United States Patent Application Publication US 2021/0199660 A1 - sequence listing, part 30

SEQ ID NO: 422641 - DNA, 120 bp, Artificial Sequence
  ENSG00000150995_214 (sequence is synthesized)
tacccatctgcccgtttccctgtgtgtacctgtctcacctctgccacccacctccacggtccccagtgtctccttggctccagctgtaagacctgccagtcctgccacctgaagggaagg

SEQ ID NO: 422642 - DNA, 120 bp, Artificial Sequence
  ENSG00000150995_215 (sequence is synthesized)
gaaggggaagaaagaaaggaagtgaaccaattaatacttttaaaagaaaaggaaagggaagataaagcaaggcttttattattttttaataaaataaataaaactgcagataaaatgcct

SEQ ID NO: 422643 - DNA, 120 bp, Artificial Sequence
  ENSG00000150995_216 (sequence is synthesized)
ttgagctggacgaagacaccaccagatttcgtagtgtcactcatctcatgctttcaacaccagccctggcctgccacctgacagccaccttctggccctgagggtgaggcgctcaggcaa

SEQ ID NO: 422644 - DNA, 120 bp, Artificial Sequence
  ENSG00000150995_217 (sequence is synthesized)
tccctgctgagcaggaggagagtctgttctgggagccagatgtctgggtggtaccaagccttgtttgagagacagctcattctgagggcacaaaattctgttttgaaaaatgagttctgc

SEQ ID NO: 422645 - DNA, 120 bp, Artificial Sequence
  ENSG00000150995_218 (sequence is synthesized)
tagtatcctgctgtgatcatttggtcataaatcagacttggttccagaacatgagttacatttgaaaactgataaaacactgagaatacgcaaaggaaactggcctaagatctggcacat

SEQ ID NO: 422646 - DNA, 120 bp, Artificial Sequence
  ENSG00000150995_219 (sequence is synthesized)
aaagaattgtttaatcagccgtgaattggggacttcaaacattttaaccatatgctgccagattgttcatcataaaatttccttctctctcccagaaaccggcgagagtttggcaagcga

SEQ ID NO: 422647 - DNA, 120 bp, Artificial Sequence
  ENSG00000150995_220 (sequence is synthesized)
accttcccagttagccctgtgatccttcctctagtctcacagcgtcgagtatctggctttgtgtggtgtgccctctgggagtgagtggagtctgtcgtgtctgtgttagcatttcccatg

SEQ ID NO: 422648 - DNA, 120 bp, Artificial Sequence
  ENSG00000150995_221 (sequence is synthesized)
agtttgtttgccattagtccttggagatctcatctgagtctagatgaagactttctaaactgcagtaagattttaattgttcactgtctaaaatctcagctgaatttgtggttgacgctg

SEQ ID NO: 422649 - DNA, 120 bp, Artificial Sequence
  ENSG00000150995_222 (sequence is synthesized)
tatctgtgagtaaagcatctgatacaaaacgatacaacagcattggtataatttgaaagtagtaaaaaaggaaaactcattaccctcttggtctacgtattgaaaagtattgagtgtgag

SEQ ID NO: 422650 - DNA, 120 bp, Artificial Sequence
  ENSG00000150995_223 (sequence is synthesized)
agttcatataaaactttttttaagcgcagtgtgaattcctacgtgctagttgagactttccatccgcaggctcaccggcaaggttagaaatgtcctgtatccatggcttctcttctagga

SEQ ID NO: 422651 - DNA, 120 bp, Artificial Sequence
  ENSG00000150995_224 (sequence is synthesized)
aaactatgtatagatccagaaattgaatatcatccagtggcttctgtacttatatatcaagctagtttcccgtacccagaattaccatggagactgactagtggtcattttgtttgggat

SEQ ID NO: 422652 - DNA, 120 bp, Artificial Sequence
  ENSG00000150995_225 (sequence is synthesized)
ctgggggcctcttgaatgttttctgttttgtgcatttcttcagtattccttgctgtatttttaggttgtgacacatgctaggtaaatgctaccagaaaattttaatttgaggaattcatg

SEQ ID NO: 422653 - DNA, 120 bp, Artificial Sequence
  ENSG00000150995_226 (sequence is synthesized)
ttttcctctgaaacacactgtacacgtaggtgaaatggtagatccacaagtaaggtggcagggcctggctcggttttaatcctgtctgaggactgagagcagattgtgacttctttgagt

SEQ ID NO: 422654 - DNA, 120 bp, Artificial Sequence
  ENSG00000150995_227 (sequence is synthesized)
gttttgccaactttgaacgtctctaggagataaaggaatgtaggtttctgagtgtcacctttggagtggtgaatagggcccatgaggactctgcagcctttcatgccttatgcttgcttt

SEQ ID NO: 422655 - DNA, 120 bp, Artificial Sequence
  ENSG00000150995_228 (sequence is synthesized)
gagtgtaaactgaagacgcagaggaagagctgggagtagggctgagtagctgcggaactagctcatcaggctcctttcctctctatcacgtgaggaacccctgtttgctgctagagttat

SEQ ID NO: 422656 - DNA, 120 bp, Artificial Sequence
  ENSG00000150995_229 (sequence is synthesized)
gcctagagtgaattttaaaagagagaaacacccacatggaatgtatgggagagggaaagtacctgtggacggagacagagagagaatattggagttctgagagctggaggaggagaaggt

SEQ ID NO: 422657 - DNA, 120 bp, Artificial Sequence
  ENSG00000150995_230 (sequence is synthesized)
ctggatgtattggtgcagtactggggatcccagttatccacattcagacaagaggagattgtagctgttaccatagatttagttttaaatctaacttaaaataatttaacttttttatcc

SEQ ID NO: 422658 - DNA, 120 bp, Artificial Sequence
  ENSG00000150995_231 (sequence is synthesized)
attttttttaaccaggaaagaaagagaagcagctagatactattaaacctgtgagaaagtctcttaatcagccccttcttttatatatgaggaaactatgtctcagagcagttaagaaat

SEQ ID NO: 422659 - DNA, 120 bp, Artificial Sequence
  ENSG00000150995_232 (sequence is synthesized)
caggccaaagtcacatagctaactaatggcagagctaaccctaaaacgtagacgtcttgatgctcagtccagtatatgtgtttccacaccgcacttctggaattgatttcagactaaaga

SEQ ID NO: 422660 - DNA, 120 bp, Artificial Sequence
  ENSG00000150995_233 (sequence is synthesized)
atttgtaagaaatctctggaatattttttttgccaggggtcagaggggaggcaggacttgaatgactgcagactgtacaatgtttagtctattaagaggtacctgccattattcacataa

SEQ ID NO: 422661 - DNA, 120 bp, Artificial Sequence
  ENSG00000150995_234 (sequence is synthesized)
caaaacatgatgattatggtctttctgggttccccccagcctacctccttccaggctacacattttgctgagaaaaggcagacaatttggaggtgggcattttgctatttggggcccctc

SEQ ID NO: 422662 - DNA, 120 bp, Artificial Sequence
  ENSG00000150995_235 (sequence is synthesized)
gacaagcattcaaagctcctcttctgtgatacattcatggccccttttctgacatccacagcagccacctgggaggtccacctcccggctaaatttttcatcagagctttttggcagatc

SEQ ID NO: 422663 - DNA, 120 bp, Artificial Sequence
  ENSG00000150995_236 (sequence is synthesized)
acctcacatacgcatagaacaacctgccaggaaccaccttatgtgacagagaatgggataaagagcccaaaaaccacacaggagtaagtttcaggctccactctttagcttaatcatgca

SEQ ID NO: 422664 - DNA, 120 bp, Artificial Sequence
  ENSG00000150995_237 (sequence is synthesized)
cggaagcagacatgtatgggtaatgagtcagtttaaggaccaacttgaaagcgatgttatgtaatgcttatatgcctaagttacccttttgaggagttagcttttctgtttgaccttaag

SEQ ID NO: 422665 - DNA, 120 bp, Artificial Sequence
  ENSG00000150995_238 (sequence is synthesized)
ttacgtggaaggcaccatctgaatgcccccgctccgaaaagtacaatctaaacacaagtccaggggggattttttttttaatgtcatgtcaggaaacatgaatgcccgtgtctatgtcta

SEQ ID NO: 422666 - DNA, 120 bp, Artificial Sequence
  ENSG00000150995_239 (sequence is synthesized)
aaaagatttgactagaacccagagctgcaaggttttctctttggggatgtccaccttaaccctgctgccagacagcagaggagtgcgtggcagagggctagtgaggagctcagctggcgg

SEQ ID NO: 422667 - DNA, 120 bp, Artificial Sequence
  ENSG00000150995_240 (sequence is synthesized)
cggcggaggaggcccaggtctcctttcgcctcagggaagttgtcatgttcctcacggcagattattcaacccttaccttgtctgtgttttcatttactctccattgccttaaaaatattt

SEQ ID NO: 422668 - DNA, 120 bp, Artificial Sequence
  ENSG00000150995_241 (sequence is synthesized)
caaacagattttattattcgccacgtctgttttcttcaccggtcatttgtggcagcattcaggccagttctggggacagggagttaacagccccccacccttcattgacaagcctcctgc

SEQ ID NO: 422669 - DNA, 120 bp, Artificial Sequence
  ENSG00000150995_242 (sequence is synthesized)
agtgcctttcttagacttaggaagtccagagacttaaggtctctgcctggctcctgccgcccatttgccaagccactctgggcaagccacttcagcaagtccttgtcatcctttatgtga

SEQ ID NO: 422670 - DNA, 120 bp, Artificial Sequence
  ENSG00000150995_243 (sequence is synthesized)
agagatgtttacattaagcccatggttagaaaactttgatatggcttcagaaaatcctgtagaacccggggaagaacagttggcaaactagtcaagatctccagagcatgtgtttcttgc

SEQ ID NO: 422671 - DNA, 120 bp, Artificial Sequence
  ENSG00000150995_244 (sequence is synthesized)
ccatccaagcttgagatcccctggatggtatgactatcgagggtccttccaactctaaaatggtgcattctgaatgagccaccaactcaggctggtctgcaggaggcaaggatgcatggt

SEQ ID NO: 422672 - DNA, 120 bp, Artificial Sequence
  ENSG00000150995_245 (sequence is synthesized)
ttggaatcatgggctttagaacttcatgctgagggactaaactgagagcataattcagagctccgaggagatttgacctgaggctgatatgacccaaggaagccttttccattatctagt

SEQ ID NO: 422673 - DNA, 120 bp, Artificial Sequence
  ENSG00000150995_246 (sequence is synthesized)
agctgatactgccttaagtgcatcagttcactctcagagggattcttttttccttttgtaagatgcattgagggcatttcctatactcactgctaaccatcctcagtagaagagttgtat

SEQ ID NO: 422674 - DNA, 120 bp, Artificial Sequence
  ENSG00000150995_247 (sequence is synthesized)
taaccctgcctagaaacaagatctggtttgttgacctgaaagtatttctttgagctaatatgtgttaggatttgttgcatcctaaaggcaagatttcataatgtccctcttgaatgtgta

SEQ ID NO: 422675 - DNA, 120 bp, Artificial Sequence
  ENSG00000150995_248 (sequence is synthesized)
taatggccgtattatgtgtgctgattttgtgtggttctgtggcttacaaggtttgcaactgccaagaaccagtggccttaaaagctccttttcaaaagtatcaccgcccctccacctttg

SEQ ID NO: 422676 - DNA, 120 bp, Artificial Sequence
  ENSG00000150995_249 (sequence is synthesized)
ttttagaactgacaagttacagtctttcaaaagcgtgcaactcaggcagcttcagattgcttactgaatttgtgagcatgccgtgatggctaaagcaaatgtagtactactttttaaatg

SEQ ID NO: 422677 - DNA, 120 bp, Artificial Sequence
  ENSG00000150995_250 (sequence is synthesized)
tttttattattgaaattgtcaaatatacacacaagtagaaagaacagtataatgagctaccatatatctatcagccagctttaacaattttgcctatcttgtttcatctatccccatact

SEQ ID NO: 422678 - DNA, 120 bp, Artificial Sequence
  ENSG00000150995_251 (sequence is synthesized)
attgctgccttctaaagaaggacattaaccagccacagcatgtctcttggtctaagtagagtgaatgagtttcatttctcacgacaggagaggtggattggtattgatggcctgtgccag

SEQ ID NO: 422679 - DNA, 120 bp, Artificial Sequence
  ENSG00000150995_252 (sequence is synthesized)
tgtcatgaaggattctgaggctgtgtccaagcccgataggagagagtgcggaacagccttttccctgggaggggagacagccagtgtgcatgctgtccatccagtcctgtgtgggtcttc

SEQ ID NO: 422680 - DNA, 120 bp, Artificial Sequence
  ENSG00000150995_253 (sequence is synthesized)
ggtccaagtctgtcatttctaaactggtcaacatcaaatggaattgaaggggatgcagtttatgtaataccgtcttcttcttttattttaatacaataggttgtaaatttagctaggaat

SEQ ID NO: 422681 - DNA, 120 bp, Artificial Sequence
  ENSG00000151005_0 (sequence is synthesized)
gccaaaccgacaaaagagagatgatggccaacgacgccaagcccgacgtgaagaccgtgcaggtgctgcgggacacagccaaccgcctgcggatccattccatcagggccacgtgtgcct

SEQ ID NO: 422682 - DNA, 120 bp, Artificial Sequence
  ENSG00000151005_1 (sequence is synthesized)
ctggttctggccagctcacgtcgtgctgcagtgcagcggaggtcgtgtctgtcctcttcttccacacgatgaagtataaacagacagacccagaacacccggacaacgaccggttcatcc

SEQ ID NO: 422683 - DNA, 120 bp, Artificial Sequence
  ENSG00000151005_2 (sequence is synthesized)
tctccaggggacatgctgctcctatcctctatgctgcttgggtggaggtgggtgacatcagtgaatctgacttgctgaacctgaggaaacttcacagcgacttggagagacaccctaccc

SEQ ID NO: 422684 - DNA, 120 bp, Artificial Sequence
  ENSG00000151005_3 (sequence is synthesized)
cccgattgccgtttgttgacgtggcaacagggtccctaggtcagggattaggtactgcatgtggaatggcttatactggcaagtaccttgacaaggccagctaccgggtgttctgcctta

SEQ ID NO: 422685 - DNA, 120 bp, Artificial Sequence
  ENSG00000151005_4 (sequence is synthesized)
tgggagatggcgaatcctcagaaggctctgtgtgggaggcttttgcttttgcctcccactacaacttggacaatctcgtggcggtcttcgacgtgaaccgcttgggacaaagtggccctg

SEQ ID NO: 422686 - DNA, 120 bp, Artificial Sequence
  ENSG00000151005_5 (sequence is synthesized)
caccccttgagcatggcgcagacatctaccagaattgctgtgaagcctttggatggaatacttacttagtggatggccatgatgtggaggccttgtgccaagcattttggcaagcaagtc

SEQ ID NO: 422687 - DNA, 120 bp, Artificial Sequence
  ENSG00000151005_6 (sequence is synthesized)
aagtgaagaacaagcctactgctatagttgccaagaccttcaaaggtcggggtattccaaatattgaggatgcagaaaattggcatggaaagccagtgccaaaagaaagagcagatgcaa

SEQ ID NO: 422688 - DNA, 120 bp, Artificial Sequence
  ENSG00000151005_7 (sequence is synthesized)
ttgtcaaattaattgagagtcagatacagaccaatgagaatctcataccaaaatcgcctgtggaagactcacctcaaataagcatcacagatataaaaatgacctccccacctgcttaca

SEQ ID NO: 422689 - DNA, 120 bp, Artificial Sequence
  ENSG00000151005_8 (sequence is synthesized)
aagttggtgacaagatagctactcagaaaacatatggtttggctctggctaaactgggccgtgcaaatgaaagagttattgttctgagtggtgacacgatgaactccaccttttctgaga

SEQ ID NO: 422690 - DNA, 120 bp, Artificial Sequence
  ENSG00000151005_9 (sequence is synthesized)
tattcaggaaagaacaccctgagcgtttcatagagtgtattattgctgaacaaaacatggtaagtgtggcactaggctgtgctacacgtggtcgaaccattgcttttgctggtgcttttg

SEQ ID NO: 422691 - DNA, 120 bp, Artificial Sequence
  ENSG00000151005_10 (sequence is synthesized)
ctgccttttttactagagcattcgatcagctccgaatgggagccatttctcaagccaatatcaaccttattggttcccactgtggggtatccactggagaagatggagtctcccagatgg

SEQ ID NO: 422692 - DNA, 120 bp, Artificial Sequence
  ENSG00000151005_11 (sequence is synthesized)
ttccgaagcattcccaattgtactgttttctatccaagtgatgccatctcgacagagcatgctatttatctagccgccaataccaagggaatgtgcttcattcgaaccagccaaccagaa

SEQ ID NO: 422693 - DNA, 120 bp, Artificial Sequence
  ENSG00000151005_12 (sequence is synthesized)
actgcagttatttataccccacaagaaaattttgagattggccaggccaaggtggtccgccacggtgtcaatgataaagtcacagtaattggagctggagttactctccatgaagcctta

SEQ ID NO: 422694 - DNA, 120 bp, Artificial Sequence
  ENSG00000151005_13 (sequence is synthesized)
gaagctgctgaccatctttctcaacaaggtatttctgtccgtgtcatcgacccatttaccattaaacccctggatgccgccaccatcatctccagtgcaaaagccacaggcggccgagtt

SEQ ID NO: 422695 - DNA, 120 bp, Artificial Sequence
  ENSG00000151005_14 (sequence is synthesized)
atcacagtggaggatcactacagggaaggtggcattggagaagctgtttgtgcagctgtctccagggagcctgatatccttgttcatcaactggcagtgtcaggagtgcctcaacgtggg

SEQ ID NO: 422696 - DNA, 120 bp, Artificial Sequence
  ENSG00000151005_15 (sequence is synthesized)
aaaactagtgaattgctggatatgtttggaatcagtaccagacacattatagcagccgtaacacttactttaatgaagtaaactaggcttatttctaaaaagtcaagtctattggctttg

SEQ ID NO: 422697 - DNA, 120 bp, Artificial Sequence
  ENSG00000151005_16 (sequence is synthesized)
gcccaaaagcactggtatctttgtattaaattcatgtttattgtcacaaaaccattatttatacctatacagttgtactgtttcttttaaagcaaagccatttaacatctttcttcattc

SEQ ID NO: 422698 - DNA, 120 bp, Artificial Sequence
  ENSG00000151005_17 (sequence is synthesized)
ctaatttggaaattaaagtttacctttctgttaatctatgtataaatgttactctgagttattaatgtggattttaaaattgtaagcaatagaataggaaataaaacaactacctaatac

SEQ ID NO: 422699 - DNA, 120 bp, Artificial Sequence
  ENSG00000151005_18 (sequence is synthesized)
aaatatttctgataagactacaaatatctgactgagctggggattaaagtagaggtaactgtatcttaaatgagtatgatttccttgtaagttaaaaaaattgaaatttaattgtagact

SEQ ID NO: 422700 - DNA, 120 bp, Artificial Sequence
  ENSG00000151005_19 (sequence is synthesized)
tcaatagtccaagttttgaaggatgtttgagcttttgtataatgccatttatacctgcagttttacagataatgtttgactgcagttgccttggaaattcctccaaagtttgccttcatc

SEQ ID NO: 422701 - DNA, 120 bp, Artificial Sequence
  ENSG00000151005_20 (sequence is synthesized)
tctcctctacagtttggaggtgatggtgcagcagtggaacatctcttgatgcaccacactacttgtgttctgtgaagtgatgaaagtataactggttctagtttgcacactacacacata

SEQ ID NO: 422702 - DNA, 120 bp, Artificial Sequence
  ENSG00000151005_21 (sequence is synthesized)
gttttgtgaagcttcagaaatgttttttcttttccttgtggccaaaccagtttgttaatctgattatattcatctgctaatgatactaaagttaatgtaataaagcatttaaaaatcaga

SEQ ID NO: 422703 - DNA, 120 bp, Artificial Sequence
  ENSG00000151006_0 (sequence is synthesized)
tcacacagccacagccccagagctaggaactgctggctagggcaagcagacagctgaatcctagccaactggaggtggagcagaggtggagccagggagacccaggtggcctctctcaga

SEQ ID NO: 422704 - DNA, 120 bp, Artificial Sequence
  ENSG00000151006_1 (sequence is synthesized)
gtggagcacaggtggcagagtggcccggggcagcatgaagtggtgctggggcccagtgctgctcatcgcgggtgccacagtcctcatggagggtcttcaagccgctcagcgtgcctgtgg

SEQ ID NO: 422705 - DNA, 120 bp, Artificial Sequence
  ENSG00000151006_2 (sequence is synthesized)
acagcgtggccccggcccccccaagcctcaggagggcaacacagtccctggcgagtggccctggcaggccagtgtgaggaggcaaggagcccacatctgcagcggctccctggtggcaga

SEQ ID NO: 422706 - DNA, 120 bp, Artificial Sequence
  ENSG00000151006_3 (sequence is synthesized)
cacctgggtcctcactgctgcccactgctttgaaaaggcagcagcaacagaactgaattcctggtcagtggtcctgggttctctgcagcgtgagggactcagccctggggccgaagaggt

SEQ ID NO: 422707 - DNA, 120 bp, Artificial Sequence
  ENSG00000151006_4 (sequence is synthesized)
gggggtggctgccctgcagttgcccagggcctataaccactacagccagggctcagacctggccctgctgcagctcgcccaccccacgacccacacacccctctgcctgccccagcccgc

SEQ ID NO: 422708 - DNA, 120 bp, Artificial Sequence
  ENSG00000151006_5 (sequence is synthesized)
ccatcgcttcccctttggagcctcctgctgggccactggctgggatcaggacaccagtgatgctcctgggaccctacgcaatctgcgcctgcgtctcatcagtcgccccacatgtaactg

SEQ ID NO: 422709 - DNA, 120 bp, Artificial Sequence
  ENSG00000151006_6 (sequence is synthesized)
tatctacaaccagctgcaccagcgacacctgtccaacccggcccggcctgggatgctatgtgggggcccccagcctggggtgcagggcccctgtcagggagattccgggggccctgtgct

SEQ ID NO: 422710 - DNA, 120 bp, Artificial Sequence
  ENSG00000151006_7 (sequence is synthesized)
gtgcctcgagcctgacggacactgggttcaggctggcatcatcagctttgcatcaagctgtgcccaggaggacgctcctgtgctgctgaccaacacagctgctcacagttcctggctgca

SEQ ID NO: 422711 - DNA, 120 bp, Artificial Sequence
  ENSG00000151006_8 (sequence is synthesized)
ggctcgagttcagggggcagctttcctggcccagagcccagagaccccggagatgagtgatgaggacagctgtgtagcctgtggatccttgaggacagcaggtccccaggcaggagcacc

SEQ ID NO: 422712 - DNA, 120 bp, Artificial Sequence
  ENSG00000151006_9 (sequence is synthesized)
caggctgatgcaccagggacagctggcctgtggcggagccctggtgtcagaggaggcggtgctaactgctgcccactgcttcattgggcgccaggccccagaggaatggagcgtagggct

SEQ ID NO: 422713 - DNA, 120 bp, Artificial Sequence
  ENSG00000151006_10 (sequence is synthesized)
ggggaccagaccggaggagtggggcctgaagcagctcatcctgcatggagcctacacccaccctgaggggggctacgacatggccctcctgctgctggcccagcctgtgacactgggagc

SEQ ID NO: 422714 - DNA, 120 bp, Artificial Sequence
  ENSG00000151006_11 (sequence is synthesized)
cagcctgcggcccctctgcctgccctatcctgaccaccacctgcctgatggggagcgtggctgggttctgggacgggcccgcccaggagcaggcatcagctccctccagacagtgcccgt

SEQ ID NO: 422715 - DNA, 120 bp, Artificial Sequence
  ENSG00000151006_12 (sequence is synthesized)
gaccctcctggggcctagggcctgcagccggctgcatgcagctcctgggggtgatggcagccctattctgccggggatggtgtgtaccagtgctgtgggtgagctgcccagctgtgaggg

SEQ ID NO: 422716 - DNA, 120 bp, Artificial Sequence
  ENSG00000151006_13 (sequence is synthesized)
cctgtctggggcaccactggtgcatgaggtgaggggcacatggttcctggccgggctgcacagcttcggagatgcttgccaaggccccgccaggccggcggtcttcaccgcgctccctgc

SEQ ID NO: 422717 - DNA, 120 bp, Artificial Sequence
  ENSG00000151006_14 (sequence is synthesized)
ctatgaggactgggtcagcagtttggactggcaggtctacttcgccgaggaaccagagcccgaggctgagcctggaagctgcctggccaacataagccaaccaaccagctgctgacaggg

SEQ ID NO: 422718 - DNA, 120 bp, Artificial Sequence
  ENSG00000151006_15 (sequence is synthesized)
gacctggccattctcaggacaagagaatgcaggcaggcaaatggcattactgcccctgtcctccccaccctgtcatgtgtgattccaggcaccagggcaggcccagaagcccagcagctg

SEQ ID NO: 422719 - DNA, 120 bp, Artificial Sequence
  ENSG00000151006_16 (sequence is synthesized)
tgggaaggaacctgcctggggccacaggtgcccactccccaccctgcaggacaggggtgtctgtggacactcccacacccaactctgctaccaagcaggcgtctcagctttcctcctcct

SEQ ID NO: 422720 - DNA, 120 bp, Artificial Sequence
  ENSG00000151006_17 (sequence is synthesized)
ttaccctttcagatacaatcacgccagccacgttgttttgaaaatttctttttttggggggcagcagttttcctttttttaaacttaaataaattgttacaaaatagactttagaaaata

SEQ ID NO: 422721 - DNA, 120 bp, Artificial Sequence
  ENSG00000151006_18 (sequence is synthesized)
tgggtgtggcctggtgggggctcaggggccatctctgccccagcagtccctgcttcttggtggggggaccgcctgtgggcgacagtccaccagtggggatgtaactccgtaggactctgt

SEQ ID NO: 422722 - DNA, 120 bp, Artificial Sequence
  ENSG00000151006_19 (sequence is synthesized)
ggggtggtatatgtggccacctgtgtcaacatggatgagattttctcgggccagctgcagtttgcgttggcggggcctgtggtcttgtgtgtgtgtgaggtgctgcctgcgtgtgtcctg

SEQ ID NO: 422723 - DNA, 120 bp, Artificial Sequence
  ENSG00000151006_20 (sequence is synthesized)
tgcctgcctccccctcgacttccacaatgacgtcaggcaaactctgggctcctctggcctcagtttccctttcttttcatccatcctctgggcagcctggctcagctgtctcatggggtg

SEQ ID NO: 422724 - DNA, 120 bp, Artificial Sequence
  ENSG00000151006_21 (sequence is synthesized)
cctgtgtgcctgtgaggggcggtgggcaggggccctctctctggcgggctctcagacagtttctgggaaggtggggaagactgagtctctagaccagggtgaggtaagtctccatttctt

SEQ ID NO: 422725 - DNA, 120 bp, Artificial Sequence
  ENSG00000151006_22 (sequence is synthesized)
ggggccctccccacttggaaatgatgcaggcctctaatccttcctcttaggcctctgctgctaagaggacaattaagctaatgctctctacacacacaggccgcctggctgactcagtgg

SEQ ID NO: 422726 - DNA, 120 bp, Artificial Sequence
  ENSG00000151006_23 (sequence is synthesized)
cgggggcaggagttgggggttctgaagcctggaggagggctggcctactcccaagctgaaccccaagccccagagtgctgagcacagctgaaggagaattaattactgagtgtgcacact

SEQ ID NO: 422727 - DNA, 120 bp, Artificial Sequence
  ENSG00000151006_24 (sequence is synthesized)
gaataggttccaataaaagctgtctcggcctcatataaatattttcattctgggaggggctggtaaggtaatcagagtcacaggcaaggaccctgggcccgccccccagcccatcccctc

SEQ ID NO: 422728 - DNA, 120 bp, Artificial Sequence
  ENSG00000151006_25 (sequence is synthesized)
aggcgtgagccaccatgcccggccagcatctataatatatgctaaaccttacccacagctgcctctgtcttggggtcagggttcttgaatggtctgggccagcctgagttaggagtggga

SEQ ID NO: 422729 - DNA, 120 bp, Artificial Sequence
  ENSG00000151006_26 (sequence is synthesized)
ggccagcctgagttaggagtgggaagaggaagaggaggcacgcgccaaagtgttcttcccgcctgaccgagtcctctgcgcctatgaggaaggtgggcaccgctgtcaccctgtttccca

SEQ ID NO: 422730 - DNA, 120 bp, Artificial Sequence
  ENSG00000151006_27 (sequence is synthesized)
ggaagccagcaggcccagggagatactgggatttgccaaaggctcacagcgagcaagcagcagtgggtgctggctcctcaccactcagcctggcacacactgtctctgagcagacctggg

SEQ ID NO: 422731 - DNA, 120 bp, Artificial Sequence
  ENSG00000151006_28 (sequence is synthesized)
agaaggcatgtgaaacccacctagccctggctggaagagaagtgggggagtggaaatgaaaagtggggactgggaggagctgcccacgtgccctccatggttccaggatggcactttcat

SEQ ID NO: 422732 - DNA, 120 bp, Artificial Sequence
  ENSG00000151006_29 (sequence is synthesized)
gctgggagtgagcttgccctgtgccaggctgtcattgagacgttttccattcaacaactgtttctcagacaaggcacaggcaggttagctctcccaggccactcaagtagtaaggaaaca

SEQ ID NO: 422733 - DNA, 120 bp, Artificial Sequence
  ENSG00000151006_30 (sequence is synthesized)
aggtcttcaagccgctcagcgtggtaaggtctggggacacggggcctaggtcttacttgggtctgggttgggactggggtgaggtcaggacaggtatctgctgtcagtgtgactaactcc

SEQ ID NO: 422734 - DNA, 120 bp, Artificial Sequence
  ENSG00000151006_31 (sequence is synthesized)
aaggctagtccctgcctctagagtaataataaagaaccatttactgagaatctgccatgtactgggtacatattgtcaagttaattgtaacaaccacctttcatggtagaagatttacaa

SEQ ID NO: 422735 - DNA, 120 bp, Artificial Sequence
  ENSG00000151006_32 (sequence is synthesized)
atcagaaaactcaggttgcaagggaatgacctcgcttaaagtcacagactgaggccgggcacagtagctcacgcttgtaatcccagccctttgggaggccacggagggaggatcgcttga

SEQ ID NO: 422736 - DNA, 120 bp, Artificial Sequence
  ENSG00000151006_33 (sequence is synthesized)
ctttgggaggccacggagggaggatcgcttgagcccaagagttcaagactagcctgtgcaacatagcaagaccatgtctctacaaaaactgtaaaattagccaggcatggtggtgcacgc

SEQ ID NO: 422737 - DNA, 89 bp, Artificial Sequence
  ENSG00000151006_34 (sequence is synthesized)
gtcatgggacgagaccctacctcaaaaagaaaaagccgtggagtgctctctgctatcttccacctacctgtggggtctcccatggtgtc

SEQ ID NO: 422738 - DNA, 120 bp, Artificial Sequence
  ENSG00000151006_35 (sequence is synthesized)
ctggctgggatcaggacaccagtgatggtaagtgctggcccagactgaagctcggagaggcactctgcttgcccagcgtcacagtctcagctcccaactgtcctggcttccagtctccct

SEQ ID NO: 422739 - DNA, 120 bp, Artificial Sequence
  ENSG00000151006_36 (sequence is synthesized)
gcctaaccctgggctgggggttggactcacaggactgggggaaagacctgcaatcagagggtgtctgccatagctgggctcaggcatctgtccttggctttgttgcctggctccagggag

SEQ ID NO: 422740 - DNA, 120 bp, Artificial Sequence
  ENSG00000151006_37 (sequence is synthesized)
tcattgggtgagtcttggatccctctctgctgtgccccctgcccctgccggcagccctgtcacctggtgccgtccacactgcctctgcacaggcgccaggccccagaggaatggagcgta

SEQ ID NO: 422741 - DNA, 120 bp, Artificial Sequence
  ENSG00000151006_38 (sequence is synthesized)
catcccctcacccaatagctcaagaacggaccttccaggcttggcctctggacccacctcccacctgaaactaagcctttttgccaattagcccccaaacagccagaggttccctagcct

SEQ ID NO: 422742 - DNA, 120 bp, Artificial Sequence
  ENSG00000151006_39 (sequence is synthesized)
ctccagctgccttgggtagggtggagcaacaggcagacccatttgattcagattctggttctttgtcatcgtgtgacttggagcaggctgctcaaccgctttgagcctcagtattctcat

SEQ ID NO: 422743 - DNA, 120 bp, Artificial Sequence
  ENSG00000151006_40 (sequence is synthesized)
ctgtcatggcggccaagacagaccctgttccttcgaggaatggggagggagggagggaccaaagccgtgaggatgaggacaactccaccctccttccttccccacaggccaaccaaccag

SEQ ID NO: 422744 - DNA, 120 bp, Artificial Sequence
  ENSG00000151012_0 (sequence is synthesized)
ggtttgtaatgatagggcggcagcagcagcagcagcagcagtggtggaacgaggaggtggagaattgagagcacgatgcatacacaggtgtttctgagtagtaattagatcgctgtgaag

SEQ ID NO: 422745 - DNA, 120 bp, Artificial Sequence
  ENSG00000151012_1 (sequence is synthesized)
gaaaaagcacacctttgagttttcacctgtgaacactatagcgctgagagagacagtctgaaagcagaggaagacatcgatcagtaacaccaagagacaccaaagttgaaagttttgttt

SEQ ID NO: 422746 - DNA, 120 bp, Artificial Sequence
  ENSG00000151012_2 (sequence is synthesized)
tctttccctctgttttatttttcccccgtgtgtccctactatggtcagaaagcctgttgtgtccaccatctccaaaggaggttacctgcagggaaatgttaacgggaggctgccttccct

SEQ ID NO: 422747 - DNA, 120 bp, Artificial Sequence
  ENSG00000151012_3 (sequence is synthesized)
gggcaacaaggagccacctgggcaggagaaagtgcagctgaagaggaaagtcactttactgaggggagtctccattatcattggcaccatcattggagcaggaatcttcatctctcctaa

SEQ ID NO: 422748 - DNA, 120 bp, Artificial Sequence
  ENSG00000151012_4 (sequence is synthesized)
gggcgtgctccagaacacgggcagcgtgggcatgtctctgaccatctggacggtgtgtggggtcctgtcactatttggagctttgtcttatgctgaattgggaacaactataaagaaatc

SEQ ID NO: 422749 - DNA, 120 bp, Artificial Sequence
  ENSG00000151012_5 (sequence is synthesized)
tggaggtcattacacatatattttggaagtctttggtccattaccagcttttgtacgagtctgggtggaactcctcataatacgccctgcagctactgctgtgatatccctggcatttgg

SEQ ID NO: 422750 - DNA, 120 bp, Artificial Sequence
  ENSG00000151012_6 (sequence is synthesized)
acgctacattctggaaccattttttattcaatgtgaaatccctgaacttgcgatcaagctcattacagctgtgggcataactgtagtgatggtcctaaatagcatgagtgtcagctggag

SEQ ID NO: 422751 - DNA, 120 bp, Artificial Sequence
  ENSG00000151012_7 (sequence is synthesized)
cgcccggatccagattttcttaaccttttgcaagctcacagcaattctgataattatagtccctggagttatgcagctaattaaaggtcaaacgcagaactttaaagacgccttttcagg

SEQ ID NO: 422752 - DNA, 120 bp, Artificial Sequence
  ENSG00000151012_8 (sequence is synthesized)
aagagattcaagtattacgcggttgccactggctttttattatggaatgtatgcatatgctggctggttttacctcaactttgttactgaagaagtagaaaaccctgaaaaaaccattcc

SEQ ID NO: 422753 - DNA, 120 bp, Artificial Sequence
  ENSG00000151012_9 (sequence is synthesized)
ccttgcaatatgtatatccatggccattgtcaccattggctatgtgctgacaaatgtggcctactttacgaccattaatgctgaggagctgctgctttcaaatgcagtggcagtgacctt

SEQ ID NO: 422754 - DNA, 120 bp, Artificial Sequence
  ENSG00000151012_10 (sequence is synthesized)
ttctgagcggctactgggaaatttctcattagcagttccgatctttgttgccctctcctgctttggctccatgaacggtggtgtgtttgctgtctccaggttattctatgttgcgtctcg

SEQ ID NO: 422755 - DNA, 120 bp, Artificial Sequence
  ENSG00000151012_11 (sequence is synthesized)
agagggtcaccttccagaaatcctctccatgattcatgtccgcaagcacactcctctaccagctgttattgttttgcaccctttgacaatgataatgctcttctctggagacctcgacag

SEQ ID NO: 422756 - DNA, 120 bp, Artificial Sequence
  ENSG00000151012_12 (sequence is synthesized)
tcttttgaatttcctcagttttgccaggtggctttttattgggctggcagttgctgggctgatttatcttcgatacaaatgcccagatatgcatcgtcctttcaaggtgccactgttcat

SEQ ID NO: 422757 - DNA, 120 bp, Artificial Sequence
  ENSG00000151012_13 (sequence is synthesized)
cccagctttgttttccttcacatgcctcttcatggttgccctttccctctattcggacccatttagtacagggattggcttcgtcatcactctgactggagtccctgcgtattatctctt

SEQ ID NO: 422758 - DNA, 120 bp, Artificial Sequence
  ENSG00000151012_14 (sequence is synthesized)
tattatatgggacaagaaacccaggtggtttagaataatgtcggagaaaataaccagaacattacaaataatactggaagttgtaccagaagaagataagttatgaactaatggacttga

SEQ ID NO: 422759 - DNA, 120 bp, Artificial Sequence
  ENSG00000151012_15 (sequence is synthesized)
gatcttggcaatctgcccaaggggagacacaaaatagggatttttacttcattttctgaaagtctagagaattacaactttggtgataaacaaaaggagtcagttatttttattcatata

SEQ ID NO: 422760 - DNA, 120 bp, Artificial Sequence
  ENSG00000151012_16 (sequence is synthesized)
ttttagcatattcgaactaatttctaagaaatttagttataactctatgtagttatagaaagtgaatatgcagttattctatgagtcgcacaattcttgagtctctgatacctacctatt

SEQ ID NO: 422761 - DNA, 120 bp, Artificial Sequence
  ENSG00000151012_17 (sequence is synthesized)
ggggttaggagaaaagactagacaattactatgtggtcattctctacaacatatgttagcacggcaaagaaccttcaaattgaagactgagatttttctgtatatatgggttttgtaaag

SEQ ID NO: 422762 - DNA, 120 bp, Artificial Sequence
  ENSG00000151012_18 (sequence is synthesized)
atggttttacacactatagatgtctatactgtgaaaagtgttttcaattctgaaaaaaagcatacatcatgattatggcaaagaggagagaaagaaatttattttacattgacattgcat

SEQ ID NO: 422763 - DNA, 120 bp, Artificial Sequence
  ENSG00000151012_19 (sequence is synthesized)
tgcttccccttagataccaatttagataacaaacactcatgctttaatggattatacccagagcactttgaacaaaggtcagtggggattgttgaatacattaaagaagagtttctaggg

SEQ ID NO: 422764 - DNA, 120 bp, Artificial Sequence
  ENSG00000151012_20 (sequence is synthesized)
gctactgtttatgagacacatccaggagttatgtttaagtaaaaatccttgagaatttattatgtcagatgttttttcattcattatcaggaagttttagttatctgtcatttttttttt

SEQ ID NO: 422765 - DNA, 120 bp, Artificial Sequence
  ENSG00000151012_21 (sequence is synthesized)
tcacatcagtttgatcaggaaagtgtataacacatcttagagcaagagttagtttggtattaaatcctcattagaacaaccacctgtttcactaataacttacccctgatgagtctatct

SEQ ID NO: 422766 - DNA, 120 bp, Artificial Sequence
  ENSG00000151012_22 (sequence is synthesized)
aaacatatgcattttaagccttcaaattacattatcaacatgagagaaatcaccaacaaagaagatgttcaaaataatagtcccatatctgtaatcatatctacatgcaatgttagtaat

SEQ ID NO: 422767 - DNA, 120 bp, Artificial Sequence
  ENSG00000151012_23 (sequence is synthesized)
tctgaagttttttaaatttatggctatttttacacgatgatgaattttgacagtttgtgcattttctttatacattttatattcttctgttaaaatatctcttcagatgaaactgtccag

SEQ ID NO: 422768 - DNA, 120 bp, Artificial Sequence
  ENSG00000151012_24 (sequence is synthesized)
attaattaggaaaaggcatatattaacataaaaattgcaaaagaaatgtcgctgtaaataagatttacaactgatgtttctagaaaatttccacttctatatctaggctttgtcagtaat

SEQ ID NO: 422769 - DNA, 120 bp, Artificial Sequence
  ENSG00000151012_25 (sequence is synthesized)
ttccacaccttaattatcattcaacttgcaaaagagacaactgataagaagaaaattgaaatgagaatctgtggataagtgtttgtgttcagaagatgttgttttgccagtattagaaaa

SEQ ID NO: 422770 - DNA, 62 bp, Artificial Sequence
  ENSG00000151012_26 (sequence is synthesized)
gtttgtgttcagaagatgttgttttgccagtattagaaaatactgtgagccgctgaggtcgg

SEQ ID NO: 422771 - DNA, 73 bp, Artificial Sequence
  ENSG00000151012_27 (sequence is synthesized)
agtcagactccatctccaaaaaaaaaagattatatatatatatatatgtgtgtgtatgtgtgtgtgtgtgtgt

SEQ ID NO: 422772 - DNA, 120 bp, Artificial Sequence
  ENSG00000151012_28 (sequence is synthesized)
tatatatatatatatatatagtggaacttacaaatgagagtaatataatgatgaaattttgaactgttatttataaacatctaaggtaaaatggttagtcatggccagagtatgtttcat

SEQ ID NO: 422773 - DNA, 120 bp, Artificial Sequence
  ENSG00000151012_29 (sequence is synthesized)
ggtaaaatggttagtcatggccagagtatgtttcatcctttaatttttgtccatttgaaaataaggatttttgaaagaattataccaattaaaattattaaaggcaaacatagaattcat

SEQ ID NO: 422774 - DNA, 120 bp, Artificial Sequence
  ENSG00000151012_30 (sequence is synthesized)
aaaaaattgtccaaagtagaaatgatgacctataatttggagcatttccaattcagtaatttcaattttgctcttgaaaacatttaatatatatccaagactgacatttctttagctgaa

SEQ ID NO: 422775 - DNA, 120 bp, Artificial Sequence
  ENSG00000151012_31 (sequence is synthesized)
cctaacgtttgggtctctgagtgaatttataataactccttccttccttagcatagggttttcaaaatttgatttataattcctatttccagtaaatattgttcatttgtccacatctct

SEQ ID NO: 422776 - DNA, 120 bp, Artificial Sequence
  ENSG00000151012_32 (sequence is synthesized)
ccctatgatatgttgctggaggtaagaatttctttcatattcctattttttttttccccatagactaggctcatagaatttaaacaagcaaattttcctgagctttttcttgccaaatga

SEQ ID NO: 422777 - DNA, 120 bp, Artificial Sequence
  ENSG00000151012_33 (sequence is synthesized)
aagaagactggtaaattctcatagagaggtttgtgtagttcttggctcttcctggggttaatgtgcttatattcacagtggcaaattggtctcagactttaatttatttatttttgattt

SEQ ID NO: 422778 - DNA, 120 bp, Artificial Sequence
  ENSG00000151012_34 (sequence is synthesized)
gaatttctctttaaaagtatcaatttaaaaggtaactagaattattctttctcattttcaaaagtgatttttgcattattaaatttccctgccattgtaatgccatttcacgcagaaaaa

SEQ ID NO: 422779 - DNA, 120 bp, Artificial Sequence
  ENSG00000151012_35 (sequence is synthesized)
aagtcagccagtaattaagaaaaaaagtgatggagattaagtagtattttggcttatttttaggactcatcatgagaagacacagttcctttaatcaggaaattaatatccataattttc

SEQ ID NO: 422780 - DNA, 120 bp, Artificial Sequence
  ENSG00000151012_36 (sequence is synthesized)
actcaaaattgcagtatgtaaagcagattctcaaaaactctcctgaacacttatttatatatatgtttttatataagtaaaatttttctcatatttttatacgatatgcacacacacaca

SEQ ID NO: 422781 - DNA, 120 bp, Artificial Sequence
  ENSG00000151012_37 (sequence is synthesized)
tacatgcacatactacttactacatgttctgtacttgtactttgtaccatgcatattcaaatgtttatatacataagtttattataacataaacagtaaaagtaatgaatactgtttaaa

SEQ ID NO: 422782 - DNA, 120 bp, Artificial Sequence
  ENSG00000151012_38 (sequence is synthesized)
ataactaatatagtattttttaatttttgtggggatggattctcaaatacttgtgattttaaaagattctaaagctaaaacacaacttgattttaaaaagaatgattctccttacacaat

SEQ ID NO: 422783 - DNA, 120 bp, Artificial Sequence
  ENSG00000151012_39 (sequence is synthesized)
cccatttaaaaagtattagattatattcctttgatccaatgaaaactgaaccttataaatggttagctgaaagtagaccttattcttgtccttctttagaagagtaaagatttgtcctag

SEQ ID NO: 422784 - DNA, 120 bp, Artificial Sequence
  ENSG00000151012_40 (sequence is synthesized)
ggaagatggctgacttcggttcccaacatgcgtatgcatttagactgtagctcctcagccctgtggacacaaaatttggacagcttattaggttacgttagcaatgcatgacggtttctc

SEQ ID NO: 422785 - DNA, 120 bp, Artificial Sequence
  ENSG00000151012_41 (sequence is synthesized)
caacactaagatattcacgttgaaacagatttcctgttcgtcttatgtgtctggtaaaattgtttccccaattacaatttgacatatcaatagagggttaacaagagtataattacataa

SEQ ID NO: 422786 - DNA, 120 bp, Artificial Sequence
  ENSG00000151012_42 (sequence is synthesized)
cagaattcctcatgaactgtaatcagtctacaggaaaatcattattttatcttgatttgcagatgaatatactgctaagaaagggagcaactctgacctttgttaaagttgatcttttgt

SEQ ID NO: 422787 - DNA, 120 bp, Artificial Sequence
  ENSG00000151012_43 (sequence is synthesized)
aattgaggtataaggtatgaaaagataaaaaaccgaaggccagagaatcaggaaatgaaagatagtatggactgaaggtaacaatattttaatgttatgcaatatagtcagagaaatatt

SEQ ID NO: 422788 - DNA, 120 bp, Artificial Sequence
  ENSG00000151012_44 (sequence is synthesized)
aaaaattagttgtttgctgtgcataggtggatctcgcaggaagctaatgaaacctaagcttcagtgcctctcacttagacatgttccattcgaggtcctgaacctaactttgtattagga

SEQ ID NO: 422789 - DNA, 120 bp, Artificial Sequence
  ENSG00000151012_45 (sequence is synthesized)
attctgtactaattttgttgaagaagaccagcaaagttgtgtacacttctacccccacaaaatctgcattgtccatgtgagtaaagtaaaataattcctgttatttttttctgttagaaa

SEQ ID NO: 422790 - DNA, 120 bp, Artificial Sequence
  ENSG00000151012_46 (sequence is synthesized)
taagtatggaggatatgtttttaaaaatttatgagttaattgaaatatccatatataacaagtgactttctcacaatatatatgatgtgatatatagggagatagtttcactttcatcat

SEQ ID NO: 422791 - DNA, 120 bp, Artificial Sequence
  ENSG00000151012_47 (sequence is synthesized)
attttatacgttgattctgaactatagaaaaataataaatgggattttaattatagctcttagttgggaaagaaatatagagagatgtgggatttgaatgcccatgaaagacattttatt

SEQ ID NO: 422792 - DNA, 120 bp, Artificial Sequence
  ENSG00000151012_48 (sequence is synthesized)
ttacttgaatatattcttgcttcactttaccctccataatatgttgtacattagtgctgatcaagtttacagagttacattttgctttcctaaccattcagtcaggaattaaaatatggc

SEQ ID NO: 422793 - DNA, 120 bp, Artificial Sequence
  ENSG00000151012_49 (sequence is synthesized)
attgtataacaactgggaagaagctcatagtggatataaattagagtagataatgggtcaccttgatagcctctgtttacattacttgtatatgggcaaaataattattacctatacgtg

SEQ ID NO: 422794 - DNA, 120 bp, Artificial Sequence
  ENSG00000151012_50 (sequence is synthesized)
cgtgtatttaagcttaattttcatataaacagtatttttaatctatgttaaaatagataatatctaaaagtgtgatctctaggtagtccttagtttattagtactgtacttcaaaaagat

SEQ ID NO: 422795 - DNA, 65 bp, Artificial Sequence
  ENSG00000151012_51 (sequence is synthesized)
gggcagaagctgcagttagccaagatcgcatcattgcactccagcctaggggacaagagcgcgag

SEQ ID NO: 422796 - DNA, 74 bp, Artificial Sequence
  ENSG00000151012_52 (sequence is synthesized)
tcacttgaacccaaggggcagaagctgcagttagccaagatcgcatcattgcactccagcctaggggacaagag

SEQ ID NO: 422797 - DNA, 120 bp, Artificial Sequence
  ENSG00000151012_53 (sequence is synthesized)
catccttagtttattagtactgtacttaaaaattattttttaatagtcaattttgggagataattatttctttccttatattttccaattagttggtgtctaaaaataaatgttttgtct

SEQ ID NO: 422798 - DNA, 120 bp, Artificial Sequence
  ENSG00000151012_54 (sequence is synthesized)
atcaggtatacattcacaaaagcataaatcatagtctcacaggaaattcaccaattttccatatgtcgtgagataactgtcctttctacaacctcataacaatgaatttatataattacc

SEQ ID NO: 422799 - DNA, 120 bp, Artificial Sequence
  ENSG00000151012_55 (sequence is synthesized)
tagattttcttagtgtgaatctacccattagttttattttcttggtagttatttttttccctcctctctgttactattggccttaaaatacacagaggacggttacagtgtcctaatagc

SEQ ID NO: 422800 - DNA, 120 bp, Artificial Sequence
  ENSG00000151012_56 (sequence is synthesized)
tgttacatgtgtgtgtttcagcgtacttgaatcaagtgtacatttatagtaccaataaccgcctttacagctttacagttaacaattctctcacaaaactgtagagcattaggcatctga

SEQ ID NO: 422801 - DNA, 120 bp, Artificial Sequence
  ENSG00000151012_57 (sequence is synthesized)
gagccatagagggccaactttgttccagagtgaacatgctttttttcctcaacatatacactactgattttttttaaaagtatgactttcaagtgaattaatgtattggttaggagaact

SEQ ID NO: 422802 - DNA, 120 bp, Artificial Sequence
  ENSG00000151012_58 (sequence is synthesized)
gcttgctaagtccttattacctcttgttaaagcctcagaaggccgtgctgaaagccagaggggaaaaaaagagtaatgcacaggtatctcttttgcagtggtgactgtattttgagtacc

SEQ ID NO: 422803 - DNA, 120 bp, Artificial Sequence
  ENSG00000151012_59 (sequence is synthesized)
ttgtgtgacagggtattattacagcatcttgtgggaaaacctattaggcctttgcatgttaaagctgtataatttgttgggttgtgagtggtctgacttaaatgtgtattataaaattta

SEQ ID NO: 422804 - DNA, 120 bp, Artificial Sequence
  ENSG00000151012_60 (sequence is synthesized)
gacatcaaattttcctactaactaactttattagatgcatacttggaagcacagtcatatcacactgggaggcaatgcaatgtggttacctggtcctaggtttgaactgtcttatttcaa

SEQ ID NO: 422805 - DNA, 120 bp, Artificial Sequence
  ENSG00000151012_61 (sequence is synthesized)
aagatttctgaattaatttttccctagaatttctccttcattccaaagtacaaacatactttgaagaatgaaacagattgttcccatgaatgtatgctcatactcgactagaaacgatct

SEQ ID NO: 422806 - DNA, 120 bp, Artificial Sequence
  ENSG00000151012_62 (sequence is synthesized)
atgttaaatgactgtgtatatgaattatttcaagtactaccccaaataactttcttattgctctgaaagaagaaaagcaatgtaaatcactatgattattgcacaaacaaccagaattct

SEQ ID NO: 422807 - DNA, 120 bp, Artificial Sequence
  ENSG00000151012_63 (sequence is synthesized)
ccaacaattttaagtaatctgatcctcttcttggagaaaattgttacctaatagtttttccttatgaatgttattactactggtataaatcaaatttctataaatttcctacttaagtct

SEQ ID NO: 422808 - DNA, 120 bp, Artificial Sequence
  ENSG00000151012_64 (sequence is synthesized)
taagaactgggttcttcctttgatgttattcatgttcagaaaggaaacaacactttactcttttaggacaattcctagaatctatagtagtatcaggatatattttgctttaaaatatat

SEQ ID NO: 422809 - DNA, 120 bp, Artificial Sequence
  ENSG00000151012_65 (sequence is synthesized)
tttggttattttgaatacagacattggctccaaattttcatctttgcacaatagtatgacttttcactagaacttctcaacatttgggaactttgcaaatatgagcatcatatgtgttaa

SEQ ID NO: 422810 - DNA, 120 bp, Artificial Sequence
  ENSG00000151012_66 (sequence is synthesized)
ggctgtatcatttaatgctatgagatacattgttttctccctatgccaaacaggtgaacaaacgtagttgttttttactgatactaaatgttggctacctgtgattttatagtatgcaca

SEQ ID NO: 422811 - DNA, 120 bp, Artificial Sequence
  ENSG00000151012_67 (sequence is synthesized)
tgtcagaaaaaggcaagacaaatggcctcttgtactgaatacttcggcaaacttattgggtcttcattttctgacagacaggatttgactcaatatttgtagagcttgcgtagaatggat

SEQ ID NO: 422812 - DNA, 120 bp, Artificial Sequence
  ENSG00000151012_68 (sequence is synthesized)
tacatggtagtgatgcactggtagaaatggtttttagttattgactcagaattcatctcaggatgaatcttttatgtctttttattgtaagcatatctgaatttactttataaagatggt

SEQ ID NO: 422813 - DNA, 120 bp, Artificial Sequence
  ENSG00000151012_69 (sequence is synthesized)
tttagaaagctttgtctaaaaatttggcctaggaatggtaacttcattttcagttgccaaggggtagaaaaataatatgtgtgttgttatgtttatgttaacatattattaggtactatc

SEQ ID NO: 422814 - DNA, 120 bp, Artificial Sequence
  ENSG00000151012_70 (sequence is synthesized)
tatgaatgtatttaaatatttttcatattctgtgacaagcatttataatttgcaacaagtggagtccatttagcccagtgggaaagtcttggaactcaggttacccttgaaggatatgct

SEQ ID NO: 422815 - DNA, 120 bp, Artificial Sequence
  ENSG00000151012_71 (sequence is synthesized)
ggcagccatctctttgatctgtgcttaaactgtaatttatagaccagctaaatccctaacttggatctggaatgcattagttatgaccttgtaccattcccagaatttcaggggcatcgt

SEQ ID NO: 422816 - DNA, 120 bp, Artificial Sequence
  ENSG00000151012_72 (sequence is synthesized)
gggtttggtctagtgattgaaaacacaagaacagagagatccagctgaaaaagagtgatcctcaatatcctaactaactggtcctcaactcaagcagagtttcttcactctggcactgtg

SEQ ID NO: 422817 - DNA, 120 bp, Artificial Sequence
  ENSG00000151012_73 (sequence is synthesized)
atcatgaaacttagtagaggggattgtgtgtattttatacaaatttaatacaatgtcttacattgataaaattcttaaagagcaaaactgcattttatttctgcatccacattccaatca

SEQ ID NO: 422818 - DNA, 120 bp, Artificial Sequence
  ENSG00000151012_74 (sequence is synthesized)
tattagaactaagatatttatctatgaagatataaatggtgcagagagactttcatctgtggattgcgttgtttcttagggttcctagcactgatgcctgcacaagcatgtgatatgtga

SEQ ID NO: 422819 - DNA, 120 bp, Artificial Sequence
  ENSG00000151012_75 (sequence is synthesized)
aataaaatggattcttctatagctaaatgagttccctctggggagagttctggtactgcaatcacaatgccagatggtgtttatgggctatttgtgtaagtaagtggtaagatgctatga

SEQ ID NO: 422820 - DNA, 120 bp, Artificial Sequence
  ENSG00000151012_76 (sequence is synthesized)
agtaagtgtgtttgttttcatcttatggaaactcttgatgcatgtgcttttgtatggaataaattttggtgcaatatgatgtcattcaactttgcattgaattgaattttggttgtattt

SEQ ID NO: 422821 - DNA, 120 bp, Artificial Sequence
  ENSG00000151012_77 (sequence is synthesized)
atatgtattatacctgtcacgcttctagttgcttcaaccattttataaccatttttgtacatattttacttgaaaatattttaaatggaaatttaaataaacatttgatagtttacataa

SEQ ID NO: 422822 - DNA, 120 bp, Artificial Sequence
  ENSG00000151014_0 (sequence is synthesized)
agacggtgccgacgcagcggtgttgcacctccctctccggctctgctgcccgggatttccccagaacctgcgccgcgcgagaaggagcctgggagcatccgcccacactgcccggacagt

SEQ ID NO: 422823 - DNA, 120 bp, Artificial Sequence
  ENSG00000151014_1 (sequence is synthesized)
cggctcgactcggtgccctcggccccagccgggctccgctcctcgggcgcgcgaggggccgtggtggcggcggcgcccggcatgtttcatagtccgcggcggctctgctcggccctgctg

SEQ ID NO: 422824 - DNA, 120 bp, Artificial Sequence
  ENSG00000151014_2 (sequence is synthesized)
catgtttcatagtccgcggcggctctgctcggccctgctgcagagggacgcgcccggcctgcgccgcctgcccgccccagggctgcgccgcccgttgtccccgccggctgctgttcccag

SEQ ID NO: 422825 - DNA, 120 bp, Artificial Sequence
  ENSG00000151014_3 (sequence is synthesized)
tcgggcgccgcgaggtcgtgttcccgaacagtgtgttccatgggaaccggtacaagcagactctatagtgctctcgccaagacactgaacagcagcgctgcctcccagcacccagagtat

SEQ ID NO: 422826 - DNA, 120 bp, Artificial Sequence
  ENSG00000151014_4 (sequence is synthesized)
ttggtgtcacctgacccagagcatctggagcccattgatcctaaagagcttcttgaggaatgcagggccgtcctgcacacccgacctccccggttccagagggattttgtggatctgagg

SEQ ID NO: 422827 - DNA, 120 bp, Artificial Sequence
  ENSG00000151014_5 (sequence is synthesized)
acagattgccctagtacccacccacctatcagggttatgcaatggaacatcctcgcccaagctcttggagaaggcaaagacaactttgtacagtgccctgttgaagcactcaaatgggaa

SEQ ID NO: 422828 - DNA, 120 bp, Artificial Sequence
  ENSG00000151014_6 (sequence is synthesized)
gaaaggaaatgtctcatcctggaagaaatcctggcctaccagcctgatatattgtgcctccaagaggtggaccactattttgacaccttccagccactcctcagtagactaggctatcaa

SEQ ID NO: 422829 - DNA, 120 bp, Artificial Sequence
  ENSG00000151014_7 (sequence is synthesized)
ggcacgtttttccccaaaccctggtcaccttgtctagatgtagaacacaacaatggaccagatggttgtgccttattttttcttcaaaaccgattcaagctagtcaacagtgccaatatt

SEQ ID NO: 422830 - DNA, 120 bp, Artificial Sequence
  ENSG00000151014_8 (sequence is synthesized)
gcacagaccctggagtgcaaggagtcaggccgacagttctgcatcgctgttacccatctaaaagcacgcactggctgggagcggtttcgatcagctcaaggctgtgacctccttcagaac

SEQ ID NO: 422831 - DNA, 120 bp, Artificial Sequence
  ENSG00000151014_9 (sequence is synthesized)
ctgcaaaacatcacccaaggagccaagattccccttattgtgtgtggggacttcaatgcagagccaacagaagaggtctacaaacactttgcttcctccagcctcaacctgaacagcgcc

SEQ ID NO: 422832 - DNA, 120 bp, Artificial Sequence
  ENSG00000151014_10 (sequence is synthesized)
tacaagctgctgagtgctgatgggcagtcagaacccccatacactacctggaagatccggacctcaggggagtgcaggcacaccctggattacatctggtattctaaacatgctctaaat

SEQ ID NO: 422833 - DNA, 120 bp, Artificial Sequence
  ENSG00000151014_11 (sequence is synthesized)
gtaaggtcagctctcgatctgctcactgaagaacagattggacccaacaggttaccttccttcaattatccttcagaccacctgtctctagtgtgtgacttcagctttactgaggaatct

SEQ ID NO: 422834 - DNA, 83 bp, Artificial Sequence
  ENSG00000151014_12 (sequence is synthesized)
cctgtctctagtgtgtgacttcagctttactgaggaatctgatggactttcataaatacttgcttttgtctttttaatcacag

SEQ ID NO: 422835 - DNA, 90 bp, Artificial Sequence
  ENSG00000151014_13 (sequence is synthesized)
tggagtacagtggcctgatctcgtggcattctcctgcctcagcctccagagcaactgggacaacaggcgcccgtcaccacgcccagctaa

SEQ ID NO: 422836 - DNA, 120 bp, Artificial Sequence
  ENSG00000151014_14 (sequence is synthesized)
ggatggtctcgatctcctgaccttgaatcacaagagtcttaacagggaatgtttcaggaaacaaataggataagacaatgccagaggaaggatagaaacatgggaagtttctatcatttc

SEQ ID NO: 422837 - DNA, 120 bp, Artificial Sequence
  ENSG00000151014_15 (sequence is synthesized)
tagaaacatgggaagtttctatcatttcattttctgcgtttccagcatgcccttggaaaagactccctttagtccctttttcaattaaaacctatggtgaaaaaggcgtttgcactccaa

SEQ ID NO: 422838 - DNA, 120 bp, Artificial Sequence
  ENSG00000151014_16 (sequence is synthesized)
acccacccacctatcagggttatgcaatggaacatcctcgcccaaggtatgctggatgcttttgtgcctctgcagtcaagtttgctgtgactgcctttctgcttctgcacatccacagtg

SEQ ID NO: 422839 - DNA, 120 bp, Artificial Sequence
  ENSG00000151014_17 (sequence is synthesized)
tggaaggaagaggtgtgggcagatggaggtgactgcagcagcatggagagctcctagaagaggttaagacagggaatcatctggttttcactttttttttttttttagaaagaaaaaaga

SEQ ID NO: 422840 - DNA, 120 bp, Artificial Sequence
  ENSG00000151014_18 (sequence is synthesized)
aaaaaagacactttaattgttcttggatagtctacaaacatggaaggtgtaaagaataaaccacgagttacttgctttaattgtaaaaaccaagtcaggtgcagtggctcacacctgtaa

SEQ ID NO: 422841 - DNA, 76 bp, Artificial Sequence
  ENSG00000151014_19 (sequence is synthesized)
aatcgcttgaacccagaaagtggttggagtacagtggcctgatctcggctcactgcaagatccgcctcccgggttc

SEQ ID NO: 422842 - DNA, 120 bp, Artificial Sequence
  ENSG00000151023_0 (sequence is synthesized)
acagtcaacgacgcttagcaatccggagagaaatagggtgttttcttcccgagagaggactgctaagagggggttaaagggggacgatgtgaaggagagaacctgtggtccttcagaagg

SEQ ID NO: 422843 - DNA, 120 bp, Artificial Sequence
  ENSG00000151023_1 (sequence is synthesized)
cgaagaagaaagaaaggggaagcagtgaagaaagggacggagatactgggacagggagaaaaaagttgtggagagtagcttttaaggagtcatttggtggccatggatccaacgtgctct

SEQ ID NO: 422844 - DNA, 120 bp, Artificial Sequence
  ENSG00000151023_2 (sequence is synthesized)
tctgagtgcatttataacctcatacccagtgacttgaaggagcctccccagcctcctaggtacatatccatttttaaggcaactgtaaaagatgacatgcaaaaagctaaaactgcaatg

SEQ ID NO: 422845 - DNA, 120 bp, Artificial Sequence
  ENSG00000151023_3 (sequence is synthesized)
aaaactatgggaccagcaaaagttgaagtaccttctccaaaggatttcctaaagaaacattcaaaggaaaaaactctaccacccaaaaaaaactttgatcggaacgtgcccaaaaagcct

SEQ ID NO: 422846 - DNA, 120 bp, Artificial Sequence
  ENSG00000151023_4 (sequence is synthesized)
gctgtgccattgaagactgatcatcctgtcatgggaatacagagtggaaaaaattttataaatacaaatgcagctgatatcatcatgggagtggctaaaaagcctaaaccaatttatgtt

SEQ ID NO: 422847 - DNA, 120 bp, Artificial Sequence
  ENSG00000151023_5 (sequence is synthesized)
gataaaagaactggagacaagcatgatcttgagccttcaggactagttccaaagtacatcaataaaaaggattatggtgtcacacctgaatacatatgtaagcgaaacgaggaaataaag

SEQ ID NO: 422848 - DNA, 120 bp, Artificial Sequence
  ENSG00000151023_6 (sequence is synthesized)
aaagcccaagaagactatgatcgttatatccaggaaaaccttaagaaagcagctatgaaaaggctctccgatgaagaaagggaggcagttttgcaggggctgaaaaagaactgggaagag

SEQ ID NO: 422849 - DNA, 120 bp, Artificial Sequence
  ENSG00000151023_7 (sequence is synthesized)
gtgcataaagaattccagtccctctcggtctttatagattctataccaaagaagatccgcaagcagaggctggaagaagaaatgaaacaactagaacacgacattggcataattgaaaag

SEQ ID NO: 422850 - DNA, 120 bp, Artificial Sequence
  ENSG00000151023_8 (sequence is synthesized)
cacaagattatttatattgccaataacgcatgataccaacagcacaactttgaaaactgttaagtattttgaactggaaatagtaacacgtgccttcttgctactctaaactgtctccaa

SEQ ID NO: 422851 - DNA, 120 bp, Artificial Sequence
  ENSG00000151023_9 (sequence is synthesized)
cacattgtttctgagctccacaaatgcaaaagatgtattttcctgtggcccatgacatttgcagttattcccagtgagaaatattttcagtattcgtaacactgtatatgatgaaaggct

SEQ ID NO: 422852 - DNA, 120 bp, Artificial Sequence
  ENSG00000151023_10 (sequence is synthesized)
tctatttggaggaagaaaaattaagaagacaacttacaaaatcaagatgacaacttataaaggcatcattgaggatgattaaggagaatagcctcctttctagcataccaacctcgatac

SEQ ID NO: 422853 - DNA, 120 bp, Artificial Sequence
  ENSG00000151023_11 (sequence is synthesized)
tcttattttattccacaactcactatgcatatcttatttaaatgtttttttccttttggtcctttctacttatctattttgtgaattctaaagttacatttgtaagattacataatctat

SEQ ID NO: 422854 - DNA, 120 bp, Artificial Sequence
  ENSG00000151023_12 (sequence is synthesized)
taagcaataagtttatgttagtagagctgttttcaacccaaaaataagaaaaaatagctctaaatatctaaaaggaaaaggttattttatgaaattttaaattagaaaaatttggtaaaa

SEQ ID NO: 422855 - DNA, 120 bp, Artificial Sequence
  ENSG00000151023_13 (sequence is synthesized)
tatatgcaactataaaatatcagagaaataacaatttctactgcttacactggtttttatcctctggacaacataaaaaacaaaatatgggagtctttcaggcttttttcacaaacacag

SEQ ID NO: 422856 - DNA, 120 bp, Artificial Sequence
  ENSG00000151023_14 (sequence is synthesized)
aaaagcttattttggttacttaaagaaaagtagtttatatacaattattttttgaaaattcacttgaaacttgtccatatgagtatctttattcctttattaacttagggcagatataaa

SEQ ID NO: 422857 - DNA, 120 bp, Artificial Sequence
  ENSG00000151023_15 (sequence is synthesized)
ataaaggataatatatgacaaattctcacttaccaagaatggttggttgctatttagggtaggctaacagctgtgacagtacactccaaaatgtataattacgtaaacacatattcaatt

SEQ ID NO: 422858 - DNA, 120 bp, Artificial Sequence
  ENSG00000151023_16 (sequence is synthesized)
cttgctaacatagcagtactttgctgtgagcaggtcagcaggaacccttttctgcagtcactcagggacccagacttacagagtgggtaggatgcatctgatccagagttagggagaggc

SEQ ID NO: 422859 - DNA, 120 bp, Artificial Sequence
  ENSG00000151023_17 (sequence is synthesized)
acgtacaggccaggcctagaaatgatgcatatcattcccgtttgcatcgctaagtaagcaacttaagttgctttaacaaactaactccaaatctcagtttcctgataaagatacattttt

SEQ ID NO: 422860 - DNA, 120 bp, Artificial Sequence
  ENSG00000151023_18 (sequence is synthesized)
catttacatcactgtgcaatgtgactaagggtaggggtataagtctgttccatgcagtcactcagggacccagtctccttttgtctggtgactctgttgatccaggcagtctttctctgc

SEQ ID NO: 422861 - DNA, 120 bp, Artificial Sequence
  ENSG00000151023_19 (sequence is synthesized)
caattcaggatgagatgtttaggtaagtattttatttgtgaaatgattgctatacatactcatttttaaataattcaaaatcagtagcaatgcaaaaatattctgattactttagcctta

SEQ ID NO: 422862 - DNA, 120 bp, Artificial Sequence
  ENSG00000151023_20 (sequence is synthesized)
tggatattatgctttgaagtcatgagtgggagttgccttaaatgttaaaatgaaaactttgtggttttaacagctaattcttttgctttctgtaaatgtctactaaagaatctagacttt

SEQ ID NO: 422863 - DNA, 120 bp, Artificial Sequence
  ENSG00000151023_21 (sequence is synthesized)
tctctatggtctacagtgttgtcctagatgaacattgttgcctttctttcacagagccttcagagggaaacattcccatccattgttcctggaaaggtgatccctaccacgggatcccaa

SEQ ID NO: 422864 - DNA, 120 bp, Artificial Sequence
  ENSG00000151023_22 (sequence is synthesized)
acttggatagagccagttcaacctcccccaatccatacacatacatacctaggtcatcctatcacccaaaagagggacaaacatctgacttggacagctgaccagtgactgatcagattc

SEQ ID NO: 422865 - DNA, 120 bp, Artificial Sequence
  ENSG00000151023_23 (sequence is synthesized)
tctctctcttgagagcatgaattaagagacatggagactgcagtcacttgggagtagacacctgaaactaaaaagtcaaacttcattatgcagctagtttgacttggtttctcttcctgt

SEQ ID NO: 422866 - DNA, 120 bp, Artificial Sequence
  ENSG00000151023_24 (sequence is synthesized)
tcaaaggaagaatgggtagaataaagatttgatgtggtctggccccttgtctatgatctttttagcttgatttcttgaaatgctgcttcttccctacccactgtaactggcattcccata

SEQ ID NO: 422867 - DNA, 120 bp, Artificial Sequence
  ENSG00000151023_25 (sequence is synthesized)
gtactgaggtactagagacctctgagatctgcacacatggttccctccacccagaaaactgcccttttctttctctcatcctacatagctgcctggcaaatccctagtcttcatcagctc

SEQ ID NO: 422868 - DNA, 120 bp, Artificial Sequence
  ENSG00000151023_26 (sequence is synthesized)
acatcacatttccatgacaatcccctttgattcctcagaatctggccttcctttatagcactggtcatattgtattgtgcatatctggttatttgcctgttttccatgaacatttcaagc

SEQ ID NO: 422869 - DNA, 120 bp, Artificial Sequence
  ENSG00000151023_27 (sequence is synthesized)
ttatgggggagaagacactgtatacattttcatctgcattccttagaatctgcataacagctggtatagagaaggtactcaaaaaatccttaatgaataaagtaatggatcgtacccaaa

SEQ ID NO: 422870 - DNA, 120 bp, Artificial Sequence
  ENSG00000151023_28 (sequence is synthesized)
cacaagattatttatattgccaataagtaagaatggatctttaaagtataacaatttcaatgtaggggaaaaaaacatggaaaatataaaaaactccaagtttttcaaaaaggaaaatac

SEQ ID NO: 422871 - DNA, 120 bp, Artificial Sequence
  ENSG00000151023_29 (sequence is synthesized)
tatgaagagaataaaaatagtcttaatcagaatgcttaggcaatatgcaaagaataattgagttattcacttacacaagaagaaattttgtttttactagtgtcacgttttccacatata

SEQ ID NO: 422872 - DNA, 120 bp, Artificial Sequence
  ENSG00000151023_30 (sequence is synthesized)
aactattaaatttgagaatatgtgttccagttccacaatgtaattcattattattatgtacttgtttcacataaacattaatttctaggtcctgaaaaataaagtcagcactcagaactt

SEQ ID NO: 422873 - DNA, 120 bp, Artificial Sequence
  ENSG00000151023_31 (sequence is synthesized)
cccttaagagaggaacactggtggaaaagtgacaagagagcaacaagtcctacttgctcaagaagagaatgactcaatacgcaggattaggcttatagagcccatgaagcaaaatggaac

SEQ ID NO: 422874 - DNA, 120 bp, Artificial Sequence
  ENSG00000151023_32 (sequence is synthesized)
agaaggagctgcacccaacagagcaggcggctggaggagcggcacaagaaagcctgggataaagttgattttccatatctggatgtgtctggcagcatcaaccatatagctgcaaaccag

SEQ ID NO: 422875 - DNA, 120 bp, Artificial Sequence
  ENSG00000151023_33 (sequence is synthesized)
ggtcgatttcaaagcccagggcctggccacacgtgtccaacacctatgaacttcttatggagattgttcaccacggagcatgaagacagagcgggtgactggaggtggctccccagaaaa

SEQ ID NO: 422876 - DNA, 120 bp, Artificial Sequence
  ENSG00000151023_34 (sequence is synthesized)
cttttaaggagtcatttggtggccatggatccaacgtgctcttctgagtgcatttataacctcatacccagtgacttgaaggagcctccccagcctcctagaaaaaaactttgatcggaa

SEQ ID NO: 422877 - DNA, 120 bp, Artificial Sequence
  ENSG00000151025_0 (sequence is synthesized)
atggagcagcgtcttcggcggccgcggcggcagcagcagcagcagcttctgaacgcgcctcaatgagagcggcggtggcggcagccgggccgagagacggactcgggctgactccagccg

SEQ ID NO: 422878 - DNA, 120 bp, Artificial Sequence
  ENSG00000151025_1 (sequence is synthesized)
ctgggagcgcgaggccatgtaacccgctcggctccaggctgcgaggtgcgtaatccccagccggcccctcgcgcagcgggcacggccagcgctgccacaggtgacttgatttctgcgacg

SEQ ID NO: 422879 - DNA, 120 bp, Artificial Sequence
  ENSG00000151025_2 (sequence is synthesized)
gtagcttagccacccggggccaatctcgaaacattcttattttcaagtcctttggactgggtgccatctggagaagggggaagactcctcgaaaaagtctgactgttgagaaactgacga

SEQ ID NO: 422880 - DNA, 120 bp, Artificial Sequence
  ENSG00000151025_3 (sequence is synthesized)
tccaaatttaaaaagtgattcccccccctcccgttccctcctcttctctctgggaggcagatgggagccatggcttaccccttactcctctgcctcctgcttgctcagctgggattggga

SEQ ID NO: 422881 - DNA, 120 bp, Artificial Sequence
  ENSG00000151025_4 (sequence is synthesized)
gctgttggcgccagccgcgacccccaaggacggccggattcccctcgagagaggaccccgaaggggaagccgcacgcccagcagccgggtcgagcctctgcctcggactcctcggctccc

SEQ ID NO: 422882 - DNA, 120 bp, Artificial Sequence
  ENSG00000151025_5 (sequence is synthesized)
tggagccgctccaccgatggcaccatcttggcgcagaaactcgccgaggaggtgcccatggacgtggcctcttacctctacaccggggactcccaccagctgaagcgagccaactgctcc

SEQ ID NO: 422883 - DNA, 120 bp, Artificial Sequence
  ENSG00000151025_6 (sequence is synthesized)
ggccgctacgagttggcgggcctgccggggaagtggccagccctggccagcgcgcacccctccttgcaccgggcgctggacacactgacacacgccaccaacttcctcaacgtgatgctg

SEQ ID NO: 422884 - DNA, 120 bp, Artificial Sequence
  ENSG00000151025_7 (sequence is synthesized)
cagagcaataagtcgcgggagcagaacttgcaggacgacctggattggtaccaggcgctggtgtggagccttctggagggcgagcccagcatctcccgggcggccatcaccttcagcacc

SEQ ID NO: 422885 - DNA, 120 bp, Artificial Sequence
  ENSG00000151025_8 (sequence is synthesized)
gattcgctgtccgcaccggccccacaggtcttcctccaggccacgcgcgaggagagccgcatcctgctccaagacctgtcctcctccgcaccccacctggccaacgccactctggagacc

SEQ ID NO: 422886 - DNA, 120 bp, Artificial Sequence
  ENSG00000151025_9 (sequence is synthesized)
gagtggttccacggcctccggcgcaagtggaggccccacttacaccgccgcggccccaatcaggggccccggggcctgggccacagctggcggcgcaaggacgggctcggcggggacaag

SEQ ID NO: 422887 - DNA, 120 bp, Artificial Sequence
  ENSG00000151025_10 (sequence is synthesized)
agccacttcaagtggtctccgccttatctggagtgcgagaacgggagttacaagcccgggtggctggttactctttcctctgccatctacgggttgcagcctaacctggtcccggaattc

SEQ ID NO: 422888 - DNA, 120 bp, Artificial Sequence
  ENSG00000151025_11 (sequence is synthesized)
aggggtgtcatgaaagttgacataaatcttcagaaagtggacattgaccaatgctcaagtgatggctggttttcaggaactcataaatgccacctcaacaattcagagtgtatgccaatt

SEQ ID NO: 422889 - DNA, 120 bp, Artificial Sequence
  ENSG00000151025_12 (sequence is synthesized)
aaaggcctaggattcgttcttggagcctatgagtgcatttgcaaagcaggattctatcatcctggagtcttaccagtgaacaactttcggagaaggggtccggatcagcatatttcagga

SEQ ID NO: 422890 - DNA, 120 bp, Artificial Sequence
  ENSG00000151025_13 (sequence is synthesized)
agtacaaaagatgtgtcagaagaagcctatgtctgcctaccttgcagggagggctgccccttctgtgctgatgacagcccatgcttcgtccaggaagataagtatttacgacttgccatc

SEQ ID NO: 422891 - DNA, 120 bp, Artificial Sequence
  ENSG00000151025_14 (sequence is synthesized)
atctccttccaagccctgtgtatgctgctcgacttcgttagcatgctggtggtctaccactttcgcaaagcaaagagcatccgggcatcgggccttatcctgttggaaacgatccttttt

SEQ ID NO: 422892 - DNA, 120 bp, Artificial Sequence
  ENSG00000151025_15 (sequence is synthesized)
ggatctctgctcctatactttccagttgttattttgtactttgagccaagcacatttcgctgtattctcctaagatgggctcgtcttctcggttttgctactgtttacggaactgtcact

SEQ ID NO: 422893 - DNA, 120 bp, Artificial Sequence
  ENSG00000151025_16 (sequence is synthesized)
ctcaaacttcacagggttttgaaggtgtttctttcacgaacggctcaacgaattccatatatgactggcggacgggtcatgaggatgctggcagtaatactcttggtagtgttttggttt

SEQ ID NO: 422894 - DNA, 120 bp, Artificial Sequence
  ENSG00000151025_17 (sequence is synthesized)
ctcattggctggacttcatctgtgtgccagaatttggagaaacagatttcacttattggccaggggaaaacatccgatcacctcatcttcaatatgtgcctcattgaccgctgggactac

SEQ ID NO: 422895 - DNA, 120 bp, Artificial Sequence
  ENSG00000151025_18 (sequence is synthesized)
atgacagcagttgctgaatttttattcctcttgtggggtgtttatctctgctatgcagtgcggacagtcccatcggcattccatgagccccgctatatggctgttgcagttcacaatgag

SEQ ID NO: 422896 - DNA, 120 bp, Artificial Sequence
  ENSG00000151025_19 (sequence is synthesized)
ctcatcatctctgctatattccatacaattagatttgttcttgcctcaagacttcagtctgattggatgttgatgctgtattttgcacatactcatttgactgtgacagtcaccattggg

SEQ ID NO: 422897 - DNA, 120 bp, Artificial Sequence
  ENSG00000151025_20 (sequence is synthesized)
ttgcttttgattccaaagttttcacattcaagcaataacccacgagatgatattgctacagaagcatatgaggatgagctagacatgggccgatctggatcctacctgaacagcagtatc

SEQ ID NO: 422898 - DNA, 120 bp, Artificial Sequence
  ENSG00000151025_21 (sequence is synthesized)
aattcagcctggagtgagcacagcttggatccagaggacattcgggacgagctgaaaaaactctatgcccaactggaaatatataaaagaaagaagatgatcacaaacaacccccacctc

SEQ ID NO: 422899 - DNA, 120 bp, Artificial Sequence
  ENSG00000151025_22 (sequence is synthesized)
cagaaaaagcggtgctcgaagaagggcctaggtcgttccatcatgagacgcattacggagatcccagagacagtcagccggcagtgctctaaagaggacaaggagggcgccgaccatggc

SEQ ID NO: 422900 - DNA, 120 bp, Artificial Sequence
  ENSG00000151025_23 (sequence is synthesized)
acagccaaaggcactgccctcatcaggaagaaccccccagagtcttcagggaacacagggaaatccaaggaggagaccctgaaaaaccgagtcttctcactcaagaaatcccacagcact

SEQ ID NO: 422901 - DNA, 120 bp, Artificial Sequence
  ENSG00000151025_24 (sequence is synthesized)
tatgaccacgtgagagaccaaacggaagagtccagtagcctacccacagaaagccaagaggaggagacaacagaaaattccacactggaatccctgtcgggtaaaaaactaacacaaaaa

SEQ ID NO: 422902 - DNA, 120 bp, Artificial Sequence
  ENSG00000151025_25 (sequence is synthesized)
ctaaaagaagacagcgaggctgagtccacggagtcggtgccgttggtgtgcaagtcagcaagcgctcacaacctcagctcagagaagaaaactgggcacccacgaacatcgatgttacag

SEQ ID NO: 422903 - DNA, 120 bp, Artificial Sequence
  ENSG00000151025_26 (sequence is synthesized)
aagtctctcagtgtcatagcaagcgccaaggagaagactcttggattagctgggaaaacccaaacagcaggtgtggaagaacgcactaaatcccagaaacctttgccaaaagataaagag

SEQ ID NO: 422904 - DNA, 120 bp, Artificial Sequence
  ENSG00000151025_27 (sequence is synthesized)
acaaacagaaatcactcaaattctgataacacagagactaaagatcctgccccccaaaactcaaatcctgcggaggagccaagaaagcctcagaaatctgggattatgaaacaacaaagg

SEQ ID NO: 422905 - DNA, 120 bp, Artificial Sequence
  ENSG00000151025_28 (sequence is synthesized)
gtcaaccccaccactgccaattctgacctgaacccaggcaccacccagatgaaggacaactttgacattggggaggtgtgtccttgggaggtttatgacctgacccctggtcctgtgcct

SEQ ID NO: 422906 - DNA, 120 bp, Artificial Sequence
  ENSG00000151025_29 (sequence is synthesized)
ttttccttaaaggagaaatctcaccacaagcctaaggcagctgaggtttgtcagcaatccaatcagaagcgcatagataaggctgaagtatgcctttgggagagccaaggccagtccatt

SEQ ID NO: 422907 - DNA, 120 bp, Artificial Sequence
  ENSG00000151025_30 (sequence is synthesized)
ttggaagatgagaagcttttgatttccaagactccagttctcccagagagggcaaaagaggagaacggaggtcagcctcgtgcagccaatgtgtgtgctgggcagagcgaagaactgccc

SEQ ID NO: 422908 - DNA, 120 bp, Artificial Sequence
  ENSG00000151025_31 (sequence is synthesized)
cccaaagctgtagcatcaaaaacagagaatgaaaatctcaaccaaataggacaccaggaaaaaaagacatcttcttctgaggagaatgtgcgtggctcctataactcaagtaataacttc

SEQ ID NO: 422909 - DNA, 120 bp, Artificial Sequence
  ENSG00000151025_32 (sequence is synthesized)
cagcaacctttaacatcacgagcagaggtttgtccttgggagtttgagaccccagctcaaccaaatgctggaagaagtgtagctttacctgcctcttctgctctaagtgcaaataagata

SEQ ID NO: 422910 - DNA, 120 bp, Artificial Sequence
  ENSG00000151025_33 (sequence is synthesized)
gcagggcctaggaaagaagagatctgggatagttttaaagtgtagcatctccaggaagaagaggaaaaggagggaaccccggattggatatgagacagaagatataagaatcaaatattc

SEQ ID NO: 422911 - DNA, 120 bp, Artificial Sequence
  ENSG00000151025_34 (sequence is synthesized)
ccaaggaggatttgtcaatcaaggaaaacatgacagatggtgaggtaaagtcaaaggcatgggtagaagaggaccaggggggcaagagcaacaacgtcataatggagaagtcagactttg

SEQ ID NO: 422912 - DNA, 120 bp, Artificial Sequence
  ENSG00000151025_35 (sequence is synthesized)
gtcaagaaagtccttcccttggtaacactaggaaaatctttccatttcagcatgtttaaggaaaatagcccacaatgtctgccctgatcaatatgtatccatgggactttgaagatccta

SEQ ID NO: 422913 - DNA, 120 bp, Artificial Sequence
  ENSG00000151025_36 (sequence is synthesized)
agccaggtaaaccaggagacacagaagacgtaccagatttgcaaagaaagaaaaggtataagacatatataactgaaattctaagtagctgaccgagaagaacttactttacctatttaa

SEQ ID NO: 422914 - DNA, 120 bp, Artificial Sequence
  ENSG00000151025_37 (sequence is synthesized)
ccttgatagcactgctaacttaatgcatcccaaaaatatcttttatattaatgattgctctcattttcttataaatgtatgtttcagtatatcgttgtgtctcatattcaagcattccag

SEQ ID NO: 422915 - DNA, 120 bp, Artificial Sequence
  ENSG00000151025_38 (sequence is synthesized)
attgtataatttttgcaaataactttggtattatgtgacacaacacatttatgcaatctgcagctattcaattgttattgcaccttacagaatacctgctatctatcaactttagttgat

SEQ ID NO: 422916 - DNA, 120 bp, Artificial Sequence
  ENSG00000151025_39 (sequence is synthesized)
tcttgaagtacagtaagctttctctggcttgggaagccataactgttactataaaaacttttagttttggctgtggtttatatattgtgactttgaatttgactctattatttcacatca

SEQ ID NO: 422917 - DNA, 120 bp, Artificial Sequence
  ENSG00000151025_40 (sequence is synthesized)
tggtttgttatactgtcttaatcagggttttttatacaagttgagttacttgttttgcacttcttgttaggactcagaagctttattaatattggagatcaagtggtcctacttagtcat

SEQ ID NO: 422918 - DNA, 120 bp, Artificial Sequence
  ENSG00000151025_41 (sequence is synthesized)
atgtctcaataagttaaggacaacttatccgttgtttattcaaagtcagagatagataacgccttcattccaattaattgtcccttttaactctttcagtatttcctacttagcagcatt

SEQ ID NO: 422919 - DNA, 120 bp, Artificial Sequence
  ENSG00000151025_42 (sequence is synthesized)
tccaaaggaagaagctaagagtgagaaaaatataccgtgcattattattactattggaaagggaagactctagggatgacataagaattatagcagtactataaacccaggaagtttgcc

SEQ ID NO: 422920 - DNA, 120 bp, Artificial Sequence
  ENSG00000151025_43 (sequence is synthesized)
tttcaaaaaaaaacacaggtagctcctgatagcactttcaagggattatttttttaaagagaaaaattatggtagcatcaagatcattgtatggatatatttttattatgtgtactgaaa

SEQ ID NO: 422921 - DNA, 120 bp, Artificial Sequence
  ENSG00000151025_44 (sequence is synthesized)
atacagtattttaaaataccttaaagtatttattctcataaactcttattcattgcttcagctacaggtagaacttgctgggctcaaatcccaaagaggttttataaccttatttattca

SEQ ID NO: 422922 - DNA, 120 bp, Artificial Sequence
  ENSG00000151025_45 (sequence is synthesized)
aaacctataaggtggtatggaatcttcattctcccaagcactggaaaatgtctaagtcctgcaaattgccattgtgagccacttgctcgacatgtaacatgtaaggtccatttgcaaagc

SEQ ID NO: 422923 - DNA, 120 bp, Artificial Sequence
  ENSG00000151025_46 (sequence is synthesized)
aaagcagcccccaaagcatattttataaagcttattgcattccacactgatctcttggcatgggaatcctaagctgccgactaagccctaccgacatgatcatgcagtgagattccaaag

SEQ ID NO: 422924 - DNA, 120 bp, Artificial Sequence
  ENSG00000151025_47 (sequence is synthesized)
ctcagtctcatttcatttaaagaagaatcactcagaaatagaaccgagacttccctttttctccctgtaaacacccaagtatcaactgcttatttggccaggacactcccagcacaaata

SEQ ID NO: 422925 - DNA, 120 bp, Artificial Sequence
  ENSG00000151025_48 (sequence is synthesized)
actattttttatgtcacaagcagcaaggaggacatgctagggtgataaaagatggagaaacaggatcagagggtggatatagggctgttcttagagagtattttcagtggaaggtaaaaa

SEQ ID NO: 422926 - DNA, 120 bp, Artificial Sequence
  ENSG00000151025_49 (sequence is synthesized)
cagaattctccatattcatcatcaaatttttctcagtgatttttttattcaggagtaagcaagcacttcactgtttcacaaagctgtgcgcaaatcttcctcacccatttgctgacttta

SEQ ID NO: 422927 - DNA, 120 bp, Artificial Sequence
  ENSG00000151025_50 (sequence is synthesized)
tgcattactcaggttggtggggtcggtttgagaagatatagaaattctatttttgtgtctttacaccatttatttcttttatctcttccttttcaatgaaggcctatatgcttggtgacc

SEQ ID NO: 422928 - DNA, 120 bp, Artificial Sequence
  ENSG00000151025_51 (sequence is synthesized)
tcctttaaggaatctttgtgaactgggttggaagttcctagacccacatatttgtttcatttatgtctgaaatctgttagcacttgattcctttcttgagaattatgcagtcaagcatca

SEQ ID NO: 422929 - DNA, 120 bp, Artificial Sequence
  ENSG00000151025_52 (sequence is synthesized)
gtgactttctattgcacttcaggattgatcctgctagagatgtgagttaaaaagacttgccaaattatatcttagcgacattctatagttcatagattattctccaccagcataaatcag

SEQ ID NO: 422930 - DNA, 120 bp, Artificial Sequence
  ENSG00000151025_53 (sequence is synthesized)
tgagagtgcctagagtctttctgagagtttcattgccattatcaacaagagaagttgaaatttacaagtcaggaggttatttttccagattgataaccatagaaagtgaataaacacttt

SEQ ID NO: 422931 - DNA, 120 bp, Artificial Sequence
  ENSG00000151025_54 (sequence is synthesized)
taaggtcgcaaacatttgctaggttgtccttctcaatgcatgtgcaggctgcatcctgtccttgtttttaagccagggtttataaataagtagatttataccaatcttaatagaattgta

SEQ ID NO: 422932 - DNA, 120 bp, Artificial Sequence
  ENSG00000151025_55 (sequence is synthesized)
tattttatgcaagaattaaatgctttacaacatgaagtataactcaacccattgtaaactttggtggcaatatggatttgaaactcgacagttctcttgtatttgcttcctaggtttctg

SEQ ID NO: 422933 - DNA, 120 bp, Artificial Sequence
  ENSG00000151025_56 (sequence is synthesized)
catgcaagttatgacaggtaggactgaaaaaacactgccttttgacttctagcatttagcaaccgagagtcgtagagtcaataaagctgtaagtgtcttcacttaatctgtggttctcct

SEQ ID NO: 422934 - DNA, 120 bp, Artificial Sequence
  ENSG00000151025_57 (sequence is synthesized)
aaaactattatctgaaacctacagcatcccaccatgaaatatttggtaaatttatgttgtgacgtgttgcagcatgtaaataattataacttctctgcaataaaacatatttatatgaaa

SEQ ID NO: 422935 - DNA, 120 bp, Artificial Sequence
  ENSG00000151025_58 (sequence is synthesized)
aaacctaaaggctgcaattaaccagccgcccggccttcgctactccggacagacgaacgtcttaaaggacgtcttcgctcctcgggagtcgcggctgcgctcgcggtgcgggtctgggcg

SEQ ID NO: 422936 - DNA, 120 bp, Artificial Sequence
  ENSG00000151025_59 (sequence is synthesized)
cattttaataaatcttgccaccgcacactctttgggtctgtgtatttgtctaatcaagctgtaaccctcgccgctgtggtccacggtttcattccctgaagcccgtgagaccacgaaccc

SEQ ID NO: 422937 - DNA, 120 bp, Artificial Sequence
  ENSG00000151025_60 (sequence is synthesized)
ttcgatcgagaaaagaccttcaatcgggagaagacttctcgtctcaaaaagcatccgggcatcgggccttatcctgttggaaacgatcctttttggatctctgctcctatactttccagg

SEQ ID NO: 422938 - DNA, 120 bp, Artificial Sequence
  ENSG00000151025_61 (sequence is synthesized)
cttatgctttgaagatagaaaggaccatgttatttaataaagatttggatgcagcataaaataccaggggaaaaggagattaaaggcgaagaataacctggttgttggactggactcact

SEQ ID NO: 422939 - DNA, 120 bp, Artificial Sequence
  ENSG00000151025_62 (sequence is synthesized)
ttgcctagaattttgctataaggaagacctgtattaagtgattaaggtgacttagtatccacatatagccaaaaaatctaataatttgttggtataaatgtgactaatatctttcttgtt

SEQ ID NO: 422940 - DNA, 120 bp, Artificial Sequence
  ENSG00000151025_63 (sequence is synthesized)
tgttaaataccttacctactttctgtgttcctggtgtgggctatactagaattgttcatgaaagttctactgggaggttacaatttttttaaaagcatacttgaataaaatagaattgtt

SEQ ID NO: 422941 - DNA, 120 bp, Artificial Sequence
  ENSG00000151025_64 (sequence is synthesized)
tttagggctagctaactccatggaagtaggctttgtggatattcactgttcttctgagttatgcaatgagccttttcttctttatatgctgcatattgttgttcagatttgcaagaatta

SEQ ID NO: 422942 - DNA, 120 bp, Artificial Sequence
  ENSG00000151033_0 (sequence is synthesized)
aggaaaggattactcgagccttgttagaatcagacatggcttcaggggatgcaggacgctcccctgagctgcctgtcaccgactaagtggagcagtgtttcttccgcagactcaactgag

SEQ ID NO: 422943 - DNA, 120 bp, Artificial Sequence
  ENSG00000151033_1 (sequence is synthesized)
aagtcagcctctgcggcaggcaccaggaatctgccttttcagttctgtctccggcaggctttgaggatgaaggctgcgggcattctgaccctcattggctgcctggtcacaggcgccgag

SEQ ID NO: 422944 - DNA, 120 bp, Artificial Sequence
  ENSG00000151033_2 (sequence is synthesized)
tccaaaatctacactcgttgcaaactggcaaaaatattctcgagggctggcctggacaattactggggcttcagccttggaaactggatctgcatggcgtattatgagagcggctacaac

SEQ ID NO: 422945 - DNA, 120 bp, Artificial Sequence
  ENSG00000151033_3 (sequence is synthesized)
gaaggagaacaaccactgccacgtcgcctgctcagccttggtcactgatgacctcacagatgcgattatctgtgccaagaaaattgttaaagagacacaaggaatgaactattggcaagg

SEQ ID NO: 422946 - DNA, 120 bp, Artificial Sequence
  ENSG00000151033_4 (sequence is synthesized)
ctggaagaaacactgtgaggggagagacctgtccgactggaaaaaagactgtgaggtttcctaaactggaactggacccaggatgctttgcagcaacgccctagggtttgcagtgaatgt

SEQ ID NO: 422947 - DNA, 120 bp, Artificial Sequence
  ENSG00000151033_5 (sequence is synthesized)
ccaaatgcctgtgtcatcttgtcccgtttcctcccaatattccttctcaaacttggagagggaaaattaagctatacttttaagaaaataaatatttccatttaaatgtcttcaccctga

SEQ ID NO: 422948 - DNA, 120 bp, Artificial Sequence
  ENSG00000151062_0 (sequence is synthesized)
agtccctgtctccgaggcctgcttgctaggtggggcgactcttctgtgagctgcagctgtggggcagagagaagccctccccacccaggactgagaggctggagaccccaggctcgccaa

SEQ ID NO: 422949 - DNA, 120 bp, Artificial Sequence
  ENSG00000151062_1 (sequence is synthesized)
ggcacggaagacaaaggcctggggcgtcctggggtctgggaggaaggcagacagagctcatggtctgtggctgctctgccctccttcccctccccaaccccaggcccaccatgcctgcaa

SEQ ID NO: 422950 - DNA, 120 bp, Artificial Sequence
  ENSG00000151062_2 (sequence is synthesized)
ctcccaacttcctcgcaaaccccagctccagcagccgctggattcccctccagccaatgcccgtggcctgggcctttgtgcagaagacctcggccctcctgtggctgctgcttctaggca

SEQ ID NO: 422951 - DNA, 120 bp, Artificial Sequence
  ENSG00000151062_3 (sequence is synthesized)
cctccctgtcccctgcgtggggacaggccaagattcctctggaaacagtgaagctatgggctgacaccttcggcggggacctgtataacactgtgaccaaatactcaggctctctcttgc

SEQ ID NO: 422952 - DNA, 120 bp, Artificial Sequence
  ENSG00000151062_4 (sequence is synthesized)
tgcagaagaagtacaaggatgtggagtccagtctgaagatcgaggaggtggatggcttggagctggtgaggaagttctcagaggacatggagaacatgctgcggaggaaagtcgaggcgg

SEQ ID NO: 422953 - DNA, 120 bp, Artificial Sequence
  ENSG00000151062_5 (sequence is synthesized)
tccagaatctggtggaagctgccgaggaggccgacctgaaccacgaattcaatgaatccctggtgttcgactattacaactcggtcctgatcaacgagagggacgagaagggcaacttcg

SEQ ID NO: 422954 - DNA, 120 bp, Artificial Sequence
  ENSG00000151062_6 (sequence is synthesized)
tggagctgggcgccgagttcctcctggagtccaatgctcacttcagcaacctgccggtgaacacctccatcagcagcgtgcagctgcccaccaacgtgtacaacaaagacccagatattt

SEQ ID NO: 422955 - DNA, 120 bp, Artificial Sequence
  ENSG00000151062_7 (sequence is synthesized)
taaatggagtctacatgtctgaagccttgaatgctgtcttcgtggagaacttccagagagacccaacgttgacctggcaatattttggcagtgcaactggattcttcaggatctatccag

SEQ ID NO: 422956 - DNA, 120 bp, Artificial Sequence
  ENSG00000151062_8 (sequence is synthesized)
gtataaaatggacacctgatgagaatggagtcattacttttgactgccgaaaccgcggctggtacattcaagctgctacttctcccaaggacatagtgattttggtggacgtgagcggca

SEQ ID NO: 422957 - DNA, 120 bp, Artificial Sequence
  ENSG00000151062_9 (sequence is synthesized)
gtatgaaggggctgaggatgactattgccaagcacaccatcaccaccatcttggacaccctgggggagaatgacttcattaatatcatagcgtacaatgactacgtccattacatcgagc

SEQ ID NO: 422958 - DNA, 120 bp, Artificial Sequence
  ENSG00000151062_10 (sequence is synthesized)
cttgttttaaagggatcctcgtccaggcggaccgagacaatcgagagcatttcaaactgctggtggaggagttgatggtcaaaggtgtgggggtcgtggaccaagccctgagagaagcct

SEQ ID NO: 422959 - DNA, 120 bp, Artificial Sequence
  ENSG00000151062_11 (sequence is synthesized)
tccagatcctgaagcagttccaagaggccaagcaaggaagcctctgcaaccaggccatcatgctcatcagcgacggcgccgtggaggactacgagccggtgtttgagaagtataactggc

SEQ ID NO: 422960 - DNA, 120 bp, Artificial Sequence
  ENSG00000151062_12 (sequence is synthesized)
cagactgtaaggtccgagttttcacttacctcattgggagagaagtgtcttttgctgaccgcatgaagtggattgcatgcaacaacaaaggctactacacgcagatctcaacgctggcgg

SEQ ID NO: 422961 - DNA, 120 bp, Artificial Sequence
  ENSG00000151062_13 (sequence is synthesized)
acacccaggagaacgtgatggaatacctgcacgtgctcagccgccccatggtcatcaaccacgaccacgacatcatctggacagaggcctacatggacagcaagctcctcagctcgcagg

SEQ ID NO: 422962 - DNA, 120 bp, Artificial Sequence
  ENSG00000151062_14 (sequence is synthesized)
ctcagagcctgacactgctcaccactgtggccatgccagtcttcagcaagaagaacgaaacgcgatcccatggcattctcctgggtgtggtgggctcagatgtggccctgagagagctga

SEQ ID NO: 422963 - DNA, 120 bp, Artificial Sequence
  ENSG00000151062_15 (sequence is synthesized)
tgaagctggcgccccggtacaagcttggagtgcacggatacgcctttctgaacaccaacaatggctacatcctctcccatcccgacctccggcccctgtacagagaggggaagaaactaa

SEQ ID NO: 422964 - DNA, 120 bp, Artificial Sequence
  ENSG00000151062_16 (sequence is synthesized)
aacccaaacctaactacaacagtgtggatctctccgaagtggagtgggaagaccaggctgaatctctgagaacagccatgatcaatagggaaacaggtactctctcgatggatgtgaagg

SEQ ID NO: 422965 - DNA, 120 bp, Artificial Sequence
  ENSG00000151062_17 (sequence is synthesized)
ttccgatggataaagggaagcgagttcttttcctgaccaatgactacttcttcacggacatcagcgacacccctttcagtttgggggtggtgctgtcccggggccacggagaatacatcc

SEQ ID NO: 422966 - DNA, 120 bp, Artificial Sequence
  ENSG00000151062_18 (sequence is synthesized)
ttctggggaacacgtctgtggaagaaggcctgcatgacttgcttcacccagacctggccctggccggtgactggatctactgcatcacagatattgacccagaccaccggaagctcagcc

SEQ ID NO: 422967 - DNA, 120 bp, Artificial Sequence
  ENSG00000151062_19 (sequence is synthesized)
agctagaggccatgatccgcttcctcaccaggaaggacccagacctggagtgtgacgaggagctggtccgggaggtgctgtttgacgcggtggtgacagcccccatggaagcctactgga

SEQ ID NO: 422968 - DNA, 120 bp, Artificial Sequence
  ENSG00000151062_20 (sequence is synthesized)
cagcgctggccctcaacatgtccgaggagtctgaacacgtggtggacatggccttcctgggcacccgggctggcctcctgagaagcagcttgttcgtgggctccgagaaggtctccgaca

SEQ ID NO: 422969 - DNA, 120 bp, Artificial Sequence
  ENSG00000151062_21 (sequence is synthesized)
ggaagttcctgacacctgaggacgaggccagcgtgttcaccctggaccgcttcccgctgtggtaccgccaggcctcagagcatcctgctggcagcttcgtcttcaacctccgctgggcag

SEQ ID NO: 422970 - DNA, 120 bp, Artificial Sequence
  ENSG00000151062_22 (sequence is synthesized)
ccagaaagtgcgggtgaacccatggtggtgacggcaagcacagctgtggcggtgaccgtggacaagaggacagccattgctgcagccgcgggcgtccaaatgaagctggaattcctccag

SEQ ID NO: 422971 - DNA, 120 bp, Artificial Sequence
  ENSG00000151062_23 (sequence is synthesized)
cgcaaattctgggcggcaacgcggcagtgcagcactgtggatgggccgtgcacacagagctgcgaggacagtgatctggactgcttcgtcatcgacaacaacgggttcattctgatctcc

SEQ ID NO: 422972 - DNA, 120 bp, Artificial Sequence
  ENSG00000151062_24 (sequence is synthesized)
aagaggtcccgagagacgggaagatttctgggggaggtggatggtgctgtcctgacccagctgctcagcatgggggtgttcagccaagtgactatgtatgactatcaggccatgtgcaaa

SEQ ID NO: 422973 - DNA, 120 bp, Artificial Sequence
  ENSG00000151062_25 (sequence is synthesized)
ccctcgagtcaccaccacagtgcagcccagcccctggtcagcccaatttctgccttcttgacggcgaccaggtggctgctgcaggagctggtgctgttcctgctggagtggagtgtctgg

SEQ ID NO: 422974 - DNA, 120 bp, Artificial Sequence
  ENSG00000151062_26 (sequence is synthesized)
ggctcctggtacgacagaggggccgaggccaaaagtgtcttccatcactcccacaaacacaagaagcaggacccgctgcagccctgcgacacggagtaccccgtgttcgtgtaccagccg

SEQ ID NO: 422975 - DNA, 120 bp, Artificial Sequence
  ENSG00000151062_27 (sequence is synthesized)
gccatccgggaggccaacgggatcgtggagtgcgggccctgccagaaggtatttgtggtgcagcagattcccaacagtaacctcctcctcctggtgacagaccccacctgtgactgcagc

SEQ ID NO: 422976 - DNA, 120 bp, Artificial Sequence
  ENSG00000151062_28 (sequence is synthesized)
atcttcccaccagtgctgcaggaggcgacagaagtcaaatataatgcctctgtcaaatgtgaccggatgcgctcccagaagctccgccggcgaccagactcctgccacgccttccatcca

SEQ ID NO: 422977 - DNA, 120 bp, Artificial Sequence
  ENSG00000151062_29 (sequence is synthesized)
gaggagaatgcccaggactgcggcggcgcctcggacacctcagcctcgccgcccctactcctgctgcctgtgtgtgcctgggggctactgccccaactcctgcggtgacaccacccagcc

SEQ ID NO: 422978 - DNA, 120 bp, Artificial Sequence
  ENSG00000151062_30 (sequence is synthesized)
tgacctgtgttttggcaaggtgatccttccagagccatcccaaaaagtcagcactgacatgggatgcagctaactgcagttgggtcgcccccaggccaacgctcctctcaatcctgggct

SEQ ID NO: 422979 - DNA, 120 bp, Artificial Sequence
  ENSG00000151062_31 (sequence is synthesized)
ggtggcccctggctccggagaatgctggatggaacaggaaaccaatcacctggcaccactttcaagatgcttcatggtgcccggtaccatctgccctaggtctcaacatgagcatacttc

SEQ ID NO: 422980 - DNA, 120 bp, Artificial Sequence
  ENSG00000151062_32 (sequence is synthesized)
tgacctaaccttcctgtctcctcttcgggaagccagcgtgagctcagcttggaccaagacaaaataatttagttcttcctgtactccagagtccagacccagccaagaaagggtcagttg

SEQ ID NO: 422981 - DNA, 120 bp, Artificial Sequence
  ENSG00000151062_33 (sequence is synthesized)
tttctgaccctttctgtcggagtggtctctggtagaacccaaggacttctgggtactgagaagcagcagcagaatgaggccaaatgcagagatgaggctaaggcaagaatatgccccaac

SEQ ID NO: 422982 - DNA, 120 bp, Artificial Sequence
  ENSG00000151062_34 (sequence is synthesized)
taaagcatagattccccaaagtgaggctcatggtgggaggccactcaccttcctagctgctgctcgaaaaggttttgactgtgttggggtgggggttgggtaagggaatggtcaagactg

SEQ ID NO: 422983 - DNA, 120 bp, Artificial Sequence
  ENSG00000151062_35 (sequence is synthesized)
agaaaggaatgaaatccattcaggaaatatcgacagggctacacgtgatgtccccaaactgctgctattgaagaacttcccaaaacttctttacaaagccctaaaggaaagtttgcatct

SEQ ID NO: 422984 - DNA, 120 bp, Artificial Sequence
  ENSG00000151062_36 (sequence is synthesized)
atgaaaagccaataggctgagacatccaattgctgcatggaaattgatgtacattcaggggacggcaaaaatagctgtaaaatagtgaaaaagagcagtggttgtgctcttttctggcca

SEQ ID NO: 422985 - DNA, 120 bp, Artificial Sequence
  ENSG00000151062_37 (sequence is synthesized)
atgatttacaaaagaatctacttgactctgtccctggagtgaaatccttagggttggaacttgtgggaacattccaacttgctaagcagggtccactgggagggaagctctatctgggaa

SEQ ID NO: 422986 - DNA, 120 bp, Artificial Sequence
  ENSG00000151062_38 (sequence is synthesized)
ctcacccccagcgcacacacatctcccccagggtcccaaggccccgcagcttcctcccccgaccaaaccccaagacctggatcccaggagacaacagtctccacagtgagagcaacatta

SEQ ID NO: 422987 - DNA, 120 bp, Artificial Sequence
  ENSG00000151062_39 (sequence is synthesized)
agggcaaagccatggagaaatgtgggagaggccggcctcaaatctttccatttaacaaaccccagtgatgggtatggacagcatgcagggcttttggggcgcttccccccgctcctccat

SEQ ID NO: 422988 - DNA, 120 bp, Artificial Sequence
  ENSG00000151062_40 (sequence is synthesized)
caccctcagcctccacacttcaaagttcaagttcaaagctgttcaagtttcctaccagcaaatagccctaacttgcctctagagtaggccaaatgccaactctgtaaaacacacttacat

SEQ ID NO: 422989 - DNA, 120 bp, Artificial Sequence
  ENSG00000151062_41 (sequence is synthesized)
tatcggttacagaatgtcactcttaccgtcatgtcttgcaacaaccctgtgagggcagtattaatgcccccttacagcagaagacactgcagctcgaagacagcttaagtggcagaataa

SEQ ID NO: 422990 - DNA, 120 bp, Artificial Sequence
  ENSG00000151062_42 (sequence is synthesized)
tgctagaacagctaaggtttacatgtaccaaataacatgtttcagctcattccatcctcacaacagccccctgaaagtgggtactatcattagtcccatgttatagaaactgcagcagag

SEQ ID NO: 422991 - DNA, 120 bp, Artificial Sequence
  ENSG00000151062_43 (sequence is synthesized)
ttgaaaattgcctccaaattaccggaagagtgtatgaagattgaatgtgatgtattcacgtaacatgcttgaaactgcctggcatatactaaacgctaaataaatacatgctaactgcga

SEQ ID NO: 422992 - DNA, 120 bp, Artificial Sequence
  ENSG00000151062_44 (sequence is synthesized)
tcatccccaaaccctctgtgcctgggtctgtgcccctgcagacaggagcatatagggatgccaatgaacacacctgtgcctgtgcttctcgggggaaacattcgcgtttatgccctgtga

SEQ ID NO: 422993 - DNA, 120 bp, Artificial Sequence
  ENSG00000151062_45 (sequence is synthesized)
actgccgcttgatcaccagggatcctcagcagtgcagcaccaggatgagggcttgactcgtctcctggaggggcatgtccaaccccacccgagatgtctgacctgcaataggcatttccc

SEQ ID NO: 422994 - DNA, 120 bp, Artificial Sequence
  ENSG00000151062_46 (sequence is synthesized)
ggcatggacgccacctcttccctgcatgctgcccctgggagggacctcattgctcaaccagagccctcaagcagggaagagggtgtcctggaggagaggggatgggccgggggctgtcag

SEQ ID NO: 422995 - DNA, 120 bp, Artificial Sequence
  ENSG00000151062_47 (sequence is synthesized)
ggatactccagctccttgggaacccaagtcgggagggctcagaggtctccgagattcagtcctgtgtctgacaggttcctgctggagtggagtgtctggggctcctggtacgacagaggg

SEQ ID NO: 422996 - DNA, 120 bp, Artificial Sequence
  ENSG00000151062_48 (sequence is synthesized)
cttcaccgcccgtgtcctccacagggctccgttatttgttctctaacccttccctgggccccggtgctgcctcctgaccctaaagctgcttgcagggcaactggtggcaccagagcaggt

SEQ ID NO: 422997 - DNA, 120 bp, Artificial Sequence
  ENSG00000151062_49 (sequence is synthesized)
tcttccagacctttttccagtctgcagaatgggctccggtcctgagatattgaccttaacagtggcttctgcacataatgcctctgtcaaatgtgaccggatgcgctcccagaagctccg

SEQ ID NO: 422998 - DNA, 120 bp, Artificial Sequence
  ENSG00000151062_50 (sequence is synthesized)
ttccttgaagcaaggcagaagcatcagaaccgcctcctgcctgagcctcggggaaaggggcatagtatttggttctgtgtgagctttgctactaattagaaacgtgatgtgggcaagcga

SEQ ID NO: 422999 - DNA, 120 bp, Artificial Sequence
  ENSG00000151062_51 (sequence is synthesized)
tctctttaacttgactctatttttttctctccccgtctcttccctggccttgccctctctctttctgccctgtagccgcgggcgtccaaatgaagctggaattcctccagcgcaaattct

SEQ ID NO: 423000 - DNA, 120 bp, Artificial Sequence
  ENSG00000151062_52 (sequence is synthesized)
gtgacagtggggataggtgaccctgaagcatcgttgttcacatctcaccctgcgtggccttctctcatcacatccctcactcctggctctgtgtgtgacatcatcttgggacaccgccac

SEQ ID NO: 423001 - DNA, 120 bp, Artificial Sequence
  ENSG00000151062_53 (sequence is synthesized)
tccatgtgccatcatcaccaccccatgacatcctgccctcatgtgccaccatgttttcctgtgccgtgtccaccctgtgctgggcttatgttccggccagccaaaagtgtcttccatcac

SEQ ID NO: 423002 - DNA, 120 bp, Artificial Sequence
  ENSG00000151062_54 (sequence is synthesized)
tgaagtggattgcatgcaacaacaaaggtgagtgccgggccagcaggtaccttcccacctgcacctgagcacaggagacagggttacccagccctggaagtgctgagcacgggcttcccc

SEQ ID NO: 423003 - DNA, 120 bp, Artificial Sequence
  ENSG00000151062_55 (sequence is synthesized)
atgggcccctaagaggagcagtgctatgtcaagaacagcagcctcagtccctccttcatatttggaaaaagcaaggtgagacaatgtcagctctgtctccatcctgcccccattctttct

SEQ ID NO: 423004 - DNA, 120 bp, Artificial Sequence
  ENSG00000151062_56 (sequence is synthesized)
gaactgcctgaggagggaccctctgcaaatgcactggggtgaactctggccctgggagtgccgaggcgaggtcaccgcaggccagaggccccttcggtggcgtgatgtcctttctccgcc

SEQ ID NO: 423005 - DNA, 120 bp, Artificial Sequence
  ENSG00000151062_57 (sequence is synthesized)
tgagccatctgccaggcccgttcccttagctgccccgacccgccctgcctcatggttccgggcttccctgccaccctaactccacactaaagtctccagaagttccttccctagaagccc

SEQ ID NO: 423006 - DNA, 120 bp, Artificial Sequence
  ENSG00000151065_0 (sequence is synthesized)
gtgcctatgtctgggagggagggaagatggcagccgtggcggcaggcggcctggtgggaaaggggcgcgacatcagcctagcggccctgcagcgccacgacccctatatcaaccgcatcg

SEQ ID NO: 423007 - DNA, 120 bp, Artificial Sequence
  ENSG00000151065_1 (sequence is synthesized)
tggacgtggccagccaggtggctctgtacaccttcggccatcgggccaacgagtgggagaaaactgatgtggaaggaaccttatttgtttatacaaggtctgcttctccaaagcatggat

SEQ ID NO: 423008 - DNA, 120 bp, Artificial Sequence
  ENSG00000151065_2 (sequence is synthesized)
tcaccattatgaataggctgagcatggaaaataggacagaacctattactaaagacttggatttccaactccaggaccctttccttctctacagaaatgccagattgtccatctatggaa

SEQ ID NO: 423009 - DNA, 120 bp, Artificial Sequence
  ENSG00000151065_3 (sequence is synthesized)
tttggttttatgataaggaagaatgccaaagaattgcagagcttatgaaaaacctaactcagtatgaacagttgaaagcccatcagggaactggagcaggaatttccccagtgatcctca

SEQ ID NO: 423010 - DNA, 120 bp, Artificial Sequence
  ENSG00000151065_4 (sequence is synthesized)
attcaggagagggcaaagaagtagacattttacgaatgctcatcaaggccaaagacgaatacacaaagtgtaaaacctgttctgagccaaaaaagataaccagttcctctgccatctatg

SEQ ID NO: 423011 - DNA, 120 bp, Artificial Sequence
  ENSG00000151065_5 (sequence is synthesized)
acaatccaaatctcatcaaaccaattccagtgaaacccagtgaaaaccagcaacagcgtatacctcagcccaaccagaccttagaccctgaaccccaacacttatccttgacagctctgt

SEQ ID NO: 423012 - DNA, 120 bp, Artificial Sequence
  ENSG00000151065_6 (sequence is synthesized)
accctgaaccccaacacttatccttgacagctctgtttgggaagcaggacaaagctacatgtcaggaaactgtggagcctccgcagactctccaccagcagcagcagcagcagcagcagc

SEQ ID NO: 423013 - DNA, 120 bp, Artificial Sequence
  ENSG00000151065_7 (sequence is synthesized)
gctccctgtcctatgaggaacccagaagacactcaccccccattgagaagcagctctgtccagccattcagaaactcatggtcaggagcgcagacctccacccattgtcagagctgcctg

SEQ ID NO: 423014 - DNA, 120 bp, Artificial Sequence
  ENSG00000151065_8 (sequence is synthesized)
tccagaactcagaacctgttcgagaaacttcagagtaccccaggggcagcaaacaagtgtgaccctagtacaccagcacctgccagctcagctgccctgaaccgcagcagagctcccact

SEQ ID NO: 423015 - DNA, 120 bp, Artificial Sequence
  ENSG00000151065_9 (sequence is synthesized)
tctgtcacccctgtggctccaggaaagggtctggctcagccaccacaggcctatttcaatggctcccttccacctcagacagtaggacatcaggctcatggaagagaacagtccacactc

SEQ ID NO: 423016 - DNA, 120 bp, Artificial Sequence
  ENSG00000151065_10 (sequence is synthesized)
ccaagacaaacactccccatctctggtagtcagactggcagctctggagtgatctcccctcaagagttactgaagaagcttcagattgtacagcaggagcagcagctgcatgcctctaac

SEQ ID NO: 423017 - DNA, 120 bp, Artificial Sequence
  ENSG00000151065_11 (sequence is synthesized)
cggccagccttggccgctaagtttcctgtgctcgctcagagctctggaacagggaaacccttggaatcctggatcaacaagacacccaacacagaacagcagactcctcttttccaggtc

SEQ ID NO: 423018 - DNA, 120 bp, Artificial Sequence
  ENSG00000151065_12 (sequence is synthesized)
atctcacctcagcgcatccctgctacagcagctccgtctctgcttatgtcccccatggtgttcgcacaacccacctccgtcccgccaaaggaaagggagagcggcctcttgcctgtggga

SEQ ID NO: 423019 - DNA, 120 bp, Artificial Sequence
  ENSG00000151065_13 (sequence is synthesized)
ggccaggagccacctgctgctgccaccagcctcctcctgcccatacagagcccggagccctccgtgatcaccagcagcccactcaccaagctccagctccaggaggcactgctgtacctc

SEQ ID NO: 423020 - DNA, 120 bp, Artificial Sequence
  ENSG00000151065_14 (sequence is synthesized)
attcagaatgatgacaacttcttaaatataatctatgaagcctatctcttcagcatgactcaagcagccatgaaaaagactatgtgacagcaaggccttttaaaactgattttcaaggtc

SEQ ID NO: 423021 - DNA, 120 bp, Artificial Sequence
  ENSG00000151065_15 (sequence is synthesized)
cttctagaactccggcacaaggttctttcatgttgagtgttgtttccttcaatgtttctgccttttttaaaaaaaaagtatgtgtaatatgaagtaaaatgtttcagacttttttttata

SEQ ID NO: 423022 - DNA, 120 bp, Artificial Sequence
  ENSG00000151065_16 (sequence is synthesized)
accgctcctcgaaatgtcatgtagggacaagttaaaagaaacagcctgccttcctctaggccaacttttgctcaaagagacgctaagggattgattataaaattacagcaacttctagct

SEQ ID NO: 423023 - DNA, 120 bp, Artificial Sequence
  ENSG00000151065_17 (sequence is synthesized)
tgctggcctccttgcctccctcttaggagttctttcggggagttcggaggctgataaataacattctttttcttccctgagttagaagcaaatgatagctgtaggagtcagtcagataag

SEQ ID NO: 423024 - DNA, 120 bp, Artificial Sequence
  ENSG00000151065_18 (sequence is synthesized)
tttacgaatgctcatcaaggccaaagacgaatacacaaagccagatgttgtgatacagtgtgccaggacacctgcatgatcacgctactttcctagtctccgtttttcttggtttgtcat

SEQ ID NO: 423025 - DNA, 120 bp, Artificial Sequence
  ENSG00000151065_19 (sequence is synthesized)
aaattgtacagtgtttgccattgtgtttgcatttggtatcagtggctatggggggtgtcagcattttaacaaatgttaatgtttaggaaatgcatgccctaatgatggaatagattcttc

SEQ ID NO: 423026 - DNA, 120 bp, Artificial Sequence
  ENSG00000151065_20 (sequence is synthesized)
cttggaagagtttaagtgaatataaatatgatgatataaacctaaaccctgtcttttgaagctttatggatttgtagtgtgaacccattgctgatcttaagcctgagcagggctgggtga

SEQ ID NO: 423027 - DNA, 120 bp, Artificial Sequence
  ENSG00000151065_21 (sequence is synthesized)
ggcaagttcttagtgaggagactgcagagacacacacataggtggctccctgaacgaagaattaacgagtctgctatggcactttttctttatgtatcacttttggccgagtgagctgac

SEQ ID NO: 423028 - DNA, 120 bp, Artificial Sequence
  ENSG00000151065_22 (sequence is synthesized)
aaagtgtttgagggcctgtattgtaggagtgccatcttctgaatacaagtaaataaaaaatcaaagtccaaaaagtttctttcagtcattaagaatttaataaccctttgtaatgtggaa

SEQ ID NO: 423029 - DNA, 120 bp, Artificial Sequence
  ENSG00000151065_23 (sequence is synthesized)
gtcgtagtaggtaactaaatagtccttgtcagatttgaaatgaagtagccatcgcctttctcatactacattttactctcgtatcgtttctgaccacttgtgttgcactgctggtcagcc

SEQ ID NO: 423030 - DNA, 120 bp, Artificial Sequence
  ENSG00000151065_24 (sequence is synthesized)
caatatataaatacatatgtgtgcacacacatgcaccttatgctttgtggacagctttcataaagaccttgcagtgaagaaatgttttctgtatatttttcatcctactctttgaactca

SEQ ID NO: 423031 - DNA, 120 bp, Artificial Sequence
  ENSG00000151065_25 (sequence is synthesized)
agatacatgaatttgcctaccatatactattcagtgtaattttaatgagtataatgtaaataatatttgacattttaaccccaatgcatcattaagatgcattaaaatgatgctgtatat

SEQ ID NO: 423032 - DNA, 120 bp, Artificial Sequence
  ENSG00000151065_26 (sequence is synthesized)
aattgtcataataggtggttatcctattatttagagaataaatttttatgagagaaaaaaataaagctattgaaactataatatgacttactaatggcaggtcctgtgaaatgaaaagtt

SEQ ID NO: 423033 - DNA, 120 bp, Artificial Sequence
  ENSG00000151065_27 (sequence is synthesized)
ttgcaatatagaaaaatattgtgttttctcctcatgtttctttgccgaaaggtacactttatcaattgtagtttattactaaagacttggaattccaactccaggaccctttccttctct

SEQ ID NO: 423034 - DNA, 120 bp, Artificial Sequence
  ENSG00000151065_28 (sequence is synthesized)
acagaaatgccagtttgaattgtttatagtttgaattgttttgtgtgcttatagttatgtcagggttttttttgagattattagattttatgtcaaattaatatataatttaagtcctaa

SEQ ID NO: 423035 - DNA, 120 bp, Artificial Sequence
  ENSG00000151065_29 (sequence is synthesized)
taaaataactacaaagttacctgtaatcatcacttttggttgcttttattttggataaatacatggtctgatcagttataggtaatattttattttaaattcttattatagatcacatat

SEQ ID NO: 423036 - DNA, 120 bp, Artificial Sequence
  ENSG00000151065_30 (sequence is synthesized)
taactactataccaaaaatataaaaacacaaactctctttaatgcatcaatttaaaaaataaccttcttaagtcccacagggtttatctgatagaaaatactatttagatctaataaaca

SEQ ID NO: 423037 - DNA, 120 bp, Artificial Sequence
  ENSG00000151065_31 (sequence is synthesized)
tacaccttggttctaagcgtgtgctgtccactatgatagtcactaactactgtggccgtttagtacctgaagtgtggctagtctaaacggagctgcactgtgagtgtccaacaggcacca

SEQ ID NO: 423038 - DNA, 120 bp, Artificial Sequence
  ENSG00000151065_32 (sequence is synthesized)
actgtcagacagtgcaaaaaaaaaaggaaaaaacctcaattattaattattttatattaacatgttgaaatgacaatattttggataaattgggcaaaataaaatatattattaatttca

SEQ ID NO: 423039 - DNA, 120 bp, Artificial Sequence
  ENSG00000151065_33 (sequence is synthesized)
gaggaaactgagactccagtgaggaggcagactgtgtaaaaacccacagattctgatttcacttccgttgctttttccacaccacctgtactgctctactattaaacatggatgcaaatt

SEQ ID NO: 423040 - DNA, 120 bp, Artificial Sequence
  ENSG00000151067_0 (sequence is synthesized)
gtctccctctcgctgcctctgcagaaacagctcctgccagagcggcgctcggcgcggcgcggcgggcccggagcggcggcggcggctcttcctgcctccgcgcccaggagttgccggctc

SEQ ID NO: 423041 - DNA, 120 bp, Artificial Sequence
  ENSG00000151067_1 (sequence is synthesized)
caggagttgccggctccctttgacagcagagagccgggcaggggcctcaggaggactcgctgggagtgggcagaggcgcctcggcccctgccggcccaggcgggccccgcgcgccccccg

SEQ ID NO: 423042 - DNA, 120 bp, Artificial Sequence
  ENSG00000151067_2 (sequence is synthesized)
cttctcgccctgcctctcccgatttattttttcaaatggtgtagccgccggaggtgcggtgctcagttcttggaaggggcccggatgtactgaggatgcgttacagtttcactcgaggag

SEQ ID NO: 423043 - DNA, 120 bp, Artificial Sequence
  ENSG00000151067_3 (sequence is synthesized)
gcagtagtggaaaggagcagtttttggggtttgatgccataatgggaatcaggtaatcgtcggcggggaagaagaaacgctgcagaccacggcttcctcgaatcttgcgcgaaagccgcc

SEQ ID NO: 423044 - DNA, 120 bp, Artificial Sequence
  ENSG00000151067_4 (sequence is synthesized)
ggcctcggaggagggattaatccagacccgccggggggtgttttcacatttcttcctcttcgtggctgctcctcctattaaaaccatttttggtccatggtcaatgagaatacgaggatg

SEQ ID NO: 423045 - DNA, 120 bp, Artificial Sequence
  ENSG00000151067_5 (sequence is synthesized)
tacattccagaggaaaaccaccaaggttccaactatgggagcccacgccccgcccatgccaacatgaatgccaatgcggcagcggggctggcccctgagcacatccccaccccgggggct

SEQ ID NO: 423046 - DNA, 120 bp, Artificial Sequence
  ENSG00000151067_6 (sequence is synthesized)
gccctgtcgtggcaggcggccatcgacgcagcccggcaggctaagctgatgggcagcgctggcaatgcgaccatctccacagtcagctccacgcagcggaagcggcagcaatatgggaaa

SEQ ID NO: 423047 - DNA, 120 bp, Artificial Sequence
  ENSG00000151067_7 (sequence is synthesized)
cccaagaagcagggcagcaccacggccacacgcccgccccgagccctgctctgcctgaccctgaagaaccccatccggagggcctgcatcagcattgtcgaatggaaaccatttgaaata

SEQ ID NO: 423048 - DNA, 120 bp, Artificial Sequence
  ENSG00000151067_8 (sequence is synthesized)
attattttactgactatttttgccaattgtgtggccttagcgatctatattccctttccagaagatgattccaacgccaccaattccaacctggaacgagtggaatatctctttctcata

SEQ ID NO: 423049 - DNA, 120 bp, Artificial Sequence
  ENSG00000151067_9 (sequence is synthesized)
atttttacggtggaagcgtttttaaaagtaatcgcctatggactcctctttcaccccaatgcctacctccgcaacggctggaacctactagattttataattgtggttgtggggcttttt

SEQ ID NO: 423050 - DNA, 120 bp, Artificial Sequence
  ENSG00000151067_10 (sequence is synthesized)
agtgcaattttagaacaagcaaccaaagcagatggggcaaacgctctcggagggaaaggggccggatttgatgtgaaggcgctgagggccttccgcgtgctgcgccccctgcggctggtg

SEQ ID NO: 423051 - DNA, 120 bp, Artificial Sequence
  ENSG00000151067_11 (sequence is synthesized)
tccggagtcccaagtctccaggtggtcctgaattccatcatcaaggccatggtccccctgctgcacatcgccctgcttgtgctgtttgtcatcatcatctacgccatcatcggcttggag

SEQ ID NO: 423052 - DNA, 120 bp, Artificial Sequence
  ENSG00000151067_12 (sequence is synthesized)
ctcttcatggggaagatgcacaagacctgctacaaccaggagggcatagcagatgttccagcagaagatgacccttccccttgtgcgctggaaacgggccacgggcggcagtgccagaac

SEQ ID NO: 423053 - DNA, 120 bp, Artificial Sequence
  ENSG00000151067_13 (sequence is synthesized)
ggcacggtgtgcaagcccggctgggatggtcccaagcacggcatcaccaactttgacaactttgccttcgccatgctcacggtgttccagtgcatcaccatggagggctggacggacgtg

SEQ ID NO: 423054 - DNA, 120 bp, Artificial Sequence
  ENSG00000151067_14 (sequence is synthesized)
ctgtactgggtcaatgatgccgtaggaagggactggccctggatctattttgttacactaatcatcatagggtcattttttgtacttaacttggttctcggtgtgcttagcggagagttt

SEQ ID NO: 423055 - DNA, 120 bp, Artificial Sequence
  ENSG00000151067_15 (sequence is synthesized)
tccaaagagagggagaaggccaaggcccggggagatttccagaagctgcgggagaagcagcagctagaagaggatctcaaaggctacctggattggatcactcaggccgaagacatcgat

SEQ ID NO: 423056 - DNA, 120 bp, Artificial Sequence
  ENSG00000151067_16 (sequence is synthesized)
cctgagaatgaggacgaaggcatggatgaggagaagccccgaaacatgagcatgcccaccagtgagaccgagtccgtcaacaccgaaaacgtggctggaggtgacatcgagggagaaaac

SEQ ID NO: 423057 - DNA, 120 bp, Artificial Sequence
  ENSG00000151067_17 (sequence is synthesized)
tgcggggccaggctggcccaccggatctccaagtcaaagttcagccgctactggcgccggtggaatcggttctgcagaaggaagtgccgcgccgcagtcaagtctaatgtcttctactgg

SEQ ID NO: 423058 - DNA, 120 bp, Artificial Sequence
  ENSG00000151067_18 (sequence is synthesized)
ctggtgattttcctggtgttcctcaacacgctcaccattgcctctgagcactacaaccagcccaactggctcacagaagtccaagacacggcaaacaaggccctgctggccctgttcacg

SEQ ID NO: 423059 - DNA, 120 bp, Artificial Sequence
  ENSG00000151067_19 (sequence is synthesized)
gcagagatgctcctgaagatgtacagcctgggcctgcaggcctacttcgtgtccctcttcaaccgctttgactgcttcgtcgtgtgtggcggcatcctggagaccatcctggtggagacc

SEQ ID NO: 423060 - DNA, 120 bp, Artificial Sequence
  ENSG00000151067_20 (sequence is synthesized)
aagatcatgtccccactgggcatctccgtgctcagatgcgtccggctgctgaggattttcaagatcacgaggtactggaactccttgagcaacctggtggcatccttgctgaactctgtg

SEQ ID NO: 423061 - DNA, 120 bp, Artificial Sequence
  ENSG00000151067_21 (sequence is synthesized)
cgctccatcgcctccctgctccttctcctcttcctcttcatcatcatcttctccctcctggggatgcagctctttggaggaaagttcaactttgatgagatgcagacccggaggagcaca

SEQ ID NO: 423062 - DNA, 120 bp, Artificial Sequence
  ENSG00000151067_22 (sequence is synthesized)
ttcgataacttcccccagtccctcctcactgtgtttcagatcctgaccggggaggactggaattcggtgatgtatgatgggatcatggcttatggcggcccctcttttccagggatgtta

SEQ ID NO: 423063 - DNA, 120 bp, Artificial Sequence
  ENSG00000151067_23 (sequence is synthesized)
gtctgtatttacttcatcatcctcttcatctgtggaaactatatcctactgaatgtgttcttggccattgctgtggacaacctggctgatgctgagagcctcacatctgcccaaaaggag

SEQ ID NO: 423064 - DNA, 120 bp, Artificial Sequence
  ENSG00000151067_24 (sequence is synthesized)
gaggaagaggagaaggagagaaagaagctggccaggactgccagcccagagaagaaacaagagttggtggagaagccggcagtgggggaatccaaggaggagaagattgagctgaaatcc

SEQ ID NO: 423065 - DNA, 120 bp, Artificial Sequence
  ENSG00000151067_25 (sequence is synthesized)
atcacggctgacggagagtctccacccgccaccaagatcaacatggatgacctccagcccaatgaaaatgaggataagagcccctaccccaacccagaaactacaggagaagaggatgag

SEQ ID NO: 423066 - DNA, 120 bp, Artificial Sequence
  ENSG00000151067_26 (sequence is synthesized)
gaggagccagagatgcctgtcggccctcgcccacgaccactctctgagcttcaccttaaggaaaaggcagtgcccatgccagaagccagcgcgtttttcatcttcagctctaacaacagg

SEQ ID NO: 423067 - DNA, 120 bp, Artificial Sequence
  ENSG00000151067_27 (sequence is synthesized)
tttcgcctccagtgccaccgcattgtcaatgacacgatcttcaccaacctgatcctcttcttcattctgctcagcagcatttccctggctgctgaggacccggtccagcacacctccttc

SEQ ID NO: 423068 - DNA, 120 bp, Artificial Sequence
  ENSG00000151067_28 (sequence is synthesized)
aggaaccatattctgttttattttgatattgtttttaccaccattttcaccattgaaattgctctgaagatcctaggcaatgcagactatgtcttcactagtatctttacattagaaatt

SEQ ID NO: 423069 - DNA, 120 bp, Artificial Sequence
  ENSG00000151067_29 (sequence is synthesized)
atccttaagatgactgcttatggggctttcttgcacaagggttctttctgccggaactacttcaacatcctggacctgctggtggtcagcgtgtccctcatctcctttggcatccagtcc

SEQ ID NO: 423070 - DNA, 120 bp, Artificial Sequence
  ENSG00000151067_30 (sequence is synthesized)
agtgcaatcaatgtcgtgaagatcttgcgagtcctgcgagtactcaggcccctgagggccatcaacagggccaaggggctaaagcatgtggttcagtgtgtgtttgtcgccatccggacc

SEQ ID NO: 423071 - DNA, 120 bp, Artificial Sequence
  ENSG00000151067_31 (sequence is synthesized)
atcgggaacatcgtgattgtcaccaccctgctgcagttcatgtttgcctgcatcggggtccagctcttcaagggaaagctgtacacctgttcagacagttccaagcagacagaggcggaa

SEQ ID NO: 423072 - DNA, 120 bp, Artificial Sequence
  ENSG00000151067_32 (sequence is synthesized)
tgcaagggcaactacatcacgtacaaagacggggaggttgaccaccccatcatccaaccccgcagctgggagaacagcaagtttgactttgacaatgttctggcagccatgatggccctc

SEQ ID NO: 423073 - DNA, 120 bp, Artificial Sequence
  ENSG00000151067_33 (sequence is synthesized)
ttcaccgtctccaccttcgaagggtggccagagctgctgtaccgctccatcgactcccacacggaagacaagggccccatctacaactaccgtgtggagatctccatcttcttcatcatc

SEQ ID NO: 423074 - DNA, 120 bp, Artificial Sequence
  ENSG00000151067_34 (sequence is synthesized)
tacatcatcatcatcgccttcttcatgatgaacatcttcgtgggcttcgtcatcgtcacctttcaggagcagggggagcaggagtacaagaactgtgagctggacaagaaccagcgacag

SEQ ID NO: 423075 - DNA, 120 bp, Artificial Sequence
  ENSG00000151067_35 (sequence is synthesized)
tgcgtggaatacgccctcaaggcccggcccctgcggaggtacatccccaagaaccagcaccagtacaaagtgtggtacgtggtcaactccacctacttcgagtacctgatgttcgtcctc

SEQ ID NO: 423076 - DNA, 120 bp, Artificial Sequence
  ENSG00000151067_36 (sequence is synthesized)
atcctgctcaacaccatctgcctggccatgcagcactacggccagagctgcctgttcaaaatcgccatgaacatcctcaacatgctcttcactggcctcttcaccgtggagatgatcctg

SEQ ID NO: 423077 - DNA, 120 bp, Artificial Sequence
  ENSG00000151067_37 (sequence is synthesized)
aagctcattgccttcaaacccaagggttactttagtgatccctggaatgtttttgacttcctcatcgtaattggcagcataattgacgtcattctcagtgagactaatcactatttctgt

SEQ ID NO: 423078 - DNA, 120 bp, Artificial Sequence
  ENSG00000151067_38 (sequence is synthesized)
gatgcatggaatacatttgacgccttgattgttgtgggtagcattgttgatatagcaatcaccgaggtaaacccagctgaacatacccaatgctctccctctatgaacgcagaggaaaac

SEQ ID NO: 423079 - DNA, 120 bp, Artificial Sequence
  ENSG00000151067_39 (sequence is synthesized)
tcccgcatctccatcaccttcttccgcctgttccgggtcatgcgtctggtgaagctgctgagccgtggggagggcatccggacgctgctgtggaccttcatcaagtccttccaggccctg

SEQ ID NO: 423080 - DNA, 120 bp, Artificial Sequence
  ENSG00000151067_40 (sequence is synthesized)
ccctatgtggccctcctgatcgtgatgctgttcttcatctacgcggtgatcgggatgcaggtgtttgggaaaattgccctgaatgataccacagagatcaaccggaacaacaactttcag

SEQ ID NO: 423081 - DNA, 120 bp, Artificial Sequence
  ENSG00000151067_41 (sequence is synthesized)
accttcccccaggccgtgctgctcctcttcaggtgtgccaccggggaggcctggcaggacatcatgctggcctgcatgccaggcaagaagtgtgccccagagtccgagcccagcaacagc

SEQ ID NO: 423082 - DNA, 120 bp, Artificial Sequence
  ENSG00000151067_42 (sequence is synthesized)
acggagggtgaaacaccctgtggtagcagctttgctgtcttctacttcatcagcttctacatgctctgtgccttcctgatcatcaacctctttgtagctgtcatcatggacaactttgac

SEQ ID NO: 423083 - DNA, 120 bp, Artificial Sequence
  ENSG00000151067_43 (sequence is synthesized)
tacctgacaagggactggtccatccttggtccccaccacctggatgagtttaaaagaatctgggcagagtatgaccctgaagccaagggtcgtatcaaacacctggatgtggtgaccctc

SEQ ID NO: 423084 - DNA, 120 bp, Artificial Sequence
  ENSG00000151067_44 (sequence is synthesized)
ctccggcggattcagccgccactaggttttgggaagctgtgccctcaccgcgtggcttgcaaacgcctggtctccatgaacatgcctctgaacagcgacgggacagtcatgttcaatgcc

SEQ ID NO: 423085 - DNA, 120 bp, Artificial Sequence
  ENSG00000151067_45 (sequence is synthesized)
accctgtttgccctggtcaggacggccctgaggatcaaaacagaagggaacctagaacaagccaatgaggagctgcgggcgatcatcaagaagatctggaagcggaccagcatgaagctg

SEQ ID NO: 423086 - DNA, 120 bp, Artificial Sequence
  ENSG00000151067_46 (sequence is synthesized)
ctggaccaggtggtgccccctgcaggtgatgatgaggtcaccgttggcaagttctacgccacgttcctgatccaggagtacttccggaagttcaagaagcgcaaagagcagggccttgtg

SEQ ID NO: 423087 - DNA, 120 bp, Artificial Sequence
  ENSG00000151067_47 (sequence is synthesized)
ggcaagccctcccagaggaacgcgctgtctctgcaggctggcttgcgcacactgcatgacatcgggcctgagatccgacgggccatctctggagatctcaccgctgaggaggagctggac

SEQ ID NO: 423088 - DNA, 120 bp, Artificial Sequence
  ENSG00000151067_48 (sequence is synthesized)
aaggccatgaaggaggctgtgtccgctgcttctgaagatgacatcttcaggagggccggtggcctgttcggcaaccacgtcagctactaccaaagcgacggccggagcgccttcccccag

SEQ ID NO: 423089 - DNA, 120 bp, Artificial Sequence
  ENSG00000151067_49 (sequence is synthesized)
accttcaccactcagcgcccgctgcacatcaacaaggcgggcagcagccagggcgacactgagtcgccatcccacgagaagctggtggactccaccttcaccccgagcagctactcgtcc

SEQ ID NO: 423090 - DNA, 120 bp, Artificial Sequence
  ENSG00000151067_50 (sequence is synthesized)
accggctccaacgccaacatcaacaacgccaacaacaccgccctgggtcgcctccctcgccccgccggctaccccagcacggtcagcactgtggagggccacgggccccccttgtcccct

SEQ ID NO: 423091 - DNA, 120 bp, Artificial Sequence
  ENSG00000151067_51 (sequence is synthesized)
gccatccgggtgcaggaggtggcgtggaagctcagctccaacaggtgccactcccgggagagccaggcagccatggcgggtcaggaggagacgtctcaggatgagacctatgaagtgaag

SEQ ID NO: 423092 - DNA, 120 bp, Artificial Sequence
  ENSG00000151067_52 (sequence is synthesized)
atgaaccatgacacggaggcctgcagtgagcccagcctgctctccacagagatgctctcctaccaggatgacgaaaatcggcaactgacgctcccagaggaggacaagagggacatccgg

SEQ ID NO: 423093 - DNA, 120 bp, Artificial Sequence
  ENSG00000151067_53 (sequence is synthesized)
caatctccgaagaggggtttcctccgctctgcctcactaggtcgaagggcctccttccacctggaatgtctgaagcgacagaaggaccgagggggagacatctctcagaagacagtcctg

SEQ ID NO: 423094 - DNA, 120 bp, Artificial Sequence
  ENSG00000151067_54 (sequence is synthesized)
cccttgcatctggttcatcatcaggcattggcagtggcaggcctgagccccctcctccagagaagccattcccctgcctcattccctaggccttttgccaccccaccagccacacctggc

SEQ ID NO: 423095 - DNA, 120 bp, Artificial Sequence
  ENSG00000151067_55 (sequence is synthesized)
agccgaggctggcccccacagcccgtccccaccctgcggcttgagggggtcgagtccagtgagaaactcaacagcagcttcccatccatccactgcggctcctgggctgagaccaccccc

SEQ ID NO: 423096 - DNA, 120 bp, Artificial Sequence
  ENSG00000151067_56 (sequence is synthesized)
ggtggcgggggcagcagcgccgcccggagagtccggcccgtctccctcatggtgcccagccaggctggggccccagggaggcagttccacggcagtgccagcagcctggtggaagcggtc

SEQ ID NO: 423097 - DNA, 120 bp, Artificial Sequence
  ENSG00000151067_57 (sequence is synthesized)
ccatagaggagatggagagcgcggccgacaacatcctcagcgggggcgccccacagagccccaatggcgccctcttaccctttgtgaactgcagggacgcggggcaggaccgagccgggg

SEQ ID NO: 423098 - DNA, 120 bp, Artificial Sequence
  ENSG00000151067_58 (sequence is synthesized)
gcgaagaggacgcgggctgtgtgcgcgcgcggggtcgaccgagtgaggaggagctccaggacagcagggtctacgtcagcagcctgtagtgggcgctgccagatgcgggcttttttttat

SEQ ID NO: 423099 - DNA, 120 bp, Artificial Sequence
  ENSG00000151067_59 (sequence is synthesized)
ttgtttcaatgttcctaatgggttcgtttcagaagtgcctcactgttctcgtgacctggagttaaccggaacagcgtcttcattcatttctgttgggaccagacgcggagcctgggtgcg

SEQ ID NO: 423100 - DNA, 120 bp, Artificial Sequence
  ENSG00000151067_60 (sequence is synthesized)
ttgggaccagacgcggagcctgggtgcgcgagccgccctccgggaggaaggcgcccggctgcgtctgcagaggcggggagaggaggcggcgagggtcccggggcgcgaggaaggcgcctg

SEQ ID NO: 423101 - DNA, 120 bp, Artificial Sequence
  ENSG00000151067_61 (sequence is synthesized)
cggccgcgcctccgcggggagagcaccccggcttcccgcgcgccctcaccaaaaggaccctacagcaaacgggtgtctttcgactctgcttgtagaaaccatttgcacatattctgtacg

SEQ ID NO: 423102 - DNA, 120 bp, Artificial Sequence
  ENSG00000151067_62 (sequence is synthesized)
agcctcgctgtctccctagagccagggccctgcggatttggagaagggagcggggcaggacttccaggaggaccccaacccggcccggagagggaggaggaggcctccaggggcgcggag

SEQ ID NO: 423103 - DNA, 120 bp, Artificial Sequence
  ENSG00000151067_63 (sequence is synthesized)
ctccaggggcgcggagctctggggatgggcgtcgggccggcagtggtgcggctcactccgtccctgcccacctgcgacgggatcccccgaccggcacgggccacgccgagctcccggcca

SEQ ID NO: 423104 - DNA, 120 bp, Artificial Sequence
  ENSG00000151067_64 (sequence is synthesized)
cagcgcgagggaggagctgcgccgccggctccgcccaaccaggtggtgctgagcttccgctgagcgctcttttgttttgtggtttgacacttttcttgacagcatgttgcagtttctttt

SEQ ID NO: 423105 - DNA, 120 bp, Artificial Sequence
  ENSG00000151067_65 (sequence is synthesized)
cggttttggttttttttaaatgttttattttgctttcccagcgggaggggaggaagaagagtgtttacaaagtcctgtagccccctcacctttctgttttcacttttgccaatgtacatc

SEQ ID NO: 423106 - DNA, 120 bp, Artificial Sequence
  ENSG00000151067_66 (sequence is synthesized)
gggtttggttttcttgtattatttaaacggttgtggtttcctttttccacggaggttcaatagaagccgctgcaggagagttttaccaaccattgtgtatgcccaataatttgttatcat

SEQ ID NO: 423107 - DNA, 120 bp, Artificial Sequence
  ENSG00000151067_67 (sequence is synthesized)
ttccttaggtagtaacctatttttgttctggtttggttcggttatctaatggaaaggtaactggcaatgcacttgatgtggtcttgcacatgtgggtgatagagttgggttcctttttat

SEQ ID NO: 423108 - DNA, 120 bp, Artificial Sequence
  ENSG00000151067_68 (sequence is synthesized)
gctgggtgtacaggtgggtttgggagagaggagcatgcgcgagagagtctccgagtgtgtgcgacgcgtgtgtgtgtggtgggttgtctgtgtgcatatgtcctgcccgtgtatatgcac

SEQ ID NO: 423109 - DNA, 120 bp, Artificial Sequence
  ENSG00000151067_69 (sequence is synthesized)
ccacaccatgtgcccgtgcacaccagtgactacgcagtcccccctttctggtttagctgtgggaagatctgaatctggggccgtttgaaagcaaaaacaaaccactgtctctgcttctga

SEQ ID NO: 423110 - DNA, 120 bp, Artificial Sequence
  ENSG00000151067_70 (sequence is synthesized)
aacgggaatcagtaactctttgcattttctgtcccacaagatatgcaaaaacaatgcaataatattcatttaaaaatacaattgtgagttgtgttggcattaaaactgtattttaaaaaa

SEQ ID NO: 423111 - DNA, 120 bp, Artificial Sequence
  ENSG00000151067_71 (sequence is synthesized)
agacagaaatttaagggaaaaacacaagaaggcattttgcttcaatatattccgtgtaatgttttattgcattgataatgtttctgttgaagaaaccgttatacttgaattcaggtcagt

SEQ ID NO: 423112 - DNA, 120 bp, Artificial Sequence
  ENSG00000151067_72 (sequence is synthesized)
ttcagtatttttcaaatatttttttaaaactgaattgcaattgtgccaagcgaatataatgaattgaattaagttggttttcggattcacttcttgtatattttgctgcatgtaaagtaa

SEQ ID NO: 423113 - DNA, 120 bp, Artificial Sequence
  ENSG00000151067_73 (sequence is synthesized)
atcattttgtatttggagtgtgacaagctttacctttgaactcaagtgcttttctatatgtggttgggggaaagggaacaagttttctttagtttgcacaatgagcaaaggtatcaccag

SEQ ID NO: 423114 - DNA, 120 bp, Artificial Sequence
  ENSG00000151067_74 (sequence is synthesized)
tgtagtcattattctgctctccacaaacaggtttggacattactgttttgcatatcttgtgtttgcttacatttccctcaatttttccaaaatcgtttgctgggtatgtttgtaccgcct

SEQ ID NO: 423115 - DNA, 120 bp, Artificial Sequence
  ENSG00000151067_75 (sequence is synthesized)
cttgctgtgagagaccaggacctattttattccagtcttcactctgtccactctgctctggtcatctgatttggtacttctccaagaacagcccttcactgtgaggtgcagggaggcgtt

SEQ ID NO: 423116 - DNA, 120 bp, Artificial Sequence
  ENSG00000151067_76 (sequence is synthesized)
ctgatgagccctcagtcactgggccgtcatccgcatcccccatggaagaggtagctggctttcccttcccttccaccacacggaattttctctttggcttccttaggaaagtgtacacta

SEQ ID NO: 423117 - DNA, 120 bp, Artificial Sequence
  ENSG00000151067_77 (sequence is synthesized)
accgggaggataaaattaaagtcaggctgcttggagggaggggcatcctcacttccggattcttgttgctctacccaacaaggacagcaggggctcgagaaaggaactggtgaaaccctg

SEQ ID NO: 423118 - DNA, 120 bp, Artificial Sequence
  ENSG00000151067_78 (sequence is synthesized)
atccatctgaaagtcaactctgcgtgctcctttctccatcccttcctcactctggagcagcctttccttcaggcttgccctaatgtttgggctgccggggagggggccaggacaagggaa

SEQ ID NO: 423119 - DNA, 120 bp, Artificial Sequence
  ENSG00000151067_79 (sequence is synthesized)
gaggcatccggagctcacagtgggggtgggaacagatttttgtgggggcatctctaatgctcacttatatctccctagaacatcactcttttggtgctgtgtccttcaaatgtatgtcaa

SEQ ID NO: 423120 - DNA, 120 bp, Artificial Sequence
  ENSG00000151067_80 (sequence is synthesized)
cagtggtggctgaaaagggactgctttggggaaaacaggacccaaccattcacccagaattgacccattaaatctcttccagtcctagtgttccctgagcccctcttggcacatatataa

SEQ ID NO: 423121 - DNA, 120 bp, Artificial Sequence
  ENSG00000151067_81 (sequence is synthesized)
gtaagctagaaattacaataagggacagtccattcctctatgacagcttgctggactgattcatgacaaagtggagaaatgtactcaatactccccggttaacacagtctagaaacagag

SEQ ID NO: 423122 - DNA, 120 bp, Artificial Sequence
  ENSG00000151067_82 (sequence is synthesized)
tttctttatggatatccacacccaagtcatccaaactttcttgattccttttcactgccatcaaggtcctctagaaattgagtttaggtatcatcctttgaaaagttcccaagatttcta

SEQ ID NO: 423123 - DNA, 120 bp, Artificial Sequence
  ENSG00000151067_83 (sequence is synthesized)
ccaggaggtacacacaggcgttccctgtctagggcaggaggactatcctagcttgaccttctgatccactagaataagactggcgtatgatgcctgtcatcagaacagactggcacaagt

SEQ ID NO: 423124 - DNA, 120 bp, Artificial Sequence
  ENSG00000151067_84 (sequence is synthesized)
agtgacatcaatgaaccacagcacaatcttccaagtgatgtctactctccacctaaaatggaattttccccatgaccttgtaaaacataattgtcacatcttccatacccctcctgacag

SEQ ID NO: 423125 - DNA, 120 bp, Artificial Sequence
  ENSG00000151067_85 (sequence is synthesized)
cccccaagtgtcaggagaaaacagtcaggggctaagggcccaagggacttgaagaaacaacagtttaaggtctgcagtttggtcaacttaattcttgtcctccgaccagccctgcctctt

SEQ ID NO: 423126 - DNA, 120 bp, Artificial Sequence
  ENSG00000151067_86 (sequence is synthesized)
tcatttccagaccttggagaatttttcccagctttgattcagaaggtactagttataacccctttccttcttcttaatccaataggcctcactctcactgggaaatccactcaaaggaac

SEQ ID NO: 423127 - DNA, 120 bp, Artificial Sequence
  ENSG00000151067_87 (sequence is synthesized)
aaggcaatgtctctcattctatttcccagttccaaattccaggtgcttgtctggagtgaagctacccgttactttctcccagcttttctccacccagcatgtctcctgcccatgcagctg

SEQ ID NO: 423128 - DNA, 120 bp, Artificial Sequence
  ENSG00000151067_88 (sequence is synthesized)
aagacagtggggcaacctcaggagaagcagacctttccatgcccaagttcatctcctgagcaacagtgacacctagaaaatgaggactttggaagtcacccaaaagatggtggctacttt

SEQ ID NO: 423129 - DNA, 120 bp, Artificial Sequence
  ENSG00000151067_89 (sequence is synthesized)
atggagtcctgaagatacacagccaccactcctaaaggcaaagaaagaaaacacgaatgtaggtcagggatagagtggaaccctggtcatcggggtttttagcctcatcgtgggaaaggt

SEQ ID NO: 423130 - DNA, 120 bp, Artificial Sequence
  ENSG00000151067_90 (sequence is synthesized)
ggtaaaggaggatgatggcatctccatccctagaggccaagaattgaaatatcattgtcaaggattagaaacaattcagcaaagaggccacaaaaagggcctgctgactcccagaagacc

SEQ ID NO: 423131 - DNA, 120 bp, Artificial Sequence
  ENSG00000151067_91 (sequence is synthesized)
tctttaaaccccaggggaggcaaatacttgctgatggagtctgggccgtttccatattttaaagaagacctgcctctggggcaaatgtcagcacagagaggactgggaggagaatggagg

SEQ ID NO: 423132 - DNA, 120 bp, Artificial Sequence
  ENSG00000151067_92 (sequence is synthesized)
caagaaaagggcatattttgactccctctgtgcctcttcccagttcatggaaggatgtgttcagcttacccacccacagtgaccagtgtggtggagccgctgacatctcaaggatctatt

SEQ ID NO: 423133 - DNA, 120 bp, Artificial Sequence
  ENSG00000151067_93 (sequence is synthesized)
tgggaaggtgagaagagtactcattccatctgggggtgttgttccagccacatcagcctacctggtgggatgtgggggtgtctgccaccctgtcccccctctgctgatgtccctcccctc

SEQ ID NO: 423134 - DNA, 120 bp, Artificial Sequence
  ENSG00000151067_94 (sequence is synthesized)
aggctgtccaggtgccacctgacacaggctgctgtgcaaagacaggcggggaagcccaaacctcactcccagggaggccctcagccgccagagtccaggttctccagaggctacgatttg

SEQ ID NO: 423135 - DNA, 120 bp, Artificial Sequence
  ENSG00000151067_95 (sequence is synthesized)
aggaggttgagggggaagacaggagggaaagaaaagtcctacaactgtcaggaatggggcacctttccctgtccctaagcaaagctccctcttcccactgccctccccagccccagctcc

SEQ ID NO: 423136 - DNA, 120 bp, Artificial Sequence
  ENSG00000151067_96 (sequence is synthesized)
ctgtcctccccaacacctagtgagaaagacggtgcgtggaagggagtcccatgggcagatgcttacacgacctctttgtgaagcctcttctgggtttaacttcattcatcaatttattct

SEQ ID NO: 423137 - DNA, 120 bp, Artificial Sequence
  ENSG00000151067_97 (sequence is synthesized)
tatgtcaaagcaatgaaacttttctttctggagccagataccaatacaacaggtgaacgggtttctgccacatctctacattgacgggggatgcttgaacaacccccctcactacacaga

SEQ ID NO: 423138 - DNA, 120 bp, Artificial Sequence
  ENSG00000151067_98 (sequence is synthesized)
cacacaccgttaaggcacaagggctggggttgagctctagatgagggactttcctgctcctgcaagggtgagcactgtatacacagacaaggagggtgcagtagagtgactcccttggat

SEQ ID NO: 423139 - DNA, 120 bp, Artificial Sequence
  ENSG00000151067_99 (sequence is synthesized)
ggaagtagtaccatcagaacctactattattatgacataaattctatttacatacattgagagaatactacaatcaacactttttcctgggatgactttaagaggtttgagccacagcac

SEQ ID NO: 423140 - DNA, 120 bp, Artificial Sequence
  ENSG00000151067_100 (sequence is synthesized)
ctgaagtggcaaagatccatggtctttgtagggtattagagaactcttccagtcacctctgaaagcactctagatcttgcagctgagtggatgaagtgtaacaaatctgttgcacgctga

SEQ ID NO: 423141 - DNA, 120 bp, Artificial Sequence
  ENSG00000151067_101 (sequence is synthesized)
gaggagtcagaattagcatttttcatgaaagttccccacgtctctactaagaatgaggaagaaaagactaagactaggtaattacacagaggcttgaaatgttacatcaccagagccaag

SEQ ID NO: 423142 - DNA, 120 bp, Artificial Sequence
  ENSG00000151067_102 (sequence is synthesized)
tcctctcccttcagatcagttactggctgctacacagggacacccccaccttttcagggcatcccatgcactccacttctcaggatctaaggaatttgactttgtagggatcccagaaag

SEQ ID NO: 423143 - DNA, 120 bp, Artificial Sequence
  ENSG00000151067_103 (sequence is synthesized)
ggcactgtgccacttcccctggtgtgaatcagacatacattgtacattcatttctaaaattcactcatgcacctcaaaccaaggtcattatccaaaaaaaaaaaaaaaaagctctgggtg

SEQ ID NO: 423144 - DNA, 120 bp, Artificial Sequence
  ENSG00000151067_104 (sequence is synthesized)
gaagagtttgtaagttttaagagagggtcatttctatgtgaggaaatgcagaaatggacagaatgattcttattcactgtttgggtctggagaattcccattgtggaaatcttagagatc

SEQ ID NO: 423145 - DNA, 120 bp, Artificial Sequence
  ENSG00000151067_105 (sequence is synthesized)
tcaagtttattaccaagggaataaggaaaaaaaggtgagcaggcaccaggccaagcagtggctcccttgccaaggaacctgaggctgcaggtttcagggacccccttgaagaaacctctc

SEQ ID NO: 423146 - DNA, 120 bp, Artificial Sequence
  ENSG00000151067_106 (sequence is synthesized)
ctggccattggccaggagaaaagagaagtctctcctgtagagtcacaagagaagcaaaagagggtgggtcactgggtcctggacatagcccccaaccccaagacttcccaatatggagaa

SEQ ID NO: 423147 - DNA, 120 bp, Artificial Sequence
  ENSG00000151067_107 (sequence is synthesized)
actacaccaatgtttaaaaggggaaaaggaaagaacttgtacatcaagggaagatgatttgtaaacacacagtcctgtgcagaaagatccccttcaggaggtgtctccagcatcccaaag

SEQ ID NO: 423148 - DNA, 120 bp, Artificial Sequence
  ENSG00000151067_108 (sequence is synthesized)
ctgtgcgcaccttctcttttcctgcctcaggccacctatgcatccagctgcagcccatacccacacctgaaatccatctcttgaatcccagccaggttatataccaccccattgccatgt

SEQ ID NO: 423149 - DNA, 120 bp, Artificial Sequence
  ENSG00000151067_109 (sequence is synthesized)
cctgtcctggccagaatgcatgctgttcccccaagcctcgtgggagtgaggccatgggaaacagagatgagcatgtctggacaagtctgtgatggtagtggatgagaataacccatggca

SEQ ID NO: 423150 - DNA, 120 bp, Artificial Sequence
  ENSG00000151067_110 (sequence is synthesized)
aaacacgcacattcattaagaaatagggcgacagattccccgttggtgaagcactgaaaggtctattactctcataatattgctgttttattttaatccaccagagctaccatgcaaaac

SEQ ID NO: 423151 - DNA, 120 bp, Artificial Sequence
  ENSG00000151067_111 (sequence is synthesized)
tttcctcctgtgaaacgctccagataaagctcctctaatctccccttccctcatgtcctccagctcaaacccaccttcatcccccaaaccaatctgtatcatgcctgttatcagagaggc

SEQ ID NO: 423152 - DNA, 120 bp, Artificial Sequence
  ENSG00000151067_112 (sequence is synthesized)
acagaaagatgggcagtgcctccgttgtcaccattccccacacccctacacacccccacaccctcccctccaggctccacgacttcacagtcttactgttgtaaatatcattgtacagtt

SEQ ID NO: 423153 - DNA, 120 bp, Artificial Sequence
  ENSG00000151067_113 (sequence is synthesized)
tgtaatcctcaaataatcccattgtcagaggcctcgcctgatgggccttctcaccctcgagaaaggccagggaatctagaaggggcaacccttcaaggagagcttcagggtcatctctgt

SEQ ID NO: 423154 - DNA, 120 bp, Artificial Sequence
  ENSG00000151067_114 (sequence is synthesized)
gtgagacactattgtatattcctgtaagattgcatttttatctaaggaatgatgttatttaaaaaacaaacaaaaaacacaaaaaataagaattgcaaataaatttcttaacaatgtcta

SEQ ID NO: 423155 - DNA, 120 bp, Artificial Sequence
  ENSG00000151067_115 (sequence is synthesized)
tggaagctcagctccaacagggaaaggcacgttccgatgtgtgaggatctggagctcaggagggattcaggctcagcagggactcaggctcactgccttctgctcaggagagcaaacccc

SEQ ID NO: 423156 - DNA, 120 bp, Artificial Sequence
  ENSG00000151067_116 (sequence is synthesized)
ctgtactggatgcaggacgctatgggctatgagttaccctgggtgtattttgtcagtctggtcatctttggatcctttttcgttctaaatctggttctcggtgtgttgagcggagagttt

SEQ ID NO: 423157 - DNA, 120 bp, Artificial Sequence
  ENSG00000151067_117 (sequence is synthesized)
ctcagctccaacaggatgcactgctgtgacatgctggatggtgggaccttccctcccgccctgggcccccgcagggctcctccctgtctgcatcagcagctccagggttccctggcgggg

SEQ ID NO: 423158 - DNA, 120 bp, Artificial Sequence
  ENSG00000151067_118 (sequence is synthesized)
ctgagagaggacacaccctgcatcgtgcctggccacgcttcactgtgctgctcttccagagtaggagagtggctcccagcaggctgcacagccccccagcatgccaggtgccactcccgg

SEQ ID NO: 423159 - DNA, 120 bp, Artificial Sequence
  ENSG00000151067_119 (sequence is synthesized)
ggaaagtgctggagtcccaagcagctggggcatgaggtccttcagggggcagcccaccaggacccccaaatccacgcatacctacagctgggagagaggccagccaccaacccacatcct

SEQ ID NO: 423160 - DNA, 120 bp, Artificial Sequence
  ENSG00000151067_120 (sequence is synthesized)
cggagagtgctgggctccacttaggacacaggactgtctgcccagacaaacgggagacaggctaggactgcttcctcagcagtgcagaggaggggttcccagggcagctggctctgggcc

SEQ ID NO: 423161 - DNA, 120 bp, Artificial Sequence
  ENSG00000151067_121 (sequence is synthesized)
tagaagattccaaagcctatggtagttcctgatggagtcgtctgtcctccatccagggcattaagaactaggaatgaaggggaatcggggagaataaaaacacaggaccacagcccagcg

SEQ ID NO: 423162 - DNA, 120 bp, Artificial Sequence
  ENSG00000151067_122 (sequence is synthesized)
caaaccctggcctgccttccgccactgccactgaggtctgtatttctcggaggggccctcctgttctcacccccctcttgctgtgctaactgcacctcctgttgccgacgggttccagaa

SEQ ID NO: 423163 - DNA, 120 bp, Artificial Sequence
  ENSG00000151067_123 (sequence is synthesized)
ggtctcaggacagctgggtggggcagaggttatccttgacatctccctccagccccccttctcattgctggagcctcctgttgccctcggagtcccttccagcttcttcccactttcggc

SEQ ID NO: 423164 - DNA, 120 bp, Artificial Sequence
  ENSG00000151067_124 (sequence is synthesized)
aacagcccccacccccaacaaacctaatgctaccaagatgccttgtttcaaaatgaagtgattccagcacagtcattcatgctgggtggtagcaactcagtgagctgcccttctaataga

SEQ ID NO: 423165 - DNA, 120 bp, Artificial Sequence
  ENSG00000151067_125 (sequence is synthesized)
gtgatgagcagctgtgatggttttcaggatggatccaagaggccagcaatggctcaagcttcctgggagctctgcccaacactcaggagttaacatggtccagctgaacatacccaatgc

SEQ ID NO: 423166 - DNA, 120 bp, Artificial Sequence
  ENSG00000151067_126 (sequence is synthesized)
gatagctggagaataaccaagtgctgtgcagggctacagaggaaggggaagagataatccctgtccatgaaaaataacaagcttcatggggcacacagcccaggctcaaatgaatggcat

SEQ ID NO: 423167 - DNA, 120 bp, Artificial Sequence
  ENSG00000151067_127 (sequence is synthesized)
tttttcactcgatggagaactgcgttcagatcacatagatgcatggaatgtgggagagaagtgagacgtgtgtttggcatgtgcaggagccctgcagagctcacatcccgagtgctgttt

SEQ ID NO: 423168 - DNA, 120 bp, Artificial Sequence
  ENSG00000151067_128 (sequence is synthesized)
tcacatcccgagtgctgttttactctttattcaaatcagcacctgtctcattccggcctgttttccaaaagaatattccagttaggtggtggtgagctctgtgtgtgtgtgtgtgtgtgt

SEQ ID NO: 423169 - DNA, 120 bp, Artificial Sequence
  ENSG00000151067_129 (sequence is synthesized)
atcaggagcccaattctaggtgtcataattagatccacaactaacatttcattaagagagtagggctttgatagaaaaccaccctaggaccacaagcaaataaaagagcatgtacccaaa

SEQ ID NO: 423170 - DNA, 120 bp, Artificial Sequence
  ENSG00000151067_130 (sequence is synthesized)
acataggcagggagcagagcagggaagacgaaaatacaaggttgaaaagaatcaagtaagaaggtgttttgttttgttttttagaattctaaaacttaaaaggaattttactgtaactta

SEQ ID NO: 423171 - DNA, 120 bp, Artificial Sequence
  ENSG00000151067_131 (sequence is synthesized)
aacttgcagcgatacgatacggccatgtcaacttttgtggcactgaaatgttactgcaggaatagcttctgggttttaaaaaattataagagatcatgagcaggataattatttagcttt

SEQ ID NO: 423172 - DNA, 120 bp, Artificial Sequence
  ENSG00000151067_132 (sequence is synthesized)
gcagaatgaggggaagagggaaaaaggcatcggtgaaggaccatccctgctccgatggtcagtgccccaactcctacacctgcccagagctgaaccaggccaactccaggaaacactctc

SEQ ID NO: 423173 - DNA, 120 bp, Artificial Sequence
  ENSG00000151067_133 (sequence is synthesized)
agctctcagtgttgaccctggctggcatgcacaagctgcagattcctcgctgagctgaacctctgagcctctcctaggagaggcaggtgatggtctttctcctatgtcccatcctctagt

SEQ ID NO: 423174 - DNA, 120 bp, Artificial Sequence
  ENSG00000151067_134 (sequence is synthesized)
acataacctgttaatagaagaaactatgctcatagactggcagaccaaacctctccaggcccagccccccagatccactcaggcctctgttccaccctcctcccatttcatcagccacac

SEQ ID NO: 423175 - DNA, 120 bp, Artificial Sequence
  ENSG00000151067_135 (sequence is synthesized)
agaccaacctcatataaaacattcagccagggctggatttgctcagggctcaggactgagggctccagcccatgggcactcctgttccctgcctaagaggctatggcattgctccttaca

SEQ ID NO: 423176 - DNA, 120 bp, Artificial Sequence
  ENSG00000151067_136 (sequence is synthesized)
tgctctggggcaggaagaacaattaccagcaaatttctctgctttgttccttgtgtaagggcaagaagattaggcctgctgctgaatgaggcagggtcagaattcctgttctttggatca

SEQ ID NO: 423177 - DNA, 120 bp, Artificial Sequence
  ENSG00000151067_137 (sequence is synthesized)
tctgtgcccttcctagccagtcacccccattgtcctcagtggtggaggagcagacactggtatgagccacaccttccaccctgggcctctgtagatgggtcagaatcacgggtatccact

SEQ ID NO: 423178 - DNA, 120 bp, Artificial Sequence
  ENSG00000151067_138 (sequence is synthesized)
ggccgggattcaccaccaggacagctgcttctgagggaggctataagagcaactgagcagcccccaggctaccataacaccttttggagaaggatgagaaggaacgagttctaggagcat

SEQ ID NO: 423179 - DNA, 120 bp, Artificial Sequence
  ENSG00000151067_139 (sequence is synthesized)
catgcagttacagacttgagacaatctctccagcttactgagccttcccctccctcctttggtagttttcccagaggcaacacagatcaacaggaggccaagagcaagaatccctggcca

SEQ ID NO: 423180 - DNA, 120 bp, Artificial Sequence
  ENSG00000151067_140 (sequence is synthesized)
tatcttctattttcattcaagtttttactggtctcaagattaattgggggtgggggagggtccagctcggcctttgaatccatgttcattgaggagatatccacagccttctttgaatga

SEQ ID NO: 423181 - DNA, 120 bp, Artificial Sequence
  ENSG00000151067_141 (sequence is synthesized)
atattcactcacactttggattccatatcatgtgctacatgtatatcatcgcacgtcattctcaaaacgtccctttaaagtaggtattagcatccctctgtggagaagggggaagggagg

SEQ ID NO: 423182 - DNA, 120 bp, Artificial Sequence
  ENSG00000151067_142 (sequence is synthesized)
ctcaaacaattaagtgcccaggattaattgatccactgctaagaactggcagaacggagactggaatccggcacctctgacttcactgtattttccaccacactgaggttaactatcatt

SEQ ID NO: 423183 - DNA, 120 bp, Artificial Sequence
  ENSG00000151067_143 (sequence is synthesized)
ttcccatgtcaagtgttctgcgggtattttttagcaagagggaaacaaccttggagggacttaaaagataagacaatattcctacaatgcagattcttctgtcactcaaagaatgcctgg

SEQ ID NO: 423184 - DNA, 120 bp, Artificial Sequence
  ENSG00000151067_144 (sequence is synthesized)
ggatcccagctgattttcatagaggaagtctcctaagggacatcctttggtgatagaacggtggtttcctgccttctccagagaagcaagtacactctttttcaccttcctgtacaagtc

SEQ ID NO: 423185 - DNA, 120 bp, Artificial Sequence
  ENSG00000151067_145 (sequence is synthesized)
ccatttaggaggacagatcttgtcctgacctagagaggacccctgcgttgccctgacaccttccttagggtacacggtgtctgtgcccacacatggtcctattccaagccctgcagccca

SEQ ID NO: 423186 - DNA, 120 bp, Artificial Sequence
  ENSG00000151067_146 (sequence is synthesized)
ggagctctgacagttcgccacccacagcagcatgaccagctgaggccaggagtgcagtcactgcctagccgagcctcagtctcggatgactcctctcagtggggaaactggcatcatttt

SEQ ID NO: 423187 - DNA, 120 bp, Artificial Sequence
  ENSG00000151067_147 (sequence is synthesized)
catacagtgtcacgagacatatggtttaaatatttcaaagccttgagtcattccacagttgactcagatgtgtttctgacgatgtctgaggcagtctggagagcctgcagtggactttct

SEQ ID NO: 423188 - DNA, 120 bp, Artificial Sequence
  ENSG00000151067_148 (sequence is synthesized)
gaatcatgcctcctgagcacgggagacatacagacaaccttccctgggaagtgcatgaaattgacacctgcaggagcctccgtcctccgtctaaaagacactccacctaaatcctgccaa

SEQ ID NO: 423189 - DNA, 120 bp, Artificial Sequence
  ENSG00000151067_149 (sequence is synthesized)
tcaaggaacaagccagtttcctaggaagtaaccattgcgagtggtctaaactgtaaagtgcctcctaatttcctctgtccctggttttctattgtgagaagatggggcaagataacagag

SEQ ID NO: 423190 - DNA, 120 bp, Artificial Sequence
  ENSG00000151067_150 (sequence is synthesized)
acttttacccaagaaggaagacagccatcctgggcccatttgcatttcacattccagggtacatctatggtgtaaagagaaaggaaaatggatctttccctgtgaatttccctaaagggg

SEQ ID NO: 423191 - DNA, 120 bp, Artificial Sequence
  ENSG00000151067_151 (sequence is synthesized)
ctctggcaagagggggataaaggtcaccacccagttaggagcatcatggagcacagctgagtccctggattcttactgagctatgttcttcattcacaaatagactccaggtaaagcagc

SEQ ID NO: 423192 - DNA, 120 bp, Artificial Sequence
  ENSG00000151067_152 (sequence is synthesized)
tccaaaattttcaggcagaaaaccaaactggaaaaacttgaagctctggaagaatatccagctggatctggcccaagaaccagtggcttctaaccatgacctgaatccatgacaactttc

SEQ ID NO: 423193 - DNA, 120 bp, Artificial Sequence
  ENSG00000151067_153 (sequence is synthesized)
atttcccaccattaagtaggactctgtgctgcactttttatttcactggcatggttgtttgtgtatgacccagatgagcatcagcatttgctgtgaaaggatggctaggaaccaaggatg

SEQ ID NO: 423194 - DNA, 120 bp, Artificial Sequence
  ENSG00000151067_154 (sequence is synthesized)
ttgaagacagtctgaagttgtcactgcttatgtttcgtctctgcaactggctggttggttggtccatcagccggtcaacttgtattcttgcttcattctttcattgttttcatggtcatg

SEQ ID NO: 423195 - DNA, 120 bp, Artificial Sequence
  ENSG00000151067_155 (sequence is synthesized)
gatgttcccaatttcttcatttctgtgtgttctcctcaccactccatggaaaataaatttactcaagtaagtccctgccttaaatctaaccatcccactccttaaattcatactctgttc

SEQ ID NO: 423196 - DNA, 120 bp, Artificial Sequence; identical to SEQ ID NO: 282854
  ENSG00000151079_0 (sequence is synthesized)

SEQ ID NO: 423197 - DNA, 120 bp, Artificial Sequence; identical to SEQ ID NO: 282855
  ENSG00000151079_1 (sequence is synthesized)

SEQ ID NO: 423198 - DNA, 120 bp, Artificial Sequence; identical to SEQ ID NO: 282856
  ENSG00000151079_2 (sequence is synthesized)

SEQ ID NO: 423199 - DNA, 120 bp, Artificial Sequence; identical to SEQ ID NO: 282857
  ENSG00000151079_3 (sequence is synthesized)

SEQ ID NO: 423200 - DNA, 120 bp, Artificial Sequence; identical to SEQ ID NO: 282858
  ENSG00000151079_4 (sequence is synthesized)

SEQ ID NO: 423201 - DNA, 120 bp, Artificial Sequence; identical to SEQ ID NO: 282859
  ENSG00000151079_5 (sequence is synthesized)

SEQ ID NO: 423202 - DNA, 120 bp, Artificial Sequence; identical to SEQ ID NO: 282860
  ENSG00000151079_6 (sequence is synthesized)

SEQ ID NO: 423203 - DNA, 120 bp, Artificial Sequence; identical to SEQ ID NO: 282861
  ENSG00000151079_7 (sequence is synthesized)

SEQ ID NO: 423204 - DNA, 120 bp, Artificial Sequence; identical to SEQ ID NO: 282862
  ENSG00000151079_8 (sequence is synthesized)

SEQ ID NO: 423205 - DNA, 120 bp, Artificial Sequence; identical to SEQ ID NO: 282863
  ENSG00000151079_9 (sequence is synthesized)

SEQ ID NO: 423206 - DNA, 120 bp, Artificial Sequence; identical to SEQ ID NO: 282864
  ENSG00000151079_10 (sequence is synthesized)

SEQ ID NO: 423207 - DNA, 120 bp, Artificial Sequence; identical to SEQ ID NO: 282865
  ENSG00000151079_11 (sequence is synthesized)

SEQ ID NO: 423208 - DNA, 120 bp, Artificial Sequence; identical to SEQ ID NO: 282866
  ENSG00000151079_12 (sequence is synthesized)

SEQ ID NO: 423209 - DNA, 120 bp, Artificial Sequence; identical to SEQ ID NO: 282867
  ENSG00000151079_13 (sequence is synthesized)

SEQ ID NO: 423210 - DNA, 120 bp, Artificial Sequence; identical to SEQ ID NO: 282868
  ENSG00000151079_14 (sequence is synthesized)

SEQ ID NO: 423211 - DNA, 120 bp, Artificial Sequence; identical to SEQ ID NO: 282869
  ENSG00000151079_15 (sequence is synthesized)

SEQ ID NO: 423212 - DNA, 120 bp, Artificial Sequence; identical to SEQ ID NO: 282870
  ENSG00000151079_16 (sequence is synthesized)

SEQ ID NO: 423213 - DNA, 120 bp, Artificial Sequence
  ENSG00000151079_17 (sequence is synthesized)
gctttttcccagcatcccggatgccttctggtgggcagtggttacaatgaccacggtaggttacggggacatgtaccccatgactgtggggggaaagatcgtgggctcgctgtgtgccat

SEQ ID NO: 423214 - DNA, 120 bp, Artificial Sequence
  ENSG00000151079_18 (sequence is synthesized)
cgctggggtcctcaccattgccctgcctgtgcccgtcatcgtctccaacttcaactacttctaccaccgggagacggagcaggaggagcaaggccagtatacccacgtcacttgtgggca

SEQ ID NO: 423215 - DNA, 120 bp, Artificial Sequence
  ENSG00000151079_19 (sequence is synthesized)
gcctgcgccggacctgagggcaactgacaacggacttggcaagcctgacttccccgaggctaaccgggaacggagacccagctaccttcctacaccacatcgggcctatgcagagaaaag

SEQ ID NO: 423216 - DNA, 120 bp, Artificial Sequence
  ENSG00000151079_20 (sequence is synthesized)
aatgctcacggaggtctgacccatgcaggcagggcctgcaggaggggagcactgagctaacagtctcttaggcttccttctcatttccactactcactctagcttcagttgacttcttga

SEQ ID NO: 423217 - DNA, 120 bp, Artificial Sequence
  ENSG00000151079_21 (sequence is synthesized)
ctctctcccctacacccactacctggcatccaggaccaaatacctggactatcaaccttgttgcttaatccctgcagcattcaaggttaatccatctaagtgacatttttgaaattccag

SEQ ID NO: 423218 - DNA, 120 bp, Artificial Sequence
  ENSG00000151079_22 (sequence is synthesized)
cggtgccacccaatcatgcccagcttctgtcatatgaatgagatatacatttatgtctgaccttccctcaagactgatttttcatgtctgggacttacaatatctcaaggaacagcaatg

SEQ ID NO: 423219 - DNA, 120 bp, Artificial Sequence
  ENSG00000151079_23 (sequence is synthesized)
tcaacaggatggaaaccagccctatctgagtcttcgctccctccttagtgttctttgctttgggtcatgtgcgtttcctagcttcaggctacttggtaactggaagaagctggaggacag

SEQ ID NO: 423220 - DNA, 120 bp, Artificial Sequence
  ENSG00000151079_24 (sequence is synthesized)
aagcagtactcaacttgctgttattccagtgccctgtaacaatcactggtcctcctgcagatgacccttggtagagtctttatttgcatagcctcaaaataggttattcgtttctaaact

SEQ ID NO: 423221 - DNA, 120 bp, Artificial Sequence
  ENSG00000151079_25 (sequence is synthesized)
tggatggaattagagaatacaatcaaactttaccacttggaggacacggggttagtccaggaccaaagaggccaatggatttttcaaagtgtgccccagcacaagaggcactggtgttcg

SEQ ID NO: 423222 - DNA, 120 bp, Artificial Sequence
  ENSG00000151079_26 (sequence is synthesized)
gtctacatttagttctccccactctgatcccctgactctccagcttccaggaaggttccttctcagagccaaatactctttgtgcaagtgccttcctgagcagaagaactggagaaaggg

SEQ ID NO: 423223 - DNA, 120 bp, Artificial Sequence
  ENSG00000151079_27 (sequence is synthesized)
aaccacagagccaggaggaatgtctgagcagagtcaagcaactggcttgaccacagtctgaagcaaggtgccacttaaacagatactgttttctcaaaggggcagaggaatcgtgttgca

SEQ ID NO: 423224 - DNA, 120 bp, Artificial Sequence
  ENSG00000151079_28 (sequence is synthesized)
gatggcagccttttctccttcattttccccacattttctctggccctctaccttgcttcctgggagtttgatttaggattgctgttgaaggcttcctcaggcaaactccagcttaaagcc

SEQ ID NO: 423225 - DNA, 120 bp, Artificial Sequence
  ENSG00000151079_29 (sequence is synthesized)
ctagacaggtaaaagcacacattggatggcagcatgggtttcttcccattttatgggcatgaaatatgtggtttagaataaggaacaagcattattcctttgccaacagcctcactctaa

SEQ ID NO: 423226 - DNA, 120 bp, Artificial Sequence
  ENSG00000151079_30 (sequence is synthesized)
gaggcttttttgctgagtcaagcaaacacttgcctgctctgccccttggagctgcatttgacctgctctcactggtaaggtgacttggtggcgttcccacttgatttagccattttcttc

SEQ ID NO: 423227 - DNA, 120 bp, Artificial Sequence
  ENSG00000151079_31 (sequence is synthesized)
cattgtgagaccactgccatctatccacctgcccacctccccttttgtttctcagtaacattgccatttgttttttgcctttgataaactgtgatgtactgttctgagatcttttgggtg

SEQ ID NO: 423228 - DNA, 120 bp, Artificial Sequence
  ENSG00000151079_32 (sequence is synthesized)
cagttctgaaactgaaaggactgttaacatgtttttaattttatatctatgctttcagactctttgatgataattttttttttaaaaattattctctcgaagagcaacttacgagaggac

SEQ ID NO: 423229 - DNA, 120 bp, Artificial Sequence
  ENSG00000151079_33 (sequence is synthesized)
agccttatgagggtttgcttgagaggcagtgtggcttctgtgactgccagctctaaatctcgatcttgccataactttacagggtaacttgggtccacagtcactctttgtgcctcagtt

SEQ ID NO: 423230 - DNA, 120 bp, Artificial Sequence
  ENSG00000151079_34 (sequence is synthesized)
tacccacccattaaatgggaacattactgtcttcccctccctacctcatggggaatgtctgggaagctggggacattgctatgcaaatgtgtgaatcttagtcatggatttgatttttag

SEQ ID NO: 423231 - DNA, 120 bp, Artificial Sequence
  ENSG00000151090_0 (sequence is synthesized)
cagaagagctcaaaagacacctcggtctaaataggattttagcacatcaggtgctattacaaagtaaagcaggctgggttgctgtgttggtggtggtgtttattcatcttcccttcgcgt

SEQ ID NO: 423232 - DNA, 120 bp, Artificial Sequence
  ENSG00000151090_1 (sequence is synthesized)
ttcatgtgtatgtatgtatgcttctctgcgtatatgcccagctctcagggtgtatggggctggagaatgcatgcgtagactgtgtgtatatgtaaactagaaactgaaccagggaaacaa

SEQ ID NO: 423233 - DNA, 120 bp, Artificial Sequence
  ENSG00000151090_2 (sequence is synthesized)
aatgaactactgtatgcaagaaatatatgaagtgcacccagctgccggcagcaattgctacatgcagtccactgattattacgcgtattttgaagatagtccgggttacagcggttgcga

SEQ ID NO: 423234 - DNA, 120 bp, Artificial Sequence
  ENSG00000151090_3 (sequence is synthesized)
tgctcaggctgtgcccagtaacaacatatatatggaacaggcctgggcagtgaatcagccttatacctgtagttaccctggaaacatgtttaaaagcaaggactctgacttggacatggc

SEQ ID NO: 423235 - DNA, 120 bp, Artificial Sequence
  ENSG00000151090_4 (sequence is synthesized)
cctgaatcaatacagccaacctgaatatttcactgaagaaaagcctactttttctcaagtgcagtcgccatcgtattctcaaaaaaaagggtacatccccagttacttagacaaggacga

SEQ ID NO: 423236 - DNA, 120 bp, Artificial Sequence
  ENSG00000151090_5 (sequence is synthesized)
gctctgtgtagtgtgtggtgacaaagccaccgggtatcactaccgctgtatcacgtgtgaaggctgcaagggtttctttagaagaaccattcagaaaaatctccatccatcctattcctg

SEQ ID NO: 423237 - DNA, 120 bp, Artificial Sequence
  ENSG00000151090_6 (sequence is synthesized)
taaatatgaaggaaaatgtgtcatagacaaagtcacgcgaaatcagtgccaggaatgtcgctttaagaaatgcatctatgttggcatggcaacagatttggtgctggatgacagcaagag

SEQ ID NO: 423238 - DNA, 120 bp, Artificial Sequence
  ENSG00000151090_7 (sequence is synthesized)
aaagacggcgggaagagctgcagaagtccatcgggcacaagccagagcccacagacgaggaatgggagctcatcaaaactgtcaccgaagcccatgtggcgaccaacgcccaaggcagcc

SEQ ID NO: 423239 - DNA, 120 bp, Artificial Sequence
  ENSG00000151090_8 (sequence is synthesized)
actggaagcaaaaacggaaattcctgccagaagacattggacaagcaccaatagtcaatgccccagaaggtggaaaggttgacttggaagccttcagccattttacaaaaatcatcacac

SEQ ID NO: 423240 - DNA, 120 bp, Artificial Sequence
  ENSG00000151090_9 (sequence is synthesized)
cagcaattaccagagtggtggattttgccaaaaagttgcctatgttttgtgagctgccatgtgaagaccagatcatcctcctcaaaggctgctgcatggagatcatgtcccttcgcgctg

SEQ ID NO: 423241 - DNA, 120 bp, Artificial Sequence
  ENSG00000151090_10 (sequence is synthesized)
ctgtgcgctatgacccagaaagtgagactttaaccttgaatggggaaatggcagtgacacggggccagctgaaaaatgggggtcttggggtggtgtcagacgccatctttgacctgggca

SEQ ID NO: 423242 - DNA, 120 bp, Artificial Sequence
  ENSG00000151090_11 (sequence is synthesized)
tgtctctgtcttctttcaacctggatgacactgaagtagccctccttcaggccgtcctgctgatgtcttcagatcgcccggggcttgcctgtgttgagagaatagaaaagtaccaagata

SEQ ID NO: 423243 - DNA, 120 bp, Artificial Sequence
  ENSG00000151090_12 (sequence is synthesized)
gtttcctgctggcctttgaacactatatcaattaccgaaaacaccacgtgacacacttttggccaaaactcctgatgaaggtgacagatctgcggatgataggagcctgccatgccagcc

SEQ ID NO: 423244 - DNA, 120 bp, Artificial Sequence
  ENSG00000151090_13 (sequence is synthesized)
gcttcctgcacatgaaggtggaatgccccacagaactcttcccccctttgttcttggaagtgttcgaggattagactgactggattcattctcataattcctacagcactactgggtgtc

SEQ ID NO: 423245 - DNA, 120 bp, Artificial Sequence
  ENSG00000151090_14 (sequence is synthesized)
aaccctgggagggcacggccgggattaggaggagggggagcgcccacacctggggaggcaggtgcggaggcggccggcccggggacctcgatgattcaggggttcctctggtcttgggct

SEQ ID NO: 423246 - DNA, 120 bp, Artificial Sequence
  ENSG00000151090_15 (sequence is synthesized)
cctccatcttcaggacatggctctgaggtcatgggctcattgcatcagaccgctgaaaggggaaccagaaagtgaagagtatgctggcttcttaaccaccttggcttggaagaaacacat

SEQ ID NO: 423247 - DNA, 120 bp, Artificial Sequence
  ENSG00000151090_16 (sequence is synthesized)
aatcactttgctcacattcccttgatctgcgatttccttctggttggctgtcctgcgtgggtgccaagttccacacatgatttaatgaataagaaggagatgtcagtgaaaaaagggatc

SEQ ID NO: 423248 - DNA, 120 bp, Artificial Sequence
  ENSG00000151090_17 (sequence is synthesized)
cagaatgattactaacctatgactcccaacagtatgacagaaaatggccttacagcctgggacaaaccgaagcactgtccagaccgagaacacgactggaagctagtaggaatgtctgaa

SEQ ID NO: 423249 - DNA, 120 bp, Artificial Sequence
  ENSG00000151090_18 (sequence is synthesized)
gcctgcctacataggaagagccattcagagaggcgcagcacgttgaaaaatgaacagtcgtcgccacatctcatccagaccacttggactagctcaatattccatctggaccatgatgat

SEQ ID NO: 423250 - DNA, 120 bp, Artificial Sequence
  ENSG00000151090_19 (sequence is synthesized)
ttgaatgcgggtacttgaaactattgcatttcgttctccggtcctgtgatgtgaatgctctgaaggttttatggttgtggaggtggggtgggggacaatcattaactcaccagcaccaag

SEQ ID NO: 423251 - DNA, 120 bp, Artificial Sequence
  ENSG00000151090_20 (sequence is synthesized)
catcaccagctcccacccgtccctggtccaagacttgagtcagcaaaatggcgccacaggacactaaagaagccttaaaaccaagataatacgaccacctccacccaatcctgatgttcg

SEQ ID NO: 423252 - DNA, 120 bp, Artificial Sequence
  ENSG00000151090_21 (sequence is synthesized)
cagggctgaagttaacagagcacagaccacctttagttagatgtggctttcagccttttagggaaagactcgaacaaattttcatctattcaagagcatgctgtttgcagcactctttat

SEQ ID NO: 423253 - DNA, 120 bp, Artificial Sequence
  ENSG00000151090_22 (sequence is synthesized)
ggtctcctaggagcataacttggaatgtacaggaatatttgtgtcctaaaaaaatcagctgcccttccaatatcatttttataacgttatggtttaattcaagttatacaaaggtgtgac

SEQ ID NO: 423254 - DNA, 120 bp, Artificial Sequence
  ENSG00000151090_23 (sequence is synthesized)
tcaaggatgtgcaggtattgactgatggaggccaacaaggaaaatattttttttcagtgagcccagagaaattagaaatcttcaccaatgtcagtgactgcatggtttccaaaaattcac

SEQ ID NO: 423255 - DNA, 120 bp, Artificial Sequence
  ENSG00000151090_24 (sequence is synthesized)
atagtattacctcacagtaggaaggcttctttcccatttaggctcagagaacacttttacagaaatcaaacctatttacagggtggcaccccttttctgtggcatctgatctgtcatctc

SEQ ID NO: 423256 - DNA, 120 bp, Artificial Sequence
  ENSG00000151090_25 (sequence is synthesized)
ccaagctcctgaagttctttatccaggttgtatctttgctgagctgacaacagatttctctatggatcaaatattctaatcaaggaaagatacggtgaaacttcagtcttcttctggaga

SEQ ID NO: 423257 - DNA, 120 bp, Artificial Sequence
  ENSG00000151090_26 (sequence is synthesized)
tcctgatggctggaggacgcttcctcctggttagatcctcaagctccttgcctcattgacaaatgtctcctagtcccctttttccctctgactctgaggaactaaatagcttgactatct

SEQ ID NO: 423258 - DNA, 120 bp, Artificial Sequence
  ENSG00000151090_27 (sequence is synthesized)
ctaaacagagactggccctgccactgaccctcctgtccctctcatagcataccctgacagatactcaatagaaaacacctgcagaccatgtgcacacttaactttcctgcccaacctgcc

SEQ ID NO: 423259 - DNA, 120 bp, Artificial Sequence
  ENSG00000151090_28 (sequence is synthesized)
tccccaacggcccatgctagaatagcttgtgcccagaaaacaaacagtgacacttcatctcttcagcgtcagaaaatgggcatagaatgtacccatgcaattgaatgtatctcattctcc

SEQ ID NO: 423260 - DNA, 120 bp, Artificial Sequence
  ENSG00000151090_29 (sequence is synthesized)
actggcatagtagatataaactattcctttgcctaccttttactgccttatcctggaaatattggggaaaataagccatatcagtgagatttacctaaaaacaaaggaaggaaagtcact

SEQ ID NO: 423261 - DNA, 120 bp, Artificial Sequence
  ENSG00000151090_30 (sequence is synthesized)
atggaaaccaagtagatgctttttgtaagtttggtggagcataactggcccagaagtctgggtgcctgagttctagttcgtgctctgtcaactggtagatttgtaattctaggtcttggt

SEQ ID NO: 423262 - DNA, 120 bp, Artificial Sequence
  ENSG00000151090_31 (sequence is synthesized)
tttcttacctggtgaataagtcatgatctctaaaacccttcctgcccttaatattgtctgaatttcaaggggaaaaaaaaaatctggttcctttaattatttttttttaacacttaaatt

SEQ ID NO: 423263 - DNA, 120 bp, Artificial Sequence
  ENSG00000151090_32 (sequence is synthesized)
cctaactttattagacaagaagtatggcccacttaacagttaaggaacgtaaatttgttattggctcgaaataataatttgacacaatactagtcaaccatttagaggccttggaaaaag

SEQ ID NO: 423264 - DNA, 120 bp, Artificial Sequence
  ENSG00000151090_33 (sequence is synthesized)
aagaggaacagcactgaaaattccaagtatgattggaaattatctgggagcggggaattaaatattcaatgcatgaaagcaattgtactggcttctgggaaaaaggaaacaagaacattg

SEQ ID NO: 423265 - DNA, 120 bp, Artificial Sequence
  ENSG00000151090_34 (sequence is synthesized)
ctatggaacttgttacccagagaaaggaagtgaaaagatttacaattataagcacgaaattcattggcagattacctgctttatctacagacagattgttttggggtttggttttgtcta

SEQ ID NO: 423266 - DNA, 120 bp, Artificial Sequence
  ENSG00000151090_35 (sequence is synthesized)
ggcagcctctggccaggctccttaattgcttgctctgctaatatttcagcttcctctcttgactccttgaggaaccaaccgctctttggaagacaaacacttagccacctctgtgctcca

SEQ ID NO: 423267 - DNA, 120 bp, Artificial Sequence
  ENSG00000151090_36 (sequence is synthesized)
gggtaaccctgagaagctctgctgtctggggcaagctttctttccaaagggaatgagaggaaggcaagcaggcagggtcctgcagcgtcaggccttctggggaaagtttcctcattttgt

SEQ ID NO: 423268 - DNA, 120 bp, Artificial Sequence
  ENSG00000151090_37 (sequence is synthesized)
ttgacagggtcctcagtacatcagacacccagatttgaatataagttcagagcctgatctcaagctaaatcagaatgctttggggactaaccatgatcgagaattggccaaatagtatgg

SEQ ID NO: 423269 - DNA, 120 bp, Artificial Sequence
  ENSG00000151090_38 (sequence is synthesized)
catataaacagccatccagccagccgcaagtaaaggaacgtttgatccttggcaccttaaatgattgattgccttcaataggcaaactgctggtctggaaatctcgttgaaggctgaata

SEQ ID NO: 423270 - DNA, 120 bp, Artificial Sequence
  ENSG00000151090_39 (sequence is synthesized)
cttcatgcggagtaggacaagccttagcccaccttcaggttgaaaggaaaggccataggactcaaaagataatgactctgaaactaaactccttccttctgaagctgacagaggtactta

SEQ ID NO: 423271 - DNA, 120 bp, Artificial Sequence
  ENSG00000151090_40 (sequence is synthesized)
gtgcatctcaagactccatctcataaaactcatttgtgagggatttgctctagatttttctaaacattttttcatctattgtccagacttgcaaatccagtgtggacctgatggagatac

SEQ ID NO: 423272 - DNA, 120 bp, Artificial Sequence
  ENSG00000151090_41 (sequence is synthesized)
ccttcacacctgcgctcccaccccctcggcagggagacgtctcagtagaggagaacacacccattatgctgggatttgtatttataaatcacttcccttttagggatgagcggtgtgggg

SEQ ID NO: 423273 - DNA, 120 bp, Artificial Sequence
  ENSG00000151090_42 (sequence is synthesized)
cgtgtgtgcgtgtgagtgtatgcgcgtgcgtgtgtgaccctcaagtgtactttgctcaatttagacgtgcagtatttccagaaacaatgaaaaaagtaagatgttttcttctttatgatt

SEQ ID NO: 423274 - DNA, 120 bp, Artificial Sequence
  ENSG00000151090_43 (sequence is synthesized)
ctgctcaaaacaccacgtgccgcctcagagctttttctagagcctcggtcctcaatgacgcgcttgacctgttgatgcctcagcccagcgaagcccctcacctgtgccccgggcgacagc

SEQ ID NO: 423275 - DNA, 120 bp, Artificial Sequence
  ENSG00000151090_44 (sequence is synthesized)
tcttcagtgtgcagtgcaggcctggggtggactgccaggccttcgctctgtgccagcaacgccgttcttgttgctcctccatgaacaggggtacaagccctggcccctcctcgacactaa

SEQ ID NO: 423276 - DNA, 120 bp, Artificial Sequence
  ENSG00000151090_45 (sequence is synthesized)
gccccccacagactcagcctccaaggaaccgctgagcacccttgaagcatgtcattgtcagtgatacctttttattctatggaactctaacctattcgtgtcatattgaccttttgctgc

SEQ ID NO: 423277 - DNA, 120 bp, Artificial Sequence
  ENSG00000151090_46 (sequence is synthesized)
atgagtcataaattatgaaatcagtcttacagtttttgaaatgtagccagcatttgtaaggctaaacctttttcatgaactgaatttaagtgaataaccaagccacagttcctcctcaaa

SEQ ID NO: 423278 - DNA, 120 bp, Artificial Sequence
  ENSG00000151090_47 (sequence is synthesized)
tggagagtgatgatcgacatttgaatctctttgccctttccaacggctatggcatcaggttctaaaataagctcgtaatttttcctgttattttaataatatggaaatattagcatagtg

SEQ ID NO: 423279 - DNA, 120 bp, Artificial Sequence
  ENSG00000151090_48 (sequence is synthesized)
tttcttttgatagtgatagactataatccatatttaaattttatagagaagaaattttattgtactgtgatgtagatatttattatccaggtaaggatttgcccggtgtgtattttttac

SEQ ID NO: 423280 - DNA, 120 bp, Artificial Sequence
  ENSG00000151090_49 (sequence is synthesized)
gtcttttttttcctcattgcaaagcctgcaatttctagtataatgttttatagaggtggttatagaaattatccttgaattattcttagtcttaggggaaactttcaatattcatcatta

SEQ ID NO: 423281 - DNA, 120 bp, Artificial Sequence
  ENSG00000151090_50 (sequence is synthesized)
gcatgtttgttatacagtttcatcaaattgagagcgttttcttccaatcccagtgtgttgtaaattggagagtaaatcccccttgtgaggtctttaaggatcacttcagtaaggccatgg

SEQ ID NO: 423282 - DNA, 120 bp, Artificial Sequence
  ENSG00000151090_51 (sequence is synthesized)
ccttctggttggctgtcctgcgtgggtgccaagttccacacatgatttaatgaataagaagggggcttggaggctcatagcaaaggtccttgaagagagcaagaaaaagtcttcccagga

SEQ ID NO: 423283 - DNA, 120 bp, Artificial Sequence
  ENSG00000151090_52 (sequence is synthesized)
gtttaggagcggagggaggagcgctgcggcacgggtcgggccggtcgggccgggcaaagaaggccgagacgtgctcctggaagactcgccctccggtcccggtgtcactcgttccccatt

SEQ ID NO: 423284 - DNA, 120 bp, Artificial Sequence
  ENSG00000151090_53 (sequence is synthesized)
cggcgcggccctggctgcggccgcctctcttcgcccaaggagttgacattttgcaggactcgcgcgacgcccagtcgccggcgctccccgggaccccgccgccgggaggagggggcggag

SEQ ID NO: 423285 - DNA, 120 bp, Artificial Sequence
  ENSG00000151090_54 (sequence is synthesized)
gagggtggagactgcggggcttggccaaggaaggcgcacatcctcgggcgggcggccgtgacgcggcggggattaactttgcatgaataatatctgcgatttccttctggttggctgtcc

SEQ ID NO: 423286 - DNA, 120 bp, Artificial Sequence
  ENSG00000151090_55 (sequence is synthesized)
tgcgtgggtgccaagttccacacatgatttaatgaataagaagctcgccagagaggcaaactccagcattttatatttcatctgcccccagtgacttcactgtaggaagaggaaatgcag

SEQ ID NO: 423287 - DNA, 120 bp, Artificial Sequence
  ENSG00000151090_56 (sequence is synthesized)
aatgtgagtgcgcttggaaaagagacctcctgctccgcgggctcggggcaagagcccgcaggctaccttccccgggcaggggcgctcaacccaaccggctccagggcactgatctgcgat

SEQ ID NO: 423288 - DNA, 120 bp, Artificial Sequence
  ENSG00000151090_57 (sequence is synthesized)
tgtcacaccttcatcaagaaatggccctaggacagtgatgtcgtagaactggagtcaggagtcctgggtcttgccttggctctgccattaacttgctctgtgactttaggcaagtcacga

SEQ ID NO: 423289 - DNA, 120 bp, Artificial Sequence
  ENSG00000151090_58 (sequence is synthesized)
cctctctggatcaatttcttcttctttctgtgaaaagacagagtaggactagatgacgtctaagttcccttccagttctaaaatactatgactctgcaatgtaaaacctgagcctttcca

SEQ ID NO: 423290 - DNA, 120 bp, Artificial Sequence
  ENSG00000151090_59 (sequence is synthesized)
ttccattgatagttaccaagtctagtgaaacggttttggttttggaaattgaccacagaaatataggtttcttgttacctgcccttctgattttcctttcacccaaatgatagaagtcag

SEQ ID NO: 423291 - DNA, 120 bp, Artificial Sequence
  ENSG00000151090_60 (sequence is synthesized)
gactgcatttactgagcacttataatgcattatcacattgaatactctgtgaagtgggtattattgagcccattttgtataggaagaaatgaaagctcagagaacctaaggaacttgcca

SEQ ID NO: 423292 - DNA, 120 bp, Artificial Sequence
  ENSG00000151090_61 (sequence is synthesized)
gaggtcacacagctagaatgtaataatatcagaattcaaacccaagtctttctagattccaaagcctggactctttaaccacccttgagggtggaccaggtagagaataatgtacagtga

SEQ ID NO: 423293 - DNA, 120 bp, Artificial Sequence
  ENSG00000151090_62 (sequence is synthesized)
gtaccttgaggcccaggtgaggcccagccacattccaattagcccttaagggagccatgaagagttggggtcctttttcctcttaaaaaaagggatcacgagcctcccacttactgctcc

SEQ ID NO: 423294 - DNA, 120 bp, Artificial Sequence
  ENSG00000151090_63 (sequence is synthesized)
ataacgtttctttttttaattccataacgtttctttaacctgaagttctctttactaagagccgttttaggggaagcggggaggacagaaacccagagagtgaattcggatgactggctg

SEQ ID NO: 423295 - DNA, 120 bp, Artificial Sequence
  ENSG00000151090_64 (sequence is synthesized)
gacagatttctctgtgatcttgtgggtagtatggattttacctctctgcttcactctgttttagaaccaccttctgtggagttggagtgcgcagtgtctaggttctctggggactttgtt

SEQ ID NO: 423296 - DNA, 120 bp, Artificial Sequence
  ENSG00000151090_65 (sequence is synthesized)
ttgaaaagctggccggtcatggggagtttggctctagagaccatgttggacaagactagtcaatggcagtttgctggtgaggagagaaactgtcccagtgtgacccaccccgaaggaccc

SEQ ID NO: 423297 - DNA, 120 bp, Artificial Sequence
  ENSG00000151090_66 (sequence is synthesized)
agtaagccatctgtgcatcagtggtcccactcctgaggctccaggaagtgcagcttgctgtgtatcttgggagcatctgtgtgccttgtctcatctttctccccctcccagtggtgctgg

SEQ ID NO: 423298 - DNA, 120 bp, Artificial Sequence
  ENSG00000151090_67 (sequence is synthesized)
gtattgctaaagtgaagccatgcactagaatgtggtgcacatgcattcatgtatcattgattaagaatatgtgtttcaatttatctttattgaagttgccacaaaaatcaagccttataa

SEQ ID NO: 423299 - DNA, 120 bp, Artificial Sequence
  ENSG00000151090_68 (sequence is synthesized)
atttcctcgctgcgcccctggcggagccgggtttgcctgctcttggccgccgccgccaccgccgcgcaagtcggacagccgtgagggctggaggggaaaccaggtcaccggttcgcagac

SEQ ID NO: 423300 - DNA, 120 bp, Artificial Sequence
  ENSG00000151090_69 (sequence is synthesized)
ggcaagagcccgcaggctaccttccccgggcaggggcgctcaacccaaccggctccagggcactggtcagccagttcctgaggatcatcctgataaactccacaatgggtcactaacagg

SEQ ID NO: 423301 - DNA, 120 bp, Artificial Sequence
  ENSG00000151090_70 (sequence is synthesized)
gggtgccaagttccacacatgatttaatgaataagaaggagtgttcggagatgatagtccacctgtagagaaagacagccataaggaaaccgcactataaacagcaggtggccaagctgg

SEQ ID NO: 423302 - DNA, 120 bp, Artificial Sequence
  ENSG00000151090_71 (sequence is synthesized)
tgggtggacgcgcggccaccaaacccacagcaccgtcaccaaccctgggagggcacggccgggattaggaggagggggagcgcccacacctggggaggcaggtgcggaggcggccggccc

SEQ ID NO: 423303 - DNA, 78 bp, Artificial Sequence
  ENSG00000151090_72 (sequence is synthesized)
ttatccaggtaaggatttgcccggtgtgtattttttacaattgagacattttactttaatctttaaaaaaaatgcatt

SEQ ID NO: 423304 - DNA, 120 bp, Artificial Sequence
  ENSG00000151090_73 (sequence is synthesized)
tttactgtgctgtataaatgtttgcaaatgcgaaaagtgtgcatttatagtgtgtttccacattaattaatgccgccttcaagagcaatattgtgcaggtaaaacgctgtttgtggcttt

SEQ ID NO: 423305 - DNA, 120 bp, Artificial Sequence
  ENSG00000151090_74 (sequence is synthesized)
ctgttgcacagttaaagctgacccaccctatgcacaagacaatcaaatataaatctgtcctcctcaggatgcagataatactcatgtaaattatggagcacaatgtaagacaaaaggaga

SEQ ID NO: 423306 - DNA, 120 bp, Artificial Sequence
  ENSG00000151090_75 (sequence is synthesized)
cactttacatatgtattgttgatacagaaattatcagggcatgaatgagctgatgtgacattatgccacttctttcttttggttctcccttattaacttggcatttttaatttgaccata

SEQ ID NO: 423307 - DNA, 120 bp, Artificial Sequence
  ENSG00000151090_76 (sequence is synthesized)
gagccaaattagttctccatgctttcttcgtagaaaatccttttttttcccataatgttttcatgccctgagaatcagaaaaatactacagaatagaaaaagatttacagtcattggaag

SEQ ID NO: 423308 - DNA, 120 bp, Artificial Sequence
  ENSG00000151090_77 (sequence is synthesized)
atttgtgttttgcaaacagtgttaagtgatattgctagatggtgatatttttttcagcctaaaactctgttgaaatctgtgatcaaaatgttttaaactatccaaaaaaaatttgtatat

SEQ ID NO: 423309 - DNA, 120 bp, Artificial Sequence
  ENSG00000151090_78 (sequence is synthesized)
ttgggaaaaatggatttttacatagcttttgtatgcagatataaaactgtaattatgaatatagtgggcgtagataaactcataagcttaaattctaaaaaagaaaaagcttataacaga

SEQ ID NO: 423310 - DNA, 120 bp, Artificial Sequence
  ENSG00000151090_79 (sequence is synthesized)
atgtaaggacatttatttcataaataaacatctactagaataagcaaatttacttgagaagaaactatggagggagagaagaaactaagtaaaatgctgatggggggttacctctttgga

SEQ ID NO: 423311 - DNA, 120 bp, Artificial Sequence
  ENSG00000151090_80 (sequence is synthesized)
aggggccacaaagatgaagggaggagagaggtgaagttttgcagctcaaggacaacattcatcttctcatctcaaattattcaggaatattactaatggaattatgttaacatcagctgc

SEQ ID NO: 423312 - DNA, 120 bp, Artificial Sequence
  ENSG00000151090_81 (sequence is synthesized)
caacatatatctcaatctctgttgccctgaacacatgttaattgagattctttctatgacaagtaacaaaaagctaactcaaactggcttaagcagaaagctaattattgactttaatat

SEQ ID NO: 423313 - DNA, 120 bp, Artificial Sequence
  ENSG00000151090_82 (sequence is synthesized)
ctgggatctagggtattgcataccaaagcttcaggcatggctggatctgggtgcacttactcagtattctcaggaagctcctttttttgtcattcatgtagacttaacattcacatggcc

SEQ ID NO: 423314 - DNA, 120 bp, Artificial Sequence
  ENSG00000151090_83 (sequence is synthesized)
tttcaccttacggtggcctccaatagctccaggatgagctttacagctccaaatatagtgaaaggagaatttcttttctccaacaattctaatgaaaattctggcctaattctcactggc

SEQ ID NO: 423315 - DNA, 120 bp, Artificial Sequence
  ENSG00000151090_84 (sequence is synthesized)
ccaagttcagtcatgtgcccattcctgagccaatcactgtggtgaggaaaacagatgcataaccaaccttatcctcaggaatcctggaactgggtgaggggaaagagggacagtcagctt

SEQ ID NO: 423316 - DNA, 120 bp, Artificial Sequence
  ENSG00000151090_85 (sequence is synthesized)
catctaaactatggactgagagttgaggcaagatgattcctgaaagaaaattctaagtcttgctgctataagtggaagagaatggtgggcaagcaaaagcaaccagtgcccacaccaaag

SEQ ID NO: 423317 - DNA, 120 bp, Artificial Sequence
  ENSG00000151090_86 (sequence is synthesized)
gtaaatctaaaacaacatcccatttcagtacagcaagcggttctccttcacacagaggaagctcatctccaagtttttatttggccaggacatgaaccaaataaacaccttccaaagaaa

SEQ ID NO: 423318 - DNA, 120 bp, Artificial Sequence
  ENSG00000151092_0 (sequence is synthesized)
agtgtgggacgcggagagcgaggggcggcggcggcgcccgctggcgctcaagcatggcggcggcggcattgggcagctcctcaggctcggcgtccccggccgtggctgagctctgccaga

SEQ ID NO: 423319 - DNA, 120 bp, Artificial Sequence
  ENSG00000151092_1 (sequence is synthesized)
acaccccggagacctttttggaggcctccaagctgctgctcacctatgctgacaacatcctcagaaaccctaatgatgaaaaatatagatccatccggattggaaacacagccttttcta

SEQ ID NO: 423320 - DNA, 120 bp, Artificial Sequence
  ENSG00000151092_2 (sequence is synthesized)
ctagactcttgcctgtcagaggagctgttgaatgtttatttgaaatgggctttgaagagggagaaacacatctcatctttcctaaaaaagcttcagtggagcagctgcaaaaaattcgtg

SEQ ID NO: 423321 - DNA, 120 bp, Artificial Sequence
  ENSG00000151092_3 (sequence is synthesized)
acctgattgccatagagagaagtagcagactggatggctcaaataagagccacaaagtaaagtcatctcagcaacctgcagccagtacccagcttcctacaacaccatcttcaaatccca

SEQ ID NO: 423322 - DNA, 120 bp, Artificial Sequence
  ENSG00000151092_4 (sequence is synthesized)
gtgggttaaaccagcacacaaggaaccgtcaagggcagtcatcagatccaccatctgcttcaacggttgctgctgactcagccattctagaagttcttcagtccaacattcagcatgtgc

SEQ ID NO: 423323 - DNA, 120 bp, Artificial Sequence
  ENSG00000151092_5 (sequence is synthesized)
tggtctatgaaaatcctgctcttcaggagaaagcgttggcttgtattccggtccaagaactaaaaaggaaatcacaagaaaagttatcgagagctagaaaattggataaaggtatcaata

SEQ ID NO: 423324 - DNA, 120 bp, Artificial Sequence
  ENSG00000151092_6 (sequence is synthesized)
taagtgatgaggattttcttttgctggagcttttgcactggtttaaggaagaattttttcactgggtgaataacgttttgtgcagcaaatgtggtggacagactaggtctagagatagat

SEQ ID NO: 423325 - DNA, 120 bp, Artificial Sequence
  ENSG00000151092_7 (sequence is synthesized)
cattactgcccagtgatgatgagctgaagtggggtgcaaaggaagtggaagatcattactgtgatgcctgccagttcagcaatcgattcccaagatataataaccctgagaaacttttgg

SEQ ID NO: 423326 - DNA, 120 bp, Artificial Sequence
  ENSG00000151092_8 (sequence is synthesized)
aaacaagatgtggacggtgtggcgagtgggccaattgttttacactgtgctgccgagctgtagggtttgaagctcgctatgtttgggattacacagaccatgtctggacagaagtctatt

SEQ ID NO: 423327 - DNA, 120 bp, Artificial Sequence
  ENSG00000151092_9 (sequence is synthesized)
ctccttctcagcagcggtggctgcactgtgatgcatgtgaagatgtctgtgacaagccactcctttatgaaataggatggggcaagaagctttcctatgtcatagcattttcaaaagatg

SEQ ID NO: 423328 - DNA, 120 bp, Artificial Sequence
  ENSG00000151092_10 (sequence is synthesized)
acttggcgatattcctgcaaacatgaagaggtgattgccagaagaactaaggttaaagaagcattacttcgagacactattaatgggcttaataagcagaggcaactgtttttgtcagaa

SEQ ID NO: 423329 - DNA, 120 bp, Artificial Sequence
  ENSG00000151092_11 (sequence is synthesized)
aacagaaggaaagaacttctccagaggataattgtggagcttgttgaatttatatctcccaaaacccctaaacctggagaacttgggggaagaatatctgggtcagtggcttggagagta

SEQ ID NO: 423330 - DNA, 120 bp, Artificial Sequence
  ENSG00000151092_12 (sequence is synthesized)
gcccgaggtgaaatgggtctacagagaaaagaaaccttgtttattccctgtgaaaatgagaagatttctaaacagctccacctttgttacaatattgtgaaagatcgttatgttcgagtt

SEQ ID NO: 423331 - DNA, 120 bp, Artificial Sequence
  ENSG00000151092_13 (sequence is synthesized)
tcaaataacaatcaaaccatttctggatgggagaatggcgtgtggaaaatggaatctatattcagaaaagttgaaacagactggcacatggtatatttggcccgaaaggaaggatcatct

SEQ ID NO: 423332 - DNA, 120 bp, Artificial Sequence
  ENSG00000151092_14 (sequence is synthesized)
tttgcttatatttcctggaagtttgagtgtgggtcagttggcctaaaagtagatagcatttctattagaacaagtagtcaaacttttcagactggaacagtagaatggaaattgcgatct

SEQ ID NO: 423333 - DNA, 120 bp, Artificial Sequence
  ENSG00000151092_15 (sequence is synthesized)
gatacagcacaagtagaactgacaggcgataacagtcttcactcctatgctgatttttctggtgccactgaagttattttggaagcagaattaagcagaggagatggtgatgtcgcttgg

SEQ ID NO: 423334 - DNA, 120 bp, Artificial Sequence
  ENSG00000151092_16 (sequence is synthesized)
caacacacccagctgtttagacaaagcttaaatgaccatgaagaaaattgtttggagataattataaaattcagtgacctttgagaacctgaacattatagaaaagctggcaataatcaa

SEQ ID NO: 423335 - DNA, 120 bp, Artificial Sequence
  ENSG00000151092_17 (sequence is synthesized)
ggacttactgaagtagtctgttggttcagtgcatgcttagttggcagttaccaccctgtgctagcatatttcttttgctagctatccatcatgtaaccctcatgaaaattatctttatac

SEQ ID NO: 423336 - DNA, 120 bp, Artificial Sequence
  ENSG00000151092_18 (sequence is synthesized)
gtggactataataaaatattgaattaaaacctttcttccatatgtgactataatttggagtaaagtcttgttgactcaatatgggattttaatctaaaactgtaagtatggttttaaaag

SEQ ID NO: 423337 - DNA, 120 bp, Artificial Sequence
  ENSG00000151092_19 (sequence is synthesized)
ttaaataatgatattcatgattaaatgctattcatgattatgataaaatcttgggcttatgatagtaatttgacattttctgatcagccattcatttcttcagaagtggttaaattagag

SEQ ID NO: 423338 - DNA, 120 bp, Artificial Sequence
  ENSG00000151092_20 (sequence is synthesized)
tcttcagaagtggttaaattagagtctcctaatatttttaattaatgtgaaagtacagtagctcataaattatataatgcatgaaaatttatatgattataaatattcaggcatttaaga

SEQ ID NO: 423339 - DNA, 120 bp, Artificial Sequence
  ENSG00000151092_21 (sequence is synthesized)
gctttcccacgcacgcgtcccgttcgactctctttccgccggttgactttaagccgcgtcaccttggctgaggtcagaccgtgggaggcggctgggtagctgtttgcgtgagcagagacg

SEQ ID NO: 423340 - DNA, 120 bp, Artificial Sequence
  ENSG00000151092_22 (sequence is synthesized)
agctgtgttcaatttaaaacatggatattatttaggtcttcatttctttttatgcatgggtgtgctatctcttgcatggcatggaagttgattaactttaaaaatatgaattgggttgca

SEQ ID NO: 423341 - DNA, 120 bp, Artificial Sequence
  ENSG00000151092_23 (sequence is synthesized)
taccacattgttttcccttttgaaattttttttaagtttcttaattgctggagaccattttagggccatggatttaaaaagaaatcattttttcctttagaaatggatgtttgttttaaa

SEQ ID NO: 423342 - DNA, 120 bp, Artificial Sequence
  ENSG00000151092_24 (sequence is synthesized)
agtaaatagaaaaacattaatcctaaatacttttggaattaatcttgcaatcaattggaaacagaagaaacattggtactatcatttccagaaagaaaagttttattttaatcttagaat

SEQ ID NO: 423343 - DNA, 120 bp, Artificial Sequence
  ENSG00000151092_25 (sequence is synthesized)
taaaatattttataaaatattaatgttattttggactagaatgcaaagattgcctgggattttaaggttaaaatacaagcttttgtaataattttacacatgcagaagactgtttcatgc

SEQ ID NO: 423344 - DNA, 120 bp, Artificial Sequence
  ENSG00000151092_26 (sequence is synthesized)
tatacctctcagctgctctcctagcttagggaactaggaaaggacactgaggaaatggttgaggactcaggatgagaaagaatccagtatgtggagagtagaaaacagcatcctagacaa

SEQ ID NO: 423345 - DNA, 120 bp, Artificial Sequence
  ENSG00000151092_27 (sequence is synthesized)
agtaagcagcatgtgtcaaagccgtgaggcaaaatgagctggacctttttgaggaactaaaggaaaagtaatgtgatgtgagtgtagaaatgaaagggaagagtaacagaagatctggct

SEQ ID NO: 423346 - DNA, 120 bp, Artificial Sequence
  ENSG00000151092_28 (sequence is synthesized)
ggagaagcaagcagggtgaaccatcacataaggccctggtagccgtggtaaagagcttggagtttaagtcactgaagtgagttaagcaggaaagtgacatatcctagtttacattttttg

SEQ ID NO: 423347 - DNA, 120 bp, Artificial Sequence
  ENSG00000151092_29 (sequence is synthesized)
aaaagtcattttcattgctatgtggagcatggataggagaggtaagagttgaaagctgggagtcagcttcaggagacaattgtagaagtccaagtagggggatagtggtggtggtagaaa

SEQ ID NO: 423348 - DNA, 120 bp, Artificial Sequence
  ENSG00000151092_30 (sequence is synthesized)
agaataaaaattaatgaattcattgaatgcaaaatcacaaaaatataagtcagagctcatacttcttgtttttctctctagtaatgtttagagttataataacatcatactgattatatt

SEQ ID NO: 423349 - DNA, 120 bp, Artificial Sequence
  ENSG00000151092_31 (sequence is synthesized)
aaaataatttccaaattttccaatggcactaattttttcttttcaattttgaaggattctcttaccactctgcttagtaatttctcttttttcttttttacatctttcataatgttgaaa

SEQ ID NO: 423350 - DNA, 120 bp, Artificial Sequence
  ENSG00000151092_32 (sequence is synthesized)
aggtagttgatgtcacttggcgatattcctgcaaacatgaagaggtgattgccagaagaactaaggttaaagaagcattacttcgagacactattaatgggcttaataagcagagaaaag

SEQ ID NO: 423351 - DNA, 120 bp, Artificial Sequence
  ENSG00000151092_33 (sequence is synthesized)
agcagagtttatagccatggttttgtttttgacgtttgttgctccttccttctgtagtctttcatccacatctatgtagaacgtcctgacaatctgcgaagagaaggctctaagaaaccc

SEQ ID NO: 423352 - DNA, 120 bp, Artificial Sequence
  ENSG00000151092_34 (sequence is synthesized)
tttgaataagataatgttttttaatttatcattttgggaatcagtagaagtagttatttcttcattgattggacatttaaaaatcacaacaagtatagtttaaaatttcagtaaaatgta

SEQ ID NO: 423353 - DNA, 120 bp, Artificial Sequence
  ENSG00000151092_35 (sequence is synthesized)
acaacgctccacagagaaattcttacgagtctcagttctttaaaataagggtcatacatgcaacccaaggaccaaatgtggttcactttaggcttttagctaaaacctgatttgtgagca

SEQ ID NO: 423354 - DNA, 120 bp, Artificial Sequence
  ENSG00000151092_36 (sequence is synthesized)
aagctgctgctcacctatgctgacaacatcctcaggtgcagggcaacggggtcggacggcgggtaccggggtgggtgggccgcggcaccttgttcggccagggactggggcgtccggcct

SEQ ID NO: 423355 - DNA, 120 bp, Artificial Sequence
  ENSG00000151092_37 (sequence is synthesized)
acccggccaagtcccacccccgctcgagaaaaggaagtttctttgcagttgtgacttggcacctgcagtcagggtgctgcgggtgaactggagtcccggaagcggggccgggcggaggag

SEQ ID NO: 423356 - DNA, 120 bp, Artificial Sequence
  ENSG00000151092_38 (sequence is synthesized)
aggtaggaaggcgtgcttcagacactgccgctcttctcgtcgtttaacggcctcagatatcgggacacaacgaaaccctaatgatgaaaaatatagatccatccggattggaaacacagc

SEQ ID NO: 423357 - DNA, 120 bp, Artificial Sequence
  ENSG00000151092_39 (sequence is synthesized)
tgggtttacattctgagcccatgattctctgttactttttggccttgtcagtctgaccttccatttgccttgtgtaaaacagtaataataccaaccttccaggttttttgaagggatcac

SEQ ID NO: 423358 - DNA, 120 bp, Artificial Sequence
  ENSG00000151092_40 (sequence is synthesized)
aagagttttgtaaaacacctagcactgtgcctggtgctttgcactataaatattcctttttttcccctttatttttttattgatgcataatagatgtacatatttgggggatacttgtaa

SEQ ID NO: 423359 - DNA, 120 bp, Artificial Sequence
  ENSG00000151092_41 (sequence is synthesized)
tgcatttatataaattctacagagcaaatcagtattattgggatgtctgagatcttaaatatttgtctttatgctggaaacatttgaattactctcttctagctattatgaaatatgcag

SEQ ID NO: 423360 - DNA, 120 bp, Artificial Sequence
  ENSG00000151092_42 (sequence is synthesized)
tttattagcaatttaccgtggcatttatagtgatgctgtttatatatggataaaaacatgtaataatgtaccatagaaatcttcattgctatagggattactgtaaaaaatttagtaaac

SEQ ID NO: 423361 - DNA, 120 bp, Artificial Sequence
  ENSG00000151092_43 (sequence is synthesized)
tataaacttaaagcacagtatacagaaataataaaagtcatgtgatatttgtgttgtccctatttagaaataacttgtgtggtctacatgttaaaaagttgttttccttgtgtttccatt

SEQ ID NO: 423362 - DNA, 120 bp, Artificial Sequence
  ENSG00000151092_44 (sequence is synthesized)
ttctaaagaattaaatgaaaccttccattaatagttagtgttctcttaaaatcaaatataaagcatgtattgaccagagattctattagacttcctgctggttctgggccttaaagtcca

SEQ ID NO: 423363 - DNA, 120 bp, Artificial Sequence
  ENSG00000151092_45 (sequence is synthesized)
gagagagagactgtagtttcaaaagtggcattaactccttcatgatagtaaactcaggatgatattttttatgctgctctttaatatgtctaccttcttaagagttacagcgcacattaa

SEQ ID NO: 423364 - DNA, 120 bp, Artificial Sequence
  ENSG00000151092_46 (sequence is synthesized)
gtaacagtagtgaacaaagtagtagatataatcccacctcacatagagcttacattctagtaggttaaacagccagtagatgtgaaaacaagatgagtgcaaagaagaaaataagaccag

SEQ ID NO: 423365 - DNA, 120 bp, Artificial Sequence
  ENSG00000151092_47 (sequence is synthesized)
attccccctgcgtgcatttttcgagcggagtggcttacatttccacatacttatcagaagttactcactgacaaagtgatgttttcttcccatgttgagactatccgagtactaaagcat

SEQ ID NO: 423366 - DNA, 120 bp, Artificial Sequence
  ENSG00000151092_48 (sequence is synthesized)
catttttaaggatttcaaagagacagaaattaatacaggtattctaaaatcctgtgtgccacaaaatgcacttattaactgaaattcagaatattatgcattactttatgattcttagga

SEQ ID NO: 423367 - DNA, 120 bp, Artificial Sequence
  ENSG00000151092_49 (sequence is synthesized)
aaaagaaaaaaacttttttccaaaagtaaaatatatttttttcttttatgacagcttcatgaatgtataattaacatacaataacctgcatatatttaaattgtacagtttgataagttt

SEQ ID NO: 423368 - DNA, 120 bp, Artificial Sequence
  ENSG00000151092_50 (sequence is synthesized)
tacactgaaatcatcactgcaaatcagtattcattgtatggatgtgccatagtttaccatttcacctgttgatggctatttgggtagttcccagtttttttcacaatttcaaattaagct

SEQ ID NO: 423369 - DNA, 120 bp, Artificial Sequence
  ENSG00000151092_51 (sequence is synthesized)
gccatgaacactcaggcacacaagtctttatatgggcatatgctgccttttctctttgcttaatgcctaggagtagaatggctgcattatatggtagatatacatacaactttttaagaa

SEQ ID NO: 423370 - DNA, 120 bp, Artificial Sequence
  ENSG00000151092_52 (sequence is synthesized)
accactaaactattttccaacgtggttgtgccattttacattttcgcaagcagtatgtaagtttccagtttctccatgtccttgctaacatttagtatgatctgactttttaattttatc

SEQ ID NO: 423371 - DNA, 120 bp, Artificial Sequence
  ENSG00000151092_53 (sequence is synthesized)
ccctttaataggtgtgtagtggcatttcattatggtttttatttgtacttccctaatgacaaataatactgagcatctttttatgtgtttgcttaccatccatatgtcccctttgcttat

SEQ ID NO: 423372 - DNA, 120 bp, Artificial Sequence
  ENSG00000151092_54 (sequence is synthesized)
tttttttaattgggtattgtgttttcttactgtttggttttgagagttctttatatattcttatataagtccattatcagatatgtgctttgcaaagatttttctccctatctgtagttt

SEQ ID NO: 423373 - DNA, 120 bp, Artificial Sequence
  ENSG00000151092_55 (sequence is synthesized)
gtctttttatgctcttaatgatttttgaagagaagaaactggcgttcagtttaccaattggttgttttatggattgtgctttttgatgttatatttaagaaattttgcctagcccttggt

SEQ ID NO: 423374 - DNA, 120 bp, Artificial Sequence
  ENSG00000151092_56 (sequence is synthesized)
cacaatgattttctcctatgttttgttttagaagttttttttggttttatgcttatgtctgcaatccattttgagttaatttttttatatgatccaaggtgtatgaagtttttttttaca

SEQ ID NO: 423375 - DNA, 120 bp, Artificial Sequence
  ENSG00000151092_57 (sequence is synthesized)
tatggataatgaattgttctagcaccatttattgaaaagattattttttctccattgaattgtctttccacttgtatcaaaaatcagttctgtaatataaatctaatacaataaaaatgg

SEQ ID NO: 423376 - DNA, 120 bp, Artificial Sequence
  ENSG00000151092_58 (sequence is synthesized)
ataaaatttttatttgttgaattttgtggaatcagctttgcagataaattttaaaaaggtaatgttttgaaattttcacttttttatcatagcgtttctggttaaactatcaactgttta

SEQ ID NO: 423377 - DNA, 83 bp, Artificial Sequence
  ENSG00000151092_59 (sequence is synthesized)
tataggcttttacgttttattttattttattttaatttttcgagacagtctcaccctcttgcccaggctggagtgcagttgca

SEQ ID NO: 423378 - DNA, 86 bp, Artificial Sequence
  ENSG00000151092_60 (sequence is synthesized)
gattacaggcatgagccactgcaccaggccccatgacttttaaattttaaacaaaggatagtattctaaaaattgcatttaaggct

SEQ ID NO: 423379 - DNA, 79 bp, Artificial Sequence
  ENSG00000151092_61 (sequence is synthesized)
caaaaatcagccaggcgtgtacgagaatctcttgaccctgggaagtgagactgcagtgagctgagatcacgccactgca

SEQ ID NO: 423380 - DNA, 120 bp, Artificial Sequence
  ENSG00000151092_62 (sequence is synthesized)
tggacaacagagcgagacttcgtctccaaaaaaatgcatttaaaaattacatacattctaggtatttagtaagtaaaggttgatggttgtaatcttgttaagtatttgtattctgttatt

SEQ ID NO: 423381 - DNA, 120 bp, Artificial Sequence
  ENSG00000151093_0 (sequence is synthesized)
gctcgagagcgtcatcgcccccgactgtggagaagtgtccggggtagccccgttacaggaatgtgtttctgatcatctgaatcttaatcatgtccaactgcctgcaaaatttcctgaaaa

SEQ ID NO: 423382 - DNA, 120 bp, Artificial Sequence
  ENSG00000151093_1 (sequence is synthesized)
ttacaagcactcgtcttctatgttcaagattatgccaacagttaagaagtaaaaggaagtttttcggaactgtgccaatatccagattgcataggcgagttgtcattacaggcattggct

SEQ ID NO: 423383 - DNA, 120 bp, Artificial Sequence
  ENSG00000151093_2 (sequence is synthesized)
tagtgactcctcttggtgttggaactcacctggtttgggatcgtcttatcggaggagagagtggaattgtttcactggttggtgaagagtataagagtatcccttgcagtgttgctgctt

SEQ ID NO: 423384 - DNA, 120 bp, Artificial Sequence
  ENSG00000151093_3 (sequence is synthesized)
atgtgccaagaggtagtgatgaaggtcagttcaatgaacaaaactttgtgtccaaatcagatatcaagtccatgtcttctcccaccatcatggccattggggctgcagaattagccatga

SEQ ID NO: 423385 - DNA, 120 bp, Artificial Sequence
  ENSG00000151093_4 (sequence is synthesized)
aggattctggctggcatcctcagtcagaagctgatcaagtggctactggtgttgcaattggcatgggaatgattcctcttgaagttgtttctgaaactgctttgaattttcagacaaaag

SEQ ID NO: 423386 - DNA, 120 bp, Artificial Sequence
  ENSG00000151093_5 (sequence is synthesized)
gttacaataaagttagcccattttttgtccctaagattctggtcaatatggcagcaggccaggtcagcattcgatataaactcaagggcccaaatcatgcagtatccacagcctgtacca

SEQ ID NO: 423387 - DNA, 120 bp, Artificial Sequence
  ENSG00000151093_6 (sequence is synthesized)
ctggaggtacagattcttgtattagccctttatctcttgctgggttttccagagcccgggctctgagcacaaactcagatcccaagttggcatgtcgaccatttcatccaaagagagatg

SEQ ID NO: 423388 - DNA, 120 bp, Artificial Sequence
  ENSG00000151093_7 (sequence is synthesized)
gttttgtaatgggagaaggtgcagctgtgctggtgctggaagaatatgaacatgctgttcaaagaagagcccggatctatgcagaagttttgggctatggactctcaggtgatgctggtc

SEQ ID NO: 423389 - DNA, 120 bp, Artificial Sequence
  ENSG00000151093_8 (sequence is synthesized)
acataactgcccctgatcctgaaggagaaggtgccttaaggtgtatggctgctgctttaaaagatgcaggtgtgcagcctgaggagatatcctatatcaatgcacatgctacttccacac

SEQ ID NO: 423390 - DNA, 120 bp, Artificial Sequence
  ENSG00000151093_9 (sequence is synthesized)
cattgggagatgctgctgaaaacaaagctatcaaacatctcttcaaagaccatgcatatgcccttgcagtttcctcaactaagggagcaacaggacatctgctgggagctgcaggggcag

SEQ ID NO: 423391 - DNA, 120 bp, Artificial Sequence
  ENSG00000151093_10 (sequence is synthesized)
tcgaggcagcttttaccacattagcttgttattatcaaaaactaccacctactttaaacctggattgttcggaaccagaatttgatctcaactatgttccactaaaggcacaggaatgga

SEQ ID NO: 423392 - DNA, 120 bp, Artificial Sequence
  ENSG00000151093_11 (sequence is synthesized)
aaactgagaaaagatttattggcctcaccaattcctttggttttggtggtactaatgcaacactttgtattgctggactgtagaacatataatttgtaattaaatactgatttttaaatg

SEQ ID NO: 423393 - DNA, 120 bp, Artificial Sequence
  ENSG00000151093_12 (sequence is synthesized)
attgccaacccatgtatccagacgctcagtctagggctcttggccctgggtagcgttttgaaaaggctggttatccttaagtactgaagattgataaagcccacttacttacttaaaaga

SEQ ID NO: 423394 - DNA, 120 bp, Artificial Sequence
  ENSG00000151093_13 (sequence is synthesized)
atatgccctgaaatgtgttttctgtgccactgacaccagaaatgctatttagaagaagttatcagtaatcctgacaaaggatgcttcctgcagctcaaatcaggctggaggtgcctttat

SEQ ID NO: 423395 - DNA, 120 bp, Artificial Sequence
  ENSG00000151093_14 (sequence is synthesized)
atttttcattgaattactgttttggtgactcgaatgaatcatcaattcatttatttgtcttcaaatgtctgacggcacttaaggtctaaaaaagaaggaatgtgtttctgatcatctgaa

SEQ ID NO: 423396 - DNA, 120 bp, Artificial Sequence
  ENSG00000151093_15 (sequence is synthesized)
acttggccgggtcccgaggcccctggccggcgggctcggacgttaggagcagaaccagctccaggtcccggtctgtccgggcgtcgctgccctctgaagctcaggccggacgccccagtc

SEQ ID NO: 423397 - DNA, 120 bp, Artificial Sequence
  ENSG00000151093_16 (sequence is synthesized)
cctggccgaacaaggtgccgcggcccacccaccccggtacccgccgtccgaccccgttgccctgcacctgaggatgttgtcagcataggaatgtgtttctgatcatctgaatcttaatca

SEQ ID NO: 423398 - DNA, 120 bp, Artificial Sequence
  ENSG00000151093_17 (sequence is synthesized)
tgaggatgttgtcagcatagtagaatacgatggtgtcccttctccgacaaaagggaatatttgggcattatcactgccaaagaaaaatgcctttttgatgggtgaaaatgctacctcatc

SEQ ID NO: 423399 - DNA, 120 bp, Artificial Sequence
  ENSG00000151093_18 (sequence is synthesized)
gcgttattggcaggtcctcgattatcggcgagtcactgaggttccgagaggggcgtctctgctcacgcaaacagctacccagccgcctcccacggtctgacctcagccaaggtgacgcgg

SEQ ID NO: 423400 - DNA, 120 bp, Artificial Sequence
  ENSG00000151093_19 (sequence is synthesized)
gttaaacgacgagaagagcggcagtgtctgaagcacgccttcctacctctcctccgcccggccccgcttccgggactccagttcacccgcagcaccctgactgcaggtgccaagtcacaa

SEQ ID NO: 423401 - DNA, 120 bp, Artificial Sequence
  ENSG00000151116_0 (sequence is synthesized)
agcggcttccgtcctgcagcaagtccggaagaaggtccgggggctggagtcctgggacctagctcgggaccggcctggagatggagttcgactgcgagggcctgagacggctgcttggca

SEQ ID NO: 423402 - DNA, 120 bp, Artificial Sequence
  ENSG00000151116_1 (sequence is synthesized)
agtacaagttcagggacctaactgtggaagaactaaggaatgtaaatgtatttttcccacatttcaaatattccatggacacctatgtttttaaagatagttctcagaaagacctgctga

SEQ ID NO: 423403 - DNA, 120 bp, Artificial Sequence
  ENSG00000151116_2 (sequence is synthesized)
attttactggcacaattcctgtgatgtatcagggtaatacatataacataccaattcgtttctggattttggattctcaccctttcgctccccctatttgcttcttgaagccaactgcaa

SEQ ID NO: 423404 - DNA, 120 bp, Artificial Sequence
  ENSG00000151116_3 (sequence is synthesized)
atatgggaatcttagtcggaaaacatgtggatgctcaaggcagaatatatttgccctatctccaaaactggagccatcctaaatctgtcattgttggattaattaaagaaatgattgcca

SEQ ID NO: 423405 - DNA, 120 bp, Artificial Sequence
  ENSG00000151116_4 (sequence is synthesized)
agtttcaagaggaacttcccatgtattctctatcatcatctgatgaggcacggcaggtagacttgctagcctatattgcaaaaatcactgaaggtgtttcagatacaaattcaaagagct

SEQ ID NO: 423406 - DNA, 120 bp, Artificial Sequence
  ENSG00000151116_5 (sequence is synthesized)
gggcaaatcatgagaataaaacagtcaataaaattactgtggttggaggtggagaactcggtattgcctgcacattagcaatttcagcaaagggtattgcagacaggcttgtcctcttag

SEQ ID NO: 423407 - DNA, 120 bp, Artificial Sequence
  ENSG00000151116_6 (sequence is synthesized)
acctctcagaagggactaaaggagccacgatggaccttgaaatcttcaaccttcctaatgtggagatcagcaaagatttgtctgcctctgctcattccaaggtggtgatcttcacagtca

SEQ ID NO: 423408 - DNA, 120 bp, Artificial Sequence
  ENSG00000151116_7 (sequence is synthesized)
actctttgggtagttctcagtcgtaccttgatgtggtacagagcaatgtggatatgttcagagcccttgtcccagctctgggacattatagtcaacacagtgtcctgctcgttgcatctc

SEQ ID NO: 423409 - DNA, 120 bp, Artificial Sequence
  ENSG00000151116_8 (sequence is synthesized)
aaccagtggaaatcatgacctatgtaacatggaaactgagtacatttcctgcaaatcgagtgatcggaattggatgtaatctggattcacagagattacagtatattattacaaatgttt

SEQ ID NO: 423410 - DNA, 120 bp, Artificial Sequence
  ENSG00000151116_9 (sequence is synthesized)
tgaaggcacagacttcaggcaaagaagtatgggttattggcgagcaaggagaagacaaagtgctcacatggagtggccaagaagaagtagtgagtcatacctctcaagtgcagctgtcca

SEQ ID NO: 423411 - DNA, 120 bp, Artificial Sequence
  ENSG00000151116_10 (sequence is synthesized)
acagagccatggaactgctaagagtaaaaggtcaaagatcctggtctgttggactatcagtagctgacatggttgacagtattgtaaacaataagaagaaagtgcattctgtatcagctt

SEQ ID NO: 423412 - DNA, 120 bp, Artificial Sequence
  ENSG00000151116_11 (sequence is synthesized)
tagcaaagggatattatgatataaatagtgaagtgtttttaagtttgccttgcatccttggaaccaatggagtatctgaagttatcaaaaccacactgaaagaagatacagttactgaga

SEQ ID NO: 423413 - DNA, 120 bp, Artificial Sequence
  ENSG00000151116_12 (sequence is synthesized)
aactccaaagcagtgcatcctcaatccacagtctccaacaacagttaaaactttgattctcaaatgcaatttgagaggctggacttctacctaaagggaaaagtcatttaattttaccta

SEQ ID NO: 423414 - DNA, 120 bp, Artificial Sequence
  ENSG00000151116_13 (sequence is synthesized)
tatataggtttgaggatttctgtatcctgctacttacttttacaaactgcttggttaaagtagagggtttcttgattagctttgtgatgtaaatccttaaggagttatacaaggagggga

SEQ ID NO: 423415 - DNA, 120 bp, Artificial Sequence
  ENSG00000151116_14 (sequence is synthesized)
aaaattaattttatttggggttcttgagatatctatgctgttctttaaatctacagcaggggtaaacattcatctgcagtgtgcatcaatttaaatcatatatcctaaactaaaagcaca

SEQ ID NO: 423416 - DNA, 120 bp, Artificial Sequence
  ENSG00000151116_15 (sequence is synthesized)
attcatacttcgggaatattttataagtaatatatctttaaaagaaaattaccctttgacttttataatcaacataagttccaggcccagtatggatttacaaaatctgtgtcagttgta

SEQ ID NO: 423417 - DNA, 120 bp, Artificial Sequence
  ENSG00000151116_16 (sequence is synthesized)
cattcacaggatccacagcttaagttactaatgtttcttgtgtaaaatcctgttggtagtaatagtaaagcattgtatttcccttcttcaaattaattacctaccaaaaaatggaaaaga

SEQ ID NO: 423418 - DNA, 120 bp, Artificial Sequence
  ENSG00000151116_17 (sequence is synthesized)
atgcactttaaaatagtaaaatggaaagtgaatttttaaaatatatgcattaaaagtttactttaatttccagtgggacttcctttatgaaattttccataacctcttcctggagtatta

SEQ ID NO: 423419 - DNA, 120 bp, Artificial Sequence
  ENSG00000151116_18 (sequence is synthesized)
caagatctccaacatctcataaactaattgtgatattagtggaaccataagcaaatatatatttttagtggaaatagattatgaatgaaagccaagcaccttactttaaagccaaaatat

SEQ ID NO: 423420 - DNA, 120 bp, Artificial Sequence
  ENSG00000151116_19 (sequence is synthesized)
gagattttcattaaaaacattggtcataatagggagaggttttttatttgttctgagcaaatcctttaacctctcctgatgatacagttcagagtacacacactttggtgatggatcaag

SEQ ID NO: 423421 - DNA, 120 bp, Artificial Sequence
  ENSG00000151116_20 (sequence is synthesized)
agcaatattttcttatgtgaaagatagcttattattactattgtgacatacaactaatagtaacagttaacatcaacacttcatatataccaggcagcatgataagcactttattatttt

SEQ ID NO: 423422 - DNA, 120 bp, Artificial Sequence
  ENSG00000151116_21 (sequence is synthesized)
actgaatcctcacaacagaccactgaggtagggactattgccatcatcattttataaaaggaaattgaggtttagtcctcaagaagtcttggctattaaggggcacttatccatacaacc

SEQ ID NO: 423423 - DNA, 120 bp, Artificial Sequence
  ENSG00000151116_22 (sequence is synthesized)
tctactttttctaggcactaaaagggggaaaaggcttaatagccaaaatagttatcaaaagaccctaaagctggggtcctgtacaccatgaaaggattactttcattctcatgtaagggc

SEQ ID NO: 423424 - DNA, 68 bp, Artificial Sequence
  ENSG00000151116_23 (sequence is synthesized)
gtacaccatgaaaggattactttcattctcatgtaagggcatgcttttataaaaaacaaacatgggct

SEQ ID NO: 423425 - DNA, 120 bp, Artificial Sequence
  ENSG00000151116_24 (sequence is synthesized)
taaaaaaataaaaataaagcaagcatataataggttaatccagatggagttaggagggtttataagggcagacacatcctagtaaagaggaaataggcaaactaatgctgttttagtgta

SEQ ID NO: 423426 - DNA, 120 bp, Artificial Sequence
  ENSG00000151116_25 (sequence is synthesized)
ataaggaatgcttataatgatgaactttagtcataaagaaaaggtgaaattatattcagtaacccatgttaggaaagcagaaaactatttaatatgcttggaaagattccaaccagagtt

SEQ ID NO: 423427 - DNA, 120 bp, Artificial Sequence
  ENSG00000151116_26 (sequence is synthesized)
aactgaataaaaaccttggacatttgaagagaaaagcatttagttctatctaatttcaatatgcacgtgaattagttcatgttactctaacaatgtattcttactgtccttttttatgaa

SEQ ID NO: 423428 - DNA, 120 bp, Artificial Sequence
  ENSG00000151116_27 (sequence is synthesized)
ataggaaagtaaaactgaaagaactatttcttgtgtttttaaaactagccttttctaatatttgatatctaattaaagttagataatatgtaatatgcttttgaacaataatctaaccag

SEQ ID NO: 423429 - DNA, 120 bp, Artificial Sequence
  ENSG00000151116_28 (sequence is synthesized)
aaaatattgtataataaattaccaagaaatcattacattaattataaaaggaacatgtcaatacaacaaatgtttatttaacacctactgttactccaaatactgtgttagaatttgact

SEQ ID NO: 423430 - DNA, 120 bp, Artificial Sequence
  ENSG00000151116_29 (sequence is synthesized)
attcgaagatgaataatagtctttgccctctggaaggccacaatgtagaagtaattctctgtatcagatatttccttgagtgttaagtgtattagtaatcatgttgtaaatcccagtgta

SEQ ID NO: 423431 - DNA, 120 bp, Artificial Sequence
  ENSG00000151116_30 (sequence is synthesized)
agtcaagaagcaatatcaccaccaccacctccctatgattttgtgataatttggcattttcaatgcttgttaactttcatgttttcatttttatgaaatcatgcagagcttgttataatt

SEQ ID NO: 423432 - DNA, 120 bp, Artificial Sequence
  ENSG00000151116_31 (sequence is synthesized)
tttagtggggtttggattaaaatgcttttttgatgtagcagaagatacattttttcccattttacattgttttccttaaatattaagaataatgagtaaaataaactgattttaaaatca

SEQ ID NO: 423433 - DNA, 120 bp, Artificial Sequence
  ENSG00000151116_32 (sequence is synthesized)
ttctacttagatagtaaaatggcccttgcagaactgttactgatgagagaaaacaggtaaggagactgcaagcagactttggggatcatgttttttgtagttcagagttttcctcacctc

SEQ ID NO: 423434 - DNA, 120 bp, Artificial Sequence
  ENSG00000151116_33 (sequence is synthesized)
gggctagtggtacagcacattcattgttatccagtggaaaaatctaacttgctagaaatgagaaaacttctatataaatattagcacaggtacccttgactccaaaagatctgttatcac

SEQ ID NO: 423435 - DNA, 88 bp, Artificial Sequence
  ENSG00000151116_34 (sequence is synthesized)
ctcggtattgcctgcacattagcaatttcagcaaaggtagtggtacaatcttggctcactacagcctccgcctcctgggttcaagcga

SEQ ID NO: 423436 - DNA, 85 bp, Artificial Sequence
  ENSG00000151116_35 (sequence is synthesized)
acctggcctgctattacctcttaattagaatttgagttgtattcagtcttttgtcactaaataaatgcttctataaacatttcaa

SEQ ID NO: 423437 - DNA, 120 bp, Artificial Sequence
  ENSG00000151116_36 (sequence is synthesized)
gcaaggagaagacaaagggatattatgatataaatagtgaagtgtttttaagtttgccttgcatccttggaaccaatggagtatctgaagttatcaaaaccacactgaaagaagatacag

SEQ ID NO: 423438 - DNA, 120 bp, Artificial Sequence
  ENSG00000151116_37 (sequence is synthesized)
gtgacacaatcatggcttactgcaaacttcacctgccaggctcaagtcatctgcccatctcagcctccccagtaactgggactataggtaatacatataacataccaattcgtttctgga

SEQ ID NO: 423439 - DNA, 120 bp, Artificial Sequence
  ENSG00000151116_38 (sequence is synthesized)
taagtatgatactgcattttctttcaatgatattcttcatgtagtctttggaagtaatttgaaattgagctctctagggttacccaagtcccagaaccctgatgacaactgcctgtacaa

SEQ ID NO: 423440 - DNA, 120 bp, Artificial Sequence
  ENSG00000151116_39 (sequence is synthesized)
agctgctccctccaggttttggagccaactgtttgctccctgtctttttatagtcgtttcccacttgagaaagtacaggaggagctactagcaagtgattggggcattatttccaagtcc

SEQ ID NO: 423441 - DNA, 120 bp, Artificial Sequence
  ENSG00000151117_0 (sequence is synthesized)
attgtccgtccctccgggctttgtagaatcgtcgccggcttacctggccgtgggcgcgtcctggccgctgcagcccggagcagggtgccagccgccgccgccgccgccatggtgtccccg

SEQ ID NO: 423442 - DNA, 120 bp, Artificial Sequence
  ENSG00000151117_1 (sequence is synthesized)
gtcactgtggtgaagagtgaaggacccaaactggtgccgttcttcaaggccacctgcgtgtattttgtgctctggctgccctcatctagcccatcgtgggtcagcaccctcatcaagtgc

SEQ ID NO: 423443 - DNA, 120 bp, Artificial Sequence
  ENSG00000151117_2 (sequence is synthesized)
ctgcctatcttctgcctctggctcttccttctggcccatggcctgggattcctgctggcccaccccagcgccacccgcatctttgtggggcttgtcttctctgctgtaggtgacgccttc

SEQ ID NO: 423444 - DNA, 120 bp, Artificial Sequence
  ENSG00000151117_3 (sequence is synthesized)
ctcatctggcaggaccaaggatacttcgtgcatggtctgctgatgtttgctgtgacccacatgttctacgcctcggcctttggcatgcagccactggctcttcggacaggtctggtgatg

SEQ ID NO: 423445 - DNA, 120 bp, Artificial Sequence
  ENSG00000151117_4 (sequence is synthesized)
gcagcgctgtcgggcctgtgctatgccctcctctacccatgcctctcaggtgccttcacctacctggtgggggtctatgtggcccttatcggcttcatgggctggcgagctatggcaggg

SEQ ID NO: 423446 - DNA, 120 bp, Artificial Sequence
  ENSG00000151117_5 (sequence is synthesized)
ctgcggctggccggggcagactggcgctggacagagctggcagctggcagtggtgcactcttctttatcatctcagacctgaccatcgccctcaacaaattctgttttcctgtgccctac

SEQ ID NO: 423447 - DNA, 120 bp, Artificial Sequence
  ENSG00000151117_6 (sequence is synthesized)
tctcgggcgcttatcatgtccacctactatgtggcccagatgctcgtcgccttgtcagctgtcgaaagccgggagcctgtggaacactacagactgaccaaggccaactgaggtgccagg

SEQ ID NO: 423448 - DNA, 120 bp, Artificial Sequence
  ENSG00000151117_7 (sequence is synthesized)
gtctggtcacccctctctcctcctggggctggggcccagatcctggggacctgcaggagctggatcaggatggctgcagtgccagcctggggcagcaggtactgcctgaggaatttgcaa

SEQ ID NO: 423449 - DNA, 120 bp, Artificial Sequence
  ENSG00000151117_8 (sequence is synthesized)
gttcgtgtggggaggctggaaaaggatctccctagcagaactcgtggttcaggacaatgctgagagctaaaagagccagcctaatatcagactggagccagaagtagacatctccccacc

SEQ ID NO: 423450 - DNA, 120 bp, Artificial Sequence
  ENSG00000151117_9 (sequence is synthesized)
tctaccctatcaggactttcaaaacccccctggaaggtgatggtgctcagcttcttgacacccccccacccacttcccctaccaggtggaagagtctgactccatgtgttatgcctagga

SEQ ID NO: 423451 - DNA, 120 bp, Artificial Sequence
  ENSG00000151117_10 (sequence is synthesized)
ccaatggcagtgctgggttcacccactcctcccctttttcatctgcacaaagttgagggaaacgggagaatctgtgctgagaagactcagacccaggagcccctttcacaggcccctagt

SEQ ID NO: 423452 - DNA, 120 bp, Artificial Sequence
  ENSG00000151117_11 (sequence is synthesized)
tgggaagactggatgagagtggagcctccgtttcttttccctcttctatccttgttacttgaacaatctcagtctctaagtggtgggtggggacatgaagaggtgtgggtccaggttagg

SEQ ID NO: 423453 - DNA, 120 bp, Artificial Sequence
  ENSG00000151117_12 (sequence is synthesized)
caggagagagaacttctttggtctcggagtttggggtctcaagaattcaagtagccccatctctctctcgggcaagcccaaagctcaggtcccatacgctacccttagatcctatcccca

SEQ ID NO: 423454 - DNA, 120 bp, Artificial Sequence
  ENSG00000151117_13 (sequence is synthesized)
gggctagggtgaaccatgccaaaggaaggggccagcttctctgtgtgtgtgtgtagcctgtctcctagtctgcctatgtctttctctgctatatgtttctgtcctgctgtctgtcaaaag

SEQ ID NO: 423455 - DNA, 120 bp, Artificial Sequence
  ENSG00000151117_14 (sequence is synthesized)
tctcacagagagagggcctcagggagctgctgaggggtgctgagcctggctcagggagctgggacccctcccctccaacacacatactcacagtgctttcctccttgtccctcctacact

SEQ ID NO: 423456 - DNA, 120 bp, Artificial Sequence
  ENSG00000151117_15 (sequence is synthesized)
agaggagggggctccaatgacactccggggttttaagacccaaggcacattcaatgcaaggggagcaaggatgggacaactccatcttctgctgcccatgtgaaaaataataaaaatcaa

SEQ ID NO: 423457 - DNA, 120 bp, Artificial Sequence
  ENSG00000151117_16 (sequence is synthesized)
gagccattggctgccctgcttgtgggcctgtgtggcacatgcctatcttggagagggcatgggggcatggtgccagaggctctggctgtcctcacagcctagtcacagtcctgggcagtg

SEQ ID NO: 423458 - DNA, 120 bp, Artificial Sequence
  ENSG00000151117_17 (sequence is synthesized)
catcttggtgccaggctggctacctggctctggtgacactgtgccggttggagtgtgtctcacttccctggtgtgggtgaggatgtggtttaggaggatgggggatgagtggtatttgcc

SEQ ID NO: 423459 - DNA, 120 bp, Artificial Sequence
  ENSG00000151117_18 (sequence is synthesized)
actgtccaaatttgtccttgatgtactcccctgtgcacaggtgcccagcacccttggtgacctttagttacccagtgtcatctattgctgcccacctcctcccctccccacttgagacct

SEQ ID NO: 423460 - DNA, 120 bp, Artificial Sequence
  ENSG00000151117_19 (sequence is synthesized)
gctgcttccttcaaaatgatccagattcccttcaagcatctccctcatcctggactctgggcttagttgaacagctgggagcaatgggattagattggctgattcattcattagttgtaa

SEQ ID NO: 423461 - DNA, 120 bp, Artificial Sequence
  ENSG00000151117_20 (sequence is synthesized)
agccctggcagaataatacatcactctgctccaggagcatttgtaacttaacagacaatgccctaacccagaagtagaaagggaagccttgggtggtggtggatatgccatcagtagagg

SEQ ID NO: 423462 - DNA, 120 bp, Artificial Sequence
  ENSG00000151117_21 (sequence is synthesized)
tgttgctcatttgtggggatgtgatttaggagactcaagtctcaggggtggttggatgagtcagtgatttccaaattagtttttacagagattcctggtaagggggtagtgaaggaataa

SEQ ID NO: 423463 - DNA, 120 bp, Artificial Sequence
  ENSG00000151117_22 (sequence is synthesized)
tgagagaaggcaggctcaaagacctcctatccttatttcaagtccagtagcttcttaggttgtgtttttttttgttttgttttgttttggaaggattccactgaaaaacgtaagtttgaa

SEQ ID NO: 423464 - DNA, 120 bp, Artificial Sequence
  ENSG00000151117_23 (sequence is synthesized)
acttagtgagctggatgatcaatcccttctagctctgaaccctggacactaaagagggaagatcttgatcctttcaaacttcagaactctgaacacagacctacctagtgtgaagaaatg

SEQ ID NO: 423465 - DNA, 120 bp, Artificial Sequence
  ENSG00000151117_24 (sequence is synthesized)
ggagggagcaggatggagagcaggatgaagtcagcaggacttgcccccaagctctgaggggagggggaaagtgccatgtagatgtggaggaggggaagggaagaccaggcccagtcacaa

SEQ ID NO: 423466 - DNA, 120 bp, Artificial Sequence
  ENSG00000151117_25 (sequence is synthesized)
gaaggctggtcactgccttgtgggtgggtttggactaggctttcaggggtccaggtctgggattccctatcatgcaatcacatccatccccttggtccctgctgtatatcaccctcagga

SEQ ID NO: 423467 - DNA, 120 bp, Artificial Sequence
  ENSG00000151117_26 (sequence is synthesized)
acgggaaaggatgagttacgtttattgccccatcccttcactgaatgtttacattaacaaacaccagagagcaaactgggcttcctacactgggccatgcagaggacaggccaagaaact

SEQ ID NO: 423468 - DNA, 120 bp, Artificial Sequence
  ENSG00000151117_27 (sequence is synthesized)
ccacatcataacagcctcctgatgcctgggcttggctggagctcacatgaggtgctttgatttcttctgcagactctcggtgatggatgctacaactgacttatcatctttgtctgaaag

SEQ ID NO: 423469 - DNA, 120 bp, Artificial Sequence
  ENSG00000151117_28 (sequence is synthesized)
agcaaaggaagtattcgttatattaatgatgctggcgaccagggaaattccaaactgctggacttcctatgcaggaaaccaggagctggaccctgggacccttaatcttgggttggcaga

SEQ ID NO: 423470 - DNA, 120 bp, Artificial Sequence
  ENSG00000151117_29 (sequence is synthesized)
gtgtgaaggggcaagagctgccatttatctagcacttaatatttgccagacattgtgccaggcagttgtgtactgtctcatttaagcctcatagtcctataaagaagatgagaaaacagg

SEQ ID NO: 423471 - DNA, 120 bp, Artificial Sequence
  ENSG00000151117_30 (sequence is synthesized)
gtcactgtgtccttaggtacctggtcgtctggactctgagtgtttcccaagtcctgtgctgggcagctcacctagccagagacacaatcgctttgggcagagtgtgggtgtacagggaac

SEQ ID NO: 423472 - DNA, 120 bp, Artificial Sequence
  ENSG00000151117_31 (sequence is synthesized)
agaggctaaccggatagcccggaatgtccttagggacactgctccacatattatctcaggacagcatcaatatttaaccctcaccaagggtctggaagagaagttctgctaaaatctttg

SEQ ID NO: 423473 - DNA, 120 bp, Artificial Sequence
  ENSG00000151117_32 (sequence is synthesized)
tccttttcttaagtgcctccaggagcggactctgtgtcactgaccacgttggccactccagggttcacctccctgacccaagcgggctccagcatgacagaggccttctagaatggattc

SEQ ID NO: 423474 - DNA, 120 bp, Artificial Sequence
  ENSG00000151117_33 (sequence is synthesized)
attccagagtgaacagctgggggctgttgctggcagagaggaggggctaaaggggccctgaggagggagaaggagggggcaggaagggagaagcacactaggctgcagaagggtgcccct

SEQ ID NO: 423475 - DNA, 120 bp, Artificial Sequence
  ENSG00000151131_0 (sequence is synthesized)
ctgcatccgggcctgagagtgcaggcttgagggaagcatggaggtccatggcaagcccaaggctagcccgagttgttcgtcgcccacccgggattcctcaggagtcccagtgtccaagga

SEQ ID NO: 423476 - DNA, 120 bp, Artificial Sequence
  ENSG00000151131_1 (sequence is synthesized)
gctgctgacggcgggaagcgacggccgcggaggtatatgggacaggttgctcatcaactcccaacctaagtccagaaagacctccactcttcaaacagttcggatagagaggagtccctt

SEQ ID NO: 423477 - DNA, 120 bp, Artificial Sequence
  ENSG00000151131_2 (sequence is synthesized)
attggaccaggtacagacatttctcccacagatggcacgggcaaatgaaaagctaagaaaagaaatggcagctgcaccacctggtcgtttcaatattgaaaacattgatgggcctcatag

SEQ ID NO: 423478 - DNA, 120 bp, Artificial Sequence
  ENSG00000151131_3 (sequence is synthesized)
taaagttatacaaatggatgtggctttgtttgagatgaatcagtcggattcaaaagaagtggacagttcagaagagagttcacaagacagttcagagaacagttcagaatcagaagacga

SEQ ID NO: 423479 - DNA, 120 bp, Artificial Sequence
  ENSG00000151131_4 (sequence is synthesized)
agatgacagcatcccatctgaagtcaccatagataacattaagcttcccaattctgaaggtggaaaaggcaagattgaagttttggacagtccagcaagtaaaaaaaagaaatagtcaaa

SEQ ID NO: 423480 - DNA, 120 bp, Artificial Sequence
  ENSG00000151131_5 (sequence is synthesized)
taaattatctgaaaagaaacaggtgacatatgtctgcaaattctgtgaaaaagaatgtgattcacgggttcttttgcttttcaggcacctatggtgcttttatatgttaaaaactttaga

SEQ ID NO: 423481 - DNA, 120 bp, Artificial Sequence
  ENSG00000151131_6 (sequence is synthesized)
caagttaaatttgacagagtttctttgggcaaagaatgattaatgagttaggtagcattgtaaactgaaaggggttcagagacctccgctctacagcaaggaaagtgtgcttttatcagc

SEQ ID NO: 423482 - DNA, 120 bp, Artificial Sequence
  ENSG00000151131_7 (sequence is synthesized)
tgaacacagaagtagagtacaggaataacttgatgggttacagctaggtgtttgcctaaataaggcaaagaggagacctaaggctgcctgatgtcccataggtatggtctgatctaagga

SEQ ID NO: 423483 - DNA, 120 bp, Artificial Sequence
  ENSG00000151131_8 (sequence is synthesized)
gatctaaggctgccttgtccgatgggctgaggcttggctgtttgtgattggccagacttggctatttgttataaaaatacactcctgagttaggttttggtgtgtagagtacaggaataa

SEQ ID NO: 423484 - DNA, 120 bp, Artificial Sequence
  ENSG00000151131_9 (sequence is synthesized)
cttgatgggttacagctaggtgtttgcctaaataaggcaaagaggagacctaagcccagcatgtcgtccactgtttgggatgcctgcaaactaaccattagctcctcctgcaaacatcat

SEQ ID NO: 423485 - DNA, 120 bp, Artificial Sequence
  ENSG00000151131_10 (sequence is synthesized)
gtgttctgttcccttgagaaatttctttcatgcatatggtggcagtgtccaaagaaacaatagtgtcagctacaaattgtattgaattttctgtagtagcaaaatctggaaaaataggta

SEQ ID NO: 423486 - DNA, 120 bp, Artificial Sequence
  ENSG00000151131_11 (sequence is synthesized)
caacattcagttttgtttagcaccatacataacccccaacatgagcaaagaggagatctaaggctgcatgatatcccattaagtgcttttgttaaatgctttcagagggtggctcctacc

SEQ ID NO: 423487 - DNA, 120 bp, Artificial Sequence
  ENSG00000151131_12 (sequence is synthesized)
ccaggaggtctggttggtcataaaataagatttttccctatctgtgcattagttttaaattccatatgactagcacccaaccactacaaagagtgagtccccaggagccccactgtaatc

SEQ ID NO: 423488 - DNA, 65 bp, Artificial Sequence
  ENSG00000151131_13 (sequence is synthesized)
ccactacaaagagtgagtccccaggagccccactgtaatctttcctcagtggaaactagcatatc

SEQ ID NO: 423489 - DNA, 76 bp, Artificial Sequence
  ENSG00000151131_14 (sequence is synthesized)
cctgaaactagcttatctttattttcttcatctattccaaggttggtgcaaatttcaattgctgaccattttagac

SEQ ID NO: 423490 - DNA, 120 bp, Artificial Sequence
  ENSG00000151131_15 (sequence is synthesized)
ccaaggttggtgcaaatttcaattgctgaccattttagactctgataataggaggtatttatggggacttttggggaagctatttggaaggcaggattgaaccatgccaaatagcaagat

SEQ ID NO: 423491 - DNA, 120 bp, Artificial Sequence
  ENSG00000151131_16 (sequence is synthesized)
cctaaccagtggggagcaaaatggagtaagcatattttctgtagaccaatacaggcagaccctctgaggctggaaaagagggctacctagtggtatttgagcatcagtcagttcagttca

SEQ ID NO: 423492 - DNA, 120 bp, Artificial Sequence
  ENSG00000151131_17 (sequence is synthesized)
tccactggtacatctgcatagctcctgaacaaggtccaggaggaaacttacttttttatagttcccctccttttaaaaagatgttttacattttattattttcattttttttttttttaa

SEQ ID NO: 423493 - DNA, 120 bp, Artificial Sequence
  ENSG00000151131_18 (sequence is synthesized)
cttttaggttcagaggtacatgtggaggtttgttatatagacaaattgggtattgtgggggtttggtgtacagattatttcatcacctggtgataagcatagtgcccaataggtagtttt

SEQ ID NO: 423494 - DNA, 120 bp, Artificial Sequence
  ENSG00000151131_19 (sequence is synthesized)
aaatctgcaccctcctcccaccctccatcctcaagtgggccctaatgtctggttcccttctttgcatccatgtgtactcaacgtttagctcccactaataagtgagaacatgtggtattt

SEQ ID NO: 423495 - DNA, 120 bp, Artificial Sequence
  ENSG00000151131_20 (sequence is synthesized)
agaacatgtggtatttttctgttcctgtgttggttgcttaggtcctgatcatctgtgttagctttctgccttgatgatctgcctaatactgtcagtggggtgttaaagtctcccactatt

SEQ ID NO: 423496 - DNA, 120 bp, Artificial Sequence
  ENSG00000151131_21 (sequence is synthesized)
aggtctctgaatgcttgctttatgaatctgggtgcttctctgttgggtgcatgtatgtttaggatagttaggtcttattgaattaagccctttatcattatgtaatgcccttctttgtct

SEQ ID NO: 423497 - DNA, 120 bp, Artificial Sequence
  ENSG00000151131_22 (sequence is synthesized)
ttttttatttttgtaaaagtatgttttgtctgaaattaaaatagcaacccctgcctttttctttctgtttgcttggtagagttttctccatccctttactttgagcttctgagtgtcact

SEQ ID NO: 423498 - DNA, 120 bp, Artificial Sequence
  ENSG00000151131_23 (sequence is synthesized)
gcttctgagtgtcactgcatgtgaggtgggtctcttgaagatagcataccattggattttgcttctttatccaagttgccacactgtttcttttgattggggcatttagcccatttacat

SEQ ID NO: 423499 - DNA, 120 bp, Artificial Sequence
  ENSG00000151131_24 (sequence is synthesized)
tatgtgtgcatttgatcctgtcatcatattgttagctggttaccatgcagacttgtctgtgtggttgctttatagtgttactaatctacctacttaagtgtgtttttgtagcggctggta

SEQ ID NO: 423500 - DNA, 120 bp, Artificial Sequence
  ENSG00000151131_25 (sequence is synthesized)
ggtaacccagtctttcctttatatagttagcactcccttccaaaactcttgtaaggcagatctgatgttaacaaattcccttagcatttgcctgtctgaaaaggatcttatttctccttt

SEQ ID NO: 423501 - DNA, 82 bp, Artificial Sequence
  ENSG00000151131_26 (sequence is synthesized)
agtcagatatgaattcttggttgaaaattattttctttaagaatgctgagggtgtggcacaccagcatggcacatgtataca

SEQ ID NO: 423502 - DNA, 120 bp, Artificial Sequence
  ENSG00000151131_27 (sequence is synthesized)
aagtataataataaaaataaataaataaagaatgctgaatataggcccccgatctcttctggcttgtagagtttctgctgacagttctgctgttagcctgatgggtttccctttgtaggt

SEQ ID NO: 423503 - DNA, 120 bp, Artificial Sequence
  ENSG00000151131_28 (sequence is synthesized)
atgggtttccctttgtaggtgacttgccccttctctctcactgcctttagcattttttctttcatttccaccttggaggatctgatgactgtatgttttaggttggtctgcttgtgtagt

SEQ ID NO: 423504 - DNA, 120 bp, Artificial Sequence
  ENSG00000151131_29 (sequence is synthesized)
atttcacaagggttttccgcatttcctgaatttgaatgttggcctctctagcaaggttggggaagttttcatcagcgatatcctgaaatatgttttcaaagttgcttggtttctctccct

SEQ ID NO: 423505 - DNA, 120 bp, Artificial Sequence
  ENSG00000151131_30 (sequence is synthesized)
ttcagtcacatcaatgagtcatagattgggtctcttttcataatcccatatttctcggaagttttgtccattctttattgttttttttctccaataaagaaaaagatgtttcagagagcc

SEQ ID NO: 423506 - DNA, 120 bp, Artificial Sequence
  ENSG00000151131_31 (sequence is synthesized)
atcttcaagctctgagattctttcctcagtttggtcaattctgctgttaatacttgtgattgcattatgcaattcttgtagtgtgtttttcagctctgtcagatcggtttagttctctct

SEQ ID NO: 423507 - DNA, 120 bp, Artificial Sequence
  ENSG00000151131_32 (sequence is synthesized)
tataatggccgttttgtttatcagcttctgtatcattttattgtaatccttagattccacggattgggtttgactttatcctgtatgttgatgatcttcattcctgtctatattctgaat

SEQ ID NO: 423508 - DNA, 120 bp, Artificial Sequence
  ENSG00000151131_33 (sequence is synthesized)
tttatttctgccatttcagccatctcagcctggttaagaaccattgctggggaactagtgtagttttttggaggtaagaagatactctagtgcttttgtcagtttttgcactgattcttt

SEQ ID NO: 423509 - DNA, 120 bp, Artificial Sequence
  ENSG00000151131_34 (sequence is synthesized)
tttatctttgtgggctcatgtcgctgaagttgctatcctttggatgattttttttcttttatcctactttatgtccttgtgtgtttaattgtggtataaagtgggtttagtcaactggct

SEQ ID NO: 423510 - DNA, 120 bp, Artificial Sequence
  ENSG00000151131_35 (sequence is synthesized)
tcatttctagaaggttttcaggggccaaggctcaactcaggattcctggactgtatgctgtaattctggggggctgatatcaggcccctggctttgttctctggccactggaggttaggt

SEQ ID NO: 423511 - DNA, 120 bp, Artificial Sequence
  ENSG00000151131_36 (sequence is synthesized)
acctgctgtgctagaggggccaagatatttctggaccactggtcagaacacttcaatgggtggtgccagccaaagtgctttgtatggcagtggcagtgggatctgtcctcatatgcacat

SEQ ID NO: 423512 - DNA, 120 bp, Artificial Sequence
  ENSG00000151131_37 (sequence is synthesized)
gccagcaatagcagtggggtgcggtgcacactcatcagcttcagaggggtgctggcagttgcaagggtgctgtttttgtgcaggcatttgtagtggctgtggtgttagcatgggggtggg

SEQ ID NO: 423513 - DNA, 120 bp, Artificial Sequence
  ENSG00000151131_38 (sequence is synthesized)
gcgctgtggctgctgctagattttgtgtgccctctgtgcgtgtgcttacatgggtagcagtggccactcagggtaagggggcgggctgctggtctccatgcatagtttcacaccactggc

SEQ ID NO: 423514 - DNA, 120 bp, Artificial Sequence
  ENSG00000151131_39 (sequence is synthesized)
agtgttgacacaggggcagggtactggtggctgcgggactggtgccaaatgtgcgcacgtttatgctggctgcagtggctgcacagggcgcagggcaggtccactggtcactgtgcctag

SEQ ID NO: 423515 - DNA, 120 bp, Artificial Sequence
  ENSG00000151131_40 (sequence is synthesized)
ttttgcagctggtggcagtgttggtgtcggagtggggtactggtggtctccgtacctgcagatactccagtggcagtggcagcatggtggtcgggtgcagtgtgctcaagccagcagtag

SEQ ID NO: 423516 - DNA, 120 bp, Artificial Sequence
  ENSG00000151131_41 (sequence is synthesized)
tggcatggccaggtgcacatgtacccacacactggcaggaaattggaggcgaggtctgtgtacacaggtgctggcaaagtgattcgggggttggctgcatgccagcgtctgcaggcaagg

SEQ ID NO: 423517 - DNA, 120 bp, Artificial Sequence
  ENSG00000151131_42 (sequence is synthesized)
tgccatgggggagtctgcagtgggaggagagagtgggatcaggtggtctggtgcacggtctgttgtgggtgggggtagtactggagttctctgccattcaggcacgatctgccaactcag

SEQ ID NO: 423518 - DNA, 120 bp, Artificial Sequence
  ENSG00000151131_43 (sequence is synthesized)
gtgctatagcgtaggcccccaggacgcaccccacctgggcatctaaggctgcactgcaagcagggacagccaggctgaggcccagggagaggtcaggaaactgaggagtgcttagttccg

SEQ ID NO: 423519 - DNA, 120 bp, Artificial Sequence
  ENSG00000151131_44 (sequence is synthesized)
atcggccaggtctcataggcaagactgccctgcatttttcaagtctgatagttcctctagggttgaagtctcttaggggagcaaggtgagtcatgggtgatgggcgtccctggccatgat

SEQ ID NO: 423520 - DNA, 120 bp, Artificial Sequence
  ENSG00000151131_45 (sequence is synthesized)
ccactacagatgctcccgcaccaaagcctctgggctctgcaccagctagaattctgccctaccacttctctaagcagctctccctgcaagctcaagagtccatgggggtcctggggtctc

SEQ ID NO: 423521 - DNA, 120 bp, Artificial Sequence
  ENSG00000151131_46 (sequence is synthesized)
ctgccagattccagaggcctgtggtgggagtcagttgctgcttgcctgctcaactcaccccttttccaggagtcgggggccaggaacgagtcttagtgtgtggtagccccttgcagggtt

SEQ ID NO: 423522 - DNA, 120 bp, Artificial Sequence
  ENSG00000151131_47 (sequence is synthesized)
ccccgcttcctccctcttcagcccagcatctgtgtcttcccttcatccactctcagtgccctccctctgaagatctgctgggagtgcaccagtcttcctgatatcccagtctcttggtgg

SEQ ID NO: 423523 - DNA, 120 bp, Artificial Sequence
  ENSG00000151131_48 (sequence is synthesized)
cagatgttccttctggctgcatctagctgatcatcttgcctccaacctgttccctttatagcataatgtgtataaccacatttagtggaaaagcaccttactatatttaatccaatgaca

SEQ ID NO: 423524 - DNA, 120 bp, Artificial Sequence
  ENSG00000151131_49 (sequence is synthesized)
ttatacaaataatcaccggtgcccacatagatagtccccaagtcttgagtatgtgatacctggaagcataatataccttttgtaggcatcacttggtttgatgttctatatttgatagtg

SEQ ID NO: 423525 - DNA, 120 bp, Artificial Sequence
  ENSG00000151131_50 (sequence is synthesized)
gttaggttattaattggaaaggttgggatattcctttcagtgagtgtaggcaagcaaatagcagtgacatttagaacatcaaggattgctttctcttcctttggggtttcagggtaattc

SEQ ID NO: 423526 - DNA, 120 bp, Artificial Sequence
  ENSG00000151131_51 (sequence is synthesized)
tcttcgggaactcagagaggtgttggcattagtggagttgtttcctggtttttacccattagcccacaaacccaaacagttgctctgttttttctgctagagcatgagccttacctaaag

SEQ ID NO: 423527 - DNA, 120 bp, Artificial Sequence
  ENSG00000151131_52 (sequence is synthesized)
ccattgcaaattatggtcctatggattttcctgtaaggaaaaggaaagattaagacaataggaaataagggaaaaagaaaagggacatagttatcatgatgacagagaagagaactcttg

SEQ ID NO: 423528 - DNA, 120 bp, Artificial Sequence
  ENSG00000151131_53 (sequence is synthesized)
atccatgatcaaattcttaccacccatactgcagcaaaagtcttgagggtctgaacttttgctgcagtgtggatggtaagaatttggtatggtcccttccataggggtttgagggcagtg

SEQ ID NO: 423529 - DNA, 120 bp, Artificial Sequence
  ENSG00000151131_54 (sequence is synthesized)
tttcactgatgttgttttcagaagacccaatctccatgttccagattgtgaaatgcttggttgtcctccattgatagatcgtgaaaggctttttttttaacctggtgaaaatatactttg

SEQ ID NO: 423530 - DNA, 120 bp, Artificial Sequence
  ENSG00000151131_55 (sequence is synthesized)
gcataatacattaaggccttgcagtatttagtcatgtcagtttacaggagcaggagatatatgaggtttaattattaggggcataggtttttcagtaactatttcataagaaactaattt

SEQ ID NO: 423531 - DNA, 120 bp, Artificial Sequence
  ENSG00000151131_56 (sequence is synthesized)
attttgtattttctgttggggtggatctagttgcccataaggccaatggtaatacctttggacgaggcaattcaatcaattcagttaactttaccaatttcagtttaaagtttcatttgt

SEQ ID NO: 423532 - DNA, 120 bp, Artificial Sequence
  ENSG00000151131_57 (sequence is synthesized)
tcttttgagctttccagaagattaagggtgttagggatgatggtaataccattgtgttcgattaactgttttagctgttttataacttgtccagtgaaacaggttcttctattgctggaa

SEQ ID NO: 423533 - DNA, 120 bp, Artificial Sequence
  ENSG00000151131_58 (sequence is synthesized)
attcctccagggaagccccagaaggaaacatactttctaataacttattgtcatagcattggccttcctacatgataaagcttctatccgtctagagaacacaaagacttttataagaac

SEQ ID NO: 423534 - DNA, 120 bp, Artificial Sequence
  ENSG00000151131_59 (sequence is synthesized)
atattgttatcccattaagggtggcaattgatgaaatccatctgtaaacattcaaatggtccaggaggcagtagaaatgtaccacctaaaatttggattatctttccaggattatgagct

SEQ ID NO: 423535 - DNA, 120 bp, Artificial Sequence
  ENSG00000151131_60 (sequence is synthesized)
tgataaaccaaacattagttataagccattttagcaattttagaatagtcatcccaccaatattttttcaatttctgcctttagagagcataacagttctggttcaggagagtcaggaaa

SEQ ID NO: 423536 - DNA, 120 bp, Artificial Sequence
  ENSG00000151131_61 (sequence is synthesized)
ctctaagattatttgtccctctgaaagagaattttatatgcccttttgccttggagagcaagtcttgccccagcagatttactggggcagtatcacataattaaaaagtatgattttctg

SEQ ID NO: 423537 - DNA, 120 bp, Artificial Sequence
  ENSG00000151131_62 (sequence is synthesized)
taaatgacaccagtgtcagttggatggcttccagtatgggaaccttttcaacttgatttgaaaccctaccacagaaataatgtttccacagagtaaacatttttactctgagggatgtat

SEQ ID NO: 423538 - DNA, 120 bp, Artificial Sequence
  ENSG00000151131_63 (sequence is synthesized)
tagcttattaaggtagagtttatagtagatgaaagtggctctagtatccaccagaattgtataagatttttcatttgttttaacttttgtttttccatgtttatttcttttcttttttta

SEQ ID NO: 423539 - DNA, 120 bp, Artificial Sequence
  ENSG00000151131_64 (sequence is synthesized)
atagtactttgagttgctgtttatccatgtttatttaaaggtattatggggagcagttttctggagaattccttggatgctcatcaatgttgattattatctctagagttaagaccttgt

SEQ ID NO: 423540 - DNA, 120 bp, Artificial Sequence
  ENSG00000151131_65 (sequence is synthesized)
ggactcattctagtggggaaatagtatggccccaaggaaggaggcttactggtatactgaaataagaatgcaaaatctcttttccagcatcctagttgtttgcaatgaagggagacacct

SEQ ID NO: 423541 - DNA, 120 bp, Artificial Sequence
  ENSG00000151131_66 (sequence is synthesized)
tagggcaaataatttcttggtctaagatctcttggttttagcttaaaataagggagaggaagtccctttggtcttggtctttgtggttattgtaattagagagacatgagcttttcgacc

SEQ ID NO: 423542 - DNA, 120 bp, Artificial Sequence
  ENSG00000151131_67 (sequence is synthesized)
tttagtcttttacttactctattctctcaaaatgttgggctagggccaccaattcaatcatatctataacctcccatcctggtttgtgttttttattcaggttactaagttcaggatgag

SEQ ID NO: 423543 - DNA, 120 bp, Artificial Sequence
  ENSG00000151131_68 (sequence is synthesized)
ctccatttacaaatagagcagttaatcctgtttcaggcactgccagaagtatcccttggtgtattggaacctggaatgttttacaaatagtctttctgaatggaccctgtaatctgaaac

SEQ ID NO: 423544 - DNA, 120 bp, Artificial Sequence
  ENSG00000151131_69 (sequence is synthesized)
tggttcattctattttttgtctatgagattgtatgatggaccaatcaattttttgtagcaaaatcttaggaattgaattttaaaggttttcaacaatttttctaggtctcattggcccta

SEQ ID NO: 423545 - DNA, 120 bp, Artificial Sequence
  ENSG00000151131_70 (sequence is synthesized)
ctcttgatgaggttttgggggagtctttaatatcctgattaagtttttcccattctcttgtcatacattttcaagctttgccatgtcccagtatcatatgaataaattggtcagagagtc

SEQ ID NO: 423546 - DNA, 120 bp, Artificial Sequence
  ENSG00000151131_71 (sequence is synthesized)
ctggcttgtaagctcctgtgcaaattctaaaatcttcagtacatttttgagtgttttccctgggctagggaagtcttttaccgtgtctggaagcttaatttttgaccatggagtaaaggt

SEQ ID NO: 423547 - DNA, 120 bp, Artificial Sequence
  ENSG00000151131_72 (sequence is synthesized)
ggttatggcaggcaggcctggctgatcagagaatcccattttgtaaggcatttgtctaacttgccttttctcattatctttagaatgaaagagtagttgagcaaaaaggttattagactc

SEQ ID NO: 423548 - DNA, 120 bp, Artificial Sequence
  ENSG00000151131_73 (sequence is synthesized)
agagtattgaggtaaagatgggtaaagagaaagaacaaaacaggtttgaatcagtcaagatacagtctttttttgtatcatccttaagctacttaaggttttcatttgccttctgtaagg

SEQ ID NO: 423549 - DNA, 120 bp, Artificial Sequence
  ENSG00000151131_74 (sequence is synthesized)
aatcttttactacctgtatgtaccaatttaaagaatgcatctcattgcttatgaagcattttggattctttcttttgtagtgtgccttgcaagtgaacaagtttatgtaggttaaaactt

SEQ ID NO: 423550 - DNA, 120 bp, Artificial Sequence
  ENSG00000151131_75 (sequence is synthesized)
tcccactgtgggccactggaattctaattttttttgtgtgtgtgtgagtttcatttttctagaaaagcaacatgccctgagtctgtagttcttatacacgaaattggctatagttccaga

SEQ ID NO: 423551 - DNA, 120 bp, Artificial Sequence
  ENSG00000151131_76 (sequence is synthesized)
tggaggagttctagactccatggatccagatgaactcatgattccctgtcttcttgtgacttatcataggccttctactggacccagtctctggaccctgtttggtaaaagaattgttca

SEQ ID NO: 423552 - DNA, 120 bp, Artificial Sequence
  ENSG00000151131_77 (sequence is synthesized)
agtaaatttggagagctcaaaacacaaatctgtgtagctttaatctgaaagggaaatcacacacaacctccagttgctgtgagagaggaatggttacaatagacccagcaaatacattca

SEQ ID NO: 423553 - DNA, 120 bp, Artificial Sequence
  ENSG00000151131_78 (sequence is synthesized)
tttggtcactagggtgctcctgggcggttgttggaagtcgcctttggacgccacttctgacaccaaaaacttaattgttaaaacctctagacaaattaaatttaacagtttgtttgagca

SEQ ID NO: 423554 - DNA, 120 bp, Artificial Sequence
  ENSG00000151131_79 (sequence is synthesized)
aagaacaattttatgaattagcactcaaaactgaaaggttcagagtgttccactctgtggcacagagagtatgcttttataagtataaattgaacttggaagtaaactacagaaataact

SEQ ID NO: 423555 - DNA, 120 bp, Artificial Sequence
  ENSG00000151131_80 (sequence is synthesized)
ggattggttacagctaggcatttgccctatttgtgcatggtttgataacttgactgcctatgactggctgaagctcacctgtttctgtctggcttaaacctagctattcgttacaaaagt

SEQ ID NO: 423556 - DNA, 120 bp, Artificial Sequence
  ENSG00000151131_81 (sequence is synthesized)
attctgctaagttaggttttggtttgtttattactgaggtagattgcagtttgttatataggaactacaagtaccaagggagtctcaggctaatggcctcctgcttatttaatttcacat

SEQ ID NO: 423557 - DNA, 120 bp, Artificial Sequence
  ENSG00000151131_82 (sequence is synthesized)
atgtaatattggatgtattttgtttctcagagaaaccagagctagtttttaaagagttgggatatatagcatttggatgtcttcccagggtagaatgatctttattctcttctatggtag

SEQ ID NO: 423558 - DNA, 120 bp, Artificial Sequence
  ENSG00000151131_83 (sequence is synthesized)
agtttagaaagcttaattttgtgcatggtgatgagtgaatttgttagcatcttttttcttcagcatggatttcagaaacatcaattttattttaaagtaaaaataaaggccaggtgcggt

SEQ ID NO: 423559 - DNA, 120 bp, Artificial Sequence
  ENSG00000151131_84 (sequence is synthesized)
caagactgtgtctcaaaacaaataaataaataaaaattaccagttttgttttaaattatctgtttgaataaaataacctagtttttttaggttattataaagtcaaacttgtcaccatca

SEQ ID NO: 423560 - DNA, 120 bp, Artificial Sequence
  ENSG00000151131_85 (sequence is synthesized)
agatgggtttaatgagggaggaatatgtgaaaaagaaaaaagatttttacaaagaaaagaattacttatacagttgatccttgaacaatgcaggagttagggtgctgaccccctttgtgg

SEQ ID NO: 423561 - DNA, 120 bp, Artificial Sequence
  ENSG00000151131_86 (sequence is synthesized)
tcaaaaatctatgtataacttttgactccctgaaaacttaactactaatagcctactattgactagaagccttagtgaaacataaatagttaacacatattgtatatgttatatgtatta

SEQ ID NO: 423562 - DNA, 120 bp, Artificial Sequence
  ENSG00000151131_87 (sequence is synthesized)
tatattgtatttttacaataaagtaagctacggaaaagaaaatatcactaaggaaatcaggaagagaaatatatacttactgttctttaaatggaagtggatcatcattaaagacttcat

SEQ ID NO: 423563 - DNA, 120 bp, Artificial Sequence
  ENSG00000151131_88 (sequence is synthesized)
cctcattgtcttcaggttgagtaggttgaggaggaggaagcagaggggttggcacaggtggaagaggtatagaagaagaaggcatactcattgtaactttatggaaatacattgtaattt

SEQ ID NO: 423564 - DNA, 120 bp, Artificial Sequence
  ENSG00000151131_89 (sequence is synthesized)
ctgtctgactttcttacttactcattttgttaccagtggagggtcttgactctgagttgtttgacaaagaattggataaaacgtgcaaatcaatgaaaggatgaagcaacaaaagcacag

SEQ ID NO: 423565 - DNA, 120 bp, Artificial Sequence
  ENSG00000151131_90 (sequence is synthesized)
atgaagcaacaaaagcacagatttgttgaaatgaaagtacacttcacagagtgggagcaggctcaagcaagtggctcaagagtgctggttagagaattttctggggtttaaataccctct

SEQ ID NO: 423566 - DNA, 120 bp, Artificial Sequence
  ENSG00000151131_91 (sequence is synthesized)
ttggtttacaccctatttaaatgaggtagtggtctgcagccagtctgattagttgctgggtgaccaatcagaggctgaagtgaagttacagagttacaccctatgcaaacatctgattgg

SEQ ID NO: 423567 - DNA, 120 bp, Artificial Sequence
  ENSG00000151131_92 (sequence is synthesized)
ttgtggaaggtgaagtgaagttacaaagttgtaaccctgcgcaaagactaggcttgtgaccagtctgattggttgcaggaggggaccagaagtacttgccatttttcatctgtgacacag

SEQ ID NO: 423568 - DNA, 120 bp, Artificial Sequence
  ENSG00000151131_93 (sequence is synthesized)
aagcagaggagctgcaaagggagagcctctgatccttttgttacttgggcgtggaaagttggggttttccttttgattcagtctaggaagtcagtgcgaattggccttaagttccctgcc

SEQ ID NO: 423569 - DNA, 120 bp, Artificial Sequence
  ENSG00000151131_94 (sequence is synthesized)
tccaggccctattctcctggctcagtttctctaaaaatatgtctatacagtaccaatcttctaccatttgctttagttttagtgtgtgtatcatagaaaggtccatgttataaaagaagt

SEQ ID NO: 423570 - DNA, 120 bp, Artificial Sequence
  ENSG00000151131_95 (sequence is synthesized)
agcaaccttgaatgatcagaacccttctgccagattgtctaatgtcaatgtgttttctgatactgatgcttctccatcttcctcatcgtctggcactgtggctcagaagcattcatctcc

SEQ ID NO: 423571 - DNA, 120 bp, Artificial Sequence
  ENSG00000151131_96 (sequence is synthesized)
atcaagctgtcttctgttaattcctctggtgtgatgtctgttagcttttgaatttctccaagatccctgtcttgaaacccttcactccacctgccccaccttttttgccacattcacaat

SEQ ID NO: 423572 - DNA, 120 bp, Artificial Sequence
  ENSG00000151131_97 (sequence is synthesized)
ctctttcatgatttccttgattggctctgtcgtaaatcttatgaattcatgcatgatatctggacacagtttttttcagcacaaatttattgtttcaggcttgatggctttcacagcttt

SEQ ID NO: 423573 - DNA, 120 bp, Artificial Sequence
  ENSG00000151131_98 (sequence is synthesized)
ttctataacaatgatattgtcttcaatggtgtaatcattctagaatttcatgatgttctatcagtgttctcttgcatagctttgaaaattttttccatagagtatcatgtataatgagcc

SEQ ID NO: 423574 - DNA, 120 bp, Artificial Sequence
  ENSG00000151131_99 (sequence is synthesized)
ttaaaggtcttcatgatcccctgaccctagaggctgaattagaagccttctgtttgggggaaagcagaccactttgataccttcaatgttgaactcttgggtttctgggtgacctgggca

SEQ ID NO: 423575 - DNA, 120 bp, Artificial Sequence
  ENSG00000151131_100 (sequence is synthesized)
ttgtctaatatcaaaagaactataaaagacagttccttatttgcaagatacttcttgaccttagagacaaagcattgatggaaccaatccagacaaaggggtcttgtccaagcctttttg

SEQ ID NO: 423576 - DNA, 120 bp, Artificial Sequence
  ENSG00000151131_101 (sequence is synthesized)
ttgtaaaccagaagactggcaactcgtatttatcttttcccttccaggctcaggggttagcagccttatagataagggcagtcctgatcataaatctaattgcatttgcacaaaacagta

SEQ ID NO: 423577 - DNA, 120 bp, Artificial Sequence
  ENSG00000151131_102 (sequence is synthesized)
gagttaacctatcccttcctgccttaaatcatgctcacttctcttactaattgatgtcttttgtggctcttttttttttaacttttaggttcaagggtacttgtgtgcaggtttgttata

SEQ ID NO: 423578 - DNA, 120 bp, Artificial Sequence
  ENSG00000151131_103 (sequence is synthesized)
taggtattttgtgtgtcataggggtttggtgtgcagattatttcgtttgtggcattttttttttccagatgagggtacttctgtttgtatttaaaacctgtttgagaagatatcctttct

SEQ ID NO: 423579 - DNA, 120 bp, Artificial Sequence
  ENSG00000151131_104 (sequence is synthesized)
tctccatgatttttttattggcacctgggaacttggctggtgcctcttggtcagcagaagctgtttcttctattatcttgactttttttttttttttaagtcaaacctctaaaattatca

SEQ ID NO: 423580 - DNA, 120 bp, Artificial Sequence
  ENSG00000151131_105 (sequence is synthesized)
aagcatcttatgctggcattgaattatccagctttagacccttcactttccctttgctctatgttgtcatttaataacttccctgtttttcaaatcatatgagagtctgtagcctttttg

SEQ ID NO: 423581 - DNA, 120 bp, Artificial Sequence
  ENSG00000151131_106 (sequence is synthesized)
atagcaatcctgtacccacataaaagctgcattttcaataggaaataaaaatgtatttcacaaaaagatttttgtgcccgctagcgtagctgcagcaatggcttcacaaatttccttttc

SEQ ID NO: 423582 - DNA, 120 bp, Artificial Sequence
  ENSG00000151131_107 (sequence is synthesized)
tttttaacaatggtcctgatgctggattcatttatcttgaaatggtgggcaactacagatgcagacctcagtctatggtacacatcaagcaattcatatttttcttgtaatgtcatgact

SEQ ID NO: 423583 - DNA, 120 bp, Artificial Sequence
  ENSG00000151131_108 (sequence is synthesized)
tttctctgcttcttggaagaaattccaacatcactagtagcactttatatggttcctacctatggtgttattcaaggtttacaatattgcactaaagacgaagaacatgcgataaccata

SEQ ID NO: 423584 - DNA, 120 bp, Artificial Sequence
  ENSG00000151131_109 (sequence is synthesized)
agagatcacttgcaggtttgttacgtaggtatacacgttccatgacggtttgctgccgccatcaacttgtcgtctacattaggtattcctcctaatactatccctcccctaggcccccac

SEQ ID NO: 423585 - DNA, 69 bp, Artificial Sequence
  ENSG00000151131_110 (sequence is synthesized)
aagttctttgtagattatggatattagctctttgtcagatggatacattgcaaaaactttctcccattc

SEQ ID NO: 423586 - DNA, 120 bp, Artificial Sequence
  ENSG00000151131_111 (sequence is synthesized)
taaatttgtttaagttctttgtagattatggatattagctctttgtcagatggatacattgcaaaaactttctcccattctataggttgctggttcactctgatgatagtttattttgct

SEQ ID NO: 423587 - DNA, 74 bp, Artificial Sequence
  ENSG00000151131_112 (sequence is synthesized)
agatcccatttgtctattttagcttttgttgacattgcttttggtgtttagtcatgaagtctctgccaatgtct

SEQ ID NO: 423588 - DNA, 69 bp, Artificial Sequence
  ENSG00000151131_113 (sequence is synthesized)
tggggttttctaattataccctttatttctttctcttgcctgcttgccctgaccagaacttccaatact

SEQ ID NO: 423589 - DNA, 88 bp, Artificial Sequence
  ENSG00000151131_114 (sequence is synthesized)
tctctgatagaattctgctgtgaatccttcaggtcctgggctttttttggttagtagtctattagttactgcctcaatttcagaactt

SEQ ID NO: 423590 - DNA, 65 bp, Artificial Sequence
  ENSG00000151131_115 (sequence is synthesized)
tttcctggtttaaggtgtttatagttatttgtatagagttgtttatagtattctctgatggtggt

SEQ ID NO: 423591 - DNA, 84 bp, Artificial Sequence
  ENSG00000151131_116 (sequence is synthesized)
tgggcttgtggtctatctattttgttaatcttctcaaaaaaccagctcctggattcgtggattttttgaagggttttttgtgtc

SEQ ID NO: 423592 - DNA, 120 bp, Artificial Sequence
  ENSG00000151131_117 (sequence is synthesized)
aatttgattgcactgtggtctgagagaccatttgttatgatttccgttcttttgcatttagctgaggagtgttttacttcaattatgtggtcaattttagaaaaagtgtgatgtggtgct

SEQ ID NO: 423593 - DNA, 85 bp, Artificial Sequence
  ENSG00000151131_118 (sequence is synthesized)
ttatttttcccacttacaatttggtatgtttttgcagtggctagtgccagtttttcctttccatatttagtgctgccttcaggag

SEQ ID NO: 423594 - DNA, 70 bp, Artificial Sequence
  ENSG00000151131_119 (sequence is synthesized)
gatggtccttacaatttggtatgtttttgcagtggctagtgccagtttttcctttccatatttagtgctg

SEQ ID NO: 423595 - DNA, 89 bp, Artificial Sequence
  ENSG00000151131_120 (sequence is synthesized)
ctttcaggtacaccaatcaaacgtaggctacgctttgttccttttcattcttttttctctaatctgtcttcacgctttatttcattaag

SEQ ID NO: 423596 - DNA, 66 bp, Artificial Sequence
  ENSG00000151131_121 (sequence is synthesized)
cattcttttttctctaatcccacttgatcgattaggccattgatacttgtgtatgcttcacgaagt

SEQ ID NO: 423597 - DNA, 85 bp, Artificial Sequence
  ENSG00000151131_122 (sequence is synthesized)
acatgctcctttagctcggaggaatttgttattatctgtattctctgtccagttttgtttccttgctggtgaggagttgtgatcc

SEQ ID NO: 423598 - DNA, 120 bp, Artificial Sequence
  ENSG00000151131_123 (sequence is synthesized)
tcagcctttttgcgctgggttttcctcatcttcctggatttacctacctttgctcttttatgttggtaacctttgggtggggtttctgtgtggacgtcctttttgttgatgtagatgcta

SEQ ID NO: 423599 - DNA, 120 bp, Artificial Sequence
  ENSG00000151131_124 (sequence is synthesized)
gctgcctgttccttcctctggaagcttcctcccagagggtcacccgctagatgccagctggagatctcctgtgtgaggtttctgtcaacctctgctgggaggtgtctcccagtcagtagg

SEQ ID NO: 423600 - DNA, 60 bp, Artificial Sequence
  ENSG00000151131_125 (sequence is synthesized)
gtgaggtttctgtcaacctctgctgggaggtgtctcccagtcagtaggcataggggtcaa

SEQ ID NO: 423601 - DNA, 85 bp, Artificial Sequence
  ENSG00000151131_126 (sequence is synthesized)
taagtctgctgaagctgcgcccacagccacccgatcccccaggtgttctgtcccagggagataggacttttatctataatcccct

SEQ ID NO: 423602 - DNA, 120 bp, Artificial Sequence
  ENSG00000151131_127 (sequence is synthesized)
aggaatctagagaggcagtctaggcacagctgctttgccgcactgtggtgggctctgcccaatttgaatttccctgtggctttatttacactgtgaggagaaaactgcctactcaagcct

SEQ ID NO: 423603 - DNA, 85 bp, Artificial Sequence
  ENSG00000151131_128 (sequence is synthesized)
tttatttacactgtgaggagaaaactgcctactcaagcctcagtcgtggtggacaccccttttcccaccaagctcaagtgtccca

SEQ ID NO: 423604 - DNA, 81 bp, Artificial Sequence
  ENSG00000151131_129 (sequence is synthesized)
tgttccaggcaccactggggtatgaagaaaaactcctgcagctagctcggtgtttgcccaaacagccacccagctttgagc

SEQ ID NO: 423605 - DNA, 77 bp, Artificial Sequence
  ENSG00000151131_130 (sequence is synthesized)
gttccaggcaccactggggtatgaagaaaaactcctgcagctagctcggtgtttgcccaaacagccacccagctttg

SEQ ID NO: 423606 - DNA, 83 bp, Artificial Sequence
  ENSG00000151131_131 (sequence is synthesized)
tgcttcccttggcttccctgggctaggggagggagttccctaacgctttgtgcttcccaggtgaggcaacaccccacccttct

SEQ ID NO: 423607 - DNA, 120 bp, Artificial Sequence
  ENSG00000151131_132 (sequence is synthesized)
cgctttgtgcttcccaggtgaggcaacaccccacccttcttctgctccccatccatgggctgtacccactgtctaaccagtcccaatgaggtgagctgggtacctcagttggaaatgcag

SEQ ID NO: 423608 - DNA, 120 bp, Artificial Sequence
  ENSG00000151131_133 (sequence is synthesized)
aaatcgcttgccttctgcgttgatctcgctgggagctgcagaccggagttgttcctatttggccatcttgccagccagccgagagatcactttttactgtgataggcaatttactgcaga

SEQ ID NO: 423609 - DNA, 120 bp, Artificial Sequence
  ENSG00000151131_134 (sequence is synthesized)
gaggaactgttcacacagagatgattagtgtcacatggtatcgtgagtagatacttgcaacacgagctcatcgcaatagcaacaggaggtgaccacaaagttattacagtactagagtta

SEQ ID NO: 423610 - DNA, 120 bp, Artificial Sequence
  ENSG00000151131_135 (sequence is synthesized)
attttatgcagttatgatttaatactgtgtctttgcatttgtttgtatttctttcaactgcaaatggtactaggtaccgtctataagtgtttgtgtgggtaagtgctgataaattctaac

SEQ ID NO: 423611 - DNA, 120 bp, Artificial Sequence
  ENSG00000151131_136 (sequence is synthesized)
tttttataatagatttatatattttttatggtagaaatgatgagatagactggtatctacatatatttaatgcatttttgacgtacctaactttttaattttttttaagccatgcagttc

SEQ ID NO: 423612 - DNA, 120 bp, Artificial Sequence
  ENSG00000151131_137 (sequence is synthesized)
atctgtgaattttttcaaattgtcacaaatctccaaaaatgttaaaaatatatttattgaaaataatccatgtataagtggacccacacagttcaaatctgtgttgttcaagtgtcacct

SEQ ID NO: 423613 - DNA, 120 bp, Artificial Sequence
  ENSG00000151131_138 (sequence is synthesized)
gtatttagctattctcaaacatacctatttttattttaagaattcctttctagtttgagttggaaaactgatgcttgtagtgtaatcactgttggtgacagtgcagtcatacaatgcatg

SEQ ID NO: 423614 - DNA, 120 bp, Artificial Sequence
  ENSG00000151131_139 (sequence is synthesized)
cagaatttactggttggaaagatcagtttttagttgatttttttttttttgtaaagcaaaacttcttatctcagctattaaaactgttccacacagttgcccacagcctgaaacctatca

SEQ ID NO: 423615 - DNA, 120 bp, Artificial Sequence
  ENSG00000151131_140 (sequence is synthesized)
aatgtagaaaatagggacatcacagcaaaatttggagggcatagtacaaagaaaggcgacagctggttttcccttccaaaggtcaaaatgacctcaggctggagttgcctttctgcccta

SEQ ID NO: 423616 - DNA, 120 bp, Artificial Sequence
  ENSG00000151131_141 (sequence is synthesized)
ttcttggttttattaagtttatttgggatctcatctgccatgagcctgacttttgctcaggaaagaggcctgagaatttaaggactatctgtgagtgggcagagctgatggaactttgtc

SEQ ID NO: 423617 - DNA, 120 bp, Artificial Sequence
  ENSG00000151131_142 (sequence is synthesized)
tgctaatgttttcgggttttctttgaattctgttctttccaattcttcacattggcctgagtcttcttgtgattgctgtgaagataattatccaggtcctttctgatctttcttattgga

SEQ ID NO: 423618 - DNA, 120 bp, Artificial Sequence
  ENSG00000151131_143 (sequence is synthesized)
aattggaaccagctctccttgactgtgactcactcgctaaatgtgtaaagaaatgagcagatctgaaacaagattttttcagctggaaagagtacaccagaactgtacacagccgtgatg

SEQ ID NO: 423619 - DNA, 120 bp, Artificial Sequence
  ENSG00000151131_144 (sequence is synthesized)
agttattggcataggtacttatttaaagattttcttccactggatgctatgctaccttgtgtgaacagttgcatttgtctgtttcactacttagcatagtgtgtggtgcacagtaggcat

SEQ ID NO: 423620 - DNA, 120 bp, Artificial Sequence
  ENSG00000151131_145 (sequence is synthesized)
ggaataatgataataaatggattaaatggatgcatgaaggtatacaggagactttaagctatcatagacggttccaggcaggagaatatgaagatgtaatttcaagtacagttgttattg

SEQ ID NO: 423621 - DNA, 120 bp, Artificial Sequence
  ENSG00000151131_146 (sequence is synthesized)
tcagttttgctttccatggtttcagctacccatagtcaatcacaatataaaaatattaaatggaacattccagaaataatacataagttttaagttgctgaataatgtgatgaaatctta

SEQ ID NO: 423622 - DNA, 120 bp, Artificial Sequence
  ENSG00000151131_147 (sequence is synthesized)
ggctgtcccacttcgtctcgcctgggatgtgaattgtccttttgtcctgcttatgcacgctgtatatgttacccaccgtttagtcacttagcagccatctggattctcagattgaaaaca

SEQ ID NO: 423623 - DNA, 120 bp, Artificial Sequence
  ENSG00000151131_148 (sequence is synthesized)
gtgtgtatagggttctgttctatcaaatgtttcaggcatcctctggggggtcttggaatgtatcccccatggataagactacttgtataatctggtaaaatggatgaattattcataaat

SEQ ID NO: 423624 - DNA, 120 bp, Artificial Sequence
  ENSG00000151131_149 (sequence is synthesized)
aatgtcagaaccagctatttcaaacaagattagattctctagcctcatatcatatgcaaagataaattatatatggattaaggatttaaatgtaaaaaaagaaattataagagttccata

SEQ ID NO: 423625 - DNA, 120 bp, Artificial Sequence
  ENSG00000151131_150 (sequence is synthesized)
ccgaaatgcaggtttatatttagtaaaatagtcaagaaaggtttttttttttttttttaaaaagcataacatcaaagcctaaaattacaaaggaaaagagtggaaaattcatccccataa

SEQ ID NO: 423626 - DNA, 120 bp, Artificial Sequence
  ENSG00000151131_151 (sequence is synthesized)
atattaaaaactagtgtgttgcaaataaattcaaaagataagggaaatactggggaaaatatctgaaacatgacagagtgtcattaatatatcatgggcttttacattttagaaaaaaat

SEQ ID NO: 423627 - DNA, 120 bp, Artificial Sequence
  ENSG00000151131_152 (sequence is synthesized)
gacggatatctcagtagtgaaaagactataggaaatgaagaagtaattcacagaaaaagggtcaactccatttatcagagaaatgcaaatgaaatcaggattgcattcttcacctgtcaa

SEQ ID NO: 423628 - DNA, 120 bp, Artificial Sequence
  ENSG00000151131_153 (sequence is synthesized)
attggcagatgcaacagtagctggtacttactgagccctttctgtgttagctactagtctaagagttaccaccactcatacatatgtaaaggctaatggagttgtaaatgtaacttttga

SEQ ID NO: 423629 - DNA, 77 bp, Artificial Sequence
  ENSG00000151131_154 (sequence is synthesized)
gctcccctttataaaaccatcagacctggtgagacttattcacatgagaacagcataggaaagacccgccccgatga

SEQ ID NO: 423630 - DNA, 89 bp, Artificial Sequence
  ENSG00000151131_155 (sequence is synthesized)
ggagctcccctttataaaaccatcagacctggtgagacttattcacatgagaacagcataggaaagacccgccccgtacaacacgtgag

SEQ ID NO: 423631 - DNA, 120 bp, Artificial Sequence
  ENSG00000151131_156 (sequence is synthesized)
acacagccaaaacatatcagtatgttatggccttatataaaagttgttttgtttgtaagcagtttgccctacagtgtgtggaaagtgcatcactgttgtgctttggttgtccaactcttt

SEQ ID NO: 423632 - DNA, 120 bp, Artificial Sequence
  ENSG00000151131_157 (sequence is synthesized)
gcttaccctgatgcttaggtgtgagttgatggcagtttggcatttggagagcagttgcactcctaaaatgagtgaaatgttctcttcaaacttgtggcgtaccgtctttctatggctctg

SEQ ID NO: 423633 - DNA, 120 bp, Artificial Sequence
  ENSG00000151131_158 (sequence is synthesized)
tgacagttacagatccgaaaattaggtgtaatggcttttgaagcaaaaatctcattctgaataaatctcccatctgttccaataacattttaattgcgcatcaaatatggtacttatttt

SEQ ID NO: 423634 - DNA, 120 bp, Artificial Sequence
  ENSG00000151131_159 (sequence is synthesized)
cgcatcaaatatggtacttatttttaaaaactgcctagcaggatagtttgtgttactctgcctgtatccatgaccgtgataagaaatgtaagaaaaggccaggcatggtggctcacacct

SEQ ID NO: 423635 - DNA, 83 bp, Artificial Sequence
  ENSG00000151131_160 (sequence is synthesized)
tcacctgaggtcaggaatccagacaagcctggccaggagccagatgcggtggtgcatatctgtaatcccagctacttgggagg

SEQ ID NO: 423636 - DNA, 120 bp, Artificial Sequence
  ENSG00000151131_161 (sequence is synthesized)
aaaaaaaaaaaaaaaatgtaagaaaagaggttgagtcttattttcatttgtatttctctcactgcctagcatagtgcctttcactcagttggaatatataataaatgttcattaaactga

SEQ ID NO: 423637 - DNA, 120 bp, Artificial Sequence
  ENSG00000151131_162 (sequence is synthesized)
tctggttagcaacaaagagaactaaacggatatatctgcttgaccatggaaacaatagcaaaaaaagatgaagaataaagatgtgttggccgagcgtggtggctcacacctataatccca

SEQ ID NO: 423638 - DNA, 120 bp, Artificial Sequence
  ENSG00000151131_163 (sequence is synthesized)
agaccatgagtcaaccttcagggtggaggtcacatggcctggcaaagacagaaaaagagtttgcatctcacatactagtcctaactgcctgtctctggactccttgaaagtgagagaaaa

SEQ ID NO: 423639 - DNA, 120 bp, Artificial Sequence
  ENSG00000151131_164 (sequence is synthesized)
ccacataaaatattattgctactactaatagggtgtacaatttcttaaaacacttgtagccagttatgttttggaattcagaattttttggactttagaagtgtaatatagtgcatatac

SEQ ID NO: 423640 - DNA, 120 bp, Artificial Sequence
  ENSG00000151131_165 (sequence is synthesized)
cttatattatctactaccccagcaggatttgggtaagcctcccataatcaaacatgctagtatttattcactgaaacatttgaatattcactctaagtgatgtaaataaatattattaat

SEQ ID NO: 423641 - DNA, 120 bp, Artificial Sequence
  ENSG00000151131_166 (sequence is synthesized)
agattatgttcatttaggtcagggtttggcatcaaacgagtttgaaccaatcaaacaattttcaggtttcagaactatttgggtttcataattggggataacagatggacctgaactacc

SEQ ID NO: 423642 - DNA, 120 bp, Artificial Sequence
  ENSG00000151131_167 (sequence is synthesized)
attagtaaatatcaatatatgcatgactttgtggctgaaccacaataaaaatttcatttttgtgcaaacctgctatgttgcagacttgtctaatcctgtagtgtacaaatactcgtttcc

SEQ ID NO: 423643 - DNA, 120 bp, Artificial Sequence
  ENSG00000151131_168 (sequence is synthesized)
aatcctcaaaacataacttgcaaagtatgtattactgtgaccattttatagaggaggaaagtaaggttctgagagagaaaataactttaacaacatcggctgataagggccagagctgag

SEQ ID NO: 423644 - DNA, 120 bp, Artificial Sequence
  ENSG00000151131_169 (sequence is synthesized)
acttgactcaggtctgtctgactgtacattaacattggtggcagcaatgtatgcagatgaaatatgatgtttcccagtctccttagcagatagagatggccaaggagggatatgagcaaa

SEQ ID NO: 423645 - DNA, 120 bp, Artificial Sequence
  ENSG00000151131_170 (sequence is synthesized)
aggtactgggaaggtaagaatgctttgttaaattcctcttaccactccccctttctcacttccttctttttgctgctgggaatgtggttgcaatgactggtactgcagtggttattatga

SEQ ID NO: 423646 - DNA, 120 bp, Artificial Sequence
  ENSG00000151131_171 (sequence is synthesized)
gtctatgaggaacatgcatactgcagtttgctacaagccctacatctcccttttgtatccccagtgctggagctagtgttgttgccgttgatcaccctgtgtttgctatttattatcata

SEQ ID NO: 423647 - DNA, 120 bp, Artificial Sequence
  ENSG00000151131_172 (sequence is synthesized)
tctgctccagaggatgcactacaaggcaccatcttaaaactagaggccaaacctgctgacacctttatcttagacttcccggcctccagaactgtaagagaataaatttctgttctttat

SEQ ID NO: 423648 - DNA, 120 bp, Artificial Sequence
  ENSG00000151131_173 (sequence is synthesized)
agatctgaacaacaaaattcattgacttaggatgagatgatgcctccaccatgaaacctaaattctgaagcctgaggaagtcctgaaggaccccagccatcacgattagcccctgatcaa

SEQ ID NO: 423649 - DNA, 120 bp, Artificial Sequence
  ENSG00000151131_174 (sequence is synthesized)
tccgtttggaagaatctgagagaccagcacaatagtgttcacaaaattaggggctgaggcagctaccttggaccatgagatggaagtccagcattggtaaggacctgagaattcttgacc

SEQ ID NO: 423650 - DNA, 120 bp, Artificial Sequence
  ENSG00000151131_175 (sequence is synthesized)
cagtcatcccaagatgcactcacccagagggtcagcttttccatccttgtctggaactgtgaacacccctactactcggtggccctctttgcggaggtggctatagacttcttgtccaaa

SEQ ID NO: 423651 - DNA, 120 bp, Artificial Sequence
  ENSG00000151131_176 (sequence is synthesized)
gaggctctggccaattagtgccaacttcagcttgtttttgaaataaacctgtgaaacaattcaatgacgaagacataagcatggatagaagacactggatgagggtgagggttaaaaaag

SEQ ID NO: 423652 - DNA, 120 bp, Artificial Sequence
  ENSG00000151131_177 (sequence is synthesized)
atagctattgggtacgatgttcactctttgggtatcaggtacaccaaaagcccagacttcaccactactcaatatatgcatgtaagaaacctacccttggccgggcacggtggctcacgc

SEQ ID NO: 423653 - DNA, 120 bp, Artificial Sequence
  ENSG00000151135_0 (sequence is synthesized)
acagtcttccagctccacatcctgagaggacgcctctggagccgcgactgcccggggttgtgccggccgccgctgccgcccaggccgcctcagctctcctctgcgccggcccgctcactc

SEQ ID NO: 423654 - DNA, 120 bp, Artificial Sequence
  ENSG00000151135_1 (sequence is synthesized)
cgcccggccccagccctagcgctggccgcgaccccggcgcctttgaaacttctgctggtgtgagtgccctcaggggttccccaggaatatcgatacaacaccaacaggagatcatgaatc

SEQ ID NO: 423655 - DNA, 120 bp, Artificial Sequence
  ENSG00000151135_2 (sequence is synthesized)
agacagataaaaatcaacaagaaatcccatcataccttaatgatgaaccaccagaaggttcaatgaaagatcacccacagcagcagccaggcatgttgtcccgtgtgactgggggtatct

SEQ ID NO: 423656 - DNA, 120 bp, Artificial Sequence
  ENSG00000151135_3 (sequence is synthesized)
tcagtgttacaaagggagctgttggtgccaccattggtggtgtggcttggattggtggaaagagtctggaagtgaccaaaacagctgttacaactgtgccttccatgggaatagggctgg

SEQ ID NO: 423657 - DNA, 120 bp, Artificial Sequence
  ENSG00000151135_4 (sequence is synthesized)
tgaaagggggtgtctctgctgtggctggaggtgttacagctgttgggtctgctgttgtaaacaaagtgcccttaacaggaaagaagaaagacaaatctgactgaaatatagagatacact

SEQ ID NO: 423658 - DNA, 120 bp, Artificial Sequence
  ENSG00000151135_5 (sequence is synthesized)
tgcgctccacagcactgtaatgccagtggcattgaattgctaaattatggactacaaccaagtcaactgttttggacgtttatcttctaaactgctgtgttgaaagtattgatgactggc

SEQ ID NO: 423659 - DNA, 120 bp, Artificial Sequence
  ENSG00000151135_6 (sequence is synthesized)
tttcatctaaaaagaagagaccaatacgagcacagtatatgaaggtttctcatacttaagttccaggtttttatctggtaaaatgttacacttactcggttgtaactgaagatatggtat

SEQ ID NO: 423660 - DNA, 120 bp, Artificial Sequence
  ENSG00000151135_7 (sequence is synthesized)
gtttgaatatttactataagtctttcagtttgactaaaaatgtgaaagttgaatttagtagatgatcttcacagttccatatgtataatgtgccaggtaactcacctgccccttaagaag

SEQ ID NO: 423661 - DNA, 120 bp, Artificial Sequence
  ENSG00000151135_8 (sequence is synthesized)
ggaaccttgaattacataagccgtacctttgatgtgcctaatagtttcagatgtcttagttttttataaccatagttgattaggccaagaggcattcatttcttatttaagctggcaaaa

SEQ ID NO: 423662 - DNA, 120 bp, Artificial Sequence
  ENSG00000151135_9 (sequence is synthesized)
ttagcaggaattagagaagtttaaaaagataaatggttttatgataatgttaaccatcttttgttagtaaatatgcgttctattattttaatcattgatgccttacaaaagaaaacatct

SEQ ID NO: 423663 - DNA, 120 bp, Artificial Sequence
  ENSG00000151135_10 (sequence is synthesized)
tttctaataccctgaatatgtgctgttcttagaatcatctatggattcttttaaaggttgtttgtgaaattagttttccctttttagaatctcaggagtagtggggtaaagacatttcct

SEQ ID NO: 423664 - DNA, 120 bp, Artificial Sequence
  ENSG00000151135_11 (sequence is synthesized)
gctgtcagtggataagacagagcttgttaactgttttggcagtagttaaaatcaaattgtacacttctcagcctgggttcatgcttcatcattaatacacctcacagtgcctaaggaaca

SEQ ID NO: 423665 - DNA, 120 bp, Artificial Sequence
  ENSG00000151135_12 (sequence is synthesized)
tttacttactggtcagaaggtattttggaagagtttcatattaaggaggaacaaataataattttaagttcttaaaaattacctaaaacaccccaaatataaaaagaagccttcacacct

SEQ ID NO: 423666 - DNA, 120 bp, Artificial Sequence
  ENSG00000151135_13 (sequence is synthesized)
agctccatagattagttttgaatataaagtatataaaagtgcatcagtggtttatataggctttaaaaacatgttatcttacagtcctttaaagcagccatagagtttgtatcatttttc

SEQ ID NO: 423667 - DNA, 120 bp, Artificial Sequence
  ENSG00000151135_14 (sequence is synthesized)
aagccaatttcagtcagggatttgaattgtttgattatggatgataaatgtgtcatatcttattaatatgtctcatgtctcgttccttcttaatatgatttagctggaattcattttctt

SEQ ID NO: 423668 - DNA, 120 bp, Artificial Sequence
  ENSG00000151135_15 (sequence is synthesized)
ttcgtttcatgtttaatttcataaaacgtttaacaattggcatatatacttggcattcctgtccaccaaggattgtaatccaagcctgggaaaatcttaaatttctttttacttaaatct

SEQ ID NO: 423669 - DNA, 120 bp, Artificial Sequence
  ENSG00000151135_16 (sequence is synthesized)
ggaaatttgtctccattctgccacctttttttttttttttttttatagtggaggggaggaaaggggggtgataccttgcagtaagtaagtcgaaatagcatgcctgaaaatttgaaacag

SEQ ID NO: 423670 - DNA, 120 bp, Artificial Sequence
  ENSG00000151135_17 (sequence is synthesized)
accattctaacacccaaggcttgtttataaaatacttgagaattacattaatgtggaatcaacagatgcagaagaatataacataacttttaaaagctttcataaataccagcagcaatt

SEQ ID NO: 423671 - DNA, 120 bp, Artificial Sequence
  ENSG00000151135_18 (sequence is synthesized)
gtaagcaaatctacaaaggttcttgaacctttctattatatacaaaactgaaaagtcattaaggagttcaactaatcaggaattaaatggtcatttatttcatgcagtatgatttaaggt

SEQ ID NO: 423672 - DNA, 120 bp, Artificial Sequence
  ENSG00000151135_19 (sequence is synthesized)
atttcttgagattctggtcaaatgtcataatcagcaaacgggattaaaaaaaaaactccaaaatcactaaataattatctaaataatggtattggagaacttgtttcctgctatttggaa

SEQ ID NO: 423673 - DNA, 120 bp, Artificial Sequence
  ENSG00000151135_20 (sequence is synthesized)
gagattgttgcttcattgctagtttgtatttctaacttctacagttatagactccactgtgctttgtgtctgaatttctcagtatagacattttgtttactgtatgcttgcatatttatt

SEQ ID NO: 423674 - DNA, 120 bp, Artificial Sequence
  ENSG00000151135_21 (sequence is synthesized)
ttcaactttgtttgtctttaaaattgcttgaggaaaaatggttgtaattaatttctgctacagaaaagccacctggtacgttttgtctcatcaggattgttttaaattctaaactataag

SEQ ID NO: 423675 - DNA, 120 bp, Artificial Sequence
  ENSG00000151135_22 (sequence is synthesized)
tttgttcagaggggcttttgcaatgatagcagaaaactgtacaaatgtacagttagttatagaggttcttgttgaaatgaacttaccatctgatgatatgtatgtacagctgtgtacttg

SEQ ID NO: 423676 - DNA, 120 bp, Artificial Sequence
  ENSG00000151135_23 (sequence is synthesized)
agtcttttttagtttacttagaaagactagcagtttgacctgttaaacaggactagttcaagtcaagaaactaaggttgttgtatacacctggaggcatctgttattcagcttatccttt

SEQ ID NO: 423677 - DNA, 120 bp, Artificial Sequence
  ENSG00000151135_24 (sequence is synthesized)
gagtgggtatttggcacaatgaggataaacttatgtgacccacttgaatggctgatctaataatgttgacattatgcattctgtacttagtgaaatgtcagatgaaaataactgatgaat

SEQ ID NO: 423678 - DNA, 120 bp, Artificial Sequence
  ENSG00000151135_25 (sequence is synthesized)
aatttttttgtattaaagggatgggaaaagaacacatgaatttgttaataaagcactatgatctgcaaacgatggaatgtttcataaagatctaaagaaataaaggaaactttaaaacag

SEQ ID NO: 423679 - DNA, 120 bp, Artificial Sequence
  ENSG00000151135_26 (sequence is synthesized)
agtgctgggtgtacaacgtggagcggagggaggaggtgccaagctcagtgctagccacggcgcctccagggtcattttctgcctcctgccacgtcactcactgctaaagaaaaaaaaaag

SEQ ID NO: 423680 - DNA, 120 bp, Artificial Sequence
  ENSG00000151135_27 (sequence is synthesized)
atttgctagtgcctaaagggatcagtagggagagaaggggccacccggaagggtttagaaacacctagagaaaagggaagggttcttaatttgatttttgcgtccttgtgaacactgtgc

SEQ ID NO: 423681 - DNA, 80 bp, Artificial Sequence
  ENSG00000151135_28 (sequence is synthesized)
gccggaccctgcgagaacgggtgggcgtgtgcccggtgggcgcgggaggggcccgggctgcacgagcgcgcgtgcgcgtc

SEQ ID NO: 423682 - DNA, 120 bp, Artificial Sequence
  ENSG00000151135_29 (sequence is synthesized)
tttattaaatgccgcagtttgaagtaggagagaaacaagatgaagactagttgtatagtgggtacaaaatgttgtttatctgaataatgttgatgaaatcgcaatttagcatgtgataag

SEQ ID NO: 423683 - DNA, 120 bp, Artificial Sequence
  ENSG00000151135_30 (sequence is synthesized)
gccaaaagcaatggaatggaccctaagggaaaataaaatggacctgtgctgcctctttcctcttgtgccactctcccaatcactcaaccctgctccaactgtactggctgctattcttct

SEQ ID NO: 423684 - DNA, 120 bp, Artificial Sequence
  ENSG00000151135_31 (sequence is synthesized)
acaattgcttccgggcagcgttccaaaatactggctacagcagtctcatcggcacctagttcttgtaaaatattcgcaatttcttcaacataggtttcatcctctaaaagtacccatcct

SEQ ID NO: 423685 - DNA, 120 bp, Artificial Sequence
  ENSG00000151135_32 (sequence is synthesized)
tttaatctacgaattttcctaatgtcaactgaacatttatagagcttttccactgttcttgtattttctttgctcgactgtttatcagttgtataggtgaagcatgctaagaaaggtctg

SEQ ID NO: 423686 - DNA, 120 bp, Artificial Sequence
  ENSG00000151135_33 (sequence is synthesized)
tattttggaggtgatcgcatctttctgaaagaacacagcctgcaggactgggatctcagcagcagcttccacaacatggctgcaatctactagctagtttccaccgtcctgggacttaaa

SEQ ID NO: 423687 - DNA, 120 bp, Artificial Sequence
  ENSG00000151136_0 (sequence is synthesized)
cgctccggtgcagggcaggctggcgccgagcgaaccagggccgggaactgggagccgggagccgggagccagctgcccgcggagctgcggcggcggcggcatctggggtggtctcagtcc

SEQ ID NO: 423688 - DNA, 120 bp, Artificial Sequence
  ENSG00000151136_1 (sequence is synthesized)
ggggtggtctcagtcccacgaacaccgtggccggcgcccggtggctactgcgcccagcggggctcagggaagagcggtctagacactttttattttggaagaaaggggcaagccccggcg

SEQ ID NO: 423689 - DNA, 120 bp, Artificial Sequence
  ENSG00000151136_2 (sequence is synthesized)
ggagcttccttcccggcctggctcgctccccattgcgcccagctccggcccggactctggaagatgactccagggtctgctctgtatattccagcggcggcagttccgggaggcagccga

SEQ ID NO: 423690 - DNA, 120 bp, Artificial Sequence
  ENSG00000151136_3 (sequence is synthesized)
aagtactaacagttggtagcagcggctagtggaaaagtgagccaaggcggcgcggactcggctctccccgcgccccgcggcactcgctgctcctcgccgctccttccctttggctcccag

SEQ ID NO: 423691 - DNA, 120 bp, Artificial Sequence
  ENSG00000151136_4 (sequence is synthesized)
gcggctgcagcatgaagtggcgcagcgatggccaggagaggtaagaagcccgtggtgagaacgctggaggatctgacgctggactcgggttatggtggcgcggcggactcggtgcgctcc

SEQ ID NO: 423692 - DNA, 120 bp, Artificial Sequence
  ENSG00000151136_5 (sequence is synthesized)
tccaacttgtctttgtgctgttccgactcgcacccggcgtccccgtatggcgggagctgctggccgcctctagctgactccatgcacagccggcacaacagctttgacactgtcaacact

SEQ ID NO: 423693 - DNA, 120 bp, Artificial Sequence
  ENSG00000151136_6 (sequence is synthesized)
gccctggtggaagactccgaggggctggactgcgccggccagcactgctcgcggctgctgccggacctagacgaggtcccctggactctccaggagctggaggcgctgctgctgcgttcg

SEQ ID NO: 423694 - DNA, 120 bp, Artificial Sequence
  ENSG00000151136_7 (sequence is synthesized)
cgggatccccgggcaggcccggcggtccccggcggcctgcccaaggacgcgctggccaagctgtcgacgctggtgagccgggcgctggtgcgcatagccaaagaggcgcagcgcctgagc

SEQ ID NO: 423695 - DNA, 120 bp, Artificial Sequence
  ENSG00000151136_8 (sequence is synthesized)
ctgcgcttcgccaagtgcaccaagtacgagatccagagcgccatggagatcgtgctgtcctggggcctggccgcgcactgtacggcggctgcgctggccgcactgtccctctacaacatg

SEQ ID NO: 423696 - DNA, 120 bp, Artificial Sequence
  ENSG00000151136_9 (sequence is synthesized)
agcagcgccggcggcgaccgcctgggccgcggcaagtcggcccgctgcggcctcaccttctccgtgggccgcgtgtatcgctggatggtggacagccgcgtggcgctgcgcatccacgag

SEQ ID NO: 423697 - DNA, 120 bp, Artificial Sequence
  ENSG00000151136_10 (sequence is synthesized)
cacgccgccatctacctgacagcctgcatggagagcctcttccgggacatctactcgcgggtcgtggcctccggggtgccccggagctgcagtggccctgggtcaggctcgggctccggc

SEQ ID NO: 423698 - DNA, 80 bp, Artificial Sequence
  ENSG00000151136_11 (sequence is synthesized)
ccaggcccgagctcgggccctggtgcggcccccgcggcggataaagagcgggaggcgcccgggggaggagcggcgagcgg

SEQ ID NO: 423699 - DNA, 120 bp, Artificial Sequence
  ENSG00000151136_12 (sequence is synthesized)
agctgttgcgccccgccggccgccgcggccgccgcagtcccgccggcagccgccgccaaccaccaccatcaccaccaccatgcgctccacgaggcgcccaagttcaccgtggagaccctg

SEQ ID NO: 423700 - DNA, 120 bp, Artificial Sequence
  ENSG00000151136_13 (sequence is synthesized)
gagcacacggtcaacaacgactcggagatctggggtctcctgcagccctaccagcacctgatctgcgggaagaacgccagcggggtgctgtgcctaccagacagcctgaatcttcacaga

SEQ ID NO: 423701 - DNA, 120 bp, Artificial Sequence
  ENSG00000151136_14 (sequence is synthesized)
gacccacagcggtcaaacaagccaggggaactgcccatgttcagccagtcggagctgaggaccatcgagcagtctttgctggccacgcgcgtaggcagcatcgccgaattgagtgacctg

SEQ ID NO: 423702 - DNA, 120 bp, Artificial Sequence
  ENSG00000151136_15 (sequence is synthesized)
gtgtcccgtgcaatgcatcacctgcagcccctcaatgccaagcaccacggcaatggcacccccctgcaccacaagcagggggcactgtactgggagcccgaggccctgtacaccctttgc

SEQ ID NO: 423703 - DNA, 120 bp, Artificial Sequence
  ENSG00000151136_16 (sequence is synthesized)
tatttcatgcactgcccacaaatggaatgggaaaaccccaacgtggagccttccaaagtcaacctccaggtggaaaggcccttcctcgtgctgccgccgctgatggagtggatccgggtg

SEQ ID NO: 423704 - DNA, 120 bp, Artificial Sequence
  ENSG00000151136_17 (sequence is synthesized)
gccgtggcgcacgccggccaccgccgcagcttctccatggacagcgacgacgtccgccaggcggcccggctgctgctgcccggcgtggactgcgagccgcgccagctcagggccgacgac

SEQ ID NO: 423705 - DNA, 120 bp, Artificial Sequence
  ENSG00000151136_18 (sequence is synthesized)
tgcttttgtgcatctcgaaagctggatgcggtggccatcgaagccaagtttaagcaggacctgggtttccggatgctgaactgtggacgaacagacctggtgaagcaggcagtgtctctg

SEQ ID NO: 423706 - DNA, 120 bp, Artificial Sequence
  ENSG00000151136_19 (sequence is synthesized)
ctggggcccgatgggatcaacaccatgagcgaacagggcatgactcccctgatgtatgcctgcgtccgtggggacgaggcgatggttcagatgctgctggatgccggagctgacctgaat

SEQ ID NO: 423707 - DNA, 120 bp, Artificial Sequence
  ENSG00000151136_20 (sequence is synthesized)
gtggaggttgtcagtactcctcataaatatccatccgtccaccccgagacccgccattggacggctctgacttttgctgtgttgcatggacatattcctgtagttcagctcctcctggat

SEQ ID NO: 423708 - DNA, 120 bp, Artificial Sequence
  ENSG00000151136_21 (sequence is synthesized)
gctggggccaaggtggaaggctcagtggagcatggcgaggagaactactcggaaacacccctccagctggcagctgctgtaggaaattttgagctggttagtttgctgttggagcgtggt

SEQ ID NO: 423709 - DNA, 120 bp, Artificial Sequence
  ENSG00000151136_22 (sequence is synthesized)
gccgatcccctgataggaaccatgtacaggaatggaatttctacaaccccccagggtgatatgaactctttcagccaggctgcagcccacggacacaggaatgtgttccgcaaactgctc

SEQ ID NO: 423710 - DNA, 120 bp, Artificial Sequence
  ENSG00000151136_23 (sequence is synthesized)
acagcaaggccaaactgagggccctgagggaggccatgtatcacagcgctgagcatggctacgtggatgtcacaattgatatcaggagcataggcgtcccgtggactctgcacacgtggc

SEQ ID NO: 423711 - DNA, 120 bp, Artificial Sequence
  ENSG00000151136_24 (sequence is synthesized)
tggagtctttgcggatcgccttccagcagcaccgcaggcctctcatccagtgcttgttaaaggagtttaagaccattcaggaggaggaatacacggaggagctcgttacccaaggcctgc

SEQ ID NO: 423712 - DNA, 120 bp, Artificial Sequence
  ENSG00000151136_25 (sequence is synthesized)
ccctgatgtttgagatcctgaaagcgagcaagaatgaagtgatcagccagcagctgtgcgtcatcttcacacactgctacgggccctaccccatccccaagctcacagaaatcaaacgga

SEQ ID NO: 423713 - DNA, 120 bp, Artificial Sequence
  ENSG00000151136_26 (sequence is synthesized)
aacagacctcgcgcttggatcctcattttcttaacaataaagaaatgtctgatgttacatttctggtagaaggaagaccattttatgctcacaaagtgctgttatttacagcctctccaa

SEQ ID NO: 423714 - DNA, 120 bp, Artificial Sequence
  ENSG00000151136_27 (sequence is synthesized)
ggttcaaagcactcctctccagcaagccgacaaatgatggcacctgcatagagattggttatgtgaaatactccatctttcagctggttatgcagtatctctactatggtggcccagagt

SEQ ID NO: 423715 - DNA, 120 bp, Artificial Sequence
  ENSG00000151136_28 (sequence is synthesized)
cactgctcattaaaaacaatgagatcatggagcttctgtctgctgctaagtttttccagctggaggctttgcagcgacactgtgagattatctgtgcgaaaagcatcaataccgacaact

SEQ ID NO: 423716 - DNA, 120 bp, Artificial Sequence
  ENSG00000151136_29 (sequence is synthesized)
gtgtggatatttacaaccatgccaagtttcttggagtcacagagctctcagcatattgcgaaggctactttctcaaaaacatgatggtcctcattgaaaacgaagcattcaagcagctcc

SEQ ID NO: 423717 - DNA, 120 bp, Artificial Sequence
  ENSG00000151136_30 (sequence is synthesized)
tgtatgacaaaaatggtgaagggaccggccaggatgtgctccaggacttacagaggacgttggccatcagaattcagtccatccacttgtcgtcttccaaaggttccgtggtatgaaacg

SEQ ID NO: 423718 - DNA, 120 bp, Artificial Sequence
  ENSG00000151136_31 (sequence is synthesized)
cctagtgcagggaatgcttcccgggaactttccagttctcctgccgcattggctttacacaaacacagacaaattccacctggcacctgtttttggctgggccaaggagctgcctctact

SEQ ID NO: 423719 - DNA, 120 bp, Artificial Sequence
  ENSG00000151136_32 (sequence is synthesized)
gctcccacgtgttcctgttgaaaaacaaaggactttccactggtctgcagatcagatcagctgggtccagagtttaatgggcaactggacaaccaagttaaccccaattgaaagcacccc

SEQ ID NO: 423720 - DNA, 120 bp, Artificial Sequence
  ENSG00000151136_33 (sequence is synthesized)
taggaccattgaacacccactgccggggaccactgtccagtgaatggattgaggccttttaaaggtcactcaggttccaggttgacagttggaggacttcaccgtaccaaccctgaagag

SEQ ID NO: 423721 - DNA, 120 bp, Artificial Sequence
  ENSG00000151136_34 (sequence is synthesized)
attgtattacacattaaggaccttggtagctgtgcttcagcaaacgtcaaccatggtagcaaattggtgaggctgtgaccaataatgaggaaataatctggcaaatttttaggggtggga

SEQ ID NO: 423722 - DNA, 120 bp, Artificial Sequence
  ENSG00000151136_35 (sequence is synthesized)
acttttttaaatgttcatttaaaaaaaaacaaaaacagggcagtcttgtagtttaaaatatatttctaaaagcttaacagttcgttttcaactaaattgtgtttagggatctgtgtttga

SEQ ID NO: 423723 - DNA, 120 bp, Artificial Sequence
  ENSG00000151136_36 (sequence is synthesized)
gatttttctttatttcttttttttttttaaatagtaagtcacaggtccacactgtgtaaacatgcatctgataagatactgctgatattctaaacaagttgaaataatcttgccttagtg

SEQ ID NO: 423724 - DNA, 120 bp, Artificial Sequence
  ENSG00000151136_37 (sequence is synthesized)
atcatgattacacaaaagaggtgcactgccaataagtatctctaattcaatagttgaaagcaacctgcatgctaatcgtggtttcggggtgagaataaaacacccccacataacatgcat

SEQ ID NO: 423725 - DNA, 120 bp, Artificial Sequence
  ENSG00000151136_38 (sequence is synthesized)
ttgcatgggcccgaacctgtgaaatgttacgtttgtgcttcatttttgccaaggtaaaaatgttccatcatttctagctaaaactccatttggtgaaaccaacatatccatttcttttcc

SEQ ID NO: 423726 - DNA, 120 bp, Artificial Sequence
  ENSG00000151136_39 (sequence is synthesized)
tagttacggatgatttggggatgcttttgcagaaatgtgttcatagatgatgctgaatgggggaggggggcagcacgtcagagaatttactattaatcccagagttttctctgtattctc

SEQ ID NO: 423727 - DNA, 120 bp, Artificial Sequence
  ENSG00000151136_40 (sequence is synthesized)
agaagatgttaatagtttgttactagccagagagtatgactatgttagattatttttaaagatgaaacatgtatgataggatggattctttctgtattctgagagtgtacagtacaggat

SEQ ID NO: 423728 - DNA, 120 bp, Artificial Sequence
  ENSG00000151136_41 (sequence is synthesized)
tattataatgaaagtttatatcaacagggtttcgttggctctgccatatattataagcaaaagagattggtaaagtgccacagtattccagataacttttcagttgcggcctttcttctc

SEQ ID NO: 423729 - DNA, 120 bp, Artificial Sequence
  ENSG00000151136_42 (sequence is synthesized)
gttctttaatttgaaacctagatacatgcagtaaaaactaggagaatgacttttacccttggggacagccaagttttgttgataaacctatttcctagcatgccttcaggaagttgtgcc

SEQ ID NO: 423730 - DNA, 120 bp, Artificial Sequence
  ENSG00000151136_43 (sequence is synthesized)
agaccctagattgtgaaggacccactgttcttctgttgtacgagctccctgaaccattgttcagaggaccaatgtcacatcgcttcatgggcatggcccatggagcatctgggtgatatc

SEQ ID NO: 423731 - DNA, 120 bp, Artificial Sequence
  ENSG00000151136_44 (sequence is synthesized)
tgtctacagtattggctcttctgcgaggctgatacacaaggcctctcttccacatgatcatttgcaaacctcccccagcccctaccatccaatgtggaaggaaaacaagaactgcctgaa

SEQ ID NO: 423732 - DNA, 120 bp, Artificial Sequence
  ENSG00000151136_45 (sequence is synthesized)
gaagagtccaagctacagatacacagcgtgtgcattgcggctgtcaccttcctcctcccacttctgtatcctcagagatgctgcgtggatgtttccttaacctcagctgacttccctgtg

SEQ ID NO: 423733 - DNA, 120 bp, Artificial Sequence
  ENSG00000151136_46 (sequence is synthesized)
aatgtctaatgctagttcagggcctccaggcattgatttgtacagtggtaactcccaatgaggcttctgttatcatttggtgtgctttctctgtcattaaaagaaatgattttcccaggc

SEQ ID NO: 423734 - DNA, 120 bp, Artificial Sequence
  ENSG00000151136_47 (sequence is synthesized)
aaagagctccagaaagacgacagggacgaggctgcagatgggaagggagtgctagcggacaccttaggcttgggtccacaatcagggagccccaaatagaaataacacggggcgctgatt

SEQ ID NO: 423735 - DNA, 120 bp, Artificial Sequence
  ENSG00000151136_48 (sequence is synthesized)
ggttttccgccgctccagaccctgcgcttggtgcttcaagtgactcatccttatgttcacatgatcgccgagagggataatattcccagatcagttacctcctagcctttcctagtcaca

SEQ ID NO: 423736 - DNA, 120 bp, Artificial Sequence
  ENSG00000151136_49 (sequence is synthesized)
ttatccccaggctacagatgaggaaactgaggcccaaggattccagagagcctgccccggggtcaccggtgcggtccggatgtctccaaaggctctcccactactctggaattcagaggc

SEQ ID NO: 423737 - DNA, 120 bp, Artificial Sequence
  ENSG00000151136_50 (sequence is synthesized)
agcgtttgtctcgttaatggagaacacagtcacaggatcaaaagggctaatttcaggataattctcctgaaatcctgctaatttcaggataattcactgcttccagaattttagagtact

SEQ ID NO: 423738 - DNA, 120 bp, Artificial Sequence
  ENSG00000151136_51 (sequence is synthesized)
tcgggtcaccagcctgcatggaagtgtctggaaggacccgtgttgggttttcatttggatgaagacttggggctcttgttccttcctgactcctcagtcctcccaaacaggaagggcttc

SEQ ID NO: 423739 - DNA, 120 bp, Artificial Sequence
  ENSG00000151136_52 (sequence is synthesized)
tcatcagagaccttccctggcaggctggggtgctagtgcacttgcttgcctgactgcttttagtagccactgagtgaaacccaattttaactggcattggtggtaagggggcagggaagg

SEQ ID NO: 423740 - DNA, 120 bp, Artificial Sequence
  ENSG00000151136_53 (sequence is synthesized)
gaaggaatttgactgaaaagtctgaggctacagctgaggcgttaatagtgatatcatcaggaaatatcctagatgacgtcttctcccttgtcactaataaaagaattatatcccctaaaa

SEQ ID NO: 423741 - DNA, 120 bp, Artificial Sequence
  ENSG00000151136_54 (sequence is synthesized)
acatccctcaaatcacaacactgtctgttcttccaagatatagaagctgagggcagattacagtctcctcctggctttcctcaaactgagcatcccacagtcatgaagcccacgcctgct

SEQ ID NO: 423742 - DNA, 120 bp, Artificial Sequence
  ENSG00000151136_55 (sequence is synthesized)
tccttcactctccccagccccctgtctgcctcttgtaattcaactggttctagccccgcctgtctaggagtcttgtttctgcctgcttttgtccaaagccaagattttcccctgttcctt

SEQ ID NO: 423743 - DNA, 120 bp, Artificial Sequence
  ENSG00000151136_56 (sequence is synthesized)
gccaaaagtggaaatcttgttcattttcctaattgaaactgggagctttgaaccagaagccaaaaatcacccccaattaatcctcagcaaaagagccaggatctcggtcagttatctgac

SEQ ID NO: 423744 - DNA, 120 bp, Artificial Sequence
  ENSG00000151136_57 (sequence is synthesized)
gtctggggggtacctggctgatgagagatgtcaggacacaatcaactgttcaagagcagacctcacacagtggttacaacacggaagctgggccagactagtctaaatccaggctccact

SEQ ID NO: 423745 - DNA, 120 bp, Artificial Sequence
  ENSG00000151136_58 (sequence is synthesized)
gcttctgagctgtgtgactgtggacaagttatttaacctcatatcctcagcttccttacccataaaatggggataactatctacctcactgggttttttagaggatcttaaaatatgcta

SEQ ID NO: 423746 - DNA, 120 bp, Artificial Sequence
  ENSG00000151136_59 (sequence is synthesized)
aggtgcttagaacagtgcctggcacacagtgatcgccaataggactatgtattcactgcaggcccacttatcctttcttcctattctgtgaaaccttccgtggtcactctctccccaccc

SEQ ID NO: 423747 - DNA, 120 bp, Artificial Sequence
  ENSG00000151136_60 (sequence is synthesized)
aaacacacacatggacacacagtgactctcttgtctccctggactactcctctgatggttttagtctcgaggatgtgggcttatttgtaaacaaaagtgcgctggtgtttacaactaatt

SEQ ID NO: 423748 - DNA, 71 bp, Artificial Sequence
  ENSG00000151136_61 (sequence is synthesized)
ttatttgtaaacaaaagtgcgctggtgtttacaactaatttttgtgtgtgtgtgaaacagtctcactctgc

SEQ ID NO: 423749 - DNA, 120 bp, Artificial Sequence
  ENSG00000151136_62 (sequence is synthesized)
ttgggattacaggcatgagccactgcacacggctgtttacaactaactgatcacaaccagttatggatttctgtattccttctccactcccactgcttcatttgtctagccttaacaaaa

SEQ ID NO: 423750 - DNA, 120 bp, Artificial Sequence
  ENSG00000151148_0 (sequence is synthesized)
gaacaccgcggggcaagatggcggtagtgcgtcggctgctgccccgggtctggcagaactcgggtgttttgggctgagacagtggcagctgcggccccgaccccaagtgcggggacctcc

SEQ ID NO: 423751 - DNA, 120 bp, Artificial Sequence
  ENSG00000151148_1 (sequence is synthesized)
ggcgaataaaggtcggcctgcgggtaggccggtagggcctgcggtccggcctgcgggagaactgggtcgtcagtcctccgagtggtggggctggggactttgagggagttggctctaggg

SEQ ID NO: 423752 - DNA, 120 bp, Artificial Sequence
  ENSG00000151148_2 (sequence is synthesized)
cacagtccctgcctggccaggtcggaggaacaagtgctgggatctggcgtgtgtgctccaggggctctttccgcggccctttccacctcttttcactttggggacggtaggcctttataa

SEQ ID NO: 423753 - DNA, 120 bp, Artificial Sequence
  ENSG00000151148_3 (sequence is synthesized)
acggactaatgctgggtgatttgttcctgtggttgttgatgccgaggaaagactctgggccccaggactcacctaaactggagttcgaatactgttcgctcgctgtgtgaccttggaaaa

SEQ ID NO: 423754 - DNA, 120 bp, Artificial Sequence
  ENSG00000151148_4 (sequence is synthesized)
aataacaagcttttctgaagtgagaagctgttctcagccacgagtcctgtgcaagatcactaatgattacctggcatttctgcgacacaggcaggtcctcagggtttgtgcaagtttgca

SEQ ID NO: 423755 - DNA, 120 bp, Artificial Sequence
  ENSG00000151148_5 (sequence is synthesized)
aacatgttcaccctgtctcagacctcgagagcatggttcatcgatagagcccgtcaggcacgagaagaaaggcttgtgcagaaggaacgggagcgggcagctgttgtgatccaggcccat

SEQ ID NO: 423756 - DNA, 120 bp, Artificial Sequence
  ENSG00000151148_6 (sequence is synthesized)
gtccggagttttctctgtcggagtcgactgcagagagatatcaggagagagattgatgacttttttaaagcagatgaccctgagtccactaaaagaagtgcactttgtattttcaagatt

SEQ ID NO: 423757 - DNA, 120 bp, Artificial Sequence
  ENSG00000151148_7 (sequence is synthesized)
gccaggaaactgctgttcctattcagaatcaaagaggataatgagagatttgagaagttgtgtcgcagcatcctgagcagcatggatgctgagaatgagcctaaggtgtggtatgtgtcc

SEQ ID NO: 423758 - DNA, 120 bp, Artificial Sequence
  ENSG00000151148_8 (sequence is synthesized)
ctggcttgttctaaggacctcaccctcctttggattcaacagatcaagaacattttgtggtactgctgtgattttctcaagcagctcaagcctgaaatcctgcaggactcccgactcatc

SEQ ID NO: 423759 - DNA, 120 bp, Artificial Sequence
  ENSG00000151148_9 (sequence is synthesized)
accctgtacctcacgatgcttgtcaccttcacagacacttcaacgtggaaaattcttcggggaaaaggtgaaagtcttcgaccagcgatgaaccacatttgtgcaaatataatgggacat

SEQ ID NO: 423760 - DNA, 120 bp, Artificial Sequence
  ENSG00000151148_10 (sequence is synthesized)
ctcaaccagcatggattttattctgtgctgcagatattgttaacccgtggcctggcaagaccccgtccttgtctatccaaaggcactttaacagcagctttttctctagcgttacgccct

SEQ ID NO: 423761 - DNA, 120 bp, Artificial Sequence
  ENSG00000151148_11 (sequence is synthesized)
gtgattgctgcacagttctcagacaatctgattcggccgttcctcatccacatcatgtctgtgcctgctctggtgactcatctcagcacagtgacccctgagcgcctcactgttttagaa

SEQ ID NO: 423762 - DNA, 120 bp, Artificial Sequence
  ENSG00000151148_12 (sequence is synthesized)
tcccatgacatgcttcgtaaattcatcatatttttaagagaccaagatcgatgccgtgatgtatgtgaaagtttagaaggatgccatacgctttgtctaatgggcaacctcctacacttg

SEQ ID NO: 423763 - DNA, 120 bp, Artificial Sequence
  ENSG00000151148_13 (sequence is synthesized)
ggctccctcagccccagagtgttagaggaggagacagatgggttcgtgagtttgctcacccagacgctgtgctactgtcggaagtatgtgtctcagaagaagtccaacctgacccactgg

SEQ ID NO: 423764 - DNA, 120 bp, Artificial Sequence
  ENSG00000151148_14 (sequence is synthesized)
catcctgtccttggctggttctcccaatctgtggattatggccttaacgagtcaatgcacttgatcaccaaacagctgcagttcttgtggggggtgcctctgatccggatcttcttctgt

SEQ ID NO: 423765 - DNA, 120 bp, Artificial Sequence
  ENSG00000151148_15 (sequence is synthesized)
gacatcctgagcaagaagctactggagagccaggagccagcccacgcacagccagcatcccctcagaatgtgctcccagtgaagagtctcctaaagcgtgcttttcaaaagtcggcatca

SEQ ID NO: 423766 - DNA, 120 bp, Artificial Sequence
  ENSG00000151148_16 (sequence is synthesized)
gtccggaatattctcaggcctgtcgggggtaaacgggtcgactctgcagaagtccagaaggtttgcaacatctgtgtcctctaccagacctcgctgacaactctcacacagattcggctg

SEQ ID NO: 423767 - DNA, 120 bp, Artificial Sequence
  ENSG00000151148_17 (sequence is synthesized)
cagatactcacaggtctcacttaccttgatgacctgcttcccaaactgtgggcatttatctgtgagctcgggccccacggagggttaaagctcttcttggaatgcctgaacaatgacact

SEQ ID NO: 423768 - DNA, 120 bp, Artificial Sequence
  ENSG00000151148_18 (sequence is synthesized)
gaagagtccaagcaactcttggccatgctgatgctgttctgtgactgttcgcggcacctcatcacaatccttgatgacattgaagtttatgaagaacagatttcattcaaactggaagag

SEQ ID NO: 423769 - DNA, 120 bp, Artificial Sequence
  ENSG00000151148_19 (sequence is synthesized)
ctggtcactatctcctctttcctgaattcttttgtgtttaagatgatctgggatggaattgtagagaacgccaagggtgagaccttggagctgttccagtctgtccacgggtggcttatg

SEQ ID NO: 423770 - DNA, 120 bp, Artificial Sequence
  ENSG00000151148_20 (sequence is synthesized)
gtgctgtacgagcgggactgccggcggcgcttcacccccgaggaccactggctgcgaaaggatctcaaacctagcgtgctcttccaagaactcgacagggacagaaaacgggcacagttg

SEQ ID NO: 423771 - DNA, 120 bp, Artificial Sequence
  ENSG00000151148_21 (sequence is synthesized)
atcctgcagtacatcccacatgtcatccctcacaaaaacagagttctactgtttcgaaccatggttaccaaggagaaggagaaactggggctggtggaaaccagctctgcctccccgcat

SEQ ID NO: 423772 - DNA, 120 bp, Artificial Sequence
  ENSG00000151148_22 (sequence is synthesized)
gtcactcacatcaccatccgccggtccaggatgctggaggacggctacgagcagcttaggcagctctcccagcacgccatgaagggggtcatccgtgtgaagtttgtcaatgacctcggg

SEQ ID NO: 423773 - DNA, 120 bp, Artificial Sequence
  ENSG00000151148_23 (sequence is synthesized)
ttcaagacaaccagtggggatgagaggctgtacccctcacccacatcctacatccatgagaattacctgcagctcttcgagtttgtggggaagatgctggggaaggctgtgtatgaggga

SEQ ID NO: 423774 - DNA, 120 bp, Artificial Sequence
  ENSG00000151148_24 (sequence is synthesized)
attgtggtggacgtgccatttgcatccttcttcctgagccaactgcttgggcaccaccacagcgtcttctatagctcggtggatgaactgccttctctggactccgagttctataaaaac

SEQ ID NO: 423775 - DNA, 120 bp, Artificial Sequence
  ENSG00000151148_25 (sequence is synthesized)
ctcacctccatcaagcgctatgatggggacatcactgacctgggcctgacgctgtcttacgacgaggacgtcatgggtcagcttgtttgccatgaactgattcctggagggaagaccatt

SEQ ID NO: 423776 - DNA, 120 bp, Artificial Sequence
  ENSG00000151148_26 (sequence is synthesized)
cctgttacaaatgaaaataaaattagctacatccatctgatggcacattttcgaatgcacactcaaataaaaaaccaaacagctgccctcattagcggattccgttccattatcaaaccc

SEQ ID NO: 423777 - DNA, 120 bp, Artificial Sequence
  ENSG00000151148_27 (sequence is synthesized)
gagtggatccgaatgttctcaactcctgaactgcagcgtctcatctctggcgacaatgctgagattgatctggaagatttaaagaagcacacagtctactacggtggtttccatggaagt

SEQ ID NO: 423778 - DNA, 120 bp, Artificial Sequence
  ENSG00000151148_28 (sequence is synthesized)
cacagagtcatcatctggctctgggatattctggcctccgacttcacaccggatgagagagctatgtttctgaagttcgtgaccagctgctccagacccccgctcctgggattcgcctac

SEQ ID NO: 423779 - DNA, 120 bp, Artificial Sequence
  ENSG00000151148_29 (sequence is synthesized)
ctcaagcctccattctccatccgctgcgtggaggtgtcggacgatcaggacaccggggacactctgggcagcgtcctccggggcttcttcaccatccgcaagcgggagccaggcggccgc

SEQ ID NO: 423780 - DNA, 120 bp, Artificial Sequence
  ENSG00000151148_30 (sequence is synthesized)
ctgcccacctcctccacctgcttcaacctgctcaagctgcccaactacagcaagaagagcgtcctccgcgagaagctgcgctacgccatcagcatgaacacgggctttgaactctcctag

SEQ ID NO: 423781 - DNA, 120 bp, Artificial Sequence
  ENSG00000151148_31 (sequence is synthesized)
ctcctgtcccagccctgcctccagggctcctgggctgccagggaccttcagctcccagaggcagtgtggtcctgggaatgtgaccaacatgccaggtgacattggcccctagaccctctc

SEQ ID NO: 423782 - DNA, 120 bp, Artificial Sequence
  ENSG00000151148_32 (sequence is synthesized)
tatagccatgagactccttgtggcctcaagaaatttagacgcccacgacagcactacacagcatctccaggtgatgcccaaggcacagggctgcagaaaataaacctccagattccacca

SEQ ID NO: 423783 - DNA, 120 bp, Artificial Sequence
  ENSG00000151148_33 (sequence is synthesized)
acacgggtccattcttcctggtgatggcagaggggcttcttttagctagtttgatcttttgggagtctgtctttccttagccgtctgagtgagctgtgtatgaacaagtcccaggagttc

SEQ ID NO: 423784 - DNA, 120 bp, Artificial Sequence
  ENSG00000151148_34 (sequence is synthesized)
caagagtctagagtggtttttgcagcatgggttgagtgtacaaagcctactgtgcgtgagatcctctccttccgtttctgaaatctcttactcaggtaaggcctcgccaagcctctatgc

SEQ ID NO: 423785 - DNA, 120 bp, Artificial Sequence
  ENSG00000151148_35 (sequence is synthesized)
accccacaaagtttctgcctccatgccgtccacagcgcctcttcccagacagccaggcccatctgctgcccagggaagcgcaggcgcctgctagggacgctatggacaccgtgagtccaa

SEQ ID NO: 423786 - DNA, 120 bp, Artificial Sequence
  ENSG00000151148_36 (sequence is synthesized)
ggcgctgctcctgccttgaagccacgcgctccacgccgcggccctcccattttctgcgtcctcagcgggctgagctgccagagagtcttcccggacctattcccgtcctatgcattcaca

SEQ ID NO: 423787 - DNA, 120 bp, Artificial Sequence
  ENSG00000151148_37 (sequence is synthesized)
ttggcatcctggtttgggggaagaaaaacaacggcccttagcagcagccccgtttccagaatgtgctgcctgttccccaaagcctgcttgtcccgcggaggacggctgcctttgaccctg

SEQ ID NO: 423788 - DNA, 120 bp, Artificial Sequence
  ENSG00000151148_38 (sequence is synthesized)
cttatttgtctcactggttatctaatgaggaacaaacactaacctaaggtacacatcccatctgggcggtggcttcactcctgagtctgcaaaatcccaggaaacttgggtcttgctgcc

SEQ ID NO: 423789 - DNA, 120 bp, Artificial Sequence
  ENSG00000151148_39 (sequence is synthesized)
catccttcctcagcacagggaacccggaagcccgttgcactgacagaggctcacaccctctgggttttttgttttttttttaaacttcatttctcttccaacccattgtgttcctctgcc

SEQ ID NO: 423790 - DNA, 120 bp, Artificial Sequence
  ENSG00000151148_40 (sequence is synthesized)
ctcattctttacctttgttgtaagaactttagctccagggaactgaggcagaggccctgtttgtggtctgtgttgacagccacccaccctctcccacctcatgctcctgcacctgcacca

SEQ ID NO: 423791 - DNA, 120 bp, Artificial Sequence
  ENSG00000151148_41 (sequence is synthesized)
ccaaggttgatgccggattcgaagccaggaaggcccagtccctcctctgctctcctcaaagacgcaaaacattttccaacaagagctgtcacagtggcagcaaagcaggggccacccgtc

SEQ ID NO: 423792 - DNA, 120 bp, Artificial Sequence
  ENSG00000151148_42 (sequence is synthesized)
tccacagtccttcagagtttcagctgcatcctggtgtcccacccaggtcgagcccccaggcttctggaaaagagtgtgtgctctactttgatggaaacatggcaaggaatttaaagacag

SEQ ID NO: 423793 - DNA, 120 bp, Artificial Sequence
  ENSG00000151148_43 (sequence is synthesized)
gaatgtattaatattattgaaggtgtgttcgtaacctctgattctgtggacttgccactttctccaaacgctcggttcctttgaagatttcttctgaacgtgtgtgcgcacgctgggcgg

SEQ ID NO: 423794 - DNA, 120 bp, Artificial Sequence
  ENSG00000151148_44 (sequence is synthesized)
gttcgtgcatacatgcggggaccccagactgtcagcacagggaagatggatcccatcctaatttttatcacctgaaggttggaaccagtgagggactgggagagagtgatttataagcac

SEQ ID NO: 423795 - DNA, 120 bp, Artificial Sequence
  ENSG00000151148_45 (sequence is synthesized)
caatatcaacttcatgtggatttttgacaaggaggggtagtttgtaatttcatttaaattcttttcagcagctggaaatattgcactatctgaaacactgaatctccttttgtaactggt

SEQ ID NO: 423796 - DNA, 120 bp, Artificial Sequence
  ENSG00000151148_46 (sequence is synthesized)
gttcactgacaccttgatggctcttgatggctctaaaaagttgtaggattttttgtttttgtagctaacttatggattgagatgtgatcaaaggctttattaaatttgtacttcagcata

SEQ ID NO: 423797 - DNA, 120 bp, Artificial Sequence
  ENSG00000151148_47 (sequence is synthesized)
aacgtcttaagccgtccgttgtgcgcctaggggccagttttctttccagcctccccggccggagtgggttccagcttttctcggctggggagggcatttatcccacctccgctatttcag

SEQ ID NO: 423798 - DNA, 120 bp, Artificial Sequence
  ENSG00000151148_48 (sequence is synthesized)
tggtccgttggcagaagctggtatgactggcagttgtctcgctagaggaaccttctacttcataccataattaaacggcttctaaaataatatgatgtctttaaattttaagtctggcat

SEQ ID NO: 423799 - DNA, 120 bp, Artificial Sequence
  ENSG00000151148_49 (sequence is synthesized)
tatttgtattagctgtttttttaactttattattaaagaatttctaaccataatatttagagaaagagtggtagagttaacctcgttacccaatactttcttccctttccttttataaaa

SEQ ID NO: 423800 - DNA, 120 bp, Artificial Sequence
  ENSG00000151148_50 (sequence is synthesized)
tttttttgtttttttgttttttttttaagagacagggttgccctgtcacccaggctggcctcaaggaatcttcctgcctcagcctcctgagctgggactgtaggtacaagccaccatgcc

SEQ ID NO: 423801 - DNA, 120 bp, Artificial Sequence
  ENSG00000151148_51 (sequence is synthesized)
taggtacaagccaccatgcctggctcacaatacagtttttttatctgaagcactcagtttacttttttgctcttttatgtacaaatgaatataaagttgatatcatcctctgaccaatta

SEQ ID NO: 423802 - DNA, 120 bp, Artificial Sequence
  ENSG00000151148_52 (sequence is synthesized)
aaacattcttttcagatattgttaacccgtggcctggcaagaccccgtccttgtctatccaaaggcactttaacagcagctttttctctagcgttacggtgagtaagaaaccatagctga

SEQ ID NO: 423803 - DNA, 120 bp, Artificial Sequence
  ENSG00000151148_53 (sequence is synthesized)
ctggacccctcagagccaagtgaggagggccccacagttctcacggcaggagaaccagccagccccagagagactgcccacggactcagccctctctcggcagcccctttctctttcctt

SEQ ID NO: 423804 - DNA, 120 bp, Artificial Sequence
  ENSG00000151148_54 (sequence is synthesized)
cctcagggaagggtacctggagtgggggtgggtacgtgctgtttttagtggcgtctggcctcaccagggctccagatctgaggcagcatgggagaaagtgagagagtgggctcaggaggc

SEQ ID NO: 423805 - DNA, 120 bp, Artificial Sequence
  ENSG00000151148_55 (sequence is synthesized)
ccccagcaggctgtgcacgtccaggctcgctgcttcatttcctcattggccaaaggagaaggaaagccttcagggttacggagctctgtgtgtctcaagcctggcccactgtgggtgctc

SEQ ID NO: 423806 - DNA, 120 bp, Artificial Sequence
  ENSG00000151148_56 (sequence is synthesized)
aaatgagagtcctactccccataaaaacccagtggccgcctctgggtgtagctgcctctcatgatgcagtttgagcccgtgatgccaccttgtacaggaagctacacagtcctcggcctc

SEQ ID NO: 423807 - DNA, 120 bp, Artificial Sequence
  ENSG00000151148_57 (sequence is synthesized)
catgcttaagggaaagttggcccaagtcatggtctgccaccggccacagcaccggtgaggagggaggagtgcattcagaaatgtttgggcacctaacagtttttacagcattctactttt

SEQ ID NO: 423808 - DNA, 120 bp, Artificial Sequence
  ENSG00000151148_58 (sequence is synthesized)
tgtcaattggttaaccagtaattcgctgtgaaccggaaggccccatttccaaaagcttacttagtgcaggaattctctgtgcaggccccagggagaaggggttccttctctggaagccag

SEQ ID NO: 423809 - DNA, 120 bp, Artificial Sequence
  ENSG00000151148_59 (sequence is synthesized)
tcgtcttgtgtctggggcttgacctcgggtagtggtgccagggcagcgccctgcactctgcccagcatccagggactggccagatcccctccctgggctccctggccttggcatcagcct

SEQ ID NO: 423810 - DNA, 120 bp, Artificial Sequence
  ENSG00000151148_60 (sequence is synthesized)
agtcccatttagttcctttggtttttaagcttatgcatcttgtgtgtttggtattcttttcattccaccttttcccaaaaggttggtgaagaattataagatacaatggacctcaggcag

SEQ ID NO: 423811 - DNA, 120 bp, Artificial Sequence
  ENSG00000151148_61 (sequence is synthesized)
ttatgttcaggctggaagactttagccggagaggatcagggacatgtaggtggcagattgggtgaggatcatggaagaactcactgagcagttggaggcaagagcaggggtctagctgct

SEQ ID NO: 423812 - DNA, 120 bp, Artificial Sequence
  ENSG00000151148_62 (sequence is synthesized)
ggtgaagacatccttaatcactggatgggggtaagccaagagtgaatcttattctagtgtatggagcagtgttaggaaatgttcagatagagctgtgtcttaaatggctcatttattcat

SEQ ID NO: 423813 - DNA, 120 bp, Artificial Sequence
  ENSG00000151148_63 (sequence is synthesized)
atgttctttcaaacatttattcatttactcacaaatgcttactaagtacctgctaagtgtcactagtatgtgtcttagatatcgaaaagattctgcagctttcctcagtaaacatcgact

SEQ ID NO: 423814 - DNA, 120 bp, Artificial Sequence
  ENSG00000151148_64 (sequence is synthesized)
ctcagtcaatgttccttgatatgcagacatgaataaggaaggcgtgaattgaggtgtgaattaagaaagtgtcacagtcagatccttatgaataagaaaaatatagagtacagatttttt

SEQ ID NO: 423815 - DNA, 120 bp, Artificial Sequence
  ENSG00000151148_65 (sequence is synthesized)
cttaattgtattttttaactttttactatggtcgatttcaaattaatagaaagtagaaaggataatataatgaaccctcatgtgcccattatcagcttcaacagtaccacctcacagcca

SEQ ID NO: 423816 - DNA, 120 bp, Artificial Sequence
  ENSG00000151148_66 (sequence is synthesized)
gttttgcttcatccaaatgcccacctgcttttctctcccacattattttgaagcaaatcctagacatcatatcatttttttcattttatttttattttattttactttaagttctaggat

SEQ ID NO: 423817 - DNA, 120 bp, Artificial Sequence
  ENSG00000151148_67 (sequence is synthesized)
acatgtgctgtggtggtttgctgcacctgtcaccccgtcatctaggttttaagctctacatgcattaggtatttgtcctaaggctctccctcccctttccccctacccctgatgatatca

SEQ ID NO: 423818 - DNA, 120 bp, Artificial Sequence
  ENSG00000151148_68 (sequence is synthesized)
tatttctcaacctcgtttattgtctagtaagcagtacagattttttttctcttcgccttttttcagtgtggaattgtgggtaattttctctctgatttagaatccttgatgacattgaag

SEQ ID NO: 423819 - DNA, 120 bp, Artificial Sequence
  ENSG00000151148_69 (sequence is synthesized)
gtgtgaaggctggggaggcataattttaaagcaggttggaggaactcctgcaggcagacaggaacttgatggaattctccatccgttctcatctcagtgccaagataattatcttaaatt

SEQ ID NO: 423820 - DNA, 120 bp, Artificial Sequence
  ENSG00000151148_70 (sequence is synthesized)
taggcagaatggtttaaatgctgttacagctgcctgttgacttcctgtttctcccttttgtcatctaacttaatgattctcaaactttatgtacataaaaagtccttctcaggtttgcct

SEQ ID NO: 423821 - DNA, 120 bp, Artificial Sequence
  ENSG00000151148_71 (sequence is synthesized)
ccacaaaactgtgctcctgttcccacatgtgacttaggggtcttgagaggtaattttcccttgcccactaactttgaagcctaacccctgaatcggggcaccataggatagtcctttggg

SEQ ID NO: 423822 - DNA, 120 bp, Artificial Sequence
  ENSG00000151148_72 (sequence is synthesized)
gatcactgggtgaacatggcaggaaggcagcaagggttccccaaaacaggtctcgccacactggcatactgctcgtttgctttgtgatgaggggaccagacggcagccgagtggatgctg

SEQ ID NO: 423823 - DNA, 120 bp, Artificial Sequence
  ENSG00000151148_73 (sequence is synthesized)
tggagacagcctgtctaacctgcgaagcatgtgacagtgttacagttgtagctgaaagggagaaatgtggcatggccttcataggacagcagggttgattggtcacttgttccatcacag

SEQ ID NO: 423824 - DNA, 120 bp, Artificial Sequence
  ENSG00000151148_74 (sequence is synthesized)
tgtctgaagacatcagtttcacctggtgattgggcctctcaagtcgggccaacagactcttccctgggccctgtgctgttcagcactgtttttatagtcactgctctgaaataaaaacct

SEQ ID NO: 423825 - DNA, 120 bp, Artificial Sequence
  ENSG00000151148_75 (sequence is synthesized)
cagcaccccaagtactaggaatgcattagatgatggaaccagaagccaggaaggcctcaacagattagaatcaagagacaaactaaacagatgatttagtaggagaactccaaagttgtg

SEQ ID NO: 423826 - DNA, 120 bp, Artificial Sequence
  ENSG00000151148_76 (sequence is synthesized)
gttctggggctgtgcatgttgaggtctggatggagtagatgtgctgaatggctgtgtcctaacagagctgaccaccagccagaagtccaggcccagcaccacccccacatctcggtctct

SEQ ID NO: 423827 - DNA, 120 bp, Artificial Sequence
  ENSG00000151148_77 (sequence is synthesized)
gctccctgcgttgatccctgccatccacctgctctgctgccaatagaaagatctgacagaaagtcagccctgttactctttgcctaaaaccttctgcagctcccattaccttcaggatgt

SEQ ID NO: 423828 - DNA, 120 bp, Artificial Sequence
  ENSG00000151148_78 (sequence is synthesized)
cccctaaattcctcagcatgacttgcaggcacttcatgattgggaaggcagcgggagatgaggggtgatgggtaattcttttcattttacagtgttctgtaggtttgatttttttttttt

SEQ ID NO: 423829 - DNA, 120 bp, Artificial Sequence
  ENSG00000151148_79 (sequence is synthesized)
ttcttttttcttttttttaccatgagctaaagatactcttagcattgagagagagagaaatgtatcttgtcccggtttctttcatcctttgtctgatggccaggagcttgtcatgactca

SEQ ID NO: 423830 - DNA, 120 bp, Artificial Sequence
  ENSG00000151148_80 (sequence is synthesized)
ttttgtctaacttccccatctcactgctctgtccccttgaggtcagtctccccttgccaaggagtgatactgtcacatccccaaatgaatctttgcttttaatcagcactcattcaaaag

SEQ ID NO: 423831 - DNA, 120 bp, Artificial Sequence
  ENSG00000151148_81 (sequence is synthesized)
caggtgagaacggctcctgtcatgcatccacgtttcataatttgcacatttggtaatgatgctgggagagcttcgcacagaggagagggaaccccgaattgtgtgcataaggctttgggc

SEQ ID NO: 423832 - DNA, 120 bp, Artificial Sequence
  ENSG00000151148_82 (sequence is synthesized)
cagcatggattttattctgtgctgcaggtctgtgactcctgccccccagtgtgcaacttctccactctccaacacctgcacttggatttttacatttgcattcagcatacctggtgtcct

SEQ ID NO: 423833 - DNA, 120 bp, Artificial Sequence
  ENSG00000151148_83 (sequence is synthesized)
cctcagaaacacttttcataggaagagcttgatgcctgctgtcctcttcttccttcccctgccttgtctcacttgtgggtcaggtaaagggaggacagtggtgctgggatcccttgaatg

SEQ ID NO: 423834 - DNA, 120 bp, Artificial Sequence
  ENSG00000151148_84 (sequence is synthesized)
ctctacatttttggctgcaagggtaatccagtcttttgacatttaaactctggaaggagacctcagggcttgttccctcagattccttcttggttgatgtctagaatcatatttctagct

SEQ ID NO: 423835 - DNA, 120 bp, Artificial Sequence
  ENSG00000151148_85 (sequence is synthesized)
ctgtgtcctcaaacagccctttccactttgtaccttgttgtgccagatcatacctctagggaattgttgagaaagcctgattgctgtttaaaggtacaatggaagtcttgagtttgagaa

SEQ ID NO: 423836 - DNA, 120 bp, Artificial Sequence
  ENSG00000151148_86 (sequence is synthesized)
cctcttggtttttctttctctcgttactggtattaggtatagacttgcccattttgtcagaatttatgggaagcattgttcttaatgaaagtgagcacatttgtgactgctcaaactttt

SEQ ID NO: 423837 - DNA, 120 bp, Artificial Sequence
  ENSG00000151148_87 (sequence is synthesized)
tcttaatcttcagtcttgaatatttcttaatcttcagccctgaatattattgcagtgtgatctttggaaactattcaaaatgaatttcttttatctaaaagaggccaagatgcaatcatt

SEQ ID NO: 423838 - DNA, 120 bp, Artificial Sequence
  ENSG00000151148_88 (sequence is synthesized)
tttccttttgaagttttaattgacaaaacaaaaaacctaggagccaggagaagcccagcaaagggcagggtgagaggattaaggaaataatgtgaatacgcatgtaaaatgttagaattt

SEQ ID NO: 423839 - DNA, 120 bp, Artificial Sequence
  ENSG00000151148_89 (sequence is synthesized)
ggaggaccagagaagaggtgatatttgccttcacttagtttggagatgtcaggtactgaagaagctaagttaattccttatggaaattacacctgcaattctgagaattgccaaatgtaa

SEQ ID NO: 423840 - DNA, 120 bp, Artificial Sequence
  ENSG00000151148_90 (sequence is synthesized)
aacactatgcttgttcataggtccagaacatgtttaaactgtcaaggggaacactagcttggggagatgttaataaaagatcctggaaggaagagtgtcatggtggaaccagcttggtga

SEQ ID NO: 423841 - DNA, 120 bp, Artificial Sequence
  ENSG00000151148_91 (sequence is synthesized)
aagctgcctgctctgcccccatctgtggatctacagtacaccttcatgctgagagctctgagaagtgctgctatgctagcaggaccccatgggcttatttaacccggggttggcccaaac

SEQ ID NO: 423842 - DNA, 120 bp, Artificial Sequence
  ENSG00000151148_92 (sequence is synthesized)
gtatctgagcatggaatacccctgccttgttttttggatgccgttgatatcccatgaaatcattttccatggaaaacctatttggaaaatgatgggctagagcatgggttggccaaattt

SEQ ID NO: 423843 - DNA, 120 bp, Artificial Sequence
  ENSG00000151148_93 (sequence is synthesized)
tctggaaagagccggataaatatttcaactctatgggccatacagcctctgtcacaaccactctgccattgcatcttgaaagcagtcgtagattgtacatacacaaatgagcatgactgt

SEQ ID NO: 423844 - DNA, 120 bp, Artificial Sequence
  ENSG00000151148_94 (sequence is synthesized)
gttccagtaaaactttatttacaaaaataggccatagtttataaacacctggtctagactgtgctttccactaaccactagccacagggggctgtttaaatgaaaattcatttaagttaa

SEQ ID NO: 423845 - DNA, 120 bp, Artificial Sequence
  ENSG00000151148_95 (sequence is synthesized)
ataaaatgaagaattcacttcctcagttgcattagccacatttcaaatgctcagcggccacatgtaactagtagcaattgtgtgggacagcacagatatagaaaacttccagcatcacag

SEQ ID NO: 423846 - DNA, 120 bp, Artificial Sequence
  ENSG00000151148_96 (sequence is synthesized)
aaagttctgttggacaaggctgacctagagcaggtctgtccgatggaaacacagttagagccacatttaaaaagccaaaagaggccaggcacggcggcccatgcctgtaatcccagcact

SEQ ID NO: 423847 - DNA, 60 bp, Artificial Sequence
  ENSG00000151148_97 (sequence is synthesized)
caaaccttgtctctacacatgtgcctgtggttccagctactcaggagtctgaggtgggag

SEQ ID NO: 423848 - DNA, 85 bp, Artificial Sequence
  ENSG00000151148_98 (sequence is synthesized)
ctgtggttggagccagggaagtcaaggctgcagcgagccgtgattgagcttctccagcctggatgacagagtgatacctggtctc

SEQ ID NO: 423849 - DNA, 120 bp, Artificial Sequence
  ENSG00000151150_0 (sequence is synthesized)
cttagacacttccagctggtggcaggggatacagccataatacagcttcctctgtcccagctgtcttcttcactacggtaaatgcattacgatggctgcactctcctgtaaaggttcagg

SEQ ID NO: 423850 - DNA, 120 bp, Artificial Sequence
  ENSG00000151150_1 (sequence is synthesized)
tagaggaaggtgtaggatgaagtccggacaccatcatttgggtttttaaaagcttcagcttctccagcatctttgcattgtgaatatcttcctgcttctagtcaaagctttctctctagt

SEQ ID NO: 423851 - DNA, 120 bp, Artificial Sequence
  ENSG00000151150_2 (sequence is synthesized)
gattggaatgctgctgtaagcctgattagaggtgcctgaggatatcaccttttacaaggaagccgtgtgtgcttgagaggatctttttaaatgcattatggctcatgcagcctcacaatt

SEQ ID NO: 423852 - DNA, 120 bp, Artificial Sequence
  ENSG00000151150_3 (sequence is synthesized)
aaagaaaaacagggatttagaaatcaatgctgaagaagagcctgagaaaaaaaggaaacaccgcaaacggtcccgggatcggaagaaaaagtctgatgccaatgcaagttacttaagagc

SEQ ID NO: 423853 - DNA, 120 bp, Artificial Sequence
  ENSG00000151150_4 (sequence is synthesized)
agctcgagctggacaccttgaaaaggccctcgactacataaaaaatggagttgacatcaacatttgcaatcagaatgggttgaacgctctccaccttgcttccaaagaaggccatgtaga

SEQ ID NO: 423854 - DNA, 120 bp, Artificial Sequence
  ENSG00000151150_5 (sequence is synthesized)
ggttgtttctgagctgctgcagagagaagccaatgtggatgcagctacaaagaaaggaaacacagcattgcacatcgcatctttggctgggcaagcagaggtggtaaaagtcttggttac

SEQ ID NO: 423855 - DNA, 120 bp, Artificial Sequence
  ENSG00000151150_6 (sequence is synthesized)
aaatggagccaatgtcaatgcacaatctcagaatggtttcacgccattgtatatggcagcccaggaaaatcacctggaagttgtcaagtttcttcttgacaatggtgcaagccagagcct

SEQ ID NO: 423856 - DNA, 120 bp, Artificial Sequence
  ENSG00000151150_7 (sequence is synthesized)
agccacagaggatggcttcacaccattggcagtggctttgcaacaaggtcacgaccaagtcgtttcgctcctgctagagaatgacaccaaaggaaaagtgcgtctcccagctcttcatat

SEQ ID NO: 423857 - DNA, 120 bp, Artificial Sequence
  ENSG00000151150_8 (sequence is synthesized)
cgcggcccgaaaagacgacacgaaagccgccgccctgctgctgcagaatgacaacaatgcagatgtggaatcaaagagtggcttcactccgctccacatagctgctcactatggaaatat

SEQ ID NO: 423858 - DNA, 120 bp, Artificial Sequence
  ENSG00000151150_9 (sequence is synthesized)
caatgtagccacgttgctgttaaaccgagcggctgctgtggatttcaccgcaaggaatgacatcactcctttacatgttgcatcaaaaagaggaaatgcaaatatggtaaaactattgct

SEQ ID NO: 423859 - DNA, 120 bp, Artificial Sequence
  ENSG00000151150_10 (sequence is synthesized)
cgatcgaggagctaaaatcgatgccaaaaccagggatggtctgacaccactgcactgtggagcaaggagtggccacgagcaggtggtagaaatgttgcttgatcgagctgcccccattct

SEQ ID NO: 423860 - DNA, 120 bp, Artificial Sequence
  ENSG00000151150_11 (sequence is synthesized)
ttcaaaaaccaagaatggattatctccattgcacatggccacacaaggggatcatttaaactgcgtccagcttctcctccagcataatgtacccgtggatgatgtcaccaatgactacct

SEQ ID NO: 423861 - DNA, 120 bp, Artificial Sequence
  ENSG00000151150_12 (sequence is synthesized)
gactgccctacacgtggctgcccactgtggccattacaaagttgccaaggttctcttggataagaaagctaaccccaatgccaaagccctgaatggctttacccctcttcatattgcctg

SEQ ID NO: 423862 - DNA, 120 bp, Artificial Sequence
  ENSG00000151150_13 (sequence is synthesized)
caagaagaatcgaattaaagtaatggaactccttctgaaacacggtgcatccatccaagctgtaaccgagtcgggccttaccccaatccatgttgctgccttcatggggcatgtaaatat

SEQ ID NO: 423863 - DNA, 120 bp, Artificial Sequence
  ENSG00000151150_14 (sequence is synthesized)
tgtatcacaactaatgcatcatggagcctcaccaaacaccaccaatgtgagaggagaaacagcactgcacatggcagctcgctccggccaagctgaagttgtgcggtatctggtacaaga

SEQ ID NO: 423864 - DNA, 120 bp, Artificial Sequence
  ENSG00000151150_15 (sequence is synthesized)
cggagctcaggtagaagctaaagctaaggatgaccaaacaccactccacatttcagcccgactggggaaagcagacatagtacaacagctgttgcagcaaggggcatctccaaatgcagc

SEQ ID NO: 423865 - DNA, 120 bp, Artificial Sequence
  ENSG00000151150_16 (sequence is synthesized)
cacaacttctgggtacaccccacttcacctttccgcccgagaggggcatgaggatgtggccgcgttccttttggatcatggagcgtctttatctataacaacaaagaaaggatttactcc

SEQ ID NO: 423866 - DNA, 120 bp, Artificial Sequence
  ENSG00000151150_17 (sequence is synthesized)
tcttcatgtggcagcaaaatatggaaagcttgaagtcgccaatctcctgctacagaaaagtgcatctccagatgctgctgggaagagcgggctaacaccactgcatgtagctgcacatta

SEQ ID NO: 423867 - DNA, 120 bp, Artificial Sequence
  ENSG00000151150_18 (sequence is synthesized)
cgataatcagaaagtggcccttctgcttttggaccaaggagcctcacctcacgcagccgcaaagaatggttatacgccactgcacatcgctgccaaaaagaaccagatggacatagcgac

SEQ ID NO: 423868 - DNA, 120 bp, Artificial Sequence
  ENSG00000151150_19 (sequence is synthesized)
aactctgctggaatatggtgctgatgccaacgcagttacccggcaaggaattgcttccgtccatctcgcagctcaggaagggcacgtggacatggtgtcgctgctcctcggtagaaatgc

SEQ ID NO: 423869 - DNA, 120 bp, Artificial Sequence
  ENSG00000151150_20 (sequence is synthesized)
gaatgtgaacctgagcaataagagcggcctgaccccactccatttggctgctcaagaagatcgagtgaatgtggcagaagtcctcgtaaaccaaggggctcatgtggacgcccagacaaa

SEQ ID NO: 423870 - DNA, 120 bp, Artificial Sequence
  ENSG00000151150_21 (sequence is synthesized)
gatgggatacacaccactgcatgtgggctgccactatggaaatatcaagattgttaatttcctgctccagcattctgcaaaagttaatgccaaaacaaagaatgggtatacgccattaca

SEQ ID NO: 423871 - DNA, 120 bp, Artificial Sequence
  ENSG00000151150_22 (sequence is synthesized)
tcaagcagcacagcaggggcatacgcatataataaatgtcttacttcagaacaacgcctcccccaatgaactcactgtgaatgggaatactgcccttggcattgcccggcgcctcggcta

SEQ ID NO: 423872 - DNA, 120 bp, Artificial Sequence
  ENSG00000151150_23 (sequence is synthesized)
catctcagtagtggacaccctgaagatagtgaccgaagagaccatgaccacaactactgtcacagagaagcacaaaatgaatgttccagaaacgatgaatgaagttcttgatatgtctga

SEQ ID NO: 423873 - DNA, 120 bp, Artificial Sequence
  ENSG00000151150_24 (sequence is synthesized)
tgatgaagttcgtaaagccaatgcccctgaaatgctcagtgatggcgaatatatctcagatgttgaagaaggtgaagatgcaatgaccggggacacagacaaatatcttgggccacagga

SEQ ID NO: 423874 - DNA, 120 bp, Artificial Sequence
  ENSG00000151150_25 (sequence is synthesized)
ccttaaggaattgggtgatgattccctgcctgcagagggttacatgggctttagtctcggagcgcgttctgccagcctccgctccttcagttcggataggtcttacaccttgaacagaag

SEQ ID NO: 423875 - DNA, 120 bp, Artificial Sequence
  ENSG00000151150_26 (sequence is synthesized)
ctcctatgcacgggacagcatgatgattgaagaactccttgtgccatccaaagagcagcatctaacattcacaagggaatttgattcagattctcttagacattacagctgggctgcaga

SEQ ID NO: 423876 - DNA, 120 bp, Artificial Sequence
  ENSG00000151150_27 (sequence is synthesized)
caccttagacaatgtcaatcttgtttcaagccccattcattctgggtttctggttagctttatggtggacgcgagagggggctccatgagaggaagccgtcatcacgggatgagaatcat

SEQ ID NO: 423877 - DNA, 120 bp, Artificial Sequence
  ENSG00000151150_28 (sequence is synthesized)
cattcctccacgcaagtgtacggcccccactcgaatcacctgccgtttggtaaagagacataaactggccaacccaccccccatggtggaaggagagggattagccagtaggctggtaga

SEQ ID NO: 423878 - DNA, 120 bp, Artificial Sequence
  ENSG00000151150_29 (sequence is synthesized)
aatgggtcctgcaggggcacaatttttaggccctgtcatagtggaaatccctcactttgggtccatgagaggaaaagagagagaactcattgttcttcgaagtgaaaatggtgaaacttg

SEQ ID NO: 423879 - DNA, 120 bp, Artificial Sequence
  ENSG00000151150_30 (sequence is synthesized)
gaaggagcatcagtttgacagcaaaaatgaagatttaaccgagttacttaatggcatggatgaagaacttgatagcccagaagagttagggaaaaagcgtatctgcaggattatcacgaa

SEQ ID NO: 423880 - DNA, 120 bp, Artificial Sequence
  ENSG00000151150_31 (sequence is synthesized)
agatttcccccagtattttgcagtggtttcccggattaagcaggaaagcaaccagattggtcctgaaggtggaattctgagcagcaccacagtgccccttgttcaagcatctttcccaga

SEQ ID NO: 423881 - DNA, 120 bp, Artificial Sequence
  ENSG00000151150_32 (sequence is synthesized)
gggtgccctaactaaaagaattcgagtgggcctccaggcccagcctgttccagatgaaattgtgaaaaagatccttggaaacaaagcaacttttagcccaattgtcactgtggaaccaag

SEQ ID NO: 423882 - DNA, 120 bp, Artificial Sequence
  ENSG00000151150_33 (sequence is synthesized)
aagacggaaattccataaaccaatcacaatgaccattccggtgcccccgccctcaggagaaggtgtatccaatggatacaaaggggacactacacccaatctgcgtcttctctgtagcat

SEQ ID NO: 423883 - DNA, 120 bp, Artificial Sequence
  ENSG00000151150_34 (sequence is synthesized)
tacagggggcacttcgcctgctcagtgggaagacatcacaggaacaactcctttgacgtttataaaagattgtgtctcctttacaaccaatgtttcagccagattttggcttgcagactg

SEQ ID NO: 423884 - DNA, 120 bp, Artificial Sequence
  ENSG00000151150_35 (sequence is synthesized)
ccatcaagttttagaaactgtggggttagccacgcaactgtacagagaattgatatgtgttccatatatggccaagtttgttgtttttgccaaaatgaatgatcccgtagaatcttcctt

SEQ ID NO: 423885 - DNA, 120 bp, Artificial Sequence
  ENSG00000151150_36 (sequence is synthesized)
gcgatgtttctgcatgacagatgacaaagtggacaaaactttagagcaacaagagaattttgaggaagtcgcaagaagcaaagatattgaggttctggaaggaaaacctatttatgttga

SEQ ID NO: 423886 - DNA, 120 bp, Artificial Sequence
  ENSG00000151150_37 (sequence is synthesized)
ttgttatggaaatttggccccacttaccaaaggaggacagcaacttgtttttaacttttattctttcaaagaaaatagactgccattttccatcaagattagagacaccagccaagagcc

SEQ ID NO: 423887 - DNA, 120 bp, Artificial Sequence
  ENSG00000151150_38 (sequence is synthesized)
ctgtggtcgtctgtcttttctgaaagaaccaaagacaacaaaaggactgcctcaaacagcggtttgcaacttaaatatcactctgccagcacataaaaaggagacagagtcagatcaaga

SEQ ID NO: 423888 - DNA, 120 bp, Artificial Sequence
  ENSG00000151150_39 (sequence is synthesized)
tgatgagattgagaaaacagatagacgacagagcttcgcatccttagctttacgtaagcgctacagctacttgactgagcctggaatgattgaacggagtacaggagcaacaagatccct

SEQ ID NO: 423889 - DNA, 120 bp, Artificial Sequence
  ENSG00000151150_40 (sequence is synthesized)
ccccaccacttactcatacaagccattcttttctacaagaccataccagtcctggacaacagctccgattacagtgcctgggccagccaagtcaggcttcacttccttatcaagttcttc

SEQ ID NO: 423890 - DNA, 120 bp, Artificial Sequence
  ENSG00000151150_41 (sequence is synthesized)
ctctaatacgccatcagcttctccgttaaaatcaatatggtctgtttcgacaccttctccaatcaaatccacattaggcgcgtcaactacatcttcagttaaatccattagtgacgtggc

SEQ ID NO: 423891 - DNA, 120 bp, Artificial Sequence
  ENSG00000151150_42 (sequence is synthesized)
atctccaattagatcctttcggacaatgtcttcgccgataaaaactgtggtgtcacaatctccatacaatatccaagtttcctctggtaccctggctagagctccagcagtcacggaagc

SEQ ID NO: 423892 - DNA, 120 bp, Artificial Sequence
  ENSG00000151150_43 (sequence is synthesized)
tacgcccttaaaagggctggcatccaattctacgttttcctctcgaacctctccagtgactacagcagggtctcttttggagaggtcatcaattactatgacaccccctgcctcccccaa

SEQ ID NO: 423893 - DNA, 120 bp, Artificial Sequence
  ENSG00000151150_44 (sequence is synthesized)
atcaaacattaatatgtattcctcaagtttgccatttaagtcaattattacatcagcagcaccgctaatatcttcacctttaaagtcagtggtgtctccagttaaatcagcagttgatgt

SEQ ID NO: 423894 - DNA, 120 bp, Artificial Sequence
  ENSG00000151150_45 (sequence is synthesized)
catttcatcagccaaaattacaatggcatcttctctctcatcacctgtgaagcagatgcctggacatgcagaggtagcattagtcaatggatctatttcccctctaaaatatccatcatc

SEQ ID NO: 423895 - DNA, 120 bp, Artificial Sequence
  ENSG00000151150_46 (sequence is synthesized)
ctcaactttaattaatggatgcaaagccactgccacgttacaggaaaaaatttcttctgctacaaactctgtgagctctgtggtcagtgcagccactgacacagttgagaaagtgttttc

SEQ ID NO: 423896 - DNA, 120 bp, Artificial Sequence
  ENSG00000151150_47 (sequence is synthesized)
taccacgactgcaatgccattttccccactcaggtcatatgtttctgcagcaccatcagcttttcagtctctaagaactccttccgcaagtgcactctatacatcccttgggtcgtcaat

SEQ ID NO: 423897 - DNA, 120 bp, Artificial Sequence
  ENSG00000151150_48 (sequence is synthesized)
atctgcaactacctcatctgtaacttcatcaattataacagtgccagtatactctgtagtcaatgttttgccagaaccagcattaaagaaacttccagactctaattcatttacaaaatc

SEQ ID NO: 423898 - DNA, 120 bp, Artificial Sequence
  ENSG00000151150_49 (sequence is synthesized)
agcagcagccttgctgtcacccattaaaacattgactacggagacacatcctcagcctcacttcagtcgaacttcatctccagttaagtcatctttgttccttgcaccctctgcccttaa

SEQ ID NO: 423899 - DNA, 120 bp, Artificial Sequence
  ENSG00000151150_50 (sequence is synthesized)
gttgtctacaccatcttctttatcttccagtcaggagatactaaaagatgtagctgaaatgaaagaggacctaatgcggatgaccgcaatactacagacagatgtgcctgaggagaagcc

SEQ ID NO: 423900 - DNA, 120 bp, Artificial Sequence
  ENSG00000151150_51 (sequence is synthesized)
attccaacctgaactcccaaaggaagggagaatagatgatgaagaacctttcaaaattgtagagaaagtaaaggaagacttagtgaaagttagtgaaatccttaaaaaggatgtatgtgt

SEQ ID NO: 423901 - DNA, 120 bp, Artificial Sequence
  ENSG00000151150_52 (sequence is synthesized)
agataataaaggatcacccaaatcaccaaagagtgacaaaggacactctcctgaagatgactggatagaatttagttcggaagaaatccgggaagccagacaacaagctgctgcgagcca

SEQ ID NO: 423902 - DNA, 120 bp, Artificial Sequence
  ENSG00000151150_53 (sequence is synthesized)
gtctccatctctgccagagagagtgcaagtaaaagcaaaagccgcctccgaaaaggattataacttgaccaaagttattgattacctaacaaatgatattgggagtagttcactgacaaa

SEQ ID NO: 423903 - DNA, 120 bp, Artificial Sequence
  ENSG00000151150_54 (sequence is synthesized)
cttaaaatacaagtttgaggatgcaaagaaggatggtgaggagagacagaaaagagttttaaaaccagcaattgctttgcaggaacacaaactcaaaatgcctccagcctccatgaggac

SEQ ID NO: 423904 - DNA, 120 bp, Artificial Sequence
  ENSG00000151150_55 (sequence is synthesized)
ttccacctctgagaaagaattgtgtaaaatggctgattccttttttggaacagatactattttagagtctcctgatgacttttctcaacacgaccaagataaaagtcccttgtctgacag

SEQ ID NO: 423905 - DNA, 120 bp, Artificial Sequence
  ENSG00000151150_56 (sequence is synthesized)
tggctttgaaacaagaagtgaaaagacaccttcagccccacaaagcgctgaaagcactggtcctaaaccactttttcatgaagttcccatccctcctgtcattacagaaacaagaactga

SEQ ID NO: 423906 - DNA, 120 bp, Artificial Sequence
  ENSG00000151150_57 (sequence is synthesized)
agtggttcatgttatcaggagctatgatccctcagctggggatgttccccagacccaaccagaggagcctgtgtcacctaaaccttcacctacttttatggaattggaaccaaagcccac

SEQ ID NO: 423907 - DNA, 120 bp, Artificial Sequence
  ENSG00000151150_58 (sequence is synthesized)
cacctctagtattaaagaaaaggttaaagcatttcaaatgaaagccagtagtgaagaagatgaccacaatcgggttttaagcaaaggcatgcgtgttaaagaagagactcacataaccac

SEQ ID NO: 423908 - DNA, 120 bp, Artificial Sequence
  ENSG00000151150_59 (sequence is synthesized)
aaccaccagaatggtttatcattctccaccaggcggtgaaggtgcatctgaaagaattgaagaaaccatgtcagtccatgacatcatgaaggcctttcagtccgggcgggatccttccaa

SEQ ID NO: 423909 - DNA, 120 bp, Artificial Sequence
  ENSG00000151150_60 (sequence is synthesized)
agaactggcaggtctgtttgaacataagtcggcagtgtctccagatgttcacaagtctgctgctgaaacctcagcccagcatgcagagaaggacaaccaaatgaaacccaaactggagcg

SEQ ID NO: 423910 - DNA, 120 bp, Artificial Sequence
  ENSG00000151150_61 (sequence is synthesized)
tataatagaagtccacatcgaaaaaggtaaccaagctgagcccactgaagtcattattagagaaaccaaaaagcatccagaaaaagaaatgtatgtatatcagaaagacttatcccgggg

SEQ ID NO: 423911 - DNA, 120 bp, Artificial Sequence
  ENSG00000151150_62 (sequence is synthesized)
agatattaacctaaaagattttctgccagaaaaacacgatgcttttccttgttcagaggaacagggtcagcaagaagaagaagaacttactgctgaagagtcattgccttcttatctgga

SEQ ID NO: 423912 - DNA, 120 bp, Artificial Sequence
  ENSG00000151150_63 (sequence is synthesized)
gtcttccagagtaaacactcctgtgtcccaagaagaagatagccgccctagttctgctcaactcatatctgatgactcttataaaacattgaagcttttgagtcaacactcaatagaata

SEQ ID NO: 423913 - DNA, 120 bp, Artificial Sequence
  ENSG00000151150_64 (sequence is synthesized)
ccatgacgatgagttgtcagaactaagaggggagtcttacaggtttgctgagaaaatgcttctgtcagaaaagctagatgtgtctcattctgatactgaggaatcggttacagaccatgc

SEQ ID NO: 423914 - DNA, 120 bp, Artificial Sequence
  ENSG00000151150_65 (sequence is synthesized)
aggaccccctagctcagagttacaggggtctgataagcggtccagagaaaaaatagccactgcccccaaaaaagaaattctctccaaaatctataaagatgtttctgaaaatggtgtagg

SEQ ID NO: 423915 - DNA, 120 bp, Artificial Sequence
  ENSG00000151150_66 (sequence is synthesized)
taaagtgtctaaagatgagcattttgataaagtgacagtgttgcactattctggcaatgttagtagtccaaaacatgccatgtggatgcgctttactgaggacagattagacagaggtag

SEQ ID NO: 423916 - DNA, 120 bp, Artificial Sequence
  ENSG00000151150_67 (sequence is synthesized)
agagaagttgatatatgaagatagggtggacaggactgtgaaggaggctgaagaaaaactgactgaagtgtcacagttttttcgtgacaaaactgaaaagctaaatgatgaactgcagtc

SEQ ID NO: 423917 - DNA, 120 bp, Artificial Sequence
  ENSG00000151150_68 (sequence is synthesized)
cccagagaaaaaggcacgccctaaaaatggcaaagaatattcttctcaaagccctaccagtagcagccctgagaaagtgctactgacagaactgctggcatccaatgatgagtgggttaa

SEQ ID NO: 423918 - DNA, 120 bp, Artificial Sequence
  ENSG00000151150_69 (sequence is synthesized)
ggcaagacagcatggccctgatggacaaggcttccccaaggccgaggagaaggcacccagtctgcccagcagcccagagaagatggttctctcccaacagactgaggacagcaagtccac

SEQ ID NO: 423919 - DNA, 120 bp, Artificial Sequence
  ENSG00000151150_70 (sequence is synthesized)
atttgaacaaggcacacacgcaaaaagtaaggacatgtctcaagaagacagaaagtcagatggccagtccagaatcccagttaaaaaaatacaggagagcaagctacccgtctaccaagt

SEQ ID NO: 423920 - DNA, 120 bp, Artificial Sequence
  ENSG00000151150_71 (sequence is synthesized)
ttttgctagagaaaaacagcagaaggccatagacctcccagatgaaagtgtatctgtgcaaaaagattttatggtattaaaaaccaaagatgagcatgcccaaagcaacgaaattgttgt

SEQ ID NO: 423921 - DNA, 120 bp, Artificial Sequence
  ENSG00000151150_72 (sequence is synthesized)
aaatgattctggctctgataatgtgaaaaaacagagaactgaaatgtcaagtaaagcaatgcctgactctttttctgagcagcaggctaaagacttggcatgtcatataacctcagattt

SEQ ID NO: 423922 - DNA, 120 bp, Artificial Sequence
  ENSG00000151150_73 (sequence is synthesized)
agcaactaggggaccatgggacaaaaaggtctttagaacatgggagagttcgggagccactaacaataagtctcagaaagaaaaactttcgcatgtacttgttcatgatgtaagagagaa

SEQ ID NO: 423923 - DNA, 120 bp, Artificial Sequence
  ENSG00000151150_74 (sequence is synthesized)
tcacattggtcaccctgagagtaaaagtgttgatcaaaagaatgaatttatgtctgtgactgagagagaacgcaaattgttaacaaacggctctctctcagaaattaaagaaatgactgt

SEQ ID NO: 423924 - DNA, 120 bp, Artificial Sequence
  ENSG00000151150_75 (sequence is synthesized)
aaaatctccctccaaaaaagtcttatatagggaatatgttgtgaaagaaggggaccatccaggcggattgcttgatcagccttccaggaggagcgagagctcagcagtgtcacacattcc

SEQ ID NO: 423925 - DNA, 120 bp, Artificial Sequence
  ENSG00000151150_76 (sequence is synthesized)
cgtcagagttgctgatgagaggagaatgctgtcttctaatattcccgatggtttttgtgaacagtcggcatttccaaaacatgaactatcacaaaaattgtcccagtcaagcatgagtaa

SEQ ID NO: 423926 - DNA, 120 bp, Artificial Sequence
  ENSG00000151150_77 (sequence is synthesized)
agagacagttgagacacagcactttaattctatagaagatgaaaaagttacctattcagaaatcagcaaagtttccaaacaccagagttatgtaggtttatgcccacctctcgaggaaac

SEQ ID NO: 423927 - DNA, 120 bp, Artificial Sequence
  ENSG00000151150_78 (sequence is synthesized)
cgaaacctcccccaccaaatctcctgattctttagagtttagcccaggaaaggaatctccctctagtgatgtattcgaccacagtcccattgatggattggaaaaactcgcaccactagc

SEQ ID NO: 423928 - DNA, 120 bp, Artificial Sequence
  ENSG00000151150_79 (sequence is synthesized)
ccagacagagggagggaaagagataaaaactttacccgtttatgtcagttttgtacaagtggggaagcaatatgaaaaggagatacaacaaggaggtgtaaaaaaaatcataagtcagga

SEQ ID NO: 423929 - DNA, 120 bp, Artificial Sequence
  ENSG00000151150_80 (sequence is synthesized)
atgtaagacagtacaagaaaccagggggaccttttatacaactagacagcaaaagcaacctccttctccccaaggtagtccagaagatgatactctagagcaagtatcctttctagacag

SEQ ID NO: 423930 - DNA, 120 bp, Artificial Sequence
  ENSG00000151150_81 (sequence is synthesized)
ctctgggaaaagccctttaaccccagaaacacccagttcagaggaagtgagttatgaatttacatctaagacacctgactcgctcatagcttatataccaggcaaacccagcccaattcc

SEQ ID NO: 423931 - DNA, 120 bp, Artificial Sequence
  ENSG00000151150_82 (sequence is synthesized)
cgaggtttctgaggagtcagaggaggaggaacaggccaagtcaacctcccttaagcagactacagtggaggaaacagcagttgagcgtgaaatgcctaatgacgtgagcaaagactctaa

SEQ ID NO: 423932 - DNA, 120 bp, Artificial Sequence
  ENSG00000151150_83 (sequence is synthesized)
ccaaagacccaaaaataacagagttgcctatattgaatttccccctcctccaccactggatgcggaccagattgagtcagataagaagcatcattatctcccagaaaaagaggttgacat

SEQ ID NO: 423933 - DNA, 120 bp, Artificial Sequence
  ENSG00000151150_84 (sequence is synthesized)
gattgaagtcaatctgcaagatgagcatgacaagtaccagctggctgaacctgtcattagagtgcagccaccttcaccagttcctcccggggcagacgtcagtgattcaagcgatgacga

SEQ ID NO: 423934 - DNA, 120 bp, Artificial Sequence
  ENSG00000151150_85 (sequence is synthesized)
atctatttatcagccagtcccagttaaaaaatataccttcaaattaaaggaagtggacgatgaacaaaaagaaaaacccaaagcttctgctgaaaaggcttccaaccagaaagaactgga

SEQ ID NO: 423935 - DNA, 120 bp, Artificial Sequence
  ENSG00000151150_86 (sequence is synthesized)
aagtaatggatctggaaaagataatgaatttggccttggccttgattcacctcagaatgaaattgcccagaatgggaacaacgaccagtccatcacagagtgttccattgccaccacagc

SEQ ID NO: 423936 - DNA, 120 bp, Artificial Sequence
  ENSG00000151150_87 (sequence is synthesized)
agagttttctcatgacacggatgccacagagatcgactctctggatggctatgacctgcaagatgaagatgatggcttgacagagagtgattctaaactcccaattcaagccatggaaat

SEQ ID NO: 423937 - DNA, 120 bp, Artificial Sequence
  ENSG00000151150_88 (sequence is synthesized)
taagaaagatatctggaacacagagggcattctgaagccagctgaccgctcttttagccaaagtaaacttgaagttatcgaggaggagggaaaggtgggaccagatgaggacaagccacc

SEQ ID NO: 423938 - DNA, 120 bp, Artificial Sequence
  ENSG00000151150_89 (sequence is synthesized)
ttctaaaagttcttcatctgaaaagactcctgataagactgatcagaagtcaggggcccagttcttcacactggaaggcagacatcctgacagatcagtgtttcctgatacttacttcag

SEQ ID NO: 423939 - DNA, 120 bp, Artificial Sequence
  ENSG00000151150_90 (sequence is synthesized)
ttacaaagtagatgaagaatttgccactccttttaaaacagtagctaccaaaggtctagattttgacccttggtctaataaccgaggggatgatgaagtttttgacagtaaatcacggga

SEQ ID NO: 423940 - DNA, 120 bp, Artificial Sequence
  ENSG00000151150_91 (sequence is synthesized)
agatgaaactaagccatttgggctggcggtagaagaccgctctccagcaacaacccctgatacaacgccagccagaacgccaactgatgaaagtaccccaactagtgagcctaacccctt

SEQ ID NO: 423941 - DNA, 120 bp, Artificial Sequence
  ENSG00000151150_92 (sequence is synthesized)
cccatttcatgaaggaaaaatgtttgagatgactcgcagtggtgcaattgacatgagcaagagggattttgttgaagagaggctccaatttttccagattggtgagcatacttctgaagg

SEQ ID NO: 423942 - DNA, 120 bp, Artificial Sequence
  ENSG00000151150_93 (sequence is synthesized)
gaagtcaggggaccagggggaaggggataaaagtatggtcactgccacaccacagccacagtcaggggacaccactgtagaaaccaatctagagagaaatgtagagacacctacagtgga

SEQ ID NO: 423943 - DNA, 120 bp, Artificial Sequence
  ENSG00000151150_94 (sequence is synthesized)
acctaaccccagcatcccgaccagcggagagtgtcaggaaggcacatccagtagtggctccctggagaaatcagcagcagccactaacacctctaaagttgaccccaagttgcgcacgcc

SEQ ID NO: 423944 - DNA, 120 bp, Artificial Sequence
  ENSG00000151150_95 (sequence is synthesized)
tataaaaatgggaatttctgcatccaccatgaccatgaagaaagaaggccctggagaaataacagataagatagaagcggtgatgaccagttgtcagggattagaaaatgaaactataac

SEQ ID NO: 423945 - DNA, 120 bp, Artificial Sequence
  ENSG00000151150_96 (sequence is synthesized)
aatgatttcaaatacagccaatagccagatgggcgttaggccccatgaaaaacatgattttcaaaaagataactttaataacaacaacaatttggattcttccactatacagacagataa

SEQ ID NO: 423946 - DNA, 120 bp, Artificial Sequence
  ENSG00000151150_97 (sequence is synthesized)
cattatgagtaatatagttctgacagaacattctgcacccacttgtaccacagagaaagataacccagtgaaagtctcatcaggaaaaaagacaggggtactacaaggacactgtgtaag

SEQ ID NO: 423947 - DNA, 120 bp, Artificial Sequence
  ENSG00000151150_98 (sequence is synthesized)
agataagcagaaagttcttggagaacagcaaaaaacaaaggaattgatagggattaggcaaaaatccaaacttcccataaaggccacttcaccaaaagataccttcccaccgaaccatat

SEQ ID NO: 423948 - DNA, 120 bp, Artificial Sequence
  ENSG00000151150_99 (sequence is synthesized)
gtcaaacactaaagcaagtaaaatgaagcaggttagtcaatccgagaaaaccaaagcccttactacttcttcatgtgtagatgtaaagtccagaattccagtgaaaaacacacacaggga

SEQ ID NO: 423949 - DNA, 120 bp, Artificial Sequence
  ENSG00000151150_100 (sequence is synthesized)
taacataattgcagttagaaaagcatgtgccacacaaaagcaagggcagccagagaaaggcaaggccaaacagcttccatccaagttgccagtaaaggtaagatccacctgtgtcactac

SEQ ID NO: 423950 - DNA, 120 bp, Artificial Sequence
  ENSG00000151150_101 (sequence is synthesized)
caccaccaccactgccaccaccaccaccactaccaccactaccaccaccaccagctgcacagttaaagttaggaaaagtcagctcaaggaagtatgtaaacattccattgaatattttaa

SEQ ID NO: 423951 - DNA, 120 bp, Artificial Sequence
  ENSG00000151150_102 (sequence is synthesized)
gggaattagtggtgagaccttaaagcttgtggaccgcctctctgaagaagaaaaaaagatgcagtccgagttgtccgatgaggaagaaagtacctcaagaaacacgtcgttgtccgagac

SEQ ID NO: 423952 - DNA, 120 bp, Artificial Sequence
  ENSG00000151150_103 (sequence is synthesized)
ttcccggggtggccagccttcggttacaacgaagtctgctagagataagaaaacagaggcagcacctttaaaatcaaagagtgaaaaggccggcagtgagaaaaggagcagtagaaggac

SEQ ID NO: 423953 - DNA, 120 bp, Artificial Sequence
  ENSG00000151150_104 (sequence is synthesized)
tggtccacagagtccatgtgaacggacagatatcaggatggcaatagtagccgatcacctgggacttagttggacagaactggcaagggaactgaatttttcagtggatgaaatcaatca

SEQ ID NO: 423954 - DNA, 120 bp, Artificial Sequence
  ENSG00000151150_105 (sequence is synthesized)
aatacgtgtggaaaatccaaattctttaatttctcagagcttcatgttattaaaaaaatgggttaccagagacggaaaaaatgccacaactgatgccttaacttcggtcttgacaaaaat

SEQ ID NO: 423955 - DNA, 120 bp, Artificial Sequence
  ENSG00000151150_106 (sequence is synthesized)
taatcgaatagatatagtgacactgctagaaggaccaatatttgattatggaaatatttcaggcaccagaagttttgcagatgagaacaatgttttccatgaccctgttgatggttggca

SEQ ID NO: 423956 - DNA, 120 bp, Artificial Sequence
  ENSG00000151150_107 (sequence is synthesized)
gaatgagacatcaagtggaaacctagagtcctgcgctcaagctcgaagagtaactggtgggttactagatcgactggatgacagccctgaccagtgtagagattccattacctcatatct

SEQ ID NO: 423957 - DNA, 120 bp, Artificial Sequence
  ENSG00000151150_108 (sequence is synthesized)
caaaggagaagctggcaaatttgaagcaaatggaagccatacagaaatcactccagaagcaaagacaaaatcttactttccagaatcccaaaatgatgtaggaaaacagagtaccaagga

SEQ ID NO: 423958 - DNA, 120 bp, Artificial Sequence
  ENSG00000151150_109 (sequence is synthesized)
aactctgaaaccaaaaatacatggatctggtcatgttgaagaaccagcatcaccactagcagcatatcagaaatctctagaagaaaccagcaagcttataatagaagagactaaaccctg

SEQ ID NO: 423959 - DNA, 120 bp, Artificial Sequence
  ENSG00000151150_110 (sequence is synthesized)
tgtgcctgtcagtatgaaaaagatgagtaggacttctccagcagatggcaagccaaggcttagcctccatgaagaagaggggtccagtgggtctgagcaaaagcagggagaaggttttaa

SEQ ID NO: 423960 - DNA, 120 bp, Artificial Sequence
  ENSG00000151150_111 (sequence is synthesized)
ggtgaaaacgaagaaagaaatccggcatgtggaaaagaagagccactcgtaacagcgaacggtcagtcaaggatcataagtttttactgccagtattgagaaattcgtggaagaaatgtc

SEQ ID NO: 423961 - DNA, 120 bp, Artificial Sequence
  ENSG00000151150_112 (sequence is synthesized)
agcaggaagtaaaaattcaccgagaagtgtgtgtgtgttcgctgcttccacacattaatggcatgattttttttatgcaaaaagaaaagaaaagaaaaccacccacattttaatttagca

SEQ ID NO: 423962 - DNA, 120 bp, Artificial Sequence
  ENSG00000151150_113 (sequence is synthesized)
tgagccaatttacagagcatggaaatcactttcatttccggattggcgcgtgtgcaattagcaatgcagtgtatatacaagaagccatgctgttaacagtttatctcaagtaatttggtg

SEQ ID NO: 423963 - DNA, 120 bp, Artificial Sequence
  ENSG00000151150_114 (sequence is synthesized)
tcatttacaaaaggaagaaattcctgccatcagaagggacagaaggagatggaatgatcaaatcacagagaaacactaaaattactaaatctacaacagctcgccttatttttcttggac

SEQ ID NO: 423964 - DNA, 120 bp, Artificial Sequence
  ENSG00000151150_115 (sequence is synthesized)
ccaaactgtcagggtataaacactatttgtttcttttttaaaacatcgatagttttgctgtaaataataacactgtataaattctaacagaaaaatagaataaaatgttgataaggcact

SEQ ID NO: 423965 - DNA, 120 bp, Artificial Sequence
  ENSG00000151150_116 (sequence is synthesized)
gcctcttagaacacaaacagaatattgcaaatgcatttaacaaataggggtctcaagtgacttcaccctagaagaggagggagggattctgggtgggggtgactcttcactgattcttgt

SEQ ID NO: 423966 - DNA, 120 bp, Artificial Sequence
  ENSG00000151150_117 (sequence is synthesized)
atattagcaattataatgtttgtatatgcaaaactgctagcttgattttaaaaaaaaacaaatctttaaaatctgctgcaaatttaaataattcccaaaatgaggaattctgtagttctg

SEQ ID NO: 423967 - DNA, 120 bp, Artificial Sequence
  ENSG00000151150_118 (sequence is synthesized)
tgaaaaatttttttcttcagaatactaatattttgatgcatgtgtatcaccttattttgattaaatcttttccaattttgcaaacactacagtatactgcaacacaaaagattttatctg

SEQ ID NO: 423968 - DNA, 120 bp, Artificial Sequence
  ENSG00000151150_119 (sequence is synthesized)
taaacacaaagcccttcatctaatatttgttgctattgccaatttttcaatgaaatgacctaaaaacaacaaaaaaaaataacctatacggtagttgctttagggggtggggggatgcta

SEQ ID NO: 423969 - DNA, 120 bp, Artificial Sequence
  ENSG00000151150_120 (sequence is synthesized)
tctgttagtgcttaaaagggggtaaatgcttgccgctttagaggtggatggtgctcataaaaggccccagtcgggggtatttaaaaaggactgaacagaaatccttagctagtagaatgg

SEQ ID NO: 423970 - DNA, 120 bp, Artificial Sequence
  ENSG00000151150_121 (sequence is synthesized)
cagcacgctgtaaaattattactgtattgtgtactggctataagatgtagacacctttcagtaagccaatcatttgtaaccattctagcagtgtcatattaggttaataaggctgctgtg

SEQ ID NO: 423971 - DNA, 120 bp, Artificial Sequence
  ENSG00000151150_122 (sequence is synthesized)
ttttaaagggcatttttatttgggttttggtgaaattctttaatttgttgattatattcacataaaatcagcattcattgacacatagctctaatgacatatgtatgaaaaaccatacac

SEQ ID NO: 423972 - DNA, 120 bp, Artificial Sequence
  ENSG00000151150_123 (sequence is synthesized)
tggatgacctagtcgattatttaagcataaaataaattgtgttaaactcttcacctatctgtgctctacagtctccttgtgttttctggcaaaaggtagttgtctaatcccttgtcatat

SEQ ID NO: 423973 - DNA, 120 bp, Artificial Sequence
  ENSG00000151150_124 (sequence is synthesized)
gagtcctggccaatccaccccattggtcctctttgtgcctctgtggtcactgaagagataatctctaacattcatatgtgccctgcaagctcccagcttataaattctgtgcatttcatg

SEQ ID NO: 423974 - DNA, 120 bp, Artificial Sequence
  ENSG00000151150_125 (sequence is synthesized)
ggggagccaagaattaaagattaattgacaagtaagctttgcccacatctgttcaggccttcttgaaaagtgaagaattggagatactatagccagcatgtcaaaaagttgactggcact

SEQ ID NO: 423975 - DNA, 120 bp, Artificial Sequence
  ENSG00000151150_126 (sequence is synthesized)
tctaggaaccatcaacatgcagttgcttttagcccacagagcttgtttttgttttgttttattaatttacatttattgtccattcttacaagttgggacatttcacataattaagttgct

SEQ ID NO: 423976 - DNA, 120 bp, Artificial Sequence
  ENSG00000151150_127 (sequence is synthesized)
aacatctcttaaaaagcaagatttggcaacaatggacctcattcccagaaggtaacaacctgctagagccaagttgtccctgccctctccagccaggtgtggggtctacaggtatcactg

SEQ ID NO: 423977 - DNA, 120 bp, Artificial Sequence
  ENSG00000151150_128 (sequence is synthesized)
ccacagcctcatttcttatatttgtacaacctgactgtgaatttgcaacccatacactgcgtgaatctaaattctactgaggcagagaccatggctgttttaacttttattctagttacc

SEQ ID NO: 423978 - DNA, 120 bp, Artificial Sequence
  ENSG00000151150_129 (sequence is synthesized)
agcttagcatatggtagtagtgatagtagtaactgtgatcatcatcactaaaactggagtgctcactacatgctattctctgttctaagcacattccatttacttacttagtcctcatat

SEQ ID NO: 423979 - DNA, 120 bp, Artificial Sequence
  ENSG00000151150_130 (sequence is synthesized)
ctactttatgaattaggtactgtctttctttgatggtaatgatccttttataaaattaaattagtgctaagagactttcagcaatgttatatattgcctgtccattaaagattgttgcca

SEQ ID NO: 423980 - DNA, 120 bp, Artificial Sequence
  ENSG00000151150_131 (sequence is synthesized)
aatggagtgagttgtccccagtaaggattcactatcaatgcagaagaaatgcacggataatctactttgcataaagaatggggctaggttgcatctgcatggtatcccaaataaataaaa

SEQ ID NO: 423981 - DNA, 120 bp, Artificial Sequence
  ENSG00000151150_132 (sequence is synthesized)
tgtgccactacccttgcaccaaaattattttatgatgggtaaagttagacccttgagaggttttttttttaaaaaaaaaaaaaaaaaaaaactttcccaaaatgcctctctgtaaagcca

SEQ ID NO: 423982 - DNA, 120 bp, Artificial Sequence
  ENSG00000151150_133 (sequence is synthesized)
ggatcagaatataggtgtcctaacttcctatctaagagttacgaatttctgactcagtctttgagagaaggtgtttatcctgaaccagaaactcaatgatgtatacctgtttaggtatta

SEQ ID NO: 423983 - DNA, 120 bp, Artificial Sequence
  ENSG00000151150_134 (sequence is synthesized)
aatagttgtgtttatatgcccaaaaatttgactttaggtatatgtgatatgctttggttccgatcaagcaggaggtcataagtttactcagaagtatccaaaatatgacattcaagattt

SEQ ID NO: 423984 - DNA, 120 bp, Artificial Sequence
  ENSG00000151150_135 (sequence is synthesized)
aacttgcatatgtgtgtatatgcatatatttatacatgtatatgtagattgaatgtgacattatgtatttctaacataatatttggcctgccagcttataaatatgtatttaagcttttc

SEQ ID NO: 423985 - DNA, 120 bp, Artificial Sequence
  ENSG00000151150_136 (sequence is synthesized)
attgattgacattactgtaaaaaatgaattatgattgagaagttctggatatttgctgtttttttcattttatattcttactaaattattgaatttgttaaattaaaatgtgctatcact

SEQ ID NO: 423986 - DNA, 120 bp, Artificial Sequence
  ENSG00000151150_137 (sequence is synthesized)
gtattgccaaattatggcaatacactatgcagtattatttcaatactttaagaggcatctattacttcattgaacacataagcagctagcctcctttcctctgtaaataaggactttttg

SEQ ID NO: 423987 - DNA, 120 bp, Artificial Sequence
  ENSG00000151150_138 (sequence is synthesized)
gcatcctgatgttcctcgctgttcatttggtatcatcctggagttccatcaagactgaggattttctccatggccaataaactattgtcagcatcagctcacgtttggctgtatgacagg

SEQ ID NO: 423988 - DNA, 120 bp, Artificial Sequence
  ENSG00000151150_139 (sequence is synthesized)
gatatgtgagaagcccagaaataaatcacaaaaataataaggcatcttctgagtctctctgaagaagccagtgatccaaaaactaacttcatatctgagtgagtcttggtattcttgatt

SEQ ID NO: 423989 - DNA, 120 bp, Artificial Sequence
  ENSG00000151150_140 (sequence is synthesized)
tgcttgaagaggctgtgacatattacaaggtgtgtaatttcccaggcatatcacactgcttctgtttcatgaattgatcaaattgtccagaagtaaacatttacaagattgagatttgaa

SEQ ID NO: 423990 - DNA, 120 bp, Artificial Sequence
  ENSG00000151150_141 (sequence is synthesized)
acagcaggaggaggataggccgcgctgggcgggcgtcgcggggccgcgcttggtgttcctgagccgcggccgaactttttcccaagaagtcccacgtttggaggcccgaggagcgggacg

SEQ ID NO: 423991 - DNA, 120 bp, Artificial Sequence
  ENSG00000151150_142 (sequence is synthesized)
gggaggagagactggagttcctggaaggagcagcagcagcagccccacaacatggcctcctccgcctcctcctctcccgcgggcaccgaggactccgctcctgcccagggtggctttgga

SEQ ID NO: 423992 - DNA, 120 bp, Artificial Sequence
  ENSG00000151150_143 (sequence is synthesized)
tcaagtggaactggaaacccccacagggttgcactacacaccacctacccctttccagcaagatgattattttagtgatatctctagcatagaatctccccttagaacccctagtagact

SEQ ID NO: 423993 - DNA, 120 bp, Artificial Sequence
  ENSG00000151150_144 (sequence is synthesized)
gagtgatgggctagtgccttcccaggggaacatagagcattccgcagatggacctccagtcgtaactgcagaagacgcttccttagaagacagcaaactggaagactcagtgcctttaac

SEQ ID NO: 423994 - DNA, 120 bp, Artificial Sequence
  ENSG00000151150_145 (sequence is synthesized)
aagcagcggctgctttgcctggggagcacccgtaaatggactttggtctcaatgctttgactctttgccgtggttttggatgttggaataccggcggtgatctgtcttttataaactcac

SEQ ID NO: 423995 - DNA, 120 bp, Artificial Sequence
  ENSG00000151150_146 (sequence is synthesized)
agcacataaaaaggtatcttttaatactgctttaaattgtctttccctggtcttgaagaagtgggcctttggtatgcaattaaggaatgctttgtaacatgaataaagctcttgaaactg

SEQ ID NO: 423996 - DNA, 120 bp, Artificial Sequence
  ENSG00000151150_147 (sequence is synthesized)
tgagtatcctcaataccttggaaatttggctgggtccccaaaagatgttaaaccagcagagcctagaaaactaggagtaagctctgagcagcaggagaaaggaaaatctggtcctgatga

SEQ ID NO: 423997 - DNA, 120 bp, Artificial Sequence
  ENSG00000151150_148 (sequence is synthesized)
ggagatgatggaagagaaactcaaatctctatttgaggacattcaacttgaagaaggagtagagtctgaggagatgacagaagaaaaagtacaggctattcttaagcgtgttcagcaagc

SEQ ID NO: 423998 - DNA, 120 bp, Artificial Sequence
  ENSG00000151150_149 (sequence is synthesized)
ttataaagggagaggaagcaaaaaacattcctggtgaatctgtcacagaagaacaatttactgatgaagaaggcaacctcatcaccagaaaaatcactcggaaagtattaagacgaattg

SEQ ID NO: 423999 - DNA, 120 bp, Artificial Sequence
  ENSG00000151150_150 (sequence is synthesized)
acaacatggcctcctccgcctcctcctctcccgcgggcaccgaggactccgctcctgcccagggtggctttggatcagattattcacgaagctctagaaaggtaagtgaacttggcattg

SEQ ID NO: 424000 - DNA, 120 bp, Artificial Sequence
  ENSG00000151150_151 (sequence is synthesized)
gccattgcttattatgcttcctgtctggctcttactcatgttgccattttgtggactaaaactcaaggcagttcaaaaatactgatatgcaggtgccatggatgctgttggagtgtgtgt

SEQ ID NO: 424001 - DNA, 120 bp, Artificial Sequence
  ENSG00000151150_152 (sequence is synthesized)
cctaagagagagggtaagtgctggttttccattttaaacatagctcgtgatatcaagttgccccctcccttcattccctgactcccgtcttcctccaaaagcggctctcttggtttagta

SEQ ID NO: 424002 - DNA, 120 bp, Artificial Sequence
  ENSG00000151150_153 (sequence is synthesized)
agcatctctaccctgcaaagcggaaataatgaaaaatgagattcactttgcaagcttgttgggtgagcttctggagaataatttttaccaaaagcctgaaatcatttggcattgttggtg

SEQ ID NO: 424003 - DNA, 120 bp, Artificial Sequence
  ENSG00000151150_154 (sequence is synthesized)
ttttcaatgcatctgcatcacagcacattgcatttcacatctggccagtttggaatgaaacttagaaaatcaccagactatagtgatgtaattgtcatgaagtggtttttgtagcttaga

SEQ ID NO: 424004 - DNA, 120 bp, Artificial Sequence
  ENSG00000151150_155 (sequence is synthesized)
atggtctgaagtcccacccaaagtaaaacattctaaattaatagttgcctaaagactacagtattattagacttctatttaaaaaaattcacagttctaatcaaagaagtgtaattggag

SEQ ID NO: 424005 - DNA, 120 bp, Artificial Sequence
  ENSG00000151150_156 (sequence is synthesized)
tttcctttttaaatatttgaagactgtatttactattttgatgttcaaatattagatctatatttagaaggaagtccagaggcattttaagctaaataggaatgtggattcctattcaac

SEQ ID NO: 424006 - DNA, 120 bp, Artificial Sequence
  ENSG00000151150_157 (sequence is synthesized)
tattggaaaaatacattgtcattatagactttttaaagtattaagtagcttttaaaaaacattataggactgttatagctaaatccttttaatatcttcattactcttaattctctagga

SEQ ID NO: 424007 - DNA, 120 bp, Artificial Sequence
  ENSG00000151150_158 (sequence is synthesized)
aggagtttagtaacattttgctttttttggtaaaatttgaagtctaatttactagttggctatttctttacattgagaatggttattactttttcactctgaacaattgaaaattaagaa

SEQ ID NO: 424008 - DNA, 120 bp, Artificial Sequence
  ENSG00000151150_159 (sequence is synthesized)
aaattacacttaaatataaattcttgatggttttctttgctgttcttttcatttattattggaaaacagatactgcattaaagtatttgttgaaatatgcctaagtgtgttttcagattg

SEQ ID NO: 424009 - DNA, 120 bp, Artificial Sequence
  ENSG00000151150_160 (sequence is synthesized)
agctcctacctccttcctaggaagtgggggaaacctttacatttccgaaggcagatatttttagatgtgatgctctgtccaaagtgttaactaattgagttatcaggtttcttacttggc

SEQ ID NO: 424010 - DNA, 120 bp, Artificial Sequence
  ENSG00000151150_161 (sequence is synthesized)
tgctgagaggaattcagcggtggtgaagagagtggatacaaaccagggattggtttccttgagctgttttggaggttgattctaaatcactgcttaaggaattcctggaaacatcaggaa

SEQ ID NO: 424011 - DNA, 120 bp, Artificial Sequence
  ENSG00000151150_162 (sequence is synthesized)
tacatgggctttagtctcggagcgcgttctgccagtcatgctgccagcacagtagcaaaagagctcactgacaaaactgggagaaccaatctgagtcacatatttcaaaattaagttttg

SEQ ID NO: 424012 - DNA, 120 bp, Artificial Sequence
  ENSG00000151150_163 (sequence is synthesized)
ttccatattgaaagaaagtattatttgctaataagtgagaaatatgtgtatagattgttcactattctctgttactgaaataataattcatgattaaaagagagcatttttgaaaaaaaa

SEQ ID NO: 424013 - DNA, 120 bp, Artificial Sequence
  ENSG00000151150_164 (sequence is synthesized)
taaatatcatgcccaaactaaggtactatcttagttcaagttagataaaactcaatccacaaaaatctctagagattcggtagaactaatgaagaaacagtgcttaaagtgagacgatct

SEQ ID NO: 424014 - DNA, 120 bp, Artificial Sequence
  ENSG00000151150_165 (sequence is synthesized)
aatcagagctctaatccttggctaaaatttgtctcaacatatgaagcctttcggtttacagtgtgtaactgcatcctataattatgtattttcaaattcttccttctggaatctgttgct

SEQ ID NO: 424015 - DNA, 120 bp, Artificial Sequence
  ENSG00000151150_166 (sequence is synthesized)
aaccatcacgcttatacatacttgaggtttaatgcttgaatgttgttgactgctaaataactgtcagtgaagtcagcctttttcccttgcactggagtagcaagtagaatttacaactta

SEQ ID NO: 424016 - DNA, 120 bp, Artificial Sequence
  ENSG00000151150_167 (sequence is synthesized)
tttctctaaaattccagagcatgtgtgtggtgtttggagtagtgtggagatttctccatctagtatgttgctaatctttatgccacatcctttagggagaggaagcaaaaaacattcctg

SEQ ID NO: 424017 - DNA, 120 bp, Artificial Sequence
  ENSG00000151150_168 (sequence is synthesized)
gtgaatctgtcacagaagaacaatttactgatgaagaaggcaacctcatcaccagaaaagtaatcatcattcagatttcatgcttctcttggaatttagattttctgcattaaaaactct

SEQ ID NO: 424018 - DNA, 120 bp, Artificial Sequence
  ENSG00000151150_169 (sequence is synthesized)
gctacttttgtgctgtagtgtcatctcctaaaacagaaaaatctctacttttcaccattacttcctacagatcactcggaaagtattaagacgaattgttatcccacaagagagaaaacg

SEQ ID NO: 424019 - DNA, 120 bp, Artificial Sequence
  ENSG00000151150_170 (sequence is synthesized)
tgatgatgtggtaatggagagggattgccaaagagaatgtagaggacaaaagctttgtgcactccctagaaattgctgctaacaggctggcatctgcagtgtggcagcttgaagtgtttg

SEQ ID NO: 424020 - DNA, 120 bp, Artificial Sequence
  ENSG00000151150_171 (sequence is synthesized)
ctgcttttgacatcttatgcatttgatcagggtcaaagaaaaatacttttcttcctaacattctttgttacatactttttttttttaactgtcttcagagttttcacaaagataaggtca

SEQ ID NO: 424021 - DNA, 120 bp, Artificial Sequence
  ENSG00000151150_172 (sequence is synthesized)
tttataggggacagaatgtgccagtttgagggagaaagaagataaaaccttcaccattcaccaccaaacctcagagcagtgcttcagccccacccagggcttggccttcagcagagtgtc

SEQ ID NO: 424022 - DNA, 120 bp, Artificial Sequence
  ENSG00000151150_173 (sequence is synthesized)
agtatgttctgcagggaaatctgaattcctccatcttcgtctgaggagggggttcccctctttgggtttataacagcccatttccaatgtgccagttaaagaatccctccagtcaacccc

SEQ ID NO: 424023 - DNA, 120 bp, Artificial Sequence
  ENSG00000151150_174 (sequence is synthesized)
tttctctcagagaaaacatctctggttatttttcacttgtttctcagatctctacccttttcaatttaaaaatagaaacttcaatagacaatgtttacattagaaaaagtaaactgaaaa

SEQ ID NO: 424024 - DNA, 120 bp, Artificial Sequence
  ENSG00000151150_175 (sequence is synthesized)
tttatcagaagtacaaatcacaaaattgaaaaggcttcatttgttttctgttaaaaattgggtaaaaactgagtatttgtgccacaaccttgctctcggggaactgtattcctgatgctc

SEQ ID NO: 424025 - DNA, 120 bp, Artificial Sequence
  ENSG00000151150_176 (sequence is synthesized)
agtgaagagaggatttgtttatgcaaaatagatgccttcttggtctgacagtaagaggaagtcattggcaattccactaacttaaaaaagtccctcagatcaacagcatttccatggatt

SEQ ID NO: 424026 - DNA, 120 bp, Artificial Sequence
  ENSG00000151150_177 (sequence is synthesized)
agtacttaactaagaagtctgaatctcattgcaacagattgtttacaattctgctgccttgtgagctgtggtgctgatttcttttagcttactataggaaatggataggctgctcgttat

SEQ ID NO: 424027 - DNA, 120 bp, Artificial Sequence
  ENSG00000151150_178 (sequence is synthesized)
tttgatttatcactaacttactgaattattgtcaagtacaattatgttgtattcattttgacagtgctctctagcttgcttgatgatgctaaactgtgtggttaagctaaagattgtacg

SEQ ID NO: 424028 - DNA, 120 bp, Artificial Sequence
  ENSG00000151150_179 (sequence is synthesized)
tatttttggacatgaagtgacaaaatgctttaaactgtttcgcttgtcctaatccagcctccaaggatcagaatggactgctttataactaacactgtttcactgtgaaatcttaatatg

SEQ ID NO: 424029 - DNA, 120 bp, Artificial Sequence
  ENSG00000151150_180 (sequence is synthesized)
tctctctctttctctctctctcaccatttccaggctcaaatcactgtggaggaacaagcaacaaagtcttgtcaggaccttatctcagggtaacgattagttaaaaatgaaaggctaaaa

SEQ ID NO: 424030 - DNA, 120 bp, Artificial Sequence
  ENSG00000151150_181 (sequence is synthesized)
tattgattttctttagaagaataattgactgtttgatatagagaacacccagtttcttcctgaggaaagctgaacagggctacattagcagcccgcgtctctctgacagcagcaggggct

SEQ ID NO: 424031 - DNA, 120 bp, Artificial Sequence
  ENSG00000151150_182 (sequence is synthesized)
acaactaatgcatcatggagcctcaccaaacaccaccaatgtgagctgcagctaatttactttggctcatgttccccagagaggagaaacagcactgcacatggcagctcgctccggcca

SEQ ID NO: 424032 - DNA, 120 bp, Artificial Sequence
  ENSG00000151150_183 (sequence is synthesized)
tgaggttttattttgtggtcttaatagcactcactataaaataccaagtgcattattgattttacttttactttaaaaaatttgatatagattaatactcaaatttttttatctttttta

SEQ ID NO: 424033 - DNA, 120 bp, Artificial Sequence
  ENSG00000151150_184 (sequence is synthesized)
caccttggcctcccaaagcgctggcattacatgagtcaccacgcccggccaatactcaaattattttaagtgtctctggggctgtcttagctggttaaaacatagcactaatgaatttaa

SEQ ID NO: 424034 - DNA, 120 bp, Artificial Sequence
  ENSG00000151150_185 (sequence is synthesized)
gttatggtctccattttcctgtggccacttgagttacctacttttcagaatcactgtttatacacattactatgattttcctttttcaaacccagtgagcatgtaagtatctaacagtgc

SEQ ID NO: 424035 - DNA, 120 bp, Artificial Sequence
  ENSG00000151150_186 (sequence is synthesized)
atgaatgttccagaaacgatgaatgaagttcttgatatgtctgatgatgaaggtaatagatgcacatggtacaaaattcccaaggtacaagagtttacggtgaaaagtgaagatgcaatg

SEQ ID NO: 424036 - DNA, 120 bp, Artificial Sequence
  ENSG00000151150_187 (sequence is synthesized)
ccaaaatgtgttctttggatgaagatgtgaatttagcgaaatgttctcgacgcaaatacacatgctctgctattttcttttgtggtttgcggttgttaatttcatgtgattgaacatgtt

SEQ ID NO: 424037 - DNA, 120 bp, Artificial Sequence
  ENSG00000151150_188 (sequence is synthesized)
agctgagaacaaagttgaaagtttgcctggagctccatgccactccccgcctgggccactgctttgttttcttctaatgtttttcctctacctgggttggctgtttcttcattcatattt

SEQ ID NO: 424038 - DNA, 120 bp, Artificial Sequence
  ENSG00000151150_189 (sequence is synthesized)
gagaagaatcacctcctaattaaatgtagcacttcgctctctccctacatgaaggctgtcttggttacccgactaggcaacgcgcattggtatcaaattaccgaaagtctacaccggagc

SEQ ID NO: 424039 - DNA, 120 bp, Artificial Sequence
  ENSG00000151150_190 (sequence is synthesized)
agtcctcatatttacatacaaataactcaggggcttgcatttatgtcaccattctgtcctgctagaggcttgccagaggagtttttaatccaatcagaaggagctttaaaaggatgtctg

SEQ ID NO: 424040 - DNA, 120 bp, Artificial Sequence
  ENSG00000151150_191 (sequence is synthesized)
cgaagtggtcaaaaggatcttaacctcaattaagtggggttttttaaaaagatttttttgggggcctgaaattttgaaaatcttcgaactctgagtggggaaagatgtataattcctcaa

SEQ ID NO: 424041 - DNA, 120 bp, Artificial Sequence
  ENSG00000151150_192 (sequence is synthesized)
aaagtgctaaagcacccatattatctctggagaaggctgtgttgctttccatgtagatttcaagcattgggacagttgggctgttgttaatttgataggtttagaagcatttcaaaattg

SEQ ID NO: 424042 - DNA, 120 bp, Artificial Sequence
  ENSG00000151150_193 (sequence is synthesized)
atgtgttccaaggctctccaaccaagcaagttatagttcacataacttgctagtttcttacttaagccccaaactgaaatcctgtgtgtgagaaaaccagttttttttttaaatgtctgt

SEQ ID NO: 424043 - DNA, 120 bp, Artificial Sequence
  ENSG00000151150_194 (sequence is synthesized)
tttaagtgtgatggtaaaattatactaaaaatgcatttgtcaggacttgaaagacagtgagagtgattcaagctcagaggaagagcggagagtcactacccgagttattcgccggcgttt

SEQ ID NO: 424044 - DNA, 120 bp, Artificial Sequence
  ENSG00000151150_195 (sequence is synthesized)
ctaaactgtgatttgcttgacttagtttctcattttctctgccagagtctgcaaataaacactctgatatcagagcaaacttggtaaatacctctgtttatatacaatataaatatacaa

SEQ ID NO: 424045 - DNA, 120 bp, Artificial Sequence
  ENSG00000151150_196 (sequence is synthesized)
tataaatcatgacgtatgaacgcctaaggtatctgaaagagttggtatttctaatatttcataaaagttaaatatctagagaatgcattgcttttgtcacttttaatttttatattaacc

SEQ ID NO: 424046 - DNA, 120 bp, Artificial Sequence
  ENSG00000151150_197 (sequence is synthesized)
ctcctaaactagttacctcttttattcgtatataggtaaaacaaacgatgagccatttttatcaaataagcaaggtattgagtaaagtgtaagcatatagtatacaaattgtaaggtaaa

SEQ ID NO: 424047 - DNA, 120 bp, Artificial Sequence
  ENSG00000151150_198 (sequence is synthesized)
tatttaaatgtgcactgaaaaaatttaatgtatcattcaagtatgtgctttagttatttagcgttcgttgttattttaacttcatgaatatgctgccatttattctttggaaaaactgct

SEQ ID NO: 424048 - DNA, 120 bp, Artificial Sequence
  ENSG00000151150_199 (sequence is synthesized)
tgatctattgtatatcaaaggcagcataatttctaattcagtcggcatacatgttactaacaacaattcctctttcacattagcttaatttatataatgatcttgtcattttttcctcat

SEQ ID NO: 424049 - DNA, 120 bp, Artificial Sequence
  ENSG00000151150_200 (sequence is synthesized)
tatgtaaattgtgctttcttcactgaaatattaagaaaaacataataaatatcttcctatgtttttcaaaatagtcctgtcttaggctcacaaatgaaaatttattcctacaatgaattt

SEQ ID NO: 424050 - DNA, 77 bp, Artificial Sequence
  ENSG00000151150_201 (sequence is synthesized)
cttaggctcacaaatgaaaatttattcctacaatgaatttttgttctgtttttgagacgaagtctcgctctgtcgcc

SEQ ID NO: 424051 - DNA, 73 bp, Artificial Sequence
  ENSG00000151150_202 (sequence is synthesized)
ccacccagcctctataatgaattttgagtagaaaatttgatgatggtgtggaggcaggaataagaactaagga

SEQ ID NO: 424052 - DNA, 120 bp, Artificial Sequence
  ENSG00000151150_203 (sequence is synthesized)
ctgctgtacttcctattgattcacaaagattgtgtacaaagatatatttgtgtacaaagatataaaacctttgaaatatccatgccaacattataagagaaaataaaagaacaaaacatt

SEQ ID NO: 424053 - DNA, 120 bp, Artificial Sequence
  ENSG00000151151_0 (sequence is synthesized)
gttcttcggctcggttctgtctaccgggcagcgccggggccggcggctgcggcggcagaggaacaggagccgggagccgcgttccgccgagagttgggcagaggagcgcccgcgccccgg

SEQ ID NO: 424054 - DNA, 120 bp, Artificial Sequence
  ENSG00000151151_1 (sequence is synthesized)
cggcgtcatgggccccctccccgcgcttcagagggcaccagccgcgggaacccccgggcctcctcgcgcccgagcctgagcgaccctcgggttctccggcgccccctccctcgccctatt

SEQ ID NO: 424055 - DNA, 120 bp, Artificial Sequence
  ENSG00000151151_2 (sequence is synthesized)
ttttttcctactctcgctgccgttaccgcttctgctctccgttatggcaacagagccaccatcccccctccgggtcgaggcgccgggccccccagaaatgcggacctcaccggcgatcga

SEQ ID NO: 424056 - DNA, 120 bp, Artificial Sequence
  ENSG00000151151_3 (sequence is synthesized)
gtccacccctgagggcaccccgcagccggcgggcggcagactccgcttcctcaacggctgcgtgcccctctcgcatcaggtggccgggcacatgtacgggaaggacaaagtgggtatact

SEQ ID NO: 424057 - DNA, 120 bp, Artificial Sequence
  ENSG00000151151_4 (sequence is synthesized)
gcaacatccagatggcacagttttgaaacagttacaaccacctccaaggggcccaagagagctggaattctataatatggtttatgctgctgactgttttgatggtgttcttctagagct

SEQ ID NO: 424058 - DNA, 120 bp, Artificial Sequence
  ENSG00000151151_5 (sequence is synthesized)
acgaaaatatttgccaaaatattatggcatctggtcacctcccactgcaccaaacgatttatacctaaaactggaagatgtgacccataaatttaataagccctgtataatggatgtaaa

SEQ ID NO: 424059 - DNA, 120 bp, Artificial Sequence
  ENSG00000151151_6 (sequence is synthesized)
gatagggcaaaaaagctatgatccttttgcctcatctgagaagattcagcaacaggtcagcaagtacccattaatggaagagattgggttcttggtgcttggcatgagggtttatcatgt

SEQ ID NO: 424060 - DNA, 120 bp, Artificial Sequence
  ENSG00000151151_7 (sequence is synthesized)
tcattccgatagctatgagacagaaaaccagcattacggaagaagcttaacaaaagaaactataaaggatggagtctccagattttttcataatgggtactgcttaagaaaagatgctgt

SEQ ID NO: 424061 - DNA, 120 bp, Artificial Sequence
  ENSG00000151151_8 (sequence is synthesized)
tgctgccagtattcagaagattgagaaaattctgcagtggtttgaaaaccagaagcagcttaatttttacgcaagttcattactctttgtttatgaaggttcatctcagccaaccactac

SEQ ID NO: 424062 - DNA, 120 bp, Artificial Sequence
  ENSG00000151151_9 (sequence is synthesized)
aaaattgaatgacagaactttggcagaaaagtttttgtccaaaggacaactgtcagacacagaagtactagagtacaataataactttcatgtgttaagttccacagctaatggaaaaat

SEQ ID NO: 424063 - DNA, 120 bp, Artificial Sequence
  ENSG00000151151_10 (sequence is synthesized)
agagtcttcagtgggcaaaagcttgtccaagatgtatgcgcgtcacaggaaaatatatacaaaaaagcatcacagtcagacttcattgaaagttgaaaatctggagcaagacaatgggtg

SEQ ID NO: 424064 - DNA, 120 bp, Artificial Sequence
  ENSG00000151151_11 (sequence is synthesized)
gaaaagcatgtcacaggaacatttaaatggaaatgtactttcccaactggaaaaagttttctaccatcttcccactggttgccaagagattgctgaagtagaagtgcgaatgatagattt

SEQ ID NO: 424065 - DNA, 120 bp, Artificial Sequence
  ENSG00000151151_12 (sequence is synthesized)
tgctcatgtgttccctagcaacacaatagatgagggatatgtttatgggctaaagcatttaatttctgtacttcgaagtattttagacaattgaatcctctgttgcagtctttttaaggg

SEQ ID NO: 424066 - DNA, 120 bp, Artificial Sequence
  ENSG00000151151_13 (sequence is synthesized)
gtgggccaatcataatgaagaggggcagtcaatatctgcacctttaatgctatgtaaaaaatttgtattatgagtcgacattttatttgtctttatacttttggaagaatggttaacttt

SEQ ID NO: 424067 - DNA, 120 bp, Artificial Sequence
  ENSG00000151151_14 (sequence is synthesized)
tttataatcttactcaggaaaactaactatttgttcattagaaaactatgaagaataaagaaacttaggaatgttaagcagggaatgtggtggtacatggcttaaacatcttttttggct

SEQ ID NO: 424068 - DNA, 120 bp, Artificial Sequence
  ENSG00000151151_15 (sequence is synthesized)
caagcaaaatgcaaaccattattcagtcattaagagtttagttagctttctgtagccaattcatgaaatctctgtccacccagccttgacaatgagccatatctaaaatattacattatt

SEQ ID NO: 424069 - DNA, 120 bp, Artificial Sequence
  ENSG00000151151_16 (sequence is synthesized)
agaacacctaccaaaatctcgaaagcacaggttgatgtccttagtattgctatgtatgaagttactaaaactggagaaaattctacttcagaaataagtactgtttaggttttatattaa

SEQ ID NO: 424070 - DNA, 120 bp, Artificial Sequence
  ENSG00000151151_17 (sequence is synthesized)
aagttcagaccagcatatcaaagggtgctccttagtgaaatgatttagaattgttgcattccaaaagcaggttttctctttaatttttacatctctctctcaaaatattatacttcatga

SEQ ID NO: 424071 - DNA, 120 bp, Artificial Sequence
  ENSG00000151151_18 (sequence is synthesized)
aaaagacaattgatgtggatgacaacaacaaagtcttgaaattaagggcacactaattgtccttactggggttaggggaagagagatattattttcaaggaacaaaatattttcctttac

SEQ ID NO: 424072 - DNA, 120 bp, Artificial Sequence
  ENSG00000151151_19 (sequence is synthesized)
aatctttcattcatgagaaaattggaatataaatttattacattgtgaaagtatcataaaccatatacctttgtatctaaatgcagcttcaaaaaagtaaataattgaagttttatttct

SEQ ID NO: 424073 - DNA, 120 bp, Artificial Sequence
  ENSG00000151151_20 (sequence is synthesized)
cctctaaataacttgaatttttttctttaaaaatttatgtatttatatgtccccatttagttaagtggtagtgtaaatgtatgttgttaaaaacagtttctcagaattatagtaagcaat

SEQ ID NO: 424074 - DNA, 120 bp, Artificial Sequence
  ENSG00000151151_21 (sequence is synthesized)
gaaagacaatatctaattaggttgttatcaaaaatactgtgtgtaaattagtccgtaatatagggtttggtgcgtatctatattcatgcttctatttcactcttcctcaaaacagtttta

SEQ ID NO: 424075 - DNA, 120 bp, Artificial Sequence
  ENSG00000151151_22 (sequence is synthesized)
tattatgttgaccagtgaaattgtaacttaatttcatggggacaggggcagtgctacagttcctggaaaaattagatttgtattatctttgtttcacacccaccaccttaaaaaaaaatc

SEQ ID NO: 424076 - DNA, 120 bp, Artificial Sequence
  ENSG00000151151_23 (sequence is synthesized)
aactagttatttgtcatttaaaacatttaaaactttgagtcttcaaatacatttgatgttaatgctgccattacttgcacttccattcactaataacatttctaggtagttatcagtttt

SEQ ID NO: 424077 - DNA, 120 bp, Artificial Sequence
  ENSG00000151151_24 (sequence is synthesized)
gtcatattcctggaaaatattttggggttgtaaattctttctcctctttttcttctggagttacaaattgaatttttaaatccgagcacctttattgtggtgtggagaaaattatcacaa

SEQ ID NO: 424078 - DNA, 120 bp, Artificial Sequence
  ENSG00000151151_25 (sequence is synthesized)
ctatccttagtaaatctattaaacctgaataatttaaaagatcatgttcattttgtaatagcaaaatttgattttaattttttatttagaattggtgtatttatcatagggacttccaat

SEQ ID NO: 424079 - DNA, 120 bp, Artificial Sequence
  ENSG00000151151_26 (sequence is synthesized)
ttttcttcactttttgaatggatattggctatagttttatgttttaacgggaatgaatttcaagtcataataatcagaatttttagttttacttttttcttttacaatatggattttgtt

SEQ ID NO: 424080 - DNA, 120 bp, Artificial Sequence
  ENSG00000151151_27 (sequence is synthesized)
gttatttggatagtggttcaataaatcttaagctcagataattaaacactattttgaatcttaacaagatactgaggctttttttgtatgggatgatatcaacctatgtacaatgaattt

SEQ ID NO: 424081 - DNA, 120 bp, Artificial Sequence
  ENSG00000151151_28 (sequence is synthesized)
aataaacttaagtattgtcagattttttgcacattttagctcaataaaatcttaatgttcaagatttttttatctgcatttggaaatacaattttgtaaaatcaatgtcttacctttttg

SEQ ID NO: 424082 - DNA, 120 bp, Artificial Sequence
  ENSG00000151151_29 (sequence is synthesized)
atacaatagatcatgttttgtttttaataaagcaagaagcccttttatctgttgtttttcagggaagggattaacatttaattctgtttgtttacatttgttatcattgttatccaatgc

SEQ ID NO: 424083 - DNA, 120 bp, Artificial Sequence
  ENSG00000151151_30 (sequence is synthesized)
tcattttatgttgctttataagtaggcttaggtataacagaataagtatctgtttatctaatctacatgtgactatcttagtctctctcggtcacttaatattatgctgaaatttaccac

SEQ ID NO: 424084 - DNA, 120 bp, Artificial Sequence
  ENSG00000151151_31 (sequence is synthesized)
tgtggggatgaatgatcgctattcaccaagtatatttgaacatgtaaatgcttaagaaataagcataatgcggatatagtttgggttaataggattctcatagttttttttcccctatga

SEQ ID NO: 424085 - DNA, 120 bp, Artificial Sequence
  ENSG00000151151_32 (sequence is synthesized)
aacataagtaatgattttagtgtatttcttatggaatacactcatttaaaaaggactttaagaaattgtggatgtgaataatacctttctctaataaaaatttaaattgtataatagttt

SEQ ID NO: 424086 - DNA, 120 bp, Artificial Sequence
  ENSG00000151151_33 (sequence is synthesized)
tttaatatggatagacattgcatagattcaaataaattaaaatcaatgataaatgctaaatattttatctaaatagtttttcaagaaacagttatggaaatgtgtatattaaatggctct

SEQ ID NO: 424087 - DNA, 120 bp, Artificial Sequence
  ENSG00000151151_34 (sequence is synthesized)
gaaatgtgtatattaaatggctctaatgtggagcttgtggtatttcaactcagtattcattattagttgtgtgtctggaaagattgtacttacttttcctctttacactacagtttgctc

SEQ ID NO: 424088 - DNA, 120 bp, Artificial Sequence
  ENSG00000151151_35 (sequence is synthesized)
ttatggggctctaaactgtttaactgaagaaccttcgtctgtattttgattgagcataatttagtattttatgatttccaagatgatgttcttatgtctatcaagtctatgtatcaaatt

SEQ ID NO: 424089 - DNA, 120 bp, Artificial Sequence
  ENSG00000151151_36 (sequence is synthesized)
tataacatcatttaagaaaaaggaatttccacagatacttcagttgcaattttttgtttcatgctactgaaaatacatttgtttctaggggttggaatattatagaagatgtaggatgaa

SEQ ID NO: 424090 - DNA, 120 bp, Artificial Sequence
  ENSG00000151151_37 (sequence is synthesized)
agaaaacgatagaacaacgaaagaattctgtttatgaaattacaggaattgtgtccactatggtaaagcattgtcattttagtacattttctcttagtagtttggcattttatactttaa

SEQ ID NO: 424091 - DNA, 120 bp, Artificial Sequence
  ENSG00000151151_38 (sequence is synthesized)
aacttgttttgctttaaaaattgtttataatgcttaccttctttctccagtgcctttagtcttgatttgatatgtttgtaccctcagttaccctttctattacatgtttttgatgttttc

SEQ ID NO: 424092 - DNA, 120 bp, Artificial Sequence
  ENSG00000151151_39 (sequence is synthesized)
atagcctaggaaacatcgattcctttttaataattgtcaatctgattatttaaagaggtaacaattatctgttaatgctttggaaaaacaagtagggttgcctttggaggccaggcttct

SEQ ID NO: 424093 - DNA, 120 bp, Artificial Sequence
  ENSG00000151151_40 (sequence is synthesized)
tagttcattcaaaaatattccttggatttatgccatgtattaagcatttttagcccccagtattacaactgtgaaccaaacggataaggccctaaccattttcagcattctctttggatg

SEQ ID NO: 424094 - DNA, 120 bp, Artificial Sequence
  ENSG00000151151_41 (sequence is synthesized)
gggtgggattggggacttaattaaaatagagatatagaaaaataggcatctaaataagataataagtgtggggttgaaatgaagcatctaacaatagttgaagttagaagtaatatttta

SEQ ID NO: 424095 - DNA, 120 bp, Artificial Sequence
  ENSG00000151151_42 (sequence is synthesized)
cagtattgtaacctctatttaagtttgggtattagttacagatagcataaaaaagccttaatttttcactttccttgctggcaaaggtacatttatttagactgtccatttaaagtaatg

SEQ ID NO: 424096 - DNA, 120 bp, Artificial Sequence
  ENSG00000151151_43 (sequence is synthesized)
tttaacataaacattactgtgaaaaacattccattacatattcccaagcaaatgagctgcatcttctttactgtattttacaatttagtacaacagttttaggcctcaatcttaacatca

SEQ ID NO: 424097 - DNA, 120 bp, Artificial Sequence
  ENSG00000151151_44 (sequence is synthesized)
ctggtattttaaatttggcaatgaatatgaaattacttttgacttacagattgattatattattactttgaaaatgcattaatttcttagaaaagtttggagcctctatctttttttgag

SEQ ID NO: 424098 - DNA, 120 bp, Artificial Sequence
  ENSG00000151151_45 (sequence is synthesized)
ttaatacttaaattctcattacttatattaatagcctgtactaagtgaaaatattatttatgcaagtaaacaagtcactataggcttttaagacttttctttaattttagattttgtcat

SEQ ID NO: 424099 - DNA, 120 bp, Artificial Sequence
  ENSG00000151151_46 (sequence is synthesized)
caaagtttaaattttttacctactgtccacttaaatataatttaacagtttgtaaagtgaaatagttttaagtatgatgtatgatgcacctgcatataaatgaaaatggcgtgcacaaag

SEQ ID NO: 424100 - DNA, 120 bp, Artificial Sequence
  ENSG00000151151_47 (sequence is synthesized)
acactttactatgggaactgtactggaagatttatgaaagcatgtgaaattgcacctaaaattgtgttattagtgactataagcagcaatgctaaatttattgtacttgatgaatgaatg

SEQ ID NO: 424101 - DNA, 120 bp, Artificial Sequence
  ENSG00000151151_48 (sequence is synthesized)
tatttagtcacagttactttggtttaaatgtataaatgtctttagggtttttttttaaatgtgtttgtaatttgtactattgtgggggtatacttggactgcaggggttattgtcaatgt

SEQ ID NO: 424102 - DNA, 120 bp, Artificial Sequence
  ENSG00000151151_49 (sequence is synthesized)
gggttattgtcaatgtgtgatttgtgtttttattttatagaatcatctaatgtgatataccaatttttataagtgatatttacataattctaataactgtatatttgacaacctattaaa

SEQ ID NO: 424103 - DNA, 120 bp, Artificial Sequence
  ENSG00000151164_0 (sequence is synthesized)
gcagagacgagatcgcgaagctttgaaaagcgcgggcaacatccgggcacctgggccgtcgagctgaggcgcgccttccgagcctgctttttagggcggatggcagccatgctgaagtgc

SEQ ID NO: 424104 - DNA, 120 bp, Artificial Sequence
  ENSG00000151164_1 (sequence is synthesized)
gtgatgagcggcagtcaggtgaaagtatttgggaaagcagttcaagctctatcacgaattagtgacgagttctggctagacccatctaaaaaaggtcttgctctaagatgtgtgaattct

SEQ ID NO: 424105 - DNA, 120 bp, Artificial Sequence
  ENSG00000151164_2 (sequence is synthesized)
tctcggtcagcatatggatgtgtcctgttctctcctgtgttttttcagcattatcaatggtcagctttagtgaaaatgagtgaaaatgaacttgacacaacactgcatttaaaatgcaaa

SEQ ID NO: 424106 - DNA, 120 bp, Artificial Sequence
  ENSG00000151164_3 (sequence is synthesized)
ttgggaatgaagtcaattttgcccatctttagatgtctgaattcccttgaaagaaatatagagaagtgcagaatattcaccagatctgataaatgcaaagtagttattcaattcttctac

SEQ ID NO: 424107 - DNA, 120 bp, Artificial Sequence
  ENSG00000151164_4 (sequence is synthesized)
agacatggtattaaaagaactcataatatatgttttcaagaaagtcagcctttgcaagttatttttgacaagaatgtttgtactaatacgctaatgattcaaccaagattgcttgctgat

SEQ ID NO: 424108 - DNA, 120 bp, Artificial Sequence
  ENSG00000151164_5 (sequence is synthesized)
gccattgttctttttacatcaagtcaagaggaagttactcttgctgttactccactgaatttttgcctcaagagttctaatgaggaatcaatggatttgagcaatgctgtacacagtgag

SEQ ID NO: 424109 - DNA, 120 bp, Artificial Sequence
  ENSG00000151164_6 (sequence is synthesized)
atgtttgttggctcagatgagtttgacttctttcaaattggaatggacactgagataacattttgtttcaaagaattgaagggaatactgacattttcagaagctacacatgctcctata

SEQ ID NO: 424110 - DNA, 120 bp, Artificial Sequence
  ENSG00000151164_7 (sequence is synthesized)
atgatatgttagtggaagctaactttattttggccacattagctgatgaacaaagtagagcatcttcaccacagtcactgtgtctttcacagaaacgaaaaaggtcagatctgattgaaa

SEQ ID NO: 424111 - DNA, 120 bp, Artificial Sequence
  ENSG00000151164_8 (sequence is synthesized)
aaaaggctggcaaaaatgtaactggccaggccctggaatgtatttcaaaaaaagcagcaccaagaaggctttatcctaaggagactctcacaaacatatctgcattggaaaactgtggca

SEQ ID NO: 424112 - DNA, 120 bp, Artificial Sequence
  ENSG00000151164_9 (sequence is synthesized)
gccctgcaatgaaaagagtggatggagatgtcagtgaagtatcagaaagcagtgtcagcaacacagaggaagtgccagggtctctgtgtctcagaaagttttcttgcatgttctttggag

SEQ ID NO: 424113 - DNA, 120 bp, Artificial Sequence
  ENSG00000151164_10 (sequence is synthesized)
cagtttcttctgaccagcaagaacacttcaaccaccctttcgacagtctggcaagagcaagtgacagtgaagaggacatgaataatgtgtgctgcaggaaagaatttaatggaagtgatg

SEQ ID NO: 424114 - DNA, 120 bp, Artificial Sequence
  ENSG00000151164_11 (sequence is synthesized)
ccaaatatttctgtattatctgacatagaacagtatcctccactgccaagacagcctgagtttggagtggaataaggtggaagacaaatgtctctgttctttggccctttaagagttagc

SEQ ID NO: 424115 - DNA, 120 bp, Artificial Sequence
  ENSG00000151164_12 (sequence is synthesized)
tttttacctgcacaaatggactaaaaaatctggcacaaaacattgttatgtaatgtcttatgatgtgtgcctctccctcccccaaacctgtttacagtcaattataacctgacaaacgag

SEQ ID NO: 424116 - DNA, 120 bp, Artificial Sequence
  ENSG00000151164_13 (sequence is synthesized)
acttttgtaacatattattgttacatctttctgaaaccttcaaaccgtaaggaagtgttaactggcaagcagttgtactttagactttgtgagaaattcataaaggtggctgagtggatt

SEQ ID NO: 424117 - DNA, 120 bp, Artificial Sequence
  ENSG00000151164_14 (sequence is synthesized)
tgcatgctttagaactgtgaatagagttctaactgaaaccagaattaatttggctcttgtagcttagtaatgagtcatagctacccacaataacctaataaaaactcaagttcatcccaa

SEQ ID NO: 424118 - DNA, 120 bp, Artificial Sequence
  ENSG00000151164_15 (sequence is synthesized)
tggaggatgggcttttaaaccacatcatcttgtacaacaaccatatctagaaatagctgtttgtcaagtgtatgtaacttgctttaaatccattatgctacttgtgaggcagaagagttt

SEQ ID NO: 424119 - DNA, 120 bp, Artificial Sequence
  ENSG00000151164_16 (sequence is synthesized)
tctgtgaaggaaaaaagcccattagagttcttcaattcaatgcacgttcaccctagagcttttaacatctttgctagttttataaaggtatttaaactttattcaacagccatttagagt

SEQ ID NO: 424120 - DNA, 120 bp, Artificial Sequence
  ENSG00000151164_17 (sequence is synthesized)
gccatcaagatggcttgaaatggaattttgtgatttgtagtcaggtatcttttgtatttgattgcaaacatttggattttagttttctcatgtaataccatggccttttttgtgcattgt

SEQ ID NO: 424121 - DNA, 120 bp, Artificial Sequence
  ENSG00000151164_18 (sequence is synthesized)
tttttatattttaagactttaagtagaataaaccctggaaaaaagatcaagagtaaaaatatatagtcactttcacttggcttttttagacggagtctcactttgtcactcaggctcaag

SEQ ID NO: 424122 - DNA, 120 bp, Artificial Sequence
  ENSG00000151164_19 (sequence is synthesized)
cccaacctggagtgtttttacatattgtaaaattttatttcctaacctcaaattgttctgattttcagatgtgattttttattttgcagtgtgctgcaggaaagaatttaatggaagtga

SEQ ID NO: 424123 - DNA, 120 bp, Artificial Sequence
  ENSG00000151164_20 (sequence is synthesized)
aaagccgtttgggaacttgtggaggcggggtggtagagtgcagagacgagatcgcgaagctttgaaaagcgcgggcaacatccgggcacctgggccgtcgagctgaggcgcgccttccga

SEQ ID NO: 424124 - DNA, 120 bp, Artificial Sequence
  ENSG00000151164_21 (sequence is synthesized)
atattctaatgcttaatgatggctgagctgggccccagcccagtgactggctcatttgcccctcaagcacgagtttgcatgtttagtgtctaaaagaggttgtccaggacttccttttaa

SEQ ID NO: 424125 - DNA, 120 bp, Artificial Sequence
  ENSG00000151176_0 (sequence is synthesized)
agcattgtgcggtcatggtgggccagatgtactgctaccccggcagccacctggcccgggcgctgacgcgggcgctggcgctggccctggtgctggccctgctggtcgggccgttcctga

SEQ ID NO: 424126 - DNA, 120 bp, Artificial Sequence
  ENSG00000151176_1 (sequence is synthesized)
cctggcgggggcgatcccagcgccggggggccgctgggcgcgcgatgggcaggtccctccagcctcccgcagccgctcggtgctcctggacgtctcggcgggccagctgcttatggtgga

SEQ ID NO: 424127 - DNA, 120 bp, Artificial Sequence
  ENSG00000151176_2 (sequence is synthesized)
tggacggacgccaccctgacgccgtggcctgggccaacctcaccaacgccatccgcgagactgggtgggccttcctggagctgggcacaagtggccaatacaatgacagcttgcaggcct

SEQ ID NO: 424128 - DNA, 120 bp, Artificial Sequence
  ENSG00000151176_3 (sequence is synthesized)
atgcagccggtgtggtggaggctgctgtgtcggaggagctcatctacatgcactggatgaacacggtggtgaattactgcggccccttcgagtatgaagtcggctactgcgagaggctga

SEQ ID NO: 424129 - DNA, 120 bp, Artificial Sequence
  ENSG00000151176_4 (sequence is synthesized)
agagcttcctggaggccaacctagagtggatgcaggaagagatggagtcaaacccagactcaccttactggcaccaggtgcggctgaccctcctgcagctgaaaggcctggaggacagct

SEQ ID NO: 424130 - DNA, 120 bp, Artificial Sequence
  ENSG00000151176_5 (sequence is synthesized)
acgaaggccgtgtgagcttcccagctgggaagttcaccatcaaacccttggggttcctcctgctgcagctctctggggacctggaagacctggagctggccctgaacaagaccaagatca

SEQ ID NO: 424131 - DNA, 120 bp, Artificial Sequence
  ENSG00000151176_6 (sequence is synthesized)
aaccttctctgggctctggctcctgttctgccctcatcaagctgctccctggccagagtgacctcctggttgcccacaacacctggaacaactaccagcacatgctgcgtgtcatcaaga

SEQ ID NO: 424132 - DNA, 120 bp, Artificial Sequence
  ENSG00000151176_7 (sequence is synthesized)
agtactggctccagttccgggaaggcccctggggggactacccgctggttcccggcaacaagctggtcttctcctcctaccccggcaccatcttctcctgcgacgacttctacatcctgg

SEQ ID NO: 424133 - DNA, 120 bp, Artificial Sequence
  ENSG00000151176_8 (sequence is synthesized)
gcagtgggctggtgacactggagaccaccattggcaacaagaacccagccctgtggaagtatgtgcggcccaggggctgtgtgctggagtgggtacgcaacatcgtggccaaccgcctgg

SEQ ID NO: 424134 - DNA, 120 bp, Artificial Sequence
  ENSG00000151176_9 (sequence is synthesized)
cctcggatggggccacctgggcagacatcttcaagaggttcaacagcggcacgtataacaaccagtggatgatcgtggactacaaggcgttcatcccgggtgggcccagccccgggagcc

SEQ ID NO: 424135 - DNA, 120 bp, Artificial Sequence
  ENSG00000151176_10 (sequence is synthesized)
gggtgcttaccatcctggagcagatccccggcatggtggtggtggctgacaagacctcggagctctaccagaagacctactgggccagctacaacataccgtccttcgagactgtgttca

SEQ ID NO: 424136 - DNA, 120 bp, Artificial Sequence
  ENSG00000151176_11 (sequence is synthesized)
atgccagtgggctgcaggccctagtggcccagtatggggactggttttcttatgacgggagcccccgggcccagatcttccggcggaaccagtcactggtacaagacatggactccatgg

SEQ ID NO: 424137 - DNA, 120 bp, Artificial Sequence
  ENSG00000151176_12 (sequence is synthesized)
tcaggctgatgaggtacaatgacttcctccatgaccctctgtcactgtgcaaagcctgcaacccccagcccaatggggagaatgctatctccgcccgctccgacctcaacccggccaatg

SEQ ID NO: 424138 - DNA, 120 bp, Artificial Sequence
  ENSG00000151176_13 (sequence is synthesized)
gctcctaccccttccaggccctgcgtcagcgctcccatgggggtatcgatgtgaaggtgaccagcatgtcactggccaggatcctgagcctgctggcggccagcggtcccacgtgggacc

SEQ ID NO: 424139 - DNA, 120 bp, Artificial Sequence
  ENSG00000151176_14 (sequence is synthesized)
aggtgcccccgttccagtggagcacctcgcccttcagcggcctgctgcacatgggccagccagacctctggaagttcgcgcctgtcaaggtttcatgggactgaagttctgtccctgctc

SEQ ID NO: 424140 - DNA, 120 bp, Artificial Sequence
  ENSG00000151176_15 (sequence is synthesized)
tgctgctttcgcccctgctgaccctcgtcagggtcacccccgtcccaaggccaccggacttctaactccagcccctcctgggggcttcgttctctgatctggggtctgagtcatctcctc

SEQ ID NO: 424141 - DNA, 120 bp, Artificial Sequence
  ENSG00000151176_16 (sequence is synthesized)
ctagagtgggtcacgaacctgatggggctcagaactgaccccctctctcccccgaggtgggtgggcaccgtggcgtctcttctgccctgccctaaatctcccactctctgtttctgtctg

SEQ ID NO: 424142 - DNA, 120 bp, Artificial Sequence
  ENSG00000151176_17 (sequence is synthesized)
tttcctactgctgctctctcaacctcattcccacctctggggccccttcctcgtgcttctccttcctgagggtttgggaaggtcctggggcagactctggggctcccatggggtggaagg

SEQ ID NO: 424143 - DNA, 120 bp, Artificial Sequence
  ENSG00000151176_18 (sequence is synthesized)
agcctgttccagcacccttctcccagctgcattcccacgggtggccctggagctggtgagctttgtctgggcgttgtcttcggctggcattgctcctcccagctctggcccctctgctcc

SEQ ID NO: 424144 - DNA, 120 bp, Artificial Sequence
  ENSG00000151176_19 (sequence is synthesized)
tgaatgtcctctctccatgtcaggcagagggtcagcccccatgcttctgcctcaggccccaccccaccccaccccaggcctgcccctcacctcagggccatacccacagcgccctgatgg

SEQ ID NO: 424145 - DNA, 120 bp, Artificial Sequence
  ENSG00000151176_20 (sequence is synthesized)
aggaaccagaccgcaggctgtgccaccattaaacaagagcggctgtggccccatgctgtgcttcttggggtggcagggaaggtggggtcagcgctttttctcctctcaggtttgggttct

SEQ ID NO: 424146 - DNA, 120 bp, Artificial Sequence
  ENSG00000151176_21 (sequence is synthesized)
gcgccatcccccatgcagcctcctgtgcagccctctgtctgtccttctgtccattcattcatctgccaacatactcacccatcatccatctgcacagccttccacccacccatccgtctt

SEQ ID NO: 424147 - DNA, 120 bp, Artificial Sequence
  ENSG00000151176_22 (sequence is synthesized)
ccatcatccatccatccatctacctatccatttatcatccatccactcacccatccaaccacccatccaaccattcagccatctccatctgtccattttctttcttcttctttttttttt

SEQ ID NO: 424148 - DNA, 120 bp, Artificial Sequence
  ENSG00000151176_23 (sequence is synthesized)
aaagtgcttggattacagatgtgagcccccgcacctggcctcatttgtccattttccatccacttacccacccacccatttactcatccagccattgactcatccatccacctatgagat

SEQ ID NO: 424149 - DNA, 120 bp, Artificial Sequence
  ENSG00000151176_24 (sequence is synthesized)
catccacctatgagatcagacagggagggatccttttttgtattggtctgtataccacagcatggcttacgaagttcttatctatctatcacccatccacccacccatttatctacccac

SEQ ID NO: 424150 - DNA, 120 bp, Artificial Sequence
  ENSG00000151176_25 (sequence is synthesized)
ccattcatccacccacccatccaactacctatccattcatccatccacccatctgccaacgcatccatccatccacccacccaatcatctacccactcacctatccacccatccacctac

SEQ ID NO: 424151 - DNA, 120 bp, Artificial Sequence
  ENSG00000151176_26 (sequence is synthesized)
ctatttgtcacccatccacccatccatccatccaatcacccatccaaccatcaatccaaccattttcatctgttcattttccatccatctacccgtccacccattcactcctccatccac

SEQ ID NO: 424152 - DNA, 120 bp, Artificial Sequence
  ENSG00000151176_27 (sequence is synthesized)
ctacctatccatttatcacccatttacccatccatccatccatccttccaaccatttatccacccatccaaacatttccatctgtttttccatccatctacccatccacccattcactca

SEQ ID NO: 424153 - DNA, 120 bp, Artificial Sequence
  ENSG00000151176_28 (sequence is synthesized)
tccatccaccttcctatccatttatcatccatctacccactcacccatccatccaaccttccaaccatttatccacccatccaactatttccatctgttcattttccacccatttaccca

SEQ ID NO: 424154 - DNA, 120 bp, Artificial Sequence
  ENSG00000151176_29 (sequence is synthesized)
tctactaattcactcatccatccacctacctatccatttatcatccatctacccactcacccatccatccatccttccaaccatttatccacccatccaaccatttccatctgttcattt

SEQ ID NO: 424155 - DNA, 120 bp, Artificial Sequence
  ENSG00000151176_30 (sequence is synthesized)
ccatccatctacccatctacccattcactcatccgtccacctatccatttatcacccatctacccatccatccacccactcatccatccattcatccatccacccacccacccgtccatc

SEQ ID NO: 424156 - DNA, 120 bp, Artificial Sequence
  ENSG00000151176_31 (sequence is synthesized)
cacctacctattcatttatcacccatccatccacacacgggtctgtgcagattcattaatatccacccatgcatccatatttatctattttctatccatcagccatccattcattcatat

SEQ ID NO: 424157 - DNA, 120 bp, Artificial Sequence
  ENSG00000151176_32 (sequence is synthesized)
ccatccatccatctatccatccagatgtttattgagcacctgtgttctgggtcctatttgggagccttgttaaccaccaagaccttcctaagccatattgtggtatacagacagatacaa

SEQ ID NO: 424158 - DNA, 120 bp, Artificial Sequence
  ENSG00000151176_33 (sequence is synthesized)
aaaaaaaggctctctccctgtctgatctcatgcagcctgccttggagacaagactctcccagtgctgtgtgcttggagagaggaaagcacacagccctggagtcagagacctgggtttca

SEQ ID NO: 424159 - DNA, 120 bp, Artificial Sequence
  ENSG00000151176_34 (sequence is synthesized)
attctgtctccacctcttattagctagctatggactcctctctgagcctcgattacctcatctgtgaaatggggtaatggtgtgagcagcgtttccctgggggatgtgatgcagcccact

SEQ ID NO: 424160 - DNA, 120 bp, Artificial Sequence
  ENSG00000151176_35 (sequence is synthesized)
tggggcctcatgcactcagcatctctttattagcaaacacttattgaacccctagtacatgccaggcactgttatgaggtcccggggatactttataacaaaagggacagaagcattcct

SEQ ID NO: 424161 - DNA, 120 bp, Artificial Sequence
  ENSG00000151176_36 (sequence is synthesized)
gctcttgtgaagtttacattgactagatagtaaacaaaataaatgaaatatgcagtgtgtcagtgctggtaaacccgtggagaaaataaagcaaggttggggtctggggttgggaattga

SEQ ID NO: 424162 - DNA, 120 bp, Artificial Sequence
  ENSG00000151176_37 (sequence is synthesized)
cagttccgggaaggcccctggggtaggtgggtgtgggtgtgtctgggggatgagcaggtgggtgggcacacacgtggggagtggtcctaggaggtttgggccttggaaaccctcccaaca

SEQ ID NO: 424163 - DNA, 120 bp, Artificial Sequence
  ENSG00000151176_38 (sequence is synthesized)
ggccaaagtcctccatagtgccacatccttcatcccaggccccagcatcagccccagggataccactgccaaatgtttgcagtacctccttcatggccaaatgtaaaaacttgatgggac

SEQ ID NO: 424164 - DNA, 120 bp, Artificial Sequence
  ENSG00000151176_39 (sequence is synthesized)
caggagctggtgaggaggtggggaagtgtccagccttattcattgctaatgggagtatgcgttggcacagctacttttaagaggaatccagctggcatctaataaaattcaaaatctgtc

SEQ ID NO: 424165 - DNA, 80 bp, Artificial Sequence
  ENSG00000151208_0 (sequence is synthesized)
ccatggctcccgccgcctcacggctcccggcgccctagggctgctgccgaggtgctcgcctgcccgcccgccggcctcgg

SEQ ID NO: 424166 - DNA, 120 bp, Artificial Sequence
  ENSG00000151208_1 (sequence is synthesized)
gccccagcgccgggagctgctcgcccagtgtcagcagagcctggcccaggccatgacggaggtggaagccgtgctcgggctgctcgaggccgcgggagcgctcagtcccggcgagcggcg

SEQ ID NO: 424167 - DNA, 120 bp, Artificial Sequence
  ENSG00000151208_2 (sequence is synthesized)
gcagctggacgaggaggcgggaggcgccaaggcggagctgctgctcaagctgctcttggccaaggagcgggaccacttccaggacctgcgggcggcgctggagaagacgcagcctcacct

SEQ ID NO: 424168 - DNA, 120 bp, Artificial Sequence
  ENSG00000151208_3 (sequence is synthesized)
gctgcccattctctacctgaacggcgtcgtcgggccgccgcagcccgccgaaggcgcgggttctacctacagcgtcctgtccaccatgccctcagactcagaaagcagcagctccctcag

SEQ ID NO: 424169 - DNA, 120 bp, Artificial Sequence
  ENSG00000151208_4 (sequence is synthesized)
cagtgtgggcactaccgggaaggcgccgtccccaccacccctcctcactgaccagcaagtgaatgagaaggtggagaacctctccattcagctgcggctgatgacccgggagagaaacga

SEQ ID NO: 424170 - DNA, 120 bp, Artificial Sequence
  ENSG00000151208_5 (sequence is synthesized)
gctccgcaagcgcctggcctttgctacgcatggcacggcctttgacaagaggccctaccacaggctgaatcctgactatgagaggctgaagatccagtgcgtgcgagccatgtcggacct

SEQ ID NO: 424171 - DNA, 120 bp, Artificial Sequence
  ENSG00000151208_6 (sequence is synthesized)
gcagagcctgcagaaccagcacaccaacgccttgaagaggtgtgaggaggtggccaaggagactgacttctaccacacactccacagccggctcctgagtgaccagactcggctgaagga

SEQ ID NO: 424172 - DNA, 120 bp, Artificial Sequence
  ENSG00000151208_7 (sequence is synthesized)
tgacgtggacatgctgaggcgggagaatgggcagctgctgcgggagcgaaacctgctgcagcagtcatgggaggacatgaagcggctccacgaggaggaccagaaggagatcggtgacct

SEQ ID NO: 424173 - DNA, 120 bp, Artificial Sequence
  ENSG00000151208_8 (sequence is synthesized)
ccgtgcccagcagcagcaggtgttgaagcacaacgggtcatccgagattctcaacaaactgtatgacacggccatggacaagttggaggtggtcaagaaggactatgacgcccttcggaa

SEQ ID NO: 424174 - DNA, 120 bp, Artificial Sequence
  ENSG00000151208_9 (sequence is synthesized)
gaggtacagtgagaaagtcgccatccacaatgcagacctgagccgcctggagcagctgggggaggagaaccagcggttgctgaagcagacagagatgctgacccagcagagggacacggc

SEQ ID NO: 424175 - DNA, 120 bp, Artificial Sequence
  ENSG00000151208_10 (sequence is synthesized)
catccagctgcagcaccagtgcgccctctccctgaggaggtttgaggcgatccaccatgagctgaacaaggccacggcgcagaacaaggacctgcagtgggagatggagctgctgcagtc

SEQ ID NO: 424176 - DNA, 120 bp, Artificial Sequence
  ENSG00000151208_11 (sequence is synthesized)
agagctgaccgagctgagaaccacgcaggtgaagacagcaaaggagtcggagaaatacagggaggagcgggacgctgtgtacagcgagtacaagctcatcatgagtgagcgtgaccaggt

SEQ ID NO: 424177 - DNA, 120 bp, Artificial Sequence
  ENSG00000151208_12 (sequence is synthesized)
catctctgagctggacaagctgcagaccgaagtggagctggccgagtccaagctcaagagcagcacatctgagaagaaggcggccaatgaggagatggaggcgctgcggcagatcaaaga

SEQ ID NO: 424178 - DNA, 120 bp, Artificial Sequence
  ENSG00000151208_13 (sequence is synthesized)
cacggtgacaatggatgctgggagagccaacaaggaggttgaaatccttcgaaagcagtgcaaggctctgtgccaggagctgaaggaagccctccaggaggcggatgtggccaagtgccg

SEQ ID NO: 424179 - DNA, 120 bp, Artificial Sequence
  ENSG00000151208_14 (sequence is synthesized)
gcgggactgggccttccaggagcgagacaagattgtagcagagcgtgacagcatccggacactgtgtgacaacctgaggcgggagcgggaccgtgcggtgagcgagctggctgaggccct

SEQ ID NO: 424180 - DNA, 120 bp, Artificial Sequence
  ENSG00000151208_15 (sequence is synthesized)
gcgcagcctggatgacacccgcaagcagaagaatgatgtcagccgcgagctgaaggagctcaaggaacagatggaatcccagttggaaaaggaggcccggttccgacagctgatggccca

SEQ ID NO: 424181 - DNA, 120 bp, Artificial Sequence
  ENSG00000151208_16 (sequence is synthesized)
cagctcccacgactcggccattgacacggattccatggagtgggaaacggaagttgtagagttcgagagggagacggaggatattgacttgaaggcactggggtttgatatggcagaagg

SEQ ID NO: 424182 - DNA, 120 bp, Artificial Sequence
  ENSG00000151208_17 (sequence is synthesized)
tgtgaatgagccttgtttcccgggggactgtggcatatttgtcactaaagtggacaaaggaagcattgctgatggccgcttaagggtcaatgactggctgctgagaatcaacgatgtgga

SEQ ID NO: 424183 - DNA, 120 bp, Artificial Sequence
  ENSG00000151208_18 (sequence is synthesized)
cctcatcaacaaggacaagaagcaggccatcaaggcgctcctcaatggggagggggccatcaacatggtcgtgcggcggaggaagtccctgggtgggaaggtggtcacgccgctgcacat

SEQ ID NO: 424184 - DNA, 120 bp, Artificial Sequence
  ENSG00000151208_19 (sequence is synthesized)
caacctcagtggacagaaagacagtggcatcagtctggagaatggagtgtatgctgccgctgtgctgcctggaagccctgccgctaaagaagggtcccttgctgtgggagacaggatcgt

SEQ ID NO: 424185 - DNA, 120 bp, Artificial Sequence
  ENSG00000151208_20 (sequence is synthesized)
tgcgatcaatggcattgcactggacaacaagtctctgaatgaatgtgaatctctgctgcgcagctgccaggactccctgaccctgtccctcctgaaggtattccctcagagctcctcgtg

SEQ ID NO: 424186 - DNA, 120 bp, Artificial Sequence
  ENSG00000151208_21 (sequence is synthesized)
gagtggccagaacatttttgaaaatatcaaagactctgataagatgctgagttttcgagcccatggcccggaggtccaggctcataacaaacggaacttgatacagcacaataactccac

SEQ ID NO: 424187 - DNA, 120 bp, Artificial Sequence
  ENSG00000151208_22 (sequence is synthesized)
gcagacagacatcttctacacggacaggctggaagacaggaaggagccaggccccccaggaggcagcagctcctttctgcataagccattccctgggggacccttgcaggtctgccccca

SEQ ID NO: 424188 - DNA, 120 bp, Artificial Sequence
  ENSG00000151208_23 (sequence is synthesized)
ggcctgtcccagtgcctctgagcgtagcctgagctccttccgctcagatgcctctggggaccgtggctttgggctggtggacgtgcgtggccggcggccactgctgccctttgagaccga

SEQ ID NO: 424189 - DNA, 120 bp, Artificial Sequence
  ENSG00000151208_24 (sequence is synthesized)
ggtgggcccctgtggggttggggaggcctccctggacaaggcagactctgaaggctccaacagcggcgggacctggcccaaggccatgctcagctccacggcagtgcctgagaagctctc

SEQ ID NO: 424190 - DNA, 120 bp, Artificial Sequence
  ENSG00000151208_25 (sequence is synthesized)
tgtttataaaaagccaaagcaaagaaagtccatctttgaccctaacactttcaaacgcccccagacaccccccaaaatagactacctgcttccaggtcctgggcctgctcactctcccca

SEQ ID NO: 424191 - DNA, 120 bp, Artificial Sequence
  ENSG00000151208_26 (sequence is synthesized)
gccctccaagagggcggggcctctgacacccccaaaacctcccagaaggagcgactccattaagttccagcacaggctggagactagctccgagtcagaagccactctggtgggcagctc

SEQ ID NO: 424192 - DNA, 120 bp, Artificial Sequence
  ENSG00000151208_27 (sequence is synthesized)
cccatccactagtcccccgagcgccctgccccctgacgtggaccccggggagcccatgcacgcatcaccccctcgcaaggccagggtccgcattgcttccagctactaccctgaaggaga

SEQ ID NO: 424193 - DNA, 120 bp, Artificial Sequence
  ENSG00000151208_28 (sequence is synthesized)
tggggactcctcccacctgccggccaagaaatcctgtgatgaggacctcacctcccagaaggtggatgagctggggcagaagcgtcgccggccaaaatctgctcccagttttcggccgaa

SEQ ID NO: 424194 - DNA, 120 bp, Artificial Sequence
  ENSG00000151208_29 (sequence is synthesized)
gcttgctccagtagtgattcctgctcagttcctggaggaacagaagtgtgtcccggccagtggagaactctccccggagctccaggagtgggcaccttactcgcctgggcattccagccg

SEQ ID NO: 424195 - DNA, 120 bp, Artificial Sequence
  ENSG00000151208_30 (sequence is synthesized)
catcctgcggaaccccatctacactgtgcgcagtcacagggtcggcccctgcagctctccacctgcggcccgagatgctggcccccagggtttgcatcccagtgtccagcaccagggacg

SEQ ID NO: 424196 - DNA, 120 bp, Artificial Sequence
  ENSG00000151208_31 (sequence is synthesized)
cctgagcctggacctgagccacaggacctgcagcgactactccgagatgagagccacccatgggtccaactcactgccctccagcgcccgcctgggttcttcgagtaacttgcagttcaa

SEQ ID NO: 424197 - DNA, 120 bp, Artificial Sequence
  ENSG00000151208_32 (sequence is synthesized)
ggcggaacgcattaaaatcccatcaacaccaagatatccgcggagtgtcgtgggctccgagagaggttcagtgtcacattctgaatgcagcactcctccacagtcacccctgaacatcga

SEQ ID NO: 424198 - DNA, 120 bp, Artificial Sequence
  ENSG00000151208_33 (sequence is synthesized)
caccctgtcctcttgtagccagtcccagacctcagcctccacattgcccagaatcgctgtcaaccccgcgtccctcggggagcggagaaaggacaggccttatgtggaggagccacgcca

SEQ ID NO: 424199 - DNA, 120 bp, Artificial Sequence
  ENSG00000151208_34 (sequence is synthesized)
cgtgaaggtgcagaagggctcagagccgctgggcatctccatcgtgagtggagagaagggcggcatctacgtctccaaggtgaccgtggggagcatcgctcaccaggctggcctcgagta

SEQ ID NO: 424200 - DNA, 120 bp, Artificial Sequence
  ENSG00000151208_35 (sequence is synthesized)
tggggatcagttactggagttcaacggcataaacctgcggagcgccacggagcagcaggcgcggctcatcatcgggcagcagtgtgataccatcaccatcctggcccagtacaaccccca

SEQ ID NO: 424201 - DNA, 120 bp, Artificial Sequence
  ENSG00000151208_36 (sequence is synthesized)
cgtgcaccagctcagcagccactcccggtccagctcacacctggaccctgccggtacccactccactctccagggcagtggcaccaccaccccggagcatccatctgtcatcgacccact

SEQ ID NO: 424202 - DNA, 120 bp, Artificial Sequence
  ENSG00000151208_37 (sequence is synthesized)
gatggagcaggacgaggggcctagcacccccccagccaagcagagcagctccaggattgcgggagatgccaacaagaagaccctggagccacgcgttgtcttcatcaaaaagtcccagct

SEQ ID NO: 424203 - DNA, 120 bp, Artificial Sequence
  ENSG00000151208_38 (sequence is synthesized)
ggagcttggggtgcacttgtgtggtgggaacctgcatggggtgtttgtggccgaggtggaggatgacagtcctgccaagggtcctgacggcctcgtgccaggggacctcatcctggagta

SEQ ID NO: 424204 - DNA, 120 bp, Artificial Sequence
  ENSG00000151208_39 (sequence is synthesized)
tggcagcctggacgtgcggaacaagacagtggaggaagtctatgtggagatgctgaagcccagggatggcgtccgcctgaaggtgcagtaccgccctgaggagttcacgaaggccaaggg

SEQ ID NO: 424205 - DNA, 120 bp, Artificial Sequence
  ENSG00000151208_40 (sequence is synthesized)
cctgcctggtgacagcttctacatcagggccctgtacgaccggctggcagatgtggagcaagagttgagctttaagaaggacgacatcctctacgtggatgacaccttaccccagggcac

SEQ ID NO: 424206 - DNA, 120 bp, Artificial Sequence
  ENSG00000151208_41 (sequence is synthesized)
gttcgggtcctggatggcttggcagctggacgagaatgcccagaagatccagcgcgggcagattcccagcaaatatgtgatggaccaagaattctccaggaggctcagcatgtctgaagt

SEQ ID NO: 424207 - DNA, 120 bp, Artificial Sequence
  ENSG00000151208_42 (sequence is synthesized)
caaagatgacaatagcgccacaaagacgctgtcagcggctgcacgccggtccttttttcggaggaaacacaagcacaaacgcagcgggtccaaggacgggaaagacctgctcgccttgga

SEQ ID NO: 424208 - DNA, 120 bp, Artificial Sequence
  ENSG00000151208_43 (sequence is synthesized)
tgccttttccagtgactccattccactctttgaagattcggtgagcctggcctatcagcgggtccagaaggtggactgcaccgctctgaggcctgtcctgattctggggcctttgctgga

SEQ ID NO: 424209 - DNA, 120 bp, Artificial Sequence
  ENSG00000151208_44 (sequence is synthesized)
cgtggtgaaggagatgctggtgaatgaggctcctggcaagttctgcagatgtccccttgaggtgatgaaggcctcccagcaggccattgagcggggtgtcaaagattgcctgtttgtcga

SEQ ID NO: 424210 - DNA, 120 bp, Artificial Sequence
  ENSG00000151208_45 (sequence is synthesized)
ctataagcggagaagcggccatttcgatgtgaccactgtggcgtcaataaaggagatcacagaaaagaaccgacactgcctcctggacattgctccgcacgctattgagcggctccacca

SEQ ID NO: 424211 - DNA, 120 bp, Artificial Sequence
  ENSG00000151208_46 (sequence is synthesized)
catgcacatctaccccattgtcatcttcatccactacaagagcgccaagcacatcaaggagcagagagaccccatctacctgagggacaaggtgactcagaggcattccaaagagcagtt

SEQ ID NO: 424212 - DNA, 120 bp, Artificial Sequence
  ENSG00000151208_47 (sequence is synthesized)
tgaggcggcgcagaagcttgagcaggagtacagcaggtacttcacaggggtcatccagggaggagccctgtcaagcatttgcactcagatcttggcaatggtcaatcaagaacaaaataa

SEQ ID NO: 424213 - DNA, 120 bp, Artificial Sequence
  ENSG00000151208_48 (sequence is synthesized)
agtcctgtggattccagcctgcccgctctaggagaatgctgtgctgtggatgactgcagctggccgcctgaggggacaccagactcagctcttttctagcgactgaaagtagaagtctgt

SEQ ID NO: 424214 - DNA, 120 bp, Artificial Sequence
  ENSG00000151208_49 (sequence is synthesized)
ccgtctatgaacatgcgggggaaggatccggaaccaggacccagaagcacctcctttgtagacagagggccacggctgcgtgcgatccaggcccaggcccacacactctgcccgtgtcac

SEQ ID NO: 424215 - DNA, 120 bp, Artificial Sequence
  ENSG00000151208_50 (sequence is synthesized)
acgtgtgctttaacacaaaacagataacactaaagacgggttcagcacccacctttctttagccagctgatcagagatgctgcaaagagaacctttcggatcactcgtttacaagccttt

SEQ ID NO: 424216 - DNA, 120 bp, Artificial Sequence
  ENSG00000151208_51 (sequence is synthesized)
tctaagtatttggtggtttatgtttacttgaacggctccatgttgccggtgcccagcccctgtcccctctgtcaaccccctgtcgctttggtgttggtttcgttcccgtcttcagcaaaa

SEQ ID NO: 424217 - DNA, 120 bp, Artificial Sequence
  ENSG00000151208_52 (sequence is synthesized)
cgaccttggaacctcaatgggggctgctttgctttgggaggttcttgttggtgggaccagagctttgacaaacctcctgctccttggtggcacctctcctggaaggacgtcacaactcca

SEQ ID NO: 424218 - DNA, 120 bp, Artificial Sequence
  ENSG00000151208_53 (sequence is synthesized)
ggtgctcagactgcctgtggcagcagaaccagtgcctttggcattttcctcccacaatggggaaggtgactttggcattcttacaaactcgtctctcggcctttctctcctgccttccac

SEQ ID NO: 424219 - DNA, 120 bp, Artificial Sequence
  ENSG00000151208_54 (sequence is synthesized)
agcctctcgtttctcctccatctgtgcttattacttgaggactgtgtctgctccgtgagagctgcgtgggcagggctgcagtggggtccaggtggtgttcagctgtgctgatgcctgcca

SEQ ID NO: 424220 - DNA, 120 bp, Artificial Sequence
  ENSG00000151208_55 (sequence is synthesized)
ttgggtcctccttaggctctgtaagtcgtgacagccttcatcagtgcaatgtttgcagggtaattcttaaactttttagagggtggcaggtacatcagttctttttgatatgaaaacatt

SEQ ID NO: 424221 - DNA, 120 bp, Artificial Sequence
  ENSG00000151208_56 (sequence is synthesized)
catgtttcagacattgaattgagagcttttaggggaagcataatggttattgtcactatcaacagtctaaaaagaaaaactgaggtctttttaatcttgattacagcactcacggcatgc

SEQ ID NO: 424222 - DNA, 120 bp, Artificial Sequence
  ENSG00000151208_57 (sequence is synthesized)
accctactcagtgtgggtgtcttcgtttgggggctttttttttttttgcacttctgaggctagatatgtctggctgaagatttgatgtggttcctccttaagctatgcgtcctgttaata

SEQ ID NO: 424223 - DNA, 120 bp, Artificial Sequence
  ENSG00000151208_58 (sequence is synthesized)
ataggtactgtactgggctctgtgtaagtgtcgttggggtaggacctatattttaatactgttcctaacatttcattttactagcgagaaatctttgatttcattttattctttgtaatt

SEQ ID NO: 424224 - DNA, 120 bp, Artificial Sequence
  ENSG00000151208_59 (sequence is synthesized)
ctagacactagattgtagtttagccataactgatgttttttaaaaagggatatattttcttgcacagttgttcaaaaaagagacaagtttcagtcctcaatgctgtcctttgttttacag

SEQ ID NO: 424225 - DNA, 120 bp, Artificial Sequence
  ENSG00000151208_60 (sequence is synthesized)
gtacaagttttctagctcagacaaactatgaaaaactgtagactattctcaaggtattaactcgcagaccctctgggggtaggggctgttttctaagttacaggcagagtgggactgaga

SEQ ID NO: 424226 - DNA, 120 bp, Artificial Sequence
  ENSG00000151208_61 (sequence is synthesized)
tggtacagtgtgcacagacaggtactgagctgacagactgggattttctgtactaaaatgttactttgtatcaaaagttaaacaggctttagtacaacaaataaaggtcaatttctgtaa

SEQ ID NO: 424227 - DNA, 120 bp, Artificial Sequence
  ENSG00000151208_62 (sequence is synthesized)
agcaggtacttcacaggtaggtgtgcgtgggcctggagtggggagcaggcagcagggaaggaagcagaggcttcctaaggctgttttcttagccgtggagaagcccgcactttctacatg

SEQ ID NO: 424228 - DNA, 120 bp, Artificial Sequence
  ENSG00000151208_63 (sequence is synthesized)
ctcccaagtgctgtcatgagcacgttcctgacaagtcaggtgttcagattgcagtccctggccaacgtcaggattcttacaggttgaatgttaagctcaccgatcttggcctcaggtcct

SEQ ID NO: 424229 - DNA, 120 bp, Artificial Sequence
  ENSG00000151208_64 (sequence is synthesized)
gcctggcttgcctgctcattttcacacgtgcagtggtgggtctgtctcatagcacaggtgcagtttagtgcagccacagtgtccccaggcagggcggggactggagcagcccccagtgtg

SEQ ID NO: 424230 - DNA, 120 bp, Artificial Sequence
  ENSG00000151208_65 (sequence is synthesized)
ccagcagtgtgggcagcggaggctaggggcccatctgtccctagcaccctccagggcagtcccgttttgcagcgggatttggcaaacccccctccaaaaaaaaaaaaacaaaaaacaaaa

SEQ ID NO: 424231 - DNA, 120 bp, Artificial Sequence
  ENSG00000151208_66 (sequence is synthesized)
cggtgttctgatcccagaaggacatgctcctcccctagcctgctgtgaaggcttatgtgttcctctacctcagaatccccttagttggactccttgggcctcaccagaaagacctctatc

SEQ ID NO: 424232 - DNA, 120 bp, Artificial Sequence
  ENSG00000151208_67 (sequence is synthesized)
ctttgccaactcctgactttggcaccttgcatttggtgactgtctagcacaggaggttaggtaggcagagatcctgactggtaggcctgaggccgctctgcctgtggcctgacatgctct

SEQ ID NO: 424233 - DNA, 120 bp, Artificial Sequence
  ENSG00000151208_68 (sequence is synthesized)
tcagccactgttctggacactcatgggaaacaagtggcctttgtcatgagctggtggacagagtgcgctgtcagcacgggttctacctacagcgtcctgtccaccatgccctcagactca

SEQ ID NO: 424234 - DNA, 120 bp, Artificial Sequence
  ENSG00000151208_69 (sequence is synthesized)
gccactgaatgagccaggtgattcctcggctgttggagctggaagggccagacaagctttcctggtctagcctgggcatttgaggaatccggaagctgaaacccagagaggtggagtgac

SEQ ID NO: 424235 - DNA, 120 bp, Artificial Sequence
  ENSG00000151208_70 (sequence is synthesized)
cctacagcgtcctgtccaccatgccctcagactcagaaagcagcagctccctcagcagtgtgggtgagtaccactgtctggggaggacaccggggaacagatggaatcccagttggaaaa

SEQ ID NO: 424236 - DNA, 120 bp, Artificial Sequence
  ENSG00000151208_71 (sequence is synthesized)
ccgaaggagggctgctaagtggccctgcaccagtgtcccaggcccctgtttagcctggtgcctttgcctttgctgttggactcaagtgggaagtggcccagctaggaggtaggtaagtgg

SEQ ID NO: 424237 - DNA, 120 bp, Artificial Sequence
  ENSG00000151208_72 (sequence is synthesized)
cgtggaagtgcatggtagtgggagtgtgacacaagaggggaacactttattgggcatagcatttggtttgcttttttaataagaagcttttgaacttacacaataaaacctagggcatag

SEQ ID NO: 424238 - DNA, 120 bp, Artificial Sequence
  ENSG00000151208_73 (sequence is synthesized)
acttgccttgaagggctagggagatgaggtggcacgtgtgaggctgagtgggcagcgggacggcctgattgcgtgtgctgtcatagtttccagaagggtgagattgctggggactgtgga

SEQ ID NO: 424239 - DNA, 120 bp, Artificial Sequence
  ENSG00000151208_74 (sequence is synthesized)
aagcatctcaggcaccagtccacactgctcactggggacaaagagcttcgcacagccctccacatcgggcagagttgtacgtgcctgatgcacttgtgcattctcaccttttacgtgatc

SEQ ID NO: 424240 - DNA, 120 bp, Artificial Sequence
  ENSG00000151208_75 (sequence is synthesized)
tctgtgaaagattcattctctgtggttttcttctgaagtaaagctgcttccttgaagatgtgtaaggcaacatgaatgggcagcgttcccattcatgtcccttcctgtgccccagtggga

SEQ ID NO: 424241 - DNA, 120 bp, Artificial Sequence
  ENSG00000151208_76 (sequence is synthesized)
gccccagtgggaggagctggttcctggggggcagaaactggcttgcagagctgctcaagcgttccactgtttggttttttttttttttttcccctaagatggagtctcactctgtcaccc

SEQ ID NO: 424242 - DNA, 120 bp, Artificial Sequence
  ENSG00000151208_77 (sequence is synthesized)
agaggggaggcagcatttcagagagctgccatgtgttttcagccctgaggtccagagaactgggaaatgctgtcctgtctgggatggtttgtcttatagccatgacatgtcttagcttgt

SEQ ID NO: 424243 - DNA, 120 bp, Artificial Sequence
  ENSG00000151208_78 (sequence is synthesized)
caacatgctttctccccatagcaacctgggaaataggaagcatgaaagagacttcccccctttttacaaatggagacaggccaggagccacagccacattgtgaattggtggttaaaact

SEQ ID NO: 424244 - DNA, 120 bp, Artificial Sequence
  ENSG00000151208_79 (sequence is synthesized)
catctcccaagtccttttcccaaaagactgcggctgcgtcctgggatacaggggaaaggcttgtgtaagtcctgggctggctgggtcctttggggcgtcttttctcaccaagcccatttc

SEQ ID NO: 424245 - DNA, 120 bp, Artificial Sequence
  ENSG00000151208_80 (sequence is synthesized)
tggagtgacagacctgtggccacgtggttagtggctggcaccgggactcattcttaccctttgctttttccctctcattcgaagctttctgttgtgaaataaaatatacacaggaagaaa

SEQ ID NO: 424246 - DNA, 120 bp, Artificial Sequence
  ENSG00000151224_0 (sequence is synthesized)
gtggcaagctggagggagggacacatcccgtgttccatccactccctcccttctcagcagtcctcgcctgttctcacgtgctcacaggcagttaggcagaagtgatccccgtggctctgc

SEQ ID NO: 424247 - DNA, 120 bp, Artificial Sequence
  ENSG00000151224_1 (sequence is synthesized)
caaagacaagcctgttgggttgaaagaagaagaagaagaagaaaaaaaaactcaggcaaagtcacagcctcaaaattgttcactgaaagaagcgtgagtggagaagtgtgagaagatgaa

SEQ ID NO: 424248 - DNA, 120 bp, Artificial Sequence
  ENSG00000151224_2 (sequence is synthesized)
tggaccggtggatggcttgtgtgaccactctctaagtgaaggagtcttcatgttcacatcggagtctgtgggagagggacacccggataagatctgtgaccagatcagtgatgcagtgct

SEQ ID NO: 424249 - DNA, 120 bp, Artificial Sequence
  ENSG00000151224_3 (sequence is synthesized)
ggatgcccatctcaagcaagaccccaatgccaaggtggcctgtgagacagtgtgcaagaccggcatggtgctgctgtgtggtgagatcacctcaatggccatggtggactaccagcgggt

SEQ ID NO: 424250 - DNA, 120 bp, Artificial Sequence
  ENSG00000151224_4 (sequence is synthesized)
ggtgagggacaccatcaagcacatcggctacgatgactcagccaagggctttgacttcaagacttgcaacgtgctggtggctttggagcagcaatccccagatattgcccagtgcgtcca

SEQ ID NO: 424251 - DNA, 120 bp, Artificial Sequence
  ENSG00000151224_5 (sequence is synthesized)
tctggacagaaatgaggaggatgtgggggcaggagatcagggtttgatgttcggctatgctaccgacgagacagaggagtgcatgcccctcaccatcatccttgctcacaagctcaacgc

SEQ ID NO: 424252 - DNA, 120 bp, Artificial Sequence
  ENSG00000151224_6 (sequence is synthesized)
ccggatggcagacctcaggcgctccggcctcctcccctggctgcggcctgactctaagactcaggtgacagttcagtacatgcaggacaatggcgcagtcatccctgtgcgcatccacac

SEQ ID NO: 424253 - DNA, 120 bp, Artificial Sequence
  ENSG00000151224_7 (sequence is synthesized)
catcgtcatctctgtgcagcacaacgaagacatcacgctggaggagatgcgcagggccctgaaggagcaagtcatcagggccgtggtgccggccaagtacctggacgaagacaccgtcta

SEQ ID NO: 424254 - DNA, 120 bp, Artificial Sequence
  ENSG00000151224_8 (sequence is synthesized)
ccacctgcagcccagtgggcggtttgtcatcggaggtccccagggggatgcgggtgtcactggccgtaagattattgtggacacctatggcggctggggggctcatggtggtggggcctt

SEQ ID NO: 424255 - DNA, 120 bp, Artificial Sequence
  ENSG00000151224_9 (sequence is synthesized)
ctctgggaaggactacaccaaggtagaccgctcagctgcatatgctgcccgctgggtggccaagtctctggtgaaagcagggctctgccggagagtgcttgtccaggtttcctatgccat

SEQ ID NO: 424256 - DNA, 120 bp, Artificial Sequence
  ENSG00000151224_10 (sequence is synthesized)
tggtgtggccgagccgctgtccatttccatcttcacctacggaacctctcagaagacagagcgagagctgctggatgtggtgcataagaacttcgacctccggccgggcgtcattgtcag

SEQ ID NO: 424257 - DNA, 120 bp, Artificial Sequence
  ENSG00000151224_11 (sequence is synthesized)
ggatttggacttgaagaagcccatctaccagaagacagcatgctacggccatttcggaagaagcgagttcccatgggaggttcccaggaagcttgtattttagagccagggggagctggg

SEQ ID NO: 424258 - DNA, 120 bp, Artificial Sequence
  ENSG00000151224_12 (sequence is synthesized)
cctggtctcaccctggaggcacctggtggccatgctcctcttccccagacgcctggctgctgatcgccttccccacccaccaaccctcagggcaaagccaggtccctctcatttagcctg

SEQ ID NO: 424259 - DNA, 120 bp, Artificial Sequence
  ENSG00000151224_13 (sequence is synthesized)
tcctgtcatcatcatggccagctggaggcaggggcttcctggtgctggaggttggatcttgatgtaaggatgggcatggtgttctcctgctgctccctcagactggggcaatgttaattt

SEQ ID NO: 424260 - DNA, 120 bp, Artificial Sequence
  ENSG00000151224_14 (sequence is synthesized)
agtgaattccctcactcgtctcccccaacagctggaccctgaccagctccccctccctccccttgcctgtgccaggtgaggtcagcacatctcaacaggcctcagggctccttgtgggcc

SEQ ID NO: 424261 - DNA, 120 bp, Artificial Sequence
  ENSG00000151224_15 (sequence is synthesized)
tgggctcctggacccccctttcacaggcagccagtgccctgagccagggtctccagaaagccccacccaggccaggcatgtggcaggggttagagcaggactgatgtctcctaagcacct

SEQ ID NO: 424262 - DNA, 120 bp, Artificial Sequence
  ENSG00000151224_16 (sequence is synthesized)
gtaatgtgcgagggacccagctaataactgatctcgttttttcttcactgcaacatgatgaggtagtaccttttatatcccatttatagatgggggaaagcaaagcacagagagtctgga

SEQ ID NO: 424263 - DNA, 120 bp, Artificial Sequence
  ENSG00000151224_17 (sequence is synthesized)
taacttccacagggtcccacagccacgtgtttagacctagatgtataactaggagctttgactcaggagcctgtgacataccccctcccccaccgttgtctcatgccagtaacaggctca

SEQ ID NO: 424264 - DNA, 120 bp, Artificial Sequence
  ENSG00000151224_18 (sequence is synthesized)
aacaatgacaaagcagattcagaaatgaggccatggactctgtcctgaaggcctgaggttactggaaattaggggattaacccactagctcttgttgagccgtgggcaattgtctgaaaa

SEQ ID NO: 424265 - DNA, 120 bp, Artificial Sequence
  ENSG00000151224_19 (sequence is synthesized)
gtgaagacagaaccacagggctattttgtttgcttcatgtgtcccagaagatgactgagggtgagttggcttacctggcccatcagggtaggctggagttagggactgaccagcagcttt

SEQ ID NO: 424266 - DNA, 120 bp, Artificial Sequence
  ENSG00000151224_20 (sequence is synthesized)
agaatcccagccccctgaccactcagagacatgcagagattgggtttttggacttctggggtaagtggtctaagtccagtccagtcctatctgggcttcctggagcagaagcagcaactt

SEQ ID NO: 424267 - DNA, 120 bp, Artificial Sequence
  ENSG00000151224_21 (sequence is synthesized)
gtcctagcacagatggccagccccttagacagaggccctcaagtctttctctttccctggtcccttgtatcccctgcaggctgagtgcatttggagggagtgagtggccctttcggatcc

SEQ ID NO: 424268 - DNA, 120 bp, Artificial Sequence
  ENSG00000151224_22 (sequence is synthesized)
agggaggctggtcctatggcctcatgttaaataggcggggcttgccttctggtgttggacaagcttctgagacgtcatgaggagattctgcctttgccaggtgactgtctggggagcggg

SEQ ID NO: 424269 - DNA, 120 bp, Artificial Sequence
  ENSG00000151224_23 (sequence is synthesized)
tctgctcccaaggggcctgagcagtccttggcctgctaaggtcttggaacttgcctgcctttccatccatggccagcagcacctgccctacctgccccacttgtccttagcctggacctc

SEQ ID NO: 424270 - DNA, 120 bp, Artificial Sequence
  ENSG00000151224_24 (sequence is synthesized)
tgacagcagcatctctaccttctccccagctcccaggaccacaggctcaggcaggggcctccatgggccccaggggaacactggggacttggcctctctctagggtacatggtgctggga

SEQ ID NO: 424271 - DNA, 120 bp, Artificial Sequence
  ENSG00000151224_25 (sequence is synthesized)
gaggcagcccaggaagtctcatctggggagcaggcagccagcatctgggccttggcctggagcacaaagaccctggctttcattttctctcaggtgaaaggaaattaaggcaacaaaaga

SEQ ID NO: 424272 - DNA, 120 bp, Artificial Sequence
  ENSG00000151224_26 (sequence is synthesized)
agcccggctcctggtcacctaggaagcctcagattccttcccatggagggagggagtggtttgcaggtggccaagttcctctaacttggctcacactcgacatgaaaattcagaatttta

SEQ ID NO: 424273 - DNA, 120 bp, Artificial Sequence
  ENSG00000151224_27 (sequence is synthesized)
tactttccctaccctctagagaaataagatcttttttgtcagtttgtttgtatgaaactaaagcctttatttgttaatagttcctgctaaaacaatgaataaaaactcaaggagcaacta

SEQ ID NO: 424274 - DNA, 120 bp, Artificial Sequence
  ENSG00000151224_28 (sequence is synthesized)
gagtctgtgggagagggacacccggataagatctgtgaccagatcagtgatgcagtgctggatgcccatctcaagcaagaccccaatgccaaggtggcctgtggctttgacttcaagact

SEQ ID NO: 424275 - DNA, 120 bp, Artificial Sequence
  ENSG00000151224_29 (sequence is synthesized)
caaaggcattagggagtggctgtgaccccagagaacccctggcccaccttctgcacttgctaatgaagctttggcaggttacctgttttcaatatgttgtcagtgactgagctgggagtg

SEQ ID NO: 424276 - DNA, 120 bp, Artificial Sequence
  ENSG00000151224_30 (sequence is synthesized)
gagtccagagttctgggctaaggggtcttaggaaaatgtctgtgggcagccccaggacatccttcctgagttgcagttcagctgccatcacagtacttcagccccctccagcatctaggg

SEQ ID NO: 424277 - DNA, 120 bp, Artificial Sequence
  ENSG00000151229_0 (sequence is synthesized)
gcccgctccgcagcgccagctcggcaggcgcggggcgtgagtgtggagtgagacccgccgggctccaactccgcagcgtcggagcgcggcgggcagcaactttctccccggagcggccgt

SEQ ID NO: 424278 - DNA, 120 bp, Artificial Sequence
  ENSG00000151229_1 (sequence is synthesized)
ggcggcggctgctgccgtggcagccggagcggaagccgggaggaagaaagcggcggcagcggcggttgctcccgccggctcgggctgtctagctcgccgagactgccggcccgcggagcc

SEQ ID NO: 424279 - DNA, 120 bp, Artificial Sequence
  ENSG00000151229_2 (sequence is synthesized)
gcgtccccccgggcagccccgggcccctgccctatgtcccgcaaggcaagcgagaatgtggagtacacgctgcggagcctgagcagcctgatgggcgagcggcgcaggaagcagccggag

SEQ ID NO: 424280 - DNA, 120 bp, Artificial Sequence
  ENSG00000151229_3 (sequence is synthesized)
gagtgcagcctcctggctgccgccgaatcgagcaccagcctgcagagcgcgggcgcgggcggcggcggcgtcggggacctggagcgcgcggcgcggcggcagttccagcaggacgagacc

SEQ ID NO: 424281 - DNA, 120 bp, Artificial Sequence
  ENSG00000151229_4 (sequence is synthesized)
cggcagttccagcaggacgagacccccgccttcgtgtacgtggtggccgtcttctccgcgctgggcggcttcctgtttggctatgacaccggggtggtgtcaggggccatgctgctgctc

SEQ ID NO: 424282 - DNA, 120 bp, Artificial Sequence
  ENSG00000151229_5 (sequence is synthesized)
aagcggcagctcagtctggacgcgctgtggcaggagctgctggtgtccagcacggtgggggcggctgccgtctcggcgctggccggaggcgccctcaacggcgtcttcggccgccgcgct

SEQ ID NO: 424283 - DNA, 120 bp, Artificial Sequence
  ENSG00000151229_6 (sequence is synthesized)
gccatcctcctggccagtgccctcttcaccgccggctccgcggtgctggctgcggccaacaacaaggagacactgctcgccggccgcctggtcgtgggactcggcatcggcattgcttct

SEQ ID NO: 424284 - DNA, 120 bp, Artificial Sequence
  ENSG00000151229_7 (sequence is synthesized)
atgacagtgccagtgtacattgcggaggtctcaccacccaatttaagaggccgattagtcaccattaataccctcttcatcacaggagggcagttctttgcaagtgttgttgatggagcc

SEQ ID NO: 424285 - DNA, 120 bp, Artificial Sequence
  ENSG00000151229_8 (sequence is synthesized)
ttcagttatctccagaaggatggatggaggtacatgttgggacttgcagcagttccggcggttatacagttttttggctttctctttttgcctgaaagccctcgatggcttattcagaaa

SEQ ID NO: 424286 - DNA, 120 bp, Artificial Sequence
  ENSG00000151229_9 (sequence is synthesized)
ggacagactcagaaggcccgtagaattttatctcagatgcgtggtaaccagaccattgatgaggaatatgatagcatcaaaaacaacattgaagaggaggaaaaagaggttggctcagct

SEQ ID NO: 424287 - DNA, 120 bp, Artificial Sequence
  ENSG00000151229_10 (sequence is synthesized)
ggacctgtgatctgcagaatgctgagttatcccccaactcgccgagctttaattgtgggttgtggcctacaaatgttccagcagctctcaggcattaacaccatcatgtactacagtgca

SEQ ID NO: 424288 - DNA, 120 bp, Artificial Sequence
  ENSG00000151229_11 (sequence is synthesized)
accattctgcagatgtctggtgttgaagatgatagacttgcaatatggctggcttcagttacagccttcacaaatttcattttcacacttgtgggagtctggcttgttgagaaggtgggc

SEQ ID NO: 424289 - DNA, 120 bp, Artificial Sequence
  ENSG00000151229_12 (sequence is synthesized)
cgcagaaagcttacctttggtagtttagcaggtaccaccgtagcactcattattcttgccttgggatttgtgctatcagcccaagtttccccacgcatcacttttaagccaatagctccg

SEQ ID NO: 424290 - DNA, 120 bp, Artificial Sequence
  ENSG00000151229_13 (sequence is synthesized)
tcaggtcagaacgccacttgcacaagatacagttactgtaatgaatgtatgttggatccagactgcggtttctgctacaagatgaacaaatcaactgtcattgactcctcctgtgttcca

SEQ ID NO: 424291 - DNA, 120 bp, Artificial Sequence
  ENSG00000151229_14 (sequence is synthesized)
gttaataaagcatctacaaatgaggcagcctggggcaggtgtgaaaatgaaaccaagttcaaaacagaagatatattttgggcttacaatttctgccctactccatactcctggactgca

SEQ ID NO: 424292 - DNA, 120 bp, Artificial Sequence
  ENSG00000151229_15 (sequence is synthesized)
cttctgggccttattttatatcttgtcttctttgcacctggaatgggaccaatgccttggactgtgaattctgaaatatatcccctttgggcaagaagtacaggaaatgcatgttcatct

SEQ ID NO: 424293 - DNA, 120 bp, Artificial Sequence
  ENSG00000151229_16 (sequence is synthesized)
ggaataaactggattttcaatgtcctggtttcactaacatttttacacacagcagagtatcttacatactatggagctttcttcctctatgctggatttgctgctgtgggactccttttc

SEQ ID NO: 424294 - DNA, 120 bp, Artificial Sequence
  ENSG00000151229_17 (sequence is synthesized)
atctatggctgtcttcctgagaccaaaggcaaaaaattagaggaaattgaatcactctttgacaacaggctatgtacatgtggcacttcagattctgatgaagggagatatattgaatat

SEQ ID NO: 424295 - DNA, 120 bp, Artificial Sequence
  ENSG00000151229_18 (sequence is synthesized)
attcgggtaaagggaagtaactatcatctttctgacaatgatgcttctgatgtggaataattttcagctgctcatatatttagttatttaaacaaactggggggagaagaacagcaattg

SEQ ID NO: 424296 - DNA, 120 bp, Artificial Sequence
  ENSG00000151229_19 (sequence is synthesized)
gtgacttcactgccctgcttctaatctggttctttccacagcctagttttgattgacttcatattctagaatacttgattaggaggaagatacaaccatgatgactttttttttccacaa

SEQ ID NO: 424297 - DNA, 120 bp, Artificial Sequence
  ENSG00000151229_20 (sequence is synthesized)
ggaacaatattttaaaaaatatttacagagattttaatctaataattcttaagcaaatgtgtgtaatgccttcctgaaatagtctaaaatgaatattgtacccagtgacttcagtggtat

SEQ ID NO: 424298 - DNA, 120 bp, Artificial Sequence
  ENSG00000151229_21 (sequence is synthesized)
ccttttttcctaagaccatttataattattagtggcaacagagtcagtgctaatctagccaaattacatatgtataatatatttataaaggattctgggagatggtccaagggtgttctg

SEQ ID NO: 424299 - DNA, 120 bp, Artificial Sequence
  ENSG00000151229_22 (sequence is synthesized)
tgtcaaaagatggcctattggccctcagttttcctacagagtagtggcttatctctgatcagctgttacaaactaaattccatgtaagctttcatcaacaaattccaaagtgcctcctac

SEQ ID NO: 424300 - DNA, 120 bp, Artificial Sequence
  ENSG00000151229_23 (sequence is synthesized)
aagggcacagctgtccgtatctcctttggattccatatttttgtttctctccaattcagatattgggagttcttcagatactgactctgcacactatcttttgaacattatgaaaatata

SEQ ID NO: 424301 - DNA, 120 bp, Artificial Sequence
  ENSG00000151229_24 (sequence is synthesized)
atctgtcgggttgttttcatacttcttttttttgcatcagtgataaggcatacatttgcgcagatgagctaggaagttttgagaagtaccttttatgttcagaaagtaacagattaaagg

SEQ ID NO: 424302 - DNA, 120 bp, Artificial Sequence
  ENSG00000151229_25 (sequence is synthesized)
tttttatgggttccaaattggttagtcacttaggtatgcaattataaatgcaaaatagtgccagatctttaactgtatatcagggtcagtttttgttcatgcccaaatcactacaccttc

SEQ ID NO: 424303 - DNA, 120 bp, Artificial Sequence
  ENSG00000151229_26 (sequence is synthesized)
ctcattggccttggagtcctactatttcgtgccttcatttgtgttacatacatagctgcaagcaaaccatttttcccctttcttttattcaaacaataatttttgaaacaaaaaagagga

SEQ ID NO: 424304 - DNA, 120 bp, Artificial Sequence
  ENSG00000151229_27 (sequence is synthesized)
aggaaatcagtggcagaaataatcctgctgttattggtgtttgtttaataaaaataatgggacttttttcttaactttttattagctcttcctaagggaaatgtcacatattattattta

SEQ ID NO: 424305 - DNA, 120 bp, Artificial Sequence
  ENSG00000151229_28 (sequence is synthesized)
attgtacttgtctttttttactttaagagcataaactcgtttttattttgcacacttttctcattttcctgagaatttaccagaaaaaaaaaagatacatagatttgtctctgtgttttt

SEQ ID NO: 424306 - DNA, 120 bp, Artificial Sequence
  ENSG00000151229_29 (sequence is synthesized)
cttattcttggcttagtttttccttcttgtgtaaaaattgagattgcctattggaacagataattggttctaatatagcacgtctataagaaatgcaggcttaattatatttccacaatg

SEQ ID NO: 424307 - DNA, 120 bp, Artificial Sequence
  ENSG00000151229_30 (sequence is synthesized)
tttttatggtaattcatcactgaactcttaatttttgcttttctattaagaactatatagtatgtacaaaattacttgatcacaaaattacttgctagttccaggaaaaatatgaatgaa

SEQ ID NO: 424308 - DNA, 120 bp, Artificial Sequence
  ENSG00000151229_31 (sequence is synthesized)
tcttctgtggccagttaggaatacatcagtttgatgcatttttaaatggctctaaacatctaataaggtactgtatttggagagaaaaggtggctatctccatattcaaaatatttcttc

SEQ ID NO: 424309 - DNA, 120 bp, Artificial Sequence
  ENSG00000151229_32 (sequence is synthesized)
cagtctccaagatactctattcttttaatgtctggcttgttcctatcacagttatcaagctgagaatacagctgaggaagttcattctctaagtcaccagaggtataatatgtgcttaaa

SEQ ID NO: 424310 - DNA, 120 bp, Artificial Sequence
  ENSG00000151229_33 (sequence is synthesized)
ctgtcaatttagtgccctaaaaatccattaaccaaaaacaaaaacgttttctccctttggtcatttcatataataaaaaaaattaatattttatagaggttttttccttgaattaggtgc

SEQ ID NO: 424311 - DNA, 120 bp, Artificial Sequence
  ENSG00000151229_34 (sequence is synthesized)
tttaacaattgatttccaagggaatattagtattgattttttcctcagaaaagcagatatgatttaatagggaaaattattattctattgatatttcttatctcataagaaatttcttat

SEQ ID NO: 424312 - DNA, 120 bp, Artificial Sequence
  ENSG00000151229_35 (sequence is synthesized)
ctaatattttacacaggtaaattgaagtgaaaaataagctactatatggtacaatcaaaatataataaggagaaaaagtagaccaataaagtgctctctaaaaatttattttttggactt

SEQ ID NO: 424313 - DNA, 120 bp, Artificial Sequence
  ENSG00000151229_36 (sequence is synthesized)
aatcaaaataattgcctcaatccttctctttattgtatatgtagccttaactaactatatacttataaactcagctgggctgatgcacagtaactttattaaaggagaaactggactctt

SEQ ID NO: 424314 - DNA, 120 bp, Artificial Sequence
  ENSG00000151229_37 (sequence is synthesized)
gttatttcctaaagcagaacatggcctgttctccctgatataagaaaacaatgttttcaactttataaccataaatgcacataataacagggaaaattagccacagttctcctcccctac

SEQ ID NO: 424315 - DNA, 120 bp, Artificial Sequence
  ENSG00000151229_38 (sequence is synthesized)
tcccctgagcccctactttaaaggactatttgttatttatatagtgttaaagataatattccatatctttgaagtataagacagagaggcacagtataagaattatttataactttttag

SEQ ID NO: 424316 - DNA, 120 bp, Artificial Sequence
  ENSG00000151229_39 (sequence is synthesized)
aaacaattacttgaaaaggaaccttatacaattagggtattatttttagatttggtgaacatttatagtatattaaaaattaaatgtttaaattttgcaggtttttttatattaggcacc

SEQ ID NO: 424317 - DNA, 120 bp, Artificial Sequence
  ENSG00000151229_40 (sequence is synthesized)
ttttaagttcccagcatatttggctaccactatcaacttggaaacattccatttgtagtatcatcaaatatatattttgtaggacaatttatatatgatgtgatttgacctaccatatta

SEQ ID NO: 424318 - DNA, 120 bp, Artificial Sequence
  ENSG00000151229_41 (sequence is synthesized)
aagcagacacagattacgtatcatgctttcaaccaaaattacagacttcctttgaaacatgctgcagatttgatagaggtatattatgtcttaggaaaatacaatgaagaaggtccaaat

SEQ ID NO: 424319 - DNA, 120 bp, Artificial Sequence
  ENSG00000151229_42 (sequence is synthesized)
ccctattgaggctggatgtctgatctgcactagacttaagaggatatatcatttcatctgcatataaacacatagggctgaatgtgatgtcaaaagggtttgccgttaataattttcttc

SEQ ID NO: 424320 - DNA, 120 bp, Artificial Sequence
  ENSG00000151229_43 (sequence is synthesized)
aatgtaaacattcctaataattttgattgttgctccttagtcaatcatttcccaaaacatgattatttttaatatatgtaaaatatttaaataataaataataaaaggtaatgtgtccat

SEQ ID NO: 424321 - DNA, 120 bp, Artificial Sequence
  ENSG00000151229_44 (sequence is synthesized)
tttaaattttgttcccagccatacacagtagttccctgatacaaaatgctatgagaataccgactattttttcataatttaattttaccactgaacctgattttagtacataagagtcta

SEQ ID NO: 424322 - DNA, 120 bp, Artificial Sequence
  ENSG00000151229_45 (sequence is synthesized)
aatattaagttattcactctaaaaggggaaatcagtaaaagcaaggaatttatgaaatttttgctgtaatttcagtatctgttatacaggggaagaatgatcaggaaaaatataagctga

SEQ ID NO: 424323 - DNA, 120 bp, Artificial Sequence
  ENSG00000151229_46 (sequence is synthesized)
caacttacccttttgctttttaacaacaaaataatattgaaaatatattagaataactcacagatccagaagttggtggaaatggaagaatgttttagaaaataccatccatatgtttat

SEQ ID NO: 424324 - DNA, 120 bp, Artificial Sequence
  ENSG00000151229_47 (sequence is synthesized)
ctaagaaagtctcagaatttagtgacactaatacagttcataaatactgtaatacagtggagagagttggaatgttattttggttttatttcatcagcacaattattaaaaacaacaaaa

SEQ ID NO: 424325 - DNA, 120 bp, Artificial Sequence
  ENSG00000151229_48 (sequence is synthesized)
ttaatgagacgttttgttataatcagatttttttttaccatattgcaagttataaaatgtcaacttatactaagtacctaacaactgacttttattcacttgttgtgacaagtttttaat

SEQ ID NO: 424326 - DNA, 120 bp, Artificial Sequence
  ENSG00000151229_49 (sequence is synthesized)
taccaaattaagaccttttcagtatctatgagtaaaagaaatagatgattatatcagaccaggagcagagaatttataatatgtgctttatagcaaaatgtattaaattgtggttaaaat

SEQ ID NO: 424327 - DNA, 120 bp, Artificial Sequence
  ENSG00000151229_50 (sequence is synthesized)
ttatagctcatatgtagctgctgccaataagaaggctcagaattgttctgtggattaatttttacatcctgttttctgtcacttttaccaatcttcttggcctcatgtacaataatgtaa

SEQ ID NO: 424328 - DNA, 120 bp, Artificial Sequence
  ENSG00000151229_51 (sequence is synthesized)
agccaatttgatgaaatggttcaggttgtagcagtctataaattgtcggtacattcagctcttctaggtgagcaatactgctgctatttttctagaaatagcaatcatttaaaaatgcca

SEQ ID NO: 424329 - DNA, 120 bp, Artificial Sequence
  ENSG00000151229_52 (sequence is synthesized)
aatagctaactgctaccaactctttcttgtatcttgtctctttagagaaggaaatttttgtgtgccagtaatcatcaaagaggtgttttataagagtgttgatgttcagaagttcatgaa

SEQ ID NO: 424330 - DNA, 120 bp, Artificial Sequence
  ENSG00000151229_53 (sequence is synthesized)
agtattttatccgtataatttgctagtgagctaaaacaatataatttatgtaaatctttatatgtacaaaatatatagtctgttgtacttgagtaatttggtctatggaattttaaatgc

SEQ ID NO: 424331 - DNA, 120 bp, Artificial Sequence
  ENSG00000151229_54 (sequence is synthesized)
cttcatttagcagtaatattcacatttttattttagacagttaagttcatgtgtttgattttgtcatgtcagcataaatgagaaaaagaagtggatcatgcagctaatgagtaaccaaca

SEQ ID NO: 424332 - DNA, 120 bp, Artificial Sequence
  ENSG00000151229_55 (sequence is synthesized)
ttttgtaaagttttaaagttttagcaaacaacattattccatctcatttaaaggttaaaaaagaagagacaactctagccaaagtagaaatttatattctacacgtccaaactgtctcct

SEQ ID NO: 424333 - DNA, 120 bp, Artificial Sequence
  ENSG00000151229_56 (sequence is synthesized)
agcagcttttggactatatatcacttgatgttaaagtatcttttatttgtaataaatattcaaatttctatttagaagctctaatgtatacctagattaaatcaaatcacagttttatgc

SEQ ID NO: 424334 - DNA, 120 bp, Artificial Sequence
  ENSG00000151229_57 (sequence is synthesized)
ttttaaaatatatgtatttcaaactgtatattttaatttctgagtgcatgttatatagtatttaatacttcagatgtcttggcaaattcaatataagtatttattcccacaagcgatata

SEQ ID NO: 424335 - DNA, 120 bp, Artificial Sequence
  ENSG00000151229_58 (sequence is synthesized)
tgggatatctcttaaaaattatgaatatgtaccatttccttcaaagtcatcctagcctatgctgtatcaaaagtattgtatattttatggagatttagtgatatacatgtaaatgttttt

SEQ ID NO: 424336 - DNA, 120 bp, Artificial Sequence
  ENSG00000151229_59 (sequence is synthesized)
agtgatatacatgtaaatgttttttaagttattttattgaagttcaatctttacataaaattaaaatctttttttaaaaaaagtgtcagtgccagaactgtaaatgaaaataatcaaata

SEQ ID NO: 424337 - DNA, 120 bp, Artificial Sequence
  ENSG00000151229_60 (sequence is synthesized)
tatttctttctggctttttactgaaaagattgtgaaaggattattttatgtgaaatagtgaaaagtatttcatgtaaatactagactcagtgatttgttctgattaaatgtatgaattct

SEQ ID NO: 424338 - DNA, 120 bp, Artificial Sequence
  ENSG00000151229_61 (sequence is synthesized)
tgattggctttatttgattccataaaatttctcttttacgccatccaatacctccttgtattctgagcttaaatgtgtcattttttctaagccatttcttgatgctggttggaaagcaaa

SEQ ID NO: 424339 - DNA, 120 bp, Artificial Sequence
  ENSG00000151229_62 (sequence is synthesized)
atagaaggaaatcacctggcattgccagagattatgggcacacagataactaattcatttctttttggtgcagtctactacagtgcaatgtgataaggacattagtagaagtacgtttat

SEQ ID NO: 424340 - DNA, 120 bp, Artificial Sequence
  ENSG00000151229_63 (sequence is synthesized)
tataaccagagtatggtagaggggagattgagtgggaaggagagtgaggaatacagaaaaattccctgttctctaattttaagagtaattcccaaagctgtatgtgtgctgagggtggga

SEQ ID NO: 424341 - DNA, 120 bp, Artificial Sequence
  ENSG00000151229_64 (sequence is synthesized)
aggactaaatattaagggctctactaggtttccctcattcagtattaaacccatttttgagggcctctgttgcactagacctacagcagtaactaaaatagacctgggtcttgtcctcat

SEQ ID NO: 424342 - DNA, 120 bp, Artificial Sequence
  ENSG00000151229_65 (sequence is synthesized)
ggatgtacaggctggtagaggaagcacacattaaataaactcacagttaaatataagatttcaaactatgataagggccatacaggactctctcaattctctacagagtagacttttaag

SEQ ID NO: 424343 - DNA, 120 bp, Artificial Sequence
  ENSG00000151229_66 (sequence is synthesized)
atcctaaatcataaaatacagtttagagaaggttatgtgctttcccagggcacatattgttagattaaaagctgccacatcttagaagtcctccccactccctgcctattgattgaattt

SEQ ID NO: 424344 - DNA, 120 bp, Artificial Sequence
  ENSG00000151229_67 (sequence is synthesized)
ttttcattaagaaaatacaaattatgtaaaattaaattttctttggtaaaccatttgtatttgagactcttgattttttttaattacttgagatatgatgagttatttagtgactgtttg

SEQ ID NO: 424345 - DNA, 120 bp, Artificial Sequence
  ENSG00000151229_68 (sequence is synthesized)
agaagagtgaattgattaaaatatttttaaaaaagaaggattaggacccaatgagccagtatattaaatcaagatttgttgagaaactccattttctatacattcacacactttgtggat

SEQ ID NO: 424346 - DNA, 120 bp, Artificial Sequence
  ENSG00000151229_69 (sequence is synthesized)
ttgactttaatcataatccctgttgaacttcaactttcgagactacatgttcaatattttgttctctcctgcttctctctgacattaactttcattttttctcacctttaccagctctat

SEQ ID NO: 424347 - DNA, 120 bp, Artificial Sequence
  ENSG00000151229_70 (sequence is synthesized)
taaggcccatctgttggtctagtgccaggcacgtttgattgcttgttctctgaatttggcacatcatgacttgttctgagatgtgtccaccttctgcagtctggtggaagtatagaattg

SEQ ID NO: 424348 - DNA, 120 bp, Artificial Sequence
  ENSG00000151229_71 (sequence is synthesized)
cagctaggctaggaccaagcatcaaataattaaatccattaataatcctatgtgaattcgttagttgaccaacctaatatttgttctggttttgaaaatatgttttgtttgttatgcttt

SEQ ID NO: 424349 - DNA, 120 bp, Artificial Sequence
  ENSG00000151229_72 (sequence is synthesized)
ttttcctaagcatttaaacttgacaagtataaaagcatagaaagtgaaggatttttcttgtactttttttgttttcacttaaaactggtatcacaaacagagccaactctagtttatggg

SEQ ID NO: 424350 - DNA, 120 bp, Artificial Sequence
  ENSG00000151229_73 (sequence is synthesized)
tagtgactggggccagtgtattcctagtttgaaatgactgtcataatccattagcagtagctagtgtaaattgagctgattgatgctgtcaaattttaataaaacattcatttctccaaa

SEQ ID NO: 424351 - DNA, 120 bp, Artificial Sequence
  ENSG00000151229_74 (sequence is synthesized)
ataataatatttcaaaacgaggcttatgtttaagttttcagagtgcttgcacttatagcagttcttttaaactggccttcataactacattactttgcagcatatactggtgatagtgga

SEQ ID NO: 424352 - DNA, 120 bp, Artificial Sequence
  ENSG00000151229_75 (sequence is synthesized)
ccagatttctctaataaggtataggagtttggatctttagttttaggcagctattcacaaatactgccaaggcaatttctcccactgcatattgtttaattgcactgtatttccaaactc

SEQ ID NO: 424353 - DNA, 120 bp, Artificial Sequence
  ENSG00000151229_76 (sequence is synthesized)
taattgcactgtatttccaaactcccaagcttttaaatgaaagaaaactgtaaagtcaaaatgaattactatcacgttaggttgggcacagtgcatcacgactgtaatcccagcactttg

SEQ ID NO: 424354 - DNA, 66 bp, Artificial Sequence
  ENSG00000151229_77 (sequence is synthesized)
catggtgaaaccccacctctacaaaaatacaaaaattagctgaaggagaatcacttgaacctggga

SEQ ID NO: 424355 - DNA, 120 bp, Artificial Sequence
  ENSG00000151229_78 (sequence is synthesized)
caggaggctgaggcaggagaaaggagaatcacttgaacctgggagatagagattgcagtgagctgagatcaaaccactgcactccagcctagacaacagagcaagactctgcctcaaaaa

SEQ ID NO: 424356 - DNA, 120 bp, Artificial Sequence
  ENSG00000151229_79 (sequence is synthesized)
gtgcattggttaattcaataaatatatattggtgatccaccctgcagggggctgcatgctgttctacagatacagagttgtctctcagatccaagcctccttcagctcaaagtgacttcc

SEQ ID NO: 424357 - DNA, 120 bp, Artificial Sequence
  ENSG00000151229_80 (sequence is synthesized)
cttggccaaaacaagtcccaaggccccaagcttactgcacaagagagtggaaaatgcagagaagcacatggaatccagtatatggtgagcaccagttgtctctgccaacatgacggtaac

SEQ ID NO: 424358 - DNA, 120 bp, Artificial Sequence
  ENSG00000151229_81 (sequence is synthesized)
tcttttcatttttcagttactgtaatgaatgtatgttggatccagactgcggtttctgctacaagatgaacaaatcaactgtcattgactcctcctgtgttccagttaataaagcatcta

SEQ ID NO: 424359 - DNA, 120 bp, Artificial Sequence
  ENSG00000151233_0 (sequence is synthesized)
agaggcggtgtccaggcttccgggcgggtagtccttcggctccggagccgcgactgcgctcgcctaggtggtgggcggggagggaaggaagggagcgggcgcaaggcggcggcggcggct

SEQ ID NO: 424360 - DNA, 120 bp, Artificial Sequence
  ENSG00000151233_1 (sequence is synthesized)
tgcccctccctccgctccagttcgtcggggcgggcgcggcggcggcggcgaaggaggagcgcggccggggcgatgcggcgctacctgcgcgtcgtggtgctgtgtgtggcctgcggcttc

SEQ ID NO: 424361 - DNA, 120 bp, Artificial Sequence
  ENSG00000151233_2 (sequence is synthesized)
ctgcgcgtcgtggtgctgtgtgtggcctgcggcttctgctcgctcctttacgctttcagccagctcgccgtgtccctggaagaaggaacgggcggcggtggcgggaagccgcaggccgcg

SEQ ID NO: 424362 - DNA, 120 bp, Artificial Sequence
  ENSG00000151233_3 (sequence is synthesized)
gtggcttcctggctcgcgggcggcggacgcggcgccgtgagaggcgccggcgtcgcgggccccgcagcgcatcccggcgtgtcggacaggtgtaaagatttctctctgtgttactggaat

SEQ ID NO: 424363 - DNA, 120 bp, Artificial Sequence
  ENSG00000151233_4 (sequence is synthesized)
ccctattggatgctgccctctgatgtttgtggaatgaactgcttttgggaagcggcttttaggtacagtctgaaaatacagcctgttgagaaaatgcatctagctgtagttgcctgtggt

SEQ ID NO: 424364 - DNA, 120 bp, Artificial Sequence
  ENSG00000151233_5 (sequence is synthesized)
gaaagactggaagaaactatgaccatgttgaagtcagctatcattttcagcatcaaacctcttcaattccatatttttgctgaagatcagctacatcatagctttaaaggcagacttgac

SEQ ID NO: 424365 - DNA, 120 bp, Artificial Sequence
  ENSG00000151233_6 (sequence is synthesized)
aactggtcatttctacaaacatttaattatacgttataccccataacctttccaagtgagaatgcagcagagtggaaaaaactctttaaaccatgtgcttcgcagagattgttcttgccg

SEQ ID NO: 424366 - DNA, 120 bp, Artificial Sequence
  ENSG00000151233_7 (sequence is synthesized)
ttaatcctgaaagaagttgactcactattgtatgtcgacactgatatcctttttttacgaccagttgatgatatttggtctttactaaagaaatttaattccacacaaattgctgcaatg

SEQ ID NO: 424367 - DNA, 120 bp, Artificial Sequence
  ENSG00000151233_8 (sequence is synthesized)
gcaccagaacatgaggaacctcgaataggatggtataatcgctttgctaggcatccatattatggaaaaactggagtaaactctggagttatgttgatgaacatgactcgaatgagaagg

SEQ ID NO: 424368 - DNA, 120 bp, Artificial Sequence
  ENSG00000151233_9 (sequence is synthesized)
aagtatttcaagaatgatatgacaactgtacgactacaatggggagatatacttatgccattgcttaaaaaatacaaactaaacatcacatggggtgatcaagatctattgaatatcgtg

SEQ ID NO: 424369 - DNA, 120 bp, Artificial Sequence
  ENSG00000151233_10 (sequence is synthesized)
ttttttcataatccagaaagcctttttgtttttccgtgtcaatggaattatcgaccagatcattgtatatatggaagcaattgccaagaagcagaagaaggaggaatctttattcttcat

SEQ ID NO: 424370 - DNA, 120 bp, Artificial Sequence
  ENSG00000151233_11 (sequence is synthesized)
gggaacagaggtgtttaccatgacgataagcaaccagcatttagagctgtttatgaagcactgagaaattgttcttttgaagatgacaacatccgttccttattaaaacctttagaactg

SEQ ID NO: 424371 - DNA, 120 bp, Artificial Sequence
  ENSG00000151233_12 (sequence is synthesized)
gaactacaaaaaacagtgcatacatactgtggaaaaatttacaaaatatttatcaaacaactagcaaaaagtgtaagagatcgttatgccagatcaccaaaggaaaagtgattcttggtg

SEQ ID NO: 424372 - DNA, 120 bp, Artificial Sequence
  ENSG00000151233_13 (sequence is synthesized)
actgcttaatcaaatggatgaaaacaaagaatcagaagataagtgtgaaggaatcgtcttggatgaagtattcaggaaggaattactcatctccagaataattttttttttcctaaagaa

SEQ ID NO: 424373 - DNA, 120 bp, Artificial Sequence
  ENSG00000151233_14 (sequence is synthesized)
gttaagtaagcagtattttcaggtaatgaagaataagttaaaatcttgggcctcaacattgaacattttttatctctgatgttttgtaatgttacttgctatcattccagtattgatgaa

SEQ ID NO: 424374 - DNA, 120 bp, Artificial Sequence
  ENSG00000151233_15 (sequence is synthesized)
aatactattgaatgggtttaacctgcagacttctgttgactcatactctcaagagtggtaggggtgtgtagatggagaaaatgtacctcaaacagtgccaacactcaagactgtgagtag

SEQ ID NO: 424375 - DNA, 120 bp, Artificial Sequence
  ENSG00000151233_16 (sequence is synthesized)
agcaataattttatgtcagcactaacctcactttaaaagtgtgagaaaaaagtttgtttacaggagcagaaacaggtctgttgtttctgaagaaatgtgatgtaactgatgtaaccattg

SEQ ID NO: 424376 - DNA, 120 bp, Artificial Sequence
  ENSG00000151233_17 (sequence is synthesized)
acaatctatgtgtgcctttatacatttcatctctgttttaaaatatttttatgacaatcatgtttaaaattatttttagattacaagtaagctgcatgttaaaaattgagctgtgtaagg

SEQ ID NO: 424377 - DNA, 120 bp, Artificial Sequence
  ENSG00000151233_18 (sequence is synthesized)
tagaggaaaaatagtgaaaactttgggattttaatctgtgtgtgcgtgtttgtgtgtgagagagagtgagaaatgtagtgtttcattttgtatgcattaaactgtcttgccaaaactcag

SEQ ID NO: 424378 - DNA, 120 bp, Artificial Sequence
  ENSG00000151233_19 (sequence is synthesized)
atctaagattgttaaatagatatttggggaatttttttttaatcactttaaatgaaaaacgtcagctttactgggcattctggaagcaaaatatattatgctgatggtaaagtgagaacc

SEQ ID NO: 424379 - DNA, 120 bp, Artificial Sequence
  ENSG00000151233_20 (sequence is synthesized)
ttaagagtatactcatgatggtggaaagtgtgatggaccaaaatgcataagctatatacttcctgtgagtagtaattttagttacaatggagtagaaaaatatggtccatttaaacttgt

SEQ ID NO: 424380 - DNA, 120 bp, Artificial Sequence
  ENSG00000151233_21 (sequence is synthesized)
cttctacctcataacggccttgcaagatacttttgaagaagcaaatgtctagagccttactttaagtaagttaaacaacttaagtggatgatttggaataagattgttacatccagctgt

SEQ ID NO: 424381 - DNA, 120 bp, Artificial Sequence
  ENSG00000151233_22 (sequence is synthesized)
agaaaatgtggttttaattgggttgatgtgcatttttgaatatcacctaagacagttaatttttttaaatcttgagaaattacttctttggcattcttgacctgttagctaatataacta

SEQ ID NO: 424382 - DNA, 120 bp, Artificial Sequence
  ENSG00000151233_23 (sequence is synthesized)
tagattctgaatacttagcatatactatgctggggcacatatcttattttaccaacaatatgattatctatatggttatcttctttttctccctgatattttaatgctcaagtagaaaat

SEQ ID NO: 424383 - DNA, 120 bp, Artificial Sequence
  ENSG00000151233_24 (sequence is synthesized)
ggaaaatcatgaaggaaaaatacaacctgtgaaaattgtggcagttagctttgtgaagacacagtgacctctgtggagacatggaatatgcagaaagagatggttagtacagttgttctg

SEQ ID NO: 424384 - DNA, 120 bp, Artificial Sequence
  ENSG00000151233_25 (sequence is synthesized)
tcgtctgcagttcagtcagggacaaattgagagaggaaagtttaagcagggtgcattagaagttgataaccagtccagcattcttagaacagatgggtttagagaacacgagttgtagtt

SEQ ID NO: 424385 - DNA, 120 bp, Artificial Sequence
  ENSG00000151233_26 (sequence is synthesized)
ccttggcagaatgccatggtgaatataagaaactgtgaaattgagcttactgagtagaaaatgagaatactaaaaatgtgaagtttggagggtatgtattagatcatttctaatggtcct

SEQ ID NO: 424386 - DNA, 120 bp, Artificial Sequence
  ENSG00000151233_27 (sequence is synthesized)
caaataatgatcattgcctgcctgactatgtaagattcttgttgggagcttaagaatagattcctgagctaggcctttggagactctggcatgctgtgtctaggagggagtctgtaaaac

SEQ ID NO: 424387 - DNA, 120 bp, Artificial Sequence
  ENSG00000151233_28 (sequence is synthesized)
aatttttaatgaagaaatttaaaaattacacaaaactagaatagtgcattggtactcaacatccagatctgacacttatcactatcttaccatgtttgcttcatttgtcatttttttgtt

SEQ ID NO: 424388 - DNA, 120 bp, Artificial Sequence
  ENSG00000151233_29 (sequence is synthesized)
tgcttaagtatcttaaaatcccatacattgtgttatttcactgctgtgaacactttgggtagataccacgatatcacacctaacagaggcagcagcagtccttcggcttcatctcatagc

SEQ ID NO: 424389 - DNA, 120 bp, Artificial Sequence
  ENSG00000151233_30 (sequence is synthesized)
cagtccttaagcaaatttccctgattatctcaaaaatcatcttctagttggtttgttagaatcaacagaatataagtcacatgatgatttcgtttttaacaatcacctcagatgactttg

SEQ ID NO: 424390 - DNA, 120 bp, Artificial Sequence
  ENSG00000151233_31 (sequence is synthesized)
aagttaggataccacaattcttggcacgtttggtggattataaatgtgattttgaaatattagaggaagcatttggggttaatgacaggatatgaatttatattagtaagtttgataaga

SEQ ID NO: 424391 - DNA, 120 bp, Artificial Sequence
  ENSG00000151233_32 (sequence is synthesized)
taaaatttcctcagtgaacggagaatctcagccccatgggctctaattgattgggacttgtgtagagcgtggtcacagtttaatccaactggactgtatgctgtggtctcactcatgttg

SEQ ID NO: 424392 - DNA, 120 bp, Artificial Sequence
  ENSG00000151233_33 (sequence is synthesized)
tggcttatttacactgtcacacacactacattgtggatcagttggaaggttcttcatctggtttatttagacctgacctaattgatcattttaccataaattgaattatagtgaaaactg

SEQ ID NO: 424393 - DNA, 120 bp, Artificial Sequence
  ENSG00000151233_34 (sequence is synthesized)
tcttttgggtactgtttctacctaaaattaaaggtatcacaaaatatgtataataatttttaaatgaattttctgaatttatctttagacaaggtaattcttttgaattctaaagaaatg

SEQ ID NO: 424394 - DNA, 120 bp, Artificial Sequence
  ENSG00000151233_35 (sequence is synthesized)
cagttcttggagttgatgagaggttaaattatagatggacaacttagagaacgtattccatcttcatataaatggtctttcataaaacatagtgtatctatgcagtttatataaactaca

SEQ ID NO: 424395 - DNA, 120 bp, Artificial Sequence
  ENSG00000151233_36 (sequence is synthesized)
tgatttattatttgagtctatgtattctgacctcagaactatctctgggctacagtattaccaaagtgggatgcctttaaaatgcagtcaaacttcatttgtatgaagtagaaaagaact

SEQ ID NO: 424396 - DNA, 120 bp, Artificial Sequence
  ENSG00000151233_37 (sequence is synthesized)
tgggaaacctttaaaaatatatattgtgatttatgctttaagaaaatgcatacttttttctaatgaagagtagttcataatatataagggttttaaggccctgaaataacattagtgctt

SEQ ID NO: 424397 - DNA, 120 bp, Artificial Sequence
  ENSG00000151233_38 (sequence is synthesized)
actcattgctctctcatcttgcctccagtcagatgttattggtatagtgaaaagaagaccagattttgaactagatctggattctctttttagtaactcaggcatgttatttacccttct

SEQ ID NO: 424398 - DNA, 120 bp, Artificial Sequence
  ENSG00000151233_39 (sequence is synthesized)
ctgtgccttaggtttttaagtacaatcagtgtacccttcaaacctcacaagatgaaactcagaagagataatggatttggaagcattttgcgtggcttatattatgccacgccagtgtta

SEQ ID NO: 424399 - DNA, 120 bp, Artificial Sequence
  ENSG00000151233_40 (sequence is synthesized)
ctgttgaagttctgttttgttcgttgttttctgtacagagcgttcagtttactcaggctgaatgttttctgacatatatctccagtatgaatttgtttatgtaaggaagagtttttcagg

SEQ ID NO: 424400 - DNA, 120 bp, Artificial Sequence
  ENSG00000151233_41 (sequence is synthesized)
aagagaaagtagagaagaaaagaatgatgtaactaaatcaaaaaagaaggaaaagagaggaagtgagaaaaggggtgaggaaagagaaaggagtaagaatggggatggcaaagggcagag

SEQ ID NO: 424401 - DNA, 120 bp, Artificial Sequence
  ENSG00000151233_42 (sequence is synthesized)
taagagaaaagatggaatgagtgtatggaaaattgagaagtagagatggagagaaatggtgtggaaacatttactttttgagttgtagccctcacactacatcagtttgcttgcctgggc

SEQ ID NO: 424402 - DNA, 120 bp, Artificial Sequence
  ENSG00000151233_43 (sequence is synthesized)
tctctggggtcaggaaaggtgctgacttccatggaatggggcagcagggcctgctgtatttggtttgttagtactagagttgtttcccaatcaccctactcactgatcatttagtgccaa

SEQ ID NO: 424403 - DNA, 120 bp, Artificial Sequence
  ENSG00000151233_44 (sequence is synthesized)
ttcaacattttatgtcttttttttttagtggatcccagtttgtgagctaggacctgtggaaatacaagtatcttcctttttaactttattgttttagccatcccaagtgttagactgcaa

SEQ ID NO: 424404 - DNA, 120 bp, Artificial Sequence
  ENSG00000151233_45 (sequence is synthesized)
gactaactacatattccccagtggaggttggaagtggaggggactgcttcattaggtctgaagggggccaaggaatgtgttgcagcagttttcgcagatgatactgacgagaggccaggt

SEQ ID NO: 424405 - DNA, 120 bp, Artificial Sequence
  ENSG00000151233_46 (sequence is synthesized)
ttgggaatcactgccctgccttggatggcaaattaagcaataaattacacctatttattcctcagttgggatactttcagttgaaccattctgagtagatttaagagaacaaaagacagc

SEQ ID NO: 424406 - DNA, 120 bp, Artificial Sequence
  ENSG00000151233_47 (sequence is synthesized)
agaaataccttaaaagatattattggctgtcttatttttcagatatttgtatttaataaataccttagtagtagtcagaacctctttgagatgtttttagaaagaccactgatttgtttt

SEQ ID NO: 424407 - DNA, 120 bp, Artificial Sequence
  ENSG00000151233_48 (sequence is synthesized)
ttaaaataatttttttggttccttagagtagagaagaaaagtaggggtgcaatatgtcaggtgtggggccagttatccatttattaaatgcaatttcaagtgtcttaaaaacaataattg

SEQ ID NO: 424408 - DNA, 120 bp, Artificial Sequence
  ENSG00000151233_49 (sequence is synthesized)
ccttattgcattttaatatttaataaagtagattaaataaagatttgtattataacagttattcttttatccattgccaaagcaacccttttttgcctattaaaatctggctaaactgtt

SEQ ID NO: 424409 - DNA, 120 bp, Artificial Sequence
  ENSG00000151233_50 (sequence is synthesized)
ctgatgttgtttcttaattcattaaacatgaaactaggttttacaaactaaattatataaagacagaagtctaaaaatggtaccagaaaatttttttttaaaaaattaatgtgttattca

SEQ ID NO: 424410 - DNA, 120 bp, Artificial Sequence
  ENSG00000151233_51 (sequence is synthesized)
aatatccagcaattaaagactcatgagaaaaacagaatagcatattagatgtaacagtttaaaatggattgcaaatcaatgtcagacttaaatagaaaatatttattatcacctcatttc

SEQ ID NO: 424411 - DNA, 120 bp, Artificial Sequence
  ENSG00000151233_52 (sequence is synthesized)
taccaataatttcagatgtttaatgggactttgaaaagataggaaaaaatagaaatgaaaatttatctcacctttaatactgtgaatactatttggagggtccctggtcagacatttaaa

SEQ ID NO: 424412 - DNA, 120 bp, Artificial Sequence
  ENSG00000151233_53 (sequence is synthesized)
tatcaaacttaagaactgacatggagcctttgattagtttatatacaggatctgaatatttacacacatagcacactatagcaacctcttgtaaaaaatcatgaagatagaattcaacag

SEQ ID NO: 424413 - DNA, 120 bp, Artificial Sequence
  ENSG00000151233_54 (sequence is synthesized)
aagtgagaccccatctctacaaaaaaattaaaaaattatccagatgtggtggtgtttgcctgcggtcctagctacacaggaagttgaggcaggaggattgcttgagtgcaagagtttgag

SEQ ID NO: 424414 - DNA, 82 bp, Artificial Sequence
  ENSG00000151233_55 (sequence is synthesized)
ggaaattggctttgactatgaaaaacagccattttcaacctttttataaaacctcttcagggaatattggaatattattttt

SEQ ID NO: 424415 - DNA, 120 bp, Artificial Sequence
  ENSG00000151233_56 (sequence is synthesized)
tttataaaacctcttcagggaatattggaatattatttttgtcaggcaaaaataatccagggcttgagcattgctgtagaatatgttatctgttcaaaacttagcagagcacgcatgcat

SEQ ID NO: 424416 - DNA, 120 bp, Artificial Sequence
  ENSG00000151233_57 (sequence is synthesized)
cacatgcattgtcatcagtatttgagagctgaaccaatggtttttgatggttgccgtaacagaagatctgtgaagaggatggtggtttgcacctgttcctgaagtcaaactggaaaaggt

SEQ ID NO: 424417 - DNA, 120 bp, Artificial Sequence
  ENSG00000151233_58 (sequence is synthesized)
tgcaggtatttcaattttctcaatcattttgcataaatgtattaatattttgagtagtaatagttctaaacctgcaggaaggcatcattgtatactgtggtatgtagagaatactactct

SEQ ID NO: 424418 - DNA, 120 bp, Artificial Sequence
  ENSG00000151233_59 (sequence is synthesized)
tacactgctctttatcttaaaatgttttggtatactgtgaatattttcctctaagtatttggtgtattttgacagttattaaaggagaatataaaattaaagattctggtctaaactaag

SEQ ID NO: 424419 - DNA, 120 bp, Artificial Sequence
  ENSG00000151233_60 (sequence is synthesized)
aataatggaaagttgcttcgtcctgccttagaggagttttcagttcatcctcttcttgagaaactatgtgttgctgttactaaataaacatttactcaataaacgttttatttcctcaaa

SEQ ID NO: 424420 - DNA, 120 bp, Artificial Sequence
  ENSG00000151239_0 (sequence is synthesized)
ggccggcggaggagcagccacttcctggggccgccggccggggccgctggctgcactcagcgccggagccgggagctagcggccgccgccatgtcccaccagaccggcatccaagcaagt

SEQ ID NO: 424421 - DNA, 120 bp, Artificial Sequence
  ENSG00000151239_1 (sequence is synthesized)
ggccgccgccatgtcccaccagaccggcatccaagcaagtgaagatgttaaagagatctttgccagagccagaaatggaaagtacagacttctgaaaatatctattgaaaatgagcaact

SEQ ID NO: 424422 - DNA, 120 bp, Artificial Sequence
  ENSG00000151239_2 (sequence is synthesized)
tgtgattggatcatatagtcagccttcagattcctgggataaggattatgattcctttgttttacccctgttggaggacaaacaaccatgctatatattattcaggttagattctcagaa

SEQ ID NO: 424423 - DNA, 120 bp, Artificial Sequence
  ENSG00000151239_3 (sequence is synthesized)
tgcccagggatatgaatggatattcattgcatggtctccagatcattctcatgttcgtcaaaaaatgttgtatgcagcaacaagagcaactctgaagaaggaatttggaggtggccacat

SEQ ID NO: 424424 - DNA, 120 bp, Artificial Sequence
  ENSG00000151239_4 (sequence is synthesized)
taaagatgaagtatttggaacagtaaaggaagatgtatcattacatggatataaaaaatacttgctgtcacaatcttcccctgccccactgactgcagctgaggaagaactacgacagat

SEQ ID NO: 424425 - DNA, 120 bp, Artificial Sequence
  ENSG00000151239_5 (sequence is synthesized)
taaaatcaatgaggtacagactgacgtgggtgtggacactaagcatcaaacactacaaggagtagcatttcccatttctcgagaagcctttcaggctttggaaaaattgaataatagaca

SEQ ID NO: 424426 - DNA, 120 bp, Artificial Sequence
  ENSG00000151239_6 (sequence is synthesized)
gctcaactatgtgcagttggaaatagatataaaaaatgaaattataattttggccaacacaacaaatacagaactgaaagatttgccaaagaggattcccaaggattcagctcgttacca

SEQ ID NO: 424427 - DNA, 120 bp, Artificial Sequence
  ENSG00000151239_7 (sequence is synthesized)
tttctttctgtataaacattcccatgaaggagactatttagagtccatagtttttatttattcaatgcctggatacacatgcagtataagagagcggatgctgtattctagctgcaagag

SEQ ID NO: 424428 - DNA, 120 bp, Artificial Sequence
  ENSG00000151239_8 (sequence is synthesized)
ccgtctgctagaaattgtagaaagacaactacaaatggatgtaattagaaagatcgagatagacaatggggatgagttgactgcagacttcctttatgaagaagtacatcccaagcagca

SEQ ID NO: 424429 - DNA, 120 bp, Artificial Sequence
  ENSG00000151239_9 (sequence is synthesized)
tgcacacaagcaaagttttgcaaaaccaaaaggtcctgcaggaaaaagaggaattcgaagactaattaggggcccagcggaaactgaagctactactgattaaagtcatcacattaaaca

SEQ ID NO: 424430 - DNA, 120 bp, Artificial Sequence
  ENSG00000151239_10 (sequence is synthesized)
ttgtaatactagttttttaaaagtccagcttttagtacaggagaactgaaatcattccatgttgatataaagtagggaaaaaaattgtactttttggaaaatagcacttttcacttctgt

SEQ ID NO: 424431 - DNA, 120 bp, Artificial Sequence
  ENSG00000151239_11 (sequence is synthesized)
gtgtttttaaaattaatgttatagaagactcatgatttctatttttgagttaaagctagaaaagggttcaacataatgtttaattttgtcacactgttttcatagcgttgattccacact

SEQ ID NO: 424432 - DNA, 120 bp, Artificial Sequence
  ENSG00000151239_12 (sequence is synthesized)
gtctgatgtctcaaagggtaaacttactactttcttgtgggacagaaagaccttaaaatattcatattacttaatgaatatgttaaggaccaggctagagtattttctaagctggaaact

SEQ ID NO: 424433 - DNA, 120 bp, Artificial Sequence
  ENSG00000151239_13 (sequence is synthesized)
tagtgtgccttggaaaaggccgcaagttgcttactccgagtagctgtgctagctctgtcagactgtaggatcatgtctgcaacttttagaaatagtgctttatattgcagcagtctttta

SEQ ID NO: 424434 - DNA, 120 bp, Artificial Sequence
  ENSG00000151239_14 (sequence is synthesized)
tatttgacttttttttaatagcattaaaattgcagatcagctcactctgaaactttaagggtaccagatattttctatactgcaggatttctgatgacattgaaagactttaaacagcct

SEQ ID NO: 424435 - DNA, 120 bp, Artificial Sequence
  ENSG00000151239_15 (sequence is synthesized)
tagtaaattatctttctaatgctctgtgaggccaaacatttatgttcagattgaaatttaaattaatatcattcaaaaggaaacaaaaaatgttgagttttaaaaatcaggattgacttt

SEQ ID NO: 424436 - DNA, 120 bp, Artificial Sequence
  ENSG00000151239_16 (sequence is synthesized)
tttctccaaaaccatacatttatgggcaaattgtgttctttatcacttccgagcaaatactcagatttaaaattactttaaagtcctggtacttaacaggctaacgtagataaacacctt

SEQ ID NO: 424437 - DNA, 120 bp, Artificial Sequence
  ENSG00000151239_17 (sequence is synthesized)
aataatctcagttaatactgtatttcaaaacacatttaactgttttctaatgctttgcattatcagttacaacctagagagattttgagcctcatatttctttgatacttgaaatagagg

SEQ ID NO: 424438 - DNA, 120 bp, Artificial Sequence
  ENSG00000151239_18 (sequence is synthesized)
gagctagaacacttaatgtttaatctgttaaacctgctgcaagagccataactttgaggcattttctaaatgaactgtggggatccaggatttgtaatttcttgatctaaactttatgct

SEQ ID NO: 424439 - DNA, 120 bp, Artificial Sequence
  ENSG00000151239_19 (sequence is synthesized)
gcataaatcacttatcggaaatgcacatttcatagtgtgaagcactcatttctaaaccttattatctaaggtaatatatgcacctttcagaaatttgtgttcgagtaagtaaagcatatt

SEQ ID NO: 424440 - DNA, 120 bp, Artificial Sequence
  ENSG00000151239_20 (sequence is synthesized)
agaataattgtgggttgacagatttttaaaatagaatttagagtatttggggttttgtttgtttacaaataatcagactataatatttaaacatgcaaaataactgacaataatgttgca

SEQ ID NO: 424441 - DNA, 120 bp, Artificial Sequence
  ENSG00000151239_21 (sequence is synthesized)
cttgtttactaaagatataagttgttccatgggtgtacacgtagacagacacacatacacccaaattattgcattaagaatcctggagcagaccatagctgaagctgttattttcagtca

SEQ ID NO: 424442 - DNA, 120 bp, Artificial Sequence
  ENSG00000151239_22 (sequence is synthesized)
ggaagactacctgtcatgaaggtataaaataatttagaagtgaatgtttttctgtaccatctatgtgcaattatactctaaattccactacactacattaaagtaaatggacattccaga

SEQ ID NO: 424443 - DNA, 120 bp, Artificial Sequence
  ENSG00000151239_23 (sequence is synthesized)
atatagatgtgattatagtcttaaactaattattattaaaccaatgattgctgaaaatcagtgatgcatttgttatagagtataactcatcgtttacagtatgttttagttggcagtatc

SEQ ID NO: 424444 - DNA, 120 bp, Artificial Sequence
  ENSG00000151239_24 (sequence is synthesized)
atacctagatggtgaataacatattcccagtaaatttatatagcagtgaagaattacatgccttctggtggacattttataagtgcattttatatcacaataaaaattttttctctttaa

SEQ ID NO: 424445 - DNA, 120 bp, Artificial Sequence
  ENSG00000151239_25 (sequence is synthesized)
acttcctggggccgccggccggggccgctggctgcactcagcgccggagccgggagctagcggccgccgccatgtcccaccagaccggcatccaagattgatccgaaattcgggggagcg

SEQ ID NO: 424446 - DNA, 120 bp, Artificial Sequence
  ENSG00000151239_26 (sequence is synthesized)
aaggaaattggctttcgaggcggcctggttgaagggggcgtgccttccaccgtccccgacagtcgcccaactttcccccttttggtcacgtagggaagagctgggacagtggaggcgact

SEQ ID NO: 424447 - DNA, 120 bp, Artificial Sequence
  ENSG00000151239_27 (sequence is synthesized)
ggctgcactcagcgccggagccgggagctagcggccgccgccatgtcccaccagaccggcatccaagggaagagctgggacagtggaggcgactggggcttcagtacgctgtcgagaacc

SEQ ID NO: 424448 - DNA, 120 bp, Artificial Sequence
  ENSG00000151239_28 (sequence is synthesized)
ggggccgctggctgcactcagcgccggagccgggagctagcggccgccgccatgtcccaccagaccggcatccaagatactccccaagggaaactgatctgtatggttgcatgtaatgcg

SEQ ID NO: 424449 - DNA, 120 bp, Artificial Sequence
  ENSG00000151239_29 (sequence is synthesized)
agctagcggccgccgccatgtcccaccagaccggcatccaaggtaacagcgcccggcgcgactcgcagggaaggggcttccgggagagccgggagagccgggagggctgcaggaccggca

SEQ ID NO: 424450 - DNA, 120 bp, Artificial Sequence
  ENSG00000151239_30 (sequence is synthesized)
tggagtcgggccgggagctccggaagtcggtctcgcggggcgagccgggcctcggcgcctctccgcgctcctgcttcccgggcgctgccggcctgcgtcctcctccagcccggtccctgc

SEQ ID NO: 424451 - DNA, 120 bp, Artificial Sequence
  ENSG00000151239_31 (sequence is synthesized)
ggccgccgccatgtcccaccagaccggcatccaagcaagtgaagatgttaaagagatctttgccagagccagaaatggaaagtacagacttctgaaaatatctattgaaaatggttagtt

SEQ ID NO: 424452 - DNA, 120 bp, Artificial Sequence
  ENSG00000151239_32 (sequence is synthesized)
aagcaagttcaaatcttacggtaacttggattcctcatattttgtgcaggtccctatgggcccctaatttcattctgaattatgtgactatcagggaaacagaaagatgttttttgatgt

SEQ ID NO: 424453 - DNA, 120 bp, Artificial Sequence
  ENSG00000151239_33 (sequence is synthesized)
gacttcttcctcttttactttttgtgtctcagtttctgcaccacagtccatttctaatgtcagtgcttccatctctggaatggaaatcactaaacaggtgattatcaaaaaaaaaaaata

SEQ ID NO: 424454 - DNA, 120 bp, Artificial Sequence
  ENSG00000151240_0 (sequence is synthesized)
ctcggtgcggttccgccgggcgcgaggagccgccgagacctccgcctgcgaacaaagaggaggccgtgcggggcgcggcgcccgcggagcatggcggaccgcagcctggagggcatggcg

SEQ ID NO: 424455 - DNA, 120 bp, Artificial Sequence
  ENSG00000151240_1 (sequence is synthesized)
ctgcccctggaggtgcgggcgcgcctggccgagctggagctggagctgtcggaaggtgacatcacacaaaaaggatatgaaaagaagaggtcaaagttaattggagcctaccttccgcag

SEQ ID NO: 424456 - DNA, 120 bp, Artificial Sequence
  ENSG00000151240_2 (sequence is synthesized)
cctccgagggtggaccaagctttgccgcaagaacgccgggctcctgtcactccttcctccgcctctcgctaccaccgccgacggtcttcagggtcacgagatgagcgctatcggtcagac

SEQ ID NO: 424457 - DNA, 120 bp, Artificial Sequence
  ENSG00000151240_3 (sequence is synthesized)
gtccacacggaagctgtccaggcggctctggccaaacacaaagagcggaagatggcagtgcctatgccttccaaacgcaggtccctggtcgtgcagacctcgatggacgcctacacccct

SEQ ID NO: 424458 - DNA, 120 bp, Artificial Sequence
  ENSG00000151240_4 (sequence is synthesized)
ccagatacctcttctggctcagaagatgaaggctcagtgcagggggactcccagggcacccccacctccagccagggcagcatcaatatggagcactggatcagccaggccatccacggc

SEQ ID NO: 424459 - DNA, 120 bp, Artificial Sequence
  ENSG00000151240_5 (sequence is synthesized)
tccaccacgtccaccacctcctcgtcctctacgcagagcgggggcagcggggctgcccacaggctggcggacgtcatggctcagacccacatagaaaatcattctgcacctcctgacgta

SEQ ID NO: 424460 - DNA, 120 bp, Artificial Sequence
  ENSG00000151240_6 (sequence is synthesized)
accacgtacacctcagagcactcgatacaggtggagagaccgcagggttccacggggtcccggacagcgcccaagtacggcaacgccgagctcatggagaccggggatggagtaccagta

SEQ ID NO: 424461 - DNA, 120 bp, Artificial Sequence
  ENSG00000151240_7 (sequence is synthesized)
agtagccgggtgtcagcaaaaatccagcagcttgtcaataccctcaaacgaccgaaacgaccacctttacgagaattctttgtcgatgactttgaagaattattagaagttcaacaaccg

SEQ ID NO: 424462 - DNA, 120 bp, Artificial Sequence
  ENSG00000151240_8 (sequence is synthesized)
gatccgaaccaaccaaagccggagggggcccagatgctggccatgcgcggagagcagctgggcgtggtcacgaactggccgccgtcgctggaggccgcactgcagaggtggggcaccatc

SEQ ID NO: 424463 - DNA, 120 bp, Artificial Sequence
  ENSG00000151240_9 (sequence is synthesized)
tcgcccaaggcgccctgcctgaccaccatggacaccaacgggaagcccctctacatcctcacttacggcaagctgtggacaagaagtatgaaggtcgcttacagcattctacacaaatta

SEQ ID NO: 424464 - DNA, 120 bp, Artificial Sequence
  ENSG00000151240_10 (sequence is synthesized)
ggcacaaagcaggaacccatggtccggcctggagatagggtggcactggtgttccccaacaatgatccggctgccttcatggcggctttctacggctgcctgctggccgaggtggtcccc

SEQ ID NO: 424465 - DNA, 120 bp, Artificial Sequence
  ENSG00000151240_11 (sequence is synthesized)
gtgcccatcgaggtgccgctcaccaggaaggacgcagggagccagcagataggtttcttgcttggaagctgtggagttactgtagccttgactagtgacgcctgccataaaggacttcca

SEQ ID NO: 424466 - DNA, 120 bp, Artificial Sequence
  ENSG00000151240_12 (sequence is synthesized)
aaaagcccaacgggagagatcccacagtttaaaggttggccaaagctgctgtggtttgtcacagagtctaaacatctctccaaaccgccccgagactggttcccacacattaaagatgcc

SEQ ID NO: 424467 - DNA, 120 bp, Artificial Sequence
  ENSG00000151240_13 (sequence is synthesized)
aataacgacactgcgtatattgagtacaagacgtgtaaggatggcagtgtgctgggtgtgacggtgacgaggactgcgctgctgacacactgccaggccctgacgcaggcgtgtggctac

SEQ ID NO: 424468 - DNA, 120 bp, Artificial Sequence
  ENSG00000151240_14 (sequence is synthesized)
acggaagctgaaaccattgtgaatgtgctggatttcaagaaggacgtcgggctctggcatggcatcctgacaagcgtcatgaacatgatgcatgtgatcagcatcccgtactcgctgatg

SEQ ID NO: 424469 - DNA, 120 bp, Artificial Sequence
  ENSG00000151240_15 (sequence is synthesized)
aaggtgaaccctctctcctggatccagaaggtctgccagtacaaagcaaaagtggcgtgtgtgaaatcgagggatatgcattgggcattagtagcacacagagatcagagagacatcaac

SEQ ID NO: 424470 - DNA, 120 bp, Artificial Sequence
  ENSG00000151240_16 (sequence is synthesized)
ctctcctctctgcgaatgctgatagtggcggacggcgcgaacccctggtctatttcttcttgcgatgcatttctcaatgtcttccaaagtaaaggccttcgacaggaggtcatctgtcct

SEQ ID NO: 424471 - DNA, 120 bp, Artificial Sequence
  ENSG00000151240_17 (sequence is synthesized)
tgtgccagctcgccagaggccctcactgtggccatccggaggcccacggatgacagtaaccagcccccgggccggggtgtcctctccatgcatggactgacctatggggtcattcgtgtg

SEQ ID NO: 424472 - DNA, 120 bp, Artificial Sequence
  ENSG00000151240_18 (sequence is synthesized)
gactcggaagagaagctgtccgtgctcaccgtgcaggatgtcggcctcgtgatgcctggagccatcatgtgttcagtgaagccagacggggttcctcagctgtgcagaacggatgagatc

SEQ ID NO: 424473 - DNA, 120 bp, Artificial Sequence
  ENSG00000151240_19 (sequence is synthesized)
ggggagctgtgtgtgtgtgcagttgcgacgggcacgtcctactatggcctctctggcatgaccaagaacacctttgaggtgtttcccatgacaagctccggggctccgatcagtgaatac

SEQ ID NO: 424474 - DNA, 120 bp, Artificial Sequence
  ENSG00000151240_20 (sequence is synthesized)
ccattcataaggacaggcttgctggggttcgtgggtcccggaggcctcgtcttcgtggtgggcaagatggatggcctcatggtggtcagcgggcgcaggcacaacgccgacgacatcgtg

SEQ ID NO: 424475 - DNA, 120 bp, Artificial Sequence
  ENSG00000151240_21 (sequence is synthesized)
gccactgcgctggccgtagaacccatgaagtttgtctaccggggaaggatagccgtgttctcggtgaccgtgctgcacgacgagaggatcgtgatcgtggctgagcagaggcctgactcc

SEQ ID NO: 424476 - DNA, 120 bp, Artificial Sequence
  ENSG00000151240_22 (sequence is synthesized)
acggaagaggacagtttccagtggatgagccgtgtgctgcaggcgattgacagtatacatcaagttggagtttattgcctggccttggtgccagcaaacaccctccccaaaaccccgctt

SEQ ID NO: 424477 - DNA, 120 bp, Artificial Sequence
  ENSG00000151240_23 (sequence is synthesized)
ggtgggatccatttatcagaaacaaaacagctttttctggagggctctctgcacccctgcaatgtcctaatgtgcccccacacctgcgtcacaaacttgcctaagcctcgacagaagcag

SEQ ID NO: 424478 - DNA, 120 bp, Artificial Sequence
  ENSG00000151240_24 (sequence is synthesized)
ccagaaatcggccctgcctctgtgatggtggggaacctggtctctgggaagagaatcgcccaggccagtggcagagacctgggtcagatcgaagataacgaccaggcacgcaagttcctg

SEQ ID NO: 424479 - DNA, 120 bp, Artificial Sequence
  ENSG00000151240_25 (sequence is synthesized)
ttcctctcagaggtcttgcagtggagagcacagaccaccccggaccacatcctctacacgctgctcaactgtcggggtgcgatagcgaactcgctgacctgcgtgcagctgcacaagaga

SEQ ID NO: 424480 - DNA, 120 bp, Artificial Sequence
  ENSG00000151240_26 (sequence is synthesized)
gctgagaagatcgccgtgatgctgatggagaggggccaccttcaggacggcgaccacgtggccttggtctaccccccaggaatagacctgatagcagcgttttatggttgcctgtacgca

SEQ ID NO: 424481 - DNA, 120 bp, Artificial Sequence
  ENSG00000151240_27 (sequence is synthesized)
ggctgtgtgccaataaccgtccgtcccccgcacccacagaacatcgcgacgacgttgcctaccgtcaagatgattgtggaggtgagtcgctctgcctgtctgatgacgacacagctgatc

SEQ ID NO: 424482 - DNA, 120 bp, Artificial Sequence
  ENSG00000151240_28 (sequence is synthesized)
tgtaagttgctgcggtccagggaggcggcggcggctgtggacgtcaggacgtggcccctcatcctggacacagatgatttgccaaagaagcggcctgcccagatctgcaaaccttgcaac

SEQ ID NO: 424483 - DNA, 120 bp, Artificial Sequence
  ENSG00000151240_29 (sequence is synthesized)
ccagacactcttgcatatctcgacttcagcgtgtccacaactgggatgctagctggcgtaaagatgtctcacgcagccaccagtgccttctgccgttccattaagctgcagtgtgaactt

SEQ ID NO: 424484 - DNA, 120 bp, Artificial Sequence
  ENSG00000151240_30 (sequence is synthesized)
tacccctctagagaagtggccatctgcctggacccttactgtggactgggatttgtcctctggtgcctctgcagtgtgtattctgggcaccagtccatcctgatcccgccctctgagctg

SEQ ID NO: 424485 - DNA, 120 bp, Artificial Sequence
  ENSG00000151240_31 (sequence is synthesized)
gaaaccaaccccgccttgtggcttcttgccgtgagtcagtacaaagtccgagacacgttttgctcctactccgtgatggagctgtgcaccaaggggctgggctcgcaaacagagtccctc

SEQ ID NO: 424486 - DNA, 120 bp, Artificial Sequence
  ENSG00000151240_32 (sequence is synthesized)
tctcaaagctgtttaaggacctgggccttcacccgcgggccgtcagcacctcgttcggttgcagggtgaacctggcgatttgcttgcagggaacctcaggacctgacccaaccactgtct

SEQ ID NO: 424487 - DNA, 120 bp, Artificial Sequence
  ENSG00000151240_33 (sequence is synthesized)
acgtggacatgagagccctgagacacgacagagtccgcttagtggaaagaggatcccctcatagtctgcccctgatggaatcgggaaagatacttccaggggttcggattataattgcca

SEQ ID NO: 424488 - DNA, 120 bp, Artificial Sequence
  ENSG00000151240_34 (sequence is synthesized)
acccagaaacaaaaggaccgctgggggactcacaccttggagagatttgggttcacagtgcccacaatgccagcggttatttcactatttacggagacgaatccctccagtcagatcact

SEQ ID NO: 424489 - DNA, 120 bp, Artificial Sequence
  ENSG00000151240_35 (sequence is synthesized)
tcaactcaagactaagttttggagacacccagaccatctgggcacgcacaggctacttggggttcctgcggagaactgagctcacagatgcaaatggagagcgccatgatgccctctacg

SEQ ID NO: 424490 - DNA, 120 bp, Artificial Sequence
  ENSG00000151240_36 (sequence is synthesized)
tggtaggggcactggacgaagccatggagctgcggggcatgcggtaccacccaatcgacattgagacctcggtcatcagagcccataaaagcgttacggaatgtgctgtgtttacctgga

SEQ ID NO: 424491 - DNA, 120 bp, Artificial Sequence
  ENSG00000151240_37 (sequence is synthesized)
caaatttgttggtggttgtggttgagctggatgggtcggaacaagaagccttggacctggttcccttggtgaccaacgtggtcctggaggagcactacctgatcgtcggagtggtggtcg

SEQ ID NO: 424492 - DNA, 120 bp, Artificial Sequence
  ENSG00000151240_38 (sequence is synthesized)
tggtggacatcggcgtcatccccatcaactcccgtggggagaagcagcgcatgcacctgcgagacgggtttttggcagaccagctagaccccatctatgtggcctacaacatgtagtctc

SEQ ID NO: 424493 - DNA, 120 bp, Artificial Sequence
  ENSG00000151240_39 (sequence is synthesized)
gtctcttggcttccatggacttttctagagatgtagacattgttctccgtgtccactgaagcgtgcagacacagggcaacactcaccagaatacagccatttgtggtgagagtggaggag

SEQ ID NO: 424494 - DNA, 120 bp, Artificial Sequence
  ENSG00000151240_40 (sequence is synthesized)
gaagaggaggaggaagaggacttctcacagcagccacgattggcatgggggtgaaatgtgaatttaccactgaatttcgctcagaaggactttggattactgccttcagtttgttggaaa

SEQ ID NO: 424495 - DNA, 120 bp, Artificial Sequence
  ENSG00000151240_41 (sequence is synthesized)
agcccatttcaaaactttcttttcttttctttcttttttaattattggataataagtgctttcttcgtaaatgtggtattttgttaagccgaaatagcaattaaaaaaatatcctgccct

SEQ ID NO: 424496 - DNA, 120 bp, Artificial Sequence
  ENSG00000151240_42 (sequence is synthesized)
ccagatgggttcttttaaacaatttatgtagtgtgacaaagaattgttttctctgttttaatgtgtcatgaaatcttaatgacatggatctgttactaatttaagccattgctagatctc

SEQ ID NO: 424497 - DNA, 120 bp, Artificial Sequence
  ENSG00000151240_43 (sequence is synthesized)
atccttttaggaaagtttgaggtacgagaaaaccttccaaatagcaccttccaattagataatagcagctttctttgtcagaaatgtgctgaagaaacaaaggctggtatacggccttcg

SEQ ID NO: 424498 - DNA, 120 bp, Artificial Sequence
  ENSG00000151240_44 (sequence is synthesized)
aagttagtatagaatgagaagaaattataaataaggtgtatttcggcaattatcttgcaaatatctttgtactaaactaaaaagataaaataagttaacttcctcaatatgtaattatgt

SEQ ID NO: 424499 - DNA, 120 bp, Artificial Sequence
  ENSG00000151240_45 (sequence is synthesized)
acaaaacgtttaatttattttgatctctttagaactataaaagagaaaaacattcaagaatattaaagtcttgtaatgtttgctaatataaaaaagtgttgtattatcttgcgtggatag

SEQ ID NO: 424500 - DNA, 120 bp, Artificial Sequence
  ENSG00000151240_46 (sequence is synthesized)
tatcacaacaaatatatatatatgaaatataaattcactaatgaacaaaggagattttaaagtttaagatgcagaacttgtcacttgcatggtgtgccccccgtactcacatacactctg

SEQ ID NO: 424501 - DNA, 120 bp, Artificial Sequence
  ENSG00000151240_47 (sequence is synthesized)
ctgttgccagcagtcgcagaccgcaggagccctgtctaaaagtttcttctagaaccagagaccagcaagtgaaattattgccatctcaaggatggcaaaagaattcaaagctcaatgtgc

SEQ ID NO: 424502 - DNA, 120 bp, Artificial Sequence
  ENSG00000151240_48 (sequence is synthesized)
actatttttttctttgctgtgggacaacagtgaatgtgtttatgccagcgtgtgctgatgatactgaggggctttaggttggcaaatagcactgttttcttagctgcaagaattcattgc

SEQ ID NO: 424503 - DNA, 120 bp, Artificial Sequence
  ENSG00000151240_49 (sequence is synthesized)
acaatgtttttcatcatttttgttaatgtcatctttttttggtccttgctacgaaaaggaatgcgattctgtggtcattcgcactgggttgcattgattccccctctgatggccaatgtg

SEQ ID NO: 424504 - DNA, 120 bp, Artificial Sequence
  ENSG00000151240_50 (sequence is synthesized)
gagtggacaaagtgtccggaactcacatcggtgatcgtcccctcgtcttaagacccagcccgctctgtgtgagcctctggggctccctcgctcagtgagcacagttccccgggggttcat

SEQ ID NO: 424505 - DNA, 120 bp, Artificial Sequence
  ENSG00000151240_51 (sequence is synthesized)
gccagagctccggctgaagcaagaagtcctccagctgcgtcgtttgccgcctgtggacgagtgcgccccagtttctgccctggcagctcctggccacaccttctcagagctcacctgtgc

SEQ ID NO: 424506 - DNA, 120 bp, Artificial Sequence
  ENSG00000151240_52 (sequence is synthesized)
acttctaaattgaattggcccacggtgtccaaccaagaaggagcatctgcactccgagaaagatgtgttctgtaactgccccagtgtgaccccgcagtggctctcggtgctagatatgca

SEQ ID NO: 424507 - DNA, 120 bp, Artificial Sequence
  ENSG00000151240_53 (sequence is synthesized)
tgactaagattgatgctgggcaaaatgtagatgatctttcattatgttgtgggcagcgtctttctctgcctttgctatatgcagtcagcagtaagccttttgctaaaagagttttgtttg

SEQ ID NO: 424508 - DNA, 120 bp, Artificial Sequence
  ENSG00000151240_54 (sequence is synthesized)
acttctgagatccaaggctgattgttgttaaaaaaaaaaaaaaaaaaaaagtggcacatttaaaaaaatgtgtctgcatatgtggtgcatccttccatctccacaaaccatttgattctt

SEQ ID NO: 424509 - DNA, 120 bp, Artificial Sequence
  ENSG00000151240_55 (sequence is synthesized)
gaaatattgtttgacctcattgctgtgtgtgaatatttctccacatgcttcagatgcacattcctagtctctgcttcctaaggggggaaccaccacacattggggggaaaaaagacattt

SEQ ID NO: 424510 - DNA, 120 bp, Artificial Sequence
  ENSG00000151240_56 (sequence is synthesized)
tcctacacccacccaccttgttgaaagggaggtaggtttggggcttcaggccaggcactgactatgaaacattagctgcagtgtgcaggacagctttgaggtccagctgaagtcaggaag

SEQ ID NO: 424511 - DNA, 120 bp, Artificial Sequence
  ENSG00000151240_57 (sequence is synthesized)
caaaacaaatgtagatgtcacttcaaacataatttcaactgtcaccagatcaactctacattcaaggagtgtggacgctgcagtgcagttgtgagggcagttagcagccgcctcttctgc

SEQ ID NO: 424512 - DNA, 120 bp, Artificial Sequence
  ENSG00000151240_58 (sequence is synthesized)
atcctgtcaactctgattagttagagtttaggctcaaaagagttggtggactgagattgaaatttggttgtgcaagagaaaggaaaggagacacttagtaccaccagtttcagcaataaa

SEQ ID NO: 424513 - DNA, 120 bp, Artificial Sequence
  ENSG00000151240_59 (sequence is synthesized)
gaagggtcattctgtattcaaaattgtactgtagataaatcattcatgagattgtaaaaaatgtttgtcttgtgaccttgtgcttttgaagtcagacaaaaccgtgtaatcaacttgcac

SEQ ID NO: 424514 - DNA, 120 bp, Artificial Sequence
  ENSG00000151240_60 (sequence is synthesized)
aaaaagagggtacacagtgaacatataaacacagacctaatcaaacaggagcagattcctcatggtgcttgtttattatatatatttaatcctgcttgacactttacccaagggagatgg

SEQ ID NO: 424515 - DNA, 120 bp, Artificial Sequence
  ENSG00000151240_61 (sequence is synthesized)
tcccttttatcagttgaatgttagcagcgttatttcagagtgtggtgactggttagagaaactcatgtactcaaccagccacagtttcaaacaaaatttttatgtgcaaaggacagcaac

SEQ ID NO: 424516 - DNA, 120 bp, Artificial Sequence
  ENSG00000151240_62 (sequence is synthesized)
cttcttgtatgttaaaccaccagtacgctttgtacatctgtgataacgcctgttttatattcaaatgaacaaataaaagcttttatttttgttgctctgaaaatagcagtttcttaattg

SEQ ID NO: 424517 - DNA, 120 bp, Artificial Sequence
  ENSG00000151240_63 (sequence is synthesized)
gtcccctggaaagatgtctgggacagctttaatcccgggaaggaagtgactcctacagggaaatgtatctgactctgtttacataatttgttgcattacttagtacagataatcatactt

SEQ ID NO: 424518 - DNA, 120 bp, Artificial Sequence
  ENSG00000151240_64 (sequence is synthesized)
tgaaaaatgtttaaattttgatgtgggcatttattgctaaaaataattcctatggcaacaaatgttttgtgaaatgttttttttaattcttttaaatatatctaaatatatttgttcaca

SEQ ID NO: 424519 - DNA, 120 bp, Artificial Sequence
  ENSG00000151240_65 (sequence is synthesized)
ccaccacgcccagccccaaaatgttttaagatggtttacaaggaaggagtacgctcagtaggagaagataaaatacgtgaaaaaagaaccaaaacatggagatgaaagaaaaacagcgca

SEQ ID NO: 424520 - DNA, 120 bp, Artificial Sequence
  ENSG00000151240_66 (sequence is synthesized)
ggaaagggacagaatgaagaacagagttggcgtgctggtgttttccacaaggcttctgaagcgtgccaccgtccttacctcggcaccagggcggggcctgacacgtggtggatattgaat

SEQ ID NO: 424521 - DNA, 120 bp, Artificial Sequence
  ENSG00000151240_67 (sequence is synthesized)
gaatgtgcgccgtgggagtgttgagcacggttctgtattcttaataggaaatggcaatatgttcttgtgcagaagacaattctgtcaatatgaccgctaaatcaaaattcagtattctaa

SEQ ID NO: 424522 - DNA, 120 bp, Artificial Sequence
  ENSG00000151240_68 (sequence is synthesized)
cctccgacagcgaatggagctgccgtggttcggtgtagactgcagcacagtgaaggagcgccgaggagaacattccgctctgcccacatcggggtgtgcgacgtccgagaagctgcggct

SEQ ID NO: 424523 - DNA, 120 bp, Artificial Sequence
  ENSG00000151247_0 (sequence is synthesized)
aggcacaggcagcctgcatacactccttttcctggtgtcaacattatttaaaagcatgggaaatagtaatgagacagtgtcttcttcattagaaccttaggagtctactagatttcttca

SEQ ID NO: 424524 - DNA, 120 bp, Artificial Sequence
  ENSG00000151247_1 (sequence is synthesized)
tctctatttgttgttattagtagccaaactgtgcaaaaaacacggtcttgagaaatgacagcacagtatcttagagggaaaggaaatgtaggatgccagtgtggggacaaatttctgatt

SEQ ID NO: 424525 - DNA, 120 bp, Artificial Sequence
  ENSG00000151247_2 (sequence is synthesized)
gccagtgattgttgtgagcataacaataatttcatgaacattaaagcctctattgagggcagctgcagttgtaaaggaaaaaaaatggtcctgaacatttaaaactacactggtgtacat

SEQ ID NO: 424526 - DNA, 120 bp, Artificial Sequence
  ENSG00000151247_3 (sequence is synthesized)
cataatcaaacaaagtaaacagaaaaaaatttaaactttgctaaaaaaaaaaagcagaagcacttgatctttaggaaggcacgcagttgcttattatgaatcatttctagagtccgatgc

SEQ ID NO: 424527 - DNA, 120 bp, Artificial Sequence
  ENSG00000151247_4 (sequence is synthesized)
attttcaaagccggttacagtcattacgaagcacacccttgtgaggtaagtgtatcatcacctttggttcataaataaaaaagctgagacgccgagcgattaagtcactcgcctaaggag

SEQ ID NO: 424528 - DNA, 120 bp, Artificial Sequence
  ENSG00000151247_5 (sequence is synthesized)
aatgagtcaacgtcaagagtcatagttgacccggcctaaagactccagaccatcagtccagggcttagtcagcggggcccggagtggcttccctggctggcatctggacttaggctattt

SEQ ID NO: 424529 - DNA, 120 bp, Artificial Sequence
  ENSG00000151247_6 (sequence is synthesized)
ccgtgcacgtaaaagcggaatattggaacggttgcacagaacttccaaataatttttaccgccacgcaagatttagccctgaggtcttaatctcaggatttgggacagtaaaagctgtcg

SEQ ID NO: 424530 - DNA, 120 bp, Artificial Sequence
  ENSG00000151247_7 (sequence is synthesized)
tccctccccctcgtccagccggtggcaagcgggtactgcgggcggttccgtccgtcccctttcgcagaaatggcaacgaatgaccaccagcattagctgagccaggggacgtgggagggt

SEQ ID NO: 424531 - DNA, 120 bp, Artificial Sequence
  ENSG00000151247_8 (sequence is synthesized)
tgattgcctaaacgactctgcatcgccgcctctttttgaaactaagagaaaatggtgggagatcaaaagaaaactaaataaacacacaggcaacttgtcctgggacctcaactaagcaaa

SEQ ID NO: 424532 - DNA, 120 bp, Artificial Sequence
  ENSG00000151247_9 (sequence is synthesized)
tgaagccttattgtgtgtgctgagcctgcagttcccaaccttccggggaagatgggaggacagggcgacaaagggcacagtaggcttgcctggcagtaagtgtgaccgcagctatccagg

SEQ ID NO: 424533 - DNA, 120 bp, Artificial Sequence
  ENSG00000151247_10 (sequence is synthesized)
cggaagagcagaggactgaaaccaccctccagcaagcgagtgtccgccgcgttgagaaccgcgcaccctacccatcggccacgtgaccagtcctttttaaaaaaaatttctttaccttaa

SEQ ID NO: 424534 - DNA, 120 bp, Artificial Sequence
  ENSG00000151247_11 (sequence is synthesized)
aaaaaaaaaaaaaaaaaaggtgggggagagactccacttcccagaagcctctcgttactcacgcagccgcagtcttgcgcaggtgccgccagggccaaacggacatatccgtcacgtggc

SEQ ID NO: 424535 - DNA, 120 bp, Artificial Sequence
  ENSG00000151247_12 (sequence is synthesized)
cagaagctggccaatccggtttgaatctcatttttttcctcttacccccccttctggagcggttgtgcgatcagatcgatctaagatggcgactgtcgaaccggaaaccacccctactcc

SEQ ID NO: 424536 - DNA, 120 bp, Artificial Sequence
  ENSG00000151247_13 (sequence is synthesized)
taatcccccgactacagaagaggagaaaacggaatctaatcaggaggttgctaacccagaacactatattaaacatcccctacagaacagatgggcactctggttttttaaaaatgataa

SEQ ID NO: 424537 - DNA, 120 bp, Artificial Sequence
  ENSG00000151247_14 (sequence is synthesized)
aagcaaaacttggcaagcaaacctgcggctgatctccaagtttgatactgttgaagacttttgggctctgtacaaccatatccagttgtctagtaatttaatgcctggctgtgactactc

SEQ ID NO: 424538 - DNA, 120 bp, Artificial Sequence
  ENSG00000151247_15 (sequence is synthesized)
actttttaaggatggtattgagcctatgtgggaagatgagaaaaacaaacggggaggacgatggctaattacattgaacaaacagcagagacgaagtgacctcgatcgcttttggctaga

SEQ ID NO: 424539 - DNA, 120 bp, Artificial Sequence
  ENSG00000151247_16 (sequence is synthesized)
gacacttctgtgccttattggagaatcttttgatgactacagtgatgatgtatgtggcgctgttgttaatgttagagctaaaggtgataagatagcaatatggactactgaatgtgaaaa

SEQ ID NO: 424540 - DNA, 120 bp, Artificial Sequence
  ENSG00000151247_17 (sequence is synthesized)
cagagaagctgttacacatatagggagggtatacaaggaaaggttaggacttcctccaaagatagtgattggttatcagtcccacgcagacacagctactaagagcggctccaccactaa

SEQ ID NO: 424541 - DNA, 120 bp, Artificial Sequence
  ENSG00000151247_18 (sequence is synthesized)
aaataggtttgttgtttaagaagacaccttctgagtattctcataggagactgcgtcaagcaatcgagatttgggagctgaaccaaagcctcttcaaaaagcagagtggactgcatttaa

SEQ ID NO: 424542 - DNA, 120 bp, Artificial Sequence
  ENSG00000151247_19 (sequence is synthesized)
atttgatttccatcttaatgttactcagatataagagaagtctcattcgcctttgtcttgtacttctgtgttcatttttttttttttttttggctagagtttccactatcccaatcaaag

SEQ ID NO: 424543 - DNA, 120 bp, Artificial Sequence
  ENSG00000151247_20 (sequence is synthesized)
aattacagtacacatccccagaatccataaatgtgttcctggcccactctgtaatagttcagtagaattaccattaattacatacagattttacctatccacaatagtcagaaaacaact

SEQ ID NO: 424544 - DNA, 120 bp, Artificial Sequence
  ENSG00000151247_21 (sequence is synthesized)
tggcatttctatactttacaggaaaaaaaattctgttgttccattttatgcagaagcatattttgctggtttgaaagattatgatgcatacagttttctagcaattttctttgtttcttt

SEQ ID NO: 424545 - DNA, 120 bp, Artificial Sequence
  ENSG00000151247_22 (sequence is synthesized)
ttacagcattgtctttgctgtactcttgctgatggctgctagattttaatttatttgtttccctacttgataatattagtgattctgatttcagtttttcatttgttttgcttttgtttt

SEQ ID NO: 424546 - DNA, 120 bp, Artificial Sequence
  ENSG00000151247_23 (sequence is synthesized)
tttcctcatgtaacattggtgaaggatccaggaatatgacacaaaggtggaataaacattaattttgtgcattctttggtaattttttttgttttttgtaactacaaagctttgctacaa

SEQ ID NO: 424547 - DNA, 120 bp, Artificial Sequence
  ENSG00000151247_24 (sequence is synthesized)
atttatgcatttcattcaaatcagtgatctatgtttgtgtgatttcctaaacataattgtggattataaaaaatgtaacatcataattacattcctaactagaattagtatgtctgtttt

SEQ ID NO: 424548 - DNA, 120 bp, Artificial Sequence
  ENSG00000151247_25 (sequence is synthesized)
tgtatctttatgctgtattttaacactttgtattacttaggttattttgctttggttaaaaatggctcaagtagaaaagcagtcccattcatattaagacagtgtacaaaactgtaaata

SEQ ID NO: 424549 - DNA, 120 bp, Artificial Sequence
  ENSG00000151247_26 (sequence is synthesized)
aaatgtgtacagtgaattgtcttttagacaactagatttgtccttttatttctccatctttatagaaggaatttgtacttcttattgcaaggcagtctctatattatgtcttcttttgtg

SEQ ID NO: 424550 - DNA, 120 bp, Artificial Sequence
  ENSG00000151247_27 (sequence is synthesized)
gtgtcttccatgtgaacagcataagtttggagcactagtttgattattatgtttattacaatttttaataaattgaataggtagtatcatatatatggaattaaattgatgtggctatct

SEQ ID NO: 424551 - DNA, 120 bp, Artificial Sequence
  ENSG00000151247_28 (sequence is synthesized)
ttgtttttttataaagtaaggcacagtcattcagtcttaggtaaataatgtactctcttaatatgttaatactcatgagaattgggatctgatgcatcaccatttgattggtagcaacag

SEQ ID NO: 424552 - DNA, 120 bp, Artificial Sequence
  ENSG00000151247_29 (sequence is synthesized)
tggttgtaaaacttggttgctgaattgagttgtttctatgttaagtgtcaaaatgatagtgtagggaaagtacaggtggtggggacatatgcattaagaatcttgttagtgttgcaatct

SEQ ID NO: 424553 - DNA, 120 bp, Artificial Sequence
  ENSG00000151247_30 (sequence is synthesized)
aaatagaatggaataaacaggtgttaagacatatttatagtggtaaattgttgtagtatggtattctgtaaacttgaaaacttgatctactctttgtaggtatcatttgaaagcaaactt

SEQ ID NO: 424554 - DNA, 120 bp, Artificial Sequence
  ENSG00000151247_31 (sequence is synthesized)
gaaaatgttttgtacatagtacatacttgtatagtcctgtgagatgaagtatggctatcagaccaaaggataagccaaactgtaggtagcagaatggaaattattattttgagaggaaaa

SEQ ID NO: 424555 - DNA, 120 bp, Artificial Sequence
  ENSG00000151247_32 (sequence is synthesized)
tttgtctttgaatggtgattatgacttaatcattttaaaactgataaacttgacaaaaaccctgtatgaaataaacatgaaattaatagcactgatttcattgtaaaattttaaagcagt

SEQ ID NO: 424556 - DNA, 120 bp, Artificial Sequence
  ENSG00000151247_33 (sequence is synthesized)
ttaaagggtaccacaggttatcacagtactctcaatgccacaaacacctcttgttcagtattctagaaatactgaatcagaattctgtgtttattataatctcagcatactgtacataat

SEQ ID NO: 424557 - DNA, 120 bp, Artificial Sequence
  ENSG00000151247_34 (sequence is synthesized)
atctgctagttaaacttgggtaattggttaaggtgacttactgtctatgtcaatatgtatagttttgagtacttcaagagtttacttaaaagtgatgatgttactggtatgttggcagtg

SEQ ID NO: 424558 - DNA, 120 bp, Artificial Sequence
  ENSG00000151247_35 (sequence is synthesized)
ggtgggactgaagtagtgtatctattataaattgatctattttcttaattctaagatgaagtccaattttaagcatcagcttttaggtgcaaaggaggaattaacacattaaatgtatac

SEQ ID NO: 424559 - DNA, 120 bp, Artificial Sequence
  ENSG00000151247_36 (sequence is synthesized)
agttctaaatttttgaaataactgatgtgtagcatttgattattggtattaccattttagaatcatgatgttattttaaacctttttcctggggacaagaaaggataataaattacgctg

SEQ ID NO: 424560 - DNA, 120 bp, Artificial Sequence
  ENSG00000151247_37 (sequence is synthesized)
aatcacttttggcagttgccacttaaatagtacagtgacttgcaacttttataactttatcagcatcttctctaaatacaaaattaggctatatgttattttccaacttactgttttctc

SEQ ID NO: 424561 - DNA, 120 bp, Artificial Sequence
  ENSG00000151247_38 (sequence is synthesized)
ttacaggtgtgagccaccgtacccagcccaaatagatgtattttcataatagagaattgaaataggctttaatgggtgaatagcagtttattgtaggcatgtgacatttcatttaatgaa

SEQ ID NO: 424562 - DNA, 120 bp, Artificial Sequence
  ENSG00000151247_39 (sequence is synthesized)
gcatgtgacatttcatttaatgaatttaaagtttattatcccaattctacagaaggatttaatgcatactatgcaattaaataattataacactacatagtaataatttatgtgccaggc

SEQ ID NO: 424563 - DNA, 120 bp, Artificial Sequence
  ENSG00000151247_40 (sequence is synthesized)
agtagttcagtcactttacatgcttattaacctgcagaataatcttttgagatgtaggtgctgttactgagaatttaacttttgcttgtaaattgcaaagggtggatttgaattctggaa

SEQ ID NO: 424564 - DNA, 120 bp, Artificial Sequence
  ENSG00000151247_41 (sequence is synthesized)
atttggttccagagacaataattacataacactttctccatagggtacagcctgtctaataggctatagtaaatcacctcagcttgttataggtcgggcatgcaaacatttctccatttt

SEQ ID NO: 424565 - DNA, 120 bp, Artificial Sequence
  ENSG00000151247_42 (sequence is synthesized)
actccctttggtaatgaatctagtaatagatggaaattttccctagattcactgtgttagtcagttggggaagtttggaggcaaagatacaggagtttatggggaggtagtgtacataaa

SEQ ID NO: 424566 - DNA, 120 bp, Artificial Sequence
  ENSG00000151247_43 (sequence is synthesized)
tataatcatatgctatataaggaagttttggtcagcagcagaccatatataggatggtgggccagtaacattgtaacactgtatttttactgtatcttttccatgttttgttatgtttag

SEQ ID NO: 424567 - DNA, 120 bp, Artificial Sequence
  ENSG00000151247_44 (sequence is synthesized)
atacacaaataacattatggagtattcagtatggtaacatgccatacaggtttgtagcctaggagcagtaatagactgttccctgaaacctatatttgtggtaggtttataccattcagg

SEQ ID NO: 424568 - DNA, 120 bp, Artificial Sequence
  ENSG00000151247_45 (sequence is synthesized)
tttgtgtaagtacacaacgaaatcatctaatggcccatttctcaaaacatattcccatcattaatcaatgcatggtcatgttttcgtatacattttaagcttctgtattctaatctaata

SEQ ID NO: 424569 - DNA, 120 bp, Artificial Sequence
  ENSG00000151247_46 (sequence is synthesized)
atggcaaaatattcaaactgataggcattgagattcttaaatgctaaagttgcattcaaaaggataattttaggcgttgtgacaaagcagtgttatattttaaagttagtgacaaggcta

SEQ ID NO: 424570 - DNA, 120 bp, Artificial Sequence
  ENSG00000151247_47 (sequence is synthesized)
tgcaccttttatctctaattgtttcttacagaatgtttttattattgagtagtaaaacaataaatgtcagatcctttatacaaattcaagattgacattgataaacaaaacttcagcata

SEQ ID NO: 424571 - DNA, 120 bp, Artificial Sequence
  ENSG00000151247_48 (sequence is synthesized)
tcactcaaggtcagcgtagaaattgtgtgtctggaaacttctatagtaattttatattactgtgacattagtatgtgatcacttttctagtaatgttttaaaaaaatatatcttacaggc

SEQ ID NO: 424572 - DNA, 120 bp, Artificial Sequence
  ENSG00000151247_49 (sequence is synthesized)
actttgggaggccaaggtggcaggattgcatgagtccaggagttcaacaccagtctgggcaataaagtgagaccccatcgctacaaacaaattaaaaaatatttatgtatgtgtgtaata

SEQ ID NO: 424573 - DNA, 120 bp, Artificial Sequence
  ENSG00000151247_50 (sequence is synthesized)
aaattaaaaaatatttatgtatgtgtgtaatatatataatatataacaaaacacatatgtatgtgtatatatagtatgtctggcagagtacaatttaggggttaagactggtccctcaca

SEQ ID NO: 424574 - DNA, 120 bp, Artificial Sequence
  ENSG00000151247_51 (sequence is synthesized)
tatggtgtgagaaacactgttcacaggttgctttccccattagcccagggcaactcatttgcccatcatttcctagaacaaccgggtctgttacgtctacagttttcatcttcatgcagt

SEQ ID NO: 424575 - DNA, 120 bp, Artificial Sequence
  ENSG00000151247_52 (sequence is synthesized)
tatggatttggtgtcaaaaactttggtcctgttctctaccatcttaaaataaactcttgtgtcctgctttactatgaattgcaaagtaggcattaggtagccttcctactaccatagttt

SEQ ID NO: 424576 - DNA, 120 bp, Artificial Sequence
  ENSG00000151247_53 (sequence is synthesized)
agagttcaatattcttatgaccattctactggtagaagcaaaaaatgaacttgtaggcatgtgatcacatgtgcctatggtgctgtcttttccagtacaggggaactaattttcatattt

SEQ ID NO: 424577 - DNA, 120 bp, Artificial Sequence
  ENSG00000151247_54 (sequence is synthesized)
taatcttgcagctttttgtttacttcatgcattgtgatttctcatagttttgcacagaactcacttccctaccttttctgaaacaaaagtatgtatacacacatacatatgtattgagca

SEQ ID NO: 424578 - DNA, 120 bp, Artificial Sequence
  ENSG00000151247_55 (sequence is synthesized)
cctctatttactgtgttccacgtgctgggcatatagcaagaacagaatggtctggggccctgctctaaagaagatttaaaagcaaacatatattaaaaatgcgtgagtctggccaggagc

SEQ ID NO: 424579 - DNA, 120 bp, Artificial Sequence
  ENSG00000151247_56 (sequence is synthesized)
tatattaaaaatgcgtgagtctggccaggagcagtggctcatgcctgcaaccccagcactttgggaggctgaagcgggtgaatcacctgagatcaggagttgagaccagcctggccaaca

SEQ ID NO: 424580 - DNA, 120 bp, Artificial Sequence
  ENSG00000151247_57 (sequence is synthesized)
gactccatctcaaaaaaaaaaaaaaaacgtgtctgttcataaggttctacaaatagctgttgttacagaaaataggactagggttttattactggggattatgcagtcgaggtaaatata

SEQ ID NO: 424581 - DNA, 120 bp, Artificial Sequence
  ENSG00000151247_58 (sequence is synthesized)
atgcagtcgaggtaaatataaaatgaggttgtttcttcttttttttatttgagacagagtcttgtttgccaggctggagtgcagtggcgtgctcttagctccgcctcccgggatcaaacg

SEQ ID NO: 424582 - DNA, 83 bp, Artificial Sequence
  ENSG00000151247_59 (sequence is synthesized)
gttctaaatactcttccagctctaaaacattgattctaaacagatcacattccaggaggactctagcaaaccagcatatgcaa

SEQ ID NO: 424583 - DNA, 120 bp, Artificial Sequence
  ENSG00000151247_60 (sequence is synthesized)
atcacattccaggaggactctagcaaaccagcatatgcaaattatagcttttgcaagaccgtttctacttttatattactgaactctatatgattgtccaagtaaagttttgtgtctctt

SEQ ID NO: 424584 - DNA, 120 bp, Artificial Sequence
  ENSG00000151247_61 (sequence is synthesized)
tgattatttgattgtactttaaaattttttcaccattcatttaacattttttaccatactgtagtatttttaatgcaattgtgtttgcattggtgtggctttagaggcttctccaaccac

SEQ ID NO: 424585 - DNA, 120 bp, Artificial Sequence
  ENSG00000151247_62 (sequence is synthesized)
cttcccaaaatactgatctgtgatttttttctttaatgtttggccaaacataatacatgcttattttatttttcatccctacagaaaggtagaagatgagaattctgtctcctactgttg

SEQ ID NO: 424586 - DNA, 120 bp, Artificial Sequence
  ENSG00000151247_63 (sequence is synthesized)
aagatgagaattctgtctcctactgttgtttttcaaggtgccactcaaatttcttgtacgtgtctagaaacttgtgcatacaatagaagtacactgtggctgggcatggtggctcatgcc

SEQ ID NO: 424587 - DNA, 120 bp, Artificial Sequence
  ENSG00000151247_64 (sequence is synthesized)
aaaaaaaaaaaaaaaaaaagatgtccaatatatgtaacttttttctttggacacaaaaattccattagctttgttttctcatttttacttgtcatgatgtatgtcgaacacattattttt

SEQ ID NO: 424588 - DNA, 120 bp, Artificial Sequence
  ENSG00000151247_65 (sequence is synthesized)
agtgtctggtgttccattatacagatgtctctcttgttggttgaatttttgcattcacagaccctcaagttggattcatatctttttacactaagcataaagaagacggattggggtcgg

SEQ ID NO: 424589 - DNA, 67 bp, Artificial Sequence
  ENSG00000151247_66 (sequence is synthesized)
gccaacatactgaaaccccgtctctaaaaatatgaaaaaaaaattagccaggcgtggtggtgcgcag

SEQ ID NO: 424590 - DNA, 120 bp, Artificial Sequence
  ENSG00000151247_67 (sequence is synthesized)
ttccagcctgcacgacagaggaagacgccatttcaaaaaaaaaaaaaaaaagacggattgattttcttcagcagtatcaagtggcacttaccatccacccctttaacacccaaaccattc

SEQ ID NO: 424591 - DNA, 120 bp, Artificial Sequence
  ENSG00000151247_68 (sequence is synthesized)
taatccatgtatacagaccatcatctgtttcgttattgtgttctataatgcagctttgcgagttatgcagttttggtcctcatgatatttttctgattggtttttaatgtattttgttct

SEQ ID NO: 424592 - DNA, 120 bp, Artificial Sequence
  ENSG00000151247_69 (sequence is synthesized)
aacgagccaacattgttatacatgtaatttgtttatttgctagattgtactctttcccaaagatgggctatgaactagcatctactttcattttacctatttacctgtaaacattgaaaa

SEQ ID NO: 424593 - DNA, 120 bp, Artificial Sequence
  ENSG00000151247_70 (sequence is synthesized)
aactgaatcaaatgcagtgatatcggacctagttttattgttatgccttataatgaatttaacttcacagttttctaaatgagagcatttcccaaagacatctttatggtcataaccagt

SEQ ID NO: 424594 - DNA, 84 bp, Artificial Sequence
  ENSG00000151247_71 (sequence is synthesized)
gagagcatttcccaaagacatctttatggtcataaccagtttcccttggcatttgatttatttttatttttatttatttatcag

SEQ ID NO: 424595 - DNA, 83 bp, Artificial Sequence
  ENSG00000151247_72 (sequence is synthesized)
tctggcctgatttgtttttaagagcattatttttctgctttattttgtgacttcaacatttgacacaattttgggtgaatggt

SEQ ID NO: 424596 - DNA, 120 bp, Artificial Sequence
  ENSG00000151247_73 (sequence is synthesized)
tttgtgacttcaacatttgacacaattttgggtgaatggtttgtgcatggtgcctgacatcgtgttttgatgtgtagtatatgccataggacatgtgagacaagatatgtcccaacttga

SEQ ID NO: 424597 - DNA, 120 bp, Artificial Sequence
  ENSG00000151247_74 (sequence is synthesized)
ccttgttttgtattgtttatgtcaaggtgttgagtgtattagatatactgttggggctctgtgttctagctctgccttttagataataaccatggttaaatattgcaatgtcctgcatgt

SEQ ID NO: 424598 - DNA, 120 bp, Artificial Sequence
  ENSG00000151247_75 (sequence is synthesized)
ctccacacatgggttttgtaactgagtcagaatgataagtgattagtaagcacattttttctcctttcaggaaaccactattttccttttctacatgctgttttgtaagtagtactttta

SEQ ID NO: 424599 - DNA, 120 bp, Artificial Sequence
  ENSG00000151247_76 (sequence is synthesized)
tgaaggttgtcttcaaatgttcgcatcttccatttctactgcccttgggttatccatcctgtcattttgtgccaatcacttttttttttaacttttaagttcagggatgaaagtgtagat

SEQ ID NO: 424600 - DNA, 76 bp, Artificial Sequence
  ENSG00000151247_77 (sequence is synthesized)
taaacttgtgtcatgggtgcactagttgtttttcctgatcctctccctgctcccaccctccaccctctgataggcc

SEQ ID NO: 424601 - DNA, 67 bp, Artificial Sequence
  ENSG00000151247_78 (sequence is synthesized)
tgcattagtttgctaaggataatggcctcgagctccatccaagtccctgtaaaggacatgatcttgt

SEQ ID NO: 424602 - DNA, 120 bp, Artificial Sequence
  ENSG00000151247_79 (sequence is synthesized)
tgctgcaatgaacatacatgtgcatgtctttttataatagaatgatttatattctgttgtgtatatacccagtaatgggattgctgagttgaatgctatttctgcctttaggtctttgat

SEQ ID NO: 424603 - DNA, 79 bp, Artificial Sequence
  ENSG00000151247_80 (sequence is synthesized)
aatgatttatattctgttgtgtatatacccagtaatgggattgctgagttgaatgctatttctgcctttaggtctttga

SEQ ID NO: 424604 - DNA, 120 bp, Artificial Sequence
  ENSG00000151247_81 (sequence is synthesized)
aaccttgtcagcatctattattttttgactttttagtaatagccattctgactgctcacatctattttgtaaataaagttttattgaaacatggccttacccatttgtttacatatattc

SEQ ID NO: 424605 - DNA, 120 bp, Artificial Sequence
  ENSG00000151247_82 (sequence is synthesized)
atggctgtttttgtgccacaatgtcagagttgtcttaaagtagacagagactatctggctgtaaagcctgagatatatactaactggttctttatgtaaaaagtttgctgaccacctact

SEQ ID NO: 424606 - DNA, 120 bp, Artificial Sequence
  ENSG00000151247_83 (sequence is synthesized)
ctaaacgttttgcagtgatggtagtgttggcaaaaaaccaaatagcttaccctctttaaatttcccttttacttcttacaaactcctaacaccatttacgactttgtcatcaatatggtc

SEQ ID NO: 424607 - DNA, 120 bp, Artificial Sequence
  ENSG00000151247_84 (sequence is synthesized)
aactaagcttggtttgcatggctctacttcctttcaccttccacttaggcagtgtctccaagtccactgcagtttctatttgtctcctgactgttactgtatcagttcttacctaaataa

SEQ ID NO: 424608 - DNA, 120 bp, Artificial Sequence
  ENSG00000151247_85 (sequence is synthesized)
cataacaactgatctccctactttttgcctatgccctcaaatgtgctcattgttgatctatctccctgttaggtgttctttttctcctctttagaaagcagccaaggaaaccagggttct

SEQ ID NO: 424609 - DNA, 120 bp, Artificial Sequence
  ENSG00000151247_86 (sequence is synthesized)
ctcaaagtggaaaatactggaacttatgtactgttatcataatgatagttggtgttttgaattataagaatgattccaggtggtttctaaatcatccaataaagctgtattcactctgta

SEQ ID NO: 424610 - DNA, 120 bp, Artificial Sequence
  ENSG00000151247_87 (sequence is synthesized)
tatgtggaattatttttgacagttttaaatagttggattttgtgtgtaggggtgcaggatcttgctctgttgctggggctggagtgcagtggcgcgatcatagctcactgcagcctcaaa

SEQ ID NO: 424611 - DNA, 120 bp, Artificial Sequence
  ENSG00000151247_88 (sequence is synthesized)
tgggctcaagagatgcttccatctcagcctctggtgtagcaagcactacaggagcaggccaccacgcccggataatttttaaactttttgtagagatggaatctcgcgatggttacccag

SEQ ID NO: 424612 - DNA, 120 bp, Artificial Sequence
  ENSG00000151247_89 (sequence is synthesized)
agatcgatctaagatggcgactgtcgaaccgggtgctgtgaggaaatgcatggtttgttgaaaagaactgaggactgacagccgcctcctccatgattaccctggctctctgtcccaccc

SEQ ID NO: 424613 - DNA, 120 bp, Artificial Sequence
  ENSG00000151247_90 (sequence is synthesized)
ttctcatggcgcttgggggaccatggctgatcctgtcctgagacaaattaagactcctgtggtgaagcagttggtcgagaaaaagtgatgcatgaaaaagaagcaaaacaagaaggaaag

SEQ ID NO: 424614 - DNA, 120 bp, Artificial Sequence
  ENSG00000151247_91 (sequence is synthesized)
ttgttgggtcctcatttctgcaaactgttttcagtgcaatatctggaatttcctgtaccagagattttaagatatcaaaggctgaagtgttcagaattcacggtttgtcaagtctgtaca

SEQ ID NO: 424615 - DNA, 120 bp, Artificial Sequence
  ENSG00000151247_92 (sequence is synthesized)
gagtattgcctttggcccccacccccacgggtccccgcgctccgtcttccttctgactgggggactccgcgggacggcgttcccggcgcgcactgtaccccttgccgccccttccccttc

SEQ ID NO: 424616 - DNA, 120 bp, Artificial Sequence
  ENSG00000151247_93 (sequence is synthesized)
tatattaaacatcccctacagaacaggtgaagttaccaagcattaattataggattatgaaatatatattcaatttggaaggctcttcagacaacattcgtgttgatgagaaaatgaaat

SEQ ID NO: 424617 - DNA, 120 bp, Artificial Sequence
  ENSG00000151247_94 (sequence is synthesized)
acgagtttatcttcaaggcattagagaaaatattatacaggcgtacctcattttactgtgcttcacaaatcatgccttttctataaattgaaggtttgtggaaatcctgtgtcaagcagt

SEQ ID NO: 424618 - DNA, 120 bp, Artificial Sequence
  ENSG00000151247_95 (sequence is synthesized)
tctgttgatgccatgtttccaatggcatgtgctcacttggtgtctctgtgtcacatttcggtaattctcacgatatttcaaacttttattgtatctgttatgatctgtgatcagtgatct

SEQ ID NO: 424619 - DNA, 120 bp, Artificial Sequence
  ENSG00000151247_96 (sequence is synthesized)
cttttttggaggggggctggcttattcacttaatgtccttagcttcccctcatgttttatgaagtgttagaatttccttcatcagggctttttagtattccattgtgtgtatatatacat

SEQ ID NO: 424620 - DNA, 120 bp, Artificial Sequence
  ENSG00000151247_97 (sequence is synthesized)
taattatttttgttctgtcatatgactcctgtttatagtacagtgaaacatcctaccacattataagtcagatattttaagtgattggcagttgactctcaccacagtaagctcactgtg

SEQ ID NO: 424621 - DNA, 120 bp, Artificial Sequence
  ENSG00000151247_98 (sequence is synthesized)
gtcatttcattaacctcaaaattatagaaccttacattttgtatgattgaagtttttgcaaccctcttacagcattgctatatgtatactaaacttttaaatacttatatttttagagcg

SEQ ID NO: 424622 - DNA, 120 bp, Artificial Sequence
  ENSG00000151247_99 (sequence is synthesized)
gctctgttgcccaggctggagtgcggatatttatttatatggctcatttcagcctcaccctctgggttcaagtgatcctcccacttcagcctcttaagtagctgggactacaggtgcatg

SEQ ID NO: 424623 - DNA, 72 bp, Artificial Sequence
  ENSG00000151247_100 (sequence is synthesized)
ggtgcatgccaccatgcccagctaattttctaatttttttccagagatgggatcttgctatgttgcccaggt

SEQ ID NO: 424624 - DNA, 90 bp, Artificial Sequence
  ENSG00000151247_101 (sequence is synthesized)
tgcctgtcccactaaactttttagattagtgaagcaaataataaaattgttgtgtactaccatttgacctacatgttgtgatattaactg

SEQ ID NO: 424625 - DNA, 120 bp, Artificial Sequence
  ENSG00000151276_0 (sequence is synthesized)
cggaatgcaaacaaagctcgcgggcgcctgtgcggggctcgcggggaagcccagaaagtttgttttatgatggcttgagtgcgcgagcgtgtgcaggggagcgaggctgccaagtttctc

SEQ ID NO: 424626 - DNA, 120 bp, Artificial Sequence
  ENSG00000151276_1 (sequence is synthesized)
tctcctgttttgtgatttggggagagatgtttctcccatgaacaagcggaggcttgggggctcgtgctgtggggggcacctgtctctcgttttatttttttggaggaggggtgtaactca

SEQ ID NO: 424627 - DNA, 120 bp, Artificial Sequence
  ENSG00000151276_2 (sequence is synthesized)
tcatgtccaaagtgatccagaagaagaaccactggactagcagggttcacgaatgcaccgtgaagcggggaccccagggcgagctgggggtgacggtgctgggaggcgcggagcacgggg

SEQ ID NO: 424628 - DNA, 120 bp, Artificial Sequence
  ENSG00000151276_3 (sequence is synthesized)
agtttccgtacgtcggagcggtggcggcggtcgaggcagcggggcttcccggcggcggcgagggcccgaggctgggcgaaggggagctgcttctggaggtgcagggggtccgggtgtccg

SEQ ID NO: 424629 - DNA, 120 bp, Artificial Sequence
  ENSG00000151276_4 (sequence is synthesized)
gcttgccccgctatgacgtgctgggggtcatcgacagctgcaaggaggccgtcaccttcaaggccgtcagacaaggaggaaggctgaacaaggacctgcgacattttctcaatcagcgat

SEQ ID NO: 424630 - DNA, 120 bp, Artificial Sequence
  ENSG00000151276_5 (sequence is synthesized)
tccagaaggggtctcctgatcatgagctccagcagaccataagggataacctttaccgccatgctgtgccttgcacaacccgatctcccagagaaggagaagtgcctggcgtggactata

SEQ ID NO: 424631 - DNA, 120 bp, Artificial Sequence
  ENSG00000151276_6 (sequence is synthesized)
actttctgactgtgaaggagttcttggacctcgagcagagtgggactcttctggaagtcggcacctatgaaggaaactattatgggacacccaagcctcctagccagccagtcagtggga

SEQ ID NO: 424632 - DNA, 120 bp, Artificial Sequence
  ENSG00000151276_7 (sequence is synthesized)
aagtgatcacgacggatgccttgcacagccttcagtctggctctaagcagtcgaccccgaagcgaaccaagtcctacaatgatatgcaaaatgctggcatagtccacgcggagaatgagg

SEQ ID NO: 424633 - DNA, 120 bp, Artificial Sequence
  ENSG00000151276_8 (sequence is synthesized)
aggaggatgacgttcctgaaatgaacagcagctttacagccgattctggtgaacaagaggagcacactctccaagaaacagcattaccacctgtgaatagtagcatcatcgctgctccca

SEQ ID NO: 424634 - DNA, 120 bp, Artificial Sequence
  ENSG00000151276_9 (sequence is synthesized)
tcacggacccttctcagaagttccctcaatacctacctctttctgcagaggataatttaggtcctctacctgaaaactgggagatggcctatactgaaaatggagaagtctattttatag

SEQ ID NO: 424635 - DNA, 120 bp, Artificial Sequence
  ENSG00000151276_10 (sequence is synthesized)
accataacacgaaaacaacatcttggttagaccctcggtgcctaaacaagcagcagaagccactggaagagtgtgaagatgatgaaggggtacacaccgaggagctggacagtgaactag

SEQ ID NO: 424636 - DNA, 120 bp, Artificial Sequence
  ENSG00000151276_11 (sequence is synthesized)
aactgcctgctggttgggaaaagattgaagaccctgtctatggtatctactatgtagaccacatcaacaggaagacacaatatgagaacccggttctagaagccaaacggaagaagcagc

SEQ ID NO: 424637 - DNA, 120 bp, Artificial Sequence
  ENSG00000151276_12 (sequence is synthesized)
gcagcagcagcagcagcagcagcagacagaagaatggacagaagatcactcagcccttgtgcctcctgttattccaaaccaccctccaagcaatccagagccagccagagaagttccact

SEQ ID NO: 424638 - DNA, 120 bp, Artificial Sequence
  ENSG00000151276_13 (sequence is synthesized)
accctccaagcaatccagagccagccagagaagttccacttcagggcaaacccttttttacacgaaacccttctgagttgaaaggcaagttcattcacacaaagctgcggaaaagcagtc

SEQ ID NO: 424639 - DNA, 120 bp, Artificial Sequence
  ENSG00000151276_14 (sequence is synthesized)
gtggctttggcttcacggtggttggaggggatgaacctgatgagtttctccagatcaagagcttggtcctagatggtcctgctgcattggatggcaagatggaaacaggggatgtgattg

SEQ ID NO: 424640 - DNA, 120 bp, Artificial Sequence
  ENSG00000151276_15 (sequence is synthesized)
taagtgtgaatgacacctgtgttttgggacacacacatgctcaagttgtgaagatcttccagtccatccccattggtgccagcgtggaccttgaactctgccgaggttatccattgcctt

SEQ ID NO: 424641 - DNA, 120 bp, Artificial Sequence
  ENSG00000151276_16 (sequence is synthesized)
ttgatccagatgaccccaatacaagtttagtgacctcggtagccattttggataaagaaccaattattgtgaatgggcaagagacctatgattcaccagctagccacagtagtaaaacag

SEQ ID NO: 424642 - DNA, 120 bp, Artificial Sequence
  ENSG00000151276_17 (sequence is synthesized)
gcaaagtcaatggcatgaaggatgccaggccaagcagcccagcggacgtggcttcaaatagttctcatggttatcctaatgacactgtttctttggcttcctccatagccactcagccag

SEQ ID NO: 424643 - DNA, 120 bp, Artificial Sequence
  ENSG00000151276_18 (sequence is synthesized)
aactcataactgttcatattgtcaaagggccaatgggctttggttttactatcgcagacagtcctggtgggggtggccaaagagtgaaacagattgttgacagcccaaggtgccgaggcc

SEQ ID NO: 424644 - DNA, 120 bp, Artificial Sequence
  ENSG00000151276_19 (sequence is synthesized)
tgttggtgcaacgaggagggctgccagttcccaagaagagcccaaagtcgcaaccactggaaaggaaagacagccagaatagttctcagcacagtgtttccagccaccgaagcctgcaca

SEQ ID NO: 424645 - DNA, 120 bp, Artificial Sequence
  ENSG00000151276_20 (sequence is synthesized)
cagcatccccaagccacagcacacaggtgctccccgagttcccacctgcagaggcccaagctccagatcaaactgacagctctggccagaaaaaaccagatccttttaaaatctgggccc

SEQ ID NO: 424646 - DNA, 120 bp, Artificial Sequence
  ENSG00000151276_21 (sequence is synthesized)
agtccaggagcatgtatgaaaaccgacctatgtcaccttcacctgcgtcgggattgagcaagggtgagagagagagagaaatcaattccacgaattttggagaatgtccgattccagatt

SEQ ID NO: 424647 - DNA, 120 bp, Artificial Sequence
  ENSG00000151276_22 (sequence is synthesized)
accaggaacaggacatcttcctctggagaaaagagactggatttggatttaggattctgggtggaaatgaaccaggggaacctatttatattggtcacatcgtaccactgggtgctgctg

SEQ ID NO: 424648 - DNA, 120 bp, Artificial Sequence
  ENSG00000151276_23 (sequence is synthesized)
atactgacggccgcctgaggtctggagatgaattaatctgtgtggatgggacgccagtaattggaaaatcacaccagcttgtggtccagcttatgcaacaagctgccaagcaaggccacg

SEQ ID NO: 424649 - DNA, 120 bp, Artificial Sequence
  ENSG00000151276_24 (sequence is synthesized)
tcaatctcacggtgcggcgtaaagtggtttttgcggtgcccaaaaccgagaacgaggtgccctcgccagcctcctctcatcacagtagcaaccagccggcctcgctgacagaagagaagc

SEQ ID NO: 424650 - DNA, 120 bp, Artificial Sequence
  ENSG00000151276_25 (sequence is synthesized)
gcactccgcagggcagccagaactcgctgaacacggtgagctcgggcagcggcagcaccagcggcatcggcagtggcggcggcgggggcagcggcgtggtcagcaccgtggtgcagccct

SEQ ID NO: 424651 - DNA, 120 bp, Artificial Sequence
  ENSG00000151276_26 (sequence is synthesized)
acgacgtggagatccggcgcggggagaacgagggcttcggcttcgtcatcgtgtcctcggtgagcaggcccgaagcaggcacgacctttgcaggcaatgcatgtgtggctatgcctcaca

SEQ ID NO: 424652 - DNA, 120 bp, Artificial Sequence
  ENSG00000151276_27 (sequence is synthesized)
aaataggtcggattattgaggggagccctgctgaccgctgtggcaagctgaaagtaggagaccggatcttggcagtaaatggatgttccatcaccaacaaatcccattcagacattgtga

SEQ ID NO: 424653 - DNA, 120 bp, Artificial Sequence
  ENSG00000151276_28 (sequence is synthesized)
acctaatcaaggaagcgggaaacacagttaccctccgcatcattcctggggatgagtcctcgaatgccaccttgctgaccaatgcagagaagattgccaccatcaccaccacacacaccc

SEQ ID NO: 424654 - DNA, 120 bp, Artificial Sequence
  ENSG00000151276_29 (sequence is synthesized)
cttctcagcaagggacccaggagacaaggaataccaccaaaccaaagcaggaatctcaatttgagttcaaagcaccccaagcaacacaggagcaagatttttacactgtggaactggaaa

SEQ ID NO: 424655 - DNA, 120 bp, Artificial Sequence
  ENSG00000151276_30 (sequence is synthesized)
gaggagccaagggatttggctttagccttcgaggaggccgagagtataacatggacctctatgttctgcgcttagcagaggacggtcctgcggagaggtgtggaaagatgaggattggtg

SEQ ID NO: 424656 - DNA, 120 bp, Artificial Sequence
  ENSG00000151276_31 (sequence is synthesized)
atgaaattttagagatcaatggtgagaccaccaaaaacatgaagcattctcgagctatagaactgattaagaatggtggccgcagagttcgtctgtttctgaagcggggagacggctcag

SEQ ID NO: 424657 - DNA, 120 bp, Artificial Sequence
  ENSG00000151276_32 (sequence is synthesized)
taccagaatatggtgggtcaaactatgaaaacattccttccttccctggcatgactccatgaatttgtctccagaacggcagcaggaaagtcttttttgtttcccctattcaccagtgtc

SEQ ID NO: 424658 - DNA, 120 bp, Artificial Sequence
  ENSG00000151276_33 (sequence is synthesized)
ttaccagcctctcgcaccatgtgattatttgcctcgcttgttctgaaatctctacacatttcatccttttgcttgcttacgtggactggggcatggcctaagacaagatctttatagccc

SEQ ID NO: 424659 - DNA, 120 bp, Artificial Sequence
  ENSG00000151276_34 (sequence is synthesized)
cctttctgataatcagagagaacgttttgtctagtccgaccaagagcgaaggaatgtttgtttgtactgtgccaaactgttcctcagatccaattgttagcacaaaatgactatatactc

SEQ ID NO: 424660 - DNA, 120 bp, Artificial Sequence
  ENSG00000151276_35 (sequence is synthesized)
cttttaagaagcaggaaagcaggtttcctgagtgatatgttgaggcacaattattttttcctttttggttacttggtgtctttatttaagaggcatgaaattttgagagatttgggggct

SEQ ID NO: 424661 - DNA, 120 bp, Artificial Sequence
  ENSG00000151276_36 (sequence is synthesized)
ttgctaacctcccttatgctctgtatacaacacttctccatcccccaactggtgtcttaccccaaatcagaccatctgagcccactactatcaaacaaacaaacaaaaactgttaatata

SEQ ID NO: 424662 - DNA, 120 bp, Artificial Sequence
  ENSG00000151276_37 (sequence is synthesized)
ttagccataatgtttttaaatgataaaggatgaaataaattcccagtgctcatcatgagggaaacatgtgactatacctttcctatgaggaaagccaggttatacatagagttcctttgt

SEQ ID NO: 424663 - DNA, 120 bp, Artificial Sequence
  ENSG00000151276_38 (sequence is synthesized)
catatctttagacttgatttgagtagacagcaatgatctttacatagcttagtgttctgatggcaaaatattgtatatgataataattatgtcctatttatttgagatttgtgtttaaaa

SEQ ID NO: 424664 - DNA, 120 bp, Artificial Sequence
  ENSG00000151276_39 (sequence is synthesized)
agcgaccgccacggccccgccaccggtccacaaggtgttccggaagtgagggccgggcccgaccgccggcagcatccgtcattggagtccagttacccacccgatcttcacaaatcatca

SEQ ID NO: 424665 - DNA, 120 bp, Artificial Sequence
  ENSG00000151276_40 (sequence is synthesized)
ccacatggggaaaagcgggcacacgcaagggatccgaaaggcagcagagagtatagcagacaacccaatgaacaccacacctggaatgggacttcgaggaaacccgacagcggggcatgc

SEQ ID NO: 424666 - DNA, 120 bp, Artificial Sequence
  ENSG00000151276_41 (sequence is synthesized)
cgacccaaggaccgggcgccggagggacggagggacgcgcaggccgagcgcgcggcagccgccaacggccccaagaggcggtccccagagaagcggagggagggcacccgcagcgccgac

SEQ ID NO: 424667 - DNA, 120 bp, Artificial Sequence
  ENSG00000151276_42 (sequence is synthesized)
aacactttggagaggagggagaagcacgagaagagacgagacgtctctccggagcggaggcgagagcggtcacccacccgcaggagagacggctcccccagccggcggagacggtctctg

SEQ ID NO: 424668 - DNA, 120 bp, Artificial Sequence
  ENSG00000151276_43 (sequence is synthesized)
gagagactcctggagcagaggaggtcccccgagcgcaggagagggggctcgcccgagcgcagggccaagtccaccgaccggaggcgcgcacgctcccccgagcgcaggagagagcggtcc

SEQ ID NO: 424669 - DNA, 120 bp, Artificial Sequence
  ENSG00000151276_44 (sequence is synthesized)
ctggacaaaaggaacagagaggacagagccagccaccgagaaagggaagaggcgaatctgaaacaggatgccggcagaagttccagacatcccccggagcagagaaggcgaccttacaaa

SEQ ID NO: 424670 - DNA, 120 bp, Artificial Sequence
  ENSG00000151276_45 (sequence is synthesized)
gaatgtagcaccgacctcagtatctgagacgctgagtcacattccaacctttaccgtgtcaaaggttctaagaggaaagtcacaaacctgaaattatttagtttcttacctaatgaagca

SEQ ID NO: 424671 - DNA, 120 bp, Artificial Sequence
  ENSG00000151276_46 (sequence is synthesized)
tctgacacctgatgatcctatgaataacaacaaacattttatgcatttgaaatcttataagaaaaaatatatatgaaaagtattgtgcctgatgtatcatattaaagaaagtatttttaa

SEQ ID NO: 424672 - DNA, 120 bp, Artificial Sequence
  ENSG00000151276_47 (sequence is synthesized)
atgcatacttttttggaaattatttgccaaatgctggcccaaagggatataaattttgtttctacgtaacctgtagaatcgtcaagaattgttcccgttttggggcaatctttttctctc

SEQ ID NO: 424673 - DNA, 120 bp, Artificial Sequence
  ENSG00000151276_48 (sequence is synthesized)
ctggttaaatggggctgttgatcattttctctacgtaagggaatttattgattaagtttaattaatttgatatagactgtcatgtagtgatgtagtgctatactgtagtcggaagttttt

SEQ ID NO: 424674 - DNA, 120 bp, Artificial Sequence
  ENSG00000151276_49 (sequence is synthesized)
cttaaaagcaaagagcaaaaatgcaaagttttatttgtaaaagctgaggacccttggggatggattaggtttgccgatgatcctaaaagtaagcaaactgtatgacaagactactattgc

SEQ ID NO: 424675 - DNA, 120 bp, Artificial Sequence
  ENSG00000151276_50 (sequence is synthesized)
aaatgaaggatatttatagctaaactgcgcagcacaaagaagttttatattgtgagttatagttggttcagaaaacagtttgtactctccctggcccaggaaggcacacagacaaaaatg

SEQ ID NO: 424676 - DNA, 120 bp, Artificial Sequence
  ENSG00000151276_51 (sequence is synthesized)
tcggccacttttactcaaatacagcccaagcacagacagtcaggttcgtgatcatcaccaacatctgataaaatctcattgaaggcaatgccatcacagctttgctcaattactacgagg

SEQ ID NO: 424677 - DNA, 120 bp, Artificial Sequence
  ENSG00000151276_52 (sequence is synthesized)
aagagacaacaagcatctttcgtgttgtctcgtctgattggaggctgaatagtagatggaatggggggacagtgtgcctggtgtgaggaagacgtaagatccccaatttggaaagcatgc

SEQ ID NO: 424678 - DNA, 120 bp, Artificial Sequence
  ENSG00000151276_53 (sequence is synthesized)
ccccctcccttttagtagaagcccatggttgccctttgccaaactggggaggaggcaatgagccttggtggaaggaacctctctgttgatatttaaagaagtgagggctgtgggtattca

SEQ ID NO: 424679 - DNA, 120 bp, Artificial Sequence
  ENSG00000151276_54 (sequence is synthesized)
ttgttagaaatgccaatttcactttgaaaccatagtccaagtctctaggttggtagaagggaaaggaaggaagtggtcccagtgattctaggtctggttgggaaacttctgcctcatgac

SEQ ID NO: 424680 - DNA, 120 bp, Artificial Sequence
  ENSG00000151276_55 (sequence is synthesized)
tctgtcctttgagtcctttggacagcagcacaaaacataacaatttttatttttaaacagacccattctttttgatcccacaggagctgtggttgggtcggccgtagccccgggatgtgg

SEQ ID NO: 424681 - DNA, 120 bp, Artificial Sequence
  ENSG00000151276_56 (sequence is synthesized)
tttaagtggattactgcctagctgagccaaaatgtttgcttgtacctgttggaccactacagcaaaccgctgcttacagtgcattgtgtatttctgtagtactgttttgcattttccata

SEQ ID NO: 424682 - DNA, 87 bp, Artificial Sequence
  ENSG00000151276_57 (sequence is synthesized)
gcattgtgtatttctgtagtactgttttgcattttccatagagacagaaaactttgcaagtcaatcactgttgttcccatggtactg

SEQ ID NO: 424683 - DNA, 120 bp, Artificial Sequence
  ENSG00000151276_58 (sequence is synthesized)
gtaattaatagagcctgttgggaaaaaaaagaaaacaactgttgcctttttttcttgtataaaagagaatttatgacaaaatttagctgtgaggaatgtgatacgtgtttatatttctga

SEQ ID NO: 424684 - DNA, 120 bp, Artificial Sequence
  ENSG00000151276_59 (sequence is synthesized)
atatggaacaaattgattcatggggatatattttaatgtaaactaaatcaggtatgtaaagttgttttaaaatgggagactatataagtaattctctaaagctttagttggtttgaatat

SEQ ID NO: 424685 - DNA, 120 bp, Artificial Sequence
  ENSG00000151276_60 (sequence is synthesized)
catcatttcctccatggtgagcctgcttgtgaattattaagcacttgtttgcattctctgttcttcactcatttatttcttgcagtgtgctatggacttaatgctctttctgtattgatg

SEQ ID NO: 424686 - DNA, 120 bp, Artificial Sequence
  ENSG00000151276_61 (sequence is synthesized)
aaaagcagtatgtgggccaatctttttataaaacactatgcatatataaatattacattgttcatagctttatttgacttatgggtttatacataacattagaatgagtagctgtagttg

SEQ ID NO: 424687 - DNA, 120 bp, Artificial Sequence
  ENSG00000151276_62 (sequence is synthesized)
tgtggacatttataaaacaagttcctttcctggaacagacacaatatacattctgtagctaaaaaggagggaaaagtctgtgaatgctatttttattattaaagttttccatacaaagca

SEQ ID NO: 424688 - DNA, 120 bp, Artificial Sequence
  ENSG00000151276_63 (sequence is synthesized)
tacattgagctgtagtaaggctgaggaagagtacaactgaataatgatgttctttttcatcaagttcctaagagctgacttggagattttattcccagggctccactgctaggattcttc

SEQ ID NO: 424689 - DNA, 120 bp, Artificial Sequence
  ENSG00000151276_64 (sequence is synthesized)
tcactagttctaacaaaatctgtgatgttaaatgactgatgctctcaattgtgatccagagttttaaataaatgaaatcaaggtggattttgggaatatatcctgaagttaacatcttga

SEQ ID NO: 424690 - DNA, 120 bp, Artificial Sequence
  ENSG00000151276_65 (sequence is synthesized)
tgtccttcttgttgtaagatgatatttggcaatttaaaatctatgtgctacccacctgggcttgtctcaatccgtggactttttggtgtggcagtttcacctgaattccacacatcagat

SEQ ID NO: 424691 - DNA, 120 bp, Artificial Sequence
  ENSG00000151276_66 (sequence is synthesized)
ttgtttggaaatattgtactgtacagggactatgcattatgcagaaagatatagttttctttgaactgctgtaaccttaaattggaaactgattcttgtgagcctactttccttaatccc

SEQ ID NO: 424692 - DNA, 120 bp, Artificial Sequence
  ENSG00000151276_67 (sequence is synthesized)
gccgcccccctcccccacttaatgtaaatgtcttgatgagagataatggatgagtattttgtatgatgaaatcaaacgatttaggaatttgtctccctccgttacacagttgatgcctga

SEQ ID NO: 424693 - DNA, 120 bp, Artificial Sequence
  ENSG00000151276_68 (sequence is synthesized)
aagaatgttgggggggaggactcaacaccctaattgtattttttaagtttcttttgtgaaagattttttaatgcatttttactgtaaaaatacatggaaatgtatgcattccacaaccac

SEQ ID NO: 424694 - DNA, 120 bp, Artificial Sequence
  ENSG00000151276_69 (sequence is synthesized)
cagcgtggtgggaggcggtttcaggctcacaaagggaaggattaatcttggcgattgggctggggtttgcaggcacaacccgatctcccagagaaggagaagtgcctggcgtggactata

SEQ ID NO: 424695 - DNA, 120 bp, Artificial Sequence
  ENSG00000151276_70 (sequence is synthesized)
atttgaggggagacttgaccggtgagaaggaggcagccacacatggatccatggggaaaattgctctgcaaagaaaaggggaatgatcataaattaaagcagcttacaggataggagtgc

SEQ ID NO: 424696 - DNA, 120 bp, Artificial Sequence
  ENSG00000151276_71 (sequence is synthesized)
agtacaagtcagcatagctaatgcagatagatctcctgcctctcgctctcctcctccctctgctttgattcgatatgaacagcctggtaactccgatgctggggagaaatctgacataac

SEQ ID NO: 424697 - DNA, 120 bp, Artificial Sequence
  ENSG00000151276_72 (sequence is synthesized)
tttacactgaggtcgcaagtttactatccaagccaatgaaataagccacaatgcaggtaaggatgaactagagtgatgtgtttgctgctgttttcctgaggagatttcctttcttggtgc

SEQ ID NO: 424698 - DNA, 120 bp, Artificial Sequence
  ENSG00000151276_73 (sequence is synthesized)
cttatcgattctcaacagtttgaggaagcataaggttaatcatttccctaaaggtttagacaactaaattatggtatatagaaattatgacataatattcaaagagcatatttaaccatt

SEQ ID NO: 424699 - DNA, 120 bp, Artificial Sequence
  ENSG00000151276_74 (sequence is synthesized)
attgaactacagtgtccttattgttttaagacttcttcatatattctggatataattcctttatcatatatgtgatttgtatgcattttctctaagtctggcttttctgttcattgtctc

SEQ ID NO: 424700 - DNA, 120 bp, Artificial Sequence
  ENSG00000151276_75 (sequence is synthesized)
agaactgggcatctgaaaacaccagatccactgaagacttcaacctgaaaaagggtgatgctgctgatctggtctgattcccaagctggaggtaatggcgtgtgtcctgccctagtgctg

SEQ ID NO: 424701 - DNA, 120 bp, Artificial Sequence
  ENSG00000151276_76 (sequence is synthesized)
ctccctgatggggagcatgctcagtttcctgcattcaggtacgagcagagacttggcaggatccgccccgttcagagttgcaggaagagccctggatgcctgtcgcaaattggaataagt

SEQ ID NO: 424702 - DNA, 120 bp, Artificial Sequence
  ENSG00000151276_77 (sequence is synthesized)
gggagggagccacaggctggtacagatactgggaatacagcaggaaatgaaactgaaaaaaatccttgccttcgtggaacttacattccagtgacttcacccaaagactccatttaaaac

SEQ ID NO: 424703 - DNA, 120 bp, Artificial Sequence
  ENSG00000151276_78 (sequence is synthesized)
acaagaaattgagatactgtcaacaataacttagcactactccgctacctgtcagggctacttcggctgtttataccagagtcatgaaaatgtgaaataacttaaaggcaagatgcatta

SEQ ID NO: 424704 - DNA, 120 bp, Artificial Sequence
  ENSG00000151276_79 (sequence is synthesized)
ctagtatgtaactaaagtgaaccgcctgtgatttgcagagaatagaagtgtgatagaagtagattggaaaagatagagcaaaggctacttcgactgtttataccagagtcatgaaaatgt

SEQ ID NO: 424705 - DNA, 120 bp, Artificial Sequence
  ENSG00000151276_80 (sequence is synthesized)
tgctgtgccttattctggcagtagaatgcaacgattgtgaacaattgcttgtgctagtcatatgcgggttctaacagagaccctttaaaaaaactgaaggaagcagggcgtgatggctca

SEQ ID NO: 424706 - DNA, 79 bp, Artificial Sequence
  ENSG00000151276_81 (sequence is synthesized)
tgggagaccccatctctacaaaaaattacccaggcacaacccgatctcccagagaaggagaagtgcctggcgtggacta

SEQ ID NO: 424707 - DNA, 120 bp, Artificial Sequence
  ENSG00000151276_82 (sequence is synthesized)
agacgcgcggggatgaggcgggcggccaccgagcgcgcgcctgggctccggcagtgaccgaggcgaactccggggccgctccggggcccgcaggcacaacccgatctcccagagaaggag

SEQ ID NO: 424708 - DNA, 120 bp, Artificial Sequence
  ENSG00000151276_83 (sequence is synthesized)
attccatgtagctaaaagcagtcagctggaacgagtttttgagatgagatgaaaactaactatctcgcttccctggcccaaatagaaatatgcccaaaaccgagaacgaggtgccctcgc

SEQ ID NO: 424709 - DNA, 120 bp, Artificial Sequence
  ENSG00000151276_84 (sequence is synthesized)
atctgcttaaaggggccgcgagcacttacctcccgccctgctccccgccgccccgccaccgcgtcttcagggctcccggcaactggctggaagggcttccctcaccctcagtaacagcct

SEQ ID NO: 424710 - DNA, 120 bp, Artificial Sequence
  ENSG00000151276_85 (sequence is synthesized)
gccagcgaggagaggcgagccgggcgggaggcaaagaggaggcaccgcatttgtaaaaggcaagagagaaaggaaggaaggaaaaaaaaataacccgagcggcgcagagtggactctggt

SEQ ID NO: 424711 - DNA, 120 bp, Artificial Sequence
  ENSG00000151276_86 (sequence is synthesized)
caggtcagtcgggtcttatgttgagtttttaaaaggtaatccaatttctgctaaatggactgtggtttacaaaagcaggaagaaagtcagagttgtttcaagagaagaatttgtttacac

SEQ ID NO: 424712 - DNA, 120 bp, Artificial Sequence
  ENSG00000151276_87 (sequence is synthesized)
ataaagacagatgcttactaatatctccattagaagcagaacagtcagaaactgttcaaatgaagatacgtcctctgtcttcaggaacttagagtaaattctagaaagtctctaggaata

SEQ ID NO: 424713 - DNA, 120 bp, Artificial Sequence
  ENSG00000151276_88 (sequence is synthesized)
aagaaaccaaagacggtctggtcagtcacacattctcaggtttaaccctatcttataaaagtcttagggggaaaagttgggagtttttcttgaactgtacatatttcacatacttcccta

SEQ ID NO: 424714 - DNA, 120 bp, Artificial Sequence
  ENSG00000151276_89 (sequence is synthesized)
gtcttggaggtaggggaaacagatctagacatgtttgagaatctctgtgtaacttagagtatacccacaatatgtagtaagtgtattcttttgagacagaggttgaggtgttacctagag

SEQ ID NO: 424715 - DNA, 120 bp, Artificial Sequence
  ENSG00000151276_90 (sequence is synthesized)
caccactctccctgttaatcttggaaatgaactaactggctgtaagagcttttgttgaaaaagttcatttcaaggctttgggttttctaattacttctccaaaatgaaaaaaaaaaaaaa

SEQ ID NO: 424716 - DNA, 120 bp, Artificial Sequence
  ENSG00000151287_0 (sequence is synthesized)
gaacgctgtggcggggcaggcgaggcggtcgcttcgagcgcgctagtcagctccctgaagggagtgacggcggttgggtgcccgcggccacttttgccttcccggggagatgtcctttgc

SEQ ID NO: 424717 - DNA, 120 bp, Artificial Sequence
  ENSG00000151287_1 (sequence is synthesized)
ttctcagatgtaaatgcactttaagtttgttattcaacagtgaaaatgagtcatacagaggttaaattaaaaataccttttggaaataaattactagatgctgtttgtttggtacctaac

SEQ ID NO: 424718 - DNA, 120 bp, Artificial Sequence
  ENSG00000151287_2 (sequence is synthesized)
aagagcttaacatatggaataattcttacacatggagcatcaggagatatgaatcttcctcatttgatgtcactggcatcccatcttgcatctcatgggtttttctgcctgagatttacc

SEQ ID NO: 424719 - DNA, 120 bp, Artificial Sequence
  ENSG00000151287_3 (sequence is synthesized)
tgtaaaggccttaatattgtacatagaattaaggcgtataaatcagttttgaattacctgaagacatcaggagaatacaaacttgcaggtgtttttcttggaggtcgttcaatgggctca

SEQ ID NO: 424720 - DNA, 120 bp, Artificial Sequence
  ENSG00000151287_4 (sequence is synthesized)
agagcagctgcttctgtaatgtgtcacattgagccagatgatggtgatgattttgttcggggtctcatttgtatttcttacccactgcaccatccaaagcagcagcataaactcagagat

SEQ ID NO: 424721 - DNA, 120 bp, Artificial Sequence
  ENSG00000151287_5 (sequence is synthesized)
ggctcagcagatgaaatgtgtgaaaagaacttgttggagaaagtggcacagaaaatgcaagctccccataaaatccactggattgagaaggcaaatcattccatggcagtgaaaggacgg

SEQ ID NO: 424722 - DNA, 120 bp, Artificial Sequence
  ENSG00000151287_6 (sequence is synthesized)
tcgacaaatgatgttttcaaagaaataaatacacagattttgttttggatccaagaaattactgaaatggacaagaaatgtcattagttaaaagccatgttatcttgagtacacatacag

SEQ ID NO: 424723 - DNA, 120 bp, Artificial Sequence
  ENSG00000151287_7 (sequence is synthesized)
ttaatttgataaagaagagtatgcctctcagcattgtgagatatatttcagactaatttgatgttctttaatgttcccttatttttgaaacacgttttaaatgtgaaattaatgtccttc

SEQ ID NO: 424724 - DNA, 120 bp, Artificial Sequence
  ENSG00000151287_8 (sequence is synthesized)
acaaaatgtcttttgaaagcactgttacagttgtataaagatgatgtaaaaatattgaaggtggtctacatataatttattttcattagtatagttaagttttgaaaaaaattaaacatc

SEQ ID NO: 424725 - DNA, 120 bp, Artificial Sequence
  ENSG00000151287_9 (sequence is synthesized)
tgaattttgttacaaaaaggtgcttttgtcttattgataggcaactgagaaattttgcagagcagcgttatcttcagaaaaggaaaacattatggttaatctagtcagagatttatagaa

SEQ ID NO: 424726 - DNA, 120 bp, Artificial Sequence
  ENSG00000151287_10 (sequence is synthesized)
tgcacacatctcttcaccttatcttttaataaatcacaatgaaaggataggagtggacatatgtttcaaatatggggaccctgaagattttttagaatgaaataaagatctttaattcaa

SEQ ID NO: 424727 - DNA, 120 bp, Artificial Sequence
  ENSG00000151287_11 (sequence is synthesized)
ccaaccctgcacctggccctctaaccaattctgagtgcccgtagaaaaatgtacatgtaaagacaccagattttagggaagtaattctaaatgtttattttagctactgaatgtgttcat

SEQ ID NO: 424728 - DNA, 120 bp, Artificial Sequence
  ENSG00000151287_12 (sequence is synthesized)
tcatagtttttgtgtcatatccatgtctgccaactcacctttcacaacagaatcttcttttcagggagatgtcctttgcttctcagatgtaaatgcactttaagtttgttattcaacagt

SEQ ID NO: 424729 - DNA, 120 bp, Artificial Sequence
  ENSG00000151287_13 (sequence is synthesized)
gaaaatgagtcatacagaggtaatattttcgtatgttctgcatcttcagggttcctggttttttgtttgtttgtaattatgtggcttcagagtaattttattttcaactttcactgtggg

SEQ ID NO: 424730 - DNA, 120 bp, Artificial Sequence
  ENSG00000151287_14 (sequence is synthesized)
aggcagtatagcataagtggttaagagcgaggaatctagagcagactaccctgagtttaaatcctagctagcggctatataaccttgggcaagttacttaatctgctgtgccttatctat

SEQ ID NO: 424731 - DNA, 120 bp, Artificial Sequence
  ENSG00000151287_15 (sequence is synthesized)
aaaatggggataatgatagtgcttgcctcacagaattgttagaaaagtgaaataagttaatacatataaagcacttataataatacccgacacagtaagcacttaactactattattaat

SEQ ID NO: 424732 - DNA, 120 bp, Artificial Sequence
  ENSG00000151287_16 (sequence is synthesized)
atcactactttttatttggaggctatgacttgaattatgagcctcacagagcaaacatatatatagctgttcagttgtcttaataggcaagaaagtaatttttgatccctttattctctt

SEQ ID NO: 424733 - DNA, 120 bp, Artificial Sequence
  ENSG00000151287_17 (sequence is synthesized)
gtcgcttcgagcgcgctagtcagctccctgaagggagtgacggcggttgggtgcccgcggccacttttgccttcccgggttaaattaaaaataccttttggaaataaattactagatgct

SEQ ID NO: 424734 - DNA, 120 bp, Artificial Sequence
  ENSG00000151287_18 (sequence is synthesized)
tcatggatcttcagatcagctgttggtcagatgttggttagactagtctggactccagacttcagttttgggttcagttctgttccgtgtgtcttcattttgagacccaggctgaaaatg

SEQ ID NO: 424735 - DNA, 120 bp, Artificial Sequence
  ENSG00000151292_0 (sequence is synthesized)
gaattcaaagtggagtaccgcaaacttgatatggaaaataaaaagaaagacaaggacaaatcagatgatagaatggcacgacctagtggtcgatcgggacacaacactcgaggaactggg

SEQ ID NO: 424736 - DNA, 120 bp, Artificial Sequence
  ENSG00000151292_1 (sequence is synthesized)
tcttcatcgtctggagttttaatggttggacctaactttagagttggaaaaaaaattggatgtggcaattttggagaattacgattagggaaaaatttatacacaaatgaatatgtggca

SEQ ID NO: 424737 - DNA, 120 bp, Artificial Sequence
  ENSG00000151292_2 (sequence is synthesized)
attaagttggagcccatgaaatcaagagcaccacagctacatttggaatacagattctataagcagttaggatctggagatggtatacctcaagtttactatttcggcccttgtggtaaa

SEQ ID NO: 424738 - DNA, 120 bp, Artificial Sequence
  ENSG00000151292_3 (sequence is synthesized)
tacaatgctatggtgctggaactgctgggacctagtttggaagacttgtttgacttgtgtgacagaacattttctcttaaaacagttctcatgatagctatacaactgatttctcgcatg

SEQ ID NO: 424739 - DNA, 120 bp, Artificial Sequence
  ENSG00000151292_4 (sequence is synthesized)
gaatatgtccattcaaagaacttgatatacagagatgtaaaacctgagaacttcttaataggacgaccaggaaacaaaacccagcaagttattcacattatagattttggtttggcaaag

SEQ ID NO: 424740 - DNA, 120 bp, Artificial Sequence
  ENSG00000151292_5 (sequence is synthesized)
gaatatattgatccggagacaaagaaacacataccatacagagaacacaagagccttacaggaacagctagatatatgagcataaacacacatttaggaaaagaacaaagtagaagagac

SEQ ID NO: 424741 - DNA, 120 bp, Artificial Sequence
  ENSG00000151292_6 (sequence is synthesized)
gatttagaagctttaggtcatatgttcatgtattttctgagaggcagtcttccttggcaaggcttaaaggctgacacattaaaggagaggtatcagaaaattggagatacaaaacgggct

SEQ ID NO: 424742 - DNA, 120 bp, Artificial Sequence
  ENSG00000151292_7 (sequence is synthesized)
acaccaatagaagtgttatgtgaaaattttccagaaatggcaacatatcttcgttatgtaagaaggctagatttttttgaaaaaccagactatgactacttaagaaagctttttactgac

SEQ ID NO: 424743 - DNA, 120 bp, Artificial Sequence
  ENSG00000151292_8 (sequence is synthesized)
ttgtttgatcgaaaaggatatatgtttgattatgaatatgactggattggtaaacagttgcctactccagtgggtgcagttcagcaagatcctgctctgtcatcaaacagagaagcacat

SEQ ID NO: 424744 - DNA, 120 bp, Artificial Sequence
  ENSG00000151292_9 (sequence is synthesized)
caacacagagataagatgcaacaatccaaaaaccagtcggcagaccacagggcagcttgggactcccagcaggcaaatccccaccatttgagagctcaccttgcagcagacagacatggt

SEQ ID NO: 424745 - DNA, 120 bp, Artificial Sequence
  ENSG00000151292_10 (sequence is synthesized)
acaaatggagagttaaacacagatgaccccaccgcaggacgttcaaatgcacccatcacagcccctactgaagtagaagtgatggatgaaaccaagtgctgctgttttttcaaacgaagg

SEQ ID NO: 424746 - DNA, 120 bp, Artificial Sequence
  ENSG00000151292_11 (sequence is synthesized)
aaaaggaaaaccatacagcgccacaaatgactctggacacagacagatcctggggagttacttacatgttcatctgctgtcttgtgattaaaatcatctctgtagtgaccacgtatattt

SEQ ID NO: 424747 - DNA, 120 bp, Artificial Sequence
  ENSG00000151292_12 (sequence is synthesized)
tcaaggactcactcttagaaacaaaaatgtcatactttcatacttcattttgtggttgtcttacattctttttctttttttttttttctctaatttaacctttatggaagctttaaagtt

SEQ ID NO: 424748 - DNA, 120 bp, Artificial Sequence
  ENSG00000151292_13 (sequence is synthesized)
ttgtcaaaacatgagtgctttgcccatcagtgaatggaatggaccaatgaggtggtatcaatgaatatagttccatagaacattttccagaagttcttctgttgtagaaagcagtacagt

SEQ ID NO: 424749 - DNA, 120 bp, Artificial Sequence
  ENSG00000151292_14 (sequence is synthesized)
atcttaagtgtcaaccagttatatacctaatctggttttttataacttctgtaagagcataatcaaacaggaattttcttttctcagtggataatacaacagagaaaacagagttgccca

SEQ ID NO: 424750 - DNA, 120 bp, Artificial Sequence
  ENSG00000151292_15 (sequence is synthesized)
aatatttaaaagaagttattccttgagaagttcatattttgtgacatctgcattgatttcagtattactgatggtactgttattcataagtcatattaacattctctccgtgaaatcatg

SEQ ID NO: 424751 - DNA, 120 bp, Artificial Sequence
  ENSG00000151292_16 (sequence is synthesized)
gtacagtcactgcccagaggtactgaggaaaaagcaatatgggttcggcagatggtggtggtaaaatgaatcttaaggagtgtggtaaatatgtgctccgcttttgttgcatcactatgt

SEQ ID NO: 424752 - DNA, 120 bp, Artificial Sequence
  ENSG00000151292_17 (sequence is synthesized)
gaagtactgtgttgcagaagtggcaaaagcgcttatttttaaaaatgcaaaatatttgtacaatgtaactttatgcttccaaataataatgtatgttagacagcaagaaatgaatacttt

SEQ ID NO: 424753 - DNA, 120 bp, Artificial Sequence
  ENSG00000151292_18 (sequence is synthesized)
aaaaagtgatgtatgttggagttataaagaaatacactaaggagaggtagtaaatgtgaaccttgttgcagtgtataaggtggaagcctaaagaaatctcaccgaaacttactgctgaat

SEQ ID NO: 424754 - DNA, 120 bp, Artificial Sequence
  ENSG00000151292_19 (sequence is synthesized)
gattacattctcccttaagcagaaaactttggatgtgccatgcaatggtgtctgtgtaattattttgctctttgattaaaaaaaagacccccagcaataaaaagtgggtcactctatgcc

SEQ ID NO: 424755 - DNA, 120 bp, Artificial Sequence
  ENSG00000151292_20 (sequence is synthesized)
tctctggaattttcctactctttagcataattttgatgattgaaaaatattttggaaaggatgggtcaggtgctttgcctccatagtcttttgaagtgcctgcatatgaacaacaacaac

SEQ ID NO: 424756 - DNA, 120 bp, Artificial Sequence
  ENSG00000151292_21 (sequence is synthesized)
aacaacaaaaaattctgtaaaaaaggaagcccattccacttttcaagtatgctttgttttaagccataaagacacacatgtagttttgtcacattctactagccaaaattttcaagaagg

SEQ ID NO: 424757 - DNA, 120 bp, Artificial Sequence
  ENSG00000151292_22 (sequence is synthesized)
gttaaaacaaagactggctagaaagataattattttgaataaatctcatattcatctttcatttatataattgttacttattcctcccatgcagtctcttcgttgtctttaagtgtgtgc

SEQ ID NO: 424758 - DNA, 120 bp, Artificial Sequence
  ENSG00000151292_23 (sequence is synthesized)
ctccaggcatgcttatttatttttattgtctcaaggtaacatttaagatgtatattaaagtaaagctacatttttttacttcattattgcatttacagggatttaattgtactttgtaat

SEQ ID NO: 424759 - DNA, 120 bp, Artificial Sequence
  ENSG00000151292_24 (sequence is synthesized)
ttatttttcttattagccaaaagtttaatgcatttttttttgatgaattaggcacccacatgaacaccacaaatcaggacattgtttatcattgttgctatgaatcctatgaatgatctt

SEQ ID NO: 424760 - DNA, 120 bp, Artificial Sequence
  ENSG00000151292_25 (sequence is synthesized)
ttttttattttaaagacctacacttaacctacaaaacatttgctgtataatttggtcaacagtttctatctatctgtatactgtcatgatgtcttaaactgcaggagttacatactgagt

SEQ ID NO: 424761 - DNA, 120 bp, Artificial Sequence
  ENSG00000151292_26 (sequence is synthesized)
ttatatttttatttgctttgagcaaggtagataaacattttggccattataatgtgaaaccacttcttctttctttacagtatttgaccaaacttgtgtgtctatgatatttgtaaatac

SEQ ID NO: 424762 - DNA, 120 bp, Artificial Sequence
  ENSG00000151292_27 (sequence is synthesized)
atgcgaatatctgtatttcttatcataagcctatttagttttattctcagtagggttttttggattgtacagtgtttatatgatctgaactccttatacataagaaggtgtgtatattaa

SEQ ID NO: 424763 - DNA, 120 bp, Artificial Sequence
  ENSG00000151292_28 (sequence is synthesized)
tccaattatggacttaaaatattttaaaagtataaatacccttatttgctgcaaagaccagtgtgtaggcatttgctttttagcaatatttttaagtgctccattttaatgccgaggaat

SEQ ID NO: 424764 - DNA, 120 bp, Artificial Sequence
  ENSG00000151292_29 (sequence is synthesized)
aagtcttttggcaacacaaactggtcaataataggtaatgcaggtatgttcaggttaagccaacaatgttttgcatttttatgcttattttctgtcaacactaatgaagtcaacattgcc

SEQ ID NO: 424765 - DNA, 120 bp, Artificial Sequence
  ENSG00000151292_30 (sequence is synthesized)
tgaatgtctgaataatgaaacacatccctgtttaaaagtatgtaactgaaaaagaaataaaaaaaaataaaagtagtttttttaaacttgctctttcccatttcctctaaagatgggtaa

SEQ ID NO: 424766 - DNA, 120 bp, Artificial Sequence
  ENSG00000151292_31 (sequence is synthesized)
aataatgtcactccctaatttaagataggaattataaaaatttggtttatttagtctgttatatatgagaagcagagctaaaggaatatgcttttgttattttatgttttgttttgcttt

SEQ ID NO: 424767 - DNA, 120 bp, Artificial Sequence
  ENSG00000151292_32 (sequence is synthesized)
cttgaaatccagtggtaaaaagcacacactaggaaggatctaagctttctttaatataaaaaaaattatacttctctgaactgtttaatagagcaataattaaatacatcttctgataaa

SEQ ID NO: 424768 - DNA, 120 bp, Artificial Sequence
  ENSG00000151292_33 (sequence is synthesized)
agctctctatcaatatcagctcacatcattgaaaagataattttgaagacatgttttgctgaaaagacactaagaaaaattttacgaatgggatgaacatgctccagttaattgactacc

SEQ ID NO: 424769 - DNA, 120 bp, Artificial Sequence
  ENSG00000151292_34 (sequence is synthesized)
gtgcattcattccgggctgcatcggtggcgacagcagaggctcgggcggcgactctccggccagcggcggcggtaggaggcaccagcggcagtgcagggaccgaatccgagcagcgctgc

SEQ ID NO: 424770 - DNA, 120 bp, Artificial Sequence
  ENSG00000151292_35 (sequence is synthesized)
gttacctctctctctcgctccttcccccctacctcgctcgctcgctcgctcgctccctgcgtggctcgctttcctcctccggccgccggcgggtgtgatgtgccgccgccgctgcccccg

SEQ ID NO: 424771 - DNA, 120 bp, Artificial Sequence
  ENSG00000151292_36 (sequence is synthesized)
actcggctgttttcgctgatgcgggcagcttgggggccgccgccgctaaacagacgctttcctttttaattttttttccatgtgttcacttccgggtccggcgtcgatccggatgcccga

SEQ ID NO: 424772 - DNA, 120 bp, Artificial Sequence
  ENSG00000151292_37 (sequence is synthesized)
attaggtaagactattttgtttattccattatgttagaaacattttaaaaattggaagatactttttaatgaaaatgatttagttatttaattgtttagttgtttaatggttgtggtaat

SEQ ID NO: 424773 - DNA, 120 bp, Artificial Sequence
  ENSG00000151292_38 (sequence is synthesized)
ttgttaagtttttttgccaaatagaagcaaaaacctatgctttagttaaatgtattatgtgctttttttcagagtacagttttatataatgtatctttaaaatcaattactggcagaatc

SEQ ID NO: 424774 - DNA, 120 bp, Artificial Sequence
  ENSG00000151292_39 (sequence is synthesized)
tttttcaagggaaaaatttatacacaaatgaatatgtggcaattaagttggagcccatgaaatcaagagcaccacagctacatttggaatacagattctataagcagttaggatctggag

SEQ ID NO: 424775 - DNA, 120 bp, Artificial Sequence
  ENSG00000151304_0 (sequence is synthesized)
gcggtctgagagaccggttcacgtgcaggcagcggcggatcatattccttcatctaccatggctcagccgggaactctgaacctcaataacgaggttgtgaagatgagaaaagaagtgaa

SEQ ID NO: 424776 - DNA, 120 bp, Artificial Sequence
  ENSG00000151304_1 (sequence is synthesized)
gagaattcgagttttagttatccgaaaacttgtcaggagtgttggccgactgaagtcaaaaaagggtactgaagatgcactgttaaaaaaccaaagacgggcgcaaagattgcttgaaga

SEQ ID NO: 424777 - DNA, 120 bp, Artificial Sequence
  ENSG00000151304_2 (sequence is synthesized)
aatccatgccatgaaggaattgaaacctgacatagtaactaaatctgctcttggtgatgatatcaactttgaaaaaatcttcaaaaagccagattctactgcaactgaaagagcaattgc

SEQ ID NO: 424778 - DNA, 120 bp, Artificial Sequence
  ENSG00000151304_3 (sequence is synthesized)
cagactagcagtacatcctcttctgaagaaaaagatagatgtgctaaaagctgctgtacaagcctttaaagaagcaagacaaaatgttgctgaagttgagtcatcaaagaatgcttcaga

SEQ ID NO: 424779 - DNA, 120 bp, Artificial Sequence
  ENSG00000151304_4 (sequence is synthesized)
ggacaatcattctgagaatactttgtattcaaatgataatggaagtaatttacagcgtgaagcaactgtcatcagtgagcaaaaagtcaaagaaaccaaaatattggcgaagaaaccaat

SEQ ID NO: 424780 - DNA, 120 bp, Artificial Sequence
  ENSG00000151304_5 (sequence is synthesized)
acataattcaaaggaaaaaatagcaaagatggaacatggacctaaagcagtgactattgcaaattctccatcaaagccttcagaaaaggattctgtagtttcccttgagtcccagaagac

SEQ ID NO: 424781 - DNA, 120 bp, Artificial Sequence
  ENSG00000151304_6 (sequence is synthesized)
acctgctgacccaaaactgaaaactctaagtcaaaccaaaaaaaacaaaggatctgatagctcactctctggtaacagtgatggcggagaagaattttgtgaagaggagaaggaatattt

SEQ ID NO: 424782 - DNA, 120 bp, Artificial Sequence
  ENSG00000151304_7 (sequence is synthesized)
tgatgatagcacagaagaaaggttttacaagcagtcttccatgtctgaagatagtgatagcggtgacgacttcttcattgggaaagtcagacggacacgaaagaaggaaagtagttgtca

SEQ ID NO: 424783 - DNA, 120 bp, Artificial Sequence
  ENSG00000151304_8 (sequence is synthesized)
ttcttcagttaaggaacaaaaaccactagaaaaagtgtttcttaaagaagatacaggtgaaactcatggggatacaagaaatgacaaaatcaagccaagtacagaaaccagaaagttaga

SEQ ID NO: 424784 - DNA, 120 bp, Artificial Sequence
  ENSG00000151304_9 (sequence is synthesized)
atcagtgtttttccactctttatctggatctaaaagctctagaagaaatttcaaagaacaggctccaaaaacaagatccctagattttccacagaatgagcctcagatcaagaatcagtt

SEQ ID NO: 424785 - DNA, 120 bp, Artificial Sequence
  ENSG00000151304_10 (sequence is synthesized)
taataagaagctatcaggaagacttgaaaatacaaaacagcaattgcagctgcctcttcatccttcatgggaagcaagcagaaggcgaaaagaacagcaatctaatattgctgtgtttca

SEQ ID NO: 424786 - DNA, 66 bp, Artificial Sequence
  ENSG00000151304_11 (sequence is synthesized)
atctaaaaaaaaaaatgttttttttaagacaggatctcattctgttgcccagactagagtacaata

SEQ ID NO: 424787 - DNA, 120 bp, Artificial Sequence
  ENSG00000151304_12 (sequence is synthesized)
taccatgcccagctttctcaccccaggctctgcagctattacttaaactcgtatttgaataagtctcttggggagaattatagaatgtttgtttttgtatttttttttaaagtaaattca

SEQ ID NO: 424788 - DNA, 120 bp, Artificial Sequence
  ENSG00000151304_13 (sequence is synthesized)
acttacgcttatataagcctttcacaaatccaatatgtacttaaattgatttttaataatatccctcagactgtttcccttatgaagtaatttggggattttagtgatctcatattttct

SEQ ID NO: 424789 - DNA, 120 bp, Artificial Sequence
  ENSG00000151304_14 (sequence is synthesized)
ctttagtgcttatcatgaaatgtgcttcactggttcagctctgttgtttccttaaacataaatgtcaatatatatttaaaataataatggaaacataggaaatcagctatttaaaccaga

SEQ ID NO: 424790 - DNA, 120 bp, Artificial Sequence
  ENSG00000151304_15 (sequence is synthesized)
tcacccttgttaaaaatcattcttgttagcaaactaaaatagtaacttttattatggatgtacagataaatattaattttattatagttttaagtacttgtgatcatgtactttttgatt

SEQ ID NO: 424791 - DNA, 120 bp, Artificial Sequence
  ENSG00000151304_16 (sequence is synthesized)
ctaaaatagttgtctaggacaattttgggattcttaattatattttagttaagaaaattgtttaaatatagcaatacaaccaataatttgttttatgtttcactgcatataaatatttcc

SEQ ID NO: 424792 - DNA, 120 bp, Artificial Sequence
  ENSG00000151304_17 (sequence is synthesized)
aatcaagaatgtatattatctagtttttactatacttattttaaaatttttgaggaatcatagattctaatttttaagaacaaattctgaaggtggtaggattaaaagaatatttccact

SEQ ID NO: 424793 - DNA, 120 bp, Artificial Sequence
  ENSG00000151304_18 (sequence is synthesized)
cactgatggctaagcaaagaagttgtaagatgactcactgaggaagggactgctttatacatcacagtactgctatttaaaaggaaaacagaaatttttaaatcccttcaaatgtttcac

SEQ ID NO: 424794 - DNA, 120 bp, Artificial Sequence
  ENSG00000151304_19 (sequence is synthesized)
ttttgctatgctgggaaaaattttgaagttcttggtaaactgaataatgctaatccatgtttcctgcacattagttcctttaatggcagggaaggccatctggttaacctgtattcacaa

SEQ ID NO: 424795 - DNA, 120 bp, Artificial Sequence
  ENSG00000151304_20 (sequence is synthesized)
ggcagggaaggccatctggttaacctgtattcacaaactctcaagagtttctacttatttcaggagcttaagaatttagataactcagccgggcgtggtgactcatgcctataatcccag

SEQ ID NO: 424796 - DNA, 120 bp, Artificial Sequence
  ENSG00000151304_21 (sequence is synthesized)
gcatttgtgatatcaaaaatcacctgagaaatgaaaagcaacccaaaagtacccaggaggcccatttacttactgatgacaactgtgccattcccaggaatatcttggtcggctgggtaa

SEQ ID NO: 424797 - DNA, 120 bp, Artificial Sequence
  ENSG00000151304_22 (sequence is synthesized)
gaaatctgatgtcccttggtttttcactctttggggaaatctgagcagcaccctgtgatcataatctctgacatctgccctgtatgctgtactgtgattttgaaaaaagaaaaattatta

SEQ ID NO: 424798 - DNA, 120 bp, Artificial Sequence
  ENSG00000151320_0 (sequence is synthesized)
atctgaactgatgtcacagcatcatgcagcaggtcaaacaaggcatctcctagtattgcatcctacagatgtgctgtaaacatcaaaagaagacggtgggatcaggagatgctgttttgg

SEQ ID NO: 424799 - DNA, 120 bp, Artificial Sequence
  ENSG00000151320_1 (sequence is synthesized)
aaagaagtgaggtttagacttctccatgttaaccatgagcgtgacactttcccccctgaggtcacaggacctggatcccatggctactgatgcttcacccatggccatcaacatgacacc

SEQ ID NO: 424800 - DNA, 120 bp, Artificial Sequence
  ENSG00000151320_2 (sequence is synthesized)
cactgtggagcagggtgagggagaagaggcaatgaaggacatggactctgaccagcagtatgaaaagccacccccactacacacaggggctgactggaagattgtcctccacttacctga

SEQ ID NO: 424801 - DNA, 120 bp, Artificial Sequence
  ENSG00000151320_3 (sequence is synthesized)
aattgagacctggctccggatgacctcagagagggtccgagacctaacctattcagtccagcaggattcggacagcaagcatgtggatgtacatctagttcaactaaaggacatttgtga

SEQ ID NO: 424802 - DNA, 120 bp, Artificial Sequence
  ENSG00000151320_4 (sequence is synthesized)
agatatttctgatcatgttgagcaaatccatgccctccttgaaacagagttctccctaaagctgctgtcttactctgtcaacgtgatagtggacatccacgcagtgcagctcctctggca

SEQ ID NO: 424803 - DNA, 120 bp, Artificial Sequence
  ENSG00000151320_5 (sequence is synthesized)
ccagcttcgagtctcagtgctggttctgcgggagcgcattctgcaaggtctgcaggacgccaatggcaactacactaggcagacggacattctgcaagctttctctgaagagacaaaaga

SEQ ID NO: 424804 - DNA, 120 bp, Artificial Sequence
  ENSG00000151320_6 (sequence is synthesized)
gggccggcttgattctctaacagaagtggatgactcaggacaattaaccatcaaatgttctcaaaattacttgtctctggattgtggcattactgcattcgaactgtctgactacagtcc

SEQ ID NO: 424805 - DNA, 120 bp, Artificial Sequence
  ENSG00000151320_7 (sequence is synthesized)
aagtgaggatttgctcagtgggctaggtgacatgacctctagccaagtcaaaaccaaaccctttgactcttggagctacagtgagatggaaaaggagtttcctgagcttatccgaagtgt

SEQ ID NO: 424806 - DNA, 120 bp, Artificial Sequence
  ENSG00000151320_8 (sequence is synthesized)
tggtttacttacggtagctgctgactctatctctaccaatggcagtgaagcagttactgaggaggtatctcaagtatctctctcagtagacgacaaaggtggatgtgaggaagacaatgc

SEQ ID NO: 424807 - DNA, 120 bp, Artificial Sequence
  ENSG00000151320_9 (sequence is synthesized)
ttctgcagtcgaagagcaaccaggcttaacactgggggtgtcatcatcttcaggagaagctctgacaaatgctgctcaaccctcctctgagactgtgcagcaagaatccagttcctcctc

SEQ ID NO: 424808 - DNA, 120 bp, Artificial Sequence
  ENSG00000151320_10 (sequence is synthesized)
ccatcatgatgcaaagaatcagcagcctgttccttgtgaaaatgcaacccccaaacgaaccatcagagattgctttaattataacgaggactctcccacgcagcctacattgccaaaaag

SEQ ID NO: 424809 - DNA, 120 bp, Artificial Sequence
  ENSG00000151320_11 (sequence is synthesized)
aggactttttcttaaagaggaaacttttaagaatgatctgaaaggcaatggtggaaagaggcaaatggttgatctaaagcctgagatgagcagaagcaccccttcgctagtagatcctcc

SEQ ID NO: 424810 - DNA, 120 bp, Artificial Sequence
  ENSG00000151320_12 (sequence is synthesized)
tgacagatccaaactttgcctggtattgcagtcttcttaccccaacagcccttctgctgccagccagtcttatgagtgtttacacaaggtggggaatgggaaccttgaaaacacagtcaa

SEQ ID NO: 424811 - DNA, 120 bp, Artificial Sequence
  ENSG00000151320_13 (sequence is synthesized)
atttcacattaaagaaatttcttccagcctgggaaggcttaacgactgctataaagagaaatctcgacttaaaaagccacacaagacctcagaagaggtgcctccatgccgaacacctaa

SEQ ID NO: 424812 - DNA, 120 bp, Artificial Sequence
  ENSG00000151320_14 (sequence is synthesized)
acgggggactggttcaggcaaacaagctaaaaatacaaagagctcagcagtgccaaatggagagctttcttatacttccaaggccatagaggggccacaaacaaattctgcttccacatc

SEQ ID NO: 424813 - DNA, 120 bp, Artificial Sequence
  ENSG00000151320_15 (sequence is synthesized)
ctcacttgagccttgtaatcagagaagttggaatgccaaattgcaattgcagtcagaaacatccagttcaccagcttttactcagagcagtgaatcctctgttggctcagacaacatcat

SEQ ID NO: 424814 - DNA, 120 bp, Artificial Sequence
  ENSG00000151320_16 (sequence is synthesized)
gtctccggtgccacttctttcaaaacacaaaagcaaaaaaggtcaagcctcctctccaagtcacgtcactaggaatggtgaggttgtggaggcctggtatggctctgatgaatacctagc

SEQ ID NO: 424815 - DNA, 120 bp, Artificial Sequence
  ENSG00000151320_17 (sequence is synthesized)
actgccctctcaccttaagcagacagaagtattggctttgaagttggaaaacctaacaaagcttctgcctcagaaacccagaggagaaaccatccagaatattgatgactgggaactgtc

SEQ ID NO: 424816 - DNA, 120 bp, Artificial Sequence
  ENSG00000151320_18 (sequence is synthesized)
tgaaatgaattcagattctgaaatctatccaacctatcatgtcaaaaagaagcatacaaggctaggcagggtgtctccaagctcatctagtgacatagcctcttcactaggggagagcat

SEQ ID NO: 424817 - DNA, 120 bp, Artificial Sequence
  ENSG00000151320_19 (sequence is synthesized)
tgaatctgggcccctgagtgacattctttctgatgaggagtccagtatgcctctcgctggcatgaaaaagtatgctgatgagaagtcagaaagagcttcatcctctgagaaaaatgagag

SEQ ID NO: 424818 - DNA, 120 bp, Artificial Sequence
  ENSG00000151320_20 (sequence is synthesized)
ccattctgccactaaatcagctttaattcagaaactgatgcaagatattcagcaccaagacaactatgaagccatatgggaaaaaatagaggggtttgtaaacaaactggatgaattcat

SEQ ID NO: 424819 - DNA, 120 bp, Artificial Sequence
  ENSG00000151320_21 (sequence is synthesized)
tcaatggttaaatgaagccatggaaactacagaaaattggactccccctaaagcagagatggatgaccttaaactgtatctggagacacacttgagttttaagttgaatgtagacagtca

SEQ ID NO: 424820 - DNA, 120 bp, Artificial Sequence
  ENSG00000151320_22 (sequence is synthesized)
ttgtgctctcaaggaagctgtggaggaggaaggacaccaacttcttgagcttattgcatctcacaaagcaggactgaaggacatgctgcggatgattgcaagtcaatggaaggagctgca

SEQ ID NO: 424821 - DNA, 120 bp, Artificial Sequence
  ENSG00000151320_23 (sequence is synthesized)
gaggcaaatcaaacggcagcacagctggattctcagggctctggataccatcaaagccgagatactggctactgatgtgtctgtggaggatgaggaagggactggaagccccaaggctga

SEQ ID NO: 424822 - DNA, 120 bp, Artificial Sequence
  ENSG00000151320_24 (sequence is synthesized)
ggttcaactatgctacctggaagcacaaagagatgctgttgagcagatgtccctcaagctgtacagcgagcagtataccagcagcagcaagcgaaaggaagagtttgctgatatgtcaaa

SEQ ID NO: 424823 - DNA, 120 bp, Artificial Sequence
  ENSG00000151320_25 (sequence is synthesized)
agttcattcagtgggaagcaatgggcttctggactttgattcagaatatcaggagctctgggattggctgattgacatggagtcccttgtgatggacagccacgacctgatgatgtcaga

SEQ ID NO: 424824 - DNA, 120 bp, Artificial Sequence
  ENSG00000151320_26 (sequence is synthesized)
ggagcagcagcagcatctttacaagcgatacagtgtggaaatgtccatcagacacctgaaaaagacggagctgcttagtaaggttgaagctttgaagaaaggtggcgttttactaccaaa

SEQ ID NO: 424825 - DNA, 120 bp, Artificial Sequence
  ENSG00000151320_27 (sequence is synthesized)
tgatctccttgaaaaagtggattcaattaatgaaaaatgggaactgcttgggaaaaccctaggagagaagatccaggacacaatggcagggcacagtgggtcgagtccacgtgacctgct

SEQ ID NO: 424826 - DNA, 120 bp, Artificial Sequence
  ENSG00000151320_28 (sequence is synthesized)
ctctcctgaaagtggaagcctggtaaggcagctggaggtcaggatcaaagaactgaaaggatggctaagagatacagagcttttcatcttcaattcctgtctgagacaagaaaaggaagg

SEQ ID NO: 424827 - DNA, 120 bp, Artificial Sequence
  ENSG00000151320_29 (sequence is synthesized)
aacaatgaatactgagaaacaactgcaatactttaagtccctctgtcgtgaaatcaagcaacgacgtcgaggagttgcctccattctgcgactatgccagcatcttttggatgaccggga

SEQ ID NO: 424828 - DNA, 120 bp, Artificial Sequence
  ENSG00000151320_30 (sequence is synthesized)
gacttgcaatctgaatgcagaccaccagcccatgcagctgatcattgtaaatcttgaaagaaggtgggaagccattgtcatgcaagccgtccagtggcaaacacgtctacaaaagaagat

SEQ ID NO: 424829 - DNA, 120 bp, Artificial Sequence
  ENSG00000151320_31 (sequence is synthesized)
gggaaaggaatctgagactttgaatgtgattgatcctggcttgatggacctaaatgggatgagtgaggatgccctggaatgggatgaaatggacataagtaacaagttaattagtttgaa

SEQ ID NO: 424830 - DNA, 120 bp, Artificial Sequence
  ENSG00000151320_32 (sequence is synthesized)
tgaggaatcaaatgaccttgatcaagaactccaacctgttatcccttccttgaagcttggagagacaagtaatgaggaccctggttatgacgaggaggctgataaccatgggggatctca

SEQ ID NO: 424831 - DNA, 120 bp, Artificial Sequence
  ENSG00000151320_33 (sequence is synthesized)
gtatgcctcaaatattactgccccctctagtccacacatttaccaggtgtacagcctccacaatgttgaactctatgaggacaaccacatgccatttctgaaaaacaatccaaaggtcac

SEQ ID NO: 424832 - DNA, 120 bp, Artificial Sequence
  ENSG00000151320_34 (sequence is synthesized)
tggcatgacacagcctaatgttttaactaagagtctcagtaaagactcttcattttcatctaccaaatctttgccagatcttctaggtggttccaatttggtaaagccctgcgcatgtca

SEQ ID NO: 424833 - DNA, 120 bp, Artificial Sequence
  ENSG00000151320_35 (sequence is synthesized)
tggaggagacatgagccagaattcaggcagtgagagtggaattgtcagtgaaggagacacagaaaccactaccaactctgaaatgtgcttgctcaatgcagtggatgggtccccaagtaa

SEQ ID NO: 424834 - DNA, 120 bp, Artificial Sequence
  ENSG00000151320_36 (sequence is synthesized)
ccttgaaactgaacatctggacccacaaatgggagatgcagttaacgtgttaaagcaaaaatttacagatgagggggaaagcattaagcttccaaatagctctcagtcgtccatttcacc

SEQ ID NO: 424835 - DNA, 120 bp, Artificial Sequence
  ENSG00000151320_37 (sequence is synthesized)
agtgggttgtgtaaatggaaaagttggagatttaaacagtattaccaaacatacccctgactgtttgggagaagaattacaaggaaaacatgatgtgtttacattttatgattactcata

SEQ ID NO: 424836 - DNA, 120 bp, Artificial Sequence
  ENSG00000151320_38 (sequence is synthesized)
cctccaaggctcaaaactcaaattaccaatgataatgaaacagtcacaaagcgaaaaagcgcatgtggaggatcccctgcttcgtggtttttattttgataaaaaatcatgcaaatctaa

SEQ ID NO: 424837 - DNA, 120 bp, Artificial Sequence
  ENSG00000151320_39 (sequence is synthesized)
acatcagactacagagttacaaccagatgtacctccccatgaaaggattttggcaagtgcatctcatgaaatggatcgcatttcatataaaagtggcaatatagaaaagacattcactgg

SEQ ID NO: 424838 - DNA, 120 bp, Artificial Sequence
  ENSG00000151320_40 (sequence is synthesized)
catgcagaatgccaaacagctctcccttttatctcatagttcatctattgagtccctttctccagggggtgatttatttggattgggcatctttaaaaatggcagtgacagcctccagcg

SEQ ID NO: 424839 - DNA, 120 bp, Artificial Sequence
  ENSG00000151320_41 (sequence is synthesized)
aagcacttctttagaaagttggttgacttcctataaaagcaatgaagatctctttagctgtcacagctctggggatataagcgtgagcagtggctcagttggtgaactaagtaaaagaac

SEQ ID NO: 424840 - DNA, 120 bp, Artificial Sequence
  ENSG00000151320_42 (sequence is synthesized)
attagatctcctgaatcgtttggagaatatccagagcccctcagagcaaaagataaaacgaagtgtttctgatatcactcttcaaagcagttcccaaaagatgtcctttactggccagat

SEQ ID NO: 424841 - DNA, 120 bp, Artificial Sequence
  ENSG00000151320_43 (sequence is synthesized)
gtcattggacatagcatcttctatcaatgaagactcagcggcatctctaacagaacttagcagcagtgacgagctctctctttgctcagaggatattgtgttacacaagaacaagatccc

SEQ ID NO: 424842 - DNA, 120 bp, Artificial Sequence
  ENSG00000151320_44 (sequence is synthesized)
ggaatcgaatgcatcgttcaggaagcgtctgactcgttcagtggctgatgaaagcgatgtcaatgtcagcatgattgttaatgtctcttgcacctctgcttgcactgatgatgaagatga

SEQ ID NO: 424843 - DNA, 120 bp, Artificial Sequence
  ENSG00000151320_45 (sequence is synthesized)
cagcgacctgctctccagctctacccttaccttgactgaagaagagctgtgcatcaaagatgaggatgacgactccagtattgcaacagatgatgaaatttatgaagactgcaccttgat

SEQ ID NO: 424844 - DNA, 120 bp, Artificial Sequence
  ENSG00000151320_46 (sequence is synthesized)
gtcagggctagactacataaagaatgaattacagacctggattaggccaaaattgtctttgacaagagataagaaaaggtgcaatgtcagtgatgagatgaagggcagtaaagatataag

SEQ ID NO: 424845 - DNA, 120 bp, Artificial Sequence
  ENSG00000151320_47 (sequence is synthesized)
tagcagtgagatgaccaatccctctgatactctgaatattgagacccttctaaatggctctgtaaaacgtgtctctgaaaataatggaaatggtaagaattcatctcatacccatgagtt

SEQ ID NO: 424846 - DNA, 120 bp, Artificial Sequence
  ENSG00000151320_48 (sequence is synthesized)
agggacaaagcgtgaaaataagaaaactattttcaaagttaataaagatccatatgtggctgacatggaaaatggcaatattgaaggtattccagaaaggcaaaagggaaaaccgaatgt

SEQ ID NO: 424847 - DNA, 120 bp, Artificial Sequence
  ENSG00000151320_49 (sequence is synthesized)
gacttcaaaggtatcagaaaatcttggttcacatgggaaagagatttcagagagtgagcattgtaagtgtaaagcacttatggatagtttagatgattcaaatactgctggcaaggaatt

SEQ ID NO: 424848 - DNA, 120 bp, Artificial Sequence
  ENSG00000151320_50 (sequence is synthesized)
tgtttcccaagatgttagacatcttccaaagaaatgtccaaatcaccaccattttgaaaatcaaagcactgcctctactcccactgagaagtctttctcagaactggctttagaaaccag

SEQ ID NO: 424849 - DNA, 120 bp, Artificial Sequence
  ENSG00000151320_51 (sequence is synthesized)
gtttaacaacagacaagactctgatgcactgaaatcatctgatgatgcaccgagtatggctggaaaatctgctggttgttgcctagcacttgaacaaaacggaacagaggaaaatgcttc

SEQ ID NO: 424850 - DNA, 120 bp, Artificial Sequence
  ENSG00000151320_52 (sequence is synthesized)
tatcagcaacatttcctgttgcaactgtgagccagatgttttccatcaaaaagatgccgaagattgttcagtacacaactttgttaaggaaatcattgacatggcttcgacagccctaaa

SEQ ID NO: 424851 - DNA, 120 bp, Artificial Sequence
  ENSG00000151320_53 (sequence is synthesized)
aagtaaatctcaacctgaaaacgaggtggctgctcctacttcattaactcaaatcaaggagaaagtgttggagcattctcaccggcccatccagctgagaaaaggggacttttattcgta

SEQ ID NO: 424852 - DNA, 120 bp, Artificial Sequence
  ENSG00000151320_54 (sequence is synthesized)
cttatctctctcatctcatgacagtgattgtggggaggtcaccaattacatagaagagaaaagcagcactccattgccactagacaccactgactcgggcttagatgacaaggaagatat

SEQ ID NO: 424853 - DNA, 120 bp, Artificial Sequence
  ENSG00000151320_55 (sequence is synthesized)
tgaatgcttttttgaggcctgtgttgagggtgactctgatggagaggagccttgtttctctagtgctcctccaaatgaatctgcagttcccagcgaagctgcaatgccactacaagcaac

SEQ ID NO: 424854 - DNA, 120 bp, Artificial Sequence
  ENSG00000151320_56 (sequence is synthesized)
agcatgttcttctgagttcagtgatagttctctttcagctgatgatgcagatacagtggctctttcaagtccttcctctcaggaaagagctgaggttggaaaggaagtgaatggtttgcc

SEQ ID NO: 424855 - DNA, 120 bp, Artificial Sequence
  ENSG00000151320_57 (sequence is synthesized)
ccaaacttccagtggctgtgcagaaaacttagagtttactccttcaaagcttgacagtgaaaaggaaagttccggaaaaccaggtgaatctggaatgccagaagaacataatgctgcttc

SEQ ID NO: 424856 - DNA, 120 bp, Artificial Sequence
  ENSG00000151320_58 (sequence is synthesized)
agccaaatctaaagttcaagacctctccttgaaggcaaatcagccaacagacaaggccgcattgcatcccagccccaaaactttaacctgtgaagaaaatcttctaaaccttcatgaaaa

SEQ ID NO: 424857 - DNA, 120 bp, Artificial Sequence
  ENSG00000151320_59 (sequence is synthesized)
acgacatagaaatatgcataggtagaatgtaccccctccccaagcatgaaaatcatctcactgaaagatacgcctggctgcaactcaggggtggcctcatcctcccgccctgggctggcc

SEQ ID NO: 424858 - DNA, 120 bp, Artificial Sequence
  ENSG00000151320_60 (sequence is synthesized)
tctggttccatcacgtttgtcactgccgtttattacattgacttctcccaagatgaatcttccttccaaatgtgttttctccacacaagccttgtgatctgaatgtgtgcgctggttctc

SEQ ID NO: 424859 - DNA, 120 bp, Artificial Sequence
  ENSG00000151320_61 (sequence is synthesized)
tttaggtgatcgtctttgaagttcagcaaagctgcttgttctcccatggattcctgtcccaagctacctctaccaaccctctctctccagctagacttttctctttgcctcctcccttcc

SEQ ID NO: 424860 - DNA, 120 bp, Artificial Sequence
  ENSG00000151320_62 (sequence is synthesized)
tggatttttttttaacggtataatgactgtgtttattgaaagagttttacctaaaaagccaacatttgaattggttgcagcatagagaagaaacactggtccttctttcaaaattaagca

SEQ ID NO: 424861 - DNA, 120 bp, Artificial Sequence
  ENSG00000151320_63 (sequence is synthesized)
actattaaaagcgccattttatttatttcatttaaaaaataatctatgcagcatttcaagaaacaaccatatggtgttgtatattataaactggtgacattctactattgaattatgtac

SEQ ID NO: 424862 - DNA, 120 bp, Artificial Sequence
  ENSG00000151320_64 (sequence is synthesized)
aacattttcattttttatgcttcttgaggtggtaatgagaaaaaagttttttaaaaaagtgtgccttgctgtatttcttataccatttattaaaaagctgctttcacggtaaaattatgt

SEQ ID NO: 424863 - DNA, 120 bp, Artificial Sequence
  ENSG00000151320_65 (sequence is synthesized)
tggtttgaaaggaggaaatagcaaggttaagatgtgtgaataatttctgtatatatgtataaccaagtacaaacattgatgtataatgacagtataaaatgctttcatgtttgtgatgtc

SEQ ID NO: 424864 - DNA, 120 bp, Artificial Sequence
  ENSG00000151320_66 (sequence is synthesized)
tagtgatgtggaaaatataagccttaaatccattagattgcatggtaattaaaattggcataataaacacagattattgggggaaaaggaaaattagtgatctcttctactatgttcttt

SEQ ID NO: 424865 - DNA, 120 bp, Artificial Sequence
  ENSG00000151320_67 (sequence is synthesized)
accaaattgttgcatctggttctgaaaaagtatagcatgtagcagcttccaaacatattcatattgcttaagaggcttaacattacctaaactagagactagacgtaaagccttcagttt

SEQ ID NO: 424866 - DNA, 120 bp, Artificial Sequence
  ENSG00000151320_68 (sequence is synthesized)
tcaaaatctttctggtcactataaagatcttggaacagcaaatgattaaatgtcagttcccctaaaccaataaacatttatactagattttttatttccacttatcattaatgatttaat

SEQ ID NO: 424867 - DNA, 120 bp, Artificial Sequence
  ENSG00000151320_69 (sequence is synthesized)
gttggatttcaggtaccttgtatgtcttaatttattttaaatatttattttgaatgagtttgatagaaagctagtagaaaagtacagaaaatttgactattatttatagatttcaggtat

SEQ ID NO: 424868 - DNA, 120 bp, Artificial Sequence
  ENSG00000151320_70 (sequence is synthesized)
atttatatgtgtaaaagaaattgacaaagaaatatttcatctggcctttactgactcctgttaaatgcagttttaaatttatatcgtaacacctacttaagtgcctgacacagtaggtat

SEQ ID NO: 424869 - DNA, 120 bp, Artificial Sequence
  ENSG00000151320_71 (sequence is synthesized)
tcaataaaaatttactgaattaaaggattaaattaggtgacatggtgacatctatccctttattttgacactaaaacatggacacaactagaaagaggtacaatgcaatataaagtcaca

SEQ ID NO: 424870 - DNA, 120 bp, Artificial Sequence
  ENSG00000151320_72 (sequence is synthesized)
atagataatatatatcaaatttctaaaaggtaaagaatgttgtgggttcatgcagtcacaggaatgacaatcattcaacagatagttcagaaacactttttatctgcaaggcactattct

SEQ ID NO: 424871 - DNA, 120 bp, Artificial Sequence
  ENSG00000151320_73 (sequence is synthesized)
agatccagaagatgcaatgttgaacaaacagacaaagccctgccctcagaaggctgtcctgcattaggaacaagtgaacacgcaaatgacatgaagtatttgttgcagagctgaggaaca

SEQ ID NO: 424872 - DNA, 120 bp, Artificial Sequence
  ENSG00000151320_74 (sequence is synthesized)
gagcaaatgtagtgatagaagcgcaatgagagaagcagcagtgggtacaaggaggaagaaaaagggcttgcagagagtggaaagttagtggaatattcatgaaacttcattgcaggggta

SEQ ID NO: 424873 - DNA, 120 bp, Artificial Sequence
  ENSG00000151320_75 (sequence is synthesized)
atagaagaaaaagtaaattgggaggacttaatggaaggtcttttaaaaagttaacttggagcttctgtatgtaaaatgctaggtaataaggacactttgtacaggctgttttgcacctga

SEQ ID NO: 424874 - DNA, 120 bp, Artificial Sequence
  ENSG00000151320_76 (sequence is synthesized)
ttttatttatcattagtgccacgccaagatcatttagacgatgcttatctgtaattctaccactttaataactatttgtatttttatgccccttctgatcttttccatatgtatttctaa

SEQ ID NO: 424875 - DNA, 120 bp, Artificial Sequence
  ENSG00000151320_77 (sequence is synthesized)
atggataaattattctaggcttcttaataggtagtaatttgttcaaaagcggttttagccagacatctagttgcagtgttcaagaggattatgggggaaagagattagagataattgtct

SEQ ID NO: 424876 - DNA, 120 bp, Artificial Sequence
  ENSG00000151320_78 (sequence is synthesized)
agttagggggcagctggagaaaataagctaagtttgcaataacagagtacacaagtatagtggcccaggatgtagtgaaagaacaaatcctagagtctttgaaatttctaagggcattct

SEQ ID NO: 424877 - DNA, 120 bp, Artificial Sequence
  ENSG00000151320_79 (sequence is synthesized)
agacctctgttgggatatggtattattttacatactgacacaacctaaattttctttgggtagtaactaatgtcaagtctacatcgactggtaaaacattcaaagaacaaactgacaatg

SEQ ID NO: 424878 - DNA, 120 bp, Artificial Sequence
  ENSG00000151320_80 (sequence is synthesized)
atgttctacctacttgttacatgctcatggaagaccgtgcagtattgaaagtatttgttaattatctgcttagtattaacactaaatttgtagaatgactttcaggtttgttgaacaatg

SEQ ID NO: 424879 - DNA, 120 bp, Artificial Sequence
  ENSG00000151320_81 (sequence is synthesized)
ccttttcaggttggaagaagaaaaatagcctcaatctcccaccccatgtaggcactacctccccaattacccttagaaaatgatcacaccaactctgcctacacacttccagtgatagtg

SEQ ID NO: 424880 - DNA, 120 bp, Artificial Sequence
  ENSG00000151320_82 (sequence is synthesized)
gctcattgtctgttaaggcaaactgttccactgttgggcatatctctttgttagaaagttctttcttaggttgctaaaatctgcctagtaccccgctaccctgttctgtcttatggagca

SEQ ID NO: 424881 - DNA, 120 bp, Artificial Sequence
  ENSG00000151320_83 (sequence is synthesized)
gcccagattatctttactccctctttctcatggcaaccctgaagataatcaaggccagttactcatcatctcccaaccactgtttcctcaactgcccttcatatgtcatggttttcagat

SEQ ID NO: 424882 - DNA, 120 bp, Artificial Sequence
  ENSG00000151320_84 (sequence is synthesized)
ccattccaacctgactgaatgttaacagacagaattcttcacattaaggaactgtcttcatcatcatacatgtagaaaagaatctgaacatttaagtgcgaagttttctctagaaatata

SEQ ID NO: 424883 - DNA, 120 bp, Artificial Sequence
  ENSG00000151320_85 (sequence is synthesized)
ttcaagatatgtttattctattattgtaaatttcaaacaataaataaataagaatccatgacttccttcagtggcccagtccagtgcctaagtcatctggaatcttctccttacatcgaa

SEQ ID NO: 424884 - DNA, 120 bp, Artificial Sequence
  ENSG00000151320_86 (sequence is synthesized)
tacaaacctaacctgtttccaagtagggcactccctccgcttatttattcatttattcagccattcagcaaacatttattaaatggctacctatgtgaggcactatatttggcattaggt

SEQ ID NO: 424885 - DNA, 120 bp, Artificial Sequence
  ENSG00000151320_87 (sequence is synthesized)
atataaaggcaactaacacatggtatctgtctccaaaggtttacagcttttcttctgaaagtgccttttgtgtccttgaatagagtgattatgacttttgtctcaattaaatgatgacct

SEQ ID NO: 424886 - DNA, 120 bp, Artificial Sequence
  ENSG00000151320_88 (sequence is synthesized)
catttagtttctgatgaagtttctctacatttaagaaaatctagtgagcaaaacggtatacaaaaaatcatctggatctgactaccagaaaaagtaaagtggttttaattacagaaagaa

SEQ ID NO: 424887 - DNA, 120 bp, Artificial Sequence
  ENSG00000151320_89 (sequence is synthesized)
aaatatttgttagatttctggtcactgaataaatatgcatcttatacaacacagaacaacctaaatttagggcttctggaaacctgagtttgatgactttgttgtgtttggttcatccgg

SEQ ID NO: 424888 - DNA, 120 bp, Artificial Sequence
  ENSG00000151320_90 (sequence is synthesized)
actaggtttcacccattctataattcctagaaacaaactagatgaaaatatcaatgaaatgatccaggtctgtcttacaagtcaatttgctttagcttccaaaagaagttgaaatttttt

SEQ ID NO: 424889 - DNA, 120 bp, Artificial Sequence
  ENSG00000151320_91 (sequence is synthesized)
actcacttttcaagtgtcatataattcttatattttaaatataaatcgaaccaactaaatttaccgctatatttttttctacatattcttttttcaattttcattttgaaaaaattcaga

SEQ ID NO: 424890 - DNA, 120 bp, Artificial Sequence
  ENSG00000151320_92 (sequence is synthesized)
tttgaaaaaattcagacctatgtaaaagttgagagtagaacaaagatacttggtactcatccctcaggttcatttattgttaatatttcaccatatttacttcatctctgtatacacaca

SEQ ID NO: 424891 - DNA, 120 bp, Artificial Sequence
  ENSG00000151320_93 (sequence is synthesized)
cacttttttgtatgattaaatcatttgaaattaaattgtagagtatgatacttcatctgcaaatacttcagcatgtgttagctgagaacatgggtattcttctgcaagtctacaatacca

SEQ ID NO: 424892 - DNA, 65 bp, Artificial Sequence
  ENSG00000151320_94 (sequence is synthesized)
gctgagaacatgggtattcttctgcaagtctacaataccatcttcatactcaagaaatgtaacat

SEQ ID NO: 424893 - DNA, 120 bp, Artificial Sequence
  ENSG00000151320_95 (sequence is synthesized)
gcactccagcctgggcaagaagagtgaaattttgtctcaaaaaaaaaaatgtaatattaatacaataatacctgatagtttatattcaagtttctctaactacccaaattatgtcctctt

SEQ ID NO: 424894 - DNA, 120 bp, Artificial Sequence
  ENSG00000151320_96 (sequence is synthesized)
tctctaactacccaaattatgtcctcttatagttgtttttgttttaatacagtattcaaacaaagatcacacactgcttttagtttccaagtctttttttttttttttttttttaaatct

SEQ ID NO: 424895 - DNA, 120 bp, Artificial Sequence
  ENSG00000151320_97 (sequence is synthesized)
tagtttccctgtgcttttactctatttttctttgggcttttataacatcgacagttctgaaaagtccaggccagttttgcagaatgatccacaatcttgatgggtctagttgttttctca

SEQ ID NO: 424896 - DNA, 120 bp, Artificial Sequence
  ENSG00000151320_98 (sequence is synthesized)
ttgttaaactcagggtaaacttttttttgtcaagtaaatacataggtgactttgcattcacagccactctttaatgaagattgattgaataactgacattcctgatatgttttaaagttc

SEQ ID NO: 424897 - DNA, 120 bp, Artificial Sequence
  ENSG00000151320_99 (sequence is synthesized)
acagcttactctttcagcccatgcttcatccatctaaggcaagggtcagcaaactgtggcacgtgggccaaattcagctcgttgcctgttctggtttgacccatttgaacaattgacgag

SEQ ID NO: 424898 - DNA, 120 bp, Artificial Sequence
  ENSG00000151320_100 (sequence is synthesized)
cttcaaacaatttttacattttttagtagttaaacaaaagaatacttcatgacatgtgaaaatcatatgaaatttaaattttggtgtccatgtataaagttttattagaacacatccacg

SEQ ID NO: 424899 - DNA, 120 bp, Artificial Sequence
  ENSG00000151320_101 (sequence is synthesized)
cacatttgtttccatagtctacggatgctttgacactatacaaagttacgtacttgcaacaaaagccatatggcctgcaaaacctaaaacatttactatctggatcattacagaaagttt

SEQ ID NO: 424900 - DNA, 120 bp, Artificial Sequence
  ENSG00000151320_102 (sequence is synthesized)
tctgatccctggtctatgatattctaaattccgacacattttcttaggatagatttccatttgcaaattcagtgtaagacataaacaccggcaatagttgtgttttttttttctttttac

SEQ ID NO: 424901 - DNA, 120 bp, Artificial Sequence
  ENSG00000151320_103 (sequence is synthesized)
ttcctagattttattgcattctcaacttgtttcatattaccttaaaaaataaagtgcacttaaagattgtttcacatccacagtttgtttaaggatttaaatttagttcactattactgc

SEQ ID NO: 424902 - DNA, 120 bp, Artificial Sequence
  ENSG00000151320_104 (sequence is synthesized)
ctggctttgattgatttagagggttagtcaattacagactaaataattagttcaatcaaaaccatcagaaaaattgacacaaactcacttccatgcaccagtaaactggaatcctttctt

SEQ ID NO: 424903 - DNA, 120 bp, Artificial Sequence
  ENSG00000151320_105 (sequence is synthesized)
taaatgtttttctaaagcaatccgaggaattaaattcaggccatttcacagtcagtttttttcaaattcatttttcaactcaaaggcaaaaccatgatcaaaatattgtatatagtacac

SEQ ID NO: 424904 - DNA, 120 bp, Artificial Sequence
  ENSG00000151320_106 (sequence is synthesized)
cttcagttcccaactgctgaatttaccaaggaattaagtattcaccacaaaccctggtgtggccataggtggacactctaattaaaaagaagatgttcaaaaagaatagtccttcttttc

SEQ ID NO: 424905 - DNA, 120 bp, Artificial Sequence
  ENSG00000151320_107 (sequence is synthesized)
tttcttaaattcacctttgatagcactgccacacttctgggaagggaacgttcaaggaaaccgtatagccacttcttttttaaaagcagccacataccttctatataacaatggcccttt

SEQ ID NO: 424906 - DNA, 120 bp, Artificial Sequence
  ENSG00000151320_108 (sequence is synthesized)
agtttgagagttgccacatatttgcatttccagagtaaaataataggatgacatgggcaggtcaggcccacaatagtatggtttctttggcaaaggcattttggccaatgccgtaagacc

SEQ ID NO: 424907 - DNA, 120 bp, Artificial Sequence
  ENSG00000151320_109 (sequence is synthesized)
attctggcccttgattaatgggttctcaccaaagcagaaattacgcagagcttatttgtccttgcattttgaagtaaatcattgcctgcataaagcaactcttttgtctcttttccattg

SEQ ID NO: 424908 - DNA, 120 bp, Artificial Sequence
  ENSG00000151320_110 (sequence is synthesized)
caacacacaggagttggaatgtgttcatacgtgtaagactgtcttagtctgcccagactgcttggactgtgttgtttataaacaacagaatttactgctcaaagttctggagactgggaa

SEQ ID NO: 424909 - DNA, 120 bp, Artificial Sequence
  ENSG00000151320_111 (sequence is synthesized)
gttcaagatcaagatgctagcagattcagtgtctgaggagggctcactttctgtttcattgatgcaccttactgcatcctcatctggtggaaggggcagtgaacaagctcccttgggccc

SEQ ID NO: 424910 - DNA, 120 bp, Artificial Sequence
  ENSG00000151320_112 (sequence is synthesized)
cttttacgaaagcactaattccattcatgaagacttcacaacttaatcacctcccaaaggctccatctcttaatacgatcacattggggattaggtttcaacataccaattttgggggta

SEQ ID NO: 424911 - DNA, 120 bp, Artificial Sequence
  ENSG00000151320_113 (sequence is synthesized)
cacaaatattgaggtgatagacacttccaggcttttgccaaacattagtaaacaatttccagtgaatactctgccccattctctcctactcaagcagagtatcttaaggcagcagattgg

SEQ ID NO: 424912 - DNA, 120 bp, Artificial Sequence
  ENSG00000151320_114 (sequence is synthesized)
agtgacgttactttaagggtaactttgaagccaatctaattcatactcaaaaaagtattccaaaattttggtactctattatgggttacaaaccccttgtgacaccatatttaagagcca

SEQ ID NO: 424913 - DNA, 120 bp, Artificial Sequence
  ENSG00000151320_115 (sequence is synthesized)
ctgctattgaggcttgcactctcttgcttgaaatgaggtgctcccaaacctgggagatggctcccaaagaacaagagaatcaaccccatcgtgcatttatgtgctgccccaggtaatcca

SEQ ID NO: 424914 - DNA, 120 bp, Artificial Sequence
  ENSG00000151320_116 (sequence is synthesized)
caggcacaaagaacttgagcttcctggtgtgttcttcagaaaaaaaggaattcaaaaagcaaatgtaaaatggaacagaacttggcctcaaagtgatgttggaaaaatagccagtcctga

SEQ ID NO: 424915 - DNA, 120 bp, Artificial Sequence
  ENSG00000151320_117 (sequence is synthesized)
tgacttggtcgaggtaacttgctttgcccactgttaactacagagccatatgataatggaacatcaaggttttccagataaacccaaagccttttgtgtctataccttgtaacctgtcat

SEQ ID NO: 424916 - DNA, 120 bp, Artificial Sequence
  ENSG00000151320_118 (sequence is synthesized)
gttcatcaacgttttagactgtaccattgctctttctcccttctttattcattttatatggggacgtttgactaggatcaccagatgtagatttggtaatttttccataccattaagatg

SEQ ID NO: 424917 - DNA, 120 bp, Artificial Sequence
  ENSG00000151320_119 (sequence is synthesized)
tatgataatggattttattaatttaacacaaatgcataaaaatatgatgtaataagaaacaatcctgaaattattaaaacatttctttgtccttacttaaacctaacctgccattttaaa

SEQ ID NO: 424918 - DNA, 120 bp, Artificial Sequence
  ENSG00000151320_120 (sequence is synthesized)
agacacctaactctataaacaaatgggccattacagacgtaaaacaaatattattcagtgaaatttattcaaggacttaaaatgattgaaggcattaggaacataaaaatgcataagatc

SEQ ID NO: 424919 - DNA, 120 bp, Artificial Sequence
  ENSG00000151320_121 (sequence is synthesized)
ctcttttaaatcccaatattccctaaccactggtttataaaaaatactctaaggtttatagaattagtttggttccgttagttgatcaagttacttacactaagtcagcaattcaaaaca

SEQ ID NO: 424920 - DNA, 120 bp, Artificial Sequence
  ENSG00000151320_122 (sequence is synthesized)
aataattccctctgtgtgtgtttgtttgcttgcaaatatgtttcattttaaagtgtctttttatatagaaagccaagttggtggaatttatcttgtcattaaaatgatgtgaaaatcaaa

SEQ ID NO: 424921 - DNA, 120 bp, Artificial Sequence
  ENSG00000151320_123 (sequence is synthesized)
attaatgaaaaatgggaactgcttggggtatttgcatttttattactgtttgtaggttatgtgtacattttttgcgtagtgaagtactctgtccgatttctaatttgaggcacaaatatc

SEQ ID NO: 424922 - DNA, 120 bp, Artificial Sequence
  ENSG00000151320_124 (sequence is synthesized)
tctctctttcaattcactacctacgtttcaaacaagctattcatgctattatgggaaagacactgcttttcctcttctgttgattttttttttttctgagcttgtcccctctcagatttt

SEQ ID NO: 424923 - DNA, 120 bp, Artificial Sequence
  ENSG00000151320_125 (sequence is synthesized)
aataattttggttctttaatacatgaaaaagtaagtaaaatatgccatgtattatgggtatgcaccaagtcaactataatacagtatatctgatatatactgactgtcatgcttgaatga

SEQ ID NO: 424924 - DNA, 120 bp, Artificial Sequence
  ENSG00000151320_126 (sequence is synthesized)
atgttaatagaatttattctgaaggtacatgtgagagacatctactgtttaactatttactgtacccttaagatgaaaagtggagttgtcactacagctttcaagtcacactaaagccac

SEQ ID NO: 424925 - DNA, 120 bp, Artificial Sequence
  ENSG00000151320_127 (sequence is synthesized)
caaaacaaagatgcaaatttgacccaaatctgaattgcagaattgaatcagcctgtgttttgtgcctcaatttccagctcacttttaacaaaagccaaaaaaaaaaaaagtttcatgtaa

SEQ ID NO: 424926 - DNA, 120 bp, Artificial Sequence
  ENSG00000151320_128 (sequence is synthesized)
ttcatttcacgcaatgatgggctgggtctcagccaaagactgagatgcaagaatctggcaaaaaggcaatatagagattctgttacccagagaccaggatggcactgtgcaggagacagt

SEQ ID NO: 424927 - DNA, 120 bp, Artificial Sequence
  ENSG00000151320_129 (sequence is synthesized)
actgtccttttgttggaagacagctgagagaaaagttaaactgtattttttcatcagcttctctcctaaattgccttcacttcaaatcaagggtaagctatatttgtcaattacctaaat

SEQ ID NO: 424928 - DNA, 120 bp, Artificial Sequence
  ENSG00000151320_130 (sequence is synthesized)
aattaattataacagccaagtatggacgatgtcagttatggagcataattttgcatgccttccatttttctaccttttaaaaaaaattttagataaataatactccaaaaatattttgaa

SEQ ID NO: 424929 - DNA, 120 bp, Artificial Sequence
  ENSG00000151320_131 (sequence is synthesized)
taaaaagctcttcatgtaccttgatgatttggaggaatgccagtattctgtttatgccatgcctaatctaggagattaaaaaactgcaggtttaagtccttgtttctcatttaaattcac

SEQ ID NO: 424930 - DNA, 120 bp, Artificial Sequence
  ENSG00000151320_132 (sequence is synthesized)
tacactctgcagttgtgcaaagtaacttaaaatgttaaaagtttttcatctaacatattgttgccttttaataataattaatggctttcactttataatacggtgacttaaatcaaaacc

SEQ ID NO: 424931 - DNA, 120 bp, Artificial Sequence
  ENSG00000151320_133 (sequence is synthesized)
tgccgtattctacagcattcattgatctcaaacaggagaaatgtggttagtgtatgacattttaaaaggttgtttactacatagataagaatggcaaccttatgtgcttgataaagtagc

SEQ ID NO: 424932 - DNA, 120 bp, Artificial Sequence
  ENSG00000151320_134 (sequence is synthesized)
gataagtctgtttacattgcattttaatatatccattggtaatttgataaataacaataatatttttagaaaattgtttaagttatgtcacatgtattgcttcctcaacagaattttaag

SEQ ID NO: 424933 - DNA, 120 bp, Artificial Sequence
  ENSG00000151320_135 (sequence is synthesized)
tcaacattattttgaaaaaagaaataatatttagctatcctttatgaatcagagactttaaaaatagttgccattttgacaaaaacatcattcaaatacaacatgcaggtttgcagtgag

SEQ ID NO: 424934 - DNA, 120 bp, Artificial Sequence
  ENSG00000151320_136 (sequence is synthesized)
agagtagggtgagggaagatttttttaaatcctgtaccacactaacaccaccaggcatactgttttaattggcatgattacattttaattggcatgaaaaaaattaaagacaaggatttt

SEQ ID NO: 424935 - DNA, 120 bp, Artificial Sequence
  ENSG00000151320_137 (sequence is synthesized)
aacttctaacaatagtaaaatagaggtatatggtttttaatattactttcatctaaggtgaacagtgtggaatggaaatacattagaatgaaatgtcagtggtgcgtacagtttaatctg

SEQ ID NO: 424936 - DNA, 120 bp, Artificial Sequence
  ENSG00000151320_138 (sequence is synthesized)
tgaaattgtgtcccctgtgctgcatattactctgtctcaattgcatattaaacaaccctatcaaggcaggcattggcatctgctgtgctgacacaaattgtgaattaaatgaaattgatg

SEQ ID NO: 424937 - DNA, 120 bp, Artificial Sequence
  ENSG00000151320_139 (sequence is synthesized)
tcctctgtcgtatatttatgaagacggaccattctctgaagtattctgtttatgaagaatttatgattgcaaactgttccagaacaaaaaagtggcaataaattcttttttgtgacccta

SEQ ID NO: 424938 - DNA, 120 bp, Artificial Sequence
  ENSG00000151320_140 (sequence is synthesized)
acatatgtggctttcatcccagcacattgggcaggacaccactgttttcttcgtttggttaatagttacacttccttgacacctcatacagctgggtcatggatctgctgctgttctcaa

SEQ ID NO: 424939 - DNA, 88 bp, Artificial Sequence
  ENSG00000151320_141 (sequence is synthesized)
acctcatacagctgggtcatggatctgctgctgttctcaatgtgagcatcacggacaggatctctgtcacccaggctggagtgcggtg

SEQ ID NO: 424940 - DNA, 79 bp, Artificial Sequence
  ENSG00000151320_142 (sequence is synthesized)
cactgtcttttttcatcaatgctaagagaatttaattctttccacatgaagcgattctacttcctcaacacgtgtttcg

SEQ ID NO: 424941 - DNA, 120 bp, Artificial Sequence
  ENSG00000151320_143 (sequence is synthesized)
ttccacatgaagcgattctacttcctcaacacgtgtttcgttttgtgacacaacaacttggaggaggtgaaattcattaacaaggaataaatatcttctctttatggagccacttcctta

SEQ ID NO: 424942 - DNA, 120 bp, Artificial Sequence
  ENSG00000151320_144 (sequence is synthesized)
acccctcaaatcttcctagaccacttccatccaacgtagaataagtgaaccatatgaaattgctgtttttgtgggtcaaaggcaattgaatggtagtctcacatggttcaacatctgtat

SEQ ID NO: 424943 - DNA, 120 bp, Artificial Sequence
  ENSG00000151320_145 (sequence is synthesized)
ctgacctctcaagaaccctggagtctcttcttgggagaatgagagaacaacagagcaaagagaattctaaccgaagatctctctctgtctacaacatccccactccaggtcttaggccag

SEQ ID NO: 424944 - DNA, 120 bp, Artificial Sequence
  ENSG00000151320_146 (sequence is synthesized)
gaattctaaccgaagatctctctctgtctacaacatccccactccaggttattgtggggacaatatatgaggcaatttcctcgcagagttctgacctggaaatgaagttgacatccttat

SEQ ID NO: 424945 - DNA, 120 bp, Artificial Sequence
  ENSG00000151320_147 (sequence is synthesized)
gctttgggcttttttctcaacctgtctcacatgcctcctttctaggtcttaggccaggagagaggagaacacacatctgagcacctgctcctcctgccttattttttattctccaaatcc

SEQ ID NO: 424946 - DNA, 120 bp, Artificial Sequence
  ENSG00000151320_148 (sequence is synthesized)
agtctgggagctgagtgactgaggatttgaaaccttgctatagttacagttcataacaagtgtctaggcagttagaccttaagtgttcaggtatggaaagaaagtcatatgttatgtttt

SEQ ID NO: 424947 - DNA, 120 bp, Artificial Sequence
  ENSG00000151320_149 (sequence is synthesized)
agattctgtttgtaaagctggttaactagagacagctgatgaaaaaccaaatcgacttgagttacaagatctgggctttctctgctctgctttcaacctgttggttggtggtggagtagc

SEQ ID NO: 424948 - DNA, 120 bp, Artificial Sequence
  ENSG00000151320_150 (sequence is synthesized)
agtattgcatcctacagatgtgctgtaaacatcaaaagaagacggtgggatcaggagatgtttggacagctctttattcagaacatcaaggactgttgacagttgaataaaaagggcgga

SEQ ID NO: 424949 - DNA, 120 bp, Artificial Sequence
  ENSG00000151320_151 (sequence is synthesized)
ggaatatgaacagctaaaaaccaggattttgttactaagaaataagggaagaatagatgggggcggtggggggagagtagtcaatatcacagtggttttatgttcatattatttcctggc

SEQ ID NO: 424950 - DNA, 120 bp, Artificial Sequence
  ENSG00000151320_152 (sequence is synthesized)
tcttggggctaccatgtagaaaatcaaaacacctctttctgtttttgttatgagctatggtttcttaatttagaaatctggcttaatttagaaatcctgtttcttctgtgaagtatcatt

SEQ ID NO: 424951 - DNA, 120 bp, Artificial Sequence
  ENSG00000151320_153 (sequence is synthesized)
gcttccagatattcttcagtaagaagtatgagaaaccagctgaaccaaatttagaatctctccgccttctttggattcagaagctgtgctgtacaggaaaaccagatcaagaacctttaa

SEQ ID NO: 424952 - DNA, 120 bp, Artificial Sequence
  ENSG00000151320_154 (sequence is synthesized)
aggttttgattttaactgagacctctggtttgggtgaatgtatttggttgctaaaaaggcaaagtaggtatctctgcttcctgattaacagtcttctcagggagaatattatttgttttc

SEQ ID NO: 424953 - DNA, 120 bp, Artificial Sequence
  ENSG00000151320_155 (sequence is synthesized)
ctggaaacgtgatagcaggaaagaggcaaggtgtaggctagctagcataggctaaatgatatggctggataacagacagaagccttgaagtggctttctggaatcagctcccccaaaacc

SEQ ID NO: 424954 - DNA, 120 bp, Artificial Sequence
  ENSG00000151320_156 (sequence is synthesized)
gctgtggcacctagagactgtgttctgtaatttccagtgaggaattgtccaggaagaaaagcacagtaccaggtttcaaaccattatctttagagataaacatggaaataattaattctt

SEQ ID NO: 424955 - DNA, 120 bp, Artificial Sequence
  ENSG00000151320_157 (sequence is synthesized)
ggaaaggaatctgtgagtgatgctttttttaagcataattgtctgtcattttctcagacaaaaaataattctttcaggcttggaaacggtgttcatcttataaatggttttactaactaa

SEQ ID NO: 424956 - DNA, 120 bp, Artificial Sequence
  ENSG00000151322_0 (sequence is synthesized)
ccgcccgcccacgccccccacccgggaggggggagagaggcaaaaagtaagagaggaaaaaaaatagcaggaagatggcgcccaccaagcccagctttcagcaggatccttccaggcgag

SEQ ID NO: 424957 - DNA, 120 bp, Artificial Sequence
  ENSG00000151322_1 (sequence is synthesized)
aacgtttacaagcattgagaaaggagaaatcccgagatgctgctcgctcccgccggggaaaagaaaactttgagttctatgaattggccaagttgttgcctcttcctgcagccattacca

SEQ ID NO: 424958 - DNA, 120 bp, Artificial Sequence
  ENSG00000151322_2 (sequence is synthesized)
gccagctcgacaaggcatccatcattcgacttacaattagctatctgaaaatgagggactttgctaaccagggggaccctccgtggaacttgcgaatggaaggccctccacctaacacat

SEQ ID NO: 424959 - DNA, 120 bp, Artificial Sequence
  ENSG00000151322_3 (sequence is synthesized)
cagtaaaaggtgcacagcgaaggagaagccccagtgcactagccattgaagtatttgaagcacatttgggaagccacattttgcagtccctggatggctttgtatttgcactaaatcagg

SEQ ID NO: 424960 - DNA, 120 bp, Artificial Sequence
  ENSG00000151322_4 (sequence is synthesized)
aaggaaaatttttgtacatttccgaaacagtctccatctacctaggcctctcacaagtggagctgacaggcagcagtgtctttgactatgtccaccccggagatcacgtggagatggctg

SEQ ID NO: 424961 - DNA, 120 bp, Artificial Sequence
  ENSG00000151322_5 (sequence is synthesized)
agcagctgggcatgaagctcccccctgggcggggtctcctgtcacagggcactgctgaggacggagccagctcagcatcttcctcctctcagtcggagacccccgagccagtggagtcaa

SEQ ID NO: 424962 - DNA, 120 bp, Artificial Sequence
  ENSG00000151322_6 (sequence is synthesized)
ccagccccagtctgctaaccactgacaacactcttgagcgttcctttttcatccgaatgaaatctactctgaccaaacgcggtgtgcacatcaaatcatcaggatataaggtgattcaca

SEQ ID NO: 424963 - DNA, 120 bp, Artificial Sequence
  ENSG00000151322_7 (sequence is synthesized)
taacaggccggctacgcctgagagtgtcgctgtcccacgggaggaccgtccccagccaaatcatgggtctcgtggttgttgcgcatgccttgcctccccctacgatcaatgaagtcagaa

SEQ ID NO: 424964 - DNA, 120 bp, Artificial Sequence
  ENSG00000151322_8 (sequence is synthesized)
ttgactgccatatgttcgtcactcgagtaaatatggacctcaatatcatttactgtgaaaataggattagtgattatatggatctgacccctgtagatatcgtagggaagagatgctacc

SEQ ID NO: 424965 - DNA, 120 bp, Artificial Sequence
  ENSG00000151322_9 (sequence is synthesized)
acttcatccatgctgaagacgtggagggcatcaggcacagtcacttggacttgctgaataagggtcagtgtgtgacaaagtactatcgctggatgcagaagaacggaggatatatttgga

SEQ ID NO: 424966 - DNA, 120 bp, Artificial Sequence
  ENSG00000151322_10 (sequence is synthesized)
tacagtccagtgccaccatagctattaatgccaagaatgcaaatgaaaagaatatcatctgggtgaattaccttcttagcaatcctgagtacaaggacacacccatggacatcgcacagc

SEQ ID NO: 424967 - DNA, 120 bp, Artificial Sequence
  ENSG00000151322_11 (sequence is synthesized)
tcccccatctgccggagaaaacttccgaatcctcggagacatccgactctgagtcagactctaaagacacctcaggtattacagaggacaacgagaactccaagtccgacgagaagggga

SEQ ID NO: 424968 - DNA, 120 bp, Artificial Sequence
  ENSG00000151322_12 (sequence is synthesized)
accagtccgagaacagcgaagacccggagcccgaccggaagaagtcgggcaacgcgtgtgacaacgacatgaactgcaacgacgacggccacagctccagtaacccggacagccgcgaca

SEQ ID NO: 424969 - DNA, 120 bp, Artificial Sequence
  ENSG00000151322_13 (sequence is synthesized)
gcgacgacagcttcgagcactcggactttgagaaccccaaggcgggcgaggacggcttcggtgctctgggcgcgatgcagatcaaggtggagcgctacgtggagagcgagtcggacctgc

SEQ ID NO: 424970 - DNA, 120 bp, Artificial Sequence
  ENSG00000151322_14 (sequence is synthesized)
ggctgcagaactgcgagtcactcacgtccgacagcgccaaggactcggacagcgcaggcgaggcgggcgcgcaggcctccagcaagcaccagaagcgcaagaaaaggcggaaacggcaaa

SEQ ID NO: 424971 - DNA, 120 bp, Artificial Sequence
  ENSG00000151322_15 (sequence is synthesized)
caaaagggcggcagcgccagccgccggcgcctgtccagcgcgtcgagcccaggcggcctggacgcgggcctggtggagcccccgcggctgctgtcctcccccaacagtgcctcggtgctc

SEQ ID NO: 424972 - DNA, 120 bp, Artificial Sequence
  ENSG00000151322_16 (sequence is synthesized)
tcaagacggagatctcagaacccatcaatttcgacaatgacagcagcatctggaactacccgcccaaccgggagatctccaggaacgagtccccctacagcatgaccaagccccccagct

SEQ ID NO: 424973 - DNA, 120 bp, Artificial Sequence
  ENSG00000151322_17 (sequence is synthesized)
catgaccaagccccccagctctgagcacttcccgtccccgcagggcggcggcggtgggggtggcggtggcggggggctgcacgtggccattcccgactcggtcctcaccccgcccggcgc

SEQ ID NO: 424974 - DNA, 80 bp, Artificial Sequence
  ENSG00000151322_18 (sequence is synthesized)
agactcagttcggcgcctcggccaccgcggccctggcccccgtcgcctccgacccgctgtcacccccgctctcggcgtcc

SEQ ID NO: 424975 - DNA, 120 bp, Artificial Sequence
  ENSG00000151322_19 (sequence is synthesized)
gcgggggcggcggcgcggggggcggcggccccagcgcgtccaactccttgctgtacactggggacctggaggcgctgcagaggttgcaggcgggcaacgtcgtgctcccgctggtgcaca

SEQ ID NO: 424976 - DNA, 120 bp, Artificial Sequence
  ENSG00000151322_20 (sequence is synthesized)
gggtgaccgggaccctggccgccaccagcacggccgcgcagagggtctacaccacgggcaccatccgctacgcgcccgccgaggtgaccctggccatgcagagcaacctgctgcccaacg

SEQ ID NO: 424977 - DNA, 120 bp, Artificial Sequence
  ENSG00000151322_21 (sequence is synthesized)
cgcacgctgttaacttcgtggacgttaacagccccggctttggcctcgaccccaagacgcccatggagatgctctaccaccacgtgcaccggctcaacatgtcaggaccgttcggcggcg

SEQ ID NO: 424978 - DNA, 120 bp, Artificial Sequence
  ENSG00000151322_22 (sequence is synthesized)
cagtgagcgcagctagcctgacgcagatgcccgccggcaacgtgttcaccacggccgagggactcttctccacgctgcccttccccgtctacagcaacggcatccacgcggcacagactc

SEQ ID NO: 424979 - DNA, 120 bp, Artificial Sequence
  ENSG00000151322_23 (sequence is synthesized)
tggagcgcaaggaggactgaggcgccgcccgtcctgggcccggccaggccccgcttggaggaggcatcgtcggcattttcgtttagacctttaattctagcactttgaattcgagcaggt

SEQ ID NO: 424980 - DNA, 120 bp, Artificial Sequence
  ENSG00000151322_24 (sequence is synthesized)
tttgccttcagagggtcagacgaccagttgcctgccgttttgtcttcttctaaggtgtgtgttgggttgttttgctttcctttgcatctttattaagatgtctttcatgtgtatatgcct

SEQ ID NO: 424981 - DNA, 120 bp, Artificial Sequence
  ENSG00000151322_25 (sequence is synthesized)
ctgccatagaatactcagtcttgtggtcaagagagttctcaagtgacaaccattggggtttcttcataaagatcttgatatgatcaagatggaaagagacaagcataaacaatgtgccct

SEQ ID NO: 424982 - DNA, 120 bp, Artificial Sequence
  ENSG00000151322_26 (sequence is synthesized)
gtttgactaagtcaaatgaaatagggtggtttttgtttctgttcctaattcctttaaaaaatagggggaatagtattttagaattttatgcagaatttaattctctttttacggttaaga

SEQ ID NO: 424983 - DNA, 120 bp, Artificial Sequence
  ENSG00000151322_27 (sequence is synthesized)
ttttaagattttcttacttgcacataaaaataatttgggttcttaaacttaatttctggcctgtgactagaatgtttaaaaaaaaaaaagtcggactaaatgttaattactgaaacatta

SEQ ID NO: 424984 - DNA, 120 bp, Artificial Sequence
  ENSG00000151322_28 (sequence is synthesized)
acttaatttctaaaaccatggtgctatcatttattaatctgtaatgtcttcatacaaaatgcagctcctgggctgggttttgggggaaaaaaaaaaaatgtgttctgtcctggtctggag

SEQ ID NO: 424985 - DNA, 120 bp, Artificial Sequence
  ENSG00000151322_29 (sequence is synthesized)
tccgttgctgcagtctccttggttagttaagacaaagccctcattaacgtttgctgcaggacttaaaattttttacctcccaactaacaaacatagcctcacattaaatttaatgggtca

SEQ ID NO: 424986 - DNA, 120 bp, Artificial Sequence
  ENSG00000151322_30 (sequence is synthesized)
gtaaagccccttttaaaggggctgctggaaaactcaatcaaactgatttgaggagcagtttaggtacatactgccttttgtttagctttttgttttccttactcagtctaactgaggcta

SEQ ID NO: 424987 - DNA, 120 bp, Artificial Sequence
  ENSG00000151322_31 (sequence is synthesized)
attttgcaacttcaataacacttcggagtaaaagaaggaaaatatttaacatgtttttggtttttttcatttcttgcttaaaacaaaaaggaaggttgtatttggggggactggtttgat

SEQ ID NO: 424988 - DNA, 120 bp, Artificial Sequence
  ENSG00000151322_32 (sequence is synthesized)
ttgatggaatttctttccctttggttcttatttctgggttgaaaccaataagttttaaaactaaagaatgggttaataagcttcagacagataactgcaactgaaaactgcacattaagt

SEQ ID NO: 424989 - DNA, 120 bp, Artificial Sequence
  ENSG00000151322_33 (sequence is synthesized)
aaaaaagaaaaagaaaaagaaaaaaaatcctattttgtctttgttgccagaaatcagtgtggtgtcaaacactccaaatgactgtcaagtataaattcttcttccacttcatttttggca

SEQ ID NO: 424990 - DNA, 120 bp, Artificial Sequence
  ENSG00000151322_34 (sequence is synthesized)
cttccacttcatttttggcagctgtttgttaaggcatctaataacagatgtgagaactgtaatgtgtacaatgtgtatgtgtccttggctgtcagtcccattgcagtttcaatgtgtgtt

SEQ ID NO: 424991 - DNA, 120 bp, Artificial Sequence
  ENSG00000151322_35 (sequence is synthesized)
tctatatgcagtatatactaagctaatgtagttgttttgtcctttgtcttatctgtgctctatctctagtccggagtggtacagtcccattcctgcagtcctagtgaatcagtgattctt

SEQ ID NO: 424992 - DNA, 120 bp, Artificial Sequence
  ENSG00000151322_36 (sequence is synthesized)
gggggttagtgggttttgtgtggtggccttcctctgtaatgtcaccctatgctgcttctactgtctgtgaatcttccgttttaccttttaaaattcctgctgttgctttgctggtgtata

SEQ ID NO: 424993 - DNA, 120 bp, Artificial Sequence
  ENSG00000151322_37 (sequence is synthesized)
ttctccctacctctcctctctttccctccctttcccatctccccctctccctcctcttcattccttccccatccccaaaatctctttcattctcagagataaaaagactcttaactagct

SEQ ID NO: 424994 - DNA, 120 bp, Artificial Sequence
  ENSG00000151322_38 (sequence is synthesized)
caaggttaatggagccatttttcccacaacggaattctgggtatgactctgtcttctggagtgcaacacaaagcactgaagaataatgctcagatatattaaataaattgatgccatata

SEQ ID NO: 424995 - DNA, 120 bp, Artificial Sequence
  ENSG00000151322_39 (sequence is synthesized)
gcctcagttgttaacattcccagagtcccttgtgctctacctataagcagtgggtgcttttctttggtttcctttcaggttggctgatggagcaatatataaagcaattaccagtgagac

SEQ ID NO: 424996 - DNA, 120 bp, Artificial Sequence
  ENSG00000151322_40 (sequence is synthesized)
agaaaattctttcaaaggtcaaccaacatttttaagaaacaaaatgggaggggataatggaatctagaattgtcatatatatttgtttacttgtgcaatgctaatatagtaactcggctg

SEQ ID NO: 424997 - DNA, 120 bp, Artificial Sequence
  ENSG00000151322_41 (sequence is synthesized)
tcctttgaatatcactgtgttgagtagattcctctaggacctttgatttcatgagttgggcccaaaccgtggtggaataataacaaaaagaagttaaatgccacaaattttaatagtgag

SEQ ID NO: 424998 - DNA, 120 bp, Artificial Sequence
  ENSG00000151322_42 (sequence is synthesized)
cttacttgaaggatttaagtaggtttaggaggtgaagaaggccgatggagaaatttacagattaattttggaagctctactctagctatcgaacaatcaaaggaatgcacctatcagcta

SEQ ID NO: 424999 - DNA, 120 bp, Artificial Sequence
  ENSG00000151322_43 (sequence is synthesized)
caaagaacagctagacagctgttttttttcttttataaatgtttctgtgttgtgtcaaaatgatttctggtgatttaaactaacagataatcacagctgctgtctaaattcatagtgttg

SEQ ID NO: 425000 - DNA, 120 bp, Artificial Sequence
  ENSG00000151322_44 (sequence is synthesized)
ttacaaaatgaaaaaaaaaaaaaaaacacttcattacctgtgaagactgtgtctgtgtttttaactatttcttgtacaaatatatgaaaacttttatgaggagactggtgccaagtagct

SEQ ID NO: 425001 - DNA, 120 bp, Artificial Sequence
  ENSG00000151322_45 (sequence is synthesized)
agctgaataatggggaaagggatattctgttcgtaaaaatcttagcagtgttaccaactctacgatatatatataaaaaaataattaaaacgttacaaagcgacagctatggtacatttg

SEQ ID NO: 425002 - DNA, 120 bp, Artificial Sequence
  ENSG00000151322_46 (sequence is synthesized)
ttttgtgtgaagctaaccggacctaacttcctgagtgcctggcttattttgaaacattttttttcattgaccattgataatgctgcaaatcagaaatgtacatacttcatttacaacagg

SEQ ID NO: 425003 - DNA, 120 bp, Artificial Sequence
  ENSG00000151322_47 (sequence is synthesized)
gttctttttatacttttgtagattctcatacatgtcacatacatggttgtctttatgtaacttaattttttcatccgcaggtgccattttcataataaacttctcttggatttgttacta

SEQ ID NO: 425004 - DNA, 120 bp, Artificial Sequence
  ENSG00000151322_48 (sequence is synthesized)
atggcgcccaccaagcccagctttcagcaggatccttccaggcgagaacgaataactgcccagcatcctctgcccaaccaatcagaatgtaggaaaatctacagatatgacggaatctac

SEQ ID NO: 425005 - DNA, 120 bp, Artificial Sequence
  ENSG00000151322_49 (sequence is synthesized)
tccgaaacagtctccatctacctaggcctctcacaagtaagtaaaacaattttagattcttggcagcgattatgaagccttcttcagcctcatgtttttccttcttcaaggaatattctg

SEQ ID NO: 425006 - DNA, 120 bp, Artificial Sequence
  ENSG00000151322_50 (sequence is synthesized)
tttagcatgaattatcaaatgtattatttaatggctttacctgactgttctctcaaagtcagtgagaaacctgtgtgtcagtgttgaacattcagaataaacttgtgctcaaaaacttta

SEQ ID NO: 425007 - DNA, 120 bp, Artificial Sequence
  ENSG00000151322_51 (sequence is synthesized)
ttgaagaaacacaattcctcaggaacagtgagcgagggcagttcatttctccccattaagcaaaggtctccaacaaatatgtttgatgcctttctttccgatttacttttatctcatttt

SEQ ID NO: 425008 - DNA, 120 bp, Artificial Sequence
  ENSG00000151322_52 (sequence is synthesized)
ccgtacccagaataatttgagagtgctgaaaataaaccactccaccattcactattgtgctattctcctaatttttctggtatcttgccaactaataaacagagaaggtatgctttcaaa

SEQ ID NO: 425009 - DNA, 120 bp, Artificial Sequence
  ENSG00000151322_53 (sequence is synthesized)
cagtgaataaaagatggatagcttctaactctagaatgaagagttcaggcttaagagtgagagctatcactggaaaatgtccttctcaattcagaactacagcacaattcatgttgcaga

SEQ ID NO: 425010 - DNA, 120 bp, Artificial Sequence
  ENSG00000151322_54 (sequence is synthesized)
ttgtgccatcttcatacactggactctttccttcctacatcgttaatgtgtttgagcacagacactgtgttcacctctccagtcacatcgacgtccaagcagatgttctgtggcaaagtt

SEQ ID NO: 425011 - DNA, 120 bp, Artificial Sequence
  ENSG00000151322_55 (sequence is synthesized)
acaaagcatttatgtcactttttaaaattaatcaaattctcccttggaaggagtttagttcctctggctttaaaagatattattgctgaaaaataaactctgtatacttgcttttaaaga

SEQ ID NO: 425012 - DNA, 120 bp, Artificial Sequence
  ENSG00000151322_56 (sequence is synthesized)
agagaactcagccagggcaaggggctcttgtggctttttgggtgggtgtgagttcatagaggggaaaatcaatactgtaccaggatttagacaatttagcaaaatgcatgaggcagtact

SEQ ID NO: 425013 - DNA, 120 bp, Artificial Sequence
  ENSG00000151322_57 (sequence is synthesized)
ttggatgatgaataactacagctgcatggctaacccattggttgtgtaaagtatgggttatcatgttttgtctaaattttcaggcaaaatctagcctgttttgtggcattaggatcatca

SEQ ID NO: 425014 - DNA, 120 bp, Artificial Sequence
  ENSG00000151322_58 (sequence is synthesized)
ttatagtagtatgatttttatgctattatacttacgctatgtcccgaatgtttttaaggccagcaaaatggaaacagtagagtacttgcctgaatgcaaataaacttcagtttcaactta

SEQ ID NO: 425015 - DNA, 120 bp, Artificial Sequence
  ENSG00000151322_59 (sequence is synthesized)
cacctacagtgtatctggtactgtacaacagagaactgcaacctcagagtgagaagacagagaaatcacctaccatgcctcacagtgggaaaataaattgggggaaggatcacatcctga

SEQ ID NO: 425016 - DNA, 120 bp, Artificial Sequence
  ENSG00000151322_60 (sequence is synthesized)
gattttgtcacctgagactgctgttactctgaaaatgatagcattaacttgtctaattctgagaaagacatttgttagctaatgtagactattaatagagcaaacataaaactggttggg

SEQ ID NO: 425017 - DNA, 120 bp, Artificial Sequence
  ENSG00000151322_61 (sequence is synthesized)
tattagcctagcaagtatctgaccagagcattatggcattacttagattacatagatattcagtaagatatttcaggtgtgatttctgcagtgaatacagtgtttacaccagaaaacaat

SEQ ID NO: 425018 - DNA, 120 bp, Artificial Sequence
  ENSG00000151322_62 (sequence is synthesized)
gtcaggaatcctataatgtaatagggaatattattcaccatagtatattaaaagagaacggagccttgctgctgaaccaattttgatctcttcctttggtcttccttccttccttgtttc

SEQ ID NO: 425019 - DNA, 120 bp, Artificial Sequence
  ENSG00000151322_63 (sequence is synthesized)
tctctttcttattatttcataatgaaaaaaaagaatgctagactcaaatatttacagtgctttcagaattcaataaaatgcatacataaaaatgattttaatagtaccttgatactgaaa

SEQ ID NO: 425020 - DNA, 120 bp, Artificial Sequence
  ENSG00000151322_64 (sequence is synthesized)
atattatctagctacttatcattgtggtctgatttttaaatttatttctcatcagacacaatacagagcaattcagagcaggtagaattctcctgtcagatgctcacacacaacttcagt

SEQ ID NO: 425021 - DNA, 120 bp, Artificial Sequence
  ENSG00000151322_65 (sequence is synthesized)
tgtgccagattctgccctcagcaatgtgagcaaacttcaaacagaaatgcacatgaatagttgaaggaaaatgctggatcccacctgttgcctcttctgggaagtaatatgtctataatg

SEQ ID NO: 425022 - DNA, 120 bp, Artificial Sequence
  ENSG00000151322_66 (sequence is synthesized)
tttataaattttaataacccatacagcgctttatctttcaatattaaatttatattttcctaaagtttgacttctttgggcaatatattttattctctagtatcttagaaaatcaatcta

SEQ ID NO: 425023 - DNA, 120 bp, Artificial Sequence
  ENSG00000151322_67 (sequence is synthesized)
ctaatgtatgtccattaataaataagtatgctcttatcaagcagttatcagcacatttataaaattacattgaaatcttcattttaaatatgatgttttcttcatctaactgaacgtgct

SEQ ID NO: 425024 - DNA, 120 bp, Artificial Sequence
  ENSG00000151322_68 (sequence is synthesized)
gtgatctttattgagggctggaaacatatttgttgattctgacaaggtgaattgtattcgtgtttaccttctgctccccaagattataattgaaatgaatttttcaaaatagttcctttt

SEQ ID NO: 425025 - DNA, 120 bp, Artificial Sequence
  ENSG00000151322_69 (sequence is synthesized)
gatgaagatcccatactgatgaaagttaaatgaacagaagtattagtttgaaatagatacacgaatgtaagcccaacttataaattgattctagttgataatatcaagctacgcctgtaa

SEQ ID NO: 425026 - DNA, 120 bp, Artificial Sequence
  ENSG00000151322_70 (sequence is synthesized)
ggtcttagaaacaataaatacacctcaatgcatggacaattgaaggaaaaaaaccttaacaagtaaaacacaatttttactcattggacttgagtttacaaaatgtaaggccagagttag

SEQ ID NO: 425027 - DNA, 120 bp, Artificial Sequence
  ENSG00000151322_71 (sequence is synthesized)
agtttatggctttagtggacattttctggaactcattttactgtcactctctagttttgaaatagtttttggtagaattttggtgggaaaaaaggaaatacaaagaaagcagtatttgaa

SEQ ID NO: 425028 - DNA, 120 bp, Artificial Sequence
  ENSG00000151327_0 (sequence is synthesized)
gcgggtgagtcccacttcccgacagcctggctcggccagcgactgggcggggagaccaaggatggaagtgggcttaccggccattaccctctttctcaccagcgccagcagccctgtggt

SEQ ID NO: 425029 - DNA, 120 bp, Artificial Sequence
  ENSG00000151327_1 (sequence is synthesized)
ggcgacgacgatggaccaggagccagtgggcggtgtggaacgaggagaagccgtcgcagcctcgggagctgcggccgccgcggcattcggggaatctgcagggcagatgagtaacgaaag

SEQ ID NO: 425030 - DNA, 120 bp, Artificial Sequence
  ENSG00000151327_2 (sequence is synthesized)
aggctttgaaaatgtagaactgggagtcataggaaaaaagaagaaagtcccaaggagagtcatccactttgttagtggtgaaacaatggaagaatatagcacagatgaagacgaagttga

SEQ ID NO: 425031 - DNA, 120 bp, Artificial Sequence
  ENSG00000151327_3 (sequence is synthesized)
tggcctggagaagaaagatgttttgcctactgttgatccgacaaaacttacctggggtccctacttatggttttacatgcttcgggctgctacatcaactctctcagtgtgtgacttcct

SEQ ID NO: 425032 - DNA, 120 bp, Artificial Sequence
  ENSG00000151327_4 (sequence is synthesized)
tggagagaagattgcatctgttttgggtatcagcaccccaaagtaccaatatgccattgatgaatattatcggatgaagaaggaggaagaagaagaagaagaagaaaacaggatgtctga

SEQ ID NO: 425033 - DNA, 120 bp, Artificial Sequence
  ENSG00000151327_5 (sequence is synthesized)
agaagcagaaaaacaatatcaacagaataaattgcagactgattccattgttcagacagatcaaccagagacagtgatatccagctcatttgtgaatgtcaattttgaaatggagggaga

SEQ ID NO: 425034 - DNA, 120 bp, Artificial Sequence
  ENSG00000151327_6 (sequence is synthesized)
cagtgaagtaattatggaaagcaagcaaaatccagtctctgtcccaccataaaatgaaatgactatcaagcttcaaactcttaagttttttttttttaatacaaaaactttcacattctt

SEQ ID NO: 425035 - DNA, 120 bp, Artificial Sequence
  ENSG00000151327_7 (sequence is synthesized)
tattcagtgggacttaatacaattatttatattttaaattattaaagtatctggaaagggaaaatgttttcttcatttttaggatctatctagcaaaagccagatctgaaattcagatat

SEQ ID NO: 425036 - DNA, 120 bp, Artificial Sequence
  ENSG00000151327_8 (sequence is synthesized)
ttgtactgtttttactgtgtatagaaattagtgctttggttttaaaatgatcttttaaaaaagttaaggacatcctagagccttaatagttaagaagagttaaattatcaagcctatttg

SEQ ID NO: 425037 - DNA, 120 bp, Artificial Sequence
  ENSG00000151327_9 (sequence is synthesized)
tgcatttgctttttttgaaaaaggtaagttgctgattaagtctaattggaattgataattccatagtcttagattaaaatgaggatattttctcctagattttctcatgttatgccatgc

SEQ ID NO: 425038 - DNA, 120 bp, Artificial Sequence
  ENSG00000151327_10 (sequence is synthesized)
atttatatatctaaccattaatttcacactaaggatgcttcaccatataataaaaggagcaagatggaagcactttgaattttctttcattgagaataactgttttatgtaagaatctgt

SEQ ID NO: 425039 - DNA, 120 bp, Artificial Sequence
  ENSG00000151327_11 (sequence is synthesized)
atttataacaccagatattaagataggcttccattttttaatgcaagccacttacttaatcttgtattctttttcaggactcaaataactagctttgaacataatattaaaacactactt

SEQ ID NO: 425040 - DNA, 120 bp, Artificial Sequence
  ENSG00000151327_12 (sequence is synthesized)
atcctggttatgttatcggttcagcgttaatcctatagaaaagtggtttggaggggattgggggatagtgggacaggtatagatttaatccatcaggagcaattagatattgtataaggt

SEQ ID NO: 425041 - DNA, 120 bp, Artificial Sequence
  ENSG00000151327_13 (sequence is synthesized)
gcaatgatagcctaatgaaattacccgtcattcatcatttagaagtagcaacagtgaagactggacagtttacttgaatctggttggccactcctctacctacttggttatttgtaaacc

SEQ ID NO: 425042 - DNA, 120 bp, Artificial Sequence
  ENSG00000151327_14 (sequence is synthesized)
cactcctctacctacttggttatttgtaaaccttacaaatgtatatattgtgaagctaattttgaaaatattcctaaatatggccaggtacggtgctcacacctgtaatcccagcacttt

SEQ ID NO: 425043 - DNA, 120 bp, Artificial Sequence
  ENSG00000151327_15 (sequence is synthesized)
cacagacacacacacacacacatatatctctaaatgtgtgtatagaaccttttatcagtataacattgatttataattaaatgtgggtgaggaagaatgtgtggagtgtttcagaaattt

SEQ ID NO: 425044 - DNA, 120 bp, Artificial Sequence
  ENSG00000151327_16 (sequence is synthesized)
tgatcttaaaagccttttcagaaactcaaagctttcagaaattaatagttatattaatagccttctaaacagcattaagttttcaattttaatatatctatataaaatatagtgtcaaag

SEQ ID NO: 425045 - DNA, 120 bp, Artificial Sequence
  ENSG00000151327_17 (sequence is synthesized)
aaagtaacatcaatatagtgggtctgtaatggaaatctgtcaatgaacatgaactgagttcttcaactacaggttgaaggataattaaacttttcattaggagtgttcagctacatggat

SEQ ID NO: 425046 - DNA, 120 bp, Artificial Sequence
  ENSG00000151327_18 (sequence is synthesized)
tcatggaatggtggttcatagtaagtgatggtaatctttttattcatgggtgtaaaccctttataacttagtgcttaaaatattaatcttttgattatataatgtcccatgaattatagt

SEQ ID NO: 425047 - DNA, 120 bp, Artificial Sequence
  ENSG00000151327_19 (sequence is synthesized)
ttaccaatagttctaaaacatgctaacctgaccttttccttctaatttgtttttaacttcattcgagatagtacctctcactcacagatatttatttggttatcaagtgaagataggtgt

SEQ ID NO: 425048 - DNA, 120 bp, Artificial Sequence
  ENSG00000151327_20 (sequence is synthesized)
gtctaaaagtgatcttctgaatcctgtctccctagaggtactagtatctagagtttacccagaaaattttatgattgtaacaaaaggaagtagtgacttatgaaggttttgtttcttgaa

SEQ ID NO: 425049 - DNA, 120 bp, Artificial Sequence
  ENSG00000151327_21 (sequence is synthesized)
ttttacttttgctacttgtccaatagtggctagtttatgtttatcaatatagttattcactgtgccttaagtttatactttgtttatgcaaactataaaatttcccataaatgtattcaa

SEQ ID NO: 425050 - DNA, 120 bp, Artificial Sequence
  ENSG00000151327_22 (sequence is synthesized)
aagaaaattgtaatttgatatttaattgccactttggaaaataaaatcatgcatttataaatatcccacaaagttttagtaataaagattgttgattgccctgcttgccagtaagaagga

SEQ ID NO: 425051 - DNA, 120 bp, Artificial Sequence
  ENSG00000151327_23 (sequence is synthesized)
agagattttgaatacatataatgcagaactgtgttgtttatgaatgccaattcatgaagtcttaacaattggttctttatttttgttttcaatttatggccgagtttggttttgctgttt

SEQ ID NO: 425052 - DNA, 120 bp, Artificial Sequence
  ENSG00000151327_24 (sequence is synthesized)
tggactgtctcaactccctgctgatgccaccatacagagtcagatcagcaaccacatcccatcactagcctttgaagtacaacgacacagctgtcttcattttacaagtgcaaaaaccga

SEQ ID NO: 425053 - DNA, 120 bp, Artificial Sequence
  ENSG00000151327_25 (sequence is synthesized)
gcggccgccgcggcattcggggaatctgcagggcaggtaggtggggccgccgaggctgacgtccggggagccgagccgcctccttgccttctccgcgggccgctcttttagcctgcgcgg

SEQ ID NO: 425054 - DNA, 120 bp, Artificial Sequence
  ENSG00000151327_26 (sequence is synthesized)
ccgtcctccgagcaggccgccccagctttggagttcctcctcactgcacccctgtttctgctcactgagaccagcttgtgggaaggagcgccccccgcctcactcaccaaccccttggct

SEQ ID NO: 425055 - DNA, 120 bp, Artificial Sequence
  ENSG00000151327_27 (sequence is synthesized)
cccaaaggctgtccttgcagtagctggaagccaggtgagggcggcttcaaccacttctcagtctcttctggtgcgagcgcctgcctgggcatctgccctttgcttggcatatgccaaacg

SEQ ID NO: 425056 - DNA, 120 bp, Artificial Sequence
  ENSG00000151327_28 (sequence is synthesized)
atctcacctggactatcatgaaagacagctcttgattcctctcttaatttctgtagtaagacttcatcttcagcaggcagctgaaaatacaaggtctttagacaaactcagccaagtgtc

SEQ ID NO: 425057 - DNA, 120 bp, Artificial Sequence
  ENSG00000151327_29 (sequence is synthesized)
tttagacaaactcagccaagtgtcaaccagaaaacatttgaatttacctgtagcctggaagccccacttcaaattgtcccacctttctggatcaaaccaatgtatttctcaaatgtattt

SEQ ID NO: 425058 - DNA, 120 bp, Artificial Sequence
  ENSG00000151327_30 (sequence is synthesized)
tctcatgcctccctaaaatgtatgaaaccaagctgcacccaaaccacctttggtacatgttctcaggatctcttgaaggctgtgtcacaggccatggccactcatatttggctcagaata

SEQ ID NO: 425059 - DNA, 88 bp, Artificial Sequence
  ENSG00000151327_31 (sequence is synthesized)
gctaatttttgtatttttttagtagaggtgggatttcaccatgttagccagggtggtctcacacccttgacctcaagttgttacaagc

SEQ ID NO: 425060 - DNA, 120 bp, Artificial Sequence
  ENSG00000151327_32 (sequence is synthesized)
ggggttacaagcatgagccaccatgcccagccacagtgtaaattttatttgtaattattggatttctggttcaagttgatgtttgaaaaataaaaaaagaaaaatattttaaaaatataa

SEQ ID NO: 425061 - DNA, 62 bp, Artificial Sequence
  ENSG00000151327_33 (sequence is synthesized)
tctgatgcagcttcccaaaggtaacagatgcaaatatgaaccaatacatatatatttctttc

SEQ ID NO: 425062 - DNA, 120 bp, Artificial Sequence
  ENSG00000151327_34 (sequence is synthesized)
tctcgatctcttgacctcgtgatccagccacctctgcctcccacagtgctggggctatagccgtgaggcaccacacccagcctttccctctttttacacaaaggatgtatcaacatacca

SEQ ID NO: 425063 - DNA, 120 bp, Artificial Sequence
  ENSG00000151327_35 (sequence is synthesized)
cctttccctctttttacacaaaggatgtatcaacataccatgaaaactgcttttgtcattccgtaatatattttacagttattccatactgactctcaaagagcttccactctttgagaa

SEQ ID NO: 425064 - DNA, 120 bp, Artificial Sequence
  ENSG00000151327_36 (sequence is synthesized)
taaatagctatatattatatcattgcatagatgtgccatatttaactaggcctctctattgggacatttagttttttcctaatattttgctgcacgaaaaataataccataagggctaag

SEQ ID NO: 425065 - DNA, 120 bp, Artificial Sequence
  ENSG00000151327_37 (sequence is synthesized)
ctaattattcattcatagatattgtggaagaatatagaatacaatttctataagtggacctgctgggttgtagcatatgcacatgtagaattttgatagaccctgggaaacttccacctc

SEQ ID NO: 425066 - DNA, 120 bp, Artificial Sequence
  ENSG00000151327_38 (sequence is synthesized)
cccacaaacgccatgtgaattttatactcccaccagcaatgtgaaggctatttctacagttccgaattctgcacacaggtgtcccaggagcaccacagttaatgtacaggggtgcatcag

SEQ ID NO: 425067 - DNA, 120 bp, Artificial Sequence
  ENSG00000151327_39 (sequence is synthesized)
gatattttaaaattttgagcgaaacagcaacatttgtcagacactgcatgacagatattgctacaagctagaattacgtgctcaaggtagttcacattttcaatactggatctcaatgta

SEQ ID NO: 425068 - DNA, 87 bp, Artificial Sequence
  ENSG00000151327_40 (sequence is synthesized)
ctcaaggtagttcacattttcaatactggatctcaatgtattccttctttttgaggcagggtctcactctgtcacacaggctaaacc

SEQ ID NO: 425069 - DNA, 75 bp, Artificial Sequence
  ENSG00000151327_41 (sequence is synthesized)
ttaattttttgtattttggtagagatggggtatctgcccaccttggcctcccagtgttggaattacaggtgtcag

SEQ ID NO: 425070 - DNA, 120 bp, Artificial Sequence
  ENSG00000151327_42 (sequence is synthesized)
gcccaccttggcctcccagtgttggaattacaggtgtcagccactgtgcctggttattattcctttttaaaaaattttttaaatcaccaaaatgtcatgaatatattccttttttttcga

SEQ ID NO: 425071 - DNA, 120 bp, Artificial Sequence
  ENSG00000151327_43 (sequence is synthesized)
ggcgtgagccaccatgcccagccaaatatactccttttaatgacataaatctttgcaaagctaggttttgatggttcctgtggtaaagtaccacacaaaaattagtgaacaggaaatgag

SEQ ID NO: 425072 - DNA, 120 bp, Artificial Sequence
  ENSG00000151327_44 (sequence is synthesized)
aattcccaggtttaagtagttgtacacatcccattaataactgtacttaagaatgaaataaaaatatcttctttcaacttaagtgtattatttattcaaatggctaataagcttaatgaa

SEQ ID NO: 425073 - DNA, 120 bp, Artificial Sequence
  ENSG00000151327_45 (sequence is synthesized)
tactcattaaattgtttaaaattaactagttaataagtgaaacttttagggatttcttttggctcagaagcactgtgaaaaaattactcaaacactaaaggtgtcaattcaaactttctg

SEQ ID NO: 425074 - DNA, 120 bp, Artificial Sequence
  ENSG00000151327_46 (sequence is synthesized)
atctttgctaatttgataggggaaaaatggcaacttagtgtagatttatctggcatttctcttatgtgaagttagttgtttcttatgattaagaagcatttgaattttactttttataca

SEQ ID NO: 425075 - DNA, 120 bp, Artificial Sequence
  ENSG00000151327_47 (sequence is synthesized)
ttatctatatctttgtccagttttttattgggttaatggctttcttcttgatttctgggagctttttatatattagggtaattggccatttctgactgtttcaggtatttcccccagttt

SEQ ID NO: 425076 - DNA, 120 bp, Artificial Sequence
  ENSG00000151327_48 (sequence is synthesized)
gttgttttctttttactttaacatgggctttgccctatagatctttaaaaatttagctgaatttattgttttctagacttctgggttttgtcatacttagaaaggctttccctattacag

SEQ ID NO: 425077 - DNA, 78 bp, Artificial Sequence
  ENSG00000151327_49 (sequence is synthesized)
ctgggttttgtcatacttagaaaggctttccctattacaggattataaatttaaaagccttccatggtgtccagtcca

SEQ ID NO: 425078 - DNA, 120 bp, Artificial Sequence
  ENSG00000151327_50 (sequence is synthesized)
gttatttttgctttaaccatttcaaatatcaaatttctggtagatctgagatactttcaagtttataggacaactggcatctcaaacttgaagtatccaaaatggggctctcttgtcatc

SEQ ID NO: 425079 - DNA, 120 bp, Artificial Sequence
  ENSG00000151327_51 (sequence is synthesized)
tccaaccttggtcctcacctgcttttcctctattccaacagttactcaaaataaaaatttaagacttgtctttggcttctctttttcttcatcaatgccttcacactccttaccctgaac

SEQ ID NO: 425080 - DNA, 120 bp, Artificial Sequence
  ENSG00000151327_52 (sequence is synthesized)
atccaatctagcagcaatttgtgttttttctgggaaggaggggagtccaaaatatatattgaattaatctatttcttgctttctctacagccaccaattaccctagttatgggcccatca

SEQ ID NO: 425081 - DNA, 120 bp, Artificial Sequence
  ENSG00000151327_53 (sequence is synthesized)
aatagctgggattacaggtggtgtctggtgtttgtccagcaaaaaccataagttcttaagagaattgtggaagtgaagatgttaaagacagctcttgattcctctcttaatttctgtagt

SEQ ID NO: 425082 - DNA, 120 bp, Artificial Sequence
  ENSG00000151327_54 (sequence is synthesized)
aagacttcatcttcagcaggcagctgaaaatacaaggtaaatttctacatgtaaattttagactactggatcctataaaatgtatgtggcctcataaaataactgtatgccaccgcctcg

SEQ ID NO: 425083 - DNA, 120 bp, Artificial Sequence
  ENSG00000151327_55 (sequence is synthesized)
ggcattcggggaatctgcagggcaggaaattaagggatccaaaaagctgagtcatggtccaaaaggaaacgttgatgtcaggacagccatagccaaattttatctcaaggatgagtaacg

SEQ ID NO: 425084 - DNA, 120 bp, Artificial Sequence
  ENSG00000151327_56 (sequence is synthesized)
cagatgaagacgaagttgatggcctggagaagaaagatgttttgcctactgttgatccgatttggctttaaatatttggctattagaaaatcatgccaggtgtggtggctgacacctgta

SEQ ID NO: 425085 - DNA, 120 bp, Artificial Sequence
  ENSG00000151332_0 (sequence is synthesized)
gtgagcaaatcttggtggtggtggtggtggggcggcctgagaagatatcatggctgctgccacggagcttaatcgcccgagcagcggtgacaggaacctggagcgaagatgcagacccaa

SEQ ID NO: 425086 - DNA, 120 bp, Artificial Sequence
  ENSG00000151332_1 (sequence is synthesized)
cctctcccgagaggtgctctacgaaatctttcgctccctacacaccctggttggacagcttgacctcagagatgatgtggtgaaaattacaatcgattggaacaagctccagagcctctc

SEQ ID NO: 425087 - DNA, 120 bp, Artificial Sequence
  ENSG00000151332_2 (sequence is synthesized)
ggcattccagcctgcattgctctttagtgcacttgaacaacacattttatatttacagccttttttagcaaaacttcagtctccgattaaagaggagaatacaactgctgttgaagagat

SEQ ID NO: 425088 - DNA, 120 bp, Artificial Sequence
  ENSG00000151332_3 (sequence is synthesized)
aggaagaacagaaatggggaacaaaaatgaagtaaatgacaaattttccattggcgacctacaagaggaagaaaagcacaaagaaagtgatttaagagatgtgaaaaagacacagatcca

SEQ ID NO: 425089 - DNA, 120 bp, Artificial Sequence
  ENSG00000151332_4 (sequence is synthesized)
ttttgatccagaagtagttcagataaaggctggaaaagcagaaattgacagacgaatatctgcatttattgaaagaaagcaagctgaaatcaatgaaaacaacgtcagggaattttgcaa

SEQ ID NO: 425090 - DNA, 120 bp, Artificial Sequence
  ENSG00000151332_5 (sequence is synthesized)
tgttattgattgtaatcaagaaaatagttgtgcaagaactgatgcgatttttaccccttaccccggatttaaaagtcacgtaaaagtttctagagttgtgaatacatacggaccacagac

SEQ ID NO: 425091 - DNA, 120 bp, Artificial Sequence
  ENSG00000151332_6 (sequence is synthesized)
atgcttcgagactgtggtaatcaggctgtagaagaacgactacaaaatattgaggcccacttgcggttacagacaggtggtccagtgccaagagacatttatcagagaattaaaaaactt

SEQ ID NO: 425092 - DNA, 120 bp, Artificial Sequence
  ENSG00000151332_7 (sequence is synthesized)
gaggataaaatccttgaattggaaggcatctctcctgaatattttcagtctgtaagcttttctggaaaaagaagaaaagttcaaccacctcaacagaactattcactggctgaacttgat

SEQ ID NO: 425093 - DNA, 120 bp, Artificial Sequence
  ENSG00000151332_8 (sequence is synthesized)
gagaaaattagtgccctcaaacaagccctcctcagaaaatcaagagaagcagaatccatggcaacccaccaccttccatgaaaaactcctctcatccttgtcattttacttttttgtata

SEQ ID NO: 425094 - DNA, 120 bp, Artificial Sequence
  ENSG00000151332_9 (sequence is synthesized)
catatgtgtaacttacactgttattaattcaacggatatatatttatcaatgtagacttctctgtgaagtcaaggtttattttcacatgagtccagcttgcagcaagtaatcttcaaata

SEQ ID NO: 425095 - DNA, 120 bp, Artificial Sequence
  ENSG00000151332_10 (sequence is synthesized)
ttccagtaagttttgaaataatgaatgcattgaaaatagcattgttggaatttattcccttctgttttaaaggaggtattttggaaattgaaaaacttaatttacaagtgctggtacatc

SEQ ID NO: 425096 - DNA, 120 bp, Artificial Sequence
  ENSG00000151332_11 (sequence is synthesized)
ttttttcttttgtggaccacaggaaggaagatttattttgatattgatactttaaaaggactttatatttgtaacattgatgttaaccagtttattagtttaaatcagtactttgcatat

SEQ ID NO: 425097 - DNA, 120 bp, Artificial Sequence
  ENSG00000151332_12 (sequence is synthesized)
aataagcattcaacaaaaatttattgactgaaatgaattttaaatgcatgtgtatgaacttgtttttcttaatctttaagatgtcagtattcatgtaaataaacaatagatccagcttta

SEQ ID NO: 425098 - DNA, 120 bp, Artificial Sequence
  ENSG00000151332_13 (sequence is synthesized)
atccttgaattggaaggcatctctcctgaatattttcagtctgtagtgagtataagtgtcttttaaaaataaatgaaaatgttattgtattctggattctttgtggtttaacagtcactc

SEQ ID NO: 425099 - DNA, 120 bp, Artificial Sequence
  ENSG00000151332_14 (sequence is synthesized)
cacaaagtaaatgctaacattaaaaagtgtttatcacaggtgaagattattttaaagttcctttaggaaatgaaggtgaggtacgagtgagaaggttgatctatctcactagtaaaagga

SEQ ID NO: 425100 - DNA, 120 bp, Artificial Sequence
  ENSG00000151332_15 (sequence is synthesized)
actgagctctatgaatttcaaacctatacatgtactgtgaaatcatgatgttaatacgtaagtgaacttagtaaagttaatattcctccagagggagcagttttctcactactcctgagc

SEQ ID NO: 425101 - DNA, 120 bp, Artificial Sequence
  ENSG00000151332_16 (sequence is synthesized)
tgtttgaaatgtcctgtgtcacgatacaaccaatttatcatgaagaccatggtgtcttgcttttttcctttctgccatagtgcatacatttgctgtttttcatctgattcacctttacct

SEQ ID NO: 425102 - DNA, 120 bp, Artificial Sequence
  ENSG00000151332_17 (sequence is synthesized)
ctctacttgatgctatagtacatttacaaatctgcaagtatgctgcagaatacaaaatattgcaatgcagtgccatagattatactcaggcaccatagtaataatcagaacaagtagttc

SEQ ID NO: 425103 - DNA, 120 bp, Artificial Sequence
  ENSG00000151332_18 (sequence is synthesized)
ttaggaaaaattatggagaagagttcataattggaatgaacatgtttcttgttgcctctaatatctcatggctaattattatgaacatagaattgtcagatgaacctagaaatgactcat

SEQ ID NO: 425104 - DNA, 120 bp, Artificial Sequence
  ENSG00000151332_19 (sequence is synthesized)
ggtattgggtcctgaatttagctgtgtgctactattaacattacacatgtgcatctctaaatttggtatattttcctgttagcttttcagaacaggtgcaacaatggcaaaatctcaggt

SEQ ID NO: 425105 - DNA, 120 bp, Artificial Sequence
  ENSG00000151332_20 (sequence is synthesized)
actacaaccaactacaagcgactatgagaaagggtttgttgagagagcaagcacatgtgtcactaatgttattcctctgttctccctgctaactctattattataaaccaccaggggata

SEQ ID NO: 425106 - DNA, 120 bp, Artificial Sequence
  ENSG00000151332_21 (sequence is synthesized)
gaaattgacgagaattgaaatgctcagcaggattccttggcccattcaattctttgctggctcaaaacagtgctagcaagaattgctgtggagagtgactagcagtcatacactcacacc

SEQ ID NO: 425107 - DNA, 120 bp, Artificial Sequence
  ENSG00000151332_22 (sequence is synthesized)
catactcatcacccttctataataggatgaatgagccatctttaggaacctcacttggaatacagtcagctctaagagtgtccttgcaaacaggagaagttgagcacataccttacagag

SEQ ID NO: 425108 - DNA, 120 bp, Artificial Sequence
  ENSG00000151332_23 (sequence is synthesized)
acttgcggttacagacaggtggtccagtgccaagagacatttatcagagaattaaaaaacttgaggataaaatccttgaattggaaggcatctctcctgaatattttcagtctgtagcct

SEQ ID NO: 425109 - DNA, 120 bp, Artificial Sequence
  ENSG00000151332_24 (sequence is synthesized)
catgcatgagcttttctggaaaaagaagaaaagttcaaccacctcaacagaactattcactggctgaacttgatgagaaaattagtgccctcaaacaagccctcctcagaaaatcaagag

SEQ ID NO: 425110 - DNA, 120 bp, Artificial Sequence
  ENSG00000151332_25 (sequence is synthesized)
atttaactattaactagtttaactggctgataaatcgcttttgcagaaatgtcatagtaaaattggttttaaattgaaatgggcttcttcgatcaagtcactgtttcgtttcatggtgta

SEQ ID NO: 425111 - DNA, 120 bp, Artificial Sequence
  ENSG00000151332_26 (sequence is synthesized)
aaattcaagttttaaatgagaaacaatttaaaagtatgcttgtttacctgccttttaaaaggaaatattttctatcttacatagaccattttctagccgtaaaagtttgttttggggctg

SEQ ID NO: 425112 - DNA, 120 bp, Artificial Sequence
  ENSG00000151332_27 (sequence is synthesized)
aacgtcatcctctttagagggtaacttgcagaatataaggtagatgttggttacagacagtaattggtattggtaaattggttggttttttttctgtcagggttcccaaggctgtacata

SEQ ID NO: 425113 - DNA, 120 bp, Artificial Sequence
  ENSG00000151332_28 (sequence is synthesized)
aatctagagcttttctggaaaaagaagaaaagttcaaccacctcaacagaactattcactggctgaacttgatgagaaaattagtgccctcaaacaagccctcctcagaaaatcaagaga

SEQ ID NO: 425114 - DNA, 120 bp, Artificial Sequence
  ENSG00000151338_0 (sequence is synthesized)
cgccccgctcctccgccggatcgtctgtgggtgagtctcgagccaggaggctctgagccagtggcgattggctgacgcggtggctgcgcactcggcctgagaaactcggcaagcgcgcag

SEQ ID NO: 425115 - DNA, 120 bp, Artificial Sequence
  ENSG00000151338_1 (sequence is synthesized)
tgtcgactccccggtctatgccaggcgcatctcagagtttggcttagagattaaagctccttctatcttgtgatgccaccatcgcaaggttctcaaggttgttgtgggagaagagaaggc

SEQ ID NO: 425116 - DNA, 120 bp, Artificial Sequence
  ENSG00000151338_2 (sequence is synthesized)
taaaggagctcatagaatgcctttaatgctaatccaaaagtaaatgagaaacttagaaaaagattgccaattccaaatcaacatatttagagaaaattggaaaaggagaagcttactaca

SEQ ID NO: 425117 - DNA, 120 bp, Artificial Sequence
  ENSG00000151338_3 (sequence is synthesized)
gctttatttgaggactttttaaagaacgctgggttctatctgtgagctgcaaatcttggagcaaaaaccagagacattgccagagcaaacaagaacagaaatacaaatggagaactggtc

SEQ ID NO: 425118 - DNA, 120 bp, Artificial Sequence
  ENSG00000151338_4 (sequence is synthesized)
aaaagacataacccacagttatcttgaacaagaaactacggggataaataaaagtacgcagccagatgagcaactgactatgaattctgagaaaagtatgcatcggaaatccactgaatt

SEQ ID NO: 425119 - DNA, 120 bp, Artificial Sequence
  ENSG00000151338_5 (sequence is synthesized)
agttaatgaaataacatgtgagaacacagaatggccagggcagagatcaacgaattttcagatcatcagttcttatccagatgatgagtctgtttactgcactactgaaaaatacaacgt

SEQ ID NO: 425120 - DNA, 120 bp, Artificial Sequence
  ENSG00000151338_6 (sequence is synthesized)
tatggaacatagacataatgatatgcattatgaatgtatgactccttgtcaagttacttcagactcagataaagagaagacaatagcatttcttctaaaagaattggatattctcagaac

SEQ ID NO: 425121 - DNA, 120 bp, Artificial Sequence
  ENSG00000151338_7 (sequence is synthesized)
aagcaataaaaagcttcagcagaaattggctaaagaagataaagaacagagaaaactaaagtttaagctggaactccaagagaaagaaacagaagctaaaattgctgaaaagacagcagc

SEQ ID NO: 425122 - DNA, 120 bp, Artificial Sequence
  ENSG00000151338_8 (sequence is synthesized)
tctggttgaagaagtgtattttgcgcagaaggaacgtgatgaagctgttatgtctagactgcaattagccattgaggagagagatgaagcaattgcacgagccaagcatatggaaatgtc

SEQ ID NO: 425123 - DNA, 120 bp, Artificial Sequence
  ENSG00000151338_9 (sequence is synthesized)
tctaaaagtgctagaaaatattaaccctgaagaaaatgacatgacattacaggaattactgaacagaataaacaatgcagacacagggatagctattcagaagaatggagctataattgt

SEQ ID NO: 425124 - DNA, 120 bp, Artificial Sequence
  ENSG00000151338_10 (sequence is synthesized)
ggatagaatctacaagaccaaggaatgtaaaatgagaataactgcagaagaaatgagtgcactaatagaagaacgggatgctgccttgtctaagtgcaaacggttagagcaggagcttca

SEQ ID NO: 425125 - DNA, 120 bp, Artificial Sequence
  ENSG00000151338_11 (sequence is synthesized)
tcatgtgaaagagcagaaccagacttcagcaaacaacatgagacatctgactgctgaaaacaatcaagaacgtgctctgaaggcaaagttgttatctatgcaacaagccagagaaactgc

SEQ ID NO: 425126 - DNA, 120 bp, Artificial Sequence
  ENSG00000151338_12 (sequence is synthesized)
agttcaacagtacaaaaaactggaagaggaaatccagacccttcgagtttactacagtttacacaaatctttatctcaagaagaaaatctgaaggatcagtttaactatacccttagtac

SEQ ID NO: 425127 - DNA, 120 bp, Artificial Sequence
  ENSG00000151338_13 (sequence is synthesized)
atatgaagaagctttaaaaaacagagagaacattgtttccatcactcaacaacaaaatgaggaactggctactcaactgcaacaagctctgacagagcgagcaaatatggaattacaact

SEQ ID NO: 425128 - DNA, 120 bp, Artificial Sequence
  ENSG00000151338_14 (sequence is synthesized)
tcaacatgccagagaggcctcccaagtggccaatgaaaaagttcaaaagttggaaaggctggtggatgtactgaggaagaaggttggaaccgggaccatgaggacagtgatctgattgaa

SEQ ID NO: 425129 - DNA, 120 bp, Artificial Sequence
  ENSG00000151338_15 (sequence is synthesized)
aaaaaacgacagtctggggaagcgatcacatctggtgaccaggctgcttcattcaacactgtgtaaacaccaaagccttaacttagcaaacagttgttagaagtgggacactccaaccac

SEQ ID NO: 425130 - DNA, 120 bp, Artificial Sequence
  ENSG00000151338_16 (sequence is synthesized)
attccaagctgagataaaatcaaatcacaaatgtttaaccactttgctgctgacttgagttatttatccaaatatattaactatagacttttaccaatgggtagctataaggttacagct

SEQ ID NO: 425131 - DNA, 120 bp, Artificial Sequence
  ENSG00000151338_17 (sequence is synthesized)
tattttgtaactattttatatctcaatatctttaatataaatctttttactgagagatcattatagaaacatgttaaagttggttaggatcatatcttcacatatggccctttctgaatc

SEQ ID NO: 425132 - DNA, 120 bp, Artificial Sequence
  ENSG00000151338_18 (sequence is synthesized)
aaagtgcggcaaagtaaatattgtctaagctttaatccactgtgttaggtcaaaacttcaaatacatgcatttttcaatatagggtatatttcttaactgatgagagaggcttagacatg

SEQ ID NO: 425133 - DNA, 120 bp, Artificial Sequence
  ENSG00000151338_19 (sequence is synthesized)
agtgtgtagtcttccttcaatgcgtgtatgtaatctttgttagtataaaagatattaaatataggtgccaagaattaaatgtataatttgtttaataagagatggatatattaaaattac

SEQ ID NO: 425134 - DNA, 120 bp, Artificial Sequence
  ENSG00000151338_20 (sequence is synthesized)
attcatcaaggcatgatttttgtttcactacaaataatgcaaactgttttcaataaaaagaggagactgttaatgtgtacttataaattcacattgtcagtattttttaatattgggtct

SEQ ID NO: 425135 - DNA, 120 bp, Artificial Sequence
  ENSG00000151338_21 (sequence is synthesized)
gaataattatctgaattctacttaagctataagtctctgtcatttttgcttgaaaattagcatgcctctgtcttaaaagagaccatcaaacctattaagtattcttattgtttatctttt

SEQ ID NO: 425136 - DNA, 120 bp, Artificial Sequence
  ENSG00000151338_22 (sequence is synthesized)
tttaattgccatttgatttttattgtggaggaggaggatctaatatataatattcaatacaattgtaatgtagaaatataagaatttagaaaaaagtaaacttgccatttggttaaggtt

SEQ ID NO: 425137 - DNA, 120 bp, Artificial Sequence
  ENSG00000151338_23 (sequence is synthesized)
acctgctttttattttattccagaaataagatagttacagcatagcagtcatatgaagttatgaatagaactgagatttttatgtaattagttataggcaaaatactttcatatttttag

SEQ ID NO: 425138 - DNA, 120 bp, Artificial Sequence
  ENSG00000151338_24 (sequence is synthesized)
attagacagacgaaagaccaagaggaaatgactgtgcctggaacaggatgaaatagacaagtagagatttaattagcaaaaattttgtagggaagtaaaattttttctaagtctatacgt

SEQ ID NO: 425139 - DNA, 120 bp, Artificial Sequence
  ENSG00000151338_25 (sequence is synthesized)
ttttaattcatctttaagattgagctaaattatctaccattgcctatttacaggataagtacattcaggacaatttattgtaccattctttcatataccatagcagattatccatttcaa

SEQ ID NO: 425140 - DNA, 120 bp, Artificial Sequence
  ENSG00000151338_26 (sequence is synthesized)
tttttttttactccacaggaaaatgtaagctactttgtcatagatcacaaaagaatcataatgctaacaaactctatttcttccttattaaatctgtatccattaaagtaacttttttaa

SEQ ID NO: 425141 - DNA, 120 bp, Artificial Sequence
  ENSG00000151338_27 (sequence is synthesized)
ctatgagaattagaaaataagggacaacaggggttaaaaataaactgatttaatttgctctatagtcctaaagagaattatatcctctcatagaccaatgactctataatagagaaatat

SEQ ID NO: 425142 - DNA, 120 bp, Artificial Sequence
  ENSG00000151338_28 (sequence is synthesized)
gtaatgatttggtcatgcatggagtcttgtctctgggctctatttgaaacgtgtaacagctccctatgtgaagaaacattatctttaaagtcatctgggaggtgcaggtaagtaaagaga

SEQ ID NO: 425143 - DNA, 120 bp, Artificial Sequence
  ENSG00000151338_29 (sequence is synthesized)
gttattttgtcttttagaatacacaaaatatagtataaagacatttcacaatttccaaacaaatctttctacgcttaaatgatcaaattagaaaaaccaattcctataattaatatgcag

SEQ ID NO: 425144 - DNA, 120 bp, Artificial Sequence
  ENSG00000151338_30 (sequence is synthesized)
aacttttatagaatatgatattataaagttaaatttgcaaaataattctaacatccactattgttcagtataggtaatctcccaaaaatatcacatcctcttgaaaatgaattgtctaca

SEQ ID NO: 425145 - DNA, 120 bp, Artificial Sequence
  ENSG00000151338_31 (sequence is synthesized)
aaatttcaaatgcaaagtattacagccaaatattatcttaattaatttcttacacttaaaagtgtccatcaacagtgtgtcagatggtctttatatattttttctgtatgaaggaatagc

SEQ ID NO: 425146 - DNA, 120 bp, Artificial Sequence
  ENSG00000151338_32 (sequence is synthesized)
cttgcctactgaagataggttctctatgtattcaacaataatgcaactttagaagtattccacactgctgagaaatgttgctttgagtttgctttacacatcatcaactctaaatcctat

SEQ ID NO: 425147 - DNA, 120 bp, Artificial Sequence
  ENSG00000151338_33 (sequence is synthesized)
agtaacatgagaattcacttcttcttgtaaaaataagtaatttacaggaaaggcaaaatgctaatactaacatttgtagcacttgatgatttacaaagtccttttacatctgttttttca

SEQ ID NO: 425148 - DNA, 120 bp, Artificial Sequence
  ENSG00000151338_34 (sequence is synthesized)
acaaagtccttttacatctgttttttcatttgatcctatcgacaatcataataataataaattatatatataacccatataataacgatggtgatgataattttagtattactgtcatta

SEQ ID NO: 425149 - DNA, 120 bp, Artificial Sequence
  ENSG00000151338_35 (sequence is synthesized)
gaggaaacagactcagtaagccttggaatttgccaaggactggctaggacctagaactaagatcttataaccacactccatgcaactatgagtctctaaatctctctgtaagaaaaaaat

SEQ ID NO: 425150 - DNA, 120 bp, Artificial Sequence
  ENSG00000151338_36 (sequence is synthesized)
ttcaaagtaaagattttactcttgcaatttctgttgtgatagtaccatctctttcacatactacatacaaattccctaataatcaaaagattgtacacatttttttcaatgaagtacaat

SEQ ID NO: 425151 - DNA, 120 bp, Artificial Sequence
  ENSG00000151338_37 (sequence is synthesized)
aatgtgaactgcatgtgtaaacagcatcacattattaccacctctctatggtattatagtggcagtatgctttgcctcagccttcactaattaggaatattgtgacaattcattgctaat

SEQ ID NO: 425152 - DNA, 120 bp, Artificial Sequence
  ENSG00000151338_38 (sequence is synthesized)
aaaacataacatgagtctctttgtactgtttttaatttggcctgatgctaaaacctatcagcttagttttttaacatggtagtctaaacttcaaggcttgctctatctcctagagcaatt

SEQ ID NO: 425153 - DNA, 120 bp, Artificial Sequence
  ENSG00000151338_39 (sequence is synthesized)
gagcaatttagagctaaaaccagtaataagcaaagttattggttataagcaaggtataagcagttaaagcaaagttattaattattaatatatgagaatttaaaattttataaataagtt

SEQ ID NO: 425154 - DNA, 120 bp, Artificial Sequence
  ENSG00000151338_40 (sequence is synthesized)
ttaatgtattttaaatatggagtaaaatattttgctaatttttttcaatgataaagttgatcctttgtatatttccttattcaaataaattcagtcatcttcttatcaggttgcttattt

SEQ ID NO: 425155 - DNA, 120 bp, Artificial Sequence
  ENSG00000151338_41 (sequence is synthesized)
aaactttctattttcaaatacttgtgattaataaggcattctatgatgaaatagccatggcttatatatttttgtcttttcacatatgatgtgtttggaacccaaattttttactgattt

SEQ ID NO: 425156 - DNA, 120 bp, Artificial Sequence
  ENSG00000151338_42 (sequence is synthesized)
tattgtgttgttggtaactagtatttacagctaacctatctattcatattttacatatatatatatatatatacatgcacacacaccgatacatttaccttttaaaaaaatgatttataa

SEQ ID NO: 425157 - DNA, 120 bp, Artificial Sequence
  ENSG00000151338_43 (sequence is synthesized)
gtgaactgttaggctccagtgatttcagtgttttgttcatgttttattggaaatgcacgtggtttcttaggcttttaaacaaatacatggaatggttgaaagatttattttgctcgtgct

SEQ ID NO: 425158 - DNA, 120 bp, Artificial Sequence
  ENSG00000151338_44 (sequence is synthesized)
tagctaaatatgtcatctctagaaaagatgtggtttgttttggcactgttttaaaaactcaaatattttaaacatttgttaagttggagcttgcacatttaaaccagcagcatacgttcc

SEQ ID NO: 425159 - DNA, 120 bp, Artificial Sequence
  ENSG00000151338_45 (sequence is synthesized)
agaagagcatctcaagttaccaaattttttgtaatccttttactagaaaaatcttttttgaagagtttttcttgtgcttgcttcggcagcatatatactgaaattagaaaaagaaaactt

SEQ ID NO: 425160 - DNA, 120 bp, Artificial Sequence
  ENSG00000151338_46 (sequence is synthesized)
gttaagttaaacttctaaaagttgaattatttaatgtaggacttcataaatagtatttgacaatgataaatgtgtatttttgagaatcattaaaatgtatacaatgatattcctttgcag

SEQ ID NO: 425161 - DNA, 120 bp, Artificial Sequence
  ENSG00000151338_47 (sequence is synthesized)
aaatgtatacaatgatattcctttgcagaagtcttaatatgcataatttttaatctaattgtcttctaaatatagttttggtgtatgctggtattttagaagccaccaatttctggacta

SEQ ID NO: 425162 - DNA, 120 bp, Artificial Sequence
  ENSG00000151338_48 (sequence is synthesized)
tctgattattaacaaagatgtattttaatgcacaaactcaaatgtttaaaatatatatttactttgtactcaaataaaatcccctattgcaaatcctatacatatttcaatgcaattctt

SEQ ID NO: 425163 - DNA, 120 bp, Artificial Sequence
  ENSG00000151338_49 (sequence is synthesized)
atacatcgatcttaatcaaatttataaatgtacaatcctgaagacagtgtactagatatgcactataaaatatattgcagtaaggaaacagattaagttcactgtcaaactgtctgactt

SEQ ID NO: 425164 - DNA, 120 bp, Artificial Sequence
  ENSG00000151338_50 (sequence is synthesized)
actgtcaaactgtctgacttccttaacaaatttaataaagataaatgtcaatatgaacaaatttgttaggtaccttaggaatctttcaaaactatttagatataaaataaaattatagta

SEQ ID NO: 425165 - DNA, 120 bp, Artificial Sequence
  ENSG00000151338_51 (sequence is synthesized)
agtaataaaatattgaagagaaatatcatttttagtgaatatggttagaaagaacataagaagtgagatcaaattattttaattaaaaaaataggccaggtgcgatggctcacgcctgta

SEQ ID NO: 425166 - DNA, 120 bp, Artificial Sequence
  ENSG00000151338_52 (sequence is synthesized)
ataataataataataataataataatagactgactcaaatctaccataaagcacctctactcattttggaatatgtacgtggaattttgcttcaatagctgaaatctaaaaacactcttt

SEQ ID NO: 425167 - DNA, 120 bp, Artificial Sequence
  ENSG00000151338_53 (sequence is synthesized)
aaaacactctttctgttgcatttgattattcaatcatgataaggtaaatgtaaacagactgtgtagcactctatcacctggagtgaacttagaatttacagcttagagtacatgactaaa

SEQ ID NO: 425168 - DNA, 120 bp, Artificial Sequence
  ENSG00000151338_54 (sequence is synthesized)
agaggaatggagtggaagtgggcagtaggtgtctttggggcaaaaattctataaactggtgttatctaaactatcacattactttgttaaattattgtttcatcacgtatgacctttgtg

SEQ ID NO: 425169 - DNA, 120 bp, Artificial Sequence
  ENSG00000151338_55 (sequence is synthesized)
atttgtcacacattttacttctacatatgcacataattgtaatttttttaactttaaaaagtcaattatgtttaagaaaatttttaaaataagaatgaacgtatgtgatatttactgtga

SEQ ID NO: 425170 - DNA, 120 bp, Artificial Sequence
  ENSG00000151338_56 (sequence is synthesized)
caaacagtccccctgcgttggcctcccaaagtgatggaattacaggtgtgaatcactgcatctgactatggcaaggatctctgtcactgagagtttggcttagagattaaagctccttct

SEQ ID NO: 425171 - DNA, 120 bp, Artificial Sequence
  ENSG00000151338_57 (sequence is synthesized)
aatacaaatctatttcattccaaataaaaaagatgaaagagaaaaattcctaatggataaaagaagaaagattgttgcacattcaaaacagaattcttgatagatacaaaatcatccaat

SEQ ID NO: 425172 - DNA, 120 bp, Artificial Sequence
  ENSG00000151338_58 (sequence is synthesized)
aaacttcagctagttttcagcattatatgcagttgatttgtccattcctcagtggaacttccaaatcatctaaaccagctttgtatgacactaagaataccctcattccttcagtgtcta

SEQ ID NO: 425173 - DNA, 120 bp, Artificial Sequence
  ENSG00000151338_59 (sequence is synthesized)
gctctgtgctgtgtttatttgcagaggaccctcatgcatggatccatataaatgaggcaaactgtgaagcagactagactgtgccgcttaccgtaaagtctttgagagaggaagattgtg

SEQ ID NO: 425174 - DNA, 120 bp, Artificial Sequence
  ENSG00000151338_60 (sequence is synthesized)
tatatgaaaactgctaggcatgatatttacttataaggaagatttctatgtgtataacatcaagcaagatttttggttgaggttttatgctttcagtaaagaaaataaaagaagaaaacc

SEQ ID NO: 425175 - DNA, 120 bp, Artificial Sequence
  ENSG00000151338_61 (sequence is synthesized)
ggtggctgcgcactcggcctgagaaactcggcaagcgcgcagtgtcgactccccggtctatgccaggcgcatctcagataccagcattgccaccggtgggtagaacactaagtgggctct

SEQ ID NO: 425176 - DNA, 120 bp, Artificial Sequence
  ENSG00000151338_62 (sequence is synthesized)
tggagtccctgattccagaacttgactcttggatgacatttctggacctgctctgggccagagaggagaccacttcccttaagggaacgaggtctcactatattgcccagactggtctcg

SEQ ID NO: 425177 - DNA, 120 bp, Artificial Sequence
  ENSG00000151338_63 (sequence is synthesized)
aattgtgattgttcaaaggatcagtcacagaatccctgaaacttacaacttaagtttttctattcaggttaaaatgtaaagggtaaaaatatagatttgtaatctaccattatagcaagt

SEQ ID NO: 425178 - DNA, 120 bp, Artificial Sequence
  ENSG00000151338_64 (sequence is synthesized)
atatcaagacaccccagtggattaaaatgggaaaaaattatattatagaaaatgtttacattattctcttgtaaaaagattatctgttactatgtatcatatctcagatgatgttgacca

SEQ ID NO: 425179 - DNA, 120 bp, Artificial Sequence
  ENSG00000151338_65 (sequence is synthesized)
tctaattaagaggaacaagagttaattttctttaccagaacagaaaatggcataacttttatctttaagaaatagtacatattggaatctaatttttctgtgtatataatgggcatcaat

SEQ ID NO: 425180 - DNA, 120 bp, Artificial Sequence
  ENSG00000151338_66 (sequence is synthesized)
tgtgatagcctttaacctaatacttgaatgccttaatagtattaaattataatgctacattaaatttatatttgtatttttttaatttgaaaagaaaaaggatttcaagaatatgaacac

SEQ ID NO: 425181 - DNA, 120 bp, Artificial Sequence
  ENSG00000151338_67 (sequence is synthesized)
acactaatttcagataagaacatgaaggcccatgtctgtgaaacacagcaggtagaaatattgatagactattgattatattactgtctttggctacagaattctatggatatgaatcag

SEQ ID NO: 425182 - DNA, 120 bp, Artificial Sequence
  ENSG00000151338_68 (sequence is synthesized)
aatgaattctgacgagtgccaggtcaaataatacttgaggaaagaatataaccaatttgtatccttgcttcctagaaaagtttggtttttttctggaaaagcaataaaattggagtagat

SEQ ID NO: 425183 - DNA, 120 bp, Artificial Sequence
  ENSG00000151338_69 (sequence is synthesized)
ggaggatccattatacataagaatagccaacagctggaaatattttattgggtttaacatacaatggactttagcataatgtcaagcctttgaaaatatatgtaattaaggtatttaaaa

SEQ ID NO: 425184 - DNA, 120 bp, Artificial Sequence
  ENSG00000151338_70 (sequence is synthesized)
cataaaaataacaaaaataaaacttttcagaaagttatctaaagactttttcacacgtctaatgattctaaagaggaaatgagattagaaaatgtttagatagcagttatatttcaaaga

SEQ ID NO: 425185 - DNA, 120 bp, Artificial Sequence
  ENSG00000151338_71 (sequence is synthesized)
attttcatattggtatcaaatttaaggctgatagtctgtttagtaaataaaaattttttaagttatatttcaaaagacatacaattatcagtactgattttaatgcttcagggataaact

SEQ ID NO: 425186 - DNA, 120 bp, Artificial Sequence
  ENSG00000151338_72 (sequence is synthesized)
tcacattggaaaaggtagctccaatatcacatatattaaatctttgaatgtaagcatagagcatattttcagaaaacttttttaatatagtctttgagttttctgtagtaaatacatgtg

SEQ ID NO: 425187 - DNA, 120 bp, Artificial Sequence
  ENSG00000151338_73 (sequence is synthesized)
tatagtaatcgagggttttttaaaaaatgcttttgattcattgtcttgctactgaaacatactattttgcataattttcaaattaattttgaacacttcctgtactgatgctgagtgtat

SEQ ID NO: 425188 - DNA, 120 bp, Artificial Sequence
  ENSG00000151338_74 (sequence is synthesized)
aaatttacagcaactttacaggggaaaatttgacaatatatattaagagctttaaaagctgacttttaatctagccatcatacttctagtaattttcttaagtaattaggtgtgtatata

SEQ ID NO: 425189 - DNA, 120 bp, Artificial Sequence
  ENSG00000151338_75 (sequence is synthesized)
cataaagatgtgtatacaaagatatccattacagtgttgtttatatagccaatagttggaaatggtgtacaatctaatattaggagcatcttagttgaatcacatatagcatgtccaaat

SEQ ID NO: 425190 - DNA, 120 bp, Artificial Sequence
  ENSG00000151338_76 (sequence is synthesized)
gataaaatttcacctgctattttatattttttaagaatactgaagaatataggaacatatgctgcttattttaattacagggttacaaagctatactaaatatttttctcctttaaattt

SEQ ID NO: 425191 - DNA, 120 bp, Artificial Sequence
  ENSG00000151338_77 (sequence is synthesized)
ttatgagtttgtactactgtttaatcagaaaaagttatttacaaagtaattgtataaaatgttgcaaagtccagttttaaaaaaacaaatagtctggtctatgaaagaagttctggagta

SEQ ID NO: 425192 - DNA, 120 bp, Artificial Sequence
  ENSG00000151338_78 (sequence is synthesized)
ataagttgaattcagcattgttatgccaaaaacagaaacatcgaactaatttgagtcggttttggttaattttctactggtgtggggcatctaccatctattttaaaatttccaatagcc

SEQ ID NO: 425193 - DNA, 120 bp, Artificial Sequence
  ENSG00000151338_79 (sequence is synthesized)
agtttatgcaaagaaggaaaaattacaattattaaggaaattaaaatatataatgtttgtagttctagaatatatatgtggtggttttataaatgttaattgttctcatatttgcaagaa

SEQ ID NO: 425194 - DNA, 120 bp, Artificial Sequence
  ENSG00000151338_80 (sequence is synthesized)
atgaatttaacatcattataagtcttctccagatggttatttctcatgtaaaactaatggtagatattcatagaatttgagattctttcatatgtagtaaagtctggtcttttacaaaat

SEQ ID NO: 425195 - DNA, 120 bp, Artificial Sequence
  ENSG00000151338_81 (sequence is synthesized)
ttgcttagaattttccaacatgaattattatccagttatttaatatgtttaaaatcctaatgatttctttttccttctttttaatttagccttttatatttacataactaccataagatg

SEQ ID NO: 425196 - DNA, 120 bp, Artificial Sequence
  ENSG00000151338_82 (sequence is synthesized)
taactaccataagatgttaacagatggattctttttcctgtgaaatgtctatcctcccaattatgttatttagagaatcatgagccagtgtttaaactagaatgttatccaaggtactgt

SEQ ID NO: 425197 - DNA, 120 bp, Artificial Sequence
  ENSG00000151338_83 (sequence is synthesized)
ctcactcgtactgtattttaaaagtagtttgaaaagtgtggaatatggatttgccaatagacttgggtctactaagaaaatatgtactctgccttgactcaataaactcatacttagtgt

SEQ ID NO: 425198 - DNA, 120 bp, Artificial Sequence
  ENSG00000151338_84 (sequence is synthesized)
atgccaggcgcatctcaggtaaacggttgggcagggaggtttgggcgacggagaatgatagtggtgggcacagatcagccctggagttttcggccgcagacttttccttggagaaggaga

SEQ ID NO: 425199 - DNA, 120 bp, Artificial Sequence
  ENSG00000151338_85 (sequence is synthesized)
cattttcagctttgatttgccaggaacttcaggtggctgtatggaaatgtaaacctttgtatgaaggagtgtatcagtgcgtcagaacttggcacccacaaggatcttaagaaaacaggc

SEQ ID NO: 425200 - DNA, 120 bp, Artificial Sequence
  ENSG00000151338_86 (sequence is synthesized)
gtggcgattggctgacgcggtggctgcgcactcggcctgagaaactcggcaagcgcgcagtgtcgactccccggtctatgccaggcgcatctcagctgcaaatcttggagcaaaaaccag

SEQ ID NO: 425201 - DNA, 120 bp, Artificial Sequence
  ENSG00000151338_87 (sequence is synthesized)
caggatggctggtttttttatagtacagaaaaagaactaaactttacacttttattttctgttgcaagcatttggttcttctattttatacattttatccctatacattcttatatatgt

SEQ ID NO: 425202 - DNA, 120 bp, Artificial Sequence
  ENSG00000151338_88 (sequence is synthesized)
ctgtaagataatgcatgatttatataatctatacattatactataatgtaaccattttttaaaaaaaagatttcttctcagccttttgttcactgactagaaaaagttgatgaaaaactg

SEQ ID NO: 425203 - DNA, 120 bp, Artificial Sequence
  ENSG00000151338_89 (sequence is synthesized)
caagccagagaaactgcagttcaacagtacaaaaaactggaagaggaaatccagacccttcgagtttactacaggtttgtatgtgagaaagagaaaaaagattttgtattgggttatgtg

SEQ ID NO: 425204 - DNA, 120 bp, Artificial Sequence
  ENSG00000151338_90 (sequence is synthesized)
taaaacatattcttacagtggatcatggtagaaaacattgaaaaaacacaccgatgcacaatgccatgtatattctttcattactaagtttaaaaaatcctcaagtctgaaatgtaggaa

SEQ ID NO: 425205 - DNA, 120 bp, Artificial Sequence
  ENSG00000151338_91 (sequence is synthesized)
ttcactaagggtgctgttaagtttttgaaagatttttgttttaatttggaccttttctcagaataaagttaaaatgcataaaatgcaattaaatcaaaataagttttactgaagtacaat

SEQ ID NO: 425206 - DNA, 120 bp, Artificial Sequence
  ENSG00000151338_92 (sequence is synthesized)
agttgtgtacatttcagcagaagtgagctgtggtgtttgccaacaaccccttctttaaacacagatacagcacccttttgttatggtattattttatttcacgtatgtgtacgtgaaaac

SEQ ID NO: 425207 - DNA, 120 bp, Artificial Sequence
  ENSG00000151338_93 (sequence is synthesized)
aacacattttctgaattttgagtggtggtatattaataacttttggtaaatgtttattctgtttcttttttatatcattaccttttgtagttaataaaaagtgaccatactaaaagaaaa

SEQ ID NO: 425208 - DNA, 120 bp, Artificial Sequence
  ENSG00000151338_94 (sequence is synthesized)
attagacactaacaccagtattggttttagctctattttttgtaccaccatatggatttgtacattttcccccaaacctggtcacctattgccaaagactgggactttttacatcccatg

SEQ ID NO: 425209 - DNA, 120 bp, Artificial Sequence
  ENSG00000151338_95 (sequence is synthesized)
gagaagtttcccagcatgattgatcacccactggaaaactctaatattgtacagtgggctcttgaaagtgaagcaaagattattcttggtgaaggaggaattggacaagccctgaagata

SEQ ID NO: 425210 - DNA, 120 bp, Artificial Sequence
  ENSG00000151338_96 (sequence is synthesized)
aaattttgcctggagaagtggtaatatgtataacttgataatatgagagtcagaggacagtaatctcacacgttttagtggcattaattagggcaggcataggaagataggaaagactga

SEQ ID NO: 425211 - DNA, 120 bp, Artificial Sequence
  ENSG00000151338_97 (sequence is synthesized)
cttggaggctgttaaagtatttcatgaatgaagtaaagaagattgcagggggccccttaaataacagcaataggaagagataggaaagaatgtgaggcattttgaaataagtagcaaaac

SEQ ID NO: 425212 - DNA, 120 bp, Artificial Sequence
  ENSG00000151338_98 (sequence is synthesized)
ttattgactcgctcactggatatgggaaatggaggagatgtttgaagataacttcaggtttttaagactaatcagagaaataatgtcactaacagacagtgaaattgagtttatttgagt

SEQ ID NO: 425213 - DNA, 120 bp, Artificial Sequence
  ENSG00000151338_99 (sequence is synthesized)
tttctaaacaagtgagttaagtttagaaagtgccttacttaaagcataagtaagatatatgattggtatttgaatatactgggactgaagcttgttgataaggatagtacaaagcctagt

SEQ ID NO: 425214 - DNA, 120 bp, Artificial Sequence
  ENSG00000151338_100 (sequence is synthesized)
tgaccattctgtggaaccaatataaattccctatggagtcaatattatccaaaaggaggactattttccacttgtatggaaggaaaacaaatacaatttttaaacgtttgaatgaataat

SEQ ID NO: 425215 - DNA, 120 bp, Artificial Sequence
  ENSG00000151338_101 (sequence is synthesized)
agagaagaagcaatggaatggaggttatttttactccaactacctaaactccaggttttcttagatcttgggaagaaactaccccttgtcctgttaatggttgtgccctacagaaagttg

SEQ ID NO: 425216 - DNA, 120 bp, Artificial Sequence
  ENSG00000151338_102 (sequence is synthesized)
tatgccggttttgaaatgtgctcagggaacccataccatctgatatgaatagccttgaggaaccatatgtaattcagggaatttgattggttcatgaagaaagaccacatctaccacata

SEQ ID NO: 425217 - DNA, 120 bp, Artificial Sequence
  ENSG00000151338_103 (sequence is synthesized)
gttggctccaattaagtcttttttatttaaaggagaagaaaatgttaaaagcaaaaataagacttcttatagagaaccaaagatattttgaaggagtgataaaaatgaccattggttaaa

SEQ ID NO: 425218 - DNA, 120 bp, Artificial Sequence
  ENSG00000151338_104 (sequence is synthesized)
aaatataataggtgattttaatatcagtgatcagggacaaaaatataaataatgatttggaacagcaaagggagaaacactaagaaaaacacaaggaaatggagtgaaatgatcagaagc

SEQ ID NO: 425219 - DNA, 120 bp, Artificial Sequence
  ENSG00000151338_105 (sequence is synthesized)
aaaacataatttgtggaaaatggagtaagtgcaggagcaaaaggagtaaatgtaagagaaaccctattcaaagaaataatagaagaaaactcatttgagctgaaggaaaacttgagttat

SEQ ID NO: 425220 - DNA, 120 bp, Artificial Sequence
  ENSG00000151338_106 (sequence is synthesized)
caaaatgaaagtccatagcaatgactgagtagaataagtaaattacatctttgctcgtgtaaatttatatacatatgctaaatatatagacatatctaggcaaaatatctgtacactaat

SEQ ID NO: 425221 - DNA, 120 bp, Artificial Sequence
  ENSG00000151338_107 (sequence is synthesized)
ggtgaagagaaaatgttatacctttataacatttgttataaaattgtatagagctgattatttacaaaagaaagagcatcacagcagcatagaattcctgacttgcaatattggaaaaca

SEQ ID NO: 425222 - DNA, 120 bp, Artificial Sequence
  ENSG00000151338_108 (sequence is synthesized)
agacagtgcaactatgtttataaatcttagaggaaaagactgcaatttaaggatcctatatttagccaaaatatcatttatagaggagggcaaaacaaagacttttttaaaacaattaag

SEQ ID NO: 425223 - DNA, 120 bp, Artificial Sequence
  ENSG00000151338_109 (sequence is synthesized)
actatgaatatacccattcattcttcctggaggaattacttgaagaagtattatagctaaaggaaaattaaaacagatatccaaagaggataaaacattgtataagaatcagtggaaggt

SEQ ID NO: 425224 - DNA, 120 bp, Artificial Sequence
  ENSG00000151338_110 (sequence is synthesized)
agtctatctgaaaatttatagataaatttaaagcagtgataactttaattgtgatgtgtgctaaggaagagttctcaaaatatgttacatacaataagaaataaaaaatatggcatggaa

SEQ ID NO: 425225 - DNA, 120 bp, Artificial Sequence
  ENSG00000151338_111 (sequence is synthesized)
tttttatacaccaagaagtagaaataatatcatctcagataatgttttaaattaaataactttactgaatggccaagataaccaaataggaacagctctagtctgcagctcccagtgttg

SEQ ID NO: 425226 - DNA, 120 bp, Artificial Sequence
  ENSG00000151338_112 (sequence is synthesized)
atcgacacagaagatgggtgatttctgtatttccacctgagatacctggttcatctcgttgggactggttggacagtgcatgcagcccaccgagggtgagccaaagcagggcagggtgtc

SEQ ID NO: 425227 - DNA, 79 bp, Artificial Sequence
  ENSG00000151338_113 (sequence is synthesized)
cggtacactcccacccaaatactgtgcttttcccacagtcttaccaacctgcagaccaggagattctctctcatgcctg

SEQ ID NO: 425228 - DNA, 120 bp, Artificial Sequence
  ENSG00000151338_114 (sequence is synthesized)
cttaccaacctgcagaccaggagattctctctcatgcctggcttggtgggtcccacgcccatggagcatggctcactgctagcatggcagtctgagatccacctgtgaggctgcagcctg

SEQ ID NO: 425229 - DNA, 120 bp, Artificial Sequence
  ENSG00000151338_115 (sequence is synthesized)
agtctgagatccacctgtgaggctgcagcctggcagggggaggggcgtctgccattgctgaggcttgaaggtaaacagagtggctgggcagctcaaactgggtggagcccaccgcagctc

SEQ ID NO: 425230 - DNA, 63 bp, Artificial Sequence
  ENSG00000151338_116 (sequence is synthesized)
ggaagtggttatctcagcatggcatttgagctctgagaagggacagactgcctcctcaagtgg

SEQ ID NO: 425231 - DNA, 72 bp, Artificial Sequence
  ENSG00000151338_117 (sequence is synthesized)
ctcctcaagtgggtccctgacacccctgtagagcgagtgcccctctaggacgaagcttccagaggaaggatc

SEQ ID NO: 425232 - DNA, 77 bp, Artificial Sequence
  ENSG00000151338_118 (sequence is synthesized)
cacctcatacaagcgagtgcccctctcttctgcaatatgtgcagttctacagcctctgctggtgatacccaggcaaa

SEQ ID NO: 425233 - DNA, 75 bp, Artificial Sequence
  ENSG00000151338_119 (sequence is synthesized)
aactccaacagacctgcagctgagggaccagagtgttagaatcacatccacaccaaaacctcatctgtaggtcac

SEQ ID NO: 425234 - DNA, 88 bp, Artificial Sequence
  ENSG00000151338_120 (sequence is synthesized)
atcaaagaccaaaggtagataaaaccatgaagatgggaagaaaccagagcagaaaatgtgccaaaggctcacagctcctcaccagcaa

SEQ ID NO: 425235 - DNA, 89 bp, Artificial Sequence
  ENSG00000151338_121 (sequence is synthesized)
gtaggcttcagaaggtcggtaataacaaaattctctgagctaaaggagcatgttcaaacccattacatgaatggctaactagaataaac

SEQ ID NO: 425236 - DNA, 120 bp, Artificial Sequence
  ENSG00000151338_122 (sequence is synthesized)
tagagaagaccttaaatgacctgatggagatgaaaaccatggcaggagaacttcatgatgcatgcacaagcttcaataggcgatgcaatcaagtgcaagaaaggatatcagtgattgaag

SEQ ID NO: 425237 - DNA, 68 bp, Artificial Sequence
  ENSG00000151338_123 (sequence is synthesized)
ggagaacttcatgatgcatgcacaagcttcaataggcgatgcaatcaagtggcaagattagagaaaag

SEQ ID NO: 425238 - DNA, 79 bp, Artificial Sequence
  ENSG00000151338_124 (sequence is synthesized)
gtgacggggagaatgaaaccaagttggagaacactcttcaggatattatccaggagaaattcccccagaacatcacaaa

SEQ ID NO: 425239 - DNA, 79 bp, Artificial Sequence
  ENSG00000151338_125 (sequence is synthesized)
tcccccagaacatcacaaagatactccttgagaagagcaaacccatgaaacataattgtcaaattcaccaaggttgaaa

SEQ ID NO: 425240 - DNA, 72 bp, Artificial Sequence
  ENSG00000151338_126 (sequence is synthesized)
tgaaggaaaaaatgttaagggtagccaggaaggtcgggttacccagaaagggaagctgactaacagtggatt

SEQ ID NO: 425241 - DNA, 81 bp, Artificial Sequence
  ENSG00000151338_127 (sequence is synthesized)
gccactgcaaaaactgcatcaatttacgggcaaaataaccagctaacatcataacgacaggttcaaattcactcataacaa

SEQ ID NO: 425242 - DNA, 80 bp, Artificial Sequence
  ENSG00000151338_128 (sequence is synthesized)
gctaggaaaaaactgcatcaatttacgggcaaaataaccagctaacatcataacgacaggttcaaattcaccccaattaa

SEQ ID NO: 425243 - DNA, 71 bp, Artificial Sequence
  ENSG00000151338_129 (sequence is synthesized)
tcagtgtgctgtattcagaagacccatcttacatgcagaggcacaaataggcttaaaatattttgcagtcc

SEQ ID NO: 425244 - DNA, 63 bp, Artificial Sequence
  ENSG00000151338_130 (sequence is synthesized)
acccaggaggaagttgatccaaaaaaagtccagaaccagacagattcacagctgaattctacc

SEQ ID NO: 425245 - DNA, 77 bp, Artificial Sequence
  ENSG00000151338_131 (sequence is synthesized)
gtaccatcccttctgaaactattccagtcaatagaaaaaggataccaaagcctgtcagagacacaacaacaaaaaag

SEQ ID NO: 425246 - DNA, 120 bp, Artificial Sequence
  ENSG00000151338_132 (sequence is synthesized)
tcatcctaataccaaagcctgtcagagacacaacaacaaaaaagataattttagaccaatatccctggtgaacatcgctgtgaaaatcctcaataaaatactggcaacccaaatccagca

SEQ ID NO: 425247 - DNA, 70 bp, Artificial Sequence
  ENSG00000151338_133 (sequence is synthesized)
aaggcctttgacaaaattcaacagcctttatgctaaaaactttatgcaataaactggatattgatggaac

SEQ ID NO: 425248 - DNA, 120 bp, Artificial Sequence
  ENSG00000151338_134 (sequence is synthesized)
atccaacttacaagggatgtgaaggaccccttcaaagagagctacaaaccactgctcaatgaaataaatgaggacacagacaaatagaagtacattccatgctcacggataggaataatc

SEQ ID NO: 425249 - DNA, 65 bp, Artificial Sequence
  ENSG00000151338_135 (sequence is synthesized)
gctacaaaccactgctcaatgaaataaatgaggacacagacaaatagaagtacattccatgctca

SEQ ID NO: 425250 - DNA, 79 bp, Artificial Sequence
  ENSG00000151338_136 (sequence is synthesized)
caaaaaagagccacatcatgctacctgacttcaaacaatagtgctaggctactataaccaaaacagcatggtactggta

SEQ ID NO: 425251 - DNA, 120 bp, Artificial Sequence
  ENSG00000151338_137 (sequence is synthesized)
tttttgcaatctacccatctgacaatgggctaatatccagaatgtacataatttattggaacttaaacaattacaagaaaaaaacaaacatccccatcaaaaagtgggccaaggatatga

SEQ ID NO: 425252 - DNA, 73 bp, Artificial Sequence
  ENSG00000151338_138 (sequence is synthesized)
aaaacaaacatccccatcaaaaagtgggccaaggatatgaatagacccttctcaaaagaagatatttatgcag

SEQ ID NO: 425253 - DNA, 82 bp, Artificial Sequence
  ENSG00000151338_139 (sequence is synthesized)
cattataaatcattttatgataaagatacatgcacacatatgcttattgcggcactattcacaataggaaacacttggaacc

SEQ ID NO: 425254 - DNA, 87 bp, Artificial Sequence
  ENSG00000151338_140 (sequence is synthesized)
ttataaatcattttatgataaagatacatgcacacatatgcttattgcggcactattcacaataggaaacacttggaaccacccaag

SEQ ID NO: 425255 - DNA, 85 bp, Artificial Sequence
  ENSG00000151338_141 (sequence is synthesized)
cagccataaaaaagaatgagttcatgtactttgcagggagatcagtgaagctggaaaccatcattctcagctctttcatttgtag

SEQ ID NO: 425256 - DNA, 77 bp, Artificial Sequence
  ENSG00000151338_142 (sequence is synthesized)
caaacgacctctcagggactgggggtctgggagagggatagcattaagataaatacctaatgtaaatgacgagttga

SEQ ID NO: 425257 - DNA, 120 bp, Artificial Sequence
  ENSG00000151348_0 (sequence is synthesized)
agccacagggatctgattcctcccagggggatgtcctgcgcctcagggtccggtggtggcctgcggcatcccttgcggtgccagaagccgtgggacgaggagtgtgaggaagaggctgtc

SEQ ID NO: 425258 - DNA, 120 bp, Artificial Sequence
  ENSG00000151348_1 (sequence is synthesized)
tgtgtcattatgtgtgcgtcggtcaagtataatatccggggtcctgccctcatcccaagaatgaagaccaagcaccgaatctactatatcaccctcttctccattgtcctcctgggcctc

SEQ ID NO: 425259 - DNA, 120 bp, Artificial Sequence
  ENSG00000151348_2 (sequence is synthesized)
attgccactggcatgtttcagttttggccccattctatcgagtcctcaaatgactggaatgtagagaagcgcagcatccgtgatgtgccggttgttaggctgccagccgacagtcccatc

SEQ ID NO: 425260 - DNA, 120 bp, Artificial Sequence
  ENSG00000151348_3 (sequence is synthesized)
ccagagcggggggatctcagttgcagaatgcacacgtgttttgatgtctatcgctgtggcttcaacccaaagaacaaaatcaaggtgtatatctatgctctgaaaaagtacgtggatgac

SEQ ID NO: 425261 - DNA, 120 bp, Artificial Sequence
  ENSG00000151348_4 (sequence is synthesized)
tttggcgtctctgtcagcaacaccatctcccgggagtataatgaactgctcatggccatctcagacagtgactactacactgatgacatcaaccgggcctgtctgtttgttccctccatc

SEQ ID NO: 425262 - DNA, 120 bp, Artificial Sequence
  ENSG00000151348_5 (sequence is synthesized)
gatgtgcttaaccagaacacactgcgcatcaaggagacagcacaagcgatggcccagctctctaggtgggatcgaggtacgaatcacctgttgttcaacatgttgcctggaggtccccca

SEQ ID NO: 425263 - DNA, 120 bp, Artificial Sequence
  ENSG00000151348_6 (sequence is synthesized)
gattataacacagccctggatgtccccagagacagggccctgttggctggtggcggcttttctacgtggacttaccggcaaggctacgatgtcagcattcctgtctatagtccactgtca

SEQ ID NO: 425264 - DNA, 120 bp, Artificial Sequence
  ENSG00000151348_7 (sequence is synthesized)
gctgaggtggatcttccagagaaaggaccaggtccacggcaatacttcctcctgtcatctcaggtgggtctccatcctgagtacagagaggacctagaagccctccaggtcaaacatgga

SEQ ID NO: 425265 - DNA, 120 bp, Artificial Sequence
  ENSG00000151348_8 (sequence is synthesized)
gagtcagtgttagtactcgataaatgcaccaacctctcagagggtgtcctttctgtccgtaagcgctgccacaagcaccaggtcttcgattacccacaggtgctacaggaggctactttc

SEQ ID NO: 425266 - DNA, 120 bp, Artificial Sequence
  ENSG00000151348_9 (sequence is synthesized)
tgtgtggttcttcgtggagctcggctgggccaggcagtattgagcgatgtgttacaagctggctgtgtcccggttgtcattgcagactcctatattttgcctttctctgaagttcttgac

SEQ ID NO: 425267 - DNA, 120 bp, Artificial Sequence
  ENSG00000151348_10 (sequence is synthesized)
tggaagagagcatctgtggttgtaccagaagaaaagatgtcagatgtgtacagtattttgcagagcatcccccaaagacagattgaagaaatgcagagacaggcccggtggttctgggaa

SEQ ID NO: 425268 - DNA, 120 bp, Artificial Sequence
  ENSG00000151348_11 (sequence is synthesized)
gcgtacttccagtcaattaaagccattgccctggccaccctgcagattatcaatgaccggatctatccatatgctgccatctcctatgaagaatggaatgaccctcctgctgtgaagtgg

SEQ ID NO: 425269 - DNA, 120 bp, Artificial Sequence
  ENSG00000151348_12 (sequence is synthesized)
ggcagcgtgagcaatccactcttcctcccgctgatcccaccacagtctcaagggttcaccgccatagtcctcacctacgaccgagtagagagcctcttccgggtcatcactgaagtgtcc

SEQ ID NO: 425270 - DNA, 120 bp, Artificial Sequence
  ENSG00000151348_13 (sequence is synthesized)
aaggtgcccagtctatccaaactacttgtcgtctggaataatcagaataaaaaccctccagaagattctctctggcccaaaatccgggttccattaaaagttgtgaggactgctgaaaac

SEQ ID NO: 425271 - DNA, 120 bp, Artificial Sequence
  ENSG00000151348_14 (sequence is synthesized)
atgatatcattatgctgacctctgacgagctgcaatttggttatgaggtctggcgggaatttcctgaccggttggtgggttacccgggtcgtctgcatctctgggaccatgagatgaata

SEQ ID NO: 425272 - DNA, 120 bp, Artificial Sequence
  ENSG00000151348_15 (sequence is synthesized)
agtggaagtatgagtctgagtggacgaatgaagtgtccatggtgctcactggggcagctttttatcacaagtattttaattacctgtatacctacaaaatgcctggggatatcaagaact

SEQ ID NO: 425273 - DNA, 120 bp, Artificial Sequence
  ENSG00000151348_16 (sequence is synthesized)
gggtagatgctcatatgaactgtgaagatattgccatgaacttcctggtggccaacgtcacgggaaaagcagttatcaaggtaaccccacgaaagaaattcaagtgtcctgagtgcacag

SEQ ID NO: 425274 - DNA, 120 bp, Artificial Sequence
  ENSG00000151348_17 (sequence is synthesized)
ccatagatgggctttcactagaccaaacacacatggtggagaggtcagagtgcatcaacaagtttgcttcagtcttcgggaccatgcctctcaaggtggtggaacaccgagctgaccctg

SEQ ID NO: 425275 - DNA, 120 bp, Artificial Sequence
  ENSG00000151348_18 (sequence is synthesized)
tcctgtacaaagatgactttcctgagaagctgaagagcttccccaacattggcagcttatgaaacgtgtcattggtggaggtctgaatgtgaggctgggacagagggagagaacaaggcc

SEQ ID NO: 425276 - DNA, 120 bp, Artificial Sequence
  ENSG00000151348_19 (sequence is synthesized)
tcccagcactctgatgtcagagtagtaggttaagggtggaaggttgacctacttggatcttggcatgcacccacctaacccactttctcaagaacaagaacctagaatgaatatccaagc

SEQ ID NO: 425277 - DNA, 120 bp, Artificial Sequence
  ENSG00000151348_20 (sequence is synthesized)
acctcgagctatgcaacctctgttcttgtatttcttatgatctctgatgggttcttctcgaaaatgccaagtggaagactttgtggcatgctccagatttaaatccagctgaggctccct

SEQ ID NO: 425278 - DNA, 120 bp, Artificial Sequence
  ENSG00000151348_21 (sequence is synthesized)
ttgttttcagttccatgtaacaatctggaaggaaacttcacggacaggaagactgctggagaagagaagcgtgttagcccatttgaggtctggggaatcatgtaaagggtacccagacct

SEQ ID NO: 425279 - DNA, 120 bp, Artificial Sequence
  ENSG00000151348_22 (sequence is synthesized)
cacttttagttatttacatcaatgagttctttcagggaaccaaacccagaattcggtgcaaaagccaaacatcttggtgggatttgataaatgccttgggacctggagtgctgggcttgt

SEQ ID NO: 425280 - DNA, 120 bp, Artificial Sequence
  ENSG00000151348_23 (sequence is synthesized)
gcacaggaagagcaccagccgctgagtcaggatcctgtcagttccatgagctattcctctttggtttggctttttgatatgattaaaattattttttattcctttttctactgtgtctta

SEQ ID NO: 425281 - DNA, 120 bp, Artificial Sequence
  ENSG00000151348_24 (sequence is synthesized)
aacaccaattcctgatagtccaaggaaccacctttctcccttgatatatttaactccgtctttggcctgacaacagtcttctgcccatgtctgggaacacacgccaggaggaatgtctga

SEQ ID NO: 425282 - DNA, 120 bp, Artificial Sequence
  ENSG00000151348_25 (sequence is synthesized)
taccctctgcatcaagcgtaagaaggtcccaaatcataaccattttaagaacagatgactcagaaacctccagaggaatctgtttgcttcctgattagatccagtcaatgttttaaaggt

SEQ ID NO: 425283 - DNA, 120 bp, Artificial Sequence
  ENSG00000151348_26 (sequence is synthesized)
attgtcagagaaaaacagagggtctgtactagccatgcaaggagtcgctctagctggtacccgtaaaagttgtgggaattgtgacccccatcccaaggggatgccaaaatttctctcatt

SEQ ID NO: 425284 - DNA, 120 bp, Artificial Sequence
  ENSG00000151348_27 (sequence is synthesized)
cttttggtataaacttaacattagccagggaggttctggctaacgttaaatgctgctatacaactgctttgcaacagttgctggtatatttaaatcattaaatttcagcatttactaata

SEQ ID NO: 425285 - DNA, 120 bp, Artificial Sequence
  ENSG00000151348_28 (sequence is synthesized)
agacggcccggatcccggttaccggcccctcgctcgctgctcgccagcccagactcggccctggcagtggcggctggcgattcggaccgatccgacctgggcggaggtggcccgcgcccc

SEQ ID NO: 425286 - DNA, 120 bp, Artificial Sequence
  ENSG00000151348_29 (sequence is synthesized)
tgatattaagattagccacagtttgggctttagccacaacatatgtccccaaaacacaaaatacataacaatttgcttagaatatggatataattacagaaacctagttgttttgccagt

SEQ ID NO: 425287 - DNA, 120 bp, Artificial Sequence
  ENSG00000151348_30 (sequence is synthesized)
cagcgtcagtcatacaccatccattgttctgttgagtgacatgaaggtgggcagttattatgctgtagtttcatcaagagtcacttcagatgtgttccccagactttgagaggtcaaaga

SEQ ID NO: 425288 - DNA, 120 bp, Artificial Sequence
  ENSG00000151348_31 (sequence is synthesized)
aagtttcagaagtagcaaagttggaagtggaaatcataagagttttgtcttctttcatttgaataagtgatcgaatcatggactattattgccaaagggggcaagcgatcatctcatcca

SEQ ID NO: 425289 - DNA, 120 bp, Artificial Sequence
  ENSG00000151348_32 (sequence is synthesized)
gtttgttcattttgcaaatgcagaaactgaagctgcagatgttcattttgcaaatgcagaaactgaagtgatttttttcagtttctgacagcagcaaacacaggtgcttaccaaatactt

SEQ ID NO: 425290 - DNA, 120 bp, Artificial Sequence
  ENSG00000151348_33 (sequence is synthesized)
ttgatttgggtaatgtgtactggtcagtaggagacatgggaaagcattttggtctcatgtattcataatattggggacgatatggtagaaagccaggaaaaatatttctgttgtcaccca

SEQ ID NO: 425291 - DNA, 120 bp, Artificial Sequence
  ENSG00000151348_34 (sequence is synthesized)
ggtaccagaggctgacaagcacagtgaggacctctaatctttctaggggttttctagtttgttttccaagatgtggggcaggtataggggagggtcttacattgaaatctctgctgaaag

SEQ ID NO: 425292 - DNA, 120 bp, Artificial Sequence
  ENSG00000151348_35 (sequence is synthesized)
ctatggactgtgctggcattgtgtatgtgtcatattgccctggtttcttcaaatttctgcccttttgctcatcatcgaatgcactaccttagtggctggtttctaatgcagcttctctcc

SEQ ID NO: 425293 - DNA, 120 bp, Artificial Sequence
  ENSG00000151348_36 (sequence is synthesized)
caaagggtacatttttaaatttttattttttaaaatcttgagagtcctttgatttgggaagaggaactctttcatctgagttcattgtgagccctagagagctgtgtgactttatcatcg

SEQ ID NO: 425294 - DNA, 120 bp, Artificial Sequence
  ENSG00000151348_37 (sequence is synthesized)
tcataggagtcattggactttaaaggcattacaactccatttaaagtacctcattactcccaggaatattgggtgttagatcttgcaacacagcataaaacaatttatgttaaagaagga

SEQ ID NO: 425295 - DNA, 120 bp, Artificial Sequence
  ENSG00000151348_38 (sequence is synthesized)
gcattatatcctaggcacttgaaacaacctcaaaggtgatgttaccctatgaacagataggtggtacagtcaccgtagaaattcaagacagggatatagcaggtgatggcgattcatgga

SEQ ID NO: 425296 - DNA, 120 bp, Artificial Sequence
  ENSG00000151348_39 (sequence is synthesized)
ttcagagtgggctagggactccactttattgttcgtgtatttctgagctgctaaccagcaaacctcacccataagcttaggtcaggatcatctgtcctcgggatgccatagagcctggtt

SEQ ID NO: 425297 - DNA, 120 bp, Artificial Sequence
  ENSG00000151348_40 (sequence is synthesized)
atcttactggcctatagagaagacgaacttgaactggccctggcccaagtgcacactgagccactggctttgcccccaggggcctaactgggatgggcctgcttggaatgccagggctgg

SEQ ID NO: 425298 - DNA, 120 bp, Artificial Sequence
  ENSG00000151348_41 (sequence is synthesized)
aaatacttttttattttgctgattaacattacatagttgttaaaatgtttatctcatgtattttaccaaccctcacacatttaggtataaacctccttttctgggagaattaaagagaaa

SEQ ID NO: 425299 - DNA, 120 bp, Artificial Sequence
  ENSG00000151348_42 (sequence is synthesized)
gtataaacctccttttctgggagaattaaagagaaaaacagcaactttagttgtcagaatcttgtgttctttcctgccagtgatgctctgctgtatccttttttttttttttttttttga

SEQ ID NO: 425300 - DNA, 62 bp, Artificial Sequence
  ENSG00000151348_43 (sequence is synthesized)
cgcttgccaccacgcctggctaatttgtttgtaattttagtagaggcgccttgacctcccaa

SEQ ID NO: 425301 - DNA, 120 bp, Artificial Sequence
  ENSG00000151348_44 (sequence is synthesized)
acgctcagccactgtatcctttactcagtgtcatcaagttcaaagctctgaccaccctggtttctctgccaaagcctcatctacttccagctgggctttgaacttgtggtttttaagtgc

SEQ ID NO: 425302 - DNA, 120 bp, Artificial Sequence
  ENSG00000151348_45 (sequence is synthesized)
tggtttctctgctgcctttggaaaatagtgaccatcatgctggtctgtgctgacgcagactgggagctggaagagacaagctccctctttgctctcattggccaaagatgttgctaataa

SEQ ID NO: 425303 - DNA, 120 bp, Artificial Sequence
  ENSG00000151348_46 (sequence is synthesized)
ccctgtgatcctagcttccttctaggatgatagcctctgacaggcaccatgccaggaggaaactagagcgtctttatcactgaaagatagcacgtttctagccacaggttctgaagttga

SEQ ID NO: 425304 - DNA, 120 bp, Artificial Sequence
  ENSG00000151348_47 (sequence is synthesized)
tttgaggttaaaatccaagaacctttgatagttttcagccaagatagtaatcagaaagtagatgaagcagagactgggtttgggaagtggttgggttctgggaaggctcttcctagctct

SEQ ID NO: 425305 - DNA, 120 bp, Artificial Sequence
  ENSG00000151348_48 (sequence is synthesized)
gcagttagatcctgtgaggacccagctgatagagtaaaggctttgggtgttggagacttcccatcagccacccatcatgagcctggtgtgtttcctttgctttgtagctcctttgggggt

SEQ ID NO: 425306 - DNA, 120 bp, Artificial Sequence
  ENSG00000151348_49 (sequence is synthesized)
atgctgctttttccatttctcttggctcgggtactcttccattgcagcaagagaagccacagtgggctgttccccaagcagccctggcacagagaggcagagtagagaatgctaaactgg

SEQ ID NO: 425307 - DNA, 120 bp, Artificial Sequence
  ENSG00000151348_50 (sequence is synthesized)
ccccatgtctcctccagccacttcctgaggagcagttctggcaggagtgttaaccatattggcagcagcttccatccagagagactttgaaagcaacttgagctttccactgcagggcct

SEQ ID NO: 425308 - DNA, 120 bp, Artificial Sequence
  ENSG00000151348_51 (sequence is synthesized)
ggaggcatatgaaacctgtggggcctgcccctactcacctcacccctgagctctgtccaagccctggacctcctgtcctcggcctgtgtttggtactcacccactttctacttctgagta

SEQ ID NO: 425309 - DNA, 120 bp, Artificial Sequence
  ENSG00000151348_52 (sequence is synthesized)
gaatcaagggcagcatttggtcccattataccagccatgcatcatctgtgaacaggccttattgagcttatcttggcagaggaaagtcaggcaggcaagacccactctaaattttaatgt

SEQ ID NO: 425310 - DNA, 120 bp, Artificial Sequence
  ENSG00000151348_53 (sequence is synthesized)
ttccccctcattttagggtgggagctgtgagttcatctgaagactgggtgagggcattgtaagctcaagccacagcctcttttccacctccattaaatggactgttagggatgcccagct

SEQ ID NO: 425311 - DNA, 120 bp, Artificial Sequence
  ENSG00000151348_54 (sequence is synthesized)
tccccaatttcctgggagggtgtgtgggtctgtacaggcaaccttgtgtcattctttcaatttccggctcaccattgctggcaacagtgggaagatgaccagagaaagtttggccccctc

SEQ ID NO: 425312 - DNA, 120 bp, Artificial Sequence
  ENSG00000151348_55 (sequence is synthesized)
tcccaagcttccaggcctctttccttttcaagaaatagttgagtcaccagcatctgtatctggcattttgtttcttcacatttgcaaccatttcagggtagagtttttttgtttgtttgt

SEQ ID NO: 425313 - DNA, 120 bp, Artificial Sequence
  ENSG00000151348_56 (sequence is synthesized)
ttgtttttgttttttttgttttttctttggaaacagagtctcactctgtcccataggctggagtgtagtgctgtgatcatggctcgctgcagcctcaaactcctggactcaagcagtctt

SEQ ID NO: 425314 - DNA, 120 bp, Artificial Sequence
  ENSG00000151348_57 (sequence is synthesized)
tcttcccatctcagccttccaagtagctgagactaaaagcgtgcaccaccacacctggctgatcttttaatttttttggagagacagggcctcactatgttgcctaggctggtctctaac

SEQ ID NO: 425315 - DNA, 89 bp, Artificial Sequence
  ENSG00000151348_58 (sequence is synthesized)
tgtcccaggatagcactttttcctttcttctgctctcagttggttggaccactggttgcatctcttcccactctccctgaaaggcacag

SEQ ID NO: 425316 - DNA, 120 bp, Artificial Sequence
  ENSG00000151348_59 (sequence is synthesized)
cactggttgcatctcttcccactctccctgaaaggcacagaactatcagacagaagacaaggtagttctcaagaagtaccaggcagctgtgtctgctagaggcttcctcagcaaagcccc

SEQ ID NO: 425317 - DNA, 120 bp, Artificial Sequence
  ENSG00000151348_60 (sequence is synthesized)
atcttgtggacaacctctcaggaattgcaggtggtgtgggagtggctgacagaggagggatccatatgtcttagaccaaagccaccagtcaggccttgccaccatatagaaccttccctt

SEQ ID NO: 425318 - DNA, 120 bp, Artificial Sequence
  ENSG00000151348_61 (sequence is synthesized)
tagaatatatttatttggaattttacttatagctgcaaatatatcattggctactatacccaagcatcaactcaaggaacatttggttttctggtgagcacagctgaagaccaaccaact

SEQ ID NO: 425319 - DNA, 120 bp, Artificial Sequence
  ENSG00000151348_62 (sequence is synthesized)
aaccaactagttactgatccagatgagggaagagaacatttattcagtcattctgttatgctaactattcattttctcatgaaaatgtagtctttggctgggcatggtggctcatgcctg

SEQ ID NO: 425320 - DNA, 120 bp, Artificial Sequence
  ENSG00000151348_63 (sequence is synthesized)
tccgtctcaaaagagaaaatgttgtctttgccaggcagtgtggtaggcccaagagatatagcaattagagttgactaagacagtgtccctatcctgttcttgagctccagttctagtggg

SEQ ID NO: 425321 - DNA, 120 bp, Artificial Sequence
  ENSG00000151348_64 (sequence is synthesized)
agttcttgagcttggtaagatgatgtgagtccatcagtggcccaggactctaagcatgtatgttttagtcccagctgtaaatgaggattccattaaccccatcttctccaatgtatggag

SEQ ID NO: 425322 - DNA, 120 bp, Artificial Sequence
  ENSG00000151348_65 (sequence is synthesized)
gatgcaagaagctttaaaatgtccttttctcacagtgacttcccttgaccatgccttagtttcctcagccagaaattggagacagcaagagcacttatgcctgagttggtgagatggaat

SEQ ID NO: 425323 - DNA, 120 bp, Artificial Sequence
  ENSG00000151348_66 (sequence is synthesized)
gatgtatcatatctcttccccttttattaaccagatcgtttaccagattgtacctggtgatgctggcagccagccctcttccggcccctatttctgcttaccgtgttaccagagagcctg

SEQ ID NO: 425324 - DNA, 120 bp, Artificial Sequence
  ENSG00000151348_67 (sequence is synthesized)
ggggtctggatcctatctggccccgtcagggtggattaccaaatgagcagttctcttgccccagtccctttcctgtgctataaataagccccatgtttattttcttatgttattgaaatg

SEQ ID NO: 425325 - DNA, 120 bp, Artificial Sequence
  ENSG00000151348_68 (sequence is synthesized)
agcacttgtgatttgggcctcttttgaggagtccagagagcgtccatccggtgcctggtgagggccctgcatggctggctgctgtctgaagctatttggagtcctctccctgtgttttct

SEQ ID NO: 425326 - DNA, 120 bp, Artificial Sequence
  ENSG00000151348_69 (sequence is synthesized)
atgtggcttaatttcaatagaaagggttatatgcaaccctgtatctgctgattttcaggtttcaactttctgccagcgtcactgcctgcttagaagtaaagttatgtttctcattaaggg

SEQ ID NO: 425327 - DNA, 120 bp, Artificial Sequence
  ENSG00000151348_70 (sequence is synthesized)
gataacagccacaattgaggtaattaacgaaaattgtacattggtggcagcacctcctataggatttccaatagtctttctctagtagatcattgggggctcaccttgatctcctctctt

SEQ ID NO: 425328 - DNA, 120 bp, Artificial Sequence
  ENSG00000151348_71 (sequence is synthesized)
ctgtctaccctgcaccaaaataccttgtcctgttttctggatatagttccaataatttttttcctaacagcctttttgtcaccagttggtttgatatcttacaacttggccaaatgaggg

SEQ ID NO: 425329 - DNA, 120 bp, Artificial Sequence
  ENSG00000151348_72 (sequence is synthesized)
ttccattaactccatcttgtctaatgcatggagaattcaaggattttttttttctcttttcatagcaccttccagttgccagttgtaccctggcccttctttggaagtcataatgatgaa

SEQ ID NO: 425330 - DNA, 120 bp, Artificial Sequence
  ENSG00000151348_73 (sequence is synthesized)
tatccattaataagagattgatgctctttcaactctcatgtcatctataccatctcagtggagaggatgactttggatgaggttggaatagaaaggaaacatttggaagtccactgcagt

SEQ ID NO: 425331 - DNA, 120 bp, Artificial Sequence
  ENSG00000151348_74 (sequence is synthesized)
gtattatatgctgtgtggaagtctgggggttaggaaatacctggagggagaacttcctaagaaatgatttttggttcttttaggccttaacagcacaataaaagtatcccatgagaccat

SEQ ID NO: 425332 - DNA, 120 bp, Artificial Sequence
  ENSG00000151348_75 (sequence is synthesized)
tatgagcaggacacgacattgtttcacaccttgggctgtgactatttacttctcggtacagattactctggttaaatcactcagtaaagaaatcttttcatgctcacaatctgaacctga

SEQ ID NO: 425333 - DNA, 120 bp, Artificial Sequence
  ENSG00000151348_76 (sequence is synthesized)
aggctattactgaagagaattgcatctgacaacaaaatttaatttacttccagagaaaggaccagaagaaagtaaattttcatttatgtttttaagtctattgtcttaaaaagattcttt

SEQ ID NO: 425334 - DNA, 120 bp, Artificial Sequence
  ENSG00000151348_77 (sequence is synthesized)
tcccttaaaaaataaaaaaacctgatgtgatgggttccttcagtcaacaaatacttattgagcagttattgtgtgccagatactgttcttggtgtgaggatatggcactgaacaaaacaa

SEQ ID NO: 425335 - DNA, 120 bp, Artificial Sequence
  ENSG00000151348_78 (sequence is synthesized)
tgtacctactttcgtcaagcttacattctaatgaggaagataaccaaaacaagtgactgaatataatttcaaatgtcaataaatgctgtgaagaaaataaagcagagtattatatgtgga

SEQ ID NO: 425336 - DNA, 120 bp, Artificial Sequence
  ENSG00000151348_79 (sequence is synthesized)
gcttaggacatcttcctggatttttctccctttgtggactcccagagttgacttattttattttatgtttaaaattgagattaatttatataccataaaatttactcttttaatgtgtat

SEQ ID NO: 425337 - DNA, 120 bp, Artificial Sequence
  ENSG00000151348_80 (sequence is synthesized)
attctagaacattttcatgactccacaaataaacctaatatccaatagcagtcagtcctcacctctgtccccagcaagaatccttaatctgctttttctctctatgggtttgcctattct

SEQ ID NO: 425338 - DNA, 120 bp, Artificial Sequence
  ENSG00000151348_81 (sequence is synthesized)
ggacatttcctatcaacataattgtacaataaatggtcttttgtacctgtcttctttcacttagcataatgtttccaaggcttattcatgtaatagcatggaatcagtacttcctttgtt

SEQ ID NO: 425339 - DNA, 120 bp, Artificial Sequence
  ENSG00000151348_82 (sequence is synthesized)
ttttggctgaatatttcatcatatgaatataccacattttattcatctcttcatcagttgatggaaatttggattatttccacctgttagctcttatgaataatgctgctatgaacattt

SEQ ID NO: 425340 - DNA, 120 bp, Artificial Sequence
  ENSG00000151348_83 (sequence is synthesized)
gtatacaagtttgtatgtaaagctggtttcagttctcttgacctaggagcagaactgctgggtcatacggtagctctatgtttaactttttgaggaactgccaaactcttttccaaagcg

SEQ ID NO: 425341 - DNA, 120 bp, Artificial Sequence
  ENSG00000151348_84 (sequence is synthesized)
gctgcaccatttcacattcccaccagccatgtatgagggtttcgatttccccatatcctcactaacccttgttattgcctgtgttttttattctagccatcctagtggatgtgaagtcat

SEQ ID NO: 425342 - DNA, 120 bp, Artificial Sequence
  ENSG00000151348_85 (sequence is synthesized)
atcttcattgtggttttggtttgcatttccccactgactaataattttgagtatcttttcatgtgcttattggccatttatataacttctttggagaaatgtctattcagatcatttgcc

SEQ ID NO: 425343 - DNA, 120 bp, Artificial Sequence
  ENSG00000151348_86 (sequence is synthesized)
gtgggtggaaggaaaaatgtactacaattgtaaaggttatttaaattctagctttctaagatgagagtgtgctttttatacttggggcctgataagggcagcataattttgaaacactga

SEQ ID NO: 425344 - DNA, 120 bp, Artificial Sequence
  ENSG00000151348_87 (sequence is synthesized)
ataaaaaccctccagaaggtaagaagccttagtgcctctctcagctggatcaattttggatggccaaattattcacatcctttgttttaaataaattttcctgctttgtcaatagcaata

SEQ ID NO: 425345 - DNA, 120 bp, Artificial Sequence
  ENSG00000151353_0 (sequence is synthesized)
ctctgtggattctggccaggccgggttcggcggttgctgtgagagcgggcttcccaacaccatgccgtccgccttctctgtcagctctttccccgtcagcatcccagccgtgctcacgca

SEQ ID NO: 425346 - DNA, 120 bp, Artificial Sequence
  ENSG00000151353_1 (sequence is synthesized)
gacggactggactgagccctggctcatggggctggccaccttccacgcgctctgcgtgctcctcacctgcttgtcctcccgaagctacagactacagatcgggcactttctgtgtctagt

SEQ ID NO: 425347 - DNA, 120 bp, Artificial Sequence
  ENSG00000151353_2 (sequence is synthesized)
catcttagtctactgtgctgaatacatcaatgaggcggctgcgatgaactggagattattttcgaaataccagtatttcgactccagggggatgttcatttctatagtattttcagcccc

SEQ ID NO: 425348 - DNA, 120 bp, Artificial Sequence
  ENSG00000151353_3 (sequence is synthesized)
actgctggtgaatgccatgatcattgtggttatgtgggtatggaagactttgaatgtgatgactgacctgaagaatgcacaagagagaagaaaggaaaagaaaaggagaaggaaagaaga

SEQ ID NO: 425349 - DNA, 120 bp, Artificial Sequence
  ENSG00000151353_4 (sequence is synthesized)
ctgaggggcagcagctgcttggagtttgcgtccttcccgtccacccagtgcagctcccagtgctgcagtgtgcgtggcgtgggcatccttccagctgactcatggtttgaaaaaccgttg

SEQ ID NO: 425350 - DNA, 120 bp, Artificial Sequence
  ENSG00000151353_5 (sequence is synthesized)
ttttatttaaatatccacagtggtagggcacacactgaagttggcttttcagccagcactgaatgtatccatcaggacatgcgtcttcaggtgcctgatctttgtagtcaggctgtggga

SEQ ID NO: 425351 - DNA, 120 bp, Artificial Sequence
  ENSG00000151353_6 (sequence is synthesized)
acggtctctgcagagcttcataactgggaatttgatttgaagaagtccatgtcatatgtgtaactagtactaattataaatataaaatacacaatataaaatatgaaactcaataataaa

SEQ ID NO: 425352 - DNA, 120 bp, Artificial Sequence
  ENSG00000151353_7 (sequence is synthesized)
cagtgccacctgtacatgggcaccatgccctcctcctcgtgctgtgttttctagtgcatgccacagttcgcagtagagggtgttttcaccttccaagacatggggcaaagtttggagaca

SEQ ID NO: 425353 - DNA, 120 bp, Artificial Sequence
  ENSG00000151353_8 (sequence is synthesized)
cctggttgtcactggagggggtggtgctcctggcttctcctgtggagcccggggtgatgcataaaatcctgtgtgcctgggtcagccgcatcacagacaatgacttgacatgaaatgtca

SEQ ID NO: 425354 - DNA, 120 bp, Artificial Sequence
  ENSG00000151353_9 (sequence is synthesized)
gctgtgctggggcagagagaccttggaaggaagctcttggaaaatacgttgtatctcagtttgatgaaccaattcacaagaggctaggccctctctagcaaagttatgggctgctttact

SEQ ID NO: 425355 - DNA, 120 bp, Artificial Sequence
  ENSG00000151353_10 (sequence is synthesized)
gaaaacagaatggaagccctgaagtcaacactccatggagaagcgtgtctttcctaatgtcctggtgttctgttgatttaggtgcttgggaacacaatgctcccagttctgttaggacag

SEQ ID NO: 425356 - DNA, 120 bp, Artificial Sequence
  ENSG00000151353_11 (sequence is synthesized)
gcatactgttactttgcaatatccactttataaaatagctcctgcccagtggctcttggttcctgtcaaatgtggacctgtagtttaagaatgacaggtggttagagacccagatattta

SEQ ID NO: 425357 - DNA, 120 bp, Artificial Sequence
  ENSG00000151353_12 (sequence is synthesized)
aaaataggtgttcaataagggaatactgattgtgcattgtatctggatagcatgcctaattgtgcatttctgaaagttaccaattcaaaatgtaattggaacagttatctttgattagac

SEQ ID NO: 425358 - DNA, 120 bp, Artificial Sequence
  ENSG00000151353_13 (sequence is synthesized)
aagcctgggaagagaatgttgaggtgcagagctcaccagccaagttcatgcccctctcgggcctttgtggctgagaagtgggacagaaagatgattaaggtaatgtgtcctccctgtagc

SEQ ID NO: 425359 - DNA, 120 bp, Artificial Sequence
  ENSG00000151353_14 (sequence is synthesized)
attgtccagggccgttgtgtagatatttgacttcactgacagaaaagaaaccagggagtttgtagagactgtgcatttttagtataacattttcaccatctgatatggtttggctttgtg

SEQ ID NO: 425360 - DNA, 120 bp, Artificial Sequence
  ENSG00000151353_15 (sequence is synthesized)
tccccacccaaattgcatctcaaattgtaatccccatgtgtcaagggagggacctgatgggaggtgatgggatcatgggggtggtttcccctatgttgttatcataatagagagggagtt

SEQ ID NO: 425361 - DNA, 90 bp, Artificial Sequence
  ENSG00000151353_16 (sequence is synthesized)
gtggtttcccctatgttgttatcataatagagagggagttctcacaagatctgctggttttaaagacagcagtttcccctgctgtcactg

SEQ ID NO: 425362 - DNA, 120 bp, Artificial Sequence
  ENSG00000151353_17 (sequence is synthesized)
tttctccctctgccatgattgtaagtttcccgaggcctccccggccatgtggaactgagtcaattaaacttcttgtttataaagtaatccaggtctcaggtagtatctttatagcagtgt

SEQ ID NO: 425363 - DNA, 120 bp, Artificial Sequence
  ENSG00000151353_18 (sequence is synthesized)
acttaatatggggccgtgtgattgaatctcagtttgcctgtgataaagtagtgtaacagtattgctagctttgcatgaatttgatgctgatgacatgtcagtgtgaaaccatgacgtgtg

SEQ ID NO: 425364 - DNA, 120 bp, Artificial Sequence
  ENSG00000151353_19 (sequence is synthesized)
gtctttgattttcattctgcatgtgtgtgtctgtgttttggaacagttatattttggttttgtaaaaacaaccttcactttatttttaactgtgtagtaagtttatattcaatgccttaa

SEQ ID NO: 425365 - DNA, 120 bp, Artificial Sequence
  ENSG00000151353_20 (sequence is synthesized)
agtgcattgttaacaattgtcttgatatgttgtcctcattttagggaaagtcatagaagccaaaatgatcagcagttgagtaatttacgaaagcacaggtgcaatcccactttaaagcac

SEQ ID NO: 425366 - DNA, 120 bp, Artificial Sequence
  ENSG00000151353_21 (sequence is synthesized)
tgggggttgcacagagcacactggtttcaggctccataaatgtggatgactcactggagagcttcatctgtttaagtagaacaaatgtttttactctactgataaagtacaggaaaggag

SEQ ID NO: 425367 - DNA, 120 bp, Artificial Sequence
  ENSG00000151353_22 (sequence is synthesized)
gtttgggatcaaaattatttttcacattccaaacctgtgacaccttacgtttatcgattgctatgcaataaaatacatctttaataatatgtagtatttttttttgtttttttcaaaaaa

SEQ ID NO: 425368 - DNA, 120 bp, Artificial Sequence
  ENSG00000151353_23 (sequence is synthesized)
atggtatttgttttgcaccttactgtaactggaaacaggagcacctggaacttagctccacctttggctggcaggtccctttgctgcagcatctggtgctgagttttaacaaacaaatgc

SEQ ID NO: 425369 - DNA, 120 bp, Artificial Sequence
  ENSG00000151353_24 (sequence is synthesized)
aattgtgtccttgccagtagaagaaagtctacttgcacagataatgtatatcaaatcagaaagcaatatgcaacctgaatggctagcttctgtgagaagtaaagtggcaaggaaatgtta

SEQ ID NO: 425370 - DNA, 120 bp, Artificial Sequence
  ENSG00000151353_25 (sequence is synthesized)
agggtaaggagcttcagtggcgcgaagttgagtgggatgcttaaagacagacgagaattgccgtcagagatataccggtcaggcccaagcatcttttccctggaaaagaacttcaggctt

SEQ ID NO: 425371 - DNA, 120 bp, Artificial Sequence
  ENSG00000151353_26 (sequence is synthesized)
ccttgtctggatttcagtggagcacccttcttctttcaccaagttaaccagaacatgttttcagtgcagccttcccctctttactgaagcccctcttgctggtcgactacaccagcaagt

SEQ ID NO: 425372 - DNA, 120 bp, Artificial Sequence
  ENSG00000151353_27 (sequence is synthesized)
cggtcctggggaggacggggctgggctccacatgcagagttctcggaggcaggaagggagcgagccagggcagagaagagcacccagggggtggcgctgcccagtcccaggatggtgcga

SEQ ID NO: 425373 - DNA, 120 bp, Artificial Sequence
  ENSG00000151353_28 (sequence is synthesized)
agatgtctccaagccctggttgctgcacagggaaggcaggatggggcggcgaggcccacgcaggctgtgggtgccatgcgttggtggcagcttgttccgagtggggctggaacagttgac

SEQ ID NO: 425374 - DNA, 120 bp, Artificial Sequence
  ENSG00000151353_29 (sequence is synthesized)
agcaagcatcctcatcggcctggtaagctttctagctcctcttcctccgatgttccagtttcacagcggcctgtacagttagatctttcctcgctttgggggaaggtgtagctattatag

SEQ ID NO: 425375 - DNA, 120 bp, Artificial Sequence
  ENSG00000151353_30 (sequence is synthesized)
tctccgaatcatgctgtcattagaaattgcacaagacctatgccaggggaggcgctgactggcacaggccctgaaaggaacctgaggacagagaaggagctccctgcagccttcaggcag

SEQ ID NO: 425376 - DNA, 120 bp, Artificial Sequence
  ENSG00000151353_31 (sequence is synthesized)
ccaagcagaggcctaagtccaagcatgtggccatagggtctgctctgtaagcctcagggctactgccttctgctccagtcctgggccaaaacacccttcagcagctcctgctccatctga

SEQ ID NO: 425377 - DNA, 120 bp, Artificial Sequence
  ENSG00000151353_32 (sequence is synthesized)
gcgagctggatgtcagcctccatgggccctgttgtgcatggggttgatgcttcatctgagtgagctgggcatctgcctccatgggtcctgttgtgtgtagggttgatgctccatctcagt

SEQ ID NO: 425378 - DNA, 120 bp, Artificial Sequence
  ENSG00000151353_33 (sequence is synthesized)
gagctgagcatctgcatctcggggttctgttgtacatggggttaatactccatccgagtgagctgggcatccgcatctctgggttttgtgtgcgtggggttaacactccatctgagtgag

SEQ ID NO: 425379 - DNA, 120 bp, Artificial Sequence
  ENSG00000151353_34 (sequence is synthesized)
ctgggtgactgcctccatgagtcctgttgtgtgtggggttgatgctccatctgagtgagtggggcatctgcatctctgtgtcctgttgtgtgtggggttgatgctgcatctgagtgagtg

SEQ ID NO: 425380 - DNA, 120 bp, Artificial Sequence
  ENSG00000151353_35 (sequence is synthesized)
gggcatctgcatctctgggtcctgttgtgtgtggggttgatgctccatctgagtgagtggggcatctgcatctctgggtcctgttgtatgtagggttgattctctatctgagtgagtggg

SEQ ID NO: 425381 - DNA, 120 bp, Artificial Sequence
  ENSG00000151353_36 (sequence is synthesized)
gcatctgcatctctgggttctgttgtatgtggggttgttgctctgagtgagtggtgcatctgcatctctgggttctattttatgtggggttgattctctgagtgagtggggcatctgcat

SEQ ID NO: 425382 - DNA, 120 bp, Artificial Sequence
  ENSG00000151353_37 (sequence is synthesized)
ctctgggttctagtttatgtggggttgattctctgtctgagtgagtggggtgtttgcatctctgggtcctgttgtatgtggagttgattctctatctgagtgagtggagcatctgcatct

SEQ ID NO: 425383 - DNA, 120 bp, Artificial Sequence
  ENSG00000151353_38 (sequence is synthesized)
ctgggtcctgttgtatgtggggttgattatctgagtgaatggggcatctgcatctctgggttctagtttatgtggggttgattctctatctgagtgagtggtgcatctgcatctctgggt

SEQ ID NO: 425384 - DNA, 120 bp, Artificial Sequence
  ENSG00000151353_39 (sequence is synthesized)
tctattttatgtggggttgattctctatctgagtgagtggggtgtctgcatctctggatcctgttgtatatggggttgattctctatcggagtgagtggggcatctgcatctctgggttc

SEQ ID NO: 425385 - DNA, 120 bp, Artificial Sequence
  ENSG00000151353_40 (sequence is synthesized)
tgttgtatgtgggagtgatgctccatctgagctgggcgtctgcatctctgggtttatggatccctaagcccaactcactcacagcttggccctccatgtgctggtctttcctctgcctta

SEQ ID NO: 425386 - DNA, 120 bp, Artificial Sequence
  ENSG00000151353_41 (sequence is synthesized)
cccatgtttggttatttcttatataacattggatatctttggaacaggagaaaattgttaagtgtcaatttgctgccccttttttctgtaagtctatcttctataaagtaatgtagtccc

SEQ ID NO: 425387 - DNA, 120 bp, Artificial Sequence
  ENSG00000151353_42 (sequence is synthesized)
tattatcatgatgctatttcactatataacattattttcaatgcctgcatagtaaacacattgtaggggtataggctgaatttacgtaaccagttactgatattagagatgcagagtttt

SEQ ID NO: 425388 - DNA, 120 bp, Artificial Sequence
  ENSG00000151353_43 (sequence is synthesized)
tctaattgttttactgacaacagcaacacagaaatctccaacctcacatgcctacatttccactattgacttggaataaattcttacaagtgaaatttagtcaacatatataacttttat

SEQ ID NO: 425389 - DNA, 120 bp, Artificial Sequence
  ENSG00000151353_44 (sequence is synthesized)
gtgacagttggtaaatgttgctaaatcaattttcagaaagcatatgccaatattggttgtacatatttcctgaaatccttgtctgcactaagtagcaacgtaaaaaaagaaacttttctg

SEQ ID NO: 425390 - DNA, 120 bp, Artificial Sequence
  ENSG00000151353_45 (sequence is synthesized)
agtaataggtgaaagttttatctcactgttttaacttgtacttctgtggttacctgtgaggtttaacgcttttcaaatgattgttggtgttttgcatttttttagtgaataatctgttcg

SEQ ID NO: 425391 - DNA, 120 bp, Artificial Sequence
  ENSG00000151353_46 (sequence is synthesized)
tattcttctttgttttgcaatatgggctttaaaaaacctatttctaattttatgtgttaaaattggtaacacatatagggcagaaatatgtgttactagtctgtagtttggctttggctt

SEQ ID NO: 425392 - DNA, 120 bp, Artificial Sequence
  ENSG00000151353_47 (sequence is synthesized)
gtgttgaaaaggttttagaaagtcaaacagttttttgctttatgtatcatcaggaactgtgaagagctgaggttccacctcctcccaagctgacaagtgaccctcggagaagaaccgtga

SEQ ID NO: 425393 - DNA, 120 bp, Artificial Sequence
  ENSG00000151353_48 (sequence is synthesized)
aaacctcacaacagtgaagttagtttaaacaagttacaacgacaaacacattgtgccatccttatgatttcacctgttacttagttcacactgatgggtggctggtgtttaaatgctttc

SEQ ID NO: 425394 - DNA, 120 bp, Artificial Sequence
  ENSG00000151353_49 (sequence is synthesized)
caagttcatttcatttattatacaaatgcctgtgaaatacccaggcagcatcattgcttccttctctagcctccaaaccgaatatccttttgctcaagcatccaggtaaaaaaaggggga

SEQ ID NO: 425395 - DNA, 120 bp, Artificial Sequence
  ENSG00000151353_50 (sequence is synthesized)
ccttaggaattgtgaatttgaagccagaagccatggtttacctaggaatggatttacttgccaagaactgtgacacctttataaataaagttactcatgttggcttttttgctctttaaa

SEQ ID NO: 425396 - DNA, 120 bp, Artificial Sequence
  ENSG00000151353_51 (sequence is synthesized)
gttggagaaaatcaagtcttgcacgtggcgatggctcaagattccctgaggtcttcagtgctgactaaggagtctgaaatgatgattcatgttttacctttggggctgagccaagtgcat

SEQ ID NO: 425397 - DNA, 120 bp, Artificial Sequence
  ENSG00000151353_52 (sequence is synthesized)
ctctttgagcaatcgtcttaatttccttgtcgtcaccaattatcataaccaattatcatcgtaaaggatggtaattcctttaattatacccaccttaaaaacatgattctgttccacaaa

SEQ ID NO: 425398 - DNA, 120 bp, Artificial Sequence
  ENSG00000151353_53 (sequence is synthesized)
cgaaaggagcacatcagagatgccttcagttctgtgtgcttgaactttgaattccatgaattatagttgcactgaggggagaatcctgtttccatcctcctggttccttctccctttcct

SEQ ID NO: 425399 - DNA, 120 bp, Artificial Sequence
  ENSG00000151353_54 (sequence is synthesized)
ctctgtggattctggccaggccgggttcggcggttgctgtgagagcgggcttcccaacaccatgccgtccgccttctctgtcagctctttccccgtcagcatcccagccgtgctcacggt

SEQ ID NO: 425400 - DNA, 120 bp, Artificial Sequence
  ENSG00000151353_55 (sequence is synthesized)
ccacgtggccgccaaggggtgacatgggcactcgatggggtctgggcagaaagccgtgctcccctcacctccgtgcctctggtcttctggtgggtgcattgatgggagtagatgcgcttg

SEQ ID NO: 425401 - DNA, 120 bp, Artificial Sequence
  ENSG00000151353_56 (sequence is synthesized)
tgtccttatgtcatggcgcggctctggagaagccgctgcggtccccagcagagagtagtgacacaggagttctggagggctgtgccgggctgcagcttggagggcagggcggggctgcag

SEQ ID NO: 425402 - DNA, 120 bp, Artificial Sequence
  ENSG00000151353_57 (sequence is synthesized)
cttggagggcagggcggggctgcagcttggagggcagggcttgtcttctgcaggagggcgctcaaggaggggatggggagggttgaggactgctgggattggcatctgagcatcaggtgg

SEQ ID NO: 425403 - DNA, 120 bp, Artificial Sequence
  ENSG00000151353_58 (sequence is synthesized)
ggactgagcagcagtggatctgagcctggctacttcaggtccctgagccagacactgtccccaggtacagcagggtcccggggagtccaggaggcggcggagtgcggcactgtctggaga

SEQ ID NO: 425404 - DNA, 120 bp, Artificial Sequence
  ENSG00000151353_59 (sequence is synthesized)
gttccatgcccttcaccccaccctcgccgacccgctgctgacatgcagcggtccctaagccgtcccccgactgcccagcctcttgggcatcctggggaagcgtgggcctcagagccaagc

SEQ ID NO: 425405 - DNA, 120 bp, Artificial Sequence
  ENSG00000151353_60 (sequence is synthesized)
actgcccctcagaacgttccagagtgtccccagctcccccagagtaaacgcggagtcctgcagtgatgccctgcggcctcctgccagctctgtcccagccgttcatggctgtgcctacga

SEQ ID NO: 425406 - DNA, 120 bp, Artificial Sequence
  ENSG00000151353_61 (sequence is synthesized)
ctccacgaggccccctcacccccgacaggcttcacatttctctgtagcagcactcgccacatgcttggactggctgcctcttacttctgggcctcccatggtatagagtgtaagcgccag

SEQ ID NO: 425407 - DNA, 120 bp, Artificial Sequence
  ENSG00000151353_62 (sequence is synthesized)
caaggcgggagccccatgctcatgaggtgttgacccactgcccaccattactagctgtgagcgccagcaaggcaggagccccatgctcacaaggcgctgacccactgcccaccattacta

SEQ ID NO: 425408 - DNA, 120 bp, Artificial Sequence
  ENSG00000151353_63 (sequence is synthesized)
gctttgttgatggcatttcctgtgctggctgctgagagaatcatcaacacccacgtgcagatcctctgccctccctggcgctgtacctttgtgcaggtggagatcttccgccttcctcag

SEQ ID NO: 425409 - DNA, 120 bp, Artificial Sequence
  ENSG00000151353_64 (sequence is synthesized)
tctcttctgctaaagaggcactggcactgacagcaagaggacctgctatgagaaccaaagggatggaagggcccggcaccactccttcccagtgcagctgtggagcagacgcagctgctg

SEQ ID NO: 425410 - DNA, 120 bp, Artificial Sequence
  ENSG00000151353_65 (sequence is synthesized)
tccctttgtcatttacggggaggggattattgacgttgttactctgtaggttttaaggatttcaagtcatcagtgtcttccagctaaggtcagatgtgctgctgatgacccagagggctt

SEQ ID NO: 425411 - DNA, 120 bp, Artificial Sequence
  ENSG00000151353_66 (sequence is synthesized)
aggcctcggggtctttcctgtgctgctgggtggtgtctccctgtcctgtgacccagtgtgttttcttcataatgagcattcattgcatttgggacagtacagtggagattaccgctgctc

SEQ ID NO: 425412 - DNA, 120 bp, Artificial Sequence
  ENSG00000151353_67 (sequence is synthesized)
ccaagggtgggcccagtgagggtgttgctcccacctcagtccacatcagctctctccaaagtcttatctaaatagacggtgtcactagaactttttggttgtattgcctagtaatttttt

SEQ ID NO: 425413 - DNA, 120 bp, Artificial Sequence
  ENSG00000151353_68 (sequence is synthesized)
gcagtgcggcggggcgtgcgtggtggagcctgatcgtgtggggtggcacggaggaacgctgcccagtgtgggcggggcgtgcgccgtgccgggttcgtctgacagatcccaggggagccc

SEQ ID NO: 425414 - DNA, 120 bp, Artificial Sequence
  ENSG00000151353_69 (sequence is synthesized)
acgccccacgtggccgccaaggggtgacatgggcactcgatggggtctgggcagaaagccgtgctcccctcacctccgtgcctctggtcttctggtacagcagggtcccggggagtccag

SEQ ID NO: 425415 - DNA, 120 bp, Artificial Sequence
  ENSG00000151360_0 (sequence is synthesized)
attctctctgagctggcactcaagcaccgtgggaccttggctggcttctggggagcaagagatccatttatgaatacttgatttctgactgctgggaagcacggctgatgctccgaagga

SEQ ID NO: 425416 - DNA, 120 bp, Artificial Sequence
  ENSG00000151360_1 (sequence is synthesized)
gggaagactgacccggtttctggacttcacccagctgatggacatggcatctgaatccgtaggaggaaaaattttatttgcaacagatgacttttttgctcctgcagaaaacctcataaa

SEQ ID NO: 425417 - DNA, 120 bp, Artificial Sequence
  ENSG00000151360_2 (sequence is synthesized)
gagtgacagcccgtgcttcaaagagcatgaatatacggagtttgggaaatggatggatggctgggagaccaggaggaaaaggattccaggtcacgactggtgtgtcctcaggctggggat

SEQ ID NO: 425418 - DNA, 120 bp, Artificial Sequence
  ENSG00000151360_3 (sequence is synthesized)
ccaaggagtcatccggggcttcgacgtggacgtttcttacttcacgggagattacgctcctcgagtgtccattcaagcagcaaacttggaagaagataaactaccagaaatcccagaaag

SEQ ID NO: 425419 - DNA, 120 bp, Artificial Sequence
  ENSG00000151360_4 (sequence is synthesized)
aggaaccaggacaggagctgcagccactcctgaggagtttgaagccattgctgagctaaaatccgacgactggagttacttggttcccatgactgagcttaagccaggaaaccctgcttc

SEQ ID NO: 425420 - DNA, 120 bp, Artificial Sequence
  ENSG00000151360_5 (sequence is synthesized)
cggccacaactattttcttgtcaattcccagcagagatggactcatatcagactcaacattttcccagatggtggaattgcacgacttagagtattcggtactggacaaaaagactggac

SEQ ID NO: 425421 - DNA, 120 bp, Artificial Sequence
  ENSG00000151360_6 (sequence is synthesized)
gcaactgaccccaaagaacctgcagacctagtggccatcgcttttgggggtgtctgtgtaggatttagtaatgctaagtttgggcacccaaacaatataataggagttggcggggcaaag

SEQ ID NO: 425422 - DNA, 120 bp, Artificial Sequence
  ENSG00000151360_7 (sequence is synthesized)
tctatggcggatggttgggaaactgcaagaaggctggaccggccaccaatattagaaaatgatgagaatggcattctcttggttccgggttgtgaatgggcagttttccgattggcacat

SEQ ID NO: 425423 - DNA, 120 bp, Artificial Sequence
  ENSG00000151360_8 (sequence is synthesized)
cctggagtaataactcgaattgaaattgacacaaaatattttgaaggcaatgctcctgacagctgtaaagtggatgggtgcatcctgacaactcaggaagaagaagccgtgatcaggcaa

SEQ ID NO: 425424 - DNA, 120 bp, Artificial Sequence
  ENSG00000151360_9 (sequence is synthesized)
aagtggattctcccggcccacaagtggaaaccactgcttccagtgaccaagttgtctcccaaccaaagtcatctgttcgatagcctgaccctagagctccaagatgtcatcactcacgcc

SEQ ID NO: 425425 - DNA, 120 bp, Artificial Sequence
  ENSG00000151360_10 (sequence is synthesized)
aggctcaccatcgtccccgacgggggagtgagccgccttcggctccggggcttccccagctccatctgcctcctgaggccccgggagaagcccatgttgaagttctcggtgagcttcaaa

SEQ ID NO: 425426 - DNA, 120 bp, Artificial Sequence
  ENSG00000151360_11 (sequence is synthesized)
gcaaacccttaacacacacaaagccccggtgtcggacacacagcagtaatttcccagtcatagtcttcttttcaaatgttttgaacacctggtgatttaataaagtggtcgtctcacaaa

SEQ ID NO: 425427 - DNA, 120 bp, Artificial Sequence
  ENSG00000151360_12 (sequence is synthesized)
gtgatattactctcataacccggctcctgctgaatgactccctctaggatattttctagggttttatgccaatgaagtttttggttttatttgttgtaaatagcaagacttccattgttt

SEQ ID NO: 425428 - DNA, 120 bp, Artificial Sequence
  ENSG00000151360_13 (sequence is synthesized)
taccaaaaaattttcagatcactcattttcactaaatttgtaaaataaaaacatatagggcatgttttagtacaatattttgattaaattaattttctatattaaaaatgcttggtttcc

SEQ ID NO: 425429 - DNA, 120 bp, Artificial Sequence
  ENSG00000151360_14 (sequence is synthesized)
accttctagcaattaatattcgaagaaacaaaacattcgttctactagaatcagatgctgtgagttgattttggtagctatttgctgctctgcagacctaatttcaggctgctgtggttc

SEQ ID NO: 425430 - DNA, 120 bp, Artificial Sequence
  ENSG00000151360_15 (sequence is synthesized)
tcagcagcaatttgattttgtgaatattatcttttgtattctgaatcacattgctaagcagggtggtgttgtaaaaataaaaacataaggttctcttgtctgagtctgtgtgggagtcag

SEQ ID NO: 425431 - DNA, 120 bp, Artificial Sequence
  ENSG00000151360_16 (sequence is synthesized)
cgatgcttatttctagcacgaaacattatctgtatggtgaatttcccgaatgctgtttgaccttggagttgttcatttaatgaaaaaaacttcaatgcctactatgtgcccagacctctt

SEQ ID NO: 425432 - DNA, 120 bp, Artificial Sequence
  ENSG00000151360_17 (sequence is synthesized)
ctaggtagagacgatacaagagtggtacagaagtgaacaacacaggtaagtggtctggcctacaaggatttcgcattctgggtattggagactgattttagcaggaacttaaaaagataa

SEQ ID NO: 425433 - DNA, 120 bp, Artificial Sequence
  ENSG00000151360_18 (sequence is synthesized)
tttcaggctgtgattagagctctggagtaaataacaaagagatatgataaaatgtaacctggggagtcaggcagtggctgaatggaggagggaggagacaacttcagagcatgagaggga

SEQ ID NO: 425434 - DNA, 120 bp, Artificial Sequence
  ENSG00000151360_19 (sequence is synthesized)
tctggtacagggtaatatcaagtgcaaaggccctggggcagtgggcttgttgtatttgagaaacagcaggtgggtgtggccaaagcctaccaagagatgacactggagaagacaggaggg

SEQ ID NO: 425435 - DNA, 120 bp, Artificial Sequence
  ENSG00000151360_20 (sequence is synthesized)
tcctgtagtgtatgatacacaagcagccatttttacaaacaataactaaggcacctttccttttcagatggtggaattgcacgacttagagtattcggtactggacaaaaagactggact

SEQ ID NO: 425436 - DNA, 120 bp, Artificial Sequence
  ENSG00000151364_0 (sequence is synthesized)
gcacttccgctggcccaagtgatctgcatgtggcagggctgcgcagtggagcggccagtgggcaggatgacgagccagacccctctgccccagtccccccggcccaggcggccaacgatg

SEQ ID NO: 425437 - DNA, 120 bp, Artificial Sequence
  ENSG00000151364_1 (sequence is synthesized)
tctactgttgtggagctgaacgtcgggggtgagttccacaccaccaccctgggtaccctgaggaagtttccgggctcaaagctggcagagatgttctctagcttagccaaggcctccacg

SEQ ID NO: 425438 - DNA, 120 bp, Artificial Sequence
  ENSG00000151364_2 (sequence is synthesized)
gacgcggagggccgcttcttcatcgaccgccccagcacctatttcagacccatcctggactacctgcgcactgggcaagtgcccacacagcacatccctgaagtgtaccgtgaggctcag

SEQ ID NO: 425439 - DNA, 120 bp, Artificial Sequence
  ENSG00000151364_3 (sequence is synthesized)
ttctacgaaatcaagcctttggtcaagctgctggaggacatgccacagatctttggtgagcaggtgtctcggaagcagtttttgctgcaagtgccgggctacagcgagaacctggagctc

SEQ ID NO: 425440 - DNA, 120 bp, Artificial Sequence
  ENSG00000151364_4 (sequence is synthesized)
atggtgcgcctggcacgtgcagaagccataacagcacggaagtccagcgtgcttgtgtgcctggtggaaactgaggagcaggatgcatattattcagaggtcctgtgttttctgcaggat

SEQ ID NO: 425441 - DNA, 120 bp, Artificial Sequence
  ENSG00000151364_5 (sequence is synthesized)
aagaagatgttcaagtctgttgtcaagtttgggccctggaaggcggtcctagacaacagcgacctcatgcactgcctggagatggacattaaggcccaggggtacaaggtattctccaag

SEQ ID NO: 425442 - DNA, 120 bp, Artificial Sequence
  ENSG00000151364_6 (sequence is synthesized)
ttatgaaattaaaagttgccatcaaagccattttcttttaatttcacaaacatcaggcaatttccagggttggtctagagtcttgccactaaatattgatcactcgtttaaggactttcc

SEQ ID NO: 425443 - DNA, 120 bp, Artificial Sequence
  ENSG00000151364_7 (sequence is synthesized)
actccattgcaactgatgccactatatttgcctagcaacttgcagctacttccttttcaaagcctcatgtatctcccagacccttctcttgaagtccaataacaagaccaagtaagaatg

SEQ ID NO: 425444 - DNA, 120 bp, Artificial Sequence
  ENSG00000151364_8 (sequence is synthesized)
tttcaacaatgcgttggcaagagatgtgagatgacaacaggaacatacaagatactgtgaatctagatgttctgacctaaagatgtagtctacatagccccagcttggggtccaatccat

SEQ ID NO: 425445 - DNA, 120 bp, Artificial Sequence
  ENSG00000151364_9 (sequence is synthesized)
ctgtccctggcatgtgccttcatgtagtaggtgctttcctgatcccctttgcgagatgctgtgggtgctaacacctcagagctgtcctcttctctagagtggaggttttcaaagtgcatc

SEQ ID NO: 425446 - DNA, 120 bp, Artificial Sequence
  ENSG00000151364_10 (sequence is synthesized)
atcagcattacctgtgaacttgctggaaatacaaatcctcaggccccacctcagacctactgaatcagaatctctgggggttggcacagcattctgatttaccaaaccctccaagtgatt

SEQ ID NO: 425447 - DNA, 120 bp, Artificial Sequence
  ENSG00000151364_11 (sequence is synthesized)
ttgatgtattctaattttgagaccatctctagaaaagaattgctacctcttgtatggaggtacaaaagactgacctcttacatcaaggaacttcctttcccagagctcctcatggaatca

SEQ ID NO: 425448 - DNA, 120 bp, Artificial Sequence
  ENSG00000151364_12 (sequence is synthesized)
agctgaagtcagtcttcttctgagagcacattcttactcagtttttttcctctgtcctacgctgcttccctcactccccttctcctaagagcactccatcaataaaccacttgcacgaga

SEQ ID NO: 425449 - DNA, 120 bp, Artificial Sequence
  ENSG00000151364_13 (sequence is synthesized)
actgagccgatctctttctttcctgctcctgcccttgcgaactgattctgtggactccttttttgctgtttctgggggaaatctcggcagatcactcgcttttctcggagtcctccccgg

SEQ ID NO: 425450 - DNA, 120 bp, Artificial Sequence
  ENSG00000151365_0 (sequence is synthesized)
attgtgtcagaggaagcaaccatgcaggtgctaaccaagcgttaccccaagaactgcctgctgaccgtcatggaccggtatgcagccgaggtgcacaacatggagcaggtggtgatgatc

SEQ ID NO: 425451 - DNA, 120 bp, Artificial Sequence
  ENSG00000151365_1 (sequence is synthesized)
cccagccttctgcgggacgtgcagctgagtgggcctgggggccaggcccaggctgaggcccctgatctctacacctacttcaccatgctcaaggccatctgtgtggatgtggaccatggg

SEQ ID NO: 425452 - DNA, 120 bp, Artificial Sequence
  ENSG00000151365_2 (sequence is synthesized)
ctgctgccgcgggaggagtggcaggccaaggtggcaggcagcgaagagaatggaaccgcagagacagaggaagtcgaggacgagagtgcctcaggagagctggacctggaagcccagttc

SEQ ID NO: 425453 - DNA, 120 bp, Artificial Sequence
  ENSG00000151365_3 (sequence is synthesized)
cacctgcacttctccagcctccatcacatcctcatgcacctcaccgagaaagcccaggaggtgacaaggaaataccaggaaatgacgggacaagtttggtagaccttggacactagggaa

SEQ ID NO: 425454 - DNA, 120 bp, Artificial Sequence
  ENSG00000151365_4 (sequence is synthesized)
cagaagtgaaggcggctcagttctccgggatgcttctctacctcctgagcaccaattcctggattccagtcactggctcacctttagaatgtctgttgctattcactgctcccctcgctc

SEQ ID NO: 425455 - DNA, 120 bp, Artificial Sequence
  ENSG00000151365_5 (sequence is synthesized)
ctcttaacagcttggggaggtgaccagtggttcaggagggactagacaattacctgtccagtgtggtatggtaggaagagtgtaggtgttggcacgtgaccaaaattcacatccctcctc

SEQ ID NO: 425456 - DNA, 120 bp, Artificial Sequence
  ENSG00000151365_6 (sequence is synthesized)
atggcagtcattcagtatgtgtacttgtacaagttatttaacccattggagcctaaattccctcatctataaaatggggataatattatctacctcacaagcttatgaaaactaaacatg

SEQ ID NO: 425457 - DNA, 120 bp, Artificial Sequence
  ENSG00000151365_7 (sequence is synthesized)
atgaatcaaaagcacttggcatgtgagggctattaaaatagcctgattttttttttctccccctctccccaatgtatttgctctggcccttgctttttaccctccagagctaagaggtag

SEQ ID NO: 425458 - DNA, 120 bp, Artificial Sequence
  ENSG00000151365_8 (sequence is synthesized)
cagagtctcttgggatgagtgattcaccctcttacttggcgaccactgatgagatcaacaacaggtgaactataaacctattatttattgcagaactaataaaaaatccaaagccttgta

SEQ ID NO: 425459 - DNA, 120 bp, Artificial Sequence
  ENSG00000151366_0 (sequence is synthesized)
gagtccggcgcgcagaggaggaggagaaagctgaccgcttaggccggggtagtggtcgtcgtggttttccttgtagttcgtggtctgagaccaggcctcaagtggaaacggcgtcaccat

SEQ ID NO: 425460 - DNA, 120 bp, Artificial Sequence
  ENSG00000151366_1 (sequence is synthesized)
gatcgcacggcggaacccagaacccttacggtttctgccggatgaggcccggagcctgcccccgcccaagctgaccgacccgcggctcctctacatcggcttcttgggctactgctccgg

SEQ ID NO: 425461 - DNA, 120 bp, Artificial Sequence
  ENSG00000151366_2 (sequence is synthesized)
cctgattgataacctaatccggcggaggccgatcgcgacggctggtttgcatcgccagcttctatatattacggcctttttttttgctggatattatcttgtaaaacgtgaagactacct

SEQ ID NO: 425462 - DNA, 120 bp, Artificial Sequence
  ENSG00000151366_3 (sequence is synthesized)
gtatgctgtgagggaccgtgaaatgtttggatatatgaaattacatccagaggattttcctgaagaagataagaaaacatatggtgaaatttttgaaaaattccatccaatacgttgaag

SEQ ID NO: 425463 - DNA, 120 bp, Artificial Sequence
  ENSG00000151366_4 (sequence is synthesized)
tcttcaaaatgcttgctccagtttcactgatacctgctgtttctgaatttgatggaacatgtttcttatgacagttgaagcttatgctaatctgtatgttgacaccttgtaattaaaata

SEQ ID NO: 425464 - DNA, 120 bp, Artificial Sequence
  ENSG00000151366_5 (sequence is synthesized)
cgtaccatgagtactctgactctttattgttgtaagaaaaatagttcatcatcagagaatggtcagtttccattcacccatctgaaagattttaagatgaggttgaattctagtttagag

SEQ ID NO: 425465 - DNA, 120 bp, Artificial Sequence
  ENSG00000151366_6 (sequence is synthesized)
ttagcagactacccaaatctggcccactgccaataaagtctcattggaacacagccatgctcatttgtttacatgttgtttatggcgactgccatgctgcaagagcagaattgagtagtt

SEQ ID NO: 425466 - DNA, 120 bp, Artificial Sequence
  ENSG00000151366_7 (sequence is synthesized)
gtgatagagacctatggcctgcaaagcctaattaatatgtagccctttcagaaaaggtttgcctgcccctgtcctagtgcaaagtgaatttagagtgagccagattatggaggattctgt

SEQ ID NO: 425467 - DNA, 120 bp, Artificial Sequence
  ENSG00000151366_8 (sequence is synthesized)
gactcttgccaaataattttgacttcatcctgtaggtattaagtcattaaggcgttttaaatcatacagtcaggtttgtatttctgagctgtctataatgaatgatatagaaggtggttt

SEQ ID NO: 425468 - DNA, 120 bp, Artificial Sequence
  ENSG00000151366_9 (sequence is synthesized)
gagactccagacaaggaaaacagaaatcttatgttgccaagttgtctttgctcttaggtgggttatcctggagaaaatggactcaggagctaatactgtctacagtggagcttggtgcaa

SEQ ID NO: 425469 - DNA, 120 bp, Artificial Sequence
  ENSG00000151366_10 (sequence is synthesized)
tacagtggagcttggtgcaattagaagcaaaagactgtacctaactggaatgaggttactttttatggcttatcaaatgcttgtcctggcccgatgcagtggctcatgcctgtaatccca

SEQ ID NO: 425470 - DNA, 120 bp, Artificial Sequence
  ENSG00000151366_11 (sequence is synthesized)
cccagcactttgagaggctgaggcagggcagattgcatgagcccaggagttcgagaccaacttgggcaacatggtgaaacactgtctctacataaaatacaaaaattagctgggcgtggt

SEQ ID NO: 425471 - DNA, 120 bp, Artificial Sequence
  ENSG00000151366_12 (sequence is synthesized)
ctcataaggctgaggtgggaggatctattgagccctggaattcgaggatgcaattaattgtggttgtgtcacagttcactgcagcctgggtgacactccagcctgggtgacaaaggagac

SEQ ID NO: 425472 - DNA, 120 bp, Artificial Sequence
  ENSG00000151366_13 (sequence is synthesized)
cccgtcaaaaaaaaaagtacttgtcccaaaagtttttgtttcctagcttagaatttataatcagattaggttttggagataaagtatatgtggtatttttttttttttttttgagacgac

SEQ ID NO: 425473 - DNA, 120 bp, Artificial Sequence
  ENSG00000151366_14 (sequence is synthesized)
ttacaggcgtgagccaccgcgcctggtctatatgtgatttcaaattaggtggccttataaatataagcagatggtttctgggcaaaatcaaatgatttctgtctctattttcttgagtac

SEQ ID NO: 425474 - DNA, 120 bp, Artificial Sequence
  ENSG00000151366_15 (sequence is synthesized)
gtaccaattgtaaaaactgaaattaggttgaggaaagtgctttagaaataataaagatgtacaaatacaaggctttggattttttattagttctgcaataaataataggtttatagttca

SEQ ID NO: 425475 - DNA, 120 bp, Artificial Sequence
  ENSG00000151366_16 (sequence is synthesized)
ttttagataatctgtgtttactgtattattattttccctggttaatcttatccatgtgtatggctttagataccttctaaattctgttgactcccacatcttagtctatagaccaaaatt

SEQ ID NO: 425476 - DNA, 120 bp, Artificial Sequence
  ENSG00000151376_0 (sequence is synthesized)
caccggatctgcttccagggcttggtttcgctttgcctggctcttggctaggcctggcgccccgcgcggagccgagcaggtggcagccgaggagtggcgggggctggaacatttaaccct

SEQ ID NO: 425477 - DNA, 120 bp, Artificial Sequence
  ENSG00000151376_1 (sequence is synthesized)
ttgggagcacctgccctctcccagagggcgcgtccccggatcaggcccggtgccccgcagcgcgcgtgggtcctggctggctggaaggaggccctgaccttgctttctctcccgtgccag

SEQ ID NO: 425478 - DNA, 120 bp, Artificial Sequence
  ENSG00000151376_2 (sequence is synthesized)
tgctttctctcccgtgccaggtctgccaaggaccatgggtgccgcgctggggacaggcacgcggctggctccctggccgggccgggcctgcggcgccctcccgcgctggacacccaccgc

SEQ ID NO: 425479 - DNA, 120 bp, Artificial Sequence
  ENSG00000151376_3 (sequence is synthesized)
ccaagcctggcccggcgcgccctgtgcccctgaagaagcgcggatacgatgtcaccaggaaccctcatctcaacaaggggatggcctttacccttgaagaaaggctgcagcttggaatcc

SEQ ID NO: 425480 - DNA, 120 bp, Artificial Sequence
  ENSG00000151376_4 (sequence is synthesized)
acggcctaatcccgccctgctttctgagccaggacgtccagctcctccgaatcatgagatattacgagcggcagcagagtgacctggacaagtacatcattctcatgacactccaagacc

SEQ ID NO: 425481 - DNA, 120 bp, Artificial Sequence
  ENSG00000151376_5 (sequence is synthesized)
ggaacgagaagctcttctaccgagtgctgacttcggacgtggagaagttcatgccaatcgtgtacacgcctaccgtggggctggcctgtcagcactatggcctgactttccgcaggcccc

SEQ ID NO: 425482 - DNA, 120 bp, Artificial Sequence
  ENSG00000151376_6 (sequence is synthesized)
gtggactgttcatcaccattcatgacaaaggtcatcttgcaacaatgctgaattcttggccagaagacaatattaaggccgtggtggtgactgatggggagcgcatcctgggcctgggag

SEQ ID NO: 425483 - DNA, 120 bp, Artificial Sequence
  ENSG00000151376_7 (sequence is synthesized)
acctgggctgctacggcatgggcatccctgtgggcaagctggccctgtacacggcatgcggaggggtgaacccgcagcagtgcctccctgtgctgctggacgtcggcaccaacaatgagg

SEQ ID NO: 425484 - DNA, 120 bp, Artificial Sequence
  ENSG00000151376_8 (sequence is synthesized)
agctgctcagagaccctctgtacatcggcctgaaacaccagcgcgtgcacgggaaggcatacgatgacttgctggatgagttcatgcaggctgtgacagacaagtttggaataaattgcc

SEQ ID NO: 425485 - DNA, 120 bp, Artificial Sequence
  ENSG00000151376_9 (sequence is synthesized)
gatgacatccaaggcacagcctccgttgctgtggcagggatcttggctgctctgcgaatcaccaagaacaagctttccaatcacgtgtttgttttccaaggtgcaggcgaggcagctatg

SEQ ID NO: 425486 - DNA, 120 bp, Artificial Sequence
  ENSG00000151376_10 (sequence is synthesized)
ggcattgcccacctccttgtcatggccctagagaaagaaggtgtaccgaaggcagaggccacaagaaagatctggatggtggactctaaagggctcattgtcaaggggaggagccacctg

SEQ ID NO: 425487 - DNA, 120 bp, Artificial Sequence
  ENSG00000151376_11 (sequence is synthesized)
aaccatgaaaaggagatgtttgcccaagaccatcctgaagtcaactccctggaggaggtggtgaggctggtgaagcccacagccatcataggtgttgctgccatcgcaggagccttcacg

SEQ ID NO: 425488 - DNA, 120 bp, Artificial Sequence
  ENSG00000151376_12 (sequence is synthesized)
gagcagattctgagggacatggcctccttccacgagcgccctatcatctttgccctgagcaaccccaccagcaaggccgagtgcacggctgagaagtgctaccgggtcaccgagggccga

SEQ ID NO: 425489 - DNA, 120 bp, Artificial Sequence
  ENSG00000151376_13 (sequence is synthesized)
gggatttttgccagtggaagtccttttaagagtgtgactctggaagatggcaagaccttcattcctgggcagggaaacaatgcttacgtgttccccggggtggcactgggagtcatcgcc

SEQ ID NO: 425490 - DNA, 120 bp, Artificial Sequence
  ENSG00000151376_14 (sequence is synthesized)
ggcgggatccggcacatcccagatgagatcttcctcctgacagcagagcaaattgcccaggaagtctctgagcagcatctgtcccaggggagactctacccaccactcagcaccatccga

SEQ ID NO: 425491 - DNA, 120 bp, Artificial Sequence
  ENSG00000151376_15 (sequence is synthesized)
gacgtgtctttgagaattgccatcaaagttctcgactacgcgtacaaacacaacctggcttcctactacccagagcctaaggacaaggaggcttttgtaagatccctggtctacactcca

SEQ ID NO: 425492 - DNA, 120 bp, Artificial Sequence
  ENSG00000151376_16 (sequence is synthesized)
gactatgactcctttacactggacagctacacttggcccaaggaagccatgaatgttcagacggtctgaggcagtctcagaggctagtatggggctagatgaagcccagagtaacaccca

SEQ ID NO: 425493 - DNA, 120 bp, Artificial Sequence
  ENSG00000151376_17 (sequence is synthesized)
caatataaatgggttccaaaatggcccaagtgaatccttgtcgctgtgttttttcttttaaactttctggtgtgagaggagatgccaaggcatacagtgaataaaagccttgtctctgaa

SEQ ID NO: 425494 - DNA, 120 bp, Artificial Sequence
  ENSG00000151376_18 (sequence is synthesized)
aaacgcaaatccccctctgtgcatttagtcttgccaagatggagagtctcaggcgggcattctgagctgcttcttgtcactggggaaaaccacgtgcacgcagtgctgaggcgccccacg

SEQ ID NO: 425495 - DNA, 120 bp, Artificial Sequence
  ENSG00000151376_19 (sequence is synthesized)
cgcgtcctcaggggaagccaggcactgagaacaaaggttgtgggaccgctctttgaggaactcaccagctccgcgagctcgcggccgccagcgcggtccacccattggcgggagaggact

SEQ ID NO: 425496 - DNA, 120 bp, Artificial Sequence
  ENSG00000151376_20 (sequence is synthesized)
gcgccctgtgcccctgaagaagcgcggatacgatgtcaccaggaaccctcatctcaacaagaaaagagaagccaaggaagaagccaagcaactccacagagattatcattggtcatagaa

SEQ ID NO: 425497 - DNA, 120 bp, Artificial Sequence
  ENSG00000151376_21 (sequence is synthesized)
gtggacagaggcagcctgcctgctgtatttgagtctactgaataatgatggcaattcacaactgcatagactgatttaggcatattcctgatggtgacagaattgatactagatgattcc

SEQ ID NO: 425498 - DNA, 120 bp, Artificial Sequence
  ENSG00000151376_22 (sequence is synthesized)
tgcttttcttctaaaatttatgtaatgacctcttctattgtccatacggatttggcaacagagtaaatctttggttatatgacccctcttttactcacattaaataggcaactatcagcc

SEQ ID NO: 425499 - DNA, 120 bp, Artificial Sequence
  ENSG00000151376_23 (sequence is synthesized)
ccacttcacagggttaccttcataggaagatgccatccccattctataactgtagcaacatgttgatgggccatcaacatatttctgacctccatttacctatagtgtcttttaggaaga

SEQ ID NO: 425500 - DNA, 120 bp, Artificial Sequence
  ENSG00000151376_24 (sequence is synthesized)
aatgccaatgccttccgcctgctcaacaaataccgtaacaagtactgcatgttcaatgatgacatccaaggaacaacctgccacactttcagctgcccatggcatttatgggcacaagtc

SEQ ID NO: 425501 - DNA, 120 bp, Artificial Sequence
  ENSG00000151376_25 (sequence is synthesized)
atgttccagcacatccctggacccatgggcttctcagagtggttacctcgaaacagctaagtagcttcctttccagttttaaacccctagtgcatagcccaagagcaccccaaaaatgca

SEQ ID NO: 425502 - DNA, 120 bp, Artificial Sequence
  ENSG00000151376_26 (sequence is synthesized)
ggttaatgatggagataactttatttgccaaattttgtaatttggagcttaagaaccactgtttttcctcttgagttctggcctgtaccaagtgcagaaatagcttcccaaaggaaaaaa

SEQ ID NO: 425503 - DNA, 120 bp, Artificial Sequence
  ENSG00000151376_27 (sequence is synthesized)
aatgagtaacctcatgagggtgaaaaatactcctacatcgctgatgagcaaactgaatttcagaaagatgaagtaacatgcccaaggtcaaagagctaataaggagtggagctggctgtc

SEQ ID NO: 425504 - DNA, 120 bp, Artificial Sequence
  ENSG00000151379_0 (sequence is synthesized)
ggcagaattttctttctcacttgccagggagccattccttctgcagctgtctcgcaggcatggacaacctgcgcgagactttcctcagcctcgaggatggcttgggctcctctgacagcc

SEQ ID NO: 425505 - DNA, 120 bp, Artificial Sequence
  ENSG00000151379_1 (sequence is synthesized)
ctggcctgctgtcttcctgggactggaaggacagggcagggccctttgagctgaatcaggcctccccctctcagagcctttccccggctccatcgctggaatcctattcttcttctccct

SEQ ID NO: 425506 - DNA, 120 bp, Artificial Sequence
  ENSG00000151379_2 (sequence is synthesized)
gtccagctgtggctgggctgccctgtgagcacggcggggccagcagtgggggcagcgaaggctgcagtgtcggtggggccagtggcctggtagaggtggactacaatatgttagctttcc

SEQ ID NO: 425507 - DNA, 120 bp, Artificial Sequence
  ENSG00000151379_3 (sequence is synthesized)
agcccacccaccttcagggcggtggtggccccaaggcccagaagggcaccaaagtcaggatgtctgtccagcggaggcggaaagccagcgagagggagaagctcaggatgaggaccttgg

SEQ ID NO: 425508 - DNA, 120 bp, Artificial Sequence
  ENSG00000151379_4 (sequence is synthesized)
cagatgccctgcacaccctccggaattacctgccacctgtctacagccagagaggccagcctctcaccaagatccagacactcaagtacaccatcaagtacatcggggaactcacagacc

SEQ ID NO: 425509 - DNA, 120 bp, Artificial Sequence
  ENSG00000151379_5 (sequence is synthesized)
gcccagagcccagagcgcgtgagctccatccggggaaactgaccggttccagcctcctgagcaggagtagaggagttttgaagacctggatatcttattgaacaatgatcggcgtagagt

SEQ ID NO: 425510 - DNA, 120 bp, Artificial Sequence
  ENSG00000151379_6 (sequence is synthesized)
gatttttatgtagtaagcctgataatcttgtgatctgaaaaaccctaagggaattcacatgtaacctgttggacccaccagaacacttacctgccagatgagcagagactttcacctcca

SEQ ID NO: 425511 - DNA, 120 bp, Artificial Sequence
  ENSG00000151379_7 (sequence is synthesized)
gttttttccacccatctgggaggctcatcctttgcaaacagacagattattttgcccttctctgtctgttcaaggtattttaaagggtcagtgattttaaatgcatttttttcaataatg

SEQ ID NO: 425512 - DNA, 120 bp, Artificial Sequence
  ENSG00000151379_8 (sequence is synthesized)
taaaagtgttaatctcttgccattttggcgttgagaccttttcttctgttgctaacaaaacctgtattttgtataggatccagtgtgatatctggattcttatttagaaagatttgtgcc

SEQ ID NO: 425513 - DNA, 120 bp, Artificial Sequence
  ENSG00000151379_9 (sequence is synthesized)
aagtaaagggctttagtgctcctgttttcatttcgtgtgtatatgtgtgtgtgtttgtgtttgactgaaatcatgctgttgcagggaccaaaatcacttaaatgcggaaggcactggtgt

SEQ ID NO: 425514 - DNA, 120 bp, Artificial Sequence
  ENSG00000151379_10 (sequence is synthesized)
catgataaatggaaagtcacaggcagacaggctaagttaagacagtgaagattccaaaagccagagcctcctcttcacaggcaaacagcttgtgtgacagggaaggagggtacggggagg

SEQ ID NO: 425515 - DNA, 120 bp, Artificial Sequence
  ENSG00000151388_0 (sequence is synthesized)
agctttgcagtcgctgccttctcgcgcctgaccatgcacccctgcatcttcctgctgggccacaggcgagcgctttatttctggagctgagggctaaaacttttttgacttttcttctcc

SEQ ID NO: 425516 - DNA, 120 bp, Artificial Sequence
  ENSG00000151388_1 (sequence is synthesized)
tcaacatctgaatcatgccatgtgcccagaggagctggcttgcaaacctttccgtggtggctcagctccttaactttggggcgctttgctatgggagacagcctcagccaggcccggttc

SEQ ID NO: 425517 - DNA, 120 bp, Artificial Sequence
  ENSG00000151388_2 (sequence is synthesized)
gcttcccggacaggaggcaagagcattttatcaagggcctgccagaataccacgtggtgggtccagtccgagtagatgccagtgggcattttttgtcatatggcttgcactatcccatca

SEQ ID NO: 425518 - DNA, 120 bp, Artificial Sequence
  ENSG00000151388_3 (sequence is synthesized)
cgagcagcaggaggaagagagatttggatggctcagaggactgggtgtactacagaatttctcacgaggagaaggacctgttttttaacttgacggtcaatcaaggatttctttccaata

SEQ ID NO: 425519 - DNA, 120 bp, Artificial Sequence
  ENSG00000151388_4 (sequence is synthesized)
gctacatcatggagaagagatatgggaacctctcccatgttaagatgatggcttcctctgcccccctctgccatctcagtggcacggttctacagcagggcaccagagttgggacggcag

SEQ ID NO: 425520 - DNA, 120 bp, Artificial Sequence
  ENSG00000151388_5 (sequence is synthesized)
ccctcagtgcctgccatggactgactggatttttccaactaccacatggagactttttcattgaacccgtgaagaagcatccactggttgagggagggtaccacccgcacatcgtttaca

SEQ ID NO: 425521 - DNA, 120 bp, Artificial Sequence
  ENSG00000151388_6 (sequence is synthesized)
ggaggcagaaagttccagaaaccaaggagccaacctgtggattaaaggacagtgttaacatctcccagaagcaagagctatggcgggagaagtgggagaggcacaacttgccaagcagaa

SEQ ID NO: 425522 - DNA, 120 bp, Artificial Sequence
  ENSG00000151388_7 (sequence is synthesized)
gcctctctcggcgttccatcagcaaggagagatgggtggagacactggtggtggccgacacaaagatgattgaataccatgggagtgagaatgtggagtcctacatcctcaccatcatga

SEQ ID NO: 425523 - DNA, 120 bp, Artificial Sequence
  ENSG00000151388_8 (sequence is synthesized)
acatggtcactgggttgttccataacccaagcattggcaatgcaattcacattgttgtggttcggctcattctactcgaagaagaagagcaaggactgaaaatagttcaccatgcagaaa

SEQ ID NO: 425524 - DNA, 120 bp, Artificial Sequence
  ENSG00000151388_9 (sequence is synthesized)
agacactgtctagcttctgcaagtggcagaagagtatcaatcccaagagtgacctcaatcctgttcatcacgacgtggctgtccttctcaccagaaaggacatctgtgctggtttcaatc

SEQ ID NO: 425525 - DNA, 120 bp, Artificial Sequence
  ENSG00000151388_10 (sequence is synthesized)
gcccctgcgagaccctgggcctgtctcacctttcaggaatgtgtcagcctcaccgcagttgtaacatcaatgaagattcgggactccctctggctttcacaattgcccatgagctaggac

SEQ ID NO: 425526 - DNA, 120 bp, Artificial Sequence
  ENSG00000151388_11 (sequence is synthesized)
acagcttcggcatccagcatgatgggaaagaaaatgactgtgagcctgtgggcagacatccgtacatcatgtcccgccagctccagtacgatcccactccgctgacatggtccaagtgca

SEQ ID NO: 425527 - DNA, 120 bp, Artificial Sequence
  ENSG00000151388_12 (sequence is synthesized)
gcgaggagtacatcacccgcttcttggaccgaggctgggggttctgtcttgatgacatacctaaaaagaaaggcttgaagtccaaggtcattgcccccggagtgatctatgatgttcacc

SEQ ID NO: 425528 - DNA, 120 bp, Artificial Sequence
  ENSG00000151388_13 (sequence is synthesized)
accagtgccagctacaatatggacccaatgctaccttctgccaggaagtagaaaacgtctgccagacactgtggtgctccgtgaagggcttttgtcgctctaagctggacgctgctgcag

SEQ ID NO: 425529 - DNA, 120 bp, Artificial Sequence
  ENSG00000151388_14 (sequence is synthesized)
atggaactcaatgtggtgagaagaagtggtgtatggcaggcaagtgcatcacagtggggaagaaaccagagagcattcctggaggctggggccgctggtcaccctggtcccactgttcca

SEQ ID NO: 425530 - DNA, 120 bp, Artificial Sequence
  ENSG00000151388_15 (sequence is synthesized)
ggacctgtggggctggagtccagagcgcagagaggctctgcaacaaccccgagccaaagtttggagggaaatattgcactggagaaagaaaacgctatcgcttgtgcaacgtccacccct

SEQ ID NO: 425531 - DNA, 120 bp, Artificial Sequence
  ENSG00000151388_16 (sequence is synthesized)
gtcgctcagaggcaccaacatttcggcagatgcagtgcagtgaatttgacactgttccctacaagaatgaactctaccactggtttcccatttttaacccagcacatccttgtgagctct

SEQ ID NO: 425532 - DNA, 120 bp, Artificial Sequence
  ENSG00000151388_17 (sequence is synthesized)
actgccgacccatagatggccagttttctgagaaaatgctggatgctgtcattgatggtaccccttgctttgaaggcggcaacagcagaaatgtctgtattaatggcatatgtaagatgg

SEQ ID NO: 425533 - DNA, 120 bp, Artificial Sequence
  ENSG00000151388_18 (sequence is synthesized)
ttggctgtgactatgagatcgattccaatgccaccgaggatcgctgcggtgtgtgcctgggagatggctcttcctgccagactgtgagaaagatgtttaagcagaaggaaggatctggtt

SEQ ID NO: 425534 - DNA, 120 bp, Artificial Sequence
  ENSG00000151388_19 (sequence is synthesized)
atgttgacattgggctcattccaaaaggagcaagggacataagagtgatggaaattgagggagctggaaacttcctggccatcaggagtgaagatcctgaaaaatattacctgaatggag

SEQ ID NO: 425535 - DNA, 120 bp, Artificial Sequence
  ENSG00000151388_20 (sequence is synthesized)
ggtttattatccagtggaacgggaactataagctggcagggactgtctttcagtatgacaggaaaggagacctggaaaagctgatggccacaggtcccaccaatgagtctgtgtggatcc

SEQ ID NO: 425536 - DNA, 120 bp, Artificial Sequence
  ENSG00000151388_21 (sequence is synthesized)
agcttctattccaggtgactaaccctggcatcaagtatgagtacacaatccagaaagatggccttgacaatgatgttgagcagcagatgtacttctggcagtacggccactggacagagt

SEQ ID NO: 425537 - DNA, 120 bp, Artificial Sequence
  ENSG00000151388_22 (sequence is synthesized)
gcagtgtgacctgcgggacaggtatccgccgccaaactgcccattgcataaagaagggccgcgggatggtgaaagctacattctgtgacccagaaacacagcccaatgggagacagaaga

SEQ ID NO: 425538 - DNA, 120 bp, Artificial Sequence
  ENSG00000151388_23 (sequence is synthesized)
agtgccatgaaaaggcttgtccacccaggtggtgggcaggggagtgggaagcatgctcggcgacatgcgggccccacggggagaagaagcgaaccgtgctgtgcatccagaccatggtct

SEQ ID NO: 425539 - DNA, 120 bp, Artificial Sequence
  ENSG00000151388_24 (sequence is synthesized)
ctgacgagcaggctctcccgcccacagactgccagcacctgctgaagcccaagaccctcctttcctgcaacagagacatcctgtgcccctcggactggacagtgggcaactggagtgagt

SEQ ID NO: 425540 - DNA, 120 bp, Artificial Sequence
  ENSG00000151388_25 (sequence is synthesized)
gttctgtttcctgtggtggtggagtgcggattcgcagtgtcacatgtgccaagaaccatgatgaaccttgcgatgtgacaaggaaacccaacagccgagctctgtgtggcctccagcaat

SEQ ID NO: 425541 - DNA, 120 bp, Artificial Sequence
  ENSG00000151388_26 (sequence is synthesized)
gcccttctagccggagagttctgaaaccaaacaaaggcactatttccaatggaaaaaacccaccaacactaaagcccgtccctccacctacatccaggcccagaatgctgaccacaccca

SEQ ID NO: 425542 - DNA, 120 bp, Artificial Sequence
  ENSG00000151388_27 (sequence is synthesized)
cagggcctgagtctatgagcacaagcactccagcaatcagcagccctagtcctaccacagcctccaaagaaggagacctgggtgggaaacagtggcaagatagctcaacccaacctgagc

SEQ ID NO: 425543 - DNA, 120 bp, Artificial Sequence
  ENSG00000151388_28 (sequence is synthesized)
tgagctctcgctatctcatttccactggaagcacttcccagcccatcctcacttcccaatccttgagcattcagccaagtgaggaaaatgtttccagttcagatactggtcctacctcgg

SEQ ID NO: 425544 - DNA, 120 bp, Artificial Sequence
  ENSG00000151388_29 (sequence is synthesized)
agggaggccttgtagctacaacaacaagtggttctggcttgtcatcttcccgcaaccctatcacttggcctgtgactccattttacaataccttgaccaaaggtccagaaatggagattc

SEQ ID NO: 425545 - DNA, 120 bp, Artificial Sequence
  ENSG00000151388_30 (sequence is synthesized)
acagtggctcaggggaagaaagagaacagcctgaggacaaagatgaaagcaatcctgtaatatggaccaagatcagagtacctggaaatgacgctccagtggaaagtacagaaatgccac

SEQ ID NO: 425546 - DNA, 120 bp, Artificial Sequence
  ENSG00000151388_31 (sequence is synthesized)
ttgcacctccactaacaccagatctcagcagggagtcctggtggccacccttcagcacagtaatggaaggactgctccccagccaaaggcccactacttccgaaactgggacacccagag

SEQ ID NO: 425547 - DNA, 120 bp, Artificial Sequence
  ENSG00000151388_32 (sequence is synthesized)
ttgaggggatggttactgaaaagccagccaacactctgctccctctgggaggagaccaccagccagaaccctcaggaaagacggcaaaccgtaaccacctgaaacttccaaacaacatga

SEQ ID NO: 425548 - DNA, 120 bp, Artificial Sequence
  ENSG00000151388_33 (sequence is synthesized)
accaaacaaaaagttctgaaccagtcctgactgaggaggatgcaacaagtctgattactgagggctttttgctaaatgcctccaattacaagcagctcacaaacggccacggctctgcac

SEQ ID NO: 425549 - DNA, 120 bp, Artificial Sequence
  ENSG00000151388_34 (sequence is synthesized)
actggatcgtcggaaactggagcgagtgctccaccacatgtggcctgggggcctactggagaagggtggagtgcagcacccagatggattctgactgtgcggccatccagagacctgacc

SEQ ID NO: 425550 - DNA, 120 bp, Artificial Sequence
  ENSG00000151388_35 (sequence is synthesized)
gagcaagtgctccagaaactgcagtgggggcttcaagatacgcgagattcagtgcgtggacagccgggaccaccggaacctgaggccatttcactgccagttcctggccggcattcctcc

SEQ ID NO: 425551 - DNA, 120 bp, Artificial Sequence
  ENSG00000151388_36 (sequence is synthesized)
cccattgagcatgagctgtaacccggagccctgtgaggcgtggcaggtggagccttggagccagtgctccaggtcctgtggaggtggagttcaggagagaggagtgttctgtccaggagg

SEQ ID NO: 425552 - DNA, 120 bp, Artificial Sequence
  ENSG00000151388_37 (sequence is synthesized)
cctctgtgattggacaaaaagacccacatccaccatgtcttgcaatgagcacctgtgctgtcactgggccactgggaactgggacctgtgttccacttcctgtggaggtggctttcagaa

SEQ ID NO: 425553 - DNA, 120 bp, Artificial Sequence
  ENSG00000151388_38 (sequence is synthesized)
gaggactgtccaatgtgtgccctcagagggcaataaaactgaagaccaagaccaatgtctatgtgatcacaaacccagacctccagaattcaaaaaatgcaaccagcaggcctgcaagaa

SEQ ID NO: 425554 - DNA, 120 bp, Artificial Sequence
  ENSG00000151388_39 (sequence is synthesized)
aagtgccgatttactttgcactaaggacaaactgtcagccagtttctgccagacactgaaagccatgaagaaatgttctgtgcccaccgtgagggctgagtgctgcttctcgtgtcccca

SEQ ID NO: 425555 - DNA, 120 bp, Artificial Sequence
  ENSG00000151388_40 (sequence is synthesized)
gacacacatcacacacacccaaaggcaaagaaggcaacggttgctccaaaagtcaaaagaactctaagcccaaaaggaagccagcttccaccagactgcagcagcctgctgaccatgaca

SEQ ID NO: 425556 - DNA, 120 bp, Artificial Sequence
  ENSG00000151388_41 (sequence is synthesized)
tgctttagccctgggagctgcttcgttgaggttttgcttcatatatttcagattcagctttgggtcatgatgaaacaaaatccattgtgttcctctagccaccgaatgtccctcacagga

SEQ ID NO: 425557 - DNA, 120 bp, Artificial Sequence
  ENSG00000151388_42 (sequence is synthesized)
ggcctaggctgccgtacttgctgctccctgataggaaggtgaaatagctaggagaatcaggcagcacctggtatcggctcctgggaaaggtgccaggttagacagatttgtgaaatactg

SEQ ID NO: 425558 - DNA, 120 bp, Artificial Sequence
  ENSG00000151388_43 (sequence is synthesized)
tatttttgttctcccttaaagataaaaacaaagagaccagctatttccctgactacctcaagagtatcaggcaacacttacccaggggacaaataatcttcttaatttatcttgatgaat

SEQ ID NO: 425559 - DNA, 120 bp, Artificial Sequence
  ENSG00000151388_44 (sequence is synthesized)
acctttcttttttttttcttgcctccctgcctggggcagctgctatttaaaatgtcacagcggagctttaggaacattcctttaattcatccaggcagaggactgctttcttcaccccat

SEQ ID NO: 425560 - DNA, 120 bp, Artificial Sequence
  ENSG00000151388_45 (sequence is synthesized)
gttcaactagggcaggaagtgctggttacatccctcagtctcttcctccatccctgtagggctccatatctgggctgcttagagtctcctgccaaccttgggacactagactaagaggaa

SEQ ID NO: 425561 - DNA, 120 bp, Artificial Sequence
  ENSG00000151388_46 (sequence is synthesized)
acaggcataagaaacacagcctaaggggtttaggtcacttacacagaaaacacttctggtttgaagagcatttctatgaaaactcgtaaaatgcaaatgagcagaaatcaatttcttaat

SEQ ID NO: 425562 - DNA, 120 bp, Artificial Sequence
  ENSG00000151388_47 (sequence is synthesized)
attacagaaaaggaactgtgggcctttattcttcccactttcctggcaaatacacactcctttgcagaagggaaaatgtgtcttcctggctgacttcctcccatcctccagtccccacag

SEQ ID NO: 425563 - DNA, 120 bp, Artificial Sequence
  ENSG00000151388_48 (sequence is synthesized)
gaggcctgagctcaggtcccaccatcgtcttgctgcaggggctgtatatgcaaagaccactatgaccagctctagggctgccacctgtcctcacctcttctcaggttggaaaatggaggt

SEQ ID NO: 425564 - DNA, 120 bp, Artificial Sequence
  ENSG00000151388_49 (sequence is synthesized)
tccatattaaaatatttcaaagaaccaggtaaattgtactaagtacaagaacatagtgcaaacttctaatctagagaaaaaacatttctaaaaagtaaggtaaaggggatctactcctca

SEQ ID NO: 425565 - DNA, 120 bp, Artificial Sequence
  ENSG00000151388_50 (sequence is synthesized)
gtgtacccaatatgtagttagtcttaaagatcttttactttggggagaacaggtgaatcagggagtccaaagaaactgaaatgaaagttagaatgcttgttctggatgttcctacctccc

SEQ ID NO: 425566 - DNA, 120 bp, Artificial Sequence
  ENSG00000151388_51 (sequence is synthesized)
accagaagtcaaagtaggcttggtctcaaattcagagcaaatttctagacaaagtgatttctaagggaaggtacttacatgaactgaacccagagaaagagggtaagtgggtgggtggag

SEQ ID NO: 425567 - DNA, 120 bp, Artificial Sequence
  ENSG00000151388_52 (sequence is synthesized)
gggcataagcttcaaatgaaagaagatatcagaaccaattcttgacagggagaaaggcaaggatgtggccttcatgtgatgggcagcatattttctgactcatgcacagatacacttaat

SEQ ID NO: 425568 - DNA, 120 bp, Artificial Sequence
  ENSG00000151388_53 (sequence is synthesized)
actcctcatggaacacaatatcccacgtctccctttacctatccgttcagcagaatggtgctattaaaaaaatggtgctaatatctagatggtggcagaattaatgtaaacatagatagg

SEQ ID NO: 425569 - DNA, 120 bp, Artificial Sequence
  ENSG00000151388_54 (sequence is synthesized)
catacaaatgggtaagtgtatgtgaaactctccatatacatcttctgttaaacatgtaacggtgttgctgaccaatgccagttttattgcttgggtaccttgaatttaagatttaatatt

SEQ ID NO: 425570 - DNA, 120 bp, Artificial Sequence
  ENSG00000151388_55 (sequence is synthesized)
atgtgctttttatttttttccaagccattaacgtgtattactctcatgaattcctgtgaaaaataaaacagtgggattgggatgaaattcaagatagaccagaaacaggaggaaagtaca

SEQ ID NO: 425571 - DNA, 120 bp, Artificial Sequence
  ENSG00000151388_56 (sequence is synthesized)
aatgtttacctaaagccagagaatttatttctagatgataattacattattgtattctctgcctttaaacataaacattgctggccgatagcaatctctggtgaataatggttttcgagg

SEQ ID NO: 425572 - DNA, 120 bp, Artificial Sequence
  ENSG00000151388_57 (sequence is synthesized)
agaggagacacttaaattgttagtgacatgagtggaggagaatctgatatttactaatgaggcagtttgcaaagactgtccctgaagtgtagtgtagtctttcagggggattcatttagt

SEQ ID NO: 425573 - DNA, 120 bp, Artificial Sequence
  ENSG00000151388_58 (sequence is synthesized)
aagctagattgatttaacctggtactgtactagcatagggtcaaatacgtgtcatcagagacctgggtatgaccaggcttacaaaactcaggaacaaactcagattcctactgacctcaa

SEQ ID NO: 425574 - DNA, 120 bp, Artificial Sequence
  ENSG00000151388_59 (sequence is synthesized)
ccaactaaactaggccaaatttctccgtgtacaaaatggaccacgttatttacaatccacgtggtggagaagatggtagacatgtggagagagtttggccaggtgctccattctaggtct

SEQ ID NO: 425575 - DNA, 120 bp, Artificial Sequence
  ENSG00000151388_60 (sequence is synthesized)
ttttccagtttctcaaaggcagaacattggctcctaattatttgccatggatatttgcttcctgttctggagctatgttgtaagacagctgtgtgatgtccatcattcttgactccagaa

SEQ ID NO: 425576 - DNA, 120 bp, Artificial Sequence
  ENSG00000151388_61 (sequence is synthesized)
tgaagacagggcttgctgttttctgtcctgttggtatcatctgttgccttggcgatcactcagtgatgagtcgtcagtattttgacatgtcccagtgcttgctgtacaagaggggactca

SEQ ID NO: 425577 - DNA, 120 bp, Artificial Sequence
  ENSG00000151388_62 (sequence is synthesized)
gatcaacaggaagactctgaagacaggaacctgcatggtatcttacatctttgatacttgggtgctgatatgaagcagagttgttgatttactttatctaggcccttctttcttctcacc

SEQ ID NO: 425578 - DNA, 120 bp, Artificial Sequence
  ENSG00000151388_63 (sequence is synthesized)
tggatcaagcaactgagaagtgtatcaggagacactggatacatatctctatgaaatagagagggccatcgcagggcctggtacttaactacattaacgttctaaaacccagtttggttt

SEQ ID NO: 425579 - DNA, 120 bp, Artificial Sequence
  ENSG00000151388_64 (sequence is synthesized)
acgttgtctttcacagtagtatatttagctcttctctggaaagttgtgggttaatataattcttaaacatgaaaatgtaattaaacacaccacgagagaacaatattccaggagacttaa

SEQ ID NO: 425580 - DNA, 120 bp, Artificial Sequence
  ENSG00000151388_65 (sequence is synthesized)
tagtgattactttcttcaatcaggaaatcgtttcagtgcctcctttgtaggaatgctttgttttgtgatgggttttcttaaagaagagcacacctccgtccaatctcctgagacagccac

SEQ ID NO: 425581 - DNA, 120 bp, Artificial Sequence
  ENSG00000151388_66 (sequence is synthesized)
gtctccgctgacatcccactgtgatgctttcagatagtcagtgaatgtttctgataaccttcatccagtatctgaaacacaatgtgagagattatattgttttagataataacatcccat

SEQ ID NO: 425582 - DNA, 120 bp, Artificial Sequence
  ENSG00000151388_67 (sequence is synthesized)
ttagttgactaaaatcttccaaactctgaaagctgcacactgctactccagagagtgcaggtcttagctcttctcctttctgacttcaagatgaatctttgggacgatgtttctggtgct

SEQ ID NO: 425583 - DNA, 120 bp, Artificial Sequence
  ENSG00000151388_68 (sequence is synthesized)
tggtccacagtgattcacttttgaaggagaggccacatgacatgaactgcctggtgttacaacctagctaacatatttgatgctactcctgttgtctgtactgcttattcaagtagtatt

SEQ ID NO: 425584 - DNA, 120 bp, Artificial Sequence
  ENSG00000151388_69 (sequence is synthesized)
ctaagttatgttactaaaaaacatggtgggtaaagcacaatcctacccatcattgtcctccaaaataattgtatgacatacacggcccagcccattgccctccctgcatctctgtgctgc

SEQ ID NO: 425585 - DNA, 120 bp, Artificial Sequence
  ENSG00000151388_70 (sequence is synthesized)
tttgccatttccccttctacccagcctcctcaaggggtaccttggtggatatttcagtacttaaaaccagactgtaatcataacctccctctgtgtggcatcaataaatagccaaactca

SEQ ID NO: 425586 - DNA, 120 bp, Artificial Sequence
  ENSG00000151388_71 (sequence is synthesized)
ggcatctccttcctctgccctggcccctagagtctcagctggtagacctactaccaacaggttcacagatgcactgacatatgggagttgaacccctgtgatgtgatgatcctggcctcc

SEQ ID NO: 425587 - DNA, 120 bp, Artificial Sequence
  ENSG00000151388_72 (sequence is synthesized)
aaagtggttggcgagaaagtatttaataaataaaagagatcgacttgagagatacaaagagtaagggcactgagggttcagaggaggcagacagaactccaaccagcaacatcagtttgg

SEQ ID NO: 425588 - DNA, 120 bp, Artificial Sequence
  ENSG00000151388_73 (sequence is synthesized)
gagctcactggtatgagagccagccgactttccacagtttagtgctcagaggtaaagggcactctcagagaacaccagtgacagctttgtctccaagccagtgtctgttcttctctcccc

SEQ ID NO: 425589 - DNA, 120 bp, Artificial Sequence
  ENSG00000151388_74 (sequence is synthesized)
tcagcggcatttgcttttacttctgccttaccatggagagtgacgctctgactttaggggaatttaggactgactactcctcaggaaacttggaaaagaattaccatgcattacggaagg

SEQ ID NO: 425590 - DNA, 120 bp, Artificial Sequence
  ENSG00000151388_75 (sequence is synthesized)
ccagaaaccaaggagccaacctgtggattaaagggtattgtgactcacatgtcctcctgggttgaagaatctgttttgttcttttggttgttttattaaaacatgacctattcttactca

SEQ ID NO: 425591 - DNA, 120 bp, Artificial Sequence
  ENSG00000151388_76 (sequence is synthesized)
agtctcttatctcctctgtattcttttttttttaatatcttcatgacattcaaatctcttctgtattctcttgccagaaagtgtacattctttttgcttgtataaaccctttcacttgtc

SEQ ID NO: 425592 - DNA, 120 bp, Artificial Sequence
  ENSG00000151388_77 (sequence is synthesized)
agaatttgaatacatacagtgagaccctagagctcaagcattgtatatctttacctgagatcttacaaagaggaagatgaagatgtaaaagaataaagtaggctatgctgatatttcaca

SEQ ID NO: 425593 - DNA, 120 bp, Artificial Sequence
  ENSG00000151413_0 (sequence is synthesized)
agtttcccagcagggctcacagcagcgttccgcgtcatggggatttggcagcgtctgctgctttttggtggggtgtcgctccgggctggtggcggggccactgccccgcttgggggaagc

SEQ ID NO: 425594 - DNA, 120 bp, Artificial Sequence
  ENSG00000151413_1 (sequence is synthesized)
cgagcgatggtttgtgggcgccagttgtctggcgccgggagtgagaccctaaaacaaagaagaacacaaatcatgtcccgaggacttccaaagcagaaaccgatagaaggtgttaaacaa

SEQ ID NO: 425595 - DNA, 120 bp, Artificial Sequence
  ENSG00000151413_2 (sequence is synthesized)
gttatagttgtggcttctggaaagggtggagtcggaaaatctactacagcagtgaatcttgcacttgcactagcagcgaacgattcgtccaaggccattggtttgctagatgtggatgtg

SEQ ID NO: 425596 - DNA, 120 bp, Artificial Sequence
  ENSG00000151413_3 (sequence is synthesized)
tatggaccttcagttccaaagatgatgaatctgaaaggaaatccggaattatcacagagcaacctaatgaggcctctcttgaattatggtattgcttgtatgtctatgggctttctggtt

SEQ ID NO: 425597 - DNA, 120 bp, Artificial Sequence
  ENSG00000151413_4 (sequence is synthesized)
gaagaaagtgaaccagtagtttggagaggccttatggtaatgtcggccattgagaaattgttgaggcaggtagattggggtcaactggactacttagttgtagacatgccaccaggaact

SEQ ID NO: 425598 - DNA, 120 bp, Artificial Sequence
  ENSG00000151413_5 (sequence is synthesized)
ggagatgtgcagttatcagtctcacagaatattcctataacaggtgctgtgattgtctccacgccccaggacatcgcattgatggatgcacacaagggtgctgagatgtttcgcagagtc

SEQ ID NO: 425599 - DNA, 120 bp, Artificial Sequence
  ENSG00000151413_6 (sequence is synthesized)
cacgtgcccgtccttggccttgtccaaaacatgagtgttttccagtgtccaaaatgtaaacacaaaactcatatttttggtgctgatggtgcaaggaaactagcacagacccttggtctt

SEQ ID NO: 425600 - DNA, 120 bp, Artificial Sequence
  ENSG00000151413_7 (sequence is synthesized)
gaagttctaggagacattcccttacaccttaatataagggaagcttcagatacaggccagccaattgtgttttcacagcctgaaagtgatgaggccaaagcttacttgaggattgctgtg

SEQ ID NO: 425601 - DNA, 120 bp, Artificial Sequence
  ENSG00000151413_8 (sequence is synthesized)
gaagtggtaagaagattgccatcaccttcagaatgattccccaagtgtcctggaaatttgcctggtactgacattaagaggacctttggaaatcagcaatgtggtgatggaacctacaga

SEQ ID NO: 425602 - DNA, 120 bp, Artificial Sequence
  ENSG00000151413_9 (sequence is synthesized)
aataatagaaatcataactgttttatttctaaggaaagaatgtcttcatatttgacttgctaagctaaggttcacaaaactttgatgtatcaatgttaactgctatatttaggaattttt

SEQ ID NO: 425603 - DNA, 120 bp, Artificial Sequence
  ENSG00000151413_10 (sequence is synthesized)
tgaaagctggtgtgtaccacctgcaaagaactgcattttattttattgaattacccctttagaaatcacgagtttatgatgttacaagtccattttgggagagaactgtacactttttgc

SEQ ID NO: 425604 - DNA, 120 bp, Artificial Sequence
  ENSG00000151413_11 (sequence is synthesized)
aggaccacagaattagtaatttaaatgatatactaaatttgtgtatgggcataagtattacgccttcccaccaggcaatttggactgtctttgaatcctgtctttggtactgtcttggac

SEQ ID NO: 425605 - DNA, 120 bp, Artificial Sequence
  ENSG00000151413_12 (sequence is synthesized)
actataccccagacttaatgaatttcagtctccaggagtggagcctgaacatatgtatttttagtaagaccatgatgatgttgatgatgattctggtaatcatggcagtaagaataatag

SEQ ID NO: 425606 - DNA, 120 bp, Artificial Sequence
  ENSG00000151413_13 (sequence is synthesized)
ctaacatttaacaagttaattataattgttcttccatttgtgtgagtgggtactattatctccattttacagataagtaatttgagatataatttgaaggcactcaaccttgagtgtctt

SEQ ID NO: 425607 - DNA, 120 bp, Artificial Sequence
  ENSG00000151413_14 (sequence is synthesized)
gctgagggttactgtatctagcaggtgatggagcttggatttgaacttgagtaattcgatattagattcatctttttgtacaccaatgtgcttttgttaattaaaaaaagtcggtggtgg

SEQ ID NO: 425608 - DNA, 83 bp, Artificial Sequence
  ENSG00000151413_15 (sequence is synthesized)
caacccgggaggctgaggttgcagtgagtggagattgtaccactgcactccagcctggtcaatggagtgcgactccatctcaa

SEQ ID NO: 425609 - DNA, 120 bp, Artificial Sequence
  ENSG00000151413_16 (sequence is synthesized)
aaaaaaaaaaaaaaaaaaaaaaagtcgggggagatgcaatatttagcatttcctcaaactttttttggccatgaaatccaccacccccctcctttttcagagcatttcatgaagttcaca

SEQ ID NO: 425610 - DNA, 120 bp, Artificial Sequence
  ENSG00000151413_17 (sequence is synthesized)
ccacccccctcctttttcagagcatttcatgaagttcacatttcaaataatacattttgaaaaacatttatcttgtctaattgaagctcaaagagatagagtcaatgacttttcaaagtc

SEQ ID NO: 425611 - DNA, 120 bp, Artificial Sequence
  ENSG00000151413_18 (sequence is synthesized)
aggtagcagatagttttaaagctgcaagtactgataagtgtgagccattagttaattcgcatttataaagaagtggtctgtcacttttggcaaatgtcttgacatctgttgctctacagt

SEQ ID NO: 425612 - DNA, 120 bp, Artificial Sequence
  ENSG00000151413_19 (sequence is synthesized)
tgtcaactagaaaattaggcatagagtttcacattattataagcatgttttcacacaaaaacatgtacattgatgtttattgcaattttatgtgtaataaccaaaaacaacccagatttt

SEQ ID NO: 425613 - DNA, 120 bp, Artificial Sequence
  ENSG00000151413_20 (sequence is synthesized)
cttcattgggtaaatgattaaacaaaccatagtacattcataccgtgagtgctactcagcaataaaaaagaacaaactatgggtacaggcagcaacttataattccagagaattatgctg

SEQ ID NO: 425614 - DNA, 120 bp, Artificial Sequence
  ENSG00000151413_21 (sequence is synthesized)
aatgaaaaaggccaatttaaaaaggttttgtaccaaaagattccatttatataacgttcttgaagtgacataattatagaaatggagaacagattagtggtggctgtgttaaggaggggg

SEQ ID NO: 425615 - DNA, 120 bp, Artificial Sequence
  ENSG00000151413_22 (sequence is synthesized)
tgaggatgggagagaattgggcgtggctgtgagaaacatgagggatccttgtgatgatggaaatgttctatatcacagctatcgatgtcagtatcccagttgtgatattgtgctatagtt

SEQ ID NO: 425616 - DNA, 120 bp, Artificial Sequence
  ENSG00000151413_23 (sequence is synthesized)
ttgcaagatgttaccactgggggaaattgggtgaagggcacatggaatctctgtattatttcaactgcatgtaaatctacaattatctcaaaataaaaataaaagttaaaaaaacacaaa

SEQ ID NO: 425617 - DNA, 120 bp, Artificial Sequence
  ENSG00000151413_24 (sequence is synthesized)
aatgaagccacggaccctcgcgaaggactttggacaacaatttctttgactgaaactggggtcagagttgcagactccctggaacatgaaaagtcaataatctagttcccaaaaggcaga

SEQ ID NO: 425618 - DNA, 120 bp, Artificial Sequence
  ENSG00000151413_25 (sequence is synthesized)
atgactatgaggggatgaaaatggataccaaggataccaagatgatggaacaaaaagaattgatttggaacatgacggcactatggattcatcgtattggacctctgtgatataattctg

SEQ ID NO: 425619 - DNA, 120 bp, Artificial Sequence
  ENSG00000151413_26 (sequence is synthesized)
aacttttcatataagactaatatacccctacttgtttaatacaactgtagagttatctgctacttgcagccaaatgtaatcctaactaatataggcaataaatcatgtttttatatcact

SEQ ID NO: 425620 - DNA, 120 bp, Artificial Sequence
  ENSG00000151413_27 (sequence is synthesized)
tttatattaaagtgctgtattagtcagagtcctagcaggaaacagacggcaaaccttaaaatgaattaataaaacaaagtttaatgaagcaactagttacaaaggagtgagcagcattaa

SEQ ID NO: 425621 - DNA, 120 bp, Artificial Sequence
  ENSG00000151413_28 (sequence is synthesized)
ggaaaccaaccagagatggtgacatacctagggactagtgacagtacaagttgttattgcccttccactggaaagggcaagggagtgaactgtcttagtggaacttggagcctgctggag

SEQ ID NO: 425622 - DNA, 120 bp, Artificial Sequence
  ENSG00000151413_29 (sequence is synthesized)
cttctaaacaaccagatcttgcgtgaactaaccgagcgagaactcacttatcaccaagaggatggtgctgagccattcatgagggaactgctggcgtgatccactcacttcccatcaggc

SEQ ID NO: 425623 - DNA, 120 bp, Artificial Sequence
  ENSG00000151413_30 (sequence is synthesized)
ctcacttccaacattgggaatcacatttcagcatgagatttggaggggagaaacatccacaccataccacaaataaaaagtcccagagttgtctactttcagactttttaaaaaagtaga

SEQ ID NO: 425624 - DNA, 120 bp, Artificial Sequence
  ENSG00000151413_31 (sequence is synthesized)
atctgaaaggaaatccggaattatcacagagtatatctcagagatgttgcaggtcttgttccagaccaccacaataaagcaagtgtctcaataaagcaacctaatgaggcctctcttgaa

SEQ ID NO: 425625 - DNA, 71 bp, Artificial Sequence
  ENSG00000151413_32 (sequence is synthesized)
tagaggggcacccaccagatgccagctggagctgtcctgtatgaggcaacctaatgaggcctctcttgaat

SEQ ID NO: 425626 - DNA, 120 bp, Artificial Sequence
  ENSG00000151413_33 (sequence is synthesized)
ctgtcctgtatgaggcaacctaatgaggcctctcttgaattatggtattgcttgtatgtctatgggctttctggttgaagaaagtgaaccagtagtttggagaggccttatggtaatgtc

SEQ ID NO: 425627 - DNA, 120 bp, Artificial Sequence
  ENSG00000151413_34 (sequence is synthesized)
ttcttgccaaagactcgcctcagttcctgagacccccagtgtgctggacgtgcctacttttcaggcaggcccaggctgaggcgtggcgggacttgaaacacagttagaacgtagatgtgt

SEQ ID NO: 425628 - DNA, 120 bp, Artificial Sequence
  ENSG00000151413_35 (sequence is synthesized)
ctgtagctttaagatcaaatgtttcttcaaggaagccctctctgactcccagagtacatcaagtcctctctgttctacactctcataataccctatactttgcttccagagaagccattc

SEQ ID NO: 425629 - DNA, 120 bp, Artificial Sequence
  ENSG00000151413_36 (sequence is synthesized)
cattttatgagtgtatttttgcactattctttgttcagtcaatttcctccaattacagtacaagctccaaagggtaaggatcaagtctgttttgctcagcactgtatgctattccttgtg

SEQ ID NO: 425630 - DNA, 120 bp, Artificial Sequence
  ENSG00000151413_37 (sequence is synthesized)
tttagcccagttactggcatatattaagagctcgttaaatattgagtttggttatagttttatattttaggtctgtgacatttgtgtagtctatagagaacatgtctgagatatttatac

SEQ ID NO: 425631 - DNA, 120 bp, Artificial Sequence
  ENSG00000151413_38 (sequence is synthesized)
agtccatagagaatgatgtgataagaagatgtaaatcacacaaactgcaaatacacacttgttctatgcctctatgtcttagggagtctaagagattccaaggtcagaatgtttttcctg

SEQ ID NO: 425632 - DNA, 120 bp, Artificial Sequence
  ENSG00000151413_39 (sequence is synthesized)
ttctctctgaattgaaatataccctcacaaagattttcactttctttaggtgtttttccttttctcactttttgagtgataattttttgtttaaattgagagccatacagtcaggggata

SEQ ID NO: 425633 - DNA, 120 bp, Artificial Sequence
  ENSG00000151413_40 (sequence is synthesized)
tatcacatttaacataaatggcagtaaaactgcccaagcagtgagtgtattatataggcatagttaataaacaagctgtgtgacattaagctatgtttctctctagctttctggagatag

SEQ ID NO: 425634 - DNA, 120 bp, Artificial Sequence
  ENSG00000151413_41 (sequence is synthesized)
tactgaattcccaaaacacagcgtgatttattttttgtgatagtgtgcatcagcaaaagggcatatattagatgcttggaaaatgctttgctatagatttatgtctttttactatttgtc

SEQ ID NO: 425635 - DNA, 120 bp, Artificial Sequence
  ENSG00000151413_42 (sequence is synthesized)
ttcatatataattattgggggcaactttagttttttctatttctcttttcagaaagaataacaattttttcgccttcttatctatatgtttcattgtggactatcagtactgttcttcat

SEQ ID NO: 425636 - DNA, 120 bp, Artificial Sequence
  ENSG00000151413_43 (sequence is synthesized)
ttaaaatgcaaatgttctaataatctacaatcataaccttatggtagaactgatacagacattgtaatctctaagcctctgaaaatagtgttctgcatttttattgtaatctctaagcct

SEQ ID NO: 425637 - DNA, 120 bp, Artificial Sequence
  ENSG00000151413_44 (sequence is synthesized)
ctgaaaatagtgttctgcatttttattctagaagagagctactgctcctcatcaatgagagagtgggattaaaaggaacatgagtaaggattatatttgcagagcctatctatttattca

SEQ ID NO: 425638 - DNA, 120 bp, Artificial Sequence
  ENSG00000151413_45 (sequence is synthesized)
acagtattgttgaataataacatttcttaagtatcatcttccctcaatatatgtgggggattggttccagaatcgccctccccccgccactgcatattccaaaattcatgcatactgaag

SEQ ID NO: 425639 - DNA, 120 bp, Artificial Sequence
  ENSG00000151413_46 (sequence is synthesized)
tcccacagttgcttctaggacatcagccattccggtacttgggttttgtggcgggcaaatactatattttttatctgtggttggttcaaaaaaaattcacacataagtggaccccccaca

SEQ ID NO: 425640 - DNA, 120 bp, Artificial Sequence
  ENSG00000151413_47 (sequence is synthesized)
gttcaaactcatgttcaaggtttagctgtatctattttgtagcagaatctagggaaacttagaaagagaatgaccttttctatgaaacttaattttgtttcagacaataacattctgata

SEQ ID NO: 425641 - DNA, 120 bp, Artificial Sequence
  ENSG00000151413_48 (sequence is synthesized)
agagctgagttttactcttttgttagcactgtcagttttctcaaccatagaatgagaatgataaaataaccatctcggctgggcacggtagctcactcctctaatcccagcactttggga

SEQ ID NO: 425642 - DNA, 120 bp, Artificial Sequence
  ENSG00000151413_49 (sequence is synthesized)
aaacaaacaaaacaaaaaacaaaataaccatctcataaagttcttgtgaagagtaaataagatagtacatttaaagtacttaacccagcacctggcatacaacaaacacttcgttatttt

SEQ ID NO: 425643 - DNA, 120 bp, Artificial Sequence
  ENSG00000151413_50 (sequence is synthesized)
agatttactgtgagacttcgtccaaagttacctcttaggtatttattttcctctgttcctcccttcttatttttctccaaattgtcatcaaagataaatttctaaaacaaaaatctgatt

SEQ ID NO: 425644 - DNA, 120 bp, Artificial Sequence
  ENSG00000151413_51 (sequence is synthesized)
gtataactacctctttgataccatcttttcagctttgaaaacctttagtggtttcctgttgtctgaagaggaatgcctcaaatacatggatggtattcagcatcttcccacgtggcccta

SEQ ID NO: 425645 - DNA, 120 bp, Artificial Sequence
  ENSG00000151413_52 (sequence is synthesized)
gccttccttcccaaaccatcttctgccttgaccacccactgggttgcagcccaagtaggccacacagttttattttgctaccttggcttgttgtcttccttctgtctagaattcctgctg

SEQ ID NO: 425646 - DNA, 120 bp, Artificial Sequence
  ENSG00000151413_53 (sequence is synthesized)
tttagcatttattatgatatcaaaggtaattctatatgtcttgctctcttactagctcatgagttccttcagagcagaggccatagtttattcatcattgtgataacattgatgagtgcc

SEQ ID NO: 425647 - DNA, 120 bp, Artificial Sequence
  ENSG00000151413_54 (sequence is synthesized)
agaaatgcagaagcagatggtactgctgaaccaaatgtgtgaaaggctagtaactcatagatgcatataatttttagagttggaagagaccaaggagttaaattcatctaactcccattc

SEQ ID NO: 425648 - DNA, 120 bp, Artificial Sequence
  ENSG00000151413_55 (sequence is synthesized)
tataagtatttcagatgactgcagttgtgtcctcatcatcaatctctaaatgaagttacttgaagcaattcttgaaaccataataataatgtctccagaattggtggattcttggtctca

SEQ ID NO: 425649 - DNA, 120 bp, Artificial Sequence
  ENSG00000151414_0 (sequence is synthesized)
acactcctgacagcggcggcagcaggaggaggatcgggagtcgcgggaggatgggccgccgctaggctcgcactccggacgcgcctcgcagtgcgcagggtgggtgccccgcgcctgcag

SEQ ID NO: 425650 - DNA, 120 bp, Artificial Sequence
  ENSG00000151414_1 (sequence is synthesized)
ggccgacaggctccgggcctcgcagcctcagcccccggcccagcgcgctttccgacggcggcgccgcgccgagccacccgcccgcccaaggtctctcgcgggcgggagaacggaaaactc

SEQ ID NO: 425651 - DNA, 120 bp, Artificial Sequence
  ENSG00000151414_2 (sequence is synthesized)
ctctcgcgggcgggagaacggaaaactcccaacttcctgagttctaaagttcctgttgcttcagacaatggatgagcaatcacaaggaatgcaagggccacctgttcctcagttccaacc

SEQ ID NO: 425652 - DNA, 120 bp, Artificial Sequence
  ENSG00000151414_3 (sequence is synthesized)
acagaaggccttacgaccggatatgggctataatacattagccaactttcgaatagaaaagaaaattggtcgcggacaatttagtgaagtttatagagcagcctgtctcttggatggagt

SEQ ID NO: 425653 - DNA, 120 bp, Artificial Sequence
  ENSG00000151414_4 (sequence is synthesized)
accagtagctttaaaaaaagtgcagatatttgatttaatggatgccaaagcacgtgctgattgcatcaaagaaatagatcttcttaagcaactcaaccatccaaatgtaataaaatatta

SEQ ID NO: 425654 - DNA, 120 bp, Artificial Sequence
  ENSG00000151414_5 (sequence is synthesized)
tgcatcattcattgaagataatgaactaaacatagttttggaactagcagatgctggcgacctatccagaatgatcaagcattttaagaagcaaaagaggctaattcctgaaagaactgt

SEQ ID NO: 425655 - DNA, 120 bp, Artificial Sequence
  ENSG00000151414_6 (sequence is synthesized)
ttggaagtattttgttcagctttgcagtgcattggaacacatgcattctcgaagagtcatgcatagagatataaaaccagctaatgtgttcattacagccactggggtggtaaaacttgg

SEQ ID NO: 425656 - DNA, 120 bp, Artificial Sequence
  ENSG00000151414_7 (sequence is synthesized)
agatcttgggcttggccggtttttcagctcaaaaaccacagctgcacattctttagttggtacgccttattacatgtctccagagagaatacatgaaaatggatacaacttcaaatctga

SEQ ID NO: 425657 - DNA, 120 bp, Artificial Sequence
  ENSG00000151414_8 (sequence is synthesized)
catctggtctcttggctgtctactatatgagatggctgcattacaaagtcctttctatggtgacaaaatgaatttatactcactgtgtaagaagatagaacagtgtgactacccacctct

SEQ ID NO: 425658 - DNA, 120 bp, Artificial Sequence
  ENSG00000151414_9 (sequence is synthesized)
tccttcagatcactattcagaagaactccgacagttagttaatatgtgcatcaacccagatccagagaagcgaccagacgtcacctatgtttatgacgtagcaaagaggatgcatgcatg

SEQ ID NO: 425659 - DNA, 120 bp, Artificial Sequence
  ENSG00000151414_10 (sequence is synthesized)
cactgcaagcagctaaacatgcaagatcatgaagagtgtaaccaaagtaattgaaagtattttgtgcaagtcatacctccccatttatgtctggtgttaagattaatatttcagagctag

SEQ ID NO: 425660 - DNA, 120 bp, Artificial Sequence
  ENSG00000151414_11 (sequence is synthesized)
tgtgctttgaatccttaaccagttttcatataagcttcattttgtaccagtcacctaaatcacctccttgcaacccccaaatgactttggaataactgaattgcatgttaggagagaaaa

SEQ ID NO: 425661 - DNA, 120 bp, Artificial Sequence
  ENSG00000151414_12 (sequence is synthesized)
tgaaacatgatggttttgaatggctaaaggtttatagaatttcttacagttttctgctgataaattgtgtttagatagactgtcagtgccaaatattgaaggtgcagcttggcacacatc

SEQ ID NO: 425662 - DNA, 120 bp, Artificial Sequence
  ENSG00000151414_13 (sequence is synthesized)
agaatagactcatacctgagaaaaagtatctgaacatgtgacttgtttcttttttagtaatttatggacattgagatgaacacaattgtgaacttttgtgaagattttatttttaaacgt

SEQ ID NO: 425663 - DNA, 120 bp, Artificial Sequence
  ENSG00000151414_14 (sequence is synthesized)
ttgaagtactagttttagttcttagcagagtagttttcaaatatgattcttatgataaatgtagacacaaactatttgagaaacatttagaactcttagcttatacattcaaaatgtaac

SEQ ID NO: 425664 - DNA, 120 bp, Artificial Sequence
  ENSG00000151414_15 (sequence is synthesized)
tattaaatgtgaagatttggggacaaaatgtgagtcagacactgaagagttttttgttttgttttaatatttttgatattctctttgcattgaaatggtataaatgaatccatttaaaaa

SEQ ID NO: 425665 - DNA, 120 bp, Artificial Sequence
  ENSG00000151414_16 (sequence is synthesized)
gtggttaaggatttgtttagctggtgtgataataatttttaaagttgcacattgcccaaggctttttttgtgtgtttttattgttgtttgtacatttgaaaaatattctttgaataacct

SEQ ID NO: 425666 - DNA, 120 bp, Artificial Sequence
  ENSG00000151414_17 (sequence is synthesized)
agtgcattttaactcataattgtacactataatataagcctaagtttttattcataagttttattgaagttctgatcggtccccttcagaaatttttttatattattcttcaagttactt

SEQ ID NO: 425667 - DNA, 120 bp, Artificial Sequence
  ENSG00000151414_18 (sequence is synthesized)
tcttatttatattgtatgtgcattttatccattaatgtttcatactttctgagagtataatacccttttaaaagatatttggtataccaatacttttcctggattgaaaactttttttaa

SEQ ID NO: 425668 - DNA, 120 bp, Artificial Sequence
  ENSG00000151414_19 (sequence is synthesized)
actttttaaaatttgggccactctgtatgcatatgtttggtcttgttaaagaggaagaaaggatgtgtgttatactgtacctgtgaatgttgatacagttacaatttatttgacaaggtt

SEQ ID NO: 425669 - DNA, 120 bp, Artificial Sequence
  ENSG00000151414_20 (sequence is synthesized)
gtaattctagaatatgcttaataaaatgaaaactggccatgactacagccagaactgttatgagattaacatttctattgagaagcttttgagtaaagtactgtatttgttcatgaagat

SEQ ID NO: 425670 - DNA, 120 bp, Artificial Sequence
  ENSG00000151414_21 (sequence is synthesized)
gactgagatggtaacacttcgtgtagcttaaggaaatgggcagaatttcgtaaatgctgttgtgcagatgtgttttccctgaatgctttcgtattagtggcgaccagtttctcacagaat

SEQ ID NO: 425671 - DNA, 120 bp, Artificial Sequence
  ENSG00000151414_22 (sequence is synthesized)
tgtgaagcctgaaggccaagaggaagtcactgttaaaggactctgtgccatcttacaaccttggatgaattatcctgccaacgtgaaaacctcatgttcaaagaacacttccctttagcc

SEQ ID NO: 425672 - DNA, 120 bp, Artificial Sequence
  ENSG00000151414_23 (sequence is synthesized)
gatgtaactgctggttttgtttttcatatgtgtttttcttacactcatttgaatgctttcaagcatttgtaaacttaaaaaatgtataaagggcaaaaagtctgaacccttgttttctga

SEQ ID NO: 425673 - DNA, 120 bp, Artificial Sequence
  ENSG00000151414_24 (sequence is synthesized)
aatctaatcagttatgtatggtttctgaagggtaattttattttggaataggtaaaggaaacctgttttgtttgtttttcctgagggctagatgcattttttttctcacactcttaatga

SEQ ID NO: 425674 - DNA, 120 bp, Artificial Sequence
  ENSG00000151414_25 (sequence is synthesized)
cttttaacatttatactgagcatccatagatatattcctagaagtatgagaagaattattcttattgaccattaatgtcatgttcattttaatgtaatataattgagatgaaatgttctc

SEQ ID NO: 425675 - DNA, 120 bp, Artificial Sequence
  ENSG00000151414_26 (sequence is synthesized)
tggttggaacagatactctcttttttttcttgcaatctttaagaatacatagatctaaaattcattagcttgacccctcaaagtaacttttaagtaaagattaaagcttttcttctcagt

SEQ ID NO: 425676 - DNA, 120 bp, Artificial Sequence
  ENSG00000151414_27 (sequence is synthesized)
gaatatatctgctagaaggaaatagctgggaagaatttaatgatcagggaaattcattatttctatatgtggaaactttttgcttcgaatattgtatctttttaaatctaaatgttcata

SEQ ID NO: 425677 - DNA, 120 bp, Artificial Sequence
  ENSG00000151414_28 (sequence is synthesized)
tttttcctgaagaaaccactgtgtaaaaatcaaattttaattttgaatggaataatttcaaagaactatgaagatgatttgaagctctaatttatatagtcacctataaaatgttcttta

SEQ ID NO: 425678 - DNA, 120 bp, Artificial Sequence
  ENSG00000151414_29 (sequence is synthesized)
tatgtgttcataagtaaattttatattgattaagttaaacttttgaattgatttgaggagcagtaaaatgaaagctatatctattctaaaccttatttagacattggtaccagttaccca

SEQ ID NO: 425679 - DNA, 120 bp, Artificial Sequence
  ENSG00000151414_30 (sequence is synthesized)
ggtgaaaatatggagtaactttgttttgtatggtaaggtttaggaatggtggatgaagggtatctctatataaataaagtgctcaacaatgtgcaatgattgtaaatttagtaagatatt

SEQ ID NO: 425680 - DNA, 120 bp, Artificial Sequence
  ENSG00000151414_31 (sequence is synthesized)
acagccatttcatgaatgctttaccattcaacatagtatctattacaaaacacctttcttgtatccatatacttcaggtgttgctgttaacatttactatgatatttattttaaccaaaa

SEQ ID NO: 425681 - DNA, 120 bp, Artificial Sequence
  ENSG00000151414_32 (sequence is synthesized)
tgttactcacattaaatgtttattctttaaaatgaatgtattatgtttttaacccacaaatgcatacttaccctgtgcctcatatttcaatagtactgtaatatggacatcttttgtgaa

SEQ ID NO: 425682 - DNA, 120 bp, Artificial Sequence
  ENSG00000151414_33 (sequence is synthesized)
acactcctgacagcggcggcagcaggaggaggatcgggagtcgcgggaggatgggccgccgctaggctcgcactccggacgcgcctcgcagtgcgcaggagttctaaagttcctgttgct

SEQ ID NO: 425683 - DNA, 120 bp, Artificial Sequence
  ENSG00000151414_34 (sequence is synthesized)
gaattcataaacaactgtcctcatagtgggcttaattttctgatgaaaatatggcatttatatgctttcagcatacaatttaagatttcattttaagtccattctaattcagtgaatagt

SEQ ID NO: 425684 - DNA, 120 bp, Artificial Sequence
  ENSG00000151414_35 (sequence is synthesized)
caggggaaggtaatgtctgcttttccaaagaattgaaaggttcattacatttctcaatttgtcacaatttttattaaaatcctattacttgtttcttctttatcacttgatgaattgacg

SEQ ID NO: 425685 - DNA, 120 bp, Artificial Sequence
  ENSG00000151414_36 (sequence is synthesized)
ctacagtatatggcaacattaaccaatctttttgaaaatttacctgtatcccatcatggttcatttgcaaaaaaataagatggtaccttaactaataaaacaattttgaaattctctgta

SEQ ID NO: 425686 - DNA, 120 bp, Artificial Sequence
  ENSG00000151414_37 (sequence is synthesized)
aattttttgaaatagtgggacatcacaaaaaggtactgttacacagtttccgctaaccttagttataataggaaaaaaacttaagccattatgtcagataaaattattggaataatttca

SEQ ID NO: 425687 - DNA, 120 bp, Artificial Sequence
  ENSG00000151414_38 (sequence is synthesized)
gtataaagatcatatgctttttagttgataatggtagataaaattagctgtttttctgacttacggatttttgcttaccagaatccagtcttgagaaattttagtttttatagttcttat

SEQ ID NO: 425688 - DNA, 120 bp, Artificial Sequence
  ENSG00000151414_39 (sequence is synthesized)
cctggaaaaggaaactattaataagcttggacgaatatgcttcaactctagaattctgaaaaaaatcagaaaactaaaaacttctgaagctctatttgaaatctctcttcaaattgagtt

SEQ ID NO: 425689 - DNA, 120 bp, Artificial Sequence
  ENSG00000151414_40 (sequence is synthesized)
cagtcaataattttcctttggatgggagtagtgttgctacttaaatatgattgatcctctttttttgttatttatgagctgtagttgtaatcaatgaaatgtcttattaatattctcaga

SEQ ID NO: 425690 - DNA, 120 bp, Artificial Sequence
  ENSG00000151414_41 (sequence is synthesized)
atggaagggagaagtagaagaaaatctacatataagtggatctgcacagttcaaacttgtgttgttcaagagtcaattgtataaacgagtaattaaaagcctgtgtgatccaggacccaa

SEQ ID NO: 425691 - DNA, 120 bp, Artificial Sequence
  ENSG00000151418_0 (sequence is synthesized)
tttataagtagatgcaacacctcatttatacctccttatctcatacagaagagctaagattggcagaaatgatttcacagaagccacttgcttggagcagactaccatgacaagccagtc

SEQ ID NO: 425692 - DNA, 120 bp, Artificial Sequence
  ENSG00000151418_1 (sequence is synthesized)
tcaggggatccaccagcttcttcaggcagaaaaacgggccaaggacaagctagaggaagccaagaagagaaaaggaaagcgattgaagcaagccaaggaggaagcaatggtagaaattga

SEQ ID NO: 425693 - DNA, 120 bp, Artificial Sequence
  ENSG00000151418_2 (sequence is synthesized)
tcgactaaaacaatctaagataatgggctctcagaataatctctcagatgaaatagaagaacaaacactagggaagatacaagaacttaatggacactacaataagtatatggaaagtgt

SEQ ID NO: 425694 - DNA, 120 bp, Artificial Sequence
  ENSG00000151418_3 (sequence is synthesized)
gatgaaccagctcttgagcatggtctgtgacatgaaaccagaaatccatgtgaactacagagccaccaactaaatgtacatcacagttttcaagaaaaaaaaaggtgtgtgagtgccacc

SEQ ID NO: 425695 - DNA, 120 bp, Artificial Sequence
  ENSG00000151418_4 (sequence is synthesized)
tggttgcttatggcttcgtatttttatgttgagaaatttgaaatgagaaccttaaatttacatttacaggaaatgtgacataactcatacatcggcactgaattaaacaaaacaaaatac

SEQ ID NO: 425696 - DNA, 120 bp, Artificial Sequence
  ENSG00000151418_5 (sequence is synthesized)
gccacttgcttggagcagactaccatgacaagccagtctcaggggatccaccagcttcttcaggcagaaaaacgggccaaggacaagctagaggaagccaagaagaagactgggactgct

SEQ ID NO: 425697 - DNA, 120 bp, Artificial Sequence
  ENSG00000151422_0 (sequence is synthesized)
actcatttttcaccaaattcttttggtgaaggacgcttcagaaacggccatcactgaagagcagacccgtttgggttctccacgcattctagactcccgaagagctcatgttttttggct

SEQ ID NO: 425698 - DNA, 120 bp, Artificial Sequence
  ENSG00000151422_1 (sequence is synthesized)
agacctatgaccattttcgctagacttcactgcacgttttctcaagtatcttctttgtccctaatgtgtgacacctcatcatggacacgctactttagctaaggcatgaccagcaatgaa

SEQ ID NO: 425699 - DNA, 120 bp, Artificial Sequence
  ENSG00000151422_2 (sequence is synthesized)
cagtagtaagatatgtgctgattagaaggctcacttgtgcagtgtggaggataaccagtgccttacaaaatggggtttgggagtgacctgaagaattcacatgaagcagtgttaaaattg

SEQ ID NO: 425700 - DNA, 120 bp, Artificial Sequence
  ENSG00000151422_3 (sequence is synthesized)
caagactgggaattacggttactggaaacagtaaagaaatttatggccctgagaataaaaagtgataaagaatatgcatctactttacagaacctttgtaatcaagttgataaggaaagt

SEQ ID NO: 425701 - DNA, 120 bp, Artificial Sequence
  ENSG00000151422_4 (sequence is synthesized)
actgtccaaatgaattatgtcagcaacgtatccaagtcttggctacttatgattcagcagacagaacaacttagtaggataatgaagacacatgcagaggacttgaactctggaccttta

SEQ ID NO: 425702 - DNA, 120 bp, Artificial Sequence
  ENSG00000151422_5 (sequence is synthesized)
cacaggctcaccatgatgattaaggacaagcagcaggtgaagaaaagttacataggtgttcatcagcagatagaggcagagatgatcaaggttaccaaaacagaattggagaagttaaaa

SEQ ID NO: 425703 - DNA, 120 bp, Artificial Sequence
  ENSG00000151422_6 (sequence is synthesized)
tgcagctatagacaattaataaaagaaatgaattctgccaaagagaaatataaagaagctttagctaaagggaaggaaactgaaaaggccaaggaacgatacgacaaagccacaatgaaa

SEQ ID NO: 425704 - DNA, 120 bp, Artificial Sequence
  ENSG00000151422_7 (sequence is synthesized)
cttcatatgttgcacaatcagtatgtattggcgttgaaaggggcacagctccatcagaatcagtattatgatatcacacttcccctgcttctggactccttacaaaagatgcaagaagaa

SEQ ID NO: 425705 - DNA, 120 bp, Artificial Sequence
  ENSG00000151422_8 (sequence is synthesized)
atgataaaagcactcaaaggtatatttgatgaatacagccagataaccagtcttgtcacagaggaaatagtgaatgtccataaagagattcaaatgtcggttgaacagatagatcctagt

SEQ ID NO: 425706 - DNA, 120 bp, Artificial Sequence
  ENSG00000151422_9 (sequence is synthesized)
acagaatacaataatttcatagatgttcacagaacaacggctgctaaagaacaagaaatagagtttgatacttccttactggaagaaaatgaaaatcttcaggcaaatgagatcatgtgg

SEQ ID NO: 425707 - DNA, 120 bp, Artificial Sequence
  ENSG00000151422_10 (sequence is synthesized)
aataacttaacagcagaaagtttgcaagtaatgttgaaaacgttagcggaagaacttatgcaaacacagcagatgcttttaaacaaggaggaggctgttttggagttagagaagagaatt

SEQ ID NO: 425708 - DNA, 120 bp, Artificial Sequence
  ENSG00000151422_11 (sequence is synthesized)
gaagaatcttctgaaacttgtgagaagaagtctgatattgtgcttctgctaagccaaaaacaggcacttgaagaactgaaacagtcagtccagcagctgagatgcactgaagcaaagttt

SEQ ID NO: 425709 - DNA, 120 bp, Artificial Sequence
  ENSG00000151422_12 (sequence is synthesized)
tcagcacagaaggaattactagagcaaaaagtgcaagaaaatgatgggaaagagccacctccagtagtaaattatgaagaagatgcacgatcagttacatctatggaaagaaaggagagg

SEQ ID NO: 425710 - DNA, 120 bp, Artificial Sequence
  ENSG00000151422_13 (sequence is synthesized)
ctatccaaatttgaatctattcgtcattcaattgctggaataattaggtctccaaaatctgcactgggctcttcagcactttctgatatgatctccatcagtgagaagcctttggcagaa

SEQ ID NO: 425711 - DNA, 120 bp, Artificial Sequence
  ENSG00000151422_14 (sequence is synthesized)
caggactggtaccatggtgcaattcccagaatagaagctcaagaactgttaaaaaaacaaggagactttttggtgcgagagagtcatgggaaacctggtgaatatgtcctttctgtatat

SEQ ID NO: 425712 - DNA, 120 bp, Artificial Sequence
  ENSG00000151422_15 (sequence is synthesized)
tctgatggacagaggagacattttatcatacaatatgttgataacatgtatcgattcgagggcactgggttttcaaacattcctcaacttatagatcatcactatacaacaaaacaggtc

SEQ ID NO: 425713 - DNA, 120 bp, Artificial Sequence
  ENSG00000151422_16 (sequence is synthesized)
atcactaagaaatcaggtgtagttctgctgaatcctattcctaaggacaagaaatggattctcagtcatgaagatgtcatattgggagaattactgggcaagggaaattttggtgaagta

SEQ ID NO: 425714 - DNA, 120 bp, Artificial Sequence
  ENSG00000151422_17 (sequence is synthesized)
tataagggcacattaaaggataaaacttctgttgctgttaaaacatgtaaagaagatcttcctcaggaattgaaaataaaatttttacaagaagccaaaattctcaagcaatatgatcat

SEQ ID NO: 425715 - DNA, 120 bp, Artificial Sequence
  ENSG00000151422_18 (sequence is synthesized)
cccaatattgtcaaacttataggagtttgcacacaaagacagcctgtctacatcattatggaactggtttcaggaggtgatttcctcacctttctgagaaggaagaaggatgaactaaaa

SEQ ID NO: 425716 - DNA, 120 bp, Artificial Sequence
  ENSG00000151422_19 (sequence is synthesized)
ctcaaacagttagtgaaattttcattagacgctgctgctggtatgttgtatctcgagagtaaaaactgtatacacagggaccttgctgcaagaaactgcctggtaggtgaaaataatgtt

SEQ ID NO: 425717 - DNA, 120 bp, Artificial Sequence
  ENSG00000151422_20 (sequence is synthesized)
ctgaaaatcagtgactttggaatgtctcgtcaagaggatggtggagtgtattcatcttctggcttaaagcagattcccattaaatggacagcaccggaagctcttaattatgggagatac

SEQ ID NO: 425718 - DNA, 120 bp, Artificial Sequence
  ENSG00000151422_21 (sequence is synthesized)
agttcagagagtgacgtgtggagctttggcatccttctctgggagaccttcagcttaggggtttgtccgtaccctggaatgacaaatcagcaagcaagagagcaagtagaaagaggatac

SEQ ID NO: 425719 - DNA, 120 bp, Artificial Sequence
  ENSG00000151422_22 (sequence is synthesized)
cggatgtcagctccccagcactgtccagaggatatttccaaaatcatgatgaagtgttgggattataaacctgaaaatcgccctaagttcagtgaacttcagaaagagctcactatcatc

SEQ ID NO: 425720 - DNA, 120 bp, Artificial Sequence
  ENSG00000151422_23 (sequence is synthesized)
aagagaaaactcacatagtgacaggatggcgccaaactcagccttcaggactctgtcctccagcagagtaacattattgttctcattaacaatgaatttataccacattaccttcgacag

SEQ ID NO: 425721 - DNA, 120 bp, Artificial Sequence
  ENSG00000151422_24 (sequence is synthesized)
tcttctaccattattttttattaactgggtgttttaaaagtacgttccacttgtaaaaagtcaaaggcaaatttgttaaagaaataggcagtcctaccaagggctttcttagctaaccat

SEQ ID NO: 425722 - DNA, 120 bp, Artificial Sequence
  ENSG00000151422_25 (sequence is synthesized)
agcaatcctaccatttcaggccattgcaaatagaaaagcacaggcttctaagtgtgtgaaggataaaagatctatcctatccttttcacaccttgtttctacttcaggcacagtttgtag

SEQ ID NO: 425723 - DNA, 120 bp, Artificial Sequence
  ENSG00000151422_26 (sequence is synthesized)
gctgccatcctatgccacagaccctactccgttggtgctataaacagcattggtaatgccatgtttgcaggacatgttccaaccacagctggctttcacctctgccaaagcaggattata

SEQ ID NO: 425724 - DNA, 120 bp, Artificial Sequence
  ENSG00000151422_27 (sequence is synthesized)
tttgtaaacaaacaaacagaattttatattgggaattatttggacctcctgagatttttcttttctttcttgccaggtataagcccaatgtaagaatcatcatgctcctacattatttgt

SEQ ID NO: 425725 - DNA, 120 bp, Artificial Sequence
  ENSG00000151422_28 (sequence is synthesized)
aagcccaatgtaagaatcatcatgctcctacattatttgtaaggttgtcattttcctcctcctttgtctgggcatcagaaaacaatgcacgtaggtcgggcacggtggctcacgcctgta

SEQ ID NO: 425726 - DNA, 61 bp, Artificial Sequence
  ENSG00000151422_29 (sequence is synthesized)
caggcgtgagccacagtgcccagccccctccctctgcatggtgaaaccctgtctctaccaa

SEQ ID NO: 425727 - DNA, 120 bp, Artificial Sequence
  ENSG00000151422_30 (sequence is synthesized)
aaagaaacacacacacaacgcatgaaacgtcgtcaaagttagagttgaggcagttgcttttcaaggatgtacagagagctgtgaagcaagaaacagatttgaacaggagggtgggctgga

SEQ ID NO: 425728 - DNA, 120 bp, Artificial Sequence
  ENSG00000151422_31 (sequence is synthesized)
gaacagagcagctaaagaatgattaacagagtaaagaagaaagtgaaaatataaaaccaccttatcagagttatgcctttctaaacatctaaacaaacaaacattcacatattctattct

SEQ ID NO: 425729 - DNA, 120 bp, Artificial Sequence
  ENSG00000151422_32 (sequence is synthesized)
aaaaacacataataatacatattctattttatggtctgaatttaccagaaaggtcctaagaaaagtttcaggagttcgtagagtcctcgtaatggcaacaaaaattttgagagaaactgc

SEQ ID NO: 425730 - DNA, 120 bp, Artificial Sequence
  ENSG00000151422_33 (sequence is synthesized)
aaagcacaaatccacagaaataacagcatactttcagttaagcattttcaccttagagggggcattccaaaatgtaatttcctttatttgtaccagtttttagagctgtcagaatttcat

SEQ ID NO: 425731 - DNA, 120 bp, Artificial Sequence
  ENSG00000151422_34 (sequence is synthesized)
gattctagttcaccaacacattcacgtgtgtacatgcgcgtgcacacacaccaccaaggtgcaagacagatgtgaatgaagtagacagtctagaagtcaggtgaatattaatgagaaata

SEQ ID NO: 425732 - DNA, 120 bp, Artificial Sequence
  ENSG00000151422_35 (sequence is synthesized)
tgacatagggacagccctcccatttctacttccaccttcattgaccattatactgccccctggacattcttaccattagctgacaggtatgcaagcagagtgctgaagatgtctcatgtg

SEQ ID NO: 425733 - DNA, 120 bp, Artificial Sequence
  ENSG00000151422_36 (sequence is synthesized)
aataaaatgtaactcactcactcagttaaaactaggattctgtatcttaactcttatctagggaacttacttacttaccccatgatctgtatatagttgcctctcaggataaatgcatat

SEQ ID NO: 425734 - DNA, 120 bp, Artificial Sequence
  ENSG00000151422_37 (sequence is synthesized)
atagaagatggtcatgctcagggctaaatatgttctggaagccttttataagttctcaggcctgtgtcctggtaaacattaccttagtgattatttggtctgcattcattggaagagctt

SEQ ID NO: 425735 - DNA, 120 bp, Artificial Sequence
  ENSG00000151422_38 (sequence is synthesized)
agggatagaaaatgcctcctgccctctccagctgtttgctgcctgtaccatcgcacagaactcacaccagtactttagagtatgaaagataatactgaagagaaaagtgacttgtatcta

SEQ ID NO: 425736 - DNA, 120 bp, Artificial Sequence
  ENSG00000151422_39 (sequence is synthesized)
acatttcaatctccttgcagatttcatacatacttaatgattagtacattcagactaaagggaaatttcttttgatggcacgtactatggtaaatcaaagcgcaaactcagaagtgctat

SEQ ID NO: 425737 - DNA, 120 bp, Artificial Sequence
  ENSG00000151422_40 (sequence is synthesized)
ggtattgaggcacttaccaaccttcaaaagtaagagtaaaatgggatattcctacccttttttttagtatttctaagtgaatctctgtaatattctttgtctgtttaaagaaaacagcct

SEQ ID NO: 425738 - DNA, 120 bp, Artificial Sequence
  ENSG00000151422_41 (sequence is synthesized)
cccatctcatagtggcttcatgctaagctctcagcaaggagagagaatgatggttttggctttagttttatgaacaagacctaaagcttaatcctgacattctggtgttaagaatgaaca

SEQ ID NO: 425739 - DNA, 120 bp, Artificial Sequence
  ENSG00000151422_42 (sequence is synthesized)
cagcattgatatttcacttatccaggctgttagaatttgcagttcacatcattactctgtgcttaaatttaaaaagcttttcaaaacatcgtgacatgtgtagcatttaaattccatttt

SEQ ID NO: 425740 - DNA, 120 bp, Artificial Sequence
  ENSG00000151422_43 (sequence is synthesized)
attctttgtcctaaagcaggcagtggtatagttcaggattaataacttattgggagtctctcagtcatatagaatattaaatttaatatagtcacatgcattaagaaaaacttacgcaaa

SEQ ID NO: 425741 - DNA, 120 bp, Artificial Sequence
  ENSG00000151422_44 (sequence is synthesized)
cagtttttcactgttaattttgttgtgcttgaagcataatttattcatcccttctgtcactgataattaattattggaattatatactttaggaggctaatccatgcccaggaagcacga

SEQ ID NO: 425742 - DNA, 120 bp, Artificial Sequence
  ENSG00000151422_45 (sequence is synthesized)
acatactgttcagaatgtgcaagttgatgtagggaaaggaagattcagaaatgtacaaaatcctgtgatttgtttagtaagaaaagagttgtaaccaaaatttcttctggtccggatgta

SEQ ID NO: 425743 - DNA, 120 bp, Artificial Sequence
  ENSG00000151422_46 (sequence is synthesized)
attagtccagtcacaaatctttgtgttgttaatggattattcaagatatatatatatattcttactactgcatagttcctctcataagtccttaaatttattaaaagggggaggtaaaca

SEQ ID NO: 425744 - DNA, 120 bp, Artificial Sequence
  ENSG00000151422_47 (sequence is synthesized)
caagcagtctgtgtctcactggtcactaaggggcctttatgagacagtttaggttgttcatcatttcacaaggaaagaaatttttcactgttaaattaacatttattaccaacatgtgaa

SEQ ID NO: 425745 - DNA, 120 bp, Artificial Sequence
  ENSG00000151422_48 (sequence is synthesized)
acctaaaattaattttgcattccatgtaatctaaggccaaagccaacatattctttctcttctgggaaaataaaattgacaggttttgtttaaacttcagaaactgaagctttatttcag

SEQ ID NO: 425746 - DNA, 120 bp, Artificial Sequence
  ENSG00000151422_49 (sequence is synthesized)
cctgtcctgccatgaggtctccagtgagaggtctccagtgaaaggtctcatgtaattgtttctcttttatctcccaaatttaatgtgggcaataaaattctcctttcgtaattcactgtt

SEQ ID NO: 425747 - DNA, 120 bp, Artificial Sequence
  ENSG00000151422_50 (sequence is synthesized)
gtatagaccaggagcctaactgtgttagatattttcagtgcacatttcacagttgtttttcattttaggattattttgagaagaaaaaatgttttgtaattgaaatagttttaatttcct

SEQ ID NO: 425748 - DNA, 120 bp, Artificial Sequence
  ENSG00000151422_51 (sequence is synthesized)
ttaaaccataatttggtttttctatctatattatattcagttcagttttcccatataacttttgtgaagattggctagtaccacaaaataactatggcttcacaatactagtgttagatt

SEQ ID NO: 425749 - DNA, 120 bp, Artificial Sequence
  ENSG00000151422_52 (sequence is synthesized)
atgtcaagaagaaagtgttttagttacaacatacgccacccactgaggaccttgtagtgggataaacaaaaattaaaatgcaacaatccaaataaattataatgtaacaatacaaatatc

SEQ ID NO: 425750 - DNA, 120 bp, Artificial Sequence
  ENSG00000151422_53 (sequence is synthesized)
tgaatcataagtcacagtttttcagggttctttcagtcacaccactttataattaattctggtgagtcatcagatgtaggaatgtacctgaaaaccttacttagtatactgtgtacactg

SEQ ID NO: 425751 - DNA, 120 bp, Artificial Sequence
  ENSG00000151422_54 (sequence is synthesized)
tttaatggccatgcatcttttgaagtttgatattttctgaaaaagcattgtttgcctcagccctcttctttttacgtatactccatttatcattgatattttagatgtttcttatcaaca

SEQ ID NO: 425752 - DNA, 120 bp, Artificial Sequence
  ENSG00000151422_55 (sequence is synthesized)
aaattggctgccctggttagtgctgagtcatcgcaagacttgcttttgcatttaggaagccacaccctcccacaaaacagaacagtgcaaaataagcagcagagagacagacagttggaa

SEQ ID NO: 425753 - DNA, 120 bp, Artificial Sequence
  ENSG00000151422_56 (sequence is synthesized)
aagacatgttttctttaggtattaatatcttaattaaatggaatcagattttgtatggaaatgagtttatattacatttccattatactaagtcagtgtgaaagtttaccatcaaaatag

SEQ ID NO: 425754 - DNA, 120 bp, Artificial Sequence
  ENSG00000151422_57 (sequence is synthesized)
cgttacttcttttatgactaactctgatttgcttatacatatcagaatgatattcattaaatattttaatttcatttatttttctatgttttgattagtttcacatcaagtctgaatact

SEQ ID NO: 425755 - DNA, 120 bp, Artificial Sequence
  ENSG00000151422_58 (sequence is synthesized)
atattttggaagaatccaaaaccacatatgaagatactgattttaaaagtcaggatttcatgtaccaagaatgacctacttgaaggagattttgctacactcttagagtcccaaaaattc

SEQ ID NO: 425756 - DNA, 120 bp, Artificial Sequence
  ENSG00000151422_59 (sequence is synthesized)
ccctttaaaaaaaatgctgtcctacagaaggtgtataaactataccttagccataattcaatttaatgaaatactaccccattaaaagccatcctcctgcctcataccgattcagaaatt

SEQ ID NO: 425757 - DNA, 120 bp, Artificial Sequence
  ENSG00000151422_60 (sequence is synthesized)
aaattctgaacttttagtgtaggcattaggaatcacttagccacttaataaggactgagattcttgggtggcagaaaaatcctggtgtgctagattcttagtcactttaaactgcataga

SEQ ID NO: 425758 - DNA, 120 bp, Artificial Sequence
  ENSG00000151422_61 (sequence is synthesized)
agtaatgagcataggcttcagtatatttaataaggtgctgaggcagcagattcaaatgcaaaagagggaggaaccagttattccaaggcaggatgatgcacccccacacagagtgtggaa

SEQ ID NO: 425759 - DNA, 120 bp, Artificial Sequence
  ENSG00000151422_62 (sequence is synthesized)
aaattaaagtgaaacaaagatttggacagtgtcattaggaagcctgaggagaacatgctacaaggccagatcctgtcctatggaaaataaaaaagatcagcagaactaaagcaaaagcag

SEQ ID NO: 425760 - DNA, 120 bp, Artificial Sequence
  ENSG00000151422_63 (sequence is synthesized)
tcatctccagtgtgtgggccttagcaaagagtaaaccaaatacctctccttgtgttaggagcactgttatattcccagctcagagatgattgtgtgctgggaaatgcttatattcattat

SEQ ID NO: 425761 - DNA, 120 bp, Artificial Sequence
  ENSG00000151422_64 (sequence is synthesized)
ttcccaactaatgcatttggacatatgtattccagtttttcaaagacactacccaaagcttctttacatttgcattggttatatttaatatttcttaagctaagatcactgattatccac

SEQ ID NO: 425762 - DNA, 120 bp, Artificial Sequence
  ENSG00000151422_65 (sequence is synthesized)
acgttattagaaatctttggttacagtgaggcttaacctgggctaaagtctcctaaatgggactacacttagatccgccctatttcacctttggactaacgttgactaaatggctcctag

SEQ ID NO: 425763 - DNA, 120 bp, Artificial Sequence
  ENSG00000151422_66 (sequence is synthesized)
agttacccacagagggagcttactatgatgagagctactgtggggaaacatagtattcaacagagaaatggaagaatacaagtagcaatgttccttgtcttcaataacatttgagggaaa

SEQ ID NO: 425764 - DNA, 120 bp, Artificial Sequence
  ENSG00000151422_67 (sequence is synthesized)
ggaatctagaaatcctaaagcttagtcagggtgcctaaggtaagacacaaaaagaaagagacatccagaaaggaaggttgaaaggaaatgaagggcagtaacaaagcaccaatgtaaaat

SEQ ID NO: 425765 - DNA, 120 bp, Artificial Sequence
  ENSG00000151422_68 (sequence is synthesized)
gacccatagccaacaataaatgcaataacaataaaggaaactaaccctcacaaagggtttgaggagcttcctgctgtgtgtccttaaacagtgcgtgcctcttaagtctctacaacactt

SEQ ID NO: 425766 - DNA, 120 bp, Artificial Sequence
  ENSG00000151422_69 (sequence is synthesized)
ttttaaagggcattgaattggacattggtttaatttttacctacgctccctataatctcaggaggtaaccattatttaatcagaattacccttgctctgtttatctgtgaggcctcagac

SEQ ID NO: 425767 - DNA, 120 bp, Artificial Sequence
  ENSG00000151422_70 (sequence is synthesized)
acaacggtggttcagccctctccctaagcagtagcaagctgagtaatggcacacatatgtctaggatagccagcattcaggaaaattgctgtgaacctcctgtttttaattttaatatag

SEQ ID NO: 425768 - DNA, 120 bp, Artificial Sequence
  ENSG00000151422_71 (sequence is synthesized)
aaaaagtctttcaggtttgtgacacgaagacagatttagcttcccacttgtcagcaaatttgtaaaaacctcaaaacaaatgaatatttggaattcactctaagagatacaaatcctgaa

SEQ ID NO: 425769 - DNA, 120 bp, Artificial Sequence
  ENSG00000151422_72 (sequence is synthesized)
tttctaactatcttctcaaatattactgaggccagcaagatgcaagtgttctacaaaataatgaactgttctaagtgacagtgttgatgctggaagtggaatgttatgttttcgctcagc

SEQ ID NO: 425770 - DNA, 120 bp, Artificial Sequence
  ENSG00000151422_73 (sequence is synthesized)
tgtattcattcagaaagtttttcttgaacatctgccacatgaggtgcagagaatactaccaggtgctagtttttccagtatttgacttctgattactatttccttttctcatctttagtt

SEQ ID NO: 425771 - DNA, 120 bp, Artificial Sequence
  ENSG00000151422_74 (sequence is synthesized)
tttcaagattttgctttaccaaaatagtaaagcctttatcatcagcttatattgaataatgttgtaattggtttcaatcaaagtttctcctcaggtacttgggggcccctagccttctaa

SEQ ID NO: 425772 - DNA, 120 bp, Artificial Sequence
  ENSG00000151422_75 (sequence is synthesized)
ggaactcccaggcacctacttaacaaggccagctacacactcagtatgtgataagccccatgatggatgcaggttagaattcaaagacctggttggagtcctagatgtggagacaggatg

SEQ ID NO: 425773 - DNA, 120 bp, Artificial Sequence
  ENSG00000151422_76 (sequence is synthesized)
atcaggtcacacttgttagatgactaacactatcagtagaagctcttgagagattttcctaacgcagcaagatttctgtgagtagaggtatcctgggaggtatcctgggaggcagcctat

SEQ ID NO: 425774 - DNA, 120 bp, Artificial Sequence
  ENSG00000151422_77 (sequence is synthesized)
tgacttgaccaagtaagctgatcaggtggcctcctctacccactaaagaaatgtgtaaacactagcaataattgctttatcttaaactcctggacatactcagttcttccattccactgt

SEQ ID NO: 425775 - DNA, 120 bp, Artificial Sequence
  ENSG00000151422_78 (sequence is synthesized)
tctattgccaataccttttgttgttttcttcacactcctcttggcagcaaatgtctgaaagtatttcaattgtgtaatgttaaggagttttttcatagcttcagaaaagagggcagcaaa

SEQ ID NO: 425776 - DNA, 120 bp, Artificial Sequence
  ENSG00000151422_79 (sequence is synthesized)
tatgaagccttaagttcaaaataagtcattctacctagaaatacagaccccagagcacattgcatgaaaatacctgtactctgcagttcctcaaagcagtattcttcctgaaaagccaaa

SEQ ID NO: 425777 - DNA, 120 bp, Artificial Sequence
  ENSG00000151422_80 (sequence is synthesized)
caccacacctattttcctatttgctaagaatcagaataagcacgttgtaaatagtatccaaagcagattctaaaatgacatagtaagaagccagattcaaattgtaaccaaagaagacaa

SEQ ID NO: 425778 - DNA, 120 bp, Artificial Sequence
  ENSG00000151422_81 (sequence is synthesized)
tagaaatcccactttaccccactgtcatcagttagaacacccttgcaaaaactgtaaccacttaagcaattcatctgatcccagaagatcataccttcttttgaaagtataggacagata

SEQ ID NO: 425779 - DNA, 120 bp, Artificial Sequence
  ENSG00000151422_82 (sequence is synthesized)
tcagtgggaaacgtcggcgttctgagcaacacaggataaatgtaggagggccttaaaaaataaatctcaattcatacactggagcagcaaaaaactgagcaggaaaggaaacagaatcca

SEQ ID NO: 425780 - DNA, 120 bp, Artificial Sequence
  ENSG00000151422_83 (sequence is synthesized)
aagtcatttttcatatagctgttgtcaaatagtataaccttggtgtcttctttgagttgcctggacagtatttatgaaacaaaaaactaaatgccccccatttggggacggggggagggg

SEQ ID NO: 425781 - DNA, 120 bp, Artificial Sequence
  ENSG00000151422_84 (sequence is synthesized)
ttcagacctctaacctggattcagagccttagaggccgagagggaatctggaatctggtattactgagatcctaggtaaaagaaccagcctggcagtctttcccacctcattggtccgtg

SEQ ID NO: 425782 - DNA, 120 bp, Artificial Sequence
  ENSG00000151422_85 (sequence is synthesized)
cttttatttttaaacccaaaagaaagaaagaaacacaccctcttatgtaggaatttcccttttacaaataatttgacctggtagaaataaacttgcctgcctgctcttaaatgccagaca

SEQ ID NO: 425783 - DNA, 120 bp, Artificial Sequence
  ENSG00000151422_86 (sequence is synthesized)
gttggaagcaaatgccgagggaaaggtgcccagagccatgcttgataggactttgaatattttctccttaattaaagtacgttgcttgtatttagactataagatgctatggaggtctat

SEQ ID NO: 425784 - DNA, 120 bp, Artificial Sequence
  ENSG00000151422_87 (sequence is synthesized)
cccatgccatgccaatgtgaattgctttgcttcagtaacaatcagaagaccagtccaacagaaaataacttgtcataattccaccttagattctagacctctcatacctgcagtgtacag

SEQ ID NO: 425785 - DNA, 120 bp, Artificial Sequence
  ENSG00000151422_88 (sequence is synthesized)
aatatgtacatgttccaatggaattcactatttttggctttagtgtcaaagagattggttctacaaggttcatctgatttcccataacaagtaaattttataatcctatgattctaaatt

SEQ ID NO: 425786 - DNA, 120 bp, Artificial Sequence
  ENSG00000151422_89 (sequence is synthesized)
caatccccaatatagattctaagcatcaaatcaaaatcacagacaaaggggaactggtcgagaggggtcttagttatttcaaatccatgaccaaagtgtccaaagacatgaaactcttat

SEQ ID NO: 425787 - DNA, 120 bp, Artificial Sequence
  ENSG00000151422_90 (sequence is synthesized)
acctgctgagcatttcactttactatacaaaatgtcagctacccagttgcatcctgtgacatgatcagactgtcaatgtggaccagtggccaggagcatatttatgggccatttctgttc

SEQ ID NO: 425788 - DNA, 120 bp, Artificial Sequence
  ENSG00000151422_91 (sequence is synthesized)
atcattctttacagagcattgaggtttcccactgaaacagcttctttagtcagacgtctatagattttacataaatttacatttaaatgcattaagttagatggcccaattgagcatctg

SEQ ID NO: 425789 - DNA, 120 bp, Artificial Sequence
  ENSG00000151422_92 (sequence is synthesized)
aatgaatatagtgggggttggtggtggtgcaaattctgctggctttatgttatggttttcttcgtgttttttcttggttttgtctggcttcttctggcaagtgccctaaaagactggaac

SEQ ID NO: 425790 - DNA, 120 bp, Artificial Sequence
  ENSG00000151422_93 (sequence is synthesized)
actgtataaagtcatagacatagaaccatatgggaaagcccagatgaaaaaatggaagaataaaatcaagttgtcaaagttccagcaacagccctgacttcttcaggaatccaagcaaat

SEQ ID NO: 425791 - DNA, 120 bp, Artificial Sequence
  ENSG00000151422_94 (sequence is synthesized)
tgaaagccaagacaaaatgtacaaatggtgcccatgccattcatttgactgtgggtggccctctagtctagggctctcttagtgaatggttgtggaaatatgatttttctaagttccttc

SEQ ID NO: 425792 - DNA, 120 bp, Artificial Sequence
  ENSG00000151422_95 (sequence is synthesized)
cttttccttttgatagatgagtttgagatgatggagtaggagtggggccctcaggcacttctggtaaagacattccacctgcaagcagcattttgagtaaagcactgctgtggtttgccg

SEQ ID NO: 425793 - DNA, 120 bp, Artificial Sequence
  ENSG00000151422_96 (sequence is synthesized)
atttatggtccatttaatgttaggctaaagcacctttaatcatttttgttgttttaagataatgtatttgtgaagtggataaacactggaaatagggtgcttcttctggaaagttcagtg

SEQ ID NO: 425794 - DNA, 120 bp, Artificial Sequence
  ENSG00000151422_97 (sequence is synthesized)
taaaacacaaacaaggctttggcgggtttatctggctttataaacaagtctgaaaaatggatgaaagctaaatatataaagcagttggttgtctatcttttatcatttttactcagatct

SEQ ID NO: 425795 - DNA, 120 bp, Artificial Sequence
  ENSG00000151422_98 (sequence is synthesized)
gtatttaacacttatttatttgttagtttttacattcaaaagaaatacactttgaactttggctaacattgtaggatattttttaattgtttctacatttttaaagcatgattcatcatt

SEQ ID NO: 425796 - DNA, 120 bp, Artificial Sequence
  ENSG00000151422_99 (sequence is synthesized)
tttgtaaacttagatcattttttaattgtcttttcttttccaatagaccagttaccactcatgtgtctgcagaacctctttattgtattcctataataaatgtaaaatatttgtagcaaa

SEQ ID NO: 425797 - DNA, 120 bp, Artificial Sequence
  ENSG00000151422_100 (sequence is synthesized)
tacgatttgctgtaagagtgaacatagccacagaacaagacgtgcaccattgtgctttctagacagtgaagaaaatttactcatctccattgcctgctggccttggcattcctggacctt

SEQ ID NO: 425798 - DNA, 120 bp, Artificial Sequence
  ENSG00000151422_101 (sequence is synthesized)
ttggtaaattgacttccttgggcccactgtcactatctcttagctaaattttgagatggagcagaaaatgaaatgtcctcattgtaaggatcagctggagtctggtttcggctcccaatc

SEQ ID NO: 425799 - DNA, 120 bp, Artificial Sequence
  ENSG00000151422_102 (sequence is synthesized)
ctttccggctgccgacccgccgagtagtcccttccaggcggcctcagcttatcatcgccggtccggccacttcccggccgcggccaggcgagcctcccaaagtttcctgtgaggccttcg

SEQ ID NO: 425800 - DNA, 120 bp, Artificial Sequence
  ENSG00000151422_103 (sequence is synthesized)
tccgtctccggccccatctcaccacggcagcccaggacacccgctagggaggagcaggttaccgaggcggggagagcggcacaaacgcgcagacctcgggactccacccgggctgatatg

SEQ ID NO: 425801 - DNA, 120 bp, Artificial Sequence
  ENSG00000151422_104 (sequence is synthesized)
acgcatacctatcctactgttactgatcacctagtaataatcttgtagttcacattactcatttttcaccaaattcttttggtgaaggacgcttcagaaacggccatcactgaagagcag

SEQ ID NO: 425802 - DNA, 120 bp, Artificial Sequence
  ENSG00000151422_105 (sequence is synthesized)
attatataaaaataaagaatgtcaccataagaaatgaaagaaaactagacattggcataggcaagtatttcatgaccaaaaactcaaaagcaaatacaataaaaacaaagataaatagct

SEQ ID NO: 425803 - DNA, 120 bp, Artificial Sequence
  ENSG00000151422_106 (sequence is synthesized)
aaggaacagtcagcagagtaaacagagtgggaggaaatcttcacaatctatacacctaacaaaggactaaaatccagaatctacaacgaatcagtaagaaaaaaaactaacaatctcatc

SEQ ID NO: 425804 - DNA, 120 bp, Artificial Sequence
  ENSG00000151422_107 (sequence is synthesized)
cacctaacaaaggactaaaatccagaatctacaacgaatcagtaagaaaaaaaactaacaatctcatcaaaaagtgggctaagcacatgaatagacatgaatagacaattctcaaaagaa

SEQ ID NO: 425805 - DNA, 120 bp, Artificial Sequence
  ENSG00000151422_108 (sequence is synthesized)
atgcaaatcaaaaccacaatgtgatacctccttactcctgcaagaatggccataatacaaaaacaaaacaaaacaaaacagtagatgttggcgtggatatggaaatcagggaacacttct

SEQ ID NO: 425806 - DNA, 120 bp, Artificial Sequence
  ENSG00000151422_109 (sequence is synthesized)
tggcgtggatatggaaatcagggaacacttctacacggctggtgggaatgtaaaatagtacagccactatggaaaacagagtggagattcctttaagagctaaaagtagaactaccattt

SEQ ID NO: 425807 - DNA, 120 bp, Artificial Sequence
  ENSG00000151445_0 (sequence is synthesized)
agaagggctggtccagcggcggcggaggctggcgctgtcctgagagggagggctctgtgcggaagagtcagggcgacccttgggcgctggagtacgcttgggactggggctgcgagtgag

SEQ ID NO: 425808 - DNA, 120 bp, Artificial Sequence
  ENSG00000151445_1 (sequence is synthesized)
caccagcgattggttcggaagcggacatttggttcagaacgagcatttaactctgccagggatccgctgggctctgacgactgcggtagatccatggcttcctggacgttcacccgtaga

SEQ ID NO: 425809 - DNA, 120 bp, Artificial Sequence
  ENSG00000151445_2 (sequence is synthesized)
gtcatcctagcttaactcttgttccctggtctcagttcacaagcctcacctgtatcttcctggctcggaagataattgaaaccaagtctgacttctcaatgaatcggacaaagggtgatg

SEQ ID NO: 425810 - DNA, 120 bp, Artificial Sequence
  ENSG00000151445_3 (sequence is synthesized)
aggaggagtattggaacagctccaagttcaaggcttttacctttgacgatgaagacgatgagctttcacagttaaaggagtccaagcgggcggtgaacagcctccgagacttcgtggatg

SEQ ID NO: 425811 - DNA, 120 bp, Artificial Sequence
  ENSG00000151445_4 (sequence is synthesized)
atgatgacgatgatgacctggagcgagtcagctggagtggggaacctgtgggaagtatctcatggtccatcagagagactgctggtaatagcggctcaacccacgaggggcgtgaacagc

SEQ ID NO: 425812 - DNA, 120 bp, Artificial Sequence
  ENSG00000151445_5 (sequence is synthesized)
taaagagccgaaacagcttctcctcctatgcacaactacccaagcctacttctacctactccctgagcagcttttttagaggtagaactagacctggaagtttccagtccctttctgatg

SEQ ID NO: 425813 - DNA, 120 bp, Artificial Sequence
  ENSG00000151445_6 (sequence is synthesized)
ctctgtcagacacacctgccaaaagctatgctccagagctggggagacccaaaggggagtatagggattacagcaatgactggagccccagtgatacagtgcgacgtctccggaagggca

SEQ ID NO: 425814 - DNA, 120 bp, Artificial Sequence
  ENSG00000151445_7 (sequence is synthesized)
aggtttgctcactagagagattccgctccttacaggacaaactacaactcctagaagaggcagtaagcatgcatgatggaaacgtcattactgcagttctgattttcctgaagaggacac

SEQ ID NO: 425815 - DNA, 120 bp, Artificial Sequence
  ENSG00000151445_8 (sequence is synthesized)
tgagcaaagagatcctcttccgagagctggaggtgcgacaggttgccctgagacatcttattcacttccttaaggaaataggggatcaaaagttgcttttagacctcttcaggttcctag

SEQ ID NO: 425816 - DNA, 120 bp, Artificial Sequence
  ENSG00000151445_9 (sequence is synthesized)
atagaacagaagagcttgcgctatctcattatcgagagcatttgaacattcaggaccctgacaaacgaaaagaatttcttaaaacctgtgttggtttgccattttcagcagaagattccg

SEQ ID NO: 425817 - DNA, 120 bp, Artificial Sequence
  ENSG00000151445_10 (sequence is synthesized)
cacacatacaggaccattacacgctcctggaacgtcagatcattattgaggcaaatgatcgccatctagaatcagcaggacagactgagatcttccgaaagcacccccgcaaagcctcca

SEQ ID NO: 425818 - DNA, 120 bp, Artificial Sequence
  ENSG00000151445_11 (sequence is synthesized)
cctcaacatgccactagtgacaacacttttctactcctgcttctatcactacacagaggctgaggggacattcagcagtcccgtcaacctgaagaagacatttaagatcccagataaaca

SEQ ID NO: 425819 - DNA, 120 bp, Artificial Sequence
  ENSG00000151445_12 (sequence is synthesized)
gtatgtgctgacagccctggctgctcgtgccaagcttcgagcctggaatgatgtagatgccctattcaccacaaagaactggctgggctataccaagaagagagcacccattggcttcca

SEQ ID NO: 425820 - DNA, 120 bp, Artificial Sequence
  ENSG00000151445_13 (sequence is synthesized)
tcgggttgtcgaaattttgcacaagaacaatgcccctgtgcagatattacaggagtatgtcaatctggtggaagatgtggacacgaagttgaacttagccactaagttcaagtgccatga

SEQ ID NO: 425821 - DNA, 120 bp, Artificial Sequence
  ENSG00000151445_14 (sequence is synthesized)
tgtcgtcattgatacctaccgggacctgaaggatcgtcaacagttgctagcatacaggagtaaggtagataaaggatcagcagaggaggagaagattgatgctcttctcagcagctcgca

SEQ ID NO: 425822 - DNA, 120 bp, Artificial Sequence
  ENSG00000151445_15 (sequence is synthesized)
aattcgatggaagaattaagtggcattgactaccttgaagcctgcctcatttcctcctctcctgcctgtgaaagcagagagagctcttctttgggagagctgcggcatcacatcgcttgg

SEQ ID NO: 425823 - DNA, 120 bp, Artificial Sequence
  ENSG00000151445_16 (sequence is synthesized)
gcccattacccatgggcagtgccagctactcttgacacagataacttcagactgatcttctgtccaaggaacatcatctgaggatcgagatctaaagctttgagtcatgagaatgattct

SEQ ID NO: 425824 - DNA, 120 bp, Artificial Sequence
  ENSG00000151445_17 (sequence is synthesized)
ctccacctggtgctcatatgaaggtgggagtgatttctagattgggcccctactgggtaagatctcacttggtctgagaaaagtgactgctccagaaaggaagaggtatgggagtcatag

SEQ ID NO: 425825 - DNA, 120 bp, Artificial Sequence
  ENSG00000151445_18 (sequence is synthesized)
ggtggctactgcattccactcagctaattatgatccaggacttggcgctggacattggcagttctgctctgaatgaagtcagaacagaaccaaaatggcctcaggaaggaatgccagtgt

SEQ ID NO: 425826 - DNA, 120 bp, Artificial Sequence
  ENSG00000151445_19 (sequence is synthesized)
ttcccaagacctcctggagatgcactcacaccagactgcacagacccctccacattatgccacacatggcctagacgttgtgtttcctcagccattttccctctgctgccccagtttact

SEQ ID NO: 425827 - DNA, 120 bp, Artificial Sequence
  ENSG00000151445_20 (sequence is synthesized)
ctgtccaaaaccctaaggttcttctctcacttgaacacagacgaccttgcttgggtgatgagacatcccctttatctcttcctctactgctggccaagacccgtcactttataagaagct

SEQ ID NO: 425828 - DNA, 120 bp, Artificial Sequence
  ENSG00000151445_21 (sequence is synthesized)
cagatgcagcagtgctggagagctctctctttatgcaaaaatctcatttcaccaggagctttcagaagtttcacctgggctaaattcagcagcatttctgttaggatatttagatggagg

SEQ ID NO: 425829 - DNA, 120 bp, Artificial Sequence
  ENSG00000151445_22 (sequence is synthesized)
ttttattttcacacttggattcttgctctgtaccaatatttgcctccttttctgtgactgaactgggtttttctgacatgcctagactcctaataaaggtatttcttccttggtgccttc

SEQ ID NO: 425830 - DNA, 120 bp, Artificial Sequence
  ENSG00000151445_23 (sequence is synthesized)
gattattcccttccgcccccttctctaagctgcacagcctgaatagaagggctggtccagcggcggcggaggctggcgctgtcctgagagggagggctctgtgcggaagaggtgagggtg

SEQ ID NO: 425831 - DNA, 120 bp, Artificial Sequence
  ENSG00000151445_24 (sequence is synthesized)
tcccaagccccttgggtcgcgtatctggctggatccagcctctccgcatcttgatcttttcccctcttctaggaggcatccctacaccctatgactacaggcctgattctcttctttcag

SEQ ID NO: 425832 - DNA, 120 bp, Artificial Sequence
  ENSG00000151445_25 (sequence is synthesized)
attcccttccgcccccttctctaagctgcacagcctgaatagaagggctggtccagcggcggcggaggctggcgctgtcctgagagggagggctctgtgcggaagagatgaatcggacaa

SEQ ID NO: 425833 - DNA, 120 bp, Artificial Sequence
  ENSG00000151445_26 (sequence is synthesized)
acagcctgaatagaagggctggtccagcggcggcggaggctggcgctgtcctgagagggagggctctgtgcggaagaggaggcatccctacaccctatgactacaggcctgattctcttc

SEQ ID NO: 425834 - DNA, 120 bp, Artificial Sequence
  ENSG00000151445_27 (sequence is synthesized)
agactccatcgggttctccccaaaaagcgtcccgaaacccaactgctcatacaaccattcctcacccataggaaaacaaagaacacgtctcattgcttccctggaccctaaatcgccctt

SEQ ID NO: 425835 - DNA, 120 bp, Artificial Sequence
  ENSG00000151445_28 (sequence is synthesized)
gctgagcctcatgggaattgtagtcttgctacgtgactcgctggataaccgcggaaggtctcgcggaaaggagaggaaatgacctagcacggtgcttggggtttctgggggctgtagtca

SEQ ID NO: 425836 - DNA, 120 bp, Artificial Sequence
  ENSG00000151445_29 (sequence is synthesized)
ccagcatgccctgcggtctcgttattcgtgttttctctccgccctacgattattcccttccgcccccttctctaagctgcacagcctgaatagaagggctggtccagcggcggcggaggc

SEQ ID NO: 425837 - DNA, 120 bp, Artificial Sequence
  ENSG00000151445_30 (sequence is synthesized)
tggcgctgtcctgagagggagggctctgtgcggaagagggcgacccttgggcgctggagtacgcttgggactggggctgcgagtgagcaccagcgattggttcggaagcggacatttggt

SEQ ID NO: 425838 - DNA, 120 bp, Artificial Sequence
  ENSG00000151445_31 (sequence is synthesized)
actcctgcttctatcactacacagaggctgaggtacaggcaaaatatggaagattccacaaactctcattgcacaaaaagaagatagttcaaatccagtacttttatgtactctattaat

SEQ ID NO: 425839 - DNA, 120 bp, Artificial Sequence
  ENSG00000151445_32 (sequence is synthesized)
ccttctgcttcttcccaggttcctagatagaacagaagagcttgcgctatctcattatcgagagcatttgaacattcaggaccctgacaaacgaaaagaatttcttaaaacctgtgttgg

SEQ ID NO: 425840 - DNA, 120 bp, Artificial Sequence
  ENSG00000151445_33 (sequence is synthesized)
gcggtcctggttgttaggagttttggggttttggcttctcacaaagaaaatgttgaaggctaagaggataagaaaccagatataggtcaagaaggaagataggtcaagttgatgatacac

SEQ ID NO: 425841 - DNA, 120 bp, Artificial Sequence
  ENSG00000151445_34 (sequence is synthesized)
ccaatacacgttttggctgagaattcaatggccaggtgttaagattaaattttggcagattttcacaatcatggaatgaactcctggaatacaagaataaatctgaaattttaccaaaaa

SEQ ID NO: 425842 - DNA, 120 bp, Artificial Sequence
  ENSG00000151458_0 (sequence is synthesized)
agttactgccctgacggcggcggcggcggcggttggccggtgggggctggggcgagcacgaccgattctgctgggaaagctggaactggcagccgccgggggccaagaggaggatccgga

SEQ ID NO: 425843 - DNA, 120 bp, Artificial Sequence
  ENSG00000151458_1 (sequence is synthesized)
gctgggagcgtgccccgggcccggcggaggaggcggctgcagttggagtggagtcttgggagcgctgctggcagcgacttctcagcgaagcaagtgtctgagactgagagtccctaacag

SEQ ID NO: 425844 - DNA, 120 bp, Artificial Sequence
  ENSG00000151458_2 (sequence is synthesized)
cggcagcggcggccacggcggcggctggggccgagttacttgtggaaattgttgattacccggacgtcttaaaaccaagaaacctgtgaacaggttcattaagaatctgctgtcttgaaa

SEQ ID NO: 425845 - DNA, 120 bp, Artificial Sequence
  ENSG00000151458_3 (sequence is synthesized)
aatgcatattatgaatgctttgaattaagaaggtgttaacagtggttgtcatttctgccacataagagactataatctgaaacagttcctggcagttgcccagatgcctgaaactggcac

SEQ ID NO: 425846 - DNA, 120 bp, Artificial Sequence
  ENSG00000151458_4 (sequence is synthesized)
gatctagtactcttgagtgatcatccttcaacgagaaatacagagctacttacatactgtacctcataccgtataaatgtaatctctctgatgccatttaatgcagtggacctcttttca

SEQ ID NO: 425847 - DNA, 120 bp, Artificial Sequence
  ENSG00000151458_5 (sequence is synthesized)
gaatctaattgtcagatgcagaattaacacttggaatctggagaagcattttgtacaaattgaaagattgggttttttctttagttttccacatgtattgtctcatctctgttcttgaaa

SEQ ID NO: 425848 - DNA, 120 bp, Artificial Sequence
  ENSG00000151458_6 (sequence is synthesized)
catccacaatcacataaactccagttataaccatggagttatgtgactcattaaaatttaggaaaagtgttgctgagctgtggaatcaggcgtttctccctcagttcaacaactaataca

SEQ ID NO: 425849 - DNA, 120 bp, Artificial Sequence
  ENSG00000151458_7 (sequence is synthesized)
tagactgctgatcaagaataaggaaccaaataaagtcatgcacgttctgttgacagaggaactctgtggctgttgaattttactgtaactagttactctgtcttcagagtcaacttaata

SEQ ID NO: 425850 - DNA, 120 bp, Artificial Sequence
  ENSG00000151458_8 (sequence is synthesized)
tacaagttatgtcataatggatggaaagacctgtgttgatgtatccagactctagcaaatgaagataaaaaacccgttatgactaatccttgggaagagaaagtctgcaaaatggctcaa

SEQ ID NO: 425851 - DNA, 120 bp, Artificial Sequence
  ENSG00000151458_9 (sequence is synthesized)
accagtttactgcaagggaagcagttttactgtagggagtgggttttccacaagcttcagcattgcctccaggagaaaagtaactgctgcaatagtgctgtcaatgcaccatcacttgta

SEQ ID NO: 425852 - DNA, 120 bp, Artificial Sequence
  ENSG00000151458_10 (sequence is synthesized)
atgaattctgggaataatgctagtggtgtctctggaaagggagctgcctggggtgtgttgttggtaggagggcctggcagtggcaagacggccctatgtactgaactcttatggccaagt

SEQ ID NO: 425853 - DNA, 120 bp, Artificial Sequence
  ENSG00000151458_11 (sequence is synthesized)
tcacctgcaagtttgcagagaggtttacatcgccaagctttggcctttcatttctgcaaagcccaggactctgatactttgtgtgttggagggtttattagaggtctagtagcccagatc

SEQ ID NO: 425854 - DNA, 120 bp, Artificial Sequence
  ENSG00000151458_12 (sequence is synthesized)
tgccgcagtggactactccaaggatatgaggacaagctaagggatccagcagtccaaagcctcttacagcctggggagtgcgagagaaacccagccgaagcatttaaaaggtgtgttcta

SEQ ID NO: 425855 - DNA, 120 bp, Artificial Sequence
  ENSG00000151458_13 (sequence is synthesized)
ctccctcttctgggaatgaagcctccccagcaaagcctatacctgcttgttgattctgttgatgaagggtgtaacattactgaaggtgaacaaacgtctaccagcttatctgggactgtt

SEQ ID NO: 425856 - DNA, 120 bp, Artificial Sequence
  ENSG00000151458_14 (sequence is synthesized)
gcagcacttttagctggtcaccatgagttctttccaccatggctattgcttctctgttctgcccgaaagcagagtaaggctgttactaaaatgtttactggttttcgaaaaataagttta

SEQ ID NO: 425857 - DNA, 120 bp, Artificial Sequence
  ENSG00000151458_15 (sequence is synthesized)
gatgaccttcggaaggcatatatcgtcaaggatgttcagcagtacattcttcatcgtttagatcaagaagaagctttgcgacaacacctcacaaaagaaactgcagagatgttaaatcaa

SEQ ID NO: 425858 - DNA, 120 bp, Artificial Sequence
  ENSG00000151458_16 (sequence is synthesized)
ctgcacattaaaagcagtggatgctttctttacctagaacgagttttagatggagttgtagaaaattttattatgttaagagaaattcgtgacatcccaggaactctaaatggtttatat

SEQ ID NO: 425859 - DNA, 120 bp, Artificial Sequence
  ENSG00000151458_17 (sequence is synthesized)
ctctggctgtgccaaagactttttgtaagaaaacaatttgcaaaggttcagcctattttgaatgtgattcttgcagcctgccgacctttgaccataacggaattatatcacgcagtatgg

SEQ ID NO: 425860 - DNA, 120 bp, Artificial Sequence
  ENSG00000151458_18 (sequence is synthesized)
accaaaaacatgtcgttaactttggaagattttcaacgcaagttagatatcctctccaaacttcttgttgatggactaggaaatacaaaaatactgtttcattatagttttgccgagtgg

SEQ ID NO: 425861 - DNA, 120 bp, Artificial Sequence
  ENSG00000151458_19 (sequence is synthesized)
cttctggatgtgaaacactgtactcagaagtatttatgtaatgcagcagaaggacacagaatgttggctatgagttatacctgtcaagccaagaatttaacaccattggaagcacaagaa

SEQ ID NO: 425862 - DNA, 120 bp, Artificial Sequence
  ENSG00000151458_20 (sequence is synthesized)
tttgcattgcacttaattaactcaaacttacaattagagacagcggagttagctctgtggatgatatggaatggtacacctgtcagagattccctttctactttgatacccaaggaacaa

SEQ ID NO: 425863 - DNA, 120 bp, Artificial Sequence
  ENSG00000151458_21 (sequence is synthesized)
gaagtgctacagctgttggttaaagctggggctcatgtcaacagtgaagacgatcgcacatcatgcatagttcgacaagccttagaaagagaggattccattcggacattattagataat

SEQ ID NO: 425864 - DNA, 120 bp, Artificial Sequence
  ENSG00000151458_22 (sequence is synthesized)
ggagcttcagtaaatcagtgtgattcaaatgggagaacattattggctaatgctgcatatagtggcagtcttgatgtagtcaatttacttgtctctaggggagcagatttagagatagaa

SEQ ID NO: 425865 - DNA, 120 bp, Artificial Sequence
  ENSG00000151458_23 (sequence is synthesized)
gatgctcatggacatacaccactcactctagcggctagacagggacataccaaggtggttaattgtttgattgggtgtggagcaaatattaatcatactgatcaagatggttggacagca

SEQ ID NO: 425866 - DNA, 120 bp, Artificial Sequence
  ENSG00000151458_24 (sequence is synthesized)
ttaagatctgctgcttggggtggccatactgaggtagtttctgcactactttatgctggcgtaaaagtggattgtgcagatgctgatagccgaacagctttgagagcagcagcatgggga

SEQ ID NO: 425867 - DNA, 120 bp, Artificial Sequence
  ENSG00000151458_25 (sequence is synthesized)
ggacacgaggatattgtactgaatttgctacaacatggcgctgaagtgaacaaagctgataatgaaggtagaactgctttgatagcagcagcatacatgggacatagagagattgtggaa

SEQ ID NO: 425868 - DNA, 120 bp, Artificial Sequence
  ENSG00000151458_26 (sequence is synthesized)
cacctactggaccatggagcagaagtaaatcatgaggatgttgatggcaggactgcactctctgtagctgcactttgtgtgcctgcaagtaaagggcacgcatcagttgttagcctttta

SEQ ID NO: 425869 - DNA, 120 bp, Artificial Sequence
  ENSG00000151458_27 (sequence is synthesized)
attgatcgaggtgctgaagtagatcattgtgataaagatggcatgactccactgctggtagctgcctatgaaggacatgttgatgtggttgacttgcttctagaagggggagcagatgta

SEQ ID NO: 425870 - DNA, 120 bp, Artificial Sequence
  ENSG00000151458_28 (sequence is synthesized)
gatcacacagataacaatggccgtacacccctcttagcagcagcgtctatgggtcatgcatcagttgtaaatacacttttgttttggggtgcagctgtggatagtattgatagtgaaggt

SEQ ID NO: 425871 - DNA, 120 bp, Artificial Sequence
  ENSG00000151458_29 (sequence is synthesized)
aggacagtcctcagtatagcttcagcacaaggaaatgttgaggtggtacgtactctactggatagagggttagatgaaaatcacagagatgatgctggatggacacctttgcacatggca

SEQ ID NO: 425872 - DNA, 120 bp, Artificial Sequence
  ENSG00000151458_30 (sequence is synthesized)
gcttttgaagggcacagattgatatgtgaagcacttattgaacaaggtgctagaacaaatgagattgacaatgatggacgaatccctttcatattagcttcacaagagggtcattatgat

SEQ ID NO: 425873 - DNA, 120 bp, Artificial Sequence
  ENSG00000151458_31 (sequence is synthesized)
tgtgttcaaatattactggaaaacaaatccaacattgatcaaagaggttatgatggaagaaatgcactgcgggttgctgcattagaagggcacagggacattgttgaattgctttttagc

SEQ ID NO: 425874 - DNA, 120 bp, Artificial Sequence
  ENSG00000151458_32 (sequence is synthesized)
catggtgctgatgttaactgcaaagatgctgatggtcggcctacactttatatcttggccttagaaaatcagcttacaatggccgaatattttttagaaaatggtgcaaacgtagaagca

SEQ ID NO: 425875 - DNA, 120 bp, Artificial Sequence
  ENSG00000151458_33 (sequence is synthesized)
agtgatgctgaaggaaggacagcacttcatgtgtcttgttggcaaggccatatggaaatggtgcaggtcctgatagcataccatgctgacgtcaatgctgcagacaatgaaaagcgctct

SEQ ID NO: 425876 - DNA, 120 bp, Artificial Sequence
  ENSG00000151458_34 (sequence is synthesized)
gctttgcagtctgcagcctggcagggccatgtaaaagtggttcagcttctgattgagcatggtgctgtagttgaccatacatgtaaccaaggtgcaactgcactctgtattgcagcccag

SEQ ID NO: 425877 - DNA, 120 bp, Artificial Sequence
  ENSG00000151458_35 (sequence is synthesized)
gaagggcacattgatgttgttcaggtcttattagagcatggtgctgatccaaaccatgctgatcaatttggacgcactgctatgcgtgttgcagccaaaaatggacattctcagataatt

SEQ ID NO: 425878 - DNA, 120 bp, Artificial Sequence
  ENSG00000151458_36 (sequence is synthesized)
ctgttccccatctcctgttcacacaatggagcaaaaacctctacagtcattgtcttcaaaagtgcagtcattaacaattaaatcaaatagctctggtagtactggtggaggggatatgca

SEQ ID NO: 425879 - DNA, 120 bp, Artificial Sequence
  ENSG00000151458_37 (sequence is synthesized)
gccttcgttacgtggtttacctaatgggcctactcatgcttttagttctccttcagaatctccagattctacagttgaccggcagaagtcatcactgtcaaataattccctgaaaagctc

SEQ ID NO: 425880 - DNA, 120 bp, Artificial Sequence
  ENSG00000151458_38 (sequence is synthesized)
aaaaaattcatctttgagaactacttcatctacagcaacggctcaaacagtgccaattgatagctttcataacttgtcatttacagaacaaattcagcagcattcattgccacgcagtag

SEQ ID NO: 425881 - DNA, 120 bp, Artificial Sequence
  ENSG00000151458_39 (sequence is synthesized)
aagtcgacagtcaattgtttccccatcttccacaacacagtccttaggacagagtcataattcaccaagtagtgaatttgagtggagtcaagtaaagcccagtttgaagtcaactaaagc

SEQ ID NO: 425882 - DNA, 120 bp, Artificial Sequence
  ENSG00000151458_40 (sequence is synthesized)
aagtaaaggggggaaatcagaaaattctgccaagtctggatcagctgggaaaaaagcgaaacaaagtaattcttcacagccaaaggttttagaatatgaaatgactcagtttgatagaag

SEQ ID NO: 425883 - DNA, 120 bp, Artificial Sequence
  ENSG00000151458_41 (sequence is synthesized)
aggacctatagccaaatccgggactgctgcaccacctaaacaaatgccagcagaatctcaatgcaaaattatgataccttcagctcagcaggaaattggtcgatctcaacagcagtttct

SEQ ID NO: 425884 - DNA, 120 bp, Artificial Sequence
  ENSG00000151458_42 (sequence is synthesized)
tattcaccaacaaagtggggaacagaagaagagaaatggaataatgacaaatccaaattatcatcttcagagcaaccaggtttttcttggtagggtttcagtcccacgaacaatgcaaga

SEQ ID NO: 425885 - DNA, 120 bp, Artificial Sequence
  ENSG00000151458_43 (sequence is synthesized)
tagagggcatcaggaagtgttggagggatacccttcctcagagacagaattaagccttaaacaagctctgaagcttcagattgaaggttctgaccctagcttcaactataaaaaggaaac

SEQ ID NO: 425886 - DNA, 120 bp, Artificial Sequence
  ENSG00000151458_44 (sequence is synthesized)
accattataaaagtttcctattctgtgaaacagaagacattgtgatggagtggttcttcagctactggatggaaacatatgcctgttgatttgctgaaaaaacaaaaaaaatgaagaatg

SEQ ID NO: 425887 - DNA, 120 bp, Artificial Sequence
  ENSG00000151458_45 (sequence is synthesized)
tgatctctgcagtacagttaccttaattactgtaatgtgcctaaatagtaaggctgccttctcaatgtaaccctctgtgcttaaaaaatttcattttgtgtgctttgtattcactacaca

SEQ ID NO: 425888 - DNA, 120 bp, Artificial Sequence
  ENSG00000151458_46 (sequence is synthesized)
ggaataagcactttttaaaaatgcagatacatactgcagttccctgataaaagctgaaaagaaaatttgagtattttaagttaagatgtgataaaaaatgtgcatgtgccataatcaaat

SEQ ID NO: 425889 - DNA, 120 bp, Artificial Sequence
  ENSG00000151458_47 (sequence is synthesized)
atatatgaaaaggcagtgttccttgtatttatttttttttctttttgtggcaaaagaaacttaaacatactgtttcagtcacattgcattgtagtgtatggcctgtttcttgtatcttta

SEQ ID NO: 425890 - DNA, 120 bp, Artificial Sequence
  ENSG00000151458_48 (sequence is synthesized)
aagacgttgctcaataaaacaaatcttgcaactgttctatgttcactacaccttcagcattggataaaaatcattttctatataaatatcacattgaaatgaaaaaatgatttcttggca

SEQ ID NO: 425891 - DNA, 120 bp, Artificial Sequence
  ENSG00000151458_49 (sequence is synthesized)
gtttaaaaaaaatattttatagtagtttagggagctgctttaagtagtttaaatctggattttcccagtagaattcttctcatctctggctaaacatgtcagaacaaacaaccaaccagt

SEQ ID NO: 425892 - DNA, 120 bp, Artificial Sequence
  ENSG00000151458_50 (sequence is synthesized)
ctgtaggcagaacaaagtcctatttcatccgctgggatacaatttcatcttccattcactttgtcattccacctctaagaagacagactatcattcctgaggcatgaaaattctcaggga

SEQ ID NO: 425893 - DNA, 120 bp, Artificial Sequence
  ENSG00000151458_51 (sequence is synthesized)
caaagccatgcctcagtcacatgtgtgtgcagagagaaatgcacctgtctatctaagggtagatttttgatccctgaataattcattgactaaactgacctcttcctcctggctaaataa

SEQ ID NO: 425894 - DNA, 120 bp, Artificial Sequence
  ENSG00000151458_52 (sequence is synthesized)
attaattttgctggcttctctctcagcggtttctattttgtaaattgctgcatgaccaaaatagccccactcaaaatcaattggattaattttaatggtttggttggatgaatattctgg

SEQ ID NO: 425895 - DNA, 120 bp, Artificial Sequence
  ENSG00000151458_53 (sequence is synthesized)
atgaatataaaatgtgctgcccttcacagatgacaccactcccctgtcaatcatagcacatgtgtactttttattgttacttaatagtgatggatttgcacttttctatcctcatactct

SEQ ID NO: 425896 - DNA, 120 bp, Artificial Sequence
  ENSG00000151458_54 (sequence is synthesized)
ttcctgttttcttctttgtacaattgcatgcaggagggctggatgccagggttaagagagaaattcatgacaaggaaggtaaaattggttcaaatgagcatgtgtcccacagccttagtc

SEQ ID NO: 425897 - DNA, 120 bp, Artificial Sequence
  ENSG00000151458_55 (sequence is synthesized)
tccttactcttaaatcagtggagctgtagcttagatgggtcgtttatatgtctggaaaagttgtcataacagtttagaagccaaggttgtggatttgatcttagaatgggcctgttaatc

SEQ ID NO: 425898 - DNA, 120 bp, Artificial Sequence
  ENSG00000151458_56 (sequence is synthesized)
ttatagaacccagaaattctgttcttttcatgtactgttgatgaggaatgaggaaagagaatttggagattcagcacaaaaccattgctacttctagaacaaaatctttagaatatgtcc

SEQ ID NO: 425899 - DNA, 120 bp, Artificial Sequence
  ENSG00000151458_57 (sequence is synthesized)
taataacaaaggtcagtaatgtcatcttcatatatgaaggacacatgtgatacattgttcgtggaaatagaaatgtataattatgataaatgtttcacttgaatcttattgtaaggcttt

SEQ ID NO: 425900 - DNA, 120 bp, Artificial Sequence
  ENSG00000151458_58 (sequence is synthesized)
tcttgcttttattttttaaagtcagcaaaactcattttgtctgtcatctataagtcatagtgaggactacgagataagttgataagttcaattgatattaaggtgacatggcaatattaa

SEQ ID NO: 425901 - DNA, 120 bp, Artificial Sequence
  ENSG00000151458_59 (sequence is synthesized)
taactcaaatgtgaatgtttcaagtattgaattcttgtccctatgggacatttattaaataaaattaatgggactcttgcaaagtagccttaaaagtgttaatgagtctattaataaata

SEQ ID NO: 425902 - DNA, 120 bp, Artificial Sequence
  ENSG00000151458_60 (sequence is synthesized)
tgaacacatactattattagaaccaactttactcatatctcaaatacagtacatttacattactgtagaggatgaagctctaatttctattacatgtaattttctttagaaagagaaccc

SEQ ID NO: 425903 - DNA, 120 bp, Artificial Sequence
  ENSG00000151458_61 (sequence is synthesized)
tgaaagctgccagtttttctattaactttgaattattgaaattgtatttatttaattttattgtttttacaaaattgcaccttgtgtccaaagggcgaagatatgacattgcataaggga

SEQ ID NO: 425904 - DNA, 120 bp, Artificial Sequence
  ENSG00000151458_62 (sequence is synthesized)
tttatgtttttcaaagagctaactgttttcatatccatactatatacacttgaagcaattggtaggaagagaacctattggaaaaatacgattttcaaaagtaagtattcctcgggatgt

SEQ ID NO: 425905 - DNA, 120 bp, Artificial Sequence
  ENSG00000151458_63 (sequence is synthesized)
ttttatataaattatgttttggaatagaacataaatgactttgagttaggataaggatgataggatgggtgctggagatgccctgccttgcttatttgtttctgtgggggatttaatact

SEQ ID NO: 425906 - DNA, 120 bp, Artificial Sequence
  ENSG00000151458_64 (sequence is synthesized)
ataaatgaaaatggcttctgctccattaaaaagtaaaaattgtcctccaaatataaaactccttaatagatatttttgaaattaaaatctttaaattttataaatcagctgttgccacta

SEQ ID NO: 425907 - DNA, 120 bp, Artificial Sequence
  ENSG00000151458_65 (sequence is synthesized)
cacaactatgatggcatgtgcttataacatttttataacattccgtctgtgtctattccctaaatatcatgagtttataataaggaaagtgataaaaatacagtaatgaaataaaaatct

SEQ ID NO: 425908 - DNA, 120 bp, Artificial Sequence
  ENSG00000151458_66 (sequence is synthesized)
gaatgtttctaagaaaggttttggaaggaaaaatgacctgaaatcagtgcgtactgcaaagtacagccaataatttttgttctttgttttcacccccaccctcactggaattctcaccaa

SEQ ID NO: 425909 - DNA, 120 bp, Artificial Sequence
  ENSG00000151458_67 (sequence is synthesized)
aaatagtttgatacttaaaaaacagaagtaaatacttttctcaatattgttttggctatgcaaatatttgttttgcttaatgtcctccatttacacttctcagcaaatgtagttgcaaac

SEQ ID NO: 425910 - DNA, 120 bp, Artificial Sequence
  ENSG00000151458_68 (sequence is synthesized)
aaatgctttctttttatttttcccttggtttgaggtatgtaaatagccaaaaatgtacattgaatttcacattgtaaaagttttattttatcccttgtatgatattactcaaaaaatccc

SEQ ID NO: 425911 - DNA, 120 bp, Artificial Sequence
  ENSG00000151458_69 (sequence is synthesized)
tgtgtatatgaaagtgcataataaatatatttgctttacagagaagatcttgttttaattttgtccttgaaccagtagaacatgcatgatatgcatatagcataaacaactgttagttgt

SEQ ID NO: 425912 - DNA, 120 bp, Artificial Sequence
  ENSG00000151458_70 (sequence is synthesized)
tttaagttattatcttaaataaatcctgagcaaatgaatttggaaacattttgcaaagaagaaagtgaaatataacactgtccaaaggaaggtagaaaaacaaagatttactgtttatgt

SEQ ID NO: 425913 - DNA, 120 bp, Artificial Sequence
  ENSG00000151458_71 (sequence is synthesized)
cttcctaagcctttttaaagacttaatgttcttttcccccccgtgactgattatatactatatcacaccatgtcaggttttgtgcctctgagaattgcagtaatccaataacttttgtat

SEQ ID NO: 425914 - DNA, 120 bp, Artificial Sequence
  ENSG00000151458_72 (sequence is synthesized)
atgtgtgctccttgatcatcagaatattatggccatcttatggcggatattttgggagtttattgcaaacatggtcattcattttctaaataaaatttgtgtgtttcttcactcagtaaa

SEQ ID NO: 425915 - DNA, 120 bp, Artificial Sequence
  ENSG00000151461_0 (sequence is synthesized)
gctgaaatactgacattgaatattatatgaaatagtgaactgccatctttcatggttgtcaaatgctagggttaaagctgactcaaaatgttcacagatatattctgaagtatttacaat

SEQ ID NO: 425916 - DNA, 120 bp, Artificial Sequence
  ENSG00000151461_1 (sequence is synthesized)
taaatgacatattgttttggagttgatagtggctgaatctgagtgatgggtacgtggaggttccttatattatgctctctacttttgtctgggcttggatttttccttataaaaagtaaa

SEQ ID NO: 425917 - DNA, 120 bp, Artificial Sequence
  ENSG00000151461_2 (sequence is synthesized)
aaacaagtacttagacataggcctaactaataatgataggatgtggaatgtgatgaataacttattttgtaacagaaatagtattcattttacctgcctttatttactcttttacaattg

SEQ ID NO: 425918 - DNA, 120 bp, Artificial Sequence
  ENSG00000151461_3 (sequence is synthesized)
ccaagttgcattaatatgttctgtttaaaaaaatagtgtgatatcattttaaaaagtcactgcatctatggtactgacattctttccctcttacagattgtcctgggtcacataatgcca

SEQ ID NO: 425919 - DNA, 120 bp, Artificial Sequence
  ENSG00000151461_4 (sequence is synthesized)
gctgagcgtaaaaagccagcaagtatggaagaaaaagactctttaccaaacaacaaggaaaaagactgcagtgaaaggcggacagtgagcagcaaggagaggccaaaagacgatatcaag

SEQ ID NO: 425920 - DNA, 120 bp, Artificial Sequence
  ENSG00000151461_5 (sequence is synthesized)
ctcactgccaagaaggaggtcagcaaggcccctgaagacaagaagaagagactggaagatgataagagaaaaaaggaagacaaggaacgcaagaaaaaagacgaagaaaaggtgaaggca

SEQ ID NO: 425921 - DNA, 120 bp, Artificial Sequence
  ENSG00000151461_6 (sequence is synthesized)
gaggaagaatcaaagaaaaaagaagaggaagaaaaaaagaaacatcaagaggaagagagaaagaagcaagaagagcaggccaaacgtcagcaagaagaagaagcagctgctcagatgaaa

SEQ ID NO: 425922 - DNA, 120 bp, Artificial Sequence
  ENSG00000151461_7 (sequence is synthesized)
gaaaaagaagaatccattcagcttcatcaggaagcttgggaacgacatcatttaagaaaggaacttcgtagcaaaaaccaaaatgctccggacagccgaccagaggaaaacttcttcagc

SEQ ID NO: 425923 - DNA, 120 bp, Artificial Sequence
  ENSG00000151461_8 (sequence is synthesized)
cgcctcgactcaagtttgaagaaaaatactgcttttgtcaagaaactaaaaactattacagaacaacagagagactccttgtcccatgattttaatggcctaaatttaagcaaatacatt

SEQ ID NO: 425924 - DNA, 120 bp, Artificial Sequence
  ENSG00000151461_9 (sequence is synthesized)
gcagaagctgtagcttccatcgtggaagcaaaactaaaaatctctgatgtgaactgtgctgtgcacctctgctctctctttcaccagcgttatgctgactttgccccatcacttcttcag

SEQ ID NO: 425925 - DNA, 120 bp, Artificial Sequence
  ENSG00000151461_10 (sequence is synthesized)
gtctggaaaaaacattttgaagcaaggaaagaggagaaaacacctaacatcaccaagttaagaactgatttgcgttttattgcagaattgacaatagttgggattttcactgacaaggaa

SEQ ID NO: 425926 - DNA, 120 bp, Artificial Sequence
  ENSG00000151461_11 (sequence is synthesized)
ggtctttccttaatctatgaacagctaaaaaatattattaatgctgatcgggagtcccacactcatgtctctgtagtgattagtttctgtcgacattgtggagatgatattgctggactt

SEQ ID NO: 425927 - DNA, 120 bp, Artificial Sequence
  ENSG00000151461_12 (sequence is synthesized)
gtaccaaggaaagtaaagagtgctgcagagaagtttaatttgagttttcctcctagtgagataattagtccagagaaacaacagcccttccagaatcttttaaaagagtactttacgtct

SEQ ID NO: 425928 - DNA, 120 bp, Artificial Sequence
  ENSG00000151461_13 (sequence is synthesized)
ttgaccaaacacctgaaaagggaccacagggagctccagaatactgagagacaaaacaggcgcattctacattctaaaggggagctcagtgaagatagacataaacagtatgaggaattt

SEQ ID NO: 425929 - DNA, 120 bp, Artificial Sequence
  ENSG00000151461_14 (sequence is synthesized)
gctatgtcttaccagaagctgctggcaaattctcaatccttagcagaccttttggatgaaaatatgccagatcttcctcaagacaaaccaacaccagaagaacatgggcctggaattgat

SEQ ID NO: 425930 - DNA, 120 bp, Artificial Sequence
  ENSG00000151461_15 (sequence is synthesized)
atattcacacctggtaaacctggagaatatgacttggaaggtggtatatgggaagatgaagatgctcggaatttttatgagaacctcattgatttgaaggcttttgtcccagccatcttg

SEQ ID NO: 425931 - DNA, 120 bp, Artificial Sequence
  ENSG00000151461_16 (sequence is synthesized)
tttaaagacaatgaaaaaagttgtcagaataaagagtccaacaaagatgataccaaagaggcaaaagaatctaaggagaataaggaggtatcaagtcccgatgatttggaacttgagttg

SEQ ID NO: 425932 - DNA, 120 bp, Artificial Sequence
  ENSG00000151461_17 (sequence is synthesized)
gagaatctagaaattaatgatgacaccttagaattagagggtggagatgaagctgaagatcttacaaagaaacttcttgatgaacaagaacaagaagatgaggaagccagcactggatct

SEQ ID NO: 425933 - DNA, 120 bp, Artificial Sequence
  ENSG00000151461_18 (sequence is synthesized)
catctcaagctcatagtagatgctttcctacagcagttacccaactgtgtcaaccgagatctgatagacaaggcagcaatggatttttgcatgaacatgaacacaaaagcaaacaggaag

SEQ ID NO: 425934 - DNA, 120 bp, Artificial Sequence
  ENSG00000151461_19 (sequence is synthesized)
aagttggtacgggcactcttcatagttcctagacaaaggttggatttgctaccattttatgcaagattggttgctacattgcatccctgcatgtctgatgtagcagaggatctttgttcc

SEQ ID NO: 425935 - DNA, 120 bp, Artificial Sequence
  ENSG00000151461_20 (sequence is synthesized)
atgctgaggggggatttcagatttcatgtacggaaaaaggaccagatcaatattgaaacaaagaataaaactgttcgttttataggagaactaactaagtttaagatgttcaccaaaaat

SEQ ID NO: 425936 - DNA, 120 bp, Artificial Sequence
  ENSG00000151461_21 (sequence is synthesized)
gacacactgcattgtttaaagatgcttctgtcagacttctctcatcaccatattgaaatggcatgcaccctgctggagacatgtggacggtttcttttcagatctccagaatctcacctg

SEQ ID NO: 425937 - DNA, 120 bp, Artificial Sequence
  ENSG00000151461_22 (sequence is synthesized)
aggaccagtgtacttttggagcaaatgatgagaaagaagcaagcaatgcatcttgatgcgagatacgtcacaatggtagagaatgcatattactactgcaacccacctccagctgaaaaa

SEQ ID NO: 425938 - DNA, 120 bp, Artificial Sequence
  ENSG00000151461_23 (sequence is synthesized)
tgtacaaggatctctctaaggttaccaccgagaaggttttgagacagatgcgaaagctgccctggcaggaccaagaagtgaaagactatgttatttgttgtatgataaacatctggaatg

SEQ ID NO: 425939 - DNA, 120 bp, Artificial Sequence
  ENSG00000151461_24 (sequence is synthesized)
tgaaatataatagtattcattgtgtagccaacctcttagcaggactagtgctctaccaagaggatgttgggatccacgttgtggatggagtgttagaagatattcgattaggaatggagg

SEQ ID NO: 425940 - DNA, 120 bp, Artificial Sequence
  ENSG00000151461_25 (sequence is synthesized)
ttaatcaacctaaatttaatcagaggcgcatcagcagtgccaagttcttaggagaactttacaattaccgaatggtggaatcagctgttattttcagaactctgtattcttttacctcat

SEQ ID NO: 425941 - DNA, 120 bp, Artificial Sequence
  ENSG00000151461_26 (sequence is synthesized)
ttggtgttaatcctgatggctctccaagttccctggacccacctgagcatcttttcagaattagactcgtatgcactattctggacacatgtggccagtactttgacagaggttccagta

SEQ ID NO: 425942 - DNA, 120 bp, Artificial Sequence
  ENSG00000151461_27 (sequence is synthesized)
aacgaaaacttgattgtttccttgtatattttcagcgttatgtttggtggaagaaaagtttggaggtttggacaaaagaccatccatttcctattgatatagattacatgatcagtgata

SEQ ID NO: 425943 - DNA, 120 bp, Artificial Sequence
  ENSG00000151461_28 (sequence is synthesized)
cactagaactgctaagaccaaagatcaaactctgtaattctctggaagaatccatcaggcaggtacaagacttggaacgagaattcttaataaaactaggcctagtaaatgacaaagact

SEQ ID NO: 425944 - DNA, 120 bp, Artificial Sequence
  ENSG00000151461_29 (sequence is synthesized)
caaaagattctatgacagaaggagaaaatcttgaagaggatgaagaagaagaagaaggtggggctgaaacagaagaacaatctggaaatgaaagtgaagtaaatgagccagaagaagagg

SEQ ID NO: 425945 - DNA, 120 bp, Artificial Sequence
  ENSG00000151461_30 (sequence is synthesized)
agggttctgataatgatgatgatgagggagaagaagaggaggaagagaatacagattaccttacagattccaataaggaaaatgaaaccgatgaagagaatactgaggtaatgattaaag

SEQ ID NO: 425946 - DNA, 120 bp, Artificial Sequence
  ENSG00000151461_31 (sequence is synthesized)
gcggtggacttaagcatgtaccttgtgtagaagatgaggacttcattcaagctctggataaaatgatgctagaaaatctacagcaacgaagtggtgaatctgttaaagtgcaccaactag

SEQ ID NO: 425947 - DNA, 120 bp, Artificial Sequence
  ENSG00000151461_32 (sequence is synthesized)
atgttgccattcctttgcatctcaaaagccagctgaggaaagggcccccactgggaggtggggaaggagaggctgagtctgcagacacaatgccgtttgtcatgttaacaagaaaaggca

SEQ ID NO: 425948 - DNA, 120 bp, Artificial Sequence
  ENSG00000151461_33 (sequence is synthesized)
ataaacagcagtttaagatccttaatgtacccatgtcctctcaacttgctgcaaatcactggaaccagcaacaggcagaacaagaagagaggatgagaatgaaaaagctcacactagata

SEQ ID NO: 425949 - DNA, 120 bp, Artificial Sequence
  ENSG00000151461_34 (sequence is synthesized)
tcaatgaacggcaagaacaagaagattatcaagaaatgttgcagtctcttgcacagcgcccagctccagcaaacaccaatcgtgagaggcggcctcgctaccaacatccgaagggagcac

SEQ ID NO: 425950 - DNA, 120 bp, Artificial Sequence
  ENSG00000151461_35 (sequence is synthesized)
ctaatgcagatctaatctttaagactggtgggaggagacgttgatccagcagcacgtgtcatttcattaggtcctgtatctgatgttgtggttagtggagtcctccagcaattgaatgag

SEQ ID NO: 425951 - DNA, 120 bp, Artificial Sequence
  ENSG00000151461_36 (sequence is synthesized)
agcagtggacacatctcagcaggtcggtctagagagttgcgaatctaaacctgggacaggctggggccaggaggcagaaacaccagcctctgccaacaccggaacaagccgacgcttcca

SEQ ID NO: 425952 - DNA, 120 bp, Artificial Sequence
  ENSG00000151461_37 (sequence is synthesized)
gacaaggcggaaaaggccttttgtaatggaaatctcgcgagggttaatcttctcttgagaatggcagtcaagaaatgagatggttcacttgactactgagcagttacaccaaggagagcg

SEQ ID NO: 425953 - DNA, 120 bp, Artificial Sequence
  ENSG00000151461_38 (sequence is synthesized)
tgaaggagatgattgagccagagaagaaacgggttgtgatggtaatggtgtgggggaaatgaacttgagctttaaacttgatttgagtttcagtgtctctgaattgaacatcccacgttg

SEQ ID NO: 425954 - DNA, 120 bp, Artificial Sequence
  ENSG00000151461_39 (sequence is synthesized)
gaagaagatacatttgggggctccaggactacagtagaaaagtatagagcaagcaggaaaatcttctagtaaaacttacatgcaggacaacaaaatgatgaaagatatccaaataccaga

SEQ ID NO: 425955 - DNA, 120 bp, Artificial Sequence
  ENSG00000151461_40 (sequence is synthesized)
taatccaccaggaaggcttttgtttaggaatttgtttcaagaggaacaagggatgagggagaaaaatccgttttatccatcagagtcagtgctataaaattgcctattaaggtaaaagaa

SEQ ID NO: 425956 - DNA, 120 bp, Artificial Sequence
  ENSG00000151461_41 (sequence is synthesized)
aaatgtggagactattttactatacagagagcattaattcagatggcttagaaaagtgataccagcccaagaacagggatctaggtgagcccattgtaagtatcattgaaaacaaaacat

SEQ ID NO: 425957 - DNA, 120 bp, Artificial Sequence
  ENSG00000151461_42 (sequence is synthesized)
gcccgtcaacatgtcacagaaaacgaacgaaggacaacaagaagtggatgagaatattttgttgaccttcatgggtttacagcctctgtctctaaacaaagtatggaaacaagtagagct

SEQ ID NO: 425958 - DNA, 120 bp, Artificial Sequence
  ENSG00000151461_43 (sequence is synthesized)
ttttgttttgtttttttttttgttttcccccactaaatagaaatgagggtccttagtctgtttctgacaatctgttaatttcttaggacagctgtctttggtttgctttccagcaggcgt

SEQ ID NO: 425959 - DNA, 120 bp, Artificial Sequence
  ENSG00000151461_44 (sequence is synthesized)
gctttccagcaggcgtagtatatttagtcggagagcacatctgtatgcgacaacttgattacatctttttttctagctattttgcattttttcttttaccatgtttcagtttctgcatgt

SEQ ID NO: 425960 - DNA, 120 bp, Artificial Sequence
  ENSG00000151461_45 (sequence is synthesized)
agatttaaataaaaaacaaaacttgtaaagttgtaacatttcacatggaaatgctgcccaatcttcaccagcttcagaaatctgacctttgccgatgctgcaataaagtgttgtaattta

SEQ ID NO: 425961 - DNA, 120 bp, Artificial Sequence
  ENSG00000151461_46 (sequence is synthesized)
gctggtagtggctaccttacgtattgccagtctgaaaaattcgctcttctcatcgactggggaatttgaaagagctgttaagtgaatggcactcatatgagcctttgccccggacccgcc

SEQ ID NO: 425962 - DNA, 120 bp, Artificial Sequence
  ENSG00000151461_47 (sequence is synthesized)
accccagagtcaagctgagggcatcggcatgccgcagggaagacgatcaggactgtttttaatcgggcagtcgcgcggatggccttttccctctcgcctccttccgccccgcccccactc

SEQ ID NO: 425963 - DNA, 120 bp, Artificial Sequence
  ENSG00000151465_0 (sequence is synthesized)
agagttccgggagggtgcaggcaggagagggaaaggcagcagcggcggcagctggaggatgaagaaggagcatgtgcttcactgccagttctccgcgtggtacccgttcttccgaggcgt

SEQ ID NO: 425964 - DNA, 120 bp, Artificial Sequence
  ENSG00000151465_1 (sequence is synthesized)
taccatcaagagtgtcattcttccacttcctcagaatgtgaaggattatttactcgatgatggaactctggtggtttcaggaagggatgatccaccaacacattctcagccagacagtga

SEQ ID NO: 425965 - DNA, 120 bp, Artificial Sequence
  ENSG00000151465_2 (sequence is synthesized)
tgatgaagcagaagaaatacagtggtctgatgatgagaacacagccacgcttacggcaccagaatttcctgagtttgccactaaagtccaggaagctatcaattccctcgggggcagtgt

SEQ ID NO: 425966 - DNA, 120 bp, Artificial Sequence
  ENSG00000151465_3 (sequence is synthesized)
ctttcctaagcttaattggagtgccccaagggatgcgtattggatagcaatgaatagttctctgaaatgtaaaaccctcagcgacatctttctgcttttcaagagttccgatttcatcac

SEQ ID NO: 425967 - DNA, 120 bp, Artificial Sequence
  ENSG00000151465_4 (sequence is synthesized)
tcgtgacttcactcagccgtttattcattgtactgatgattctccagatccatgtatagaatatgagctcgttctccgaaaatggtgtgaattgattcctggggctgagtttcgatgttt

SEQ ID NO: 425968 - DNA, 120 bp, Artificial Sequence
  ENSG00000151465_5 (sequence is synthesized)
gtcaaggaaaacaagcttattggtatttctcaaagagactacacacaatactatgatcatatttctaaacaaaaggaagaaattcgcagatgcatacaagactttttcaagaaacacata

SEQ ID NO: 425969 - DNA, 120 bp, Artificial Sequence
  ENSG00000151465_6 (sequence is synthesized)
cagtacaaattcttagatgaagactttgtgttcgatatatacagagacagtagggggaaggtgtggctcattgactttaatccatttggtgaagtcacagattcactgctgttcacctgg

SEQ ID NO: 425970 - DNA, 120 bp, Artificial Sequence
  ENSG00000151465_7 (sequence is synthesized)
gaagaactgatatctgagaacaacttaaacggcgattttagtgaagttgacgctcaagagcaggattccccagctttccgttgcacaaacagtgaagtgacagtccagcccagcccctat

SEQ ID NO: 425971 - DNA, 120 bp, Artificial Sequence
  ENSG00000151465_8 (sequence is synthesized)
ttgagttaccggctacccaaggactttgtagacctctctactggggaggacgctcacaagctaatagacttccttaagctgaagagaaatcagcaggaggacgactgatgagcgtactgg

SEQ ID NO: 425972 - DNA, 120 bp, Artificial Sequence
  ENSG00000151465_9 (sequence is synthesized)
aactggagaagaggaggccccgccccaccgctccgggagctgctcatcagccgcaacttcctgccgaccctgatgcgggtgggccgagcagtgtggacatcagccactttttatattcat

SEQ ID NO: 425973 - DNA, 120 bp, Artificial Sequence
  ENSG00000151465_10 (sequence is synthesized)
gtacattcacctggggaaaaaaacggagggactttgctacttgtaaaaataacataataaatagatcttaaacataggaaaaccatactgttctgataataaaatgctttctatgaaata

SEQ ID NO: 425974 - DNA, 120 bp, Artificial Sequence
  ENSG00000151465_11 (sequence is synthesized)
actctggtggtttcaggaaggtaaagtattttagaaaaaaatttcttaaactttatcataaagaaacacataaaatgaatgaattagcttaggcaccattctttccctttagctcttttt

SEQ ID NO: 425975 - DNA, 120 bp, Artificial Sequence
  ENSG00000151465_12 (sequence is synthesized)
catgagaccctgtctcagaataaaaaagtgtttctttctcagaagacagagtacagaagatgtttgtttttgttttttctctctctgtgctacaggggaaggtgtggctcattgacttta

SEQ ID NO: 425976 - DNA, 120 bp, Artificial Sequence
  ENSG00000151465_13 (sequence is synthesized)
tggtaaagtctatgtgcatttagtatgctggccatcttttcaaatagaccttcaaattggcttttatataatatttcattggaatcctgtatcacctagactttgatggttatgaatgga

SEQ ID NO: 425977 - DNA, 120 bp, Artificial Sequence
  ENSG00000151465_14 (sequence is synthesized)
aagttactgagttagagcattttctaattaaatatgaaataggagctgaaggcataatttattgattagaatgacagaaaatgtttttatgctgtacatgccttttgaacatttttcaaa

SEQ ID NO: 425978 - DNA, 120 bp, Artificial Sequence
  ENSG00000151465_15 (sequence is synthesized)
atacttgtaactttgaagaaagtgtgtatattgttagaaggctgtaaggagagcaggtctctgctctggtggtgattttactcaagaggggatgtgaatatttatatttttgtgtggatt

SEQ ID NO: 425979 - DNA, 120 bp, Artificial Sequence
  ENSG00000151465_16 (sequence is synthesized)
tctgtgtaggagtttttgtatgtatggaagaaagagaagaaaatactcaaatacctgaggataatttgctcaggagtcaaagtgataaactagtttaatgaattaaagcatggttttcca

SEQ ID NO: 425980 - DNA, 120 bp, Artificial Sequence
  ENSG00000151465_17 (sequence is synthesized)
tgacaatttttaattacatcctttgccaagacctctagaaaattacacctgctgagcagatatcccaaggagcatgtgctattttaacatccccttggttttctttgacagaagagaaat

SEQ ID NO: 425981 - DNA, 120 bp, Artificial Sequence
  ENSG00000151466_0 (sequence is synthesized)
gacttccgctgctggcctggggcttcccagccgtcttggcgttgtcctctccaacccccgccgctccgcgtagaacgccgctctcaggctgccgtcaagctcccgcggcactctcctagg

SEQ ID NO: 425982 - DNA, 120 bp, Artificial Sequence
  ENSG00000151466_1 (sequence is synthesized)
tggcccgacgagacccagagtgacccgcgggacgcctgtatcgaccgcgtcctcttcccaccagcgtgggattcggttgaacgtggagtccccagcaatcttcagtctctcaccagggcc

SEQ ID NO: 425983 - DNA, 120 bp, Artificial Sequence
  ENSG00000151466_2 (sequence is synthesized)
agggactcgtctggggcgcgggggaaagaagcgtggcggggctgtagatgccgcgtgagtaggatgcagattgcaccgctggagcgcttgacaaccaaccgagcgttggcttagttttgt

SEQ ID NO: 425984 - DNA, 120 bp, Artificial Sequence
  ENSG00000151466_3 (sequence is synthesized)
tttcccgcacagcaagctctctgtctttcagaggaaggtaaaggtggtgaaagctctaaactaaaattgtatcgaaatggctgcagaaatcgactttctgagagagcaaaatcgaagact

SEQ ID NO: 425985 - DNA, 120 bp, Artificial Sequence
  ENSG00000151466_4 (sequence is synthesized)
aaatgaagattttaggcggtatcaaatggaaagtttttccaaatattcatctgtacagaaagctgtctgccaaggagaaggagacgacacatttgaaaacctagtatttgaccaaagctt

SEQ ID NO: 425986 - DNA, 120 bp, Artificial Sequence
  ENSG00000151466_5 (sequence is synthesized)
tttagctcctcttgttactgagtatgataaacacctaggagaactaaatgggcagctgaaatattaccagaaacaggtgggtgagatgaaattacaacttgaaaatgtcatcaaggaaaa

SEQ ID NO: 425987 - DNA, 120 bp, Artificial Sequence
  ENSG00000151466_6 (sequence is synthesized)
tgaaaggttgcacagtgaattaaaagatgctgttgaaaaaaaattggaggcctttcccctgggcacagaggtaggaactgacatatatgcagatgatgaaacagtcagaaaccttcaaga

SEQ ID NO: 425988 - DNA, 120 bp, Artificial Sequence
  ENSG00000151466_7 (sequence is synthesized)
acaattgcagctagccaatcaagaaaaaactcaggctgtggaactctggcagactgtttctcaggagttggacagactacacaagctttaccaggaacatatgactgaggcccagattca

SEQ ID NO: 425989 - DNA, 120 bp, Artificial Sequence
  ENSG00000151466_8 (sequence is synthesized)
tgtatttgaaagtcaaaaacaaaaggatcagctatttgattttcaacaactgaccaaacaacttcatgttactaatgagaacatggaagtgactaaccaacagtttctgaaaacagtaac

SEQ ID NO: 425990 - DNA, 120 bp, Artificial Sequence
  ENSG00000151466_9 (sequence is synthesized)
tgaacaaagtgtgataatcgaacaactccgaaaaaaacttaggcaagccaaattagagctgagagttgctgtagcaaaagtggaagagttaactaatgtgactgaagatctgcagggaca

SEQ ID NO: 425991 - DNA, 120 bp, Artificial Sequence
  ENSG00000151466_10 (sequence is synthesized)
gatgaaaaagaaggagaaggatgtggtgtctgcccatggaagagaggaagcatcagataggcgtttacagcagttacagtctagtataaaacaattagaaataagattatgtgtgacaat

SEQ ID NO: 425992 - DNA, 120 bp, Artificial Sequence
  ENSG00000151466_11 (sequence is synthesized)
ccaagaagccaaccaattaagaaccgaaaatacacatctggaaaaacagaccagagagctacaagcaaagtgcaatgaattagaaaatgagagatatgaggctattgtaagagccagaaa

SEQ ID NO: 425993 - DNA, 120 bp, Artificial Sequence
  ENSG00000151466_12 (sequence is synthesized)
ttgtacaagatgctaccataagaaccaagaaagaagttgcaaacaccaaaaaacaatgtaatatacaaatttctcgattaacagaagaactttcagcccttcaaatggagtgtgctgaaa

SEQ ID NO: 425994 - DNA, 120 bp, Artificial Sequence
  ENSG00000151466_13 (sequence is synthesized)
aacaaggccaaattgaacgagtcattaaggaaaaaaaagcagtggaagaagaactagaaaagatttaccgtgaaggcagaggaaatgagagtgattacagaaaactggaagaaatgcacc

SEQ ID NO: 425995 - DNA, 120 bp, Artificial Sequence
  ENSG00000151466_14 (sequence is synthesized)
aaagattcctggtttcagagcgttcaaaagatgatcttcagctaagacttacgagagcagaaaatagaataaaacaacttgaaactgactcctcagaagaaatatcacgttaccaagaaa

SEQ ID NO: 425996 - DNA, 120 bp, Artificial Sequence
  ENSG00000151466_15 (sequence is synthesized)
tgattcagaaacttcaaaatgtattggagtctgagagagagaactgtgggcttgtcagtgaacaaaggctaaaacttcagcaagaaaataaacagttacggaaagagactgagagtttaa

SEQ ID NO: 425997 - DNA, 120 bp, Artificial Sequence
  ENSG00000151466_16 (sequence is synthesized)
ggaagattgccctggaggctcaaaaaaaagccaaagtaaagatcagtacaatggaacatgaattttcaataaaggaacgtggatttgaagttcaattgagagagatggaagacagtaata

SEQ ID NO: 425998 - DNA, 120 bp, Artificial Sequence
  ENSG00000151466_17 (sequence is synthesized)
gaaattccattgttgaactgaggcatctcctagcgactcaacagaaggcagccaataggtggaaagaagaaacgaagaaacttactgaaagtgcagaaattagaatcaataatctaaaga

SEQ ID NO: 425999 - DNA, 120 bp, Artificial Sequence
  ENSG00000151466_18 (sequence is synthesized)
gtgagctgagtcgacagaaacttcatacccaagagctgctttctcagctggaaatggcaaatgaaaaggtagctgagaatgaaaagctaattctagagcatcaagaaaaagccaacagac

SEQ ID NO: 426000 - DNA, 120 bp, Artificial Sequence
  ENSG00000151466_19 (sequence is synthesized)
ttcaaaggcgtctaagtcaggcagaagagagagctgcttcagcttcccagcagctcagtgtgattacagtgcagagaagaaaagcagcctccctgatgaatctggaaaatatttaaaaat

SEQ ID NO: 426001 - DNA, 120 bp, Artificial Sequence
  ENSG00000151466_20 (sequence is synthesized)
attcatagttcactcacagaactttagagttgggaaagcagttggactagaagtgtattgaaatggtaaagcctgcaaagtataatagttaaggcttgtgttatttcgcgtaagcattgt

SEQ ID NO: 426002 - DNA, 120 bp, Artificial Sequence
  ENSG00000151466_21 (sequence is synthesized)
tgttctgttttgagggttattggaaaacagagcagtgaccacttcctgtaagtaaagaaaatataatcctatattgagcttcagtggagaataaaccagctgagaagaactcattgcctt

SEQ ID NO: 426003 - DNA, 120 bp, Artificial Sequence
  ENSG00000151466_22 (sequence is synthesized)
catcaatgtgtctgttttttaattcctcctttttcccttgaaaggacataataattttcaaactatgcaaatttctctttcataagaaagagtttttaagaaaattctagaatttaatat

SEQ ID NO: 426004 - DNA, 120 bp, Artificial Sequence
  ENSG00000151466_23 (sequence is synthesized)
ttcagtttccaagatttgagaattttacatctaattgttacttctaactcatttttaaagttcctaagtatccattttattatgaactcataaatgtaataaattgtgcactttctaaaa

SEQ ID NO: 426005 - DNA, 120 bp, Artificial Sequence
  ENSG00000151466_24 (sequence is synthesized)
aaaaaacaggaatccattcatgttggaagcccagattccctaacatatgcactagtggttggctctgggaagtaacagtcaccagagtctggaagttcttcgcttgaacttgagtagcca

SEQ ID NO: 426006 - DNA, 120 bp, Artificial Sequence
  ENSG00000151466_25 (sequence is synthesized)
ctgtactattggaagccagatggccagagctctcctctagcaaacccaatgacgagcccaaagggcttccgcatcatctctgttgcatcaagaagccaagatgcttctcctgataatgtc

SEQ ID NO: 426007 - DNA, 120 bp, Artificial Sequence
  ENSG00000151466_26 (sequence is synthesized)
tgtccttctgctgatagtgctgctgggctattctgcaaaggatctcgcttatggggctttttcagcgaatgaaccaaggaagtacccatttgttttctgaagaatgcagaatgccacttc

SEQ ID NO: 426008 - DNA, 120 bp, Artificial Sequence
  ENSG00000151466_27 (sequence is synthesized)
aagtcctctatcttgggagcatcagggccaacagaaggactgttaaacaaaagcatgttttccagtgaggaggaggagcaggaagaaggcacacctataaacataaaaccacaaataaag

SEQ ID NO: 426009 - DNA, 120 bp, Artificial Sequence
  ENSG00000151466_28 (sequence is synthesized)
aaaaattacagcagaagcaaatccaaaagaataaaattctacacccttagtgtggcccaattgatgtgaactccccacccaacaacacaacacttacaccaccaagtttgtacaaatttg

SEQ ID NO: 426010 - DNA, 120 bp, Artificial Sequence
  ENSG00000151466_29 (sequence is synthesized)
gtttttatagtgaagagatgacctgccttgagaatctccattcaatctgcagactcaatatgccacattttctaaaacagctgaagctcacataatttttcataaaactagacctcctcc

SEQ ID NO: 426011 - DNA, 120 bp, Artificial Sequence
  ENSG00000151466_30 (sequence is synthesized)
aaacaaaataactgatctgattttcagagcggactccatgcagaactcatcaggtggctgatggctgcctctgctccctctacctggttacagagcagcacctgcgccgcgctcctccac

SEQ ID NO: 426012 - DNA, 120 bp, Artificial Sequence
  ENSG00000151466_31 (sequence is synthesized)
ggtccagtcttctgcctcccgtacgagactgagaggacccaaaaagcagggctcggggcttgtaagtttctctatgtgtctgtaccctcacagggctattacgaggacaagtacatgtaa

SEQ ID NO: 426013 - DNA, 120 bp, Artificial Sequence
  ENSG00000151466_32 (sequence is synthesized)
tatcatatgctgagtttatctgggaaaccaaggagaaagagaaagtatatataacagtgggaaggaagaaatacagaaagcttcctgaaagaaatgaatactgaggaatgagtaggccaa

SEQ ID NO: 426014 - DNA, 120 bp, Artificial Sequence
  ENSG00000151466_33 (sequence is synthesized)
atagttagaatttgctattctgatctcctagaccaagcttccttgatcttctcggttgaaagagagagaaaaaggctggcagaactgcctgttccacctggcccttgcgaaagtgtactc

SEQ ID NO: 426015 - DNA, 120 bp, Artificial Sequence
  ENSG00000151466_34 (sequence is synthesized)
cctttagcttaggaagcacaatcaagactaatacacaatcatgaattagttaccgttttaagtgagattttgcatgcttttacatgtaaattcagggttttgtgtgtgtgtgtgtgtgtg

SEQ ID NO: 426016 - DNA, 120 bp, Artificial Sequence
  ENSG00000151466_35 (sequence is synthesized)
tgtgtgtgtgtgcgcgcgcgcacactctccatttgctcattcacacttactgagagttgactacttattttttgctattttgcttttactcatattttcgccaactttaaatgctttctt

SEQ ID NO: 426017 - DNA, 120 bp, Artificial Sequence
  ENSG00000151466_36 (sequence is synthesized)
ttcttttgaaatcctaacatctttttactccttcagagaacgttaatcagaccttcatttaattccctttctggtgtgcattttattctgccttgtattttagttaggattttttttaac

SEQ ID NO: 426018 - DNA, 120 bp, Artificial Sequence
  ENSG00000151466_37 (sequence is synthesized)
catctttcctactatttttcaatgagcatgtctgtttaccttagcgccttgtatggtacggagagtttagatagttaatgaaggtggtgaatcagaaactgaatgaatgactgctaaaaa

SEQ ID NO: 426019 - DNA, 120 bp, Artificial Sequence
  ENSG00000151466_38 (sequence is synthesized)
agacctccattttcttctttactgttagcattttaccttttgaaatactagaaaaatatacatacttatatgggcttcacctaaactgaggtgaattaactaagatatacattcaagata

SEQ ID NO: 426020 - DNA, 120 bp, Artificial Sequence
  ENSG00000151466_39 (sequence is synthesized)
caggaaccatctggtatttgttatagtgacatactccagaatatctttcatctgtttttcacaactacaagtcataggaattacatttataaacatttctcaccatgttacataaaatat

SEQ ID NO: 426021 - DNA, 88 bp, Artificial Sequence
  ENSG00000151466_40 (sequence is synthesized)
tcgatttctttgttgaccatttttatatgtttatttacctatgtggttttcttttctcataaaatgcttgttcatatattttccccat

SEQ ID NO: 426022 - DNA, 120 bp, Artificial Sequence
  ENSG00000151466_41 (sequence is synthesized)
ttcttttctcataaaatgcttgttcatatattttccccatttctacttatcttgttcttattaaattgccaaagtgcatatgtgatctgtattctgaaaatttgttgatgtgctggtcag

SEQ ID NO: 426023 - DNA, 120 bp, Artificial Sequence
  ENSG00000151466_42 (sequence is synthesized)
tcacttacatttaagtgctactaaatcattagttttacagttacacctcagagactataatcctggggttaggaatttatggtgctaccaccatccctggtgctaccaccatccctatta

SEQ ID NO: 426024 - DNA, 120 bp, Artificial Sequence
  ENSG00000151466_43 (sequence is synthesized)
ctaccatggcagcattatttccataaaactggagacttgatattggaaaaagggtcataggatattgactacaagagacatttttgtctatccagttttacttaccagccaccatatcaa

SEQ ID NO: 426025 - DNA, 120 bp, Artificial Sequence
  ENSG00000151466_44 (sequence is synthesized)
cagaaaaaatggtctcagctcacttctaccttttatatctcccttaaatgcctctcactggtaaaattttaatcttatccacaacttcagctgcaagacatctgggcaatgtagttttgg

SEQ ID NO: 426026 - DNA, 120 bp, Artificial Sequence
  ENSG00000151466_45 (sequence is synthesized)
actttccgcccctgggacagaggccagaatgtggaagggaacagaaataaataatgagtgccagtggttcatacaacacattagataataggtgtttcaaatgtatattcccagactgtg

SEQ ID NO: 426027 - DNA, 120 bp, Artificial Sequence
  ENSG00000151466_46 (sequence is synthesized)
gtgtgtttgatgaacagaatttttttttcttttttttttttaacttaaagtaaatctctcactcttctcctgtggttattgttctttgtatctcctgtaagaagtcctttctcagcctaa

SEQ ID NO: 426028 - DNA, 120 bp, Artificial Sequence
  ENSG00000151466_47 (sequence is synthesized)
tgtcatagagatcttctcttatatttgctactaaaaaatgtttaaagcttttccataccaagtttcttaactttaacccataaaattcatataactggactgaaatctgatacatcattt

SEQ ID NO: 426029 - DNA, 120 bp, Artificial Sequence
  ENSG00000151466_48 (sequence is synthesized)
tttgttgacttttaactagactaaaaatccaaaattttttgagttctaaatttattcaaaacatgggctcttttaaagtttgacattcttttatttgtatttttctatgttatgtagtaa

SEQ ID NO: 426030 - DNA, 120 bp, Artificial Sequence
  ENSG00000151466_49 (sequence is synthesized)
ttttattttattttgattatatttatttttattttagtgtagctatatttaaattaatacatgctgttccttaaaattacatagcacacccacggaattgtcttgcctttggctatttca

SEQ ID NO: 426031 - DNA, 120 bp, Artificial Sequence
  ENSG00000151466_50 (sequence is synthesized)
tgattttctctcttccttgtattttccattagttttctttccttctaatttccaaaaacttcatatatttaagctgtcagtgtttactgaagtgcaaaataaagtacatcttttaattgg

SEQ ID NO: 426032 - DNA, 120 bp, Artificial Sequence
  ENSG00000151466_51 (sequence is synthesized)
atctatttttacttgttcagcaatcccatgaaacaagtagaacaagcaattattttatcctttctgaaggtaagaaaaccaaatcagtgtggttgctatgctttttcagagttttctcag

SEQ ID NO: 426033 - DNA, 120 bp, Artificial Sequence
  ENSG00000151466_52 (sequence is synthesized)
tttctcagttttatccttactacttaaatatattattccttaagtttttcctttaaaaatatataggattttataactggtagaatcatttgttgatttagattgtagatatactcctga

SEQ ID NO: 426034 - DNA, 120 bp, Artificial Sequence
  ENSG00000151466_53 (sequence is synthesized)
ctcagcctgacgcagagattttacatgaataatgtggtttttattttgtccttagggaatcattttgcaaatgaaaaaaacctatttttgtttgattttttttttttctttgagatggag

SEQ ID NO: 426035 - DNA, 66 bp, Artificial Sequence
  ENSG00000151466_54 (sequence is synthesized)
actacaggcacgcgtgccatcaggatgggctcaatctcttgaccttgtgatcctcccacctcggcc

SEQ ID NO: 426036 - DNA, 120 bp, Artificial Sequence
  ENSG00000151466_55 (sequence is synthesized)
aggcatgagccaccgcacctggcctgtttgattttttttataatcttggttaatttaaagcaaaacattttcttaaatgcctcatcatataaaatattattaggaccatgtgagggtagg

SEQ ID NO: 426037 - DNA, 120 bp, Artificial Sequence
  ENSG00000151466_56 (sequence is synthesized)
agggtaggcagtctgtcataggggactcattaaatactagttttattacgtattgtgaatcctagggcatattagtaaacctctatcaaccttgctctcctctacttcagtttgatataa

SEQ ID NO: 426038 - DNA, 120 bp, Artificial Sequence
  ENSG00000151466_57 (sequence is synthesized)
tagtagtattaattcacagttattatcgagtgtcaagtgagatgactgcaaagcatttacaacagtccctggcactaataactacctgagatattatcagctattattagatttgtattt

SEQ ID NO: 426039 - DNA, 120 bp, Artificial Sequence
  ENSG00000151466_58 (sequence is synthesized)
tctattgtaggaaatttataactatataagtaatgcagttttaaagacaaagagtcaaaaggaaatgaactaacatttacttgtgaattttgcatcaaataatttctgtaagttctatag

SEQ ID NO: 426040 - DNA, 120 bp, Artificial Sequence
  ENSG00000151466_59 (sequence is synthesized)
cacaaatatgatttacatttagatacatacataaaatgtaattaagaaatagggaacagttcctacactacagtatttttttcttgaaaatgtatgttctttagataatcaaagggtttt

SEQ ID NO: 426041 - DNA, 120 bp, Artificial Sequence
  ENSG00000151466_60 (sequence is synthesized)
agggttttatactcacttaatgcttaattatgatgatattaaaaatcattttttctgtttaagaaagtcatattattgttctaaaatcatttcctatgaggagttaagaagatattgaaa

SEQ ID NO: 426042 - DNA, 120 bp, Artificial Sequence
  ENSG00000151466_61 (sequence is synthesized)
attctgttagaatgttcaaaaaaatttatctttttcatttgttgccaatacagtctctgaagaaaataaacattgtattatggtggaacaaatgttttaatttatgttgtgtttacataa

SEQ ID NO: 426043 - DNA, 120 bp, Artificial Sequence
  ENSG00000151466_62 (sequence is synthesized)
tacaaacttctggtgtctatggaatgatcaaggtattgaagtttaagttcattttcatagaaagtccaatcagcagtatatctccatctccatctataaagatattatagacataagtat

SEQ ID NO: 426044 - DNA, 120 bp, Artificial Sequence
  ENSG00000151466_63 (sequence is synthesized)
attcttcttagtgcactggagctcttgttaggtaatgtatcaagatgataaagtgctttttcaagaaacttattgaatcactttggtatataatataatttacccaagtacagcattcat

SEQ ID NO: 426045 - DNA, 120 bp, Artificial Sequence
  ENSG00000151466_64 (sequence is synthesized)
gacctctacttcatacccttcgccattcagctatattttttcctctttaatatcttctacatgcacttcattagtaataaaggaatcttccaaaatttattccatggatccattttagat

SEQ ID NO: 426046 - DNA, 120 bp, Artificial Sequence
  ENSG00000151466_65 (sequence is synthesized)
acagtgtttattaatttactttattttttaggcaagccaaattagagctgagagttgctgtagcaaaagtggaagagttaactaatgtgactgaagatctgcagggacagatgaaaaaga

SEQ ID NO: 426047 - DNA, 120 bp, Artificial Sequence
  ENSG00000151466_66 (sequence is synthesized)
ctcagactagaacacatcatctaatggagttctgagcattaaagggaaatcatattgaagatttcaaccttgaagttaattgtgaagtttgttgcagatggctaatgcttcaaagcataa

SEQ ID NO: 426048 - DNA, 80 bp, Artificial Sequence
  ENSG00000151468_0 (sequence is synthesized)
atgccgagccccgtggcggagacagcggtgcgctcagctcccgggagcggcccgagcagccgagcgcccagggctgccct

SEQ ID NO: 426049 - DNA, 120 bp, Artificial Sequence
  ENSG00000151468_1 (sequence is synthesized)
gctcgccgcgctctgcctggcgggtcccccagcgcccgcgcgcgcctgccagctgccctccgagtggaggcccctgagcgagggctgccgcgccgagctggccgagaccatcgtgtacgc

SEQ ID NO: 426050 - DNA, 120 bp, Artificial Sequence
  ENSG00000151468_2 (sequence is synthesized)
agggctgccgcgccgagctggccgagaccatcgtgtacgccagggtgctggcgctgcaccccgaggcgcccggcctctacaaccacctgccctggcagtaccacgccggccaggggggcc

SEQ ID NO: 426051 - DNA, 120 bp, Artificial Sequence
  ENSG00000151468_3 (sequence is synthesized)
tcttctactcggccgaggtcgagatgctgtgcgaccaggcgtggggcagcatgctggaggtgcccgccggctccaggctcaacctcaccggcctgggctacttctcgtgccactcccaca

SEQ ID NO: 426052 - DNA, 120 bp, Artificial Sequence
  ENSG00000151468_4 (sequence is synthesized)
ccgtggtccaggactactcctatttcttcttcctcaggatggatgaaaattataacctcttgcctcacggagtcaatttccaagatgccatcttcccagacactcaagagaacagaagga

SEQ ID NO: 426053 - DNA, 120 bp, Artificial Sequence
  ENSG00000151468_5 (sequence is synthesized)
tgttttctagccttttccagttttcaaactgttcgcaagggcagcagctggcgactttctccagtgactgggaaatccaggaagacagtaggctcatgtgctcctcggtgcagaaggcct

SEQ ID NO: 426054 - DNA, 120 bp, Artificial Sequence
  ENSG00000151468_6 (sequence is synthesized)
tgtttgaggaggaggaccacgtcaagaaactgcagcagaaagtggccaccctggagaagcgcaaccggcagctccgggagcgagtgaagaaggtcaagaggtccttgcggcaggcgcgta

SEQ ID NO: 426055 - DNA, 120 bp, Artificial Sequence
  ENSG00000151468_7 (sequence is synthesized)
agaagggccgccacctggagctggcgaaccagaaactcagtgagaagctggcggcgggcgcgctgccgcacatcaatgcccgggggcccgtgcgccccccctacctgcgggggtaacggg

SEQ ID NO: 426056 - DNA, 120 bp, Artificial Sequence
  ENSG00000151468_8 (sequence is synthesized)
cctgggggctgccaggtgtgcagggccaatcctgacggtaattgagaatgagtgaggtttcgtacatgcagctatttcaagggttgtaagagtttttgtttttaatcacgcatttggtag

SEQ ID NO: 426057 - DNA, 120 bp, Artificial Sequence
  ENSG00000151468_9 (sequence is synthesized)
agtctaaatggataaaatgcaaggcttgctttccccttgggtgctggcctcaatgtcagaccccacgcgctgccccttcctggcctgaccccagacgcagtgcctggcagtccagaggca

SEQ ID NO: 426058 - DNA, 120 bp, Artificial Sequence
  ENSG00000151468_10 (sequence is synthesized)
gtgggatccctgagtgctgaatgctcgcctgcagagcagcccagaaagagccctgactggggagagaacattttagaatctctagtgtaaaagacatcaacgtgcttagcctttatttca

SEQ ID NO: 426059 - DNA, 120 bp, Artificial Sequence
  ENSG00000151468_11 (sequence is synthesized)
tttggaaggggatggtggccttgcatccaagatgcctgaaaatcagcacgtgcagggcctccctatccagccagcattttccttccagctgaggcaggtgaagacttcataagctcatca

SEQ ID NO: 426060 - DNA, 120 bp, Artificial Sequence
  ENSG00000151468_12 (sequence is synthesized)
caggggagggaattaggagcagggcagcaggtaattaaacaagataaattatacctgatttccaacaccagctacaaagagttgaagatgatacctatgggtcgcgttaacacagggggc

SEQ ID NO: 426061 - DNA, 120 bp, Artificial Sequence
  ENSG00000151468_13 (sequence is synthesized)
aactgccttgatcggcctgccatgggtcatcagactgcttcctaaattgagagaaactgagcaatctctcagccactgctatagtctaacttcttgtttgctgagtaattgtttctaatg

SEQ ID NO: 426062 - DNA, 120 bp, Artificial Sequence
  ENSG00000151468_14 (sequence is synthesized)
tctctgaactcaaagtgaggtgctccaagacgctgtgaacttctgcaaagacacctccttacctactgggatcacgtgacctgacctcactcccagccaggctcccaaagggctcattcc

SEQ ID NO: 426063 - DNA, 120 bp, Artificial Sequence
  ENSG00000151468_15 (sequence is synthesized)
agccattccaatctcttcttctttatgcaaacacttttcccccacaacaagccttgtttgttccgataggaatacgtgtacgtcagtgcacttgtccttacgtcagttccttacaccacc

SEQ ID NO: 426064 - DNA, 120 bp, Artificial Sequence
  ENSG00000151468_16 (sequence is synthesized)
aaagcacttcacctttctggaaataaaacttttaagacactactataagtaaaaatgagagtattcactagacttattgctcaggcacatttgagtgggtcccagctgtgtgattaagaa

SEQ ID NO: 426065 - DNA, 120 bp, Artificial Sequence
  ENSG00000151468_17 (sequence is synthesized)
gtcaactgggtggccttttctgggttatcttctgatcatggcctttcaacccaacaagggcccttccctgctcttccaccagtaaaggctcctggcctctcatcaggatctgccccccag

SEQ ID NO: 426066 - DNA, 120 bp, Artificial Sequence
  ENSG00000151468_18 (sequence is synthesized)
agaccccccccagacactgcagggcctggtgatgctgtcctctgtaccggaaatggcaggcactgtcagatttccactcttctgcctttaggaaggctgggtgcttcttgctctgacagc

SEQ ID NO: 426067 - DNA, 120 bp, Artificial Sequence
  ENSG00000151468_19 (sequence is synthesized)
cagtctggggagatgactcttacgttgcttgagtcttggtggcaggctgctgtccacgggggagaagtctctgctctggactggacagaagagagacttttaccctggggcactcacacg

SEQ ID NO: 426068 - DNA, 120 bp, Artificial Sequence
  ENSG00000151468_20 (sequence is synthesized)
gccaagcttctgccaccacttcattagctgtattctccatagtatggtgaaatagcaggtgcgtcttctagtttattcctcctggggacatttcctcaaagcagttttgcgcccccgcaa

SEQ ID NO: 426069 - DNA, 120 bp, Artificial Sequence
  ENSG00000151468_21 (sequence is synthesized)
gggaatggtcagcctaagggtaatgtacagcccgtgcttggagaaccatggaagctacacccctacaggtgcatactgttctgcttttccaataaatacgagcggcgatttcaaccacaa

SEQ ID NO: 426070 - DNA, 120 bp, Artificial Sequence
  ENSG00000151468_22 (sequence is synthesized)
aatacactcaaaaagcagaaagcctgcaggatgcttcttgggctcttgttgcggacgaataggctcggctattcttgttgctgaagaatagcctctgctggtgtggaggagggaagctgc

SEQ ID NO: 426071 - DNA, 120 bp, Artificial Sequence
  ENSG00000151468_23 (sequence is synthesized)
ccccggattagacagcaggatgacaaggaaaaaggcagatgcgccctctcctggtatctccgaaggattctgcttcgctgtctggacctcctgctgcctggccaagcctgactctcaacc

SEQ ID NO: 426072 - DNA, 120 bp, Artificial Sequence
  ENSG00000151468_24 (sequence is synthesized)
ctgcccctgaggctaaccccaagagcagggcagagaagcaagcaagtcagcgactgccccagacccaattccgggccctcgagttggtgtggtgtaggaggggcagatgaggctagaggc

SEQ ID NO: 426073 - DNA, 120 bp, Artificial Sequence
  ENSG00000151468_25 (sequence is synthesized)
tgctttataaggagcagaaaagacggtgtcacagctgtaccctgggatcggcagaaaagggtccccccggggcctgtaaggggtgcctgcgtaacaggtgacttgaatttcaagtgatta

SEQ ID NO: 426074 - DNA, 120 bp, Artificial Sequence
  ENSG00000151468_26 (sequence is synthesized)
tcatataaatggaggattagaaaagagacaccaactctggaaccagttcaatggaattcttcaagagactgtaacttagtgcttacaaagacttggaatgatctacactgcatggtgtac

SEQ ID NO: 426075 - DNA, 120 bp, Artificial Sequence
  ENSG00000151468_27 (sequence is synthesized)
ctgttagaggaggtgacatcaaagctttaggtactgagagaggatacttcctactgtggaagggaagaaaagaaaaaagcaaagctacttcttggaagagcagtggagagaaaaatattg

SEQ ID NO: 426076 - DNA, 120 bp, Artificial Sequence
  ENSG00000151468_28 (sequence is synthesized)
tttctttttcttgggaaattggcagaggcatgctgaagaaatcagctacagctgttctccacacctggataaatttttaataagaacttaacacacccgccctccagaaagggtggtctg

SEQ ID NO: 426077 - DNA, 120 bp, Artificial Sequence
  ENSG00000151468_29 (sequence is synthesized)
aggtgtcgatggtgttgtctctcccagggctcttctgggcagccttctctgtgacctggagagcgaagagtctatttccatcacatttcagctgccaaactcccctttaaacgatggatg

SEQ ID NO: 426078 - DNA, 120 bp, Artificial Sequence
  ENSG00000151470_0 (sequence is synthesized)
gaagattgctggggactccacgttcaaccgaatcccacgctggtgggaagaggacgcggtcgatacaggcgtcccgcgggtcactctgggtctcgtcgggccacctaggagagtgccgcg

SEQ ID NO: 426079 - DNA, 120 bp, Artificial Sequence
  ENSG00000151470_1 (sequence is synthesized)
ggagcttgacggcagcctgagagcggcgttctacgcggagcggcgggggttggagaggacaacgccaagacggctgggaagccccaggccagcagcggaagtccactcggcccgccctgc

SEQ ID NO: 426080 - DNA, 120 bp, Artificial Sequence
  ENSG00000151470_2 (sequence is synthesized)
gactttgaaaccggtgccccggaccactccttggagacggtggcgcctcttgcgtcatcacgcgggcgttggagcttacgccatcgcgcgtcctagagtcctagcacgctattggctggc

SEQ ID NO: 426081 - DNA, 120 bp, Artificial Sequence
  ENSG00000151470_3 (sequence is synthesized)
tgtcaagcaatgggaggagtcgtgagaacctggatgacagcgggctgagccaccggcttggcgcggcggccaaactggtgggacagtgtctccaggtagtgaggcccaacctctttaaaa

SEQ ID NO: 426082 - DNA, 120 bp, Artificial Sequence
  ENSG00000151470_4 (sequence is synthesized)
caaacaaacaaacaaacaaaaaaccaaaatgcaaacgtgagtagagaatgaaatacacagtttaaatgccctcactatctttgggttactaatatactaagcctttctggactaagtaaa

SEQ ID NO: 426083 - DNA, 120 bp, Artificial Sequence
  ENSG00000151470_5 (sequence is synthesized)
agatgcaggttcctgcggctagggatagaagccagactggcgtcttcagaatctcccaccaaggctgtacctctggaggagttctaggtttggatttggtcatctcaagaagagacttca

SEQ ID NO: 426084 - DNA, 120 bp, Artificial Sequence
  ENSG00000151470_6 (sequence is synthesized)
gatggattttaaaattgaacacacttgggatggttttccagtgaagcatgagcccgtatttatcaggctgaatccaggtgacagaggagtgatgatggacattagtgctccatttttcag

SEQ ID NO: 426085 - DNA, 120 bp, Artificial Sequence
  ENSG00000151470_7 (sequence is synthesized)
ggatcctccagccccacttggagaaccaggaaaacctttcaatgaactgtgggattatgaagttgtggaagcatttttcttgaatgatataactgagcaatatttagaagttgaactttg

SEQ ID NO: 426086 - DNA, 120 bp, Artificial Sequence
  ENSG00000151470_8 (sequence is synthesized)
tccccacggacagcatttagtgcttttactttctggaagaagaaatgtgtggaaacaagaacttcctttatcgttcagaatgtccagaggagagacaaaatgggaaggcaaagcttatct

SEQ ID NO: 426087 - DNA, 120 bp, Artificial Sequence
  ENSG00000151470_9 (sequence is synthesized)
cccttggagttattttccaccaaatgtgacaaaattcaattcatttgcaattcatggatcaaaagataaacgaagttatgaagctctttaccctgtacctcagcatgaactgcagcaagg

SEQ ID NO: 426088 - DNA, 120 bp, Artificial Sequence
  ENSG00000151470_10 (sequence is synthesized)
acaaaaacctgatttccattgcctagaatacttcaagtctttcaattttaacacactgcttggagaagagtggaaacaaccggaatcagacctgtggctaatagagaaatgtgatatata

SEQ ID NO: 426089 - DNA, 120 bp, Artificial Sequence
  ENSG00000151470_11 (sequence is synthesized)
ggagtaatagataaccataccgatcattttttcctctataccttttaagataaacaaaaaataaatatcaattttttaagatgtcatgcatacatttcaacaacaaatatcttcatagaa

SEQ ID NO: 426090 - DNA, 120 bp, Artificial Sequence
  ENSG00000151470_12 (sequence is synthesized)
gtcactgaaaatatagtatctgtggcaaattgtatatgattaacaagaaaatatatgattctttgtagatgatttcatctgtaaagtcacaatgtttctcagagtcacttagtccaggat

SEQ ID NO: 426091 - DNA, 120 bp, Artificial Sequence
  ENSG00000151470_13 (sequence is synthesized)
gttgcattcccagcacacagtacagttattcttgaaaactacaagtgaaaaagggggaacaattgaggttgtccaaggccacctagaggactgtcttgcactaccttgtgattcaaccat

SEQ ID NO: 426092 - DNA, 120 bp, Artificial Sequence
  ENSG00000151470_14 (sequence is synthesized)
ttcattcctagatatataccccagaaaaatgactgctcatagcagctttattcataatagcacaaaattgtaaacagtgaaatttccatccataggaaaatggatagacaaactacaata

SEQ ID NO: 426093 - DNA, 120 bp, Artificial Sequence
  ENSG00000151470_15 (sequence is synthesized)
tagtcagtggaatactgttcatttaaaaaaggactgctgatacatgcaacaacctgtatgaatctcaaaaacattaagttgagcaaaacaaaccaaacataacatactatctaattactt

SEQ ID NO: 426094 - DNA, 120 bp, Artificial Sequence
  ENSG00000151470_16 (sequence is synthesized)
ttatattaaagccacttccaggcaaaactaatatttgatgatagataccagaacagtggctgcttagagtgagggcagggaattcaaattgaatggaaaaggggcctgaggaaattttcc

SEQ ID NO: 426095 - DNA, 120 bp, Artificial Sequence
  ENSG00000151470_17 (sequence is synthesized)
ggggtgattgaaatgttttgtattttgatctggatgatggttatgtagctgcatatatttgtcaacattcctcatgctgtatgtttagatttgtgattttactatatgtaaattaattcc

SEQ ID NO: 426096 - DNA, 120 bp, Artificial Sequence
  ENSG00000151470_18 (sequence is synthesized)
ttaataaaatactattataaaataagctgtaaattaaatggaattaacttcaagtttacattgagtttatatgtttccattgaacaatcactagtgatggttaaatgtggcttatcgact

SEQ ID NO: 426097 - DNA, 120 bp, Artificial Sequence
  ENSG00000151470_19 (sequence is synthesized)
tactcatttcttatatatgttctctatctaaaaagagagctggtgtaagataaatgctaacttttacaaaaggtattattaagtatcctgactacacatcatggtggcagtgttaggcat

SEQ ID NO: 426098 - DNA, 120 bp, Artificial Sequence
  ENSG00000151470_20 (sequence is synthesized)
cttagataaattgagaaattattcttaaaactgacaatagcaactaattaatttgatatagaaacgatctgcctgttttagatacgaatggcatattttaaataacctaggacgatttat

SEQ ID NO: 426099 - DNA, 120 bp, Artificial Sequence
  ENSG00000151470_21 (sequence is synthesized)
ttataaattacctgaataattttataaatgcatataaaactatcaaaataaaaacaagatatattttagagcatcttgattttagaagcgaatcgaacactgtgaatcacagtttcagat

SEQ ID NO: 426100 - DNA, 120 bp, Artificial Sequence
  ENSG00000151470_22 (sequence is synthesized)
ataaatcataactatttataatatggataaaaatgaagcacaaatatgatagatacaatcacaacaatataaaatactgaatttgaatgttgtagcttgtgagctttctcaaatctaatg

SEQ ID NO: 426101 - DNA, 120 bp, Artificial Sequence
  ENSG00000151470_23 (sequence is synthesized)
tgtatctttttaaaatttgtttagatgttttttaaacatctcttaactttctttcatctagataaggcatttccttttcttccaataccaagcaagcaaaaatacattatataaacattt

SEQ ID NO: 426102 - DNA, 120 bp, Artificial Sequence
  ENSG00000151470_24 (sequence is synthesized)
tcttttgaaaggaacatgcatatcaactacagaatttcggaaagcttgtccattagtcaggtacaaatgatatattctagaaacttgtatccaagaaacttttatttgagagtgggtgtt

SEQ ID NO: 426103 - DNA, 120 bp, Artificial Sequence
  ENSG00000151470_25 (sequence is synthesized)
aatcatccttttgtttaaaatatgcataaatgcatttctttgctgtgatttgaattgttcactgcagtgtcaagcagattctctcttctcaccacctaaatagattacacaatgtgcata

SEQ ID NO: 426104 - DNA, 120 bp, Artificial Sequence
  ENSG00000151470_26 (sequence is synthesized)
tttattcaggtgcattctcatgctttttcccagctccaggaaagtgtaagtcacagtctgaagggaaatgtgctttttatttttggctccaaactactttttttaaacgttaaaaaggtt

SEQ ID NO: 426105 - DNA, 120 bp, Artificial Sequence
  ENSG00000151470_27 (sequence is synthesized)
ttttgccacaggaaaaaaaacatttaatttcccctccttctcctccttttgctccttttttaaatgttaggcttttggaggacagaagataatgagcataattaatctgatattgaaaaa

SEQ ID NO: 426106 - DNA, 120 bp, Artificial Sequence
  ENSG00000151470_28 (sequence is synthesized)
gaaagggtagcaagtggataaagcaattacagtaagccctcagcccttttctcatgcctcaaagcttaaggattgtctcttcttttccatgtaaatttccataatattttacacattgct

SEQ ID NO: 426107 - DNA, 120 bp, Artificial Sequence
  ENSG00000151470_29 (sequence is synthesized)
ttattacagcatttatttcactggtcctagatagctcttctgacccacctcctatcctctcagcctaactttttactccagccatcagttgcatacagtgaactgactggccagttgcct

SEQ ID NO: 426108 - DNA, 120 bp, Artificial Sequence
  ENSG00000151470_30 (sequence is synthesized)
cagctgtactgtgtatgtcttacttcctgcccctagggcttctctgcttcctctgctgtgtggaacacttgcaggaacccatttagccattctctcacatgaactacccgggatgtgtga

SEQ ID NO: 426109 - DNA, 120 bp, Artificial Sequence
  ENSG00000151470_31 (sequence is synthesized)
agggactaaaacaccccatggggcacctcttgaccaaagagggtgggagttgatggataactacttctctgttacatccctcagtttaacaatttatggtcccttccacacagctcctca

SEQ ID NO: 426110 - DNA, 120 bp, Artificial Sequence
  ENSG00000151470_32 (sequence is synthesized)
gaagttctcttaaaaggattccaccctgattacccacagcagtggccaactagtaacacatttttgcattatctttccttcatttccatcattttctgttttgctcttcctggtacctct

SEQ ID NO: 426111 - DNA, 120 bp, Artificial Sequence
  ENSG00000151470_33 (sequence is synthesized)
ctcctctctggaattgcttaactacagtcaacctctttggaagttattgtcctatgtttgcttcatggggaacccaggctaagtcagtgattacctaaagcagccctagaaagccgttcg

SEQ ID NO: 426112 - DNA, 120 bp, Artificial Sequence
  ENSG00000151470_34 (sequence is synthesized)
tcaggatgagaatctagaattgtatcacagggcatttggtgacaaggaccccattgttggtggtaatggctctgctataagtaacttcacagttattaaaacagtggtagactggcttga

SEQ ID NO: 426113 - DNA, 120 bp, Artificial Sequence
  ENSG00000151470_35 (sequence is synthesized)
ggtgcagctgaggcacctgaagctatgaaagccatctagtcataatgactcttcgtgtcaactgttcagcaggcaaatagaagcgggctaccatgcagagctagagttataactattaat

SEQ ID NO: 426114 - DNA, 120 bp, Artificial Sequence
  ENSG00000151470_36 (sequence is synthesized)
ggaagcagtatagagtatgtccttcctaggggattcattgagtcatcctttggtgtttcaatgtcaagtggtaatcttaaatgggcaactgtagcaaccacagcctgacaaggtaaagca

SEQ ID NO: 426115 - DNA, 120 bp, Artificial Sequence
  ENSG00000151470_37 (sequence is synthesized)
actaaggactctgaccctttgaggataaaggtctaggtcacctcaccattcaaaccacttgaaactactgaagagtttggccaaatgtgagagaaatacagaatttgtgatggaagagag

SEQ ID NO: 426116 - DNA, 120 bp, Artificial Sequence
  ENSG00000151470_38 (sequence is synthesized)
agatgataactatcaattatagacttgaaatcagttacaggagccacataacttgttccactaaatcttttgcatttagtatttgtataatggctgcccacttccttgaagactctgtga

SEQ ID NO: 426117 - DNA, 120 bp, Artificial Sequence
  ENSG00000151470_39 (sequence is synthesized)
cagattggactcaatgtggaatgtgtgtggctctgagtgctgcaaggagtggactgtatttaatatctcttgtgtcctacctcacatcctcttaggccatttttcaattcacccatttta

SEQ ID NO: 426118 - DNA, 120 bp, Artificial Sequence
  ENSG00000151470_40 (sequence is synthesized)
ctctttgatagcactttacctcttttgtcccatgtatctctagatttctgtattagtgcttttctgacacctcagttatgtggaacacctgtgggaatctgctaatctactctgacgtat

SEQ ID NO: 426119 - DNA, 120 bp, Artificial Sequence
  ENSG00000151470_41 (sequence is synthesized)
atgcaaacctggaagtttgagggaattgacaatagggacaggattcagtggataaatactccccttttccgtcccttgggcagacaattctgaagtgcattctgtatagttccttagtgg

SEQ ID NO: 426120 - DNA, 120 bp, Artificial Sequence
  ENSG00000151470_42 (sequence is synthesized)
tctccagtaggactccactagggtcttcagttacctacagtactgatcagcttaaaaatgcaatcttagattggcttgctttatttaatttttccaaagttcccaatcccattccttaga

SEQ ID NO: 426121 - DNA, 120 bp, Artificial Sequence
  ENSG00000151470_43 (sequence is synthesized)
atcacattccaaaattaatgcactgcacacaaccctctgcttttgtcaggggtagaaggggtatccagcctaaggcacctaagtccaagaggaatatgtgcctaacaaatcttctaacta

SEQ ID NO: 426122 - DNA, 120 bp, Artificial Sequence
  ENSG00000151470_44 (sequence is synthesized)
tatatatatatataaaatatatatgtttatatataacatatatatatagagagagagcataaaatgtgctgtgtatgtgtgtagcatattttttgttaaatcaccattcctgggccctac

SEQ ID NO: 426123 - DNA, 120 bp, Artificial Sequence
  ENSG00000151470_45 (sequence is synthesized)
cattcctgggccctactcattttctgataatttcttatcttaatttgctctgaaagagcaaaacttataaaattgactattgtaactctattttttaccaactatcatttttcatggaag

SEQ ID NO: 426124 - DNA, 120 bp, Artificial Sequence
  ENSG00000151470_46 (sequence is synthesized)
gaatagtaaaaagagttacctctgaagctaagatgacacatgtatgaggaatataggaagccagaaatcatgaatctatgaaaagtgaggggtgtctgtgcatattttattttatttcat

SEQ ID NO: 426125 - DNA, 120 bp, Artificial Sequence
  ENSG00000151470_47 (sequence is synthesized)
aataaataaccagtaattaaaatattcttttccatgtaatgggatctacgagtaaatttttgtctgatatttataaatctaatatgtaatataaaggagaaataggaaatgctgtcaaat

SEQ ID NO: 426126 - DNA, 120 bp, Artificial Sequence
  ENSG00000151470_48 (sequence is synthesized)
gacatttcactttactacttatttgaattacaatgaaataatatatagctacatcactggctcctgagagagctttgggtgttctgtaaattttttactttgcactcttgaaaaattcgc

SEQ ID NO: 426127 - DNA, 120 bp, Artificial Sequence
  ENSG00000151470_49 (sequence is synthesized)
agagaatgcaaggtttagtaaaaatttattttcttttggcagcctatcacctgtaatttccgttaaacagcatttctgactcaatagtacactgaaagcccatgtttgtaataatgccct

SEQ ID NO: 426128 - DNA, 120 bp, Artificial Sequence
  ENSG00000151470_50 (sequence is synthesized)
aaagcactgcagtacctagagtatatattttgaagagatagctttgctgaaatagaaaaccaaactgtaaattgaagtctgagcattcagagaaataaaaattatgctaaaaacaaacgt

SEQ ID NO: 426129 - DNA, 120 bp, Artificial Sequence
  ENSG00000151470_51 (sequence is synthesized)
aattcttagtggagcagaagtaacacttttgatcaaagaagacgacatatgtgcacaagtatctagtagagtccaatgttcactgatggtcctcagaaaatacttggaaaactttggact

SEQ ID NO: 426130 - DNA, 120 bp, Artificial Sequence
  ENSG00000151470_52 (sequence is synthesized)
gtcataatctctctcactactgtcagtagagcacttatttttccatagtggtatgagaaaagtgttgtttgcatgtgagaaaagtaaatgttgtaatagctgatatagaagtatggtcac

SEQ ID NO: 426131 - DNA, 120 bp, Artificial Sequence
  ENSG00000151470_53 (sequence is synthesized)
ggctgaaaagaagaagccagtgtttgagaaaagcttcgtggtctgtgttctctagttgttccctcttctctctgacattcctttcgtcgtcgccagaatttttgtggatttggtggttgt

SEQ ID NO: 426132 - DNA, 120 bp, Artificial Sequence
  ENSG00000151470_54 (sequence is synthesized)
ggaagtactgtattttattgcaaacataaatcttcttataataacctctcacagaactattattttatcttgctgttgggaagtaagtgcttctgagcaattgacatgtacagtttctga

SEQ ID NO: 426133 - DNA, 120 bp, Artificial Sequence
  ENSG00000151470_55 (sequence is synthesized)
tatttcctaccaatctctcattctgactttttctccattacctgtgtgactttaactatataacaaaaacagttaaaaaatggcaattacaaatccagattttttttttttttttttttt

SEQ ID NO: 426134 - DNA, 120 bp, Artificial Sequence
  ENSG00000151474_0 (sequence is synthesized)
gtctgtatgcggcgtacatgtggtacagccagggagatcagaacgctcacagaacaggcagtgcaattccatgttcctcttaagtatgttagccctaccgggagctgagctggccagtct

SEQ ID NO: 426135 - DNA, 120 bp, Artificial Sequence
  ENSG00000151474_1 (sequence is synthesized)
acttggagaggaaaagtagatctggggaaggtggaagggtcagttcctaagtgacttcctcctcggggatggtaagggcatttgctgatctccagtgactgcctggtgcctcatggtcag

SEQ ID NO: 426136 - DNA, 120 bp, Artificial Sequence
  ENSG00000151474_2 (sequence is synthesized)
actcggctgtctcactcccagatatctgattttgcaaaaagggacacacctatctgcagcaaagaagacactgaccagattgcgagcggtgcttttggatgctctgtagccacccggggc

SEQ ID NO: 426137 - DNA, 120 bp, Artificial Sequence
  ENSG00000151474_3 (sequence is synthesized)
ccaggaggactgactcggcagcaggattcgtgcatgggaatcggagaccatggcagtgcagctggtgcccgactcagctctcggcctgctgatgatgacggagggccgccgatgtcaagt

SEQ ID NO: 426138 - DNA, 120 bp, Artificial Sequence
  ENSG00000151474_4 (sequence is synthesized)
acatcttcttgatgacaggaagctggaactcctagtacagcccaagctgttggccaaggagcttcttgaccttgtggcttctcacttcaatctgaaggaaaaggagtactttggaatagc

SEQ ID NO: 426139 - DNA, 120 bp, Artificial Sequence
  ENSG00000151474_5 (sequence is synthesized)
attcacagatgaaacgggacacttaaactggcttcagctagatcgaagagtattggaacatgacttccctaaaaagtcaggacccgtggttttatacttttgtgtcaggttctatataga

SEQ ID NO: 426140 - DNA, 120 bp, Artificial Sequence
  ENSG00000151474_6 (sequence is synthesized)
aagcatttcatacctgaaggataatgctaccattgagcttttctttctgaacgcgaagtcctgcatctacaaggagcttattgacgttgacagcgaagtggtgtttgaattagcttccta

SEQ ID NO: 426141 - DNA, 120 bp, Artificial Sequence
  ENSG00000151474_7 (sequence is synthesized)
tattttacaggaggcaaagggagatttttctagcaatgaagttgtgaggagtgacttgaagaagctgccagcccttcccacccaagccctgaaggagcacccttccctggcctactgtga

SEQ ID NO: 426142 - DNA, 120 bp, Artificial Sequence
  ENSG00000151474_8 (sequence is synthesized)
agacagagtcattgagcactacaagaaactgaacggtcagacaagaggtcaagcaatcgtaaactacatgagcatcgtggagtctctcccaacctacggggttcactattatgcagtgaa

SEQ ID NO: 426143 - DNA, 120 bp, Artificial Sequence
  ENSG00000151474_9 (sequence is synthesized)
ggacaagcagggcataccatggtggctgggcctgagctacaaagggatcttccagtatgactaccatgataaagtgaagccaagaaagatattccaatggagacagttggaaaacctgta

SEQ ID NO: 426144 - DNA, 120 bp, Artificial Sequence
  ENSG00000151474_10 (sequence is synthesized)
cttcagagaaaagaagttttccgtggaagttcatgacccacgcagggcttcagtgacaaggaggacgtttgggcacagcggcattgcagtgcacacgtggtatgcatgtccggcattgat

SEQ ID NO: 426145 - DNA, 120 bp, Artificial Sequence
  ENSG00000151474_11 (sequence is synthesized)
caagtccatctgggctatggccataagccaacaccagttctatctggacagaaagcagagtaagtccaaaatccatgcagcacgcagcctgagtgagatcgccatcgacctgaccgagac

SEQ ID NO: 426146 - DNA, 120 bp, Artificial Sequence
  ENSG00000151474_12 (sequence is synthesized)
ggggacgctgaagacctcgaagctggccaacatgggtagcaaggggaagatcatcagcggcagcagcggcagcctgctgtcttcaggttctcaggaatcagatagctcgcagtcggccaa

SEQ ID NO: 426147 - DNA, 120 bp, Artificial Sequence
  ENSG00000151474_13 (sequence is synthesized)
gaaggacatgctggctgccttgaagtccaggcaggaagctctggaggaaaccctgcgtcagaggctggaggaactgaagaagctgtgtctccgagaagctgagctcacgggcaagctgcc

SEQ ID NO: 426148 - DNA, 120 bp, Artificial Sequence
  ENSG00000151474_14 (sequence is synthesized)
agtagaatatcccctggatccaggggaggaaccacccattgttcggagaagaataggaacagccttcaaactggatgaacagaaaatcctgcccaaaggagaggaagctgagctggaacg

SEQ ID NO: 426149 - DNA, 120 bp, Artificial Sequence
  ENSG00000151474_15 (sequence is synthesized)
cctggaacgagagtttgccattcagtcccagattacggaggccgcccgccgcctagccagtgaccccaacgtcagcaaaaaactgaagaaacaaaggaaaacctcgtatctgaatgcact

SEQ ID NO: 426150 - DNA, 120 bp, Artificial Sequence
  ENSG00000151474_16 (sequence is synthesized)
gaagaaactgcaggagattgaaaatgcaatcaatgagaaccgcatcaagtctgggaagaaacccacccagagggcttcgctgatcatagacgatggaaacattgccagtgaagacagctc

SEQ ID NO: 426151 - DNA, 120 bp, Artificial Sequence
  ENSG00000151474_17 (sequence is synthesized)
cctctcagatgcccttgttcttgaggatgaagactctcaggttaccagcacaatatcccccctacattctcctcacaagggactccctcctcggccaccgtcgcacaacaggcctcctcc

SEQ ID NO: 426152 - DNA, 120 bp, Artificial Sequence
  ENSG00000151474_18 (sequence is synthesized)
tccccagtccctggagggactccgacagatgcactatcaccgcaacgactatgacaagtcacccatcaagcccaaaatgtggagtgagtcctctttagatgaaccctatgagaaggtcaa

SEQ ID NO: 426153 - DNA, 120 bp, Artificial Sequence
  ENSG00000151474_19 (sequence is synthesized)
gaagcgctcctctcacagccattccagcagccacaagcgcttccccagcacaggaagctgtgcggaagccggcggaggaagcaactccttgcagaacagccccatccgcggcctcccgca

SEQ ID NO: 426154 - DNA, 120 bp, Artificial Sequence
  ENSG00000151474_20 (sequence is synthesized)
ctggaactcccagtccagcatgccgtccacgccagacctgcgggtccggagtccccactacgtccattccacgaggtcggtggacatcagccccacccgactgcacagcctcgcactgca

SEQ ID NO: 426155 - DNA, 120 bp, Artificial Sequence
  ENSG00000151474_21 (sequence is synthesized)
ctttaggcaccggagctccagcctggagtcccagggcaagctcctgggctcggaaaacgacaccgggagccccgacttctacaccccgcggactcgtagcagcaacggctcagaccccat

SEQ ID NO: 426156 - DNA, 120 bp, Artificial Sequence
  ENSG00000151474_22 (sequence is synthesized)
ggacgactgctcgtcgtgcaccagccactcgagctcggagcactactacccggcgcagatgaacgccaactactccacgctggccgaggactcgccgtccaaggcgcgccagaggcagag

SEQ ID NO: 426157 - DNA, 120 bp, Artificial Sequence
  ENSG00000151474_23 (sequence is synthesized)
cagctcgggcagcatgcccaacctggcggcgcgcgggggtgcggggggcgcggggggcgcggggggcggtgtgtacctgcacagccagagccagcccagctcgcagtaccgcatcaagga

SEQ ID NO: 426158 - DNA, 120 bp, Artificial Sequence
  ENSG00000151474_24 (sequence is synthesized)
ccagagccagcccagctcgcagtaccgcatcaaggagtacccgctgtacatcgagggcggcgccacgcccgtggtggtgcgcagcctggagagcgaccaggagggccactacagcgtcaa

SEQ ID NO: 426159 - DNA, 120 bp, Artificial Sequence
  ENSG00000151474_25 (sequence is synthesized)
ggctcagttcaagacgtccaactcctacacggcgggcggcctgttcaaggagagctggcgcggcggcggcggcgacgagggcgacacgggccgcctgacgccgtcgcgatcgcagatcct

SEQ ID NO: 426160 - DNA, 120 bp, Artificial Sequence
  ENSG00000151474_26 (sequence is synthesized)
gcggactccgtcgctgggccgcgagggcgcccacgacaagggcgcgggccgtgccgccgtctcagacgagctgcgccagtggtaccagcgttccaccgcctcgcacaaggagcacagccg

SEQ ID NO: 426161 - DNA, 120 bp, Artificial Sequence
  ENSG00000151474_27 (sequence is synthesized)
cctgtcgcacaccagctccacctcctcggacagcggctcgcagtacagcacctcctcccagagcaccttcgtggcgcacagcagggtcaccaggatgccccagatgtgcaaggccacgtc

SEQ ID NO: 426162 - DNA, 120 bp, Artificial Sequence
  ENSG00000151474_28 (sequence is synthesized)
gagaagctcgacaccgtcaagtgaaattggagccacccccccaagcagcccccaccacatcctaacctggcagactggagaagcaacagaaaactcacccattctggatgggtctgagtc

SEQ ID NO: 426163 - DNA, 120 bp, Artificial Sequence
  ENSG00000151474_29 (sequence is synthesized)
tccacctcaccaaagtactgatgaatagaggagctacaatgatagctgtttcctggattcctccctctatccagaactagctgatgtccagtggtacgggcaggaaaaagccaagcccgg

SEQ ID NO: 426164 - DNA, 120 bp, Artificial Sequence
  ENSG00000151474_30 (sequence is synthesized)
gaccctcgtgtgagccagcccggcctaatctgaccgcctcaacgccattctgagatcacctcactgcctctcatttgccttacccagacgcaccgtcaccctgcaccagctttggccctc

SEQ ID NO: 426165 - DNA, 120 bp, Artificial Sequence
  ENSG00000151474_31 (sequence is synthesized)
agcactttttttctcctgtctccgcattccctcccccttgaaaacctgactgaggagacattctggaaggttccggtcccactgtgtgtcccctggcgctcttgcccatagagagccaga

SEQ ID NO: 426166 - DNA, 120 bp, Artificial Sequence
  ENSG00000151474_32 (sequence is synthesized)
caccaatcctcaatggcaccttggtggcttccctctgccatgacagcccctaggccaggaaccatcaggggggccagccggcatccaattcctgcggataagtagcgttgggagagaacg

SEQ ID NO: 426167 - DNA, 120 bp, Artificial Sequence
  ENSG00000151474_33 (sequence is synthesized)
ggaaaggggacttgagttacagggtgacccagaaagacgattcagctgtgtccagcctgccacccatacgtaggccaaccaagcacttcatgaagaggaggcctcgtggcatattcagtt

SEQ ID NO: 426168 - DNA, 120 bp, Artificial Sequence
  ENSG00000151474_34 (sequence is synthesized)
tacacctgaaatattccttgatgggacagcttgtggggatggctatgggggaaggggaggttgagaaaggaagttctcgacaccagaaatgcatcggaggaccacaatcagttctatgct

SEQ ID NO: 426169 - DNA, 120 bp, Artificial Sequence
  ENSG00000151474_35 (sequence is synthesized)
gccaaagattaaaaataaataaaaacataaaaaattaagaggggccaagaggaagacattctttctgcaaggaaatttcttttaaattctgaactgctactacacacaagtgaaagtcaa

SEQ ID NO: 426170 - DNA, 120 bp, Artificial Sequence
  ENSG00000151474_36 (sequence is synthesized)
ccctatgtaaactggtgtcctctctctagccctctcccttactggcccacttctctctccgtagagagcctgaaaaactgccccaatgccacggtaaaggcgaggaagtcttggctggcg

SEQ ID NO: 426171 - DNA, 120 bp, Artificial Sequence
  ENSG00000151474_37 (sequence is synthesized)
ttgctgactcacagtcgccatccatctggacacaaagagagacctgtgggagtcgtagagggtactgttagccccggtccatgcagggggttcagccgagcccaagactcaaagctgctt

SEQ ID NO: 426172 - DNA, 120 bp, Artificial Sequence
  ENSG00000151474_38 (sequence is synthesized)
tcctttcaggatttgtagtaacgtaaggtgataatggccaaaagtggttctctctcattaaaccaaccagtaaaagcgtatcctatttttttgcacaaggtgtttcattttcgtttttat

SEQ ID NO: 426173 - DNA, 120 bp, Artificial Sequence
  ENSG00000151474_39 (sequence is synthesized)
gggaaaccaagggaaaagcacattgcgatccattcagtgtttaactgtcgtggctcattttctgttcgttagcacttgtgtgacaaaagagctcagatccgacttctcctatgtgtcact

SEQ ID NO: 426174 - DNA, 120 bp, Artificial Sequence
  ENSG00000151474_40 (sequence is synthesized)
tattccaagaacccaactatgcccttaggtagaaagatttgactcgtgtgtctactagccaacaggcagagcagggttgaaaaaaatatcagctcccaaagggcccatgtgtctacatca

SEQ ID NO: 426175 - DNA, 120 bp, Artificial Sequence
  ENSG00000151474_41 (sequence is synthesized)
tcagttactgtcatgcaccacatttgtgtgcagataccaaaagaggaggaaagaagaaaaaaattaatgtgtgggagctgcacgtttacatgttttgagctatgcttcaaacacaactgg

SEQ ID NO: 426176 - DNA, 120 bp, Artificial Sequence
  ENSG00000151474_42 (sequence is synthesized)
aaagccatcaatcttcaaaggcctcaaaaatacttttatagtaacaagtgcacgactttagttgggttattcaagatggcacaaaaaggtttccgcagaggtggtatgctgtgcttttgg

SEQ ID NO: 426177 - DNA, 120 bp, Artificial Sequence
  ENSG00000151474_43 (sequence is synthesized)
cgcaagtggtggggggatggggtgggggtggaatttttttctcactctaatgacttcctattggaaaggcattgacagccagggacaggagccagggtgggggtagttttgtgggaaagc

SEQ ID NO: 426178 - DNA, 120 bp, Artificial Sequence
  ENSG00000151474_44 (sequence is synthesized)
agaactgaagttagcttaagcataaaaacaaagaaaaatcttcgcttttcatgtatgtggaatccaagaataaccataggctctaccagaccagaagggtaaggatggacactaaaatga

SEQ ID NO: 426179 - DNA, 120 bp, Artificial Sequence
  ENSG00000151474_45 (sequence is synthesized)
aacaaataccaaggtattccttctgctgcagcctggagaccaccgagagtcgagctggggcacacacacacctggccgggacccggcagggacaaggcgggccgtggcctcctccaccaa

SEQ ID NO: 426180 - DNA, 120 bp, Artificial Sequence
  ENSG00000151474_46 (sequence is synthesized)
gtctctctagacaattcagggcctgctttccccagctccatgcatggctggactggtgattccagggtgcagaagggattcatattcccagaacgctttaagtgtacacctgcaggataa

SEQ ID NO: 426181 - DNA, 120 bp, Artificial Sequence
  ENSG00000151474_47 (sequence is synthesized)
agagataccggttacattattaaatgattctagggattcactgggggatatttttgttgcttttactttcatggttagagctacaaagaacagtgattttttttttttctcccttcccca

SEQ ID NO: 426182 - DNA, 120 bp, Artificial Sequence
  ENSG00000151474_48 (sequence is synthesized)
ttcagaaacattatacattgggccatttttctttctcccaaagaagattcatggatagtcagactgaactgtgtgcaacaggaaaagtcaaaagggaaaaggtagctgatgaggttacat

SEQ ID NO: 426183 - DNA, 120 bp, Artificial Sequence
  ENSG00000151474_49 (sequence is synthesized)
ggttacatgttctacatcatgcatagtagcttgaaatctagtctggagaaaactggatcaagattctagcccactggagttgcaaggaatgagaggcaaaaattctaaagatttgggtta

SEQ ID NO: 426184 - DNA, 120 bp, Artificial Sequence
  ENSG00000151474_50 (sequence is synthesized)
tattttcaacttgggggacagagagaaatggagagcaggaattacagttccaacaaacatcatgatagtctggtagtcaagacagagattaagtaaaacaggttttactgtttagctgag

SEQ ID NO: 426185 - DNA, 120 bp, Artificial Sequence
  ENSG00000151474_51 (sequence is synthesized)
ttcagttaatacaaaatgtacataaaacgttagtcctttgagactgacatgattaatgatcagtgtggtgggaaatgatgtagttattgtacacaagcacttgcaaactctttatcccta

SEQ ID NO: 426186 - DNA, 120 bp, Artificial Sequence
  ENSG00000151474_52 (sequence is synthesized)
tttctttaaaacaaaataaggtgaaatacgaagtccttggtctgatataaagcccctattggattcttcggatgcgtaaaagaaattgcctgtttcagccagaagactggtgaaaacaca

SEQ ID NO: 426187 - DNA, 120 bp, Artificial Sequence
  ENSG00000151474_53 (sequence is synthesized)
tacatcagactatgttgtgagccaggttgattttttattttattatatgcaggtgagtgttgaaactgttaaaattccaatttgttttcattcagtattagtttagttctaaatatagca

SEQ ID NO: 426188 - DNA, 120 bp, Artificial Sequence
  ENSG00000151474_54 (sequence is synthesized)
aaccccatccaggtgctatcagatgaccagttactgcttagttaactaggtgtaaagttttacatatacattaatgtcaatagtttattacaagttgtgtaaaatggactctagtttaat

SEQ ID NO: 426189 - DNA, 120 bp, Artificial Sequence
  ENSG00000151474_55 (sequence is synthesized)
aatgggggaaaaaagattaggttgctcctgaaactgactgtagagcatgtaaaatgattttactggattctgttcaactgtaatcaatgaaaaagatgtacgttgtagacaaagttgcag

SEQ ID NO: 426190 - DNA, 120 bp, Artificial Sequence
  ENSG00000151474_56 (sequence is synthesized)
aattaaaaaaagaaatctgcttttaatttattctttttgtattaagaatttgtatagtacctttacattttgcaaaacagtgttgtcaacacttattaaagcattttcaaaatgaaaaga

SEQ ID NO: 426191 - DNA, 120 bp, Artificial Sequence
  ENSG00000151474_57 (sequence is synthesized)
gccaagctggaagactttgagctgacactggagcacctgctcatggatgtgtttatgacggagggccgccgatgtcaagtacatcttcttgatgacaggaagctggaactcctagtacag

SEQ ID NO: 426192 - DNA, 120 bp, Artificial Sequence
  ENSG00000151474_58 (sequence is synthesized)
gcttctttcagttcgaatcctcctcacagatagtgatgaaaggggttgctctgaaaacctagacaggcacatttctaagtctgagctggtcagtggtgacagcctgttctatcgggaata

SEQ ID NO: 426193 - DNA, 120 bp, Artificial Sequence
  ENSG00000151474_59 (sequence is synthesized)
cctggacctgattgagggttcagctgctggtaccccccttccacctctgcatccatgacggagggccgccgatgtcaagtacatcttcttgatgacaggaagctggaactcctagtacag

SEQ ID NO: 426194 - DNA, 120 bp, Artificial Sequence
  ENSG00000151474_60 (sequence is synthesized)
gaggcaaagggagatttttctagctctgaactctgctgtaaatattatttattttgagagtaccctgacgggatggaatgtgaactgggaatagcatgatctggccccacggatcatggg

SEQ ID NO: 426195 - DNA, 120 bp, Artificial Sequence
  ENSG00000151474_61 (sequence is synthesized)
ccagcttgttggctgaattcaaagaaacaaaggatccgggttgtgctccatttgtcaaagtgctactgctacctagcagtttgtttgtaagcgcagctgtctgggaagagaaatcactgt

SEQ ID NO: 426196 - DNA, 120 bp, Artificial Sequence
  ENSG00000151474_62 (sequence is synthesized)
caggagaggggagaggtcagacaccttatccaaaagcaatgaagttgtgaggagtgacttgaagaagctgccagcccttcccacccaagccctgaaggagcacccttccctggcctactg

SEQ ID NO: 426197 - DNA, 120 bp, Artificial Sequence
  ENSG00000151474_63 (sequence is synthesized)
gcgattctcctgcttcatcctcctgagtagctggggttgcaggatgatgctcattccaagattttctgttttatttctgtcttttgcaatcgttggcctgctttgctgccataaatgagg

SEQ ID NO: 426198 - DNA, 120 bp, Artificial Sequence
  ENSG00000151474_64 (sequence is synthesized)
gaattgtggctaagagagcaatctgccggaagcatctcctcatccatcggtggacactaaccacagctataaccgggacaactagagacactgtccaagtcctctgtcaaattcacaact

SEQ ID NO: 426199 - DNA, 120 bp, Artificial Sequence
  ENSG00000151474_65 (sequence is synthesized)
gctggaggggcctaaggactcagttccctttatctaagacaaaaccgaatggagacagtaagagcccatcacactccaccctccctccctcaccttcttgcagagctggtagagtgtagt

SEQ ID NO: 426200 - DNA, 120 bp, Artificial Sequence
  ENSG00000151474_66 (sequence is synthesized)
ggccaagagcaggtcctctgcggtgtcacaattggagacctcttctgaatccatccctcaccaactcagtgaccagagctggttacccaacctctcagtgcttcaggtttggtttgatgt

SEQ ID NO: 426201 - DNA, 120 bp, Artificial Sequence
  ENSG00000151474_67 (sequence is synthesized)
tttcaatctctagaatgcaacagtcgtagagttggtgagaagattatgcagctgtgctgaggaaagagtaagagctcaaacatgtcagctgtcattcaaatgtcactacaatggcctttt

SEQ ID NO: 426202 - DNA, 120 bp, Artificial Sequence
  ENSG00000151474_68 (sequence is synthesized)
ttcaagtgtgatccacttgcaccaaaattacctgaggtgcttgtgacaaggatcttacagattcagtctccacggaaggttccagaagtgttttagtgatcgaggcaggggctctacagt

SEQ ID NO: 426203 - DNA, 120 bp, Artificial Sequence
  ENSG00000151474_69 (sequence is synthesized)
cagacagacccaacttcaaatcttaccttgcaccttagttagatctgcgtgatgtgcaacaagttaatgcatttagcttcttggagtctttgtttcaataaattaagacattaatatcta

SEQ ID NO: 426204 - DNA, 120 bp, Artificial Sequence
  ENSG00000151474_70 (sequence is synthesized)
gctgtcttcaggatctggtgccaggagacactgcattctactcccaggtctaaagagacggattgtcatttcccttctttagttctagaacaaccgattcctttcttctttggagcattg

SEQ ID NO: 426205 - DNA, 120 bp, Artificial Sequence
  ENSG00000151474_71 (sequence is synthesized)
tttgctttgaagtttcccctccttccagagaggaaagcaccccttctctgtcttctgaaatcagtggctggtcatcaatatcccctctgtgtcaaaaacagatgagccacgcgtggctcc

SEQ ID NO: 426206 - DNA, 120 bp, Artificial Sequence
  ENSG00000151474_72 (sequence is synthesized)
cggtgctgagtcgcccagggtcttctgaacaattggagcatttctggctcgcggctgaatgaggctgaaagaggctgtccttccatgtgtctgccggccgggaggagagctgctgtttgt

SEQ ID NO: 426207 - DNA, 120 bp, Artificial Sequence
  ENSG00000151474_73 (sequence is synthesized)
gctgctggcgttgcctccacatccgctcctccacacccagctgtccccggctggagtctggagttccccggctggaagctgggaaacccacagtgacacaggcagtgtctccagggtctc

SEQ ID NO: 426208 - DNA, 120 bp, Artificial Sequence
  ENSG00000151474_74 (sequence is synthesized)
aaacaatgttcatagcatcgggaagttcactccaaagatttccaaatgcccccgaaaatgactttctgacttggcgtgagtaactccatctctctctctgcttggatgggaattgtcttt

SEQ ID NO: 426209 - DNA, 120 bp, Artificial Sequence
  ENSG00000151474_75 (sequence is synthesized)
ttagggtcagccctttttgtcttcctcgttggccagattattagtgaactagttcaatgaaaatcctttggattaggattgaaatgtgctcataaggtcgccaaaaacaacagattctat

SEQ ID NO: 426210 - DNA, 120 bp, Artificial Sequence
  ENSG00000151474_76 (sequence is synthesized)
ctttagtatcattcaagtagatcatttcctcccgataactgggaggaaagattttttgctggagaactgacctgatgacactgttttcctgacaataattcagaggcaggcttaaccttc

SEQ ID NO: 426211 - DNA, 120 bp, Artificial Sequence
  ENSG00000151474_77 (sequence is synthesized)
agccgcttgcagccagaagttcctcggatcccttggaagcgcaaaaaataaaagatgacggagggccgccgatgtcaagtacatcttcttgatgacaggaagctggaactcctagtacag

SEQ ID NO: 426212 - DNA, 120 bp, Artificial Sequence
  ENSG00000151474_78 (sequence is synthesized)
tctgcagccacgagaagcaaagttgacatttctggatcactctccccagacgcgtcacttgcccacaagcgggacacggcagtctcgctgagccagctgtgcagagggacagatggaaga

SEQ ID NO: 426213 - DNA, 120 bp, Artificial Sequence
  ENSG00000151474_79 (sequence is synthesized)
aagctagagatgctgcttcgtgggcgctgaagttgcagaacttgggctggttttctttcttcccatcccccctcctcctgacaaaccacatcttgactcagatggtcgaaagaaaaactc

SEQ ID NO: 426214 - DNA, 120 bp, Artificial Sequence
  ENSG00000151474_80 (sequence is synthesized)
gtcgaaagaaaaactctttcagttatttgatatttgggaaccctccaggagaccataacttatttttgagggaggctccttctctccctttgctgggaacacacacacacacacacacac

SEQ ID NO: 426215 - DNA, 120 bp, Artificial Sequence
  ENSG00000151474_81 (sequence is synthesized)
gtgctgcagcaagaagaatgggcttgacaggctcacactgtgatcttgagttgcctgcccccgaaataaggtcccagcctcctccgccctttgcaaggctcttacacattagtgagcagg

SEQ ID NO: 426216 - DNA, 120 bp, Artificial Sequence
  ENSG00000151474_82 (sequence is synthesized)
aagtggagtcccgatgggaggctgggaatttgaacgccttcccatttcagcactggaggggaggaagctcagttcagcactccacgcagatggctaccgctccctcctgagcgctcgctc

SEQ ID NO: 426217 - DNA, 120 bp, Artificial Sequence
  ENSG00000151474_83 (sequence is synthesized)
ctctcgctcctctcccctcacccgccgccttccctgctgggtccctctccccggtctccacctctcctccctctcctggaagggaaaagtctgccaagctggggactgccacgaccaaac

SEQ ID NO: 426218 - DNA, 120 bp, Artificial Sequence
  ENSG00000151474_84 (sequence is synthesized)
caacaaaggccgaccgaaggcggagaacttgaaaagaacttgttttgttccagttaaggaacctgcaggaaaatccacacccacattgcctggttttgaactggagagctgcgtgtgtgt

SEQ ID NO: 426219 - DNA, 120 bp, Artificial Sequence
  ENSG00000151474_85 (sequence is synthesized)
gtgtatgtgtgtgtgtgtgtcaagcaagaggcggaggaggcacagactacggtctctgttttgataaggaaactgccagctgtcgaaagttaaccagcagagaggggaagatggcccagg

SEQ ID NO: 426220 - DNA, 120 bp, Artificial Sequence
  ENSG00000151474_86 (sequence is synthesized)
tgcagctggggagactgcagggcaagctgctccaaagctggctttgctttccagaccaaggttgggatccaaatgcgaatctgagaaaactgctcccaggaatcaaatagtggaagggaa

SEQ ID NO: 426221 - DNA, 120 bp, Artificial Sequence
  ENSG00000151474_87 (sequence is synthesized)
aaaaaaaaaaaaaagcatcagtagaaccacgcagtgcaagaaggcctgctggtcacacttaagtgtcttcaggtaccccccagagcgtttcacaatccccatggcaagctgtcgggaatg

SEQ ID NO: 426222 - DNA, 120 bp, Artificial Sequence
  ENSG00000151474_88 (sequence is synthesized)
ctcccaggtgggtttctccggcttttaaaaatgcggaatactctctccatcgtgtcgcagggcatgatttctccattcagtgccttttgaaattgcgagtcagagatctggttccgtcgt

SEQ ID NO: 426223 - DNA, 120 bp, Artificial Sequence
  ENSG00000151474_89 (sequence is synthesized)
ccgcttccgccagccttggccaagtcattttgtcttttgatgttgggagggacagaggagttccaaggtcctggatctgactgacttaaaaaggggggtgtcatttactgaaatggcagg

SEQ ID NO: 426224 - DNA, 120 bp, Artificial Sequence
  ENSG00000151474_90 (sequence is synthesized)
aggaggagtgggtttgaaagaagcagagaggaagggaggcagccgtggtttggaaatgttagaaaagggcattgtggccgggcacggtggctcacacctctaatcccagcactgtgggag

SEQ ID NO: 426225 - DNA, 120 bp, Artificial Sequence
  ENSG00000151474_91 (sequence is synthesized)
ggctcacacctctaatcccagcactgtgggaggccgaggctggagaatcacttgaggccagggagtttaagaccagcctgggcaatataatgagaccccgtctctaccaaaaaaaaaaaa

SEQ ID NO: 426226 - DNA, 89 bp, Artificial Sequence
  ENSG00000151474_92 (sequence is synthesized)
tgtagtcccagctacttgggaggctgagtagggaggatcactgaaccctggaggttgaggctgcagtgagcagtgactgcactgccttc

SEQ ID NO: 426227 - DNA, 120 bp, Artificial Sequence
  ENSG00000151474_93 (sequence is synthesized)
tttcaaaaaacaaaaaaagaaaagtggaatatgagaaaaaaacctgattgatgtaggaaccatgcagctgtctctgagccacgcaaagaaggcaagaaatcttccctggtaatttatatt

SEQ ID NO: 426228 - DNA, 120 bp, Artificial Sequence
  ENSG00000151474_94 (sequence is synthesized)
actatatatagtggctgtaaacaataacaaaaaggaaaagacaggagaggaagaggagctaaaaattgtctcgttagcttgtgggctggtgtgatccaatcatagccaggagaaatttaa

SEQ ID NO: 426229 - DNA, 120 bp, Artificial Sequence
  ENSG00000151474_95 (sequence is synthesized)
aggaccagagagaggacagacatccttcctggactgagaggcgaggttactgttctggtgagtggagcgttaagttgaaggcccctccttggacaggctgaggccctccggggaccttag

SEQ ID NO: 426230 - DNA, 120 bp, Artificial Sequence
  ENSG00000151474_96 (sequence is synthesized)
ttagcagtgtgttcacacggtcatgtgtttttataaaatctgtgaacataatatgttttgtatttttcttcagtagaaccgctaaaggccagtgtggtggctcaggcctgtaatctcagc

SEQ ID NO: 426231 - DNA, 120 bp, Artificial Sequence
  ENSG00000151474_97 (sequence is synthesized)
atttctccagtgctgctacagaatgggactttttgcttgaccttgtggaaactcatgggttctccaagttgtaaagagttaagaaaagggatggaatgtctggggaatgttgcagggaag

SEQ ID NO: 426232 - DNA, 120 bp, Artificial Sequence
  ENSG00000151474_98 (sequence is synthesized)
gctgcagctctctgctcttagctttctcaccctggaggggatcccaacactcggtggtgcttctgggtctgaggtcttccctaagttctgtttgatctgccaaagagccagcctcagtcc

SEQ ID NO: 426233 - DNA, 120 bp, Artificial Sequence
  ENSG00000151474_99 (sequence is synthesized)
actgagaaacagggatgtgccgttatctgcacactgaggtttatttttaccttgtccctggtgagtccccagagacaaggagaaaacactttgggagggagttaagagccttttgcttat

SEQ ID NO: 426234 - DNA, 120 bp, Artificial Sequence
  ENSG00000151474_100 (sequence is synthesized)
ccttgaaggaaagcagtctctgaggattagtgagggtggtggtgagggtaggtagggggaggagagtcagaggaatcagagttatttggactgcattttttccttgcctgattaaatctt

SEQ ID NO: 426235 - DNA, 120 bp, Artificial Sequence
  ENSG00000151474_101 (sequence is synthesized)
actgacattggcactttgtgtcactaaaagaacacagccctggatgtggggccagggaccagagggttggcggcagagtctggggctggcatggctgctgggctgcttggctctgaggac

SEQ ID NO: 426236 - DNA, 120 bp, Artificial Sequence
  ENSG00000151474_102 (sequence is synthesized)
ccaccgtggagttggaacctgacttgtcgggcgctgaggacctgccaagtgaggaacattcgagttctgcagctgctgctaaaaccatggtgcatctccagggccgtctatcagatgacg

SEQ ID NO: 426237 - DNA, 120 bp, Artificial Sequence
  ENSG00000151474_103 (sequence is synthesized)
gtcaagtgagcagggtacacagagagctgtaggcagattatggaaagagagagggaggagagagagggaggagagagagcgcgggagagggagaaagagagaggggaccagggcgaggag

SEQ ID NO: 426238 - DNA, 120 bp, Artificial Sequence
  ENSG00000151474_104 (sequence is synthesized)
ggtggcggtgcagaggcgccacccgggagaggggagccaccacggctcccgacatggctcttttcatgtgggatgcttaagcacggcacacagagagagtaacttgcaggagacagaaac

SEQ ID NO: 426239 - DNA, 120 bp, Artificial Sequence
  ENSG00000151474_105 (sequence is synthesized)
tggcatgaggattctgccaccatggaagggctcctgtctccgatgaggacgaagatgacggagggccgccgatgtcaagtacatcttcttgatgacaggaagctggaactcctagtacag

SEQ ID NO: 426240 - DNA, 120 bp, Artificial Sequence
  ENSG00000151474_106 (sequence is synthesized)
acacacacacagctgtacaccatggtggttcaggctgcagtggctccgaatagatcccaaagacttttactgaaaattccttatggatctctgagaaggcgcagcgttgaaaggatgacg

SEQ ID NO: 426241 - DNA, 120 bp, Artificial Sequence
  ENSG00000151474_107 (sequence is synthesized)
tgccacgtaagacgtgactttgctccccctttgcctgctgccatgattgtggggtctccccatccacgtgaagctgtgatctatggaggtgggacattgatgtagagttgaggacgataa

SEQ ID NO: 426242 - DNA, 120 bp, Artificial Sequence
  ENSG00000151474_108 (sequence is synthesized)
ctggcttcaggatttctcaagaaaagctttgagagatctacaccttggaaaccccagccctagaggagtgttcttccaagactccacgaacaggaaaaagtcctggatagcagctgagtg

SEQ ID NO: 426243 - DNA, 120 bp, Artificial Sequence
  ENSG00000151474_109 (sequence is synthesized)
gtggtggagatggccttttaggctgttgaaaagctgcctctcccatctttgcaagaatctcaggcagcgaaagaagatactgctgtgttcaccaacccgtgaggaggcttcagattgatg

SEQ ID NO: 426244 - DNA, 120 bp, Artificial Sequence
  ENSG00000151474_110 (sequence is synthesized)
gtgtcatttgttgagggcgtgtgagttcagggaaagctgcaagggctggaacatgctagagccgaggattagtttatctttagagccaggataaggatgaataaccaaggggcttcaagg

SEQ ID NO: 426245 - DNA, 120 bp, Artificial Sequence
  ENSG00000151474_111 (sequence is synthesized)
gtgttatgatgccatttcggttcttagattataaaggctcaccttcaggacagctagattaaaatagtttttaatggaaattaactggataataaataatgcaaattaagcttttctata

SEQ ID NO: 426246 - DNA, 120 bp, Artificial Sequence
  ENSG00000151474_112 (sequence is synthesized)
aatgaagtgtctttaaatacattatctcatttaattccatccatgaccctatttttaagaccaaaaaaaatctgataattagaatttgggaaactgtcaatggtcacataagtgaaactg

SEQ ID NO: 426247 - DNA, 120 bp, Artificial Sequence
  ENSG00000151474_113 (sequence is synthesized)
atgaagcaagttctcaaaatctcggtcctctgagtcccaagccagtgctttctctgacagcatatcaaagctcaacaatttgacttctaggaccttctaacactttggattcgctcctga

SEQ ID NO: 426248 - DNA, 120 bp, Artificial Sequence
  ENSG00000151474_114 (sequence is synthesized)
agttagctcccctctgaaccagtcagcattttctgtgtttccaggtgaggaatcctgtctttctgttaatcatctgttcttttccatattgaagtgtaaaataaaaaagggataccacaa

SEQ ID NO: 426249 - DNA, 120 bp, Artificial Sequence
  ENSG00000151474_115 (sequence is synthesized)
gacggtgtttcctgagctggggagtttgcagatctgatctgtcagcggggactgagagcaaatcgggacattcatcatgactttggctgccaagctggaagactttgagctgacactgga

SEQ ID NO: 426250 - DNA, 120 bp, Artificial Sequence
  ENSG00000151474_116 (sequence is synthesized)
tccactgtatgatcgaacaaaggaacagagagccaccaatgaagttgtgaggagtgacttgaagaagctgccagcccttcccacccaagccctgaaggagcacccttccctggcctactg

SEQ ID NO: 426251 - DNA, 120 bp, Artificial Sequence
  ENSG00000151475_0 (sequence is synthesized)
gccggcgcgcggctctctcagcgtcccaagagccactttctcgccagtacgatgctgcagcggttttccggttttccgcttcccttcatcgtagctcccgtactcatttttagccactgc

SEQ ID NO: 426252 - DNA, 120 bp, Artificial Sequence
  ENSG00000151475_1 (sequence is synthesized)
tgccggtttttatatccttctccatcatgcatcgtgagcctgcgaaaaagaaggcagaaaagcggctgtttgacgcctcatccttcgggaaggaccttctggccggcggagtcgcggcag

SEQ ID NO: 426253 - DNA, 120 bp, Artificial Sequence
  ENSG00000151475_2 (sequence is synthesized)
ctgtgtccaagacagcggtggcgcccatcgagcgggtgaagctgctgctgcaggtgcaggcgtcgtcgaagcagatcagccccgaggcgcggtacaaaggcatggtggactgcctggtgc

SEQ ID NO: 426254 - DNA, 120 bp, Artificial Sequence
  ENSG00000151475_3 (sequence is synthesized)
ggattcctcgcgagcagggtttcttcagtttttggcgtggcaatttggcaaatgttattcggtattttccaacacaagctctaaactttgcttttaaggacaaatacaagcagctattca

SEQ ID NO: 426255 - DNA, 120 bp, Artificial Sequence
  ENSG00000151475_4 (sequence is synthesized)
tgtctggagttaataaagaaaaacagttctggaggtggtttttggcaaacctggcttctggtggagctgctggggcaacatccttatgtgtagtatatcctctagattttgcccgaaccc

SEQ ID NO: 426256 - DNA, 120 bp, Artificial Sequence
  ENSG00000151475_5 (sequence is synthesized)
gattaggtgtcgatattggaaaaggtcctgaggagcgacaattcaagggtttaggtgactgtattatgaaaatagcaaaatcagatggaattgctggtttataccaagggtttggtgttt

SEQ ID NO: 426257 - DNA, 120 bp, Artificial Sequence
  ENSG00000151475_6 (sequence is synthesized)
cagtacagggcatcattgtgtaccgagcctcttattttggagcttatgacacagttaagggtttattaccaaagccaaagaaaactccatttcttgtctcctttttcattgctcaagttg

SEQ ID NO: 426258 - DNA, 120 bp, Artificial Sequence
  ENSG00000151475_7 (sequence is synthesized)
ctggaatactttcttatccctttgacacagttagaagacgtatgatgatgcagagtggtgaggctaaacggcaatataaaggaaccttagactgctttgtgaagatataccaacatgaag

SEQ ID NO: 426259 - DNA, 120 bp, Artificial Sequence
  ENSG00000151475_8 (sequence is synthesized)
gaatcagttccttttttcgtggcgccttctccaatgttcttcgcggtacagggggtgctttggtgttggtattatatgataaaattaaagaattctttcatattgatattggtggtaggt

SEQ ID NO: 426260 - DNA, 120 bp, Artificial Sequence
  ENSG00000151475_9 (sequence is synthesized)
aatcgggagagtaaattaagaaatacatggatttaacttgttaaacatacaaattacatagctgccatttgcatacattttgatagtgttattgtctgtattttgttaaagtgctagttc

SEQ ID NO: 426261 - DNA, 120 bp, Artificial Sequence
  ENSG00000151475_10 (sequence is synthesized)
tgcaataaagcatacattttttcaagaatttaaatactaaaaatcagataaatgtggattttcctcccacttagactcaaacacattttagtgtgatatttcatttattataggtagtat

SEQ ID NO: 426262 - DNA, 120 bp, Artificial Sequence
  ENSG00000151475_11 (sequence is synthesized)
ttgttagtttaaaattctttttatgattaaaaattaatcatataatcctagattaatgctgaaatctaggaaatgaaagtagcgtcttttaaattgctattcatttaatatacctgtttt

SEQ ID NO: 426263 - DNA, 120 bp, Artificial Sequence
  ENSG00000151475_12 (sequence is synthesized)
cctgttttcccatcttttgaagtcatatggtatgacatatttcttaaaagcttatcaatagatgtcatcatatgtgtaggcagaaataagctttgttctatatctcttctaagacagttg

SEQ ID NO: 426264 - DNA, 120 bp, Artificial Sequence
  ENSG00000151475_13 (sequence is synthesized)
ttattactgtgtataatatttacagtatcagcctttgattatagatgtgatcatttaaaatttgataatgactttagtgacattataaaactgaaactggaaaataaaatggcttatctg

SEQ ID NO: 426265 - DNA, 120 bp, Artificial Sequence
  ENSG00000151475_14 (sequence is synthesized)
ctgatgtttatctttaaaataaataaaatcttgctagtgtgaatatatcttagaacaaaaggtatcctcttgaaaattagtttgtatattttgttgacaataaaggaagcttaactgtta

SEQ ID NO: 426266 - DNA, 120 bp, Artificial Sequence
  ENSG00000151490_0 (sequence is synthesized)
agtcattaaagaacagcagcgcctggcacgttcttggaggaccccgggcgcagaggaggaaagggagcaggcgcagggggactggaaaggcagcatgcgctcgccaggagcaacctcggc

SEQ ID NO: 426267 - DNA, 120 bp, Artificial Sequence
  ENSG00000151490_1 (sequence is synthesized)
gcccagggtctgaggctgcagccccagttcgccattgtgagccgccgccgggggagtccgctagcgcagccgtgcccccgagtccccgtccgcgcagcgatggggcacctgcccacgggg

SEQ ID NO: 426268 - DNA, 120 bp, Artificial Sequence
  ENSG00000151490_2 (sequence is synthesized)
atacacggcgcccgccgcctcctgcctctgctctggctctttgtgctgttcaagaatgctacagctttccatgtaactgtccaagatgataataacatcgttgtctcattagaagcttca

SEQ ID NO: 426269 - DNA, 120 bp, Artificial Sequence
  ENSG00000151490_3 (sequence is synthesized)
gacgtcatcagtccagcatctgtgtatgttgtgaagataactggtgaatccaaaaattatttcttcgaatttgaggaattcaacagcactttgcctcctcctgttattttcaaggccagt

SEQ ID NO: 426270 - DNA, 120 bp, Artificial Sequence
  ENSG00000151490_4 (sequence is synthesized)
tatcatggcctttattatataatcactctggtagtggtaaatggaaatgtggtgaccaagccatccagatcaatcactgtgttaacaaaacctctacctgtaaccagtgtttccatatat

SEQ ID NO: 426271 - DNA, 120 bp, Artificial Sequence
  ENSG00000151490_5 (sequence is synthesized)
gactataaaccttctcctgaaacaggagtcctgtttgaaatacattatccagaaaaatataacgttttcacaagagtgaacattagctactgggaaggtaaagacttccggacaatgcta

SEQ ID NO: 426272 - DNA, 120 bp, Artificial Sequence
  ENSG00000151490_6 (sequence is synthesized)
tataaagatttctttaagggaaaaacagtatttaatcactggctgccaggaatgtgttatagtaatatcacctttcagctggtatctgaggcaacttttaataaaagtacccttgttgag

SEQ ID NO: 426273 - DNA, 120 bp, Artificial Sequence
  ENSG00000151490_7 (sequence is synthesized)
tacagtggtgtcagtcacgaacccaaacagcacagaactgccccttatccacctcaaaatatttccgttcgtatcgtaaacttgaacaaaaacaactgggaagaacagagtggcaatttc

SEQ ID NO: 426274 - DNA, 120 bp, Artificial Sequence
  ENSG00000151490_8 (sequence is synthesized)
ccagaagaatccttcatgagatcacaagatacaataggaaaagaaaaactcttccattttacagaagaaacccctgaaattccctcgggcaacatttcttccggttggcctgattttaat

SEQ ID NO: 426275 - DNA, 120 bp, Artificial Sequence
  ENSG00000151490_9 (sequence is synthesized)
agcagtgactatgaaactacgtctcagccatattggtgggacagtgcatctgcagctcctgaaagtgaagatgaatttgtcagcgtacttcccatggaatacgaaaataacagtacactc

SEQ ID NO: 426276 - DNA, 120 bp, Artificial Sequence
  ENSG00000151490_10 (sequence is synthesized)
agtgagacagagaagtcaacatcaggctctttctcctttttccctgtgcaaatgatattgacctggttaccacccaaaccacccactgcttttgatgggttccatatccatattgaacga

SEQ ID NO: 426277 - DNA, 120 bp, Artificial Sequence
  ENSG00000151490_11 (sequence is synthesized)
gaagagaactttactgaatatttgatggtggatgaagaagcacatgaatttgttgcagaactgaaggaacctgggaaatataagttatctgtgacaacctttagttcctcaggatcttgt

SEQ ID NO: 426278 - DNA, 120 bp, Artificial Sequence
  ENSG00000151490_12 (sequence is synthesized)
gaaactcgaaaaagtcagtcagcaaaatcactcagcttttatatcagtccttcaggagagtggattgaagaactgaccgagaagccgcagcacgtgagtgtccacgttttaagctcaacc

SEQ ID NO: 426279 - DNA, 120 bp, Artificial Sequence
  ENSG00000151490_13 (sequence is synthesized)
actgccttgatgtcctggacatcttcccaagagaactacaacagcaccattgtgtctgtggtgtcgctgacctgccagaaacaaaaggagagccagaggcttgaaaagcagtactgcact

SEQ ID NO: 426280 - DNA, 120 bp, Artificial Sequence
  ENSG00000151490_14 (sequence is synthesized)
caggtgaactcaagcaaacctattattgaaaatctggttcctggtgcccagtaccaggttgtaatatacctaaggaaaggccctttgattggaccaccttcagatcctgtgacatttgct

SEQ ID NO: 426281 - DNA, 120 bp, Artificial Sequence
  ENSG00000151490_15 (sequence is synthesized)
attgttcccacaggaataaaggatttaatgctctatcctttgggtcctacggccgtggttctgagctggaccagaccttatttaggcgtgttcagaaaatacgtggttgaaatgttttat

SEQ ID NO: 426282 - DNA, 120 bp, Artificial Sequence
  ENSG00000151490_16 (sequence is synthesized)
ttcaaccctgctacaatgacatcagagtggaccacctactatgaaatagcagcaactgtttccttaactgcatccgtgagaatagctaatctgctgccagcatggtactacaacttccgg

SEQ ID NO: 426283 - DNA, 120 bp, Artificial Sequence
  ENSG00000151490_17 (sequence is synthesized)
gttaccatggtgacgtggggagatccagaattgagctgctgtgacagctctaccatcagcttcataacagccccagtggctccggaaatcacttctgtggaatatttcaacagtctgtta

SEQ ID NO: 426284 - DNA, 120 bp, Artificial Sequence
  ENSG00000151490_18 (sequence is synthesized)
tatatcagttggacatatggggatgatacaacggacttgtcccattctagaatgcttcactggatggtggttgcagaaggaaaaaagaaaattaaaaagagtgtaacacgcaatgtcatg

SEQ ID NO: 426285 - DNA, 120 bp, Artificial Sequence
  ENSG00000151490_19 (sequence is synthesized)
actgcaattctcagcttgcctccaggcgacatctataacctctcagtaactgcttgtactgaaagaggaagtaatacctccatgctccgccttgtcaagctagaaccagctccacccaaa

SEQ ID NO: 426286 - DNA, 120 bp, Artificial Sequence
  ENSG00000151490_20 (sequence is synthesized)
tcactcttcgcagtgaacaaaacccagacttcagtgactttgctgtgggtggaagagggagtagctgatttctttgaagttttctgtcaacaagttggctccagtcagaaaaccaaactt

SEQ ID NO: 426287 - DNA, 120 bp, Artificial Sequence
  ENSG00000151490_21 (sequence is synthesized)
caggaaccagttgctgtttcttcccatgtcgtgaccatctccagccttcttcctgccactgcctacaattgtagtgtcaccagctttagccatgacagccccagtgtccctacgttcata

SEQ ID NO: 426288 - DNA, 120 bp, Artificial Sequence
  ENSG00000151490_22 (sequence is synthesized)
gccgtctcaacaatggttacagagatgaatcccaatgtggtagtgatctccgtgctggccatccttagcacacttttaattggactgttgcttgttaccctcattattcttaggaaaaag

SEQ ID NO: 426289 - DNA, 120 bp, Artificial Sequence
  ENSG00000151490_23 (sequence is synthesized)
catctgcagatggctagggagtgtggagctggtacatttgtcaattttgcatccttagagagggatggaaagcttccatacaactggcgtaggagtatatttgctttcttaaccctgcta

SEQ ID NO: 426290 - DNA, 120 bp, Artificial Sequence
  ENSG00000151490_24 (sequence is synthesized)
ccctcatgtctttggactgattatcttttggcattttatattaatccttggagtaaaaatggtttaaagaagaggaaactgacaaacccggttcaactggatgactttgatgcctatatt

SEQ ID NO: 426291 - DNA, 120 bp, Artificial Sequence
  ENSG00000151490_25 (sequence is synthesized)
ggccaaagactctgactataaattttctcttcagtttgaggagttgaaattgattggactggatatcccacactttgctgcagatcttccactgaatcgatgtaaaaaccgttacacaaa

SEQ ID NO: 426292 - DNA, 120 bp, Artificial Sequence
  ENSG00000151490_26 (sequence is synthesized)
catcctaccatatgacttcagccgtgtgagattagtctccatgaatgaagaggaaggtgcagactacatcaatgccaactatattcctggatacaactcaccccaggagtatattgccac

SEQ ID NO: 426293 - DNA, 120 bp, Artificial Sequence
  ENSG00000151490_27 (sequence is synthesized)
ccaggggccactgcctgaaaccagaaatgacttctggaagatggtcctgcaacaaaagtctcagattattgtcatgctcactcagtgtaatgagaaaaggagggtgaaatgtgaccatta

SEQ ID NO: 426294 - DNA, 120 bp, Artificial Sequence
  ENSG00000151490_28 (sequence is synthesized)
ctggccattcacggaagaacctatagcctatggagacatcactgtggagatgatttcagaggaagagcaggacgactgggcctgtagacacttccggatcaactatgctgacgagatgca

SEQ ID NO: 426295 - DNA, 120 bp, Artificial Sequence
  ENSG00000151490_29 (sequence is synthesized)
ggatgtgatgcattttaactacactgcatggcctgatcatggtgtgcccacagcaaatgctgcagaaagtatcctgcagtttgtacacatggtccgacagcaagctaccaagagcaaagg

SEQ ID NO: 426296 - DNA, 120 bp, Artificial Sequence
  ENSG00000151490_30 (sequence is synthesized)
tcccatgatcattcactgcagtgctggcgtgggacggacaggaacattcattgccctggacaggctcttgcagcacattcgggatcatgagtttgttgacatcttagggctggtgtcaga

SEQ ID NO: 426297 - DNA, 120 bp, Artificial Sequence
  ENSG00000151490_31 (sequence is synthesized)
aatgaggtcataccggatgtctatggtacagacagaggagcagtacatttttatccatcagtgtgtgcaactgatgtggatgaagaagaagcagcagttctgcatcagtgatgtcatata

SEQ ID NO: 426298 - DNA, 120 bp, Artificial Sequence
  ENSG00000151490_32 (sequence is synthesized)
cgagaatgttagcaagtcctagttcagaatccggagcagagaggacatgatgtgcgcccatcctcccttgcttccagattgttttagtgggccctgatggtcatttttctaaacagaggc

SEQ ID NO: 426299 - DNA, 120 bp, Artificial Sequence
  ENSG00000151490_33 (sequence is synthesized)
cctgctttgtaatatgtggccaaggagataatttatctcacagaagcaccgggaagacttagccttaaagagcctacagtgtccttttggactctttcacttcgggacatttaataatgg

SEQ ID NO: 426300 - DNA, 120 bp, Artificial Sequence
  ENSG00000151490_34 (sequence is synthesized)
accaaattcaacagaacaccaggaaggtcaagacgctctccaaagggcaggaagtacagcacttccgaagagtttagttggccctttgctggttgggctgagttttttatttttaagtgt

SEQ ID NO: 426301 - DNA, 120 bp, Artificial Sequence
  ENSG00000151490_35 (sequence is synthesized)
ttgtttttcagtgcaataatttttgtgtgtgtgtgattcttatcagaaagttgaattgttttctgcctacaccgttcatcagccccataacccaggaaggaacaggcattgttagcatca

SEQ ID NO: 426302 - DNA, 120 bp, Artificial Sequence
  ENSG00000151490_36 (sequence is synthesized)
gattatacctcattattaaaaggaggcatggccacacatgaagaaatggtcattctacttcaaagaaattgagccagcactatctgtactccaacattaccggatctggattggggaggt

SEQ ID NO: 426303 - DNA, 120 bp, Artificial Sequence
  ENSG00000151490_37 (sequence is synthesized)
tggtcagggaagagaggggttctacccacagatcaactgtgtaatcttttactattcaagctataattcagcttcaaagtagagtagaaaaaaaattgtcttaactgttctagttcttga

SEQ ID NO: 426304 - DNA, 120 bp, Artificial Sequence
  ENSG00000151490_38 (sequence is synthesized)
tggttttcttccttattaacagttggtgtttcttccttggcccttttggactaatgttactgtccaagttctttctcaagaaaccacatctggttcagaagagtgtcaagttggactctt

SEQ ID NO: 426305 - DNA, 120 bp, Artificial Sequence
  ENSG00000151490_39 (sequence is synthesized)
tgaactctgttgctgtctgagcaatcgtggtgcctagactttgcattccttgttctgttgacctgcatacatgtgagagctatttctttaagaactatataggctgtgaaaacgcacttt

SEQ ID NO: 426306 - DNA, 120 bp, Artificial Sequence
  ENSG00000151490_40 (sequence is synthesized)
ctttcccccaaagagctgggaatttatgaagttatggcaatgaactgcagcatgctgggacaattatttgactacttttttttgtaatattgtcaaatgtctctatggattctgacagag

SEQ ID NO: 426307 - DNA, 120 bp, Artificial Sequence
  ENSG00000151490_41 (sequence is synthesized)
atttctttttgttttgttattcttttggttgtcagtttcattttaacgagtgtaactagtaacattttattctttggattttgtataattacagtacatgattgtgtattgtgacatgaa

SEQ ID NO: 426308 - DNA, 120 bp, Artificial Sequence
  ENSG00000151490_42 (sequence is synthesized)
tgctgtcaaaatgacattgatggcattgtgaagcctgttactttgtgtcacttcctgataaataagaggtgatgacatggatatacaacagaaaacactttgagttgaaagtaaacacaa

SEQ ID NO: 426309 - DNA, 120 bp, Artificial Sequence
  ENSG00000151490_43 (sequence is synthesized)
gctggctgcttccctgtggcaactgtggctattgtgagcctccgtgtgtgtgcttccaggaggctttgctcctcttcatgcacccgacactgccccttccctggcttccctccatccctg

SEQ ID NO: 426310 - DNA, 120 bp, Artificial Sequence
  ENSG00000151490_44 (sequence is synthesized)
atcatcttcatgaagccacagatataagatcagcttaatattttatcagtgaccttagtgttggtgaaggatgccaaatgaacagctctgcaccccaccgtctcttgtcactgaaaaggc

SEQ ID NO: 426311 - DNA, 120 bp, Artificial Sequence
  ENSG00000151490_45 (sequence is synthesized)
ttggccatggcagaccttggcagagtttcttgcaagatctggccagtgagtctcagtttcaccttgcagggtgaatggcagaggatgcccataccctgcaggttaacagcttgggctcct

SEQ ID NO: 426312 - DNA, 120 bp, Artificial Sequence
  ENSG00000151490_46 (sequence is synthesized)
caggggttgtcagttcctactcacctccctgctaccacctcctcctcttcttctcacccccgactcctttatttccctttttggacattttaataatgtgtcgcaccattctcaggaaca

SEQ ID NO: 426313 - DNA, 120 bp, Artificial Sequence
  ENSG00000151490_47 (sequence is synthesized)
aacatggttaatgaaaggtggcaaagggatgtgtgacattcttagattttcacacatgggcagtcaggagtgaaatgtgcaaccttggaagagctgatacaatgtatggtaagctgaagt

SEQ ID NO: 426314 - DNA, 120 bp, Artificial Sequence
  ENSG00000151490_48 (sequence is synthesized)
acgtttccaacactgctgctcagagcatacagaagttttgcatcctggaacattgcttcccatgaaacaaagcacttcataaatattttatgtttttcttgagcaccctttcaaggtagg

SEQ ID NO: 426315 - DNA, 120 bp, Artificial Sequence
  ENSG00000151490_49 (sequence is synthesized)
gatcaaatagtgccagatcaattttcccaaaaggaaagaggaagtatccagagtttagactgaaggcttagagtcaaaactacaggaaggtcacactgttctctggaacactgttgctct

SEQ ID NO: 426316 - DNA, 120 bp, Artificial Sequence
  ENSG00000151490_50 (sequence is synthesized)
tcagtttgtagagtttatgatggaaaaggcatcagtctgtcaaaagacttgtttaatcctgataatgactttggaattatctctcctgggtctcagttaataaactgaagaatgacctaa

SEQ ID NO: 426317 - DNA, 120 bp, Artificial Sequence
  ENSG00000151490_51 (sequence is synthesized)
tttggcaaatgggaagtataaagtgcagatatgttcatgcaatctagtagagttttaaaaaatgaatctgaaattattattatcttctcatgtaaggaaaagtaaacaaacctgatatgt

SEQ ID NO: 426318 - DNA, 120 bp, Artificial Sequence
  ENSG00000151490_52 (sequence is synthesized)
gtttaatgaaaattaaataaaactgaggtacctgatgtaattatttaaagctgttcaagtttaattattatgttaatcaattcttctgcccagataaatttgtcttttcttttttaatta

SEQ ID NO: 426319 - DNA, 120 bp, Artificial Sequence
  ENSG00000151490_53 (sequence is synthesized)
gctctggctctttgtgctgttcaaggagtgcctgtgaggatgtttccaggagagataagtattggaattgatggaccaagtaaagcaggtggcatactccaatatggatgggcatgattc

SEQ ID NO: 426320 - DNA, 120 bp, Artificial Sequence
  ENSG00000151490_54 (sequence is synthesized)
aatccattgagggctcgaatagagcaaaaagacagaagaatgctgggttcacctgctctctgctggactacttgggttgggacatctatcttcttctgcctttgatgcttctggttctca

SEQ ID NO: 426321 - DNA, 120 bp, Artificial Sequence
  ENSG00000151490_55 (sequence is synthesized)
tgaccctctagctttcaggcctttaaacttcacttgaccttcctgcatgtccagattgcagacagcagattctgggatttcttagcctccataatcatgtgagccaatatgtgataataa

SEQ ID NO: 426322 - DNA, 120 bp, Artificial Sequence
  ENSG00000151490_56 (sequence is synthesized)
atttctttaaaaatatggattagtaaaatttgcatcctaatgaaaatgtaagcattgtgacagagaatgctttagtcagtctcaaatcctaaatttgagattgaaatttaagatagctta

SEQ ID NO: 426323 - DNA, 120 bp, Artificial Sequence
  ENSG00000151490_57 (sequence is synthesized)
aagtactgtagcagatctttgagtttcaatgcaccttggttggtgttggcaacaaacaggagcttctgcacatcatgatgactttacctccattccctctacccagaaccctaaattatt

SEQ ID NO: 426324 - DNA, 120 bp, Artificial Sequence
  ENSG00000151490_58 (sequence is synthesized)
ctgttattggatctgtgcctgtaatatcaggatactaccatccaaatctatctagatatcttgtgcaaatattttattgattacaagggctgtatacggggttacaaaaagacatgagct

SEQ ID NO: 426325 - DNA, 120 bp, Artificial Sequence
  ENSG00000151490_59 (sequence is synthesized)
ggattggacactcctaaaaccaaaaacaacagtgacaatagagtctcaggatagcagagtctgaaaataccttggtctcccccattatgtgagcccttacttgagagcttcatgaagaca

SEQ ID NO: 426326 - DNA, 120 bp, Artificial Sequence
  ENSG00000151490_60 (sequence is synthesized)
ctcatcaactgcattttctattaaatattaggagttggttttgtaaggggaacagctcaccattccataagcccttatcaggtttagttgaaaattaaataaactctgatgttttttaaa

SEQ ID NO: 426327 - DNA, 120 bp, Artificial Sequence
  ENSG00000151490_61 (sequence is synthesized)
aagtaaaaaaatggaagggggaaaaggcaaagtattctgccttccaagttagatagctatctttatgaaaggacatatttcaaaggcaatataaagtctttatggtgctcttacctacct

SEQ ID NO: 426328 - DNA, 120 bp, Artificial Sequence
  ENSG00000151490_62 (sequence is synthesized)
cctgtactccagttttgactacgagatcagattttggaggtgtaagtaaacttggctgaggtaacagtaatctgcccatttagttcagtaaacagactgtagagtgtctgactatactgg

SEQ ID NO: 426329 - DNA, 120 bp, Artificial Sequence
  ENSG00000151490_63 (sequence is synthesized)
gggaagaggagccaatgacagggtagggagatgacagtggtgcatgatgggagaatcatgaaagtctgggaagcatatggaccagtgggaaggataggattagcactgcacctctacatc

SEQ ID NO: 426330 - DNA, 120 bp, Artificial Sequence
  ENSG00000151490_64 (sequence is synthesized)
catcaagagagacagagcgcacaatggagcaggaaggataaaaaataaagaaagacagagagaaacaaatttgctgggagagggaaagacattcagacccacagaaaggaggcagcacac

SEQ ID NO: 426331 - DNA, 120 bp, Artificial Sequence
  ENSG00000151490_65 (sequence is synthesized)
agagaaagatgcacagatcaacccacatctgcatgggttgtgagactgagcatagtgagagcagtggtggagcaatagaagattgctgtgacaccaggctgcttactgtctttctttgtc

SEQ ID NO: 426332 - DNA, 120 bp, Artificial Sequence
  ENSG00000151490_66 (sequence is synthesized)
aactgcatccgtggtaatcttcccttaaccaactgtcagtctttcctatgggaacaggcaaacctttatgtaccaaatgtgtctttaagaaattatctataaatttgattattttgtaaa

SEQ ID NO: 426333 - DNA, 120 bp, Artificial Sequence
  ENSG00000151491_0 (sequence is synthesized)
agacttcacaggcagcagctagcgaggcggtctcgcccggcgcgaggccggcgctgtgctcgcctcggagatcgctgctctttagctgggtgcagaaggcggctccgcggctcgcggacg

SEQ ID NO: 426334 - DNA, 120 bp, Artificial Sequence
  ENSG00000151491_1 (sequence is synthesized)
actggctgggcgcgaatcagattggggggctttctcccggtcccctcccacctcgtctgggctcgcggcgtctccggggaaagccgtggccccgagggcggatccgagaacacacaagtg

SEQ ID NO: 426335 - DNA, 120 bp, Artificial Sequence
  ENSG00000151491_2 (sequence is synthesized)
aaagacacaatgaatggtcatatttctaatcatcccagtagttttggaatgtacccatctcagatgaatggctacggatcatcacctaccttttcccagacggacagagaacatggttca

SEQ ID NO: 426336 - DNA, 120 bp, Artificial Sequence
  ENSG00000151491_3 (sequence is synthesized)
aaaacaagtgcaaaggccctttatgaacaaaggaagaattatgcacgggacagtgtcagcagtgtgtcagatatatctcaataccgtgttgaacacttgactacctttgtcctggatcgg

SEQ ID NO: 426337 - DNA, 120 bp, Artificial Sequence
  ENSG00000151491_4 (sequence is synthesized)
aaagatgctatgatcactgttgatgatggaataaggaaattgaaattgcttgatgccaagggcaaagtgtggactcaagatatgattcttcaagtggatgacagagctgtgagcctgatt

SEQ ID NO: 426338 - DNA, 120 bp, Artificial Sequence
  ENSG00000151491_5 (sequence is synthesized)
gatttagaatcaaagaatgaactggagaattttcctttaaacacaatccagcactgccaagctgtgatgcattcatgcagctatgattcagttcttgcactggtgtgcaaagagccaacc

SEQ ID NO: 426339 - DNA, 120 bp, Artificial Sequence
  ENSG00000151491_6 (sequence is synthesized)
cagaacaagccagatcttcatctcttccagtgtgatgaggttaaggcaaacctaattagtgaagatattgaaagtgcaatcagtgacagtaaaggagggaaacagaagaggcggcccgac

SEQ ID NO: 426340 - DNA, 120 bp, Artificial Sequence
  ENSG00000151491_7 (sequence is synthesized)
gccctgaggatgatttccaatgcagaccctagtataccgcctccacccagagctcctgcccctgcgccccctgggaccgtcacccaggtggatgttagaagtcgagtggcagcctggtct

SEQ ID NO: 426341 - DNA, 120 bp, Artificial Sequence
  ENSG00000151491_8 (sequence is synthesized)
gcatgggcagccgaccaaggggactttgagaaaccaaggcagtatcatgagcaggaagaaacacctgagatgatggcagcccgcattgacagagatgtgcaaatcttaaaccacattttg

SEQ ID NO: 426342 - DNA, 120 bp, Artificial Sequence
  ENSG00000151491_9 (sequence is synthesized)
gatgacattgaattttttatcacaaaactccaaaaagcagcagaagcattttctgagctttctaaaaggaagaaaaacaagaaaggtaaaaggaaaggaccaggagagggtgttttaacg

SEQ ID NO: 426343 - DNA, 120 bp, Artificial Sequence
  ENSG00000151491_10 (sequence is synthesized)
ctgcgggcaaaacctccacctcctgatgaatttcttgactgtttccaaaagtttaaacacggatttaaccttctggccaaactgaagtctcatattcagaatcctagtgctgcagatttg

SEQ ID NO: 426344 - DNA, 120 bp, Artificial Sequence
  ENSG00000151491_11 (sequence is synthesized)
gttcactttttgtttactccattaaatatggtggtgcaggcaacaggaggtcctgaactagccagttcagtacttagtcccctattgaataaggacacaattgatttcttaaattatact

SEQ ID NO: 426345 - DNA, 120 bp, Artificial Sequence
  ENSG00000151491_12 (sequence is synthesized)
gtcaatggtgatgaacggcagctgtggatgtcattgggaggaacttggatgaaagccagagcagagtggccaaaagaacagtttattccaccatatgttccacgattccgcaatggctgg

SEQ ID NO: 426346 - DNA, 120 bp, Artificial Sequence
  ENSG00000151491_13 (sequence is synthesized)
gagcccccaatgctgaactttatgggagccacaatggaacaagatctttatcaactggcagaatctgtggcaaatgtagcagaacatcagcgcaaacaggaaataaaaagattatccaca

SEQ ID NO: 426347 - DNA, 120 bp, Artificial Sequence
  ENSG00000151491_14 (sequence is synthesized)
gagcattccagtgtatcagagtatcatccagccgatggctatgcgttcagtagcaacatttacacaagaggatcccacctggaccaaggggaagctgctgttgcttttaagccaacttct

SEQ ID NO: 426348 - DNA, 120 bp, Artificial Sequence
  ENSG00000151491_15 (sequence is synthesized)
aatcgccatatagatagaaattatgaaccactcaaaacacaacccaagaaatatgccaaatccaagtatgactttgtagcaaggaacaacagtgagctctcggttctaaaggatgatatt

SEQ ID NO: 426349 - DNA, 120 bp, Artificial Sequence
  ENSG00000151491_16 (sequence is synthesized)
gatttgtgccaaataacattttggatattgtgagacctccagaatctggattggggcgtgctgatccaccttatactcatactatacagaaacaaaggatggagtatggcccaagaccag

SEQ ID NO: 426350 - DNA, 120 bp, Artificial Sequence
  ENSG00000151491_17 (sequence is synthesized)
ctgatactccccctgctccatcacctcctccaacaccagctcctgttcctgttccccttcccccttccactccagcacctgttcctgtgtcaaaggtcccagcaaatataacacgtcaaa

SEQ ID NO: 426351 - DNA, 120 bp, Artificial Sequence
  ENSG00000151491_18 (sequence is synthesized)
acagcagctccagtgacagtggtggcagtatcgtgcgagacagccagagacacaaacaacttccggtggaccgaaggaaatctcagatggaggaagtgcaagatgaactcatccacagac

SEQ ID NO: 426352 - DNA, 120 bp, Artificial Sequence
  ENSG00000151491_19 (sequence is synthesized)
tgaccattggtcggagtgccgctcagaagaaattccatgtgccacggcagaacgtgccagttatcaatatcacttacgactccacaccagaggatgtgaagacgtggttacagtcaaagg

SEQ ID NO: 426353 - DNA, 120 bp, Artificial Sequence
  ENSG00000151491_20 (sequence is synthesized)
gattcaaccctgtgactgtcaatagtcttggagtattaaatggtgcacaacttttctctctcaataaggatgaactgaggacagtctgccctgaaggggcgagagtctatagccaaatca

SEQ ID NO: 426354 - DNA, 120 bp, Artificial Sequence
  ENSG00000151491_21 (sequence is synthesized)
ctgtacaaaaagctgcattggaggatagcagtggcagctccgagttacaagaaattatgagaagacgacaggaaaaaatcagtgctgccgctagtgattcaggagtggaatcttttgatg

SEQ ID NO: 426355 - DNA, 120 bp, Artificial Sequence
  ENSG00000151491_22 (sequence is synthesized)
aaggaagcagtcactaatttgtttgtttgtatttaaactccattgtttttggcattattccaacatgctttgttttaagaagccttgaagggaatgtcagattcatttttcttgatgtaa

SEQ ID NO: 426356 - DNA, 120 bp, Artificial Sequence
  ENSG00000151491_23 (sequence is synthesized)
tttatcaccataaaaaaaaacccatgcaaacctgagtgagcacaggatttgcttctaggcccattatttttattaaaactgaaaaaatttaaactgaattttttgaccttggaaaatatt

SEQ ID NO: 426357 - DNA, 120 bp, Artificial Sequence
  ENSG00000151491_24 (sequence is synthesized)
tttcttactttaccaaggtgaagtttccttaattagactaattattttatccccatcccagggtataaacaggaattgttttgatagtggtggagttattcactgcaacaaagcaacaat

SEQ ID NO: 426358 - DNA, 120 bp, Artificial Sequence
  ENSG00000151491_25 (sequence is synthesized)
gttgtccatgattcaaaatctaagcagtttcgattttgcctgtgaatatggtgtctgtcattcagggcatagctcactgtaggctagcctctgcttacttaagtctcttctctgacatac

SEQ ID NO: 426359 - DNA, 120 bp, Artificial Sequence
  ENSG00000151491_26 (sequence is synthesized)
tcaatggaagaatatttagatttatttaaagttcttaatgccaacagtttaaaaaaaaattaaaacatttgaatgaactgtaaagtacagccataccttggacatgcaaatataaatcta

SEQ ID NO: 426360 - DNA, 120 bp, Artificial Sequence
  ENSG00000151491_27 (sequence is synthesized)
tggagcattctcaagagagtttgtcatggctctgttgattgcaactccttgtatagcttgtattttgatttagtttatattctgcttattatgtatactgtgttcttatatatgagaaag

SEQ ID NO: 426361 - DNA, 120 bp, Artificial Sequence
  ENSG00000151491_28 (sequence is synthesized)
cacaaatgcgaaagaggtcatgtcttctcaaaatctagcaaaggaagtagtctgcattggtgtgcattacagtattttgcttaatgaaagcctcagttctgaatgttgatatgagtagtt

SEQ ID NO: 426362 - DNA, 120 bp, Artificial Sequence
  ENSG00000151491_29 (sequence is synthesized)
aaaaggaagtggggccattttatgtgtttatctgtgtcaagtatttctggtaataagaagcacttaatttacacatattttaatcctgtgaaagattccacatagagaaaagaaagatac

SEQ ID NO: 426363 - DNA, 120 bp, Artificial Sequence
  ENSG00000151491_30 (sequence is synthesized)
atacctaaccttcaacaaatgttatttttggaaacacaatttttgtcattaaatgttatattatttcacatatataaaacagatgttatgtaagaatgttgtatattttaacataaatca

SEQ ID NO: 426364 - DNA, 120 bp, Artificial Sequence
  ENSG00000151491_31 (sequence is synthesized)
gagaaattatctagattcattaattttcatagtgcctttttcacatgagtcagctggaaagtctgcaataaacagtatttgctgtctgttaataaatggtttctgtctcattagcaaaaa

SEQ ID NO: 426365 - DNA, 120 bp, Artificial Sequence
  ENSG00000151491_32 (sequence is synthesized)
acaatgccgaaactgacgcttagagtcccaccctttctgacgttgtgccaaaggtcacttggcacataagtaaactgagtggaatggcctctcaatattgcctggacgattgcttagagg

SEQ ID NO: 426366 - DNA, 120 bp, Artificial Sequence
  ENSG00000151491_33 (sequence is synthesized)
aatcttcccctgaggacattgtgattgaactgagatctgaagaatgagacagaattaactcgaagtgaccagatcttgaatattatttctttatgtaggctttctgtgctcttccaatca

SEQ ID NO: 426367 - DNA, 120 bp, Artificial Sequence
  ENSG00000151491_34 (sequence is synthesized)
gagttaagttctgttattatttgcatccgtgttatgatgaatgttccctttgtaatgataagtacaacttaaaattttacacttattcattatctgtttccccccactagactgttggcc

SEQ ID NO: 426368 - DNA, 120 bp, Artificial Sequence
  ENSG00000151491_35 (sequence is synthesized)
ctatagttgggaccatgtctgtttggttcactttggtggtcccaatatccatcacaggacctgaaacttaataatcaatatttgttcatgctttcacccccttggcccataaagctgggg

SEQ ID NO: 426369 - DNA, 120 bp, Artificial Sequence
  ENSG00000151491_36 (sequence is synthesized)
tatgtcctgcctaactcacagttattgagaggacatagtaatataatatatttgaaaagacaaaattcagaaaactaaggcaggatccaggatagcttagtgacacaaacccggagagga

SEQ ID NO: 426370 - DNA, 120 bp, Artificial Sequence
  ENSG00000151491_37 (sequence is synthesized)
ccaaatatccaggagtgaaaagaaacaaattgggtacagcaatgttatctagaagaaagaaaaggccattccatttggtaaagaggaagttttactaattatttgtcttgtttgaaggaa

SEQ ID NO: 426371 - DNA, 120 bp, Artificial Sequence
  ENSG00000151491_38 (sequence is synthesized)
gtttgttcaatctgtaaaatagatttaaaaatggtttttgaggttaaatatctgatattgatttttaaagttattttcttgtgaaaagtaaaagaagtgtgtaaatgaaaagtttcttga

SEQ ID NO: 426372 - DNA, 120 bp, Artificial Sequence
  ENSG00000151491_39 (sequence is synthesized)
aaaaaggatgtgtccatgtgcatttgtgcatttgacaaagcacatgttgtcaaatgtgctttgaaggaaagaagaaataaaagaaggaagggaggaaagaaaaccacttgtaggcaaaaa

SEQ ID NO: 426373 - DNA, 120 bp, Artificial Sequence
  ENSG00000151491_40 (sequence is synthesized)
gactgcaaggtaactgttacctggttctctgtaaatgatagggctctgggtgatactttttgcttttgtacttttctgtatttctcaactttttaaattaaatgagtttatattactttt

SEQ ID NO: 426374 - DNA, 120 bp, Artificial Sequence
  ENSG00000151491_41 (sequence is synthesized)
ataatggaatagtaaacaaaataacatctcataaaattgatagttgattatgagtttgggcagaatgtagaattatgtctatatgctttgagaactcagaactatattttagatttttct

SEQ ID NO: 426375 - DNA, 120 bp, Artificial Sequence
  ENSG00000151491_42 (sequence is synthesized)
tttgttcacctaaatctgcttataattttagcatattaattttaaatgccagttggatctttgtttaaatgttcatctatacctctggggcctgagctctttgagggtggagatctttat

SEQ ID NO: 426376 - DNA, 120 bp, Artificial Sequence
  ENSG00000151491_43 (sequence is synthesized)
ctttgcatttctactataattcctggcagcaacacatatttgttgaatgaataacttttgaaactgagatgtcttgacctttttattgcctttaatctatgtgtctttctttttttagaa

SEQ ID NO: 426377 - DNA, 120 bp, Artificial Sequence
  ENSG00000151491_44 (sequence is synthesized)
aaacaccgtctacaagattcgagtcaaacaacgtgagaacttgaaatacgtctccattctttttccttagtactctcgttcattcacttacggtcttcaagggatcaccacactgtcttc

SEQ ID NO: 426378 - DNA, 120 bp, Artificial Sequence
  ENSG00000151491_45 (sequence is synthesized)
cacaatggttgaactaattttcacccccaccaatgatgctaccattgaatttaattatgatgctgtcttcaacatggaagttacataagaaaatctgaagccattgtgtatttcagctag

SEQ ID NO: 426379 - DNA, 120 bp, Artificial Sequence
  ENSG00000151491_46 (sequence is synthesized)
gcttcttcttaggaaatagaggtcagcctagtgcagtgaagtctgattggaggtggacaatgaggatcctgccaaggtgctgtccttagcttctgttcagcctaattgtctgtagtggga

SEQ ID NO: 426380 - DNA, 120 bp, Artificial Sequence
  ENSG00000151491_47 (sequence is synthesized)
gggcgcaggcgctagttcagtgctcgtgaggtaactggcgctggcccacgccgactaagggagacgctctaggcaccgggatggggtccctgtccccgagctctagcgggtcagaacgcc

SEQ ID NO: 426381 - DNA, 120 bp, Artificial Sequence
  ENSG00000151491_48 (sequence is synthesized)
ttcctggtccgcggccgagttgaaagttgttcccactcccataagtccaaggaccagcgtcagctgtgtacctgccgagcagccctactgaggactgtgctcggcctctgaatatctaga

SEQ ID NO: 426382 - DNA, 120 bp, Artificial Sequence
  ENSG00000151491_49 (sequence is synthesized)
cggacacgagccatacccagtgacggcccaaaccagcgaacgctgtctggcaacgttttttgcaatttgtcttatttaaaaaccatatacgggcttggagtggtggtgcctgtggtccca

SEQ ID NO: 426383 - DNA, 120 bp, Artificial Sequence
  ENSG00000151491_50 (sequence is synthesized)
gcttggagtggtggtgcctgtggtcccacctacttggaaggctgaggtgggaggataactcgagcccgagaggtcgacaccgcagtaagcggtgctcgcgccaccgcactccagcctggg

SEQ ID NO: 426384 - DNA, 120 bp, Artificial Sequence
  ENSG00000151491_51 (sequence is synthesized)
aaaaaaaaaatccccagtcatttcttccgctgtcaaacaccgtctacaagattcgagtcaaacaacgtgagaacttgaaatacgtctccattctttttccttagtactctcgttcattca

SEQ ID NO: 426385 - DNA, 120 bp, Artificial Sequence
  ENSG00000151491_52 (sequence is synthesized)
cttacgacttagaagcaacttgaggcagtatgggagcataaaagacagccaggatgccaaagtctccgagcagtgagtaggagtctaagaagttggaaagattcatggacctcttccagt

SEQ ID NO: 426386 - DNA, 120 bp, Artificial Sequence
  ENSG00000151491_53 (sequence is synthesized)
atgtgaaagccacaactgtggagcaaatgggaaagcaggttctagaggttgcctgcattccttgactcctgaatctctatcaccttcagagccagatatttcctgctgagtctttctgag

SEQ ID NO: 426387 - DNA, 120 bp, Artificial Sequence
  ENSG00000151491_54 (sequence is synthesized)
gctgcatcaccctgaccctgactcttccatctccatccttcatgcttaaaggatcctggtgattacattggaccctcccgtacaatctaggatacatttttaaccttaagaacacacaag

SEQ ID NO: 426388 - DNA, 120 bp, Artificial Sequence
  ENSG00000151491_55 (sequence is synthesized)
cacttactttgggttgggacatagttcttgctttcaaattctgatgctgatttcagaactgaagcttgaggttagtttttaaaaaatcaactctggccgggcgcagtggctcatgcctgt

SEQ ID NO: 426389 - DNA, 79 bp, Artificial Sequence
  ENSG00000151491_56 (sequence is synthesized)
gaccagcatgaccaatgggtgtggtggcatgcgcctataatcctagctactgggatggttgagacaggagaatcacttg

SEQ ID NO: 426390 - DNA, 82 bp, Artificial Sequence
  ENSG00000151491_57 (sequence is synthesized)
aaatacaaaaattaggtgggtgtggtggcatgcgcctataatcctagctactgggatggttgagacaggagaatcacttgaa

SEQ ID NO: 426391 - DNA, 120 bp, Artificial Sequence
  ENSG00000151491_58 (sequence is synthesized)
cctgactcttccatctccatccttcatgcttaaaggatcctggtgattacattggaccctcccgtacaatctaggatacatttttaaccttaaggtcttcaagggatcaccacactgtct

SEQ ID NO: 426392 - DNA, 120 bp, Artificial Sequence
  ENSG00000151491_59 (sequence is synthesized)
agaaggctcagagaatggaggcagccagacacccgttttagtacagtgtggagctgaaggaagtatatattaaaaaacaaacaaacaatggactttggaatcagaccttatctgccttgg

SEQ ID NO: 426393 - DNA, 120 bp, Artificial Sequence
  ENSG00000151491_60 (sequence is synthesized)
ttaaaaatagccaacaatgtcctatcaaagtataatttgttttcctagcctaggtttatattttttaaattttaagttaattatttgtctttttatagaaacaaaggatggagtatggcc

SEQ ID NO: 426394 - DNA, 120 bp, Artificial Sequence
  ENSG00000151491_61 (sequence is synthesized)
agcacattgcacagcatcaaaagttaatatgactattaaaaagtagtgcttgtttttgccatgggtttttgtccacacattttgaaaatacacaaagaatagtaatcttcttgctaaaaa

SEQ ID NO: 426395 - DNA, 120 bp, Artificial Sequence
  ENSG00000151491_62 (sequence is synthesized)
attgccatggtgatgaataatctgctgagttttatggttggcatgattcttctggattaggtcacttgtgttttctttctataataccagtcgactacgcttttggtaacagttaaagtt

SEQ ID NO: 426396 - DNA, 120 bp, Artificial Sequence
  ENSG00000151491_63 (sequence is synthesized)
aataccctgaatggtcttaagacatttattttttaatgtgaaaatttctgtctgcttttaaagcatgtagcttaaaattaatgagcccaacattgtgggttttaagcttaattacactag

SEQ ID NO: 426397 - DNA, 120 bp, Artificial Sequence
  ENSG00000151491_64 (sequence is synthesized)
aattttaagaagcactctgctgtcagaactccgaaagctttattgtagtcacagtgttggaatgtataaaaattatagctctgttgcattagaacttagttgaccagcttttgagaagta

SEQ ID NO: 426398 - DNA, 120 bp, Artificial Sequence
  ENSG00000151491_65 (sequence is synthesized)
aaagcttgactgctggtttatatttctggcttgtgtaggaattaaagggtgctaagttaaggttggttctacaggtagctgactcagggaagagagagaatggggtgatattacaagttg

SEQ ID NO: 426399 - DNA, 120 bp, Artificial Sequence
  ENSG00000151491_66 (sequence is synthesized)
ggattatctagactgcttttcttcattaccttgcgtgggtactatttctttgccatttgtgtaaacatcaagaatgtaaaatttgagaatttaaaagaaccctgtaaatcatctagttta

SEQ ID NO: 426400 - DNA, 120 bp, Artificial Sequence
  ENSG00000151498_0 (sequence is synthesized)
agggtgcagtgggacaggcgttgccgggtcgcaggtcccgccagtgcgagcgcaacggaggtcgaaggcgttcagactcttagctgaacgcggagctgcggcggctatgctgtggagcgg

SEQ ID NO: 426401 - DNA, 120 bp, Artificial Sequence
  ENSG00000151498_1 (sequence is synthesized)
ctgccggcgtttcggggcgcgcctcggctgcctgcccggcggtctccgggtcctcgtccagaccggccaccggagcttgacctcctgcatcgacccttccatgggacttaatgaagagca

SEQ ID NO: 426402 - DNA, 120 bp, Artificial Sequence
  ENSG00000151498_2 (sequence is synthesized)
gaaagaatttcaaaaagtggcctttgactttgctgcccgagagatggctccaaatatggcagagtgggaccagaaggagctgttcccagtggatgtgatgcggaaggcagcccagctagg

SEQ ID NO: 426403 - DNA, 120 bp, Artificial Sequence
  ENSG00000151498_3 (sequence is synthesized)
cttcggaggggtctacatacaaacagatgtgggcgggtctgggctgtcacgtcttgatacctctgtcatttttgaagccttggctacaggctgcaccagcaccacagcctatataagcat

SEQ ID NO: 426404 - DNA, 120 bp, Artificial Sequence
  ENSG00000151498_4 (sequence is synthesized)
ccacaacatgtgtgcctggatgattgatagcttcggaaatgaggaacagaggcacaaattttgcccaccgctctgtaccatggagaagtttgcttcctactgcctcactgaaccaggaag

SEQ ID NO: 426405 - DNA, 120 bp, Artificial Sequence
  ENSG00000151498_5 (sequence is synthesized)
tgggagtgatgctgcctctcttctgacctccgctaagaaacagggagatcattacatcctcaatggctccaaggccttcatcagtggtgctggtgagtcagacatctatgtggtcatgtg

SEQ ID NO: 426406 - DNA, 120 bp, Artificial Sequence
  ENSG00000151498_6 (sequence is synthesized)
ccgaacaggaggaccaggccccaagggcatctcatgcatagttgttgagaaggggacccctggcctcagctttggcaagaaggagaaaaaggtggggtggaactcccagccaacacgagc

SEQ ID NO: 426407 - DNA, 120 bp, Artificial Sequence
  ENSG00000151498_7 (sequence is synthesized)
tgtgatcttcgaagactgtgctgtccctgtggccaacagaattgggagcgaggggcagggcttcctcattgccgtgagaggactgaacggagggaggatcaatattgcttcctgctccct

SEQ ID NO: 426408 - DNA, 120 bp, Artificial Sequence
  ENSG00000151498_8 (sequence is synthesized)
gggggctgcccacgcctctgtcatcctcacccgagaccacctcaatgtccggaagcagtttggagagcctctggccagtaaccagtacttgcaattcacactggctgatatggcaacaag

SEQ ID NO: 426409 - DNA, 120 bp, Artificial Sequence
  ENSG00000151498_9 (sequence is synthesized)
agctctttgctacagatgaatgctttgccatctgcaaccaggccttgcagatgcacgggggctacggctacctgaaggattacgctgttcagcagtacgtgcgggactccagggtccacc

SEQ ID NO: 426410 - DNA, 120 bp, Artificial Sequence
  ENSG00000151498_10 (sequence is synthesized)
agattctagaaggtagcaatgaagtgatgaggatactgatctctagaagcctgcttcaggagtagaacccacacttgttctggcctggtgttcagtgcgactgcagtcagtgttgagtgg

SEQ ID NO: 426411 - DNA, 120 bp, Artificial Sequence
  ENSG00000151498_11 (sequence is synthesized)
tgccatgtgggccgctctattccaaaggaatcatggattagacccaagggctgagctcctctagggcaggacctgcaccctgtgtgttggcaccagcatcgggtcttggactggggcaga

SEQ ID NO: 426412 - DNA, 120 bp, Artificial Sequence
  ENSG00000151498_12 (sequence is synthesized)
atccccagtggaaccggaagagctggactgatgagaaacatcagaagaacacatactaccttgttttcctaatgccagaagggtgaccagtgaagattcaccgtcaaaccatgaaagtcc

SEQ ID NO: 426413 - DNA, 120 bp, Artificial Sequence
  ENSG00000151498_13 (sequence is synthesized)
tttcttggatccactttatcttgattagtctgcattttactagttcactggatccctcctctaggggcctggggactttcactgatgctcttcctgattctagagcaaaggtgtgggaag

SEQ ID NO: 426414 - DNA, 120 bp, Artificial Sequence
  ENSG00000151498_14 (sequence is synthesized)
gggaaatggaggaatgccctcctgtctgtgtcgttctctgtgccacagctacagatgcagaaggtttctctggatagcacacctctgaatgtaaatcatgataaaatggatatttggaaa

SEQ ID NO: 426415 - DNA, 120 bp, Artificial Sequence
  ENSG00000151498_15 (sequence is synthesized)
cttactcctaagctgtgatttagggtgtatttctacttctggactgcctcaatatcaagggctgagacttttgaattttgaatattcgttgggtttcatgttaagaagcctgtggtctag

SEQ ID NO: 426416 - DNA, 120 bp, Artificial Sequence
  ENSG00000151498_16 (sequence is synthesized)
gagtgctattcagtgtttcttttcctgataaacactttgaatattttttttgtgtttttgtttccttttctgaagctgttcctccttttaaatatttttaatcacattgataaaatctat

SEQ ID NO: 426417 - DNA, 120 bp, Artificial Sequence
  ENSG00000151498_17 (sequence is synthesized)
ccttcaccacctctggttctactatagttgatttttattttaaatgtttaattgtatttgattaaacacttaactggattttggaataataaaactctcgtccaatttggcttttaaaaa

SEQ ID NO: 426418 - DNA, 120 bp, Artificial Sequence
  ENSG00000151498_18 (sequence is synthesized)
actgtttgtatctctcctaatctgattccagatcatttcgttgacttttgtctatcctttttatactctcttggactgcctctctgatctgcagtcactgcagcgaccttttacctcacc

SEQ ID NO: 426419 - DNA, 120 bp, Artificial Sequence
  ENSG00000151498_19 (sequence is synthesized)
tcagtctctgtgccattggaccttattgtcagtctctgtgccattggaccttattgtcagtctctgtgccattggaccttattgtcagtctctgtgccattggaccttattgtcagtctc

SEQ ID NO: 426420 - DNA, 120 bp, Artificial Sequence
  ENSG00000151498_20 (sequence is synthesized)
tgtgccattggaccttattgtcagtctctgtgccattggaccttattgtcaggaggacccagtggtgttcccagacgctgtgagaactcaagcattccctggtccttttgcacccctttt

SEQ ID NO: 426421 - DNA, 120 bp, Artificial Sequence
  ENSG00000151498_21 (sequence is synthesized)
gagaagacctggtgttggccacaagtctcagtaatggaaggcgtgtggtcccttttgcttctttgattaaaaataaagtaaaactcattggagatgattgtgggtatttcagcaacccaa

SEQ ID NO: 426422 - DNA, 120 bp, Artificial Sequence
  ENSG00000151498_22 (sequence is synthesized)
gaaggacacttaggtactgtaagtaatttgaaaagtaagatacttctaggattaagagccgccatggccagggcatgaacaggagacttgtgatcatgtaaccgtaattggtaataaggg

SEQ ID NO: 426423 - DNA, 120 bp, Artificial Sequence
  ENSG00000151498_23 (sequence is synthesized)
ctcaagacccattcagattttttagaccagatgctcaaagcagtcatctctctctagtttgtactgttatggggggactttgtgagagaaggcaggtaatgaaatgacccctaagtgtac

SEQ ID NO: 426424 - DNA, 120 bp, Artificial Sequence
  ENSG00000151498_24 (sequence is synthesized)
ctctttctcacagctcctcgggtttctgtattttcctacaggatccttcctgatcctctgtaactgtaaggcattatgcattttagcatccccttctctttggtaacacagcaaccattt

SEQ ID NO: 426425 - DNA, 120 bp, Artificial Sequence
  ENSG00000151498_25 (sequence is synthesized)
gaagctttggatcacttagaaaaggcgcctccgagatgtcttaccgaggctcctgcaccaggtgctggtctaagcccctcagtcttgtctggttctctgctccctgtgctgcagtacttg

SEQ ID NO: 426426 - DNA, 120 bp, Artificial Sequence
  ENSG00000151498_26 (sequence is synthesized)
tgagactctgccacctgccagcccaactcctgctctatttcagaaaacaggtttgcatacttgctaacctacctttgaagcagttgcttctattaggattttcaacaggagcatatgaaa

SEQ ID NO: 426427 - DNA, 120 bp, Artificial Sequence
  ENSG00000151498_27 (sequence is synthesized)
tacaacagggcattattaaacactaggcctctggggaaagtgacaatgtttgccagtaaattcttcaagccacctgtgagtgttctgacctctcctgcctctgcttttggcctgtgttcc

SEQ ID NO: 426428 - DNA, 120 bp, Artificial Sequence
  ENSG00000151498_28 (sequence is synthesized)
tgtttacattgtcaggctgcattgccactagggggaaccatagctttttatcatcccagccagggtggctgtgggcagcttctgcctggcagatctgcaaccaggccttgcagatgcacg

SEQ ID NO: 426429 - DNA, 120 bp, Artificial Sequence
  ENSG00000151498_29 (sequence is synthesized)
ctttcggggggcctcagatcgctctgctgctgcccttttcctctggagatctgcgagaagggtgaactgagataatggatgagaaagcatgttgaaaaccacagccggggcttttctcta

SEQ ID NO: 426430 - DNA, 120 bp, Artificial Sequence
  ENSG00000151498_30 (sequence is synthesized)
aggttatcgagtacgtggttctcagggatccaagaacagtgatggacaaggcaaatgtgagccagtatggtcatcagtagctctatattgattatcagccagatggcctaaaagatacct

SEQ ID NO: 426431 - DNA, 120 bp, Artificial Sequence
  ENSG00000151498_31 (sequence is synthesized)
gtctcaatattactagtgtatttttcaataaaataaaccatcactatatgggtatcttcttggtagtcacagacattctatcgaggaaacatggaagccgttggggtcgggctcggagcc

SEQ ID NO: 426432 - DNA, 120 bp, Artificial Sequence
  ENSG00000151498_32 (sequence is synthesized)
tggctgtctccactctctacagccagtgcggaagtcttgaaatgacacgactcttggaaaagcaggaggggcagaggcttctttgagtgacttcggtgaagcaacgtgaggctgccttgc

SEQ ID NO: 426433 - DNA, 120 bp, Artificial Sequence
  ENSG00000151498_33 (sequence is synthesized)
tctcaaacctcagcctgtgctggaatcgcctggagggcatgggagcgcagattgcgggcctcaaccccagagcttctgctccagagggtctagtgtgggcctgggaatttgtatctgcaa

SEQ ID NO: 426434 - DNA, 120 bp, Artificial Sequence
  ENSG00000151498_34 (sequence is synthesized)
caagtcttcaagtgaggctgccacagcttgtctgagaaccacactttgagacccaccgctctggtgttaatgtcagagtcacaggctaccacaggttagaccgctgctttcttctgcaaa

SEQ ID NO: 426435 - DNA, 120 bp, Artificial Sequence
  ENSG00000151498_35 (sequence is synthesized)
cctcattccagaaagatgtttatgggctcagtcgccagtgttcaaactgaattcccgagagtcgttttccttccattactcttggaattgctttctcactgagctttatgtgcgtaggaa

SEQ ID NO: 426436 - DNA, 120 bp, Artificial Sequence
  ENSG00000151498_36 (sequence is synthesized)
acttcgccttcattctaactctctctccaccctgcaataataagcaggaaaacatttattgtaggccacaccatcacccacttacagaagaattggggcactcatcactgtatcactttg

SEQ ID NO: 426437 - DNA, 120 bp, Artificial Sequence
  ENSG00000151498_37 (sequence is synthesized)
tttcatcatggactttactgttggataaatctacagtttatgctttatttgagacgatgtgactactgattcctcgagggggtttatatttctttttgcattaaaggccactgctaaaaa

SEQ ID NO: 426438 - DNA, 120 bp, Artificial Sequence
  ENSG00000151498_38 (sequence is synthesized)
tgaagcaaataattgataccctcctttcagggaaaatgttttcattcttttgtaagtcagttttctgattaccaaagaaatgtgtatttattgttgaaaccttataaaattaggaaaagt

SEQ ID NO: 426439 - DNA, 120 bp, Artificial Sequence
  ENSG00000151498_39 (sequence is synthesized)
tattgcttagggaatcaggtcagccagctttctcagaaatcttattttgagctggtaccaggagacttctccaatagagtgatcagggtcctctcacccttttatttatttatttatttt

SEQ ID NO: 426440 - DNA, 120 bp, Artificial Sequence
  ENSG00000151498_40 (sequence is synthesized)
tacagatgtgagccaccgcacccggcccctctcacccttttcctcaatccaaagatggaactgccagtgatttgaggaagtaatagaaactactaatagaaagcacatataactctgatt

SEQ ID NO: 426441 - DNA, 120 bp, Artificial Sequence
  ENSG00000151498_41 (sequence is synthesized)
acatataactctgatttttagaggctcgtgtaacctaactagaagtagtacaaacgtgctggtgagaagtacctcagcctggttatctctgggtagtccttattccaggaatatgtttta

SEQ ID NO: 426442 - DNA, 120 bp, Artificial Sequence
  ENSG00000151498_42 (sequence is synthesized)
atccaccgtttgcctttaaagagtcttcccaattgtgactctccccttcccactcttctgctttactccactgccctgccctttgttctctttccccttctcccccatttttttttcttt

SEQ ID NO: 426443 - DNA, 120 bp, Artificial Sequence
  ENSG00000151498_43 (sequence is synthesized)
agaccttcagtaaaaggcttagaaatggagtttatcctatcaacaaaagagagcaaggaaatgatgtaaaggcagtctattttcagagccagagaggaactgggagattgtagatagttt

SEQ ID NO: 426444 - DNA, 120 bp, Artificial Sequence
  ENSG00000151498_44 (sequence is synthesized)
gtggttttcaattagaggcactgaaattgggggcagttggtgtcacaatcctaaaagaagttgtgagaagtgtttgtaggttagtcaggtagagtagacattagtagattctcttaataa

SEQ ID NO: 426445 - DNA, 120 bp, Artificial Sequence
  ENSG00000151498_45 (sequence is synthesized)
cattttaagttcttgtgggtctaagtcttgggtgctgaaacccatacctcacaggctcccgtccccagggaaggccgccctacctgctggattgttgggcaaccacgcagtccctgattt

SEQ ID NO: 426446 - DNA, 120 bp, Artificial Sequence
  ENSG00000151498_46 (sequence is synthesized)
gacgttctaacaacagatgtctcaggcagacctttatctttgtctcctgataatgtaattgttaaatgtctcctccacttaccaactcttactgcaagtgagaataccggtagtggatga

SEQ ID NO: 426447 - DNA, 120 bp, Artificial Sequence
  ENSG00000151498_47 (sequence is synthesized)
tttttcctagaaggcatcctgatcatcttgtacataactttttttttgttagttgaataaagatttggatataaaactaaggcagttctatagataataaaaagaaacttcttaatgcca

SEQ ID NO: 426448 - DNA, 120 bp, Artificial Sequence
  ENSG00000151498_48 (sequence is synthesized)
acactctgagcagggtctgtttagagaagatttcctagaagatagaattgtgctgggctccctcgacctcactgactttctcaccttctctctgctgccttttgatccctcctcaggaag

SEQ ID NO: 426449 - DNA, 120 bp, Artificial Sequence
  ENSG00000151498_49 (sequence is synthesized)
ctttggaaggttcacagcagccccaatttagcactctgccatgtttacattgtcaggctgcattgccactagggggaaccatagctttttatcatcccagccagggtggctgtgggcagc

SEQ ID NO: 426450 - DNA, 120 bp, Artificial Sequence
  ENSG00000151498_50 (sequence is synthesized)
ttctgcctggcaggtaataagggagaggggcagagggctttgagtcgcctgtctggggggaactgacaagtttagtaggtgaacttcccttgtctctaaccatacagaatgtggaggccc

SEQ ID NO: 426451 - DNA, 120 bp, Artificial Sequence
  ENSG00000151498_51 (sequence is synthesized)
tctttgagcttggctgtttgtggttctttcatgggtttatggcgggctgccagatcgtgggctggggtaggaagggaagctgcttgctccacagtcttcccagagtccaagacgtctagt

SEQ ID NO: 426452 - DNA, 120 bp, Artificial Sequence
  ENSG00000151498_52 (sequence is synthesized)
ccctgtctccctgcagatctgcaaccaggccttgcagatgcacgggggctacggctacctgaaggattacgctgttcagcagtacgtgcgggactccagggtccaccagattctagaagg

SEQ ID NO: 426453 - DNA, 120 bp, Artificial Sequence
  ENSG00000151498_53 (sequence is synthesized)
taaaaattgccagaggttattctcttcccttcagaacgggggcgggatcgctgctttccccactctctgtccccatgcctcctgggcctcagggtgcagtcaagccctgtctgtctcgag

SEQ ID NO: 426454 - DNA, 120 bp, Artificial Sequence
  ENSG00000151500_0 (sequence is synthesized)
gcacagcctgcggcgcagcggaggcggaccgcagtcgagtctgcagagtgttgggtctgtagccagcaaattacttcatcatctagattatccattcagttgatcctaattagcaaggat

SEQ ID NO: 426455 - DNA, 120 bp, Artificial Sequence
  ENSG00000151500_1 (sequence is synthesized)
aacaaggtaacacaaggcttacttatattcacccaacaaaagtgtctctgtggagccacttcccagtgaactacatactgagataggggttcctggatgagaaggaccaaggacagaacc

SEQ ID NO: 426456 - DNA, 120 bp, Artificial Sequence
  ENSG00000151500_2 (sequence is synthesized)
gagaagagtttaggggcaggttatgcgagatggaaatggcgcagataacggagggaaggatttgagggctcaaacgtaggcgtctgtgtttcgcaaaagttggagacgttctaggctgcc

SEQ ID NO: 426457 - DNA, 120 bp, Artificial Sequence
  ENSG00000151500_3 (sequence is synthesized)
tctcgttgcctccatctcgctctgcgcgggttttggaggacattagcattctttcttgtatctccgttgattccagaatcgtccgcactaaagtcccctgcagcgtgaccatgtcgagac

SEQ ID NO: 426458 - DNA, 120 bp, Artificial Sequence
  ENSG00000151500_4 (sequence is synthesized)
cccggaagaggctggctgggacttctggttcagacaagggactatcaggaaaacgcaccaaaactgagaactcaggtgaggcattagctaaagtggaggactccaaccctcagaagactt

SEQ ID NO: 426459 - DNA, 120 bp, Artificial Sequence
  ENSG00000151500_5 (sequence is synthesized)
gatctcaaagcacagcccaaacagacaacatgctgggatggtgttcgtaactaccaggctcggaacttccttagagccatgaagctgggagaagaagccttcttctaccatagcaactgc

SEQ ID NO: 426460 - DNA, 120 bp, Artificial Sequence
  ENSG00000151500_6 (sequence is synthesized)
aaagagccaggcatcgcaggactcatgaagatcgtgaaagaggcttacccagaccacacacagtttgagaaaaacaatccccattatgacccatctagcaaagaggacaaccctaagtgg

SEQ ID NO: 426461 - DNA, 120 bp, Artificial Sequence
  ENSG00000151500_7 (sequence is synthesized)
tccatggtggatgtacagtttgttcggatgatgaaacgtttcattcccctggctgagctcaaatcctatcatcaagctcacaaagctactggtggccccttaaaaaatatggttctcttc

SEQ ID NO: 426462 - DNA, 120 bp, Artificial Sequence
  ENSG00000151500_8 (sequence is synthesized)
actcgccagagattatcaatccagcccctgacccaggaagagtttgattttgttttgagcctggaggaaaaggaaccaagttaactgagatactgctgctggaatgggcgagacattgct

SEQ ID NO: 426463 - DNA, 120 bp, Artificial Sequence
  ENSG00000151500_9 (sequence is synthesized)
gcaaagaagtcaagcttttttcagacaaaaggtgtgagggggcttgcttggtatgcttacctgggcttgtgtacctcagtggtttttgtgtacttttttcaataaaatatcaaagttgaa

SEQ ID NO: 426464 - DNA, 120 bp, Artificial Sequence
  ENSG00000151500_10 (sequence is synthesized)
tatgctttctatttcatgacaggggaaggatgaaccaggggaagaagacggttggggtgactgtaggtcaaggtacacggcccagcacttactcagatgaggtgatactgagataggagc

SEQ ID NO: 426465 - DNA, 120 bp, Artificial Sequence
  ENSG00000151500_11 (sequence is synthesized)
gcctagacacgtctttctgtcatgtacactgttgtcacataggtggatgtacagtttgttcggatgatgaaacgtttcattcccctggctgagctcaaatcctatcatcaagctcacaaa

SEQ ID NO: 426466 - DNA, 120 bp, Artificial Sequence
  ENSG00000151500_12 (sequence is synthesized)
ggacttctggttcaggcacattctgattgtcttgggatgaaatcgaatcatcaccatttttctacaatgtcctgaatgaactgtttctttcaacttttattggcaccttcaaggagcaga

SEQ ID NO: 426467 - DNA, 120 bp, Artificial Sequence
  ENSG00000151500_13 (sequence is synthesized)
aaggagatgggccaggagccacagtgagcaagaaggaaagacacaagggactatcaggaaaacgcaccaaaactgagaactcaggtgaggcattagctaaagtggaggactccaaccctc

SEQ ID NO: 426468 - DNA, 120 bp, Artificial Sequence
  ENSG00000151500_14 (sequence is synthesized)
caggagccacagtgagcaagaaggaaagacgtatgagatgagaataataatgcttttattatgcacttattgtaatgccaggcattgtctaggccctttgtattacctcatttaagcttc

SEQ ID NO: 426469 - DNA, 120 bp, Artificial Sequence
  ENSG00000151500_15 (sequence is synthesized)
aaaatagttgcaagtaggtgctcagtttcctctttcctatgcaaaggcatagaagagagagtgaggaaaggaaaacatgtattgactactgtccggacctttaatcctgaacaaccctgt

SEQ ID NO: 426470 - DNA, 120 bp, Artificial Sequence
  ENSG00000151500_16 (sequence is synthesized)
aaggtgttcttaccctattgaatagataatccagaagataccctgtaaggtaggtattcttgtctaatttttatagataaggaaagcttcttaacagtaagattaagttcctacagctgg

SEQ ID NO: 426471 - DNA, 120 bp, Artificial Sequence
  ENSG00000151500_17 (sequence is synthesized)
ctagagaaaggtgtagatgtgaagcattgaggatctcaaagcacagcccaaacagacaacatgctgggatggtgttcgtaactaccaggctcggaacttccttagagccatgaagctggg

SEQ ID NO: 426472 - DNA, 120 bp, Artificial Sequence
  ENSG00000151502_0 (sequence is synthesized)
ggagccgccgaagcgcctcggtgcgttgcaccgccggaggctgggcagctcgcagcgctgctcggcgctggaccccacccggcaggcgcaggccacccacacccggctctgtgcggctgc

SEQ ID NO: 426473 - DNA, 120 bp, Artificial Sequence
  ENSG00000151502_1 (sequence is synthesized)
cccccgcagcattgcacggccgaccctcgcccgcccactgccaccggccgcgggactggctgggactggctcggccgagggcactgctcctcggtgcattgctgctcgggcgccgcagcc

SEQ ID NO: 426474 - DNA, 80 bp, Artificial Sequence
  ENSG00000151502_2 (sequence is synthesized)
cattgctgctcgggcgccgcagcccgcagccgccagcctcccccggccgtgcccctcccccgtggagccggctgtccgtc

SEQ ID NO: 426475 - DNA, 120 bp, Artificial Sequence
  ENSG00000151502_3 (sequence is synthesized)
catcgggccctctggccttctttacctagggcagcccgcgccccggtgcgagggagcggtccttaccgagacccgcccggcccggcggtgcgatgagcttcttcggcttcgggcagagcg

SEQ ID NO: 426476 - DNA, 120 bp, Artificial Sequence
  ENSG00000151502_4 (sequence is synthesized)
tggaggtggaaatccttctgaacgatgcagagagtaggaagcgggccgagcacaagacggaggacgggaagaaggagaaatatttcctcttctacgacggggagacggtctccgggaagg

SEQ ID NO: 426477 - DNA, 120 bp, Artificial Sequence
  ENSG00000151502_5 (sequence is synthesized)
tgagccttgccctcaagaaccccaacaagcggctggagcaccagggcatcaagatcgagttcatcgggcagatcgaactctactacgatcgcgggaaccaccatgagtttgtgtccctgg

SEQ ID NO: 426478 - DNA, 120 bp, Artificial Sequence
  ENSG00000151502_6 (sequence is synthesized)
tgaaggacctggcccggcctggagagatcacccagtcgcaggccttcgactttgagtttacccacgtggagaagccgtatgagtcctacacagggcagaatgtgaagctacgctatttcc

SEQ ID NO: 426479 - DNA, 120 bp, Artificial Sequence
  ENSG00000151502_7 (sequence is synthesized)
ttcgtgctaccatcagccgccgcctcaatgatgttgtcaaagagatggacattgtagttcacacactcagcacatacccagagctgaactcttccatcaagatggaggttgggattgagg

SEQ ID NO: 426480 - DNA, 120 bp, Artificial Sequence
  ENSG00000151502_8 (sequence is synthesized)
actgtctgcacattgaatttgagtacaataaatccaaataccacttgaaagatgtcattgtagggaagatatacttcctgctggtgagaatcaaaatcaagcacatggagatagacatca

SEQ ID NO: 426481 - DNA, 120 bp, Artificial Sequence
  ENSG00000151502_9 (sequence is synthesized)
tcaagcgagaaacgacgggtacaggccccaacgtgtaccatgagaatgacacgatagccaagtacgagatcatggacggggcaccagtgcgaggagagtccatcccgatccggctcttcc

SEQ ID NO: 426482 - DNA, 120 bp, Artificial Sequence
  ENSG00000151502_10 (sequence is synthesized)
tggccgggtatgagctcacgcccaccatgcgggacatcaacaagaagttctctgtgcgctattacctcaacctggtgctgatagacgaggaggagcggcgctacttcaagcagcaggaag

SEQ ID NO: 426483 - DNA, 120 bp, Artificial Sequence
  ENSG00000151502_11 (sequence is synthesized)
tggtgttgtggcggaagggtgacatcgtacggaagagcatgtcccaccaggcggccatcgcctcacagcgctttgagggcaccacctccctgggtgaggtgcggacccccagccagctgt

SEQ ID NO: 426484 - DNA, 120 bp, Artificial Sequence
  ENSG00000151502_12 (sequence is synthesized)
ctgacaacaactgcaggcagtaggcccccagggccgagaagatgctgggcacccacccagcacccccatctaccaacaccagcggctgggggcgggggcggaccttgtgaggctcagttg

SEQ ID NO: 426485 - DNA, 120 bp, Artificial Sequence
  ENSG00000151502_13 (sequence is synthesized)
acccgttacttgcaacctgaaaacaaatcatgtttttgacttaaattcttttctctggagaacccaaggggcttggggtgggaagcagtctctccttgggattctgcggccgatgtggga

SEQ ID NO: 426486 - DNA, 120 bp, Artificial Sequence
  ENSG00000151502_14 (sequence is synthesized)
tagaagaggtagcatcctggaagccagcctctctggggaacatgagcccccttcctcggggggctgccttgcgtcttagaggagggagagcagagagcacgcatccttggctcctggctc

SEQ ID NO: 426487 - DNA, 120 bp, Artificial Sequence
  ENSG00000151502_15 (sequence is synthesized)
ctgggtagtcacatcttgtactcccctttgctgtcccggaggtagtggcaggagttgggccagcccccactaagtggcaggggaagactcacgattgggaagctacctctttgggaatct

SEQ ID NO: 426488 - DNA, 120 bp, Artificial Sequence
  ENSG00000151502_16 (sequence is synthesized)
tggatgtggtgatctcaagttcccacaggccacctccttctggccactcactgctgggacccaggcacctcccttctccatcctctctggattgtcagtaatgtcctggaacagaagcct

SEQ ID NO: 426489 - DNA, 120 bp, Artificial Sequence
  ENSG00000151502_17 (sequence is synthesized)
gtgggatggccttgggcacggagaagccctggggtcagtgtcgtgcacggatggcggcagtgttgaacccaggaggctgaacccggcccaccacggaagatgagtgcatggcaaccgcct

SEQ ID NO: 426490 - DNA, 120 bp, Artificial Sequence
  ENSG00000151502_18 (sequence is synthesized)
gccttcacgtcgctccacttggtaaccccaaggtctgggctgttctaggtattgcttcacgtgccccagcaagcccttaacaagagggcctggttccctgaagaaccaatcccaggaagg

SEQ ID NO: 426491 - DNA, 120 bp, Artificial Sequence
  ENSG00000151502_19 (sequence is synthesized)
ggccttgatccctccgccttgctgagagtgaaccctcgtctctcctcaccctccatttcatttctgggaattggggcttagtttcgaacctttggcaaggctgttcttactaatgcccaa

SEQ ID NO: 426492 - DNA, 120 bp, Artificial Sequence
  ENSG00000151502_20 (sequence is synthesized)
gcccctttacccctctccctataggttacacaggggagaccagggcctcggcagaagactgctgccacacttccgaatcattctgcttgccaaataggtcatcttcaccagttgactgac

SEQ ID NO: 426493 - DNA, 120 bp, Artificial Sequence
  ENSG00000151502_21 (sequence is synthesized)
ccaagtttaggaccattggtatcgtgtgtttaaaaaacacatataaaaaaactcttgtgaatattcttgttatgctagagaggaaggtacttctccctctacggctctgcgctggggcct

SEQ ID NO: 426494 - DNA, 120 bp, Artificial Sequence
  ENSG00000151502_22 (sequence is synthesized)
atggtagtaaagttgtttactgtcctttttctgcttcccctggaaatgacaggcattactctcccattggcctcccttccctttatagaaagaccaagcaggccccactggccaagaggt

SEQ ID NO: 426495 - DNA, 120 bp, Artificial Sequence
  ENSG00000151502_23 (sequence is synthesized)
acggtatttggcagtctgagttctcagtaatttggaaagttaaggagttggttcctgtgtcacctttcagttagtgtgggaaaggaagacttctgttttcctgagatcagtgcagtctca

SEQ ID NO: 426496 - DNA, 120 bp, Artificial Sequence
  ENSG00000151502_24 (sequence is synthesized)
ggcctttggcagggctcatggatcagagctgagactggagggagaggcattttgggtagcctaggagggcgactggcggcagcagaaccgaggaaggcaaggttgtttcccccacgctgt

SEQ ID NO: 426497 - DNA, 120 bp, Artificial Sequence
  ENSG00000151502_25 (sequence is synthesized)
gtcctgtgttcaggtgcgacacacaatcctcatgggaacaggatcacccatgcgctgcccttgatgatcaaggttggggcttaagtggataagggaggcaagttctgggttccttgcctt

SEQ ID NO: 426498 - DNA, 120 bp, Artificial Sequence
  ENSG00000151502_26 (sequence is synthesized)
ttcagagcatgaggtcaggctctgtatccctccttttcctagctgatattctaactagaagcatttgtcaattcctttgcctcccaactgacaacacacgttcattttccaaccttccta

SEQ ID NO: 426499 - DNA, 120 bp, Artificial Sequence
  ENSG00000151502_27 (sequence is synthesized)
acatcttaaacctttcttctgggagaactagaagacagaatttgctttgattctctcaggcgctgtgcacaagccaggtcttctgttttctctttcttactctacccacattcttgcctt

SEQ ID NO: 426500 - DNA, 120 bp, Artificial Sequence
  ENSG00000151502_28 (sequence is synthesized)
ctctatccaactgtgaaagtgaggggaggctcctgtccccctctcttaaggtccccaaacctgggagtgcataggtactaaatcaagcagtgcaacttgtaattaagcagctgcagtgtt

SEQ ID NO: 426501 - DNA, 120 bp, Artificial Sequence
  ENSG00000151502_29 (sequence is synthesized)
tacatgtttcttaatgtgtcatcttttcaatggctgtattaaaagaagaacgtttgttttaatggtctttctgattaaagaaagcccctgtggctttggaggcattgtgcccacggtcca

SEQ ID NO: 426502 - DNA, 120 bp, Artificial Sequence
  ENSG00000151502_30 (sequence is synthesized)
catcttcaccctgaaaagttgcacttagacttggattatatatcgggcttgtactgaagattgaacctcaagcgtcactttggaaggtccaggtttagcagatgtggtttgaaaacgttt

SEQ ID NO: 426503 - DNA, 120 bp, Artificial Sequence
  ENSG00000151502_31 (sequence is synthesized)
ctgcttcttcctgttgacattctggcattctctgctgctcaggagcaagggatgcatgcacagcagcctgtctgtgacttggctctagctccgatttattttctgaattcacttgtcagg

SEQ ID NO: 426504 - DNA, 120 bp, Artificial Sequence
  ENSG00000151502_32 (sequence is synthesized)
agctggaagccctttgtcatttggggaccgtgattatctggaagaagcaatcatttacattcttcattggctctttagccatccctcaggaatggcgaagactcttcattttgaagtgca

SEQ ID NO: 426505 - DNA, 120 bp, Artificial Sequence
  ENSG00000151502_33 (sequence is synthesized)
tggtgcttccagggttttattggcttattccttttactcccacaggctgttccatgtggaaggaggagcgccacagatttagctgcctgcagctctggggacacgcgggtgttaccatgc

SEQ ID NO: 426506 - DNA, 120 bp, Artificial Sequence
  ENSG00000151502_34 (sequence is synthesized)
caggcccttggagggttgggaccaagctctcctgacactctctgatgtcccattttgtcactggctgtgcaaatagagccagctgtcatttttcctgtacaaatgaaatgggtcactgag

SEQ ID NO: 426507 - DNA, 120 bp, Artificial Sequence
  ENSG00000151502_35 (sequence is synthesized)
aatgcatgtaaaagagcagataatgataagatggcttatatttagctttagaccacattataggtttggcctttcttggtagaattactgccctaattttgttccactgatactagaaac

SEQ ID NO: 426508 - DNA, 120 bp, Artificial Sequence
  ENSG00000151502_36 (sequence is synthesized)
ggtctgatgttagagctggaagggatctgtagtatcacgcagtccgattctctaattttccacatgagaaaatgaaggtccagaggaagcagagacttaactcacaaatcagaaaagcgg

SEQ ID NO: 426509 - DNA, 120 bp, Artificial Sequence
  ENSG00000151502_37 (sequence is synthesized)
ttcttgcagaactgaggccatagtgaggactttctgctttccaccataccaccttgccagtccacacaagagggaggatgtattttggggggcatacactgaggatggagaaagatggca

SEQ ID NO: 426510 - DNA, 120 bp, Artificial Sequence
  ENSG00000151502_38 (sequence is synthesized)
tcagaactgctgggtgaagtggtggcttaactggactttgacagctgccttttgaaaaccccaaaactaaacacactgcatgtaatcaaaagatgcttatactaataatgacctgtgctg

SEQ ID NO: 426511 - DNA, 120 bp, Artificial Sequence
  ENSG00000151502_39 (sequence is synthesized)
ttcccactcagttgctctctgttttcgagaagacatgagaagctgcaacatgacctggagtggaactggagagtcacatttttgtttcagccacctgctgggcagcagagcgactgcacc

SEQ ID NO: 426512 - DNA, 120 bp, Artificial Sequence
  ENSG00000151502_40 (sequence is synthesized)
tccagtggcatctctgcagtggtcagagtgacctggtataagggagagggcatcaccttgccccctgtgctgactcctgccctccccctacaggagagtccatcccgatccggctcttcc

SEQ ID NO: 426513 - DNA, 120 bp, Artificial Sequence
  ENSG00000151502_41 (sequence is synthesized)
aacctgccccatgtggacaaggacctgaggccgtccccactttgagaatcttcacagggatcccgagaaggaagagtgtcgcgagctgtggcgtgctggtaaaccattaaccgtgggcct

SEQ ID NO: 426514 - DNA, 120 bp, Artificial Sequence
  ENSG00000151502_42 (sequence is synthesized)
ctaggttgtagcatgtgtcaatttctgtagtgtacatagccccgccatggccaatttcaagctacctaatgttcctaaatgtagaggtgggagagatgtgctattaccatcatatggaga

SEQ ID NO: 426515 - DNA, 120 bp, Artificial Sequence
  ENSG00000151502_43 (sequence is synthesized)
cacattccctcaagagcagagagcattgtaaagggccggaaaataggaagtgatgagattttcgcatgtcttacctttgtttttaacatgattcatttaattgtgagtttatataattta

SEQ ID NO: 426516 - DNA, 120 bp, Artificial Sequence
  ENSG00000151502_44 (sequence is synthesized)
actttaaataattgctgtgtttaacagccaggtcataaaattcctgaaagttcaacgtcagccacccccagcacactcctgctggctgggtgtcaggagatcctgacctgctgtccggct

SEQ ID NO: 426517 - DNA, 120 bp, Artificial Sequence
  ENSG00000151502_45 (sequence is synthesized)
ctgccacacagctgcagtgtgaccttgagctctgtaactcagctttctcacttcaaagtgggtaatggacttggattctaattctagatgtcctcttcttttgggggtgataagaaaata

SEQ ID NO: 426518 - DNA, 120 bp, Artificial Sequence
  ENSG00000151502_46 (sequence is synthesized)
gggccgtgaaaggcccaagaataacatgtgattggggtacaaggcagagaaatcactttcccttacagcaggattcttgacccgggggcatgggctccctagagggatttgggggaaggg

SEQ ID NO: 426519 - DNA, 120 bp, Artificial Sequence
  ENSG00000151502_47 (sequence is synthesized)
tctttgaactccctagaattgtggttgaaaaggtctctgtataggtacatatgtgcatctttccctggaagagggtctgtaacttcttaaaaggatacaaagccctcaagggttaagaac

SEQ ID NO: 426520 - DNA, 120 bp, Artificial Sequence
  ENSG00000151502_48 (sequence is synthesized)
ggagagatcacccagtcgcaggccttcgactttgagtttacccacgtggagaagccgtatgagtcctacacagggcagaatgtgaagctacgtggatttgtcttaagcgtttgtacggca

SEQ ID NO: 426521 - DNA, 120 bp, Artificial Sequence
  ENSG00000151502_49 (sequence is synthesized)
gaaagaaaggtgttgaaaccagtatagcagtgcctcaaaaaattaaacagaattaccatatgatctagcaattcctcttttggatccagaagcggatccaaaagaatggaaaacaggatc

SEQ ID NO: 426522 - DNA, 120 bp, Artificial Sequence
  ENSG00000151502_50 (sequence is synthesized)
tcgaacggatatctgtacacccatattcacagcagcattattcgcaataaccaaaaggtagaagcaacccaagtgtccatcagtgggtaaatggacacaggaaatgtgttttgtccgtac

SEQ ID NO: 426523 - DNA, 120 bp, Artificial Sequence
  ENSG00000151502_51 (sequence is synthesized)
tcaaaaggaaggacattctgtcctatgctacaacatgggtgaacctaaaggacattgtgctacgtgaaagaagcctgtcacaaaaggacaaatactgtctgattccatatatatgagcta

SEQ ID NO: 426524 - DNA, 120 bp, Artificial Sequence
  ENSG00000151503_0 (sequence is synthesized)
ggcgcgcgcgcgggagcgagctttgaaagttgagcacggcggcggcgagccggtgccctgggatcatggtggcgttgcggggccttggtagcggcctgcagccctggtgtccgctggatc

SEQ ID NO: 426525 - DNA, 120 bp, Artificial Sequence
  ENSG00000151503_1 (sequence is synthesized)
ttagactcgaatgggttgacacagtgtgggaactggatttcacagagactgagcctttggatcccagcatagaagcagagatcatagagactggattggctgcattcacaaaactctatg

SEQ ID NO: 426526 - DNA, 120 bp, Artificial Sequence
  ENSG00000151503_2 (sequence is synthesized)
aaagccttttaccctttgctactggagaacatggatctatggagagtatctggaccttcttcattgagaacaatgtttcccatagtacactggtggcattgttctatcattttgttcaaa

SEQ ID NO: 426527 - DNA, 120 bp, Artificial Sequence
  ENSG00000151503_3 (sequence is synthesized)
tagttcataagaagaatgtcagtgtacagtatcgagaatatggccttcatgccgctgggctttactttttgctactagaagtaccaggcagtgtagccaatcaagtattccacccagtga

SEQ ID NO: 426528 - DNA, 120 bp, Artificial Sequence
  ENSG00000151503_4 (sequence is synthesized)
tgtttgacaaatgcattcagactctaaagaagagctggccccaggaatctaacttgaatcggaaaagaaagaaagaacagcctaagagctctcaggctaaccccgggaggcatagaaaaa

SEQ ID NO: 426529 - DNA, 120 bp, Artificial Sequence
  ENSG00000151503_5 (sequence is synthesized)
ggggaaagccacccaggagagaagatattgagatggatgaaattatagaagaacaagaagatgagaatatttgtttttctgcccgggacctttctcaaattcgaaatgccatctttcacc

SEQ ID NO: 426530 - DNA, 120 bp, Artificial Sequence
  ENSG00000151503_6 (sequence is synthesized)
ttttaaagaattttttaaggcttctgccaaagttttccttgaaagaaaagccacaatgtgtacagaattgtatagaggtctttgtttcattaactaattttgagccagttcttcatgaat

SEQ ID NO: 426531 - DNA, 120 bp, Artificial Sequence
  ENSG00000151503_7 (sequence is synthesized)
gtcatgttacacaagccagagctcttaaccaagcaaaatacataccagaactggcttattatggattgtatttgctgtgctctcccattcatggagaaggagataaggtcatcagttgtg

SEQ ID NO: 426532 - DNA, 120 bp, Artificial Sequence
  ENSG00000151503_8 (sequence is synthesized)
ttttccatcaaatgctcagtgtaatattaatgttagaagttggtgaaggatcccatcgtgccccccttgctgttacctcccaagtcatcaactgtagaaaccaggcggtccagtttatca

SEQ ID NO: 426533 - DNA, 120 bp, Artificial Sequence
  ENSG00000151503_9 (sequence is synthesized)
gcgcccttgtggatgaattaaaggagagtatattcccagtcgtccgtatcttactgcagcacatctgtgccaaggtggtagataaatcagagtatcgtacttttgcagcccagtccctag

SEQ ID NO: 426534 - DNA, 120 bp, Artificial Sequence
  ENSG00000151503_10 (sequence is synthesized)
tccagctgctcagtaaacttccttgtggggaatacgctatgttcattgcctggctttacaaatactcccgaagttccaagatcccacaccgggtttttactcttgatgttgtcttagctc

SEQ ID NO: 426535 - DNA, 120 bp, Artificial Sequence
  ENSG00000151503_11 (sequence is synthesized)
tgttagaactgcctgaaagagaggtggataacaccctctccttggagcatcagaagttcttaaagcataagttcctggtgcaggaaattatgtttgatcgttgcttagacaaggcgccta

SEQ ID NO: 426536 - DNA, 120 bp, Artificial Sequence
  ENSG00000151503_12 (sequence is synthesized)
ctgtccgcagcaaggcactgtccagctttgcacactgtctggagttgactgttaccagtgcgtcggagagtatcctggagctcctgattaacagtcctacgttttctgtaatagagagtc

SEQ ID NO: 426537 - DNA, 120 bp, Artificial Sequence
  ENSG00000151503_13 (sequence is synthesized)
accctggtaccttactgagaaattcatcagctttttcctaccaaaggcagacatctaaccgttccgaaccctcaggggagatcaacatagacagcagtggtgaaacagttggatctggag

SEQ ID NO: 426538 - DNA, 120 bp, Artificial Sequence
  ENSG00000151503_14 (sequence is synthesized)
aaagatgtgtcatggcaatgctgagaaggaggatcagggatgagaagaccaacgttaggaagtctgcactgcaggtattagtgagtattttgaaacactgtgatgtctcaggcatgaagg

SEQ ID NO: 426539 - DNA, 120 bp, Artificial Sequence
  ENSG00000151503_15 (sequence is synthesized)
aagacctgtggattctgcaggaccagtgtcgggaccctgcagtgtctgtccggaagcaggccctccagtctcttactgaactccttatggctcagcctagatgcgtgcagatccagaaag

SEQ ID NO: 426540 - DNA, 120 bp, Artificial Sequence
  ENSG00000151503_16 (sequence is synthesized)
cctggttgcggggggtggtcccggtggtgatggactgcgagagcactgtgcaggagaaggccctggagttcctggaccagctgctgctgcagaacatccggcatcacagtcattttcact

SEQ ID NO: 426541 - DNA, 120 bp, Artificial Sequence
  ENSG00000151503_17 (sequence is synthesized)
ctggggacgacagccaggtcctcgcctgggcgcttcttactctcctcaccaccgaaagccaggaactgagccgatatttaaataaggcttttcatatctggtccaagaaagaaaaattct

SEQ ID NO: 426542 - DNA, 120 bp, Artificial Sequence
  ENSG00000151503_18 (sequence is synthesized)
cacccacttttataaacaatgtaatatctcacactggcacggaacattcggcacctgcctggatgctgctctccaagattgctggctcctcacccaggctggactacagcagaataatac

SEQ ID NO: 426543 - DNA, 120 bp, Artificial Sequence
  ENSG00000151503_19 (sequence is synthesized)
aatcttgggagaaaatcagcagtcagcagaatcccaattcaaacaccttaggacatattctctgtgtgattgggcatattgcaaagcatcttcctaagagcacccgggacaaagtgactg

SEQ ID NO: 426544 - DNA, 120 bp, Artificial Sequence
  ENSG00000151503_20 (sequence is synthesized)
atgctgtcaagtgtaagctgaatggatttcagtggtctctagaggtgatcagttcagctgttgacgccttgcagaggctttgtagagcatctgcagagacaccagcagaggagcaggaat

SEQ ID NO: 426545 - DNA, 120 bp, Artificial Sequence
  ENSG00000151503_21 (sequence is synthesized)
atgtactctccacctgcgagcaccgcctctccaacatcgttctcaaggagaatggaacagggaatatggacgaagacctgttggtgaagtacatttttaccttaggggatatagcccagc

SEQ ID NO: 426546 - DNA, 120 bp, Artificial Sequence
  ENSG00000151503_22 (sequence is synthesized)
tgtgtccagccagggtggagaagcgcatcttccttctgattcagtccgtcctggcttcgtctgctgatgctgaccactcaccatcatctcaaggcagcagtgaggccccagcgtctcagc

SEQ ID NO: 426547 - DNA, 120 bp, Artificial Sequence
  ENSG00000151503_23 (sequence is synthesized)
cacccccccaggtcagaggttctgtcatgccctctgtgattagagcacatgccatcattaccttaggtaagctgtgcttacagcacgaggatctggcaaagaagagcatcccagccctgg

SEQ ID NO: 426548 - DNA, 120 bp, Artificial Sequence
  ENSG00000151503_24 (sequence is synthesized)
tgcgagagctcgaggtgtgtgaggacgtggctgtccgcaacaacgtcatcattgtaatgtgcgatctctgcattcgctacaccatcatggtggacaagtatattcccaacatctccatgt

SEQ ID NO: 426549 - DNA, 120 bp, Artificial Sequence
  ENSG00000151503_25 (sequence is synthesized)
gtctgaaggattccgacccattcatccggaagcagacactcatcttgcttaccaatctcttgcaggaggaatttgtgaaatggaagggctccctgttcttccgatttgtcagcactctga

SEQ ID NO: 426550 - DNA, 120 bp, Artificial Sequence
  ENSG00000151503_26 (sequence is synthesized)
tcgattcacacccagacattgccagcttcggggagttttgcctggctcacctgttactgaagaggaaccctgtcatgttcttccaacacttcattgaatgtatttttcactttaataact

SEQ ID NO: 426551 - DNA, 120 bp, Artificial Sequence
  ENSG00000151503_27 (sequence is synthesized)
atgagaagcatgagaagtacaacaagttcccccagtcagagagagagaagcggctgttttcattgaagggaaagtcaaacaaagagagacgaatgaaaatctacaaatttcttctagagc

SEQ ID NO: 426552 - DNA, 120 bp, Artificial Sequence
  ENSG00000151503_28 (sequence is synthesized)
acttcacagatgaacagcgattcaacatcacttccaaaatctgccttagtattttggcgtgctttgctgatggcatcctacccctggacctggacgccagtgagttactctcagacacgt

SEQ ID NO: 426553 - DNA, 120 bp, Artificial Sequence
  ENSG00000151503_29 (sequence is synthesized)
ttgaggtcctcagctcaaaggagatcaagcttttggcaatgagatctaaaccagacaaagacctccttatggaagaagatgacatggccttggcaaatgtagtcatgcaggaagctcaga

SEQ ID NO: 426554 - DNA, 120 bp, Artificial Sequence
  ENSG00000151503_30 (sequence is synthesized)
agaagctcatctcacaagttcagaagaggaatttcatagaaaatattattccaattatcatctccctgaagactgtgctggagaaaaataagatcccagctttgcgggaactcatgcact

SEQ ID NO: 426555 - DNA, 120 bp, Artificial Sequence
  ENSG00000151503_31 (sequence is synthesized)
atctcagggaggtgatgcaggattaccgagatgagctcaaggacttctttgcagttgacaaacagctggcatcagagcttgagtatgacatgaagaagtaccaggaacagctggtccagg

SEQ ID NO: 426556 - DNA, 120 bp, Artificial Sequence
  ENSG00000151503_32 (sequence is synthesized)
agcaggagctagcaaaacatgcagatgtggccgggacggctggaggtgctgaggtggcacctgtggcacaggttgccctgtgtttagaaacagtgccagttcctgctggccaagaaaacc

SEQ ID NO: 426557 - DNA, 120 bp, Artificial Sequence
  ENSG00000151503_33 (sequence is synthesized)
ctgccatgtcacctgccgtgagccagccctgcacacccagggcaagtgctggccatgtagcagtatcatctcctacacctgaaacagggccattgcagaggttgctgcccaaagccaggc

SEQ ID NO: 426558 - DNA, 120 bp, Artificial Sequence
  ENSG00000151503_34 (sequence is synthesized)
ccatgtccctgagcaccattgcaatcctgaattctgtcaagaaagccgtggagtcaaagagcaggcatcggagtcggagcttaggagtgctgcctttcactttaaattctggaagcccag

SEQ ID NO: 426559 - DNA, 120 bp, Artificial Sequence
  ENSG00000151503_35 (sequence is synthesized)
aaaaaacgtgcagtcaggtgtcttcatacagtttggagcaagagtcgaatggcgagattgagcacgtgaccaagcgggccatcagcacccccgagaagagcatcagtgatgtcacgtttg

SEQ ID NO: 426560 - DNA, 120 bp, Artificial Sequence
  ENSG00000151503_36 (sequence is synthesized)
gagcaggggtcagttacatcgggacaccacggactccgtcgtcagccaaagagaaaattgaaggccggagtcaaggaaatgacatcttatgtttatcactgcctgataaaccgcccccac

SEQ ID NO: 426561 - DNA, 120 bp, Artificial Sequence
  ENSG00000151503_37 (sequence is synthesized)
agcctcagcagtggaatgtgcggtctcccgccaggaataaagacactccagcctgcagcaggaggtccctccgaaagacccctctgaaaacagccaactaaacagcgcctcccaccagtg

SEQ ID NO: 426562 - DNA, 120 bp, Artificial Sequence
  ENSG00000151503_38 (sequence is synthesized)
tccaggcaggcaggagcccttgaggaagcagtctcgtgtcctccgtgtgaaggcagctggatcacttcccgcagtccttgggcagcgctttgctgtggaacacgagagctcctcctcagg

SEQ ID NO: 426563 - DNA, 120 bp, Artificial Sequence
  ENSG00000151503_39 (sequence is synthesized)
ggcctggcactcaccttctattctgtatgatgtatttggttaaacactgtcaaataatagagatgtgccagatttagattttcttaccctaatctgtttaatattgtaactttattccat

SEQ ID NO: 426564 - DNA, 120 bp, Artificial Sequence
  ENSG00000151503_40 (sequence is synthesized)
ttgaaagtgtcaagcccattcagataagctataatctggtctttaaggaacacaactttaaaactgcagctttcttttatataaatcaagcctctgttaacttgaattccttatagtaca

SEQ ID NO: 426565 - DNA, 120 bp, Artificial Sequence
  ENSG00000151503_41 (sequence is synthesized)
tattttcccatctgtaatgacgaaattttgattctaatattttttctattatttataagtgcaaattttttaaaaaagtgtacagctttctaaaagtaataaaggtttagcataaataca

SEQ ID NO: 426566 - DNA, 120 bp, Artificial Sequence
  ENSG00000151503_42 (sequence is synthesized)
agttgacaagcgactgtgacaggcctcgccggaggagctgggccctgaatcaccctgctccccggccggctgtcggcgctgggggagggggtcccgggggtcgactcaccgatctgcccg

SEQ ID NO: 426567 - DNA, 120 bp, Artificial Sequence
  ENSG00000151503_43 (sequence is synthesized)
atgaactcgatcttgatgccctggtgctccagccgcttgttggggttcttgagggcaaggctcaccttcccggagaccgtctccccgtcgtagaagaggaaatatttctccttcttcccg

SEQ ID NO: 426568 - DNA, 120 bp, Artificial Sequence
  ENSG00000151503_44 (sequence is synthesized)
gagcgcggccggcgctccagcggtcggcatggcagctgctacctcgctgggacaggctctgggcccacgcgtgccgcgcagtccctacagaactgcagttgtcttgtcttctcggagtgc

SEQ ID NO: 426569 - DNA, 120 bp, Artificial Sequence
  ENSG00000151503_45 (sequence is synthesized)
tttcggctacttttcccttattactttagctcgatacacgttgggctgcctttcacattcggatattacgctgttcgagtgctgacgggaaaggcagccctttgacacgcacgcgaaatg

SEQ ID NO: 426570 - DNA, 120 bp, Artificial Sequence
  ENSG00000151503_46 (sequence is synthesized)
gcgggaaaaacgctgttagggtttaactcaggccctggctccttctcgaacgaattagcggaacacccgcaggagccttgtttggcttccacttttcggcccgcccagttctctgagcgt

SEQ ID NO: 426571 - DNA, 120 bp, Artificial Sequence
  ENSG00000151503_47 (sequence is synthesized)
ggttggaaaaagaatcatgtgtacagcgcgcagtcagggcctaggaagtcatctgccgcttgctgctggcccagggccattaggacggtggttacattgtcatgagagcctatgaggaag

SEQ ID NO: 426572 - DNA, 120 bp, Artificial Sequence
  ENSG00000151503_48 (sequence is synthesized)
gagacactgagccagaattcacacccaagctgcggtggaatctgctcaactgtgttctcctgttcctgagggcaaactggagggggttcattgcgggtaggtgccatgaacaatcaaggg

SEQ ID NO: 426573 - DNA, 120 bp, Artificial Sequence
  ENSG00000151503_49 (sequence is synthesized)
cgaggggggaggtggactgagccgctcccagtgtggcacgacgggacaggatgaggcggcgactggaggtagaagggacaggacttggctgctgattccatgtggaggagctgctcacgg

SEQ ID NO: 426574 - DNA, 120 bp, Artificial Sequence
  ENSG00000151503_50 (sequence is synthesized)
tgccatatttccagcgcgcatgctccagtcactggctggaaaccagcaggcacgcgtggaggtgcagaggcaaggagttgaagtgtcctcagggaatctgggtgagccacagtaggaggt

SEQ ID NO: 426575 - DNA, 120 bp, Artificial Sequence
  ENSG00000151503_51 (sequence is synthesized)
gtagtaagtgggacagggcggtcaccgggacaggggcaatgatggaagacggcgggagggaagccagaggcgtgaacagtgaggcccaggggccagccgagtgcctgagggctgcgggtc

SEQ ID NO: 426576 - DNA, 120 bp, Artificial Sequence
  ENSG00000151503_52 (sequence is synthesized)
agagaagggggtcagagagacggaaaggagcatccccaggaggggccctcaacactgccaggccctgggacagggtccagtggaggtctgagggccgccgctgggacactgatgtggaca

SEQ ID NO: 426577 - DNA, 120 bp, Artificial Sequence
  ENSG00000151503_53 (sequence is synthesized)
gaacagagacctccgatagaccacgcggctttcactcagtggtgtctcctctttatgcagagagcatcagtgatgtcacgtttggagcaggggtcagttacatcgggacaccacggactc

SEQ ID NO: 426578 - DNA, 120 bp, Artificial Sequence
  ENSG00000151503_54 (sequence is synthesized)
cgtcgtcagccaaaggagcccaaagctgggacgctacatggaagacaccagtgtccctgcagtgcccacctgagagctgtgctggatgaagcaagggccacgtgagtaaagctcactggg

SEQ ID NO: 426579 - DNA, 120 bp, Artificial Sequence
  ENSG00000151503_55 (sequence is synthesized)
acacagccactgccagggcccaaggatggcagggcctcctggcagacagcgaggcaacagtgagctagagcgggggcgcctggcgcaaccccaggagctgactggcatctgtgtatgtac

SEQ ID NO: 426580 - DNA, 120 bp, Artificial Sequence
  ENSG00000151503_56 (sequence is synthesized)
atctgagggcttctgggtggcctctgggtacagactgtcctagtcatctcaggaagaggcagttcaaagctaacctgagaggtttcttttgaagagatgcaaactgatttcaacattgct

SEQ ID NO: 426581 - DNA, 120 bp, Artificial Sequence
  ENSG00000151503_57 (sequence is synthesized)
taactggaatttttaaaggtttcctaagcaactatggtctgatgtgtagacagtatgagttcccttgtgaaaaaggctaaaacttgtgtgagaaaaggaacatcacagtaaacttccatg

SEQ ID NO: 426582 - DNA, 120 bp, Artificial Sequence
  ENSG00000151503_58 (sequence is synthesized)
atcaaacgtcacatgagtgaaaatgggattcccaaagcctgctaatggcaccatccaagccaccaacccaggagtcatggcatttctgcttcccctttcatgcccactaccactgtcctg

SEQ ID NO: 426583 - DNA, 120 bp, Artificial Sequence
  ENSG00000151503_59 (sequence is synthesized)
cctctgaggtgtctcagggcagccccgctccattcctgatgctgctgccttcatcatagcctcgagcaattgcaggagtattttagctgctttctgatgttaactgtgccagcccatccc

SEQ ID NO: 426584 - DNA, 120 bp, Artificial Sequence
  ENSG00000151503_60 (sequence is synthesized)
ccacacttttgcagaacgacttttgaaaacacagctttgaatgtgtcaagcctgtacacctttaatgtttcccctttgtttcctaaataaatgaccacatccttggcatgctttataaga

SEQ ID NO: 426585 - DNA, 120 bp, Artificial Sequence
  ENSG00000151503_61 (sequence is synthesized)
atagacagcaaaaattctgaaaaaaaggattcctcattgacacaaaactagaaactactgtagcggtcatctagtccagtgatttactgttgtggccaaggagacctagaacagtcatgc

SEQ ID NO: 426586 - DNA, 120 bp, Artificial Sequence
  ENSG00000151503_62 (sequence is synthesized)
gacctggtcaaagtcatatcacctcaacatcagctcctgcctggagtttatctgggcttggtttgggtaaattgaaaaccatgggacaaagtgtttggcatttattacagtcacctgtac

SEQ ID NO: 426587 - DNA, 120 bp, Artificial Sequence
  ENSG00000151503_63 (sequence is synthesized)
atcgttctgtgtgtagctgttgtcttaagtaagcccagccatgggactgtgtcaggggctgcggagcctgtctgtgtctgctctcagccatgtggttcctagaggtggctctgatctgag

SEQ ID NO: 426588 - DNA, 120 bp, Artificial Sequence
  ENSG00000151503_64 (sequence is synthesized)
tttgtttttttatttttcctttagtgtgagtgtatatttcatgctacctaagttattaatttttttgtaatattagttatttttcaaatacctaagaattgcaaaacatttcccaggcac

SEQ ID NO: 426589 - DNA, 120 bp, Artificial Sequence
  ENSG00000151503_65 (sequence is synthesized)
aaaagaaacatacaaacaaaactcagcagccttttcaactatgaacaagaaagaaagaaagaaagaaagaaaggggacatgcattctttcctatttacccagctcagatttcaaattcag

SEQ ID NO: 426590 - DNA, 120 bp, Artificial Sequence
  ENSG00000151503_66 (sequence is synthesized)
catgggtatttagcatctgtagaggatatgtataatcaggagtaaaatgtttcacctctcaggctttgctgatcattttccaggtaaggggataactgcgaaattcaaatgttgacttta

SEQ ID NO: 426591 - DNA, 120 bp, Artificial Sequence
  ENSG00000151503_67 (sequence is synthesized)
aaaggaagatgattttattagtgtaaaggaacatcccatagtatataactcctggggagtttatttctccttaggtatttttattcgactattcaagatgggtctgtctgcctttagttt

SEQ ID NO: 426592 - DNA, 120 bp, Artificial Sequence
  ENSG00000151503_68 (sequence is synthesized)
tttgttgtttgtgattgtgggcatgatgttttaactttgatgaaatagaagccattagcaagatgtatctggagaaaatttaggaatggaattaggatttagaatacagttgagacatct

SEQ ID NO: 426593 - DNA, 120 bp, Artificial Sequence
  ENSG00000151503_69 (sequence is synthesized)
ttgggtaagcccagtgtgtgtgggagaaaatgtgtgtgtttgcaaatgaaatgctgtgttgataatggcccagcaggcctctagtaagggagaccctggcactgcaggaagacccctgtc

SEQ ID NO: 426594 - DNA, 120 bp, Artificial Sequence
  ENSG00000151503_70 (sequence is synthesized)
atcttgtccttctctggcatcagctgtgccccagacaaaacacccttgcagaccccctgacagcctcagatggccccccagttgtgggaattacacctcctctctgggccagagcatttc

SEQ ID NO: 426595 - DNA, 120 bp, Artificial Sequence
  ENSG00000151503_71 (sequence is synthesized)
gggcttctcctcagtctctcctgcattcgtgatgtgtttgctagagtcgcagtaaaactccttccggtgcaggatagttctgatggtcagaaccatgagtgcattgctgaggtggagtat

SEQ ID NO: 426596 - DNA, 120 bp, Artificial Sequence
  ENSG00000151532_0 (sequence is synthesized)
ccgttctgctctcgggggcaccttccggggttcctaagccgcggggcccctcgctgcccctcgaggccctttccctgacctaggctttggcctgggctactcgttccggagccgccatgt

SEQ ID NO: 426597 - DNA, 120 bp, Artificial Sequence
  ENSG00000151532_1 (sequence is synthesized)
cgtccgacttcgaaggttacgagcaggacttcgcggtgctcactgcagagatcaccagcaagattgcgagggtcccacgactcccgcctgatgaaaagaaacagatggttgcaaatgtgg

SEQ ID NO: 426598 - DNA, 120 bp, Artificial Sequence
  ENSG00000151532_2 (sequence is synthesized)
agaaacagcttgaagaagcgaaagaactgcttgaacagatggatttggaagtccgagagataccaccccaaagtcgagggatgtacagcaacagaatgagaagctacaaacaagaaatgg

SEQ ID NO: 426599 - DNA, 120 bp, Artificial Sequence
  ENSG00000151532_3 (sequence is synthesized)
gaaaactcgaaacagattttaaaaggtcacggatcgcctacagtgacgaagtacggaatgagctcctgggggatgatgggaattcctcagagaaccagagggcacatctgctcgataaca

SEQ ID NO: 426600 - DNA, 120 bp, Artificial Sequence
  ENSG00000151532_4 (sequence is synthesized)
cagagaggctggaaaggtcatctcggagactagaggctggataccaaatagcagtggaaaccgagcaaattggtcaggagatgttggaaaaccttagtcatgacagagaaaagatacagc

SEQ ID NO: 426601 - DNA, 120 bp, Artificial Sequence
  ENSG00000151532_5 (sequence is synthesized)
gagcacgtgaaagacttcgggaaacagatgctaatttgggaaaaagctccaggattctgacagggatgttgcgaagaatcatccagaaccgcatcctgctcgtcatcctagggatcatcg

SEQ ID NO: 426602 - DNA, 120 bp, Artificial Sequence
  ENSG00000151532_6 (sequence is synthesized)
tggtcatcaccatcctgatggcgatcactttttctgtcagaagacactgatgtatctgctctcccttgataaacagcaacaacagcttgttctgagtaattaagacaaaatggtcacatg

SEQ ID NO: 426603 - DNA, 120 bp, Artificial Sequence
  ENSG00000151532_7 (sequence is synthesized)
aatcattctgttgcgctgacaggccccaggtgaccctctctctccctcaccgccgttgggctgaagtgcaaagagtgtaaaaatattttctattcctgtttgcatgtgggttggtttcct

SEQ ID NO: 426604 - DNA, 120 bp, Artificial Sequence
  ENSG00000151532_8 (sequence is synthesized)
tttcgaggtttgtcttcacccagattcgttttttagaggggaaggtgaatgtttatttacctttttgctaatgtcatcaactagccaaaatagccccagtgacactcctagccctctgga

SEQ ID NO: 426605 - DNA, 120 bp, Artificial Sequence
  ENSG00000151532_9 (sequence is synthesized)
cgtgtcaagggccgtggtttgggagaggacatgatgagtcagtcacgagagcttctgtttgtcacccgcctcttgttgctgaaaagctcttctgtgatgtctgaggataaaaatgcagca

SEQ ID NO: 426606 - DNA, 120 bp, Artificial Sequence
  ENSG00000151532_10 (sequence is synthesized)
aaaagcaggggatggagtcagtgaccccgtccagcaagccagccctgttcctacacaggcctcatgaatatagtcatcaacctgcctgagtgctttcattgtaaaggtcggtatttaatg

SEQ ID NO: 426607 - DNA, 120 bp, Artificial Sequence
  ENSG00000151532_11 (sequence is synthesized)
tcggttgtacaggaaattgacttagcactttccctgtttttctattgcataattttttttttaacccaaagatattttttttgctgagcctgcccagtattcactgttcacaactttgat

SEQ ID NO: 426608 - DNA, 120 bp, Artificial Sequence
  ENSG00000151532_12 (sequence is synthesized)
tactggctacaagaaatattttcttgccttccccaaatcccatactccccagaatctgctggcaaagtgagccctggtacaggatttaattgtgacctcgtcttccctgacctgtgtaag

SEQ ID NO: 426609 - DNA, 120 bp, Artificial Sequence
  ENSG00000151532_13 (sequence is synthesized)
catctctgtatcctttcggttttaatatctgcactgccaaaagcagtcctcatacttgcaaaaggtctgacaaggttctctccacatacattccagtatgtaaagagaccatgaatattt

SEQ ID NO: 426610 - DNA, 120 bp, Artificial Sequence
  ENSG00000151532_14 (sequence is synthesized)
cagtaagagcaagaacatgactccatcagtgtgaaatttcaaatgtgattataaatatgggagagtcctataggagggtccaccagagataaacttcacggaaaacgttccctaacctcc

SEQ ID NO: 426611 - DNA, 120 bp, Artificial Sequence
  ENSG00000151532_15 (sequence is synthesized)
tttaaaagaatagaggatggcagattgttccaaaaggaatggcttgggtttttaactaacaaatgttagcaagcctttcttgaattcactatgtattcaaacttctaatatgctttgtga

SEQ ID NO: 426612 - DNA, 120 bp, Artificial Sequence
  ENSG00000151532_16 (sequence is synthesized)
tttttttctttcatttctttctgtctgaggtaaccaggaattgcgttcaaaatgagctcatttgtgatcaggcttaaaagttgcccaagctgaggtcgtttccccccagtcacaaagcag

SEQ ID NO: 426613 - DNA, 120 bp, Artificial Sequence
  ENSG00000151532_17 (sequence is synthesized)
aatataattagaagctttgaatccttgaaaagcaaacctgttctcttcatcaaaaatgctaaccacctgtgcccgtggatcaatatcacctggatgtagtgcttgatatttttcccaact

SEQ ID NO: 426614 - DNA, 120 bp, Artificial Sequence
  ENSG00000151532_18 (sequence is synthesized)
cagaagaaaaccattatggtttagagaggaaatgcagaatggcagaatccaccagagaaattgcacttatcgaaacaggccaaggcctgcatgtgttcggataaatcatttagtattgtg

SEQ ID NO: 426615 - DNA, 120 bp, Artificial Sequence
  ENSG00000151532_19 (sequence is synthesized)
taaataaagctgcagcctttacttcggagggatggtgtgggattttggccgagggaagcaggacagagaaggagcaggaagctatgctaattttcctgtcagcttaagggatccgtctca

SEQ ID NO: 426616 - DNA, 120 bp, Artificial Sequence
  ENSG00000151532_20 (sequence is synthesized)
gcaagaatcttgtattctgataacggaatgctgtacgtgctgaccacatctaagaaccattaaaaagcaaggaaacaaacaaacaacccttttctcattccgacacacgaatagtcatcg

SEQ ID NO: 426617 - DNA, 120 bp, Artificial Sequence
  ENSG00000151532_21 (sequence is synthesized)
agtattacaccagcccctctggtggcttccttcaaaactgttgatcttagctaaagtgtataaccagttaccagctgcacttcgcacggccatcccgtccacaatgcagcagactcttcc

SEQ ID NO: 426618 - DNA, 120 bp, Artificial Sequence
  ENSG00000151532_22 (sequence is synthesized)
caaggccacctagcaagcaaggttgatcggatcatctaaactggccgcctcctgaatatttcactgaatcctggcgttcatgttgaagcagacaaaatgagaaaggaggagggcattgct

SEQ ID NO: 426619 - DNA, 120 bp, Artificial Sequence
  ENSG00000151532_23 (sequence is synthesized)
cacctctcaatagcttttttcgttcaagttctatgtctttatcagctcttgcctgtgattttaccccaattcaaccttgggagtgggaagaatatgaacagataacccttggcctaacag

SEQ ID NO: 426620 - DNA, 120 bp, Artificial Sequence
  ENSG00000151532_24 (sequence is synthesized)
ctccatcaaacctccttgagagcaactacctaggccaggctagtgagtgctttgtgaggaagctggtcagaaggttccctcaactccttcctggtcctcctggacactgcagaaaagact

SEQ ID NO: 426621 - DNA, 120 bp, Artificial Sequence
  ENSG00000151532_25 (sequence is synthesized)
taggggatccccagcagaggccaattgctctccttccttccctgccccaccaggaaaggaataacgtccacagacttgaagcagatagtgaagtagatctgtgagaggttctaggtactt

SEQ ID NO: 426622 - DNA, 120 bp, Artificial Sequence
  ENSG00000151532_26 (sequence is synthesized)
agtgtgtagactttgacgaatatttctcaagttgggagcccttgttaaaaatgatgtttaagggagtggttggggggaagatgaaggcatggaggaggaagaagagaaggaagcccttgc

SEQ ID NO: 426623 - DNA, 120 bp, Artificial Sequence
  ENSG00000151532_27 (sequence is synthesized)
catataaaattcatgcagactaaacagtttccctgacagaataaataaagtggatgctaccccactccagaatcaaaagcaatttaattaaagtctcttaagttgtaaagagttttaaat

SEQ ID NO: 426624 - DNA, 120 bp, Artificial Sequence
  ENSG00000151532_28 (sequence is synthesized)
gatccgtgttgaaggcgaatgcctgcaaatgcagtgggtctgacgtcagctgccgggcctgggctgggaggccatttgctattctgtttaaggcaggctggattgtcttattttggaacc

SEQ ID NO: 426625 - DNA, 120 bp, Artificial Sequence
  ENSG00000151532_29 (sequence is synthesized)
agcttggtggggggtttgctttgctactgcttctgagccctgagcttcaaaggctgaaattaatggtgaacaaaattgtgcggctctggccatcccatgcggggcaagcccattgagggt

SEQ ID NO: 426626 - DNA, 120 bp, Artificial Sequence
  ENSG00000151532_30 (sequence is synthesized)
tatcattaagtaaagaaataaagagggggaaaaaagcctgcctgttccaaaaacctcatcagataatgacctcagtgattgggttttcattaccaaacagcatccagagattatcaaccc

SEQ ID NO: 426627 - DNA, 120 bp, Artificial Sequence
  ENSG00000151532_31 (sequence is synthesized)
atagaagaagggaggggaaaaaaaagaaagaaaggaaaagcaactgtctttctctccctctctttctcctttttttttgcacatcttttctttaaaactgtcagatcatttcagtatttc

SEQ ID NO: 426628 - DNA, 120 bp, Artificial Sequence
  ENSG00000151532_32 (sequence is synthesized)
aaatccgaggaaaacagcctgcctgctgctgtatttgaagttgtaatggtgtcaaaaagtcacgactgactgacagccgtcagtcccagaggggctcattaaatcataaaaacttgacaa

SEQ ID NO: 426629 - DNA, 120 bp, Artificial Sequence
  ENSG00000151532_33 (sequence is synthesized)
ggaaataattgcgcattgccagcaacttggcgcctgtttagacgtttttattttctttcattattagtccccaccattacgttcattaacaaattgcattaaacaactgttaagggctaa

SEQ ID NO: 426630 - DNA, 120 bp, Artificial Sequence
  ENSG00000151532_34 (sequence is synthesized)
aggcttgaaccagaaccagccagtggaaattactcaaacacgtattgtgccttcaatgagaagccttctcactgaaagagctgccctggacggaaaatgagtagtgagatgatgctggtg

SEQ ID NO: 426631 - DNA, 120 bp, Artificial Sequence
  ENSG00000151532_35 (sequence is synthesized)
actgacatcaaatgtgctgtggttctgggtgatttatctggtcccttcccatcccagagctttatgattctgtaataatcaagggagaaacccattacatagtggacaattttttttctt

SEQ ID NO: 426632 - DNA, 120 bp, Artificial Sequence
  ENSG00000151532_36 (sequence is synthesized)
atctcttaaccttgtgagccaccgtgcccaaccctaacaattatttttaaaaggaggaatttaaatgagctgtggattattcattttgtcccataagaagataattaaaaaatgacaaaa

SEQ ID NO: 426633 - DNA, 120 bp, Artificial Sequence
  ENSG00000151532_37 (sequence is synthesized)
atgaactgaacaaaaaagttctaacaaaataataaggctgaatttttaaagtctcttccgcatcttctgttccctgggatgccttagacggggtgtgcagtattttaggtacatcgtgag

SEQ ID NO: 426634 - DNA, 120 bp, Artificial Sequence
  ENSG00000151532_38 (sequence is synthesized)
caaggagcctgcattcccagggggcggcagggacagcatgtaaggtcttagtccagctctgtgatctgaaggcaaagcctctatgtgtgaaacacaggggtacctcaaaaatagaacaag

SEQ ID NO: 426635 - DNA, 120 bp, Artificial Sequence
  ENSG00000151532_39 (sequence is synthesized)
agcactccatccatgtgcggatgactgtcaaggtcactgagacctacagtgatctggaaaattaaagctctctggccgcctttcctctcaggacatacttctggagatcaaaaaaaaaaa

SEQ ID NO: 426636 - DNA, 120 bp, Artificial Sequence
  ENSG00000151532_40 (sequence is synthesized)
tgtgccttgtagcgtgtggatccggagccgattcccagaacacgaaggggggaaaaaacgcttctaatgatccctcagaacttgcatattttcatacgcttttctggggggaggcactaa

SEQ ID NO: 426637 - DNA, 120 bp, Artificial Sequence
  ENSG00000151532_41 (sequence is synthesized)
ttggggcgcttttcctttgcgaacttacttatcttaaagtcggagcggaaaataaagcacgcacgcaacccaatttccggagaaccgagattgcgacgaacaaccaggaagcggctgggt

SEQ ID NO: 426638 - DNA, 120 bp, Artificial Sequence
  ENSG00000151532_42 (sequence is synthesized)
tttctatgctagactgtcaactatgtgaaggtgggagctgtgtctgatttccttggcgtttacttattaggggctcaggaaaataagtgaatgagcagggatatttgcttgaagccagga

SEQ ID NO: 426639 - DNA, 120 bp, Artificial Sequence
  ENSG00000151532_43 (sequence is synthesized)
tctctgaacttataccccactcatctcctgaagtccccagttagttctggaggagatggatgatgtcttaaagaggtttatgagtccaagtaagggaacaagaggagagaaccaaggtag

SEQ ID NO: 426640 - DNA, 120 bp, Artificial Sequence
  ENSG00000151532_44 (sequence is synthesized)
tatataccaccaagctctgctgcctcagagatttttgtgtcgaaagtggctgatggcctcatctcttcatgatacatcacctcgcctcttctcttcagttctgcttttctccactgccgg

SEQ ID NO: 426641 - DNA, 120 bp, Artificial Sequence
  ENSG00000151532_45 (sequence is synthesized)
agatcgtcttgatttttgttattgttggagactacttcctttgaattgagtcccagagcctcagagtatcaggacttgtggttccagttagagttttactcatttttaattgtaattgtt

SEQ ID NO: 426642 - DNA, 120 bp, Artificial Sequence
  ENSG00000151532_46 (sequence is synthesized)
ttagcagtagaaacatttctttgggttattagtttttgtattgggaagctgttttacaaggtaacaaaatcatccttggatgcaaagttgtaaatttccaagaaaacagatcgtgttaca

SEQ ID NO: 426643 - DNA, 120 bp, Artificial Sequence
  ENSG00000151532_47 (sequence is synthesized)
atttttttcttgcctttatattttaatgtgacaattcttaacacatagaaggaaactttttgaattcagtaccttaaaaataaaactgggcagagcccggtggctcatgcctataatccc

SEQ ID NO: 426644 - DNA, 68 bp, Artificial Sequence
  ENSG00000151532_48 (sequence is synthesized)
gtggaggttgcggtctcaataaataaataaattaaaaaaaaactatgtctttccttagctgtagtatt

SEQ ID NO: 426645 - DNA, 120 bp, Artificial Sequence
  ENSG00000151532_49 (sequence is synthesized)
taaaaaaaaactatgtctttccttagctgtagtattatataaggcccaaacacaggagcttcattacaattgaaaggagactgcattgctggctctggaagaatgcttactgacttgtat

SEQ ID NO: 426646 - DNA, 120 bp, Artificial Sequence
  ENSG00000151532_50 (sequence is synthesized)
tattgaataatcataattcttttttctttatgagatggggtcttgctgtatcgcccacgttggagtgtaatggcgcaatctcagctcattgcaacctctccctcacggctcaagtctact

SEQ ID NO: 426647 - DNA, 86 bp, Artificial Sequence
  ENSG00000151532_51 (sequence is synthesized)
tcagctcattgcaacctctccctcacggctcaagtctatcaagccactgtgcccggctgattttttttttttgtagagatggggtt

SEQ ID NO: 426648 - DNA, 120 bp, Artificial Sequence
  ENSG00000151532_52 (sequence is synthesized)
caggcgtgagccaccgcacctggcctgatcataattcttaaaaacgcagtagttgccctcttaataatgacttgtgcttgcccctttttaaatctatttccaattgatgtatagaaaaag

SEQ ID NO: 426649 - DNA, 120 bp, Artificial Sequence
  ENSG00000151532_53 (sequence is synthesized)
cccctttttaaatctatttccaattgatgtatagaaaaagatgaaaaatatatccatgtagttatgaatttcagatgtatgtctgtagatgaacagacattaatatatataaccatggca

SEQ ID NO: 426650 - DNA, 120 bp, Artificial Sequence
  ENSG00000151532_54 (sequence is synthesized)
aaaatagtttgatgacaagtaattataatctctctctctggccatcattggcgagtgcagtgttgagctaaaagtgacccagaggaggtgaactataatttacttgagttaagaaggata

SEQ ID NO: 426651 - DNA, 120 bp, Artificial Sequence
  ENSG00000151532_55 (sequence is synthesized)
aaaattggagcaaactttccagccaaagcagttaattcccccaacatagtaacttacttaaattcaagtagagtgggtagatctattgaaatgaactttactctgctgtgcatgttacaa

SEQ ID NO: 426652 - DNA, 120 bp, Artificial Sequence
  ENSG00000151532_56 (sequence is synthesized)
tgtattaaagtattgcttccaaagagaacagaagagtgaacatttaaaaattttattttaagaaagaaatctgattactctgtgatattttttaaacaataaagagattttgctcttaaa

SEQ ID NO: 426653 - DNA, 120 bp, Artificial Sequence
  ENSG00000151532_57 (sequence is synthesized)
atctcggagactagaggctggataccaaatagcagtggaaaccggtaagaattctgagagtgagcaaattgtcttgcttatgcacagcagtcttcacaacacatgacatttcagggaaac

SEQ ID NO: 426654 - DNA, 120 bp, Artificial Sequence
  ENSG00000151532_58 (sequence is synthesized)
ttcaaaggagtagcagagacagcagcccgagatgtggtttacatattggggagacaattgggagcttatttgcgcttatcttttttcaagttaaaaggcatgacatctactgaaaacagt

SEQ ID NO: 426655 - DNA, 120 bp, Artificial Sequence
  ENSG00000151532_59 (sequence is synthesized)
tcctgaggtttaaaagtatacatctgaaaagagatggaatactttgtctaaattctacatttgtcttaatatgcagttacatgttgtcagtttacccacccgcaatgattgctagcacat

SEQ ID NO: 426656 - DNA, 120 bp, Artificial Sequence
  ENSG00000151532_60 (sequence is synthesized)
tagaatgctaatcaggaaggcccggtgggtggctggagggtgaaggaggtcactggcgcactgggctctcaagctgctccttaacggtattagcagcaactcatgtggaagcgatactgt

SEQ ID NO: 426657 - DNA, 120 bp, Artificial Sequence
  ENSG00000151532_61 (sequence is synthesized)
ttaatgcaaagctggagtcttaatcaacttcaaaatgtttcttggagatcttacatttaaccctttaccttgtgatcactgtctgctatcttttaaaaaaatcttttcttctcttttctt

SEQ ID NO: 426658 - DNA, 120 bp, Artificial Sequence
  ENSG00000151532_62 (sequence is synthesized)
aaaactcgaaacagattttgtgagtcaaattcgaccctttgtcatatttacttttttttaaaaatgtttcctcctcatgcctcagtcagcattaaatgcacagtcttttgggctcatgta

SEQ ID NO: 426659 - DNA, 120 bp, Artificial Sequence
  ENSG00000151552_0 (sequence is synthesized)
attcggagctgcgggagccgggctggcaggagcaggatggcggcggcggcggctgcaggcgaggcgcgccgggtgctggtgtacggcggcaggggcgctctgggttctcgatgcgtgcag

SEQ ID NO: 426660 - DNA, 120 bp, Artificial Sequence
  ENSG00000151552_1 (sequence is synthesized)
gcttttcgggcccgcaactggtgggttgccagcgttgatgtggtggagaatgaagaggccagcgctagcatcattgttaaaatgacagactcgttcactgagcaggctgaccaggtgact

SEQ ID NO: 426661 - DNA, 120 bp, Artificial Sequence
  ENSG00000151552_2 (sequence is synthesized)
gctgaggttggaaagctcttgggtgaagagaaggtggatgcaattctttgcgttgctggaggatgggccgggggcaatgccaaatccaagtctctctttaagaactgtgacctgatgtgg

SEQ ID NO: 426662 - DNA, 120 bp, Artificial Sequence
  ENSG00000151552_3 (sequence is synthesized)
aagcagagcatatggacatcgaccatctccagccatctggctaccaagcatctcaaggaaggaggcctcctgaccttggctggcgcaaaggctgccctggatgggactcctggtatgatc

SEQ ID NO: 426663 - DNA, 120 bp, Artificial Sequence
  ENSG00000151552_4 (sequence is synthesized)
gggtacggcatggccaagggtgctgttcaccagctctgccagagcctggctgggaagaacagcggcatgccgcccggggcagccgccatcgctgtgctcccggttaccctggataccccg

SEQ ID NO: 426664 - DNA, 120 bp, Artificial Sequence
  ENSG00000151552_5 (sequence is synthesized)
atgaacaggaaatcaatgcctgaggctgacttcagctcctggacacccttagaattcctagttgaaactttccatgactggatcacagggaaaaaccgaccgagctcaggaagcctaatc

SEQ ID NO: 426665 - DNA, 120 bp, Artificial Sequence
  ENSG00000151552_6 (sequence is synthesized)
tatgaggggcctgccagaaaagtcactaacctgtctcagtgtggccttgtccagccttgtgttttctgtaacccctgtttgtggtacgagataatgagtcctatttttctctcacataat

SEQ ID NO: 426666 - DNA, 120 bp, Artificial Sequence
  ENSG00000151552_7 (sequence is synthesized)
atgcatttgctctcctaggacagtgtaatacatttatgtgaagtaaagacatgcgagactggtggcctgcaaatagcatccgttgatctgtgttaactgcatagggagggctctgcatag

SEQ ID NO: 426667 - DNA, 120 bp, Artificial Sequence
  ENSG00000151552_8 (sequence is synthesized)
cacctgctatagcggtgtcatgttggatcgcttttgtgactgttcatctgtccttgacagtggctgtcatcttgactactttgttgatttgttggtattggggacattttaaaggctgag

SEQ ID NO: 426668 - DNA, 120 bp, Artificial Sequence
  ENSG00000151552_9 (sequence is synthesized)
ttatttttgaatgtcatgtttatgtcatagacgtagttttcgcatccttgaattaaactgccttaactccttttgtggtataagcaaaactacatggactctgtcctggtatccttttcc

SEQ ID NO: 426669 - DNA, 120 bp, Artificial Sequence
  ENSG00000151552_10 (sequence is synthesized)
tgtgtggttgccccgtgtcctctggcctagggttaagtgtgcaagataactactcgtgagtattcagaatgttgttcctaataaatgcacttgttgtctgtcttctttaatcaaatcaca

SEQ ID NO: 426670 - DNA, 120 bp, Artificial Sequence
  ENSG00000151552_11 (sequence is synthesized)
tcttatatacagcagtcagagatgagtatactagaatcatggattgctggaggtcttttaatctgatgttctcagaagggggtggatttaaatcctgaaataaatatttcaacacaagaa

SEQ ID NO: 426671 - DNA, 120 bp, Artificial Sequence
  ENSG00000151552_12 (sequence is synthesized)
tgcacatcagacggaatctcagagtagctggacttggagacaggcagcacagtggcagaatgggtagtgccgacatgaatcctggctcgctccctcaccaccggccatgctgagcacatt

SEQ ID NO: 426672 - DNA, 120 bp, Artificial Sequence
  ENSG00000151552_13 (sequence is synthesized)
attgacctgctgaggcctcagtttccccacctgtatcatgaggtccatcatgcttgttaggattaaacgtgatagtgtgcggcaagcactcaacacagtgtctggccataacaagtgctc

SEQ ID NO: 426673 - DNA, 120 bp, Artificial Sequence
  ENSG00000151552_14 (sequence is synthesized)
agtgatccccagctgcagtttgtgtccttactgctgtgatgaggagactccatgggggagggggacaccacgtagatggcctgggggcacatatctgaatctgtgtcaagccacagaccc

SEQ ID NO: 426674 - DNA, 120 bp, Artificial Sequence
  ENSG00000151552_15 (sequence is synthesized)
acagaaagtgccctttaatttccgaaatcctttttgcccatttgtgaatatgggtggcatttgaacgctcatgggacagagagctgaattcctcttttgtgtttgtttaggtatcagttc

SEQ ID NO: 426675 - DNA, 120 bp, Artificial Sequence
  ENSG00000151552_16 (sequence is synthesized)
ccaccaagttgtccttaaaaactttgatccccgaatgcttggggaaaccaatctgagtaataataaaactcaagtcacctgcacagctggctctgtgtgaattactctctctattgcaat

SEQ ID NO: 426676 - DNA, 120 bp, Artificial Sequence
  ENSG00000151552_17 (sequence is synthesized)
tcccctgtcttgataaaatggctctatctaggcagctggcaaggtgaatccattgggtggttacaatacctcccttagtagactaaagaacaacttggataaaaccagcaagaaatggat

SEQ ID NO: 426677 - DNA, 120 bp, Artificial Sequence
  ENSG00000151552_18 (sequence is synthesized)
tatatcgagggaaattgtcatgcccatccaagaccatgataaggaatgaggaagtaacataatggaaggattctgtctcttctcattgggactgactctaagcacctctgattagatgtc

SEQ ID NO: 426678 - DNA, 120 bp, Artificial Sequence
  ENSG00000151552_19 (sequence is synthesized)
attctatgtctgggatgatctcaggactatggtattgtcctcttgtgctatcaattttaactcacaaatggatgtcgatgtcatttattctcttattctacagaccttcattggctacat

SEQ ID NO: 426679 - DNA, 120 bp, Artificial Sequence
  ENSG00000151552_20 (sequence is synthesized)
gctctctgccattttttgatgggggttggtgagggcgtctgacctgaaggaggaggccagatgcagctatttataaagtttttagggaatagagatctcaagagaagattgcatgtcctt

SEQ ID NO: 426680 - DNA, 120 bp, Artificial Sequence
  ENSG00000151552_21 (sequence is synthesized)
ttagaattcctagttgagtgagtattacagacatgtccatgactgagcagcttccagcccctattctctgcctgctgtggtccagaggacaagtctgtgttccctgagatcgtcaatccg

SEQ ID NO: 426681 - DNA, 80 bp, Artificial Sequence
  ENSG00000151553_0 (sequence is synthesized)
gagccgggctgccaccgtgtcccaaccggtgccgccgccggagcttctccgggccccgagtcctcgccgaacgccctcct

SEQ ID NO: 426682 - DNA, 120 bp, Artificial Sequence
  ENSG00000151553_1 (sequence is synthesized)
gcacacctgaagcggccgggccaggccctgcctcgatcctcagctcgtcctccccgccccgcaccggccttcactctggagcggccccggcagccgcagcaggggcggcggcggcggatc

SEQ ID NO: 426683 - DNA, 120 bp, Artificial Sequence
  ENSG00000151553_2 (sequence is synthesized)
ggcggatcgaggagctctccaggtcgtcccgggagaggctgctgcagtcccgggacaggatgttctccaagttcacctccatcctgcagcacgccgtggaggcgcttgcaccttctcttc

SEQ ID NO: 426684 - DNA, 120 bp, Artificial Sequence
  ENSG00000151553_3 (sequence is synthesized)
ctttacaagaagattttgtttatcactggaaggcaattacccattactacatagagacttcagatgataaagccccagtgaccgatacaaatattccatcgcatctggaacagatgttag

SEQ ID NO: 426685 - DNA, 120 bp, Artificial Sequence
  ENSG00000151553_4 (sequence is synthesized)
atatactggttcaagaagaaaatgaacgggaatctggagagacagggccatgtatggaatatttgcttcatcacaagatcttggaaacattatataccttggggaaagctgattgtcctc

SEQ ID NO: 426686 - DNA, 120 bp, Artificial Sequence
  ENSG00000151553_5 (sequence is synthesized)
cgggaatgaaacagcaggttttggttttctatacgaaacttctgggaagaatccggcagccactacttccacacattaacgtgcacaggccagtgcagaaattaattagactctgtggtg

SEQ ID NO: 426687 - DNA, 120 bp, Artificial Sequence
  ENSG00000151553_6 (sequence is synthesized)
aagtcctagcaacaccaacagaaaatgaagagattcagtttctttgcattgtgtgtgcgaagctgaaacaggacccctacctggttaactttttcctagagaataagatgaaatcattgg

SEQ ID NO: 426688 - DNA, 120 bp, Artificial Sequence
  ENSG00000151553_7 (sequence is synthesized)
cttccaaaggagtaccaaatgtaatttcagaagatacattaaaaggtcaggattccttgtcaacagatacaggacagtcccgtcaaccagaggaactatctggtgctactggaatggagc

SEQ ID NO: 426689 - DNA, 120 bp, Artificial Sequence
  ENSG00000151553_8 (sequence is synthesized)
aaacagaattggaagatgagcctcctcatcagatggatcacctgtccacaagcttggataacctcagtgtcacctcactgccagaggcctcggttgtttgtccaaatcaggattacaatt

SEQ ID NO: 426690 - DNA, 120 bp, Artificial Sequence
  ENSG00000151553_9 (sequence is synthesized)
tagtgaattctttgttaaatcttactagaagtcctgatggcagaatagctgtgaaggcatgtgaaggcttgatgctgttagtaagtttgccagagcctgcggctgcaaagtgccttacac

SEQ ID NO: 426691 - DNA, 120 bp, Artificial Sequence
  ENSG00000151553_10 (sequence is synthesized)
agagcacttgcttgtgtgaactactgacagacagacttgcctccctgtacaaggccctacctcagtcagtggatccgttagatattgaaaccgtggaagcaattaactggggcttggact

SEQ ID NO: 426692 - DNA, 120 bp, Artificial Sequence
  ENSG00000151553_11 (sequence is synthesized)
catatagtcataaagaagatgcttcagcatttccaggaaaacgagccttaatttcatttctttcctggtttgattattgtgatcagctcattaaggaagcccaaaagactgctgctgttg

SEQ ID NO: 426693 - DNA, 120 bp, Artificial Sequence
  ENSG00000151553_12 (sequence is synthesized)
ctcttgccaaagctgttcatgaaagatttttcattggtgttatggaacctcaattaatgcaaacttctgagatgggtattctcacatccactgctctgcttcatcgcatcgttcggcaag

SEQ ID NO: 426694 - DNA, 120 bp, Artificial Sequence
  ENSG00000151553_13 (sequence is synthesized)
tgacctctgatgttttgcttcaagaaatggtgttttttatccttggagaacagagggaaccagaaactctggcagaaatcagcagacatcctttaaggcataggttaattgaacattgtg

SEQ ID NO: 426695 - DNA, 120 bp, Artificial Sequence
  ENSG00000151553_14 (sequence is synthesized)
atcacatatctgatgagataagcataatgacattacgaatgtttgaacatcttttacaaaaacccaatgagcacattctttacaacttggtcttgagaaatcttgaagaaagaaattata

SEQ ID NO: 426696 - DNA, 120 bp, Artificial Sequence
  ENSG00000151553_15 (sequence is synthesized)
cagaatataaacctttgtgcccagaagataaagatgtggtagaaaatggattgatagcaggagcagtagatctggaagaagatccattatttactgacatttcaccagaaaacactttgc

SEQ ID NO: 426697 - DNA, 120 bp, Artificial Sequence
  ENSG00000151553_16 (sequence is synthesized)
caaaccaagagtggcttagttcttcacctcctgctactccagaccaccccaaaaatgatggaaaaactgaagttcataaaattgtaaatagttttctctgtctggtaccggatgacgcaa

SEQ ID NO: 426698 - DNA, 120 bp, Artificial Sequence
  ENSG00000151553_17 (sequence is synthesized)
aatcctcctaccatgttgagggcacaggatatgacacttacctccgagacgctcataggcagttccgagactactgtgctatctgcttaagatgggagtggcctgggtctccaaaagcat

SEQ ID NO: 426699 - DNA, 120 bp, Artificial Sequence
  ENSG00000151553_18 (sequence is synthesized)
tggaaaagtgcaatttagaagctgctttctttgaaggtcattttttgaaagtgctgttcgacagaatgggaagaattcttgatcagccatatgatgtaaacttacaagtaacctcagtgt

SEQ ID NO: 426700 - DNA, 120 bp, Artificial Sequence
  ENSG00000151553_19 (sequence is synthesized)
tatctagactttctctcttccctcatccacacatccacgagtaccttttggatccttacgtgaacctcgctcctggctgtagatctctcttctctgtaattgtcagggttgttggagacc

SEQ ID NO: 426701 - DNA, 120 bp, Artificial Sequence
  ENSG00000151553_20 (sequence is synthesized)
ttatgcttcgaatccagcgtattcaagactttactcccaagcttctgttagtcagaaagcggttacttggtttggaacctgaaggccctattattgaccacatcacactgctagagggtg

SEQ ID NO: 426702 - DNA, 120 bp, Artificial Sequence
  ENSG00000151553_21 (sequence is synthesized)
tgattgtgttagaagagttctgtaaggagctggcggcaatcgcatttgtaaaatatcatgcttcctccacaccataaataacatctttcatgtaactgggggaacagaactactgtgtac

SEQ ID NO: 426703 - DNA, 120 bp, Artificial Sequence
  ENSG00000151553_22 (sequence is synthesized)
atttcaccaaaaaagactcagttccacccagccacaagaggataaaaagcctttttaaacgcagtattgctgtaaactggacagaaccattaagaacctattgagtggacattcttggtg

SEQ ID NO: 426704 - DNA, 120 bp, Artificial Sequence
  ENSG00000151553_23 (sequence is synthesized)
aaatgttgtataatgttgttttcattggctttatcataatggttctatatatacaattgcacattgttgaatccaggatacaatcaaaggaacttcaggaaataagcatttctaatgact

SEQ ID NO: 426705 - DNA, 120 bp, Artificial Sequence
  ENSG00000151553_24 (sequence is synthesized)
tatttccaatgtcatgactttgatgatatttctgttatattaatgtccttttaggtagcaaggcattttgacattctctgggactcaaatgcttgtattcttttggattaataagtagca

SEQ ID NO: 426706 - DNA, 120 bp, Artificial Sequence
  ENSG00000151553_25 (sequence is synthesized)
aaaaaaaatcactaattttataactttttaaggtcagaattcttatcaaacaaaatatgaaaactgtaaatgagaaaaaaatacaattcagaaaccattgaatgaattaattataggcga

SEQ ID NO: 426707 - DNA, 120 bp, Artificial Sequence
  ENSG00000151553_26 (sequence is synthesized)
tgtagagcaccattaactttcttcagcttttttaagaataacaatttaatatgataaattcttgattaatataatatatctatatttttaaagaaatgttcttttactcttttgtgcaca

SEQ ID NO: 426708 - DNA, 120 bp, Artificial Sequence
  ENSG00000151553_27 (sequence is synthesized)
tgtgcacatagccatgttagtgattttcttcatgtgtgggtcccagtttatttaaactgtgtcgttttcgcagcagtgttcaatttgctcaccattggtagtgtttgctaaaattgtatt

SEQ ID NO: 426709 - DNA, 120 bp, Artificial Sequence
  ENSG00000151553_28 (sequence is synthesized)
tttttaagctaagtaacatgtactgggttgagaacctttttcccccctctccctctcagaaaattgctttataaaattgctttataatttgattttcttactgaaacgcatggtggtgtc

SEQ ID NO: 426710 - DNA, 120 bp, Artificial Sequence
  ENSG00000151553_29 (sequence is synthesized)
taggtggggaactgactgataacccttggcagcaatcaaagtgccagtggctcctcgatgtttacatttttttctattttgttcagtcttttgttttaaatgattctaaagagattaaag

SEQ ID NO: 426711 - DNA, 120 bp, Artificial Sequence
  ENSG00000151553_30 (sequence is synthesized)
aaaacagagttttaaatgtcctatttacatgttaaaggatttggggaaattgggtatgtatgtgaatgggtgtacatgtaggaacctgtagttcagcaaagctgcgctgggcacagcatg

SEQ ID NO: 426712 - DNA, 120 bp, Artificial Sequence
  ENSG00000151553_31 (sequence is synthesized)
cttgtacttgattgacaaaatcgtgtttgccagtccactttctatttttcctttaagtgatgctgatcactcaaataatgcttttaagctattgtttgtttttatttgacatgttaagcc

SEQ ID NO: 426713 - DNA, 120 bp, Artificial Sequence
  ENSG00000151553_32 (sequence is synthesized)
gcagcactttcttcttcatctttccatttactgatatttgggggaacaggctatcaaaggttccggcttgaagggaactgtcactaccccctctaggaagttattttatgtagcatgttt

SEQ ID NO: 426714 - DNA, 120 bp, Artificial Sequence
  ENSG00000151553_33 (sequence is synthesized)
gcatatacgcattgtgtggcatgtgcatagaggcttgttttacacctatctgctcattttgttgtgttagcttttctggtttatttcatagtttgttcttgctatttattaagaacagaa

SEQ ID NO: 426715 - DNA, 120 bp, Artificial Sequence
  ENSG00000151553_34 (sequence is synthesized)
tatcaaaagattatgaatagcctcagctctagaatgcttaccactgttaaaacaacaaaaagactaaacctctaatttcatgcaaatctttgttagcttattctaagaaatttattaagt

SEQ ID NO: 426716 - DNA, 120 bp, Artificial Sequence
  ENSG00000151553_35 (sequence is synthesized)
aaaacaaagaaaaaacagaagtgggagatagttattttgtgcgtaattttctttaaatcattttgaatgatgtgaaggcattcagtttgctgtatttttttaatcacttcatacaaggaa

SEQ ID NO: 426717 - DNA, 120 bp, Artificial Sequence
  ENSG00000151553_36 (sequence is synthesized)
aacttcgacatttacatttctagatgtagtaacagtctactttgatatatgagtatttaaactaaggcattaagagatattagatatttcttaatgttttcatagtgctcaataggtgta

SEQ ID NO: 426718 - DNA, 120 bp, Artificial Sequence
  ENSG00000151553_37 (sequence is synthesized)
gtagcaatgatattacctctgaaaccaaatactcttttatccttgattccactatgggaccttataactagtccatgaaaccaagctcagaaaagctttaactcttatatttgtgtatat

SEQ ID NO: 426719 - DNA, 120 bp, Artificial Sequence
  ENSG00000151553_38 (sequence is synthesized)
gtatgctgcttctgaaaatataatttttctaagttgttgtaatgactttaatttgtaatcagctaaggcttaagatttcatttgtttctaagtttctgtttttcatcccttcttttttct

SEQ ID NO: 426720 - DNA, 120 bp, Artificial Sequence
  ENSG00000151553_39 (sequence is synthesized)
tttatatttagttcagacctagagccagtagaagctctcacagtgagttcaatttgttagtgaaacattgtactgcatcaccagtttttcttaccttctgttgacagctgaatatttctg

SEQ ID NO: 426721 - DNA, 120 bp, Artificial Sequence
  ENSG00000151553_40 (sequence is synthesized)
ttactcagtacttgcaaaaacagtaactaaaatgcactatgctgagtggaaagcaccgtcataacaattgattgccatagcaagttccaaagtgaatttcagccttgcttcacatttgta

SEQ ID NO: 426722 - DNA, 120 bp, Artificial Sequence
  ENSG00000151553_41 (sequence is synthesized)
tcaataaatatgcacattttttaaaactttctaacaatatagtctttggatttgtttttagttatgagccgcattctttacttgatagaactcagatttgtcttagcctattgccatata

SEQ ID NO: 426723 - DNA, 120 bp, Artificial Sequence
  ENSG00000151553_42 (sequence is synthesized)
gtactcaccttataactatgtaactttctcgtaatgtatctgtttgtgcaatatggaagctgtgagtggattcatagctttttggtttaattgtacattattgtgtgtgtatatatgtat

SEQ ID NO: 426724 - DNA, 120 bp, Artificial Sequence
  ENSG00000151553_43 (sequence is synthesized)
atatgtatatatataaggaccaaaattcttagctcgcttacactgttgctagtgtaaacattgttacacttaattttacagggcacaaattatggaattacttcataaattcatggtaat

SEQ ID NO: 426725 - DNA, 120 bp, Artificial Sequence
  ENSG00000151553_44 (sequence is synthesized)
gttttcataaattattgcattaacatacaattgccatttaattatgaagtccatcagtattgacagaagacgttacagtgaagtgctaaaaccacactatatggtaattatattttgggt

SEQ ID NO: 426726 - DNA, 120 bp, Artificial Sequence
  ENSG00000151553_45 (sequence is synthesized)
tatgtagtaaatcaaatatgcatgtcattgtgacactttatgtgttaaaacatggtagataatcacattttctgggccctgtaaaatagtgttactgtaatactctgttttgcctcctgc

SEQ ID NO: 426727 - DNA, 120 bp, Artificial Sequence
  ENSG00000151553_46 (sequence is synthesized)
cttgtttacattaaacaggatatttggtaaatttttttgtattgaaagttgtgtaggttactgacagtgttaccagcgtctggaattcttggtccctccgtggagaaactcttcagatgg

SEQ ID NO: 426728 - DNA, 120 bp, Artificial Sequence
  ENSG00000151553_47 (sequence is synthesized)
tcattgtgtacctactctctcttcaaaggaagttgtgatcaagttcaactttttgtgctaacaatgcatgcaggactaagagggatgatctaaaaaataaataatgtaatttaaacaaaa

SEQ ID NO: 426729 - DNA, 120 bp, Artificial Sequence
  ENSG00000151553_48 (sequence is synthesized)
gaacctgaaggccctatgcagacgttgccttcatggtggtaagagggattccagagtctcttatgtcctcaaagcttcaagctcagccaaaagaatctcgatggtttccacaaaaaatct

SEQ ID NO: 426730 - DNA, 120 bp, Artificial Sequence
  ENSG00000151553_49 (sequence is synthesized)
tgggccttggatcaactgcccacccttgaaccaatcctggtggccccaggctgattggcagacctgaatcacctatcccatgcccagaactttggcttgaccaggctcatccaaaacaag

SEQ ID NO: 426731 - DNA, 120 bp, Artificial Sequence
  ENSG00000151553_50 (sequence is synthesized)
ggaatccagagtgtttccccaaagaaaatcagggggctattactgggaaaaagaattccaccacaagtataaaaaatactgttatcaataaaacatcacctgatactttggttcattaaa

SEQ ID NO: 426732 - DNA, 120 bp, Artificial Sequence
  ENSG00000151572_0 (sequence is synthesized)
ctgttccagacttctcagggtttttacagcacaaacaactgcatacggcccgaggggaggctgaaaaggacttgtgtgtggtggttttattgcctgtcatcactttgctggcctcctccc

SEQ ID NO: 426733 - DNA, 120 bp, Artificial Sequence
  ENSG00000151572_1 (sequence is synthesized)
gactggagcctggaggttcacagtggatttctttctgccgaagacaccaaggcactgaggaaggatcccttctccttctgttgactctttctatttttatggtttaagtttatctattca

SEQ ID NO: 426734 - DNA, 120 bp, Artificial Sequence
  ENSG00000151572_2 (sequence is synthesized)
tggggctgaaaagcgtttgcaaatccatcaacggcgaagtgtggcaagccgcccagcgtcacgtcgtcgcctgcctgtggtcaggcattcctcactcccaccaggcagaaggtcaataaa

SEQ ID NO: 426735 - DNA, 120 bp, Artificial Sequence
  ENSG00000151572_3 (sequence is synthesized)
aatggaggcaagctcttctggaatcactaatggaaaaaccaaagtcttccacccagtggccaaggatgtcaatattctttttgatgaattagaagctgtcagcagtccttgcaaagatga

SEQ ID NO: 426736 - DNA, 120 bp, Artificial Sequence
  ENSG00000151572_4 (sequence is synthesized)
cgattctcttcttcaccctggaaacctgactagtacttcagatgatgccagcagattggaagccgggggagagacagtgccagaaagaaacaaatcaaatggactttactttcgagatgg

SEQ ID NO: 426737 - DNA, 120 bp, Artificial Sequence
  ENSG00000151572_5 (sequence is synthesized)
aaagtgtcgaattgactacatccttgtgtacagaaaatccaacccccagactgaaaagagagaagtatttgaaagaaacattagagcagaaggattgcaaatggagaaagagtcctctct

SEQ ID NO: 426738 - DNA, 120 bp, Artificial Sequence
  ENSG00000151572_6 (sequence is synthesized)
aataaatagtgacattatctttgtgaagttgcatgccccatgggaagtccttggaagatatgcagaacaaatgaatgtaagaatgcctttcaggagaaaaatctattacctgccccgccg

SEQ ID NO: 426739 - DNA, 120 bp, Artificial Sequence
  ENSG00000151572_7 (sequence is synthesized)
ttacaagttcatgagcaggatcgataaacaaataagcaggtttcggagatggttacctaagaagccaatgaggctggacaaggagacactgccagacctggaggagaatgactgctacac

SEQ ID NO: 426740 - DNA, 120 bp, Artificial Sequence
  ENSG00000151572_8 (sequence is synthesized)
tgcccctttcagccagcaaaggatccatcacttcatcatacacaacaaagaaacgttcttcaacaatgccacaagaagtagaatcgtgcatcacattttacaaagaataaaatatgaaga

SEQ ID NO: 426741 - DNA, 120 bp, Artificial Sequence
  ENSG00000151572_9 (sequence is synthesized)
aggaaaaaacaagattggtctgaatcgtttgcttaccaatggctcctatgaagctgcgtttcccctgcatgagggaagttatagaagtaaaaactccattcgaacccatggagcagaaaa

SEQ ID NO: 426742 - DNA, 120 bp, Artificial Sequence
  ENSG00000151572_10 (sequence is synthesized)
ccaccgacatctactctatgagtgctgggcctcctggggcgtgtggtataaataccaacctttggatcttgtaaggcggtactttggagagaagattgggttatattttgcctggttggg

SEQ ID NO: 426743 - DNA, 120 bp, Artificial Sequence
  ENSG00000151572_11 (sequence is synthesized)
ctggtacaccggcatgctcttcccagctgccttcattggattgtttgtctttttgtatggcgtcaccactctggatcacagccaagtcagtaaagaagtctgccaagctacagatatcat

SEQ ID NO: 426744 - DNA, 120 bp, Artificial Sequence
  ENSG00000151572_12 (sequence is synthesized)
catgtgtcctgtgtgtgataaatactgtccattcatgaggctgtcagacagctgtgtatatgccaaggtaacccacctttttgacaatggagccactgtcttctttgctgttttcatggc

SEQ ID NO: 426745 - DNA, 120 bp, Artificial Sequence
  ENSG00000151572_13 (sequence is synthesized)
agtctgggcaacagttttcctggagttttggaaaagacggcgagcagtaattgcttatgactgggatttgatagactgggaagaagaggaggaagaaatacgaccccagtttgaagccaa

SEQ ID NO: 426746 - DNA, 120 bp, Artificial Sequence
  ENSG00000151572_14 (sequence is synthesized)
gtattccaagaaagagcggatgaatccaatttctggaaagccagaaccttatcaagcatttacagataaatgcagcagacttatcgtttctgcatctggaatattttttatgatctgcgt

SEQ ID NO: 426747 - DNA, 120 bp, Artificial Sequence
  ENSG00000151572_15 (sequence is synthesized)
ggtgattgctgccgtgttcgggatcgtcatttaccgggtggtgactgtcagcactttcgctgcctttaagtgggcgttaatcaggaataactctcaggttgcaaccacagggactgctgt

SEQ ID NO: 426748 - DNA, 120 bp, Artificial Sequence
  ENSG00000151572_16 (sequence is synthesized)
tttagaacagcctcgcacagagtctgagtgggagaacagcttcaccctgaaaatgtttctttttcagtttgtcaatctgaacagctccacattttacatcgcattcttcctcggaagatt

SEQ ID NO: 426749 - DNA, 120 bp, Artificial Sequence
  ENSG00000151572_17 (sequence is synthesized)
tacaggacacccaggtgcctacttgaggctgataaacaggtggagactagaagagtgccaccctagtggatgccttattgatctgtgtatgcaaatgggtattataatggtgctaaagca

SEQ ID NO: 426750 - DNA, 120 bp, Artificial Sequence
  ENSG00000151572_18 (sequence is synthesized)
gacctggaataatttcatggaacttggctacccgttaattcagaattggtggactagaagaaaagtacgacaagaacatggacctgaaaggaaaataagtttcccacaatgggaaaagga

SEQ ID NO: 426751 - DNA, 120 bp, Artificial Sequence
  ENSG00000151572_19 (sequence is synthesized)
ctataaccttcagccgatgaatgcctatggactcttcgatgaatacttagaaatgattcttcagtttggattcacaactatctttgtggcagcttttcccctagcaccacttctggcctt

SEQ ID NO: 426752 - DNA, 120 bp, Artificial Sequence
  ENSG00000151572_20 (sequence is synthesized)
actgaataacataattgaaattcgacttgatgcttacaaatttgtcacacagtggaggagacctttagcttcaagggccaaagacataggaatttggtatggaattcttgaaggcattgg

SEQ ID NO: 426753 - DNA, 120 bp, Artificial Sequence
  ENSG00000151572_21 (sequence is synthesized)
aattctctctgttatcacaaatgcatttgtcatagcgataacatctgactttatccctcgcttggtgtatgcttataagtatggaccttgtgcaggccaaggagaagctgggcaaaagtg

SEQ ID NO: 426754 - DNA, 120 bp, Artificial Sequence
  ENSG00000151572_22 (sequence is synthesized)
catggttggctatgtgaatgccagcttgtctgtatttcgaatttctgactttgagaaccgatctgagcctgaatctgatggcagtgagttctcggggactcctcttaagtactgcagata

SEQ ID NO: 426755 - DNA, 120 bp, Artificial Sequence
  ENSG00000151572_23 (sequence is synthesized)
ccgggactaccgtgacccgcctcattcactggtgccctatggctacacactgcagttttggcatgtcctagctgctcgattagcttttatcattgtctttgagcacctcgtgttttgtat

SEQ ID NO: 426756 - DNA, 120 bp, Artificial Sequence
  ENSG00000151572_24 (sequence is synthesized)
aaagcacctcatttcatatctgatcccagacctcccaaaagacctaagggatcgaatgagaagagagaagtacttgattcaggagatgatgtatgaagcagaactggaacgtctccagaa

SEQ ID NO: 426757 - DNA, 120 bp, Artificial Sequence
  ENSG00000151572_25 (sequence is synthesized)
ggaacgaaaggagaggaagaagaatggaaaagcacaccacaacgagtggccgtgaccataaaatagtccctttccaggccaaggacctgaattctgtttacttcttctggctgtgcaaaa

SEQ ID NO: 426758 - DNA, 120 bp, Artificial Sequence
  ENSG00000151572_26 (sequence is synthesized)
gcacactcaagtgaatgactaaaaatgcaaccacagtgcatgttgcagataccggcggccgcaggaggggcagcatccagtagaggactggcgttggagtcacactgctgtgaaatcacg

SEQ ID NO: 426759 - DNA, 120 bp, Artificial Sequence
  ENSG00000151572_27 (sequence is synthesized)
ttgcagtccagcgcacaattgctatctatccatagaccattcttgaccaagcaagcatgcacattatgggcagttacattctcaagtttttaaaatcaaggggaacttgtatactgggcc

SEQ ID NO: 426760 - DNA, 120 bp, Artificial Sequence
  ENSG00000151572_28 (sequence is synthesized)
tgtttttcagcctgtttgctaccttttttgcattctatcccatgtgaattttacagacactgggctaaaaagggtattcagacacatggacacacattcctagaatgtcatcatatggtc

SEQ ID NO: 426761 - DNA, 120 bp, Artificial Sequence
  ENSG00000151572_29 (sequence is synthesized)
ctaattccatgtcaccaacaacacagacaagaccctgtttacaactttttctttccttttttttaattttagacctttctgagaagattattatatatgacatatctatagctatgtgta

SEQ ID NO: 426762 - DNA, 120 bp, Artificial Sequence
  ENSG00000151572_30 (sequence is synthesized)
tggccatagatgtatttctgtgtgtacatatgtatagtcatgtattcctgcatatgtacatacaaatacagagatatataaagtacatagaaattccttacttgtaaatagccaaaaagt

SEQ ID NO: 426763 - DNA, 120 bp, Artificial Sequence
  ENSG00000151572_31 (sequence is synthesized)
actgacatgagtgaattttcacatttaaatagtcatcaatatgaagccatgattaatgcttgtataatgtgatgcaataaaatttaaaataaatttctgcacatggaatattttcagctg

SEQ ID NO: 426764 - DNA, 120 bp, Artificial Sequence
  ENSG00000151572_32 (sequence is synthesized)
atatgcaaatactacctgacgggccaaagagtgatgtggacttttcagagattcttaatgcaatacaagaaatggccaaggatgtcaatattctttttgatgaattagaagctgtcagca

SEQ ID NO: 426765 - DNA, 120 bp, Artificial Sequence
  ENSG00000151572_33 (sequence is synthesized)
actgatgttctctccggcagttccttccactctaaagagactccttttcatccctcttctcgcctttcctagcccagcctagtgcccaccctcccccgaccatgcctcccctgcacctgg

SEQ ID NO: 426766 - DNA, 120 bp, Artificial Sequence
  ENSG00000151572_34 (sequence is synthesized)
aacctggaggaagacaattcaggactagttcagcagctcaaggaaggcctccaggatacaggcttcttctactgtcctaaacatgtttaagtttatctattcatggggctgaaaagcgtt

SEQ ID NO: 426767 - DNA, 120 bp, Artificial Sequence
  ENSG00000151572_35 (sequence is synthesized)
atggcctccctcaccgcatacgacaaagatgtgagcagcggaagttataacctttcctctgcaacgacgggcagctactacagttgtgtcagccagatcaccataggttatgacgttgcg

SEQ ID NO: 426768 - DNA, 120 bp, Artificial Sequence
  ENSG00000151572_36 (sequence is synthesized)
gggcctgtggcaattgggcttacccactggaaaaatccatacgtacaaggcagaccaaccctcccatcagatctgcctctcttcgtctccaaagatgcaggcatccctgtgtaccaccga

SEQ ID NO: 426769 - DNA, 120 bp, Artificial Sequence
  ENSG00000151572_37 (sequence is synthesized)
tccttcacccgcaagactgaccaggccacacctttgtcctgtccagcctcactgtctatcactccagtgccttcttacagcagtagcagccaggaaaccctgagtcaagacacaacaggt

SEQ ID NO: 426770 - DNA, 120 bp, Artificial Sequence
  ENSG00000151575_0 (sequence is synthesized)
gtaaccgcgtcgcagtcgccgaagatggcggggcgaagtctgtgtctcacgagaagcagcgttccagggactccgttcccgccacccgttcagcaaccctctacacctggacccgacctc

SEQ ID NO: 426771 - DNA, 120 bp, Artificial Sequence
  ENSG00000151575_1 (sequence is synthesized)
ctcgccttggaggaagaatataagcgtttaaatgcagaattgcaggcaaaaacagctgacgtggttcaacaagctaaggaaataataagagatcggcaagaagtacgatctaggcctgtt

SEQ ID NO: 426772 - DNA, 120 bp, Artificial Sequence
  ENSG00000151575_2 (sequence is synthesized)
tcaacacaaatgaaatcatgtgatgacgaagatgattacagtttaagaggtctgttaccatctgaagggatagttcatcttcattcagaaactaagccaaagaccaaaaacattgatcct

SEQ ID NO: 426773 - DNA, 120 bp, Artificial Sequence
  ENSG00000151575_3 (sequence is synthesized)
gtaaacaaggttcaaaacaaattacactctgcaaataaaggaaggaaaacaaattcaagtgttaaattgaaatactctgatgtccaaactgccgacgatgttgccattccagaggatttc

SEQ ID NO: 426774 - DNA, 120 bp, Artificial Sequence
  ENSG00000151575_4 (sequence is synthesized)
tcagacttttcccttgcaaaaacaattagcaaaattgaagggcaactggaggaagaaggcttacctgaatatatagatgatattttttctggtgttagtaatgacattggaacagaagca

SEQ ID NO: 426775 - DNA, 120 bp, Artificial Sequence
  ENSG00000151575_5 (sequence is synthesized)
aaattttgaagaagattttatgagacagcagcgaacaattaatatgcaacagtctcaagtagaaaaatacaaaactcttttcgaagaagcaaacaaaaagtatgatggattacagcaaca

SEQ ID NO: 426776 - DNA, 120 bp, Artificial Sequence
  ENSG00000151575_6 (sequence is synthesized)
gttgtcttcagtagaaagggaattagaaaataaaagaagactgcaaaaacaggctgcaagtagtcaaagtgccacagaggttcgcttgaatagagctctagaagaagcagaaaagtataa

SEQ ID NO: 426777 - DNA, 120 bp, Artificial Sequence
  ENSG00000151575_7 (sequence is synthesized)
actggagttaagtaaattaaggcaaaataacaaggacatagcaaatgaagaacacaaaaaaattgaagtgttaaaatcagaaaacaagaagctagaaaaacaaaaaggagaattaatgat

SEQ ID NO: 426778 - DNA, 120 bp, Artificial Sequence
  ENSG00000151575_8 (sequence is synthesized)
agggttcaagaaacagttaaaattaattgatgttttaaaaaggcaaaagatgcatattgaagctgccaagatgctatctttcactgaggaggaatttatgaaagcacttgaatggggaaa

SEQ ID NO: 426779 - DNA, 120 bp, Artificial Sequence
  ENSG00000151575_9 (sequence is synthesized)
ttcataagtgatctacttcagttagtctctatgacaataagaaaactaaggctcagagaaaaagccaaaactagtacttgcatgacacctagtcaagtcctagtagtattcgactttcat

SEQ ID NO: 426780 - DNA, 120 bp, Artificial Sequence
  ENSG00000151575_10 (sequence is synthesized)
tttgtggatcaatttttatttggaaaatagcagcaattctcgtaggagtcagattaaaacgtctacaactaccttgaataacttcaactatcaggataattaaaactgcaaaccactgga

SEQ ID NO: 426781 - DNA, 120 bp, Artificial Sequence
  ENSG00000151575_11 (sequence is synthesized)
ggaagaatataagtaagaaattcggcggttgaacttttccttctttctttcatctgaatgaggctgcttacaagtacttttttctggagactggctggatcttcgggaccactcactctg

SEQ ID NO: 426782 - DNA, 120 bp, Artificial Sequence
  ENSG00000151575_12 (sequence is synthesized)
cagcattcccttctcgtcatctcgttcacctgccgtttatcctttctttgtctttgatctgagtagttcgcctgcgtattagaagatatttgaagtgggcgaaaatttagcccaagcgtt

SEQ ID NO: 426783 - DNA, 120 bp, Artificial Sequence
  ENSG00000151575_13 (sequence is synthesized)
acaggacattgtttgtgctactttctttttcaaaggacagcgctatatggcttagcaaatgaagtctctccaccttttcttatcacctgccacacctaaaggtattcctgttaacagcat

SEQ ID NO: 426784 - DNA, 120 bp, Artificial Sequence
  ENSG00000151575_14 (sequence is synthesized)
gaagatggcggggcgaagtctgtgtctcacggtcagttcaactccaggctcctggggagcgtctgggttccggcgactaggacgcctaacttcctttaacttcgggtctgaaagtctgtg

SEQ ID NO: 426785 - DNA, 120 bp, Artificial Sequence
  ENSG00000151575_15 (sequence is synthesized)
aatgccacagatacaagaaaattattaaggttacacatttgtatagatgccattttgacagttcagttattttattagtatttactgaaaactctttccccttacatagaatatttttaa

SEQ ID NO: 426786 - DNA, 120 bp, Artificial Sequence
  ENSG00000151575_16 (sequence is synthesized)
caactttattgagatgtaattcacccttttaaagtatgcaattcaatggcttttggtgtattcatagaattgtgcaactatcaccacaaccattttcataatccctaaaagatacttcat

SEQ ID NO: 426787 - DNA, 120 bp, Artificial Sequence
  ENSG00000151575_17 (sequence is synthesized)
accctttagccaccacaccctgaccctgctcccctcaatcccttacagccctaggcaaccactattctattttatgtctcaataaatttgtctattctggaaatcacatatacgtggaat

SEQ ID NO: 426788 - DNA, 120 bp, Artificial Sequence
  ENSG00000151575_18 (sequence is synthesized)
catataatatgtggtcttttgtgactgacttttacttaagatattttcaaggttcattcatgttgcagcccctatcagtattttatttctttttattggcaagtaacattctgttatatg

SEQ ID NO: 426789 - DNA, 120 bp, Artificial Sequence
  ENSG00000151575_19 (sequence is synthesized)
gatataacacatttaatttatctgtttatcagttcgtagctttaggttatttgggttgtttctactgtctgacaattttaaatactttgaatattcatgtacaagtttttgtgtgcacgt

SEQ ID NO: 426790 - DNA, 120 bp, Artificial Sequence
  ENSG00000151575_20 (sequence is synthesized)
atgtttctatttctcttggttatatagccaggaatggaattgctgggtcatatggaaatcctatgttgaccttttgaggaattgctgactgttttccaacctgcctgtaccattttacat

SEQ ID NO: 426791 - DNA, 120 bp, Artificial Sequence
  ENSG00000151575_21 (sequence is synthesized)
tcctaccagtagtgcatgaagctcctaatttctacacatcctcaccaacatctgctagattatctttttgattatagccatactgcaagtgtaaaagggttacctcattgtggttttgat

SEQ ID NO: 426792 - DNA, 120 bp, Artificial Sequence
  ENSG00000151575_22 (sequence is synthesized)
ttgcatttccctaataactaatgatgttgaacatcttttcatgtgcttattggcatttgtatattttctttggagaaatgtctgttaaggtctttgcccattttttaaattggatttgaa

SEQ ID NO: 426793 - DNA, 120 bp, Artificial Sequence
  ENSG00000151575_23 (sequence is synthesized)
aaaattactgaataataagaacttttaagttctttatgtgtttagatacaagtcccttatcaggtatattttgcaaatagttttcccctacagtgggttgtctttcactttctttatggt

SEQ ID NO: 426794 - DNA, 120 bp, Artificial Sequence
  ENSG00000151575_24 (sequence is synthesized)
actctaaaggcacaaaagttttaaattttgatgaagtccagtttatctaatatttatttggtttcctgtgcttttggtgtcatatttaaggggagaatgtattttaaataaactatccta

SEQ ID NO: 426795 - DNA, 120 bp, Artificial Sequence
  ENSG00000151575_25 (sequence is synthesized)
gcttatattagtgtgccattgtgaaaataaaaatatactgtttgagattgctttgtaaaatgtagtgacgataagaattatgtaatatagcatatcccgagatttagtaagaaaatgtgc

SEQ ID NO: 426796 - DNA, 120 bp, Artificial Sequence
  ENSG00000151575_26 (sequence is synthesized)
cccctttattagtacccttacatttctcgtttgtatggtcatatttaaaaaccctgctttttaaacattttggtcttgtataattagctttatcttgtaataaattttaatatcaaaatc

SEQ ID NO: 426797 - DNA, 120 bp, Artificial Sequence
  ENSG00000151575_27 (sequence is synthesized)
acttagacaaaatttatatgcagtaaattcacactttttagtgtacaattctatgagttttgacaaatgtatgcagtaatataactatcactataattgagacatagaacagttccatca

SEQ ID NO: 426798 - DNA, 120 bp, Artificial Sequence
  ENSG00000151575_28 (sequence is synthesized)
gccccccaaaattccctgtgaatttagtgaaggccttccctaattccaccaccaggcaaccactgatctgtgtttggttcttaaattttggacttttcccaaatgtcacataaatagaat

SEQ ID NO: 426799 - DNA, 120 bp, Artificial Sequence
  ENSG00000151575_29 (sequence is synthesized)
tggacttttcccaaatgtcacataaatagaatcgcattggatatagacttttgaatctgttttttttttttttttttcagttagcataaaacatttgatatggtttggctgtgtccccac

SEQ ID NO: 426800 - DNA, 120 bp, Artificial Sequence
  ENSG00000151575_30 (sequence is synthesized)
ggggcaagtctttcctgtgctgttcttgtgatggcgaaaaagtctcaggagatctgatggttttaaaagggagagtttcccagtgcaaactttcttgtctgctgctatgtgagacatgcc

SEQ ID NO: 426801 - DNA, 80 bp, Artificial Sequence
  ENSG00000151575_31 (sequence is synthesized)
gagatctgatggttttaaaagggagagtttcccagtgcaaactttcttgtctgctgctatgtgagacatgccttttactt

SEQ ID NO: 426802 - DNA, 120 bp, Artificial Sequence
  ENSG00000151575_32 (sequence is synthesized)
ttgggtgtgtcttaccagcagcatgacgatgaactaatccagtaaattggtactagtagagtcaggcgctactgaaaagataccaaaaagtgttgaagtgaccttggaactgggtaagag

SEQ ID NO: 426803 - DNA, 86 bp, Artificial Sequence
  ENSG00000151575_33 (sequence is synthesized)
taccaaaaagtgttgaagtgaccttggaactgggtaagaggcagaggttggaaaagtttggagggctcagaaaaatacaggaaaat

SEQ ID NO: 426804 - DNA, 75 bp, Artificial Sequence
  ENSG00000151575_34 (sequence is synthesized)
gatctcagatggagatgaggaacttgttaggaactagagcaaaccctcccctagagatctgtggaactttgaact

SEQ ID NO: 426805 - DNA, 120 bp, Artificial Sequence
  ENSG00000151575_35 (sequence is synthesized)
agagatgatttagggtatctggtggaacaaatttctaagcagcaaagcactcaagaggtgacttggtgctgttaaaggcatccagttttgaaagggaaacagagcacaaaaggttggaaa

SEQ ID NO: 426806 - DNA, 83 bp, Artificial Sequence
  ENSG00000151575_36 (sequence is synthesized)
acttggtgctgttaaaggcatccagttttgaaagggaaacagagcacaaaaggttggaaaatttgcagcctgagaatgcagtg

SEQ ID NO: 426807 - DNA, 120 bp, Artificial Sequence
  ENSG00000151575_37 (sequence is synthesized)
atgttaatccccaggacaatggggaaaatgtctcccaaggtatgcagaggtcttcacggcagcgcctcccatcacaggcccagagacctaggaggcatgattggttttgaaatgtgagga

SEQ ID NO: 426808 - DNA, 120 bp, Artificial Sequence
  ENSG00000151575_38 (sequence is synthesized)
tctttcctgtgctgttctcatgagagtgaataagtctcaggagatttgatggttttaaaaatgggaatttccctgcacaagctctcgtctgccaccatgtgagatgtgcctttaccttcc

SEQ ID NO: 426809 - DNA, 120 bp, Artificial Sequence
  ENSG00000151575_39 (sequence is synthesized)
cattcaatatttatccctattatagtccattcctttttattgctgagtagtgtaaactatgaatgaatgtacttcagtttgtttccccactcatctagtaataaaagttaattatagtat

SEQ ID NO: 426810 - DNA, 120 bp, Artificial Sequence
  ENSG00000151575_40 (sequence is synthesized)
ttaatagtctgaacttgtgtttccagtatggtagccacttaccatatgtggctaaattgcgatgtgctataactataaagtaaaaatcagattttgaagaattcatgtaaaacagaatga

SEQ ID NO: 426811 - DNA, 120 bp, Artificial Sequence
  ENSG00000151575_41 (sequence is synthesized)
aataacaagatgcatattgaagctgccaagatgctatctttcactgaggaggaatttatgaaagcacttgaatggggaaattcataagtgatctacttcagttagtctctatgacagtat

SEQ ID NO: 426812 - DNA, 120 bp, Artificial Sequence
  ENSG00000151575_42 (sequence is synthesized)
gtgatggatacccattttacttattgtagtggtttgaattatttttattcttcataagtaatatatttgattatgaaagcaaaataatttcaaagaattccctttttagatttaggagat

SEQ ID NO: 426813 - DNA, 120 bp, Artificial Sequence
  ENSG00000151575_43 (sequence is synthesized)
tagctattagctctttttgagttgttttttaagttcttagcgtgacaattaagcacatcagataataaaattcttgactcttttcatttataattctcctcccttacagtagaccaaaaa

SEQ ID NO: 426814 - DNA, 120 bp, Artificial Sequence
  ENSG00000151575_44 (sequence is synthesized)
agatgctttaaaagaaaattccaaatatttatttccctggctaaatcaagtaagtaaagttcgtaaacacagacagaaggcagttcactttggggtagagttctgtattagtcaaggtaa

SEQ ID NO: 426815 - DNA, 120 bp, Artificial Sequence
  ENSG00000151575_45 (sequence is synthesized)
atatactgtcttgaggatggggatgcaaacagtgctctgtagtgttgtagaaatcggattttgaaattatcagtacaaaaataacagcttgattaaaattaatttgtatctgataattgt

SEQ ID NO: 426816 - DNA, 120 bp, Artificial Sequence
  ENSG00000151575_46 (sequence is synthesized)
ttacaagttatgaaattcagtgatgatttacaaaatccaaacagacaatggatacctaatgccactgaactgtaaaacaaaagttatgctgacatctagtggtaacatgcaaaaaatcta

SEQ ID NO: 426817 - DNA, 120 bp, Artificial Sequence
  ENSG00000151575_47 (sequence is synthesized)
gatcaatatcatcctcttttttaaatactccctacgagaaaaatactttgtgggttacttttgaataccagaatatttcactaaatgcttttaagactgacagacataagattagtaaag

SEQ ID NO: 426818 - DNA, 120 bp, Artificial Sequence
  ENSG00000151575_48 (sequence is synthesized)
ttatctccaaggtaatgaaatctattcaacagattaatgaaactttaaaaaaatcaatacttttcaaaaaataagactttacatatatattgaatattcctagactgacccaattttctg

SEQ ID NO: 426819 - DNA, 120 bp, Artificial Sequence
  ENSG00000151575_49 (sequence is synthesized)
atttatcagctctagtgtaggagcttttcataggaatctgagctcttctacaagttctactgcttggattacctagataggaaggcacttcatctatactgtaccctacccttttcttta

SEQ ID NO: 426820 - DNA, 120 bp, Artificial Sequence
  ENSG00000151575_50 (sequence is synthesized)
aatagctctataatatgatataatggtgagcttcagtagattcatgcatgggattagttcttcatgcctcagttctatggctaatcagcaaacagtcaatcttgcagaaaagaatccagg

SEQ ID NO: 426821 - DNA, 120 bp, Artificial Sequence
  ENSG00000151575_51 (sequence is synthesized)
tttggagttaagccatttaagcaaaccctttggaattcttcactgttctatttttcttttcccctacagtatactgcaaaaggctctttaaaacaaaattaaatatttacttaaattgca

SEQ ID NO: 426822 - DNA, 120 bp, Artificial Sequence
  ENSG00000151575_52 (sequence is synthesized)
atctaaagaataaagaattttagggataactgaagtcatttggcaccattaggacctaaaggataaaggtcatttttggatatcaagtttattaatccctcctgctgcctccacaattat

SEQ ID NO: 426823 - DNA, 120 bp, Artificial Sequence
  ENSG00000151575_53 (sequence is synthesized)
ttcctctacaaaaatatcaaatcccaaagaaagacattcctacaatttataatttagtttatgaaatgtattaattacatatggattttatcattaatacatcattttgtattccttaat

SEQ ID NO: 426824 - DNA, 120 bp, Artificial Sequence
  ENSG00000151575_54 (sequence is synthesized)
cctttctaaccaattagactatcaagtcctgtggccaggcagtaattacctatatatctttttccttccttagcaccagagtgaatataataaaataaatatgcacttgattctactgaa

SEQ ID NO: 426825 - DNA, 120 bp, Artificial Sequence
  ENSG00000151575_55 (sequence is synthesized)
taggcgtttaaatgcagaattgcaggcaaaaacagctgacgtggttcaacaagctaaggaaataatatttttgccagtgtctgaaaagcaggaaaatacttgtacaaaaggaccccacgt

SEQ ID NO: 426826 - DNA, 120 bp, Artificial Sequence
  ENSG00000151575_56 (sequence is synthesized)
tatagtagaatgacagattcattacgttttctactcagagagccctgtaaaaagaatctccccctgcaaataaaaaacagaatagaaaactgggataagctaggaaaggggttggggaat

SEQ ID NO: 426827 - DNA, 120 bp, Artificial Sequence
  ENSG00000151575_57 (sequence is synthesized)
tactcactttctctttttaaaatttttaatgtttgtggttacatagtaagtgtttatggggtaaatgagatattttgatacaggcatgcattgtgtaataatcacatcatggaaaatggg

SEQ ID NO: 426828 - DNA, 120 bp, Artificial Sequence
  ENSG00000151575_58 (sequence is synthesized)
gtatccatcccctcaagtatttatcctttgtgttacaaaaaatccaattatactattttagttaatttaaaatgtacaattaaatgattttgactataataaacatgttgtgctgtcaaa

SEQ ID NO: 426829 - DNA, 120 bp, Artificial Sequence
  ENSG00000151575_59 (sequence is synthesized)
accaaagatagatcctgaaggtttgtgggagaaagcttagacagtaaggtattagtgtatttctttgcttcaaagacacatatactacattttaactgctcagaaattgggatctgtgtt

SEQ ID NO: 426830 - DNA, 120 bp, Artificial Sequence
  ENSG00000151575_60 (sequence is synthesized)
acagtcagtggcattttgtaatcacagtggctgcactgaagctgagttttgctagagaagatttatgtttgtttctgccaaactctcagggacattactgacctgagaacactttaaata

SEQ ID NO: 426831 - DNA, 120 bp, Artificial Sequence
  ENSG00000151575_61 (sequence is synthesized)
tgaatttagtctgcaaacttatgtgaatactacctgtgatttctttctgttgagtggatttattcgtcattgaccttttcattaggactgttgagtacctatagtgccccctaacagata

SEQ ID NO: 426832 - DNA, 120 bp, Artificial Sequence
  ENSG00000151575_62 (sequence is synthesized)
tctcctatttgactccccatcttgagtattttcttctttataaagtaatggtctgtcttacaattgatgtcatcttagattcagcaaaagacagtaaatataattatttaaattcacaga

SEQ ID NO: 426833 - DNA, 120 bp, Artificial Sequence
  ENSG00000151575_63 (sequence is synthesized)
ggccagggaagcgcgccgctgggggccgggaggagtccggcccggctggtggagagcaggaaaacgtgggggaggtgctggcgagagaaagagaacttgcgtgaggaggaggaggagaaa

SEQ ID NO: 426834 - DNA, 120 bp, Artificial Sequence
  ENSG00000151575_64 (sequence is synthesized)
ccaaatttaataatatttggcgtggaaatgggatttgggcgggggaggcatcttcaaagcaagtaaagagaaatcaacattatcccccttcccctgcacatgcatgtgaggattacttcc

SEQ ID NO: 426835 - DNA, 120 bp, Artificial Sequence
  ENSG00000151576_0 (sequence is synthesized)
agtactccctgattggctctgcactggaggcagtgattttggggcagagaattttgcaacacgtggtagtgaactgtgaggagtttgaggggtctgaagactgaaagagtcgaatggttt

SEQ ID NO: 426836 - DNA, 120 bp, Artificial Sequence
  ENSG00000151576_1 (sequence is synthesized)
gttggcagggtgtcctggtggattggtttctgtaagttcagattctcataaatcgtgtgagcgtcgccgacacctctgagataaaagggcccctttcgactagcctctgctgaaaggacc

SEQ ID NO: 426837 - DNA, 120 bp, Artificial Sequence
  ENSG00000151576_2 (sequence is synthesized)
tagaagaatcccttaggatgaagctgagtcttaccaaggtagttaatggctgtcgcctaggaaaaataaaaaacctgggcaaaacaggggaccacaccatggatattccaggctgccttc

SEQ ID NO: 426838 - DNA, 120 bp, Artificial Sequence
  ENSG00000151576_3 (sequence is synthesized)
tgtataccaagactggctccgccccacacctcacccatcacacgctgcataatatccacggggttcctgccatggctcagcttacgctgtcatccctagcagaacatcatgaagtcttga

SEQ ID NO: 426839 - DNA, 120 bp, Artificial Sequence
  ENSG00000151576_4 (sequence is synthesized)
cagaatataaagaaggagttggaaagtttataggcatgccagaatcactcttgtactgctccctgcacgatccagtcagcccctgcccggctggttatgtaacaaacaagtctgtgtctg

SEQ ID NO: 426840 - DNA, 120 bp, Artificial Sequence
  ENSG00000151576_5 (sequence is synthesized)
tgtggagtgttgcaggacgagtggaaatgactgtttccaagttcatggcaattcagaaggcccttcagccagactggttccagtgcctctccgatggagaagtatcttgtaaggaagcaa

SEQ ID NO: 426841 - DNA, 120 bp, Artificial Sequence
  ENSG00000151576_6 (sequence is synthesized)
cttccataaaaagggtcagaaagtctgttgaccgatcacttcttttcttggataactgtctgcggctgcaggaagagtcagaggttcttcagaagagtgtgatcattggagtgattgaag

SEQ ID NO: 426842 - DNA, 120 bp, Artificial Sequence
  ENSG00000151576_7 (sequence is synthesized)
gtggagatgtgatggaagagaggctgaggtcagcacgagagacagccaagcggcctgtgggtggcttccttctggatggttttcaaggaaatccaacaaccctggaggctagactacgct

SEQ ID NO: 426843 - DNA, 120 bp, Artificial Sequence
  ENSG00000151576_8 (sequence is synthesized)
tgctgtcatcagtcactgcagagctgccggaggacaagccaaggctcatatctggtgttagtcggccagatgaggtgctcgagtgtattgaaagaggagtggacttatttgagagttttt

SEQ ID NO: 426844 - DNA, 120 bp, Artificial Sequence
  ENSG00000151576_9 (sequence is synthesized)
tcccttatcaagtaacagagcggggatgtgccctgactttcagttttgattaccagccgaatcctgaagagacactactacaacaaaatggaacacaagaagaaataaaatgtatggatc

SEQ ID NO: 426845 - DNA, 120 bp, Artificial Sequence
  ENSG00000151576_10 (sequence is synthesized)
aaataaagaaaattgaaacaactggttgcaaccaagaaataacatcatttgaaattaatctgaaggaaaaaaagtaccaggaggactttaacccgctggtgagaggatgttcctgttact

SEQ ID NO: 426846 - DNA, 120 bp, Artificial Sequence
  ENSG00000151576_11 (sequence is synthesized)
gctgtaagaatcacactcgggcatacatccaccatctgctggtgaccaatgagctgctggccggagtcctgcttatgatgcacaactttgaacactactttgggtttttccattacatcc

SEQ ID NO: 426847 - DNA, 120 bp, Artificial Sequence
  ENSG00000151576_12 (sequence is synthesized)
gggaagcactaaaaagtgacaaactggcacagttgaaagagctcatccacaggcaagcatcttgagatcttgcaaatacaagtctcactcttcacactgagcctgtaccactgttgtaac

SEQ ID NO: 426848 - DNA, 120 bp, Artificial Sequence
  ENSG00000151576_13 (sequence is synthesized)
atgggaagacgtgaagaagaaataatctgagctttaattatttatatttggatataaggtctgcttaaataaagaatctttgtaccaaactgcccacatgagggtgaagagatttcctca

SEQ ID NO: 426849 - DNA, 120 bp, Artificial Sequence
  ENSG00000151576_14 (sequence is synthesized)
aaagacttaaatgacctggattgatcagagagaattgaactgtgacctttaagacttctagactaattcttttagttgatagagattcatttagtcaaagacaaaagctttaactgtgag

SEQ ID NO: 426850 - DNA, 120 bp, Artificial Sequence
  ENSG00000151576_15 (sequence is synthesized)
ggcacagccttgaagtgggagtgatgagattctgagggacccatgaattggattgaggcttgaggggaaatggtgtgagacgaatgggctctggacatatgcctgttgatttgagaagaa

SEQ ID NO: 426851 - DNA, 120 bp, Artificial Sequence
  ENSG00000151576_16 (sequence is synthesized)
cttttgtcttccaccctgccctggcagtgcagccaatcagaaatggctcttgtgacttaactgggcttggatatccctggaatgtggggcttgaacattgctcctgtgatgatcatctgt

SEQ ID NO: 426852 - DNA, 120 bp, Artificial Sequence
  ENSG00000151576_17 (sequence is synthesized)
cccaggtcacactccttcatttgaccacatggcctatttgcaacttctttttagagccaatgtaattgcctgttaggagccagaagtttgcccagctgctttcttctggttgtacagatc

SEQ ID NO: 426853 - DNA, 120 bp, Artificial Sequence
  ENSG00000151576_18 (sequence is synthesized)
cattgtggtctgccttccaggctcattaatagtctaactacgtaataactgaagacctatctcttgtgaagattcattctcaatgtgttcacttggacagagccctgcctggcctaacga

SEQ ID NO: 426854 - DNA, 120 bp, Artificial Sequence
  ENSG00000151576_19 (sequence is synthesized)
ttagagggttagtctccatcctgctcagatatgactcctgggcaattcacttaacttctccatggctgcttcctgctgaataaatagggacaggcataatggataggaatgaatgaactt

SEQ ID NO: 426855 - DNA, 120 bp, Artificial Sequence
  ENSG00000151576_20 (sequence is synthesized)
ttaagatactgtctagctctaaaattggaagaacaaaaagttttagattagagtcatagccttaatagccctagttgtcatcctgggagacaggcaacagtagagatatttgagagccta

SEQ ID NO: 426856 - DNA, 120 bp, Artificial Sequence
  ENSG00000151576_21 (sequence is synthesized)
aagagaggtttggcctgtgggtttttaagtggttattgaattggtatcaggagatcctgaggctggtaggggaaggtaattctttctaagttacctctgtatttttcaagttttctataa

SEQ ID NO: 426857 - DNA, 120 bp, Artificial Sequence
  ENSG00000151576_22 (sequence is synthesized)
ggaatacacatacacccacatgcacacaccatagtttttatacaaacagcaataacaaaaccaaaaagatgcccctttttttgtagggataagaaatacatttgttttatacttctatgc

SEQ ID NO: 426858 - DNA, 120 bp, Artificial Sequence
  ENSG00000151576_23 (sequence is synthesized)
tatattttgctattcaaaatttagtgggcattacttaacattgtttctaattattttgtggctgctgtatgttttatgtgttgggagcccattgtattaggccgttcttggattgctata

SEQ ID NO: 426859 - DNA, 78 bp, Artificial Sequence
  ENSG00000151576_24 (sequence is synthesized)
aagactgggtaatcttacaggaagcatggtactggcatctgcttggtttctggggaggcctccggaagcttatagtca

SEQ ID NO: 426860 - DNA, 120 bp, Artificial Sequence
  ENSG00000151576_25 (sequence is synthesized)
ctgcttggtttctggggaggcctccggaagcttatagtcatgacagaaggtgaagggggagcaggcacatcacatgacaaaagcaggaacaagactcagagcaagaagtcacttatcacc

SEQ ID NO: 426861 - DNA, 89 bp, Artificial Sequence
  ENSG00000151576_26 (sequence is synthesized)
tgcgtattggggattacatttcaacttgaggtttgggcgggaacaaatagtcaaattatattacccatctacatggttttctttttctt

SEQ ID NO: 426862 - DNA, 120 bp, Artificial Sequence
  ENSG00000151576_27 (sequence is synthesized)
gtcaaattatattacccatctacatggttttctttttcttagtatgggagtgtccatgaataaattcatgggcatcctcataactcttccatgaatggcaaggggtacttatggaaaaca

SEQ ID NO: 426863 - DNA, 120 bp, Artificial Sequence
  ENSG00000151576_28 (sequence is synthesized)
gttttccaaagatctgattgttttgaaatgtgttagattggacttgttcaaatgttcatatttttgttctatgctaaatgcatcgttaggggagtagtggtaaatattccagaatccata

SEQ ID NO: 426864 - DNA, 120 bp, Artificial Sequence
  ENSG00000151576_29 (sequence is synthesized)
tgaaattcatgagtttatttatgtctaaaacactgaaaactgtgtccaatatcgttcagtttcctgggtctttttcttattagcacatttgagaaaaatattcctttcctttattgtagt

SEQ ID NO: 426865 - DNA, 120 bp, Artificial Sequence
  ENSG00000151576_30 (sequence is synthesized)
aaatctattaaaggcaatagccaataaaacatttttaattttaaaaatttactgtgtttggctttctgtaaatgtagtaggtctgttaaacaaaatattaaatttccatagtaccagaaa

SEQ ID NO: 426866 - DNA, 120 bp, Artificial Sequence
  ENSG00000151576_31 (sequence is synthesized)
gataaattctcaggagtgaaattacagagtcaaagatcatgaaataataactaaaataaaatgtttccaatggccacttcttatctgatcatcattcaagcctttttattggtttgtcct

SEQ ID NO: 426867 - DNA, 120 bp, Artificial Sequence
  ENSG00000151576_32 (sequence is synthesized)
cctcaagggatgcagggaaggagtgctggccgattgtatattaaatagtgtctgtgcataggcatgcctttgatgttttgtttatgtcctttctgggctgagtctgctgaggtgctgagg

SEQ ID NO: 426868 - DNA, 120 bp, Artificial Sequence
  ENSG00000151576_33 (sequence is synthesized)
cagactgtaaggggagtttccatcaaggctgtcctggccttgatttcagaatgtagagtagaggataattgccatttgaattatgttatttgatcctcctaagtgagagcaagtattata

SEQ ID NO: 426869 - DNA, 120 bp, Artificial Sequence
  ENSG00000151576_34 (sequence is synthesized)
ctgtttcccctcattcttgtgccaattacaaatattgttgttataatatggtacctggagaccaagtgtaaagtcacatggaatgctggtttaaattgaggaaagttgaggacagatctg

SEQ ID NO: 426870 - DNA, 120 bp, Artificial Sequence
  ENSG00000151576_35 (sequence is synthesized)
ggatgactagtgagaagatgagctccaccaacaagaacttaagaagctcttagatttgaggctggtagtgagtggtgtcaatttttgaaattgaggggactgacaacactagtaggattg

SEQ ID NO: 426871 - DNA, 120 bp, Artificial Sequence
  ENSG00000151576_36 (sequence is synthesized)
gttcttatgtttccataaattgcaggattcaccttgtgctgataagaaaagacgatctgcaagatttgaagctacaaattctgagtttctgaatgcagctgatatcgtattaggctaccc

SEQ ID NO: 426872 - DNA, 120 bp, Artificial Sequence
  ENSG00000151576_37 (sequence is synthesized)
acattttttttaatggtttgttatcttaatgtgaatattcatgcttttttcctgcatgtatattaagaagtttggttgtggggtgctgctccatagtctctagagctgttggatagtata

SEQ ID NO: 426873 - DNA, 120 bp, Artificial Sequence
  ENSG00000151576_38 (sequence is synthesized)
gcgcgattttactacttttttaaagatccaagtacaacttggaggaaagcacgtgaatcttacatacagctcaattaattttcacatgtctacacttgtgtaaacactacccagaacaag

SEQ ID NO: 426874 - DNA, 120 bp, Artificial Sequence
  ENSG00000151576_39 (sequence is synthesized)
gtatttccatcaccttagccagcctttgatccccaattttaacctagttcttttgtgttcattgctccctctcctgtacttgtttcactctggtgcacataacacttcagcaccagtatt

SEQ ID NO: 426875 - DNA, 120 bp, Artificial Sequence
  ENSG00000151576_40 (sequence is synthesized)
tctagacattttctggacttcttcatgttaagtgctcacagatgtctgttactgaatttgaaagctggattgtttttctttctataagtgtgtagaaatgccagcttcagttggatagga

SEQ ID NO: 426876 - DNA, 120 bp, Artificial Sequence
  ENSG00000151576_41 (sequence is synthesized)
gttctaaaacattacatcacttgaaggaaactgtagtcaggaaaaccagcatatatttgtaagagttctgcttatttaatattacatgagccttttttttttttttgcatttctgtgcca

SEQ ID NO: 426877 - DNA, 120 bp, Artificial Sequence
  ENSG00000151576_42 (sequence is synthesized)
gttcatagaaaggggctataggtagtaaaacaaacataaaaaagagcagcagccagccagccctgatttagtacatctccacatctgttttcatggagtggcaaaacctggccgagtgcc

SEQ ID NO: 426878 - DNA, 120 bp, Artificial Sequence
  ENSG00000151576_43 (sequence is synthesized)
attaatagtctcagaatgccttacctattacaagttgagtatcctttatccaaaatgctagggaccagaagtgcttgagattttggattttttcagatcctggaatatttgcagagtacg

SEQ ID NO: 426879 - DNA, 120 bp, Artificial Sequence
  ENSG00000151576_44 (sequence is synthesized)
tactggttgggcatccctaatttgaaagtccaaaatccaaaattctccagtgagcatttcctttcagtgtcatgttggtgctcaaaaagtttcagattttggagcattttggatttcaga

SEQ ID NO: 426880 - DNA, 120 bp, Artificial Sequence
  ENSG00000151576_45 (sequence is synthesized)
ttttcggattaaggatgctcaacctgtaccttggaaaccaccatcttattccacagtgcagactttttattaatggagaaaatataaagaaagccaactagattcttagatcctatggcc

SEQ ID NO: 426881 - DNA, 120 bp, Artificial Sequence
  ENSG00000151576_46 (sequence is synthesized)
agaggtgaaatcctgacagcgagagttgctttgtaaattaacttatgagggatatagtggattaaaatgtctttattgcaccaattatgaaaaattataggcaaaatacagttaaaacaa

SEQ ID NO: 426882 - DNA, 120 bp, Artificial Sequence
  ENSG00000151576_47 (sequence is synthesized)
gcaaaatatttcagcaagaaataaagcacacagctttgcactcctaaaaaatctatatagtgtatagaagataggctataaagggctataaagtttagtttatgaccagggaggttgttc

SEQ ID NO: 426883 - DNA, 120 bp, Artificial Sequence
  ENSG00000151576_48 (sequence is synthesized)
gtttagtttatgaccagggaggttgttcagaaggatgatagttgagaggaagctaacctttattgaacttctctctgggatcagaaactatactatgggctgggcgtggtggctcacacc

SEQ ID NO: 426884 - DNA, 83 bp, Artificial Sequence
  ENSG00000151576_49 (sequence is synthesized)
gctagggaggctgaggcaggagaattactcccggaaggtgcaggttgcagtgagtcgagtgactccctctcaaaaaaaaaaaa

SEQ ID NO: 426885 - DNA, 120 bp, Artificial Sequence
  ENSG00000151576_50 (sequence is synthesized)
gtgcactcagagagacattctgaagggaaccctgcaagttgcctgttgttgttcttcccaggggaggactgagcatacaaccactgcttcccaagggaggcttttcccacaaagggggca

SEQ ID NO: 426886 - DNA, 120 bp, Artificial Sequence
  ENSG00000151576_51 (sequence is synthesized)
caaggctgcagctttgtcccaggaagtcagcctatggtgtatccctcagatgctcagatcccactgtctgggatgatcccttataccttttccttatttcgataattatagtgggatggg

SEQ ID NO: 426887 - DNA, 120 bp, Artificial Sequence
  ENSG00000151576_52 (sequence is synthesized)
atggtttataagacttagagtagggctgcctaaggatgaggttaagatgaagaacactgtatcctcagcattttcattgttgcaaaaaaatttgagggtagaggagggtcaaatacatgc

SEQ ID NO: 426888 - DNA, 120 bp, Artificial Sequence
  ENSG00000151576_53 (sequence is synthesized)
ttggagtttggaggtgctgttacctctttgatctttcattcatatgtttgtttattcataaatttaataagtattatttgaacatctaagagccaggcattggcaagtcaagattgaata

SEQ ID NO: 426889 - DNA, 120 bp, Artificial Sequence
  ENSG00000151576_54 (sequence is synthesized)
ggaaacagttgctgctctcatggaatttggagcctagctgggataaagatagagaattctagtaaaaattgtggttactgctttacaggattagggatatgtatggatatcatgacaggc

SEQ ID NO: 426890 - DNA, 120 bp, Artificial Sequence
  ENSG00000151576_55 (sequence is synthesized)
aggtctggggccatggagatggcccatggagcaaagataaatccaggcttattggcttagccgaggtgtttccagagacagcccatttaggggtgataaatgggcttataaagcagagta

SEQ ID NO: 426891 - DNA, 120 bp, Artificial Sequence
  ENSG00000151576_56 (sequence is synthesized)
aagatttagaacaggagttttgaattcaactactttgtggctatatgaccctaggcaacttgtttaataactcagagaccctgttttctcatgcaaaatggggacgataatacctgaatc

SEQ ID NO: 426892 - DNA, 120 bp, Artificial Sequence
  ENSG00000151576_57 (sequence is synthesized)
actggagtgttgtaatgattaaaaataaatgtatgtgaagcattctgccaggaaatgtaaactaaagttgatttgaaattggtgaaaatgaagttagggaagctatgccctcggactgtt

SEQ ID NO: 426893 - DNA, 120 bp, Artificial Sequence
  ENSG00000151577_0 (sequence is synthesized)
gatagagagacaaagaggaaaagagagcgaggtagaaaacggatactgcctatgcctactccatccctctttcagcaccaaggacagaacctctgagcggctgacccaagcaacgctcag

SEQ ID NO: 426894 - DNA, 120 bp, Artificial Sequence
  ENSG00000151577_1 (sequence is synthesized)
tttagggtccctcccaaatcctctaaagaaaacggatacattcgaaagcagctatgaaacatgcactaaggtctaatagggaagctggaaaagcagcactcaagtaatttcaccttagag

SEQ ID NO: 426895 - DNA, 120 bp, Artificial Sequence
  ENSG00000151577_2 (sequence is synthesized)
gcaaaaatgggtgatttctttctgttcatttcatagtttctgagtcctgagaaaggcaaagtttgctttgcttgggtatgtctgctgtcagtaaatggctgcaggagccgaagtggtaaa

SEQ ID NO: 426896 - DNA, 120 bp, Artificial Sequence
  ENSG00000151577_3 (sequence is synthesized)
ctcctcggtctccagaaatcagaagaaaattttagggaagccccttggcatcacgcacctccctctgggctatggcatctctgagccagctgagtggccacctgaactacacctgtgggg

SEQ ID NO: 426897 - DNA, 120 bp, Artificial Sequence
  ENSG00000151577_4 (sequence is synthesized)
cagagaactccacaggtgccagccaggcccgcccacatgcctactatgccctctcctactgcgcgctcatcctggccatcgtcttcggcaatggcctggtgtgcatggctgtgctgaagg

SEQ ID NO: 426898 - DNA, 120 bp, Artificial Sequence
  ENSG00000151577_5 (sequence is synthesized)
agcgggccctgcagactaccaccaactacttagtagtgagcctggctgtggcagacttgctggtggccaccttggtgatgccctgggtggtatacctggaggtgacaggtggagtctgga

SEQ ID NO: 426899 - DNA, 120 bp, Artificial Sequence
  ENSG00000151577_6 (sequence is synthesized)
atcagcatagacaggtacactgcagtggtcatgcccgttcactaccagcatggcacgggacagagctcctgtcggcgcgtggccctcatgatcacggccgtctgggtactggcctttgct

SEQ ID NO: 426900 - DNA, 120 bp, Artificial Sequence
  ENSG00000151577_7 (sequence is synthesized)
gtgtcctgccctcttctgtttggctttaataccacaggggaccccactgtctgctccatctccaaccctgattttgtcatctactcttcagtggtgtccttctacctgccctttggagtg

SEQ ID NO: 426901 - DNA, 120 bp, Artificial Sequence
  ENSG00000151577_8 (sequence is synthesized)
actgtccttgtctatgccagaatctatgtggtgctgaaacaaaggagacggaaaaggatcctcactcgacagaacagtcagtgcaacagtgtcaggcctggcttcccccagcaaaccctc

SEQ ID NO: 426902 - DNA, 120 bp, Artificial Sequence
  ENSG00000151577_9 (sequence is synthesized)
tctcctgacccggcacatctggagctgaagcgttactacagcatctgccaggacactgccttgggtggaccaggcttccaagaaagaggaggagagttgaaaagagaggagaagactcgg

SEQ ID NO: 426903 - DNA, 120 bp, Artificial Sequence
  ENSG00000151577_10 (sequence is synthesized)
aattccctgagtcccaccatagcgcccaagctcagcttagaagttcgaaaactcagcaatggcagattatcgacatctttgaagctggggcccctgcaacctcggggagtgccacttcgg

SEQ ID NO: 426904 - DNA, 120 bp, Artificial Sequence
  ENSG00000151577_11 (sequence is synthesized)
gagaagaaggcaacccaaatggtggccattgtgcttggggccttcattgtctgctggctgcccttcttcttgacccatgttctcaatacccactgccagacatgccacgtgtccccagag

SEQ ID NO: 426905 - DNA, 120 bp, Artificial Sequence
  ENSG00000151577_12 (sequence is synthesized)
ctttacagtgccacgacatggctgggctacgtgaatagcgccctcaaccctgtgatctataccaccttcaatatcgagttccggaaagccttcctcaagatcctgtcttgctgagggagc

SEQ ID NO: 426906 - DNA, 120 bp, Artificial Sequence
  ENSG00000151577_13 (sequence is synthesized)
attataaaagcaagttcaacctcctcttgctctcaccctttcttgctcttctgccttccgccatgagatgacacagcacaaaggtctttgccagatgtctgtgccacactcttggacttc

SEQ ID NO: 426907 - DNA, 120 bp, Artificial Sequence
  ENSG00000151577_14 (sequence is synthesized)
ggtaaactcctcggtctccagaaatcagaagaaaattttaggaaagagaacaaataattaaaactctgtaagtcttaatgaggtgctaaggaggaaccccacgaatgtttcaggaagact

SEQ ID NO: 426908 - DNA, 120 bp, Artificial Sequence
  ENSG00000151577_15 (sequence is synthesized)
gttattcagcactgagggattgaacatcagcaaagcaggacaaatgtcataactgatggggacctgacaactctctgttcccctgcctttttaaataggttatgcactcactctaagaga

SEQ ID NO: 426909 - DNA, 120 bp, Artificial Sequence
  ENSG00000151611_0 (sequence is synthesized)
gccccctggaggatttggggtgggggaaggaaaaggagagtattatcgaatattctcctaatattgatgttcggggtgcggatatgtgtggacaggcaggagtcggcaaatgggttcaaa

SEQ ID NO: 426910 - DNA, 120 bp, Artificial Sequence
  ENSG00000151611_1 (sequence is synthesized)
tggaagctttaacaaagaaaggccctggaggtcacaatcacattgagccaaaacgcatccagtgttttctccagttacaaataaaacgaatatgcccatgctgctaccacatcctcacca

SEQ ID NO: 426911 - DNA, 120 bp, Artificial Sequence
  ENSG00000151611_2 (sequence is synthesized)
gcatttcctaaaaggccttttaagagcacctttccgatgttaccacttcatctttcactcaagtactcatctcggatcaggaatcccatgtgctcagccgtttaattctcttggactcca

SEQ ID NO: 426912 - DNA, 120 bp, Artificial Sequence
  ENSG00000151611_3 (sequence is synthesized)
ttgtacaaagtggatgctgctgtcagatggcttaaagagaaaattatgtgtacaaacaaccttaaaggaccacacagaaggactttctgataaagagcaaagatttgtggataaacttta

SEQ ID NO: 426913 - DNA, 120 bp, Artificial Sequence
  ENSG00000151611_4 (sequence is synthesized)
tactggtttaatccaagggcaaagggcctgtttagcagaggccataactcttgtagaatcaactcacagcaggaaaaaggagttagcccaggtgcttcttcagaaagtattactttacca

SEQ ID NO: 426914 - DNA, 120 bp, Artificial Sequence
  ENSG00000151611_5 (sequence is synthesized)
cagagaacaagaacaatcaaataaaggaaaaccactagcatttcgagtaggattgtctgggccccctggtgctggaaaatcaacatttatagaatattttggaaaaatgcttactgagag

SEQ ID NO: 426915 - DNA, 120 bp, Artificial Sequence
  ENSG00000151611_6 (sequence is synthesized)
agggcacaaattatctgtgctagctgtggacccttcttcttgtactagtggtggatcactcttaggtgataaaacccgaatgactgagttatcaagagatatgaatgcatacatcaggcc

SEQ ID NO: 426916 - DNA, 120 bp, Artificial Sequence
  ENSG00000151611_7 (sequence is synthesized)
atctcctactagaggaactttaggaggcgtgacaaggaccacaaatgaagctattctgttgtgtgaaggagcgggatatgacataattcttattgaaaccgttggtgtgggtcagtcgga

SEQ ID NO: 426917 - DNA, 120 bp, Artificial Sequence
  ENSG00000151611_8 (sequence is synthesized)
gtttgctgttgctgacatggttgacatgtttgttttactactgccaccagcaggaggagatgagctgcagggtatcaaaaggggtataatcgagatggcagatctggtagctgtaactaa

SEQ ID NO: 426918 - DNA, 120 bp, Artificial Sequence
  ENSG00000151611_9 (sequence is synthesized)
atctgatggagacttgattgtgccagctcgaaggatacaagcggaatatgtgagtgcactgaaattactccgcaaacgttcacaagtctggaaaccaaaggtaattcgtatttctgcccg

SEQ ID NO: 426919 - DNA, 120 bp, Artificial Sequence
  ENSG00000151611_10 (sequence is synthesized)
aagtggagaggggatctctgaaatgtgggataaaatgaaagatttccaggacctaatgcttgccagtggggagctgactgccaaacgacggaagcaacagaaagtttggatgtggaatct

SEQ ID NO: 426920 - DNA, 120 bp, Artificial Sequence
  ENSG00000151611_11 (sequence is synthesized)
cattcaggaaagtgtgttagagcatttcaggacccaccccacagtccgggaacagattccacttctggaacaaaaggttctcattggggccctgtccccaggactagcagcagacttctt

SEQ ID NO: 426921 - DNA, 120 bp, Artificial Sequence
  ENSG00000151611_12 (sequence is synthesized)
agcagacttcttgttaaaagcttttaaaagcagagactaataaaattcatcctgtataataattttacatatcatttcataaagtattttaatagaaaaatcacttgtatgcttatattt

SEQ ID NO: 426922 - DNA, 120 bp, Artificial Sequence
  ENSG00000151611_13 (sequence is synthesized)
gtatggtgctcttgtcttctttgtttgtgacccatgcttgaaaacttgaaggaagttagatatgaatggcaaaagttaggcagtatttataaggtacctgttttatgttactgatatctg

SEQ ID NO: 426923 - DNA, 120 bp, Artificial Sequence
  ENSG00000151611_14 (sequence is synthesized)
tttccttctcttcttataccctggcatggtggcctgtagggtagtttcttcttaatagtcaagaacagagaaagctgaggagagcagaaaatatcttgcactttaaaatgcttattttga

SEQ ID NO: 426924 - DNA, 120 bp, Artificial Sequence
  ENSG00000151611_15 (sequence is synthesized)
ttccatattatctgaatttccagagaggatgtaaacaagagtgaccatatttttggagtccttcttgaagccagaacaacacacagtgggttgctaagagccgacaatcataattgacat

SEQ ID NO: 426925 - DNA, 120 bp, Artificial Sequence
  ENSG00000151611_16 (sequence is synthesized)
ttagtgtaccagattattctaagaatttctgaaattaccatgtacatgagtaatgaaacaactggaataatgtgatgatgtgaacacaattttaaagtctgcttgtctggatttgcaggt

SEQ ID NO: 426926 - DNA, 120 bp, Artificial Sequence
  ENSG00000151611_17 (sequence is synthesized)
acccttccgccaccccccaacatgataggtaagagagcaaaagggaactgggaaaaatcagctacaaataaaatgggtgactaatccccagttcttggacccattatatttgtagccaat

SEQ ID NO: 426927 - DNA, 120 bp, Artificial Sequence
  ENSG00000151611_18 (sequence is synthesized)
gacaaagtgaggtcagaatgattcaaggattattcagtttgaagactaccaaaggcttttgcttctcttcttccttggccatttcacttcattttagtattttaaaaatcttttttcttg

SEQ ID NO: 426928 - DNA, 120 bp, Artificial Sequence
  ENSG00000151611_19 (sequence is synthesized)
atggtgaacaagttttgtcctatgctatggaggaggcatagcacagtgattaagagcttgggctctgtagttggactatgtgggtttaaactttaaacccagatcaattgtatattagct

SEQ ID NO: 426929 - DNA, 120 bp, Artificial Sequence
  ENSG00000151611_20 (sequence is synthesized)
acatgagctaatctctttaagcttccatttcctccctggtaaaatgaaattggcaaataactttctaaggttagtgaagataggaaatactcgaaggctgcttactatccttattacatt

SEQ ID NO: 426930 - DNA, 120 bp, Artificial Sequence
  ENSG00000151611_21 (sequence is synthesized)
aaagttatgggtatcttgaaactacaaacctgatgtataatttcagttttctctcatggtcttgttactaccatcatactcttgatattttaggatactttaggattacctttgaagaac

SEQ ID NO: 426931 - DNA, 120 bp, Artificial Sequence
  ENSG00000151611_22 (sequence is synthesized)
cctttctagttaattctttgaatatgttttatacttatttgatggtagttgtaactgtgtacatttgaataaaatttctaaccataaaatttcgccattgcacaaaaagcctttatagaa

SEQ ID NO: 426932 - DNA, 120 bp, Artificial Sequence
  ENSG00000151611_23 (sequence is synthesized)
gtttctaacatattctattctgaaccctgtagaatattttatgtagtatagcagcttgcattgttacttactgtactggaatcaaacctcttgagcattattttaacaaacatcccttta

SEQ ID NO: 426933 - DNA, 120 bp, Artificial Sequence
  ENSG00000151611_24 (sequence is synthesized)
cattttttggaaagatttttagtactccattggcatagctatttcatacaaggattaggagaaactttgaaaggttatccacttgacttttctgattttagaaaggactaccattaaacc

SEQ ID NO: 426934 - DNA, 120 bp, Artificial Sequence
  ENSG00000151611_25 (sequence is synthesized)
accctatcagacaaaaaaaactggtttttagaaacctgagagaaggaattttataatttccctgagtaagctgttacagggaataacaaatctcctgccacatgtggcacagtgtaagta

SEQ ID NO: 426935 - DNA, 120 bp, Artificial Sequence
  ENSG00000151611_26 (sequence is synthesized)
atgctggagcacacatactgcattgtaaagaaggtaggaaaggtggggggacttttgttagctttaattttaaggctaaaagcatttcttctcagtttgaactacttttaaatgttataa

SEQ ID NO: 426936 - DNA, 120 bp, Artificial Sequence
  ENSG00000151611_27 (sequence is synthesized)
atgtcatcataaaaatcattagaaaactcatttctccttatgttgtcgttgtaccattgggtattgtatagagaccaatttctaagagattttttcacctctgtttctgttatttgctat

SEQ ID NO: 426937 - DNA, 120 bp, Artificial Sequence
  ENSG00000151611_28 (sequence is synthesized)
actggaggtaatataataataatgaaatatagctttttttttcaactcagaaatcctattccctctccccatctgtgattatattgtactggacttctgacttggtcaaaagcataggtt

SEQ ID NO: 426938 - DNA, 120 bp, Artificial Sequence
  ENSG00000151611_29 (sequence is synthesized)
ttgacttagatacatgtgggggcagatctcagctctatcactaactagctatatgatatttggcaagttttttctctatgtgcagtagtttctttatctgtaaaattaagataatagcta

SEQ ID NO: 426939 - DNA, 120 bp, Artificial Sequence
  ENSG00000151611_30 (sequence is synthesized)
ctttacagggttggaagaattaatttagaaattgtacagtgcttagcctcaataattggtaggtggtggtgtaaatattttacatagatacttgtgacagttctttgttctacaaaacag

SEQ ID NO: 426940 - DNA, 120 bp, Artificial Sequence
  ENSG00000151611_31 (sequence is synthesized)
actaatattaatttcagattggccaagctacttaatttctctgtgcctcagtttcctcactattaaatggggatgacaatagtgtccacctagagcaggactattttagtattacatata

SEQ ID NO: 426941 - DNA, 120 bp, Artificial Sequence
  ENSG00000151611_32 (sequence is synthesized)
atccttggatataaatgctgatgaagtttggatatttgtccccacccaagtctcatgttgaaatgtaatccccaatcttggaggtggagcctggtgggaggtgtatggattagatcagat

SEQ ID NO: 426942 - DNA, 120 bp, Artificial Sequence
  ENSG00000151611_33 (sequence is synthesized)
ctctcatgaatgacttgggccatcctttgggtggtaagtgagctcttgctccgagttcacacgaggtctagatctggtcatttaaaagtgtgtggcatctccccatccctcactctatca

SEQ ID NO: 426943 - DNA, 81 bp, Artificial Sequence
  ENSG00000151611_34 (sequence is synthesized)
tagaagctgagcagatgccagcaccatgcttcctgtagtctgtagaaccataagccaaataaacatcttttctttataaat

SEQ ID NO: 426944 - DNA, 120 bp, Artificial Sequence
  ENSG00000151611_35 (sequence is synthesized)
gtagaaccataagccaaataaacatcttttctttataaatttataaattacccagtcgcagatatttatagaaagaacagcctaatacaggtgctaaatacatatctgacaataaatggt

SEQ ID NO: 426945 - DNA, 120 bp, Artificial Sequence
  ENSG00000151611_36 (sequence is synthesized)
agttatctcttagaactgttatgaggattaaacgagttacagtgtccatcttaaaaagataattctgaaaaaaatctcataggttcactttgccttgtcaagaatatgattaccattaac

SEQ ID NO: 426946 - DNA, 120 bp, Artificial Sequence
  ENSG00000151611_37 (sequence is synthesized)
ttgctaaaacaatatcaaatctcattaaaatgatgacagttatttcaatagttgacagtagctatcccaatacaacctaacaaggcattttctcttcagaatcactcgatcatatggcca

SEQ ID NO: 426947 - DNA, 120 bp, Artificial Sequence
  ENSG00000151611_38 (sequence is synthesized)
tttccctaagcttttatagctattgcccagtgtacactgaagacaacagctaacgaacaacatacgtgtgataatttatgtagttgaacctctaaggcaaaaaaaaaaaaaaaaaggaaa

SEQ ID NO: 426948 - DNA, 120 bp, Artificial Sequence
  ENSG00000151611_39 (sequence is synthesized)
aattagtgaaaatcattcaaacattatgctcaccaggtagactgccatcatagaagtcctaatgctactgctaaaaactagtaaactaccagtaaactgtgaagacagaagtaactcctg

SEQ ID NO: 426949 - DNA, 120 bp, Artificial Sequence
  ENSG00000151611_40 (sequence is synthesized)
tgatctatatgtttgtgcagatggtggagcttttctgctcctaaagcctgagaaatgcaaatgtggcttcgttaatgcaaatgcttcctacgccagactttatgaaactcctcctaaagt

SEQ ID NO: 426950 - DNA, 120 bp, Artificial Sequence
  ENSG00000151611_41 (sequence is synthesized)
tgaattcttatccaagtggacatatgttagggtgccattgtaattcaggtagagtgtcagagtggtggctggcaccaacggtagatgttctcaacattagcgttattcaggtaagactac

SEQ ID NO: 426951 - DNA, 120 bp, Artificial Sequence
  ENSG00000151611_42 (sequence is synthesized)
aacaatgatgaacatgtcaaaactttcctttaaaaggaacaatcagaaaaactctttaacaaatgtttttctttccgtagtattttaattaaaatttttaaaattttaaaatttactaaa

SEQ ID NO: 426952 - DNA, 120 bp, Artificial Sequence
  ENSG00000151611_43 (sequence is synthesized)
tttatgaacgtttttatcccacttgagatgaatacttatttatagtccctgtcccatgaagcttctgtggatttgctttgtttgtcatttgtggtatgtttgataacaaaaatattagtg

SEQ ID NO: 426953 - DNA, 120 bp, Artificial Sequence
  ENSG00000151611_44 (sequence is synthesized)
gcacaaaagcagttatattgaatgcttttgttttagagaaaatttcactctgtactagaaaatgtagatgatgtgagtcaaagttcattaatatttacctgaaaatttgtgtataaaggt

SEQ ID NO: 426954 - DNA, 120 bp, Artificial Sequence
  ENSG00000151611_45 (sequence is synthesized)
aaccttggggcagtttattttgcttagacccctcagcttcttgatagagtgaggtgagggcatatgtaagtcagtaaactattctgttagtaaagtcaaaggcgtaatctaaattaatta

SEQ ID NO: 426955 - DNA, 120 bp, Artificial Sequence
  ENSG00000151611_46 (sequence is synthesized)
tgcttttaactaacacagaagaaatcatgtgacctcattctcaaagctcgtaacatccacctggccaatcttaagatgtggatagagttcttttttttcttttttcaatttttacaataa

SEQ ID NO: 426956 - DNA, 120 bp, Artificial Sequence
  ENSG00000151611_47 (sequence is synthesized)
tttttgacacattgaagctgtgcatgtttatgggggcacaatttgatgtttcaatacatgtatatgttgtgtaatgatcaaatcggagtacttagcatatctatcatctcgtgcatttat

SEQ ID NO: 426957 - DNA, 120 bp, Artificial Sequence
  ENSG00000151611_48 (sequence is synthesized)
catttctttgtggcgagaacatttaaaaatcctattttctagctattttgtaatatacactaccttactgttgcgaaccatagtcaccctactgtgcaatagaacacctgaacttattcc

SEQ ID NO: 426958 - DNA, 120 bp, Artificial Sequence
  ENSG00000151611_49 (sequence is synthesized)
tcctatctagttgtaactttgtacccattgaccccccttcccttccttccactctcccctccccagtctctggtaaccactgttctgttccctatgagataaaactttttttgtcttcca

SEQ ID NO: 426959 - DNA, 120 bp, Artificial Sequence
  ENSG00000151611_50 (sequence is synthesized)
agtttacagcacatgaactttgggggacacacttaaaccatagtgccgtcttcagtctgagaagaatttctgtctttcattgaagttccaaaggcttcttattttgatgactttgcctaa

SEQ ID NO: 426960 - DNA, 120 bp, Artificial Sequence
  ENSG00000151611_51 (sequence is synthesized)
agaagggattctacagccaaatgctttctttttaacataccgaatgagtaaaagtgcaaaataagtacagaactatcaaacagcaacaaatgtgcttctgctgcctaccacagaattttc

SEQ ID NO: 426961 - DNA, 120 bp, Artificial Sequence
  ENSG00000151611_52 (sequence is synthesized)
aagtgagatgtttaaaggagtgaccaggttgactgtgtgaccatgagtatgagtaaatgaagtagaatggaaatggtcaatgtagttgagaaagtcaaataatggtgagtattttaggat

SEQ ID NO: 426962 - DNA, 120 bp, Artificial Sequence
  ENSG00000151611_53 (sequence is synthesized)
gccgccgcaggctgctgggggtgaggacacgactcggcctccgtccgactcgagggtgtcgcgaaggccaggagggaacgaaagttaccctcgaacttcggaggcgaaagatttcatgtg

SEQ ID NO: 426963 - DNA, 120 bp, Artificial Sequence
  ENSG00000151611_54 (sequence is synthesized)
gatcttaaaaagggcaaaacctaccccaaaggccgtaaaccgccctcccctcccccgccagagaacttcccggcgcagagcttccgcagcctgctgcaggccgggagaccttcacgctca

SEQ ID NO: 426964 - DNA, 120 bp, Artificial Sequence
  ENSG00000151611_55 (sequence is synthesized)
ctcactcgctctccgccacacgccggaactgcgcggccacgtccacggggaccctggccatgccccgcaccgccacccagccccaggcgatccccgggccccacgcgcctgcagtcggcg

SEQ ID NO: 426965 - DNA, 120 bp, Artificial Sequence
  ENSG00000151611_56 (sequence is synthesized)
aattaaatacaagatatcccatactccctagaagatatgaatgtataggttataatctttaccctccaagatcttattttaaaaagtaaaaataagccatctatctggataactgttata

SEQ ID NO: 426966 - DNA, 120 bp, Artificial Sequence
  ENSG00000151611_57 (sequence is synthesized)
caggtggtatattatacatgccagaggagaactgtaaacattaggatgatctgtgtaaatgatgctttggcacaacacctattttaagtacatttcatatgtctactgtgttcatcaaga

SEQ ID NO: 426967 - DNA, 120 bp, Artificial Sequence
  ENSG00000151611_58 (sequence is synthesized)
aaattaatgtagttgggtgccttttgaaaatgcaaatatgttttatttcattgttttatatccttagcatatagttacatgtgatgaagacactgaaatgaaaaccctaataaattcttt

SEQ ID NO: 426968 - DNA, 120 bp, Artificial Sequence
  ENSG00000151611_59 (sequence is synthesized)
gtttctgaagatttgtgaacagcatttgaatttgtttgtttttatttatattgtctttttactatgatgtataaatatgtcctgtaatgtcattgatctatatgatgagtgagacaatca

SEQ ID NO: 426969 - DNA, 120 bp, Artificial Sequence
  ENSG00000151611_60 (sequence is synthesized)
agtgttaaaatggaacttgttgattaggatatttataccatagtttagttttcttaagaaactctgacagacacgatatttaaaatgactaaatttacactttgacataaggctactaaa

SEQ ID NO: 426970 - DNA, 120 bp, Artificial Sequence
  ENSG00000151611_61 (sequence is synthesized)
aggtagaatataccattgagatatgccacttgaaaaaactacttttaaaaaaatggcattactggtgtcatgaagaaaagaaatgcttttatctcaaccctggtttcaaaaatttgtgta

SEQ ID NO: 426971 - DNA, 120 bp, Artificial Sequence
  ENSG00000151611_62 (sequence is synthesized)
ccactagcatttcgagtaggtcagtcttttttgtgtgttttctcagtaaatatttttacaaattctctgtattctgttttttaaaaaaaagtctaaatagtttgcaatcgaatggcgact

SEQ ID NO: 426972 - DNA, 120 bp, Artificial Sequence
  ENSG00000151611_63 (sequence is synthesized)
tttttcacaatatttggatgaattttaaatgagttttcctggcaaatattagttttgttaagttgaaaaaattgccatgacatttgaaccaaggctatgtattttaagaaaataatataa

SEQ ID NO: 426973 - DNA, 120 bp, Artificial Sequence
  ENSG00000151612_0 (sequence is synthesized)
gagaatgtgagaaaagggggaaaatgcccaggaggaagcaggagcagcccaagcgccttccctcacatgttagtaggcaggaagaggcggagggagagctcagtgaaggagaacactggt

SEQ ID NO: 426974 - DNA, 120 bp, Artificial Sequence
  ENSG00000151612_1 (sequence is synthesized)
atggaaactcttcagagactccgtcagaagcatcctatggggaagtccaggagaactataagttgtctctggaggaccggatccaggagcagtccacgtccccggacacctccttgggaa

SEQ ID NO: 426975 - DNA, 120 bp, Artificial Sequence
  ENSG00000151612_2 (sequence is synthesized)
gcacgactcccagcagccacacgttggagctggtggcactggacagtgaggtcctgcgagactcactgcagtgtcaagatcacctttccccgggagtgtcttctttgtgtgacgatgacc

SEQ ID NO: 426976 - DNA, 120 bp, Artificial Sequence
  ENSG00000151612_3 (sequence is synthesized)
caggctccaacaagcccctgagcagcaatttgaggcggctgctggaggctggttccctcaaactcgatgctgcagccacggctaatggcagagtggagtcccccgtaaacgttggctcga

SEQ ID NO: 426977 - DNA, 120 bp, Artificial Sequence
  ENSG00000151612_4 (sequence is synthesized)
acctctccttttccccgccttcccaccacgcccagcagctcagtgttctggccaggaagttggccgagaagcaggaacagaatgaccaatacactccaagtaaccgttttatatggaatc

SEQ ID NO: 426978 - DNA, 120 bp, Artificial Sequence
  ENSG00000151612_5 (sequence is synthesized)
aaggtaagtggttgccaaactcaaccaccacctgcagcttgtctccggattcagccatcctaaaactgaaagctgcagccaatgccgttctgcaggacaaatctctcaccaggactgagg

SEQ ID NO: 426979 - DNA, 120 bp, Artificial Sequence
  ENSG00000151612_6 (sequence is synthesized)
agaccatgcgatttgagtccttttcctccccttttagctcccagtctgccagttctaccttggccgctttgtccaagaaggtcagtgaaagaagtttgactcctggtcaggagcaccctc

SEQ ID NO: 426980 - DNA, 120 bp, Artificial Sequence
  ENSG00000151612_7 (sequence is synthesized)
caccggccagctccttcctttccctggcttctatgacctcctcagcggcccttctgaaggaggtggccgcaagggctgcgggcagtcttctggctgagaaatcatcgctgctgcctgagg

SEQ ID NO: 426981 - DNA, 120 bp, Artificial Sequence
  ENSG00000151612_8 (sequence is synthesized)
accctctaccgcccccgccttcagagaagaaaccagaaaaagtcactccgccacctccaccgccacctccaccacctccaccaccaccaccacaatccctggaattattattactcccag

SEQ ID NO: 426982 - DNA, 120 bp, Artificial Sequence
  ENSG00000151612_9 (sequence is synthesized)
ttcctaagggaagagtttctaaaccctccaattcagcctcagaagaggaaagtggaaagcctttccagtgtccaatatgtggtttggttattaaaaggaagagttactggaagcggcaca

SEQ ID NO: 426983 - DNA, 120 bp, Artificial Sequence
  ENSG00000151612_10 (sequence is synthesized)
tggtgattcacacaggtttaaaaagtcatcagtgtccgctctgtccattccggtgtgctcgcaaggacaatctcaaatcccacatgaaggttcatcagcaccaggatcggggagagacct

SEQ ID NO: 426984 - DNA, 120 bp, Artificial Sequence
  ENSG00000151612_11 (sequence is synthesized)
ttcagtgccagctgtgcccttttacttcctcacgccacttcagcctgaaactccacatgcgttgccatcagcacttcctgaggacagaagccaaggtgaaggaggagatcccagacccag

SEQ ID NO: 426985 - DNA, 120 bp, Artificial Sequence
  ENSG00000151612_12 (sequence is synthesized)
atgtcaagggatctccccacctcagtgacagtgcctgcctggggcagcaaagggaaggaggagggacagagctagtggggaccatgatgacgtctaacactccagagaggactagccagg

SEQ ID NO: 426986 - DNA, 120 bp, Artificial Sequence
  ENSG00000151612_13 (sequence is synthesized)
gaggggctggcgtctcgcctttgctggtgaaggaggaacccaaggaagataacggcctgcccacctcctttactttgaatgctgccgacaggcccgccaaccacacaaagctgaaagacc

SEQ ID NO: 426987 - DNA, 120 bp, Artificial Sequence
  ENSG00000151612_14 (sequence is synthesized)
cctccgagtatgtggccaacagtgcgtcagcattgttcagccaggacatctctgttaagatggcgtctgattttctcatgaagctgtcagctgcaaatcagaaggagcccatgaatctta

SEQ ID NO: 426988 - DNA, 120 bp, Artificial Sequence
  ENSG00000151612_15 (sequence is synthesized)
attttaaagtgaaagaggagcctaaggaaggggagtccctaagcacgactttgcctcggtccagctatgtgttcagcccggaatctgaagtgtcagccccaggcgtctctgaggacgcac

SEQ ID NO: 426989 - DNA, 120 bp, Artificial Sequence
  ENSG00000151612_16 (sequence is synthesized)
taaagccccaggaagggaagggaagtgtgctaaggcgggatgtgtcagtcaaagcagcctctgaacttctcatgaaactctcagcggaaagctacaaggaaacacagatggtgaagatta

SEQ ID NO: 426990 - DNA, 120 bp, Artificial Sequence
  ENSG00000151612_17 (sequence is synthesized)
tttaatcgggcgagagaaaaccgaacccttacagaagatgccagagggcagagtacccccagagagaaacctcttcagtcaggatatctctgtgaaaatggcttccgagctcctctttca

SEQ ID NO: 426991 - DNA, 120 bp, Artificial Sequence
  ENSG00000151612_18 (sequence is synthesized)
actgtcagaaaaagtgagcaaagagcacaatcatacaaaagaaaacaccatccggaccacgaccagccctttcttttcagaagacacatttagacaatcaccattcacctccaattcaaa

SEQ ID NO: 426992 - DNA, 120 bp, Artificial Sequence
  ENSG00000151612_19 (sequence is synthesized)
agaactgctgcccagtgactccgtgctgcacggaagaatatcagctccagaaacagaaaagatagtcctagaggcaggaaatggattaccatcctggaaattcaatgaccagctttttcc

SEQ ID NO: 426993 - DNA, 120 bp, Artificial Sequence
  ENSG00000151612_20 (sequence is synthesized)
ctgtgacgtgtgtgggaaagtgtttggccgacagcagacattgtcccgacacctctcgctgcacacagaggaaagaaaatacaaatgccacttgtgcccctatgctgctaagtgccgtgc

SEQ ID NO: 426994 - DNA, 120 bp, Artificial Sequence
  ENSG00000151612_21 (sequence is synthesized)
aaatctgaaccagcacttgaccgtccattccgtgaagctggtgagtacagacaccgaggacattgtcagcgccgtcacctctgaaggcagtgatgggaagaaacatccttattattacag

SEQ ID NO: 426995 - DNA, 120 bp, Artificial Sequence
  ENSG00000151612_22 (sequence is synthesized)
ttgtcacgtgtgtggatttgagaccgagctcaatgtccagtttgtcagccacatgtcactccacgtggacaaggagcagtggatgttttcgatctgctgcactgcctgcgacttcgtcac

SEQ ID NO: 426996 - DNA, 120 bp, Artificial Sequence
  ENSG00000151612_23 (sequence is synthesized)
catggaggaagcagagataaagactcacattggcaccaagcacacaggggaagacaggaagacccccagcgaatcaaatagcccctcttcatcctccctctcagctctgagtgattcagc

SEQ ID NO: 426997 - DNA, 120 bp, Artificial Sequence
  ENSG00000151612_24 (sequence is synthesized)
caacagcaaagatgattcagatggctcccagaaaaacaagggcgggaacaatctgctggtcatctctgtcatgcctgggagccagccctcactgaacagtgaggaaaagccagagaaagg

SEQ ID NO: 426998 - DNA, 120 bp, Artificial Sequence
  ENSG00000151612_25 (sequence is synthesized)
gttcgaatgtgttttttgcaactttgtctgcaagacgaagaacatgtttgagcgtcatctgcagatacacctcatcacccggatgtttgagtgtgatgtgtgccacaagttcatgaagac

SEQ ID NO: 426999 - DNA, 120 bp, Artificial Sequence
  ENSG00000151612_26 (sequence is synthesized)
ccccgaacagctgctggagcataagaaatgccacactgtccccaccggtgggctcaagtaaggaaactcaggacagtggtgagtttcagactcctctaggtgcccattctgcatttattc

SEQ ID NO: 427000 - DNA, 120 bp, Artificial Sequence
  ENSG00000151612_27 (sequence is synthesized)
caccaaccgccccgctgccatggagtgccacctcaagacccactacaagatggagtacaagtgccggatctgccagacggtgaaggccaaccagctggagctggagacgcacacccggga

SEQ ID NO: 427001 - DNA, 120 bp, Artificial Sequence
  ENSG00000151612_28 (sequence is synthesized)
gcaccgcctgggcaaccactacaagtgcgaccagtgcggctacctgtccaagaccgccaacaagctcatcgagcacgtgcgcgtccacaccggggagcggcccttccactgtgaccagtg

SEQ ID NO: 427002 - DNA, 120 bp, Artificial Sequence
  ENSG00000151612_29 (sequence is synthesized)
cagctacagctgcaagcgcaaggacaatctcaacctgcacaagaagctgaagcacgccccacgccagaccttcagctgcgaagagtgcctgttcaagaccacacaccctttcgtcttcag

SEQ ID NO: 427003 - DNA, 120 bp, Artificial Sequence
  ENSG00000151612_30 (sequence is synthesized)
ccgccacgtcaagaagcaccagagtggggactgccccgaggaggacaagaagggcctgtgtccagcccccaaggaaccggccggcccgggggccccgctcctggtggtcgggagctcccg

SEQ ID NO: 427004 - DNA, 120 bp, Artificial Sequence
  ENSG00000151612_31 (sequence is synthesized)
gaatctcctgtctcccctgtcagttatgtctgcctcccaggctctgcagaccgtggccctgtcggcagcccacggcagcagctcagagcccaacctggcactcaaggctttggccttcaa

SEQ ID NO: 427005 - DNA, 120 bp, Artificial Sequence
  ENSG00000151612_32 (sequence is synthesized)
cggctcccctttgcgctttgacaagtaccggaactcagattttgcccatctcattcccttgacaatgttataccccaagaaccacttggatctcacattccaccctccccgacctcagac

SEQ ID NO: 427006 - DNA, 120 bp, Artificial Sequence
  ENSG00000151612_33 (sequence is synthesized)
tgcgcctcccagcatcccctcacccaaacactccttcctggcctatctcggactgagagaaagagcagagactgtctgagggcagccatgttctgtaccaaaaacagagagacaaaagac

SEQ ID NO: 427007 - DNA, 120 bp, Artificial Sequence
  ENSG00000151612_34 (sequence is synthesized)
gacattagtgttaggggctcggagacacagagcgcggccatagacaccgccgcaccggcactcatttatttatacctcccatcacacacgcgagcataggacacacacacactcacacct

SEQ ID NO: 427008 - DNA, 120 bp, Artificial Sequence
  ENSG00000151612_35 (sequence is synthesized)
cacacgcgagcataggacacacacacactcacacctattagatccgtttccattgaagaatattacgctcggggacaagccaggtgcacgaccaaaaatttaaaaaaaaaaaaaaaagga

SEQ ID NO: 427009 - DNA, 120 bp, Artificial Sequence
  ENSG00000151612_36 (sequence is synthesized)
tggctccaggaaacaagcttcaacccattgcacacaccggagaaggggtttccccctgcccgcccgcccgccccccaactacctccccgctcctgccagtgtctgcctctctgcccccac

SEQ ID NO: 427010 - DNA, 120 bp, Artificial Sequence
  ENSG00000151612_37 (sequence is synthesized)
aaggaatagaaaattggctctgtgtgtatacctattgcattgacctgaaagctgctttatccaatcttcagagaggtgacctactgcatacttctaccttcagaggcatgcctccccagc

SEQ ID NO: 427011 - DNA, 120 bp, Artificial Sequence
  ENSG00000151612_38 (sequence is synthesized)
cacccactcccactctcagcccttctccgtacttttctctgaaaggaatcttgtcttgttaaaccctaaagagagtgtccttaatagcaatcagcacttgtaagcttatatactggtgca

SEQ ID NO: 427012 - DNA, 120 bp, Artificial Sequence
  ENSG00000151612_39 (sequence is synthesized)
tttggttttctgttgggtgaatgcggtgtgtgggcgtttgtggattctgaaagagaaagccgtgtgtcgtgtgccatgacatttctattgcacattctttgtactggcttctttaacagc

SEQ ID NO: 427013 - DNA, 120 bp, Artificial Sequence
  ENSG00000151612_40 (sequence is synthesized)
gatgaacgttcttttccctcctgggttgttcatccacgacagtctctccctgtgctccttcatcacctttccctctctctttgatggctacagagtggtagggcctggtgcttagtcgat

SEQ ID NO: 427014 - DNA, 120 bp, Artificial Sequence
  ENSG00000151612_41 (sequence is synthesized)
gaaggaatggtagccatctacagtgctgctggagatttccgccagagcgctggagaccttgcgctcagatcttctctggtgatgaagaggcgaggaatcaagtgactgatctggaagaaa

SEQ ID NO: 427015 - DNA, 120 bp, Artificial Sequence
  ENSG00000151612_42 (sequence is synthesized)
tatctcgcagcactgcagctaacatcacagaacttaagtgtgttttgtgtgtgtgcccacacgtagacaaatgtgtacggtgcacacacacagtgcatcattttttaagggcagattata

SEQ ID NO: 427016 - DNA, 120 bp, Artificial Sequence
  ENSG00000151612_43 (sequence is synthesized)
tatatatatgagatgtattaattcagtggttaccatttgtttgcaggaaaaagaaatgtatgggtgaaaaaatttatggttgataaatccagccaaggagattaaaaggggtttggataa

SEQ ID NO: 427017 - DNA, 120 bp, Artificial Sequence
  ENSG00000151612_44 (sequence is synthesized)
attctgggtataaatgctcagactaaaaaaaagaaatggcagttttgcacagtgctatggtcttgcactagtttttgtttctcatctgaaaaaaaaaaagtaaaataaaaggaagaaaat

SEQ ID NO: 427018 - DNA, 120 bp, Artificial Sequence
  ENSG00000151612_45 (sequence is synthesized)
gtaccttttttatggaatgagtagactgtatgtttgaagatttagccacaacctctttgacatataatgacgcaacaaaaaggtgctgtttagtcctatggttcagtttatgcccctgac

SEQ ID NO: 427019 - DNA, 120 bp, Artificial Sequence
  ENSG00000151612_46 (sequence is synthesized)
aagtttccattgtgttttgccgatcttctggctaatcgtggtatcctccatgttattagtaattctgtattccattttgttaacgcctggtagatgtaacctgctaggaggctaacttta

SEQ ID NO: 427020 - DNA, 120 bp, Artificial Sequence
  ENSG00000151612_47 (sequence is synthesized)
tacttatttaaaagctcttattttgtggtcattaaaatggcaatttatgtgcagcactttattgcagcaggaagcaggtgtgggttggttgtaaagctctttgctaatcttaaaaagtaa

SEQ ID NO: 427021 - DNA, 120 bp, Artificial Sequence
  ENSG00000151612_48 (sequence is synthesized)
tgggtgatttaaaaagaaaaaaggaaaaaaatctttggctgaatatgttcattgcttgtatttttaaaacaacagaatttccagtatgaaacaggctgaaagagcaggaagaaatgttct

SEQ ID NO: 427022 - DNA, 120 bp, Artificial Sequence
  ENSG00000151612_49 (sequence is synthesized)
ttgtataataatgggaagtttggaatataaaagtttatatattatttatctattggagaactggtgtacaggaggaacattttcttactgtgttgctgttttccatcatgtgttatccta

SEQ ID NO: 427023 - DNA, 120 bp, Artificial Sequence
  ENSG00000151612_50 (sequence is synthesized)
agagttggggttttttaaaatctgtttcaccaggggaaaataaaagcatccctaatgttcttcctctagtcagtttgctttgctgaaagctccctggaaattagtacagttctacaggaa

SEQ ID NO: 427024 - DNA, 120 bp, Artificial Sequence
  ENSG00000151612_51 (sequence is synthesized)
gccagaagactgtactgtctgtccacaccatggtctcctcagtcccctccacgccagcccctcttccccacacctagtaggtgtgctacacctccctttgccagtcatcccgccatggat

SEQ ID NO: 427025 - DNA, 120 bp, Artificial Sequence
  ENSG00000151612_52 (sequence is synthesized)
ggggagcctacttggtgccctggcaaacctgtttacactaaggagatgcccacagggagcgggaagctcccaaaccctcagtcattctccagcagagacctttgctcttggccaggtttg

SEQ ID NO: 427026 - DNA, 120 bp, Artificial Sequence
  ENSG00000151612_53 (sequence is synthesized)
aaacgatgttcaacctcgccacgtcaatgtctcagtaaaagacactatagatagttatggacaatacactccaagaatactgggcttatgggtgggttggttttttgttttgttttgttt

SEQ ID NO: 427027 - DNA, 120 bp, Artificial Sequence
  ENSG00000151612_54 (sequence is synthesized)
tgttttcaagtcatgtctttatccccatataatggagaatgtgccacttggctaataatgtgttttcaaaactacaagttcagtgatgacaggaaagagggctaaagtagtcccacagag

SEQ ID NO: 427028 - DNA, 120 bp, Artificial Sequence
  ENSG00000151612_55 (sequence is synthesized)
gctggtagaaaaggcgaatcacacttaagcaccagcaggttaaaaacctgaaagggtggccctgacaattcagactataggttttacagcatgccacttgtgcaataggaggtctagggt

SEQ ID NO: 427029 - DNA, 120 bp, Artificial Sequence
  ENSG00000151612_56 (sequence is synthesized)
tgaaactttcaagaacgagaggaggtgaaggaaggagacgtttactgctcaaatgccatgcatttcactgcttgccactgaacttgtatttgaatgacttagtaatgcttaatataattg

SEQ ID NO: 427030 - DNA, 120 bp, Artificial Sequence
  ENSG00000151612_57 (sequence is synthesized)
ggcaacttttttagcactttggaaagagtcatcaatctttctggtaaattataaaagttttctgagtgagaaaaggtgtgtttggagtttgtttgactttttatattattattgttatta

SEQ ID NO: 427031 - DNA, 120 bp, Artificial Sequence
  ENSG00000151612_58 (sequence is synthesized)
ataaagaaaaaaatctacagcatttttcagactccaccctagaaaatatgtacccctgaatttggtttgcagtttgatactcagggaaggatgtattccatagatatcctttccgtataa

SEQ ID NO: 427032 - DNA, 120 bp, Artificial Sequence
  ENSG00000151612_59 (sequence is synthesized)
aacactaacatctttgagaaattcacctaccaactaacttcaattgttgtcactatgcattcttcaatgaaaactagcttatttttccatatagtaatgcagttagggttctcagcactt

SEQ ID NO: 427033 - DNA, 120 bp, Artificial Sequence
  ENSG00000151612_60 (sequence is synthesized)
tctttcttctatcctttttttaactcttcatattatgttcagatgatcatactgtcaaggtttgtgtacattactgaaaatttgtattgtataaagctttttgcattacgaggctgtaca

SEQ ID NO: 427034 - DNA, 120 bp, Artificial Sequence
  ENSG00000151612_61 (sequence is synthesized)
gggtcattttgacagtaactggtatattcctttgcatcttatgttgcattgccaatttctagtgtatccagtttgaaagtataatatactctaattaaaaaaaaaaaaaggttggctata

SEQ ID NO: 427035 - DNA, 120 bp, Artificial Sequence
  ENSG00000151612_62 (sequence is synthesized)
gggggcgtgtggggggagggagaggaggcaggaatcctgagggggtcaggggaggtctgccgtgcttggacaaaatgggcttcagtgttctctgcgaacttgcccttagatggcaacttt

SEQ ID NO: 427036 - DNA, 76 bp, Artificial Sequence
  ENSG00000151612_63 (sequence is synthesized)
accacacttggctaatttttatatttttggtagagatgcggtttcaccatagccttgaccttcaaaagtgctggga

SEQ ID NO: 427037 - DNA, 120 bp, Artificial Sequence
  ENSG00000151612_64 (sequence is synthesized)
gggattataggtgtgagccaccatgcttggcctatttttttaaacctttcatttgaaagaaatttgagtaaaattgagagataagcaaaaatttattagtccactcatagtccttccagc

SEQ ID NO: 427038 - DNA, 120 bp, Artificial Sequence
  ENSG00000151612_65 (sequence is synthesized)
agtccttccagcctcacaggacttaacactgatcagcaatgtggtcggttttatgtaataatatccagcttattacaaaaactacattacaaactgaggctatagttgagaatccagagg

SEQ ID NO: 427039 - DNA, 120 bp, Artificial Sequence
  ENSG00000151612_66 (sequence is synthesized)
tgaacaaattcaggaaaaatgcctcaggccttcatccaaatatacttatattagttttcttgggttgctgtaataaagtatcacaaaccagtgcttaaacaacagaaatttattgtctca

SEQ ID NO: 427040 - DNA, 120 bp, Artificial Sequence
  ENSG00000151612_67 (sequence is synthesized)
caattctggaggctaaaagtctgagctcaaggtgtccacaaggccactctcgctctgaaggcggtagggaagggtctgttccagacctctcgcccagcttctggtagtttctaggcttat

SEQ ID NO: 427041 - DNA, 120 bp, Artificial Sequence
  ENSG00000151612_68 (sequence is synthesized)
gatagcataactcatctcatggtgttcttcctgtgtgcatgtgtgtctctgcatccaaatttcccccttttataaggacaccagtcatactggatttgagtccaccccaatgacctcatc

SEQ ID NO: 427042 - DNA, 120 bp, Artificial Sequence
  ENSG00000151612_69 (sequence is synthesized)
ttcacttgattatctgcagaagcctatttcccaataaggtcacagtcacatgtactgggggttagaacttcaatatcttttgagagaacacaattcaactcatgatactaggtattcatt

SEQ ID NO: 427043 - DNA, 120 bp, Artificial Sequence
  ENSG00000151612_70 (sequence is synthesized)
ccaagtttgtacacagttttaataagcctggtgatttttatctcagtttatgcatacaaagagttataagtataggagaaagagtctctgctgaggatataatggagaacaaaagtattc

SEQ ID NO: 427044 - DNA, 120 bp, Artificial Sequence
  ENSG00000151612_71 (sequence is synthesized)
aaaaagactattaaagtaggaataagaacttaaaatacatagttgctttgggccactcaatggagggacaaactgctgaaaagttccagtagctcctgaaacacatttatatataacaaa

SEQ ID NO: 427045 - DNA, 120 bp, Artificial Sequence
  ENSG00000151612_72 (sequence is synthesized)
cataataacagcatcaacatattatgtttgagtgtgtgtgcacttttaaatcccatcaaattaaattttgaaaatattgcgtacttgatggcactttgataatttttggttacctgaaaa

SEQ ID NO: 427046 - DNA, 120 bp, Artificial Sequence
  ENSG00000151612_73 (sequence is synthesized)
attattcttttgtcaagctcctcacatattgtcagatgttctgaatatttgggtttcaacttggctttgtcactcagtaagcatgcatgttgtgtaagccattaactttttggaacttgg

SEQ ID NO: 427047 - DNA, 120 bp, Artificial Sequence
  ENSG00000151612_74 (sequence is synthesized)
gttttttggtctgtaaaatgaaaagtttggtttcctatataaaattattgtgaggatgaaatttgctgatgaatatgaaaacatctatcatagctccagatgtgttttcatgattgttca

SEQ ID NO: 427048 - DNA, 120 bp, Artificial Sequence
  ENSG00000151612_75 (sequence is synthesized)
ttcattcaacaaatgtttattgggagcctactgtatgcagtggcttgttctagaattcattcattcacttaatgctgattgaaaagtaccatgatttagtagtattgggacatctgagct

SEQ ID NO: 427049 - DNA, 120 bp, Artificial Sequence
  ENSG00000151612_76 (sequence is synthesized)
caagcactgcctatgtttggaaatcatctaggggaccttgggcaaatctatggccctctctaggcctctaactagagactagtcatatagagtagatttccaaggcttttccatctgtaa

SEQ ID NO: 427050 - DNA, 120 bp, Artificial Sequence
  ENSG00000151612_77 (sequence is synthesized)
aataattcatataacaaacttcaagtataatgaatagtttttgatatcgtacagattaattgtattatactggcaagttactttatcctctgcgcctttgcttttgtctttgaaagtggg

SEQ ID NO: 427051 - DNA, 120 bp, Artificial Sequence
  ENSG00000151612_78 (sequence is synthesized)
gttaataggtctagtactgttttctggttagtaatagcagtaataatgatagtcacccattattgagctcttggcattgtgctagatatttttatacattcttgcttctacaaacacggt

SEQ ID NO: 427052 - DNA, 120 bp, Artificial Sequence
  ENSG00000151612_79 (sequence is synthesized)
acatgtttctccaaagcatgtcggtacctggagaaacaggttgcatctttctagagaataaagtttccttgatggcacagctgtttatagagtggaatgcagaagtcacttgaaatgtta

SEQ ID NO: 427053 - DNA, 120 bp, Artificial Sequence
  ENSG00000151612_80 (sequence is synthesized)
agctaaaactcaaagaaagttggggcttcttagagggggcggcgactttaataccaagttcccctgcagtgttgttctttcttggcctttggggaaactggtggaaaagtttgcaaaaca

SEQ ID NO: 427054 - DNA, 120 bp, Artificial Sequence
  ENSG00000151612_81 (sequence is synthesized)
ggctttttccctgttccatgtttgactcacatgagaaaaatagcattctaatttacaattttgaaaatagttcttatttccatcactgacagatgttacctttatgattgttcagcctat

SEQ ID NO: 427055 - DNA, 120 bp, Artificial Sequence
  ENSG00000151612_82 (sequence is synthesized)
tcttccatttcatttatgcattggacaaataataattgactgcctgctctgtgttcagtaccaacctaaatgccgaggatgcagcagcaaccaaaataaagtcctccctcggagcttgta

SEQ ID NO: 427056 - DNA, 120 bp, Artificial Sequence
  ENSG00000151612_83 (sequence is synthesized)
ttctaaaaaacagtgaggtttgagggcagacctgaggaattaggggaattaagcatgtggctgtttcaggcagaggaagagcaattgcaaaggccctgaggcaggagcttattttcctag

SEQ ID NO: 427057 - DNA, 120 bp, Artificial Sequence
  ENSG00000151612_84 (sequence is synthesized)
taagggagagtgttaggagaggaggtcacaaggagatgattagggatgccttgaggttcaggtaagagttttgtattttatactgagaaacatgggaaaccattgtggaagtttgagaac

SEQ ID NO: 427058 - DNA, 120 bp, Artificial Sequence
  ENSG00000151612_85 (sequence is synthesized)
ttactttggctgctggttgagaataatggagcaaggttgggaagtgaggagaccagttggaaggctactgccatagtacaggtgggggatgacagcactgggtaccaggttagtagtagt

SEQ ID NO: 427059 - DNA, 120 bp, Artificial Sequence
  ENSG00000151612_86 (sequence is synthesized)
ggtggaaatggtgcaaagtggccagatttggtacctctgttgaaggtagaaccaacggaatccgagaatgaattggatgtggggtctgagagaaagagaagagtcaagggaggtggcatg

SEQ ID NO: 427060 - DNA, 120 bp, Artificial Sequence
  ENSG00000151612_87 (sequence is synthesized)
gttttgggtctaagtaattgaaaggatggaggagttgccattcctgctgagacgggcaggtagagggaggaacacgggcagttcctcggccatggaaggtctggctaagcactttatatg

SEQ ID NO: 427061 - DNA, 120 bp, Artificial Sequence
  ENSG00000151612_88 (sequence is synthesized)
aagaatactgaaactgacttagctactttttcgaactcactctgcagaggagtgatgcgttcatttgtgttacctttattttactcacggtcatttagaataatgatttgaaaatgttgc

SEQ ID NO: 427062 - DNA, 120 bp, Artificial Sequence
  ENSG00000151612_89 (sequence is synthesized)
tgtgtgccaaatgctcgtcttgacccaggagcccctccctccccccgtgtgtggactactctcgtctccagacttcctctcacttcctcatgcctttgcagcaccttttccctagctgga

SEQ ID NO: 427063 - DNA, 120 bp, Artificial Sequence
  ENSG00000151612_90 (sequence is synthesized)
ctggtgacaggaatctggttgtcttctgcaccctggcagttttaaataactagcagttcttacattttcttcctgggcacgctgacagcggttgggtgtcctggacatccgtgtttcgat

SEQ ID NO: 427064 - DNA, 120 bp, Artificial Sequence
  ENSG00000151612_91 (sequence is synthesized)
aactgtaatctccgagtctctgtcctgtgaagcccattgccggccgtgcatttacctcagactgtggacttggagccttgaagacgcgagaggaactgagaaaattcccttattgcttca

SEQ ID NO: 427065 - DNA, 120 bp, Artificial Sequence
  ENSG00000151612_92 (sequence is synthesized)
tgcggtcctgctggttttctgtcatttacaaccacaggagcccagatacccctactatgagcagggaatcaagaaggaacacaaaaatgactaactcatagccttgcctccagatgttag

SEQ ID NO: 427066 - DNA, 120 bp, Artificial Sequence
  ENSG00000151612_93 (sequence is synthesized)
caccactcgatagcctttccgccctgcaagagagacgtgacacttgagggggaggtttctttcatgtgaccctgcgcccccagcacatgctacacggctcctctgaaaggggacacgata

SEQ ID NO: 427067 - DNA, 120 bp, Artificial Sequence
  ENSG00000151612_94 (sequence is synthesized)
gagggaagattatgtccgtttgctataaagataaatgtcacacattgactgaattctctttgaagctactgttctgttgcagctaagaataaaataaatggtttttattttaaagacaaa

SEQ ID NO: 427068 - DNA, 120 bp, Artificial Sequence
  ENSG00000151612_95 (sequence is synthesized)
gtttcttgtagaaggccaacaagattcccaggatgccagactcctgtttaaaagaaataacagggagagtttcagagagagggtctccaaaacatcttattgtactgaataaaatgtaaa

SEQ ID NO: 427069 - DNA, 120 bp, Artificial Sequence
  ENSG00000151612_96 (sequence is synthesized)
caccggtgggctcaagtaaggaaagcaatttatgttctaggatgaccaagtagaagaatactttgaaaaaattgataatgccttctggctatacactcaggacagtggtgagtttcagac

SEQ ID NO: 427070 - DNA, 120 bp, Artificial Sequence
  ENSG00000151612_97 (sequence is synthesized)
atgggtgagccagggcaattccatctctaccgggaaaaccacagacaggccctttctgattctgacccaggcagggcacaacacacagaaagaatagagcaagaggaaaatgtactgcac

SEQ ID NO: 427071 - DNA, 120 bp, Artificial Sequence
  ENSG00000151612_98 (sequence is synthesized)
agctgtcctcctctacgggtttaacagtgtttcaaagatgatgtttcatttattccccccaaatataaaacccataggcagaagccctttcttttcagaagacacatttagacaatcacc

SEQ ID NO: 427072 - DNA, 120 bp, Artificial Sequence
  ENSG00000151612_99 (sequence is synthesized)
atgtctaaattgcttttctgtgatggaactgcttgtactctatatcctgttcataatgcagatcaaataagattatactattatttttcttttgccgtagctcaggacagtggtgagttt

SEQ ID NO: 427073 - DNA, 120 bp, Artificial Sequence
  ENSG00000151612_100 (sequence is synthesized)
cagactcctctaggtaaggcccagcttggcgtaggggttgtgtgtgcacctgacctgggaatgggctttatatttctctcgtgtgcactcttctgtgagctgaggttcaaaggctaacgg

SEQ ID NO: 427074 - DNA, 120 bp, Artificial Sequence
  ENSG00000151612_101 (sequence is synthesized)
cgagcttggcgctgaggaggccgtgcacggtgcacttggttgtgttgggctctgctgaacacctctccagaccctccgaggacagtccactcctgagccctgccctgcaggagccaagca

SEQ ID NO: 427075 - DNA, 120 bp, Artificial Sequence
  ENSG00000151612_102 (sequence is synthesized)
agagctgaggcagccacttttgcatctgcattctttgtggaaagagagcaaacacactacagttctcatataagccactgactccagcctggcagcttctaaaagagaggctcagcagag

SEQ ID NO: 427076 - DNA, 120 bp, Artificial Sequence
  ENSG00000151612_103 (sequence is synthesized)
tttgttaacatggcctcaccactcctcgtggcccctctggacagccaggagggttggtggtagcgtagcctcactgcaaaggatggagaaaccgagccacagagaggcccaggctagggt

SEQ ID NO: 427077 - DNA, 120 bp, Artificial Sequence
  ENSG00000151612_104 (sequence is synthesized)
gtccagctccagcctgacaaggtgatggagctgggaccagcatccgcccttccagaatctacctaaattgcctgtagagaccactcaaataatgaaccagtatgtcctgagtgcttaccg

SEQ ID NO: 427078 - DNA, 120 bp, Artificial Sequence
  ENSG00000151612_105 (sequence is synthesized)
tgtgttaagtactctaccaagcactgcagagaatgcagaggaaatgtaagatatggtcctgccctctgagaatttccaatccagttggattattatcctatctccggcataatcatgtat

SEQ ID NO: 427079 - DNA, 120 bp, Artificial Sequence
  ENSG00000151612_106 (sequence is synthesized)
taataatgtcttcgagctccagatagcagttgtctccctccctcctcccttcctcattagcagatgggccgttgggtgggcttccttctcctcccatgcccctgccatagtcctcagctt

SEQ ID NO: 427080 - DNA, 120 bp, Artificial Sequence
  ENSG00000151612_107 (sequence is synthesized)
cctttcctgacaaagagctagtcctgtagggagatatgttttacgagtacatagatatgtacacatgcacacactcacacagagagacacacacaggccttctcatcctaacaaaccctt

SEQ ID NO: 427081 - DNA, 120 bp, Artificial Sequence
  ENSG00000151612_108 (sequence is synthesized)
aataagcacgattctgacccctgtgactttctgtttgctggaggtagcgctccccctataagctgttctttaaaacctcttagcctttctgcgtgtgcttggtgtggtgcatgaaaagtc

SEQ ID NO: 427082 - DNA, 120 bp, Artificial Sequence
  ENSG00000151612_109 (sequence is synthesized)
gattctttgtgttgctcccatctagaggggaggtcaggaggtttagacctctgcgctgtctggtcgggagtggggagggctccgaggggccgggcgggggctggaggggagcaccagcaa

SEQ ID NO: 427083 - DNA, 120 bp, Artificial Sequence
  ENSG00000151612_110 (sequence is synthesized)
attgattcctggcactttctctgctccccttggtgagggctggccttgcctgtatcggccaagagacccagaataggctgagcggaccttgccagagctgcttgtcagcggggactgctc

SEQ ID NO: 427084 - DNA, 120 bp, Artificial Sequence
  ENSG00000151612_111 (sequence is synthesized)
tgtcagcagggagagccaaaaagggccgttccacccctgagaggcggcagggctgggctgggctgggcaggccaggcctcagacactggggggtggtgtgagggaaggctggtgaggcgg

SEQ ID NO: 427085 - DNA, 120 bp, Artificial Sequence
  ENSG00000151612_112 (sequence is synthesized)
cctaccccgtcccttcccgtgaaggttttgggagtcatggagaaggggagcttggtatgagaggagttagtcaggaacccctgctgcctttagctggattgaattagacctgtcccccta

SEQ ID NO: 427086 - DNA, 120 bp, Artificial Sequence
  ENSG00000151612_113 (sequence is synthesized)
gggtgtcaacagatgtcagtaggagaatccattttgcaaataccccgggattcagggcaagaaaaaagacacgttgaaacaacccagcatgcaagaatagactacactgcttgagttttg

SEQ ID NO: 427087 - DNA, 120 bp, Artificial Sequence
  ENSG00000151612_114 (sequence is synthesized)
gagtataagcttttgcttcaaagttgacaacatttggcaactgccctcattccttataataaatggaagataagcagtatccagaactcacaatatgccctaaagccatctgtaattctg

SEQ ID NO: 427088 - DNA, 120 bp, Artificial Sequence
  ENSG00000151612_115 (sequence is synthesized)
tgtcaactacttggttattactcagttaactgttatttgggaaatgtatttaatctctctaggtctgagatctctcatctgcaaaatggggataatactagtgcctacctcaaagggtgg

SEQ ID NO: 427089 - DNA, 120 bp, Artificial Sequence
  ENSG00000151612_116 (sequence is synthesized)
ctgtgagaattagataaattaatacaggtaaatacttggtgtgttacccagctcatgttatgtgctcaataaatgatagatctagctctatccatatgtatctacatatgtctatttgtc

SEQ ID NO: 427090 - DNA, 120 bp, Artificial Sequence
  ENSG00000151612_117 (sequence is synthesized)
gcaccaagcacacttgatacacttgaatctacccttgcatttaatttaaggcaggtatgcccaggggatagctggcaatgtctagagaaattgtttttttcacaactgggaagtactcct

SEQ ID NO: 427091 - DNA, 120 bp, Artificial Sequence
  ENSG00000151612_118 (sequence is synthesized)
ggctactagtgcgtagagatgccaaggatgctgttaaatatcctacaatgtgcaagacagtcccccacccccaactgctcccagcagattatccagtgcagaatatcagtggagtggagg

SEQ ID NO: 427092 - DNA, 120 bp, Artificial Sequence
  ENSG00000151612_119 (sequence is synthesized)
ttgagaaacactaatttaaagtatgtttataggctctagtaggactataattatatatgaacacacatgcataggcctgaattctttgaaaaatcagtgcaaaggcagccacttcattat

SEQ ID NO: 427093 - DNA, 120 bp, Artificial Sequence
  ENSG00000151612_120 (sequence is synthesized)
tgatgacattactacaactgcagctctcctatgagagggggagaaactgcattacaagggctactacacaaaactgaatcaacttggcaacatattagtggtctccagtatgttgatgtt

SEQ ID NO: 427094 - DNA, 120 bp, Artificial Sequence
  ENSG00000151612_121 (sequence is synthesized)
ttatatataatgcagtggatgatgcacgctttgaacttaaattttaaattaattaattttacaatgattttttaaaaacttaaattcaaaacaaacatttgttggaacccctgaagcata

SEQ ID NO: 427095 - DNA, 120 bp, Artificial Sequence
  ENSG00000151612_122 (sequence is synthesized)
tcctagggttccttggaacactgtttgaaaaccattgctctgtagtcccttccaggctcaagagtctttggccttggtttagggtgagatcgtaaataaaattctcagtgggttgctttt

SEQ ID NO: 427096 - DNA, 120 bp, Artificial Sequence
  ENSG00000151612_123 (sequence is synthesized)
tcacagagcagttcagcatttataaaattgccatacgttgaactgaaggagagttctgtcttattaagctcaagaaaaggtgtcattttccttcaccagagggaaccaatagaagtattt

SEQ ID NO: 427097 - DNA, 120 bp, Artificial Sequence
  ENSG00000151612_124 (sequence is synthesized)
attttgcagttgattccttcccttcatcctcctagtcaaatcttctcaggatttcttcctaccagaaaatgtcccttttcttcagacaaaacccacccttccctttctcatgaacagtgc

SEQ ID NO: 427098 - DNA, 120 bp, Artificial Sequence
  ENSG00000151612_125 (sequence is synthesized)
ttaattcacccacatcacttattttccaaagccattgttcacctgctgaggatagtgtcccttttaaaggtacctgggtgtcttggagagaaaggaaggggtttggatgcatttccagtg

SEQ ID NO: 427099 - DNA, 120 bp, Artificial Sequence
  ENSG00000151612_126 (sequence is synthesized)
agaaactctgagccaagtgtctctgtgaattagatctgtgatttggggcatcagtttcttaacctttttaggaccttagtttcctcacctgtaaaatgaagatagtaataacatctgtct

SEQ ID NO: 427100 - DNA, 120 bp, Artificial Sequence
  ENSG00000151612_127 (sequence is synthesized)
cctgtgattgatggaaggtttgatccctatgtaattactcaagagctagttgtatacgttgttaaaacaaatgatggtctttagaaggaagttatatagtattttccctagtaataggga

SEQ ID NO: 427101 - DNA, 120 bp, Artificial Sequence
  ENSG00000151612_128 (sequence is synthesized)
agttatatagtattttcccaattactatataactagaaaatattgtaaaatatatagtattttctagttatacagtaatttcctagaattggaagactggaatcatcttatcccagcagc

SEQ ID NO: 427102 - DNA, 120 bp, Artificial Sequence
  ENSG00000151612_129 (sequence is synthesized)
tttcccattcctttcccacatttgcctttatcttgaattcttcataaatcctcaaaaaagcggatttgtttcctttaaatggtggtccacctccatcaagtacataaactgagaggtatg

SEQ ID NO: 427103 - DNA, 120 bp, Artificial Sequence
  ENSG00000151612_130 (sequence is synthesized)
tgtaattgatcagcagcgtggcccaggtcctacgatgctgggaacaaacagcgagagagggggcctcttgattaccaagggctttctcatcacatcaaaagtgcagttatccagaaactt

SEQ ID NO: 427104 - DNA, 120 bp, Artificial Sequence
  ENSG00000151612_131 (sequence is synthesized)
tcaaataaataaacagaagtcaaggcaggtgttgtgaaagtccttgacaagttgagttccgcacctgcacaaatctttctgtgttagtagtaggaataaagtgaagactatgtcatgagt

SEQ ID NO: 427105 - DNA, 120 bp, Artificial Sequence
  ENSG00000151612_132 (sequence is synthesized)
cataaatggttgcttttctcttagcaatttccccaaagaaaaagaaaacatcttgaattccacctctcactgcacatgtgggtttttttgtaaagtgggataatttaaaagatagtaatt

SEQ ID NO: 427106 - DNA, 120 bp, Artificial Sequence
  ENSG00000151612_133 (sequence is synthesized)
attaagtcatattaattttaaaatataggctttatgtactgttctcaatgtaaatatttttggtcattgaaaaaagcaggttagccttcatatttctatttttacgtcttctattgagac

SEQ ID NO: 427107 - DNA, 120 bp, Artificial Sequence
  ENSG00000151612_134 (sequence is synthesized)
ccaaatgtttgggaaattaaaacttgggcaaatgagtgatttccatatgctcttctgatatgtcattagctatatttacatttcctcagcacattacaattttctgttattctctgtatt

SEQ ID NO: 427108 - DNA, 120 bp, Artificial Sequence
  ENSG00000151612_135 (sequence is synthesized)
gtcagaatgaaaaccaggtatgtagtgccttgcaaatgtataatccagcaatatacagcttgcctattgccttttaaagtgtctttttgaagttctattaaatccaggttgtgctagcaa

SEQ ID NO: 427109 - DNA, 120 bp, Artificial Sequence
  ENSG00000151612_136 (sequence is synthesized)
cagcagtgagggggattgcaaagtagagagaggttggtagaactgtggactgtgaagagatcgagaatagcacagttaactaggcatttgccttcggcagatggcatctgaaactcacag

SEQ ID NO: 427110 - DNA, 120 bp, Artificial Sequence
  ENSG00000151612_137 (sequence is synthesized)
ctgccaccgtcccagagaaacagaataaacacagagcttcacggtgtcctggctgcggttgttgccagtatttctagactgactttcctgagaactaaagaatgctcatgttagccaaga

SEQ ID NO: 427111 - DNA, 120 bp, Artificial Sequence
  ENSG00000151612_138 (sequence is synthesized)
gcgagaggtctcttagtttcaggcagacctggtgtgggggatgtgctaaggctctcaggctacaaagggacaatttaaaacttggcaagtaaaaccggcctaaatgcggatgtgttttat

SEQ ID NO: 427112 - DNA, 120 bp, Artificial Sequence
  ENSG00000151612_139 (sequence is synthesized)
gcttagcatcataaaattgattcagaacagcctgatatgcggcagaagaaacctttattaaacattatagaggtcattgcttttgtcttcctgatacctcttccctctcctttcttctgt

SEQ ID NO: 427113 - DNA, 120 bp, Artificial Sequence
  ENSG00000151612_140 (sequence is synthesized)
gacccacattgagcccattgtagaacccgccccctggcttcagtgataggcccatggaggggaacatgacctccaacaggccaatcagaggcgtaaagacctttctctagtgggaagtca

SEQ ID NO: 427114 - DNA, 120 bp, Artificial Sequence
  ENSG00000151612_141 (sequence is synthesized)
ttgagagtgaaaacccagaaccggttgcagccaggttttcagcctcctgggaaaagtggcctgagaggaagagactagaggcgaatgagagagagccctgatggtgctttcgacatccta

SEQ ID NO: 427115 - DNA, 120 bp, Artificial Sequence
  ENSG00000151612_142 (sequence is synthesized)
ttggtaaggtctacctttgacaaatcaatagtatatttttaaaatgtgaagatagtgtattttataaaaatatacaattttttcattgggttaatttatccaacatatatcacttgaata

SEQ ID NO: 427116 - DNA, 120 bp, Artificial Sequence
  ENSG00000151612_143 (sequence is synthesized)
ctttctccatgactggcatatttcctttttgataatttgctgaggagcaaggctgcttgttaatgaatttttgtctactattaaaatcgccctcatcctttgaggtccatttccaaagcc

SEQ ID NO: 427117 - DNA, 120 bp, Artificial Sequence
  ENSG00000151612_144 (sequence is synthesized)
acctgcacctctggagttcattattccctcttttgtgcttacacaacccttgctgtttctgtatggtggcaccagtcattatgctttgaatgcttgtgaaaccctcactcttctgttgat

SEQ ID NO: 427118 - DNA, 120 bp, Artificial Sequence
  ENSG00000151612_145 (sequence is synthesized)
tagaaacttttatgccagagactgttgtgtctctgtttccctttgcagggaacagttccctgaacatagtaggtgatcagtaaatgcttgttgaattaagtcaattagtagcactggttt

SEQ ID NO: 427119 - DNA, 120 bp, Artificial Sequence
  ENSG00000151612_146 (sequence is synthesized)
tgctaataacttttgtagtaaacttacaaactacttttatgtaaaactgcatgtaaaagttggttgtatgatttgcagcacttattatgagtataactgataatgctaatggaaatgtat

SEQ ID NO: 427120 - DNA, 120 bp, Artificial Sequence
  ENSG00000151612_147 (sequence is synthesized)
gatcttaaaaggcattagatatttagctatagaagtgtattagtaggaaagggaaaacttacaagatttttacatgaaaataaaccagaaggttggttggtaggtaccaggtgaacatac

SEQ ID NO: 427121 - DNA, 120 bp, Artificial Sequence
  ENSG00000151612_148 (sequence is synthesized)
ctgtggtcacaagaagagagtgttggagacactgattgttagagagttgaccgtgagaaagcatctctccaatcctatgccagaaggcaggatcttagttttgttcattctgagtgagag

SEQ ID NO: 427122 - DNA, 120 bp, Artificial Sequence
  ENSG00000151612_149 (sequence is synthesized)
agccctcaagcttcaggctaccctttttgcttttttgacccagctttctccaaggcctgggattcaaaagaccagactcaaaagggctcttgttttattatcatctccctgtcgcatagc

SEQ ID NO: 427123 - DNA, 120 bp, Artificial Sequence
  ENSG00000151612_150 (sequence is synthesized)
tgcatatgttaatatagccacgaaaatttgtattggcttgtgttcccagaaaccaggcaagaactctgacaggaatttaatgtgctccaccttcatcgtagattccttttctgttggact

SEQ ID NO: 427124 - DNA, 120 bp, Artificial Sequence
  ENSG00000151612_151 (sequence is synthesized)
gcttcaggactagggcagggaggggtctggacgcagcagggagtgggtagggctgcagggtggtggatctggggtgggggcgtgctgaaggggctctagatcttcctttacaaatatgga

SEQ ID NO: 427125 - DNA, 120 bp, Artificial Sequence
  ENSG00000151612_152 (sequence is synthesized)
gcaaaagaattaagaatgacgcctaggccttcctcttggattcctgcatctctttctgtttctggtataaatgactacagatgttacctaatcggtaacacatacttggggcacaaacgg

SEQ ID NO: 427126 - DNA, 120 bp, Artificial Sequence
  ENSG00000151612_153 (sequence is synthesized)
agaggccgctggtaaatacgatttgatgatgacgactctgagaagacgctttattttccgagggatccagttgcagtgtggttgcaaatatttgagtaaccagtcaatctgctcaatttt

SEQ ID NO: 427127 - DNA, 120 bp, Artificial Sequence
  ENSG00000151615_0 (sequence is synthesized)
agtttcgggtgccgaggtctgcagctagcggcaagcggagtcaggcatccgttcagactgacagcagaggcggcgaaggagcgcgtagccgagatcaggcgtacagagtccggaggcggc

SEQ ID NO: 427128 - DNA, 120 bp, Artificial Sequence
  ENSG00000151615_1 (sequence is synthesized)
ggcgggtgagctcaacttcgcacagcccttcccagctccagccccggctggcccggcacttctcggagggtcccggcagccgggaccagtgagtgcctctacggaccagcgccccggcgg

SEQ ID NO: 427129 - DNA, 120 bp, Artificial Sequence
  ENSG00000151615_2 (sequence is synthesized)
gcgggaagatgatgatgatgtccctgaacagcaagcaggcgtttagcatgccgcacggcggcagcctgcacgtggagcccaagtactcggcactgcacagcacctcgccgggctcctcgg

SEQ ID NO: 427130 - DNA, 120 bp, Artificial Sequence
  ENSG00000151615_3 (sequence is synthesized)
aagtactcggcactgcacagcacctcgccgggctcctcggctcccatcgcgccctcggccagctcccccagcagctcgagcaacgctggtggtggcggcggcggcggcggcggcggcggc

SEQ ID NO: 427131 - DNA, 120 bp, Artificial Sequence
  ENSG00000151615_4 (sequence is synthesized)
gcagcggcggcgggggctcggaggctatgcggagagcctgtcttccaaccccaccgagcaatatattcggcgggctggatgagagtctgctggcccgcgccgaggctctggcagccgtgg

SEQ ID NO: 427132 - DNA, 120 bp, Artificial Sequence
  ENSG00000151615_5 (sequence is synthesized)
acatcgtctcccagagcaagagccaccaccaccatccaccccaccacagccccttcaaaccggacgccacctaccacactatgaataccatcccgtgcacgtcggccgcctcttcttcat

SEQ ID NO: 427133 - DNA, 84 bp, Artificial Sequence
  ENSG00000151615_6 (sequence is synthesized)
accgcaccaggcgctggagggcgagctgctggagcacctgagtcccgggctggccctgggcgctatggcgggccccgacggcgc

SEQ ID NO: 427134 - DNA, 120 bp, Artificial Sequence
  ENSG00000151615_7 (sequence is synthesized)
ccgggctggccctgggcgctatggcgggccccgacggcgctgtggtgtccacgccggctcacgcgccgcacatggccaccatgaaccccatgcaccaagcagcgctcagcatggcccacg

SEQ ID NO: 427135 - DNA, 120 bp, Artificial Sequence
  ENSG00000151615_8 (sequence is synthesized)
cgcacgggctgccgtcgcacatgggctgcatgagcgacgtggacgccgacccgcgggacctggaggcattcgccgagcgcttcaagcagcgacgcatcaagctgggggtgacccaggcag

SEQ ID NO: 427136 - DNA, 120 bp, Artificial Sequence
  ENSG00000151615_9 (sequence is synthesized)
atgtgggctccgcgctggccaacctcaagatccccggcgtgggctcgcttagccagagcaccatctgcaggttcgagtccctcacactgtcccacaataatatgatcgcgctcaaaccca

SEQ ID NO: 427137 - DNA, 120 bp, Artificial Sequence
  ENSG00000151615_10 (sequence is synthesized)
tcctgcaggcatggctcgaggaggccgagaagtcccaccgcgagaagctcaccaagcctgaactcttcaatggcgcggagaagaagcgcaagcgcacgtccatcgctgcgccagagaagc

SEQ ID NO: 427138 - DNA, 120 bp, Artificial Sequence
  ENSG00000151615_11 (sequence is synthesized)
gctcgctcgaagcctactttgccattcagcctcggccctcctctgaaaagatcgccgccatcgcggagaagctggacctgaagaaaaacgtggtgcgcgtctggttctgcaaccagaggc

SEQ ID NO: 427139 - DNA, 120 bp, Artificial Sequence
  ENSG00000151615_12 (sequence is synthesized)
agaaacagaaaagaatgaaatattccgccggcatttagaagactcttggcctctccagagacgcccctttcctcgtccgctcttttctctcctctcttctgcctcttttcacttttggcg

SEQ ID NO: 427140 - DNA, 120 bp, Artificial Sequence
  ENSG00000151615_13 (sequence is synthesized)
gaatctcgacaaatcgaggactgaagagggagcgaacgagcgaacaactgagcccaagccggtgagaatgtgaaacagtttctcaaaggaaagaataacaaaagatggtatttgtctgtt

SEQ ID NO: 427141 - DNA, 120 bp, Artificial Sequence
  ENSG00000151615_14 (sequence is synthesized)
gtagcaaagttgtccctttgaaccccacctcggcttcttcagaggaagtgtggagatggctgtttgcaggaaggcagacgagacagtgtttaaaaagtccacaagaatgatcaagtaaga

SEQ ID NO: 427142 - DNA, 120 bp, Artificial Sequence
  ENSG00000151615_15 (sequence is synthesized)
tttgtttttattcttacagacatcacccgtgttcaagtttaaaagtacactttgcaactatttttcagaaatagaaattgattcaggactaaaactttaaactagagttgatgcttaatg

SEQ ID NO: 427143 - DNA, 120 bp, Artificial Sequence
  ENSG00000151615_16 (sequence is synthesized)
tgatagagacatctctaaagtattttgaattttaaaaaaagatggcagattttctgcatttacactgtatattatatatatatttttattgtggttcttacccccttttccttctctgaa

SEQ ID NO: 427144 - DNA, 120 bp, Artificial Sequence
  ENSG00000151615_17 (sequence is synthesized)
gtgttaatgcttaagaaaagagttgcgcctgctgtgttcactgatcttgaaagctattattagattattgcagaacaaccctctgtaaattattaatttatctctctagcaacttaattt

SEQ ID NO: 427145 - DNA, 120 bp, Artificial Sequence
  ENSG00000151615_18 (sequence is synthesized)
tgtgcacattctaattaattaaacttcttccgtctaaaaaaagtgggggaaatgtatagctagtaacgttcaaaaaattttgtttgatgagtttaccgaatttttacagctttcctccta

SEQ ID NO: 427146 - DNA, 120 bp, Artificial Sequence
  ENSG00000151615_19 (sequence is synthesized)
tactgtgttccttttgacccatttgtatattctcacttgaatgaagattgtttttttctttgtttttactggtagtgttctgatttgtgagtcgacactcagtaatggatgtcttaatcg

SEQ ID NO: 427147 - DNA, 120 bp, Artificial Sequence
  ENSG00000151615_20 (sequence is synthesized)
tgtagacctgattcactgtctgaagtattgtttacttcgttacatatttaatggggattcccacattgtccccatgacacatgagcgctctcacttacccttacacacacacacacacac

SEQ ID NO: 427148 - DNA, 120 bp, Artificial Sequence
  ENSG00000151615_21 (sequence is synthesized)
acacacacctctaacagaagggaagaagcagttggaagcatgaccgatgcaccattttctagttttaggtgcatttgccacttggtgtttgcccttcagattttagatttcaccaaggta

SEQ ID NO: 427149 - DNA, 120 bp, Artificial Sequence
  ENSG00000151615_22 (sequence is synthesized)
tttcagtcttccagttttcaattgctttgttggctacatgttaatatttataggaatacttcagtttttccttttggaggtttgtttgtagaaaaactaatttgaactataagaaagaca

SEQ ID NO: 427150 - DNA, 120 bp, Artificial Sequence
  ENSG00000151615_23 (sequence is synthesized)
gtgcactgcttgtaaattcacattgtttggaaaaattcttttggaacaaaaaattaggtacatgataactggtaccttatctactgtaaatatttcattaaaaatgatgcacacatagat

SEQ ID NO: 427151 - DNA, 120 bp, Artificial Sequence
  ENSG00000151615_24 (sequence is synthesized)
atattcttacaaattttgctgtattgctgttctctttgaggctctccaaagtcttgagttctgtatatggcctggtttcttgtttttattaatagatggtttatttactatggtaatgta

SEQ ID NO: 427152 - DNA, 120 bp, Artificial Sequence
  ENSG00000151615_25 (sequence is synthesized)
ttaatttatttttggtgttgttcgattgtctttcattgaagagataattttaatgttttattggcaacgtatgctgctttttcattaaaatatgctattaaaattaaatggcttttaaaa

SEQ ID NO: 427153 - DNA, 120 bp, Artificial Sequence
  ENSG00000151617_0 (sequence is synthesized)
gggggcggcagctttgtgctttttagtggccgcgtcccaggatagctggaaggttaggacgctcttgcggtcccagagtggagtggaaggtctggagctttgggaggagacggggaggac

SEQ ID NO: 427154 - DNA, 120 bp, Artificial Sequence
  ENSG00000151617_1 (sequence is synthesized)
agactggaggcgtgttcctccggagttttctttttcgtgcgagccctcgcgcgcgcgtacagtcatcccgctggtctgacgattgtggagaggcggtggagaggcttcatccatcccacc

SEQ ID NO: 427155 - DNA, 120 bp, Artificial Sequence
  ENSG00000151617_2 (sequence is synthesized)
cggtcgtcgccggggattggggtcccagcgagacctccccgggagaagcagtgcccaggaggttttctgaagccggggaagctgtgcagccgaagccgccgccgcgccggagcccgggac

SEQ ID NO: 427156 - DNA, 120 bp, Artificial Sequence
  ENSG00000151617_3 (sequence is synthesized)
accggccaccctccgcgccacccaccctcgccggctccggcttcctctggcccaggcgccgcgcggacccggcagctgtctgcgcacgccgagctccacggtgaaaaaaaagtgaaggtg

SEQ ID NO: 427157 - DNA, 120 bp, Artificial Sequence
  ENSG00000151617_4 (sequence is synthesized)
taaaagcagcacaagtgcaataagagatatttcctcaaatttgcctcaagatggaaaccctttgcctcagggcatccttttggctggcactggttggatgtgtaatcagtgataatcctg

SEQ ID NO: 427158 - DNA, 120 bp, Artificial Sequence
  ENSG00000151617_5 (sequence is synthesized)
agagatacagcacaaatctaagcaatcatgtggatgatttcaccacttttcgtggcacagagctcagcttcctggttaccactcatcaacccactaatttggtcctacccagcaatggct

SEQ ID NO: 427159 - DNA, 120 bp, Artificial Sequence
  ENSG00000151617_6 (sequence is synthesized)
caatgcacaactattgcccacagcagactaaaattacttcagctttcaaatacattaacactgtgatatcttgtactattttcatcgtgggaatggtggggaatgcaactctgctcagga

SEQ ID NO: 427160 - DNA, 120 bp, Artificial Sequence
  ENSG00000151617_7 (sequence is synthesized)
tcatttaccagaacaaatgtatgaggaatggccccaacgcgctgatagccagtcttgcccttggagaccttatctatgtggtcattgatctccctatcaatgtatttaagctgctggctg

SEQ ID NO: 427161 - DNA, 120 bp, Artificial Sequence
  ENSG00000151617_8 (sequence is synthesized)
ggcgctggccttttgatcacaatgactttggcgtatttctttgcaagctgttcccctttttgcagaagtcctcggtggggatcaccgtcctcaacctctgcgctcttagtgttgacaggt

SEQ ID NO: 427162 - DNA, 120 bp, Artificial Sequence
  ENSG00000151617_9 (sequence is synthesized)
acagagcagttgcctcctggagtcgtgttcagggaattgggattcctttggtaactgccattgaaattgtctccatctggatcctgtcctttatcctggccattcctgaagcgattggct

SEQ ID NO: 427163 - DNA, 120 bp, Artificial Sequence
  ENSG00000151617_10 (sequence is synthesized)
tcgtcatggtaccctttgaatataggggtgaacagcataaaacctgtatgctcaatgccacatcaaaattcatggagttctaccaagatgtaaaggactggtggctcttcgggttctatt

SEQ ID NO: 427164 - DNA, 120 bp, Artificial Sequence
  ENSG00000151617_11 (sequence is synthesized)
tctgtatgcccttggtgtgcactgcgatcttctacaccctcatgacttgtgagatgttgaacagaaggaatggcagcttgagaattgccctcagtgaacatcttaagcagcgtcgagaag

SEQ ID NO: 427165 - DNA, 120 bp, Artificial Sequence
  ENSG00000151617_12 (sequence is synthesized)
tggcaaaaacagttttctgcttggttgtaatttttgctctttgctggttccctcttcatttaagccgtatattgaagaaaactgtgtataacgagatggacaagaaccgatgtgaattac

SEQ ID NO: 427166 - DNA, 120 bp, Artificial Sequence
  ENSG00000151617_13 (sequence is synthesized)
ttagtttcttactgctcatggattacatcggtattaacttggcaaccatgaattcatgtataaaccccatagctctgtattttgtgagcaagaaatttaaaaattgtttccagtcatgcc

SEQ ID NO: 427167 - DNA, 120 bp, Artificial Sequence
  ENSG00000151617_14 (sequence is synthesized)
tctgctgctgctgttaccagtccaaaagtctgatgacctcggtccccatgaacggaacaagcatccagtggaagaaccacgatcaaaacaaccacaacacagaccggagcagccataagg

SEQ ID NO: 427168 - DNA, 120 bp, Artificial Sequence
  ENSG00000151617_15 (sequence is synthesized)
acagcatgaactgaccacccttagaagcactcctcggtactcccataatcctctcggagaaaaaaatcacaaggcaactgtgagtccgggaatctcttctctgatccttcttccttaatt

SEQ ID NO: 427169 - DNA, 120 bp, Artificial Sequence
  ENSG00000151617_16 (sequence is synthesized)
cactcccacacccaagaagaaatgctttccaaaaccgcaagggtagactggtttatccacccacaacatctacgaatcgtacttctttaattgatctaatttacatattctgcgtgttgt

SEQ ID NO: 427170 - DNA, 120 bp, Artificial Sequence
  ENSG00000151617_17 (sequence is synthesized)
ctacttttgcatgaaaatagagctttcaagtacatggctagcttttatggcagttctggtgaatgttcaatgggaactggtcaccatgaaactttagagattaacgacaagattttctac

SEQ ID NO: 427171 - DNA, 120 bp, Artificial Sequence
  ENSG00000151617_18 (sequence is synthesized)
tttttttaagtgatttttttgtccttcagccaaacacaatatgggctcaagtcacttttatttgaaatgtcatttggtgccagtattttttaactgcataatagcctaacatgattattt

SEQ ID NO: 427172 - DNA, 120 bp, Artificial Sequence
  ENSG00000151617_19 (sequence is synthesized)
gaacttatttacacatagtttgaaaaaaaaaagacaaaaatagtattcaggtgagcaattagattagtattttccacgtcactgtttatttttttaaaacacaaattctaaagctacaac

SEQ ID NO: 427173 - DNA, 120 bp, Artificial Sequence
  ENSG00000151617_20 (sequence is synthesized)
aaatactacaggcccttaaagcacagtctgatgacacatttggcagtttaatagatgttactcaaagaattttttaagaactgtattttattttttaaatggtgttttattacaagggac

SEQ ID NO: 427174 - DNA, 120 bp, Artificial Sequence
  ENSG00000151617_21 (sequence is synthesized)
cttgaacatgttttgtatgttaaattcaaaagtaatgcttcaatcagatagttctttttcacaagttcaatctgtttttcatgtaaattttgtatgaaaaatcaatgtcaagtaccaaaa

SEQ ID NO: 427175 - DNA, 120 bp, Artificial Sequence
  ENSG00000151617_22 (sequence is synthesized)
tgttaatgtatgtgtcatttaactctgcctgagactttcagtgcactgtatatagaagtctaaaacacacctaagagaaaaagatcgaatttttcagatgattcagaaattttcattcag

SEQ ID NO: 427176 - DNA, 120 bp, Artificial Sequence
  ENSG00000151617_23 (sequence is synthesized)
gtatttgtaatagtgacatatatatgtatatacatatcacctcctattctcttaatttttcttaaaatgttaactggcagtaagtcttttttgatcattcccttttccatataggaaaca

SEQ ID NO: 427177 - DNA, 120 bp, Artificial Sequence
  ENSG00000151617_24 (sequence is synthesized)
taattttgaagtggccagatgagtttatcatgtcagtgaaaaataattacccacaaatgccaccagaacttacgattcttcacttcttggggttttcagtatgaacctaactccccaccc

SEQ ID NO: 427178 - DNA, 120 bp, Artificial Sequence
  ENSG00000151617_25 (sequence is synthesized)
caacatctccctcccacattgtcaccatttcaaagggcccacagtgacttttgctgggcattttcccagatgtttacagactgtgagtacagcagaaaatcttttactagtgtgtgtgtg

SEQ ID NO: 427179 - DNA, 120 bp, Artificial Sequence
  ENSG00000151617_26 (sequence is synthesized)
tatatatataaacaattgtaaatttcttttagcccatttttctagactgtctctgtggaatatatttgtgtgtgtgatatatgcatgtgtgtgatggtatgtatggatttaatctaatct

SEQ ID NO: 427180 - DNA, 120 bp, Artificial Sequence
  ENSG00000151617_27 (sequence is synthesized)
aataattgtgccccgcagttgtgccaaagtgcatagtctgagtaaaatctaggtgattgttcatcatgacaacctgcctcagtccattttaacctgtagcaaccttctgcattcataaat

SEQ ID NO: 427181 - DNA, 120 bp, Artificial Sequence
  ENSG00000151617_28 (sequence is synthesized)
cttgtaatcatgttaccattacaaatgggatataagaggcagcgtgaaagcagatgagctgtggactagcaatatagggttttgtttggttggttggtttgataaagcagtatttggggt

SEQ ID NO: 427182 - DNA, 120 bp, Artificial Sequence
  ENSG00000151617_29 (sequence is synthesized)
catattgtttcctgtgctggagcaaaagtcattacactttgaagtattatattgttcttatcctcaattcaatgtggtgatgaaattgccaggttgtctgatatttctttcagacttcgc

SEQ ID NO: 427183 - DNA, 120 bp, Artificial Sequence
  ENSG00000151617_30 (sequence is synthesized)
cagacagattgctgataataaattaggtaagataatttgttgggccatattttaggacaggtaaaataacatcaggttccagttgcttgaattgcaaggctaagaagtactgcccttttg

SEQ ID NO: 427184 - DNA, 120 bp, Artificial Sequence
  ENSG00000151617_31 (sequence is synthesized)
tgtgttagcagtcaaatctattattccactggcgcatcatatgcagtgatatatgcctataatataagccataggttcacaccattttgtttagacaattgtctttttttcaagatgctt

SEQ ID NO: 427185 - DNA, 120 bp, Artificial Sequence
  ENSG00000151617_32 (sequence is synthesized)
tgtttctttcatatgaaaaaaatgcattttataaattcagaaagtcatagatttctgaaggcgtcaacgtgcattttatttatggactggtaagtaactgtggtttactagcaggaatat

SEQ ID NO: 427186 - DNA, 120 bp, Artificial Sequence
  ENSG00000151617_33 (sequence is synthesized)
ttccaatttctacctttactacatcttttcaacaagtaactttgtagaaatgagccagaagccaaggccctgagttggcagtggcccataagtgtaaaataaaagtttacagaaaccttg

SEQ ID NO: 427187 - DNA, 120 bp, Artificial Sequence
  ENSG00000151623_0 (sequence is synthesized)
attgctctacccaccgtcagcagggcgactgccactgccgggattatcatcctctccatcctcaccgccgatcagccaatattggacttgctggtggcggcggcagcagcggcggcggga

SEQ ID NO: 427188 - DNA, 120 bp, Artificial Sequence
  ENSG00000151623_1 (sequence is synthesized)
gtctagccgttccccttcccccgccccagcctccccaccatgtcctagaaaagcgatggagaccaaaggctaccacagtctccctgaaggtctagatatggaaagacggtggggtcaagt

SEQ ID NO: 427189 - DNA, 120 bp, Artificial Sequence
  ENSG00000151623_2 (sequence is synthesized)
ttctcaggctgtggagcgttcttccctgggacctacagagaggaccgatgagaataactacatggagattgtcaacgtaagctgtgtttccggtgctattccaaacaacagtactcaagg

SEQ ID NO: 427190 - DNA, 120 bp, Artificial Sequence
  ENSG00000151623_3 (sequence is synthesized)
aagcagcaaagaaaaacaagaactactcccttgccttcagcaagacaataatcggcctgggattttaacatctgatattaaaactgagctggaatctaaggaactttcagcaactgtagc

SEQ ID NO: 427191 - DNA, 120 bp, Artificial Sequence
  ENSG00000151623_4 (sequence is synthesized)
tgagtccatgggtttatatatggattctgtaagagatgctgactattcctatgagcagcagaaccaacaaggaagcatgagtccagctaagatttatcagaatgttgaacagctggtgaa

SEQ ID NO: 427192 - DNA, 120 bp, Artificial Sequence
  ENSG00000151623_5 (sequence is synthesized)
attttacaaaggaaatggccatcgtccttccactctaagttgtgtgaacacgcccttgagatcatttatgtctgactctgggagctccgtgaatggtggcgtcatgcgcgccgttgttaa

SEQ ID NO: 427193 - DNA, 120 bp, Artificial Sequence
  ENSG00000151623_6 (sequence is synthesized)
aagccctatcatgtgtcatgagaaaagcccgtctgtttgcagccctctgaacatgacatcttcggtttgcagccctgctggaatcaactctgtgtcctccaccacagccagctttggcag

SEQ ID NO: 427194 - DNA, 120 bp, Artificial Sequence
  ENSG00000151623_7 (sequence is synthesized)
ttttccagtgcacagcccaatcacccagggaactcctctgacatgctcccctaatgttgaaaatcgaggctccaggtcgcacagccctgcacatgctagcaatgtgggctctcctctctc

SEQ ID NO: 427195 - DNA, 120 bp, Artificial Sequence
  ENSG00000151623_8 (sequence is synthesized)
aagtccgttaagtagcatgaaatcctcaatttccagccctccaagtcactgcagtgtaaaatctccagtctccagtcccaataatgtcactctgagatcctctgtgtctagccctgcaaa

SEQ ID NO: 427196 - DNA, 120 bp, Artificial Sequence
  ENSG00000151623_9 (sequence is synthesized)
tattaacaactcaaggtgctctgtttccagcccttcgaacactaataacagatccacgctttccagtccggcagccagtactgtgggatctatctgtagccctgtaaacaatgccttcag

SEQ ID NO: 427197 - DNA, 120 bp, Artificial Sequence
  ENSG00000151623_10 (sequence is synthesized)
ctacactgcttctggcacctctgctggatccagtacattgcgggatgtggttcccagtccagacacgcaggagaaaggtgctcaagaggtcccttttcctaagactgaggaagtagagag

SEQ ID NO: 427198 - DNA, 120 bp, Artificial Sequence
  ENSG00000151623_11 (sequence is synthesized)
tgccatctcaaatggtgtgactggccagcttaatattgtccagtacataaaaccagaaccagatggagcttttagcagctcatgtctaggaggaaatagcaaaataaattcggattcttc

SEQ ID NO: 427199 - DNA, 120 bp, Artificial Sequence
  ENSG00000151623_12 (sequence is synthesized)
attctcagtaccaataaagcaagaatcaaccaagcattcatgttcaggcacctcttttaaagggaatccaacagtaaacccgtttccatttatggatggctcgtatttttcctttatgga

SEQ ID NO: 427200 - DNA, 120 bp, Artificial Sequence
  ENSG00000151623_13 (sequence is synthesized)
tgataaagactattattccctatcaggaattttaggaccacctgtgcccggctttgatggtaactgtgaaggcagcggattcccagtgggtattaaacaagaaccagatgatgggagcta

SEQ ID NO: 427201 - DNA, 120 bp, Artificial Sequence
  ENSG00000151623_14 (sequence is synthesized)
ttacccagaggccagcatcccttcctctgctattgttggggtgaattcaggtggacagtccttccactacaggattggtgctcaaggtacaatatctttatcacgatcggctagagacca

SEQ ID NO: 427202 - DNA, 120 bp, Artificial Sequence
  ENSG00000151623_15 (sequence is synthesized)
atctttccaacacctgagttcctttcctcctgtcaatactttagtggagtcatggaaatcacacggcgacctgtcgtctagaagaagtgatgggtatccggtcttagaatacattccaga

SEQ ID NO: 427203 - DNA, 120 bp, Artificial Sequence
  ENSG00000151623_16 (sequence is synthesized)
aaatgtatcaagctctactttacgaagtgtttctactggatcttcaagaccttcaaaaatatgtttggtgtgtggggatgaggcttcaggatgccattatggggtagtcacctgtggcag

SEQ ID NO: 427204 - DNA, 120 bp, Artificial Sequence
  ENSG00000151623_17 (sequence is synthesized)
ctgcaaagttttcttcaaaagagcagtggaagggcaacacaactatttatgtgctggaagaaatgattgcatcattgataagattcgacgaaagaattgtcctgcttgcagacttcagaa

SEQ ID NO: 427205 - DNA, 120 bp, Artificial Sequence
  ENSG00000151623_18 (sequence is synthesized)
atgtcttcaagctggaatgaatttaggagcacgaaagtcaaagaagttgggaaagttaaaagggattcacgaggagcagccacagcagcagcagcccccacccccacccccacccccgca

SEQ ID NO: 427206 - DNA, 120 bp, Artificial Sequence
  ENSG00000151623_19 (sequence is synthesized)
aagcccagaggaagggacaacgtacatcgctcctgcaaaagaaccctcggtcaacacagcactggttcctcagctctccacaatctcacgagcgctcacaccttcccccgttatggtcct

SEQ ID NO: 427207 - DNA, 120 bp, Artificial Sequence
  ENSG00000151623_20 (sequence is synthesized)
tgaaaacattgaacctgaaattgtatatgcaggctatgacagctcaaaaccagatacagccgaaaatctgctctccacgctcaaccgcttagcaggcaaacagatgatccaagtcgtgaa

SEQ ID NO: 427208 - DNA, 120 bp, Artificial Sequence
  ENSG00000151623_21 (sequence is synthesized)
gtgggcaaaggtacttccaggatttaaaaacttgcctcttgaggaccaaattaccctaatccagtattcttggatgtgtctatcatcatttgccttgagctggagatcgtacaaacatac

SEQ ID NO: 427209 - DNA, 120 bp, Artificial Sequence
  ENSG00000151623_22 (sequence is synthesized)
gaacagccaatttctctattttgcaccagacctagtctttaatgaagagaagatgcatcagtctgccatgtatgaactatgccaggggatgcaccaaatcagccttcagttcgttcgact

SEQ ID NO: 427210 - DNA, 120 bp, Artificial Sequence
  ENSG00000151623_23 (sequence is synthesized)
caaaagccaggctgcatttgaagaaatgaggacaaattacatcaaagaactgaggaagatggtaactaagtgtcccaacaattctgggcagagctggcagaggttctaccaactgaccaa

SEQ ID NO: 427211 - DNA, 120 bp, Artificial Sequence
  ENSG00000151623_24 (sequence is synthesized)
gctgctggactccatgcatgacctggtgagcgacctgctggaattctgcttctacaccttccgagagtcccatgcgctgaaggtagagttccccgcaatgctggtggagatcatcagcga

SEQ ID NO: 427212 - DNA, 120 bp, Artificial Sequence
  ENSG00000151623_25 (sequence is synthesized)
ccagctgcccaaggtggagtcggggaacgccaagccgctctacttccaccggaagtgactgcccgctgcccagaagaactttgccttaagtttccctgtgttgttccacacccagaagga

SEQ ID NO: 427213 - DNA, 120 bp, Artificial Sequence
  ENSG00000151623_26 (sequence is synthesized)
cccaagaaaacctgtttttaacatgtgatggttgattcacacttgttcaacagtttctcaagtttaaagtcatgtcagaggtttggagccgggaaagctgtttttccgtggatttggcga

SEQ ID NO: 427214 - DNA, 120 bp, Artificial Sequence
  ENSG00000151623_27 (sequence is synthesized)
gaccagagcagtctgaaggattccccacctccaatcccccagcgcttagaaacatgttcctgttcctcgggatgaaaagccatatctagtcaataactctgattttgatattttcacaga

SEQ ID NO: 427215 - DNA, 120 bp, Artificial Sequence
  ENSG00000151623_28 (sequence is synthesized)
tggaagaagttttaactatgccgtgtagtttctggtatcgttcgcttgttttaaaagggttcaaggactaacgaacgttttaaagcttacccttggtttgcacataaaacgtatagtcaa

SEQ ID NO: 427216 - DNA, 120 bp, Artificial Sequence
  ENSG00000151623_29 (sequence is synthesized)
aaacacaaaaaaataataaaaaaatatatacagattcctgttgtgtaataacagaactcgtggcgtggggcagcagctgcctctgagccctcgctcgtccacggtcttctgcatcactgg

SEQ ID NO: 427217 - DNA, 120 bp, Artificial Sequence
  ENSG00000151623_30 (sequence is synthesized)
cctcgctcgtccacggtcttctgcatcactggtatacacactcgttagcgtccatttcttatttaattagaatggataagatgatgttaaatgccttggtttgatttctagtatctattg

SEQ ID NO: 427218 - DNA, 120 bp, Artificial Sequence
  ENSG00000151623_31 (sequence is synthesized)
tgttggctttacaaataattttttgcagtcttttgctgtgctgtacattactgtatgtataaattatgaaggacctgaaataaggtataaggatcttttgtaaatgagacacatacaaaa

SEQ ID NO: 427219 - DNA, 120 bp, Artificial Sequence
  ENSG00000151623_32 (sequence is synthesized)
aaaatctttaatggttaataggatgaatgggaaagtatttttgaaagaattctattttgctggagactatttaagtactatctttgtctaaacaaggtaatttttttttgtaaagtgcaa

SEQ ID NO: 427220 - DNA, 120 bp, Artificial Sequence
  ENSG00000151623_33 (sequence is synthesized)
tgtcctgcatgcataatgaaccgtttacagtgtatttaagaaagggaaagctgtgccttttttagcttcatatctaatttaccattattttacagtctctgttgtaaataaccacactga

SEQ ID NO: 427221 - DNA, 120 bp, Artificial Sequence
  ENSG00000151623_34 (sequence is synthesized)
aacctcttcggttgtcttgaaacctttctactttttctgtactttttgttttgttcttggtctcccgcttggggcatttgtgggactccagcacgttttctggcttctgcttcatcctgc

SEQ ID NO: 427222 - DNA, 120 bp, Artificial Sequence
  ENSG00000151623_35 (sequence is synthesized)
tccatcggggaatgacacactgcggtgtctgcagctcctggaaggtgtcatttgacaacacatgtgggagaggaggtccttggagtgctgcagctttgggaaagctgcctcgtttccctt

SEQ ID NO: 427223 - DNA, 120 bp, Artificial Sequence
  ENSG00000151623_36 (sequence is synthesized)
ttcctctagaagcagaaccagctctacgagagtgagactgggaacttgatggctcagagagcatcttttcctcccattttagaaaatcagattttctcctgtgggaaaaaaaaattccat

SEQ ID NO: 427224 - DNA, 120 bp, Artificial Sequence
  ENSG00000151623_37 (sequence is synthesized)
gcactctctctctgttaaagatcagctattcccttctgatcttggaaagaggttctgcactcctggaaccggtcacaggaacgcacagatcatggcaggatgcgctgggacggcccatct

SEQ ID NO: 427225 - DNA, 120 bp, Artificial Sequence
  ENSG00000151623_38 (sequence is synthesized)
tggcaaggttcagtctgaatggcatggagaccgggagatagaggggttttagatttttaaaaggtaggttttaaaaataagttttatacataaacagttttggagaaaaattacagatca

SEQ ID NO: 427226 - DNA, 120 bp, Artificial Sequence
  ENSG00000151623_39 (sequence is synthesized)
tataagcaagacagtggcactaaaatgtttaattcattaatctgtttgtttggcactgatgcaatgtatggcttttctcttgccccaaatcacaaacatatgtatctttggggaaactaa

SEQ ID NO: 427227 - DNA, 120 bp, Artificial Sequence
  ENSG00000151623_40 (sequence is synthesized)
caatatgattgcactaaataaactactttgaatagaggccaaattaatcttttaaaaatgatgataatcatcaggtttactcagtgaaatcatattaattattttccaaaatctaaaagc

SEQ ID NO: 427228 - DNA, 120 bp, Artificial Sequence
  ENSG00000151623_41 (sequence is synthesized)
tgtagctggagaagcccatggccacgaggaagcagcaattaattagatcaacacttttctccagggttcaccatgcaggcaacattaccttgtctttcaaaagacacctgccttatgcaa

SEQ ID NO: 427229 - DNA, 120 bp, Artificial Sequence
  ENSG00000151623_42 (sequence is synthesized)
ggggaaacctgtgaaagctgcactcagagggaggagtttttcttacataatttgcaatttcaggaatttaatttataggcagatctttaaatacagtcaacttacggtgcacagtaatat

SEQ ID NO: 427230 - DNA, 120 bp, Artificial Sequence
  ENSG00000151623_43 (sequence is synthesized)
gaaagccacactttgaaggtaataaatacacagcatgcagactgggagttgctagcaaacaaatggcttacttacaaaagcagcttttagttcagacttagtttttataaaatgggaatt

SEQ ID NO: 427231 - DNA, 120 bp, Artificial Sequence
  ENSG00000151623_44 (sequence is synthesized)
ctgacttacttaaccaggtttgggatggagatggtctgcatcagctttttgtattaacaaagttactggctctttgtgtgtctccaggtaactttgcttgattaaacagcaaagccatat

SEQ ID NO: 427232 - DNA, 120 bp, Artificial Sequence
  ENSG00000151623_45 (sequence is synthesized)
tctaaattcactgttgaatgcctgtcccagtccaaattgtctgtctgctcttatttttgtaccatattgctcttaaaaatcttggtttggtacagttcataattcaccaaaagttcatat

SEQ ID NO: 427233 - DNA, 120 bp, Artificial Sequence
  ENSG00000151623_46 (sequence is synthesized)
aatttaaagaaacactaaattagtttaaaatgaagcaatttatatctttatgcaaaaacatatgtctgtctttgcaaaggactgtaagcagattacaataaatcctttactttaatcacc

SEQ ID NO: 427234 - DNA, 120 bp, Artificial Sequence
  ENSG00000151623_47 (sequence is synthesized)
ctctcagcccctccgcgcccggggtgtcattgggcccgggagacgggagccaacttcaggctgctcagaggaagcccgtgcagtcagtcacctgggtgcaagagcgttgctgcctcgggc

SEQ ID NO: 427235 - DNA, 120 bp, Artificial Sequence
  ENSG00000151623_48 (sequence is synthesized)
tctcccgctgcagggagagcggcactcgctggcctggatgtggttggatttaggggggctccgcagcaggggtttcgtggcggtggcaagcgctgcaacaggtagacggcgagagacgga

SEQ ID NO: 427236 - DNA, 120 bp, Artificial Sequence
  ENSG00000151623_49 (sequence is synthesized)
gtaataacaatagcagagacagggtggggaagctattttcttcccacgattcgattttcttctttgaagaggtagtaattcggttgtacacacttaatattgaagcacatcccaacccaa

SEQ ID NO: 427237 - DNA, 120 bp, Artificial Sequence
  ENSG00000151623_50 (sequence is synthesized)
agaagatggagaaacttctgaagaggcccagggccctaagtgcctgccatagaggccgcagtttcctatggagtgccccctacaccactgacggggcaacacaactatttatgtgctgga

SEQ ID NO: 427238 - DNA, 120 bp, Artificial Sequence
  ENSG00000151623_51 (sequence is synthesized)
cctctgtggattctctgagtgtctctctgggatgaaggtgacttccacccacaccatcttgcgtctgaagcactagttgtgtgagggcagctccattagacgagtacacaactcagttgc

SEQ ID NO: 427239 - DNA, 120 bp, Artificial Sequence
  ENSG00000151632_0 (sequence is synthesized)
ttttcttaggtaagaaacggttgaactggatgcaatttttatcacagcttgtgtaagactgcctctgtccctcctctcacatgccattggttaaccagcagacagtgtgctcaggggcgt

SEQ ID NO: 427240 - DNA, 120 bp, Artificial Sequence
  ENSG00000151632_1 (sequence is synthesized)
tgccagctcattgctcttatagcctgtgagggaggaagaaacatttgctaaccaggccagtgacagaaatggattcgaaataccagtgtgtgaagctgaatgatggtcacttcatgcctg

SEQ ID NO: 427241 - DNA, 120 bp, Artificial Sequence
  ENSG00000151632_2 (sequence is synthesized)
tcctgggatttggcacctatgcgcctgcagaggttcctaaaagtaaagctctagaggccgtcaaattggcaatagaagccgggttccaccatattgattctgcacatgtttacaataatg

SEQ ID NO: 427242 - DNA, 120 bp, Artificial Sequence
  ENSG00000151632_3 (sequence is synthesized)
aggagcaggttggactggccatccgaagcaagattgcagatggcagtgtgaagagagaagacatattctacacttcaaagctttggagcaattcccatcgaccagagttggtccgaccag

SEQ ID NO: 427243 - DNA, 120 bp, Artificial Sequence
  ENSG00000151632_4 (sequence is synthesized)
ccttggaaaggtcactgaaaaatcttcaattggactatgttgacctctatcttattcattttccagtgtctgtaaagccaggtgaggaagtgatcccaaaagatgaaaatggaaaaatac

SEQ ID NO: 427244 - DNA, 120 bp, Artificial Sequence
  ENSG00000151632_5 (sequence is synthesized)
tatttgacacagtggatctctgtgccacatgggaggccatggagaagtgtaaagatgcaggattggccaagtccatcggggtgtccaacttcaaccacaggctgctggagatgatcctca

SEQ ID NO: 427245 - DNA, 120 bp, Artificial Sequence
  ENSG00000151632_6 (sequence is synthesized)
acaagccagggctcaagtacaagcctgtctgcaaccaggtggaatgtcatccttacttcaaccagagaaaactgctggatttctgcaagtcaaaagacattgttctggttgcctatagtg

SEQ ID NO: 427246 - DNA, 120 bp, Artificial Sequence
  ENSG00000151632_7 (sequence is synthesized)
ctctgggatcccatcgagaagaaccatgggtggacccgaactccccggtgctcttggaggacccagtcctttgtgccttggcaaaaaagcacaagcgaaccccagccctgattgccctgc

SEQ ID NO: 427247 - DNA, 120 bp, Artificial Sequence
  ENSG00000151632_8 (sequence is synthesized)
gctaccagctgcagcgtggggttgtggtcctggccaagagctacaatgagcagcgcatcagacagaacgtgcaggtgtttgaattccagttgacttcagaggagatgaaagccatagatg

SEQ ID NO: 427248 - DNA, 120 bp, Artificial Sequence
  ENSG00000151632_9 (sequence is synthesized)
gcctaaacagaaatgtgcgatatttgacccttgatatttttgctggcccccctaattatccattttctgatgaatattaacatggagggcattgcatgaggtctgccagaaggccctgcg

SEQ ID NO: 427249 - DNA, 120 bp, Artificial Sequence
  ENSG00000151632_10 (sequence is synthesized)
tgtggatggtgacacagaggatggctctatgctggtgactggacacatcgcctctggttaaatctctcctgcttggcgacttcagtaagctacagctaagcccatcggccggaaaagaaa

SEQ ID NO: 427250 - DNA, 120 bp, Artificial Sequence
  ENSG00000151632_11 (sequence is synthesized)
gacaataattttgtttttcattttgaaaaaattaaatgctctctcctaaagattcttcacctactttggtctccataacttctatgttttctctccttctgacacactagtgcccccaaa

SEQ ID NO: 427251 - DNA, 120 bp, Artificial Sequence
  ENSG00000151632_12 (sequence is synthesized)
ttgtgatttgcctatacgtttagggccggggttggaagatgttaacaaccatttaagattcatttctgcagtgggagtgggtggagtttcaccctctgggaaaggggcaggtgacaggta

SEQ ID NO: 427252 - DNA, 120 bp, Artificial Sequence
  ENSG00000151632_13 (sequence is synthesized)
tttatcagtcagtgcctctctagctcttgtaggaagaagcacacgcaggatggagtctagaggatgagcgatattgactagcaattcatgggctccctccagcagtgcgagggtcagagt

SEQ ID NO: 427253 - DNA, 120 bp, Artificial Sequence
  ENSG00000151632_14 (sequence is synthesized)
ttctggagccttgggaggaggcatccctgtgagggggggttagggagatgggagggcaccaggaaaagtgattagaagtcaggtatgggaaggctaaataggacagagtcgagtacatct

SEQ ID NO: 427254 - DNA, 120 bp, Artificial Sequence
  ENSG00000151632_15 (sequence is synthesized)
tcattatatcttgttcataaaagaaaactttccacattgttttaacaaaccccacagctgagagtcaggcctgaatctttgatgtgtgcccattcacaacgttgaccctattggtttgtg

SEQ ID NO: 427255 - DNA, 120 bp, Artificial Sequence
  ENSG00000151632_16 (sequence is synthesized)
gtggggcaggacatcgaagatatcattgactcatcacattcccctgaatagctcatatttagaaaatattcttagattgtaaaaatgtactgttcatttgttatatgcaatcttttaaat

SEQ ID NO: 427256 - DNA, 120 bp, Artificial Sequence
  ENSG00000151632_17 (sequence is synthesized)
gttttatactttaaacaaggcatagttacaagtataaaacataaatatcccaaagccattatgcatggcactcaagattaaaatgggaaataatacatctaataaatcaaatgttccaag

SEQ ID NO: 427257 - DNA, 120 bp, Artificial Sequence
  ENSG00000151632_18 (sequence is synthesized)
acttcaaatgtcttttggaaacaggctatgtaaaacagcacactggtttcaaactttggtaaattttaagaagaactcttacaaaggcatttaattcttatacataattttcaggggaac

SEQ ID NO: 427258 - DNA, 120 bp, Artificial Sequence
  ENSG00000151632_19 (sequence is synthesized)
taatcaaatcagctaatcatgaagacatgattttcgttttagaaaacacttttgaaaacttgggataatctcatgtcttaatgatcaaagcattatgagaaggacagtggttttttacct

SEQ ID NO: 427259 - DNA, 120 bp, Artificial Sequence
  ENSG00000151632_20 (sequence is synthesized)
gggcacactttctaacacatttactctccactattcgtactctggtagccatgttaaccccatcagagattccttctcaagccatgtctcagagctgataggcatcccagcaagttttgc

SEQ ID NO: 427260 - DNA, 120 bp, Artificial Sequence
  ENSG00000151632_21 (sequence is synthesized)
agctcacaatttttctgtaaattacttattctataaaattggaagaggccataaactttggagggccctagaccaattttttggattatttctggtctactctcattccgttgatgatct

SEQ ID NO: 427261 - DNA, 120 bp, Artificial Sequence
  ENSG00000151632_22 (sequence is synthesized)
tagatattctctgcattaaatatcacctctaggctgagaaatccaccaaaaaatatttctagctcagcgttttcctccaaatcttcaatggaagatcataatgtgaactctgcatctcca

SEQ ID NO: 427262 - DNA, 120 bp, Artificial Sequence
  ENSG00000151632_23 (sequence is synthesized)
tgttaaagtttaatggacattcacacttagcatgtctcaaagaaatctcatgtaaaccatggccatcctgttctaccttaactttctgagtctatggaatgataatttcacatctcataa

SEQ ID NO: 427263 - DNA, 120 bp, Artificial Sequence
  ENSG00000151632_24 (sequence is synthesized)
acttgactgatgtaagtgtcaagaaaagattgacattttgttaaaacttcgtagccaagtgtgtaacgcttaagcagactttcatatttcaaatctctatagcacgtgtaactctttttt

SEQ ID NO: 427264 - DNA, 120 bp, Artificial Sequence
  ENSG00000151632_25 (sequence is synthesized)
caagatgtgaaataatcattaggtcagtcatttgtaaatagtacggctgctgtgggctttttccagttcttcaccatccatttttataaaactcttattgttaaaaaaaaaaagttactc

SEQ ID NO: 427265 - DNA, 120 bp, Artificial Sequence
  ENSG00000151632_26 (sequence is synthesized)
agaatttcataaagccaaacacctgatttcaggaacacttgagatgtaagaaaattttatagggacctccaatcactaattttcctattttttctctcaaagaaatgctgaagggaggaa

SEQ ID NO: 427266 - DNA, 120 bp, Artificial Sequence
  ENSG00000151632_27 (sequence is synthesized)
ttcaggttgaatgaaaggaaatagtaacttacagccatatagagttataaagacttcttgtaaatgtgaacatatggtaaaatataaaaacatgtatttttgaaattttggattctactc

SEQ ID NO: 427267 - DNA, 120 bp, Artificial Sequence
  ENSG00000151632_28 (sequence is synthesized)
attattttacttcaatttaagatataaatgtatagaaataagtataattctaagctaatacgtatgcaatgtaggaagctgtaattactgaccaaaactatgtgaagtggagaaaacctg

SEQ ID NO: 427268 - DNA, 120 bp, Artificial Sequence
  ENSG00000151632_29 (sequence is synthesized)
gggaagtggatggttttagatgaaactgaagttaaattcatattgatttaaagtaaattgtcataactttataaagtttttcatcatcaccacagcaatcacaaagagaataattatgaa

SEQ ID NO: 427269 - DNA, 120 bp, Artificial Sequence
  ENSG00000151632_30 (sequence is synthesized)
tatacgcaagaggaaatgagaagggaatccaaatgtcattaaaaaaaaatcacgccacctcacaaaatggtaacagtggatataaaggatagaaagctataaacctggtaggaaaacatt

SEQ ID NO: 427270 - DNA, 120 bp, Artificial Sequence
  ENSG00000151632_31 (sequence is synthesized)
aagcaattttgaatccatacttccgtgattgcatgtctacaagaaaagagagtgcagaatcctcaaagcctctgcctcaaaaacttgaggaaatgacaatcatctccttgaaggcacaag

SEQ ID NO: 427271 - DNA, 120 bp, Artificial Sequence
  ENSG00000151632_32 (sequence is synthesized)
gtcttatttatgattcctgatttcacctcttgggatgttcacagacacagagtttcatgaagctgtggtgtccagaaaacctgctgcacatagggtgcacaatgagtttccatcttcttg

SEQ ID NO: 427272 - DNA, 120 bp, Artificial Sequence
  ENSG00000151632_33 (sequence is synthesized)
cctcttttcaaggggcaagaactcagtccgggaatgtcttaaactacaaaccttcatgggaaaccttgttgcttctgcttcctctcttttcacactggaggttttatttttgcttagcca

SEQ ID NO: 427273 - DNA, 120 bp, Artificial Sequence
  ENSG00000151632_34 (sequence is synthesized)
tgaattcttgtgtcattcataacttttgtcttaaggtactgaaaactagtcaggctagttaatgcaaaagggtatattagatatgataatgggaaatcaaagccagggctacattaagaa

SEQ ID NO: 427274 - DNA, 120 bp, Artificial Sequence
  ENSG00000151632_35 (sequence is synthesized)
gtaagtttcctgaggcctccacagccatactttctgtacagcctgtggaactgtaatgtctaatgaaactacagggcactggagccttagaccctgccactttgttgacacctactgggc

SEQ ID NO: 427275 - DNA, 120 bp, Artificial Sequence
  ENSG00000151632_36 (sequence is synthesized)
gggcaaccaaaggaactagtacacaactgcctagtggttatagatcaagagtcttccaggcgaccagatctgaaggacacagccctccagggtggagactggatgctctttgtggacaga

SEQ ID NO: 427276 - DNA, 120 bp, Artificial Sequence
  ENSG00000151632_37 (sequence is synthesized)
caaaaggctgagtaaattgcccttatgagagccttgcatctgtccaaagtgggaagagtgctgcaacccagccctagccaacgccgcatgagagggagtgtgccgagggcttctgagaag

SEQ ID NO: 427277 - DNA, 120 bp, Artificial Sequence
  ENSG00000151632_38 (sequence is synthesized)
gtttctctcacatctagaaagaagcgcttaagatgtggcagcccctcttcttcaagtggctcttgtcctgttgccctgggagttctcaaattgctgcagcagcctccacccagcctgagg

SEQ ID NO: 427278 - DNA, 120 bp, Artificial Sequence
  ENSG00000151632_39 (sequence is synthesized)
gttgtttgaaagtgtgtagcacctccaccttctctctctctctccctctccctctcctgccagccaagtgaagacatgcttacttccccttcaccttccttcatgatgtgggaagagtgc

SEQ ID NO: 427279 - DNA, 120 bp, Artificial Sequence
  ENSG00000151632_40 (sequence is synthesized)
gatgagagaagttacagactctcctgggcgaccccgagagcttaccattcctcagacttcttcacatggtgctaacagatttttaccattggaatgacatactgcatcctatagttatac

SEQ ID NO: 427280 - DNA, 120 bp, Artificial Sequence
  ENSG00000151632_41 (sequence is synthesized)
catccactctgaaatcaatgtgaatttaacttcagttccatacagaaacttcttttccacagactcaggaatttcaagtgtgctatccctatgtgtattgattatatcttcatcctgctc

SEQ ID NO: 427281 - DNA, 120 bp, Artificial Sequence
  ENSG00000151632_42 (sequence is synthesized)
aggcccatgttcattaccgtgagctcctgtgcatctcctaatttccaaactagcctggaaaacgcctccattgaccatgattggttcatggtcctgtgcatggaacatcatatgttcagg

SEQ ID NO: 427282 - DNA, 120 bp, Artificial Sequence
  ENSG00000151632_43 (sequence is synthesized)
gagataaagaactctgatagtggcacctgggtaaaaagtacaatccattatatctggatatcaagatcttttgcagttgaagagaggtattgccacagagaaaattataggagcagaaga

SEQ ID NO: 427283 - DNA, 120 bp, Artificial Sequence
  ENSG00000151632_44 (sequence is synthesized)
aagtcaatgaaagtcaatgatgacactccattaggaaccagaaagatggtatttatttatacatataataggtgtaagagattagaggaagcctgtcacctgaagacattccttatacct

SEQ ID NO: 427284 - DNA, 120 bp, Artificial Sequence
  ENSG00000151632_45 (sequence is synthesized)
tcatatgtagtacactttgtacataccactctctggagcgctgcatcacctacctcatggaggattagtgtccttaaatgtacctcagagcatggctatgtgtggagaaattgacttgtg

SEQ ID NO: 427285 - DNA, 81 bp, Artificial Sequence
  ENSG00000151632_46 (sequence is synthesized)
agttccatacagaaacttcttttccacagatggagtttaagcccaagctggagtgcgatggtgcaatccttcctggcttag

SEQ ID NO: 427286 - DNA, 120 bp, Artificial Sequence
  ENSG00000151632_47 (sequence is synthesized)
actgatcctcagacaagccaggactcaagtacaagcccacctacaaccagatgagcccttagggccactggggccatttctgactttgtgctcttcacatacttccttacattagaataa

SEQ ID NO: 427287 - DNA, 120 bp, Artificial Sequence
  ENSG00000151632_48 (sequence is synthesized)
tgtaattgttcagtatgttgtgctttaattttttaagaaaatgtcaaaggctagccatgacacggttatgtgtatttcttttaacttttccataaatattaaataatgtaattgttcaga

SEQ ID NO: 427288 - DNA, 120 bp, Artificial Sequence
  ENSG00000151640_0 (sequence is synthesized)
cgtccccacgcacgcgtcccggctcacgcgtccccccgcccgcccgcccgcccgcccgcccccgcttgtgccgcccctaccagagacccccaggagcaggatgtccttccagggcaagaa

SEQ ID NO: 427289 - DNA, 120 bp, Artificial Sequence
  ENSG00000151640_1 (sequence is synthesized)
ccttccagggcaagaaaagcatcccccggatcacgagtgaccgccttctgatcagaggtgggaggatcgtgaatgacgaccagtccttttacgctgatgtgcacgtggaagatggcttga

SEQ ID NO: 427290 - DNA, 120 bp, Artificial Sequence
  ENSG00000151640_2 (sequence is synthesized)
taaaacaaatcggagaaaacctcatcgtccctgggggcatcaagaccattgacgcccacggcctgatggtccttcctggtggcgttgacgtccacacaaggctgcagatgcctgtcctgg

SEQ ID NO: 427291 - DNA, 120 bp, Artificial Sequence
  ENSG00000151640_3 (sequence is synthesized)
gcatgacaccggctgacgacttctgtcagggcaccaaggcagcgctagcaggaggaaccaccatgatcttggaccacgtcttccccgacacgggtgtgagcctgctggcggcctacgagc

SEQ ID NO: 427292 - DNA, 120 bp, Artificial Sequence
  ENSG00000151640_4 (sequence is synthesized)
agtggcgggagcgggcggacagcgcggcctgctgcgactactccctgcacgtggacatcacccgatggcatgagagcatcaaggaggagctggaggccctggtcaaggagaagggtgtga

SEQ ID NO: 427293 - DNA, 120 bp, Artificial Sequence
  ENSG00000151640_5 (sequence is synthesized)
actccttcctggtcttcatggcatacaaggaccggtgccagtgcagcgacagccagatgtacgagatcttcagcatcatccgggacctgggggccttggcccaggtgcacgctgagaacg

SEQ ID NO: 427294 - DNA, 120 bp, Artificial Sequence
  ENSG00000151640_6 (sequence is synthesized)
gggacatcgtggaggaggagcagaagcggttgctggagctcggcatcactggccccgagggccacgtgctcagccaccccgaggaggtggaggctgaggcggtgtaccgagctgtcacca

SEQ ID NO: 427295 - DNA, 120 bp, Artificial Sequence
  ENSG00000151640_7 (sequence is synthesized)
tcgccaagcaggcaaactgcccgctgtacgtcaccaaggtgatgagcaagggggcggccgacgccatcgctcaggccaagcgcagaggggtggtcgtgtttggggagcccatcaccgcca

SEQ ID NO: 427296 - DNA, 120 bp, Artificial Sequence
  ENSG00000151640_8 (sequence is synthesized)
gcctgggcaccgacggttcacactactggagcaagaactgggccaaggccgcagccttcgtcacatcaccccctgtcaacccagaccccaccacggcggaccacctcacctgcttgctgt

SEQ ID NO: 427297 - DNA, 120 bp, Artificial Sequence
  ENSG00000151640_9 (sequence is synthesized)
ccagcggggacctccaggtgacaggcagcgcccactgcaccttcaccactgcccagaaggctgtgggcaaggacaacttcgcgctgatccccgagggcaccaacggcattgaggagcgca

SEQ ID NO: 427298 - DNA, 120 bp, Artificial Sequence
  ENSG00000151640_10 (sequence is synthesized)
tgtcgatggtctgggagaaatgtgtggcctctgggaagatggacgagaatgagttcgtcgcggtgaccagtacaaatgctgccaaaatcttcaatttttacccaaggaaggggcgagtgg

SEQ ID NO: 427299 - DNA, 120 bp, Artificial Sequence
  ENSG00000151640_11 (sequence is synthesized)
tcatatggaaccccaaggccaccaagatcatctctgccaagacccacaatctgaacgtggagtacaacatcttcgagggagtggagtgccggggagcgcctgccgtggtcataagtcagg

SEQ ID NO: 427300 - DNA, 120 bp, Artificial Sequence
  ENSG00000151640_12 (sequence is synthesized)
gccgagtggcgctggaggacgggaagatgtttgtcaccccgggggcgggccgcttcgtccctcggaaaacattcccggactttgtctacaagaggatcaaagctcgcaacaggctggcgg

SEQ ID NO: 427301 - DNA, 120 bp, Artificial Sequence
  ENSG00000151640_13 (sequence is synthesized)
agatccacggtgtgccccgtggactgtatgacgggcccgtccacgaggtgatggtgcctgccaagccagggagtggcgctccggcccgcgcgtcctgcccaggcaagatctccgtccctc

SEQ ID NO: 427302 - DNA, 120 bp, Artificial Sequence
  ENSG00000151640_14 (sequence is synthesized)
ctgtgcgcaacctacatcagtcggggttcagcctatctgggtctcaggctgatgaccacatcgcccgacgcacagcacagaagatcatggcaccacctggcggccgctccaacatcacct

SEQ ID NO: 427303 - DNA, 120 bp, Artificial Sequence
  ENSG00000151640_15 (sequence is synthesized)
ctctctcctagacgcccaggaccggccctgtgagccgtgctggccccacccgaggccgcgggggccccagggcactcgcccccctccttagcattttcttttgtagaagtttctcgaagg

SEQ ID NO: 427304 - DNA, 120 bp, Artificial Sequence
  ENSG00000151640_16 (sequence is synthesized)
tgcttggcggtcttgccttccccctccccacaggctctccttgtggggtcccaggtcctgctgccaagagcccctcaagagaagggctgaacctggggagatgtcactgccagggtgagg

SEQ ID NO: 427305 - DNA, 120 bp, Artificial Sequence
  ENSG00000151640_17 (sequence is synthesized)
tggagccacatggcagggacaatgccggcagcctgagcccaggcaccccagtgcccgctgggcccagcctggggacagggaacctgccgggctcacagtgtgggagcagctggacaccag

SEQ ID NO: 427306 - DNA, 120 bp, Artificial Sequence
  ENSG00000151640_18 (sequence is synthesized)
gcttcttggtgaaccggcgaggggccgagtcccgcctggtgggcatttgccgccgcctccccaccaccagtcactgcctcgcagagccctacactcccgcagccgctcctcagaggcctg

SEQ ID NO: 427307 - DNA, 120 bp, Artificial Sequence
  ENSG00000151640_19 (sequence is synthesized)
tgcccatcgcaggcctgggaggaaagtgggcgcagagccctcctgctcacacagctgctgagacttcagggacccatcagaacttggtgcagcacagccccgcccgtggagggtcccttt

SEQ ID NO: 427308 - DNA, 120 bp, Artificial Sequence
  ENSG00000151640_20 (sequence is synthesized)
tacgcaccccaaggcccacacctaagcttccatgtagccctcatccagggaagttttgcgatcctttaggaagacactgtcctcttattacagattgtgtatttccgtaggcttcttagt

SEQ ID NO: 427309 - DNA, 120 bp, Artificial Sequence
  ENSG00000151640_21 (sequence is synthesized)
agcagctttgtacactgaggacactgtagccaggaacctgtgcatgccacccaccgcctggacaggcagtcatcctgcctctgatgtgaatcaggcccattaaagacgtctgggtttgaa

SEQ ID NO: 427310 - DNA, 120 bp, Artificial Sequence
  ENSG00000151640_22 (sequence is synthesized)
catctattagcgcacctgcttccgtttgtcaagctgctccgtcctctagtcaaaaaagtaccaaccagggacctgagtggaaaaccacagggcgtggcgtctgcgtgaggctggaccctg

SEQ ID NO: 427311 - DNA, 120 bp, Artificial Sequence
  ENSG00000151640_23 (sequence is synthesized)
gggaggactgcaaggagggaggcgtgtgtgaacttgggttgagcacccccccagggcagccccaaattcctgaagctggcactggagaggcgcagagcaggcccagccctccagctgccc

SEQ ID NO: 427312 - DNA, 120 bp, Artificial Sequence
  ENSG00000151650_0 (sequence is synthesized)
gaggtggatcctgcgcctggccagccccgcctggccttccctccggcccacctggccgccatgcgcctctcctcctccccacctcgtggcccgcagcagctctccagctttggctccgtg

SEQ ID NO: 427313 - DNA, 120 bp, Artificial Sequence
  ENSG00000151650_1 (sequence is synthesized)
gactggctctcccagagcagctgctcagggccgacccacacccccaggcctgccgacttctccctggggagcctccctggcccaggccagacatccggcgcccgggagccccctcaggcc

SEQ ID NO: 427314 - DNA, 120 bp, Artificial Sequence
  ENSG00000151650_2 (sequence is synthesized)
gtcagcatcaaggaggccgccgggtcctcaaatctgcctgcgccggagaggaccatggccgggttgagtaaggagccaaataccttgcgggccccccgtgtccgcacagccttcaccatg

SEQ ID NO: 427315 - DNA, 120 bp, Artificial Sequence
  ENSG00000151650_3 (sequence is synthesized)
gagcaggtccgcaccttggagggcgtcttccagcaccaccagtacctgagccctctggagcggaagaggctggccagggagatgcagctctcagaggtccagataaaaacctggtttcag

SEQ ID NO: 427316 - DNA, 120 bp, Artificial Sequence
  ENSG00000151650_4 (sequence is synthesized)
aatcgccgcatgaaacacaaacggcaaatgcaggacccccagctgcacagccccttctcggggtctctccatgcgcccccagctttctactcaacgtcttctggccttgccaatggcctg

SEQ ID NO: 427317 - DNA, 120 bp, Artificial Sequence
  ENSG00000151650_5 (sequence is synthesized)
cagctgctgtgcccttgggcacccctgtccgggccccaggctctgatgctgccccctggctccttctggggtctctgccaagtggcacaagaggccctggcatctgcgggagcttcctgc

SEQ ID NO: 427318 - DNA, 120 bp, Artificial Sequence
  ENSG00000151650_6 (sequence is synthesized)
tgcgggcagcctctggcgtcccacccccctaccccaggccggccttcgctgggaccagccctgtccacggggccccggggcctgtgtgctatgccacagacgggggatgcattttgagga

SEQ ID NO: 427319 - DNA, 120 bp, Artificial Sequence
  ENSG00000151650_7 (sequence is synthesized)
ggcacctctgactcccacactcgcggtcttgctgatcgcacctggctcctacctggaggactcagttgttctgtttacatcctggtggcacctctcaccctgacccacacaaaggttctg

SEQ ID NO: 427320 - DNA, 120 bp, Artificial Sequence
  ENSG00000151650_8 (sequence is synthesized)
accctgacccacacaaaggttctggagattactggagaatatatataaatatatatatgtacgtatatatgtaaatacacatatacgtatatataaatatatatatacatatgtgtgtgt

SEQ ID NO: 427321 - DNA, 120 bp, Artificial Sequence
  ENSG00000151650_9 (sequence is synthesized)
atatatttattaaagccacctcttcactgaaagttaccgaaagagtcggtttaggaaggaaacgaagggtcagtgaacagagtcaaatgcagaagtgggcttgtcatgggtagggctttc

SEQ ID NO: 427322 - DNA, 120 bp, Artificial Sequence
  ENSG00000151650_10 (sequence is synthesized)
ggcgtacgataaaaggatcatttgttttttaaaaggggttggaaaaactggttttccagttggaaacagtaaaggttgtaagctttgtgtgtacaaaagaaaacagggaatgcaggtgtg

SEQ ID NO: 427323 - DNA, 120 bp, Artificial Sequence
  ENSG00000151650_11 (sequence is synthesized)
tttatagcgttgtggttcaagtccctcttaacaagaactccaaagctggaaagcaggagggaacaaaggtgaacatgaaggcgaggatgctggggccctgcagtgcgctctaggctgtgc

SEQ ID NO: 427324 - DNA, 120 bp, Artificial Sequence
  ENSG00000151650_12 (sequence is synthesized)
gtgagccgggactgtacccacagcttgctgagggctgctcttcttgggccagggaaagcagggcagccgggacctgcggctgtgcctggactgaagctgtcccgcaggtccccaccctcc

SEQ ID NO: 427325 - DNA, 120 bp, Artificial Sequence
  ENSG00000151650_13 (sequence is synthesized)
aacacgtgctcacctgtccccctgctcgcagcagcctcgggacaaaacaatgactcaaggacagcacttcttgcagaaggtctggaagtgcccagaatgggaggcacggaagcccctccc

SEQ ID NO: 427326 - DNA, 120 bp, Artificial Sequence
  ENSG00000151650_14 (sequence is synthesized)
ggggaggactcccgcgttgatggaccgttcttggtgcagactcctgactgcgtgcatgaaacctgagacaagtgcaattccttccatgtcgccccagagtgcccaggaggcaggcagtgc

SEQ ID NO: 427327 - DNA, 120 bp, Artificial Sequence
  ENSG00000151650_15 (sequence is synthesized)
ggggtgcccaggcagacgggttcagcctgcagaactggaggcgacctgtgaaacccacccgggcaccccaacaggaacagaagcgtggtcctgcggctgcgtccccagcgagtttcactt

SEQ ID NO: 427328 - DNA, 120 bp, Artificial Sequence
  ENSG00000151650_16 (sequence is synthesized)
tccccttgctcgtttctcccttgttgtaagtgtttacaactggcatgtgcttttaaacgtcaggtaagaggggaacagctgctgtacatcgtcctggcgagtgacaatgtgacagaagcc

SEQ ID NO: 427329 - DNA, 120 bp, Artificial Sequence
  ENSG00000151650_17 (sequence is synthesized)
tgggcgaggccctcggagggcagcagctggacagggactactgggtttggcctggacagcactgatttgtggatgtggatgggggcacgttgtccgtgataaaagtacaagtgcccctca

SEQ ID NO: 427330 - DNA, 120 bp, Artificial Sequence
  ENSG00000151651_0 (sequence is synthesized)
agaccgtgtcccgcggggctgtcacctccgcctctgctccccgacccggccatgcgcggcctcgggctctggctgctgggcgcgatgatgctgcctgcgattgcccccagccggccctgg

SEQ ID NO: 427331 - DNA, 120 bp, Artificial Sequence
  ENSG00000151651_1 (sequence is synthesized)
gccctcatggagcagtatgaggtcgtgttgccgtggcgtctgccaggcccccgagtccgccgagctctgccctcccacttgggcctgcacccagagagggtgagctacgtccttggggcc

SEQ ID NO: 427332 - DNA, 120 bp, Artificial Sequence
  ENSG00000151651_2 (sequence is synthesized)
acagggcacaacttcaccctccacctgcggaagaacagggacctgctgggctccggctacacagagacctatacggctgccaatggctccgaggtgacggagcagcctcgcgggcaggac

SEQ ID NO: 427333 - DNA, 120 bp, Artificial Sequence
  ENSG00000151651_3 (sequence is synthesized)
cactgcttctaccagggccacgtagaggggtacccggactcagccgccagcctcagcacctgtgccggcctcaggggtttcttccaggtggggtcagacctgcacctgatcgagcccctg

SEQ ID NO: 427334 - DNA, 120 bp, Artificial Sequence
  ENSG00000151651_4 (sequence is synthesized)
gatgaaggtggcgagggcggacggcacgccgtgtaccaggctgagcacctgctgcagacggccgggacctgcggggtcagcgacgacagcctgggcagcctcctgggaccccggacggca

SEQ ID NO: 427335 - DNA, 120 bp, Artificial Sequence
  ENSG00000151651_5 (sequence is synthesized)
gccgtcttcaggcctcggcccggggactctctgccatcccgagagacccgctacgtggagctgtatgtggtcgtggacaatgcagagttccagatgctggggagcgaagcagccgtgcgt

SEQ ID NO: 427336 - DNA, 120 bp, Artificial Sequence
  ENSG00000151651_6 (sequence is synthesized)
catcgggtgctggaggtggtgaatcacgtggacaagctatatcagaaactcaacttccgtgtggtcctggtgggcctggagatttggaatagtcaggacaggttccacgtcagccccgac

SEQ ID NO: 427337 - DNA, 120 bp, Artificial Sequence
  ENSG00000151651_7 (sequence is synthesized)
cccagtgtcacactggagaacctcctgacctggcaggcacggcaacggacacggcggcacctgcatgacaacgtacagctcatcacgggtgtcgacttcaccgggactaccgtggggttt

SEQ ID NO: 427338 - DNA, 120 bp, Artificial Sequence
  ENSG00000151651_8 (sequence is synthesized)
gccagggtgtccgccatgtgctcccacagctcaggggctgtgaaccaggaccacagcaagaaccccgtgggcgtggcctgtaccatggcccatgagatgggccacaacctgggcatggac

SEQ ID NO: 427339 - DNA, 120 bp, Artificial Sequence
  ENSG00000151651_9 (sequence is synthesized)
catgatgagaacgtccagggctgccgctgccaggaacgcttcgaggccggccgctgcatcatggcgggcagcattggctccagtttccccaggatgttcagtgactgcagccaggcctac

SEQ ID NO: 427340 - DNA, 120 bp, Artificial Sequence
  ENSG00000151651_10 (sequence is synthesized)
ctggagagctttttggagcggccgcagtcggtgtgcctcgccaacgcccctgacctcagccacctggtgggcggccccgtgtgtgggaacctgtttgtggagcgtggggagcagtgcgac

SEQ ID NO: 427341 - DNA, 120 bp, Artificial Sequence
  ENSG00000151651_11 (sequence is synthesized)
tgcggcccccccgaggactgccggaaccgctgctgcaactctaccacctgccagctggctgagggggcccagtgtgcgcacggtacctgctgccaggagtgcaaggtgaagccggctggt

SEQ ID NO: 427342 - DNA, 120 bp, Artificial Sequence
  ENSG00000151651_12 (sequence is synthesized)
gagctgtgccgtcccaagaaggacatgtgtgacctcgaggagttctgtgacggccggcaccctgagtgcccggaagacgccttccaggagaacggcacgccctgctccgggggctactgc

SEQ ID NO: 427343 - DNA, 120 bp, Artificial Sequence
  ENSG00000151651_13 (sequence is synthesized)
cactggcccagcagtgccaggccttctgggggccaggtgggcaggctgccgaggagtcctgcttctcctatgacatcctaccaggctgcaaggccagccggtacagggctgacatgtgtg

SEQ ID NO: 427344 - DNA, 120 bp, Artificial Sequence
  ENSG00000151651_14 (sequence is synthesized)
gcgttctgcagtgcaagggtgggcagcagcccctggggcgtgccatctgcatcgtggatgtgtgccacgcgctcaccacagaggatggcactgcgtatgaaccagtgcccgagggcaccc

SEQ ID NO: 427345 - DNA, 120 bp, Artificial Sequence
  ENSG00000151651_15 (sequence is synthesized)
ggtgtggaccagagaaggtttgctggaaaggacgttgccaggacttacacgtttacagatccagcaactgctctgcccagtgccacaaccatggggtgtgcaaccacaagcaggagtgcc

SEQ ID NO: 427346 - DNA, 120 bp, Artificial Sequence
  ENSG00000151651_16 (sequence is synthesized)
actgccacgcgggctgggccccgccccactgcgcgaagctgctgactgaggtgcacgcagcgtccgggagcctccccgtcttcgtggtggtggttctggtgctcctggcagttgtgctgg

SEQ ID NO: 427347 - DNA, 120 bp, Artificial Sequence
  ENSG00000151651_17 (sequence is synthesized)
tcaccctggcaggcatcatcgtctaccgcaaagcccggagccgcatcctgagcaggaacgtggctcccaagaccacaatggggcgctccaaccccctgttccaccaggctgccagccgcg

SEQ ID NO: 427348 - DNA, 120 bp, Artificial Sequence
  ENSG00000151651_18 (sequence is synthesized)
cagccgcgtgccggccaagggcggggctccagccccatccaggggcccccaagagctggtccccaccacccacccgggccagcccgcccgacacccggcctcctcggtggctctgaagag

SEQ ID NO: 427349 - DNA, 120 bp, Artificial Sequence
  ENSG00000151651_19 (sequence is synthesized)
ctgctcctccggtcactgtgtccagcccacccttcccagttcctgtctacacccggcaggcaccaaagcaggtcatcaagccaacgttcgcacccccagtgcccccagtcaaacccgggg

SEQ ID NO: 427350 - DNA, 120 bp, Artificial Sequence
  ENSG00000151651_20 (sequence is synthesized)
ctggtgcggccaaccctggtccagctgagggtgctgttggcccaaaggttgccctgaagccccccatccagaggaagcaaggagccggagctcccacagcaccctaggggggcacctgcg

SEQ ID NO: 427351 - DNA, 120 bp, Artificial Sequence
  ENSG00000151651_21 (sequence is synthesized)
cctgtgtggaaatttggagaagttgcggcagagaagccatgcgttccagcattccacggtccagctagtgccgctcagccctagaccctgactttgcaggctcagctgctgttctaacct

SEQ ID NO: 427352 - DNA, 120 bp, Artificial Sequence
  ENSG00000151651_22 (sequence is synthesized)
caggaatgcatctacctgagaggctcctgctgtccacgccctcagccaattccttctccccgccttggccacgtgtagccccagctgtctgcaggcaccaggctgggatgagctgtgtgc

SEQ ID NO: 427353 - DNA, 120 bp, Artificial Sequence
  ENSG00000151651_23 (sequence is synthesized)
ttgcgggtgcgtgtgtgtgtacgtgtctccaggtggccgctggtctcccgctgtgttcaggaggccacatatacagcccctcccagccacacctgcccctgctctggggcctgctgagcc

SEQ ID NO: 427354 - DNA, 120 bp, Artificial Sequence
  ENSG00000151651_24 (sequence is synthesized)
ggctgccctgggcacccggttccaggcagcacagacgtggggcatccccagaaagactccatcccaggaccaggttcccctgcgtgctcttcgagagggtgtcagtgagcagactgcacc

SEQ ID NO: 427355 - DNA, 120 bp, Artificial Sequence
  ENSG00000151651_25 (sequence is synthesized)
ccaagctcccgactccaggtcccctgatcttggggcctgtttcccatgggattcaagagggacagccccagctttgtgtgtgtttaagcttaggaatcgcctttatggaaagggctatgt

SEQ ID NO: 427356 - DNA, 120 bp, Artificial Sequence
  ENSG00000151651_26 (sequence is synthesized)
gggagagtcagctatcttgtctggttttcttgagacctcagatgtgtgttcagcagggctgaaagcttttattctttaataatgagaaatgtatattttactaataaattattgaccgag

SEQ ID NO: 427357 - DNA, 120 bp, Artificial Sequence
  ENSG00000151651_27 (sequence is synthesized)
gtctgtggggagcttcgttccaggtccagagaaggtgatgtccaggctagagccgggagtgcctgggggacccatgtcagctgtgtctgtttcctcccaggtcatcaagccaacgttcgc

SEQ ID NO: 427358 - DNA, 120 bp, Artificial Sequence
  ENSG00000151651_28 (sequence is synthesized)
ctctgtgggtgtccagagcggtcacagggagggagtggctgcagggcaccccagtggtcaggggaggcggccaggtccgccctggagcccagcccggccccagtgcagcctgccaaggcc

SEQ ID NO: 427359 - DNA, 120 bp, Artificial Sequence
  ENSG00000151651_29 (sequence is synthesized)
acactggcccagcagtgccaggccttctgggggccaggtgaagtgggcacagagctggcctggcagggtggctgcaggccttgccagggctaacccgcttctggtcccacaggtgggcag

SEQ ID NO: 427360 - DNA, 120 bp, Artificial Sequence
  ENSG00000151651_30 (sequence is synthesized)
ccggccgctgcatcatggcgggcagcattgggtgaggcggccaggccctgcagagccagggtatgctggaggtacgaggtgggtggggaaggggccaggccgcctcccccaatgctgccc

SEQ ID NO: 427361 - DNA, 120 bp, Artificial Sequence
  ENSG00000151651_31 (sequence is synthesized)
ctactaccgacctgcccgctgccctgggctcatccagccggtggcacagctaaggctgtcccagagctctgcaggccgagccccagcctgcacatgggggctggagatgcagtggtccag

SEQ ID NO: 427362 - DNA, 120 bp, Artificial Sequence
  ENSG00000151651_32 (sequence is synthesized)
agaccgtgtcccgcggggctgtcacctccgcctctgctccccgacccggccatgcgcggcctcgggctctggctgctgggcgcgatgatgctgcctgggcctgcacccagagagggtgag

SEQ ID NO: 427363 - DNA, 120 bp, Artificial Sequence
  ENSG00000151651_33 (sequence is synthesized)
agatgcgatcagatgatcagaagaatggaggaggagaatggaaacgggcaggtcggcggcccgagtcctcctccctggggggaaggttcatccttgccctcgggcccctccagagatctg

SEQ ID NO: 427364 - DNA, 120 bp, Artificial Sequence
  ENSG00000151651_34 (sequence is synthesized)
agacagcctggagacctgtggagtcactggcacccgctggcacccacagcgtctctgagcactgtgtgtgggtgctgcaggacacaggcccaccggccatgcctgggggcgctcctgggg

SEQ ID NO: 427365 - DNA, 120 bp, Artificial Sequence
  ENSG00000151651_35 (sequence is synthesized)
ggtttgccaggccgaggccagagctggataggggaggggacgcctcggtccaggtctctggagcaggccacctcccctcaggccaggtttaatgcctgattttatgttttaaggtggtgt

SEQ ID NO: 427366 - DNA, 120 bp, Artificial Sequence
  ENSG00000151651_36 (sequence is synthesized)
tggcgggaagctgtgccaagtcctgggccctggtggggtgagggtggcaggcgtggggagttggccacatggttcctgagagcacagaccctcctgcaggaccacagcaagaaccccgtg

SEQ ID NO: 427367 - DNA, 120 bp, Artificial Sequence
  ENSG00000151651_37 (sequence is synthesized)
cccactcaggcctttgctgtcttgcatgggggtctgctcaggggacgccaagcccaagaggctcaccctcctgtaccctggggcctgaagtcacctgcggggggctgctggtggcagggt

SEQ ID NO: 427368 - DNA, 120 bp, Artificial Sequence
  ENSG00000151651_38 (sequence is synthesized)
agggggagctgtaggcaacaaactggagcctctggtccttcggggcaggaccaggccactctgaagcccacagcacacccggctcccactcccctcaggggtttcttccaggtggggtca

SEQ ID NO: 427369 - DNA, 120 bp, Artificial Sequence
  ENSG00000151655_0 (sequence is synthesized)
cttctttcttaaagcgaactgtactcctctgctgttcctttgaacttggttcagtaggaagaagtgatatcctccccagaccatctgctttggggagcttggcaaaactgtccagcaaaa

SEQ ID NO: 427370 - DNA, 120 bp, Artificial Sequence
  ENSG00000151655_1 (sequence is synthesized)
tgaaaagactcacgtgctttttcatctgcttctttctttctgaagtatcaggcttcgaaatccccataaatggactttctgaatttgtagactatgaagatcttgtggaactggccccag

SEQ ID NO: 427371 - DNA, 120 bp, Artificial Sequence
  ENSG00000151655_2 (sequence is synthesized)
gcaaatttcaattggtggcagagaaccggagatatcagagaagccttccaggagaatcggaagaaatgatggaagaggttgatcaagtaactctttatagctataaagtccagtctacta

SEQ ID NO: 427372 - DNA, 120 bp, Artificial Sequence
  ENSG00000151655_3 (sequence is synthesized)
ttacttctcggatggccaccaccatgatccagagcaaagtggtgaacaattccccgcagcctcagaatgtcgtgtttgatgttcagatccccaaaggagcattcatttccaacttctcca

SEQ ID NO: 427373 - DNA, 120 bp, Artificial Sequence
  ENSG00000151655_4 (sequence is synthesized)
tgactgtggacggcaagacatttaggagctctattaaggagaaaactgtgggccgagctctttatgcacaggccagagcaaaaggcaagacggctggcttggtgaggagcagcgctcttg

SEQ ID NO: 427374 - DNA, 120 bp, Artificial Sequence
  ENSG00000151655_5 (sequence is synthesized)
atatggaaaacttcagaacggaagtaaatgtcctcccaggagcaaaggtgcagttcgaacttcactaccaggaggtgaagtggaggaagctgggctcctatgagcacaggatctatctgc

SEQ ID NO: 427375 - DNA, 120 bp, Artificial Sequence
  ENSG00000151655_6 (sequence is synthesized)
aacctggacggctggccaaacacttagaggtagatgtgtgggttatcgaaccacagggactgagatttcttcatgttcccgacacatttgaaggccatttcgatggtgttccggtcattt

SEQ ID NO: 427376 - DNA, 120 bp, Artificial Sequence
  ENSG00000151655_7 (sequence is synthesized)
ctaaaggacaacagaaggcgcacgtctccttcaagcccacggtagcacagcagagaatatgccctaactgccgggagactgcggtagatggggaactggtggtgctgtatgacgtgaaaa

SEQ ID NO: 427377 - DNA, 120 bp, Artificial Sequence
  ENSG00000151655_8 (sequence is synthesized)
gagaagagaaggctggtgaactggaggtgtttaatggatattttgtccacttctttgctcctgacaacctggacccaattcccaaaaacatcctctttgtcatcgatgtgagtggctcca

SEQ ID NO: 427378 - DNA, 120 bp, Artificial Sequence
  ENSG00000151655_9 (sequence is synthesized)
tgtggggagttaaaatgaaacaaactgtggaagcaatgaagaccatattggatgacctcagagcagaagaccatttctctgtgattgatttcaaccagaacattcgaacttggagaaatg

SEQ ID NO: 427379 - DNA, 120 bp, Artificial Sequence
  ENSG00000151655_10 (sequence is synthesized)
atttaatttcagctacaaaaacacaggttgcagatgccaagaggtatattgagaaaatccagcccagtggaggcacaaacatcaacgaagcactcctacgggcaatcttcattttgaatg

SEQ ID NO: 427380 - DNA, 120 bp, Artificial Sequence
  ENSG00000151655_11 (sequence is synthesized)
aagccaataacttgggactgttagaccccaactccgtctcgctgatcattttggtttctgatggagatccaacagtgggcgaactaaaactgtcaaaaattcagaaaaacgttaaggaga

SEQ ID NO: 427381 - DNA, 120 bp, Artificial Sequence
  ENSG00000151655_12 (sequence is synthesized)
acatccaagacaatatctccttgttcagtttgggcatgggatttgatgtggactatgattttttgaagagactgtccaatgaaaaccatggaattgcacaaaggatttatggaaaccagg

SEQ ID NO: 427382 - DNA, 120 bp, Artificial Sequence
  ENSG00000151655_13 (sequence is synthesized)
tacaaccaggtctccactccattgctccggaatgttcagttcaactatccccatacatcagtcacggacgtcactcaaaacaatttccataactactttggaggctcagagattgtggtg

SEQ ID NO: 427383 - DNA, 120 bp, Artificial Sequence
  ENSG00000151655_14 (sequence is synthesized)
gcaggaaaatttgaccctgctaaattggatcaaatagagagcgttatcacggcgacttcggctaacacgcagttagtcttggagaccctggcccagatggacgacttgcaggattttcta

SEQ ID NO: 427384 - DNA, 120 bp, Artificial Sequence
  ENSG00000151655_15 (sequence is synthesized)
tcgaaagacaagcatgcagatcccgatttcaccaggaaactgtgggcctatctaaccatcaaccaactgctagctgaacgaagcctggctcctacagctgccgccaagagaagaattaca

SEQ ID NO: 427385 - DNA, 120 bp, Artificial Sequence
  ENSG00000151655_16 (sequence is synthesized)
agatcgatcctgcagatgtctctagaccaccacattgtgactccgctgacctcgctggtgatcgagaacgaggctggggatgagcgcatgctggcggatgccccaccgcaggatccctcc

SEQ ID NO: 427386 - DNA, 120 bp, Artificial Sequence
  ENSG00000151655_17 (sequence is synthesized)
tgctgctcaggggccctgtattacggcagcaaagtggttccagattccaccccgtcttgggccaatccttcaccaacgcccgtgatctccatgctggcacaaggatctcaggtgctagag

SEQ ID NO: 427387 - DNA, 120 bp, Artificial Sequence
  ENSG00000151655_18 (sequence is synthesized)
tccacgccacccccacatgtgatgagagttgaaaatgacccacatttcatcatttatctaccaaaaagccaaaagaacatttgtttcaatattgactcagaacctggaaaaatcctcaac

SEQ ID NO: 427388 - DNA, 120 bp, Artificial Sequence
  ENSG00000151655_19 (sequence is synthesized)
ctggtttctgacccagaatcaggaattgtagtcaacggtcagcttgttggtgccaagaagcccaacaatggaaaactaagcacctattttggaaaactgggattttatttccaaagtgaa

SEQ ID NO: 427389 - DNA, 120 bp, Artificial Sequence
  ENSG00000151655_20 (sequence is synthesized)
gacataaaaatagaaatcagcactgagaccatcaccctgagccatggttctagcacattctccttgtcctggtccgacacggctcaagtcacgaatcagagggtgcagatctcagtgaag

SEQ ID NO: 427390 - DNA, 120 bp, Artificial Sequence
  ENSG00000151655_21 (sequence is synthesized)
aaagaaaaagtggtaactatcaccctggataaagagatgtccttttctgttttacttcatcgtgtttggaagaagcatcccgtcaatgttgactttctgggaatctacataccccctaca

SEQ ID NO: 427391 - DNA, 120 bp, Artificial Sequence
  ENSG00000151655_22 (sequence is synthesized)
aacaagttctcacctaaagcccacggactaataggccagttcatgcaggaaccaaagatacacatcttcaatgagagaccaggaaaggaccctgagaagccagaggccagcatggaagtg

SEQ ID NO: 427392 - DNA, 120 bp, Artificial Sequence
  ENSG00000151655_23 (sequence is synthesized)
aaggggcagaagctgatcatcaccaggggcttacagaaagactacagaacggatctagtgtttggaacggacgttacctgctggtttgtgcacaacagtggaaaaggattcattgacggg

SEQ ID NO: 427393 - DNA, 120 bp, Artificial Sequence
  ENSG00000151655_24 (sequence is synthesized)
cattacaaggattacttcgtgcctcagctctacagctttctcaaacggccttaaaggtttatagtttgggaaattatatatattaatatacatctttcccctgtcacttttgcagatatt

SEQ ID NO: 427394 - DNA, 120 bp, Artificial Sequence
  ENSG00000151655_25 (sequence is synthesized)
cttcggtttgaataattaaaatgaaccagatatcagggtggttaattaaaatgaaccagatatcagggtggtttataaagcctgtaaacacacctaagaaaataaacattttacaaatga

SEQ ID NO: 427395 - DNA, 120 bp, Artificial Sequence
  ENSG00000151655_26 (sequence is synthesized)
ctttactaaactgccctccctggattttccagaaaatttatgatattgcttcttcattcctttcctttcggacatcaccaactttaggcgaactaaaactgtcaaaaattcagaaaaacg

SEQ ID NO: 427396 - DNA, 120 bp, Artificial Sequence
  ENSG00000151657_0 (sequence is synthesized)
ggttccgtttccggctggctgagtactggggtccagaaagtgatcgctgccgtggtcgccatggggaagtcggattttcttactcccaaggctatcgccaacaggatcaagtccaagggg

SEQ ID NO: 427397 - DNA, 120 bp, Artificial Sequence
  ENSG00000151657_1 (sequence is synthesized)
ctgcagaagctacgctggtattgccagatgtgccagaagcagtgccgggacgagaatggctttaagtgtcattgtatgtccgaatctcatcagagacaactattgctggcttcagaaaat

SEQ ID NO: 427398 - DNA, 120 bp, Artificial Sequence
  ENSG00000151657_2 (sequence is synthesized)
cctcagcagtttatggattatttttcagaggaattccgaaatgactttctagaacttctcaggagacgctttggcactaaaagggtccacaacaacattgtctacaacgaatacatcagc

SEQ ID NO: 427399 - DNA, 120 bp, Artificial Sequence
  ENSG00000151657_3 (sequence is synthesized)
caccgagagcacatccacatgaatgccactcagtgggaaactctgactgattttactaagtggctgggcagagaaggcttgtgcaaagtggacgagacaccaaaaggctggtatattcag

SEQ ID NO: 427400 - DNA, 120 bp, Artificial Sequence
  ENSG00000151657_4 (sequence is synthesized)
tacatagacagggacccagaaactatccgccggcaactggaactggagaaaaagaaaaagcaggaccttgatgatgaagaaaaaactgccaaatttattgaagagcaagtgagaagaggc

SEQ ID NO: 427401 - DNA, 120 bp, Artificial Sequence
  ENSG00000151657_5 (sequence is synthesized)
ctggaagggaaggaacaggaggtccctacttttacggaattaagcagagaaaatgatgaagagaaagtcacgtttaatttgagtaaaggagcatgtagctcatccggagcaacatcttcc

SEQ ID NO: 427402 - DNA, 120 bp, Artificial Sequence
  ENSG00000151657_6 (sequence is synthesized)
aagtcaagtactctgggaccgagtgcactgaagacgataggaagttcagcatcagtgaaacgaaaagaatcttcccagagctcaactcagtctaaagaaaagaagaaaaagaaatctgca

SEQ ID NO: 427403 - DNA, 120 bp, Artificial Sequence
  ENSG00000151657_7 (sequence is synthesized)
ctggatgaaatcatggagattgaagaggaaaagaaaagaactgcccgaacagactactggctacagcctgaaattattgtgaaaattataaccaagaaactgggagagaaatatcataag

SEQ ID NO: 427404 - DNA, 120 bp, Artificial Sequence
  ENSG00000151657_8 (sequence is synthesized)
aaaaaggctattgttaaggaagtaattgacaaatatacagctgttgtgaagatgattgattctggagacaagctgaaacttgaccagactcatttagagacagtaattccagcaccagga

SEQ ID NO: 427405 - DNA, 120 bp, Artificial Sequence
  ENSG00000151657_9 (sequence is synthesized)
aaaagaattctagttttaaatggaggctacagaggaaatgaaggtaccctagaatccatcaatgagaagactttttcagctactatcgtcattgaaactggccctttaaaaggacgcaga

SEQ ID NO: 427406 - DNA, 120 bp, Artificial Sequence
  ENSG00000151657_10 (sequence is synthesized)
gttgaaggaattcaatatgaagacatttctaaacttgcctgagtttgaaaatttgttaacaatacattaaaatcttaaagcatcaaattggtgttcgccaaggcattatgagactctact

SEQ ID NO: 427407 - DNA, 120 bp, Artificial Sequence
  ENSG00000151657_11 (sequence is synthesized)
gtgttagggtatattcttttgtataaaacaaacaggtttttgaaaatattactgtatagttgttcagctaaactttgagaagaatttaattatgtctcatgaggtatcaaactatgtaat

SEQ ID NO: 427408 - DNA, 120 bp, Artificial Sequence
  ENSG00000151657_12 (sequence is synthesized)
tttgtccttgttatttttgtttcctttgtaatttacttgatgagtttatatcttcattaaagaatgttattataaagtgttttatctatgacaatttagaatcatgtaattggaggaaat

SEQ ID NO: 427409 - DNA, 120 bp, Artificial Sequence
  ENSG00000151657_13 (sequence is synthesized)
ccttcatacactctatattttcagtagtagagtagtaaagttgaactctaagtgtgactaaattttaaatgtcaaactataaatatagaagcagctttattgtggtaataattcatatac

SEQ ID NO: 427410 - DNA, 120 bp, Artificial Sequence
  ENSG00000151657_14 (sequence is synthesized)
catacagttcactcatttaaaatatacatacaattcagtggtttttagtatttttgcagaattgtgcagccatcaccactgtctgattttaaaacactttcataccccaaaatgaaaccc

SEQ ID NO: 427411 - DNA, 120 bp, Artificial Sequence
  ENSG00000151657_15 (sequence is synthesized)
tttaatagtcaatcgctatttttcccctctgccctagccctagacagccactaatgtactttctgtctctatggatttgccctttctggacatttcttataaatggaatcatataatatg

SEQ ID NO: 427412 - DNA, 120 bp, Artificial Sequence
  ENSG00000151657_16 (sequence is synthesized)
tgatcttttatgactggcttcttacacttagcatcatgttttcaaggtttatccatgcagtagcatgtaggcgtgcttcatttgtttttatggctgcttaatattccactgtatggatgt

SEQ ID NO: 427413 - DNA, 120 bp, Artificial Sequence
  ENSG00000151657_17 (sequence is synthesized)
accgtattttgtttgtccattcatcagctgataaacatttagattgtttctactttttggctattgtgaataatgctgccatgatcacccatttacaggattttatgtgaacagaagctt

SEQ ID NO: 427414 - DNA, 120 bp, Artificial Sequence
  ENSG00000151657_18 (sequence is synthesized)
tcgcttctgccaaactcttccagagcagctataccattttacagtcctaccagcaatgttgaactatagttttatttgtttttaatttttttacttttagagacatggtctcactgtgtt

SEQ ID NO: 427415 - DNA, 76 bp, Artificial Sequence
  ENSG00000151657_19 (sequence is synthesized)
agcaccctgcctaaccatacagtttgaaataagtagggcagtgtattattagggaatgcaaaagacaggaaaccca

SEQ ID NO: 427416 - DNA, 120 bp, Artificial Sequence
  ENSG00000151657_20 (sequence is synthesized)
ggcagtgtattattagggaatgcaaaagacaggaaacccacatttgcctgtgccaaaggaaaaacgaagggatatttgtagtgcacatgactgaaaggagcagacgctagcttccagggc

SEQ ID NO: 427417 - DNA, 120 bp, Artificial Sequence
  ENSG00000151657_21 (sequence is synthesized)
agcgggaccgggtgtgaacagccttccctgggcttccgctctgtctctggctcctgtgctggctctctacatttacattcttgagcactctaggtttacatcttacccttcagcagcacc

SEQ ID NO: 427418 - DNA, 84 bp, Artificial Sequence
  ENSG00000151657_22 (sequence is synthesized)
ttcagcagcaccgggaagagagagatgacacagagtctcactctgtcacccaggctgattgcagtagtgcaatctcggctcact

SEQ ID NO: 427419 - DNA, 75 bp, Artificial Sequence
  ENSG00000151657_23 (sequence is synthesized)
ctttttttttgttctgttttttgagatagggtcttgctctgtcatccagcctggagtgcagtggcacaatcatgg

SEQ ID NO: 427420 - DNA, 80 bp, Artificial Sequence
  ENSG00000151657_24 (sequence is synthesized)
cgcctctttttttttgttctgttttttgagatagggtcttgctctgtcatccagctcctcctgggcttaggtcattgatt

SEQ ID NO: 427421 - DNA, 120 bp, Artificial Sequence
  ENSG00000151657_25 (sequence is synthesized)
ttgtgattacaggtgtgagctaccacgccttgcctgagttgatcttctacaagagttcaaacaaaaaacagaccataccaggatgatcacttcaaacatgaggatgggtataagctgacg

SEQ ID NO: 427422 - DNA, 120 bp, Artificial Sequence
  ENSG00000151657_26 (sequence is synthesized)
tcagacacaggtatggtgccaaaccctgggatctctctctttaactgagagtcagggagggctgattgcttctattctcagaagatgggagaacgtatgctgttagcagaaatgtaagag

SEQ ID NO: 427423 - DNA, 120 bp, Artificial Sequence
  ENSG00000151657_27 (sequence is synthesized)
gcagtaaagaaatactaataggatgatggcagaagctttacagaaaatgttcctcagggatgaattaaggtttttccaaagtaacctgacagcacattatggaaagcaactgggttttgg

SEQ ID NO: 427424 - DNA, 120 bp, Artificial Sequence
  ENSG00000151657_28 (sequence is synthesized)
gtgtgggcagtctttagatcaaattctggcagttctgttcattggctttgtaatattagaatgttaatgttcttgaattgcaatgtttttaatgtataaattgtcaaaatgtttttcagc

SEQ ID NO: 427425 - DNA, 120 bp, Artificial Sequence
  ENSG00000151657_29 (sequence is synthesized)
agggttgatgggagacctacagaaaatacatataaatcatcagacatgaagtccagcacatagtaggtattgaataaatggcagtgagtggtcatgtccagaaatgaagccaagaagttg

SEQ ID NO: 427426 - DNA, 120 bp, Artificial Sequence
  ENSG00000151657_30 (sequence is synthesized)
agcctggactactaagaatctggtctgaagaatttcaaaaaggagaatggttctccctgataacaaatagtgatgagtaaaaccagacaaattacatatgcctcccccaagtatgtacgt

SEQ ID NO: 427427 - DNA, 120 bp, Artificial Sequence
  ENSG00000151657_31 (sequence is synthesized)
ttggaatcaacttggtggttttcttcagagaaaaaatgtttcatgtctgcctcccacatttaattctccaacgtctttctgaaattatttcagaatgaaatgaggcagcatacttgaggt

SEQ ID NO: 427428 - DNA, 120 bp, Artificial Sequence
  ENSG00000151657_32 (sequence is synthesized)
taaattcaataaaaaatatctgaagcataaaaatacgattatagacttcacagtagttttttccctctgagtctgtagaacttgatagagtttatgctaagcaaaatgactgcagataac

SEQ ID NO: 427429 - DNA, 120 bp, Artificial Sequence
  ENSG00000151657_33 (sequence is synthesized)
taacaacaggtctcatattagactttgatttttgaagtatcataagctatttttctttatttcaaacatagactttactttttagagcagtctctgtgggttttgacaaatgtataatga

SEQ ID NO: 427430 - DNA, 120 bp, Artificial Sequence
  ENSG00000151657_34 (sequence is synthesized)
catgcatctgccactgtagtatcacacagaacagtttcactgccctagaagtttcctgtgttctgtctgttccctgtctccccccaaatccctgctgaccgctgatctttttactgtctc

SEQ ID NO: 427431 - DNA, 120 bp, Artificial Sequence
  ENSG00000151657_35 (sequence is synthesized)
cctagttttgtctccatcgaaggtcatatagttggagtcacacagggtgtagctttttcagattggcttctttcacctggtagaacatatgcatgtaaggttcctccatgttgttttggt

SEQ ID NO: 427432 - DNA, 120 bp, Artificial Sequence
  ENSG00000151657_36 (sequence is synthesized)
taggtttttgtggctcgatagcgcacttcattttagcactgcatattctattgtctgaatgcaccacagtttatgcactcacctactgaaggatatcttggttgcttacaaggtttggaa

SEQ ID NO: 427433 - DNA, 120 bp, Artificial Sequence
  ENSG00000151657_37 (sequence is synthesized)
attatgagtaaagctgctacaaacatctgtgcgcaggttttttgtggatagacgttttcaacttatttacgtaacgaccaaagagcacaattgctggatcatatgccaggagtcttctga

SEQ ID NO: 427434 - DNA, 120 bp, Artificial Sequence
  ENSG00000151657_38 (sequence is synthesized)
gaaactaccaacctgtcttccagagtgactgtaccattttgtattcaaacgagcagtgaatgagagttcctgctgctctgcatctccgtcagcatttgatgttgtcagtgttctggattt

SEQ ID NO: 427435 - DNA, 120 bp, Artificial Sequence
  ENSG00000151657_39 (sequence is synthesized)
tggccatcttaatagctgtacagtgggatcttgtcattgctttaatttgcatttctttgatgaagtatgatgtggagcatcttttcatgggcttatttgccacctgtatatcttctctgg

SEQ ID NO: 427436 - DNA, 120 bp, Artificial Sequence
  ENSG00000151657_40 (sequence is synthesized)
tgagatgtctttcaggttttttgcccattatttaattgggttactcattttcttattgttgaattttaagagttgtttgtatatttcagttgtgttctttatcgaatgtgtcttttgcaa

SEQ ID NO: 427437 - DNA, 120 bp, Artificial Sequence
  ENSG00000151657_41 (sequence is synthesized)
atcgaatgtgtcttttgcaagtattttctctcagtcagtggcctgtcttctcattttgttttaagctattcttttttaacaccccaagattttcatcgttactttttttttttttttttt

SEQ ID NO: 427438 - DNA, 120 bp, Artificial Sequence
  ENSG00000151657_42 (sequence is synthesized)
ccggctaattttttgtatttttagtacatcgttacttttaagaccactgtgcacacataaaatactaaaagctaaacttaatatctgcaggtagaagttttaaattcaagattttaacca

SEQ ID NO: 427439 - DNA, 120 bp, Artificial Sequence
  ENSG00000151657_43 (sequence is synthesized)
agaagttttaaattcaagattttaaccaaataacagagttaatgctaaaatctcacttttgaagtttatgttgaatattagcattctaatatttaatatttttctatttttgaaatagga

SEQ ID NO: 427440 - DNA, 120 bp, Artificial Sequence
  ENSG00000151657_44 (sequence is synthesized)
aatggaaaagatgcagtaggtttttcaaaagggtatcataggtgagcacttcttatagaagaagaaaactaagaggtagtgctatttacctcttcagcactaagtttatctttattttta

SEQ ID NO: 427441 - DNA, 88 bp, Artificial Sequence
  ENSG00000151657_45 (sequence is synthesized)
gctcctgccttggcctccgagagtgctgggattataggcatgaggcaccacacccagccagtaatctttagcttctagaaacaatcag

SEQ ID NO: 427442 - DNA, 120 bp, Artificial Sequence
  ENSG00000151657_46 (sequence is synthesized)
cacacccagccagtaatctttagcttctagaaacaatcagatttccttaagattttgcaattaggtttagaggagctcacttgctttttcaaatatgggttggatatgtccaaaaaaaga

SEQ ID NO: 427443 - DNA, 120 bp, Artificial Sequence
  ENSG00000151657_47 (sequence is synthesized)
gttttgcctctacaatgaaaaatgatttttaccagattatggaaaggaagattcataaaaatgtgcctttaaaaagcttttttaaagtgcaagttcaccaatttgacttttgaaaatacg

SEQ ID NO: 427444 - DNA, 120 bp, Artificial Sequence
  ENSG00000151657_48 (sequence is synthesized)
ttcattttaggaattgattttttaaggaaagttgtaaacacagcaaagcacagaattacactggttcagacttgcatcttagcaccaaaatccactatacaaatgcagacagcataaagt

SEQ ID NO: 427445 - DNA, 120 bp, Artificial Sequence
  ENSG00000151657_49 (sequence is synthesized)
aacctagtttcgctttaaatttgttgcttattttattctcccttataaatgtcattggtcttttgttagaacataatttactactttattttgaaataaagtctaagatttagcatgtaa

SEQ ID NO: 427446 - DNA, 120 bp, Artificial Sequence
  ENSG00000151657_50 (sequence is synthesized)
attgccaatgtagtgataacatcagtctctggaacttcttattatcatattctttattctttttccccctaaagtaaaaattctttttacagattagaaaaatttatgttagctttattg

SEQ ID NO: 427447 - DNA, 120 bp, Artificial Sequence
  ENSG00000151657_51 (sequence is synthesized)
gagttgtgtctgtttgcttcctaggtcagttgacttgctttattatatacttttaaaaactgaagttttttttaaatcaaaaactaatgacaagtaatgtttatttgtatttatcagagc

SEQ ID NO: 427448 - DNA, 120 bp, Artificial Sequence
  ENSG00000151657_52 (sequence is synthesized)
tcgcaaattatgtcattggtcttctgtgaagtagaggacttcacagttttatggtgttattttgctaaatagaatggtattttgaaatccaatgaggattttagggagataatttaagac

SEQ ID NO: 427449 - DNA, 120 bp, Artificial Sequence
  ENSG00000151665_0 (sequence is synthesized)
ctgggccgcccgtcgtacctgatggtaggaggcagtagttccccgcttcccttccgcgggagggagagttagctagccatccaagaaaacaccatgaaagataacgatatcaagagacta

SEQ ID NO: 427450 - DNA, 120 bp, Artificial Sequence
  ENSG00000151665_1 (sequence is synthesized)
ctgtatacccatcttttatgcatattttcaattatcctaagtgtcttcattccatcactcttcttggagaacttctcaatattggaaacacacttgacatggttgtgcatctgttctggt

SEQ ID NO: 427451 - DNA, 120 bp, Artificial Sequence
  ENSG00000151665_2 (sequence is synthesized)
tttgtaactgctgtcaatctagtactatatttagtagtgaaaccaaatacatcctctaaaagaagttcattatcacacaaggtaactggatttttgaaatgctgtatctactttcttatg

SEQ ID NO: 427452 - DNA, 120 bp, Artificial Sequence
  ENSG00000151665_3 (sequence is synthesized)
tcttgtttctcctttcatgtaatttttgttctgtatggagcaccactgatagagttggcattggaaacatttttatttgcagttattttgtctacttttactactgtgccttgcttatgt

SEQ ID NO: 427453 - DNA, 120 bp, Artificial Sequence
  ENSG00000151665_4 (sequence is synthesized)
ttgttaggaccaaacctcaaagcatggctaagagtgttcagtagaaatggagttacatccatatgggagaatagtctccagatcactacaatttctagctttgtaggagcatggcttgga

SEQ ID NO: 427454 - DNA, 120 bp, Artificial Sequence
  ENSG00000151665_5 (sequence is synthesized)
ttatttcaccactctggatatactggaatagaaagcaacttacatacaagaacaattaactggagcaaagggagatatttctttgtgcagattctgtaagggctgggcagaaatgtgtat

SEQ ID NO: 427455 - DNA, 120 bp, Artificial Sequence
  ENSG00000151665_6 (sequence is synthesized)
ggtcaaagccaagcagttccatttacagctctgttttttacgtagttacaacatgatgtgattgtagctttttaaactatgaaacccctgagagattgtaccttctagttgaaataaagt

SEQ ID NO: 427456 - DNA, 120 bp, Artificial Sequence
  ENSG00000151665_7 (sequence is synthesized)
atttataatagattgtggcttcagatgctgcttactgcttcttaaacctttaaggaacattcttaatacactttatagaattctgaggacaggttttgttttctttcaagttttgaactg

SEQ ID NO: 427457 - DNA, 120 bp, Artificial Sequence
  ENSG00000151665_8 (sequence is synthesized)
cttcattacctataaaaggtctgggtatagctgtagcatttcatttgctttctgagagaaatggacagtttccttggccactgaagatgtttctcacgtaattaaacaacagtttataca

SEQ ID NO: 427458 - DNA, 120 bp, Artificial Sequence
  ENSG00000151665_9 (sequence is synthesized)
tcttgatcctattcttttttttacagtgtgtttctttggagttaaaatggctatgatagcctcatcaaaaacagtcttcaatcccttctgggttaaagctgaacattccacatagcagca

SEQ ID NO: 427459 - DNA, 120 bp, Artificial Sequence
  ENSG00000151665_10 (sequence is synthesized)
atgaggtttttaaactcacgttttattaatgggtaggcaggtaacatgatgattaggagttctggcatcagattactgggttgaaatcctggctttgtcacttgctagtgaggatgaaat

SEQ ID NO: 427460 - DNA, 120 bp, Artificial Sequence
  ENSG00000151665_11 (sequence is synthesized)
aataaaatccctctaaaatacctagctcagcacctgacacatggttattacttaattaatgttacaggcatttgtgacctagaaaagacatagtttaatgactatatttttagccttcaa

SEQ ID NO: 427461 - DNA, 120 bp, Artificial Sequence
  ENSG00000151665_12 (sequence is synthesized)
aaaatgcaaattccatgatttatttgagttctcatatattagagaatatgttaattgtctcagtttgttgttttattttttctgcccagcagtctttcagttggtagagtggactgttaa

SEQ ID NO: 427462 - DNA, 120 bp, Artificial Sequence
  ENSG00000151665_13 (sequence is synthesized)
ggtatttagttatgccaatttagggtatttggatttcacataattttcaatcctgtctgacatttcagatgacagtagaaagaaaacgtagcacttatagatctctccatgtaccctgca

SEQ ID NO: 427463 - DNA, 120 bp, Artificial Sequence
  ENSG00000151665_14 (sequence is synthesized)
cttcctattccactggattgggaaagaccatggcagaagcagatagcaaggtaatttttgcagcagcggcctgtgttatcaagaaagctcacaaacatcagatttttcgtcttgtatcac

SEQ ID NO: 427464 - DNA, 120 bp, Artificial Sequence
  ENSG00000151665_15 (sequence is synthesized)
gccgcccgtcgtacctgatggtaggaggcagtagttccccgcttcccttccgcgggagggagagttaggtaagccccgctggacgccctcggcgtctcgcctcacgaggtgcaagctacc

SEQ ID NO: 427465 - DNA, 120 bp, Artificial Sequence
  ENSG00000151665_16 (sequence is synthesized)
cccgcgaattgccgaagcagccctgagccttggcgccccgacccgccggcgctcgccgtcagctcagcgccactcttccggcgtgccctgatggacagaccccctttcggatccgagttt

SEQ ID NO: 427466 - DNA, 120 bp, Artificial Sequence
  ENSG00000151665_17 (sequence is synthesized)
ttcccttgtcttcaactcccatgctctttgatcctgcctctcagctggttcctcgctgcccacgcttgcgccggcgtaggctcgggcagaatcccgagggacccgggttggggtggggct

SEQ ID NO: 427467 - DNA, 120 bp, Artificial Sequence
  ENSG00000151665_18 (sequence is synthesized)
gccggtgaaggtgcggcgatgcccgcgaaggctcctctgggtgccgctcggaagagccttctctccgctgcgctagccatccaagaaaacaccatgaaagataacgatatcaagagacta

SEQ ID NO: 427468 - DNA, 120 bp, Artificial Sequence
  ENSG00000151665_19 (sequence is synthesized)
cttctgcaggcgtcctgggggcacgccagggcctaaccggtgctggttccctctttgcttactctggttccttcattcattcagcaaacatttgagtttgggtcctgctcactgtattac

SEQ ID NO: 427469 - DNA, 120 bp, Artificial Sequence
  ENSG00000151665_20 (sequence is synthesized)
atccacatctgctgctggcagctgcgattccgagggtggctcagaaaaatcgctgaagggctatctgttgagagaatggattcctgatccccttgccctccctcaatcagcttaagatag

SEQ ID NO: 427470 - DNA, 120 bp, Artificial Sequence
  ENSG00000151665_21 (sequence is synthesized)
aatctatgggaaactttccctttgtcccttcttgccatccgtttgcttttcatgcctagtgtatttccttataccagagagatggctgtagcgcatgggaccttggaccacctcacctgt

SEQ ID NO: 427471 - DNA, 120 bp, Artificial Sequence
  ENSG00000151665_22 (sequence is synthesized)
ttgccgtgtttccttatcagtaaaatatctgcctttgaaaagcattgggtgaattaaatgagagctattaggataaggcccaggttcgcctttctgcttttctcactagtgggcgcccct

SEQ ID NO: 427472 - DNA, 120 bp, Artificial Sequence
  ENSG00000151665_23 (sequence is synthesized)
ccgcccacgcgcgcgcgcgcgtgtgcgtgtgtgtgtatagtatttttttttctgagatatttctattttctggaatattctccataatgtaacatattgactgttactttaaattaataa

SEQ ID NO: 427473 - DNA, 120 bp, Artificial Sequence
  ENSG00000151665_24 (sequence is synthesized)
agtccttgtttagcagtacaattagtcagctctcaggtaatttaaatacgtgtattttagagacggtaatttttttttcctccttccgttcgtgctctacttttggttggaatttaacac

SEQ ID NO: 427474 - DNA, 120 bp, Artificial Sequence
  ENSG00000151665_25 (sequence is synthesized)
ctgtaacagacgttgtcatcttggtatttctgaagcattgggatcccttggtttagtgtggtgctctttgaactcttgattccactggccaccatttgagtattggaatgtgcacttggt

SEQ ID NO: 427475 - DNA, 120 bp, Artificial Sequence
  ENSG00000151665_26 (sequence is synthesized)
gtcatttggcatttgctagaagatgtgaactactgtaatgttagacaagagtaaaaaaaaataccaacaattcagcctaagtatatttgtggagttgttggaattataacctatgcattc

SEQ ID NO: 427476 - DNA, 120 bp, Artificial Sequence
  ENSG00000151665_27 (sequence is synthesized)
tagaaaccgcataaataaactttggttataattgcaacaggcagtagataatttaatccacacagttgatttcatctctttgatattggccaaaaaagtttaaatgaattgctttattgg

SEQ ID NO: 427477 - DNA, 120 bp, Artificial Sequence
  ENSG00000151665_28 (sequence is synthesized)
tcctaggacatgacccttttgcagaaaccagtcacaatatttaagaaattagtaaatttgttctttttaggctctgagagatgtttgtaccatattaagaaaatcaaaggtagaatagaa

SEQ ID NO: 427478 - DNA, 120 bp, Artificial Sequence
  ENSG00000151665_29 (sequence is synthesized)
agtgtttcttttaatggaagaataaagtattcatcaagtctttattagcttatttatagtgagcaaagggaacctgatatttttccccccaaattggtaggctgttacttggtggaaggc

SEQ ID NO: 427479 - DNA, 120 bp, Artificial Sequence
  ENSG00000151665_30 (sequence is synthesized)
tgcccacaatgtttgattgatccttgccttgcattaattatggaattatgacttcttcagagcatattataatattgtgagcctatatagtcattgttttatgtcaccattgaaaataaa

SEQ ID NO: 427480 - DNA, 120 bp, Artificial Sequence
  ENSG00000151665_31 (sequence is synthesized)
tacgtgtgacagtctatctttaaaccttactcaataagacattgcagtttatttttattatttttgcatttctgaaagccacttagtgggattttcagaaattgcaatataagcctgtgg

SEQ ID NO: 427481 - DNA, 120 bp, Artificial Sequence
  ENSG00000151665_32 (sequence is synthesized)
taatgcttgtttccaacatggccttccttgactaaacaattttcagatattagaatcaattttccagaatattcactgcagtagatattcacttggctattactaataatgtccacactt

SEQ ID NO: 427482 - DNA, 120 bp, Artificial Sequence
  ENSG00000151665_33 (sequence is synthesized)
aacattattttctaccatgtataagctctgttaggtcatttactgcctatgattggaaaagctgaatgtatgtgttatgtttatatattcttaagctccaaatcaagaagatctcatgtt

SEQ ID NO: 427483 - DNA, 120 bp, Artificial Sequence
  ENSG00000151665_34 (sequence is synthesized)
tctttgtagatgttcaggtcttttttcatacgggttgtgtaatatgagtgtgatttcaagaattatttagtattttgctttttcagtgcagttttcccaggaattttgttttaaaatgaa

SEQ ID NO: 427484 - DNA, 120 bp, Artificial Sequence
  ENSG00000151665_35 (sequence is synthesized)
aaaaattgttattttctgcagatatttcctctatcatcgcataatactgtattttttgtatcctagctctctgatgtcaatcagtatttgataaatattgattaatgacatagctctata

SEQ ID NO: 427485 - DNA, 120 bp, Artificial Sequence
  ENSG00000151665_36 (sequence is synthesized)
ttaccatggaaacagaacctcttttcgactcatgtaggtcggatgggtagaatatgggcggaaggtggtatttgccttttaggcttttttagtctgtatcgaaggctgtgtatgtgacgg

SEQ ID NO: 427486 - DNA, 120 bp, Artificial Sequence
  ENSG00000151665_37 (sequence is synthesized)
tacaggacatgtgatctgatttgagtatacccaagaacatttgaactgttttacacattatgggaacaagttgtgtttgtagatgaaatggaagaatttattgtcctttaagcattatct

SEQ ID NO: 427487 - DNA, 120 bp, Artificial Sequence
  ENSG00000151687_0 (sequence is synthesized)
gataatcttttccttcttattcattgcagaagcttcaaaaaggacacactagatttaattagaaatgttaagattgcccaaaaaaggattacctagatttgagcaagttcaggatgaaga

SEQ ID NO: 427488 - DNA, 120 bp, Artificial Sequence
  ENSG00000151687_1 (sequence is synthesized)
cacctacctggaaaatttagcaatacaaagaaatgcatctgctttttttgaaaaatatgatcggagtgaaatacaagagttactaactactgcactagttagctggttgtctgccaaaga

SEQ ID NO: 427489 - DNA, 120 bp, Artificial Sequence
  ENSG00000151687_2 (sequence is synthesized)
ggatgtgcgctctcaagtagacctcccatgtggaattatgagtcaaatgaataacgtaggcttctccactgcaatcctactgactcccgtggaccctactgccctcttagactatagaga

SEQ ID NO: 427490 - DNA, 120 bp, Artificial Sequence
  ENSG00000151687_3 (sequence is synthesized)
ggtccatcaaatgataagagagttggctattggaatttattgcctaaatcaaatcccttccatcagtttagaagctaattatgatcagagttcttcttgtcaattacctccagcttatta

SEQ ID NO: 427491 - DNA, 120 bp, Artificial Sequence
  ENSG00000151687_4 (sequence is synthesized)
tgataccagaattgggcaaattctgatcaatattgactacatgctgaaagcactatggcatggaatatatatgcccaaagaaaaacgagctagattctctgaattgtggcgtgccatcat

SEQ ID NO: 427492 - DNA, 120 bp, Artificial Sequence
  ENSG00000151687_5 (sequence is synthesized)
ggacattgatcctgatggaaaacctcaaacaaataaagacattttttcagagtttagttcagcaggtttgactgatattacaaaggatccagactttaatgaaatctatgatgaagacgt

SEQ ID NO: 427493 - DNA, 120 bp, Artificial Sequence
  ENSG00000151687_6 (sequence is synthesized)
gaatgaagatccaacatatgatcccaacagccctgaagaaacagctgtatttatgaaatatgctgaaaatattatgctaaagttaacattcagtaccacacaaattcaacagtatgaaaa

SEQ ID NO: 427494 - DNA, 120 bp, Artificial Sequence
  ENSG00000151687_7 (sequence is synthesized)
tgtctttatatttgaaacaggctattggcttactaatgctataaaatataatcaggattatcttgatatctgtacctaccagagactacagcaaagattatatcttcaaaaaaagattat

SEQ ID NO: 427495 - DNA, 120 bp, Artificial Sequence
  ENSG00000151687_8 (sequence is synthesized)
tcaaaaacactttgagaagaaaaaagatatcagaagagggataggatacctaaagttaatatgttttctgattccatttctactgagtttaaagaagaaaatgaaagttccatatttaag

SEQ ID NO: 427496 - DNA, 120 bp, Artificial Sequence
  ENSG00000151687_9 (sequence is synthesized)
tagtctgcttcagcctttttcagatgacaaggtcaagacagagcgagaattgcctccatttatttatggaagagattttaaatgccagaattttcactacaaagagaatcaatattttca

SEQ ID NO: 427497 - DNA, 120 bp, Artificial Sequence
  ENSG00000151687_10 (sequence is synthesized)
tgttcatggaggaattgaatttgatatcagcaccccttcaattgagaatgccttggaagattttcagaaaaatttagaaaaaatacgagattgtgctgctaatacatttatagaagattc

SEQ ID NO: 427498 - DNA, 120 bp, Artificial Sequence
  ENSG00000151687_11 (sequence is synthesized)
aggatataaagaatattactcaataccagtcatggaatttcatggaaaaagctactatgtgatctattttgaactagaaactttctatcagcaactatataagacacagtggtggggagc

SEQ ID NO: 427499 - DNA, 120 bp, Artificial Sequence
  ENSG00000151687_12 (sequence is synthesized)
cataaatgaaatagtgaacaatctgagactgaaaagacttccactgacagatgctcaattacatgaacaatttaagaaaaagcttggtttcaaaagagctatgaaatgcaagagtattcc

SEQ ID NO: 427500 - DNA, 120 bp, Artificial Sequence
  ENSG00000151687_13 (sequence is synthesized)
atttggtatgaagtccgctgttgaaagagggttgtctgcagttttccacacatttagccgtaaaacctcaagctcaacaatcaatgtttcagatgaagcaggttatactatttttcatca

SEQ ID NO: 427501 - DNA, 120 bp, Artificial Sequence
  ENSG00000151687_14 (sequence is synthesized)
tgctgccctgcacaacagagtttctattatatgtcaactgtgcaatgctaacttcaaggtcaaccagaggcgctttgttacgttcagccaaggtccaacacctctacaccttgctgcaca

SEQ ID NO: 427502 - DNA, 120 bp, Artificial Sequence
  ENSG00000151687_15 (sequence is synthesized)
ggcttgctcattagaaacaacagtttgtctactgtgttccaaagctgattacacgctttctgaaaaaagaggctggatgccgattcactttgccgctttctatgacaacgtttgcatcat

SEQ ID NO: 427503 - DNA, 120 bp, Artificial Sequence
  ENSG00000151687_16 (sequence is synthesized)
tattgctctctgtaggaaggatcctagtttgctagaagctgaggcaacagctgagaatcagtgcactccactgttacttgctgccacttcaggagcactggacactattcaatacctgtt

SEQ ID NO: 427504 - DNA, 120 bp, Artificial Sequence
  ENSG00000151687_17 (sequence is synthesized)
ttctatcggtgctaactggagaaaaacagatattaaaggaaataatataatccatttatcagtgttaacctttcatacagaggttctcaaatatataataaaattaaatattcctgaact

SEQ ID NO: 427505 - DNA, 120 bp, Artificial Sequence
  ENSG00000151687_18 (sequence is synthesized)
ccttggaagtaatttgcttagcaaatgatcaatactggagatgtattttggatgcaggcaccattcctgccttaatcaatctattaaaaagttccaaaataaaactgcagtgcaaaactg

SEQ ID NO: 427506 - DNA, 120 bp, Artificial Sequence
  ENSG00000151687_19 (sequence is synthesized)
ttgggttattgagtaatatctcaacccacaaaagtgcagtgcatgctttggtagaagcgggaggcattccatctctaatcaacctactggtttgtgatgagcctgaagtacactctcgct

SEQ ID NO: 427507 - DNA, 120 bp, Artificial Sequence
  ENSG00000151687_20 (sequence is synthesized)
gtgctgtcattctatatgatattgctcaatgtgaaaacaaggatgttattgccaaatataatggaatcccaagcctgataaatctattgaacttaaacatagaaaatgtgctagtaaatg

SEQ ID NO: 427508 - DNA, 120 bp, Artificial Sequence
  ENSG00000151687_21 (sequence is synthesized)
taatgaactgtatacgggtattgtgtataggaaatgaaaacaatcaaagagctgtgagagaacataaaggcctcccatatcttatcagatttctgagttctgattcagatgtgttgaagg

SEQ ID NO: 427509 - DNA, 120 bp, Artificial Sequence
  ENSG00000151687_22 (sequence is synthesized)
ctgtatcttctgctgcaattgctgaggttgggcgtgacaataaggaaattcaggatgctatagctatggagggagcgattcctcctctggtggctctttttaaagggaaacaaattagtg

SEQ ID NO: 427510 - DNA, 120 bp, Artificial Sequence
  ENSG00000151687_23 (sequence is synthesized)
tccaaatgaaaggtgcaatggctgtggaatcactggcaagtcacaacgctcttatacagaaagcatttctggaaaaatcgttaactaaatatcttttaaaactcctaaaggcatttcaaa

SEQ ID NO: 427511 - DNA, 120 bp, Artificial Sequence
  ENSG00000151687_24 (sequence is synthesized)
tagatgttaaggaacaaggagctgttgcactttgggccttggcaggacaaacactaaaacaacaaaaatatatggcagaacaaattggatacagctttataataaatatgcttttgtcac

SEQ ID NO: 427512 - DNA, 120 bp, Artificial Sequence
  ENSG00000151687_25 (sequence is synthesized)
catcagctaaaatgcagtatgttggaggtgaagctgtcatagctctaagtaaggacagcaggatgcatcaaaatcaaatatgtgaagggaatggaattgcaccattggttcgcttactaa

SEQ ID NO: 427513 - DNA, 120 bp, Artificial Sequence
  ENSG00000151687_26 (sequence is synthesized)
gaattagtacgattgctgaaggcacacttctcagtgtcatcagagcagtgggatccatttgtattggtgtagcccatacaagcaatcctgtcagtcaacaattggttgtagatgaaaatg

SEQ ID NO: 427514 - DNA, 120 bp, Artificial Sequence
  ENSG00000151687_27 (sequence is synthesized)
cctttccagtacttatccaactactaagaaatcacccttctcctaacattaaggttgaagtggcattttccttggcatgcattgtcctagggaatgatgtgttacagaaagacttacatg

SEQ ID NO: 427515 - DNA, 120 bp, Artificial Sequence
  ENSG00000151687_28 (sequence is synthesized)
aaaatgaaggatttgaatatgctgatgtcctttatcttcttcactcaacagaaaaggatatttgcttaagagcaggctatgcattaacactttttgccttcaataatcgctttcaacaat

SEQ ID NO: 427516 - DNA, 120 bp, Artificial Sequence
  ENSG00000151687_29 (sequence is synthesized)
acttaatattggaaagtggaataatgaccatatctatttttgaacgttttcttgaatcaacagttgaaactgagaaggcaatggcagcatttcagattgttgtactggctaaagtcatta

SEQ ID NO: 427517 - DNA, 120 bp, Artificial Sequence
  ENSG00000151687_30 (sequence is synthesized)
gagatatggaccatattactttgtctgcaagaggtgttactattttagttgatagtctgtattcagttcagacttctactattgtcttgacagggaatttaatagcaagcctggctcatt

SEQ ID NO: 427518 - DNA, 120 bp, Artificial Sequence
  ENSG00000151687_31 (sequence is synthesized)
ctagagctggtatcccagaagcatttaccacattaggaacaatccaacggctctgctatcatttgtactcgggaatagaagaggttcgtgcagcttgttcctctgctcttggctacttaa

SEQ ID NO: 427519 - DNA, 120 bp, Artificial Sequence
  ENSG00000151687_32 (sequence is synthesized)
catacaatgcaaatgctttccgcatcctattaaaagaatgcaggaataaacctaatcagttcattcgtataaaaaataatatcagcagagatgcaagtattaacccagcatttttaaagg

SEQ ID NO: 427520 - DNA, 120 bp, Artificial Sequence
  ENSG00000151687_33 (sequence is synthesized)
aatttcaaatgcaacaaacactggtgggacttccttccttaagtctggagaagaatggaggaccatccataattcctatctttaaaagagggaaggagcaccgaagaaaattaaaaccta

SEQ ID NO: 427521 - DNA, 120 bp, Artificial Sequence
  ENSG00000151687_34 (sequence is synthesized)
aaattcaaccaaaagattctttgactttattacctcctgtaactaacttcatgggactcttcaaagcaacaaaaaagaccaaggattcccataatattttttctttttcatctacaatta

SEQ ID NO: 427522 - DNA, 120 bp, Artificial Sequence
  ENSG00000151687_35 (sequence is synthesized)
catcagatatcacaaatgtatcaagaccaagaatagtgtgtttgaaccaacttgggaaacatgtccagaaagccaacccagagcctgcagaaggctaataaaacattttagaatgaaagg

SEQ ID NO: 427523 - DNA, 120 bp, Artificial Sequence
  ENSG00000151687_36 (sequence is synthesized)
ggaggaccatccataattcctatctttaaaagagagctctgcggatatagaagttacttgcgacaccaccagatgcaacctgaaggaattgagaaaaccaaaataactatcatatatgga

SEQ ID NO: 427524 - DNA, 120 bp, Artificial Sequence
  ENSG00000151687_37 (sequence is synthesized)
tatgaaccaagctgctaattaaacctggagaaaaatatcagcattaaacaataataaactatcccattttgagatgggtaatgggcagatgacatatctatgtaataaaaatttggaaag

SEQ ID NO: 427525 - DNA, 120 bp, Artificial Sequence
  ENSG00000151687_38 (sequence is synthesized)
ggccggcgaggcgaggagggccgggccgccacggtggggcgaaaagccctgaaagttcctctcagttccttccggtgcgcctcccgctcgcccttgcggaggccctgagggcggattcaa

SEQ ID NO: 427526 - DNA, 120 bp, Artificial Sequence
  ENSG00000151687_39 (sequence is synthesized)
ggccccgcgagaagccatctgaggcggcgacgactgttctcagccccacgggaacgccgcggacgcagcgtccctctcccggacaagaaaacagccattctagagtttgactgatattac

SEQ ID NO: 427527 - DNA, 120 bp, Artificial Sequence
  ENSG00000151687_40 (sequence is synthesized)
atttgatatcagcaccccttcaattgagaatgccttggaagattttcaggtttaaatgatcattccttagacaatttatcatttcacaactcttttatcctattctccaaccaaaaagag

SEQ ID NO: 427528 - DNA, 120 bp, Artificial Sequence
  ENSG00000151687_41 (sequence is synthesized)
cctctgttggtacaggcactcgacagctctccaaatgattattctcacaactcaataattttttcatacattattttaacatcaatgaattaagtgcagatatatgtaaggtactgtgtt

SEQ ID NO: 427529 - DNA, 120 bp, Artificial Sequence
  ENSG00000151687_42 (sequence is synthesized)
ggatatctgagataaaattataaataagctaggtacatctatcaccctcacagaatttaaagacttctaatggactatatttgtcccagaacaggtaaccaaagagtgcagtagaaatct

SEQ ID NO: 427530 - DNA, 120 bp, Artificial Sequence
  ENSG00000151687_43 (sequence is synthesized)
ctggacactcagtacacattcttccattttcctcaaagaatcaggattagaacagagatcctttaaaattttggaacagtaattcttcacctggaatttagtataaaaattctacatttc

SEQ ID NO: 427531 - DNA, 120 bp, Artificial Sequence
  ENSG00000151687_44 (sequence is synthesized)
gtattccaactcgggactgcctcaacgcccggcgctgtctcctctgctactctgtttcggtgttttagcagaggcagatagtgagggcggcacagtgcccacggcatgccgctggactaa

SEQ ID NO: 427532 - DNA, 120 bp, Artificial Sequence
  ENSG00000151687_45 (sequence is synthesized)
gcgctaagcgggcttgggatgatgcgcacgcggggggtctgagccagccaaggggccgggcgccgcctgggggcgctgcggctgctgcgggacgcaccaggcctagtcgcccgcaggctc

SEQ ID NO: 427533 - DNA, 120 bp, Artificial Sequence
  ENSG00000151687_46 (sequence is synthesized)
ccataattcctatctttaaaagagttttcctaggacttcagctgagaccatgaaacatagaagtggagaaaagaaggaatgcattactgaaggaaaatcaataaatacggaagctgggaa

SEQ ID NO: 427534 - DNA, 120 bp, Artificial Sequence
  ENSG00000151687_47 (sequence is synthesized)
ctattatatgtcaactgtgcaatgctaacttcaaggtcaaccagaggcgctttgttacgttcagccaaggaatcagtgcactccactgttacttgctgccacttcaggagcactggacac

SEQ ID NO: 427535 - DNA, 120 bp, Artificial Sequence
  ENSG00000151689_0 (sequence is synthesized)
ctctgaatcatcgcgctccacttgtgacgtcgcggacgcccggctcgggcaggcgtggggggcccgcgcgtcccgggagccccgaggcggcagcgcgcgtttccacgccgcggtcccgcg

SEQ ID NO: 427536 - DNA, 120 bp, Artificial Sequence
  ENSG00000151689_1 (sequence is synthesized)
ggaaagccgggggcggcggcctggctgaggccaagctcggatccggtgccgagccaagcggggccgtgcgtcgccggggcttcgccttcgctcgcgtgacctccgccgtcctccccaacc

SEQ ID NO: 427537 - DNA, 120 bp, Artificial Sequence
  ENSG00000151689_2 (sequence is synthesized)
ctcgtcctctggccgcgcctgcggccgcacgcccagcgcccctcgcctaacctcgcgcccgggccgcgcctcctcctcctcctgctccccgccgcttccgtttctcgagggaaaggctgc

SEQ ID NO: 427538 - DNA, 120 bp, Artificial Sequence
  ENSG00000151689_3 (sequence is synthesized)
tgcctcctgctctgtcctcatccccggcttagctgacggcccagagggtgggtgccaattccaccagcagctgcaactgaaaagcaaggttcagaaatgtcagatatcctccgggagctg

SEQ ID NO: 427539 - DNA, 120 bp, Artificial Sequence
  ENSG00000151689_4 (sequence is synthesized)
ctctgtgtctctgagaaggctgctaacattgcccgggcgtgcagacagcaggaagccctcttccagctgctgatcgaagaaaagaaagagggagaaaagaacaagaagtttgcagttgac

SEQ ID NO: 427540 - DNA, 120 bp, Artificial Sequence
  ENSG00000151689_5 (sequence is synthesized)
ttcaagacgctggctgatgtactggtacaggaagttataaaacagaatatggagaacaagtttccaggcttggaaaaaaatatttttggagaagaatccaatgagtttactaatgactgg

SEQ ID NO: 427541 - DNA, 120 bp, Artificial Sequence
  ENSG00000151689_6 (sequence is synthesized)
ggggaaaagattaccttgaggttgtgttcaacagaggaggaaacagcagagcttcttagcaaagtcctcaatggtaacaaggtggcatctgaagcattagccagggttgttcatcaggat

SEQ ID NO: 427542 - DNA, 120 bp, Artificial Sequence
  ENSG00000151689_7 (sequence is synthesized)
taaatccaaccagggaatcttcccctgtggacttcagtgtgtcaccattttaattggtgtctatgacatacagacaggggttcccctgatgggagtcatcaatcaaccttttgtgtcacg

SEQ ID NO: 427543 - DNA, 120 bp, Artificial Sequence
  ENSG00000151689_8 (sequence is synthesized)
agatccaaacaccctcaggtggaaaggacagtgctattggggcctttcttacatggggaccaacatgcattcactacagctcaccatctctagaagaaacggcagtgaaacacacactgg

SEQ ID NO: 427544 - DNA, 120 bp, Artificial Sequence
  ENSG00000151689_9 (sequence is synthesized)
aaacaccggctctgaggcagcattctcccccagtttttcagccgtaattagtacaagtgaaaaggagactatcaaagctgcattgtcacgtgtgtgtggagatcgcatatttggggcagc

SEQ ID NO: 427545 - DNA, 120 bp, Artificial Sequence
  ENSG00000151689_10 (sequence is synthesized)
tggggctggttataagagcctatgtgttgtccaaggcctcgttgacatttacatcttttcagaagataccacattcaaatgggactcttgtgctgctcatgccatactgagggccatggg

SEQ ID NO: 427546 - DNA, 120 bp, Artificial Sequence
  ENSG00000151689_11 (sequence is synthesized)
tgggggaatagtagacttgaaagaatgcttagaaagaaatccagaaacagggcttgatttgccacagttggtgtaccacgtggaaaatgagggtgctgctggggtggatcggtgggccaa

SEQ ID NO: 427547 - DNA, 120 bp, Artificial Sequence
  ENSG00000151689_12 (sequence is synthesized)
caagggaggactcattgcatacagatccaggaagcggctggagacattcctgagcctcctggtccaaaacctggcacctgcagagacgcatacctagaggaactctaaccccggtgtacc

SEQ ID NO: 427548 - DNA, 120 bp, Artificial Sequence
  ENSG00000151689_13 (sequence is synthesized)
tgtataaactgaactgtgaaactgtttcggttatctctgtcttttgaggatggctttgtcctgttgctggttaacattcaccttcctcttttgaggagtatttttccattatgtattcat

SEQ ID NO: 427549 - DNA, 120 bp, Artificial Sequence
  ENSG00000151689_14 (sequence is synthesized)
aataatgttaatttcaataaatgacattcatgcagcaattatattggtgtatgaaattcttacagtgaatattgtgctgttagtgctgcttgaaacatttcaataaaatattgaccagga

SEQ ID NO: 427550 - DNA, 120 bp, Artificial Sequence
  ENSG00000151689_15 (sequence is synthesized)
atccccggcttagtccttcagagcttacatcatgtggccgagtttatatacctgattggcaaaacagagcctaagaaccagctctcctgtatcccaagcaaggctctttctaccgcacac

SEQ ID NO: 427551 - DNA, 120 bp, Artificial Sequence
  ENSG00000151689_16 (sequence is synthesized)
cgtttctcgagggaaaggctgctgcctcctgctctgtcctcatccccggcttagggtgaaagaaagcactacttcaatattgctgctaagcatatgatcattctaagctgacggcccaga

SEQ ID NO: 427552 - DNA, 80 bp, Artificial Sequence
  ENSG00000151689_17 (sequence is synthesized)
gtgagtcgatggcgccgggagggttcctcgcctctgcgcgccggcctgcgaggtccctgccccggcagcgaggccgcccc

SEQ ID NO: 427553 - DNA, 120 bp, Artificial Sequence
  ENSG00000151689_18 (sequence is synthesized)
gctgaaactcaccagggttaaattgatgagctttctgcgtgaaagaagggagtggtggtgatttccggagcttgtagccagggtgattagctcgcctgagtgttattagggtgttataag

SEQ ID NO: 427554 - DNA, 120 bp, Artificial Sequence
  ENSG00000151689_19 (sequence is synthesized)
gagtgtttcttggttattcaacagtgtagttagtatcgtttcttttaagaaaaaaaattgattttaacacttgaataaaagaaacactgctgatattgtttatcttgaaagctttcaaat

SEQ ID NO: 427555 - DNA, 120 bp, Artificial Sequence
  ENSG00000151689_20 (sequence is synthesized)
agattactgcagcatttgtgctgaaactcaccagggttaaattgatgagctttctgcgtgaaagaagggagtggtggtgatttccggagcttgtagccaggctgacggcccagagggtgg

SEQ ID NO: 427556 - DNA, 120 bp, Artificial Sequence
  ENSG00000151689_21 (sequence is synthesized)
atgtttggaagccacttactgtaaacaacataatatatttgaatgttaaggttcattcaatttctacctcagaatatcatgccatttaacttaagtagagagatgtggtatcttagaata

SEQ ID NO: 427557 - DNA, 120 bp, Artificial Sequence
  ENSG00000151689_22 (sequence is synthesized)
atttagcaagtccatgtatcattttagatataaatctgtggcatttaagtaacttataactcaagctttgggaaaattgcatggccctttgggaatctaatgtaagttattaatgcccca

SEQ ID NO: 427558 - DNA, 120 bp, Artificial Sequence
  ENSG00000151689_23 (sequence is synthesized)
tgtcctcatccccggcttaggtaacacgttttcctccttacgacacccaccacagggtccccgcgccgctgcccctcctccttggatctggggcccgggctggtgagcggcgcgcgccgt

SEQ ID NO: 427559 - DNA, 120 bp, Artificial Sequence
  ENSG00000151689_24 (sequence is synthesized)
gggcccggccaggcatgcccggcatcgccgctgcagccagcgcggaggggagctcaaattgcttaaaagataattatgttatataaagtgatcaatgaaaacaaacgtcatcttcatttt

SEQ ID NO: 427560 - DNA, 120 bp, Artificial Sequence
  ENSG00000151689_25 (sequence is synthesized)
ttaaaatgtacagttaagttcttattgattatagttaccctattgtgctatcaaatagtaggtctttttttttcacccattggaaggaggcttttccatctcacattgtactagtcctct

SEQ ID NO: 427561 - DNA, 120 bp, Artificial Sequence
  ENSG00000151689_26 (sequence is synthesized)
gattagtagtatttctaaaataatcccaccaattattctggttattactttttcaatgcttttgataagtaacaaatatttgaatgcctgttatatacaaattgctatgccacaggaact

SEQ ID NO: 427562 - DNA, 120 bp, Artificial Sequence
  ENSG00000151689_27 (sequence is synthesized)
atagacacatcctctcccttcaagagttctcacagtcaggaaaatgaaacacaagcaatttaaaagtaaagtacaagaggccaaataacaattcaatacagtgacatccaaaggtaaaaa

SEQ ID NO: 427563 - DNA, 120 bp, Artificial Sequence
  ENSG00000151690_0 (sequence is synthesized)
cttaatttcctgcaagatgaagttctgtgtttacatgttatgattttcattactaagccatcttttaaattttactttacagatcaacagtacaaattctgaagtttgtaaacttgctga

SEQ ID NO: 427564 - DNA, 120 bp, Artificial Sequence
  ENSG00000151690_1 (sequence is synthesized)
tggtggtggtaagccatggcagatgataaagttgctatcttaacggatgatgaagaggaacagaagagaaagtatgtgcttgcagatccctttaatggtatttccagggaaccagaacca

SEQ ID NO: 427565 - DNA, 120 bp, Artificial Sequence
  ENSG00000151690_2 (sequence is synthesized)
ccttcgaatgaaacaccttcctccacagaaacatctgctattcctgaggaggaaatagactggatagagaaacattgtgttaagataaacaacgatcttctaatttccaaggtcttttat

SEQ ID NO: 427566 - DNA, 120 bp, Artificial Sequence
  ENSG00000151690_3 (sequence is synthesized)
tttttcttttactctgcctatggctctctctatccccttttgcctgtgtattacaaacagctgggaatgtctccaagccagagtggactactagtaggtattcgttacttcattgaattc

SEQ ID NO: 427567 - DNA, 120 bp, Artificial Sequence
  ENSG00000151690_4 (sequence is synthesized)
tgcagtgcccccttttggggtgtagttgcagaccgctttaaaaaaggcaaaattgtcctcctcttttctcttttgtgttgggttttattcaacctgggcattggatttgtcaaacctgct

SEQ ID NO: 427568 - DNA, 120 bp, Artificial Sequence
  ENSG00000151690_5 (sequence is synthesized)
accttgagatgtgtaccaaagattcgcccaacaactcaccccaccaatgcaagtcaccagttaactatcctgccaacaaattcttcctttacctctttcctcaccatatcaccaaaaatg

SEQ ID NO: 427569 - DNA, 120 bp, Artificial Sequence
  ENSG00000151690_6 (sequence is synthesized)
cgtgagaaaagaaaccttttggaaacaaggctcaatgtctcagacaccgttactttgccaacagctccaaacatgaacagtgaacccactctgcagccccagacaggtgaaattactaac

SEQ ID NO: 427570 - DNA, 120 bp, Artificial Sequence
  ENSG00000151690_7 (sequence is synthesized)
cgtatgatggacttgactttgaactcaagcacagcaacccctgtctccccaggaagcgtaaccaaggagacaaccactgttattgttaccaccaccaaatctttaccttctgaccaagtc

SEQ ID NO: 427571 - DNA, 120 bp, Artificial Sequence
  ENSG00000151690_8 (sequence is synthesized)
atgcttgtttatgatcaacaagaagttgaagctatattcttggtgatcttggtagttgtcataataggagaatttttcagtgcctcttctgtcacaatcgtagacacggtcacactccag

SEQ ID NO: 427572 - DNA, 120 bp, Artificial Sequence
  ENSG00000151690_9 (sequence is synthesized)
tatctgggaaaacacagagatcgctatgggttgcagcgcatgtggggctccctgggctggggcctggcgatgctgtctgtgggcatcgggatcgactacacccacatcgaagtgctcatc

SEQ ID NO: 427573 - DNA, 120 bp, Artificial Sequence
  ENSG00000151690_10 (sequence is synthesized)
gatggaaaggggtgtaagccccccgagtacaggaattaccagatcgtcttcatcgtcttcggcgttctcatgaccatggccttgatcgttgccactcagttccggttccgctacaaccat

SEQ ID NO: 427574 - DNA, 120 bp, Artificial Sequence
  ENSG00000151690_11 (sequence is synthesized)
ttcaaaaacgatgattctaaagggaaagaggtggagatcccgcaggtggaaaggaacaactctacagagtcctctgaggagacaccaaccaccacaagccactcgcaggccttcaacttt

SEQ ID NO: 427575 - DNA, 120 bp, Artificial Sequence
  ENSG00000151690_12 (sequence is synthesized)
tgggacttaatcaagctgctctgcagcgtgcagtatggctcagtgctgtttgtggcttggttcatgggttttggatatggcttcgtgttcacctttctctactggcatttggaagacctc

SEQ ID NO: 427576 - DNA, 120 bp, Artificial Sequence
  ENSG00000151690_13 (sequence is synthesized)
aatggaactacaaccctctttggggtctgttcagtcctgagtcatgtgtctgagctgacagcatatttttttagtcacaagcttattgaattgatcggccacatcagggttctgtacatt

SEQ ID NO: 427577 - DNA, 120 bp, Artificial Sequence
  ENSG00000151690_14 (sequence is synthesized)
ggcctggcctgcaatacggctcgctatatttatatttcctacctggagaatgcctggactgttctccccatggaagttcttcaaggagtgacacacgcggccatctgggcagcatgcatt

SEQ ID NO: 427578 - DNA, 120 bp, Artificial Sequence
  ENSG00000151690_15 (sequence is synthesized)
tcttacctcagtgcagccgttccccctgagctgaggacatctgctcagggcatcctgcagggccttcacctgggtttgggaagaggatgtggtgccatgatcggaggcgtgttagtcaat

SEQ ID NO: 427579 - DNA, 120 bp, Artificial Sequence
  ENSG00000151690_16 (sequence is synthesized)
tattttggggctgctgcaaccttccgaggaattggcatggcctgcttggtgatcctactgctctttgccctgatccagtggctggcagtgccagatgaggaagaagacaagacaatgttg

SEQ ID NO: 427580 - DNA, 120 bp, Artificial Sequence
  ENSG00000151690_17 (sequence is synthesized)
gcagaaagaattcctgttccctccagtcccgttcctatagcaaccatcgacttggtacagcaacagacagaagatgtcatgccacgcattgagcccagacttccacccaagaaaactaag

SEQ ID NO: 427581 - DNA, 120 bp, Artificial Sequence
  ENSG00000151690_18 (sequence is synthesized)
caccaggaagaacaggaagatgtgaacaaaccagcctggggagtcagctcttctccctgggtgacctttgtctatgcactctaccaaattaaagagatgatgcaactcacaagagacaac

SEQ ID NO: 427582 - DNA, 120 bp, Artificial Sequence
  ENSG00000151690_19 (sequence is synthesized)
aattctcctgctggtagagcccagcctgtcccatgtgagactcactctgacccatctagaaaccagccatcccctgacgcagcagcatctcagacgcagaccagccccgctcaccccagt

SEQ ID NO: 427583 - DNA, 120 bp, Artificial Sequence
  ENSG00000151690_20 (sequence is synthesized)
gtggacccgtgcacagaggagagtgaagagcagcaggctcagctggccgcgggaggacactgagggcatcctgctcatctcacaccctgcatggaatcaggctcctcagccaggacacag

SEQ ID NO: 427584 - DNA, 120 bp, Artificial Sequence
  ENSG00000151690_21 (sequence is synthesized)
ggtgaggccccccagccaggatatgcctcccctggaggagcacagcactgcatatgcttctaaatatctaaactcattaacatggaaacacacacacaggagctacagtacatattggca

SEQ ID NO: 427585 - DNA, 120 bp, Artificial Sequence
  ENSG00000151690_22 (sequence is synthesized)
ggaaaaggtaaactttcgtaatctcattggaattacaacagggaaatggagttcaatgaggactttcagttctttgcttggttaggttaaggatgatagaatttctctgccagtgcagta

SEQ ID NO: 427586 - DNA, 120 bp, Artificial Sequence
  ENSG00000151690_23 (sequence is synthesized)
agagttgaaaccggcagttacactaagtaagtggagggaatgaaagtgtttcgaggtgaatgtggatataatttccctcttctgattatttattcttatttggttcctaacacaaactgg

SEQ ID NO: 427587 - DNA, 120 bp, Artificial Sequence
  ENSG00000151690_24 (sequence is synthesized)
gaagagatagaattcatctatactttcttttttcttggagagaaccgtttaaaaaattacaagatatatttaaaaagtaaccagataaaagtagcacatgtgcttttgttaaaaataaag

SEQ ID NO: 427588 - DNA, 120 bp, Artificial Sequence
  ENSG00000151690_25 (sequence is synthesized)
ttaaaagttaaagttaaaaaatgaagttaaaagtttcatcagaaactttacatatctttagcaaatatatttttatatgtgtatggcatataatggaaataattctttgagcaacagaag

SEQ ID NO: 427589 - DNA, 120 bp, Artificial Sequence
  ENSG00000151690_26 (sequence is synthesized)
ctattattaactactgcaagctaagccgagcttaaaaatgccttttgttttaaatgggctttgagaaaaaaaacagaaacaagcgattatttcaaatcaaccaaccaactcagtatcctg

SEQ ID NO: 427590 - DNA, 120 bp, Artificial Sequence
  ENSG00000151690_27 (sequence is synthesized)
tgttttgatagacaagagtttactaaatatattgatactgtaaatagcctctctcgctatttactatcttatagtaattcaggctctaattagctgagggaatgaaacacacaaaaatca

SEQ ID NO: 427591 - DNA, 120 bp, Artificial Sequence
  ENSG00000151690_28 (sequence is synthesized)
ctgaattcctaagagttccttaaataagcagtactagttacaaatcacagtataagatttaagtgcctgggggaaggatacaatttttagaaattacatattgggtcagttttgttttgt

SEQ ID NO: 427592 - DNA, 120 bp, Artificial Sequence
  ENSG00000151690_29 (sequence is synthesized)
ttttggtgaggaaaaggtggtaaataggaaaccatgaatgggaaggatggcaataagtagcaactatactttccaatgactaaagaaagaaaatctcagtatattcgttctcatgaagac

SEQ ID NO: 427593 - DNA, 120 bp, Artificial Sequence
  ENSG00000151690_30 (sequence is synthesized)
acagtcagacactggacaatgtaatgtatgcaactgcaaacgttacaactgcagccagaacaatggctgggtggatcgcacgtaaagcttgccactaaaaatcaaagcagaggttaacag

SEQ ID NO: 427594 - DNA, 120 bp, Artificial Sequence
  ENSG00000151690_31 (sequence is synthesized)
gaaacctggggggagtgtggaaaagggaaaactgttttagctgaataaaggtgaattatataatttataatagctgtggatgagcacaggagagagaggaaagaaaagaacagtcgaaat

SEQ ID NO: 427595 - DNA, 120 bp, Artificial Sequence
  ENSG00000151690_32 (sequence is synthesized)
gagcaactcaccttaccctctgaccctgattagacaggatcaattgtaaagtgagggcttctccatgacaccatagttctgcccaatactgcatttgggataagaaattctacacttgga

SEQ ID NO: 427596 - DNA, 120 bp, Artificial Sequence
  ENSG00000151690_33 (sequence is synthesized)
tgtctcgcttcacaataaaacacagcttaaaaataaaataactgaaagaaatagaattcagcaaatagttattttttgcacttgaactgaaacgtactgtactgtaaattatgactcatt

SEQ ID NO: 427597 - DNA, 120 bp, Artificial Sequence
  ENSG00000151690_34 (sequence is synthesized)
ttaagtgacctttaaaatcagatgtatttattatgcttgtgtaattatagaaataaagaaatgggtgacaggcttaacctcacctatgaatgtacagtatgtggatttgtgaaactgact

SEQ ID NO: 427598 - DNA, 120 bp, Artificial Sequence
  ENSG00000151690_35 (sequence is synthesized)
gtaggaagtcaaaaacttgtactgtatcttgtgtttacagttctgatttattcctttgaaaagcctgctgttttggaaatgcacagttgacatgttgaaataaaaatgaataccattttt

SEQ ID NO: 427599 - DNA, 120 bp, Artificial Sequence
  ENSG00000151690_36 (sequence is synthesized)
aaatgtttcttaaatgataaagatgtgaccaaacaaaagtcctatactctaatgaatgagaccaaattcaacatgcctttgttatggaacatttactgtgacagcagaatcgataatgca

SEQ ID NO: 427600 - DNA, 120 bp, Artificial Sequence
  ENSG00000151690_37 (sequence is synthesized)
gtcatttccagccttgtgagctgacaccttcatgggtttgtggactttgtgactttttcttcctgtccccaaagtgccatatgctaccttaaaaaatattaaagtgaattcaaattacat

SEQ ID NO: 427601 - DNA, 80 bp, Artificial Sequence
  ENSG00000151690_38 (sequence is synthesized)
gccgccccgtgctccggggacagggctccccgcgccccgcgcagctgagcgctgccgccgccgcagcagacaggatctct

SEQ ID NO: 427602 - DNA, 120 bp, Artificial Sequence
  ENSG00000151690_39 (sequence is synthesized)
gcagctgagcgctgccgccgccgcagcagacaggatctctctcagttacccaggccggagtgcagtggcgtgatcctagctcactgcagccttgaacccctgggctcaagtgattctcct

SEQ ID NO: 427603 - DNA, 120 bp, Artificial Sequence
  ENSG00000151690_40 (sequence is synthesized)
agtagcaacagaaattgagggaaggaatagatctgggaggtaaaattgacagaattatttggatgtggaagtgaggtagagacccctacatttccagcttggtatggtaattccaaaaat

SEQ ID NO: 427604 - DNA, 120 bp, Artificial Sequence
  ENSG00000151690_41 (sequence is synthesized)
ctaataggaaattcagaaaggagatgtagaatggggtgggggtgtgattgtttggtttgaaattgaaacatctagatggggatgtctagcaggcagttgacacaatattgtaagtctgaa

SEQ ID NO: 427605 - DNA, 120 bp, Artificial Sequence
  ENSG00000151690_42 (sequence is synthesized)
cgggaatgtggataagatcaacaaggaaatcttgtcgtctaagaagagaaatgggctgaggaaaatcaattataattgtctccaagatagtatttcaagtttctgatttattgaaatgtt

SEQ ID NO: 427606 - DNA, 120 bp, Artificial Sequence
  ENSG00000151690_43 (sequence is synthesized)
ggtctgtgctttattgcttaaaggttctgtacattggcctggcctgcaatacggctcgctatatttatatttcctacctggagaatgcctggactgttctccccatggaagttcttcaag

SEQ ID NO: 427607 - DNA, 120 bp, Artificial Sequence
  ENSG00000151690_44 (sequence is synthesized)
cactcaagataccttaactgggctcagttttaattactcacttttcattcaacaagatttattgaaagtctggtgggggaaatagacatgcaaacaatttcagtactctgtgagcactga

SEQ ID NO: 427608 - DNA, 120 bp, Artificial Sequence
  ENSG00000151690_45 (sequence is synthesized)
gttaaagagggtgtatacaaggtcccatagagagaatattctgccttatggagttcaggaaaacttcagaggttatgattctttcacttcttgaaagaaataaaataaattaatccattc

SEQ ID NO: 427609 - DNA, 120 bp, Artificial Sequence
  ENSG00000151690_46 (sequence is synthesized)
acttttatattaacaagcattttgaaaaggctgagggcagatatgttagaagccatcttcttattcctaaattcatgcttaaatgtaattgtccttcagttttcccactcctgagtttgg

SEQ ID NO: 427610 - DNA, 120 bp, Artificial Sequence
  ENSG00000151690_47 (sequence is synthesized)
atcaccccagacagtctgagaagcactgacaagagccgcagactacagtgtccattgctgcggggcacaaatgactgaatgaagtcaacttgaaggtcgcatgtcaggcagtactcgggt

SEQ ID NO: 427611 - DNA, 80 bp, Artificial Sequence
  ENSG00000151692_0 (sequence is synthesized)
gcgctcgcgccccgcccgcgcagccgcttctccccgcgcgggctctcggcaggcgggaggcggcagggctggcattgcag

SEQ ID NO: 427612 - DNA, 120 bp, Artificial Sequence
  ENSG00000151692_1 (sequence is synthesized)
ggcgcgggcggcaaactgcgggcacccggcaccccgcagccagtaccgggcggaggcgtcagagccgcgcaccgcggacgagcaggcccaggcatccagtaccctgctgactctgacatg

SEQ ID NO: 427613 - DNA, 120 bp, Artificial Sequence
  ENSG00000151692_2 (sequence is synthesized)
cccccagcctcccccagctctgcagggagccctggtgccagagaccttctcccatttctccctatgggtgcctgacctgagggcagagacatctgagtgtgtataagcacagcaggacac

SEQ ID NO: 427614 - DNA, 120 bp, Artificial Sequence
  ENSG00000151692_3 (sequence is synthesized)
caggacctggcctgaagacatttcctctcctcccctctggatttctcagagactgttctgcgatgaccacaacaaggtaccggcccacctgggacctggccctcgacccgctggtgtctt

SEQ ID NO: 427615 - DNA, 120 bp, Artificial Sequence
  ENSG00000151692_4 (sequence is synthesized)
gcaagctctgtcttggggagtacccagtggagcagatgacaaccatagcccagtgccaatgcatcttctgtactctgtgcctgaaacagtatgttgagctcttgatcaaagaaggattag

SEQ ID NO: 427616 - DNA, 120 bp, Artificial Sequence
  ENSG00000151692_5 (sequence is synthesized)
aaaccgcaattagctgcccagatgctgcctgccctaaacagggccacctacaggagaacgagattgagtgcatggttgcagctgaaattatgcaaagatataaaaagctacaatttgaaa

SEQ ID NO: 427617 - DNA, 120 bp, Artificial Sequence
  ENSG00000151692_6 (sequence is synthesized)
gagaggtgctgtttgatccctgtcggacttggtgcccggcgtccacctgccaagctgtgtgtcagctccaggacgtggggctgcagaccccccagccagtgcagtgcaaagcctgccgta

SEQ ID NO: 427618 - DNA, 120 bp, Artificial Sequence
  ENSG00000151692_7 (sequence is synthesized)
tggaattctgctccacctgcaaagccagctggcaccctggccagggctgcccggagaccatgccgatcaccttcctccccggggagaccagtgctgctttcaaaatggaagaagatgacg

SEQ ID NO: 427619 - DNA, 120 bp, Artificial Sequence
  ENSG00000151692_8 (sequence is synthesized)
cgcccatcaagcgctgccccaagtgcaaagtctacatcgagcgagacgaaggctgcgcgcagatgatgtgcaagaactgcaagcacgccttctgctggtactgcctggagtctctggacg

SEQ ID NO: 427620 - DNA, 120 bp, Artificial Sequence
  ENSG00000151692_9 (sequence is synthesized)
atgatttccttctgatacactacgataagggaccctgccggaacaagctgggccactcccgggcatctgtgatctggcatcggacacaggttgtgggcatttttgcaggatttgggctgc

SEQ ID NO: 427621 - DNA, 120 bp, Artificial Sequence
  ENSG00000151692_10 (sequence is synthesized)
tgctcttggtggcctcacctttcctactcctggccactccctttgtactttgctgcaagtgcaagtgcagtaaaggtgacgacgacccgttacccacctagaggaagcgcgatgctggaa

SEQ ID NO: 427622 - DNA, 120 bp, Artificial Sequence
  ENSG00000151692_11 (sequence is synthesized)
cacatccctgcctccgggaagtgtggctctcccccaaccctccccaccgtccccccttcactaaacatctttcttgccttatgtgccccattgagcttcacagtgtcaggctggacgccg

SEQ ID NO: 427623 - DNA, 120 bp, Artificial Sequence
  ENSG00000151692_12 (sequence is synthesized)
tgatttcagggacctatgtcacaatgttcgctgaggccccaggtgtggtggggaggggaggcaggtgtgggtagcgcacatccccacagatcaatctctgcagatgacagggaggtgctg

SEQ ID NO: 427624 - DNA, 120 bp, Artificial Sequence
  ENSG00000151692_13 (sequence is synthesized)
tgagaagtgcaccaggcagctttctctctgtggtagactaggcatgtctggggatggcctaagagactttctgctccttggcttctagatggcaccatgttgtcagagaagtcttttaag

SEQ ID NO: 427625 - DNA, 120 bp, Artificial Sequence
  ENSG00000151692_14 (sequence is synthesized)
gactgccactctcttcagacagaatctgattattccagcttgagagaagcactctgtttatgacaactgtttttattactaatggcatttagtaaaatcctttttagaaggtattttttt

SEQ ID NO: 427626 - DNA, 120 bp, Artificial Sequence
  ENSG00000151692_15 (sequence is synthesized)
tccaactgagtagtgaaaatcaacaaggtgcatataaaccatcctatgcctttcttgaaatgtgcattttaagaagttatagttaaacgacttttcaggagatttagaaagccttatgca

SEQ ID NO: 427627 - DNA, 120 bp, Artificial Sequence
  ENSG00000151692_16 (sequence is synthesized)
ctctttgtgtttttcttgaaacttgctgtagtaactttttgaacgctgtaagctgtgtactgttataagtgtgcttcctatattgttgcatttccttgataatattgacgtgtttaaagg

SEQ ID NO: 427628 - DNA, 120 bp, Artificial Sequence
  ENSG00000151692_17 (sequence is synthesized)
aacatctcatctccattagatttgccttttgttgttttctctctttggtgattcagctcagctcatgggcctcatcccttctctcccaggtagcagaaaacgctttttattgtattcaat

SEQ ID NO: 427629 - DNA, 120 bp, Artificial Sequence
  ENSG00000151692_18 (sequence is synthesized)
cccactgctttgctcggcaatggttctcctccgaattgctgccgtctggcctctggcctcagtcttcagatagacagtaagaagaaagcagcctcattgatccgcagatgtaggggcctc

SEQ ID NO: 427630 - DNA, 120 bp, Artificial Sequence
  ENSG00000151692_19 (sequence is synthesized)
ttggcagaggctggaggactctgggggctagggaagagcctgccagattttcacatttttaaaatgttctagtcattttgagaaatcatatatcttacacagttccaagtcctgttgcta

SEQ ID NO: 427631 - DNA, 120 bp, Artificial Sequence
  ENSG00000151692_20 (sequence is synthesized)
accgttttgctcttgttggggaaaagaacctcccatttcacttcgttttaacgtggggattttaccacttgatcttttacagggctgtctgtgaccatttccatggcagcaggatgcagg

SEQ ID NO: 427632 - DNA, 120 bp, Artificial Sequence
  ENSG00000151692_21 (sequence is synthesized)
gattaataaggacacatacacattattccaccaattgactttgaaaagtggagaaagtgtattctttaaagagaatttacttctaaaagccacaggtgcttttacaaagcaaactgcatt

SEQ ID NO: 427633 - DNA, 120 bp, Artificial Sequence
  ENSG00000151692_22 (sequence is synthesized)
gaatttaaaacttctaaaaataacaggcaaatattgtagctatattacagtgggattttaaaaatcttgttaaacattctataaagaagtaaaacaaaatccttttatctcagttatttg

SEQ ID NO: 427634 - DNA, 120 bp, Artificial Sequence
  ENSG00000151692_23 (sequence is synthesized)
tactttccctggttggaaatttatttcttatttcctaacattgaattcgttagaaaaaacagcgtcacctcactcttcacctgtcatgttgattttccttatgaacccgaagccatttag

SEQ ID NO: 427635 - DNA, 120 bp, Artificial Sequence
  ENSG00000151692_24 (sequence is synthesized)
aaaatccctgtgtgtcaaaattacattcaaaaagctctccttgtaattgcaagtttagtaactcagtaagaacatgcctgcgactccctttctggatggaacctgggctgtggctctctg

SEQ ID NO: 427636 - DNA, 120 bp, Artificial Sequence
  ENSG00000151692_25 (sequence is synthesized)
tcgtttgtggtgctgtgatggtgtctactgttagaatagcttttctggaggtgggtggcaactccacgcgggagtcattggctgggcttgagccctcagcctgtgatatgtggatgcagc

SEQ ID NO: 427637 - DNA, 120 bp, Artificial Sequence
  ENSG00000151692_26 (sequence is synthesized)
tgtccagccactgccctttaacatgcccagcacacatgggaggcctgtggccctgtgtccagtggcccacaggacacgcctccaccatatgctcatccttcctgcctgaaattgctgctg

SEQ ID NO: 427638 - DNA, 120 bp, Artificial Sequence
  ENSG00000151692_27 (sequence is synthesized)
cccatcgcatgagcccacacagtagcacccccgtccttaggatgagagtcagagcctttggaaaggctgcatccccagggctagagctcagatgaccttatttctagagggacaggctgt

SEQ ID NO: 427639 - DNA, 120 bp, Artificial Sequence
  ENSG00000151692_28 (sequence is synthesized)
tctgttggaagagtctctggcccagtcatgcacatctgtagccccagccatccttgtgccttcacctctgatgtgtttcacaagcacgtagttcaacccagatagggaccacagagattc

SEQ ID NO: 427640 - DNA, 120 bp, Artificial Sequence
  ENSG00000151692_29 (sequence is synthesized)
tggggccagccaggggcagtcaaattggcacctactggctctgactttttgtatgaagcatgcctcagtttcctcattttgatctagatataaaattaaaattgtccatttcctatataa

SEQ ID NO: 427641 - DNA, 120 bp, Artificial Sequence
  ENSG00000151692_30 (sequence is synthesized)
ataccagcaagatcactctgagatacataaactcgcatttccttctgttttagtaaggagtgccagacttatctttgatgggaatacagtatgaaccctgcttgatgtaaaatggaaata

SEQ ID NO: 427642 - DNA, 120 bp, Artificial Sequence
  ENSG00000151692_31 (sequence is synthesized)
gcacacaggcagatggccctgggtttggactttgatcttgccatcattccccagtaaaacctggggagttctgcgttgagtggacggacttattcctgtgaagcggcataatttgtctcc

SEQ ID NO: 427643 - DNA, 120 bp, Artificial Sequence
  ENSG00000151692_32 (sequence is synthesized)
attgaaaaatggcattcactcttacagatggtgttcactgcaagccccagaagcatatggcatgtgttcactaagaggcctttaatcctggggagtaaggggcgaaggcccttagacaac

SEQ ID NO: 427644 - DNA, 120 bp, Artificial Sequence
  ENSG00000151692_33 (sequence is synthesized)
catggctgctgtactgccgcccagggtgggtggccagtgaggactggccttagcccagtggacctgtggcttctctgaggcccttgagtaactgaccacatttggaggttttgctggaaa

SEQ ID NO: 427645 - DNA, 120 bp, Artificial Sequence
  ENSG00000151692_34 (sequence is synthesized)
tgcctgacctctcagtctggctctgctgtgtagtccatagcccagccagatgagcttgcagcctcataggaggtcagcaccttgcaaagatgcagtcaccatagatgtccacgtagcaga

SEQ ID NO: 427646 - DNA, 120 bp, Artificial Sequence
  ENSG00000151692_35 (sequence is synthesized)
gactgacttaggatctgagataaagcatcggattgcaggaataactgtccaaattagttcttcctcctcaactcataggagtagctgtggacagaggaaccaacatctgccacctctggc

SEQ ID NO: 427647 - DNA, 120 bp, Artificial Sequence
  ENSG00000151692_36 (sequence is synthesized)
gaaccaacatctgccacctctggcattttctttctttttttttctttttgagacggagtttcgcttttgtcccccaagctggagtacaatgacaggatctcggctcactgcaagctctgc

SEQ ID NO: 427648 - DNA, 120 bp, Artificial Sequence
  ENSG00000151692_37 (sequence is synthesized)
ggcttcccaaagtgctggaattacaggcctgagccaccccacccggcctattttcttaaaggggaacaaatgatcttgacaacatattattccataaaaccagtttagggcacaggccag

SEQ ID NO: 427649 - DNA, 120 bp, Artificial Sequence
  ENSG00000151692_38 (sequence is synthesized)
cagtttagggcacaggccagttcctgattagaacacaggacctgtgggagggactatcagagatgcaaaaattacttcaagatgagtttattgttttcatttgtattgcaaaagttagaa

SEQ ID NO: 427650 - DNA, 120 bp, Artificial Sequence
  ENSG00000151692_39 (sequence is synthesized)
gtcattttacaaattaaaaaaacatttttttcttggtagtctttaaaaattaggggattgaaaggatccaggatgggctttgtgtgtgtgtctcagattctcatttattagtgagcacac

SEQ ID NO: 427651 - DNA, 120 bp, Artificial Sequence
  ENSG00000151692_40 (sequence is synthesized)
ctgtgtatatatataaatcacaaggagatcatcaagggaaaacattttgcatgtgtaaagcttcatgaagttctctttaaaaaataccaaagcttgtttatttctgataattaacctaag

SEQ ID NO: 427652 - DNA, 120 bp, Artificial Sequence
  ENSG00000151692_41 (sequence is synthesized)
cccttatgaaaataaacaaaatgaagggattatgacaggtattaccaaaaacaccaaaaggaacaaaggggcctgcgttaaaacctaattgctaatgcttcacaactaggagagcatgcc

SEQ ID NO: 427653 - DNA, 120 bp, Artificial Sequence
  ENSG00000151692_42 (sequence is synthesized)
gtcttgatgtttaaaaaacccagggtctccacccttcctttgatttgtgcaattctgtcttccacagttccggagccttcagtgaggggtagctacatgccccatgcctgccctttcttt

SEQ ID NO: 427654 - DNA, 120 bp, Artificial Sequence
  ENSG00000151692_43 (sequence is synthesized)
ccttctttgctcactttactatgggtgtattttaatcttgtataaaaatatgcatgaatgagtcatgcacatgtatacgttatgtatttgacaagtggtggtgaaacaaaatcaaaacag

SEQ ID NO: 427655 - DNA, 120 bp, Artificial Sequence
  ENSG00000151692_44 (sequence is synthesized)
atttgatttgtgtttttgaaatgtcagtacattttgtgccactaacactgtgatgtataaaagagctgtttgaatgccttttaatgttgtgttttgtactctggaatcatatggaaaaag

SEQ ID NO: 427656 - DNA, 120 bp, Artificial Sequence
  ENSG00000151692_45 (sequence is synthesized)
tttgatttgtaatttcaatacatattttaaatgtattgtgtcttacgtagtttgtccccccctttagcagggattcctttttaaagctattttggctggaatacaggtgacttttgtaaa

SEQ ID NO: 427657 - DNA, 120 bp, Artificial Sequence
  ENSG00000151692_46 (sequence is synthesized)
gcagagctatactgctttttgaaatactaacttgcaagttcagcaacagctaagaaaacaatcctagacttggaaattgaaagattggaagagaagtggagggattcctttggaaccctt

SEQ ID NO: 427658 - DNA, 120 bp, Artificial Sequence
  ENSG00000151692_47 (sequence is synthesized)
tctcaaaaaaaaccaaaaaattctcagaacatccagatgctctaggctccatcagcagtcagttggccacctccctgggtcccagctacagccaggagaaccttgccacggagcaggtgg

SEQ ID NO: 427659 - DNA, 120 bp, Artificial Sequence
  ENSG00000151692_48 (sequence is synthesized)
aggaaaggttgcatcagtttatgtgatcatgttcaagtccctcgaggttggactcagaaccaagctgaatgctcaggaaacaagtaggctggttctgcagtctgagcctggaccctgtct

SEQ ID NO: 427660 - DNA, 80 bp, Artificial Sequence
  ENSG00000151693_0 (sequence is synthesized)
agttcccgccggctgtgcgcgcccgcctcggggctcgctctgagaggacgcggcggcagcggactcggagccctcggcgc

SEQ ID NO: 427661 - DNA, 80 bp, Artificial Sequence
  ENSG00000151693_1 (sequence is synthesized)
cgctcccctttgtccgcgggccggagcggcggcggcagcggcggtgtccgagcggcggtcggagcctgctgcggcagttg

SEQ ID NO: 427662 - DNA, 120 bp, Artificial Sequence
  ENSG00000151693_2 (sequence is synthesized)
gttgaggcggcggcgcccctgcggctgtgcgccagcgccctcgcgccgaggcgatgccggaccagatctccgtgtcggaattcgtggccgagacccatgaggactacaaggcgcccacgg

SEQ ID NO: 427663 - DNA, 120 bp, Artificial Sequence
  ENSG00000151693_3 (sequence is synthesized)
cctccagcttcaccacccgcacggcgcagtgccggaacactgtggcggccatcgaggaggctttggacgtggaccggatggttctttacaaaatgaagaaatccgtgaaagcaatcaaca

SEQ ID NO: 427664 - DNA, 120 bp, Artificial Sequence
  ENSG00000151693_4 (sequence is synthesized)
gctctgggctggctcacgtggaaaatgaagagcagtacacccaggctctggagaagtttggcggcaactgtgtatgcagagatgacccagatttaggaagtgcgttcctgaagttctcag

SEQ ID NO: 427665 - DNA, 120 bp, Artificial Sequence
  ENSG00000151693_5 (sequence is synthesized)
tgtttacaaaggagttgacagcacttttcaaaaacctgattcagaatatgaacaacataatctccttccctttggacagtttgctgaagggggacctgaaaggagtgaaaggggatctga

SEQ ID NO: 427666 - DNA, 120 bp, Artificial Sequence
  ENSG00000151693_6 (sequence is synthesized)
aaaagccttttgataaagcttggaaggactatgaaacaaaaataaccaagatagaaaaggagaaaaaggaacacgccaagctccatgggatgattcggactgaaataagcggagcggaaa

SEQ ID NO: 427667 - DNA, 120 bp, Artificial Sequence
  ENSG00000151693_7 (sequence is synthesized)
ttgccgaagagatggaaaaggagaggcgcttcttccagctacagatgtgcgagtatctgctgaaggtcaacgaaatcaagattaaaaagggagtagatttacttcagaatctgatcaaat

SEQ ID NO: 427668 - DNA, 120 bp, Artificial Sequence
  ENSG00000151693_8 (sequence is synthesized)
actttcatgcccaatgcaatttttttcaggatggactcaaagccgtggaaagcctcaaaccttccattgaaacgctgtctacggatcttcacacgatcaaacaggcccaggatgaagaaa

SEQ ID NO: 427669 - DNA, 120 bp, Artificial Sequence
  ENSG00000151693_9 (sequence is synthesized)
gaaggcagttgatacagcttcgagatattttgaaatccgcattgcaggttgaacagaaagaggactcccaaattcgtcagagcacagcttatagcttacatcagcctcagggaaacaagg

SEQ ID NO: 427670 - DNA, 120 bp, Artificial Sequence
  ENSG00000151693_10 (sequence is synthesized)
aacatgggaccgagcggaacggcagcctctacaagaagagtgacgggatccgaaaagtgtggcagaaaaggaaatgttcagttaaaaatggttttctgaccatatcccatggtaccgcta

SEQ ID NO: 427671 - DNA, 120 bp, Artificial Sequence
  ENSG00000151693_11 (sequence is synthesized)
accggcctcctgcaaagctcaacctgctaacctgccaggtgaagaccaaccctgaggagaagaagtgctttgacctcatttcacatgacagaacttaccactttcaagctgaagatgaac

SEQ ID NO: 427672 - DNA, 120 bp, Artificial Sequence
  ENSG00000151693_12 (sequence is synthesized)
aggaatgtcaaatatggatgtctgtgctgcaaaatagcaaagaagaagctttaaacaatgcatttaagggggatgacaatactggagaaaataacatcgtccaagaactgacaaaggaga

SEQ ID NO: 427673 - DNA, 120 bp, Artificial Sequence
  ENSG00000151693_13 (sequence is synthesized)
tcatctcagaagtgcagaggatgacgggcaatgacgtctgctgtgactgtggggcgccagatcctacatggctttccaccaacctgggcatcctgacctgcatcgagtgttccggaatcc

SEQ ID NO: 427674 - DNA, 120 bp, Artificial Sequence
  ENSG00000151693_14 (sequence is synthesized)
accgagagctgggggttcattattccaggatgcagtccctgaccttagatgtactgggaacatctgagctgctgctcgccaagaatattgggaatgcaggctttaatgagatcatggaat

SEQ ID NO: 427675 - DNA, 120 bp, Artificial Sequence
  ENSG00000151693_15 (sequence is synthesized)
gttgcctaccagctgaggactcagtcaaacccaacccaggcagcgacatgaatgcaagaaaggactacatcacagccaagtacatcgagaggagatacgcaaggaagaagcacgcggata

SEQ ID NO: 427676 - DNA, 120 bp, Artificial Sequence
  ENSG00000151693_16 (sequence is synthesized)
acgcggcgaagcttcacagtctttgcgaggccgtcaaaacgagagatatttttggattgctccaagcttatgctgatggtgtggatcttacggaaaaaatcccactggccaacggacatg

SEQ ID NO: 427677 - DNA, 120 bp, Artificial Sequence
  ENSG00000151693_17 (sequence is synthesized)
agccggatgaaacggccctccaccttgcagtcagatccgtggatcgaacctctcttcacattgtagactttttagttcagaacagtgggaacctggataaacagacagggaaaggcagca

SEQ ID NO: 427678 - DNA, 120 bp, Artificial Sequence
  ENSG00000151693_18 (sequence is synthesized)
cagccctgcactactgctgcctgaccgacaatgccgagtgcctcaagttgctcctgcgggggaaggcctccatcgagatagcaaacgagtcaggagagactccgctggacattgccaagc

SEQ ID NO: 427679 - DNA, 120 bp, Artificial Sequence
  ENSG00000151693_19 (sequence is synthesized)
gcctcaagcacgagcactgtgaggagctgctgacccaagccttatctggaagatttaattctcacgttcacgttgaatatgaatggcgactactccacgaagacctggatgaaagtgatg

SEQ ID NO: 427680 - DNA, 120 bp, Artificial Sequence
  ENSG00000151693_20 (sequence is synthesized)
acgacatggatgagaaattgcagcccagtcccaaccggcgggaagaccggcccatcagcttctaccagctgggctccaaccagcttcagtctaacgctgtatctttggccagagatgctg

SEQ ID NO: 427681 - DNA, 120 bp, Artificial Sequence
  ENSG00000151693_21 (sequence is synthesized)
caaaccttgccaaggagaagcagagggctttcatgcccagcatcttgcagaatgagacttacggagccctcctgagtggcagcccacctcccgcccagcctgcagcccccagcaccacca

SEQ ID NO: 427682 - DNA, 120 bp, Artificial Sequence
  ENSG00000151693_22 (sequence is synthesized)
gcgcccccccgcttcctccacggaatgttggcaaagttcagacagcctcctctgctaacaccctgtggaagacaaactctgtaagtgtggacggtggaagccggcagcgatcttcgtcag

SEQ ID NO: 427683 - DNA, 120 bp, Artificial Sequence
  ENSG00000151693_23 (sequence is synthesized)
gccccctcttcgcgtgacatctaccaatcccctgacccccacgccgcccccacccgttgccaagacgcccagcgtaatggaagccttgagccagccgagcaagcctgccccgcctgggat

SEQ ID NO: 427684 - DNA, 120 bp, Artificial Sequence
  ENSG00000151693_24 (sequence is synthesized)
ctcacagatcaggcccccacctctgcccccacagccgcccagccgcctcccgcagaagaagcctgcgccgggggctgacaagtccaccccactgaccaacaaaggccaaccgagaggacc

SEQ ID NO: 427685 - DNA, 120 bp, Artificial Sequence
  ENSG00000151693_25 (sequence is synthesized)
tgtggatctctctgcaacggaagctctgggtcctctgtccaatgctatggtcctgcagccccctgcacccatgcctaggaagtcgcaggcaaccaagttgaagcctaagcgggtgaaagc

SEQ ID NO: 427686 - DNA, 120 bp, Artificial Sequence
  ENSG00000151693_26 (sequence is synthesized)
gctctataactgtgtggctgacaaccccgatgagctcaccttctccgagggggatgtgatcatcgtggacggggaggaggaccaggagtggtggattggccacattgatggagatcctgg

SEQ ID NO: 427687 - DNA, 120 bp, Artificial Sequence
  ENSG00000151693_27 (sequence is synthesized)
tcgcaaaggcgcattcccggtgtcatttgtgcactttatcgctgactgaattgctactgaacaaaagcattaacagttatgttcctgtttcgttattggtaccaaaactcttgccagata

SEQ ID NO: 427688 - DNA, 120 bp, Artificial Sequence
  ENSG00000151693_28 (sequence is synthesized)
accagtttcatgaactgtttgtatggcagcccatgttctctaatgccactgctctgttttaaaaactcagaggcaatttttacatatcagtaattgtttttataatttgtggttttcatg

SEQ ID NO: 427689 - DNA, 120 bp, Artificial Sequence
  ENSG00000151693_29 (sequence is synthesized)
aaacattgctatgcatttattaggaaaaactgaatttcccaacaggtgaactgaaaagttattttaactattatacataatcaagatcctgcctctacggaattagctaaacctaaaaat

SEQ ID NO: 427690 - DNA, 120 bp, Artificial Sequence
  ENSG00000151693_30 (sequence is synthesized)
gtttgcattaatgaataaattcttcctgcattccttggcccagttctggagttggtgacctttatcacaattattattttaggcggccagtgaactgctgcttcagaagtccatagccca

SEQ ID NO: 427691 - DNA, 120 bp, Artificial Sequence
  ENSG00000151693_31 (sequence is synthesized)
gctctgaactttctcgataaaatgccatcagttcacctttaaagacacacattcctttgaaatccacccagtgtttaaaaagcaacttggaaatttacacattagcattgtactttctag

SEQ ID NO: 427692 - DNA, 120 bp, Artificial Sequence
  ENSG00000151693_32 (sequence is synthesized)
ccctaatttgtgaggttgcagctatcattatattctgcatgtatgtataacctgttgtgaacaatcatacttaacaaaactactgatggtttatgacaacgtagggtaactacagttcat

SEQ ID NO: 427693 - DNA, 120 bp, Artificial Sequence
  ENSG00000151693_33 (sequence is synthesized)
tctgttccaggttatataaaactgcatttcctgaatttggttaaaaactaaggatgatggattgcaaaacagttcttttaaattagtttatatgctttaggtgttttggaatttgccttc

SEQ ID NO: 427694 - DNA, 120 bp, Artificial Sequence
  ENSG00000151693_34 (sequence is synthesized)
ttgaacttcctgagtcacacagaaagcaactgtacacagtagaattctgtggcgcagaccatgctgtattaacacatcacttgctgtttcctactgagtgtaccactgccttcccttcta

SEQ ID NO: 427695 - DNA, 120 bp, Artificial Sequence
  ENSG00000151693_35 (sequence is synthesized)
gcccaggagaatgtttactcagtttagtgtcttgtatttctataatactccaacaggaatggtagtcacactgtcttgaaattgaatctgtccatctgtttataatcaagaacatatcag

SEQ ID NO: 427696 - DNA, 120 bp, Artificial Sequence
  ENSG00000151693_36 (sequence is synthesized)
aaatatataggtcccaggtaatactcccaaacatcccactttttactgtttcaggccatcatatcattcttaagctacttggggtggtagtagaggattaggttgtctattataaaacca

SEQ ID NO: 427697 - DNA, 120 bp, Artificial Sequence
  ENSG00000151693_37 (sequence is synthesized)
aaactcattcgtttaatgaacttgactgtcatacctctatttagtaattgcgagggtaagattcatagtaggaatattggaaattttggcactctgagaataaataggcatatgataccc

SEQ ID NO: 427698 - DNA, 120 bp, Artificial Sequence
  ENSG00000151693_38 (sequence is synthesized)
acttggacttttaacaaaagtaaaggaataaatttgcatataggcttggaaagtgaggcagcaatgctgttaactgcatttgttgtgatggtgcatttgattgaagcagcttgtctttat

SEQ ID NO: 427699 - DNA, 120 bp, Artificial Sequence
  ENSG00000151693_39 (sequence is synthesized)
tatgcaagactgtgtagagttttttttttttttggcattgtactttttgtttttgttataaaggaagacagaacaaactggaatgttttatgatgttgtatagcaatcgctttttacctt

SEQ ID NO: 427700 - DNA, 120 bp, Artificial Sequence
  ENSG00000151693_40 (sequence is synthesized)
tcaaagttccgggtaaaaatgtgttatatctgtagttttttgtttttgtttttttttaaagcactacatctgttttcactaattgttaatttctgtttgaacccttcatttaattttctc

SEQ ID NO: 427701 - DNA, 120 bp, Artificial Sequence
  ENSG00000151693_41 (sequence is synthesized)
atagatttaagtaaacagatgtattttgcacagtgcacttatgtctattttaacaatcctcctgcatctgtattttatagtcagccttttgaccacctggtgccagctatataaggaata

SEQ ID NO: 427702 - DNA, 120 bp, Artificial Sequence
  ENSG00000151693_42 (sequence is synthesized)
aagttgattcatatcaacattagaactccagtcccaaactaatctgtcaggttcactggtacataaatacctaggaaatatttttccagtctacaatttggtgctattgtgcagtaacta

SEQ ID NO: 427703 - DNA, 120 bp, Artificial Sequence
  ENSG00000151693_43 (sequence is synthesized)
atagtactcttaccagaggagaaattatattaacgaccctgctaatatcctttcttagttatttgctccttgcaaattaaaaaagcaactaagagaaagaaaaacattgtagatatctat

SEQ ID NO: 427704 - DNA, 120 bp, Artificial Sequence
  ENSG00000151693_44 (sequence is synthesized)
ttatatttaaagtttatgtttcatgaactgcagctgcaggattctggcattttgcatgccattctccatcagatctgggatgatggctcagaacatgtacacagactaagagtaactgtg

SEQ ID NO: 427705 - DNA, 120 bp, Artificial Sequence
  ENSG00000151693_45 (sequence is synthesized)
tgatctgttaaggggtggataacataatatgcagcttaggatgctattttgagatgtatgatattcagttcattcacctgattactttggttgcagcacaactgtatatattgtataacc

SEQ ID NO: 427706 - DNA, 120 bp, Artificial Sequence
  ENSG00000151693_46 (sequence is synthesized)
gaaattgattattttcattgtccttaatgcagtgatttataattagagcatgtttaataagtttactcttcttgttaactagtcatttgactggaaaaaaataaaatacttttaaatgga

SEQ ID NO: 427707 - DNA, 120 bp, Artificial Sequence
  ENSG00000151693_47 (sequence is synthesized)
tcggtaggaatcagaactgaatgttttgggcttagccatgcaatatcttgatctgaaggcacccactgccagcagcctcaaagctggcatcgcttgtcctcttgtccaggtgggtttgtg

SEQ ID NO: 427708 - DNA, 120 bp, Artificial Sequence
  ENSG00000151693_48 (sequence is synthesized)
tagaccaccaaggtgcccttgcagggaggcagttgccctctgtggagatgaagttcaaaggcctctgtaacttgtcccagtcaagccttcctctgtcaagtctgaaggccacctttgcaa

SEQ ID NO: 427709 - DNA, 120 bp, Artificial Sequence
  ENSG00000151693_49 (sequence is synthesized)
aaagtttactatctgcctctttaaagaaaaagtctgctcactgctgtctcagaggatcaggccttccctgcgagtgttctgtagttagggatgactgccggccagggggtcagccaggtc

SEQ ID NO: 427710 - DNA, 120 bp, Artificial Sequence
  ENSG00000151693_50 (sequence is synthesized)
agtgtagtgatgtctgcagagacatttacacccagagacacagatggaaaacaaatggctagactggtcaaatgggaggggtctttgttttatggaataaaacaaagttccttttcagtt

SEQ ID NO: 427711 - DNA, 120 bp, Artificial Sequence
  ENSG00000151693_51 (sequence is synthesized)
ccttcagcgtatgagcaaaacccatgtgatgttttctctcccttcattctgggactgcaagcattgaggccagacagggttcattccgagcagcgaagggagtgtcgacagacgggagcg

SEQ ID NO: 427712 - DNA, 120 bp, Artificial Sequence
  ENSG00000151693_52 (sequence is synthesized)
tacagtggaaagaatcccatccttgccttccccttcccttcctccctggtcttcctcttctgcttctccagcccccgtcctgtgcctggctttatgctaggtccaggagatccaccgggg

SEQ ID NO: 427713 - DNA, 120 bp, Artificial Sequence
  ENSG00000151693_53 (sequence is synthesized)
agctgaagccactggcactggtccttagctctggagttgacggatcttgtgtcacaccttttgcagatgaaaatgctgactctccagaacccatttatccagggctgccaggtggcaggt

SEQ ID NO: 427714 - DNA, 120 bp, Artificial Sequence
  ENSG00000151693_54 (sequence is synthesized)
tcgagatgagggacccctctctgccagccctgagaactacttcctcactcatgtgtttctaccttgtggctttggggtgtgctggcccagaggttcatggatggggcttgagcccgtggt

SEQ ID NO: 427715 - DNA, 120 bp, Artificial Sequence
  ENSG00000151693_55 (sequence is synthesized)
cagccacattggttcccagaagcagggacggcagaggcatggacagcgctgacccagagtgctcggacccgtcctggcaaagccatctgggcctgaggttaaggttcagccctgcccttt

SEQ ID NO: 427716 - DNA, 120 bp, Artificial Sequence
  ENSG00000151693_56 (sequence is synthesized)
catgtgatgggaccaaggcagggaaggggctgagcagactcggggcggggccagtggccagtgcccagcatcactccagaccctggccatcggtggcaggctcacgtggacagagtgctc

SEQ ID NO: 427717 - DNA, 120 bp, Artificial Sequence
  ENSG00000151693_57 (sequence is synthesized)
tggaaaagccctggttttaggatcagaaacgttgaatttagcactttcctcagggcctctcattcttccttttcccataaaaaagagacagctaagtgacagtggaggaaaccacctcac

SEQ ID NO: 427718 - DNA, 120 bp, Artificial Sequence
  ENSG00000151693_58 (sequence is synthesized)
acactctgagcttgaactcagaaggttctctgataaaaggggatgagaaaggggcaggtgccctccggtagcagtaaatctactttttccctgtctttgtagggctgacaagtccacccc

SEQ ID NO: 427719 - DNA, 120 bp, Artificial Sequence
  ENSG00000151694_0 (sequence is synthesized)
agcggcggccggaagctggctgagccggcctttggtaacgccacctgcacttctgggggcgtcgagcctggcggtagaatcttcccagtaggcggcgcgggagggaaaagaggattgagg

SEQ ID NO: 427720 - DNA, 120 bp, Artificial Sequence
  ENSG00000151694_1 (sequence is synthesized)
ggctaggccgggcggatcccgtcctcccccgatgtgagcagttttccgaaaccccgtcaggcgaaggctgcccagagaggtggagtcggtagcggggccgggaacatgaggcagtctctc

SEQ ID NO: 427721 - DNA, 120 bp, Artificial Sequence
  ENSG00000151694_2 (sequence is synthesized)
ctattcctgaccagcgtggttcctttcgtgctggcgccgcgacctccggatgacccgggcttcggcccccaccagagactcgagaagcttgattctttgctctcagactacgatattctc

SEQ ID NO: 427722 - DNA, 120 bp, Artificial Sequence
  ENSG00000151694_3 (sequence is synthesized)
tctttatctaatatccagcagcattcggtaagaaaaagagatctacagacttcaacacatgtagaaacactactaactttttcagctttgaaaaggcattttaaattatacctgacatca

SEQ ID NO: 427723 - DNA, 120 bp, Artificial Sequence
  ENSG00000151694_4 (sequence is synthesized)
agtactgaacgtttttcacaaaatttcaaggtcgtggtggtggatggtaaaaacgaaagcgagtacactgtaaaatggcaggacttcttcactggacacgtggttggtgagcctgactct

SEQ ID NO: 427724 - DNA, 120 bp, Artificial Sequence
  ENSG00000151694_5 (sequence is synthesized)
agggttctagcccacataagagatgatgatgttataatcagaatcaacacagatggggccgaatataacatagagccactttggagatttgttaatgataccaaagacaaaagaatgtta

SEQ ID NO: 427725 - DNA, 120 bp, Artificial Sequence
  ENSG00000151694_6 (sequence is synthesized)
gtttataaatctgaagatatcaagaatgtttcacgtttgcagtctccaaaagtgtgtggttatttaaaagtggataatgaagagttgctcccaaaagggttagtagacagagaaccacct

SEQ ID NO: 427726 - DNA, 120 bp, Artificial Sequence
  ENSG00000151694_7 (sequence is synthesized)
gaagagcttgttcatcgagtgaaaagaagagctgacccagatcccatgaagaacacgtgtaaattattggtggtagcagatcatcgcttctacagatacatgggcagaggggaagagagt

SEQ ID NO: 427727 - DNA, 120 bp, Artificial Sequence
  ENSG00000151694_8 (sequence is synthesized)
acaactacaaattacttaatagagctaattgacagagttgatgacatctatcggaacacttcatgggataatgcaggttttaaaggctatggaatacagatagagcagattcgcattctc

SEQ ID NO: 427728 - DNA, 120 bp, Artificial Sequence
  ENSG00000151694_9 (sequence is synthesized)
aagtctccacaagaggtaaaacctggtgaaaagcactacaacatggcaaaaagttacccaaatgaagaaaaggatgcttgggatgtgaagatgttgctagagcaatttagctttgatata

SEQ ID NO: 427729 - DNA, 120 bp, Artificial Sequence
  ENSG00000151694_10 (sequence is synthesized)
gctgaggaagcatctaaagtttgcttggcacaccttttcacataccaagattttgatatgggaactcttggattagcttatgttggctctcccagagcaaacagccatggaggtgtttgt

SEQ ID NO: 427730 - DNA, 120 bp, Artificial Sequence
  ENSG00000151694_11 (sequence is synthesized)
ccaaaggcttattatagcccagttgggaagaaaaatatctatttgaatagtggtttgacgagcacaaagaattatggtaaaaccatccttacaaaggaagctgacctggttacaactcat

SEQ ID NO: 427731 - DNA, 120 bp, Artificial Sequence
  ENSG00000151694_12 (sequence is synthesized)
gaattgggacataattttggagcagaacatgatccggatggtctagcagaatgtgccccgaatgaggaccagggagggaaatatgtcatgtatcccatagctgtgagtggcgatcacgag

SEQ ID NO: 427732 - DNA, 120 bp, Artificial Sequence
  ENSG00000151694_13 (sequence is synthesized)
aacaataagatgttttcaaactgcagtaaacaatcaatctataagaccattgaaagtaaggcccaggagtgttttcaagaacgcagcaataaagtttgtgggaactcgagggtggatgaa

SEQ ID NO: 427733 - DNA, 120 bp, Artificial Sequence
  ENSG00000151694_14 (sequence is synthesized)
ggagaagagtgtgatcctggcatcatgtatctgaacaacgacacctgctgcaacagcgactgcacgttgaaggaaggtgtccagtgcagtgacaggaacagtccttgctgtaaaaactgt

SEQ ID NO: 427734 - DNA, 120 bp, Artificial Sequence
  ENSG00000151694_15 (sequence is synthesized)
cagtttgagactgcccagaagaagtgccaggaggcgattaatgctacttgcaaaggcgtgtcctactgcacaggtaatagcagtgagtgcccgcctccaggaaatgctgaagatgacact

SEQ ID NO: 427735 - DNA, 120 bp, Artificial Sequence
  ENSG00000151694_16 (sequence is synthesized)
gtttgcttggatcttggcaagtgtaaggatgggaaatgcatccctttctgcgagagggaacagcagctggagtcctgtgcatgtaatgaaactgacaactcctgcaaggtgtgctgcagg

SEQ ID NO: 427736 - DNA, 120 bp, Artificial Sequence
  ENSG00000151694_17 (sequence is synthesized)
gacctttctggccgctgtgtgccctatgtcgatgctgaacaaaagaacttatttttgaggaaaggaaagccctgtacagtaggattttgtgacatgaatggcaaatgtgagaaacgagta

SEQ ID NO: 427737 - DNA, 120 bp, Artificial Sequence
  ENSG00000151694_18 (sequence is synthesized)
agacaacatcgttgggtctgtcctggttttctccttgatattttggattcctttcagcattcttgtccattgtgtggataagaaattggataaacagtatgaatctctgtctctgtttca

SEQ ID NO: 427738 - DNA, 120 bp, Artificial Sequence
  ENSG00000151694_19 (sequence is synthesized)
ccccagtaacgtcgaaatgctgagcagcatggattctgcatcggttcgcattatcaaaccctttcctgcgccccagactccaggccgcctgcagcctgcccctgtgatcccttcggcgcc

SEQ ID NO: 427739 - DNA, 120 bp, Artificial Sequence
  ENSG00000151694_20 (sequence is synthesized)
agcagctccaaaactggaccaccagagaatggacaccatccaggaagaccccagcacagactcacatatggacgaggatgggtttgagaaggaccccttcccaaatagcagcacagctgc

SEQ ID NO: 427740 - DNA, 120 bp, Artificial Sequence
  ENSG00000151694_21 (sequence is synthesized)
caagtcatttgaggatctcacggaccatccggtcaccagaagtgaaaaggctgcctcctttaaactgcagcgtcagaatcgtgttgacagcaaagaaacagagtgctaatttagttctca

SEQ ID NO: 427741 - DNA, 120 bp, Artificial Sequence
  ENSG00000151694_22 (sequence is synthesized)
gctcttctgacttaagtgtgcaaaatatttttatagatttgacctacaaatcaatcacagcttgtattttgtgaagactgggaagtgacttagcagatgctggtcatgtgtttgaacttc

SEQ ID NO: 427742 - DNA, 120 bp, Artificial Sequence
  ENSG00000151694_23 (sequence is synthesized)
ctgcaggtaaacagttcttgtgtggtttggcccttctccttttgaaaaggtaaggtgaaggtgaatctagcttattttgaggctttcaggttttagtttttaaaatatcttttgacctgt

SEQ ID NO: 427743 - DNA, 120 bp, Artificial Sequence
  ENSG00000151694_24 (sequence is synthesized)
ggtgcaaaagcagaaaatacagctggattgggttatgaatatttacgtttttgtaaattaatcttttatattgataacagcactgactagggaaatgatcagtttttttttatacactgt

SEQ ID NO: 427744 - DNA, 90 bp, Artificial Sequence
  ENSG00000151694_25 (sequence is synthesized)
cactgactagggaaatgatcagtttttttttatacactgtaatgaaccgctgaatatgaggcatttggcatttatttgtgatgacaactg

SEQ ID NO: 427745 - DNA, 120 bp, Artificial Sequence
  ENSG00000151694_26 (sequence is synthesized)
tgtctctaaattgtgggtctatttctagttattacccagagtttttatgtagcagggaaaatatatatctaaatttagaaatcatttgggttaatatggctcttcataattctaagacta

SEQ ID NO: 427746 - DNA, 120 bp, Artificial Sequence
  ENSG00000151694_27 (sequence is synthesized)
atgctctctagaaacctaaccacctaccttacagtgagggctatacatggtagccagttgaatttatggaatctaccaactgtttagggccctgatttgctgggcagtttttctgtattt

SEQ ID NO: 427747 - DNA, 120 bp, Artificial Sequence
  ENSG00000151694_28 (sequence is synthesized)
gccctgatttgctgggcagtttttctgtattttataagtatcttcatgtatccctgttactgatagggatacatgctcttagaaaattcactattggctgggagtggtggctcatgcctg

SEQ ID NO: 427748 - DNA, 87 bp, Artificial Sequence
  ENSG00000151694_29 (sequence is synthesized)
tctacaaacctagaatatttaaaatacaaagattgcctgttttcaaacactattgaataagagggtgagatatttcttaacaacaac

SEQ ID NO: 427749 - DNA, 120 bp, Artificial Sequence
  ENSG00000151694_30 (sequence is synthesized)
cactattgaataagagggtgagatatttcttaacaacaacaacaacaaaaaaaacaggttgttttgaatgtgatgagccagccaggagatagaatactacctgcccttagggttgggggc

SEQ ID NO: 427750 - DNA, 120 bp, Artificial Sequence
  ENSG00000151694_31 (sequence is synthesized)
tgtccccacaagacttgatacttcagaaaccctttttattgacccacaagcagatatttgaattacttcttactttattgctccaggattctggatgggctgcatttactgtgtgaagga

SEQ ID NO: 427751 - DNA, 120 bp, Artificial Sequence
  ENSG00000151694_32 (sequence is synthesized)
taaaaatcattagcctggattctgatttctataaattgccattaaaagctttttttcccctaagaactgaaatgtgctcaccagccaaaacattttaacttgtaaattttgagggcagtt

SEQ ID NO: 427752 - DNA, 120 bp, Artificial Sequence
  ENSG00000151694_33 (sequence is synthesized)
aaccaaacctgtgactaatcatatctcctcctaccccccatttccaaggacatttgttactcagatacttgttatactaatacttgaacttgtaccttatggtatttgctatcttttaac

SEQ ID NO: 427753 - DNA, 120 bp, Artificial Sequence
  ENSG00000151694_34 (sequence is synthesized)
tagtcatgatattcttatactttagttacacttttggaatttgatacaaggttgagtggggtgtgtgggtgtatgtatgagtgaaacagttctcaaaagaatgtaagaaaaaccattttt

SEQ ID NO: 427754 - DNA, 120 bp, Artificial Sequence
  ENSG00000151694_35 (sequence is synthesized)
ataaaattgtgactttttaaaaacatagtctttgtcatttatagaattaacaagctgctcagggtatattttatagctgtagcactgatatctgcattaataaatactgtcgaaacacaa

SEQ ID NO: 427755 - DNA, 88 bp, Artificial Sequence
  ENSG00000151694_36 (sequence is synthesized)
ctgactctagggttctagcccacataagagatgatgatgttataatcagaatcaacacagatggggccgaatataacatagttctcga

SEQ ID NO: 427756 - DNA, 120 bp, Artificial Sequence
  ENSG00000151694_37 (sequence is synthesized)
aagtgctgagattacaggcgtgagccatcgcgcccggcagttttcgtatattgatggagttgtgcaaacaccacctcattcaattttagaacatttttatcacctgaaaaagaaacgctg

SEQ ID NO: 427757 - DNA, 120 bp, Artificial Sequence
  ENSG00000151694_38 (sequence is synthesized)
tatcctttagccatacttcccccttcctccctaactcccccagctctaggcaaccagggatctactgtctatttagatttgtctgtttgggtcatctcatataaatggaattacataaca

SEQ ID NO: 427758 - DNA, 120 bp, Artificial Sequence
  ENSG00000151694_39 (sequence is synthesized)
tgcatgtaatggtgagcagttttattcccagtccagcagcaggagaaaacatggcctttgtctgccaggctcccttcctccatttggaggttgtgcgaatgacagcagtggtgagatcca

SEQ ID NO: 427759 - DNA, 120 bp, Artificial Sequence
  ENSG00000151694_40 (sequence is synthesized)
cactaaactatacagagctaaaatcatgcaaaagattgcaaaacaaactgccttgggaaatttccagtctaagctaaatggaccaagtataggattgaattttaagaagttggtgggaag

SEQ ID NO: 427760 - DNA, 120 bp, Artificial Sequence
  ENSG00000151694_41 (sequence is synthesized)
atggagagatggtgtggtgtaatacaggcagcacagacattctgctctcggtagtatgtctagccagcagctctggcatttgacacaatggtaatatcctaagagcatttcactttagat

SEQ ID NO: 427761 - DNA, 120 bp, Artificial Sequence
  ENSG00000151694_42 (sequence is synthesized)
ttaatgctacttgcaaaggcgtgtcctactgcacagacatccactctactgtggttaatatttgcctggatatgtgtatatccttgaaagatcatatagtgttattttgtgcatgtatgt

SEQ ID NO: 427762 - DNA, 120 bp, Artificial Sequence
  ENSG00000151694_43 (sequence is synthesized)
gtttttaatgtgccaaaatgatattctaccttaaatttacttttaaaaaattcagtatcatgttttaaagaattacccatattgtgctacagataatataacaaggtttttaatggctac

SEQ ID NO: 427763 - DNA, 120 bp, Artificial Sequence
  ENSG00000151694_44 (sequence is synthesized)
atcctaatagcaaaattttggaaacaatcaaaatgacaatcttgggataatgaatgttatcatgaatctatgcactggaatagtgtggaggaagcaggatacaagttagaagggtaacca

SEQ ID NO: 427764 - DNA, 120 bp, Artificial Sequence
  ENSG00000151694_45 (sequence is synthesized)
gtggtagctacttccattgccttcatccccttgatattccagataggacacagatcacatcctcctacgtcccttcaggaacctgtgtgtttctctgggtactgaggagtgtcattgtgt

SEQ ID NO: 427765 - DNA, 120 bp, Artificial Sequence
  ENSG00000151694_46 (sequence is synthesized)
agtcacagaggcaggatgtgctggtctctagagcaccactgctaggttgcctgtgtctgaggactccttatcctgacgttctggccaacgcttggaattaccctgctgtcctattagcat

SEQ ID NO: 427766 - DNA, 120 bp, Artificial Sequence
  ENSG00000151694_47 (sequence is synthesized)
gatgagtataaagtaatctcttgttcttacttttttttttaacagcccttgtcctaatgcacttacttacatttttcttgagcatctctttatatttttcagctattcagatttctcctg

SEQ ID NO: 427767 - DNA, 120 bp, Artificial Sequence
  ENSG00000151694_48 (sequence is synthesized)
tgaatagccagttcatatatttggttcattttttaaaaattgggtttcatgttatttcactactgtgaatttggaggagttcttatgtaatcatccatttgggcatacgtctcctatctg

SEQ ID NO: 427768 - DNA, 120 bp, Artificial Sequence
  ENSG00000151694_49 (sequence is synthesized)
ttgccattctcagaacagaaatctttaacgtaatcaaatccatcattttgttgtgtgtgtgtattttttaaacacatggttcagaaaagccatggcggatggttaaaaagatattttcca

SEQ ID NO: 427769 - DNA, 120 bp, Artificial Sequence
  ENSG00000151694_50 (sequence is synthesized)
cagctgcttctattagcttcataagttgtccttttacattcaggacttgaatctttctggagctaacctttccaggtgtccagtatcttttgttcggtcaattgttgctttaaaaatttc

SEQ ID NO: 427770 - DNA, 120 bp, Artificial Sequence
  ENSG00000151694_51 (sequence is synthesized)
aaagctatgttattactaggtatataaacggacatatctctacatctttatctgctgttccttaccagtatataatgttccttttttacccttgcgatgttttttgacttaaattgtcaa

SEQ ID NO: 427771 - DNA, 120 bp, Artificial Sequence
  ENSG00000151694_52 (sequence is synthesized)
aaagcaatattcagtttgctattctagtttttttgttcctctgatatatctatctgtcccattcttatatttttcaaaatttgtctctcttggttggttggtttgattttgtaatagctt

SEQ ID NO: 427772 - DNA, 120 bp, Artificial Sequence
  ENSG00000151694_53 (sequence is synthesized)
tattgatacataattcacactcatgtagtttgcccatttaaagtgtacagtttaatgatttttagtatattcagatttatgcagtcatcacaattaattttagaacatttacattactcc

SEQ ID NO: 427773 - DNA, 120 bp, Artificial Sequence
  ENSG00000151694_54 (sequence is synthesized)
agaaagaaaccctgtatcctttagctatgatcctccaatccccccattccccacaactcagagcaaccactaaccaccctattctttatggagttgtctgttttgaacatttcatataaa

SEQ ID NO: 427774 - DNA, 120 bp, Artificial Sequence
  ENSG00000151694_55 (sequence is synthesized)
tggaattatacaatatggtttcgtgaccacatattgtatgactggcttctttcactgaacatagcatttttaaggttcatgtatgttgtagcatgtatcagtacttcatgtacttttatt

SEQ ID NO: 427775 - DNA, 120 bp, Artificial Sequence
  ENSG00000151694_56 (sequence is synthesized)
gctgggtaaattccattgcatggatatgccacattttgtttattcattcattggttgatagacatttgggttgcttccacttttttgctataacaaataatgctgctgtgaacatttatc

SEQ ID NO: 427776 - DNA, 120 bp, Artificial Sequence
  ENSG00000151694_57 (sequence is synthesized)
tatgagtttttgtgtggacagttcctttggatattattcaggaatagaatttctgggtcatgtggtaactatgcttaatcttttgaggagctgtcagactgttttccaaaatggctacac

SEQ ID NO: 427777 - DNA, 120 bp, Artificial Sequence
  ENSG00000151694_58 (sequence is synthesized)
cattttacagtctcagcagcattgtatgagggtcccagcttctccatatcctcaccaacacttgttatcttttttattgtaactatcctaggttttgtgataaggatgcaaacagaaagc

SEQ ID NO: 427778 - DNA, 120 bp, Artificial Sequence
  ENSG00000151694_59 (sequence is synthesized)
tggaggtcttcagggacctagtgaatgaagttgtgtcctattttggcttgattttggttttccgtgtgcatagtatgacatgttgcccatgtttttatcttttgggatctgtcactatca

SEQ ID NO: 427779 - DNA, 75 bp, Artificial Sequence
  ENSG00000151694_60 (sequence is synthesized)
tgttgcccatgtttttatcttttgggatctgtcactatcacattactttgccaaatgttaggaacctgatggccc

SEQ ID NO: 427780 - DNA, 120 bp, Artificial Sequence
  ENSG00000151694_61 (sequence is synthesized)
ttatttgaataggtaacatgtacacagtacaaaagccagtgaaaagtaagtctctgcagcctgtttattgtcaaaccagttcctttccccaaagacattcatgtcactagtttcatatgt

SEQ ID NO: 427781 - DNA, 120 bp, Artificial Sequence
  ENSG00000151694_62 (sequence is synthesized)
atctttctagagatgtcgtatgcaggtatagtgtatgtatatgtctgtatttgacacaacggtgctatgcagtacacttttacaccttgctttttcatttcacagtatgttggagagtac

SEQ ID NO: 427782 - DNA, 120 bp, Artificial Sequence
  ENSG00000151694_63 (sequence is synthesized)
ttcatgttcatgcatgtaaagctgcttcacttgttttattataaatagctgcatcatgtttgagtttcagggaacctgtaaattttctttttgctttaggcatttggaaccagtcgaaga

SEQ ID NO: 427783 - DNA, 120 bp, Artificial Sequence
  ENSG00000151694_64 (sequence is synthesized)
aacaggaataatataggagattaaaacattaacttctttacatctgatgaaggatggattggagggtgtggtttagatgtgtatcatggtgggcttctaagtagttctatcccagatttg

SEQ ID NO: 427784 - DNA, 120 bp, Artificial Sequence
  ENSG00000151694_65 (sequence is synthesized)
accttgaccagccaccatcaaaactgcagagtccaccccagtaaacttaccacacagtggcagaggagaccagaatgggccttctctgcaggcaggcaggcaggcaggcaggcagagaga

SEQ ID NO: 427785 - DNA, 120 bp, Artificial Sequence
  ENSG00000151694_66 (sequence is synthesized)
ctcacagaaactctgagctgagcatggtttccttctttatctcacacttactaatgggagcctttgttacttttttttttcttctttgcaggtttaatatgaatttgtctgaaatgcctg

SEQ ID NO: 427786 - DNA, 120 bp, Artificial Sequence
  ENSG00000151694_67 (sequence is synthesized)
tataaggagaagactctattcttagccttttattcctttgatgcacaaagagatgtatattttattattctttcctgagttgtcgactgtagtcgtaataaatattttaggctcctgtaa

SEQ ID NO: 427787 - DNA, 120 bp, Artificial Sequence
  ENSG00000151694_68 (sequence is synthesized)
aattgacttcagtaggggtggttgttatttgttaaaaaataacatgattgtcaagtaactatagtatttggcatgaaaataagaggtttgttccagaaattttcatcttcttttgtttat

SEQ ID NO: 427788 - DNA, 120 bp, Artificial Sequence
  ENSG00000151694_69 (sequence is synthesized)
aatgtaagagttgaaaactctggaaaataatgggaacaacagagattagactttaaaaaagattagggaaaagggaaatggagtgatctgagggaaaatattcctgcagatatttagaaa

SEQ ID NO: 427789 - DNA, 120 bp, Artificial Sequence
  ENSG00000151694_70 (sequence is synthesized)
atttataatattataaataattcattgacatatgttttccataccatatgcttctctgtttgtttcaaacattgaatattggtactgaagaatttatgaattttggttttaaaatgtttt

SEQ ID NO: 427790 - DNA, 120 bp, Artificial Sequence
  ENSG00000151694_71 (sequence is synthesized)
gagacaccttatttttaatctcatatgccgggttgagtttctggcactccttagtttgtgacacttggctttggtgggtttaagacctgtttctatttctctttcatttccatcactctc

SEQ ID NO: 427791 - DNA, 120 bp, Artificial Sequence
  ENSG00000151694_72 (sequence is synthesized)
cagagcaagactccatctcaaaaaaaaaccaaaaaaacaaatgttaggaacctgaatatctaaatcaagctttaaagaagcatttgctagctatgctcaatgtttcatcttcactgtaat

SEQ ID NO: 427792 - DNA, 120 bp, Artificial Sequence
  ENSG00000151694_73 (sequence is synthesized)
actgtaataataaaatagattgagaaaaatgctttcttttaaataaacgtaagtaaaacaatttgaaaacgtttgttcttatcaaacagccttttgttcccttgatattttatacaaaat

SEQ ID NO: 427793 - DNA, 120 bp, Artificial Sequence
  ENSG00000151694_74 (sequence is synthesized)
acccgggcttcggcccccaccagagactcgcctctggtaaccaccattctgctgtctacctccacgagatccacttttttagcttccacacatgaagaagcttgattctttgctctcaga

SEQ ID NO: 427794 - DNA, 120 bp, Artificial Sequence
  ENSG00000151694_75 (sequence is synthesized)
taaataagttttctcagatgccaatgattttttatgatgaattgtgcagtatttttgatgttaattagttctagattgtgaagttttctgtccttagtctcgctttaggtagaaagcctt

SEQ ID NO: 427795 - DNA, 120 bp, Artificial Sequence
  ENSG00000151694_76 (sequence is synthesized)
ttatgctgctgtgctttgttccttctttgaattcatggcctttatattctctgtagttttcttcccccctccgattatgcttaagtctttagttaaaactctggcatgcaccattgaatc

SEQ ID NO: 427796 - DNA, 120 bp, Artificial Sequence
  ENSG00000151694_77 (sequence is synthesized)
cttagtcagaaaatttactaaaaaatactgtgtacctttgcaaggctgtatttatatatacagaacctttaggttctttcctctcagatatctccttctgatttcttgtaatctgttaac

SEQ ID NO: 427797 - DNA, 120 bp, Artificial Sequence
  ENSG00000151694_78 (sequence is synthesized)
agagtgtgtctagtaatgttatattaatgtcatcttaataatagctcatattaaaagttatttcaaattgctaggactaattaaaaaggcttctgacaaagggtattgctttgggcagag

SEQ ID NO: 427798 - DNA, 120 bp, Artificial Sequence
  ENSG00000151694_79 (sequence is synthesized)
gggcagagagacattttgatatgtaaattatataaattgttatctctatttttttccaagctttttgtagtaaaccatatttttataagttatatagtatagaatttagaggttgaaaaa

SEQ ID NO: 427799 - DNA, 120 bp, Artificial Sequence
  ENSG00000151702_0 (sequence is synthesized)
ctctttcgctccgctacaacaacaaacgtgcacaggggagtgagggcagggcgctcgcagggggcacgcagggagggcccagggcgccagggaggccgcgccgggctaatccgaaggggc

SEQ ID NO: 427800 - DNA, 120 bp, Artificial Sequence
  ENSG00000151702_1 (sequence is synthesized)
tgcgaggtcaggctgtaaccgggtcaatgtgtggaatattggggggctcggctgcagacttggccaaatggacgggactattaaggaggctctgtcggtggtgagcgacgaccagtccct

SEQ ID NO: 427801 - DNA, 120 bp, Artificial Sequence
  ENSG00000151702_2 (sequence is synthesized)
ctttgactcagcgtacggagcggcagcccatctccccaaggccgacatgactgcctcggggagtcctgactacgggcagccccacaagatcaaccccctcccaccacagcaggagtggat

SEQ ID NO: 427802 - DNA, 120 bp, Artificial Sequence
  ENSG00000151702_3 (sequence is synthesized)
caatcagccagtgagggtcaacgtcaagcgggagtatgaccacatgaatggatccagggagtctccggtggactgcagcgttagcaaatgcagcaagctggtgggcggaggcgagtccaa

SEQ ID NO: 427803 - DNA, 120 bp, Artificial Sequence
  ENSG00000151702_4 (sequence is synthesized)
ccccatgaactacaacagctatatggacgagaagaatggcccccctcctcccaacatgaccaccaacgagaggagagtcatcgtccccgcagaccccacactgtggacacaggagcatgt

SEQ ID NO: 427804 - DNA, 120 bp, Artificial Sequence
  ENSG00000151702_5 (sequence is synthesized)
gaggcaatggctggagtgggccataaaggagtacagcttgatggagatcgacacatcctttttccagaacatggatggcaaggaactgtgtaaaatgaacaaggaggacttcctccgcgc

SEQ ID NO: 427805 - DNA, 120 bp, Artificial Sequence
  ENSG00000151702_6 (sequence is synthesized)
caccaccctctacaacacggaagtgctgttgtcacacctcagttacctcagggaaagttcactgctggcctataatacaacctcccacaccgaccaatcctcacgattgagtgtcaaaga

SEQ ID NO: 427806 - DNA, 120 bp, Artificial Sequence
  ENSG00000151702_7 (sequence is synthesized)
agacccttcttatgactcagtcagaagaggagcttggggcaataacatgaattctggcctcaacaaaagtcctccccttggaggggcacaaacgatcagtaagaatacagagcaacggcc

SEQ ID NO: 427807 - DNA, 120 bp, Artificial Sequence
  ENSG00000151702_8 (sequence is synthesized)
ccagccagatccgtatcagatcctgggcccgaccagcagtcgcctagccaaccctggaagcgggcagatccagctgtggcaattcctcctggagctgctctccgacagcgccaacgccag

SEQ ID NO: 427808 - DNA, 120 bp, Artificial Sequence
  ENSG00000151702_9 (sequence is synthesized)
ctgtatcacctgggaggggaccaacggggagttcaaaatgacggaccccgatgaggtggccaggcgctggggcgagcggaaaagcaagcccaacatgaattacgacaagctgagccgggc

SEQ ID NO: 427809 - DNA, 120 bp, Artificial Sequence
  ENSG00000151702_10 (sequence is synthesized)
cctccgttattactatgataaaaacattatgaccaaagtgcacggcaaaagatatgcttacaaatttgacttccacggcattgcccaggctctgcagccacatccgaccgagtcgtccat

SEQ ID NO: 427810 - DNA, 120 bp, Artificial Sequence
  ENSG00000151702_11 (sequence is synthesized)
gtacaagtacccttctgacatctcctacatgccttcctaccatgcccaccagcagaaggtgaactttgtccctccccatccatcctccatgcctgtcacttcctccagcttctttggagc

SEQ ID NO: 427811 - DNA, 120 bp, Artificial Sequence
  ENSG00000151702_12 (sequence is synthesized)
cgcatcacaatactggacctcccccacggggggaatctaccccaaccccaacgtcccccgccatcctaacacccacgtgccttcacacttaggcagctactactagaagcttactcatca

SEQ ID NO: 427812 - DNA, 120 bp, Artificial Sequence
  ENSG00000151702_13 (sequence is synthesized)
gtggccttctagctgaagcccatcctgcacacttactggatgctttggactcaacaggacatatgtggccttgaagggaagacaaaactggatgttctttcttgttggatagaacctttg

SEQ ID NO: 427813 - DNA, 120 bp, Artificial Sequence
  ENSG00000151702_14 (sequence is synthesized)
tatttgttctttaaaaacattttttttaatgttggtaacttttgcttcctctacctgaacaaagagatgaataattccatgggccagtatgccagtttgaattctcagtctcctagcatc

SEQ ID NO: 427814 - DNA, 120 bp, Artificial Sequence
  ENSG00000151702_15 (sequence is synthesized)
acacggggttcagtatgacacagaatcatggacttaacccgtcatgttctggtttgagatttagtgacaaatagaggtgggaagcttataatctaattttaggaggaccaaattcagtgg

SEQ ID NO: 427815 - DNA, 120 bp, Artificial Sequence
  ENSG00000151702_16 (sequence is synthesized)
atggcaactggaacattgattgtaaggccagtgaagttttcacccaactggaatttgatggaaagaaggtttgtgtgtttaagacgccaagggcattgcagaatccctctcagtggacag

SEQ ID NO: 427816 - DNA, 120 bp, Artificial Sequence
  ENSG00000151702_17 (sequence is synthesized)
tatgcactcagctgaccactctctctagaaatagtcaagatatgaactaagaaattttaatgcaaatacatacattcctgaaagacggggaattaaattactaattttttttttttttta

SEQ ID NO: 427817 - DNA, 120 bp, Artificial Sequence
  ENSG00000151702_18 (sequence is synthesized)
aatgatgacagtggtcccagaacttggaaaagttgtagggatttctaaactcaagcagattcgcaagtgctgtgcgcttgtcagaccatcagaccagggccaaccaatcagaaggcaact

SEQ ID NO: 427818 - DNA, 120 bp, Artificial Sequence
  ENSG00000151702_19 (sequence is synthesized)
tactgtataaattatgcagagttattttcctatatctcacagtattaaaaataaataattaaaaattaagaataaataaacgagttgacctcggtcacaaaagcagttttactatcgaat

SEQ ID NO: 427819 - DNA, 120 bp, Artificial Sequence
  ENSG00000151702_20 (sequence is synthesized)
caatcgctgttattttttttaatgtaatttgtacatcttttttcaatctgtacatttgggctgtctgtatgtttttatagctggtttttaaaaagcataatatgcctatagctgaaaagg

SEQ ID NO: 427820 - DNA, 120 bp, Artificial Sequence
  ENSG00000151702_21 (sequence is synthesized)
aaacagggctgtttaagtcactgacttatgagaaagcaaagcactggtacagttatttaacaggcatacacaagcagggaaaagataatccatttagatctttaatgctttggaaatgcg

SEQ ID NO: 427821 - DNA, 120 bp, Artificial Sequence
  ENSG00000151702_22 (sequence is synthesized)
tgtaacagtactgcaataatcacagctctgggaaaaacaacgaaactttcccttgtggagaggagggattttcctgctctatataagcaacatatttttagacattaaaatatatataat

SEQ ID NO: 427822 - DNA, 120 bp, Artificial Sequence
  ENSG00000151702_23 (sequence is synthesized)
tttgcaggtaattgttgacttttttaactatattaagtgttaagctgacaactgtcaaagaagaccatgttgtaaaataatttgactaaataaatggttccttctctcagtgctgaggac

SEQ ID NO: 427823 - DNA, 120 bp, Artificial Sequence
  ENSG00000151702_24 (sequence is synthesized)
agttttcttatttaccgcccccgttaggtcaaagggttttccctggggaactttcctatttacttcttgcactatcaagaatttttcgaatgtacctactgcagtacagcagaaggtaaa

SEQ ID NO: 427824 - DNA, 120 bp, Artificial Sequence
  ENSG00000151702_25 (sequence is synthesized)
aaatcagtgtggtttttcattgttgttgatgatgtttgtagtgtttttgtgtgtgttatttaaatcttcctccagcctaaaagggttttataaaacagcagctaaggccatggataaacc

SEQ ID NO: 427825 - DNA, 120 bp, Artificial Sequence
  ENSG00000151702_26 (sequence is synthesized)
tgtatgtaaggactggagcaaagcgagctggtctatccagactggtctgtgagatttaactctgcagcctcccctgggcacttcagacccagacggccaccttctgccactccagcaaag

SEQ ID NO: 427826 - DNA, 120 bp, Artificial Sequence
  ENSG00000151702_27 (sequence is synthesized)
aataagcgccctgcttccttcaggtctcagaccaggactttatggctcatgcagatttttaaggtcatttttcttcccaaggaagaaacttgcctccagttccttcactgttaggtagct

SEQ ID NO: 427827 - DNA, 120 bp, Artificial Sequence
  ENSG00000151702_28 (sequence is synthesized)
tattttcattttctctattttacaatgaaaagagtgagacctgggaagtccttgatttgcaaggaattagactcacagcattggtaaccctagaaccttcttagggtaacactaagtacc

SEQ ID NO: 427828 - DNA, 120 bp, Artificial Sequence
  ENSG00000151702_29 (sequence is synthesized)
ttctagacaacatgtctacctaaatgaaatgggatgtgtttcggaacatttgtctccagtttttttttaatcttgcaccctgccatttaaaaagatgtgtaaagcacatattctcaacat

SEQ ID NO: 427829 - DNA, 120 bp, Artificial Sequence
  ENSG00000151702_30 (sequence is synthesized)
gtgtaaagcacatattctcaacatatgcacattgatttataaatcatatatacaaactgttacattattcttcatattagaaaacaaatacaaaatagaacattttaaatggtgatataa

SEQ ID NO: 427830 - DNA, 120 bp, Artificial Sequence
  ENSG00000151702_31 (sequence is synthesized)
acagtctctccatctgcatccccacttcatcaccatcccaccgtctctccctcgctccactcgcgggtaaccgaggcttctccctcccaggctggttcttgggcgttcccgacccttagc

SEQ ID NO: 427831 - DNA, 120 bp, Artificial Sequence
  ENSG00000151702_32 (sequence is synthesized)
ctcaccccgggaaaagtctgggtctgctctgcgctgttgcgtgctgcgctcctgggacctgctgactgtcctagagggaacgtcccgcggtagtgtcagttccctggggaccaggaaggg

SEQ ID NO: 427832 - DNA, 120 bp, Artificial Sequence
  ENSG00000151702_33 (sequence is synthesized)
tttgtttttaagcaagaagaatccctttagaggaggaattaggaaagaaaaaaaagtcaaacagaaacagaaggagtggaggtttgtctctctcttttgtcccctgccttgcccttcctc

SEQ ID NO: 427833 - DNA, 120 bp, Artificial Sequence
  ENSG00000151702_34 (sequence is synthesized)
cctatcccatccccctcactttctgtgttgcttttcatgccagttgctaaagactgtaattttaaaactgaacgggcttttccagagccttgaggaatgtgcatctgcacgtggattttt

SEQ ID NO: 427834 - DNA, 120 bp, Artificial Sequence
  ENSG00000151702_35 (sequence is synthesized)
ccacaaaaaaagtgtccctgtcttttggatcttcttagccagaaacaatgaggccaggcaatcagagtccatccgtcttcccaactcttattctaatttgtttgagaggctcagaagggg

SEQ ID NO: 427835 - DNA, 120 bp, Artificial Sequence
  ENSG00000151702_36 (sequence is synthesized)
ctgaagggcatggttgtgtttcaccccgtcagactctgttgtttgatgaggtttgtgctccatttgttcggatggtttttatggtttctttgttgttcatggaataactttgaaggtcat

SEQ ID NO: 427836 - DNA, 120 bp, Artificial Sequence
  ENSG00000151702_37 (sequence is synthesized)
aattctgtatcctcaagctcctctgctattcctgctcaatgtctcaatgggactcataccaagagaaagggaaggaagaagtttccagctagttagttaagcaatttctcaacacattta

SEQ ID NO: 427837 - DNA, 120 bp, Artificial Sequence
  ENSG00000151702_38 (sequence is synthesized)
tggaagcatgtggaatctttcaagaaaggggttacgatcacaaaagttcgatttgaggagtattctccaagacaactgagaagcaagcccttagtcatgcccaggtggggagcaggtctc

SEQ ID NO: 427838 - DNA, 120 bp, Artificial Sequence
  ENSG00000151702_39 (sequence is synthesized)
caacctctcatttcctgatccagcccctttcccagccacatttctggcctcttccctttctctgtggtcatcagcccagccctctccactatcaatagaaaagcccgagagccctcagag

SEQ ID NO: 427839 - DNA, 120 bp, Artificial Sequence
  ENSG00000151702_40 (sequence is synthesized)
agcctggaatgtgctcccaccgctgtgatgtcatcccacatcatccatgtgctgaaatcagggactggagtcggcccccaggaatgtcatggccatgggctttgagacactcttcttatg

SEQ ID NO: 427840 - DNA, 120 bp, Artificial Sequence
  ENSG00000151702_41 (sequence is synthesized)
ggcctttcacccaatccagaccttgcctgctcttcagagctgcttgaaggattttgctacagaactatggacatttaagaaatgtctaaccttgtgtcagtttatatttgtagaacgctt

SEQ ID NO: 427841 - DNA, 120 bp, Artificial Sequence
  ENSG00000151702_42 (sequence is synthesized)
cataaggtgcttttccatatgttatctcatctgatcatttccacaaccccataaggtagataaaacataaatttttatttccgtattaaaattgaagcccagaggagacttttgattcat

SEQ ID NO: 427842 - DNA, 120 bp, Artificial Sequence
  ENSG00000151702_43 (sequence is synthesized)
cccaggtttcacaacaaagagtgtcaggaagagaacttgaaccaatcctctgacttcacattcagggttcttcccattactttggctcccagataagactacaatcttctgaaagtcaga

SEQ ID NO: 427843 - DNA, 120 bp, Artificial Sequence
  ENSG00000151702_44 (sequence is synthesized)
gtgttaatattccaaccccagggggtgagtacacttccagaatttagggatgctttaaaagccattgctgaattgaattttatttctcctgatcactacagataatgctcatgcaacttt

SEQ ID NO: 427844 - DNA, 120 bp, Artificial Sequence
  ENSG00000151702_45 (sequence is synthesized)
tctgagaagcaggcgatgctaatgtacccctatttgttattgttcattagacccttcttatgactcagtcagaagaggagcttggggcaataacatgaattctggcctcaacaaaagtaa

SEQ ID NO: 427845 - DNA, 120 bp, Artificial Sequence
  ENSG00000151702_46 (sequence is synthesized)
gtaaatgttttatagttctttggaggaaagcatgtttctgaggacaggattggagaacaggatcatgagacacaggagagcagcaagcatttgtttccctgctttttgagtagacatcaa

SEQ ID NO: 427846 - DNA, 120 bp, Artificial Sequence
  ENSG00000151702_47 (sequence is synthesized)
aattatttgccaatttagggcctttccatgataccagtccttgaaagatgatatgggattttcgtttagatttttgagttttgttttattgcgctcggttttagaacatgggaaatttga

SEQ ID NO: 427847 - DNA, 120 bp, Artificial Sequence
  ENSG00000151702_48 (sequence is synthesized)
aggttttcttgagacaaggttctgtaccaatgaatggtcactgtcactgggttttgcttttgttatttaaatcaagataatgactctctataattttgctcccgtaactgttgaggctaa

SEQ ID NO: 427848 - DNA, 120 bp, Artificial Sequence
  ENSG00000151702_49 (sequence is synthesized)
gtcgtaccaatttccccattccccttgatactgggtagatttcctcatatcatcatctcaccacttggtggagaaattgatgtctcagaaccctgccatctcctcaacaggttatcttct

SEQ ID NO: 427849 - DNA, 120 bp, Artificial Sequence
  ENSG00000151702_50 (sequence is synthesized)
gtccctgatgaggagatgccggggggtctgggacatcaggttctccaccaagtggtgagatgatgacatgtcgaagtctacccaatatcccccagtaagagaataaggggcaagaatgac

SEQ ID NO: 427850 - DNA, 120 bp, Artificial Sequence
  ENSG00000151702_51 (sequence is synthesized)
tcatgaactcctgtaccagaaatcaaacttgccatgcctaggaagcaaaatatgaagcacatgaacaggtggtaaagggaattctttcaagaaagaggttggggttacaaattaatgccc

SEQ ID NO: 427851 - DNA, 120 bp, Artificial Sequence
  ENSG00000151702_52 (sequence is synthesized)
aaacaataaccaagaccccttccaattatgtgtattaattatttacttactctgcacatgacatttggcaatataagattcacaaagatgaatcagacatgcactggtcccataagcggg

SEQ ID NO: 427852 - DNA, 120 bp, Artificial Sequence
  ENSG00000151702_53 (sequence is synthesized)
agagagaaatcaagcacacacagaactcctttcttctggttggtatcaaggaaggctttgtggacctggtagcacttgagttagctctggaaggagaggcaggatttggacctgtggcga

SEQ ID NO: 427853 - DNA, 120 bp, Artificial Sequence
  ENSG00000151702_54 (sequence is synthesized)
tatgggctggggaagacatgagcttggcatgtctgacagtcagtgaggacctcaggttcctggagcttaggatgtgtgatgcagaagaagtctggaaaggtaagaaacagaattgtaaat

SEQ ID NO: 427854 - DNA, 120 bp, Artificial Sequence
  ENSG00000151702_55 (sequence is synthesized)
gaagagtaatgaggacaccagtcagactaagccagaaaccatgcaagaagcaatacagatctgtgatgcagaagtgatcatgggaatggaaggggtgtgtgagagataccaaggaggaaa

SEQ ID NO: 427855 - DNA, 120 bp, Artificial Sequence
  ENSG00000151702_56 (sequence is synthesized)
ctcacaagacagggacaccaggaagcagctgatctttgctcagatgtcactttctcagtaaggacttctctaactttccgatttgaaaatgaaatccacagcctcagtaccatcagtgat

SEQ ID NO: 427856 - DNA, 120 bp, Artificial Sequence
  ENSG00000151702_57 (sequence is synthesized)
gctatactgttagtttactttttaaaaatttgaaaatgaaaaggtgacatttaagcaaagacaaaattttaagaatttaaaaatgtgtttattattgtctctcccattggaatgcgagtt

SEQ ID NO: 427857 - DNA, 120 bp, Artificial Sequence
  ENSG00000151702_58 (sequence is synthesized)
ctaccaggaactgcttgttcattcctgaatctccagcctggagaacagggccagcacatagtagattctaggtaaatgtttctaaaataagatgaataaatgagtcagtggagagtgggc

SEQ ID NO: 427858 - DNA, 120 bp, Artificial Sequence
  ENSG00000151702_59 (sequence is synthesized)
gaaggaatgagtgagaaagcacatctgtcaagacgtcttgctcccctcggggagctgggtcctactcactgcatttctttccctcttgccacaggtcctccccttggaggggcacaaacg

SEQ ID NO: 427859 - DNA, 120 bp, Artificial Sequence
  ENSG00000151702_60 (sequence is synthesized)
gtcaacgtcaagcgggagtatgaccacatgaatggatccaggcgccagctgcctcattaaagagcagccttttatgctgggcttcacctgtacccaccctgagcggcagccgtggagccc

SEQ ID NO: 427860 - DNA, 120 bp, Artificial Sequence
  ENSG00000151702_61 (sequence is synthesized)
catggccgcacgcagggcttgcgctggctggaggaggcacggtgcttgggagctgcaagaatggagggaggactggcaggcgagcgggcgagggagtctccggtggactgcagcgttagc

SEQ ID NO: 427861 - DNA, 120 bp, Artificial Sequence
  ENSG00000151702_62 (sequence is synthesized)
ttcgagaaccaggctgcctgggcgccattcacttccccactctctgggggggcagggagcatctaaacctttatctgatactctattccctgtggaattgcaaaatggagaaagctgcac

SEQ ID NO: 427862 - DNA, 75 bp, Artificial Sequence
  ENSG00000151702_63 (sequence is synthesized)
ctctattccctgtggaattgcaaaatggagaaagctgcacgccagccgggagggtgaatcacttgtcaggagttc

SEQ ID NO: 427863 - DNA, 79 bp, Artificial Sequence
  ENSG00000151702_64 (sequence is synthesized)
gacttcctccccgattcgcaaagtgaagtcacttcccaaaattagctgaaaaaaaagtttcatccggttaactgtctct

SEQ ID NO: 427864 - DNA, 120 bp, Artificial Sequence
  ENSG00000151704_0 (sequence is synthesized)
acacaaattagcgtcagtccactgactgtcgcctacaataaattaggctgagtctaaaagaaatcagtctgcatagaaagaccaacaaccagcaccacttccttgctttttccagccatg

SEQ ID NO: 427865 - DNA, 120 bp, Artificial Sequence
  ENSG00000151704_1 (sequence is synthesized)
aatgcttccagtcggaatgtgtttgacacgttgatcagggtgttgacagaaagtatgttcaaacatcttcggaaatgggtcgtcactcgcttttttgggcattctcggcaaagagcaagg

SEQ ID NO: 427866 - DNA, 120 bp, Artificial Sequence
  ENSG00000151704_2 (sequence is synthesized)
ctagtctccaaagatggaaggtgcaacatagaatttggcaatgtggaggcacagtcaaggtttatattctttgtggacatctggacaacggtacttgacctcaagtggagatacaaaatg

SEQ ID NO: 427867 - DNA, 120 bp, Artificial Sequence
  ENSG00000151704_3 (sequence is synthesized)
accattttcatcacagccttcttggggagttggtttttctttggtctcctgtggtatgcagtagcgtacattcacaaagacctcccggaattccatccttctgccaatcacactccctgt

SEQ ID NO: 427868 - DNA, 120 bp, Artificial Sequence
  ENSG00000151704_4 (sequence is synthesized)
gtggagaatattaatggcttgacctcagcttttctgttttctctggagactcaagtgaccattggatatggattcaggtgtgtgacagaacagtgtgccactgccatttttctgcttatc

SEQ ID NO: 427869 - DNA, 120 bp, Artificial Sequence
  ENSG00000151704_5 (sequence is synthesized)
tttcagtctatacttggagttataatcaattctttcatgtgtggggccatcttagccaagatctccaggcccaaaaaacgtgccaagaccattacgttcagcaagaacgcagtgatcagc

SEQ ID NO: 427870 - DNA, 120 bp, Artificial Sequence
  ENSG00000151704_6 (sequence is synthesized)
gagaccattattttggaccagatcaatatcaactttgtagttgacgctgggaatgaaaatttattcttcatctccccattgacaatttaccatgtcattgatcacaacagccctttcttc

SEQ ID NO: 427871 - DNA, 120 bp, Artificial Sequence
  ENSG00000151704_7 (sequence is synthesized)
cacatggcagcggagacccttctccagcaggactttgaattagtggtgtttttagatggcacagtggagtccaccagtgctacctgccaagtccggacatcctatgtcccagaggaggtg

SEQ ID NO: 427872 - DNA, 120 bp, Artificial Sequence
  ENSG00000151704_8 (sequence is synthesized)
ctttggggctaccgttttgctcccatagtatccaagacaaaggaagggaaataccgagtggatttccataactttagcaagacagtggaagtggagacccctcactgtgccatgtgcctt

SEQ ID NO: 427873 - DNA, 120 bp, Artificial Sequence
  ENSG00000151704_9 (sequence is synthesized)
tataatgagaaagatgttagagccaggatgaagagaggctatgacaaccccaacttcatcttgtcagaagtcaatgaaacagatgacaccaaaatgtaacagtggcttttcaacgggagt

SEQ ID NO: 427874 - DNA, 120 bp, Artificial Sequence
  ENSG00000151704_10 (sequence is synthesized)
aaagcaaagtctctaaagctcctagtacctagaagcattatgaagcagtcaacaatttaggggtacgaaagtaggatgagagccttcaaagtctaccagcacaaagacccctgagccccg

SEQ ID NO: 427875 - DNA, 120 bp, Artificial Sequence
  ENSG00000151704_11 (sequence is synthesized)
caattgtgatcccacaagacatgcatctccacaaggctactgtattagaacgtgcaatgcatttatatgaaactggtgtatggaagacataggtgctctcttgaaatcttaaatatgatt

SEQ ID NO: 427876 - DNA, 120 bp, Artificial Sequence
  ENSG00000151704_12 (sequence is synthesized)
atttgagctcatataaggtggattggagcagataaaattatcaaaagtttcatgaacaggccaaacaaaatattttttaaagtttccttaaagaagttatgaactttagaaaggatcagg

SEQ ID NO: 427877 - DNA, 120 bp, Artificial Sequence
  ENSG00000151704_13 (sequence is synthesized)
gttgcatacagatgagttggcagccggtctgagctggcccacagactcataaaatcaacagggcctcgggtaccctcacctagcatatccaaactcttgcatcaaaggtgcagggacttg

SEQ ID NO: 427878 - DNA, 120 bp, Artificial Sequence
  ENSG00000151704_14 (sequence is synthesized)
ctcacatcgagaatctggttgctttcttggagaccaagaaaatgagtttttgtttctacatttactccagcaatccatgaggactttataggaattttgcaccattctgaatggatacat

SEQ ID NO: 427879 - DNA, 120 bp, Artificial Sequence
  ENSG00000151704_15 (sequence is synthesized)
ttggatttctcaacatttgttcagcttcctaatgactgttgtgacaattgctctataccagtgaatgccaactgtttatctctgctctgaacaggtttcttctctactgtgccttcatcc

SEQ ID NO: 427880 - DNA, 120 bp, Artificial Sequence
  ENSG00000151704_16 (sequence is synthesized)
ccatcctgggccctgacaaagacagtgtgacaagttctgagccccacaggtggaatcccaaaccaagcagctcttgctggtcaccccaagatctacttatacatgaagttttgaaaatca

SEQ ID NO: 427881 - DNA, 120 bp, Artificial Sequence
  ENSG00000151704_17 (sequence is synthesized)
atcaatgacaagaaaacgcttacacaaagaacaatttgaggctctaagcttctcatgtggtacgtttagacagaggctaaatctgcacactagaatcttgatgataccttcctgcaagac

SEQ ID NO: 427882 - DNA, 120 bp, Artificial Sequence
  ENSG00000151704_18 (sequence is synthesized)
agaatgctttagttaaaagtggtgatgatatttctttcaatctgtattggatggcttaaagggctataaatctgtttataaagagcatttcctgctcttcgaagacagcaatgaggagtt

SEQ ID NO: 427883 - DNA, 120 bp, Artificial Sequence
  ENSG00000151704_19 (sequence is synthesized)
ggaaggtgcaaagtcagtagagaagggaatgtatcattaatgcacctgagaagaaacagtttcatgtgttcctccacctagagtttgtactggaatgctatttctaaagaagaagtggga

SEQ ID NO: 427884 - DNA, 120 bp, Artificial Sequence
  ENSG00000151704_20 (sequence is synthesized)
aagagagaggaatgggatggagccccacagtcagaatgttactatgtctttctttccctgacagcccatcttcctaaaagggaccagcttatggaaggctcgaccttgaggggaaagttt

SEQ ID NO: 427885 - DNA, 120 bp, Artificial Sequence
  ENSG00000151704_21 (sequence is synthesized)
cgaatgtgtcctggaaaaaaactggtactcaaagctgcttaggaatcaaaatgttttcagtgtgttgattaatatagtaaatttctgaaactgtgcatgcactttgattattattattac

SEQ ID NO: 427886 - DNA, 120 bp, Artificial Sequence
  ENSG00000151704_22 (sequence is synthesized)
tatgcattaactgagtcaggttccaggtgaaaatcctcttgcagagaggaccctctcctggaaggggcgggaggagtggagaggaagcagataggacacatttgttgtctggagtcctca

SEQ ID NO: 427887 - DNA, 120 bp, Artificial Sequence
  ENSG00000151704_23 (sequence is synthesized)
ggaggaaatgaccctggccacagacacaccccttccggtacagctccatcacgcctctccagtgtgagtcttggcacataaaacggcagctgcccacagttgttgggagggatggcttat

SEQ ID NO: 427888 - DNA, 120 bp, Artificial Sequence
  ENSG00000151704_24 (sequence is synthesized)
gtttttccatgcctgggctgtatttgtacagatccatgcaccactctggtccttctgactaagaacagtgggaagtctgatggttttagggttgcacaccttgtcagtggccataacagt

SEQ ID NO: 427889 - DNA, 120 bp, Artificial Sequence
  ENSG00000151704_25 (sequence is synthesized)
ggccatagctggcccatgtggaactctcactctgtacctgtgagtgctttggcaccacaatttaatgtgctgacaggaaaaagaaatcaggtatcacaagcttgagggagctggaattct

SEQ ID NO: 427890 - DNA, 120 bp, Artificial Sequence
  ENSG00000151704_26 (sequence is synthesized)
ctgctggcccactgtcatgatgtagccccttcataaactggagggaaactgtgttgacacttgttcccatcagcatgcactcttcctggtgtattctcctgctggctggcagcatgcatg

SEQ ID NO: 427891 - DNA, 120 bp, Artificial Sequence
  ENSG00000151704_27 (sequence is synthesized)
tagatggctggaagtgagatggtcataagcaatccattccctttgattgtttagggaggtgaacaacatacatctttctgattggtatttacttctgggttatttggtggaggcccatct

SEQ ID NO: 427892 - DNA, 120 bp, Artificial Sequence
  ENSG00000151704_28 (sequence is synthesized)
gcttctaaatatccctttgctaggatcaagacactctgcacctggagtctcttttttaatggaaattcccattgaccctctagcaaccattaacacaggtacatccaattaagcccctag

SEQ ID NO: 427893 - DNA, 120 bp, Artificial Sequence
  ENSG00000151704_29 (sequence is synthesized)
gaaaagaggcctggaacaggtaacttttgataggtctaaggagtggctggaaccccaaagcgcataacactcctgtgcattttaagaaagggggtaacaagggaatgggtgctcaagtag

SEQ ID NO: 427894 - DNA, 120 bp, Artificial Sequence
  ENSG00000151704_30 (sequence is synthesized)
taaagagaaatgaaaaatagcctgagaaggccaaactgcttgtaggttaacaccactgctaaaggcagcctttttattacaatgcagtgacatttttcccggtggaatctgactacatca

SEQ ID NO: 427895 - DNA, 120 bp, Artificial Sequence
  ENSG00000151704_31 (sequence is synthesized)
gtactgctatttgctacagatgctgggttattctatttgctgatttcaaaagcatgtcaactgttctaatttccttcgtgaaaaactgcatcccatgatgcattattatattcaaaattt

SEQ ID NO: 427896 - DNA, 120 bp, Artificial Sequence
  ENSG00000151704_32 (sequence is synthesized)
tccttgagactgattctctttgaattgcccagttcatctctgttgctatggggattttgactaagagcgtttgatcctggttgaatcttcctggacttaggttggctcaagctccaatat

SEQ ID NO: 427897 - DNA, 120 bp, Artificial Sequence
  ENSG00000151704_33 (sequence is synthesized)
ttaagagttaagatttgggaggttgtctttaatggaaagcactaaatgtttaaaaattatttattccttaagagagaaaaggtagaagggaaagatccttttgtgttgccatgccttttt

SEQ ID NO: 427898 - DNA, 120 bp, Artificial Sequence
  ENSG00000151704_34 (sequence is synthesized)
aagacatgggctgataggtgactgtccttctctatccatcactaaggggatgtgcaactggaccttccagaagaactccctgggcggattgcagagacggttgaggaagtgtcttccttg

SEQ ID NO: 427899 - DNA, 120 bp, Artificial Sequence
  ENSG00000151704_35 (sequence is synthesized)
gggatttttcatgaaacagaatatgggtcctcaacaggatgcttctgtgaatagcacggggatctttccctgtctagaacaaacgttaggacagcttctgatggaaagaatgcaaatgaa

SEQ ID NO: 427900 - DNA, 120 bp, Artificial Sequence
  ENSG00000151715_0 (sequence is synthesized)
gcacttggcgcgcggcgcgggctgcagacggctgcgaggcgctgggcacaggtgtcctgatggcaaatttcaagggccacgcgcttccagggagtttcttcctgatcattgggctgtgtt

SEQ ID NO: 427901 - DNA, 120 bp, Artificial Sequence
  ENSG00000151715_1 (sequence is synthesized)
ggtcagtgaagtacccgctgaagtactttagccacacgcggaagaacagcccactacattactatcagcgtctcgagatcgtcgaagccgcaattaggactttgttttccgtcactggga

SEQ ID NO: 427902 - DNA, 120 bp, Artificial Sequence
  ENSG00000151715_2 (sequence is synthesized)
tcctggcagagcagtttgttccggatgggccccacctgcacctctaccatgagaaccactggataaagttaatgaattggcagcacagcaccatgtacctattctttgcagtctcaggaa

SEQ ID NO: 427903 - DNA, 120 bp, Artificial Sequence
  ENSG00000151715_3 (sequence is synthesized)
ttgttgacatgctcacctatctggtcagccacgttcccttgggggtggacagactggttatggctgtggcagtattcatggaaggtttcctcttctactaccacgtccacaaccggcctc

SEQ ID NO: 427904 - DNA, 120 bp, Artificial Sequence
  ENSG00000151715_4 (sequence is synthesized)
cgctggaccagcacatccactcactcctgctgtatgctctgttcggagggtgtgttagtatctccctagaggtgatcttccgggaccacattgtgctggaacttttccgaaccagtctca

SEQ ID NO: 427905 - DNA, 120 bp, Artificial Sequence
  ENSG00000151715_5 (sequence is synthesized)
tcattcttcagggaacctggttctggcagattgggtttgtgctgttcccaccttttggaacacccgaatgggaccagaaggatgatgccaacctcatgttcatcaccatgtgcttctgct

SEQ ID NO: 427906 - DNA, 120 bp, Artificial Sequence
  ENSG00000151715_6 (sequence is synthesized)
ggcactacctggctgccctcagcattgtggccgtcaactattctcttgtttactgccttttgactcggatgaagagacacggaaggggagaaatcattggaattcagaagctgaattcag

SEQ ID NO: 427907 - DNA, 120 bp, Artificial Sequence
  ENSG00000151715_7 (sequence is synthesized)
atgacacttaccagaccgccctcttgagtggctcagatgaggaatgagccgagatgcggagggcgcagatgtcccactgcacagctggaatgaatggagttcatcccctccacctgaatg

SEQ ID NO: 427908 - DNA, 120 bp, Artificial Sequence
  ENSG00000151715_8 (sequence is synthesized)
cctgctgtggtctgatcttaagggtctatatatttgcacctcctcattcaacacagggctggaggttctacaacaggaaatcaggcctacagcatcctgtgtatcttgcagttgggattt

SEQ ID NO: 427909 - DNA, 120 bp, Artificial Sequence
  ENSG00000151715_9 (sequence is synthesized)
gaaaaatgaagtaatgcctataagtagcaggcctttgtgcctcagtgtcaagagaaatcaagagatgctaaaagctttacaatggaagtggcctcatggatgaatccggggtatgagccc

SEQ ID NO: 427910 - DNA, 120 bp, Artificial Sequence
  ENSG00000151715_10 (sequence is synthesized)
aggagaacgtgctgcttttggtaacttatccctttttctcttaagaaagcaggtactttcttattagaaatatgttagaatgtgtaagcaaacgacagtgcctttagaattacaattcta

SEQ ID NO: 427911 - DNA, 120 bp, Artificial Sequence
  ENSG00000151715_11 (sequence is synthesized)
acttacatattttttgaaagtaaaataattcacaagctttggtattttaaaattattgttaaacatatcataactaatcataccagggtactgcaataccactgtttataagtgacaaaa

SEQ ID NO: 427912 - DNA, 120 bp, Artificial Sequence
  ENSG00000151715_12 (sequence is synthesized)
ttaggccaaaggtgatttttttttaaatcaggaagctggttactggctctactgagagttggagccctgatgttctgattcttcaaagtcaccctaaaagaagatctgacaggaaagctg

SEQ ID NO: 427913 - DNA, 120 bp, Artificial Sequence
  ENSG00000151715_13 (sequence is synthesized)
tataatgagatagaaaaacgtcaggtatggaaggctttcagttttaatatggctgaaagcaaaggataacgaattcagaattagtaatgtaaaatcttgataccctaatcttgcttctgg

SEQ ID NO: 427914 - DNA, 74 bp, Artificial Sequence
  ENSG00000151715_14 (sequence is synthesized)
ttagtaatgtaaaatcttgataccctaatcttgcttctggatctgttctttttttaaaaaaacttccttcaccg

SEQ ID NO: 427915 - DNA, 120 bp, Artificial Sequence
  ENSG00000151715_15 (sequence is synthesized)
cagagcaagactctgtctcaaaaacaagcaaacagacttccttcaacaaatatttattaaatatccactttgcaacagcactgaaatggctgtaaggactcctgagatatgtgtccagca

SEQ ID NO: 427916 - DNA, 120 bp, Artificial Sequence
  ENSG00000151715_16 (sequence is synthesized)
aatggctgtaaggactcctgagatatgtgtccagcaaggagtttacagtcaaacaggagagacatgcctgtagttacatccagtgtgatgggtgctgagaggcaagtacaaaccacgatg

SEQ ID NO: 427917 - DNA, 120 bp, Artificial Sequence
  ENSG00000151715_17 (sequence is synthesized)
accgcacctggcctctcatgtttttctataagcagttaagagaagccacacagcatcctgaacactttgctttctatctcttctgccaaatatcctaggtcatcattcttaagttctgcc

SEQ ID NO: 427918 - DNA, 120 bp, Artificial Sequence
  ENSG00000151715_18 (sequence is synthesized)
acttggcgcgcggcgcgggctgcagacggctgcgaggcgctgggcacaggatccagcaaaactgcctaattttcatgacagtttgaagaaaggcccaaatcaaatgcctcccgctctgtg

SEQ ID NO: 427919 - DNA, 120 bp, Artificial Sequence
  ENSG00000151715_19 (sequence is synthesized)
cccagtttctcagcacccagaagaatcctgtatttaattggctcatatggaaaattttagaaagagagagacagcagggctgagactatcttctgctcaggaaccaaaacgagctgggag

SEQ ID NO: 427920 - DNA, 120 bp, Artificial Sequence
  ENSG00000151715_20 (sequence is synthesized)
ttttctgagccctgtgaaatagatgttcccactggcagagataatagggcaacaatttcctgatggccactagactattttatcgtaacatccattgtgtacagagctttataatactaa

SEQ ID NO: 427921 - DNA, 120 bp, Artificial Sequence
  ENSG00000151715_21 (sequence is synthesized)
cggttgacagctctcacatcatgggacactgtgaaaaactcaaatcaacaaggacacaggtatggaaagttgtaggagcaaaacacccactgtatgaaaaagatatgacacaaataaaaa

SEQ ID NO: 427922 - DNA, 120 bp, Artificial Sequence
  ENSG00000151715_22 (sequence is synthesized)
cgcgggctgcagacggctgcgaggcgctgggcacagcacccagaagaatcctgtatttaattggctcatatggaaaattttagaaagagagagacagcagggctgagactatcttctgct

SEQ ID NO: 427923 - DNA, 120 bp, Artificial Sequence
  ENSG00000151718_0 (sequence is synthesized)
gggttcgctcgccggctccgacgcagacatggtggactgatccgcagcggggccgcgaacagcgtttcctgaggcacctcccgcgcgtggttccgccgcgccccgcgccctgcgcccctc

SEQ ID NO: 427924 - DNA, 120 bp, Artificial Sequence
  ENSG00000151718_1 (sequence is synthesized)
gtcgcgggttggcagcctagcccggcagccgcgttcccgccgcgtcccgcgcccggtacctatggaggcgccgctcgccggcgaggccgccgaccatgcctaggagggccgggagcggtc

SEQ ID NO: 427925 - DNA, 120 bp, Artificial Sequence
  ENSG00000151718_2 (sequence is synthesized)
taggagggccgggagcggtcagctgccgctgccccggggctgggaggaggccagggactacgacggcaaggtcttctacattgaccacaacaccaggaggaccagctggatcgacccccg

SEQ ID NO: 427926 - DNA, 120 bp, Artificial Sequence
  ENSG00000151718_3 (sequence is synthesized)
ggacaggttaacgaagcccttgtcatttgctgattgtgttggggatgagctgccgtggggatgggaagcagggtttgaccctcagattggtgtctactacatcgatcacatcaacaaaac

SEQ ID NO: 427927 - DNA, 120 bp, Artificial Sequence
  ENSG00000151718_4 (sequence is synthesized)
cacgcagatagaagatccaagaaaacaatggaggggggaacaggagaagatgctcaaggactacctctctgtggcacaggatgccctccggacacagaaggaactgtaccatgtgaagga

SEQ ID NO: 427928 - DNA, 120 bp, Artificial Sequence
  ENSG00000151718_5 (sequence is synthesized)
gcagaggctggcgctggccctggatgaatacgtgcgattaaatgatgcctataaggaaaagtcaagttctcacacaagcttattctcaggatcttcatccagtactaaatatgatcccga

SEQ ID NO: 427929 - DNA, 120 bp, Artificial Sequence
  ENSG00000151718_6 (sequence is synthesized)
tattttaaaagctgagatctccactacaagattaagggttaaaaagctaaagagagagctctcacagatgaagcaggaactgctctataaagaacaaggctttgaaacattgcagcaaat

SEQ ID NO: 427930 - DNA, 120 bp, Artificial Sequence
  ENSG00000151718_7 (sequence is synthesized)
tgataaaaaaatgtctggaggccagagcgggtatgaactcagtgaagccaaagccattctaacagaactaaaatctatcagaaaggcaattagctcaggagaaaaagaaaaacaagatct

SEQ ID NO: 427931 - DNA, 120 bp, Artificial Sequence
  ENSG00000151718_8 (sequence is synthesized)
gatgcagagtcttgctaagctgcaggagcggtttcatttggatcagaacattggcagatctgagccagatttgagatgtagtcctgtgaactctcatttatgtctctccagacagaccct

SEQ ID NO: 427932 - DNA, 120 bp, Artificial Sequence
  ENSG00000151718_9 (sequence is synthesized)
tgatgctgggtcacaaacaagcatttccggagatattggagtaagaagtagatcaaatttagctgaaaaggtcaggctaagcctacagtatgaagaagccaaaagaagtatggccaactt

SEQ ID NO: 427933 - DNA, 120 bp, Artificial Sequence
  ENSG00000151718_10 (sequence is synthesized)
aaaaattgaactgtcaaaattggacagtgaggcctggcctggggcactggatattgagaaggaaaaactgatgctgattaatgaaaaagaagaacttttgaaagagcttcagttcgtcac

SEQ ID NO: 427934 - DNA, 120 bp, Artificial Sequence
  ENSG00000151718_11 (sequence is synthesized)
cccacagaaacgtacccaagatgaattagaacgcctagaagctgaaaggcagcggctggaagaagagttgctgtctgtgaggggaacaccaagcagagctctggccgagagattgagatt

SEQ ID NO: 427935 - DNA, 120 bp, Artificial Sequence
  ENSG00000151718_12 (sequence is synthesized)
ggaagagagaagaaaagagctgctacagaaacttgaagaaactactaaattaactacttatttgcattcacaacttaaaagcctctctgccagcaccctgtccatgtcatctgggagcag

SEQ ID NO: 427936 - DNA, 120 bp, Artificial Sequence
  ENSG00000151718_13 (sequence is synthesized)
cctgggttccctggcatcgagtcggggctctctgaacacctccagcagagggtcactcaactccctcagttccaccgaactctattacagcagtcaaagtgatcagatagatgtggatta

SEQ ID NO: 427937 - DNA, 120 bp, Artificial Sequence
  ENSG00000151718_14 (sequence is synthesized)
tcagtataaactggacttccttctgcaagagaaaagcggttacattccttctggacccatcaccaccatccatgaaaacgaggtggtcaagtcccctagccagcctggccagagtggact

SEQ ID NO: 427938 - DNA, 120 bp, Artificial Sequence
  ENSG00000151718_15 (sequence is synthesized)
ctgtggagtggcagctgcagcaacaggccacactcctccactggctgaggccccgaagtctgtggcctccctgtcctcgaggtcctccctttcctccttgtctcctccaggctctccctt

SEQ ID NO: 427939 - DNA, 120 bp, Artificial Sequence
  ENSG00000151718_16 (sequence is synthesized)
ggttttggaaggcacgtttcccatgtcttcttctcatgatgcctctctccatcagttcactgctgactttgaagactgtgagttgagtagccattttgcagatatcagcctcatcgaaaa

SEQ ID NO: 427940 - DNA, 120 bp, Artificial Sequence
  ENSG00000151718_17 (sequence is synthesized)
tcagattttgctggattctgattcaggaggagcctcccagtctctttcagaggataaagaccttaatgaatgtgctagggagccattatatgaaggaactgcagatgtggaaaaatcatt

SEQ ID NO: 427941 - DNA, 120 bp, Artificial Sequence
  ENSG00000151718_18 (sequence is synthesized)
accaaaaagaagagtgatccacttgcttggggagaaaaccacttgtgtgtcggctgctgtgtctgatgagtctgtggctggagacagtggggtctatgaagctttcgtgaaacaacctag

SEQ ID NO: 427942 - DNA, 120 bp, Artificial Sequence
  ENSG00000151718_19 (sequence is synthesized)
tgaaatggaagatgtcacatacagtgaagaggatgtagccattgtagagaccgcccaggttcagataggactcagatacaatgcaaaaagttcaagtttcatggtgattatagcacagct

SEQ ID NO: 427943 - DNA, 120 bp, Artificial Sequence
  ENSG00000151718_20 (sequence is synthesized)
ccgaaaccttcatgccttcttgatacctcatacttcaaaagtatattttagggttgccgttcttccttcctcaactgatgtcagctgtctgtttcgcacaaaagttcatccgcccacaga

SEQ ID NO: 427944 - DNA, 120 bp, Artificial Sequence
  ENSG00000151718_21 (sequence is synthesized)
atccattttattcaatgatgtgttcagagtcgccatttcccaaacagccttacaacagaagacactgagggtagacctttgctctgtcagtaaacaccgaagggaagaatgcctggctgg

SEQ ID NO: 427945 - DNA, 120 bp, Artificial Sequence
  ENSG00000151718_22 (sequence is synthesized)
aactcagatcagcctggcagatttaccattttccagtgaggttttcactctatggtataacttgcttccttccaagcaaatgccttgcaaaaagaatgaagaaaatgaggactctgtatt

SEQ ID NO: 427946 - DNA, 120 bp, Artificial Sequence
  ENSG00000151718_23 (sequence is synthesized)
tcaaccaaaccagccgttagtagattctatagacttggatgcagtgtcagccttacttgcaagaacatcagctgagttgttagctgtggaacaagaattagcacaagaagaagaagaaga

SEQ ID NO: 427947 - DNA, 120 bp, Artificial Sequence
  ENSG00000151718_24 (sequence is synthesized)
atcaggacaagaagagccaaggggcccagatggagactggctaacaatgctaagagaggcctctgatgaaattgtggctgaaaaagaggctgaagttaaattgccagaggacagtagctg

SEQ ID NO: 427948 - DNA, 120 bp, Artificial Sequence
  ENSG00000151718_25 (sequence is synthesized)
tacagaagatttaagttcatgcactagtgtgcctgagatgaatgaagacgggaacaggaaagaaagcaactgtgccaaagacctcagaagtcagccacctactagaataccaacactggt

SEQ ID NO: 427949 - DNA, 120 bp, Artificial Sequence
  ENSG00000151718_26 (sequence is synthesized)
tgacaaagagacaaacactgatgaagccgctaatgacaatatggcagttcgccccaaagagcgcagcagcctgagctctagacagcatccgtttgtgaggagcagtgtgatagtgcgctc

SEQ ID NO: 427950 - DNA, 120 bp, Artificial Sequence
  ENSG00000151718_27 (sequence is synthesized)
acagaccttttctccaggagagcggaaccagtacatctgcaggttaaatcggagtgacagtgacagttcaaccctggctaaaaaatcactgtttgtgagaaactccaccgaacgccgcag

SEQ ID NO: 427951 - DNA, 120 bp, Artificial Sequence
  ENSG00000151718_28 (sequence is synthesized)
tttgagggtcaaaaggacggtttgccagtcagtccttagaagaacaacacaggaatgcccagtgcggacatctctagacttagaactggaccttcaggcatctctgacccggcagagccg

SEQ ID NO: 427952 - DNA, 120 bp, Artificial Sequence
  ENSG00000151718_29 (sequence is synthesized)
cctcaatgatgagctgcaggcgctgagggacttgcggcagaagctggaggaactgaaagctcagggagagactgaccttccaccaggcgtgctggaggatgagaggttccagaggcttct

SEQ ID NO: 427953 - DNA, 120 bp, Artificial Sequence
  ENSG00000151718_30 (sequence is synthesized)
gaagcaagctgagaagcaggctgaacagtccaaagaagagcagaagcaaggtctgaatgcagagaagttgatgaggcaagtctccaaggacgtgtgtcggctccgggagcagagccagaa

SEQ ID NO: 427954 - DNA, 120 bp, Artificial Sequence
  ENSG00000151718_31 (sequence is synthesized)
ggtgcctcggcaggtgcagtccttcagggagaagattgcctacttcaccagagcaaagataagcatcccatccctgccagctgatgatgtgtgattacatgacttaagaaattatttttt

SEQ ID NO: 427955 - DNA, 120 bp, Artificial Sequence
  ENSG00000151718_32 (sequence is synthesized)
catctgttcactttcttagggagggtaaaagactgaagatttgtgtttttgttttggtgtttggttttttttggtaacgtaactgtcaactcttgaagaacttttatttcacatcagatt

SEQ ID NO: 427956 - DNA, 120 bp, Artificial Sequence
  ENSG00000151718_33 (sequence is synthesized)
ttcaacacattaatttgtaaagtaccttgagtgtaatttttatatgcttaaaaaagaaaaaatcatataagaaagatgggataacctggtacacaaatgttgcccagtatgtgcgcattg

SEQ ID NO: 427957 - DNA, 120 bp, Artificial Sequence
  ENSG00000151718_34 (sequence is synthesized)
ccagtggacttcattttgtaaaaatggaatagaggcagtaccccacatgtgtactgttgagccggctgttgagaaacaacttggttcagccggtggttttgcttctcctttgtgttcctg

SEQ ID NO: 427958 - DNA, 120 bp, Artificial Sequence
  ENSG00000151718_35 (sequence is synthesized)
tgagtaggctgtgccgatggcagcagcgccacgtggtatctgtgcgctggcgaggagaggagcgctttccatttggaggcagtgtgagcacacgctggagtgcagcgttccaaagtccgc

SEQ ID NO: 427959 - DNA, 120 bp, Artificial Sequence
  ENSG00000151718_36 (sequence is synthesized)
agatataaactaccaagtgctcttaagaataaaaataagaataagaatacaaaggagcactactcttggctacacgaaagatcttgggattcatgacactgagggcagggagaagaaaga

SEQ ID NO: 427960 - DNA, 120 bp, Artificial Sequence
  ENSG00000151718_37 (sequence is synthesized)
acaccagccacgcagagatacaaataagctcatcaaatgagcagctggtttgtctcactcagcctgaatttgcattaagtgttcaaaagtgagtttctggcttgcactagtgttttgccc

SEQ ID NO: 427961 - DNA, 120 bp, Artificial Sequence
  ENSG00000151718_38 (sequence is synthesized)
taaatctaaggatggtgcctagtggtggccctgtgttctgaggacagagagagctggaggggtggagggaaatgcatcggcactcatttggtgtaaccaagaagagggggaaagatgtct

SEQ ID NO: 427962 - DNA, 120 bp, Artificial Sequence
  ENSG00000151718_39 (sequence is synthesized)
tgatagaatcaaagttgccaaaaacaaagaagagtttatcaagcagatttctaacatttagtagaaactacttcatagctctcatttttagggggttctatctataatttatggtaaata

SEQ ID NO: 427963 - DNA, 120 bp, Artificial Sequence
  ENSG00000151718_40 (sequence is synthesized)
gttgggaggcaaagggaagaatgtgtgtggggggattattaatttgaagtataagctaaattgtttattaaaaagcctattttggatgaacaagtttagagagataaactgactaatgtg

SEQ ID NO: 427964 - DNA, 120 bp, Artificial Sequence
  ENSG00000151718_41 (sequence is synthesized)
tcctccagtttagaatttcaccttacccgacccaggcacttcttaaaaacacagatcctcagtgcagctctgccagcatcaaggcttttaaaatatgtagtatttaggccatttaaacca

SEQ ID NO: 427965 - DNA, 120 bp, Artificial Sequence
  ENSG00000151718_42 (sequence is synthesized)
tacttattactcaataacccaagaaacaattttgggttagccatctaatatagcaaataaaatagattttttaaagaaatccaaaattgtcttaaaggaatggaccccttgaagaaaaaa

SEQ ID NO: 427966 - DNA, 120 bp, Artificial Sequence
  ENSG00000151718_43 (sequence is synthesized)
aaaaaaagttttgttcctcagttagaatgctcactagctcactagcaagaatttttattttcttgaaagcaattatatatattttggaaagttcatgttattggaattgaagttcaaatt

SEQ ID NO: 427967 - DNA, 120 bp, Artificial Sequence
  ENSG00000151718_44 (sequence is synthesized)
aagcaacttctgagcctagaactttaattactttttcctaaatgtcccaacacttacatacaaatttctttgaagacataactggacatggcagacactgctttgaacaaaaaccagcct

SEQ ID NO: 427968 - DNA, 120 bp, Artificial Sequence
  ENSG00000151718_45 (sequence is synthesized)
agtgaattgactgagtacagtcctttaaggctgcccagttcattctattagatgactaaggaaaactagaaaaagaatacagttcacccttgtcaaggtcaaatgtgaaagacagaagtt

SEQ ID NO: 427969 - DNA, 120 bp, Artificial Sequence
  ENSG00000151718_46 (sequence is synthesized)
tatttaatgtagaggtaaatgaaggtgagctgttttcagcatcttagtttgaccatgaaaatgtctatagaattatgtgtagttgttccgtacgattttattttcttcatttatttattt

SEQ ID NO: 427970 - DNA, 120 bp, Artificial Sequence
  ENSG00000151718_47 (sequence is synthesized)
acagtcttatttatgttctgtttaatatatagtttgattctggccattttaaatatttgacacagaagagactatattggaatatttacagctttataagtctttcatcagattagctgt

SEQ ID NO: 427971 - DNA, 120 bp, Artificial Sequence
  ENSG00000151718_48 (sequence is synthesized)
tgactttttgtaatacaaaaagtttcagacaagtattaaagaataaaatctgtctcaggctggtagttagcagttgtgaccaagatgcttttggttgttgtatttcacaaaatttcctca

SEQ ID NO: 427972 - DNA, 120 bp, Artificial Sequence
  ENSG00000151718_49 (sequence is synthesized)
tttctaacatgagagatgaacttattttaatataatcctttttctacactttaaaagtcagcaatagtgttatgtatttataggcagcttttaataatcttgtcatatttgtactaaccc

SEQ ID NO: 427973 - DNA, 120 bp, Artificial Sequence
  ENSG00000151718_50 (sequence is synthesized)
aaatgattcacagtgacaaaacattttaataacttgatcacaaaaccatatggacaaatatgaattttaatattataaatactatttttaaaaggtagaatttattcgcacagggtaaaa

SEQ ID NO: 427974 - DNA, 120 bp, Artificial Sequence
  ENSG00000151718_51 (sequence is synthesized)
agaatgtaatatttagttctcaagtttgaattatcagtatattattacaattttgtatatcagaatcttaagtgttacaggtacaaaaagaatattgctagccaaatgaacaaagtttag

SEQ ID NO: 427975 - DNA, 120 bp, Artificial Sequence
  ENSG00000151718_52 (sequence is synthesized)
ctaaatctctgtagcatgcaaatcaaataaattaaaattttttgctattgctttatctatattgtcttaaatatcaaaagctcaggactgaacttaatatttaatcaggttaaattctga

SEQ ID NO: 427976 - DNA, 120 bp, Artificial Sequence
  ENSG00000151718_53 (sequence is synthesized)
acatgtttctgttttaatttgtcttgtttgtaaacgtatgcaaatacatcacatagattaactggtttctgcactttccatgtgtttgtgggtggaaaaaaattcagtggttttttttaa

SEQ ID NO: 427977 - DNA, 120 bp, Artificial Sequence
  ENSG00000151718_54 (sequence is synthesized)
aaaaaaaagcaaaaacaaagctacatattgcctaatactctatttcagtgtcgtttattgttcagtttatttccctgattggcacaaacacaagagtttccttgaaccatgtaccaagca

SEQ ID NO: 427978 - DNA, 120 bp, Artificial Sequence
  ENSG00000151718_55 (sequence is synthesized)
aatacaaaatatttcatgaagaaatccccaggctggcagtttgtgatgaatagttcttgttggaactatatgtattgctgataaaaaaggacgaagtattttcattgagcaaataaaatg

SEQ ID NO: 427979 - DNA, 120 bp, Artificial Sequence
  ENSG00000151718_56 (sequence is synthesized)
aagggctccagaatatgtgctctgtggtcgctgcgcctgggctggcagtgtgctccacagagaggcagccgtcccaggaggttatctacccacacaccccagtcctgccctgccgtgccc

SEQ ID NO: 427980 - DNA, 120 bp, Artificial Sequence
  ENSG00000151718_57 (sequence is synthesized)
cccacaggctgctcagtgcctgggaagccagaaacgctgcccgtgaaatacagaacacaggatgcagaagcacgtttgtgtggcagagtctacttgaatcatccaaaacccaagatcgcc

SEQ ID NO: 427981 - DNA, 120 bp, Artificial Sequence
  ENSG00000151718_58 (sequence is synthesized)
ctcctgcctctgacagtatagaaggcgtgactgaatgtggctgccttttgaaaaaggttccatagagacactgaggtctctgattcagaaggagatgatgtgtctacacctttcacctct

SEQ ID NO: 427982 - DNA, 120 bp, Artificial Sequence
  ENSG00000151718_59 (sequence is synthesized)
gaagcttctaaagagctagtaattattttatataataagacgtcatgcattttaaataaatatgcaacaagacctcaggcttattatactaggttatcttaaacacctgaaataagtaaa

SEQ ID NO: 427983 - DNA, 120 bp, Artificial Sequence
  ENSG00000151718_60 (sequence is synthesized)
tgatttgccaaatgattccgctccatatgaataataccttcaaagatacatagagattaatgttttatttaccacttctgtgcaatcgctattttaaaattgagaaaactcatccacagt

SEQ ID NO: 427984 - DNA, 120 bp, Artificial Sequence
  ENSG00000151718_61 (sequence is synthesized)
aatgggtgtcattactattcagtcttgattgattttggtctcagactagaagataaaaatggtttaccagtcttggaaagaaactatagtttaatagccacaggaaaagatgcattttca

SEQ ID NO: 427985 - DNA, 120 bp, Artificial Sequence
  ENSG00000151718_62 (sequence is synthesized)
aaaatcaaaagcacagtgagatgactagagcgggacatcctaccaaatccagtgttgagcaagcgtctcctgaacagcagacgcttgtcctttctggcttagtgtttcaggttggtgttt

SEQ ID NO: 427986 - DNA, 120 bp, Artificial Sequence
  ENSG00000151718_63 (sequence is synthesized)
ctcgtctccagttcttgatgatgatcttgtgtttgtgccactgcgtagtggcccgaagctaggggagcgtggctggagcaggctgcacagtggagcagacaccctcctagcagaagagaa

SEQ ID NO: 427987 - DNA, 120 bp, Artificial Sequence
  ENSG00000151718_64 (sequence is synthesized)
agtccagcaaaccagcccagaaacagggcctccccaaactcccacctggggacaaagtctgggacgttctcatcccagaactcctgaaccgtcttgtgggcaacccaagagacgggaacc

SEQ ID NO: 427988 - DNA, 120 bp, Artificial Sequence
  ENSG00000151718_65 (sequence is synthesized)
agggctgtgactcccgaggcccaggacagaattcctcccaggatcagcagtcgcctcttgagatctctctgactctctccaattctcaaacagtccaggccaaacccagagaccagcagg

SEQ ID NO: 427989 - DNA, 120 bp, Artificial Sequence
  ENSG00000151718_66 (sequence is synthesized)
cccagaaatcccagcccatttgacagaaacattaagatcctggagaccctgagttcagcaggcaaagccaggaaggagtcaaagtccttgcattgcatccccacttcctcttggatgaca

SEQ ID NO: 427990 - DNA, 120 bp, Artificial Sequence
  ENSG00000151718_67 (sequence is synthesized)
caggtttgccagagtcccatggtccagttttccatttcatttaagtccaggttgaggttcttccagtgtggcaggtagtttgtaagacaggataaaacccatcccagcaaagataatgaa

SEQ ID NO: 427991 - DNA, 120 bp, Artificial Sequence
  ENSG00000151718_68 (sequence is synthesized)
actccagctagttgagctacagttctaaatactaaagccattataatgtcctgagagctttagccaaactaactcctgcccttcggttgctgtgaaaagaagtgtgacacttgtgttata

SEQ ID NO: 427992 - DNA, 120 bp, Artificial Sequence
  ENSG00000151718_69 (sequence is synthesized)
acttatgaaactcagaaatatttcttcattgtgtatataggaggattcttgccagagttgctattgtttgattccatgttgaatgggtttcacaaaaggatagggaaataatgccgccaa

SEQ ID NO: 427993 - DNA, 120 bp, Artificial Sequence
  ENSG00000151718_70 (sequence is synthesized)
ccagtaatgccaaggtgtggccaagattgtgtttgtgtcctgtgggctggatttgacagaaagcagtttgtcactgaaatataattaagtgataatctcctttcattgtcaaggttaaaa

SEQ ID NO: 427994 - DNA, 120 bp, Artificial Sequence
  ENSG00000151718_71 (sequence is synthesized)
tggctttcatgttattcccaacctttctaacaaagaattaagtctaaatgcaaaatgtttaactgatggttttggttcaactcctcctgctttgtgtttcactaactgcacctgtcagat

SEQ ID NO: 427995 - DNA, 120 bp, Artificial Sequence
  ENSG00000151718_72 (sequence is synthesized)
tttcatctcttatagttctcacatttcaaatgtgcatgttatggtaatactgagtgttattttttaaaaataggtttaagaaaagtatttcttaaccaaataaatcaatcttatcagaaa

SEQ ID NO: 427996 - DNA, 120 bp, Artificial Sequence
  ENSG00000151718_73 (sequence is synthesized)
tgagtctgtttatttcccagataacaacttagcatgcccaggttgcgtgttcatggagcatgcctgcctaccaaaagtgttttgtttttgttttaccataggctaacaatgctaagagag

SEQ ID NO: 427997 - DNA, 120 bp, Artificial Sequence
  ENSG00000151718_74 (sequence is synthesized)
caagaagagccaaggggcccagatggagactggttaaacacttatttcctttgctgttgggagctcaaagatgatgtgtttacacggcttacagtgaaacctttgtaggctcatgcttta

SEQ ID NO: 427998 - DNA, 120 bp, Artificial Sequence
  ENSG00000151718_75 (sequence is synthesized)
ctaggaaaagtctttccttggtcattagagagttaaggaagtaatggcaagattatgggcaaagttaaaacattagccagattctttgttcttgtttcgagtaattttaaaacactattt

SEQ ID NO: 427999 - DNA, 120 bp, Artificial Sequence
  ENSG00000151718_76 (sequence is synthesized)
tctgagcctttttttttttagtctaaacttgattttgaaaggtatggtagcttattgtagagttatagataattttaaaagtgactctatttttcttttaactacctggaagtaccattt

SEQ ID NO: 428000 - DNA, 120 bp, Artificial Sequence
  ENSG00000151718_77 (sequence is synthesized)
aggctctagtaagacaaagcaggtatttaaaaaacaacttctgagtactcatttctctgttaccactcttaccttctttttctgtgtccttccctgtatccatacccaatcctttaaaaa

SEQ ID NO: 428001 - DNA, 120 bp, Artificial Sequence
  ENSG00000151718_78 (sequence is synthesized)
aagcaatatgacatttaaatgctacagcagaagacttcacagttaactaattgtgagtttaatacactgttgtgcgtaataaccagaaaaccattatgtcccagtaaagttacataagta

SEQ ID NO: 428002 - DNA, 120 bp, Artificial Sequence
  ENSG00000151718_79 (sequence is synthesized)
ttcaaatgcaggcatctagagatgtgccatgtgttcagaaaacaatgtgagtctccaattgagcttttctctgcagtccagtgggaagcacagaaacacatgtttcatgatgaacaaagt

SEQ ID NO: 428003 - DNA, 120 bp, Artificial Sequence
  ENSG00000151718_80 (sequence is synthesized)
gccaagctttgcgtgactgctgtgtatatattatctcatttaatcctcatgacaacctgatgaaagattggttatgaaatggatgattatccactattttcagataaggagctgcttaga

SEQ ID NO: 428004 - DNA, 120 bp, Artificial Sequence
  ENSG00000151725_0 (sequence is synthesized)
agcttccagtcgctcgagagcggagagcggcaccatggccccgcgggggcggcggcggccgcggcctcacaggtctgagggcgcaagacgttcaaagaacactttagaaagaacacattc

SEQ ID NO: 428005 - DNA, 120 bp, Artificial Sequence
  ENSG00000151725_1 (sequence is synthesized)
catgaaagataaagctggtcaaaagtgcaagcctattgacgtgttcgactttcctgataattctgatgtctcaagcattggcaggctgggtgaaaatgagaaagatgaagaaacttatga

SEQ ID NO: 428006 - DNA, 120 bp, Artificial Sequence
  ENSG00000151725_2 (sequence is synthesized)
gacctttgatcctcctttacatagcacagctatatatgctgatgaagaagaattctccaaacattgtggactgtctctctcttcaactcctccaggaaaagaagcaaaaagaagttcaga

SEQ ID NO: 428007 - DNA, 120 bp, Artificial Sequence
  ENSG00000151725_3 (sequence is synthesized)
cacttctggaaatgaagcaagtgaaatcgaatctgtaaaaattagtgcaaaaaagccaggaagaaagctcaggcccattagtgatgactctgaaagcattgaagaaagtgatacaaggag

SEQ ID NO: 428008 - DNA, 120 bp, Artificial Sequence
  ENSG00000151725_4 (sequence is synthesized)
aaaagttaaatcagcagagaaaataagtacacaacgtcatgaggttattcgaaccacagcgtcttcagaactttcagagaaaccagctgagtctgtcacttctaaaaagacaggacccct

SEQ ID NO: 428009 - DNA, 120 bp, Artificial Sequence
  ENSG00000151725_5 (sequence is synthesized)
tagtgcccagccctctgttgaaaaagagaacttggcaatagaaagtcaatcgaaaactcagaaaaaagggaagatatctcatgacaaaaggaagaaatcaagaagtaaagccataggctc

SEQ ID NO: 428010 - DNA, 120 bp, Artificial Sequence
  ENSG00000151725_6 (sequence is synthesized)
agatacttctgacattgtgcacatttggtgtccagaaggaatgaaaaccagtgacatcaaggagttgaatattgttttgcctgaatttgagaaaacccacctagagcatcaacaaagaat

SEQ ID NO: 428011 - DNA, 120 bp, Artificial Sequence
  ENSG00000151725_7 (sequence is synthesized)
agaatctaaagtttgtaaggcagccatcgccacattttatgttaatgttaaagaacaattcatcaaaatgcttaaagaaagccagatgttgacaaatctgaaaaggaagaatgctaagat

SEQ ID NO: 428012 - DNA, 120 bp, Artificial Sequence
  ENSG00000151725_8 (sequence is synthesized)
gatttcagatatcgaaaagaaaaggcagcgtatgattgaagtccaggatgaactgcttcggttagagccacagctgaaacaactacaaacaaaatatgatgaacttaaagagagaaagtc

SEQ ID NO: 428013 - DNA, 120 bp, Artificial Sequence
  ENSG00000151725_9 (sequence is synthesized)
ttcccttaggaatgcagcatatttcttatctaatttaaaacagctttatcaagattattcagatgttcaagctcaagaaccaaacgtaaaggaaacgtatgattcatccagccttccagc

SEQ ID NO: 428014 - DNA, 120 bp, Artificial Sequence
  ENSG00000151725_10 (sequence is synthesized)
gagcagtctactaaaatgtgcctataggaagactagtctcatgctgttaccttctgaaactgtacctttataaatcaattgttttgcaaagaagttatggcctacttagaatctaaaatt

SEQ ID NO: 428015 - DNA, 120 bp, Artificial Sequence
  ENSG00000151725_11 (sequence is synthesized)
tgttattcaaattaaatggctgtgaacaatgttaaatagcatcagtttgtccaatagttttaaaggccataatcatcttttctggttaatatcttgagtaattttaaaatgttgacacct

SEQ ID NO: 428016 - DNA, 120 bp, Artificial Sequence
  ENSG00000151725_12 (sequence is synthesized)
taatcggtcccaggtatgagctataataaacttgtaaaattaagttgatgtgaacataattttgattaattaataaggcgatttctcctgaatttacaccaaagctaatttttaatgaaa

SEQ ID NO: 428017 - DNA, 120 bp, Artificial Sequence
  ENSG00000151725_13 (sequence is synthesized)
ttggtttacagaagtaaaaaacaaaaattggaaagcaaagtaataaaacttagtttatataaacaggttgaatgatatatttatcaaatctcacagacatcaggcaaattatagcctggt

SEQ ID NO: 428018 - DNA, 120 bp, Artificial Sequence
  ENSG00000151725_14 (sequence is synthesized)
gacaaaagtgttcatagtgaattagttactcttgtaatacttctataattagttcatcaggaatttcatccacttcactgttataactgagaagactgttctctgcagcttcagctaatt

SEQ ID NO: 428019 - DNA, 120 bp, Artificial Sequence
  ENSG00000151725_15 (sequence is synthesized)
cagcatcttcagtagcttctaaaaaataagcatcatcaatgccattatcccagacagcatcagcagatgcacctgttgacagcctgctaggtgatggtttatgaggattctgggtttcat

SEQ ID NO: 428020 - DNA, 120 bp, Artificial Sequence
  ENSG00000151725_16 (sequence is synthesized)
tgctcctagtttcatctgcttcatctgttgtaaactcttcttcctttatttcagtggtgaagggatagagagtgggataggaaaatatttactcaggatatgtgatttaaccttatactc

SEQ ID NO: 428021 - DNA, 120 bp, Artificial Sequence
  ENSG00000151725_17 (sequence is synthesized)
tatgttgaagtaaggtattaagtgacagatactaaagtgaatatgcaggaggaatgctgtctccgatatctcaccgtgggaatgagtgcactgattcaaacgttgctgcactgaagctca

SEQ ID NO: 428022 - DNA, 120 bp, Artificial Sequence
  ENSG00000151725_18 (sequence is synthesized)
gacacacttgaaactccaaatttgaaattacctacagttctgtgcacatacttttcaatactccccgacggaagagcaagggtggatttaattttttaacaagtggacagtccagctgaa

SEQ ID NO: 428023 - DNA, 120 bp, Artificial Sequence
  ENSG00000151725_19 (sequence is synthesized)
gacaaatcagaagataaatttgctatcttgacaatggacttagtacccatgctttaaattttaaagtatttagcaaatcgtaaacatggattgaaaaaagattaaaaacagttgccaaaa

SEQ ID NO: 428024 - DNA, 120 bp, Artificial Sequence
  ENSG00000151725_20 (sequence is synthesized)
ttgatccagtagttcccaagacttgaacggcttgatgaatttcagcatttataaggaatattcttctgtggatatcactgctaattattcattgtgcattgtatttcagagatttttttt

SEQ ID NO: 428025 - DNA, 120 bp, Artificial Sequence
  ENSG00000151725_21 (sequence is synthesized)
cctacattttaaactgaaacccagaatcttttacacattcgtagtttcagagccaaagcaagtcatctagttggccagccccggttcttcacactcgctcagcgtacttacaacctcagt

SEQ ID NO: 428026 - DNA, 120 bp, Artificial Sequence
  ENSG00000151725_22 (sequence is synthesized)
gggcagtactcagacaaggactcttaggacaccccccacaggcacctgtgctctcctgagcagcttattccagaaaactcagaaaaaagggaagatatctcatgacaaaaggaagaaatc

SEQ ID NO: 428027 - DNA, 120 bp, Artificial Sequence
  ENSG00000151725_23 (sequence is synthesized)
gaaactcagccactgagagatgaaacagtttgccccaagtcacacattttcatccaggcactgacagtcttccactggttttattagactttggaaagtggacaagatttgataagagga

SEQ ID NO: 428028 - DNA, 120 bp, Artificial Sequence
  ENSG00000151725_24 (sequence is synthesized)
tccatcatggtacttagacttttttttaattcctctacagacaaagaatagaatctaaagtttgtaaggcagccatcgccacattttatgttaatgttaaagaacaattcatcaaaatgg

SEQ ID NO: 428029 - DNA, 120 bp, Artificial Sequence
  ENSG00000151725_25 (sequence is synthesized)
taagctcacggacatgcatttgttggtctaaggtttttttcactaatcctgtagcagcatattgttgtcttagaaaagcttgcatttgctggcagtatggtaataaactcattagaacta

SEQ ID NO: 428030 - DNA, 120 bp, Artificial Sequence
  ENSG00000151725_26 (sequence is synthesized)
ctggatctggcgggaagggtctcggcttgctgcagacggtgcacaaagccatacgccaagacgatctgaagagaacaggagttcccccgggcctgggaaggctgcctggaggaggagcgc

SEQ ID NO: 428031 - DNA, 120 bp, Artificial Sequence
  ENSG00000151726_0 (sequence is synthesized)
agggagtgggctgcagtgacagccggcggcggagcggccggtccacggaggagaattcagcttagagaactatcaacacaggacaatgcaagcccatgagctgttccggtattttcgaat

SEQ ID NO: 428032 - DNA, 120 bp, Artificial Sequence
  ENSG00000151726_1 (sequence is synthesized)
gccagagctggttgacttccgacagtacgtgcgtactcttccgaccaacacgcttatgggcttcggagcttttgcagcactcaccaccttctggtacgccacgagacccaaacccctgaa

SEQ ID NO: 428033 - DNA, 120 bp, Artificial Sequence
  ENSG00000151726_2 (sequence is synthesized)
gccgccatgcgacctctccatgcagtcagtggaagtggcgggtagtggtggtgcacgaagatccgcactacttgacagcgacgagcccttggtgtatttctatgatgatgtcacaacatt

SEQ ID NO: 428034 - DNA, 120 bp, Artificial Sequence
  ENSG00000151726_3 (sequence is synthesized)
atacgaaggtttccagaggggaatacaggtgtcaaataatggcccttgtttaggctctcggaaaccagaccaaccctatgaatggctttcatataaacaggttgcagaattgtcggagtg

SEQ ID NO: 428035 - DNA, 120 bp, Artificial Sequence
  ENSG00000151726_4 (sequence is synthesized)
cataggctcagcactgatccagaagggcttcaagactgccccagatcagttcattggcatctttgctcaaaatagacctgagtgggtgattattgaacaaggatgctttgcttattcgat

SEQ ID NO: 428036 - DNA, 120 bp, Artificial Sequence
  ENSG00000151726_5 (sequence is synthesized)
ggtgatcgttccactttatgatacccttggaaatgaagccatcacgtacatagtcaacaaagctgaactctctctggtttttgttgacaagccagagaaggccaaactcttattagaggg

SEQ ID NO: 428037 - DNA, 120 bp, Artificial Sequence
  ENSG00000151726_6 (sequence is synthesized)
tgtagaaaataagttaataccaggccttaaaatcatagttgtcatggatgcctacggcagtgaactggtggaacgaggccagaggtgtggggtggaagtcaccagcatgaaggcgatgga

SEQ ID NO: 428038 - DNA, 120 bp, Artificial Sequence
  ENSG00000151726_7 (sequence is synthesized)
ggacctgggaagagccaacagacggaagcccaagcctccagcacctgaagatcttgcagtaatttgtttcacaagtggaactacaggcaaccccaaaggagcaatggtcactcaccgaaa

SEQ ID NO: 428039 - DNA, 120 bp, Artificial Sequence
  ENSG00000151726_8 (sequence is synthesized)
catagtgagcgattgttcagcttttgtgaaagcaacagagaatacagtcaatccttgcccagatgatactttgatatctttcttgcctctcgcccatatgtttgagagagttgtagagtg

SEQ ID NO: 428040 - DNA, 120 bp, Artificial Sequence
  ENSG00000151726_9 (sequence is synthesized)
tgtaatgctgtgtcatggagctaaaatcggatttttccaaggagatatcaggctgctcatggatgacctcaaggtgcttcaacccactgtcttccccgtggttccaagactgctgaaccg

SEQ ID NO: 428041 - DNA, 120 bp, Artificial Sequence
  ENSG00000151726_10 (sequence is synthesized)
gatgtttgaccgaattttcggacaagcaaacaccacgctgaagcgatggctcttggactttgcctccaagaggaaagaagcagagcttcgcagcggcatcatcagaaacaacagcctgtg

SEQ ID NO: 428042 - DNA, 120 bp, Artificial Sequence
  ENSG00000151726_11 (sequence is synthesized)
ggaccggctgatcttccacaaagtacagtcgagcctgggcggaagagtccggctgatggtgacaggagccgccccggtgtctgccactgtgctgacgttcctcagagcagccctgggctg

SEQ ID NO: 428043 - DNA, 120 bp, Artificial Sequence
  ENSG00000151726_12 (sequence is synthesized)
tcagttttatgaaggatacggacagacagagtgcactgccgggtgctgcctgaccatgcctggagactggaccgcaggccatgttggggccccgatgccgtgcaatttgataaaacttgt

SEQ ID NO: 428044 - DNA, 120 bp, Artificial Sequence
  ENSG00000151726_13 (sequence is synthesized)
tgatgtggaagaaatgaattacatggctgccgagggcgagggcgaggtgtgtgtgaaagggccaaatgtatttcagggctacttgaaggacccagcgaaaacagcagaagctttggacaa

SEQ ID NO: 428045 - DNA, 120 bp, Artificial Sequence
  ENSG00000151726_14 (sequence is synthesized)
agacggctggttacacacaggggacattggaaaatggttaccaaatggcaccttgaaaattatcgaccggaaaaagcacatatttaagctggcacaaggagaatacatagcccctgaaaa

SEQ ID NO: 428046 - DNA, 120 bp, Artificial Sequence
  ENSG00000151726_15 (sequence is synthesized)
tcctgggcccaaaagagaggatttgaagggtcgtttgaggaactgtgcagaaataaggatgtcaaaaaagctatcctcgaagatatggtgagacttgggaaggattctggtctgaaacca

SEQ ID NO: 428047 - DNA, 120 bp, Artificial Sequence
  ENSG00000151726_16 (sequence is synthesized)
tttgaacaggtcaaaggcatcacattgcaccctgaattattttctatcgacaatggccttctgactccaacaatgaaggcgaaaaggccagagctgcggaactatttcaggtcgcagata

SEQ ID NO: 428048 - DNA, 120 bp, Artificial Sequence
  ENSG00000151726_17 (sequence is synthesized)
gatgacctctattccactatcaaggtttagtgtgaagaagaaagctcagaggaaatggcacagttccacaatctcttctcctgctgatggccttcatgttgttaattttgaatacagcaa

SEQ ID NO: 428049 - DNA, 120 bp, Artificial Sequence
  ENSG00000151726_18 (sequence is synthesized)
gtgtagggaaggaagcgttcgtgtttgacttgtccattcggggttcttctcataggaatgctagaggaaagagaacactgccttacagtcacctcatgttgcagaccatgtttatggtaa

SEQ ID NO: 428050 - DNA, 120 bp, Artificial Sequence
  ENSG00000151726_19 (sequence is synthesized)
tacacactttccaaaatgagccttaaaaattgtaaaggggatactataaatgtgctaagttatttgagacttcctcagtttaaaaagtgggttttaaatcttctgtctccctgtttctct

SEQ ID NO: 428051 - DNA, 120 bp, Artificial Sequence
  ENSG00000151726_20 (sequence is synthesized)
aatcaaggggttaggactttgctatctctgagatgtctgctacttgctgcaaattctgcagctgtctgctgctctaaagagtacagtgcactagagggaagtgttccctttaaaaataag

SEQ ID NO: 428052 - DNA, 120 bp, Artificial Sequence
  ENSG00000151726_21 (sequence is synthesized)
aacaactgtcctggctggagaatctcacaagcggaccagagatctttttaaatccctgctactgtcccttctcacaggcattcacagaacccttctgattcgtaagggttacgaaactca

SEQ ID NO: 428053 - DNA, 120 bp, Artificial Sequence
  ENSG00000151726_22 (sequence is synthesized)
tgttcttctccagtcccctgtggtttctgttggagcataaggtttccagtaagcgggagggcagatccaactcagaaccatgcagataaggagcctctggcaaatgggtgctcatcagaa

SEQ ID NO: 428054 - DNA, 120 bp, Artificial Sequence
  ENSG00000151726_23 (sequence is synthesized)
cgcgtggattctctttcatggcagaatgctcttggactcggttctccaggcctgattccccgactccatcctttttcaggggttatttaaaaatctgccttagattctatagtgaagaca

SEQ ID NO: 428055 - DNA, 120 bp, Artificial Sequence
  ENSG00000151726_24 (sequence is synthesized)
agcatttcaagaaagagttacctggatcagccatgctcagctgtgacgcctgaataactgtctactttatcttcactgaaccactcactctgtgtaaaggccaacagatttttaatgtgg

SEQ ID NO: 428056 - DNA, 120 bp, Artificial Sequence
  ENSG00000151726_25 (sequence is synthesized)
ttttcatatcaaaagatcatgttgggattaacttgcctttttccccaaaaaataaactctcaggcaagcatttctttaaagctattaagggagtatatacttgagtacttattgaaatgg

SEQ ID NO: 428057 - DNA, 120 bp, Artificial Sequence
  ENSG00000151726_26 (sequence is synthesized)
acagtaataagcaaatgttcttataatgctacctgatttctatgaaatgtgtttgacaagccaaaattctaggatgtagaaatctggaaagttcatttcctgggattcacttctccaggg

SEQ ID NO: 428058 - DNA, 120 bp, Artificial Sequence
  ENSG00000151726_27 (sequence is synthesized)
attttttaaagttaatttgggaaattaacagcagttcactttattgtgagtctttgccacatttgactgaattgagctgtcatttgtacatttaaagcagctgttttggggtctgtgaga

SEQ ID NO: 428059 - DNA, 120 bp, Artificial Sequence
  ENSG00000151726_28 (sequence is synthesized)
gtacatgtattatatacaagcacaacagggcttgcactaaagaattgtcattgtaataacactacttggtagcctaacttcatatatgtattcttaattgcacaaaaagtcaataatttg

SEQ ID NO: 428060 - DNA, 120 bp, Artificial Sequence
  ENSG00000151726_29 (sequence is synthesized)
tcaccttggggttttgaatgtttgctttaagtgttggctatttctatgttttataaaccaaaacaaaatttccaaaaacaatgaaggaaaccaaaataaatatttctgcatttcaggtga

SEQ ID NO: 428061 - DNA, 120 bp, Artificial Sequence
  ENSG00000151726_30 (sequence is synthesized)
gggactgtgttaagaaccaagggcatataaagacagatgggaggagaccctggccggggagaggaagaagcatctacataggtactaagtaccattcgctaattcagcttagagaactat

SEQ ID NO: 428062 - DNA, 120 bp, Artificial Sequence
  ENSG00000151726_31 (sequence is synthesized)
aaactccacggtaacggggaccaatgttgttagaggttgaggttcctggtaggtcccaggtgctaaaaggaagagcagcctttgggatgtgagcccgaaaaccatcgtgttggcttctga

SEQ ID NO: 428063 - DNA, 120 bp, Artificial Sequence
  ENSG00000151726_32 (sequence is synthesized)
agccccaagatgggcatggcagggacgcggaagccctcagaaccgcggaagccctcagaaccgcacagcaggtggccgccgtggtgcagcgcgcagtcggccctcagctcccctgcaccg

SEQ ID NO: 428064 - DNA, 120 bp, Artificial Sequence
  ENSG00000151726_33 (sequence is synthesized)
gactttgctgctggctgcccattggcctatcctccaccctctgctctcctgagaagtcaagtgtggattttgtctgctagttacctttagcccagtgggcagcagcgtggggctcggcat

SEQ ID NO: 428065 - DNA, 120 bp, Artificial Sequence
  ENSG00000151726_34 (sequence is synthesized)
gtgacttgtgccctgagagaccttggtaggctgggggagcgcagctgagccctgctaacccccgcccacttccaggctcattgccctcttctgtgtctgcagtggggtgtcacctagtag

SEQ ID NO: 428066 - DNA, 120 bp, Artificial Sequence
  ENSG00000151726_35 (sequence is synthesized)
gcaggggcttgggcttgaattgggctgtgccatgtgccatctgtatgaccctggacaatcctcccaatcttacagaacttcagtttactcatctgtaaagttagaatgcgtttacctctc

SEQ ID NO: 428067 - DNA, 120 bp, Artificial Sequence
  ENSG00000151726_36 (sequence is synthesized)
agagtggctgataaggattataagagaaaatgcatgaacacactttgtaaaccatggtcacaacacaagcataatgtgggaggtcattttatttttacaataaacactttgagcctctgc

SEQ ID NO: 428068 - DNA, 120 bp, Artificial Sequence
  ENSG00000151726_37 (sequence is synthesized)
acaaagggggcgctttcagcctctgtaaatagcctattgtacaaggggaggaggcggggcacggaatggcagcatcttgccagcttgggttgctgcgttaaggaaagatgtcaggctttc

SEQ ID NO: 428069 - DNA, 120 bp, Artificial Sequence
  ENSG00000151726_38 (sequence is synthesized)
ttaatttgccactgcaggggcaagggtgtcatttatgtgggtttgtttgagggctgcattcctagtgaagtattccatcaaactgccattattcatcttgatgaaagcttgaggaacttt

SEQ ID NO: 428070 - DNA, 120 bp, Artificial Sequence
  ENSG00000151726_39 (sequence is synthesized)
agaaggagagaaacatccagaccacccggtttttggtttctaaatgacatgaagagaatacaatgttaataattcagcttagagaactatcaacacaggacaatgcaagcccatgagctg

SEQ ID NO: 428071 - DNA, 120 bp, Artificial Sequence
  ENSG00000151726_40 (sequence is synthesized)
agcgcaccagcagcatcctggctcagccgcggcggtggcgggggcgcaaccagcgggccgaggcggcggcgccagcggcgccttaaatagcatccagagccggcgcggggcagggagtgg

SEQ ID NO: 428072 - DNA, 120 bp, Artificial Sequence
  ENSG00000151726_41 (sequence is synthesized)
gttagattttaaaattattttaggatattttcttataagagaatgcacttatttttctttgagattgcagctattttcgtttgatctagaatcttctcattcttttgatttttaatttta

SEQ ID NO: 428073 - DNA, 120 bp, Artificial Sequence
  ENSG00000151726_42 (sequence is synthesized)
ttgttagtagattataaagaatgggatattagagatttttctttaaaaatgaacctatatacattttatttatttattttcttaaagatagggtctcactctgttgtccagctggagtgt

SEQ ID NO: 428074 - DNA, 86 bp, Artificial Sequence
  ENSG00000151726_43 (sequence is synthesized)
cttaaagatagggtctcactctgttgtccagctggagtgtaatggcagtcatagctcattacagcttcaaattgctgggttccagg

SEQ ID NO: 428075 - DNA, 120 bp, Artificial Sequence
  ENSG00000151726_44 (sequence is synthesized)
tctcgaactcctggcctcaagtgatccccattggcttcccaacgtgctaggattacaagcatgagacaggcttcctttttttccttttttttttaaaagcagttatctgatatccatcac

SEQ ID NO: 428076 - DNA, 120 bp, Artificial Sequence
  ENSG00000151726_45 (sequence is synthesized)
ttccttttttttttaaaagcagttatctgatatccatcaccttgtttacttgaccctgcttttaaaaaaataagtatataaaagtaaatacgaattagagatttgttagattggtattcc

SEQ ID NO: 428077 - DNA, 120 bp, Artificial Sequence
  ENSG00000151726_46 (sequence is synthesized)
cagtggttttttaaaaacattaattgcaaaattcctgatgcttaccacattttagagccaggagttcttaatctgggctgagtgaactcctgggggaggggggtagtatgttctgaatag

SEQ ID NO: 428078 - DNA, 120 bp, Artificial Sequence
  ENSG00000151726_47 (sequence is synthesized)
atgagccataactttcatcatattctcccagggggccacaagatggaaaaataaagaaccactattttagagcatttggatcaagctatgtaataactcatttgtctgtgttaaaggcat

SEQ ID NO: 428079 - DNA, 120 bp, Artificial Sequence
  ENSG00000151726_48 (sequence is synthesized)
cagaggggaatacaggtgtcaagatcgctcaggcccctctgtgtccactgtaactttcccagagtcggtcccaaagctcactggaccctctagatgttccctgtggccctgggggctcca

SEQ ID NO: 428080 - DNA, 120 bp, Artificial Sequence
  ENSG00000151729_0 (sequence is synthesized)
ggccccctagcgtcgcgcagggtcggggactgcgcggcggtgccaggccgggcgtgggcgagagcacgaacgggctgcctgcgggctgagagcgtcgagctgtcaccatgggtgatcacg

SEQ ID NO: 428081 - DNA, 120 bp, Artificial Sequence
  ENSG00000151729_1 (sequence is synthesized)
cttggagcttcctaaaggacttcctggccgggggcgtcgccgctgccgtctccaagaccgcggtcgcccccatcgagagggtcaaactgctgctgcaggtccagcatgccagcaaacaga

SEQ ID NO: 428082 - DNA, 120 bp, Artificial Sequence
  ENSG00000151729_2 (sequence is synthesized)
tcagtgctgagaagcagtacaaagggatcattgattgtgtggtgagaatccctaaggagcagggcttcctctccttctggaggggtaacctggccaacgtgatccgttacttccccaccc

SEQ ID NO: 428083 - DNA, 120 bp, Artificial Sequence
  ENSG00000151729_3 (sequence is synthesized)
aagctctcaacttcgccttcaaggacaagtacaagcagctcttcttagggggtgtggatcggcataagcagttctggcgctactttgctggtaacctggcgtccggtggggccgctgggg

SEQ ID NO: 428084 - DNA, 120 bp, Artificial Sequence
  ENSG00000151729_4 (sequence is synthesized)
ccacctccctttgctttgtctacccgctggactttgctaggaccaggttggctgctgatgtgggcaagggcgccgcccagcgtgagttccatggtctgggcgactgtatcatcaagatct

SEQ ID NO: 428085 - DNA, 120 bp, Artificial Sequence
  ENSG00000151729_5 (sequence is synthesized)
tcaagtctgatggcctgagggggctctaccagggtttcaacgtctctgtccaaggcatcattatctatagagctgcctacttcggagtctatgatactgccaaggggatgctgcctgacc

SEQ ID NO: 428086 - DNA, 120 bp, Artificial Sequence
  ENSG00000151729_6 (sequence is synthesized)
ccaagaacgtgcacatttttgtgagctggatgattgcccagagtgtgacggcagtcgcagggctggtgtcctacccctttgacactgttcgtcgtagaatgatgatgcagtccggccgga

SEQ ID NO: 428087 - DNA, 120 bp, Artificial Sequence
  ENSG00000151729_7 (sequence is synthesized)
aaggggccgatattatgtacacggggacagttgactgctggaggaagattgcaaaagacgaaggagccaaggccttcttcaaaggtgcctggtccaatgtgctgagaggcatgggcggtg

SEQ ID NO: 428088 - DNA, 120 bp, Artificial Sequence
  ENSG00000151729_8 (sequence is synthesized)
cttttgtattggtgttgtatgatgagatcaaaaaatatgtctaatgtaattaaaacacaagttcacagatttacagtgaacttgatctacaagttcacagatccattgtgtggtttaata

SEQ ID NO: 428089 - DNA, 120 bp, Artificial Sequence
  ENSG00000151729_9 (sequence is synthesized)
gactattcctaggggaagtaaaaagatctgggataaaaccagactgaaaggaatacctcagaagagatgcttcattgagtgttcattaaaccacacatgtattttgtatttattttacat

SEQ ID NO: 428090 - DNA, 120 bp, Artificial Sequence
  ENSG00000151729_10 (sequence is synthesized)
ttaaattcccacagcaaatagaaaataatttatcatacttgtacaattaactgaagaattgataataactgaatgtgaaacatcaataaagaccacttaatgcacgctttctattttatt

SEQ ID NO: 428091 - DNA, 120 bp, Artificial Sequence
  ENSG00000151729_11 (sequence is synthesized)
gaactcttattaactgtaaaatgcatttttaaaagatcaaaaatgcatattttctagcatgattcatgtatcagtcagcagccaagcttctaaatgccagatattatattgagaatgtat

SEQ ID NO: 428092 - DNA, 120 bp, Artificial Sequence
  ENSG00000151729_12 (sequence is synthesized)
tatatgagaacgtacaatgcttaaagttccggttttcaaacttaggcaggtcatattctatctatcttatccagcattactgtaggctagaaagtgataatggctttcataatcctgcct

SEQ ID NO: 428093 - DNA, 120 bp, Artificial Sequence
  ENSG00000151729_13 (sequence is synthesized)
tgtcttaggcactttcctgcagtctttagaaattctaagattctgctaaaagttttaaatcacaatctggagaattttctatgattaggaagtgctctgttttcatccctttagataact

SEQ ID NO: 428094 - DNA, 120 bp, Artificial Sequence
  ENSG00000151729_14 (sequence is synthesized)
gtgacacctagaattttatgttaagtagagagtattcattgaaaatcaaggccaggtgcagtggctcacacctgtcaccccagcactttgggaggcagaggtgggcgtatcacttcaggc

SEQ ID NO: 428095 - DNA, 74 bp, Artificial Sequence
  ENSG00000151729_15 (sequence is synthesized)
agaggttgcagtgagctgagatggcatgccaccacatccatcctaatcagttgtcttagtttaagctactataa

SEQ ID NO: 428096 - DNA, 120 bp, Artificial Sequence
  ENSG00000151729_16 (sequence is synthesized)
ttgtcttagtttaagctactataacaaggtactgtagactgatggcttataagcaacagaaacttatttctcagttctgtagtctggaggtccaagatcaaggtgacactgtggtcaggt

SEQ ID NO: 428097 - DNA, 120 bp, Artificial Sequence
  ENSG00000151729_17 (sequence is synthesized)
agctcactaatcccattcatgagggccctaccctcatgacccaattacctcccaaatgcccctcctccaaacaccaccactttgggggttaagatttcaacagatgaattttgaagggac

SEQ ID NO: 428098 - DNA, 120 bp, Artificial Sequence
  ENSG00000151729_18 (sequence is synthesized)
acaaacattcagtccatagcatcacttatcaagctagtatttaatacctcttaggccccgtggaagggaaaatagataggaacctgccctgaaagatgcttcagttggggagaaaaggtg

SEQ ID NO: 428099 - DNA, 120 bp, Artificial Sequence
  ENSG00000151729_19 (sequence is synthesized)
aaattccattgttagacaatttgtttaagacaatacatcttgcttgagaaggaatagaagggaaatgaaatggggggagggagtggtaggagatggaggctttgaaagaaaataaccaga

SEQ ID NO: 428100 - DNA, 120 bp, Artificial Sequence
  ENSG00000151729_20 (sequence is synthesized)
tttagaaacatgggtatagaaagcatcctccagtacttctgtaacaatttatcaagacctacaggaagtcagttttggatttgctcctccgagatttgcgagccagaggaaaatacttag

SEQ ID NO: 428101 - DNA, 120 bp, Artificial Sequence
  ENSG00000151729_21 (sequence is synthesized)
actatcaggttggaaagttcacacttggaccaggaaaagaccaagcagttgctatagtctcctggattgtgactaatctggaggaagcaagtccctgtatccttggcaaagcttgaaagg

SEQ ID NO: 428102 - DNA, 120 bp, Artificial Sequence
  ENSG00000151729_22 (sequence is synthesized)
caggcaaatgtcttctctgtgttttctgacaggtggttgggtggtgggggttggtctctgtacctcctgttctttaccttgcttaccaagcccttccaccgactcactcctgcctcccca

SEQ ID NO: 428103 - DNA, 120 bp, Artificial Sequence
  ENSG00000151729_23 (sequence is synthesized)
gctaaaaattggctgtgttgcttttaccacagttaccaaggtctgagttttataaaatccaggatcacatctgacctcacctggtagatatctaggccaataaagtctaaagggctaaaa

SEQ ID NO: 428104 - DNA, 120 bp, Artificial Sequence
  ENSG00000151729_24 (sequence is synthesized)
agaaggtacctctccatcctgtctcctcgaggccaggcagcacatgtgcagttaagaggcctcctggatccattgtcctcctgttgcttttcgttctaagtgatccaaactctattgctg

SEQ ID NO: 428105 - DNA, 120 bp, Artificial Sequence
  ENSG00000151729_25 (sequence is synthesized)
atagggaataaaagcagggcaggctagtagtgggcaagtgctttgatggagcgtatctccaagcagggcccaagtttaggaggaggaagacctgatacaatgaatgaacagtgcgtcctc

SEQ ID NO: 428106 - DNA, 120 bp, Artificial Sequence
  ENSG00000151729_26 (sequence is synthesized)
ccaacccaaccaagaagtgtaattgtgttccgtctttaaccctggcatggaatggggagggaagaggcatggacatttattacatagtgcacattatctacattctctgcatgtgaccca

SEQ ID NO: 428107 - DNA, 120 bp, Artificial Sequence
  ENSG00000151729_27 (sequence is synthesized)
gatgtcagcccttccgcttcctgcgaaggttacctctaatgcacgttgccccaggccctgctgagctagttcctcaccgcagctacttaactcaccatgaattcctagaaccctcagcct

SEQ ID NO: 428108 - DNA, 120 bp, Artificial Sequence
  ENSG00000151729_28 (sequence is synthesized)
ctgagagtgctgggatctggcgggagaacaggcagtacttccctcactaacctacccgcacgccataccatcattgtgcaaagctgcctcatgctggaaggtctggtttacgtaaaagtg

SEQ ID NO: 428109 - DNA, 120 bp, Artificial Sequence
  ENSG00000151729_29 (sequence is synthesized)
acaagttggaattgagcgtccgactctcgggtacctgccccaggcatttctcatcagccccatttcccacacagctctctcctaggcgcagccctccttcaccaccaccacccccacccc

SEQ ID NO: 428110 - DNA, 120 bp, Artificial Sequence
  ENSG00000151729_30 (sequence is synthesized)
aatcacctttaggtattttctcccctaaagcctcacctgttggcattttacatctttttaagaccttattttgtattttaaatgtatgagaaaaattatggaggatgatgcaagatgagt

SEQ ID NO: 428111 - DNA, 120 bp, Artificial Sequence
  ENSG00000151729_31 (sequence is synthesized)
gagtccataatggtaataattggacactaaaaacaatgaaaacttgtctcaagtatttgtgttgaaatctcaattaactgggcgactgctcccgttccattttattctgtaaaatatgtg

SEQ ID NO: 428112 - DNA, 120 bp, Artificial Sequence
  ENSG00000151729_32 (sequence is synthesized)
gcatcctttgtgttgaggcggcatttactaaacacccccaaggtgcaaggctgcaagagaatcgagcgccgcaaggcgagcttatcttccacacctggtacagtgcccaggacagagaag

SEQ ID NO: 428113 - DNA, 120 bp, Artificial Sequence
  ENSG00000151729_33 (sequence is synthesized)
gtgtttagcaagtttctgctgaatggaagagtgagcgagaagggaaagtgcatctaaaaagcacagggaacctacaaaatatttgggaaagggtttcatcagttcgggtgaaatcttgaa

SEQ ID NO: 428114 - DNA, 120 bp, Artificial Sequence
  ENSG00000151729_34 (sequence is synthesized)
cgtgcaaagcaccatgggggtggctggacaggcttgttggagtcgtataatgcaatgaataaaaacttacggctgccttaaatgcaaatgtcaagcccttaaataaaatttaacaaagtc

SEQ ID NO: 428115 - DNA, 120 bp, Artificial Sequence
  ENSG00000151729_35 (sequence is synthesized)
ccctctagacacagccatagcagttactgagtttaacttgaagccacttccaatgccctgtatacaagctgagcactgcccctccggggtccggagagggcagcagccacctttgctgtc

SEQ ID NO: 428116 - DNA, 120 bp, Artificial Sequence
  ENSG00000151729_36 (sequence is synthesized)
tgcctggtcatatgtgaagcacctgcacaggggcaggttccccgcaaggtcagagcatggagctggaggtgcagtggcctctctccctccacctgctttctgctgagaacaggcacttca

SEQ ID NO: 428117 - DNA, 120 bp, Artificial Sequence
  ENSG00000151743_0 (sequence is synthesized)
agacgctgcagcgatgcctcgcccacggcgggtcagtcagctcctggatctatgcctttggtgcttcatgaagaatatttccagatatctcacagacattaagcctttgcctcccaacat

SEQ ID NO: 428118 - DNA, 120 bp, Artificial Sequence
  ENSG00000151743_1 (sequence is synthesized)
aaaagacagactgattaaaataatgagtatgcagggacagataacagattcaaatataagtgagattttacatcctgaagtccaaactctagatctacggagctgcgatatatcagatgc

SEQ ID NO: 428119 - DNA, 120 bp, Artificial Sequence
  ENSG00000151743_2 (sequence is synthesized)
tgctctcctgcacctgtctaactgtagaaaactgaagaaattaaatttaaatgcttcaaaagggaaccgagtttctgtaacttcagaaggaataaaagctgtggcttcatcttgttcata

SEQ ID NO: 428120 - DNA, 120 bp, Artificial Sequence
  ENSG00000151743_3 (sequence is synthesized)
cctacacgaagcttctttgaaaagatgctgcaatctcactgacgaaggagtcgttgctcttgcactcaattgccagctgctaaagatcatcgatttaggtggctgcttaagtattactga

SEQ ID NO: 428121 - DNA, 120 bp, Artificial Sequence
  ENSG00000151743_4 (sequence is synthesized)
tgtgtccttacatgcattaggaaaaaactgcccatttttgcagtgtgtcgacttttcagctactcaggtatctgacagtggtgtgattgcacttgttagtggaccttgtgcgaagaaatt

SEQ ID NO: 428122 - DNA, 120 bp, Artificial Sequence
  ENSG00000151743_5 (sequence is synthesized)
agaggagattcatatgggacattgtgtaaatctgactgatggggctgtcgaagctgtccttacttactgtcctcaaatacgtatattactcttccatggatgccccttgataacagatca

SEQ ID NO: 428123 - DNA, 120 bp, Artificial Sequence
  ENSG00000151743_6 (sequence is synthesized)
ttcccgagaagtgttggagcaattagtaggcccaaacaaactaaagcaagtgacatggactgtttattgatgcttttttgaagatgatcaatgctaggaaagcttatcaaaactactttc

SEQ ID NO: 428124 - DNA, 120 bp, Artificial Sequence
  ENSG00000151743_7 (sequence is synthesized)
ccaggaaaccatctatagagatttgcattctacttaatgttaacactatttttaattattttattgtcttaagttataactctcagagaattagctaagtcttggtatatacatggtttg

SEQ ID NO: 428125 - DNA, 120 bp, Artificial Sequence
  ENSG00000151743_8 (sequence is synthesized)
tattctatatctgttggatgagtcattatttttgaaatgataatcctagcatgaactctgatctatggtgttggattctgtttcttaaataactttaaaattaactgttttcccttgaga

SEQ ID NO: 428126 - DNA, 120 bp, Artificial Sequence
  ENSG00000151743_9 (sequence is synthesized)
tttccttctcctatgtaggtatttgagctattgttctaagtttacctgtaagtataaaccttgggagaatctaagtaaacatatttctaaaagcatagttaccttcctattttctggctc

SEQ ID NO: 428127 - DNA, 120 bp, Artificial Sequence
  ENSG00000151743_10 (sequence is synthesized)
ttaccttcttggagtatttaaatgcccatttgccaaaagcagacctgaacatcaagcctgttaattcttcaaagaatttaggtatttgtttcaccgaaatgaagtgacttattagccatt

SEQ ID NO: 428128 - DNA, 120 bp, Artificial Sequence
  ENSG00000151743_11 (sequence is synthesized)
cagcgtattagtattacagaggctcttgcccagccacatccattcattgatttttatggctactcttcccagttacattttatgcatctgtaagctttccttccttagcaaaattgcatt

SEQ ID NO: 428129 - DNA, 120 bp, Artificial Sequence
  ENSG00000151743_12 (sequence is synthesized)
caaaaatgtgtaaaaatgagtaaatacagaatatcactacagagacttgtatcctcaggtttattgatttcacattgtgaaataaacagcaaaggtcttagttttcaagtgaaaactttt

SEQ ID NO: 428130 - DNA, 120 bp, Artificial Sequence
  ENSG00000151743_13 (sequence is synthesized)
tggtaatcacaaaattacctgacacataccacgcttaaaccaacccccaaatttagcatattcattttgccatgagccagtcttgagattttcttaaaagatttcttattttgcctctga

SEQ ID NO: 428131 - DNA, 120 bp, Artificial Sequence
  ENSG00000151743_14 (sequence is synthesized)
tgtagtgaaaaacggggtaagtatgctaactttcttgtatatgttggggggtacttattcaactccatttcttgtccttacaagatttataaatgtggtatgtttatagtgtggatatat

SEQ ID NO: 428132 - DNA, 120 bp, Artificial Sequence
  ENSG00000151743_15 (sequence is synthesized)
atgttgccactgcaaaggtggtgcatatgtatatatgtgcaaaatgggtaaggcctgttctaactatgaaatttttctaaagacaaattcaataaaatttaatactgaatatttaaccaa

SEQ ID NO: 428133 - DNA, 120 bp, Artificial Sequence
  ENSG00000151743_16 (sequence is synthesized)
atgctactggacttgaatggttaataaaattgcacaatgttgttggtggcagtgacttctttctgttcagatgcctttggtgcttcatgaagaatatttccagatatctcacagacatta

SEQ ID NO: 428134 - DNA, 90 bp, Artificial Sequence
  ENSG00000151743_17 (sequence is synthesized)
ctttgcctcccaacataaaagacagactgattaaaataatgagtatgcagggacagataacagattcaaatataagtgagggtcatgctc

SEQ ID NO: 428135 - DNA, 120 bp, Artificial Sequence
  ENSG00000151743_18 (sequence is synthesized)
agacgctgcagcgatgcctcgcccacggcgggtcagtcagctcctggatcttgatgcttaggaaagattttatatcattaaaaagaaattgggaggtcacttccaagatggctaaatggg

SEQ ID NO: 428136 - DNA, 63 bp, Artificial Sequence
  ENSG00000151743_19 (sequence is synthesized)
ctgcaacctccgctgcctggacttaggtgatccctcttcagcctcctgagtagttgggactat

SEQ ID NO: 428137 - DNA, 120 bp, Artificial Sequence
  ENSG00000151743_20 (sequence is synthesized)
ttgggactataggtgtgagccaccatgcctggcccacattttagaatattataaagtataagggtttgtttttttccctccagataaccaaaatgtccatatgtaattatcagaggaacc

SEQ ID NO: 428138 - DNA, 120 bp, Artificial Sequence
  ENSG00000151743_21 (sequence is synthesized)
atcccagcagtttgggaggccaaggtgggaggctcacttcagcccaggagttcaagaccggcctgggcaacatatagagaccccatctctacaagaaatacagaaaattagctgattgtg

SEQ ID NO: 428139 - DNA, 90 bp, Artificial Sequence
  ENSG00000151743_22 (sequence is synthesized)
agcccaggagttcaagaccggcctgggcaacatatagagaccccatctctacaagaaatacagaaaattagctgattgtggtggtgcatg

SEQ ID NO: 428140 - DNA, 120 bp, Artificial Sequence
  ENSG00000151746_0 (sequence is synthesized)
atcattccgcaccggctgctgcagggccagagggagcaggtggagcgagagagcgagccgcgagccggagcgcgccagacccagggcgagactgcagtgacgcggcccgggagacatggc

SEQ ID NO: 428141 - DNA, 120 bp, Artificial Sequence
  ENSG00000151746_1 (sequence is synthesized)
ggacgggcgtctctgaataagcagaatccggagcccctcgctacccgcggccgccgcagcccgggccatgccgcacggctgctgaccgcacgcaggggccggccccgaggacacatgcgg

SEQ ID NO: 428142 - DNA, 120 bp, Artificial Sequence
  ENSG00000151746_2 (sequence is synthesized)
cggcctttgccgcctcgcccctgaccctctgccctgttctccatgttgcatttctcgtcagtttctcgggcggtgtagctgccgctgccaccagagccggcggggcatcgcgctgctcat

SEQ ID NO: 428143 - DNA, 120 bp, Artificial Sequence
  ENSG00000151746_3 (sequence is synthesized)
tcatccggccgcactttcttttccgtttccacccatcccttcccatttccttctccctttccccgccagcttcgcatccatctcccccaccccgtaaccccctcctgcctccatccaccg

SEQ ID NO: 428144 - DNA, 120 bp, Artificial Sequence
  ENSG00000151746_4 (sequence is synthesized)
gggctatggccgcagaagaggtattgcagacggtggaccattataagactgagatagagaggctaaccaaggagctcacggagaccacccacgagaagatccaggctgccgagtacgggc

SEQ ID NO: 428145 - DNA, 120 bp, Artificial Sequence
  ENSG00000151746_5 (sequence is synthesized)
tggtggtgctggaggagaagctgaccctcaaacagcagtatgatgaactggaggctgagtacgacagcctcaaacaggagctggagcagctcaaagaggcatttgggcagtccttctcca

SEQ ID NO: 428146 - DNA, 120 bp, Artificial Sequence
  ENSG00000151746_6 (sequence is synthesized)
tccaccggaaggttgctgaagatggagagactcgggaggaaacgcttctgcaggagtcagcatcgaaggaggcttactatctggggaagatcttggagatgcagaacgagctgaaacaga

SEQ ID NO: 428147 - DNA, 120 bp, Artificial Sequence
  ENSG00000151746_7 (sequence is synthesized)
gccgggctgtggtcactaatgtacaggcagaaaacgagaggctcaccgcagtcgtgcaggatctgaaggagaacaatgagatggtggagctacagagaatacggatgaaggatgaaatcc

SEQ ID NO: 428148 - DNA, 120 bp, Artificial Sequence
  ENSG00000151746_8 (sequence is synthesized)
gagaatataagttccgggaggcacggctccttcaggactatactgaattggaagaagaaaatatcacattgcagaaactagtgtccacgttgaagcagaaccaggttgaatacgaaggct

SEQ ID NO: 428149 - DNA, 120 bp, Artificial Sequence
  ENSG00000151746_9 (sequence is synthesized)
taaagcatgagattaagcgatttgaggaggagacggtactgctgaacagccagctggaagatgccatccgattgaaagagattgctgagcaccaactggaagaagccctcgagactttaa

SEQ ID NO: 428150 - DNA, 120 bp, Artificial Sequence
  ENSG00000151746_10 (sequence is synthesized)
aaaatgaaagagagcaaaagaacaacctgcggaaggagctctcccagtatatcagcctcaatgataaccatatcagcatctcagtagatggactcaaatttgccgaggatgggagtgaac

SEQ ID NO: 428151 - DNA, 120 bp, Artificial Sequence
  ENSG00000151746_11 (sequence is synthesized)
caaacaatgatgacaaaatgaacggtcatatccatgggcctcttgtgaaactgaatggagactatcggactcccaccttaaggaaaggagagtctctgaaccctgtctctgacttattca

SEQ ID NO: 428152 - DNA, 120 bp, Artificial Sequence
  ENSG00000151746_12 (sequence is synthesized)
gtgagctgaacatttcagaaatacagaagttgaagcagcagcttatgcaggtagagcgggaaaaggccattcttttggccaacctacaggagtcacagacacagctggaacacaccaagg

SEQ ID NO: 428153 - DNA, 120 bp, Artificial Sequence
  ENSG00000151746_13 (sequence is synthesized)
gggcactgacggagcagcatgagcgggtgcaccggctcacagagcacgtcaatgccatgaggggcctgcaaagcagcaaggagctcaaggctgagctggacggggagaagggccgggact

SEQ ID NO: 428154 - DNA, 120 bp, Artificial Sequence
  ENSG00000151746_14 (sequence is synthesized)
caggggaggaggcccatgactatgaggtggacatcaatggtttagagatccttgaatgcaaatacagggtggcagtaactgaggtgattgatctgaaagctgaaattaaggccttaaagg

SEQ ID NO: 428155 - DNA, 120 bp, Artificial Sequence
  ENSG00000151746_15 (sequence is synthesized)
agaaatataataaatctgtagaaaactacactgatgagaaggccaagtatgagagtaaaatccagatgtatgatgagcaggtgacaagccttgagaagaccaccaaggagagtggtgaga

SEQ ID NO: 428156 - DNA, 120 bp, Artificial Sequence
  ENSG00000151746_16 (sequence is synthesized)
agatggcccacatggagaaggagttgcaaaagatgaccagcatagccaacgaaaatcacagtacccttaatacggcccaggatgagttagtgacattcagtgaggagttagctcagcttt

SEQ ID NO: 428157 - DNA, 120 bp, Artificial Sequence
  ENSG00000151746_17 (sequence is synthesized)
accaccatgtgtgtctatgtaataatgaaactcccaacagggtcatgctggattactataggcagagcagagtcacccgcagtggcagcctgaaagggcccgatgatcccagaggacttt

SEQ ID NO: 428158 - DNA, 120 bp, Artificial Sequence
  ENSG00000151746_18 (sequence is synthesized)
tgtccccacgattagccaggcggggtgtgtcatccccggtagaaacaaggacctcatctgaaccagttgcaaaagaaagcacagaggccagcaaagaaccaagtccaactaagaccccca

SEQ ID NO: 428159 - DNA, 120 bp, Artificial Sequence
  ENSG00000151746_19 (sequence is synthesized)
caatctctcctgttattactgccccaccgtcatctccagtattggatacaagtgacatccgcaaagagccaatgaatatctacaaccttaatgccataatccgggaccaaatcaagcatc

SEQ ID NO: 428160 - DNA, 120 bp, Artificial Sequence
  ENSG00000151746_20 (sequence is synthesized)
tgcagaaagctgtggaccggtccttgcaactgtctcgtcaaagagcagcggctcgggagctagcccccatgattgataaagacaaggaagccttaatggaagagatcctcaagctaaagt

SEQ ID NO: 428161 - DNA, 120 bp, Artificial Sequence
  ENSG00000151746_21 (sequence is synthesized)
ccctgctgagcaccaaacgggagcagatcgccacattgagggcggtgttgaaagccaacaagcagacagctgaggtggcgctagctaatctcaagaacaaatatgaaaatgaaaaagcaa

SEQ ID NO: 428162 - DNA, 120 bp, Artificial Sequence
  ENSG00000151746_22 (sequence is synthesized)
tggtgactgaaaccatgacgaagcttagaaatgaactgaaggctttgaaagaagatgctgcaaccttctcatccctgagagcaatgtttgcaacaagatgtgatgaatatgtcacccagt

SEQ ID NO: 428163 - DNA, 120 bp, Artificial Sequence
  ENSG00000151746_23 (sequence is synthesized)
tggatgagatgcagagacagttagcagctgcagaggatgagaagaagactctgaacactttgttacgaatggctatccagcaaaaactcgccctgacccagaggctggaggacttagagt

SEQ ID NO: 428164 - DNA, 120 bp, Artificial Sequence
  ENSG00000151746_24 (sequence is synthesized)
ttgaccatgagcagtcccgacgcagcaaaggcaaacttggaaagagcaagatcggcagccctaaagtaagtggggaggcatcagtcaccgtgcccaccatagacacttacctcctgcata

SEQ ID NO: 428165 - DNA, 120 bp, Artificial Sequence
  ENSG00000151746_25 (sequence is synthesized)
gtcagggcccacagacacccaacattcgggtcagcagtggcactcagaggaaaagacaattttcaccttccctttgtgatcagagccgtcccaggacttcaggggcttcctacctacaga

SEQ ID NO: 428166 - DNA, 120 bp, Artificial Sequence
  ENSG00000151746_26 (sequence is synthesized)
atttattaagagttccccctgatcccacctccacagaatcatttcttctgaagggccccccttccatgagtgaattcatccaagggcaccggctcagcaaggaaaaaaggttaaccgtgg

SEQ ID NO: 428167 - DNA, 120 bp, Artificial Sequence
  ENSG00000151746_27 (sequence is synthesized)
ctccaccagattgtcagcagcctgctgcctccgtaccgccacagtgctcacaactagccgggaggcaagactgcccaactgtcagtcctgacacagctctccctgaggagcagccacatt

SEQ ID NO: 428168 - DNA, 120 bp, Artificial Sequence
  ENSG00000151746_28 (sequence is synthesized)
ccagctcccagtgcgcccctctccactgtctctccaagcctcctcacccctagtcttcatctcctgtggacgaacatctggggtggaagttttgtagccacacacaggatactgcccaag

SEQ ID NO: 428169 - DNA, 120 bp, Artificial Sequence
  ENSG00000151746_29 (sequence is synthesized)
atccagcgggtgttttcttctcggttgttagatgtacaattggattaatgtccatcgttttggaagacgagagaaagttgagaagaacacgaagcacagaccctgatgtgataaaacatt

SEQ ID NO: 428170 - DNA, 120 bp, Artificial Sequence
  ENSG00000151746_30 (sequence is synthesized)
ttgtggtttctctgagtcacagataaacttctgccatcaaatggctacagttcatttaaatttaaaaaaaagaaaaaagaaacagaaaacgtgtctcagatggctggctttacctcgata

SEQ ID NO: 428171 - DNA, 120 bp, Artificial Sequence
  ENSG00000151746_31 (sequence is synthesized)
gcataagagagacctaagacatgtaaaatacgtatattgcagtatcatctttcctcacactccaaattcagctagggaagttgattccaatatgtttgtcattgatatttattttgtact

SEQ ID NO: 428172 - DNA, 120 bp, Artificial Sequence
  ENSG00000151746_32 (sequence is synthesized)
ttatttgctacatgatttatgtctatacaaataatttctctgaggtgaatttaattcatttattttcaaataagcataatttgctcaattaagtatgagtttgaatttagtttgaaatct

SEQ ID NO: 428173 - DNA, 120 bp, Artificial Sequence
  ENSG00000151746_33 (sequence is synthesized)
ggaattggccagactgtggtcatttttcttgcacaaaatgataaatgaggtgcatcagaatgttaacaataactgtattttgctgctacgctggtattgtttaggcacttactttctaat

SEQ ID NO: 428174 - DNA, 120 bp, Artificial Sequence
  ENSG00000151746_34 (sequence is synthesized)
cagtagctcattaactgctgggttttgtttttgtatttttaactagagttcttcactggacattactaagtaaatctaagaaagagactaagttatgatttattgacttattcaagtttt

SEQ ID NO: 428175 - DNA, 120 bp, Artificial Sequence
  ENSG00000151746_35 (sequence is synthesized)
gatggcatctttacttttattttttcattgcagttgagtagatgtactggtgctgctcctttgtatgtgtgtatgtgtgtgataacgttaaagaaggctcaataacttgaagggaaaaaa

SEQ ID NO: 428176 - DNA, 120 bp, Artificial Sequence
  ENSG00000151746_36 (sequence is synthesized)
atggtgtgtttatttaatgaccagaattttttttacttctcccaaaatcagggtcctactgagtctttcctgataaaaggtatcaagtacaaatgggaaaatatatacatatatagatgt

SEQ ID NO: 428177 - DNA, 120 bp, Artificial Sequence
  ENSG00000151746_37 (sequence is synthesized)
aagatagcctttaattaattaatttacccagagagtgttcaaagtttgattaaaattgtatgttttgttgttgttagtttttttcataacgaatcttccttgccaaaaaaacaatagata

SEQ ID NO: 428178 - DNA, 120 bp, Artificial Sequence
  ENSG00000151746_38 (sequence is synthesized)
ataaaccttagctcattgtctacttttgacaaacactcaggtgcctacaaacattctattatcttgagataatacatgttcctggttaatttacagattctgctgggtaacttttatgac

SEQ ID NO: 428179 - DNA, 120 bp, Artificial Sequence
  ENSG00000151746_39 (sequence is synthesized)
aggaaaacagctaactgagctgaaaggtctaacactctcgggctccttaaccatcaagtgctgcccacacaattgctcctagccctgattccttgtctttgtcaggtagccttaacttat

SEQ ID NO: 428180 - DNA, 120 bp, Artificial Sequence
  ENSG00000151746_40 (sequence is synthesized)
ttaaaaccataagggtttgaccttttcatataaagacatctgtaacttctcttcaaaacaaaaatgaccctcactgttaacacaaaggacagttaccagtgtagggcactgagaaaggag

SEQ ID NO: 428181 - DNA, 120 bp, Artificial Sequence
  ENSG00000151746_41 (sequence is synthesized)
atccaggagccactcagcttattgagcggacatgggtggcacagaaatggagtggtccatcagagaccaaatggtaagtcgtaaagcacattgcaggagctttcgttagtcatacgccta

SEQ ID NO: 428182 - DNA, 120 bp, Artificial Sequence
  ENSG00000151746_42 (sequence is synthesized)
ttaagtagtggtcgctattaccaaagcaaccaggacgttttgtgttctttatatgagtgctattttccacagtgtcatttattatgcaacgtggagtaaagagttgaaatcttcaccaaa

SEQ ID NO: 428183 - DNA, 120 bp, Artificial Sequence
  ENSG00000151746_43 (sequence is synthesized)
ataagggttcaggttaaagtacagaaacagaaacaaaacgattcgacatgaagttcccaaccatagcagcctaaccttctgctcttttctacctgcatggccttgctgttcctaaacatt

SEQ ID NO: 428184 - DNA, 120 bp, Artificial Sequence
  ENSG00000151746_44 (sequence is synthesized)
gtcttcatttcactggcgttgtatctgcctagtaccagtattagtgagactgtggattttatcagagttcaatgaaagaaagcttacccctgccctcactttgtgttttttatttttccc

SEQ ID NO: 428185 - DNA, 120 bp, Artificial Sequence
  ENSG00000151746_45 (sequence is synthesized)
cctttctcaagcaccacgtatttggacctgagaagtggcatagctgctaagttgacttttaataaaaaactgtttgtgcctgagggaaatatatgcctttttaaaaagtacctcagaaca

SEQ ID NO: 428186 - DNA, 120 bp, Artificial Sequence
  ENSG00000151746_46 (sequence is synthesized)
tgttcgtagatcgtctcatcggttttgtttggtgggactgggagttcagcaggaagtattgtctgtgtgtgatgacggggcagtattgccagtcggcaatgttgtatttgcattctttat

SEQ ID NO: 428187 - DNA, 120 bp, Artificial Sequence
  ENSG00000151746_47 (sequence is synthesized)
ccctaactctgaatctaggactccatgaaaagccgggtcacccacaaaacatttcttccaatacaaagtgtattattacgtctattataaactagtttcatttcagttatttatcttcat

SEQ ID NO: 428188 - DNA, 120 bp, Artificial Sequence
  ENSG00000151746_48 (sequence is synthesized)
agagtgggaaagtctttttctgaaatactaattctatgaaaataataattttagtgaatctttgccaagaagttatagaaacttggaaataaatttctcattttcagcacaaaattaagt

SEQ ID NO: 428189 - DNA, 120 bp, Artificial Sequence
  ENSG00000151746_49 (sequence is synthesized)
gatagtccctaagcagtaagagagaataccatgtatttacactgtggcatcatttagtatagtttacactgagccatatttatttataggcatttaaagtgaatcagtatgtgtagtgtt

SEQ ID NO: 428190 - DNA, 120 bp, Artificial Sequence
  ENSG00000151746_50 (sequence is synthesized)
gataaaaatcagtatctgtaaagataacatcaggaattcaaaaggaaattgaaaaggggcagaactagtgagaaccaaaaagaatgaactccagtaagactaattgaagacatacttgga

SEQ ID NO: 428191 - DNA, 120 bp, Artificial Sequence
  ENSG00000151746_51 (sequence is synthesized)
gaggaaaaataaacagcagaaatgcactaaaaaatactggctaattattgcaaacagagtgagcaaagattaatgctaactagtaaaagtagttagcaaagtaaacaggtagttttttaa

SEQ ID NO: 428192 - DNA, 120 bp, Artificial Sequence
  ENSG00000151746_52 (sequence is synthesized)
aagtaagcacaattacaatattgaatagtatggagaaatgcttttctcctgaggattttccttaatcaaaaaataagaagaagcaataaattgtctttggcctgagtgctgagtggcata

SEQ ID NO: 428193 - DNA, 120 bp, Artificial Sequence
  ENSG00000151746_53 (sequence is synthesized)
aataaaggagcttggcttaatctttctggtccacacataatccattagatcccattcatatatccaactctggattctaataaaataatttggagaactttgagaaaaaggaaaactgtt

SEQ ID NO: 428194 - DNA, 120 bp, Artificial Sequence
  ENSG00000151746_54 (sequence is synthesized)
aaataagaaaagacctatttagaaattatactttagtctaacgaagaggaggtacaatagtagtcttcaagaaaagaatatttaacaaatgatagatatcagctatagatattgttacta

SEQ ID NO: 428195 - DNA, 120 bp, Artificial Sequence
  ENSG00000151746_55 (sequence is synthesized)
agtctagaataaaaaaggcttcagtgtgaaggatgtatagtaactctaggaaagagatttttaacactgggaaattaacgtggaaattgataatcataaagaatatttgttttgtaaaaa

SEQ ID NO: 428196 - DNA, 120 bp, Artificial Sequence
  ENSG00000151746_56 (sequence is synthesized)
ttgaatatcattggtggtctagtaagtattaagtggcaagataggagaatgcatttcagttctgggagctcataatcctgtgattcttttattttaagttttaaaatacattaaaatttt

SEQ ID NO: 428197 - DNA, 120 bp, Artificial Sequence
  ENSG00000151746_57 (sequence is synthesized)
actggttaatcataaaatattttatatttgaaaataggatggcaatctttatttttccaagatatttgttggaaaaaaatgatcgttggtattattttttctttcagctatattccatgg

SEQ ID NO: 428198 - DNA, 120 bp, Artificial Sequence
  ENSG00000151746_58 (sequence is synthesized)
tatctttaaaattgttcagaatataggacttttactaaaaaaattcaattgtcagagtctaaaaaaacaatgtcctcaggaatacttcagaaatagaaggtatgcaatcccttagtgggg

SEQ ID NO: 428199 - DNA, 120 bp, Artificial Sequence
  ENSG00000151746_59 (sequence is synthesized)
ggcaaacacatttcagatttcgtctttatttaaaaggatcttcagtctacaacatttgcttttttcgtgctttggaaaatatccttgtgcagataagttcttctgtttgaaacaagcatg

SEQ ID NO: 428200 - DNA, 120 bp, Artificial Sequence
  ENSG00000151746_60 (sequence is synthesized)
aaacattggtccaataacctaagaatgtggagatttcttgatattctgtattaattaaagttctctacatgtctcaaatggagatcacaaaacatgaaaaggaagaaatgaaatatcttt

SEQ ID NO: 428201 - DNA, 120 bp, Artificial Sequence
  ENSG00000151746_61 (sequence is synthesized)
tcttctgggatgagtgtcaattttaatgtataattgtcataatcaatcagccaaaagttacaatctgtccctcagagacattgggggaagctgatggatttccagtaaggaactgtggtg

SEQ ID NO: 428202 - DNA, 120 bp, Artificial Sequence
  ENSG00000151746_62 (sequence is synthesized)
ggttcaaactcaggctgccacaaatacattgatatggtaggtaggaagtaggactaaatttgaaagaaacttatgggataaagttcacaattttaaaaaggttgccctccagtttttttg

SEQ ID NO: 428203 - DNA, 120 bp, Artificial Sequence
  ENSG00000151746_63 (sequence is synthesized)
tttgtttataaactagagtgatttttaagtaacccttatatttaaggctgcaaaaaatgtacaagagtatgttttcaagtaaagggaacataattcttcaaaaagctgttgaactggagt

SEQ ID NO: 428204 - DNA, 120 bp, Artificial Sequence
  ENSG00000151746_64 (sequence is synthesized)
tatgataggttatgacagagagcatgatcagtgctgatactgacaagtacttttttaccttaaaatcaacttctatggaactacaagatcaatctagctcccgagtgacattttccattg

SEQ ID NO: 428205 - DNA, 120 bp, Artificial Sequence
  ENSG00000151746_65 (sequence is synthesized)
tctgtaataatgccctcggatgagttgtgtctaaaattaagttcatctttatttatatgcgaacttaactgccatagtccctaatgtattgcgtttgtaacctgatcgtattatgtttac

SEQ ID NO: 428206 - DNA, 120 bp, Artificial Sequence
  ENSG00000151746_66 (sequence is synthesized)
agctgaaagatttcatctagacatgtctttcgtccttattattcaaagtgtaattgaaagagatatttagtattaagacatgttccccaattgagaattttccagaatattctacttaag

SEQ ID NO: 428207 - DNA, 120 bp, Artificial Sequence
  ENSG00000151746_67 (sequence is synthesized)
aagaagaagagcaattaactgcctttagtgtaagggcgagagtgcatagaaatatgcaatgtaaaatgtttgcatgaattatttcacatcatgtaagctttcccatattcataagatgaa

SEQ ID NO: 428208 - DNA, 120 bp, Artificial Sequence
  ENSG00000151746_68 (sequence is synthesized)
cactatagaagtctcatttctctgtgatcttctgtccattaggaaagtaaggagattgttatctatatctagtctcctttccatattgaactgcatggctctaatcctcagtgtattttt

SEQ ID NO: 428209 - DNA, 120 bp, Artificial Sequence
  ENSG00000151746_69 (sequence is synthesized)
atcccttctcgagttatttaaaatttgccctatttaagctgaagcctggataaactgctgagccagattattcctgtgattggagtttaattgctgtagaacacttgttgagaacacatt

SEQ ID NO: 428210 - DNA, 120 bp, Artificial Sequence
  ENSG00000151746_70 (sequence is synthesized)
ttttactttttttctttcagaattattcctcaatcattgttctctaatgaaaacaccgagaagtaaatctggtgcttcttagtgtaaatatgtttttctttttaaaaagtcattttaaaa

SEQ ID NO: 428211 - DNA, 120 bp, Artificial Sequence
  ENSG00000151746_71 (sequence is synthesized)
caaagatgagagaactataaagtaaggggaaatatcattttatttaaaaataattattcaatgatagataatggagatacagaatgactcattgggttcataggtatgatttgtgcagcc

SEQ ID NO: 428212 - DNA, 120 bp, Artificial Sequence
  ENSG00000151746_72 (sequence is synthesized)
agtcttagaggaaatacatcattttaacattattcccacaaaatgttaaagctcaatggtttgactatgagagtcaaacaattactatttgaaaatctcttatgacatttttataatcta

SEQ ID NO: 428213 - DNA, 120 bp, Artificial Sequence
  ENSG00000151746_73 (sequence is synthesized)
ctctgtttttatttgcatgattatgcttatgtgatgaaccatccatgattctgatattgtatttctttccagtattaacatgtgtattgtgtggccaactctgatttgtacaccgtatta

SEQ ID NO: 428214 - DNA, 120 bp, Artificial Sequence
  ENSG00000151746_74 (sequence is synthesized)
ttgttgtaatgattcaactgttcctacatttaattgcagtttaattattatgccttttggggttaaatgatgtgaagtgtttccacctactgataaataccatatgaaaacacgactaaa

SEQ ID NO: 428215 - DNA, 120 bp, Artificial Sequence
  ENSG00000151746_75 (sequence is synthesized)
agactgatttaagaaacttgttatttttaaaaatatgaatttcaaaagaaatgttctcaaagacacatgcatttattttaaattcaaaaaattcttatgaatttattattgcttgtactt

SEQ ID NO: 428216 - DNA, 120 bp, Artificial Sequence
  ENSG00000151746_76 (sequence is synthesized)
taactttttttattgtagacaatcctaagtgaataatgtctcatgggagaacacatgatatgtgcttgtatttgtgtaatctgatcatgcactcaatggttggaaaaggcactccagtgc

SEQ ID NO: 428217 - DNA, 120 bp, Artificial Sequence
  ENSG00000151746_77 (sequence is synthesized)
taagaaaataaccagaagccaatatatcgattcttatatctcggtttatgttaccaactgaatatggtgtaatgcataactttttccagtaaataaactggttattttttgttcatttca

SEQ ID NO: 428218 - DNA, 120 bp, Artificial Sequence
  ENSG00000151746_78 (sequence is synthesized)
gcgatcttcatagtacggtgcagtggccagattttagttaactgcaaaaataaatgtgctcttgttgtggaggatggaggaggggaagcaaaagaaaaaatgggagctggcatataaatg

SEQ ID NO: 428219 - DNA, 120 bp, Artificial Sequence
  ENSG00000151746_79 (sequence is synthesized)
gtcttgctaatgtgggtctttccagatcaaaacctttttgataattgtgtttatgtagtcctttctaaccccctgcccaatccctcctcttgattaatcgtaatataattttcaagtgtc

SEQ ID NO: 428220 - DNA, 120 bp, Artificial Sequence
  ENSG00000151746_80 (sequence is synthesized)
gtatgtgtaaatatgcctctcccttacctccaacctgagaattggtagataaaggtggatattaagaatgaagctgtgttctacctgggttataattttaaaagtcattgtacctttgga

SEQ ID NO: 428221 - DNA, 120 bp, Artificial Sequence
  ENSG00000151746_81 (sequence is synthesized)
aatggtgctgtttatcagcttctctttaacggggcaaggatatgaatatgttctcttagggaaacttttgtccatatgaccaaaactgatgacagactgaaaggggatgtctatatctag

SEQ ID NO: 428222 - DNA, 120 bp, Artificial Sequence
  ENSG00000151746_82 (sequence is synthesized)
ataaaatgggatggaatacgcacagtccttttcttgaaagcaggtttttgtgctttttcatttggcatgggaatattgcccagagaaaccacttgtaaggtttttaggggcttgattttg

SEQ ID NO: 428223 - DNA, 120 bp, Artificial Sequence
  ENSG00000151746_83 (sequence is synthesized)
tgagtcctggctgttgagttacttaccctgtattttcggttaatggtaacatttttattttaggagctttcattaaagactcaaataatatattttctatttgcggttcaagctgactaa

SEQ ID NO: 428224 - DNA, 120 bp, Artificial Sequence
  ENSG00000151746_84 (sequence is synthesized)
ctgtaataaatcttttttccagtatccagaacagtttccaaatagggttgtatcctgatgtggaaactaaaaaaaaaaaaagcaaaaagattgatttacatatttaaaaaattaaatgcc

SEQ ID NO: 428225 - DNA, 120 bp, Artificial Sequence
  ENSG00000151746_85 (sequence is synthesized)
agtataaataatgttgtcactggtgaggcgttaaaaggtaattaaagtaaaacttttttgtttcctatatgtatttttcttggatctcctgcaagacaattttcaccttccctttgtgat

SEQ ID NO: 428226 - DNA, 120 bp, Artificial Sequence
  ENSG00000151746_86 (sequence is synthesized)
caatttagtgtgtaatatggtaagcatttatacttttagatatgtcttatttttatttggatgcctgtctaccaaaaaataaatgtactacctatgattaaaaatcccaactaggaatct

SEQ ID NO: 428227 - DNA, 120 bp, Artificial Sequence
  ENSG00000151746_87 (sequence is synthesized)
gcatgtgatgcaaatgattagttgaatagactctccccttccttccggtcactcaggctcacccagctgcagagtatacctttgatgatgtgtaaattcctataagtcaagtaaaaactt

SEQ ID NO: 428228 - DNA, 120 bp, Artificial Sequence
  ENSG00000151746_88 (sequence is synthesized)
gaaatgaatatataagctggaatttgggaggcaatggctgtttggcctgcgggggagggagattagtaagagtcatcaagtctcagcactctaagacgacattcaagtgggttggaatgt

SEQ ID NO: 428229 - DNA, 120 bp, Artificial Sequence
  ENSG00000151746_89 (sequence is synthesized)
ataaatcaaacttctcaaaaccgctgttatctcaaacccaggtttcagcgacaatttcgtagtccacaaaagtgatgaggtttgtgcctgaggacccacaatttcaggatttagactgtg

SEQ ID NO: 428230 - DNA, 120 bp, Artificial Sequence
  ENSG00000151746_90 (sequence is synthesized)
tggcacctcagctttcctctggatgtaaccactccttggtgagagagggaactcctcaccaatcccatttgacaaaggctaggcaatcttcattctgcttggctttagtcattcttgtca

SEQ ID NO: 428231 - DNA, 120 bp, Artificial Sequence
  ENSG00000151746_91 (sequence is synthesized)
ttgggctgcagaagaaaaacaactttgctgggtgatcccactgccttgatttcacctcggagcgaggctgggccatgtccaagtcttatgaggtcaccctgactagaaaaaattgaactc

SEQ ID NO: 428232 - DNA, 120 bp, Artificial Sequence
  ENSG00000151746_92 (sequence is synthesized)
acctacaaatagtctgaaagagtggtgtatatcaaatacgtgggtagtgttgcatttcaaatgaggctcttctggttgaaatgatatatttataaaaccagaatatcaaaaatgggtgat

SEQ ID NO: 428233 - DNA, 120 bp, Artificial Sequence
  ENSG00000151746_93 (sequence is synthesized)
aaaagctgaatcaggatatttctgtgtgaatgcacattcctcactaaatctctcaggcagctgctttagtcactgttactaacaccttgctctgtcatctctttgtacacatgtctaatt

SEQ ID NO: 428234 - DNA, 120 bp, Artificial Sequence
  ENSG00000151746_94 (sequence is synthesized)
tatcagtttcttgtagattgtcagcagcctgctgcctccgtaccgccacagtgctcacaactagccgggaggcaagactgcccaactgtcaggtaaattcagatgtcctttcccttccac

SEQ ID NO: 428235 - DNA, 120 bp, Artificial Sequence
  ENSG00000151746_95 (sequence is synthesized)
aactgcctacgcatcattgtattttgctgtattttatttcaagtgtgggctacatagacacacattggacacctgcagtccctgcgttcccagtaggaatacaagagagctggggtttat

SEQ ID NO: 428236 - DNA, 120 bp, Artificial Sequence
  ENSG00000151746_96 (sequence is synthesized)
tttgctggctgccagctggtagactctacaggctgccttcagcccctttgtctgtgtaaatacttggattagtccactgtttcattcctttccaaaaaataaaagctggaattgttatga

SEQ ID NO: 428237 - DNA, 120 bp, Artificial Sequence
  ENSG00000151746_97 (sequence is synthesized)
tgtcacctctccctttcctggccctcactccccccacccgcaaggcccactcatcatgatcaagaagtcataaaggaggtgattgaaaggactgttttttcttctagggccctttgttgg

SEQ ID NO: 428238 - DNA, 120 bp, Artificial Sequence
  ENSG00000151746_98 (sequence is synthesized)
acatacatattgtttaagtaactcggtcttttttatctgattcttgaggcactatgggtagcaaataaccacttacaaatttaaatgtaatatacactccttttctgtgtgtcaagtcct

SEQ ID NO: 428239 - DNA, 120 bp, Artificial Sequence
  ENSG00000151746_99 (sequence is synthesized)
tatttttaggtgcatattgacatttaaatgttaattattgtttggcatataatatcaaaaatctattatttattttatgctgttacagttaaaagatgtgatttatgacatactgaatca

SEQ ID NO: 428240 - DNA, 120 bp, Artificial Sequence
  ENSG00000151746_100 (sequence is synthesized)
cacattgagggcggtgttgaaagccaacaagcaggcacagtgccttctgatgaagtcagtaaatgcttatgaagcaccgtccatctagcactgtgctagatgctgaagattcaaagaaga

SEQ ID NO: 428241 - DNA, 120 bp, Artificial Sequence
  ENSG00000151746_101 (sequence is synthesized)
ctaacacatggtccctgccttccagaagactcagcctcctggggatgtcaggatagaaacacaattacagttcaacgttacacatgctgtaatccaagttatgagaacaatgcagaggaa

SEQ ID NO: 428242 - DNA, 120 bp, Artificial Sequence
  ENSG00000151746_102 (sequence is synthesized)
ttataccttagtttgttattaaaggataagaagttgttttccagaggaggaggaagtaattccagacagaacagtaggtagagaggctttggagtgacaaaatagaataatatattcagg

SEQ ID NO: 428243 - DNA, 120 bp, Artificial Sequence
  ENSG00000151746_103 (sequence is synthesized)
gaatgctcacaaaggcctatgtggctggaaataagactttttttatttagaaagtcaactttggaatgtgtggagaaagtggtgaaagcagaaatcagcaaatccagtgagttatggata

SEQ ID NO: 428244 - DNA, 120 bp, Artificial Sequence
  ENSG00000151746_104 (sequence is synthesized)
cttaaaattacttaattctggaaaaactttgcacagtcaatggacaaacaaatctacaaacaaaactgaggctttggggtatttgtcacaaacaataaatgattttgtatttctgtttca

SEQ ID NO: 428245 - DNA, 120 bp, Artificial Sequence
  ENSG00000151748_0 (sequence is synthesized)
agtggtagcggttattcggcggcccgcggcggaccatggccctggccctggcccggcgtcgctgggctttcctcacggcgtccccgagcagcgtcgcagagcgggccgacttccgggaag

SEQ ID NO: 428246 - DNA, 120 bp, Artificial Sequence
  ENSG00000151748_1 (sequence is synthesized)
gaactgaccagcgactgagcggcggccggcgcgcttagcgccctgaacatgcggcagtccctgcgggcgaccccgggctccggacaggcggcggcggaggcggcggctcgggagggaagg

SEQ ID NO: 428247 - DNA, 120 bp, Artificial Sequence
  ENSG00000151748_2 (sequence is synthesized)
aggcggcggcgccggcggaggtggcggcggagacggccggcgcccggcgcggagccctagggaggcagttcagcgcggcctcgggcctcgtcgagaaggatgctgtcccgaaagaaaacc

SEQ ID NO: 428248 - DNA, 120 bp, Artificial Sequence
  ENSG00000151748_3 (sequence is synthesized)
aaaaacgaagtgtccaagccggccgaggtgcaggggaagtacgtgaagaaggagacgtcgcctctgcttcggaatcttatgccttcattcatccggcatggtccaacaattccaagacga

SEQ ID NO: 428249 - DNA, 120 bp, Artificial Sequence
  ENSG00000151748_4 (sequence is synthesized)
actgatatctgtcttccagattcaagccctaatgccttttcaacttctggagatgtagtttcaagaaaccagagtttccttagaactccaattcaaagaacacctcatgaaataatgaga

SEQ ID NO: 428250 - DNA, 120 bp, Artificial Sequence
  ENSG00000151748_5 (sequence is synthesized)
agagaaagcaacagattatctgcaccttcttatcttgccagaagtctagcagatgtccctagagagtatggttcttctcagtcatttgtaacggaagttagttttgctgttgaaaatgga

SEQ ID NO: 428251 - DNA, 120 bp, Artificial Sequence
  ENSG00000151748_6 (sequence is synthesized)
gactctggttcccgatattattattcagacaatttttttgatggtcagagaaagcggccacttggagatcgtgcacatgaagactacagatattatgaatacaaccatgatctcttccaa

SEQ ID NO: 428252 - DNA, 120 bp, Artificial Sequence
  ENSG00000151748_7 (sequence is synthesized)
agaatgccacagaatcaggggaggcatgcttcaggtattgggagagttgctgctacatctttaggaaatttgactaaccatggttctgaagatttaccccttcctcctggctggtctgtg

SEQ ID NO: 428253 - DNA, 120 bp, Artificial Sequence
  ENSG00000151748_8 (sequence is synthesized)
gactggacaatgagagggagaaaatattatatagatcataacacaaatacaactcactggagccatcctcttgagcgagaaggacttcctcctggatgggaacgagttgagtcatccgaa

SEQ ID NO: 428254 - DNA, 120 bp, Artificial Sequence
  ENSG00000151748_9 (sequence is synthesized)
tttggaacctattatgtagatcacacaaataagaaggcccaatacaggcatccctgtgctcctagtgtacctcggtatgatcaaccacctcctgtcacataccagccacagcaaactgaa

SEQ ID NO: 428255 - DNA, 120 bp, Artificial Sequence
  ENSG00000151748_10 (sequence is synthesized)
agaaatcagtcccttctggtacctgcaaatccatatcatactgcagaaattcctgactggcttcaggtttacgcacgagcccctgtgaaatatgaccacattctgaagtgggaactcttc

SEQ ID NO: 428256 - DNA, 120 bp, Artificial Sequence
  ENSG00000151748_11 (sequence is synthesized)
cagctggctgacctggatacataccagggaatgctaaagttgctcttcatgaaagaattggagcagattgttaaaatgtatgaagcatacagacaagcccttcttacagagttggaaaac

SEQ ID NO: 428257 - DNA, 120 bp, Artificial Sequence
  ENSG00000151748_12 (sequence is synthesized)
ttttcacagataaaaaattgcaaacaagtactctggttaataaatgctgcttcctttgtggaaattataaaattctaactttacatgtattttgttattagaaattttcttttattgaat

SEQ ID NO: 428258 - DNA, 120 bp, Artificial Sequence
  ENSG00000151748_13 (sequence is synthesized)
gagaaaaattagtctatcattttaagagccaatatggcaaacactttcaaatactgtatattaggaaactgttttggtattcttgatggaaaaaaacgcagcggaaatgtcattatgaac

SEQ ID NO: 428259 - DNA, 120 bp, Artificial Sequence
  ENSG00000151748_14 (sequence is synthesized)
agatgttaaataggaaattattacttgttaacttcttacagcagtagtaccttctttaaaaaaaaaaaagaatctgcggtatttttttaaaaaaaaagtttaccgctgtagtgtgaaata

SEQ ID NO: 428260 - DNA, 120 bp, Artificial Sequence
  ENSG00000151748_15 (sequence is synthesized)
ttgtctggaaagggatggtttaaatattaccatgatgtagttgaaatataaaataggatttggaaccttattgtgataaatatttatatatgatgtatgtttgtctcccctctccaaagt

SEQ ID NO: 428261 - DNA, 61 bp, Artificial Sequence
  ENSG00000151748_16 (sequence is synthesized)
tatttatatatgatgtatgtttgtctcccctctccaaagtaaggaacccaccgcttgagtc

SEQ ID NO: 428262 - DNA, 86 bp, Artificial Sequence
  ENSG00000151748_17 (sequence is synthesized)
gtgttcagaggatggcttgagcccaagaggcagaggttgcagggtcaagatcgcaccacttgcactgcagcctgagagagagagag

SEQ ID NO: 428263 - DNA, 120 bp, Artificial Sequence
  ENSG00000151748_18 (sequence is synthesized)
agaggatggcttgagcccaagaggcagaggttgcagggtcaagatcgcaccacttgcactgcagcctgagagagagagagccagaccttgtctcaaaaaataaaaaataaaaaaataaaa

SEQ ID NO: 428264 - DNA, 120 bp, Artificial Sequence
  ENSG00000151748_19 (sequence is synthesized)
tttttggtatgaatgggtgacgggccttttaatctttcaggaatacatataagcaggaatacttagcctgtattgggaaggtgcgtgaaactcaaagttgctaacatcatcttccttatt

SEQ ID NO: 428265 - DNA, 120 bp, Artificial Sequence
  ENSG00000151748_20 (sequence is synthesized)
ttcagccagtgctgttactgcatttagcatggctctgacgaggcagtggagagttcctgacagcatagcatactgccttctgacagactgggttaagctaccaaaaatgacaaccaggga

SEQ ID NO: 428266 - DNA, 120 bp, Artificial Sequence
  ENSG00000151748_21 (sequence is synthesized)
ttcaaaaaaaatttttggtcattaaatcgaatgtatattattactttttaattttctaagtatttatcacaggactttaacaccatatatttccctcccagtttttctccccttttggtt

SEQ ID NO: 428267 - DNA, 120 bp, Artificial Sequence
  ENSG00000151748_22 (sequence is synthesized)
taatagttaaaacatttttcataattagtgctgtacatttgattgcaaacaaattggtgatacttctaaactataactataaatctctagaattctgtgaatttcaacattatttgaagt

SEQ ID NO: 428268 - DNA, 120 bp, Artificial Sequence
  ENSG00000151748_23 (sequence is synthesized)
agttcttcagttatatttacatgtgttgtaaatatgtaaatatacttttagcttaggaagtcttccagaatacaaactactcccagttagatatcagtgagtttgaataactgaagaaat

SEQ ID NO: 428269 - DNA, 120 bp, Artificial Sequence
  ENSG00000151748_24 (sequence is synthesized)
gttgacaatgttaagtgtttgattttatataacaagcttattaaatatatttttgtggaaactaagcgcgtggtttttgagtccatgttttagacatagtgctgtatttcatttttctgt

SEQ ID NO: 428270 - DNA, 120 bp, Artificial Sequence
  ENSG00000151748_25 (sequence is synthesized)
catgtttgcaaacattgcgggtgtctctcgactgtgctgcaagttgtgcgaactctggggcagaattccttagtcctgctgccggatgcagacttgagaagatcttatgccttcattcat

SEQ ID NO: 428271 - DNA, 120 bp, Artificial Sequence
  ENSG00000151748_26 (sequence is synthesized)
gaattttatcactgggaaaagataatttgctgaacttgtgatcagacttttctaagatgtcagtatatatatcttatgaactcccacactcctctatcttaattgttctttcctgtcact

SEQ ID NO: 428272 - DNA, 120 bp, Artificial Sequence
  ENSG00000151748_27 (sequence is synthesized)
tcttactttatatcgctacttaattatggtgtagccatttctgtgacagtctttagaagtttctctgttttggacctcctagataagtattacttttttcattaacacactttccttctt

SEQ ID NO: 428273 - DNA, 120 bp, Artificial Sequence
  ENSG00000151748_28 (sequence is synthesized)
cctctaagaagtctgttcagtgaaactccactagagattttagtcattaagaactagaagttacctaaaggaattagcatgttttgtaaaatagaaacttaagtttgtactgatgtcaac

SEQ ID NO: 428274 - DNA, 120 bp, Artificial Sequence
  ENSG00000151748_29 (sequence is synthesized)
attaaataaaatgcatcttgagtctaaaaaaagagataaaccttcatcattctatatcagcacctctcattttcaaattcagtaagcatttgtttttaatcttaggaaccagagtaaact

SEQ ID NO: 428275 - DNA, 120 bp, Artificial Sequence
  ENSG00000151748_30 (sequence is synthesized)
ttaataatagttcacatattaaaagaataaacctatgaagaatacattctttgtgtaccaaatgaaaaaatatacaatgcagtgaaactcacatatacaaagtgattttttgtgcatttt

SEQ ID NO: 428276 - DNA, 120 bp, Artificial Sequence
  ENSG00000151748_31 (sequence is synthesized)
ttatcaagaggtttatattctattaaaccatgtaaaagcaatatctggtttttgataaagcaactaaggaactctaaaatgtgcttaaaaataagattgtgatatatataagatgataca

SEQ ID NO: 428277 - DNA, 120 bp, Artificial Sequence
  ENSG00000151748_32 (sequence is synthesized)
gattaaatccagcctgctgagttatgatgctgtgttttaacaaatggctaatgtgaaataatttaaaattttttctgtagaaattaaatgagcatatccaaacgtggaatatcacatgat

SEQ ID NO: 428278 - DNA, 120 bp, Artificial Sequence
  ENSG00000151748_33 (sequence is synthesized)
ttaattataacccagtagtagaatttagtaaattcaagcagaacacgtgtactgttatcataaatagacaaatactttataacagcatttttgaagaaaaatcaggaaattgtacatgtt

SEQ ID NO: 428279 - DNA, 120 bp, Artificial Sequence
  ENSG00000151748_34 (sequence is synthesized)
aacaaaatagtataaccatgcatacatacatctgcttattaaacactgaagtaaaagaactaatccagtttgcagtcttcagaggtgtttagtattttactccgttctgatggaagcact

SEQ ID NO: 428280 - DNA, 120 bp, Artificial Sequence
  ENSG00000151748_35 (sequence is synthesized)
ttgaatgtttgcatggagacataaaactgaatatttaattgacaattggtcatgcacctgtatttcttaaaatttgcattacatttttttcttttctgattgttcagtagattccgactt

SEQ ID NO: 428281 - DNA, 120 bp, Artificial Sequence
  ENSG00000151748_36 (sequence is synthesized)
tggtgtagggaaagcttgatgatacagatgtctgtgggttgctgctgcactgtaaagcttgtacaaagcctagaataaaagcatcaaaattataaaacattttattaaacacacagatgt

SEQ ID NO: 428282 - DNA, 120 bp, Artificial Sequence
  ENSG00000151748_37 (sequence is synthesized)
aaaaagatgttcttttctagattttcttgggacacgaacaaatactactagcgaaatgtttttccactttgctcatcctgcttaagcctgtgtgcaaatagttgttaatctacactgaat

SEQ ID NO: 428283 - DNA, 120 bp, Artificial Sequence
  ENSG00000151748_38 (sequence is synthesized)
ggaagagtccttgtgaccatttattttattaactcatgttatgtaaacttggtatttatctcaaggctgtctagactcttaatgctgtgacccttgaaaacctagagaatttaatgtctc

SEQ ID NO: 428284 - DNA, 120 bp, Artificial Sequence
  ENSG00000151748_39 (sequence is synthesized)
cagttgggctgaatttaggtttaggtttggtagaataatgggaagggtaagtcttcagagacacttgacggagtcctcagagacacttgacaaacttgggaaaggaaagaagagtaggaa

SEQ ID NO: 428285 - DNA, 120 bp, Artificial Sequence
  ENSG00000151748_40 (sequence is synthesized)
aaccacattacttcgctagatcctgccctttttctcaacaaaaagtagttcaagaattatttcctgagttgatcaaaaagacttattgtcatatggttaattatgtgttgagcatgtctt

SEQ ID NO: 428286 - DNA, 120 bp, Artificial Sequence
  ENSG00000151748_41 (sequence is synthesized)
tttattatttttgtaacagacaaaaaaaattaccatataatttaagaaaagaaggtactttccatatctcctgagttggagatacttctgaaaggagcagaagagatgggagaaatgtac

SEQ ID NO: 428287 - DNA, 120 bp, Artificial Sequence
  ENSG00000151748_42 (sequence is synthesized)
aattctactttattcctgaagtcctggttttaccagataaaatgaagtgagatgaaaattaaactttcttgtctgattttttttttctaccaagttatagactttaaattttggcaggat

SEQ ID NO: 428288 - DNA, 120 bp, Artificial Sequence
  ENSG00000151748_43 (sequence is synthesized)
aaaaataaaatgtgagacagatttactttttggctcacataacttcaaataaggcgacttaaaaatggtttggagcattagtattttgactgtagaaaaaatttattcatttaatattaa

SEQ ID NO: 428289 - DNA, 120 bp, Artificial Sequence
  ENSG00000151773_0 (sequence is synthesized)
acctacctcgccgcggccgcacagattccccgcctgataccgtcccaggatcccaggggaaacctgacggccaggttccctcgtgccagctgccgggaggcgggagggagtgccctgaaa

SEQ ID NO: 428290 - DNA, 120 bp, Artificial Sequence
  ENSG00000151773_1 (sequence is synthesized)
ctctaatctcattgcctggccagaaaaggaagtaatccctagtgtcagcagattcagcggtactggtgtataataggatcaccaatatacaacaggaaaaaacaaaagtgaaagattatc

SEQ ID NO: 428291 - DNA, 120 bp, Artificial Sequence
  ENSG00000151773_2 (sequence is synthesized)
aatatagattattgagtaggagtaaagaaggtaaatcaaaaaggggaaaagagattacagacacagaaaatgtcagacaacaaagaaaggaagagtcaaggatttcctaaagaagataac

SEQ ID NO: 428292 - DNA, 120 bp, Artificial Sequence
  ENSG00000151773_3 (sequence is synthesized)
caagacacaagttcattagctgatgctgtagagaaagttgcaaagcaacaacaatcacaagcatcagagatagaaaaaaacaaaaaggttctgttcaatttgaagaatgaacttcatgag

SEQ ID NO: 428293 - DNA, 120 bp, Artificial Sequence
  ENSG00000151773_4 (sequence is synthesized)
cttgaaaaagaaatagcagctatctctgcagaaactaaagaaacagaaagacaaatttatcaacaagattctgccatagagaataccaaacttcattgtgatagcctggaaactcaaatc

SEQ ID NO: 428294 - DNA, 120 bp, Artificial Sequence
  ENSG00000151773_5 (sequence is synthesized)
aaatccttacattcagaaaatgtaaagcttaaatttgacatagaaacagcccaagaagattttgaggaacacatgataaaatataatgcatattatgcaaaaataaaagcacataaaaat

SEQ ID NO: 428295 - DNA, 120 bp, Artificial Sequence
  ENSG00000151773_6 (sequence is synthesized)
agtttgggggaagtagagagcaaatggtcatttatgactgaactccatgaaaagcgagattttgttaaaaaattaaagacaatgaaagaagaacttatgcaagatcttcaaaatccagga

SEQ ID NO: 428296 - DNA, 120 bp, Artificial Sequence
  ENSG00000151773_7 (sequence is synthesized)
gggaaccgaataacacaagtacaggaagacattacaaacttaaaggataaaattataactgtaaaagaatctatcattgaaaaaacttgttttcttgaggaagaaaaaaagacacatgaa

SEQ ID NO: 428297 - DNA, 120 bp, Artificial Sequence
  ENSG00000151773_8 (sequence is synthesized)
aggtacaacataagaggtatgatgcaattcttaagcgtttgcattgtcaggtgaacaagcttcagtcaaatagacgacagtggcaatggaacattcaacaattggaaaaaactgcagccg

SEQ ID NO: 428298 - DNA, 120 bp, Artificial Sequence
  ENSG00000151773_9 (sequence is synthesized)
aattaagaaaatgcattggaatgcaagagtaacattgccatagggcaatgtggaacacagaccatgacaacaaaaattactggacagaacattaagaaaatcttttggattcttaataac

SEQ ID NO: 428299 - DNA, 120 bp, Artificial Sequence
  ENSG00000151773_10 (sequence is synthesized)
aagcatccactattagagacctgtcttaatgacagatgtcttcggttgttgttttttttaaatcagtcatcgatttgttaaaatgccttctaaccctacacttgatagcagtagacagac

SEQ ID NO: 428300 - DNA, 120 bp, Artificial Sequence
  ENSG00000151773_11 (sequence is synthesized)
aataggaatgtctacgggaaaataatgcaagagtctctgtgactatttggagtgtgtaaaatgtattatactcatgaatacctgtttatgttgcattcactaccctatgaagtaaaaatt

SEQ ID NO: 428301 - DNA, 120 bp, Artificial Sequence
  ENSG00000151773_12 (sequence is synthesized)
tcactaccctatgaagtaaaaatttagaagggaaaaaacactcgaattttcactgatttaaattgttaagatttttaaaatgtttgtctgtttcgaactttttttttttttttttttttg

SEQ ID NO: 428302 - DNA, 120 bp, Artificial Sequence
  ENSG00000151773_13 (sequence is synthesized)
ggcgtgagccaccgcgcccggcctgtttcgaactttttattggaacttgtttttttacagctgccttcacagtagcccataaatattgatatttataataatgtttttgtatgttcaatg

SEQ ID NO: 428303 - DNA, 120 bp, Artificial Sequence
  ENSG00000151773_14 (sequence is synthesized)
cttcaaatattttactccattttctcttttatccagaaggtaacaatcatttttctttgttataaaataacatattttgagtgatacgatgaataaaatattttgttcactttctataaa

SEQ ID NO: 428304 - DNA, 120 bp, Artificial Sequence
  ENSG00000151773_15 (sequence is synthesized)
ccagccttaatttaacttttaagttcaggggtatgtatgcaggtttgttatataggtaaatttctgtcatagtttgttgtacagattatttcaatagccaggtattaagcctagtaccca

SEQ ID NO: 428305 - DNA, 76 bp, Artificial Sequence
  ENSG00000151773_16 (sequence is synthesized)
cccattagttatttttcctgatcctttccctcctctcaccctccagtgtgtgttgtttccctctatgtgtccagta

SEQ ID NO: 428306 - DNA, 78 bp, Artificial Sequence
  ENSG00000151773_17 (sequence is synthesized)
atcgtggcctccagctccattcatgttcctgcaaaggacataatctcattctttttatggctgcatagtatttcatgg

SEQ ID NO: 428307 - DNA, 120 bp, Artificial Sequence
  ENSG00000151773_18 (sequence is synthesized)
cactcccaccaacagtgtataataagtgttctttttctctgcaaccttgtcagcatgttttttgtttgtttgtttgttttgttttatttttttactttttgatactagtgatgatggtat

SEQ ID NO: 428308 - DNA, 120 bp, Artificial Sequence
  ENSG00000151773_19 (sequence is synthesized)
ctccttgtggttttgatttacatttccctaatgatttatgatgctgaacttttttttggtagtttaaaaggaatagcatcaaatctatacattgctttggatagtatggccattttaatg

SEQ ID NO: 428309 - DNA, 120 bp, Artificial Sequence
  ENSG00000151773_20 (sequence is synthesized)
gtttttccatttgtttatgtcatctctaatttatttgagcagtattttatagttctacttgtagagatcttttaccttcctggttggctgtgttcttaggggtgtgtgtgtgtgtgtgtg

SEQ ID NO: 428310 - DNA, 90 bp, Artificial Sequence
  ENSG00000151773_21 (sequence is synthesized)
tgtgtgtgtgtgtgtgtgtgtgtggcaactgtgaatgggatttgactcagtttgattggtgttatataggagtgctagtgatttttgcat

SEQ ID NO: 428311 - DNA, 120 bp, Artificial Sequence
  ENSG00000151773_22 (sequence is synthesized)
tttatcagcttaagaagcttttgggccaggactgttgggttttctagatatagcatcatgtcgtctgcaaacagggctagtttggcttcctctcttcttatttgtatatgttttatttct

SEQ ID NO: 428312 - DNA, 120 bp, Artificial Sequence
  ENSG00000151773_23 (sequence is synthesized)
cttgcctgattgctctggctaggacttcgaatactatgtcaagtaagagtagtgagagaggggatccttgtcttttgctggttttcaagaggaatgcctctggtttttgcccattgagta

SEQ ID NO: 428313 - DNA, 72 bp, Artificial Sequence
  ENSG00000151773_24 (sequence is synthesized)
tgagagaggggatccttgtcttttgctggttttcaagaggaatgcctctggtttttgcccattcaggtatgt

SEQ ID NO: 428314 - DNA, 120 bp, Artificial Sequence
  ENSG00000151773_25 (sequence is synthesized)
gaatcgttgttaaattgtatcgacagtcttttctgcatctattgagataattcatgttgtgtttgtcttcagttctgtttatatgatgaatcatatttattgatttgcatatgttgaacc

SEQ ID NO: 428315 - DNA, 120 bp, Artificial Sequence
  ENSG00000151773_26 (sequence is synthesized)
aaccaaacttgcatcccagatataaagcttacttgatggtgatggataagctttttgatgtgcttctggattcaatttaacagtattttgttggggatttttgcatcgatgttcatcaag

SEQ ID NO: 428316 - DNA, 120 bp, Artificial Sequence
  ENSG00000151773_27 (sequence is synthesized)
cctgaagtttcctttttgttatgtctctttcgggttttggtatcaggatgattctggcctcatagaatgagttagggaggagtccatcctcctcaattttttggaatagttttggcagga

SEQ ID NO: 428317 - DNA, 120 bp, Artificial Sequence
  ENSG00000151773_28 (sequence is synthesized)
atggtaccagctcttctttgtatatctgatagaattcagctgtgaacccatctggtactgggcttttttcagttggtaggctatttattactgaattaattccagagcttgttactggtc

SEQ ID NO: 428318 - DNA, 68 bp, Artificial Sequence
  ENSG00000151773_29 (sequence is synthesized)
ctatttattactgaattaattccagagcttgttactggtctgttcagagattcgatttcttcccggtt

SEQ ID NO: 428319 - DNA, 120 bp, Artificial Sequence
  ENSG00000151773_30 (sequence is synthesized)
tttctgtggggtcagtggtgatatcctcctcatttctgattaggtttattttgatcttctctattctgtgttagtctagctagcagtttatctgttttattaattttttcaaaaaaccag

SEQ ID NO: 428320 - DNA, 120 bp, Artificial Sequence
  ENSG00000151773_31 (sequence is synthesized)
tcaaaaaaccagctcctagattcactgatctttttgaagggttttttttttggtctcagtctccttcagctctgattttggttattgtcttctactagctttgggcttggtttgcttttg

SEQ ID NO: 428321 - DNA, 120 bp, Artificial Sequence
  ENSG00000151773_32 (sequence is synthesized)
taagaaaagaaatagaggcaaagcgagatgacccaatagaagcctgcaccactcattccccaagcaggagcatcaaattctaactatactcaagagcaccatcatcacaagaacccaaat

SEQ ID NO: 428322 - DNA, 120 bp, Artificial Sequence
  ENSG00000151773_33 (sequence is synthesized)
aaattaagaaaagaaatagaggtaagtcttaattatctagatttcaatgttttatgggaccatttttaaaacttaacactatattcatatttccatagtttactctcaatactcaaaaca

SEQ ID NO: 428323 - DNA, 120 bp, Artificial Sequence
  ENSG00000151773_34 (sequence is synthesized)
gttgaagaacaagaaagaactataaaatttagtaaatacaaatcattaatagataactagagataaccccctcattcaaagatgttcaaatatgtgaatgtgttcaaacaatgcaagcat

SEQ ID NO: 428324 - DNA, 120 bp, Artificial Sequence
  ENSG00000151773_35 (sequence is synthesized)
ctaagaacatgatacccaattaatggctagaaagcagctatgtagtcaaagaggatgcccattcttagatatcaaagactcctcaaaatagaataaaacacaatggaaagcatcgtcttt

SEQ ID NO: 428325 - DNA, 120 bp, Artificial Sequence
  ENSG00000151773_36 (sequence is synthesized)
ccaaacctctctgacttcatattcgcaattatcaagagtcaagttaaaaaaacaaactgaaaatatgcaaaattgaaagtcagagtaaattcataatgtgttgtggtgctgcctgtggac

SEQ ID NO: 428326 - DNA, 120 bp, Artificial Sequence
  ENSG00000151773_37 (sequence is synthesized)
ttctattgtcattattgtttggatgaatggtgaacagaaatgtaaaataatatgctattaagggcaaataatttttgcctgaatacattaatttggaaaataaaaatatgcatgtttcaa

SEQ ID NO: 428327 - DNA, 120 bp, Artificial Sequence
  ENSG00000151773_38 (sequence is synthesized)
cagcagattcagcggtactggtgtataataggtatacagtttatttttaattattcaattaattctttttggatgtctctgatgatgttctaacttctcttaaaaacatgtttgaaaaga

SEQ ID NO: 428328 - DNA, 80 bp, Artificial Sequence
  ENSG00000151778_0 (sequence is synthesized)
acttccgtccgggctgcggcctctctctggagtcggctagccggggctcggggagcggggtgcgcagggctcggggccac

SEQ ID NO: 428329 - DNA, 120 bp, Artificial Sequence
  ENSG00000151778_1 (sequence is synthesized)
cggcgggacgcgctcggccctgtcgcaggagctaacgcagggggaatccttgcaggtgggagcatttcagagcgcacaagccatggtggccaaacagcggatccggatggctaacgagaa

SEQ ID NO: 428330 - DNA, 120 bp, Artificial Sequence
  ENSG00000151778_2 (sequence is synthesized)
gcacagcaaaaacatcacccagagggggaacgtagccaaaaccctgaggccgcaagaggagaaatatcctgtgggaccatggctgttggcactgtttgtttttgttgtctgtggctcagc

SEQ ID NO: 428331 - DNA, 120 bp, Artificial Sequence
  ENSG00000151778_3 (sequence is synthesized)
ggaggacaacggaagcggtcagccagtttctgcgggaaacaagcaggccacacggaatagaaaaaaacgctcccccacttgttccctgatcacttcatcgtggatgtcagaccaaattgc

SEQ ID NO: 428332 - DNA, 120 bp, Artificial Sequence
  ENSG00000151778_4 (sequence is synthesized)
cttctcacaggacatcttggtgcatccgcgttctcaagcggaaaggacattttgcttttctgttggcaggattagtagccacgcgggtcgtccgcagcagtgctgtttttttggtttttc

SEQ ID NO: 428333 - DNA, 120 bp, Artificial Sequence
  ENSG00000151778_5 (sequence is synthesized)
ccttggtttcactaatgcgtgcatgtggccctctgaacgatcactggtttactttctatggatacaatctctcctccattgagaattgattttacaaataaatgtcttcgttcaacctta

SEQ ID NO: 428334 - DNA, 120 bp, Artificial Sequence
  ENSG00000151778_6 (sequence is synthesized)
tccagagggagtcaccccacccccaagaccggcaactgagatgtttaaaggaactggctggccctgaaggaaagactgaggccattcatctgctctggagttcatcctcgggatctgaga

SEQ ID NO: 428335 - DNA, 120 bp, Artificial Sequence
  ENSG00000151778_7 (sequence is synthesized)
cacagcctgaagacatctcatcagccatcagctcccttaagctatctttcagatcattcagagcataaggatgggcatgtgagaaagccagggatttgacaccacctccctcccactgga

SEQ ID NO: 428336 - DNA, 120 bp, Artificial Sequence
  ENSG00000151778_8 (sequence is synthesized)
ctcccttaaggtgacctgcagcctcctttgtgccctgggggcatttgggattgtgtagaggctctctctcagaagcatctttctgttattttaatgcggatagaaagctttacattcttt

SEQ ID NO: 428337 - DNA, 120 bp, Artificial Sequence
  ENSG00000151778_9 (sequence is synthesized)
cttttttccctcttctccatctctagagaagccaccagaaaatggcatcttgcttttgactttctttgtgctgattcttttagagaacttagtgatccactttgcaatgtctcgtctcct

SEQ ID NO: 428338 - DNA, 120 bp, Artificial Sequence
  ENSG00000151778_10 (sequence is synthesized)
aacatttcagcttgtttctcagagggcctgtactttgctttctaccagctctttcatcattttcattttctttaatgaaaaataagcaaaactgtatgatttctaggttgtcttcttctc

SEQ ID NO: 428339 - DNA, 120 bp, Artificial Sequence
  ENSG00000151778_11 (sequence is synthesized)
ctaaaggatattcttcttccggcctctcttaatctctcttctcagcaactcccttgatctcttttatcatcaatttattgtcaataaaagtggctttaggaagcctcctgttacctggca

SEQ ID NO: 428340 - DNA, 120 bp, Artificial Sequence
  ENSG00000151778_12 (sequence is synthesized)
cgcgacactgcagggccccggctctgcgcgctgcgctccggccgctcggcgcgggaggacgtgcggtcgcgcctgcctcggtggccgcgcggggtgggagcatttcagagcgcacaagcc

SEQ ID NO: 428341 - DNA, 120 bp, Artificial Sequence
  ENSG00000151778_13 (sequence is synthesized)
aaatgatcagaagcagaaatgggagcccagaagtgcagctgaccagaagcatttcagtgtcagatcacacgcagcctcctctgtaatgagatcacagcacgtctcatcagttactggttt

SEQ ID NO: 428342 - DNA, 120 bp, Artificial Sequence
  ENSG00000151779_0 (sequence is synthesized)
actcctccgctgcctgagtcctcggcgaacatggcggcccccgagtcagggccggctttgagtccaggcactgcagagggtgaggaggagacgattctctatgacttgttggtcaacacc

SEQ ID NO: 428343 - DNA, 120 bp, Artificial Sequence
  ENSG00000151779_1 (sequence is synthesized)
gagtggccaccggagactgaagtacagcctagaggcaaccaaaaacatggtgcatcctttatcatcacgaaagcaattcgagatcgtttattatttttacgccaatacatctggtacagc

SEQ ID NO: 428344 - DNA, 120 bp, Artificial Sequence
  ENSG00000151779_2 (sequence is synthesized)
ccggcaccttttttgctccctgatggactggttcgcttggttaataaacagataaactggcatttggtacttgcaagcaatggaaagcttttggctgctgttcaagatcagtgtgtggaa

SEQ ID NO: 428345 - DNA, 120 bp, Artificial Sequence
  ENSG00000151779_3 (sequence is synthesized)
atcaggtctgcaaaagatgattttacatccattattgggaaatgtcaagttccgaaagacccgaaaccccagtggagacgggtagcatggagttacgattgtaccctactggcctatgcc

SEQ ID NO: 428346 - DNA, 120 bp, Artificial Sequence
  ENSG00000151779_4 (sequence is synthesized)
gaaagcacaggaactgtgagggtgtttgatctcatgggaagtgaactctttgtcatttccccggcatctagttttataggtgacttaagctatgccattgctgggttgatatttttagaa

SEQ ID NO: 428347 - DNA, 120 bp, Artificial Sequence
  ENSG00000151779_5 (sequence is synthesized)
tataaagcaagtgcacagtggtctgcagaactcctggtcatcaattaccgaggagaacttagaagttaccttgtaagtgttggaacaaatcagagctaccaagaaagtcactgtttcagc

SEQ ID NO: 428348 - DNA, 120 bp, Artificial Sequence
  ENSG00000151779_6 (sequence is synthesized)
ttcagtagtcattatcctcatggaatcaacacagctatttaccaccctggtcacagacttttacttgttggtggatgtgaaactgctgaagtaggcatgtcaaaagcttctagctgtggc

SEQ ID NO: 428349 - DNA, 120 bp, Artificial Sequence
  ENSG00000151779_7 (sequence is synthesized)
ctttctgcctggagagttctttcaggatcaccgtattataagcaggttactaatggtggagacggggttactgcagtaccgaagacactgggattattaaggatgttaagtgtcaagttt

SEQ ID NO: 428350 - DNA, 120 bp, Artificial Sequence
  ENSG00000151779_8 (sequence is synthesized)
tacagtcgccagggacaagaacaggatggaatttttaagatgagcctttctccagatgggatgctcctggcagccattcacttctcagggaaactgagcatctgggcgattccatctctg

SEQ ID NO: 428351 - DNA, 120 bp, Artificial Sequence
  ENSG00000151779_9 (sequence is synthesized)
aagcaacaaggggaatggggtcaaaatgagcagccaggctatgatgaccttaatcctgattggaggctctctactgagaagagaaaaaaaatcaaagataaagagtccttttacccactg

SEQ ID NO: 428352 - DNA, 120 bp, Artificial Sequence
  ENSG00000151779_10 (sequence is synthesized)
atagatgtcaattggtgggcagacagtgcagtgactttagctcgatgctctggtgctttaactgtttcatctgtgaaaactttgaagaatttactgggaaaatcctgtgaatggtttgaa

SEQ ID NO: 428353 - DNA, 120 bp, Artificial Sequence
  ENSG00000151779_11 (sequence is synthesized)
ccatcacctcaagtcactgctacccatgatgggggatttttaagtttggagtgtgagattaaacttgcccccaaacgatctcgtttggagactagagctggagaagaagatgaaggagaa

SEQ ID NO: 428354 - DNA, 120 bp, Artificial Sequence
  ENSG00000151779_12 (sequence is synthesized)
gaggattctgattctgattatgaaatatctgccaaggctcgctactttggttatataaaacagggcctttacttggtgactgaaatggagcgatttgcaccaccacggaaacgcccacga

SEQ ID NO: 428355 - DNA, 120 bp, Artificial Sequence
  ENSG00000151779_13 (sequence is synthesized)
accattactaaaaactaccgccttgtgagtttgcgctccacgacaccagaggaactttatcagaggaagattgaaagtgaagagtatgaggaagccttgtccttggctcatacctacggc

SEQ ID NO: 428356 - DNA, 120 bp, Artificial Sequence
  ENSG00000151779_14 (sequence is synthesized)
ctggatactgaccttgtatatcagaggcagtggaggaagtcagcggtcaacgttgcttcaattcagaattatttgagtaaaataaagaagcgatcctgggttctccatgagtgtttggaa

SEQ ID NO: 428357 - DNA, 120 bp, Artificial Sequence
  ENSG00000151779_15 (sequence is synthesized)
agagttcctgaaaatgtggatgctgcaaaagaactgcttcagtatggattaaaaggcacagacctggaggctcttttagcaatagggaaaggagcagatgatggcagatttacattacct

SEQ ID NO: 428358 - DNA, 120 bp, Artificial Sequence
  ENSG00000151779_16 (sequence is synthesized)
ggtgaaatagacattgacagtatctcctatgaagagctttcaccacctgatgaagagcctgccaagaataaaaaggaaaaggagctcaagaagagacaagaactactgaaattagtgaac

SEQ ID NO: 428359 - DNA, 120 bp, Artificial Sequence
  ENSG00000151779_17 (sequence is synthesized)
ttttccaagttgacactggaacaaaaggaactttgccgttgtagacggaagttattaacctacttagatcgacttgcaacatatgaggaaatcctaggagtgcctcatgcatctgaacag

SEQ ID NO: 428360 - DNA, 120 bp, Artificial Sequence
  ENSG00000151779_18 (sequence is synthesized)
agatatgatgctgaattctttaagaaattcagaaatcagaatattgttctctcagcaagaacttatgctcaggaaagtaatgtacaagccctggaaattctgtttacttaccatggttcc

SEQ ID NO: 428361 - DNA, 120 bp, Artificial Sequence
  ENSG00000151779_19 (sequence is synthesized)
gacctgcttcctcatcgccttgcaattctgtccaactttccagagaccacttctccacatgaatattctgttttgctgcccgaagcttgttttaacggtgactccctgatgatcattcct

SEQ ID NO: 428362 - DNA, 120 bp, Artificial Sequence
  ENSG00000151779_20 (sequence is synthesized)
tggcatgaacataaacaccgagctaaagattggtgcgaggagttggcttgcagaatggttgttgagccgaatctccaagatgaaagtgaattcttgtatgctgcacagcctgagttacta

SEQ ID NO: 428363 - DNA, 120 bp, Artificial Sequence
  ENSG00000151779_21 (sequence is synthesized)
aggttcaggatgacccagcttacggtggagaaggttatggactggtatcagaccagagcagaggaaatagagcattatgctcggcaggtggactgtgcattgtcacttattcgacttggg

SEQ ID NO: 428364 - DNA, 120 bp, Artificial Sequence
  ENSG00000151779_22 (sequence is synthesized)
atggagcggaatattcctggtttgctggttctctgtgacaatttggttactctggaaacattggtttatgaagccaggtgtgatgtaactctaaccctgaaagaactccagcagatgaaa

SEQ ID NO: 428365 - DNA, 120 bp, Artificial Sequence
  ENSG00000151779_23 (sequence is synthesized)
gacattgaaaaactaagattactgatgaatagttgttctgaggataaatatgtgacaagtgcctaccagtggatggttccctttcttcatcgttgtgagaaacagtcgcctggtgtggct

SEQ ID NO: 428366 - DNA, 120 bp, Artificial Sequence
  ENSG00000151779_24 (sequence is synthesized)
aatgagctattaaaagaatatttagtaactttagctaaaggggacttaaaatttcccctgaagatatttcagcattccaaaccagatctgcagcaaaaaattattcctgatcaggaccaa

SEQ ID NO: 428367 - DNA, 120 bp, Artificial Sequence
  ENSG00000151779_25 (sequence is synthesized)
ctgatggcaatagcactagagtgcatctatacctgtgaacgaaatgatcaactctgtctttgctatgacctactagaatgtctgccagaaagaggatatggtgataagacagaggcaacc

SEQ ID NO: 428368 - DNA, 120 bp, Artificial Sequence
  ENSG00000151779_26 (sequence is synthesized)
acaaagcttcatgacatggtagaccaactggaacaaattctcagtgtgtcagagcttttggaaaaacatggactcgagaaaccaatttcatttgttaaaaacactcaatctagctcagaa

SEQ ID NO: 428369 - DNA, 120 bp, Artificial Sequence
  ENSG00000151779_27 (sequence is synthesized)
gaggcacgcaagctgatggttagattgacgaggcacactggccggaagcagcctcctgtcagtgagtctcattggagaacgttgctgcaagacatgttaactatgcagcagaatgtatac

SEQ ID NO: 428370 - DNA, 120 bp, Artificial Sequence
  ENSG00000151779_28 (sequence is synthesized)
acatgtctagattctgatgcctgctatgagatatttacagaaagccttctgtgctctagtcgccttgaaaacatccacctggctggacagatgatgcactgcagtgcttgttcagaaaat

SEQ ID NO: 428371 - DNA, 120 bp, Artificial Sequence
  ENSG00000151779_29 (sequence is synthesized)
cctccagctggtatagcccataaagggaaaccccactacagggtcagctacgaaaagagtattgacttggttttggctgccagcagagagtacttcaattcttctaccaacctcactgat

SEQ ID NO: 428372 - DNA, 120 bp, Artificial Sequence
  ENSG00000151779_30 (sequence is synthesized)
atccaagccgttggatgtcttgaagaatttggggtaaagatcctgcctttgcaagtgcgattgtgccctgatcggatcagtctcatcaaggagtgtatttcccagtcccccacatgctat

SEQ ID NO: 428373 - DNA, 120 bp, Artificial Sequence
  ENSG00000151779_31 (sequence is synthesized)
aaacaatccaccaagcttctgggccttgctgagctgctgagggttgcaggtgagaacccagaagaaaggcggggacaggttctaatccttttagtggagcaggcacttcgcttccatgac

SEQ ID NO: 428374 - DNA, 120 bp, Artificial Sequence
  ENSG00000151779_32 (sequence is synthesized)
tacaaagcagccagtatgcattgtcaggagctgatggccacaggttatcctaaaagttgggatgtttgtagccagttaggacaatcagaaggttaccaggacttggccactcgtcaagag

SEQ ID NO: 428375 - DNA, 120 bp, Artificial Sequence
  ENSG00000151779_33 (sequence is synthesized)
ctcatggcttttgctttgacacattgccctcctagcagcattgaacttcttttggcagctagcagctctctgcagacagaaattctttatcaaagagtgaatttccagatccatcatgaa

SEQ ID NO: 428376 - DNA, 120 bp, Artificial Sequence
  ENSG00000151779_34 (sequence is synthesized)
ggaggggaaaatatcagtgcttcaccattaactagtaaagcagtacaagaggatgaagtaggtgttccaggtagcaattcagctgacctattgcgctggaccactgctaccaccatgaaa

SEQ ID NO: 428377 - DNA, 120 bp, Artificial Sequence
  ENSG00000151779_35 (sequence is synthesized)
gtcctttccaacaccacaaccaccaccaaagcggtgctgcaggccgtcagtgatgggcagtggtggaagaagtctttaacttaccttcgaccccttcaggggcaaaaatgtggtggtgca

SEQ ID NO: 428378 - DNA, 120 bp, Artificial Sequence
  ENSG00000151779_36 (sequence is synthesized)
tatcaaatcggaactacagccaatgaagatctagagaaacaagggtgtcatcctttttatgaatctgtcatctcaaatccttttgtcgctgagtctgaagggacctatgacacctatcag

SEQ ID NO: 428379 - DNA, 120 bp, Artificial Sequence
  ENSG00000151779_37 (sequence is synthesized)
catgttccagtggaaagctttgcagaagtattgctgagaactggaaaattggcagaggctaaaaataaaggagaagtatttccaacaactgaagttctcttgcaactagcaagtgaagcc

SEQ ID NO: 428380 - DNA, 120 bp, Artificial Sequence
  ENSG00000151779_38 (sequence is synthesized)
ttgccaaatgacatgaccttggctcttgcttaccttcttgccttaccacaagtgttagatgctaaccggtgctttgaaaagcagtccccctctgcattatctctccagctggcagcgtat

SEQ ID NO: 428381 - DNA, 120 bp, Artificial Sequence
  ENSG00000151779_39 (sequence is synthesized)
tactatagcctccagatctatgcccgattggccccatgtttcagggacaagtgccatcctctttacagggctgatcccaaagaactaatcaagatggtcaccaggcatgtgactcgacat

SEQ ID NO: 428382 - DNA, 120 bp, Artificial Sequence
  ENSG00000151779_40 (sequence is synthesized)
gagcacgaagcctggcctgaagaccttatttcactgaccaagcagttacactgctacaatgaacgtctcctggatttcactcaggcgcagatccttcagggccttcggaagggtgtggac

SEQ ID NO: 428383 - DNA, 120 bp, Artificial Sequence
  ENSG00000151779_41 (sequence is synthesized)
gtgcagcggtttactgcagatgaccagtataaaagggaaactatccttggtctggcagaaactctagaggaaagcgtctacagcattgctatttctctggcacaacgttacagtgtctcc

SEQ ID NO: 428384 - DNA, 120 bp, Artificial Sequence
  ENSG00000151779_42 (sequence is synthesized)
cgctgggaagtttttatgacccatttggagttcctcttcacggacagtggtttgtccacactagaaattgaaaatagagcccaagaccttcatctctttgagactttgaagactgatcca

SEQ ID NO: 428385 - DNA, 120 bp, Artificial Sequence
  ENSG00000151779_43 (sequence is synthesized)
gaagcctttcaccagcacatggtcaagtatatttaccctactattggtggctttgatcacgaaaggctgcagtattatttcactcttctggaaaactgtggctgtgcagatttggggaac

SEQ ID NO: 428386 - DNA, 120 bp, Artificial Sequence
  ENSG00000151779_44 (sequence is synthesized)
tgtgccattaaaccagaaacccacattcgactgctgaagaagtttaaggttgttgcatcaggtcttaattacaaaaagctgacagatgaaaacatgagtcctcttgaagcattggagcca

SEQ ID NO: 428387 - DNA, 120 bp, Artificial Sequence
  ENSG00000151779_45 (sequence is synthesized)
gttctttcaagtcaaaatatcttgtctatttccaaacttgttcccaaaatccctgaaaaggatggacagatgctttccccaagctctctgtacaccatctggttacagaagttgttctgg

SEQ ID NO: 428388 - DNA, 120 bp, Artificial Sequence
  ENSG00000151779_46 (sequence is synthesized)
actggagaccctcatctcattaaacaagtcccaggctcttcaccggagtggcttcatgcctatgatgtctgcatgaagtactttgatcgtctccacccaggtgacctcatcactgtggta

SEQ ID NO: 428389 - DNA, 120 bp, Artificial Sequence
  ENSG00000151779_47 (sequence is synthesized)
gatgcagttacattttctccaaaagctgtgaccaagctgtctgtggaagcccgtaaagagatgactagaaaggctattaagacagtcaaacattttattgagaagccaaggaaaagaaac

SEQ ID NO: 428390 - DNA, 120 bp, Artificial Sequence
  ENSG00000151779_48 (sequence is synthesized)
tcagaagacgaagctcaagaagctaaggattctaaagttacctatgcagatactttgaatcatctggagaaatcacttgcccacctggaaaccctgagccacagcttcatcctttctctg

SEQ ID NO: 428391 - DNA, 120 bp, Artificial Sequence
  ENSG00000151779_49 (sequence is synthesized)
aagaatagtgagcaggaaacactgcaaaaatacagtcacctctatgatctgtcccgatcagaaaaagagaaacttcatgatgaagctgtggctatttgtttagatggtcagcctctagca

SEQ ID NO: 428392 - DNA, 120 bp, Artificial Sequence
  ENSG00000151779_50 (sequence is synthesized)
atgattcagcagctgctagaggtggcagttggccctcttgacatctcacccaaggatatagtgcagagtgcaatcatgaaaataatttctgcattgagtggtggcagtgctgaccttggt

SEQ ID NO: 428393 - DNA, 120 bp, Artificial Sequence
  ENSG00000151779_51 (sequence is synthesized)
gggccaagggacccactgaaggtcctggaaggtgttgttgcagcagtccacgccagtgtggacaagggtgaggagctggtttcacctgaggacctgctggagtggctgcggcctttctgt

SEQ ID NO: 428394 - DNA, 120 bp, Artificial Sequence
  ENSG00000151779_52 (sequence is synthesized)
gctgatgacgcctggccggtgcggccccgcattcacgtgctgcagattttggggcaatcatttcacctgactgaggaggacagcaagctcctcgtgttctttagaactgaagccattctc

SEQ ID NO: 428395 - DNA, 120 bp, Artificial Sequence
  ENSG00000151779_53 (sequence is synthesized)
aaagcctcctggccccagagacaggtagacatagctgacattgagaatgaagagaaccgctactgtctattcatggaactcctggaatctagtcaccacgaggctgaatttcagcacttg

SEQ ID NO: 428396 - DNA, 120 bp, Artificial Sequence
  ENSG00000151779_54 (sequence is synthesized)
gttttacttttgcaagcttggccacctatgaaaagtgaatatgtcataaccaataatccatgggtgagactagctacagtgatgctaaccagatgtacgatggagaacaaggaaggattg

SEQ ID NO: 428397 - DNA, 120 bp, Artificial Sequence
  ENSG00000151779_55 (sequence is synthesized)
gggaatgaagttttgaaaatgtgtcgctctttgtataacaccaagcagatgctgcctgcagagggtgtgaaggagctgtgtctgctgctgcttaaccagtccctcctgcttccatctctg

SEQ ID NO: 428398 - DNA, 120 bp, Artificial Sequence
  ENSG00000151779_56 (sequence is synthesized)
aaacttctcctcgagagccgagatgagcatctgcacgagatggcactggagcaaatcacggcagtcactacggtgaatgattccaattgtgaccaagaacttctttccctgctcctggat

SEQ ID NO: 428399 - DNA, 120 bp, Artificial Sequence
  ENSG00000151779_57 (sequence is synthesized)
gccaagctgctggtgaagtgtgtctccactcccttctatccacgtattgttgaccacctcttggctagcctccagcaagggcgctgggatgcagaggagctgggcagacacctgcgggag

SEQ ID NO: 428400 - DNA, 120 bp, Artificial Sequence
  ENSG00000151779_58 (sequence is synthesized)
gccggccatgaagccgaagccgggtctctccttctggccgtgagggggactcaccaggccttcagaaccttcagtacagccctccgcgcagcacagcactgggtgtgagggccacctgtg

SEQ ID NO: 428401 - DNA, 120 bp, Artificial Sequence
  ENSG00000151779_59 (sequence is synthesized)
gccctgctccttagcagaaaaagcatctggagttgaatgctgttcccagaagcaacatgtgtatctgccgattgttctccatggttccaacaaattgcaaataaaactgtatggaaacga

SEQ ID NO: 428402 - DNA, 120 bp, Artificial Sequence
  ENSG00000151779_60 (sequence is synthesized)
ggcactggagcaaatcacggcagtcactacggatatcttctagggaccagagaaggaaggagaatctagagcagaggtatatgcttgctactcaagacagtgaagaggttgatgaaaaga

SEQ ID NO: 428403 - DNA, 120 bp, Artificial Sequence
  ENSG00000151779_61 (sequence is synthesized)
catcactgatataaagttttcttaatgacaaaggatacagaaaattctgtaaatagttacagaaagcagaatataattgtatttggaaataatcattatgaataaaatgagaaaatcaaa

SEQ ID NO: 428404 - DNA, 120 bp, Artificial Sequence
  ENSG00000151779_62 (sequence is synthesized)
agtaagtgggaagatggcagttgatgcgatgaatcttgatataatccacagctgttttcacaatttcaccagactccaggctatgatgaccttaatcctgattggaggctctctactgag

SEQ ID NO: 428405 - DNA, 120 bp, Artificial Sequence
  ENSG00000151779_63 (sequence is synthesized)
cgatgtatgaggaatgtgttttacaaactgctaccctgctggtattgatcattgtcacacaggtttgtgtagcacagccttctactctgaaacgtgagggccttgcagatttcaagagca

SEQ ID NO: 428406 - DNA, 120 bp, Artificial Sequence
  ENSG00000151779_64 (sequence is synthesized)
gacatgctgggtgaaagctaaaactataatgtgcagaattcccaagagaactttatcctgagtttaaatgcgagcttacttgtgtcattcttattttattgatgctctataataatgtaa

SEQ ID NO: 428407 - DNA, 120 bp, Artificial Sequence
  ENSG00000151779_65 (sequence is synthesized)
agcaattttgaaaatatagtaaatttgagtttttcttctccgatctgctgtctgaatggcacgagagaaaaatcaatcccgtggatagcaatgatcatcagttctttagagcaacccttg

SEQ ID NO: 428408 - DNA, 120 bp, Artificial Sequence
  ENSG00000151779_66 (sequence is synthesized)
ctttagtgtaatggagtcattcatcgtctggtttttggtccaaagtgttctcttctttatgttacagctaaagtcaggacctaaatggcaacacagctcagcagggcaaaacagattgca

SEQ ID NO: 428409 - DNA, 120 bp, Artificial Sequence
  ENSG00000151779_67 (sequence is synthesized)
aatcttattcttattgttttatgcttttgttgtaaaggattatcatttgttaccttatacgaaagcctgctctgtgaccacaggttcagttggtaaaatacagggctgagaataaaattc

SEQ ID NO: 428410 - DNA, 120 bp, Artificial Sequence
  ENSG00000151779_68 (sequence is synthesized)
agatacacctgtggggatccaaacacattttcatttttctgcaacacagatagttttcgtgaagatagactgtcttaagtatattaaggagtcaattcattttgacattaaaatgataga

SEQ ID NO: 428411 - DNA, 120 bp, Artificial Sequence
  ENSG00000151779_69 (sequence is synthesized)
tacattttaaaatattttatttgctgatttcctttgtttcagtgaatgacaactagaggttgttaacaatattagcaattgataatactttttattataattcagcctccactatatgct

SEQ ID NO: 428412 - DNA, 120 bp, Artificial Sequence
  ENSG00000151779_70 (sequence is synthesized)
gggctgtgagagtttaggaaaataaattataccactatatctgtacaatgagcattacaaagccattaaaaagcaatattgtcgatgaatatctgatagcttggaaatctgtacacagtt

SEQ ID NO: 428413 - DNA, 120 bp, Artificial Sequence
  ENSG00000151779_71 (sequence is synthesized)
tactgtgaaccaagtgaagcaggtaccaacgcccatattcagtatatccagtgcggtaccatatgtggctttacacacacacacacacgctaccacagaaaaaggggtggaatgatccag

SEQ ID NO: 428414 - DNA, 120 bp, Artificial Sequence
  ENSG00000151779_72 (sequence is synthesized)
ccagaaccgtgccggtgagaagtacgtcgtggagttctcgctcacccctgctctgtggtttcagggtgtgaaggagctgtgtctgctgctgcttaaccagtccctcctgcttccatctct

SEQ ID NO: 428415 - DNA, 120 bp, Artificial Sequence
  ENSG00000151779_73 (sequence is synthesized)
tggttagattgacgaggcacactggccggaacctgtttaccacttctctgtccgtggacatttgggttattttgagttttggcttttacaaataaagttgctacgacttttcatatgcaa

SEQ ID NO: 428416 - DNA, 120 bp, Artificial Sequence
  ENSG00000151789_0 (sequence is synthesized)
agtcctgatgtcacaggcgcggcaaggacatcgcaaggaggagtcggattacagtaaggatgggcagtgcagcaggcagcccgagcgcactctccagccgccggggatcttagccctgga

SEQ ID NO: 428417 - DNA, 120 bp, Artificial Sequence
  ENSG00000151789_1 (sequence is synthesized)
aaggcagcctgcaaggcgctcatcccgcggaggaggcacgctctcggcgctcactgctctccacgccggggacatttccaccgaatgtagcatgaaagggctctgctctacgtgccagcc

SEQ ID NO: 428418 - DNA, 120 bp, Artificial Sequence
  ENSG00000151789_2 (sequence is synthesized)
ttgggtgagagctgatgctgaagacaccgcggtgggattccagctgtctgattaatgagaaacataatgtattttggtggtacatgccagagtcctgctctcccggcccttgtccgtcca

SEQ ID NO: 428419 - DNA, 120 bp, Artificial Sequence
  ENSG00000151789_3 (sequence is synthesized)
ccagcccctcctttgcaaccatcgctggatattaaaccatttcttccctttcctcttgacactgcagctgcagtcaacctcttccccaatttcaatgcgatggacccgattcagaaagct

SEQ ID NO: 428420 - DNA, 120 bp, Artificial Sequence
  ENSG00000151789_4 (sequence is synthesized)
gtaataaaccatacattcggggttcctcttccccaccgaagaaagcaaatcatatcatgcaacatttgccagttgagatttaattctgatagccaggctgcggcccactacaaaggcacg

SEQ ID NO: 428421 - DNA, 120 bp, Artificial Sequence
  ENSG00000151789_5 (sequence is synthesized)
aaacatgccaagaagctcaaagcactggaagccatgaaaaataagcagaaatctgtaactgccaaggacagcgcaaagactaccttcacctccatcactaccaataccatcaataccagc

SEQ ID NO: 428422 - DNA, 120 bp, Artificial Sequence
  ENSG00000151789_6 (sequence is synthesized)
tctgacaaaacagacggtactgcagggacaccagcaatatcaacgacgacaactgtggaaatccgcaaaagcagtgttatgacaactgagatcacctctaaagtggaaaaaagcccaacg

SEQ ID NO: 428423 - DNA, 120 bp, Artificial Sequence
  ENSG00000151789_7 (sequence is synthesized)
acagccactggcaatagctcatgtccttctactgagaccgaggaagaaaaggcaaaacggcttctttactgttcgctatgcaaggttgctgtcaactctgcctcgcagctggaggcgcac

SEQ ID NO: 428424 - DNA, 120 bp, Artificial Sequence
  ENSG00000151789_8 (sequence is synthesized)
aacagtggtactaagcacaaaaccatgttagaagcccggaatggaagtggcactatcaaagcctttcctagggcaggagtgaaaggcaaaggacctgttaataaaggaaacacaggcctc

SEQ ID NO: 428425 - DNA, 120 bp, Artificial Sequence
  ENSG00000151789_9 (sequence is synthesized)
caaaataaaacatttcactgtgaaatctgtgatgtgcacgtcaactcggaaacgcaacttaaacagcacattagcagtagaaggcacaaagacagagctgctgggaagcccccgaaacct

SEQ ID NO: 428426 - DNA, 120 bp, Artificial Sequence
  ENSG00000151789_10 (sequence is synthesized)
aaatacagtccttacaacaaactacagaagacagcacatccactgggggtaaaattagtattttcaaaagaaccttcaaagccattggctccacgaattctaccaaatcctctagcagct

SEQ ID NO: 428427 - DNA, 120 bp, Artificial Sequence
  ENSG00000151789_11 (sequence is synthesized)
gcagcagccgcagcagcagtggcagtgagttcccccttcagtcttcgaactgctccagcagcaacactgttccagacttccgcgcttcctccggcactcctgcggccagctcctggaccc

SEQ ID NO: 428428 - DNA, 120 bp, Artificial Sequence
  ENSG00000151789_12 (sequence is synthesized)
attcggaccgcccacactcctgtgctgtttgctccttactaaattccaaataggagtaattgtactgcaataatttttcaaaaaacaaaaaacaaaacaaacaaaagagaactatgcagt

SEQ ID NO: 428429 - DNA, 120 bp, Artificial Sequence
  ENSG00000151789_13 (sequence is synthesized)
gtttatttatagtttaaagtatatctgaagagccaggacttttgatagtgaattgaaaaggttataaaaaagtgggggaggtttgggggtgggagggagggagtggtattttctccaaat

SEQ ID NO: 428430 - DNA, 120 bp, Artificial Sequence
  ENSG00000151789_14 (sequence is synthesized)
taaagcattcctcttgaacgctgattgttttagaagtgatctccagcattgatttgtagtggtatctagaccttctgaagcctctgtgactgtgcttttgggcacctatttccctctgca

SEQ ID NO: 428431 - DNA, 120 bp, Artificial Sequence
  ENSG00000151789_15 (sequence is synthesized)
ttgtctgtcctgctttatgaaacaactatacattgtctaagggcattaactggttccaatgtatataaaataatttactctgtagattaaaatcgtacaaaaaaaaaggaaaaaaacaaa

SEQ ID NO: 428432 - DNA, 120 bp, Artificial Sequence
  ENSG00000151789_16 (sequence is synthesized)
aacaaaagcaacactgtgaatagtactacccgtgctggtcctcttgctatgacggcaattactgggtatttatcccaacaaaagtagatacagtagatgtcttgtaaaacaatagtgctg

SEQ ID NO: 428433 - DNA, 120 bp, Artificial Sequence
  ENSG00000151789_17 (sequence is synthesized)
tgtctcaatctatgccactaggttttaaagaattgcaaaggtagaatgaacaactatttcataccaataagcagtcaaaaaataaacatacaccggatggtgtcatggaggtctccctgg

SEQ ID NO: 428434 - DNA, 120 bp, Artificial Sequence
  ENSG00000151789_18 (sequence is synthesized)
tcagcattctcccctcctgtctagcttgaagatataacagggctaagcttagagatgggggaggcattaataaaggtgatttcttataaagtagtaacttcccaccctgaagatatattg

SEQ ID NO: 428435 - DNA, 120 bp, Artificial Sequence
  ENSG00000151789_19 (sequence is synthesized)
ctggaaacagggaagtgtttataatgaacctatatctgaaagcagagaaacccatgcatcatgagtgttaagaaagaaatcaatacaactcttctatttcaaggatgaagaatcataacc

SEQ ID NO: 428436 - DNA, 120 bp, Artificial Sequence
  ENSG00000151789_20 (sequence is synthesized)
tagaatgataatgcaaagtaaagatctttcatttagtacatatccagtaaaaacggagaatgttgcatctctgcagtatcccctttatatcataccagtagggttgtttcttaggcaaag

SEQ ID NO: 428437 - DNA, 120 bp, Artificial Sequence
  ENSG00000151789_21 (sequence is synthesized)
gtttctgctttaagtatgatggtagaattaagcattagctatttttatgggtttttcttgttttttagattacctgctgacatgatataaacaattaatatatatttaaatgttaataac

SEQ ID NO: 428438 - DNA, 120 bp, Artificial Sequence
  ENSG00000151789_22 (sequence is synthesized)
aacaggaaatatgaatctgagttaattgcacaccaatgacatagtgttaaaaaatactggtaagttccactcgacaattatttctccagtggagttgtgaaatactgagagcctttgata

SEQ ID NO: 428439 - DNA, 120 bp, Artificial Sequence
  ENSG00000151789_23 (sequence is synthesized)
ttcaccatcaggctgaaagaagttgatgttttacctttaaaacaagatttatcaggggtatatataaatatatgtatattgtatatatgttagaaagattaagagaataagttataaaaa

SEQ ID NO: 428440 - DNA, 120 bp, Artificial Sequence
  ENSG00000151789_24 (sequence is synthesized)
gaaaaaatctatataaaataattatataaccatccagtgttacatgttatcattaaattggtaacaaatggcataaaaatagctgtgcctttaatttgtgataaaggctatttgcttttt

SEQ ID NO: 428441 - DNA, 120 bp, Artificial Sequence
  ENSG00000151789_25 (sequence is synthesized)
cccatagaaagctgacatatacctatcaaaatggtggggtttgatgcagccagtctgttgcattaataagagcaatgacactgaaacttagaataatgacaaaacatacatgatttaggt

SEQ ID NO: 428442 - DNA, 120 bp, Artificial Sequence
  ENSG00000151789_26 (sequence is synthesized)
ttagagaaaaaactatttttgaaaaggttttctaaagactatttaaaaatatagggaaggattgggtgtggccttcctgaaactgctctcaaagtgttgtaacccttggagaggtataaa

SEQ ID NO: 428443 - DNA, 120 bp, Artificial Sequence
  ENSG00000151789_27 (sequence is synthesized)
gaatcaagaggaaaccatttgagacataggtatttagcatttatcattttatatttaagaaacaccatagcgtgcttggtgctcaacattaaacatggttttttggagttcttctccacc

SEQ ID NO: 428444 - DNA, 120 bp, Artificial Sequence
  ENSG00000151789_28 (sequence is synthesized)
atctagctatagaaatttgtcatataaatgaatctttaaagcagttggctttatatatcctttgttaaccaaccaaaacaaaaacaaaaaaaaagaaggaaagaaggaaggaaggaagga

SEQ ID NO: 428445 - DNA, 120 bp, Artificial Sequence
  ENSG00000151789_29 (sequence is synthesized)
agaatggaaggaaggaaggaagaaaggagggaaggaaggaaggaaaggagatggggaagggaagaaaaggaaggaaggaagaaaggaagataatgtgttccatcagtattctggtagaaa

SEQ ID NO: 428446 - DNA, 120 bp, Artificial Sequence
  ENSG00000151789_30 (sequence is synthesized)
gaatttcaaaccatgcttctctggttaaatatattgattagcattaaaatttgttttgaaagtatctggtgattttgcatttaccagcatctctattctctagttttagcaagtgtttcc

SEQ ID NO: 428447 - DNA, 120 bp, Artificial Sequence
  ENSG00000151789_31 (sequence is synthesized)
tttttcacctacagaccctggtagttcagccaggtggatagttgcccataagtctgttgtttggggctctgtctgtatcccatgtgaccagcttctaaccattttgaactttagtttccc

SEQ ID NO: 428448 - DNA, 120 bp, Artificial Sequence
  ENSG00000151789_32 (sequence is synthesized)
ttttctgctatgtcaaatattttgattttccataatcatcctgagtccctatccaacaacctttacaactgatacagcctcactttctgttagataacttagtgttaattaaagcagtct

SEQ ID NO: 428449 - DNA, 120 bp, Artificial Sequence
  ENSG00000151789_33 (sequence is synthesized)
cactaaaacgtgcttttgctgttctttcccattttcaccaaagtgaatgagccagtccactaaaaatcagggcctatgggatacacagtgtcctgggtcacaaggcattactgtctttaa

SEQ ID NO: 428450 - DNA, 120 bp, Artificial Sequence
  ENSG00000151789_34 (sequence is synthesized)
tgatttgctgggaacaaacgaatcagccatattttctccatcagccatataagaaatctcagaaatacctggatcccttctgcctcacttcgctatggaaccatttttgtttaaatggtc

SEQ ID NO: 428451 - DNA, 120 bp, Artificial Sequence
  ENSG00000151789_35 (sequence is synthesized)
ttttaaattggagttgtaagcatcagttgtcttttattcactacctaataaaggatgaagcctaaccacagaacttacagtggattctctgtgagttgtttcccccacactccatatatt

SEQ ID NO: 428452 - DNA, 120 bp, Artificial Sequence
  ENSG00000151789_36 (sequence is synthesized)
taccaataccagattaacatccattatagttcaggctgccataaaactgtatcttttcccttagggaacttttttcatgaataaagatccacaatttagattggtcagcagtgtgctgtg

SEQ ID NO: 428453 - DNA, 120 bp, Artificial Sequence
  ENSG00000151789_37 (sequence is synthesized)
aaaatccctgagggtggtctgactttatggttttacattccttcccatgcatcacaccatggcaaggaaagtgatagagaaagcagctctgattcatttgaaacaaatataaatgcattg

SEQ ID NO: 428454 - DNA, 120 bp, Artificial Sequence
  ENSG00000151789_38 (sequence is synthesized)
cagaagccaaatgcctctggaaaaagcattgttgcacctcaatcagatcgtccagacaaatgggaaacagtcattggggaggtactgtatttctcttatgagaaaacaggcaattacaca

SEQ ID NO: 428455 - DNA, 120 bp, Artificial Sequence
  ENSG00000151789_39 (sequence is synthesized)
tgataaattgctcctctcactggacctcaactttgaagagtactttttttattcacataagcaaacatacttggcttttggcaatttatatcacccctgcctcatttgaaaggatttcta

SEQ ID NO: 428456 - DNA, 120 bp, Artificial Sequence
  ENSG00000151789_40 (sequence is synthesized)
tctttaggtactatttggcttctcctgatctatcgcagtaattcactgccattatcatcagagatgaaatttggtttttctaaaggtgctacatattttgttgccaagaaactagttagc

SEQ ID NO: 428457 - DNA, 120 bp, Artificial Sequence
  ENSG00000151789_41 (sequence is synthesized)
aaaggagtatttatatgtacttgaaaattaaaagagcaggaaatcataaaagactaagaattaaaagacagcagaagtttcaaaatagaatcaaagaggctgtgcctatttgagtttcta

SEQ ID NO: 428458 - DNA, 120 bp, Artificial Sequence
  ENSG00000151789_42 (sequence is synthesized)
aggcacaaaccaacacatagtagacatgagcaataaatatcaccaattacaattaaattttaaattaatatctttgtctttgtaccagtgtaatgtttcaattgttctgaagaaatcaga

SEQ ID NO: 428459 - DNA, 120 bp, Artificial Sequence
  ENSG00000151789_43 (sequence is synthesized)
tgtttctttagatctgaattgaagtagaaaattacctttctatacataagcatggatgacattgtattaataactttgttcacccaaaagccgcatgaagtggtgggaaaagcaatgagg

SEQ ID NO: 428460 - DNA, 120 bp, Artificial Sequence
  ENSG00000151789_44 (sequence is synthesized)
agccttagagtagccagagtctattgtagactttgtccctgaccaacagggtaacttaaatagtcaactaatgccttgcccttaatttcttcatcagtaaaatggatgacagtgattaat

SEQ ID NO: 428461 - DNA, 120 bp, Artificial Sequence
  ENSG00000151789_45 (sequence is synthesized)
agctaagctggtttaatacatcagcactagaggggcattgcttttatcctctcaggaataaaaattctttattcgagtgaccaatgcagctactcacatacttgcatatgtccagaaaaa

SEQ ID NO: 428462 - DNA, 120 bp, Artificial Sequence
  ENSG00000151789_46 (sequence is synthesized)
tattctgtattcctttccatcctgagtgtaagccatattgtaggtcattcatatgctcaaccagaatgtacatttcaccaatattggagtagttgctaattcacttagtactcacttatt

SEQ ID NO: 428463 - DNA, 120 bp, Artificial Sequence
  ENSG00000151789_47 (sequence is synthesized)
atgatcgcacttatgccaacatcatgtaagatatgctacttctattttcccagtcaagaatgtaataaattctgaacaaaaccaaccctgaaaaaggcaatagacagctggcagtggggg

SEQ ID NO: 428464 - DNA, 120 bp, Artificial Sequence
  ENSG00000151789_48 (sequence is synthesized)
tgtggaagggaacaacaatttaaatgcatcatccttatttcttttgttgcactttctctcttcaataggaaggggtcccgactaagccataactaattctgtcctgcgtttgcatgtatt

SEQ ID NO: 428465 - DNA, 120 bp, Artificial Sequence
  ENSG00000151789_49 (sequence is synthesized)
ttaactaatggttgccttattaagaccatctcttccacagacaagtatatcagttatgcgctcttgtcattgttacaggaattatttaaactgagtcctaacagtgaaagttttacctga

SEQ ID NO: 428466 - DNA, 120 bp, Artificial Sequence
  ENSG00000151789_50 (sequence is synthesized)
cttttgctgatttttttttctttctacatggggagatttatctctggagcatctcttgtgtttttgtatggtttgcttcagtagctagagaggctactatcaggaagtgaaatggatcat

SEQ ID NO: 428467 - DNA, 120 bp, Artificial Sequence
  ENSG00000151789_51 (sequence is synthesized)
ttctaatggtaggtctccattgcctacatggtatttctgagagtggtatcagggtgtccagtgaaagacggataggttgacatgtcatgctcatttggcctaaaggttgttactgccagg

SEQ ID NO: 428468 - DNA, 120 bp, Artificial Sequence
  ENSG00000151789_52 (sequence is synthesized)
gttactgccaggaatggacttacaacttaccagaatgtgaatggtgacaaaaggcaggttctactctggaaaaatatgtgttattttattagaagttcatggccgggcgcggtggctcac

SEQ ID NO: 428469 - DNA, 120 bp, Artificial Sequence
  ENSG00000151789_53 (sequence is synthesized)
aaaaaaaaaaaaaaaaaagaagttcatgcaggtcatgaagagtcacagagtttaaagaattctctggttgggtcatcaatgttcagatgtcaagggactgaacattaccttcaatttgag

SEQ ID NO: 428470 - DNA, 120 bp, Artificial Sequence
  ENSG00000151789_54 (sequence is synthesized)
actgaacattaccttcaatttgagggtcttctctttcctcttctcagtgatggaaactcatccttcctaggtggctaagttgactgtagaaactgctaaaatgtatttgtcaaacgaagt

SEQ ID NO: 428471 - DNA, 120 bp, Artificial Sequence
  ENSG00000151789_55 (sequence is synthesized)
aaaatctgactattaatatatatgatcaggtagagtatcttagagtttggttaactaagacagccgataatggggtcatgttattttcagactggcaggtcatctctaaaggcaattttt

SEQ ID NO: 428472 - DNA, 120 bp, Artificial Sequence
  ENSG00000151789_56 (sequence is synthesized)
aaagattagggctaaaatgatttgtgagcaaagaagtataattaaaaataagtaatagtatagtgacgagttctaaggttaatgcttatatacgcacacacatacagaattgtaaaaata

SEQ ID NO: 428473 - DNA, 120 bp, Artificial Sequence
  ENSG00000151789_57 (sequence is synthesized)
tgagtcttagtacctgtcattcttttacaaagccatggtaaaatcattttattttcaatgattaggttggttttactttaacaaaaggaactccaatgtcacacttgggagtcttaatca

SEQ ID NO: 428474 - DNA, 120 bp, Artificial Sequence
  ENSG00000151789_58 (sequence is synthesized)
ttttggggcattaatcattttagggcattggaggggctgggaagtagatataatgttaagatgttatgcactctagcaagactattatgctaacagtttgagttgggtcatacaattgta

SEQ ID NO: 428475 - DNA, 120 bp, Artificial Sequence
  ENSG00000151789_59 (sequence is synthesized)
tcatttcacatcagctactgactttgagtactgactttgaatgcttataaaatcttcctcaaatccaggtagtgtgcaggacatggtataacaagacaacggaaaattagcagagagagc

SEQ ID NO: 428476 - DNA, 120 bp, Artificial Sequence
  ENSG00000151789_60 (sequence is synthesized)
cttcattggaaacccagattgtatttttgccagtacaacaaatattatttttaaagtctctcactaataggattgttcaacataaatctattgagaaacaatgatgtcagagagttttaa

SEQ ID NO: 428477 - DNA, 120 bp, Artificial Sequence
  ENSG00000151789_61 (sequence is synthesized)
agctatagtgaagtgtgttaaattttgttaaccaaaataatgatatgggttttattggacgtttgtcaacccaacttaacacacattgttatataatttcagtataggaccctagggcta

SEQ ID NO: 428478 - DNA, 120 bp, Artificial Sequence
  ENSG00000151789_62 (sequence is synthesized)
ggggcaactaatattggataaagacccttcgtgagatgctttatgtctcttatgatgttatgctaacattagtagagatgaaaaaggaattgagttcgtgagatcctggaaagtttaact

SEQ ID NO: 428479 - DNA, 120 bp, Artificial Sequence
  ENSG00000151789_63 (sequence is synthesized)
tttatcaaatagtcaagaaaaattccattttatggcatctggtttttaaatggattatagaaaaatgtgtggaagtactggatattggcgaaaaagccttgtggccaagggatctgggca

SEQ ID NO: 428480 - DNA, 120 bp, Artificial Sequence
  ENSG00000151789_64 (sequence is synthesized)
caagatcgagcatcacagaacagtgaacacagttgttggcttcactaccaatcatctacgaggaaactgggccaattcacttgacattttgatgattctctctgataaaaatagggataa

SEQ ID NO: 428481 - DNA, 120 bp, Artificial Sequence
  ENSG00000151789_65 (sequence is synthesized)
tgactgattacagaaatgtgcttttaaaaaagctgaatttagtaaaagcaagtcatttgctactcaaaatagctccaaaatctaagccatatttctataaatttcataaagtcgttttaa

SEQ ID NO: 428482 - DNA, 120 bp, Artificial Sequence
  ENSG00000151789_66 (sequence is synthesized)
aatgtgacttatagttacagcgtttatattactacatatttaagatggaactgacctgatgccaaagctacatcatttgtagctatattagctttctcttttgtcctgaaaaaaggttgg

SEQ ID NO: 428483 - DNA, 120 bp, Artificial Sequence
  ENSG00000151789_67 (sequence is synthesized)
agtgtttttaaaaatatagtttttaatctgcacatggagctatatgcaaagaacattgtttcttcggggaatatttttagtcatagtttctttcatttattttatcagcaaaaatcttat

SEQ ID NO: 428484 - DNA, 89 bp, Artificial Sequence
  ENSG00000151789_68 (sequence is synthesized)
aaatccacagcaatttttattaaataaaagcctaggtgagaaaaataagttatatcctagcacatgaaacttagtcaataatttcttct

SEQ ID NO: 428485 - DNA, 120 bp, Artificial Sequence
  ENSG00000151789_69 (sequence is synthesized)
ttatatcctagcacatgaaacttagtcaataatttcttctaataatatttaattcactgaaattttacaacaaattttaaatcgactaccaagagtggtcagtcggggaaaatttagtgt

SEQ ID NO: 428486 - DNA, 120 bp, Artificial Sequence
  ENSG00000151789_70 (sequence is synthesized)
tatccaatgtatgatgaaatattcagctctcacaaaaactggatgtttggctattttaaaatggctgttcttcacaataaaactacaaacagacactgtcgaataaattgagtgataagt

SEQ ID NO: 428487 - DNA, 120 bp, Artificial Sequence
  ENSG00000151789_71 (sequence is synthesized)
atgtctatttactaacatgagccaatttgaactttagttttgagatctaaaaatattttaatccacatgcatttagtgactataaattgaaggcagtgttcttttgacaaccaagcttat

SEQ ID NO: 428488 - DNA, 120 bp, Artificial Sequence
  ENSG00000151789_72 (sequence is synthesized)
tgaaaactttggcattaatgttcacaaacatgagcactattttgaaattaaaaatagactatggtttgctctacatgcttgtgaccctgcaaaaaataaaggaaaaatattcatgctatt

SEQ ID NO: 428489 - DNA, 120 bp, Artificial Sequence
  ENSG00000151789_73 (sequence is synthesized)
tttctcctcttatattcttatggcttaaaaaatataaccagggttttatctaatatcaatctcttggcaaaggatcatataaggttttacctgctaacaagaatacctcatttgaaagag

SEQ ID NO: 428490 - DNA, 120 bp, Artificial Sequence
  ENSG00000151789_74 (sequence is synthesized)
cattaccacaagcattggagggaggtacagttgacatggtgaatttgattttacaaaaactaacaaagctggggggtggcaaagcattgacttaactataatcactagtcacaccaatgt

SEQ ID NO: 428491 - DNA, 120 bp, Artificial Sequence
  ENSG00000151789_75 (sequence is synthesized)
gagattccgaatcattggtcagccacagtgatgccaccttggcatcaaacttgcctgttccatctttatcaatgtatctggaagtctgacttgagtaccagaagccaaaacgctcagaat

SEQ ID NO: 428492 - DNA, 120 bp, Artificial Sequence
  ENSG00000151789_76 (sequence is synthesized)
gctaatttgtgccaccttaatggcccatgtgttcggtaaataaatttgctttttacatctcgtcaaatcttactgaataaacctttcatcagagttctacatatccccaggtgggcttgg

SEQ ID NO: 428493 - DNA, 120 bp, Artificial Sequence
  ENSG00000151789_77 (sequence is synthesized)
aaacgtgagataggattttattgtgttttatattatgatagttgaatgatgattctatatgttattgttatatttgttttcattaaaaacccaaagaactaccctttgtataccagtaaa

SEQ ID NO: 428494 - DNA, 120 bp, Artificial Sequence
  ENSG00000151789_78 (sequence is synthesized)
gtactattttttcttgaaaaaaagtaataataataataattaaggcaattcacatagtttgttttatgccagtcttctgttttaagtcatgtgataacatctccccaaacatcaatttct

SEQ ID NO: 428495 - DNA, 120 bp, Artificial Sequence
  ENSG00000151789_79 (sequence is synthesized)
caccctacatgatatgtgataaaatcccccatatgccaataatttcccccactataaaatgaagctgcttccaatattattgactcagaaatgtaaaatatagcacagtttatcttgtct

SEQ ID NO: 428496 - DNA, 120 bp, Artificial Sequence
  ENSG00000151789_80 (sequence is synthesized)
gtggtcctgtactaagttaaacttgcagctgtgaacaaattaatatttatttttattaggaattctttaagatgaattttcagttttagtaaaagaaagacaccagtgatatttttatgg

SEQ ID NO: 428497 - DNA, 120 bp, Artificial Sequence
  ENSG00000151789_81 (sequence is synthesized)
atgaaagctctctggttccttcagcagctctaggaacatccttagccattatatcctctctctttgacaatatcaaaattgtccaggtaaatgtaatattgccagtggtgtcaagacatt

SEQ ID NO: 428498 - DNA, 120 bp, Artificial Sequence
  ENSG00000151789_82 (sequence is synthesized)
ggtctgttcatgtccttattcttcgcttggtttgtggaatcaaaatggttgcttattttcctctcttctgtagataatccataggcaatgttttcaatttgggaaactttttttttcaac

SEQ ID NO: 428499 - DNA, 120 bp, Artificial Sequence
  ENSG00000151789_83 (sequence is synthesized)
ttggtttaagtttgaaggctctaaggaagaggaatattagaacaaattatgtattctctatgttctattccacttgtttgtaatatactcctgttctgagagttatggtaaacctatata

SEQ ID NO: 428500 - DNA, 120 bp, Artificial Sequence
  ENSG00000151789_84 (sequence is synthesized)
acacgactgttccaagtgccaagtgagaattgtagtgactcacagaacacgtctcatgactatttatcaaaagaaatgtgctgattaaagaaaaaaagtaaaatatcttattttcattca

SEQ ID NO: 428501 - DNA, 120 bp, Artificial Sequence
  ENSG00000151789_85 (sequence is synthesized)
gtgagtgcgtgtgcttgtgagagagagaggagacagacagatttcacctgtgtacacgatggcgagagtgaggctgaattaatacctgatgactttgaagaaaaaccagaaagagaaaag

SEQ ID NO: 428502 - DNA, 120 bp, Artificial Sequence
  ENSG00000151789_86 (sequence is synthesized)
aaacataccaactttactttgtgcaatgtatgtaacattcagctgaattcagccgctcaagcacaaatccactacaatggcaaatcacatcaaaagagattaaaacaactcagcaatggg

SEQ ID NO: 428503 - DNA, 120 bp, Artificial Sequence
  ENSG00000151789_87 (sequence is synthesized)
gaactatttttttaaaccaggaaaaatattacttaaaatttttatcagcagagtacattaaaatacatcatttctctttgagagtgaaggagaaattttgcatacttaattgtattaggg

SEQ ID NO: 428504 - DNA, 120 bp, Artificial Sequence
  ENSG00000151789_88 (sequence is synthesized)
ttgtgacctgcagaaaatttactatttttgagttgttagagttttagagtttcttgatgtgtgccttcagtatagttatgtgtggaaatagacatccttttacagtgtataggacagtgg

SEQ ID NO: 428505 - DNA, 120 bp, Artificial Sequence
  ENSG00000151789_89 (sequence is synthesized)
cagattttcatacaaaaagaggttgtttttttttctggcaatattatctgtcacaattatcccttcacttagtagttagaagtcggggggtgctaagagcaatttccacagatgctttgt

SEQ ID NO: 428506 - DNA, 120 bp, Artificial Sequence
  ENSG00000151789_90 (sequence is synthesized)
ttgtggagaaaagtaggatggcccctctgcttgtcttagtgcagagcaaggaatggcttcgaagccattccttgagtactgaggtctctgtgtagtcttacttcttttctgaatttttca

SEQ ID NO: 428507 - DNA, 120 bp, Artificial Sequence
  ENSG00000151789_91 (sequence is synthesized)
gagtcttctgatagttgcttgatatattttgtctatggttttcagttctatgtagtagaaagaatagagtatctccccccagtcctctaagtagaaataaaaattaatataaaaaattaa

SEQ ID NO: 428508 - DNA, 120 bp, Artificial Sequence
  ENSG00000151789_92 (sequence is synthesized)
atacaccatcaatttcaaagatgtcaaaatgggaaaagatcagcatcttaaaatggaagaatatatttaaggtacttacaaatagcacttaatataagttgtttatcattttatcatgaa

SEQ ID NO: 428509 - DNA, 120 bp, Artificial Sequence
  ENSG00000151789_93 (sequence is synthesized)
atcttcattgctgttgtaattaaaattaatagtatatcaacacataaaatagagataacagatgtattgaagaagttcatctgtaacttcccaaataaatttattgtggaaaaccataaa

SEQ ID NO: 428510 - DNA, 120 bp, Artificial Sequence
  ENSG00000151789_94 (sequence is synthesized)
agatggacccgattcagaaagctgtaataaaccatacattcggggttcctcttccccaccgaagaaagcaaatcatatcatgcaacatttgccagttgagatttaattctgatgtctgtg

SEQ ID NO: 428511 - DNA, 120 bp, Artificial Sequence
  ENSG00000151789_95 (sequence is synthesized)
tcactttgggtcataattaaacaattgcaggcttgaccatttaccagatgattattgtattagtcttctattgctgctaaaataaatcaccacaaactcagtggcctgaaacaacacaaa

SEQ ID NO: 428512 - DNA, 120 bp, Artificial Sequence
  ENSG00000151789_96 (sequence is synthesized)
gaccaccgccgttgaagctgcaggcgggcagccgtgcgtctcccgggacagccagccccggcggctgctcctcccggatgccagggccagggcgccgggcggccgccagcaggagaatga

SEQ ID NO: 428513 - DNA, 120 bp, Artificial Sequence
  ENSG00000151789_97 (sequence is synthesized)
acagctctgcaattatcttcctctgaatagattagatcttttgcagcaggggacaaaggggtggaggaaaactggcaattattacatggaaatcattaaccattaaaaaataaaaatgac

SEQ ID NO: 428514 - DNA, 120 bp, Artificial Sequence
  ENSG00000151789_98 (sequence is synthesized)
tgcagtagcttcaccagatttcgttgcgtctgctgtccaagattgttgaggttagcgttatttatagttaaatatgagagttgagagtgtgggggaagttgttgtctggtactgcaccca

SEQ ID NO: 428515 - DNA, 120 bp, Artificial Sequence
  ENSG00000151789_99 (sequence is synthesized)
aaccaggaggataaaggaggccgcgggcccctcccttcgcgcgggctcgcacctctccccagcctggtgcacctgggctgacgccggctcgggactcgtgcggagcgccgcgagcgcggc

SEQ ID NO: 428516 - DNA, 120 bp, Artificial Sequence
  ENSG00000151789_100 (sequence is synthesized)
attctattagtcaaactggtcacaaaaccaagtacaaaataaggcagtagttgaaatataatatgccttattagggaaaagaattgcaaagttgcatggcagagggcatggatatgaaga

SEQ ID NO: 428517 - DNA, 120 bp, Artificial Sequence
  ENSG00000151789_101 (sequence is synthesized)
tttaattctgatttccggaggctgagaagtccaagatcaaggtgctgacaaattcactgtctggtctgtgtggcatgtcgtaaaaggaacatggccaaggtatttggagatatggactaa

SEQ ID NO: 428518 - DNA, 120 bp, Artificial Sequence
  ENSG00000151790_0 (sequence is synthesized)
aggtcaatgatagcatctgcctagagtcaaacctccgtgcttctcagacagtgccttttcaccatgagtgggtgcccatttttaggaaacaactttggatatacttttaaaaaactcccc

SEQ ID NO: 428519 - DNA, 120 bp, Artificial Sequence
  ENSG00000151790_1 (sequence is synthesized)
gtagaaggcagcgaagaagacaaatcacaaactggtgtgaatagagccagcaaaggaggtcttatctatgggaactacctgcatttggaaaaagttttgaatgcacaagaactgcaaagt

SEQ ID NO: 428520 - DNA, 120 bp, Artificial Sequence
  ENSG00000151790_2 (sequence is synthesized)
gaaacaaaaggaaataaaatccatgatgaacatctttttatcataactcatcaagcttatgaactctggtttaagcaaatcctctgggagttggattctgttcgagagatctttcagaat

SEQ ID NO: 428521 - DNA, 120 bp, Artificial Sequence
  ENSG00000151790_3 (sequence is synthesized)
ggccatgtcagagatgaaaggaacatgcttaaggttgtttctcggatgcaccgagtgtcagtgatcctgaaactgctggtgcagcagttttccattctggagacgatgacagccttggac

SEQ ID NO: 428522 - DNA, 120 bp, Artificial Sequence
  ENSG00000151790_4 (sequence is synthesized)
ttcaatgacttcagagagtacttatctccagcatcaggcttccagagtttgcaattccgactattagaaaacaagataggtgttcttcagaacatgagagtcccttataacagaagacat

SEQ ID NO: 428523 - DNA, 120 bp, Artificial Sequence
  ENSG00000151790_5 (sequence is synthesized)
tatcgtgataacttcaaaggagaagaaaatgaactgctacttaaatctgagcaggaaaagacacttctggaattagtggaggcatggctggaaagaactccaggtttagagccacatgga

SEQ ID NO: 428524 - DNA, 120 bp, Artificial Sequence
  ENSG00000151790_6 (sequence is synthesized)
tttaacttctggggaaagcttgaaaaaaatatcaccagaggcctggaagaggaattcataaggattcaggctaaagaagagtctgaagaaaaagaggaacaggtggctgaatttcagaag

SEQ ID NO: 428525 - DNA, 120 bp, Artificial Sequence
  ENSG00000151790_7 (sequence is synthesized)
cttatttgatgagaaacgtcatgaacatctccttagtaaaggtgaaagacggctgtcatacagagcacttcagggagcattgatgatatatttttacagggaagagcctaggttccaggt

SEQ ID NO: 428526 - DNA, 120 bp, Artificial Sequence
  ENSG00000151790_8 (sequence is synthesized)
gccttttcagttgctgacttctcttatggacatagattcactgatgaccaaatggagatataaccatgtgtgcatggtgcacagaatgctgggcagcaaagctggcaccggtggttcctc

SEQ ID NO: 428527 - DNA, 120 bp, Artificial Sequence
  ENSG00000151790_9 (sequence is synthesized)
aggctatcactacctgcgatcaactgtgagtgataggtacaaggtatttgtagatttatttaatctttcaacatacctgattccccgacactggataccgaagatgaacccaaccattca

SEQ ID NO: 428528 - DNA, 120 bp, Artificial Sequence
  ENSG00000151790_10 (sequence is synthesized)
caaatttctatatacagcagaatactgtgatagctcctacttcagcagtgatgaatcagattaaaatcgtctgcaaaatctatgaagaatactggtttcacagcctattttttattttct

SEQ ID NO: 428529 - DNA, 120 bp, Artificial Sequence
  ENSG00000151790_11 (sequence is synthesized)
atggattttcataaatacagtttgaatatatgtatgcatatattgttcagcaccacgatgctctgatttaattctagaaacaatttgattacctcttgtttgtgacaagactaagcatta

SEQ ID NO: 428530 - DNA, 120 bp, Artificial Sequence
  ENSG00000151790_12 (sequence is synthesized)
agatgagaaagaatacatttaaatagtaacattgtacatagggtgttttcctattaaaaattcagtttcccctgagacttaatgtaaccacttaatgtaatcactatctcattgtttcat

SEQ ID NO: 428531 - DNA, 120 bp, Artificial Sequence
  ENSG00000151790_13 (sequence is synthesized)
tcatctttataaacttgtaaacttcatctatttcaaatattttatgcagtacattatattattctgtacaaaggctttcaaacaaaatttttaaaataataaagtattaatctttctccc

SEQ ID NO: 428532 - DNA, 120 bp, Artificial Sequence
  ENSG00000151790_14 (sequence is synthesized)
gtggtagctcacccacactgcaatccatctgctgactcaacttgctagtatcgggcagcagccaggaccacagctcctccagctcctttgtgaccttttccttcagcttcttcaaatact

SEQ ID NO: 428533 - DNA, 120 bp, Artificial Sequence
  ENSG00000151790_15 (sequence is synthesized)
gggttagacacctgcctggaatatagtgagtgttaggataaagtaaacatagaccagaggaagaagtcaaatacgcatttgcctcagccacattcagttgccagagagcaggcaccaaat

SEQ ID NO: 428534 - DNA, 120 bp, Artificial Sequence
  ENSG00000151790_16 (sequence is synthesized)
catctagatgtgtttccctgccttaccaattctttgtgttctttcctcaaatggatgctttccaatgtgattgagtaaattaataaactctggtaaagaaattaaaagttaaaaaactgg

SEQ ID NO: 428535 - DNA, 120 bp, Artificial Sequence
  ENSG00000151790_17 (sequence is synthesized)
cttaatgtgtcagttctcctgtttttatgtttatacttttatgggtggcttataccgaggcaatatcaataggagaagaatcatggtatggtagcataaattaggaatttaaaaattgtt

SEQ ID NO: 428536 - DNA, 120 bp, Artificial Sequence
  ENSG00000151790_18 (sequence is synthesized)
tagtatctcagttctactgttataaattgtgtgactctggtcaagttgcttagatctcaggacctccatttccccatacgtaaaatggagagaattactgatgctctcacttacagagtt

SEQ ID NO: 428537 - DNA, 120 bp, Artificial Sequence
  ENSG00000151790_19 (sequence is synthesized)
cctaggaagataaataagataatgtgcatcaagcatttagcccgaggtatagcacataataaacatgcaacaaatggtagctatcattattttataaaaacacttttcttctattcttta

SEQ ID NO: 428538 - DNA, 120 bp, Artificial Sequence
  ENSG00000151790_20 (sequence is synthesized)
gttataacatgtaggcagtggttacatagggttaaaaaagatatacataaactgatcaataaatgtttgattgttctttgctcaaatataaaaattaggtcccccaaagtctttttaaac

SEQ ID NO: 428539 - DNA, 120 bp, Artificial Sequence
  ENSG00000151790_21 (sequence is synthesized)
ataacttagagttataattggattctcttaattagtatggaaacattgcctttatccatatgattgaaccaaataggatgcactgaagatctctaagattattgacttcctgtgtcatct

SEQ ID NO: 428540 - DNA, 120 bp, Artificial Sequence
  ENSG00000151790_22 (sequence is synthesized)
aattattacattgtctatttaatttattcataaaaataaaaataatcacccaatatttactttatgcctgacactgtgctaggtaatgaagaaaaatggatgagtatgagtaagtcctta

SEQ ID NO: 428541 - DNA, 120 bp, Artificial Sequence
  ENSG00000151790_23 (sequence is synthesized)
gtttctagtgacaaagaatactatgggaaggacaaatcaacggggagaaccatttatatttgctatgaatcatctagcaacacaaaggagtcaaaatgtctatccatgtctaccatactg

SEQ ID NO: 428542 - DNA, 120 bp, Artificial Sequence
  ENSG00000151790_24 (sequence is synthesized)
ctgtaagtcttaaggttttgaatcataggtttccaattgtaggtgggtaactgatcattttgcaaatgaatcaactgaagttaaagaaaatggttttgccccaattgacacagcccgtca

SEQ ID NO: 428543 - DNA, 120 bp, Artificial Sequence
  ENSG00000151790_25 (sequence is synthesized)
cttcagatagattgattccaactatgcttcttccaacatgtcattactgtatcacttttctttaatgccaatgttactgtttgacagcccgtagtaaaaggggagaacaaacttaatcct

SEQ ID NO: 428544 - DNA, 120 bp, Artificial Sequence
  ENSG00000151790_26 (sequence is synthesized)
tcgacagaaaagctttggcagtattcaggtttgaacaaataaaccttggactcatggaaattctgaaagatgatctactggataatgtgaactcaattgccacaaagttcccccgggaat

SEQ ID NO: 428545 - DNA, 120 bp, Artificial Sequence
  ENSG00000151790_27 (sequence is synthesized)
tagctgttacagtaatatgaagctttgccattttcctttgaccacaaacatctggccgctttcccatatgtgctaagtctatgagttgctaggattttcacaaataaaacaaacagacaa

SEQ ID NO: 428546 - DNA, 120 bp, Artificial Sequence
  ENSG00000151790_28 (sequence is synthesized)
aatgctgcattttaagtaacttagctttgtattttcaagttcttaaaatcctacagtctttcatttaggttaggaaatattaatttctcagtgtgtagatgaagttgattatcacttctg

SEQ ID NO: 428547 - DNA, 120 bp, Artificial Sequence
  ENSG00000151790_29 (sequence is synthesized)
cttccatagaggaagctagaattaggttatgtgctatatcctcaaagacctaaaaatgcatttgttgagaggaattagtgtaataataatgaatatgaagcattaggtaacatgtctagc

SEQ ID NO: 428548 - DNA, 120 bp, Artificial Sequence
  ENSG00000151790_30 (sequence is synthesized)
atattaaaacatttaataaaaggaggctattacaactttaacactaacatttatttctggcacacaatgggactatatttacatttattgattttaaggtaacattttaatttctctttc

SEQ ID NO: 428549 - DNA, 120 bp, Artificial Sequence
  ENSG00000151790_31 (sequence is synthesized)
aacatgttaaacatatctttcatataataatggccaaaaaggctcccataactttccaactgacaatgatttccttattacagcttatgaactctggtttaagcaaatcctctgggagtt

SEQ ID NO: 428550 - DNA, 120 bp, Artificial Sequence
  ENSG00000151790_32 (sequence is synthesized)
actgatataaggatttcaatagtcttctttatgttactcctctgctaataggtgaagtaggactttagctttgttcttaactccaaggggactttctgcctcttggaatttcactaggaa

SEQ ID NO: 428551 - DNA, 120 bp, Artificial Sequence
  ENSG00000151790_33 (sequence is synthesized)
ttcacaagtgaagatgttacgtttctcacttcggaacactaaaaaactattttcaagatcattgaaatttatgctggattgacataatcctatacaaatctagtaataaagacaaatgta

SEQ ID NO: 428552 - DNA, 120 bp, Artificial Sequence
  ENSG00000151790_34 (sequence is synthesized)
aattgtgtccaaaaatgtatgtttatcctttccagatttctataatgatttctgggcagtgggtttttttttagcctatgtgttcatgacttcagaagtttagaaggtccctgaactcca

SEQ ID NO: 428553 - DNA, 120 bp, Artificial Sequence
  ENSG00000151790_35 (sequence is synthesized)
aaattatgcacaaattttcatgaatattatcttaaagaggtctgtgaccccaaaatattagtaacatttactttaagcttttcagtaccactatactgacctcttaatgactggagccca

SEQ ID NO: 428554 - DNA, 120 bp, Artificial Sequence
  ENSG00000151790_36 (sequence is synthesized)
tgagatgggcttcacaatggaagatcaggcttccggtccattcctcgcctcttataacctgcacaactttagccaagtttcttagtcttataccttttctgtcaaatggcagcaatggta

SEQ ID NO: 428555 - DNA, 120 bp, Artificial Sequence
  ENSG00000151790_37 (sequence is synthesized)
attatctagatcataataagtactcaagggtattagctatttttattattctgctaatgtagtggtgatgtggtaaatagtaaaatattcaggaattttaaaaagctttaaaagtatctt

SEQ ID NO: 428556 - DNA, 120 bp, Artificial Sequence
  ENSG00000151790_38 (sequence is synthesized)
aaaaaattagttcttaatggctttatatatgttcataattaggtgaattaacttttatatcctttgccaaaataatacttttggaatataggtattcaactatccagcattaatttactt

SEQ ID NO: 428557 - DNA, 120 bp, Artificial Sequence
  ENSG00000151790_39 (sequence is synthesized)
acaagatgtttcaagcttcatttactattaaatcattatttaatacaacataaataaccaatcaattagctaagctttttattcagttataggacatatgctataaaaaggtgtctatta

SEQ ID NO: 428558 - DNA, 120 bp, Artificial Sequence
  ENSG00000151806_0 (sequence is synthesized)
agacgtcggcaagctgcgccgccgcttcgggttgcttccggatctggtacttgggcagagctccccggggttcattgtcttcgcttcacaggatctgtttgagtcctgtccaccggatcc

SEQ ID NO: 428559 - DNA, 120 bp, Artificial Sequence
  ENSG00000151806_1 (sequence is synthesized)
tacggggggtaccttcgaaaaaaaacgggctatgctgctgttgcgtgtgggtaccctctcctgacgcctccgccgcccgggtcatgtggaccctcgtgggtcggggctgggggtgcgcac

SEQ ID NO: 428560 - DNA, 120 bp, Artificial Sequence
  ENSG00000151806_2 (sequence is synthesized)
gcgctctcgcgccacgagccactggggccgcgcttctggtggccccggggccccggtccgcgccgacccttggggctgctccagagtcctgggctaccgacaggctctacagctccgcag

SEQ ID NO: 428561 - DNA, 120 bp, Artificial Sequence
  ENSG00000151806_3 (sequence is synthesized)
aattcaaggaaaaacttgacatgtctaggtttcctgttgaaaatattagaaatttcagtattgttgcacacgtggatcatggcaaaagtactttagctgacaggctcctagaacttacag

SEQ ID NO: 428562 - DNA, 120 bp, Artificial Sequence
  ENSG00000151806_4 (sequence is synthesized)
ggacaattgataaaacaaagaataataagcaggttcttgataaattgcaagtggaacgagaaagaggaatcactgttaaagcacagacagcatctctcttttacaattgtgaaggaaagc

SEQ ID NO: 428563 - DNA, 120 bp, Artificial Sequence
  ENSG00000151806_5 (sequence is synthesized)
agtaccttttaaatctcattgatacaccgggccatgttgattttagttatgaagtatccaggtcactttctgcttgccagggtgttttacttgtggttgatgcaaatgagggaattcaag

SEQ ID NO: 428564 - DNA, 120 bp, Artificial Sequence
  ENSG00000151806_6 (sequence is synthesized)
cccaaactgtagcaaacttctttcttgccttcgaagcacagctatcggtaattccagttataaataagatagatctgaagaatgctgatcctgaaagggttgaaaaccaaattgagaaag

SEQ ID NO: 428565 - DNA, 120 bp, Artificial Sequence
  ENSG00000151806_7 (sequence is synthesized)
tgtttgatattccaagtgatgaatgtattaagatttctgctaaacttggaacaaatgttgagagtgttcttcaggcaattattgaaagaatcccccctcctaaagtgcatcgcaaaaatc

SEQ ID NO: 428566 - DNA, 120 bp, Artificial Sequence
  ENSG00000151806_8 (sequence is synthesized)
ctctgagagctttggtatttgactccacctttgaccagtatagaggtgtgatagccaatgtagcattatttgacggagtggtttccaaaggagataaaattgtatctgcacatactcaaa

SEQ ID NO: 428567 - DNA, 120 bp, Artificial Sequence
  ENSG00000151806_9 (sequence is synthesized)
agacatacgaagttaatgaagtaggagtcttgaatcctaatgagcagccaactcataaattatatgcaggacaggtgggctatctgattgctgggatgaaagatgtcactgaagcgcaaa

SEQ ID NO: 428568 - DNA, 120 bp, Artificial Sequence
  ENSG00000151806_10 (sequence is synthesized)
taggagatacattatgtttacataagcaaccagtggagcccttgcctgggtttaaatcagcgaaaccaatggtatttgcaggaatgtatcctctagaccaatctgaatataacaatctga

SEQ ID NO: 428569 - DNA, 120 bp, Artificial Sequence
  ENSG00000151806_11 (sequence is synthesized)
agagtgctatagaaaaactgactttaaatgattccagtgtgaccgttcatcgggatagtagccttgctctgggtgctggctggaggctaggatttcttggacttttgcacatggaagttt

SEQ ID NO: 428570 - DNA, 120 bp, Artificial Sequence
  ENSG00000151806_12 (sequence is synthesized)
tcaaccagcgactggagcaagaatataatgcttctgttattttaacaacccctactgttccatataaagctgtactgtcatcatcaaaattgataaaggaacatagagaaaaagaaatta

SEQ ID NO: 428571 - DNA, 120 bp, Artificial Sequence
  ENSG00000151806_13 (sequence is synthesized)
caattatcaatcctgcacaattccccgataaatcaaaagtaacagaatatttggagccagttgttttgggcactattatcacaccagatgaatacactggaaaaataatgatgctttgcg

SEQ ID NO: 428572 - DNA, 120 bp, Artificial Sequence
  ENSG00000151806_14 (sequence is synthesized)
aggctcgaagagcagttcagaagaatatgatatttattgatcaaaatagagttatgcttaaatatctctttcctttgaatgaaattgtggtagatttttatgactctttgaaatccctat

SEQ ID NO: 428573 - DNA, 120 bp, Artificial Sequence
  ENSG00000151806_15 (sequence is synthesized)
cttctggatatgctagttttgattacgaagatgcaggctaccagactgcagaacttgtaaaaatggatattctactgaatggaaatactgtagaggagctagtaactgttgtacacaaag

SEQ ID NO: 428574 - DNA, 120 bp, Artificial Sequence
  ENSG00000151806_16 (sequence is synthesized)
acaaagctcattcaattggcaaagccatatgtgaacggctgaaggattctcttcctaggcaactgtttgagatagcaattcaagctgctattggaagtaaaatcattgcaagagaaactg

SEQ ID NO: 428575 - DNA, 120 bp, Artificial Sequence
  ENSG00000151806_17 (sequence is synthesized)
tgaaagcctataggaaaaacgttttggcaaaatgttatggtggtgatattacccgaaaaatgaagcttttgaagagacaagcagaagggaaaaaaaagctgaggaaaattggcaacgttg

SEQ ID NO: 428576 - DNA, 120 bp, Artificial Sequence
  ENSG00000151806_18 (sequence is synthesized)
ataaaagttctgaaaacacaatcttctaaataattggtgggaaaacaaagaattttcattgcaatttgtaatatgctgacaacagaaagaaaattataaaatttgcttgttactttcagg

SEQ ID NO: 428577 - DNA, 120 bp, Artificial Sequence
  ENSG00000151806_19 (sequence is synthesized)
gtattcaggttcaaataacctactagtctttcgttgaaagggagtagttagtgggtaggcaagagcttagattttgaagccatgttgcctgttctcaaatatctgttccaaccactcact

SEQ ID NO: 428578 - DNA, 120 bp, Artificial Sequence
  ENSG00000151806_20 (sequence is synthesized)
agtaaggtgaccgtggccagattaacctttgtttcctcttcagtaaaatcgagattatactactacctacataagttgttgttgtgaagattaaatgaggtaatacgttaaatattcaga

SEQ ID NO: 428579 - DNA, 120 bp, Artificial Sequence
  ENSG00000151806_21 (sequence is synthesized)
ggtgcaagacacatagtaagcactcaattgtaactacagttaagtccttaaatgccatcgaaaggttcttagaaactgactttaagcaaaatgacacgtagcacaatgttcttgaatgat

SEQ ID NO: 428580 - DNA, 120 bp, Artificial Sequence
  ENSG00000151806_22 (sequence is synthesized)
aatgttcttgaatgatgtcatttccttaagtggtttgtaacatcgatgaggaaaaaaaattggtttatgcgtcatttcattttatttttatttattttttgagacagagtcttgccctgt

SEQ ID NO: 428581 - DNA, 69 bp, Artificial Sequence
  ENSG00000151806_23 (sequence is synthesized)
ttacaggcgtgcaccaccatgctcggctaattttttgtatctttagtagagtcggggtttcaccatgtt

SEQ ID NO: 428582 - DNA, 85 bp, Artificial Sequence
  ENSG00000151806_24 (sequence is synthesized)
cctgacctcgtgatccacccaccgtggcctcccaaagtgccatttcatttaaagtcacaatttccatgaatctcaacaagtgagg

SEQ ID NO: 428583 - DNA, 120 bp, Artificial Sequence
  ENSG00000151806_25 (sequence is synthesized)
catttaaagtcacaatttccatgaatctcaacaagtgaggacctgctatattttgttgcatgcagtttttctttacggacactaaaaggccccatacttaagattccatctactttaagt

SEQ ID NO: 428584 - DNA, 120 bp, Artificial Sequence
  ENSG00000151806_26 (sequence is synthesized)
ttaaaggattttcagaatcaccttaagtgtcaaatttgttagcaggattaattgatatgaattcacttattaaacagtaaactcaaataacatagacatcaaataacagacatctgctct

SEQ ID NO: 428585 - DNA, 120 bp, Artificial Sequence
  ENSG00000151806_27 (sequence is synthesized)
agttaatgataaaatgtttatagattttatcaggtggttagtttgaaactaaatggtttacatctaaattaagggcaggagctgtctttcagacattcaaaacgcatttgtgtaaaatga

SEQ ID NO: 428586 - DNA, 120 bp, Artificial Sequence
  ENSG00000151806_28 (sequence is synthesized)
caggtgtttggtattaccaggaactcataatgacattttaataattattgtctaaatttcataatcgaagcgattttagagtagttaacttgagatttcacagccagtaaatggctgtat

SEQ ID NO: 428587 - DNA, 120 bp, Artificial Sequence
  ENSG00000151806_29 (sequence is synthesized)
ttctccagagctctcagctcccatgtttattcagccaacgaacaaaccagactgcagactgtattagagcaagacaacatcatttagccattgatttttatcttctaccttgaatgaatt

SEQ ID NO: 428588 - DNA, 120 bp, Artificial Sequence
  ENSG00000151806_30 (sequence is synthesized)
gaatgaagaaaatgtcttttagggataaacactatcaaggatgaattttatactaaggttatatgaaagaaaaatctcaaaaccactaagccaaagggaagtcaagctgggaactgattg

SEQ ID NO: 428589 - DNA, 120 bp, Artificial Sequence
  ENSG00000151806_31 (sequence is synthesized)
aggcaaacctgcctcccattttattcctaaataagacagccacaaagataaaatttgctcacaagggaattccttatggacaaagaactcaaagtcttcacatgaaacaaatgcataaat

SEQ ID NO: 428590 - DNA, 120 bp, Artificial Sequence
  ENSG00000151806_32 (sequence is synthesized)
gattgctttctctgtttcatgtttcactaagccagattaaggtataactgactattcctctactctcctctcacatgtaaattgtatattcagtgaaaggctaatcagaaactcaaaaaa

SEQ ID NO: 428591 - DNA, 120 bp, Artificial Sequence
  ENSG00000151806_33 (sequence is synthesized)
atgcaaccctttctctcttacctgcctatgcttgaagcccccgcccctcttcaagttgtcctgcctttcaagaccaatgtacaccttacacatactgattgatgtctcatgtctctctaa

SEQ ID NO: 428592 - DNA, 120 bp, Artificial Sequence
  ENSG00000151806_34 (sequence is synthesized)
aaaccaagctgtgccccaaccaccttgggcacatgtggtgaggacctcctgaggctgtgtcatgggcacaccttaaccctgggaaaataaactttctaaactgacttgagagctgtctca

SEQ ID NO: 428593 - DNA, 120 bp, Artificial Sequence
  ENSG00000151806_35 (sequence is synthesized)
ctgtctcagatattttgagcttacagttattgtgaaatcattttaattataaattaagtggagatttacttaaaatcatgtgtagaagtagcctgtgatatagtcctagatacatacatt

SEQ ID NO: 428594 - DNA, 120 bp, Artificial Sequence
  ENSG00000151806_36 (sequence is synthesized)
atcatcttatgtatcttccctccctcttccaggttctgataaaaacagatgaaatctgaaagaccatgacagtagtattttgaaaatgacagtatttgaaattaaaaaattgtaaaagtg

SEQ ID NO: 428595 - DNA, 80 bp, Artificial Sequence
  ENSG00000151812_0 (sequence is synthesized)
attcgggcagcagtgctccgggtggcgcgcgggagagctgccaggctgacggagaggccggcccgagtgggggccgctcc

SEQ ID NO: 428596 - DNA, 120 bp, Artificial Sequence
  ENSG00000151812_1 (sequence is synthesized)
cggtgctgcgccgggcggtggagtcagagcccgggcgcgggagcaggagctgcaagatcagcaccagcggctccggcacctgcaccagctcccgggccccgcgctgcgctctccgccccg

SEQ ID NO: 428597 - DNA, 120 bp, Artificial Sequence
  ENSG00000151812_2 (sequence is synthesized)
actcggggccgtcgccccgcgctctctatggatgtcaaggcggcccccaacggggtggccactatcgaggaccggatcctgcggatcaccggctactatggctattatccaggttactcc

SEQ ID NO: 428598 - DNA, 120 bp, Artificial Sequence
  ENSG00000151812_3 (sequence is synthesized)
agccagaaaagtacctccagatcatcagtcactagatgtaaaccaggagccaactgccccagttcacacagtggcatcagtagacaactgtccccactgtctgtcaccgaagattcctct

SEQ ID NO: 428599 - DNA, 120 bp, Artificial Sequence
  ENSG00000151812_4 (sequence is synthesized)
gctcctattcttgaacttcaaaaccaaggatcctcaggagtttgtggacacagagttgagagacagaacagatcagcagacgatgggacacagactcattctgagaacagcagccaagaa

SEQ ID NO: 428600 - DNA, 120 bp, Artificial Sequence
  ENSG00000151812_5 (sequence is synthesized)
aacagaatcaaggctcgctgcctgtcctgcacgtccatggttctgaagggcatctggggactcttgatcatcttgtcagtatcatcatcttgggttggaactacacagattgtaaaaatt

SEQ ID NO: 428601 - DNA, 120 bp, Artificial Sequence
  ENSG00000151812_6 (sequence is synthesized)
acttataagaacttctattgcccatttttcatgacttggttttcaacaaactggaacattatgtttttcccagtctattattctggtcatctagccactgctcaagaaaagcaatctcca

SEQ ID NO: 428602 - DNA, 120 bp, Artificial Sequence
  ENSG00000151812_7 (sequence is synthesized)
atgaaaaaattcagggaatgcagtcggatttttggtgaagatggtctgacgctgaaactctttcttaaaagaactgctcccttttctattctatggactttgactaattacctttattta

SEQ ID NO: 428603 - DNA, 120 bp, Artificial Sequence
  ENSG00000151812_8 (sequence is synthesized)
ggccacggatgtctccgctctgttctgttgtaacaaagcctttgtcttcttgctgtcatggattgtgctgaaagacaggttcatgggagtgaggatagttgctgcaataatggcaattac

SEQ ID NO: 428604 - DNA, 120 bp, Artificial Sequence
  ENSG00000151812_9 (sequence is synthesized)
cggcattgtcatgatggcatatgcagataatttccacgctgattccatcataggagtggcatttgcggtgggctcagcctctacatctgcattatataaggtcttgtttaaaatgtttct

SEQ ID NO: 428605 - DNA, 120 bp, Artificial Sequence
  ENSG00000151812_10 (sequence is synthesized)
tggaagtgccaactttggggaagctgcacactttgtctccaccttgggtttcttcaatttgatcttcatctccttcaccccagtcatcttgtatttcaccaaggtggagcactggtcctc

SEQ ID NO: 428606 - DNA, 120 bp, Artificial Sequence
  ENSG00000151812_11 (sequence is synthesized)
ttttgctgctctgccatggggctgtctctgtgggatggcagggctgtggctggccttcaacatcctggtgaatgttggggtggtgctgacatacccaatcctaatctccattgggacagt

SEQ ID NO: 428607 - DNA, 120 bp, Artificial Sequence
  ENSG00000151812_12 (sequence is synthesized)
gctcagcgttcctggaaatgcagctgtggatctcctaaagcaggaggtgatattcaatgttgtccgcctggctgctaccatcatcatctgcattgggtttctgctgatgctgttgcctga

SEQ ID NO: 428608 - DNA, 120 bp, Artificial Sequence
  ENSG00000151812_13 (sequence is synthesized)
ggaatgggatgaaatcaccctgaggttcatcaacagcctgaaggaaaagaagagtgaggagcatgtggatgatgtgactgatcccagcatacacctgcggggcagaggcagagccaatgg

SEQ ID NO: 428609 - DNA, 120 bp, Artificial Sequence
  ENSG00000151812_14 (sequence is synthesized)
gacagtgtctataccactggcttagagagggacatattttgaatgcacgtgtatgtatattctgtgaatataacaaaattttctcactacctgtacactcaaacgacagtattaactctg

SEQ ID NO: 428610 - DNA, 120 bp, Artificial Sequence
  ENSG00000151812_15 (sequence is synthesized)
aatttggataaatcatatgtgaaataatgccaacaataaaagtttacatttatatgcttatcaaggaattggtgtaaataatcataatggatttttttattaaaacacatttgtccttgt

SEQ ID NO: 428611 - DNA, 120 bp, Artificial Sequence
  ENSG00000151812_16 (sequence is synthesized)
atggatgaactactcttggatctcttccacaaactgaccagtgggaggcagctggcagcaggcaatgggctttgcggtatatcacataaggaacaggaggtatggaagccaggacataat

SEQ ID NO: 428612 - DNA, 120 bp, Artificial Sequence
  ENSG00000151812_17 (sequence is synthesized)
agaacgatgctgtgtggctccctggattcagcccccttcctagggatatgtacagacggatctgccacctcgctgggaatcccggggccagaacagaaccatcaagactagccttttcac

SEQ ID NO: 428613 - DNA, 120 bp, Artificial Sequence
  ENSG00000151812_18 (sequence is synthesized)
tgtatagaaatgaatctccacttgctgttggcgttatcacagtgaccggagtgatacagaagagaagtgatgttggtgcatctaagagattctctctaccctcagttgggaatcaaccag

SEQ ID NO: 428614 - DNA, 120 bp, Artificial Sequence
  ENSG00000151812_19 (sequence is synthesized)
acactgtcttaaagcatgtgaatgctgagatcctagccagagaaaagaaagattctactgcaatacaaatttcaaaaggagacattccagctccccttcaagactacattttggattaac

SEQ ID NO: 428615 - DNA, 120 bp, Artificial Sequence
  ENSG00000151812_20 (sequence is synthesized)
aacttccaaatagttatcttccccctaggttctctctgtagtacctccagatcatcagtcactagatgtaaaccaggagccaactgccccagttcacacagtggcatcagtagacaactg

SEQ ID NO: 428616 - DNA, 120 bp, Artificial Sequence
  ENSG00000151812_21 (sequence is synthesized)
attttagtgaaaatgagaaaggaagataaatcactggtgtggcttatacattcaacacttgctcgctacacacaagttaccaactttttaggtaactatggacaatatttgatctcaatc

SEQ ID NO: 428617 - DNA, 120 bp, Artificial Sequence
  ENSG00000151812_22 (sequence is synthesized)
ccatcccaacttgctacccagcctatttctagactttctccttttgatgtataattgccaagggattggaaatggaatattgggaaaatgaaacccaatattaccctgagaaaagaggag

SEQ ID NO: 428618 - DNA, 120 bp, Artificial Sequence
  ENSG00000151812_23 (sequence is synthesized)
aaggcataccttataaaaataaatttcaaaagataaattttaaaagactcttggagtatctgagcatcagccactcttgaagaacaggaataattgtgagttcactgaatttcagacagt

SEQ ID NO: 428619 - DNA, 120 bp, Artificial Sequence
  ENSG00000151812_24 (sequence is synthesized)
ccgtttttatcgaacttgaattgtccaattagaaacatagctgtacaaggtataataaacattctgaatatgtaaaataagaaccctgggtatttttgatgctcttataataacaatagt

SEQ ID NO: 428620 - DNA, 120 bp, Artificial Sequence
  ENSG00000151812_25 (sequence is synthesized)
aacatagcattaatttaagtgtagcagtcagtatataatgcttctgttaactttctgagtaactgtaaatttttaattttctaaatccaagattacatagtacattttattttatttgta

SEQ ID NO: 428621 - DNA, 120 bp, Artificial Sequence
  ENSG00000151812_26 (sequence is synthesized)
ttttattttatttgtatgggtgcatagtaggtatatatatttacaggtacaggagatatttttatacagacataccatgtgtaacatgtcatctatcacctcaagcatttatcatttctt

SEQ ID NO: 428622 - DNA, 120 bp, Artificial Sequence
  ENSG00000151812_27 (sequence is synthesized)
caattatgatcttagttattttacaatctacaatcaattattgttgactgtagtcaccctcttgtgctttcaaatattagatcttactcattctaactatatgtttgtactcattaactg

SEQ ID NO: 428623 - DNA, 120 bp, Artificial Sequence
  ENSG00000151812_28 (sequence is synthesized)
tccccactccctccaccctcaacccactatccatcctaggttctggcaaccatcattccaaagaaatagaagaaatagaaatgcttggagaagtgattaatttcaggagtggggcaggga

SEQ ID NO: 428624 - DNA, 120 bp, Artificial Sequence
  ENSG00000151812_29 (sequence is synthesized)
agtgaggattgctgggaagccctgaagatttaaggagccagatctcattcatataatccggcatgccactatgatgaacatattgagacaacacttctttagaaggagatataccagcaa

SEQ ID NO: 428625 - DNA, 120 bp, Artificial Sequence
  ENSG00000151812_30 (sequence is synthesized)
tgggatgtcagagtctccttggaagagtcctaattaaggactcagaatgattgacaggtggtggaagctcaagaaagcacacttgatatgcagcagaagacagtctgtgagttgcaaaaa

SEQ ID NO: 428626 - DNA, 120 bp, Artificial Sequence
  ENSG00000151812_31 (sequence is synthesized)
tgtgagagagaaccctcagataagacataatgaatgcatactgctttcctttccatgaaaaatgtgaacctcttttgatcttccttactgataaaggttgagaagtatgtacttgctaga

SEQ ID NO: 428627 - DNA, 120 bp, Artificial Sequence
  ENSG00000151812_32 (sequence is synthesized)
actcatagctaaaaaatctgccctttaaaatgtctcctcacgaagtaggaagcgccacttttgaccgtgtctgctgacatggtttttgatctgggaaagggggtgaggagccgactggaa

SEQ ID NO: 428628 - DNA, 120 bp, Artificial Sequence
  ENSG00000151834_0 (sequence is synthesized)
aaacgcgtcgtttcgcagcacttgatcggaacccggctgcctctaagacttggtcttgggcaaccgtgggtgggcaggaagggaaattatttattttattttgttaaggggagtgaagaa

SEQ ID NO: 428629 - DNA, 120 bp, Artificial Sequence
  ENSG00000151834_1 (sequence is synthesized)
aagaagacgtgaggaccgcagttcactgtaatgtagagtaattgcaaaagtgggctgcctgcccctagcttttcccgctgtggttgcggaggtggtcttggttgagggggttgtggcgtg

SEQ ID NO: 428630 - DNA, 120 bp, Artificial Sequence
  ENSG00000151834_2 (sequence is synthesized)
aagtacccatctctcctctcctctcctttcctcccctcccctccaacccattccctttccagctgctatgccagtttaaagtccagggtgttattattacgtgtgcgcaaaacagtgttt

SEQ ID NO: 428631 - DNA, 120 bp, Artificial Sequence
  ENSG00000151834_3 (sequence is synthesized)
gctgacgatgaggctgggggacgttcctggcagagagaagtctgattacttggtcatcttgctgttaaagaaagaaagaaagaaaaaaagaaagaaagaaacagaaaggaaaagggtggg

SEQ ID NO: 428632 - DNA, 120 bp, Artificial Sequence
  ENSG00000151834_4 (sequence is synthesized)
ggtgggggtccataaaaaagaaatcgtctctcaatcatcaagtcctacacagagtccaggaagtaatctccatagctttaacacgaatccctaactaaaaggatattctttggggttact

SEQ ID NO: 428633 - DNA, 120 bp, Artificial Sequence
  ENSG00000151834_5 (sequence is synthesized)
tggatagtgaaactgaaggcaattttaagtgtattttgtttttcattccatggctttgtaaagagcggcggtgatgaagacaaaattgaacatctacaacatgcagttcctgctttttgt

SEQ ID NO: 428634 - DNA, 120 bp, Artificial Sequence
  ENSG00000151834_6 (sequence is synthesized)
tttcttggtgtgggaccctgccaggttggtgctggctaacatccaagaagatgaggctaaaaataacattaccatctttacgagaattcttgacagacttctggatggttacgataatcg

SEQ ID NO: 428635 - DNA, 120 bp, Artificial Sequence
  ENSG00000151834_7 (sequence is synthesized)
gcttagaccaggactgggagacagtattactgaagtcttcactaacatctacgtgaccagttttggccctgtctcagatacagatatggaatatacaattgatgttttctttcgacaaaa

SEQ ID NO: 428636 - DNA, 120 bp, Artificial Sequence
  ENSG00000151834_8 (sequence is synthesized)
atggaaagatgaacgtttaaaatttaaaggtcctatgaatatccttcgactaaacaatttaatggctagcaaaatctggactccagataccttttttcacaatgggaaaaaatcagtagc

SEQ ID NO: 428637 - DNA, 120 bp, Artificial Sequence
  ENSG00000151834_9 (sequence is synthesized)
tcataatatgacaatgccaaataagttgcttcgaattcaggatgatgggactctgctgtataccatgaggcttacagttcaagctgaatgcccaatgcacttggaggatttcccaatgga

SEQ ID NO: 428638 - DNA, 120 bp, Artificial Sequence
  ENSG00000151834_10 (sequence is synthesized)
tgctcattcatgtcctctgaaatttggcagctatgcatatacaacttcagaggtcacttatatttggacttacaatgcatctgattcagtacaggttgctcctgatggctctaggttaaa

SEQ ID NO: 428639 - DNA, 120 bp, Artificial Sequence
  ENSG00000151834_11 (sequence is synthesized)
ctgctgggccaatcaatcggaaaggagacaattaaatccagtacaggtgaatatactgtaatgacagctcatttccacctgaaaagaaaaattgggtattttgtgattcaaacctatctg

SEQ ID NO: 428640 - DNA, 120 bp, Artificial Sequence
  ENSG00000151834_12 (sequence is synthesized)
ccttgcatcatgactgtcattctctcccaagtttcattctggcttaacagagaatctgtgcctgcaagaactgtgtttggagtaacaactgtcctaacaatgacaactctaagcatcagt

SEQ ID NO: 428641 - DNA, 120 bp, Artificial Sequence
  ENSG00000151834_13 (sequence is synthesized)
gctcggaattctctccccaaagtggcttatgcaactgccatggactggtttattgctgtttgttatgcatttgtgttctctgccctaattgaatttgcaactgttaattacttcaccaaa

SEQ ID NO: 428642 - DNA, 120 bp, Artificial Sequence
  ENSG00000151834_14 (sequence is synthesized)
agaggatgggcttgggatgggaagagtgtagtaaatgacaagaaaaaagaaaaggcttccgttatgatacagaacaacgcttatgcagtggctgttgccaattatgccccgaatctttca

SEQ ID NO: 428643 - DNA, 120 bp, Artificial Sequence
  ENSG00000151834_15 (sequence is synthesized)
aaagatccagttctctccaccatctccaagagtgcaaccacgccagaacccaacaagaagccagaaaacaagccagctgaagcaaagaaaactttcaacagtgttagcaaaattgacaga

SEQ ID NO: 428644 - DNA, 120 bp, Artificial Sequence
  ENSG00000151834_16 (sequence is synthesized)
atgtccagaatagtttttccagttttgtttggtacctttaatttagtttactgggctacatatttaaacagagaacctgtattaggggtcagtccttgaattgagacccatgttatcttt

SEQ ID NO: 428645 - DNA, 120 bp, Artificial Sequence
  ENSG00000151834_17 (sequence is synthesized)
gggatgtatagcaacattaaatttggtttgttttgctatgtacagtctgactaataactgctaatttgtgatccaacatgtacagtatgtatatagtgacatagcttaccagtagacctt

SEQ ID NO: 428646 - DNA, 120 bp, Artificial Sequence
  ENSG00000151834_18 (sequence is synthesized)
taatggagacatgcatttgctaactcatggaactgcagacagaaagcactccatgcgaaaacagccattgccttttttaaagatttaccctaggacctgatttaaagtgaatttcaagtg

SEQ ID NO: 428647 - DNA, 120 bp, Artificial Sequence
  ENSG00000151834_19 (sequence is synthesized)
acctgattaatttcctattcttccaaatgagatgaaaatggggatcctgtacaaccctttgtggacccttttggtttagctcttaagtaggggtattttctactgttgcttaattatgat

SEQ ID NO: 428648 - DNA, 120 bp, Artificial Sequence
  ENSG00000151834_20 (sequence is synthesized)
ggaagataacattgtcattcctagatgaatcctttgaagtaacaaacattgtatctgacatcagctctgttcatgagtgctcagagtccctgctaatgtaattggaagcttggtacacat

SEQ ID NO: 428649 - DNA, 120 bp, Artificial Sequence
  ENSG00000151834_21 (sequence is synthesized)
aagaaaaactagagatttgaaatcagctatgaattactctatatagtatctatagccatgtacatattacagcatgacaagctcaaataattatgagtcagcccgaaaggatgttaatta

SEQ ID NO: 428650 - DNA, 120 bp, Artificial Sequence
  ENSG00000151834_22 (sequence is synthesized)
tgcctacgatgtaataactattggaatgtcatggtcattacatttttagcttcagagtttatttgaaagtaataattgaaatcctacaatttattttaatcattggaaactaccttaatt

SEQ ID NO: 428651 - DNA, 63 bp, Artificial Sequence
  ENSG00000151834_23 (sequence is synthesized)
cctagcgctcctctccggcttccaccagcccatcgctccacgctctcttggctgctgcagtct

SEQ ID NO: 428652 - DNA, 120 bp, Artificial Sequence
  ENSG00000151834_24 (sequence is synthesized)
tctctcccaagtttcctatctcgtcaagatcagggcaaaaggaagaaaacaccgaattctgcttgccgtttcagagcggcggtgatgaagacaaaattgaacatctacaacatgcagttc

SEQ ID NO: 428653 - DNA, 120 bp, Artificial Sequence
  ENSG00000151834_25 (sequence is synthesized)
ttggttgctgtggagcaacatgcatattggattagaaaattgtgccaaaaactcccactgatgagaattcataggtgccccacactatgacaaacacttatatgattctcctctttcctg

SEQ ID NO: 428654 - DNA, 120 bp, Artificial Sequence
  ENSG00000151834_26 (sequence is synthesized)
gagaacaagctttagagatgataaaagcacagtatcttggcaaccttttgtgttgggttatttttaaaaaatggataatattgtgctctagttctcatttattcagctacttgctgagtg

SEQ ID NO: 428655 - DNA, 120 bp, Artificial Sequence
  ENSG00000151834_27 (sequence is synthesized)
ggcacatttttctcttgtgaaagcagttctttcagataagaattaatgtaaatctgcttttgtaaattgcaactttaaatttcgctgactcaaatttacaacagctttgtataccagaag

SEQ ID NO: 428656 - DNA, 120 bp, Artificial Sequence
  ENSG00000151834_28 (sequence is synthesized)
ctttgtataccagaagaggttttggtaagggttgaacatttttacactgcaactttaaaacatcaccaatagattgtggattatttcacgtgcacaaacatacacacacacacacacaca

SEQ ID NO: 428657 - DNA, 120 bp, Artificial Sequence
  ENSG00000151834_29 (sequence is synthesized)
cacacacacacatacacagctaaattagaaaacacaattttaaattttatataattactagttattaatgggtaaaattcatttttcttttaatatcttaaaatattatttatgccccga

SEQ ID NO: 428658 - DNA, 120 bp, Artificial Sequence
  ENSG00000151834_30 (sequence is synthesized)
agattgtgtattatgcctagattcaaagtttttggcaaacttcaaatacttttgattgacatgtacattagcagttattagttgacttttactaaaacatgcacctttacgatggtgttt

SEQ ID NO: 428659 - DNA, 120 bp, Artificial Sequence
  ENSG00000151834_31 (sequence is synthesized)
ttgtagaaacataagtagtcaaatagtaacatttattgcagttttgtacagtatttgagtatagtgcataaataggtatgttcataaaatcaataaaaggagtatctatggaaataagca

SEQ ID NO: 428660 - DNA, 120 bp, Artificial Sequence
  ENSG00000151834_32 (sequence is synthesized)
aaatatcagcaaaaattgctattcctttgcctcatttaatttttaaaatttctttgtttccatgtgattctattatatgctttgcatgcttgtataaaaccaaggtcacaaatgcaactt

SEQ ID NO: 428661 - DNA, 120 bp, Artificial Sequence
  ENSG00000151834_33 (sequence is synthesized)
attaacggaatttgccaagaagacagccttgacattaaaaattccctcacaagaggtaatccataatccttaataaaataaaattgttacatgagccaataaatgtatttctttaattcc

SEQ ID NO: 428662 - DNA, 120 bp, Artificial Sequence
  ENSG00000151834_34 (sequence is synthesized)
agctgaaggcattacattaacatacaactcagtgaaagcaattcttcaaggagctaagctaatatggtccaagtatatagctttctcatggcccagtttattccaagaaaagactttaga

SEQ ID NO: 428663 - DNA, 120 bp, Artificial Sequence
  ENSG00000151834_35 (sequence is synthesized)
ctaattatttgtagtaggtggggcggggagtattgtttttgccttataggtgaagaagtaggctcagagtggtaacatagtgctacactgttaataagggatataaggaaagaaaagtac

SEQ ID NO: 428664 - DNA, 120 bp, Artificial Sequence
  ENSG00000151834_36 (sequence is synthesized)
tcaaatattcttaaaacacacttagtcttctttctgttaaatcatactgctgttcaacatttgtctgtactatatttacacaaggagaattttcttagaagttttaatttatagtctcac

SEQ ID NO: 428665 - DNA, 120 bp, Artificial Sequence
  ENSG00000151834_37 (sequence is synthesized)
taccatatttctaggctttctatatttttctgttgtttttagatgaagagtgatgatcttaaaactttaagttagaaacaggtagaaagggagggaggaagagagacctcattcactttt

SEQ ID NO: 428666 - DNA, 120 bp, Artificial Sequence
  ENSG00000151834_38 (sequence is synthesized)
cgctcctccggcgaggtgtgggcgaggggagcggcgctccgagcgcacccaggcgcccgacgccgcccgggtctgcgccgctgctagtgccaggcgggcgacgagcggcggtgatgaaga

SEQ ID NO: 428667 - DNA, 120 bp, Artificial Sequence
  ENSG00000151834_39 (sequence is synthesized)
aaaaactgacattaaagacatccatatatatatgaatttgaatcatatcaatttcttttaaagtgttcttgcctgaaatcctttaggagttcttgtagtactaatacttccattaaaacc

SEQ ID NO: 428668 - DNA, 120 bp, Artificial Sequence
  ENSG00000151834_40 (sequence is synthesized)
actccgtagcatctgttgagctgtatgtgtcaggcactgtgctaagtgttttacatatgctctctcacataatctttatagcatccttatgactagactgccttcttattcttattttta

SEQ ID NO: 428669 - DNA, 120 bp, Artificial Sequence
  ENSG00000151834_41 (sequence is synthesized)
ctcatgaagaatctgaagcagtaaagttattttcttgcccaagcttacacaacttgttagtaagtatacttgaactccgatctacctgtctgactgttaagttcatggttttaacaccac

SEQ ID NO: 428670 - DNA, 120 bp, Artificial Sequence
  ENSG00000151834_42 (sequence is synthesized)
actgcattattataaagagattagaaaaagaaaatgggcattaattttacttattatagaattccaggctctatcaatgaattgaatcctcttcacctgttccagtctctgctgattgat

SEQ ID NO: 428671 - DNA, 120 bp, Artificial Sequence
  ENSG00000151834_43 (sequence is synthesized)
tgtaaaagcccggatagcatttttttaaaatctttcccatgttgtatggaataaatatgtcggtgctggaatgcttaggaattttaaattgttcatatggtctaaaagggaaaagttatt

SEQ ID NO: 428672 - DNA, 120 bp, Artificial Sequence
  ENSG00000151834_44 (sequence is synthesized)
tgtttttaagattaacttcttttgagattattgctgtccatatttaggtttcaagtactgaatctaatgggagatttgtgcattgatataacagctgtttcctttcatactctgtagatt

SEQ ID NO: 428673 - DNA, 120 bp, Artificial Sequence
  ENSG00000151834_45 (sequence is synthesized)
atgtatctgcctaagaggaggctttgaatgtatcataatcatctatattcttaataatggtaaaaagttgtattcagaggatatctttaacattgtatcaacctaaatgcttcttttatt

SEQ ID NO: 428674 - DNA, 120 bp, Artificial Sequence
  ENSG00000151834_46 (sequence is synthesized)
aaatttggattaacatacttgcagatttgatttctttttcagttatttgaatatattttttcatttctatgaccatgttacagtttaaatatacaagcagtaaatgttatagtttaaaag

SEQ ID NO: 428675 - DNA, 120 bp, Artificial Sequence
  ENSG00000151834_47 (sequence is synthesized)
tcttggtctttttccttaattttgtaagccatagaaattttaataagactgattatttatttcattttataagttgtgttttccctactaacggagccaacaaataaatattaaaaggaa

SEQ ID NO: 428676 - DNA, 120 bp, Artificial Sequence
  ENSG00000151834_48 (sequence is synthesized)
atttgcaactacaataaaatccaggacacctgctcggcagcacgttagcctggctcttttatagtcttcaactttgctcactgtgattaccgctgcctgcctggctggtgtttgctgccg

SEQ ID NO: 428677 - DNA, 120 bp, Artificial Sequence
  ENSG00000151834_49 (sequence is synthesized)
tgggcagaacaaataaaggaatgagtggagcataatggagattgaagaactggagagcacatttcttgtatgaagggggttgagttttatctgatcattgccacataagtatttaaaatc

SEQ ID NO: 428678 - DNA, 120 bp, Artificial Sequence
  ENSG00000151834_50 (sequence is synthesized)
agagttgccagatattccaattatttttcaaaagttgttgaagatctccatttttatagaaagttttcttcagtcttaaaggtcaaccaattttcatttaaatcaaactaaacaaaatct

SEQ ID NO: 428679 - DNA, 120 bp, Artificial Sequence
  ENSG00000151834_51 (sequence is synthesized)
gtgcttcccaaacaaatcacacttgagtattagtttgcagcctctggccctaaaccaagacttctcataaagggtatgaaaaaaccagtcggaaaacttgttaagtgcaaatttaacaaa

SEQ ID NO: 428680 - DNA, 120 bp, Artificial Sequence
  ENSG00000151834_52 (sequence is synthesized)
tcttcaaagactcattcagatttggtttggtcccagaactatatttcaacaaatgttcttgattctgatgcacatggtccaaacactggactgagtcatctgttttcaaggttctggtta

SEQ ID NO: 428681 - DNA, 120 bp, Artificial Sequence
  ENSG00000151834_53 (sequence is synthesized)
aaaatgatggtttctttcttctttctctcatagtactttatttgaactcttttaagttaaagggaaaaagaaatgtgtatggtaagattggtctgttaccagatgagtctagctagcatt

SEQ ID NO: 428682 - DNA, 120 bp, Artificial Sequence
  ENSG00000151834_54 (sequence is synthesized)
ttcctcaaaacctcaaagagaggcctctgtcccccattgttctgaggtggctgtcagtgttacaaggtcagagtcctacttttgtttagtgattggattagtcagaattaactggcttat

SEQ ID NO: 428683 - DNA, 120 bp, Artificial Sequence
  ENSG00000151834_55 (sequence is synthesized)
gtttcagtaataactatccagttttatctctcgatcatgtatcttgctcacgatccaaccttgtccactgaggttggatggcatgtaggaatgggctctcttttatgtcttcctcactta

SEQ ID NO: 428684 - DNA, 120 bp, Artificial Sequence
  ENSG00000151834_56 (sequence is synthesized)
gggtttcggattgatggacttccaccacctaaaacattgctagccactgtgtccaggggaaagatgtggctaggtgtacactgtcatttaaagcttctgcccagatgtgacacaatgtcc

SEQ ID NO: 428685 - DNA, 120 bp, Artificial Sequence
  ENSG00000151834_57 (sequence is synthesized)
ctctgcccacagtccattgttcaaaggaaaccatatacacatgtttaacttcaaggtggcagggaagtgcaaccctaccatttactcagaagtggaagaactagcaatattttgcaagta

SEQ ID NO: 428686 - DNA, 120 bp, Artificial Sequence
  ENSG00000151834_58 (sequence is synthesized)
acttaataactaccacacttggcaagtagaacccatttctcagggtgcaagtcatcttccatagtgactgattatacaaactgtttggtgacacaggtcatatctcatttcaagatgtat

SEQ ID NO: 428687 - DNA, 120 bp, Artificial Sequence
  ENSG00000151834_59 (sequence is synthesized)
aattctgcaactttgttttgtctgtagcatgcatagaatgtttatgaagttaattattatgaagatatgatattaataaccatgcttttttggatatagtcaactttatgtaccttctct

SEQ ID NO: 428688 - DNA, 120 bp, Artificial Sequence
  ENSG00000151834_60 (sequence is synthesized)
tttcttggtgttagaaggcagtgctgtatgccctttttccaaagctcccaggaataaagaggtttgccatttgtgctgtgaaggcatagttccagttgaagatatttaaaaagagatact

SEQ ID NO: 428689 - DNA, 120 bp, Artificial Sequence
  ENSG00000151834_61 (sequence is synthesized)
ctttgaagtgttagtctgaaatttcaacctccgtgacagtaattgccagggagaatggagttagataggtgaggaagagaccatgtgtggtttgctactgtgtccttagtgcttggcaca

SEQ ID NO: 428690 - DNA, 120 bp, Artificial Sequence
  ENSG00000151834_62 (sequence is synthesized)
gtatgtagaattcaccatttgtcaattgattatgtgaatccaacactcatatatgcaaaaacagacatatctgtgctttggagagctacttattttgggttcttagaaatgtttttgaca

SEQ ID NO: 428691 - DNA, 120 bp, Artificial Sequence
  ENSG00000151834_63 (sequence is synthesized)
ttcaacaatcaatttttttctatatattttagtggtttagacttctgacattgctaacaacgagtcatccttctcagaaacaatgttgattgatagatgggttaaattggtctgctgaac

SEQ ID NO: 428692 - DNA, 120 bp, Artificial Sequence
  ENSG00000151834_64 (sequence is synthesized)
cttaaattcagtagcacataaaattagaaccattgggttgaacctggatttaatatagtgaaatggactaattcagtagcccctgctgttactgcttttcagaccatctgagcagtgatc

SEQ ID NO: 428693 - DNA, 120 bp, Artificial Sequence
  ENSG00000151834_65 (sequence is synthesized)
atgaacaaaggctctatggcttcagtcatctgtaatgcatacaacactgccttctaaccccacaacaaaagctttggaagagccactagatgcacatgatagagacaaaaacaagaacta

SEQ ID NO: 428694 - DNA, 120 bp, Artificial Sequence
  ENSG00000151834_66 (sequence is synthesized)
caaaaatgtattttaaaagcctgaaaagcataagcctaaaatgtctctgtattttgagattttgcaaaactattgttagttttataccaaccgtttaaagtttttcagttgtcttgcaga

SEQ ID NO: 428695 - DNA, 120 bp, Artificial Sequence
  ENSG00000151834_67 (sequence is synthesized)
ggctgttaatgaaaagttataagataatggaatcatactaaattataatttctaacaggttctgagattgaggtgccatgctaagcactttacatatcatttaatactcattataactcc

SEQ ID NO: 428696 - DNA, 120 bp, Artificial Sequence
  ENSG00000151834_68 (sequence is synthesized)
cgcagaccaattacttgccttttgtcacctaattattttgtgatggcatggatattctatccaatataattttctcaagagcctttctccagagtctcatcaatcaggaattaagcaccc

SEQ ID NO: 428697 - DNA, 120 bp, Artificial Sequence
  ENSG00000151834_69 (sequence is synthesized)
tcaaatcaaacaaaggtggtatcaatgagtatatgtatgctttggaggaggagctcactatttgttacatttgtgtaatcattagcatctggataagtatctctggaaggggaaggatgg

SEQ ID NO: 428698 - DNA, 120 bp, Artificial Sequence
  ENSG00000151834_70 (sequence is synthesized)
tgcgcagtttcattcttttatttgtttaggtgttcttattattgcatttcttggtcatcctgagtttgacgtatatccagacttgaatacaggtttagacatgaaggatcagaaaggaca

SEQ ID NO: 428699 - DNA, 120 bp, Artificial Sequence
  ENSG00000151834_71 (sequence is synthesized)
gtgcagtgtttagcagaaaatctattagggtgttgtgaattaaagccagaatctgttactctcactgctgattttactcccttactgtgtgaatcagagcttttggtattattatgctgg

SEQ ID NO: 428700 - DNA, 120 bp, Artificial Sequence
  ENSG00000151834_72 (sequence is synthesized)
agaatagctaatgagaaggagataagaagaccatgtagtctagatagataatctcagcatttcttggtacaaagtacattggtacttgagttatttgtaaaattagtaatacaatgatgc

SEQ ID NO: 428701 - DNA, 120 bp, Artificial Sequence
  ENSG00000151834_73 (sequence is synthesized)
aattgttcatataaatttcaatcatgttaagcttattataagtgatattgaagtaatatgatacatgaagaagggatgagtatatgaaaggcaaatagatgaaggcatattaaatgcaag

SEQ ID NO: 428702 - DNA, 120 bp, Artificial Sequence
  ENSG00000151834_74 (sequence is synthesized)
aaccctctttccagatgcattgagttacaactgcttcatttccctttgttcccatttgacccatgtacatcttatgagacacaatatagtgtactttggaaaagatcaggctttggagct

SEQ ID NO: 428703 - DNA, 120 bp, Artificial Sequence
  ENSG00000151834_75 (sequence is synthesized)
tgaaaaaccagggtttgtattctggtttgagcatgttcttaccatgtgctttttgtatacatgaattgccttctctaaacctcagtttcttcatcagtaaaataagtataaaataactaa

SEQ ID NO: 428704 - DNA, 120 bp, Artificial Sequence
  ENSG00000151834_76 (sequence is synthesized)
catttatagcaaggttacaaagagtaatgaaattatttgtaatgttcctgtaaaagtacccagcatatgttgggtgttcattagtggccaacttcccatgtgccttttgatttttgcgaa

SEQ ID NO: 428705 - DNA, 120 bp, Artificial Sequence
  ENSG00000151834_77 (sequence is synthesized)
catgtcataatgtggagatttgttcacaatttaggaaataatgagtgaaaatgagagaacatctaaaaataggacatgagatagttatttttactaagagagttcatggagtttgatagt

SEQ ID NO: 428706 - DNA, 120 bp, Artificial Sequence
  ENSG00000151834_78 (sequence is synthesized)
ctttatttaactgtgtatcctagggttacatgtgattaaatttttcctttgtgggatgccctttaagtagaagtttattgcaaaattctccatagaatgtttaaatttcatggtatttct

SEQ ID NO: 428707 - DNA, 120 bp, Artificial Sequence
  ENSG00000151834_79 (sequence is synthesized)
tgtcatacactagaattaaatgagaaggaatagttggattttgagattacatctatggaagtacagaaccaaacaggagaataaggtgtttctgagaaaacctgagcagtcaaataaatg

SEQ ID NO: 428708 - DNA, 120 bp, Artificial Sequence
  ENSG00000151834_80 (sequence is synthesized)
atagcttaacttcatctggcttttctttagaaatttagacttccataaatatgttgtatttcccttgcataaatattagccattagtgatctaattacctgttagatttctaatcatgat

SEQ ID NO: 428709 - DNA, 120 bp, Artificial Sequence
  ENSG00000151834_81 (sequence is synthesized)
tacttatgatttcttcaaaacttaaaaaaggtaaccttttaaaatgattgaaagtgttatgcaatagacaatttttaaaacatttactgaaatgagtaggagatagaattctaggctatc

SEQ ID NO: 428710 - DNA, 120 bp, Artificial Sequence
  ENSG00000151834_82 (sequence is synthesized)
cccaaatttcttgtcacatgttttacatgccctgtatgatttctgtgactgtgactgtgatttcagtctgatgattagtttttgttatatggcacagttgactttaagaaagggacatta

SEQ ID NO: 428711 - DNA, 120 bp, Artificial Sequence
  ENSG00000151834_83 (sequence is synthesized)
tccgagtgggtctgacctaatcacatgagccttttaaatctaaatcaagagatcagagacagaaaagtccaggatatttaaaacatgagggagattcttcattgctggtagggggccaca

SEQ ID NO: 428712 - DNA, 120 bp, Artificial Sequence
  ENSG00000151834_84 (sequence is synthesized)
tggcaaggaacacaacagcctctaggagatgagacttgacagccagcagggaaaatgggaatcttaattctacagctgcaaggaactagatttggacaacaatctgaaagagcttagaag

SEQ ID NO: 428713 - DNA, 120 bp, Artificial Sequence
  ENSG00000151834_85 (sequence is synthesized)
ctgattcttccccagaggctccagaaaggagcacagcacacccataccttgatttcagccatgtgagaatctgagcagagaaccaagacatagcatgctggacttctgacctacagaact

SEQ ID NO: 428714 - DNA, 120 bp, Artificial Sequence
  ENSG00000151834_86 (sequence is synthesized)
atgtgctaataaatgggtattgtcttacattgttaagtttgtaataatttgttaaacaatagaaaactagcatatctactgttactaattttttaaaatacatttttcagtgtttaacct

SEQ ID NO: 428715 - DNA, 120 bp, Artificial Sequence
  ENSG00000151834_87 (sequence is synthesized)
gtgctaggcatagtgtactttacacctaccatctcatttaattatttcaaagtactgtaagataggcattataagccacatttaacagataagaatatcgaagcacatataagttaagta

SEQ ID NO: 428716 - DNA, 120 bp, Artificial Sequence
  ENSG00000151834_88 (sequence is synthesized)
atatgcatagggtcacaaattattagtgtataactctgaattgaatttagatctctttgattccaaggcttgggatcttacatgcccctttattaggtaggaatagatacttcatgaaga

SEQ ID NO: 428717 - DNA, 120 bp, Artificial Sequence
  ENSG00000151834_89 (sequence is synthesized)
tgataacatgccatctacagaatacgatatggcattgatgtgacactttacctacaaaatatcttatttctgagtcttccgcaagagaaaaagcaattttatttttatgggacaagattg

SEQ ID NO: 428718 - DNA, 120 bp, Artificial Sequence
  ENSG00000151834_90 (sequence is synthesized)
gatgttacatttttaatcaattacatgtaagtgtattctacctttaaaattgctatggaaaagtttaattatttccaacaggatttataactatcagttatacctcaaagttgttattaa

SEQ ID NO: 428719 - DNA, 120 bp, Artificial Sequence
  ENSG00000151834_91 (sequence is synthesized)
ctgaataaaactacacattccaaaatgattaactcttaaagcgcattattggtacattcataatgtttaattttatttttatcatccttgctcatattgaataaatgccttttaaaacca

SEQ ID NO: 428720 - DNA, 120 bp, Artificial Sequence
  ENSG00000151834_92 (sequence is synthesized)
ggcggtgatgaagacaaaattgaacatctacaacatgcagttcctgctttttgttttcttggtgtgggaccctgccagagaccaatcaggaagaactaggctctaaggatctctgcagct

SEQ ID NO: 428721 - DNA, 120 bp, Artificial Sequence
  ENSG00000151834_93 (sequence is synthesized)
tatgtgttgctgatgctttcagagcccacctccacctcctggctacatggagcctggcacatagccagtggagtttccctgatgcttatattgcacttggccattgggtggaggtatacc

SEQ ID NO: 428722 - DNA, 120 bp, Artificial Sequence
  ENSG00000151834_94 (sequence is synthesized)
caaagttggtgctggctaacatccaagaagatgaggctaaaaataacattaccatctttacgagaattcttgacagacttctggatggttacgataatcggcttagaccaggactgggag

SEQ ID NO: 428723 - DNA, 120 bp, Artificial Sequence
  ENSG00000151835_0 (sequence is synthesized)
agtgcggctgcgggacagtcacgctgggaactgctgatggcactggaggaaaacaaaggccgagagaccctgatgcccacagcccccagatcacagaagtgaggccaagatgcccatgtc

SEQ ID NO: 428724 - DNA, 120 bp, Artificial Sequence
  ENSG00000151835_1 (sequence is synthesized)
accagagccagaagaaaggctcctaccaaagaatattttacatctgctgagatgagggtgagaaacaaaatccaagaatttctgcgacgttttccccaagaaccttcaaaaagaaataca

SEQ ID NO: 428725 - DNA, 120 bp, Artificial Sequence
  ENSG00000151835_2 (sequence is synthesized)
gaaaattctcagatgaaaataaattgattttgctctgggggaaagccaaaaacctttagcgaatccacactgttttatcctgagaacttccatgggtcgctggatcagcaggcaaccatt

SEQ ID NO: 428726 - DNA, 120 bp, Artificial Sequence
  ENSG00000151835_3 (sequence is synthesized)
atcagactggagagtcatactttaaggaatacaaatgcaacacacgacaatgtttcctgacatcagatgatgaatggacactgaagggaaaaacaggctttttttccacctggcaggaag

SEQ ID NO: 428727 - DNA, 120 bp, Artificial Sequence
  ENSG00000151835_4 (sequence is synthesized)
agctgaacttggagtacacatttaaaggaagcacagagggaagacttaaacagaagaaagaagcgtactttcatggttttcacaaacaaatatcccaggagaagtgatcatggagaccaa

SEQ ID NO: 428728 - DNA, 120 bp, Artificial Sequence
  ENSG00000151835_5 (sequence is synthesized)
ggagaacaggtgggtcccggtgaccgtgctccccggctgcgtgggctgcaggaccgtcgcggcgctggcgtcctggaccgtgcgcgatgtgaaggaacgtatcttcgcggagactggctt

SEQ ID NO: 428729 - DNA, 120 bp, Artificial Sequence
  ENSG00000151835_6 (sequence is synthesized)
cccggtgtcggagcagcggctgtggcgcggcggccgcgagttatctgactggatcaagattggagatctgacttccaaaaattgtcatctttttgtaaaccttcaatcaaaaggcttaaa

SEQ ID NO: 428730 - DNA, 120 bp, Artificial Sequence
  ENSG00000151835_7 (sequence is synthesized)
agggggaggtcgatttggtcagacaacgccaccacttgttgattttctcaaggacattttgagaagatatccagaaggaggacagattcttaaggaattaattcagaatgcagaagatgc

SEQ ID NO: 428731 - DNA, 120 bp, Artificial Sequence
  ENSG00000151835_8 (sequence is synthesized)
tggggcgacagaagttaaatttttatatgatgaaactcaatacggaacagagactctttggtcaaaagatatggcgccatatcaggggccagctctctatgtgtacaacaacgcggtttt

SEQ ID NO: 428732 - DNA, 120 bp, Artificial Sequence
  ENSG00000151835_9 (sequence is synthesized)
caccccagaggactggcacggcattcaagaaatagcaagaagcaggaaaaaggatgatcctctgaaggtcggaagatttggaattgggtttaattctgtctatcatataacagatgttcc

SEQ ID NO: 428733 - DNA, 120 bp, Artificial Sequence
  ENSG00000151835_10 (sequence is synthesized)
ttgtatctttagtggtgaccaaatcgggatgctagatcctcatcaaacactttttggcccacatgaatcaggccaatgttggaatctcaaagatgacagcaaagaaattagtgaactttc

SEQ ID NO: 428734 - DNA, 120 bp, Artificial Sequence
  ENSG00000151835_11 (sequence is synthesized)
agaccagtttgcaccatttgttggcatttttggaagcaccaaggaaacatttataaacggcaattttccaggaacatttttccgtttccctcttcgcctacaaccttcacaacttagtag

SEQ ID NO: 428735 - DNA, 120 bp, Artificial Sequence
  ENSG00000151835_12 (sequence is synthesized)
taacctctacaataagcagaaggttcttgagttgtttgagtcttttagggcagatgcagacacagtgctgctctttctgaaaagtgtgcaggatgtttccttatatgtccgagaggctga

SEQ ID NO: 428736 - DNA, 120 bp, Artificial Sequence
  ENSG00000151835_13 (sequence is synthesized)
cggaacagagaaactggtgtttagagtgacttcgagtgagagtaaggcactgaaacatgagcggccgaattctataaagattctgggaactgctataagtaactattgtaaaaagactcc

SEQ ID NO: 428737 - DNA, 120 bp, Artificial Sequence
  ENSG00000151835_14 (sequence is synthesized)
aagcaataacatcacctgtgtaacatatcacgtaaatattgttttagaagaggagagtactaaggatgcacagaaaacatcttggttggtgtgtaacagtgtgggtgggcgagggatcag

SEQ ID NO: 428738 - DNA, 120 bp, Artificial Sequence
  ENSG00000151835_15 (sequence is synthesized)
tagtaagcttgactctttagctgatgaactgaaatttgtcccaatcattggaatagccatgcctttatcaagcagagatgatgaagcaaaaggagcaacgtctgatttctcaggaaaagc

SEQ ID NO: 428739 - DNA, 120 bp, Artificial Sequence
  ENSG00000151835_16 (sequence is synthesized)
attttgtttccttcctttaccacctggtgaggaaagcagcacaggcctcccagttcacatcagtgggttctttggccttactgataaccgcaggagcataaaatggagagagctggacca

SEQ ID NO: 428740 - DNA, 120 bp, Artificial Sequence
  ENSG00000151835_17 (sequence is synthesized)
gtggagagacccggcagccttatggaatgagtttcttgtcatgaatgttgtccccaaagcttatgctactctgatcttagattcaataaaacgtctggagatggaaaagagctctgattt

SEQ ID NO: 428741 - DNA, 120 bp, Artificial Sequence
  ENSG00000151835_18 (sequence is synthesized)
ccccttgtcagttgatgttatctataagctttggccggaggcgagcaaagtcaaggtgcactggcaaccggtgttagagcctctattcagcgagctgttgcagaatgcagtgatttattc

SEQ ID NO: 428742 - DNA, 120 bp, Artificial Sequence
  ENSG00000151835_19 (sequence is synthesized)
aattagctgtgactgggtcaggttggagcaggtgtacttctcagaacttgatgaaaatttagaatacacaaaaactgtgctcaactacctccagagctcagggaagcagattgccaaggt

SEQ ID NO: 428743 - DNA, 120 bp, Artificial Sequence
  ENSG00000151835_20 (sequence is synthesized)
accagggaatgtggatgctgctgttcagctcacagctgcctctggcacaacacctgtgaggaaggtgacgcccgcgtgggtgcggcaggtgctgcggaagtgtgcacacctgggctgtgc

SEQ ID NO: 428744 - DNA, 120 bp, Artificial Sequence
  ENSG00000151835_21 (sequence is synthesized)
tgaagaaaagcttcaccttctagaatttgtgctttctgaccaagcctacagtgagctgcttgggctggagctgctccctttacaaaatggcaattttgtccccttctcctcatctgtatc

SEQ ID NO: 428745 - DNA, 120 bp, Artificial Sequence
  ENSG00000151835_22 (sequence is synthesized)
agaccaagatgtcatttatattacctcagcagaatatccaaggtcccttttcccaagtcttgaaggaagatttattttggataacttgaaacctcaccttgtggctgctttaaaggaagc

SEQ ID NO: 428746 - DNA, 120 bp, Artificial Sequence
  ENSG00000151835_23 (sequence is synthesized)
tgcccaaacccgaggaagaccatgtactcagctgcagcttctaaatccagaacgatttgcacgtcttatcaaggaagtaatgaatacattctggcctggcagagaattgattgttcaatg

SEQ ID NO: 428747 - DNA, 120 bp, Artificial Sequence
  ENSG00000151835_24 (sequence is synthesized)
gtatccatttgatgaaaacagaaatcacccatctgtttcatggcttaagatggtttggaaaaatctttatatacatttttcagaggatttgactttatttgatgagatgccacttatccc

SEQ ID NO: 428748 - DNA, 120 bp, Artificial Sequence
  ENSG00000151835_25 (sequence is synthesized)
cagaactatactagaggaaggtcagacatgtgtggaactcattagactcaggattccatcgttagtcattttagacgatgaatctgaagcacagcttccagaatttttagcagacattgt

SEQ ID NO: 428749 - DNA, 120 bp, Artificial Sequence
  ENSG00000151835_26 (sequence is synthesized)
acaaaaacttggagggtttgtccttaaaaaattagatgcatctatacaacatccgcttattaaaaaatatattcattcaccattaccaagtgctgttttgcagataatggagaagatgcc

SEQ ID NO: 428750 - DNA, 120 bp, Artificial Sequence
  ENSG00000151835_27 (sequence is synthesized)
attgcagaaattgtgtaatcaaataacttcgctacttccaacacacaaagatgccctgaggaagttcttggctagtttaaccgatagcagtgagaaagagaaaagaattattcaagaatt

SEQ ID NO: 428751 - DNA, 120 bp, Artificial Sequence
  ENSG00000151835_28 (sequence is synthesized)
ggcaatattcaagcgcattaaccattcttctgatcagggaatttcctcttatacaaaattgaaaggttgtaaagtcttacaccatactgccaaactcccagcagatctgcgactttctat

SEQ ID NO: 428752 - DNA, 120 bp, Artificial Sequence
  ENSG00000151835_29 (sequence is synthesized)
ttcagtaatagacagtagtgatgaagctactattcgtctggcaaacatgttgaaaatagaacagttaaagaccactagctgcttaaagcttgttttaaaagatattgaaaatgcatttta

SEQ ID NO: 428753 - DNA, 120 bp, Artificial Sequence
  ENSG00000151835_30 (sequence is synthesized)
ttcacatgaagaggtaacacagcttatgttatgggtccttgagaatctatcttctcttaaaaatgagaatccaaatgtgcttgagtggttaacaccattaaaattcatccagatatcaca

SEQ ID NO: 428754 - DNA, 120 bp, Artificial Sequence
  ENSG00000151835_31 (sequence is synthesized)
ggaacagatggtatcagctggtgaactctttgaccctgatatagaagtactaaaggatctcttttgtaatgaagaaggaacctatttcccaccctcagtttttacctcaccagatattct

SEQ ID NO: 428755 - DNA, 120 bp, Artificial Sequence
  ENSG00000151835_32 (sequence is synthesized)
tcactccttaagacagattggtttaaaaaacgaagccagtctcaaagaaaaggatgttgtgcaagtggcaaaaaaaattgaagccttacaggtcggtgcttgtcctgatcaagatgttct

SEQ ID NO: 428756 - DNA, 120 bp, Artificial Sequence
  ENSG00000151835_33 (sequence is synthesized)
tctgaagaaagccaaaaccctcttactggttttaaataagaatcacacactgttgcaatcatctgaaggaaagatgacattgaagaaaataaaatgggttccagcctgcaaggaaaggcc

SEQ ID NO: 428757 - DNA, 120 bp, Artificial Sequence
  ENSG00000151835_34 (sequence is synthesized)
tccaaattatccaggctctttggtctggaaaggagatctctgtaatctctgtgcaccaccagatatgtgtgatgtaggccatgcaattctcattggctcctcacttcctcttgttgaaag

SEQ ID NO: 428758 - DNA, 120 bp, Artificial Sequence
  ENSG00000151835_35 (sequence is synthesized)
tatccatgtaaacctggaaaaagcattagggatcttcacaaaacctagccttagtgctgtcttaaaacactttaaaattgttgttgattggtattcttcaaaaacctttagtgatgaaga

SEQ ID NO: 428759 - DNA, 120 bp, Artificial Sequence
  ENSG00000151835_36 (sequence is synthesized)
ctactatcaattccagcatattttgcttgagatttacggattcatgcatgatcatctaaatgaagggaaagattcttttagagccttaaaatttccatgggtttggactggcaaaaagtt

SEQ ID NO: 428760 - DNA, 120 bp, Artificial Sequence
  ENSG00000151835_37 (sequence is synthesized)
ttgtccacttgcccaggctgtgattaaaccaatccatgatcttgaccttcagccttatttgcataatgtacctaaaaccatggcaaaattccaccaactatttaaggtctgtggttcaat

SEQ ID NO: 428761 - DNA, 120 bp, Artificial Sequence
  ENSG00000151835_38 (sequence is synthesized)
agaggagttgacatcagatcatatttccatggttattcagaagatatatctcaaaagtgaccaagatctcagtgaacaagaaagcaaacaaaatcttcatcttatgttgaatattatcag

SEQ ID NO: 428762 - DNA, 120 bp, Artificial Sequence
  ENSG00000151835_39 (sequence is synthesized)
atggctgtatagcaatcagattccagcaagccccaacacaccagttcctatacatcatagcaaaaatccttctaaacttatcatgaagccaattcacgaatgctgttattgtgacattaa

SEQ ID NO: 428763 - DNA, 120 bp, Artificial Sequence
  ENSG00000151835_40 (sequence is synthesized)
agttgatgaccttaatgacttacttgaagattctgtggaaccaatcattttggtgcatgaggacatacccatgaaaactgcagaatggctaaaagttccatgccttagtacaagactgat

SEQ ID NO: 428764 - DNA, 120 bp, Artificial Sequence
  ENSG00000151835_41 (sequence is synthesized)
aaatcctgaaaacatgggatttgagcagtcaggacaaagagagccacttactgtaagaattaaaaatattctggaagaatacccttcagtgtcagatatttttaaagaactacttcaaaa

SEQ ID NO: 428765 - DNA, 120 bp, Artificial Sequence
  ENSG00000151835_42 (sequence is synthesized)
cgctgatgatgcaaatgcaacagaatgcagtttcttgattgatatgagaagaaatatggacataagagagaatctcctagacccagggatggcagcttgtcatggacctgctttgtggtc

SEQ ID NO: 428766 - DNA, 120 bp, Artificial Sequence
  ENSG00000151835_43 (sequence is synthesized)
attcaacaattctcaattctcagattcagattttgtgaacataactaggttaggagaatctttaaaaaggggagaagttgacaaagttggaaaatttggtcttggatttaattctgtgta

SEQ ID NO: 428767 - DNA, 120 bp, Artificial Sequence
  ENSG00000151835_44 (sequence is synthesized)
ccatatcactgacattcccatcattatgagtcgggaattcatgataatgttcgatccaaacataaatcatatcagtaaacacattaaagacaaatccaatcctgggatcaaaattaattg

SEQ ID NO: 428768 - DNA, 120 bp, Artificial Sequence
  ENSG00000151835_45 (sequence is synthesized)
gagtaaacaacagaaaagacttagaaaatttcctaatcagttcaaaccatttatagatgtatttggctgtcagttacctttgactgtagaagcaccttacagctataatggaaccctttt

SEQ ID NO: 428769 - DNA, 120 bp, Artificial Sequence
  ENSG00000151835_46 (sequence is synthesized)
ccgactgtcctttagaactcaacaggaagcaaaagtgagtgaagttagtagtacgtgctacaatacagcagatatttattctcttgtggatgaatttagtctctgtggacacaggcttat

SEQ ID NO: 428770 - DNA, 120 bp, Artificial Sequence
  ENSG00000151835_47 (sequence is synthesized)
cattttcactcagagtgtaaagtcaatgtatttgaagtacttgaaaattgaggaaaccaaccccagtttagcacaagatacagtaataattaaaaaaaaatcctgctcttccaaagcatt

SEQ ID NO: 428771 - DNA, 120 bp, Artificial Sequence
  ENSG00000151835_48 (sequence is synthesized)
gaacacacctgtcttaagtgttttaaaagaggctgctaagctcatgaagacttgcagcagcagtaataaaaagcttcccagtgatgaaccaaagtcatcttgcattcttcagatcacagt

SEQ ID NO: 428772 - DNA, 120 bp, Artificial Sequence
  ENSG00000151835_49 (sequence is synthesized)
ggaagaatttcaccatgtgttcagaaggattgctgatttacagtcgccactttttagaggtccagatgatgacccagctgctctctttgaaatggctaagtctggccaatcaaaaaagcc

SEQ ID NO: 428773 - DNA, 120 bp, Artificial Sequence
  ENSG00000151835_50 (sequence is synthesized)
atcagatgagttgtcacagaaaacagtagagtgtaccacgtggcttctgtgtacttgcatggacacaggagaggctctgaagttttccctgagtgagagtggaagaagactaggactggt

SEQ ID NO: 428774 - DNA, 120 bp, Artificial Sequence
  ENSG00000151835_51 (sequence is synthesized)
tccatgtggggcagtaggagttcagctgtcagaaatccaggaccagaagtggacagtgaaaccacacattggagaggtgttttgctatttacctttacgaataaaaacaggcttgccagt

SEQ ID NO: 428775 - DNA, 120 bp, Artificial Sequence
  ENSG00000151835_52 (sequence is synthesized)
tcatatcaatgggtgctttgctgttacatcaaataggaaagaaatctggaaaacagatacaaaaggacgatggaataccacgttcatgagacatgttattgtgaaagcttacttacaggt

SEQ ID NO: 428776 - DNA, 120 bp, Artificial Sequence
  ENSG00000151835_53 (sequence is synthesized)
actgagtgtcttacgggacctggccactagtggggagctaatggattatacttactatgcagtatggcccgatcctgatttagttcatgatgatttttctgtaatttgccaaggatttta

SEQ ID NO: 428777 - DNA, 120 bp, Artificial Sequence
  ENSG00000151835_54 (sequence is synthesized)
tgaagatatagctcatggaaaagggaaagaactgaccaaagtcttctctgatggatctacttgggtttccatgaagaacgtaagatttctagatgactctatacttaaaagaagagatgt

SEQ ID NO: 428778 - DNA, 120 bp, Artificial Sequence
  ENSG00000151835_55 (sequence is synthesized)
tggttcagcagccttcaagatatttttgaaatacctcaagaagactgggtccaaaaacctttgtgctgttgaacttccttcttcggtaaaattaggatttgaagaagctggctgcaaaca

SEQ ID NO: 428779 - DNA, 120 bp, Artificial Sequence
  ENSG00000151835_56 (sequence is synthesized)
gatactacttgaaaacacattttcagagaaacagtttttttctgaagtgttttttccaaatattcaagaaattgaagcagaacttagagatcctttaatgatctttgttctaaatgaaaa

SEQ ID NO: 428780 - DNA, 120 bp, Artificial Sequence
  ENSG00000151835_57 (sequence is synthesized)
agttgatgagttctcgggagttcttcgtgttactccatgtattccttgttccttggaggggcatcctttggttttgccatcaagattgatccaccccgaaggacgagttgcaaagttatt

SEQ ID NO: 428781 - DNA, 120 bp, Artificial Sequence
  ENSG00000151835_58 (sequence is synthesized)
tgatattaaagatgggagattcccttatggttctactcaggattatctcaatcctattattttgattaaactagttcagttaggtatggcaaaagatgatattttatgggatgatatgct

SEQ ID NO: 428782 - DNA, 120 bp, Artificial Sequence
  ENSG00000151835_59 (sequence is synthesized)
agaacgtgcagtgtcagtagctgaaattaataaaagtgatcatgttgctgcatgcctaagaagtagtatcttattgagtcttatcgatgagaaactaaaaataagggatcctagagcaaa

SEQ ID NO: 428783 - DNA, 120 bp, Artificial Sequence
  ENSG00000151835_60 (sequence is synthesized)
ggattttgctgcaaaatatcaaacaatccgcttccttccatttctgacaaaaccagcaggtttttctttggactggaaaggcaacagttttaagcctgaaaccatgtttgcagcaactga

SEQ ID NO: 428784 - DNA, 120 bp, Artificial Sequence
  ENSG00000151835_61 (sequence is synthesized)
cctttatacagctgaacatcaagatatagtttgtcttttgcaaccaattctaaatgaaaattcccattcttttagaggttgtggttcagtgtcattggctgttaaagagtttttgggatt

SEQ ID NO: 428785 - DNA, 120 bp, Artificial Sequence
  ENSG00000151835_62 (sequence is synthesized)
actcaagaagccaacagttgatctggttataaaccaattgaaagaagtagcaaaatcagttgatgatggaattacactgtaccaggagaatatcaccaatgcttgctacaaataccttca

SEQ ID NO: 428786 - DNA, 120 bp, Artificial Sequence
  ENSG00000151835_63 (sequence is synthesized)
tgaagccttgatgcaaaatgaaatcactaagatgtcaattattgataagttaaaaccctttagcttcattctagttgagaatgcatatgttgactcagaaaaggtttcttttcatttaaa

SEQ ID NO: 428787 - DNA, 120 bp, Artificial Sequence
  ENSG00000151835_64 (sequence is synthesized)
ttttgaggcggcaccatacctttatcagttgcctaataagtataaaaataatttccgcgaactttttgaaaccgtgggtgtgaggcagtcatgcactgttgaagattttgctcttgtttt

SEQ ID NO: 428788 - DNA, 120 bp, Artificial Sequence
  ENSG00000151835_65 (sequence is synthesized)
taacagaagagaattttcagctttgccgacgaataatcagtgaaggaatatggagtctcattagagaaaagaaacaagaattttgtgagaaaaattatggcaagatattattgccagata

SEQ ID NO: 428789 - DNA, 120 bp, Artificial Sequence
  ENSG00000151835_66 (sequence is synthesized)
ctaatcttatgcttctccctgctaaatcgttatgctacaatgattgcccttggataaaagtaaaggataccactgtaaaatattgtcatgctgacatacccagggaagtagcagtaaaac

SEQ ID NO: 428790 - DNA, 120 bp, Artificial Sequence
  ENSG00000151835_67 (sequence is synthesized)
taggagcagtcccaaagcgacacaaagccttagaaagatatgcatccaatgtctgttttacaacacttggcacagaatttgggcagaaagaaaaattgaccagcagaattaagagcatcc

SEQ ID NO: 428791 - DNA, 120 bp, Artificial Sequence
  ENSG00000151835_68 (sequence is synthesized)
ttaatgcatatccttctgaaaaggaaatgttgaaagagcttcttcaaaatgctgatgatgcaaaggcgacagaaatctgttttgtgtttgatcctagacagcatccagttgatagaatat

SEQ ID NO: 428792 - DNA, 120 bp, Artificial Sequence
  ENSG00000151835_69 (sequence is synthesized)
ttgatgataagtgggccccattgcaagggccagcactttgtgtgtacaacaaccagccatttacagaagatgatgttagaggaattcagaatcttggaaaaggcacgaaagagggaaatc

SEQ ID NO: 428793 - DNA, 120 bp, Artificial Sequence
  ENSG00000151835_70 (sequence is synthesized)
cttataaaactggacagtatggaataggattcaattctgtgtatcatatcacagactgcccatcttttatttctggcaatgacatcctgtgtatttttgatcctcatgccagatatgcac

SEQ ID NO: 428794 - DNA, 120 bp, Artificial Sequence
  ENSG00000151835_71 (sequence is synthesized)
caggggccacatccattagtcccggacgcatgtttagagatttggatgcagattttaggacacagttctcagatgttctggatctttatctgggaacccattttaaactggataattgca

SEQ ID NO: 428795 - DNA, 120 bp, Artificial Sequence
  ENSG00000151835_72 (sequence is synthesized)
caatgttcagatttcctcttcgtaatgcagaaatggcaaaagtttcggaaatttcgtctgttccagcatcagacagaatggtccagaatcttttggacaaactgcgctcagatggggcag

SEQ ID NO: 428796 - DNA, 120 bp, Artificial Sequence
  ENSG00000151835_73 (sequence is synthesized)
aacttctaatgtttcttaatcacatggaaaaaatttctatttgtgaaatagataagagtactggagctctaaatgtgctgtattcagtaaagggcaaaatcacagatggagacagattga

SEQ ID NO: 428797 - DNA, 120 bp, Artificial Sequence
  ENSG00000151835_74 (sequence is synthesized)
aaaggaaacaatttcatgcatctgtaattgatagtgttactaaaaagaggcagctcaaagacataccagttcaacaaataacctatactatggatactgaggactctgaaggaaatctta

SEQ ID NO: 428798 - DNA, 120 bp, Artificial Sequence
  ENSG00000151835_75 (sequence is synthesized)
ctacgtggctaatttgtaatagatcaggcttttcaagtatggagaaagtatctaaaagtgtcatatcagctcacaagaaccaagatattactcttttcccacgtggtggagtagctgcct

SEQ ID NO: 428799 - DNA, 120 bp, Artificial Sequence
  ENSG00000151835_76 (sequence is synthesized)
gcattactcacaactataaaaaaccccatagggccttctgttttttgcctctttctttggagactgggctgccatttcatgtgaatggccactttgcactggattcagccagaaggaacc

SEQ ID NO: 428800 - DNA, 120 bp, Artificial Sequence
  ENSG00000151835_77 (sequence is synthesized)
tgtggcgtgatgataatggagttggtgttcgaagtgactggaataacagtttaatgacagcattaatagctcctgcatatgttgaattgctaatacagttaaaaaaacggtatttccctg

SEQ ID NO: 428801 - DNA, 120 bp, Artificial Sequence
  ENSG00000151835_78 (sequence is synthesized)
gttctgatccaacattatcagtgttacagaacacccctattcatgttgtaaaggacactttaaagaagtttttatcgtttttcccagttaaccgtcttgatctacagccagatttatatt

SEQ ID NO: 428802 - DNA, 120 bp, Artificial Sequence
  ENSG00000151835_79 (sequence is synthesized)
gtctagtgaaagcactttacaattgcattcacgaagacatgaaacgtcttttacctgttgtgcgggctccaaatattgatggctctgacttgcactctgcagttataattacttggatca

SEQ ID NO: 428803 - DNA, 120 bp, Artificial Sequence
  ENSG00000151835_80 (sequence is synthesized)
atatgtctacttctaataaaactagaccattttttgacaatttactacaggatgaattacaacaccttaaaaatgcagattataatatcaccacacgcaaaacagtagcagagaatgtct

SEQ ID NO: 428804 - DNA, 120 bp, Artificial Sequence
  ENSG00000151835_81 (sequence is synthesized)
ataggctgaaacatctccttttagaaattggtttcaacttggtttataactgtgatgaaactgctaatctttaccactgtcttatagatgcagatattcctgttagttatgtgacccctg

SEQ ID NO: 428805 - DNA, 120 bp, Artificial Sequence
  ENSG00000151835_82 (sequence is synthesized)
ctgatatcagatcttttttaatgacattttcctctcctgacactaattgccatattgggaagctgccttgtcgtctgcagcagactaatctaaaactttttcatagtttaaaacttttag

SEQ ID NO: 428806 - DNA, 120 bp, Artificial Sequence
  ENSG00000151835_83 (sequence is synthesized)
ttgattattgttttaaagatgcagaagaaaatgagattgaagttgagggattgccccttctcatcacactggacagtgttttgcaaacttttgatgcaaaacgacccaagtttctaacaa

SEQ ID NO: 428807 - DNA, 120 bp, Artificial Sequence
  ENSG00000151835_84 (sequence is synthesized)
catatcatgaattgattccatcccgcaaagacttgtttatgaatacattatatttgaaatatagtaatattttattgaactgtaaagttgcaaaagtgtttgacatttccagctttgctg

SEQ ID NO: 428808 - DNA, 120 bp, Artificial Sequence
  ENSG00000151835_85 (sequence is synthesized)
atttgttatcctctgtgttgcctcgagaatataagaccaaaagttgcacaaagtggaaagacaattttgcaagtgagtcttggcttaagaatgcatggcattttattagtgaatctgtaa

SEQ ID NO: 428809 - DNA, 120 bp, Artificial Sequence
  ENSG00000151835_86 (sequence is synthesized)
gtgtgaaagaagatcaggaagaaacaaaaccaacatttgacattgttgttgatactctaaaagactgggcattgcttccaggaacaaagtttactgtttcagccaaccagcttgtggttc

SEQ ID NO: 428810 - DNA, 120 bp, Artificial Sequence
  ENSG00000151835_87 (sequence is synthesized)
ctgaaggagatgttctgcttcctctcagccttatgcacattgcagtttttccaaatgcccagagtgataaagtttttcatgctctaatgaaagctggctgtattcagcttgctttgaaca

SEQ ID NO: 428811 - DNA, 120 bp, Artificial Sequence
  ENSG00000151835_88 (sequence is synthesized)
aaatctgttccaaagacagtgcatttgttcctttgttgtcatgtcacacagcaaatatagagagccccacaagcatcttgaaggctctacattatatggtccaaacttcaacatttagag

SEQ ID NO: 428812 - DNA, 120 bp, Artificial Sequence
  ENSG00000151835_89 (sequence is synthesized)
cagaaaaattagtagaaaatgattttgaggcacttttgatgtatttcaactgcaatttgaatcatttgatgtcccaagatgatataaaaattctaaagtcacttccgtgctataaatcca

SEQ ID NO: 428813 - DNA, 120 bp, Artificial Sequence
  ENSG00000151835_90 (sequence is synthesized)
tcagtggccgctatgtaagcattggaaaatttggaacatgctacgtacttacaaaaagtatcccttcagctgaagtggagaaatggacacagtcatcatcatctgcatttcttgaagaaa

SEQ ID NO: 428814 - DNA, 120 bp, Artificial Sequence
  ENSG00000151835_91 (sequence is synthesized)
aaatacacttaaaagaactatatgaggtgattggttgtgtacctgtagatgatcttgaggtatatttgaaacacctcttaccaaaaattgaaaatctctcttatgatgcaaaattagagc

SEQ ID NO: 428815 - DNA, 120 bp, Artificial Sequence
  ENSG00000151835_92 (sequence is synthesized)
acttgatctaccttaagaatagattatcaagtgctgaggaattatcagagattaaggaacaactttttgaaaaactggaaagtttattgataatccatgatgctaacagtagactaaagc

SEQ ID NO: 428816 - DNA, 120 bp, Artificial Sequence
  ENSG00000151835_93 (sequence is synthesized)
aagcaaagcatttctatgatagaactgtgagagtttttgaagttatgcttcctgaaaaattgtttattcctaatgatttctttaagaaattggaacaacttataaaacccaaaaatcatg

SEQ ID NO: 428817 - DNA, 120 bp, Artificial Sequence
  ENSG00000151835_94 (sequence is synthesized)
ttacatttatgacatcctgggtggaattcttaagaaatattggactaaaatacatactttctcagcagcagttgttacagtttgctaaggaaatcagtgtgagggctaatacagaaaact

SEQ ID NO: 428818 - DNA, 120 bp, Artificial Sequence
  ENSG00000151835_95 (sequence is synthesized)
ggtccaaagaaacattgcaaaatacagttgatatccttctgcatcatatattccaagaacgaatggatttgttatctggaaattttctgaaagaactatctttaataccattcttatgtc

SEQ ID NO: 428819 - DNA, 120 bp, Artificial Sequence
  ENSG00000151835_96 (sequence is synthesized)
ctgagcgggcccccgcggaattcattagatttcatcctcaatatcaagaggtaaatggaacacttcctcttataaagttcaatggagcacaggtaaatccaaaattcaagcaatgtgatg

SEQ ID NO: 428820 - DNA, 120 bp, Artificial Sequence
  ENSG00000151835_97 (sequence is synthesized)
tactccagctgttatggacatcctgccctattcttccagagaaagctacacccttaagcattaaagaacaagaaggtagtgaccttggtccacaagaacagcttgaacaagttttaaata

SEQ ID NO: 428821 - DNA, 120 bp, Artificial Sequence
  ENSG00000151835_98 (sequence is synthesized)
tgcttaatgttaacctggatcctcctcttgataaggtaatcaataactgcagaaacatatgcaacataacgacgttggatgaagaaatggtaaaaactagagcaaaagtcttaaggagca

SEQ ID NO: 428822 - DNA, 120 bp, Artificial Sequence
  ENSG00000151835_99 (sequence is synthesized)
tatatgaattcctcagtgcagaaaaaagggaatttcgttttcagttgcgaggggttgcttttgtgatggtagaagatggttggaaacttctgaagcctgaggaggtagtcataaacctag

SEQ ID NO: 428823 - DNA, 120 bp, Artificial Sequence
  ENSG00000151835_100 (sequence is synthesized)
aatatgaatctgattttaaaccttatttgtacaagctacctttagaacttggcacatttcaccagttgttcaaacacttaggtactgaagatattatttcaactaagcaatatgttgaag

SEQ ID NO: 428824 - DNA, 120 bp, Artificial Sequence
  ENSG00000151835_101 (sequence is synthesized)
tgttgagccgcatatttaaaaattctgagggcaaacaattagatcctaatgaaatgcgtacagttaagagagtagtttctggtctgttcaggagtctacagaatgattcagtcaaggtga

SEQ ID NO: 428825 - DNA, 120 bp, Artificial Sequence
  ENSG00000151835_102 (sequence is synthesized)
ggagtgatctcgagaatgtacgagaccttgcgctttacctcccaagccaggatggtagattggtaaagtcaagcatcttagtgtttgacgatgcgccacattataaaagtagaatccagg

SEQ ID NO: 428826 - DNA, 120 bp, Artificial Sequence
  ENSG00000151835_103 (sequence is synthesized)
ggaatattggtgtgcaaatgttagttgatctcagccagtgctacttagggaaagaccatggatttcacactaagttgataatgctctttcctcaaaaacttagacctcgattattgagca

SEQ ID NO: 428827 - DNA, 120 bp, Artificial Sequence
  ENSG00000151835_104 (sequence is synthesized)
gtatacttgaagaacaattagatgaagagactcccaaagtttgtcagtttggagcgttgtgttctcttcaaggaagattgcagttactcttgtcttctgaacagttcattacaggactga

SEQ ID NO: 428828 - DNA, 120 bp, Artificial Sequence
  ENSG00000151835_105 (sequence is synthesized)
ttagaattatgaagcatgaaaatgataatgcttttctggccaatgaagaaaaagccataagactttgcaaagccctaagagaaggattgaaagtatcctgctttgaaaagcttcaaacaa

SEQ ID NO: 428829 - DNA, 120 bp, Artificial Sequence
  ENSG00000151835_106 (sequence is synthesized)
cattaagagttaaaggttttaatcctattccccacagcagaagtgaaacttttgcttttttgaagcgatttggtaatgcagtcatcttgctctacattcaacattcagacagtaaagaca

SEQ ID NO: 428830 - DNA, 120 bp, Artificial Sequence
  ENSG00000151835_107 (sequence is synthesized)
ttaatttcctgttagcattggcaatgactcttaaatcagcaactgacaatttgatttctgacacttcatatttaattgctatgctaggatgcaatgatatttacaggattggtgagaaac

SEQ ID NO: 428831 - DNA, 120 bp, Artificial Sequence
  ENSG00000151835_108 (sequence is synthesized)
ttgacagtttaggagtgaaatatgactcttcggagccatcaaaactggaacttccaatgcctggcacaccaattcctgctgaaattcattacactctgcttatggacccaatgaatgttt

SEQ ID NO: 428832 - DNA, 120 bp, Artificial Sequence
  ENSG00000151835_109 (sequence is synthesized)
tttacccgggagaatatgttgggtaccttgttgatgctgaaggtggtgatatctatggatcataccagccaacatacacatatgcaattattgtacaagaagttgaaagagaagatgctg

SEQ ID NO: 428833 - DNA, 120 bp, Artificial Sequence
  ENSG00000151835_110 (sequence is synthesized)
acaattctagttttctaggaaagatatatcagatagatattggttatagtgaatataaaatagttagctctcttgatctgtataagttttcaagacctgaggaaagctctcaaagcaggg

SEQ ID NO: 428834 - DNA, 120 bp, Artificial Sequence
  ENSG00000151835_111 (sequence is synthesized)
acagtgctccttctacaccaaccagccccactgagttcctcacccctggcctgagaagcattcctcctcttttctctggtagagagagccacaagacttcttccaaacatcagtccccca

SEQ ID NO: 428835 - DNA, 120 bp, Artificial Sequence
  ENSG00000151835_112 (sequence is synthesized)
aaaagcttaaggttaattctttaccagaaatcttaaaagaagtgacatctgtggtggagcaagcatggaagcttccagaatcggaacgaaaaaagattattaggcggttgtatttgaaat

SEQ ID NO: 428836 - DNA, 120 bp, Artificial Sequence
  ENSG00000151835_113 (sequence is synthesized)
ggcatcctgacaaaaatccagagaaccatgacattgccaatgaagtttttaaacatttgcagaatgaaatcaacagattagaaaaacaggcttttctagatcaaaatgcagacagggcct

SEQ ID NO: 428837 - DNA, 120 bp, Artificial Sequence
  ENSG00000151835_114 (sequence is synthesized)
ccagacgaacattttcaacctcagcatcccgatttcagtcagacaaatactcatttcagagattctatacttcatggaatcaagaagcaacgagccataaatctgaaagacagcaacaga

SEQ ID NO: 428838 - DNA, 120 bp, Artificial Sequence
  ENSG00000151835_115 (sequence is synthesized)
acaaagaaaaatgccccccttcagccggacagacttactctcaaaggttctttgttcctcccactttcaagtcggttggcaatccagtggaagcacgcagatggctaagacaagccagag

SEQ ID NO: 428839 - DNA, 120 bp, Artificial Sequence
  ENSG00000151835_116 (sequence is synthesized)
caaacttctcagctgccaggaatgaccttcataaaaatgccaatgagtgggtgtgctttaaatgttacctttctaccaagttagctttgattgcagctgactatgctgtgaggggaaagt

SEQ ID NO: 428840 - DNA, 120 bp, Artificial Sequence
  ENSG00000151835_117 (sequence is synthesized)
ctgataaagatgtaaaaccaactgcacttgctcagaaaatagaggaatatagtcagcaacttgaaggactgacaaatgatgttcacacattggaagcttatggtgtagacagtttaaaaa

SEQ ID NO: 428841 - DNA, 120 bp, Artificial Sequence
  ENSG00000151835_118 (sequence is synthesized)
caagataccctgatttgcttccctttcctcagatcccaaatgacaggttcacttctgaggttgctatgagggtgatggaatgtactgcctgtatcataataaaacttgaaaattttatgc

SEQ ID NO: 428842 - DNA, 120 bp, Artificial Sequence
  ENSG00000151835_119 (sequence is synthesized)
aacaaaaagtgtgaagatatttaacgaaaaaaaaggtagatcttgaatgtgttgtagcacgaataaattgctgtacttcattaagcttcattgccaattagctaggaattgttaagcaca

SEQ ID NO: 428843 - DNA, 120 bp, Artificial Sequence
  ENSG00000151835_120 (sequence is synthesized)
ttgcagattgttcttggagaattctggagttgttatgaacatgaataccaacggaaaaccttaactgaatctaaaagaaaactattttgaagatggtggtgagctgcaaaatagctggat

SEQ ID NO: 428844 - DNA, 120 bp, Artificial Sequence
  ENSG00000151835_121 (sequence is synthesized)
ggatttgaatgattgggatgatacatcattgaactgcactttatataaccaaagcttagcagtttgttagataagagtctatgtatgtctctggttaggatgaagttaattttatgtttt

SEQ ID NO: 428845 - DNA, 120 bp, Artificial Sequence
  ENSG00000151835_122 (sequence is synthesized)
taacatggtatttttgaaggagctaatgaaacactggacatataattggtttaaacataaggggaattaagtctttgtagtctgtcatttttttaagtggatcctcttggatgcgttatt

SEQ ID NO: 428846 - DNA, 120 bp, Artificial Sequence
  ENSG00000151835_123 (sequence is synthesized)
ttctcatcagctggctctgatcatgaatttgttgtaattttatgttgtactcagtgcatttaagaaatggtagagtattttaatcctattacttgactaagagtgtgaaggtagtacttt

SEQ ID NO: 428847 - DNA, 120 bp, Artificial Sequence
  ENSG00000151835_124 (sequence is synthesized)
ttagagtgcactgagtgcactttacatctttatttaaatttttttttaacatcttatgtttacaggcttcctgtttgatgaagatagcaacggaaaactcaaaatggtggcagttcttat

SEQ ID NO: 428848 - DNA, 120 bp, Artificial Sequence
  ENSG00000151835_125 (sequence is synthesized)
taccagttgttagtattgtttctggaaactgcttgccaagacaacatttattaactgttagaacacttgctttatgtttgtgtgtacatattttccacaaatgttataatttatatagtg

SEQ ID NO: 428849 - DNA, 120 bp, Artificial Sequence
  ENSG00000151835_126 (sequence is synthesized)
tggttgaacaggatgcaatcttttgttgtctaaaggtgctgcagttaaaaaaaaaacaaccttttctttcaatatggcatgtagtggagtttttttaactttaaaaacatcaaaaattgt

SEQ ID NO: 428850 - DNA, 120 bp, Artificial Sequence
  ENSG00000151835_127 (sequence is synthesized)
taaaatcattgtgttatctagtagtttataattatcggcttatatttccccatgaatgatcagaactgacatttaattcatgtttgtctcgccatgcttctttactttaacatatttctt

SEQ ID NO: 428851 - DNA, 120 bp, Artificial Sequence
  ENSG00000151835_128 (sequence is synthesized)
ttgcagaatgtaaaaggtaatgataattagtttatataagtgtactggctgtaaatgatgctaaatatactttatgcaattaagggcttacagaacatgttgaaactttttttactttta

SEQ ID NO: 428852 - DNA, 120 bp, Artificial Sequence
  ENSG00000151835_129 (sequence is synthesized)
ttgggaataaggaatgtttgcacctccacattttattgcttctggatgtgaaatcatgtaattatttctgctgttatataaagtgccatacttttaataaaggaaaatgtacatatgaaa

SEQ ID NO: 428853 - DNA, 120 bp, Artificial Sequence
  ENSG00000151835_130 (sequence is synthesized)
ctgctcctcggccgccgcggcttcctctagcgtttcctcctcggcgcgggctgctgcgtacgggactgcgccatgcggatcccgccctcccggcccgcgcggggcctgtggacgcggtag

SEQ ID NO: 428854 - DNA, 120 bp, Artificial Sequence
  ENSG00000151838_0 (sequence is synthesized)
ggctctggcttaggaggcgctcaagtagagcggcaaaatggccctgagcccctggaccccagggctgggcgctggcgagaagctggtgcaggcggctgccgtctccactggcccctccct

SEQ ID NO: 428855 - DNA, 120 bp, Artificial Sequence
  ENSG00000151838_1 (sequence is synthesized)
ggagttatgcaccttaccctccaccctgggctcctcggtcgcggtcgaggcgctggagcagctgtttgttgtggaacaatcactgcaaagtgactattttaaatgtaatgaagaagctaa

SEQ ID NO: 428856 - DNA, 120 bp, Artificial Sequence
  ENSG00000151838_2 (sequence is synthesized)
gatctttcttaaggacattgctgtagctgttaagaaattggaagaaatgagaaaagccacaatcgatcttttggagattgaaagcatggaactcaacaaactatactatctattggaaac

SEQ ID NO: 428857 - DNA, 120 bp, Artificial Sequence
  ENSG00000151838_3 (sequence is synthesized)
tcttcccaatagcattaagagggaattggaagaatgtgtccgagacgctcgcagattaaatctttttgagataaatacaataaaaatgagaattacaaggacagagaatgaaatagagct

SEQ ID NO: 428858 - DNA, 120 bp, Artificial Sequence
  ENSG00000151838_4 (sequence is synthesized)
tctgaagaagaaaataactgacctgacaaaatataatgaagctctgggggagaagcaggaagagctagcaaggaagcatgcaaggtttgtcctgtcactcaaccaaactatggagaaaaa

SEQ ID NO: 428859 - DNA, 120 bp, Artificial Sequence
  ENSG00000151838_5 (sequence is synthesized)
agccaccaccactgtttacataaatgagacttataccaaaataaacttgaagagagaagacatagcattgcaaaaaaaatgtattcaagaggcagaggagctaatggaaaaagaaagggc

SEQ ID NO: 428860 - DNA, 120 bp, Artificial Sequence
  ENSG00000151838_6 (sequence is synthesized)
agaatatctaataagaaaacaagagttgactgcacagattaatgaatttgaaaatacccgtgaagtaaagagaatggagacttatcaaaagaagaaagaattggataaattacaaactaa

SEQ ID NO: 428861 - DNA, 120 bp, Artificial Sequence
  ENSG00000151838_7 (sequence is synthesized)
aatgtcaaaaataaaagaaacagttactgtttccgcagcggttcttagtgatcacaatttagagatagcacgactacacgaatcaataaggtattgggaacaagaggtcagtgagctaaa

SEQ ID NO: 428862 - DNA, 120 bp, Artificial Sequence
  ENSG00000151838_8 (sequence is synthesized)
gaaagaccttgcaattctggaggcgaaactgtgttttttcacagataacaaagaaaaactagatgatatatctaatgatgaaaaaaatgaattcctgaacaagataaaacagctggttga

SEQ ID NO: 428863 - DNA, 120 bp, Artificial Sequence
  ENSG00000151838_9 (sequence is synthesized)
aacactgcatgctgctcgtatggaatacaaagacctacgagagaaaatgaaaactcttgccagacaatataagattgttttaagtgaggaagaaaaagcttttttgcaaaaacaaaagat

SEQ ID NO: 428864 - DNA, 120 bp, Artificial Sequence
  ENSG00000151838_10 (sequence is synthesized)
acatcaaaaatatggaagaaggactcatcacactccaggaacttcaacaagcaacaaaaacagtgtatcagcaacaaatcaaaatcctgagtgctaacctggaaagagaaagtcagagat

SEQ ID NO: 428865 - DNA, 120 bp, Artificial Sequence
  ENSG00000151838_11 (sequence is synthesized)
gtgttataactcagtggaaaatggcttgcttgagaaaaaagcatgcacgttggacagccaagataaaagctgaaatacaagctattacagaaaaaattcagaatgcagaagttagacgaa

SEQ ID NO: 428866 - DNA, 120 bp, Artificial Sequence
  ENSG00000151838_12 (sequence is synthesized)
ttgaattacttaacgagaccagtttcagacaacaggagatcagtggatttgtggcacagattgaaaaacttacaacagaattaaaagaagaggagaaagcatttgttaacaaagaaaaaa

SEQ ID NO: 428867 - DNA, 120 bp, Artificial Sequence
  ENSG00000151838_13 (sequence is synthesized)
tgttaatgaaagagttaagcaagtatgaggaaatatttgttaaggaaacacaaattaacaaagaaaaggaagaagaactagttgagtatcttccacaacttcaggtggcagaacaagagt

SEQ ID NO: 428868 - DNA, 120 bp, Artificial Sequence
  ENSG00000151838_14 (sequence is synthesized)
ataaagagaaaagaagaaagttagaagagctcagtaatattattacagcacaaagacaggaggaagatttactgaacaatcacatttttctgtttacaagggacttttcaagatacatta

SEQ ID NO: 428869 - DNA, 120 bp, Artificial Sequence
  ENSG00000151838_15 (sequence is synthesized)
gcaacatggaagatgtaaaacaagaattacaacaattacgagatcaagaaagcaaaaaaaacaaagatcattttgaaactctaaagaacttagaaaatggattctatataaatgaccaaa

SEQ ID NO: 428870 - DNA, 120 bp, Artificial Sequence
  ENSG00000151838_16 (sequence is synthesized)
aagcagatcttctgctcctggaaaataaaaaattaaaagaatatattttatacttgaagaataacatagagaaatacagagaaggacaagaagccctcatgcacacctcaagcgacttgt

SEQ ID NO: 428871 - DNA, 120 bp, Artificial Sequence
  ENSG00000151838_17 (sequence is synthesized)
ctcggcaactaatagctcaggaggcacaatataaggatttgtgggctgaatttcagaccacagttaagatcttggtggacaatggtgaagagaccttgcaagacataaacaatctaacag

SEQ ID NO: 428872 - DNA, 120 bp, Artificial Sequence
  ENSG00000151838_18 (sequence is synthesized)
acaagctgcgtgaaagagatgaaaaaatgcagcatgtcagtacatggctacgagggagtcttgaagggctgcgtttgcttgtggaacaggaatcaccaatggaccttcttaagaagaaga

SEQ ID NO: 428873 - DNA, 120 bp, Artificial Sequence
  ENSG00000151838_19 (sequence is synthesized)
aacacattcgtacaagggttcatttcccagtggttaaatgtactgagaaaaatacattaacaaagtaactcaaggatacaactgctgtgaattcaaaagacagactactacaggaaaagt

SEQ ID NO: 428874 - DNA, 120 bp, Artificial Sequence
  ENSG00000151838_20 (sequence is synthesized)
gagtgcacttactttcatattttgcagctgttaatagaagtcttaaacatttaaaatttaactaattcacacaacctccaccaagtatcagtaaataaacttctaaacaataaaaatgga

SEQ ID NO: 428875 - DNA, 120 bp, Artificial Sequence
  ENSG00000151838_21 (sequence is synthesized)
gacttagttatccccaattatgccacaaacattcaattgaacattgatacttatttggggttgaatactcttgtagtgttatccaattctgcctttcacctaagagaattttctagataa

SEQ ID NO: 428876 - DNA, 120 bp, Artificial Sequence
  ENSG00000151838_22 (sequence is synthesized)
aattaaaattcagcatcagatctgttatgattgtttcttccttgttctgctctggttgactgggggagaggtggttttgataagagggtgacatcgttcattagggtctaacaagtggca

SEQ ID NO: 428877 - DNA, 120 bp, Artificial Sequence
  ENSG00000151838_23 (sequence is synthesized)
aatatgtgagaaatatagaatttttcaaaaggatgtttttcattgaccaataatatggttgtttgtagtaatttaaaaaattttatctcctcccaaagtactttaattatatcaaagagc

SEQ ID NO: 428878 - DNA, 120 bp, Artificial Sequence
  ENSG00000151838_24 (sequence is synthesized)
aatccaaacaaatcttgaaccaatctataaacagaaaacctgttatataaattattatctatttttgcaatacatcaaaatactgtattgatgaaaataaatagataacaaaaaacaata

SEQ ID NO: 428879 - DNA, 120 bp, Artificial Sequence
  ENSG00000151838_25 (sequence is synthesized)
acaaagaaaaactagatgatatatctaatgatgaaaaaaatgaattcctgaacaagataaaacagaaatcagaaacagctgacatttatttctcagaaagaatactttctgtcacaaaag

SEQ ID NO: 428880 - DNA, 120 bp, Artificial Sequence
  ENSG00000151846_0 (sequence is synthesized)
ctcttttacaaaataacccggtgaagcagctgagcccgagccgcccgccagcggccccgcagcagctccaagaaggaactaagagaccaaggccttcctgctgcccggacccgacaccgc

SEQ ID NO: 428881 - DNA, 120 bp, Artificial Sequence
  ENSG00000151846_1 (sequence is synthesized)
taccctggctccccgccggcagccggcagccagcggcagcggatcgaccccgttctgcggccgttgagtagttttcgatttcggctgatttttgtccctctgcgcttgcccccgctcccc

SEQ ID NO: 428882 - DNA, 120 bp, Artificial Sequence
  ENSG00000151846_2 (sequence is synthesized)
tccctccggctacgcccccggccccggcacgcgctctactcctgtaacggaaaggtcgcggcttgtgtgcctgcgggcagccgtgccgagaatgaaccccagcacccccagctacccaac

SEQ ID NO: 428883 - DNA, 120 bp, Artificial Sequence
  ENSG00000151846_3 (sequence is synthesized)
ggcctcgctctacgtgggggacctccaccccgacgtgactgaggcgatgctctacgagaagttcagcccggcagggcccatcctctccatccggatctgcagggacttgatcaccagcgg

SEQ ID NO: 428884 - DNA, 120 bp, Artificial Sequence
  ENSG00000151846_4 (sequence is synthesized)
ctcctccaactacgcgtatgtgaacttccagcatacgaaggacgcggagcatgctctggacaccatgaattttgatgttataaagggcaagccagtacgcatcatgtggtctcagcgtga

SEQ ID NO: 428885 - DNA, 120 bp, Artificial Sequence
  ENSG00000151846_5 (sequence is synthesized)
tccatcacttcgaaaaagtggagtgggcaacatattcgttaaaaatctggataagtccattaataataaagcactgtatgatacagtttctgcttttggtaacatcctttcgtgtaacgt

SEQ ID NO: 428886 - DNA, 120 bp, Artificial Sequence
  ENSG00000151846_6 (sequence is synthesized)
ggtttgtgatgaaaatggttccaagggttatggatttgtacactttgagacacacgaagcagctgaaagagctattaaaaaaatgaacggaatgctcctaaatggtcgcaaagtatttgt

SEQ ID NO: 428887 - DNA, 120 bp, Artificial Sequence
  ENSG00000151846_7 (sequence is synthesized)
tggacaatttaagtctcgtaaagaacgagaagctgaacttggagctagggcaaaagagttccccaatgtttacatcaagaattttggagaagacatggatgatgagcgccttaaggatct

SEQ ID NO: 428888 - DNA, 120 bp, Artificial Sequence
  ENSG00000151846_8 (sequence is synthesized)
ctttggcaagttcgggcccgccttaagtgtgaaagtaatgaccgatgaaagtggaaaatccaaaggatttggatttgtaagctttgaaaggcatgaagatgcacagaaagctgtagatga

SEQ ID NO: 428889 - DNA, 120 bp, Artificial Sequence
  ENSG00000151846_9 (sequence is synthesized)
gatgaatggaaaggagctcaatggaaaacaaatttacgttggtcgagctcagaaaaaagtggaacggcagacggaacttaagcgcacatttgaacagatgaagcaagataggatcaccag

SEQ ID NO: 428890 - DNA, 120 bp, Artificial Sequence
  ENSG00000151846_10 (sequence is synthesized)
ataccaggttgttaatctttatgtgaaaaatcttgatgatggtattgatgatgaacgtctccggaaagcgttttctccatttggtacaatcactagtgcaaaggttatgatggaaggtgg

SEQ ID NO: 428891 - DNA, 120 bp, Artificial Sequence
  ENSG00000151846_11 (sequence is synthesized)
tcgcagcaaagggtttggttttgtatgtttctcctccccagaagaagccactaaagcagttacagaaatgaacggtagaattgtggccacaaagccattgtatgtagctttagctcagcg

SEQ ID NO: 428892 - DNA, 120 bp, Artificial Sequence
  ENSG00000151846_12 (sequence is synthesized)
caaagaagagcgccaggcttacctcactaacgagtatatgcagagaatggcaagtgtacgagctgtgcccaaccagcgagcacctccttcaggttacttcatgacagctgtcccacagac

SEQ ID NO: 428893 - DNA, 120 bp, Artificial Sequence
  ENSG00000151846_13 (sequence is synthesized)
tcagaaccatgctgcatactatcctcctagccaaattgctcgactaagaccaagtcctcgctggactgctcagggtgccagacctcatccattccaaaataagcccagtgctatccgccc

SEQ ID NO: 428894 - DNA, 120 bp, Artificial Sequence
  ENSG00000151846_14 (sequence is synthesized)
tatgagaccagcttcttcacaggttccacgagtcatgtcaacgcagcgtgttgctaacacatcaacacagacagtgggtccacgtcctgcagctgctgctgctgctgcagctacccctgc

SEQ ID NO: 428895 - DNA, 120 bp, Artificial Sequence
  ENSG00000151846_15 (sequence is synthesized)
tgtgcgcacggttccacggtataaatatgctgcgggagttcgcaatcctcagcaacatcgtaatgcacagccacaagttacaatgcaacagcttgctgttcatgtacaaggtcaggaaac

SEQ ID NO: 428896 - DNA, 120 bp, Artificial Sequence
  ENSG00000151846_16 (sequence is synthesized)
tttgactgcctccaggttggcatctgcccctcctcaaaagcaaaagcaaatgttaggtgaacggctctttcctcttattcaagccatgcaccctactcttgctgggaaaatcactggcat

SEQ ID NO: 428897 - DNA, 120 bp, Artificial Sequence
  ENSG00000151846_17 (sequence is synthesized)
gttgttggagattgataattcagaacttctttatatgctcgagtctccagagtcactccgttctaaggttgatgaagctgtagctgtactacaagcccaccaagctaaagaggctaccca

SEQ ID NO: 428898 - DNA, 120 bp, Artificial Sequence
  ENSG00000151846_18 (sequence is synthesized)
gaaagcagttaacagtgctaccggtgttccaactgtttaaaattgatcagagaccacgaaaagaaatttgtgcttcaccgaagaaaaatatctaaacatcgagaaactatgggaaaaaaa

SEQ ID NO: 428899 - DNA, 120 bp, Artificial Sequence
  ENSG00000151846_19 (sequence is synthesized)
attgcaaaatctaaaataaaaaatgcaaaatctaaaataaaaaatggaaaggaaactttgaaccttatgtaccgagcaaatgcaaggtctagcaaatataatgctagtcctagattactt

SEQ ID NO: 428900 - DNA, 120 bp, Artificial Sequence
  ENSG00000151846_20 (sequence is synthesized)
attgatttaaaaacaaaaaaaagattacttaattttgatttaaaaacaaaaaatcgtaaaatacaaaaaccagttaatgttttgtagaccctgggaaaagaattttcagcaaagtacaaa

SEQ ID NO: 428901 - DNA, 120 bp, Artificial Sequence
  ENSG00000151846_21 (sequence is synthesized)
tagaccctgggaaaagaattttcagcaaagtacaaaaatttaaagcattcctttaattttttaattctttactgtggaatagctcaaaatgtccattctgttttaagtaacagaattgat

SEQ ID NO: 428902 - DNA, 120 bp, Artificial Sequence
  ENSG00000151846_22 (sequence is synthesized)
aaaatttcttaaacagtgaaaaaaagaaaaatcatcaattttactaatagtctttctttacattttctattattctatctcccactatatttcaaatatgaaaatcactttttcaccaaa

SEQ ID NO: 428903 - DNA, 120 bp, Artificial Sequence
  ENSG00000151846_23 (sequence is synthesized)
tcactttttcaccaaaattttaggtctttacataatagtgtttatttttaatattcataaatgaaaatatgcaatgacaaaatagtaattataaattcagtaacatttgttcaaaattgt

SEQ ID NO: 428904 - DNA, 120 bp, Artificial Sequence
  ENSG00000151846_24 (sequence is synthesized)
caattattaatttatactgcattatttttaaataaaaaataaatacatagttttaaaaatctaattgaacaggaggctaaacatggttctgatcacagagataatcacttttaatcattt

SEQ ID NO: 428905 - DNA, 120 bp, Artificial Sequence
  ENSG00000151846_25 (sequence is synthesized)
ggttttagtgtttctggtagttgattttcttcaataataattgtacatagttatttcttggtttatcaattttgtaatttaactattgacttcctgctgtaacaaataaggatatgtttc

SEQ ID NO: 428906 - DNA, 120 bp, Artificial Sequence
  ENSG00000151846_26 (sequence is synthesized)
atctacctcttcccaccatccctcctcctcctcccaatataatttatcactacttgtagctcctttattggtaatattaattaatataaatatttataattaatgttacacctagtgaat

SEQ ID NO: 428907 - DNA, 120 bp, Artificial Sequence
  ENSG00000151846_27 (sequence is synthesized)
tgtataaaaggacagcccatttgagcattctcctttaagatgagtagaggctgtgacattgcactacatagaaatataattataccatattactttgcaataaactatgtattatagaga

SEQ ID NO: 428908 - DNA, 120 bp, Artificial Sequence
  ENSG00000151849_0 (sequence is synthesized)
ggggctccgacagaggcggcgattgtggcggcccatttgtaaatgctgcggagattgaggtgtcggttcgtgctgctgagctgcccaggcttcacggagcggtgttggaaatcaatagct

SEQ ID NO: 428909 - DNA, 120 bp, Artificial Sequence
  ENSG00000151849_1 (sequence is synthesized)
cttctagcctttgcattgtttaaatataatagtgtcattggactaagatgttcctgatgccaacctcttcagagttaaacagtgggcagaacttcctaacccagtggatgaccaatcctt

SEQ ID NO: 428910 - DNA, 120 bp, Artificial Sequence
  ENSG00000151849_2 (sequence is synthesized)
ctcgggctggggtcatattaaatcgtggatttcctattttggaagcagacaaagagaagcgagcagctgtggacatttctaccagctttcctattaaaggcacacatttttctgatagct

SEQ ID NO: 428911 - DNA, 120 bp, Artificial Sequence
  ENSG00000151849_3 (sequence is synthesized)
tcagctttataaatgaagaagattcacttcttgaagaacagaagttggagtcaaacaacccttacaaaccacagtcagataaatctgaaacccatacagcctttccttgcattaaaaagg

SEQ ID NO: 428912 - DNA, 120 bp, Artificial Sequence
  ENSG00000151849_4 (sequence is synthesized)
gaccacaggtagcggcatgtcacagtgctcctggacaccaggaagaaaacaaaaatgacttcatcccagatcttgcgagtgaattcaaagaaggggcttataaagacccactttttaaaa

SEQ ID NO: 428913 - DNA, 120 bp, Artificial Sequence
  ENSG00000151849_5 (sequence is synthesized)
aacttgaacagctgaaagaagtacaacagaagaagcaggaacaattgaagaggcaacagttggagcaactacagagactcatggaagaacaagagaagctgctcaccatggtgtctgggc

SEQ ID NO: 428914 - DNA, 120 bp, Artificial Sequence
  ENSG00000151849_6 (sequence is synthesized)
agtgcacacttccaggtttgagtttactgcctgatgatcagagccagaagcacaggtctccaggaaataccaccactggagagagagccacatgctgcttcccatcatatgtctacccgg

SEQ ID NO: 428915 - DNA, 120 bp, Artificial Sequence
  ENSG00000151849_7 (sequence is synthesized)
acccaacccaggaagaaacatacccgtccaacattttatcccatgagcaaagcaacttctgtagaactgctcatggagattttgtcttaacttcaaaacgtgcgtctcctaatttatttt

SEQ ID NO: 428916 - DNA, 120 bp, Artificial Sequence
  ENSG00000151849_8 (sequence is synthesized)
ctgaggcacagtatcaagaagcacctgtggaaaaaaataatttaaaagaagaaaaccgtaaccatcctacaggagaaagtatcttatgttgggagaaagtgacagaacagattcaggaag

SEQ ID NO: 428917 - DNA, 120 bp, Artificial Sequence
  ENSG00000151849_9 (sequence is synthesized)
caaatgataagaacttacaaaaacatgatgattcctcagaagtggctaatattgaagaaaggcccattaaagctgctattggagaaaggaaacagacctttgaagattacttagaagaac

SEQ ID NO: 428918 - DNA, 120 bp, Artificial Sequence
  ENSG00000151849_10 (sequence is synthesized)
aaattcagttggaagagcaagaactgaagcaaaaacagctgaaggaagcagaaggaccattgccaatcaaagcaaaaccaaaacaaccatttttaaaacgaggagaaggtttagctagat

SEQ ID NO: 428919 - DNA, 120 bp, Artificial Sequence
  ENSG00000151849_11 (sequence is synthesized)
ttactaatgccaaatctaagtttcaaaaaggcaaagaaagtaaactagtgactaaccagagcacttccgaggaccagccgctgtttaaaatggatagacagcaactccagcggaaaaccg

SEQ ID NO: 428920 - DNA, 120 bp, Artificial Sequence
  ENSG00000151849_12 (sequence is synthesized)
ctcttaaaaataaagagctgtgtgcagacaaccctatccttaaaaaggacagtaaagctagaaccaagagtggttctgtcaccctcagtcagaagccgaaaatgctgaagtgtagtaaca

SEQ ID NO: 428921 - DNA, 120 bp, Artificial Sequence
  ENSG00000151849_13 (sequence is synthesized)
ggaaaagtctttctccgtcaggattgaaaatacagacggggaagaaatgtgatgggcagtttagagaccagatcaaatttgaaaacaaagtcacatctaataataaagaaaatgtaactg

SEQ ID NO: 428922 - DNA, 120 bp, Artificial Sequence
  ENSG00000151849_14 (sequence is synthesized)
agtgtccaaaaccttgcgatactggctgcacagggtggaataagacacaaggtaaagacagacttcctctttcaacagggccggccagccggctggctgctaagagccccataagggaga

SEQ ID NO: 428923 - DNA, 120 bp, Artificial Sequence
  ENSG00000151849_15 (sequence is synthesized)
ccatgaaagagtctgaatcttctcttgacgtttctcttcagaaaaagttagagacttgggaacgagaaaaggaaaaggaaaatttggaattagatgaatttttgtttttagaacaagctg

SEQ ID NO: 428924 - DNA, 120 bp, Artificial Sequence
  ENSG00000151849_16 (sequence is synthesized)
ctgatgaaatatcattttctagtaattcctcatttgtactgaaaatcttagaaagggatcaacagatctgcaaaggtcaccggatgtcttccacccctgtcaaagctgtgccacagaaga

SEQ ID NO: 428925 - DNA, 120 bp, Artificial Sequence
  ENSG00000151849_17 (sequence is synthesized)
caaatccggcagatcccattagtcattgtaaccgcagtgaggatttggaccacactgcacgtgagaaggagagtgagtgtgaagtcgcacccaaacaacttcattcattgtcctcagctg

SEQ ID NO: 428926 - DNA, 120 bp, Artificial Sequence
  ENSG00000151849_18 (sequence is synthesized)
atgaattgagggaacagccttgtaaaatcaggaaagccgtccaaaagagcacttctgaaaatcagactgaatggaatgcacgtgacgatgaaggtgttccaaatagtgacagtagcactg

SEQ ID NO: 428927 - DNA, 120 bp, Artificial Sequence
  ENSG00000151849_19 (sequence is synthesized)
actctgaggaacagcttgatgttaccataaaaccatcgactgaggatagagagaggggcatcagcagcagagaggatagcccacaagtctgtgatgataaggggccttttaaggacacca

SEQ ID NO: 428928 - DNA, 120 bp, Artificial Sequence
  ENSG00000151849_20 (sequence is synthesized)
ggacccaagaagataaaaggagagatgttgatctggatttgtctgataaagattacagtagcgatgagtctatcatggaaagcataaaacataaagtgtctgagccctcgagatcctcat

SEQ ID NO: 428929 - DNA, 120 bp, Artificial Sequence
  ENSG00000151849_21 (sequence is synthesized)
ggactgaccttgaagagaatttgtgtaaccatgatgttgttcttgggaatgaatccacttatgggacgccgcagacatgctaccctaataatgaaataggtatcctggacaaaacaataa

SEQ ID NO: 428930 - DNA, 120 bp, Artificial Sequence
  ENSG00000151849_22 (sequence is synthesized)
aaaggaagattgcaccagtcaagaggggagaagacttgagcaagtccaggaggagcagaagtcctcctacatcggagctgatgatgaaattctttccttctttgaaaccaaaaccaaagt

SEQ ID NO: 428931 - DNA, 120 bp, Artificial Sequence
  ENSG00000151849_23 (sequence is synthesized)
cagattcacacttgggaaatgaactcaagttaaacataagtcaagaccaaccacctggtgacaatgctcgatcccaggttttgagagagaaaattattgaattggaaacagaaatagaaa

SEQ ID NO: 428932 - DNA, 120 bp, Artificial Sequence
  ENSG00000151849_24 (sequence is synthesized)
agtttaaagctgagaacgcatctttagctaaacttcgcattgaacgagaaagtgccttggaaaaactcaggaaagaaattgcagacttcgaacaacagaaagcaaaagaattagctcgaa

SEQ ID NO: 428933 - DNA, 120 bp, Artificial Sequence
  ENSG00000151849_25 (sequence is synthesized)
tagaagagtttaaaaaggaggagatgaggaagctacaaaaggaacgtaaagtttttgaaaagtatactacagctgcaagaacttttccagataaaaaggaacgtgaagaaatacagactt

SEQ ID NO: 428934 - DNA, 120 bp, Artificial Sequence
  ENSG00000151849_26 (sequence is synthesized)
taaaacagcaaatagcagatttacgggaagatttgaaaagaaaggaaaccaaatggtcaagtacacacagccgtctcagaagccagatacaaatgttagtcagagagaacacagacctcc

SEQ ID NO: 428935 - DNA, 120 bp, Artificial Sequence
  ENSG00000151849_27 (sequence is synthesized)
gggaagaaataaaagtgatggaaagattccgactggatgcctggaagagagcagaagccatagagagcagcctcgaggtggagaagaaggacaagcttgcgaacacatctgttcgatttc

SEQ ID NO: 428936 - DNA, 120 bp, Artificial Sequence
  ENSG00000151849_28 (sequence is synthesized)
aaaacagtcagatttcttcaggaacccaggtagaaaaatacaagaaaaattatcttccaatgcaaggcaatccacctcgaagatccaagtctgcacctcctcgtgatttaggcaatttgg

SEQ ID NO: 428937 - DNA, 120 bp, Artificial Sequence
  ENSG00000151849_29 (sequence is synthesized)
ataagggacaagctgcctctcccagggagccacttgaaccactgaacttcccagatcctgaatataaagaggaggaggaagaccaagacatacagggagaaatcagtcatcctgatggaa

SEQ ID NO: 428938 - DNA, 120 bp, Artificial Sequence
  ENSG00000151849_30 (sequence is synthesized)
aggtggaaaaggtttataagaatgggtgccgtgttatactgtttcccaatggaactcgaaaggaagtgagtgcagatgggaagaccatcactgtcactttctttaatggtgacgtgaagc

SEQ ID NO: 428939 - DNA, 120 bp, Artificial Sequence
  ENSG00000151849_31 (sequence is synthesized)
aggtcatgccagaccaaagagtgatctactactatgcagctgcccagaccactcacacgacatacccggagggactggaagtcttacatttctcaagtggacaaatagaaaaacattacc

SEQ ID NO: 428940 - DNA, 120 bp, Artificial Sequence
  ENSG00000151849_32 (sequence is synthesized)
cagatggaagaaaagaaatcacgtttcctgaccagactgttaaaaacttatttcctgatggacaagaagaaagcattttcccagatggtacaattgtcagagtacaacgtgatggcaaca

SEQ ID NO: 428941 - DNA, 120 bp, Artificial Sequence
  ENSG00000151849_33 (sequence is synthesized)
aactcatagagtttaataatggccaaagagaactacatactgcccagttcaagagacgggaatacccagatggcactgttaaaaccgtatatgcaaacggtcatcaagaaacgaagtaca

SEQ ID NO: 428942 - DNA, 120 bp, Artificial Sequence
  ENSG00000151849_34 (sequence is synthesized)
gatccggtcggataagagttaaggacaaggagggtaatgtgctaatggacacggagctgtgacgatcctcatgtgatcatgaagtaacagtaactgactttttatgttaaaaaatgtaca

SEQ ID NO: 428943 - DNA, 120 bp, Artificial Sequence
  ENSG00000151849_35 (sequence is synthesized)
tttactgtggattctgtttaatttattgtgtatgtgtggggaaaagattagattctaaaataaaagtttaccctgtggcatcttcatttttatattctttgaaatgcaatgatagctctc

SEQ ID NO: 428944 - DNA, 120 bp, Artificial Sequence
  ENSG00000151849_36 (sequence is synthesized)
atttataattcactaccctgtctttcaatagactaaggaaagcattttgactgtttagaaattgtgtacaggtttttacagtaagtgggtgtgtttattggttagaaatggctataaaaa

SEQ ID NO: 428945 - DNA, 120 bp, Artificial Sequence
  ENSG00000151849_37 (sequence is synthesized)
aaaaccaagaagtacaggaagtacatcacctagatgtcccacagacacatcagccgtagagcactggacttgtacagaaggtgtactcaaggagtaaacacgtgtctctgtagccaaaat

SEQ ID NO: 428946 - DNA, 120 bp, Artificial Sequence
  ENSG00000151849_38 (sequence is synthesized)
attactatgttcagttagtaccaaaattagaccatttgatcttctacagaggatcattaattattataacagaatgggaagttacaacagtggatgaatataaataggtcacacacaaca

SEQ ID NO: 428947 - DNA, 120 bp, Artificial Sequence
  ENSG00000151849_39 (sequence is synthesized)
ggtagtaatcatggtgaagagaaagcagttataacaaggctgactttgtaatgtaatgtctcaaaatgggatacttgagagtggaggggggcatgaacgatgactagccagtgttaaccc

SEQ ID NO: 428948 - DNA, 120 bp, Artificial Sequence
  ENSG00000151849_40 (sequence is synthesized)
atggaccacagctaccctgatgttaccacagtgagattactgtagcctcatggaagcaagatgtccctgaaggatgggcaagtcacttacttacttacttgtaaatttatataataaata

SEQ ID NO: 428949 - DNA, 120 bp, Artificial Sequence
  ENSG00000151849_41 (sequence is synthesized)
attacagattggtctagatagaccttacctgtcacatatactatgaatcaggttttgttaatgaaatctatcaattccaggtgacttaactgaatatgaaaaataaaactttttgaagaa

SEQ ID NO: 428950 - DNA, 120 bp, Artificial Sequence
  ENSG00000151849_42 (sequence is synthesized)
aaacatttcagaatgtaaggaataaacaatttatacccaacttaataaaacatttcttaataaatgtttttgaacatttgaatgaatttgaattaataaatgtaattgaagctcctgtgc

SEQ ID NO: 428951 - DNA, 120 bp, Artificial Sequence
  ENSG00000151849_43 (sequence is synthesized)
ggacatattacaaaaagtttataccatagccacaagggcatttatgttttaactaaatacccagttatttggtgaagccaaattccacaggtcttagatgcctcttttatctgcacctta

SEQ ID NO: 428952 - DNA, 120 bp, Artificial Sequence
  ENSG00000151849_44 (sequence is synthesized)
caccttgtgattgtctctgaaatacatttgggtctgtcaggctgtttcatcacctgtctcttccccaggattgtaaactctgagacaagatactgtctttcttggacatctaggacttaa

SEQ ID NO: 428953 - DNA, 120 bp, Artificial Sequence
  ENSG00000151849_45 (sequence is synthesized)
ctaaggaaatgtgtgatcatactaataaaattttcaattaaatattaaatctaactcttgacaattttattctaataggcaatccacctcgaagatccaagtctgcacctcctcgtgatt

SEQ ID NO: 428954 - DNA, 120 bp, Artificial Sequence
  ENSG00000151849_46 (sequence is synthesized)
caggtagaaaaatacaagaaaaattatcttccaatgcaaggcacagcacagccgcctcacacgcccagcagcttgttggctgaccacctgcctccgctctcctccttcaggccattctcc

SEQ ID NO: 428955 - DNA, 120 bp, Artificial Sequence
  ENSG00000151849_47 (sequence is synthesized)
cgtaacatccagctctgttacactttttaacatggaggtcagattctggcacttgctcgagacccttccaagcaatccacctcgaagatccaagtctgcacctcctcgtgatttaggcaa

SEQ ID NO: 428956 - DNA, 120 bp, Artificial Sequence
  ENSG00000151876_0 (sequence is synthesized)
agacgcgtcacccacgctgcgggcaagccatggcgggaagcgagccgcgcagcggaacaaactcgccgccgccgcccttcagcgactggggccgcctggaggcggccatcctcagcggct

SEQ ID NO: 428957 - DNA, 120 bp, Artificial Sequence
  ENSG00000151876_1 (sequence is synthesized)
ggaagaccttctggcagtcagtgagcaaggagagggtggcgcgtacgacctcacgggaggaggtggatgaggcggccagcaccctgacgcggctgccgattgatgtacagctatatattt

SEQ ID NO: 428958 - DNA, 120 bp, Artificial Sequence
  ENSG00000151876_2 (sequence is synthesized)
tgtcctttctttcacctcatgatctgtgtcagttgggaagtacaaatcattattggaatgaaactgtaagagatccaattctgtggagatactttttgttgagggatcttccttcttggt

SEQ ID NO: 428959 - DNA, 120 bp, Artificial Sequence
  ENSG00000151876_3 (sequence is synthesized)
cttctgttgactggaagtctcttccagatctagaaatcttaaaaaagcctatatctgaggtcactgatggtgcattttttgactacatggcagtctatagaatgtgctgtccatacacaa

SEQ ID NO: 428960 - DNA, 120 bp, Artificial Sequence
  ENSG00000151876_4 (sequence is synthesized)
gaagagcttcaaaatccagccgtcctatgtatggagctgtcacttcttttttacactccctgatcattcagaatgaaccacgatttgctatgtttggaccaggtttggaagaattgaata

SEQ ID NO: 428961 - DNA, 120 bp, Artificial Sequence
  ENSG00000151876_5 (sequence is synthesized)
cctctttggtgttgagcttgatgtcttcagaggaactttgcccaacagctggtttgcctcagaggcagattgatggtattggatcaggagtcaattttcagttgaacaaccaacataaat

SEQ ID NO: 428962 - DNA, 120 bp, Artificial Sequence
  ENSG00000151876_6 (sequence is synthesized)
aatgaaggtgatgatcaacaaggaagccggtacagtgtgattccacagattcaaaaagtgtgtgaagttgtagatgggttcatctatgttgcaaatgctgaagctcataaaagacatgaa

SEQ ID NO: 428963 - DNA, 120 bp, Artificial Sequence
  ENSG00000151876_7 (sequence is synthesized)
tggcaagatgaattttctcatattatggcaatgacagatccagcctttgggtcttcgggaagaccattgttggttttatcttgtatttctcaaggggatgtaaaaagaatgccctgtttt

SEQ ID NO: 428964 - DNA, 120 bp, Artificial Sequence
  ENSG00000151876_8 (sequence is synthesized)
tatttggctcatgagctgcatctgaatcttctaaatcacccatggctggtccaggatacagaggctgaaactctgactggttttttgaatggcattgagtggattcttgaagaagtggaa

SEQ ID NO: 428965 - DNA, 120 bp, Artificial Sequence
  ENSG00000151876_9 (sequence is synthesized)
tctaagcgtgcaagatgattctcttttcagatcttgggaactgaaaccatttgaaatttattactaaggtcgtgatgtgaatatttgctcagtcagcccaccttgtcctgcctttttgca

SEQ ID NO: 428966 - DNA, 120 bp, Artificial Sequence
  ENSG00000151876_10 (sequence is synthesized)
gataggctttcatttggacagctataactgctgtgttttttatattatttttactctttaccataaatcaattacaagaaaagagtttcagtcctagtatttagccccaaaatgaacctt

SEQ ID NO: 428967 - DNA, 120 bp, Artificial Sequence
  ENSG00000151876_11 (sequence is synthesized)
taaacatttttttggtaatttttatattttctgtctttttaaaaatattaaattctggaaaaaacaagtttgtgcctctcattccctgagtttctattcttttgggtataaagattgcct

SEQ ID NO: 428968 - DNA, 120 bp, Artificial Sequence
  ENSG00000151876_12 (sequence is synthesized)
tagtgagaaatagcaaatttgctaaactttctattcagtcttttcaagggttcataagtggttatcagaaaagaaatttttatctattcttaataaatacactgcttaaagactgaaaaa

SEQ ID NO: 428969 - DNA, 120 bp, Artificial Sequence
  ENSG00000151876_13 (sequence is synthesized)
tacctttttagactttactgtggcttcttaagaatatgatggcttattttatcaatgtgattttctgacccttactattaatagtgtgttctcacacttttgtgtgtattaggatcacct

SEQ ID NO: 428970 - DNA, 120 bp, Artificial Sequence
  ENSG00000151876_14 (sequence is synthesized)
gggaagcttgttaaacatgttaacaagctgattcctaccctggtggattttattcctagatttgggttgtgtgaatcagatttgggcatctgttttttccaagcacccagggaattctga

SEQ ID NO: 428971 - DNA, 120 bp, Artificial Sequence
  ENSG00000151876_15 (sequence is synthesized)
tgcattccaaagtttggtactagagctatacaatatttttttgctttatgcttctgcatttttttgatactgacattttgtctgcttctggctttattcaaataatctatgcaaataact

SEQ ID NO: 428972 - DNA, 120 bp, Artificial Sequence
  ENSG00000151876_16 (sequence is synthesized)
atgaaaaattttatctttgttttatccaaatagtaaagagatgtgatggtagggtgttaagtagattagttgagaacactattcatatattctgaataattgccattcagaatgctattt

SEQ ID NO: 428973 - DNA, 120 bp, Artificial Sequence
  ENSG00000151876_17 (sequence is synthesized)
ttgtgtgaaatcaaaatatcattgggccatgagctagtattataatatctttcccaaatcctttgtgaacaaggtagaatataaatacataatatattgtatatatattatagttctcta

SEQ ID NO: 428974 - DNA, 120 bp, Artificial Sequence
  ENSG00000151876_18 (sequence is synthesized)
atacactggtttgaatttctattcaatttattttccctgtgatctgttaggcatgaaagcagttgcaattactttctgttattacagggctatctataaaaagaaaacttagaagcaaaa

SEQ ID NO: 428975 - DNA, 75 bp, Artificial Sequence
  ENSG00000151876_19 (sequence is synthesized)
ctgagttatttctgttgctcaaataatacagatgaagaaactgaaattcagactctatagaatgtgctgtccata

SEQ ID NO: 428976 - DNA, 120 bp, Artificial Sequence
  ENSG00000151876_20 (sequence is synthesized)
gaagagtactgtgatttttttccctcagtttatgtttggatcctggtaaatttttgttccctcgctttgttagttttttattttattattttcaaaactattaaaagtaatgcaaattaa

SEQ ID NO: 428977 - DNA, 120 bp, Artificial Sequence
  ENSG00000151876_21 (sequence is synthesized)
tggtaattttcatgttaatctacagttaattcaaacactttgagcttgacattcttgttaaaaagaaagaaattcattttaaattaattatttgctataatgaagtacagtactttggtt

SEQ ID NO: 428978 - DNA, 120 bp, Artificial Sequence
  ENSG00000151876_22 (sequence is synthesized)
gttgggagccctaccaggttccactgaactgacagaattaatttacttactataagaaagcttcctcttaattcctcaaatttgtacaatccagcctttaagattatgtgaaaataaatt

SEQ ID NO: 428979 - DNA, 120 bp, Artificial Sequence
  ENSG00000151881_0 (sequence is synthesized)
ggctccgaccgaggggcggagccgctgctcgagctgctgctggattgaactcagagaagccgggggtgctggaaatgtaaacaagaatagactgttcattcctgatggcttttagtctat

SEQ ID NO: 428980 - DNA, 120 bp, Artificial Sequence
  ENSG00000151881_1 (sequence is synthesized)
actaacatattgtttgtcatggcatccgagactgaaaagacccatgctttactgcagacttgtagcactgaatctcttatttccagccttggtctgggggcattttgcctcgtagctgac

SEQ ID NO: 428981 - DNA, 120 bp, Artificial Sequence
  ENSG00000151881_2 (sequence is synthesized)
agacttcttcagttttccacaattcagcaaaatgactggcttcgtgctctctcagataatgcagtacattgtgtaattggcatgtggtcatgggcggtagtcactggaatcaagaagaag

SEQ ID NO: 428982 - DNA, 120 bp, Artificial Sequence
  ENSG00000151881_3 (sequence is synthesized)
actgactttggagaaatcattttagctggatttttagcctctgttattgatgtagaccacttttttctagctggatccatgtctttaaaggctgctttgactctcccgcgaagacctttc

SEQ ID NO: 428983 - DNA, 120 bp, Artificial Sequence
  ENSG00000151881_4 (sequence is synthesized)
cttcactgttctactgtgattcccgttgtggttctgaccctgaaatttactatgcaccttttcaagctcaaagactcatggtgctttcttccctggatgttatttatatcctggacttca

SEQ ID NO: 428984 - DNA, 120 bp, Artificial Sequence
  ENSG00000151881_5 (sequence is synthesized)
catcatatccgagatgggattcgtcatggtttgtggatatgcccatttggaaaaacttctcctttgccattctggctttatgtaataatcacatcatctttacctcacatctgttcattc

SEQ ID NO: 428985 - DNA, 120 bp, Artificial Sequence
  ENSG00000151881_6 (sequence is synthesized)
gttatgtatttaacaggaaccagacaaatgatgtcttcaaaacatggagttcgtattgatgtctgaggtacacggcagtcttagagaagcaaatggctcagatgatgataattaagagta

SEQ ID NO: 428986 - DNA, 120 bp, Artificial Sequence
  ENSG00000151881_7 (sequence is synthesized)
gccaacattaaagttaatttttaaaaatacagttaggtgtttatattatttagttattataattctgcaatcctcttgctcaggaagtgtatacaacttttttaaaaattatacttgtta

SEQ ID NO: 428987 - DNA, 120 bp, Artificial Sequence
  ENSG00000151881_8 (sequence is synthesized)
ttattctacttctctcttctatgacaactctagtgcaatattagagtttcatttattccacaatatatttttactgtttttttctatttatctggctttactagtagttcttttagatta

SEQ ID NO: 428988 - DNA, 120 bp, Artificial Sequence
  ENSG00000151881_9 (sequence is synthesized)
cagctcaaattttagggtaactaatttgtaaagagttaacattatatttggatccaattttcctgagatattgaaatagtgaaatcaccaaataaatgatatgaatcatttaactataca

SEQ ID NO: 428989 - DNA, 120 bp, Artificial Sequence
  ENSG00000151881_10 (sequence is synthesized)
aatgtatagttaatgctaacatgtatttattttcatatatgttgatcctgagtgaaatttaatttgcagaatgctttatgagttatgattactggcaaaaccttcagagcacttgtgaca

SEQ ID NO: 428990 - DNA, 120 bp, Artificial Sequence
  ENSG00000151881_11 (sequence is synthesized)
catcattataatatccagtagctaacattagatctagcttattatttcagaaattaatttaggaaataattattaaaacatgttggctacagtagcactttactgaagtagtattttttg

SEQ ID NO: 428991 - DNA, 120 bp, Artificial Sequence
  ENSG00000151881_12 (sequence is synthesized)
gtatctctagcctagaatctcgtgtgttagttttaactgttttgaaaataataagtaacattaacaaaatgttgatatttggatcataaccgtaacatttgaatttatgcaaaaaaaaga

SEQ ID NO: 428992 - DNA, 120 bp, Artificial Sequence
  ENSG00000151881_13 (sequence is synthesized)
ccagaaatgtcatttcaaatgtaaattcctgaatgtaccattaaaattattttagttgctatcagtttgtttatatactattttatatactattctaaaatattttactctgcctgatac

SEQ ID NO: 428993 - DNA, 120 bp, Artificial Sequence
  ENSG00000151881_14 (sequence is synthesized)
tgaaagacagcatatatttttttcaaaataaagttttaggaaatttgctttttcctttttctttcaggttgatcttctattaaaatgattcctctttattagagaaggaaaatttagttg

SEQ ID NO: 428994 - DNA, 120 bp, Artificial Sequence
  ENSG00000151881_15 (sequence is synthesized)
ctatacatcttatatttgcacagtttattaaagtcagtgccctaaaggtacctgcttttctttgtggcatatatggcatctgctgtcttcagattttcttacacttttgtgatttataat

SEQ ID NO: 428995 - DNA, 120 bp, Artificial Sequence
  ENSG00000151881_16 (sequence is synthesized)
gttagtgattggtgccttattctctgaggaaagatggagggttcataaagcaatgccttatccacagcagattttcttgtatattaagttaaacagaattctgtaaattattatgaaggt

SEQ ID NO: 428996 - DNA, 120 bp, Artificial Sequence
  ENSG00000151881_17 (sequence is synthesized)
tcaagctctttaggggagttttttttcttgttgttaacaaattggttgcaatctattatattttgcaattgattagatattacagtctacttatttttcaagagtaattattgtataagt

SEQ ID NO: 428997 - DNA, 120 bp, Artificial Sequence
  ENSG00000151881_18 (sequence is synthesized)
ttggttggtataatggtaaatattatatagtgggggtaaatttgattagagttttttttttaagcactggcttcagaaatccatggaaataaagtctgtatcttgtgtaacaattcctga

SEQ ID NO: 428998 - DNA, 120 bp, Artificial Sequence
  ENSG00000151881_19 (sequence is synthesized)
ctcagagaagccggggtgttgaatgtttgttttctaaaggagacaatgattcataatttgtgacactgtaaatcctgaggtttatagaaaggattcatgactttgtaatggagttttgat

SEQ ID NO: 428999 - DNA, 120 bp, Artificial Sequence
  ENSG00000151881_20 (sequence is synthesized)
gcttgagtaacctgcaggagaggatgacactttcgatgtcagagctgcacttgtgggcccaggatttggagaagtggagagaaggtctgatgggagttgaaggagctgcaggtccagctt

SEQ ID NO: 429000 - DNA, 79 bp, Artificial Sequence
  ENSG00000151881_21 (sequence is synthesized)
taaaaatacaaaaattaactgggcgtgctggtgtgcacctgtagtttcagctattcgggaggctgaggcagacaatggg

SEQ ID NO: 429001 - DNA, 87 bp, Artificial Sequence
  ENSG00000151881_22 (sequence is synthesized)
gggccactgcactgcagcctgtgtgacagagggagactgtcttaaaaaataaacataaaataaataaataagaatgctacataggca

SEQ ID NO: 429002 - DNA, 120 bp, Artificial Sequence
  ENSG00000151881_23 (sequence is synthesized)
ctctatggctccgaccgaggggcggagccgctgctcgagctgctgctggattgaactcagagaagccggggctatttcgtgtagtggagcccatggcctccaagaagaggaactttctct

SEQ ID NO: 429003 - DNA, 120 bp, Artificial Sequence
  ENSG00000151881_24 (sequence is synthesized)
accacaagacaaattttggaaaggaatctgattggctcagcctggaccactttcattactagattagtcaccattattagggaaatggaaaactctaattgggtgctggaaatgtaaaca

SEQ ID NO: 429004 - DNA, 120 bp, Artificial Sequence
  ENSG00000151881_25 (sequence is synthesized)
tcgagctgctgctggattgaactcagagaagccggggtgttgaatgtttgttttctaaaggagacaatgattcataatttgtgacactgtaaatcctgaggtttatagaaaggattcatg

SEQ ID NO: 429005 - DNA, 120 bp, Artificial Sequence
  ENSG00000151882_0 (sequence is synthesized)
aggacacctttagcctcatttcctgatcgaacagcctcacttgtgttgctgtcagtgccagtagggcaggcaggaatgcagcagagaggactcgccatcgtggccttggctgtctgtgcg

SEQ ID NO: 429006 - DNA, 120 bp, Artificial Sequence
  ENSG00000151882_1 (sequence is synthesized)
gccctacatgcctcagaagccatacttcccattgcctccagctgttgcacggaggtttcacatcatatttccagaaggctcctggaaagagtgaatatgtgtcgcatccagagagctgat

SEQ ID NO: 429007 - DNA, 120 bp, Artificial Sequence
  ENSG00000151882_2 (sequence is synthesized)
ggggattgtgacttggctgctgtcatccttcatgtcaagcgcagaagaatctgtgtcagcccgcacaaccatactgttaagcagtggatgaaagtgcaagctgccaagaaaaatggtaaa

SEQ ID NO: 429008 - DNA, 120 bp, Artificial Sequence
  ENSG00000151882_3 (sequence is synthesized)
ggaaatgtttgccacaggaagaaacaccatggcaagaggaacagtaacagggcacatcaggggaaacacgaaacatacggccataaaactccttattagagagtctacagataaatctac

SEQ ID NO: 429009 - DNA, 120 bp, Artificial Sequence
  ENSG00000151882_4 (sequence is synthesized)
agagacaattcctcaagtggacttggccatgattggttgtaagtttatcatctgaattctccttattgtagacaacagaacaaaacaaaatattggtttttaaaaaatgaacaattgtgc

SEQ ID NO: 429010 - DNA, 120 bp, Artificial Sequence
  ENSG00000151882_5 (sequence is synthesized)
aattgtgcggtatgcaaatgtagccaataatatactcaactggaaaatgaaatgaaaagataatactggctgggtatggtggttcacaccttttatcccagcacttcgggaggctgaggc

SEQ ID NO: 429011 - DNA, 86 bp, Artificial Sequence
  ENSG00000151882_6 (sequence is synthesized)
cagcctgggcaacatagcaagacctcatttctacaaacaaaaaaaaaattggcccggcatggtagtacttgcctataatcccagcc

SEQ ID NO: 429012 - DNA, 88 bp, Artificial Sequence
  ENSG00000151882_7 (sequence is synthesized)
ctgggagagtttgaggttgcagtgagaaaaataataataataatgatagtgtatatcttcatataatattttaagaggagcatataga

SEQ ID NO: 429013 - DNA, 120 bp, Artificial Sequence
  ENSG00000151882_8 (sequence is synthesized)
aatattttaagaggagcatatagatataacttctcccaactttttaattatagttttccaaacttacagagaagttaaaagaatggtacaatgaacatctatatatctttcaccacaata

SEQ ID NO: 429014 - DNA, 120 bp, Artificial Sequence
  ENSG00000151882_9 (sequence is synthesized)
ttaatcattgttaatattgtgtcacatttgctttctctctcctctctttgtatgtgtttctatataaaatattataacttttaaaatatatcttgttttgctaaaccatttgaaaataag

SEQ ID NO: 429015 - DNA, 120 bp, Artificial Sequence
  ENSG00000151882_10 (sequence is synthesized)
ttgcaaaaatcatgacacttcacccctagtttctttttggtgttataacttgacataccctaaaataaagacatttttctacataatcaccttatcagttttatacctaaaaaattaata

SEQ ID NO: 429016 - DNA, 120 bp, Artificial Sequence
  ENSG00000151882_11 (sequence is synthesized)
atttcatctaatatattccatattcaaattttcccaactatttagagagcattttatgtagtttttttttcactccagtaatcaatcaaggttgacatacatattgcaaataattgttat

SEQ ID NO: 429017 - DNA, 120 bp, Artificial Sequence
  ENSG00000151882_12 (sequence is synthesized)
ttttctttaatatctttcaatctaagaaagttcctctgtcttttttttttaatttttaaaattattttgttgagggagggtcttgctgtgtcttccaggctggagtgcagtggcacaatt

SEQ ID NO: 429018 - DNA, 82 bp, Artificial Sequence
  ENSG00000151882_13 (sequence is synthesized)
tgtgtcttccaggctggagtgcagtggcacaattttgattttggctcactgaagcctcaacttcttctgggatcaaggtgca

SEQ ID NO: 429019 - DNA, 120 bp, Artificial Sequence
  ENSG00000151882_14 (sequence is synthesized)
ttttcttgtgatcaaattcaggtttaatgtttttggttaagaatttcctacgtgaattcgtgtacttattttgtcatttagagttcataaatattagggtttattttctaaatagaatag

SEQ ID NO: 429020 - DNA, 120 bp, Artificial Sequence
  ENSG00000151882_15 (sequence is synthesized)
tttaaactaaatataacttcaaaacgtctagtttgagtagctaccgttgtttggattgaaattttctgatactgaaaagaacaaaaagcctgcctttctgcccagaaccttttgcctccc

SEQ ID NO: 429021 - DNA, 120 bp, Artificial Sequence
  ENSG00000151882_16 (sequence is synthesized)
ccagtcagttcttggagcagcactagttaggggcccagagttcggccttctgtgtggtgattttacgctctgcctaaacaaggagcctacatcttttagctcctattccacccttctcac

SEQ ID NO: 429022 - DNA, 60 bp, Artificial Sequence
  ENSG00000151882_17 (sequence is synthesized)
aggagcctacatcttttagctcctattccacccttctcacacgtttttgttgttgtttgg

SEQ ID NO: 429023 - DNA, 81 bp, Artificial Sequence
  ENSG00000151882_18 (sequence is synthesized)
tctcttgcctcagcctcccaagtaactgatattacaggcgcccagccaccacacccccgttggccgggctggtctcaaact

SEQ ID NO: 429024 - DNA, 120 bp, Artificial Sequence
  ENSG00000151882_19 (sequence is synthesized)
cttgacctcaagtgaaccacccgcctgtgcctcccaaagtgctggaattaccagcgtgagccaccatgccgggctcacacgtttgagttgataccattgtgccattcctcttttggcctc

SEQ ID NO: 429025 - DNA, 120 bp, Artificial Sequence
  ENSG00000151882_20 (sequence is synthesized)
ttttttgtccatagaggcttcaagatagataggtaagagcccagtagtgttcataagaagccaatagagagcaggagccactttatcaggtggcaggtgtcctgggcctccctgctggct

SEQ ID NO: 429026 - DNA, 120 bp, Artificial Sequence
  ENSG00000151882_21 (sequence is synthesized)
agtcccaagcggtggtgttgccaggatgtcttggaggtgataatgggacacacagaggcactgagtctccataggttaaaatgccaccaaaactggcctttgcctaatatccctcattga

SEQ ID NO: 429027 - DNA, 120 bp, Artificial Sequence
  ENSG00000151882_22 (sequence is synthesized)
ctatttagcatttaatttatttattttcctgacatttctgcaagctttgtatttatatttccactttatagatgaggaaatttgaggctcttagaggtaaaatgacttgcccaggtcaca

SEQ ID NO: 429028 - DNA, 120 bp, Artificial Sequence
  ENSG00000151882_23 (sequence is synthesized)
caggaagtggcagagacaagctttttaaataagaaaaaattaataaaatataatatgagagtaacttaaaatattaataaaccacaattttaaattaattaaccgtgataaccaacatta

SEQ ID NO: 429029 - DNA, 120 bp, Artificial Sequence
  ENSG00000151882_24 (sequence is synthesized)
ataaaagttaagataccaaaacactggtgtctaattctttcaactaacaacttgaattattttccattttaaattaattaaccgtgataaccaacattaataaaagttaagataccaaaa

SEQ ID NO: 429030 - DNA, 120 bp, Artificial Sequence
  ENSG00000151882_25 (sequence is synthesized)
tacaacatacaaacaatcatccaaacaagggagggaagagtaaatattctgtccattaggccccaggctccctggagtaaattcatagtctctctgtccaaagatgtcctgagccccata

SEQ ID NO: 429031 - DNA, 120 bp, Artificial Sequence
  ENSG00000151882_26 (sequence is synthesized)
ccagcacaccatctacttccaccctgtagtgctgtggttaggactaaattcccccagtcaccaaaaagtgttcatgactttcccaagcaaaacaaaaccccaaacaaaagataactctgt

SEQ ID NO: 429032 - DNA, 120 bp, Artificial Sequence
  ENSG00000151882_27 (sequence is synthesized)
cccgcggtaggctaggcctggtcctgggcgccccagccggctcccccgggtccaggcgtgcgcctgcgggcgacgtgcgcgtctgggcatccggccgtcacgcgctgcctgggactccac

SEQ ID NO: 429033 - DNA, 120 bp, Artificial Sequence
  ENSG00000151882_28 (sequence is synthesized)
cctacctacccttcgcgtagtacttgttatactttggcagcttcttcacgtcggtcctctccgcgcgcgggtaggaaccgtccacggccttaaagaagcctcctcaccagccatacttcc

SEQ ID NO: 429034 - DNA, 120 bp, Artificial Sequence
  ENSG00000151882_29 (sequence is synthesized)
gtggacttggccatgattggttagtctcactctatcacacaggctggagggcagtggcaggatctcagttcaccccaacctttgcctcacgggttcaagggattctcgtgcctcagcctt

SEQ ID NO: 429035 - DNA, 80 bp, Artificial Sequence
  ENSG00000151882_30 (sequence is synthesized)
aagtagctgggattacaggtgtgcgccagtacgcctggctagttttagtattttttgttactctgatctcaagtgatcca

SEQ ID NO: 429036 - DNA, 120 bp, Artificial Sequence
  ENSG00000151882_31 (sequence is synthesized)
aggcatgagccactgcacctggcctacgtattaggctttatgtaagatgtacatagtactccatactcctttccttttcctcctattgaaactgttcctataaactttataaaattaatc

SEQ ID NO: 429037 - DNA, 120 bp, Artificial Sequence
  ENSG00000151882_32 (sequence is synthesized)
ataaaattaatcagagaagaagagagggtgagaaacataaataatccaagcttgcaccacattcagcattaatcactaggtcactttgcttgctgaccccttcctcatagttgtttggct

SEQ ID NO: 429038 - DNA, 120 bp, Artificial Sequence
  ENSG00000151882_33 (sequence is synthesized)
attgcttcagaattatgtggagtctgttacaagattatagttccccttaactgctctatagataacagcttgaacattatgaaatgctaagttttcccttcgagacattctttcaggtcc

SEQ ID NO: 429039 - DNA, 120 bp, Artificial Sequence
  ENSG00000151882_34 (sequence is synthesized)
tgcatactgatgaaactactgatgtcagctggtctgaaggaccctaccagaagctaaatcatcaaagaatgcaatttccatatcctaatgattcaatctcccttaccctgaccaatcagt

SEQ ID NO: 429040 - DNA, 120 bp, Artificial Sequence
  ENSG00000151882_35 (sequence is synthesized)
ggcccaaattttccagccccttgcctcccagaaccccagcccagaactcttcagagatttaagaatctcctcctacctcctgactcagcaccatgtaatcattaaactctctgctgcaaa

SEQ ID NO: 429041 - DNA, 120 bp, Artificial Sequence
  ENSG00000151883_0 (sequence is synthesized)
tgagccggagcggggctcgcccctcgccggcgcccgccgcccagccggtgattgctctctggctgtccccggcacctcggcccccacggccgttggtccgggcgggtgagggagaaagtg

SEQ ID NO: 429042 - DNA, 120 bp, Artificial Sequence
  ENSG00000151883_1 (sequence is synthesized)
cccccacggccgttggtccgggcgggtgagggagaaagtgagacttggtgtcatcaccatccattgtcagaaggggaggaaattggaatccagcagcggcgagcagcagctgggcggtca

SEQ ID NO: 429043 - DNA, 120 bp, Artificial Sequence
  ENSG00000151883_2 (sequence is synthesized)
catctgggaatgcaaagccgacctccccctcctcctcctcctccccctcctcctcctcctcttctctcacccaggatcacttccgaaaccacttcgccttcagcccctgcctcggccaga

SEQ ID NO: 429044 - DNA, 120 bp, Artificial Sequence
  ENSG00000151883_3 (sequence is synthesized)
ggtttcatttttaactgaatatttacgaaagctggaagcgtgcgaggggggtggggtggggtggaaatagcggctgcttcttttccagggatttatttaatggggatgtgttcaaggcaa

SEQ ID NO: 429045 - DNA, 120 bp, Artificial Sequence
  ENSG00000151883_4 (sequence is synthesized)
gagcgaattcagaaggatatcgacgtcgtgatccagaagtccagagctgagaaggactgcctgtttgcagatttcagatactctgactccacctttacttttacctacgttggcggcccc

SEQ ID NO: 429046 - DNA, 120 bp, Artificial Sequence
  ENSG00000151883_5 (sequence is synthesized)
agaagtgtatcctactcagtacatgtatctgaagattacccagataatacatatgtgtcaagttcagagaatgatgaagatgtgctagttactacagagccaataccagtaatttttcat

SEQ ID NO: 429047 - DNA, 120 bp, Artificial Sequence
  ENSG00000151883_6 (sequence is synthesized)
agaatagcaacagaattaagaaaaacaaatgacattaactgttgcttatccataaaatccaaattacaaaaggaaaatggggaggaatcaagacagaatagtacagtggaggaagattct

SEQ ID NO: 429048 - DNA, 120 bp, Artificial Sequence
  ENSG00000151883_7 (sequence is synthesized)
gaaggtgacaatgattccgaagaattttattacggagggcaggtgaactatgatggggaactgcacaagcacccacaactggaagctgatttgtcagcagttagagagatatatgggcca

SEQ ID NO: 429049 - DNA, 120 bp, Artificial Sequence
  ENSG00000151883_8 (sequence is synthesized)
catgcagtttctctcagggaatatggagccattgatgatgtagatattgatctgcatatcgatgttagctttcttgatgaggagattgctgtggcttgggaagtaattcgaacagaacct

SEQ ID NO: 429050 - DNA, 120 bp, Artificial Sequence
  ENSG00000151883_9 (sequence is synthesized)
ataattgttcgactacactgttcacttacacagtatttaaatggcccagtgcccactgttgatgtctttcagatttccacaaaagagcgatttggattgggacatcagctgaaaaaaatc

SEQ ID NO: 429051 - DNA, 120 bp, Artificial Sequence
  ENSG00000151883_10 (sequence is synthesized)
atgcagacatttgttacacagcagtggaaacagagcaaagaaaaatccaattgcctgcacaataaaaagttgtcagagaagaaagtgaagtctcccctgcatttattttctactttgcgc

SEQ ID NO: 429052 - DNA, 120 bp, Artificial Sequence
  ENSG00000151883_11 (sequence is synthesized)
aggtcgccaagttatcctccccctggttgtggcaaaagcaaatccaaactgaaatctgagcaggacggaatctccaaaacgcataagctgctgcggaggacttgttccagcacagtcaag

SEQ ID NO: 429053 - DNA, 120 bp, Artificial Sequence
  ENSG00000151883_12 (sequence is synthesized)
actgatgatgtgtgtgtcacaaagtcacacaggacctttggccgctccttgtccagcgatcccagggcggagcaggctatgacagcaattaaatcgcacaaacttttgaaccgtccttgc

SEQ ID NO: 429054 - DNA, 120 bp, Artificial Sequence
  ENSG00000151883_13 (sequence is synthesized)
cctgcagctgttaagtcagaggaatgcctaactctaaagtcgcatagactattgactcgatcttgttctggagatccacgatgtgagcacaacacaaacttgaagccccataaactgtta

SEQ ID NO: 429055 - DNA, 120 bp, Artificial Sequence
  ENSG00000151883_14 (sequence is synthesized)
agcaggtcttactctagtaatctcagaatggaagaattatatggactgaaaaatcacaaattgctcagcaagtcctactccagtgcccccaagtcatccaaaactgagcttttcaaggaa

SEQ ID NO: 429056 - DNA, 120 bp, Artificial Sequence
  ENSG00000151883_15 (sequence is synthesized)
cctaacgcagagggcaggaggctctctcttacctcagggcttattggtatcctaacaccatcttcatcttcatcttctcagcttgctccaaatggtgcaaaatgcattccagtacgagac

SEQ ID NO: 429057 - DNA, 120 bp, Artificial Sequence
  ENSG00000151883_16 (sequence is synthesized)
cgtggcttcctggtgcagacaattgagtttgctgaacagcggatccctgtattaaatgaatattgtgtggtttgtgatgagccacatgtgtttcaaaatggccctatgcttaggcctacc

SEQ ID NO: 429058 - DNA, 120 bp, Artificial Sequence
  ENSG00000151883_17 (sequence is synthesized)
gtatgtgaacgggagctgtgtgtgtttgcttttcaaaccctgggagtaatgaatgaagctgctgatgaaatagcaactggagctcaggtggtagatctactagtatccatgtgtaggtct

SEQ ID NO: 429059 - DNA, 120 bp, Artificial Sequence
  ENSG00000151883_18 (sequence is synthesized)
gcgttggaatctcctagaaaagttgtgattttcgagccatatccttctgtggtagatcctaatgatcctcagatgttggccttcaaccccaggaaaaagaactatgatcgagtaatgaaa

SEQ ID NO: 429060 - DNA, 120 bp, Artificial Sequence
  ENSG00000151883_19 (sequence is synthesized)
gcactggatagcataacttctatcagagaaatgacacaagcaccatatctggaaatcaagaagcaaatggataaacaggacccccttgctcatcccttactgcaatgggttatatcaagt

SEQ ID NO: 429061 - DNA, 120 bp, Artificial Sequence
  ENSG00000151883_20 (sequence is synthesized)
aatagatcacatattgtgaaactgccagttaacaggcaattgaagtttatgcatactccacatcagttccttcttctcagcagtccaccagccaaagaatccaattttagagctgctaaa

SEQ ID NO: 429062 - DNA, 120 bp, Artificial Sequence
  ENSG00000151883_21 (sequence is synthesized)
aaactctttggaagcacctttgcatttcatggctcacacattgaaaactggcactccatcctgaggaatggtctggttgttgcttctaatacacgattgcagctccatggtgcaatgtat

SEQ ID NO: 429063 - DNA, 120 bp, Artificial Sequence
  ENSG00000151883_22 (sequence is synthesized)
ggaagtggaatctatcttagtccaatgtcaagcatatcatttggttactcagggatgaacaagaaacagaaggtgtcagccaaggacgagccagcttcaagcagtaaaagcagcaataca

SEQ ID NO: 429064 - DNA, 120 bp, Artificial Sequence
  ENSG00000151883_23 (sequence is synthesized)
tcacagtcacagaaaaaaggacagcaatcccaattcctgcaaagccgtaacttaaaatgcatagccttatgtgaagtgatcacctcatctgacctgcacaaacatggagagatatgggtt

SEQ ID NO: 429065 - DNA, 120 bp, Artificial Sequence
  ENSG00000151883_24 (sequence is synthesized)
gtccccaatactgaccatgtctgcacacgattctttttcgtctatgaagacggccaagtgggagatgcaaatattaatacacaagaaggaggcattcacaaagagatcctccgagtaatt

SEQ ID NO: 429066 - DNA, 120 bp, Artificial Sequence
  ENSG00000151883_25 (sequence is synthesized)
ggtaatcaaactgctactggttaaaggaccaccatttaattaacatgattcgaaagccttcctcgggttcaaagctggattttgaactgaagaagattataaaattatttattgttatta

SEQ ID NO: 429067 - DNA, 120 bp, Artificial Sequence
  ENSG00000151883_26 (sequence is synthesized)
taaacaaaattaaccctttgaatactgattttttttcttagtatttctaagtatctcattaaatacctaaaatggtataagatttatcaattgtagggttatggaatctagtaataaaat

SEQ ID NO: 429068 - DNA, 120 bp, Artificial Sequence
  ENSG00000151883_27 (sequence is synthesized)
ttcaacagcacttaaactgaagtttgggttgctcatacaataaacagattgaaaaaactgttttgtgctgatatttttatactaaactctttaactggatatttggtattatataccgac

SEQ ID NO: 429069 - DNA, 120 bp, Artificial Sequence
  ENSG00000151883_28 (sequence is synthesized)
attttaggttaccaaaatagaattgagaacattttataatggcatctaaatctatcagatactttgcaataagtatactgtttgcacattctgatgtgctatatcattagtagtatgggc

SEQ ID NO: 429070 - DNA, 120 bp, Artificial Sequence
  ENSG00000151883_29 (sequence is synthesized)
attctaatgttttggaaggggtgttccctattctatttttcttcataaaaaaagaagtaggtcttagaagcagtgctttgccaaaaagtatgtaatatacacatctatacattcatgcat

SEQ ID NO: 429071 - DNA, 120 bp, Artificial Sequence
  ENSG00000151883_30 (sequence is synthesized)
caaaatgtgtggttgtgaatatatttgtgtatattcacacgtatgttttgacaagaaagatggcttagcttcacaattctatcctcgtttaatggaaagaagataatatttagtaagcaa

SEQ ID NO: 429072 - DNA, 120 bp, Artificial Sequence
  ENSG00000151883_31 (sequence is synthesized)
taccaccattcattcactgaaaatatttgcagacaatttttctgtttgtctgaagaaattcagcccttttaaaatgttatctaaaagtcataatttggggaacatacatggcctggtaga

SEQ ID NO: 429073 - DNA, 120 bp, Artificial Sequence
  ENSG00000151883_32 (sequence is synthesized)
ccgaatctatattcaaatgattatgtatttaaaagaaagacctcagaatttaaagaaaccatatatattttttatttactacaaaaaaattatacaattttatttatgccacaccagcat

SEQ ID NO: 429074 - DNA, 120 bp, Artificial Sequence
  ENSG00000151883_33 (sequence is synthesized)
ttttatatttgttcatctaatatctctgcttatttttttcatattgagaaagaacacaaacttgatgcttcttttatattaaaagaccacaaataagtttatagagaacagtaacaccag

SEQ ID NO: 429075 - DNA, 120 bp, Artificial Sequence
  ENSG00000151883_34 (sequence is synthesized)
ctctcagcatttccttttcaagagtcataatttcatcaaaatcatttcttattctttgagtcctagagttcttattcatcaagttttaattgacagtgtttattttcccacatgttgtct

SEQ ID NO: 429076 - DNA, 120 bp, Artificial Sequence
  ENSG00000151883_35 (sequence is synthesized)
ttggaataaggccattcatgaaagcagtttaattagtgagtctgccactctattcaaaccctgaatcaaggctctatctgattttaatttatgtaaaaaaaaataaaaatgtatagtcat

SEQ ID NO: 429077 - DNA, 120 bp, Artificial Sequence
  ENSG00000151883_36 (sequence is synthesized)
ttgcaagtataatgtgataactgctgtgtttatttcctttgtctggcataaaaggtgagaaaaaggtcatacatgttgttaagggtagcagtttaggaagtgttttctaataatttgttt

SEQ ID NO: 429078 - DNA, 120 bp, Artificial Sequence
  ENSG00000151883_37 (sequence is synthesized)
tgttatattgcaaataattgatatgccacttatttctgcaagaaaaataggcttgaagtggttgggatattaatcattttgatagtatctacttaaagcattgatctgttttgacttgtg

SEQ ID NO: 429079 - DNA, 120 bp, Artificial Sequence
  ENSG00000151883_38 (sequence is synthesized)
gctctgaaccctgggctaggctgagggataatagtagtggagtagggcaaagatataatatcctatccagtgttttgtgaccacttatttgaagattagtgtgggacatgaggaccttgc

SEQ ID NO: 429080 - DNA, 120 bp, Artificial Sequence
  ENSG00000151883_39 (sequence is synthesized)
tacttttttgccaagatgctgcaagtctcccaaatcacttcaactgtgtttttaaaacatgtttaagcaacagaattatttttttgaaattagtctatacgttagacagtctatacatga

SEQ ID NO: 429081 - DNA, 120 bp, Artificial Sequence
  ENSG00000151883_40 (sequence is synthesized)
caaacatgaagatctaatatcaagatttgggagacgggatcttggaactccacctgtttgaccactaggaccactgaggcacctccaataagctctgtagagtgcctccagcataattca

SEQ ID NO: 429082 - DNA, 120 bp, Artificial Sequence
  ENSG00000151883_41 (sequence is synthesized)
aaatccactgacctaatccattatggctttacttaacattggagtgatccgtaaagaatatagtattggagtctgaactggaacggtaactcgtaagactcaagaaagaccgtttaagga

SEQ ID NO: 429083 - DNA, 120 bp, Artificial Sequence
  ENSG00000151883_42 (sequence is synthesized)
aaattggcataatacaaactgttcctgttgacttaagaataacagtaggttcacctatctgaggaaattaagtagttgatagtttaatgctaggcatcttttatgataataaagtaagat

SEQ ID NO: 429084 - DNA, 120 bp, Artificial Sequence
  ENSG00000151883_43 (sequence is synthesized)
gtcttcttatgacagttaattgagttgtatcatgatacagaatgacagattttgtttcaaacaattgcgtcagaacctttgtaagcaaatattctaaggagaatcaatcttattttttaa

SEQ ID NO: 429085 - DNA, 120 bp, Artificial Sequence
  ENSG00000151883_44 (sequence is synthesized)
ttgaactttttgaaattagggatactataataactgataaagatgaatttctgtgtttctaaagaatctaatttcaattactaccattaacatataaatgtgcttccaaaatccaagcag

SEQ ID NO: 429086 - DNA, 120 bp, Artificial Sequence
  ENSG00000151883_45 (sequence is synthesized)
gtccatacaatttagagatttgaacactgttatcatgctttaattcagtcattcattaaaatattatctattcacttatttgatgattccaaacatttgatattgtattgtgtttttata

SEQ ID NO: 429087 - DNA, 120 bp, Artificial Sequence
  ENSG00000151883_46 (sequence is synthesized)
attatttgaaatctgttcaccaatgctttgtaatggttttattaattgtgtagccattgctacttagatagtaacccactgagcaaaggcagtcatttattttcatccttgaagtagggg

SEQ ID NO: 429088 - DNA, 120 bp, Artificial Sequence
  ENSG00000151883_47 (sequence is synthesized)
aagaaaattattaatttattagttctactttttcctgcattgcttattttgtaaacattttactatgaataatctgttctctttcactgtattaaaaggagaagaaaatgaacatttgag

SEQ ID NO: 429089 - DNA, 120 bp, Artificial Sequence
  ENSG00000151883_48 (sequence is synthesized)
aatggaaaaaagtaataatatacaaataatctagtgctataaaatgcattatagtaagacacttttggtgtcttcgagtgcactatgttggaataaattttatacttgttgcttagtaaa

SEQ ID NO: 429090 - DNA, 120 bp, Artificial Sequence
  ENSG00000151883_49 (sequence is synthesized)
tctcagtcatacgtttggtttgaagctgtttttttttttaatttgaagtttaattttaaaagtgccacattgtaaaagttaccgttaaatactatgtagtataaaaaaccaacccaagct

SEQ ID NO: 429091 - DNA, 120 bp, Artificial Sequence
  ENSG00000151883_50 (sequence is synthesized)
attgttaatgctctgaatgtttttctttgaaaatttaagtttagagaagaaattccttcatttttctcccctttgctaaaagaaagaaaatctataatatgtaagtctatgaatctttaa

SEQ ID NO: 429092 - DNA, 120 bp, Artificial Sequence
  ENSG00000151883_51 (sequence is synthesized)
ataactgaaggaattttagcagtactttgtataataaaaatattttttaaactataacttgccttagagcatggggtttcagaaagttttgacgaaaaactcatcttcattaaagagtct

SEQ ID NO: 429093 - DNA, 120 bp, Artificial Sequence
  ENSG00000151883_52 (sequence is synthesized)
ggataacttcatcagatggtaatttaatatgtcatgaaggggacactcaacattgggtcatctaccgtctaaataaatacggatttcatggtggcatttgaagcacattttgcaaacatt

SEQ ID NO: 429094 - DNA, 120 bp, Artificial Sequence
  ENSG00000151883_53 (sequence is synthesized)
atgatgttctattgtcttgctgaattctttattataacactacctcaagacaaatgatagactgttggtaaggtaaattgggttttcaatgtcaggaacaaataaaattttgcaaataga

SEQ ID NO: 429095 - DNA, 120 bp, Artificial Sequence
  ENSG00000151883_54 (sequence is synthesized)
agtcatcaaataattcaacaggaagaccatactggacacagatgttgtcagttacttctggacaatgtggtaacatggatatttcagtcactggtaacaatgtcagggttaacacccaat

SEQ ID NO: 429096 - DNA, 120 bp, Artificial Sequence
  ENSG00000151883_55 (sequence is synthesized)
gaattatttgaaacaatttgggttgcaaaatttgaaattaattagtctattttgagattgattttctacgtgggccaattttatgtccattacctaaagccacaatctcccgctctaagg

SEQ ID NO: 429097 - DNA, 120 bp, Artificial Sequence
  ENSG00000151883_56 (sequence is synthesized)
agttaaaggatgaaaacacccaactgctacactggaatggcagactggatattcaagcattttggcatttaatgcctgctaaatttttgtccgattatatatagatttgatgtatattat

SEQ ID NO: 429098 - DNA, 120 bp, Artificial Sequence
  ENSG00000151883_57 (sequence is synthesized)
tacccagtaaattcttcttgggaattttgtatacattatggaatattaggataagtttttgtaggtcagaagaatttcaagtagtttttagacaaaacatatccatgagtgtgaaaaaag

SEQ ID NO: 429099 - DNA, 120 bp, Artificial Sequence
  ENSG00000151883_58 (sequence is synthesized)
ctgtgttgacgaatagattacatttcacatttaccagcaagtcagtaaaaaatagtgcttatttacatagtcaatataatttaatgttctaaaaataatatcttcgatctgcccaatatt

SEQ ID NO: 429100 - DNA, 120 bp, Artificial Sequence
  ENSG00000151883_59 (sequence is synthesized)
taatgtatcatttgagatttttaaaaatgcatccgctccattatgtaaacattaagatatgcctatgtttctttaactatacagcctctttacaataaatttcttgatttttgtgcacag

SEQ ID NO: 429101 - DNA, 120 bp, Artificial Sequence
  ENSG00000151883_60 (sequence is synthesized)
gatagtattgcaacctgctatttagcctttggtgccttagaattattataaatatttaacaatatgtacataatgtaaatactgccaagagatcagtaaggccaaatattttctctattc

SEQ ID NO: 429102 - DNA, 120 bp, Artificial Sequence
  ENSG00000151883_61 (sequence is synthesized)
actttttattgctcttgctttctattgctactaaagcctcttttatccagctttgtaatagttccaacattgtagcgaatgtaaatgtttactttcaataaatctgaacttgttcaacaa

SEQ ID NO: 429103 - DNA, 120 bp, Artificial Sequence
  ENSG00000151883_62 (sequence is synthesized)
agagcagtatctcatttctgaacacctggattgtagctttcccttgactgtcaaaggaggtggttttaaaaatcaagccaaacaggtttccatcttttaggaagaccctggaacgtgcca

SEQ ID NO: 429104 - DNA, 120 bp, Artificial Sequence
  ENSG00000151883_63 (sequence is synthesized)
gaattcagaacttgctctagattttgctttcttctcatgtccaccttctttcactttcacttatgcttcttgacaatattttctgcctgctacatggcatttattatgtacagcacatac

SEQ ID NO: 429105 - DNA, 120 bp, Artificial Sequence
  ENSG00000151883_64 (sequence is synthesized)
taacagtactctgcaatctacttaagctttgttctttccacgtttttttggtactactcattagatccttgagccaatcatccatgtctgtttgtactagattgtttcccttagaactct

SEQ ID NO: 429106 - DNA, 120 bp, Artificial Sequence
  ENSG00000151883_65 (sequence is synthesized)
ataaaagtgatggggggaggggcgcggagagggaaggctgggagccccagggagtcttcacgaccgctcagctcccggcgcgagtggagggatttatttaatggggatgtgttcaaggca

SEQ ID NO: 429107 - DNA, 120 bp, Artificial Sequence
  ENSG00000151883_66 (sequence is synthesized)
tgtatctgaagattacccagctattgtgaatactgccacaatgcacatggtggtggagatattgcttcaagatcctggttccgtttcctgtggatctcaaaaggattgctgaaatggata

SEQ ID NO: 429108 - DNA, 120 bp, Artificial Sequence
  ENSG00000151883_67 (sequence is synthesized)
catttcctgttcacactcttgtgtttcctttgttcttagcgtgttccgtgttcgggtattttggttgcttgtttgtttgattattgtggcttttctttacctgctacccaagcctgacgt

SEQ ID NO: 429109 - DNA, 120 bp, Artificial Sequence
  ENSG00000151883_68 (sequence is synthesized)
ccctcggttttaaatagcaggaggaggggaatcaatgtttgattcaggtgtttcgaggaccacgccacaggcaatgagcagaactcttcatgttgaaactgttctgctacagtactagat

SEQ ID NO: 429110 - DNA, 120 bp, Artificial Sequence
  ENSG00000151883_69 (sequence is synthesized)
tgctctcaggcgatttggggttgatacaggcacgccggtgcaaaactggaatactggatatgaagtgaaatgtataaaagacataaaatgtcacaaaatagtttgatcagaagtgttgat

SEQ ID NO: 429111 - DNA, 120 bp, Artificial Sequence
  ENSG00000151883_70 (sequence is synthesized)
tttcctggtgagttggggctgcgtgtttccatgttttctgaaggtttacataaacatgcagcctgccaattctctgtacatttttttttcaatgagtggtatttcggttttcacgtatag

SEQ ID NO: 429112 - DNA, 120 bp, Artificial Sequence
  ENSG00000151883_71 (sequence is synthesized)
gggaagaatgagagatgcacatttcgttagtaaattgtgaacaacttgaaacaaacccaaatccaattttgaatttaggaagtagagttaaaatgaaaggtagccattcaaatactatgc

SEQ ID NO: 429113 - DNA, 120 bp, Artificial Sequence
  ENSG00000151883_72 (sequence is synthesized)
cttgctaccttcacttgttgagttaggattttcttccttttagccctttagggacacagtagtttaaaagagcagtagccacatatgagaagtaccagatttagcttagagggaattcct

SEQ ID NO: 429114 - DNA, 120 bp, Artificial Sequence
  ENSG00000151883_73 (sequence is synthesized)
tagaccagccctgctgttaggacttgacattcaatattgtttgatcacattccaaaatatatcttagctaatggaaacatttataaacatataaattgcaaaagaagctttcttgtgtac

SEQ ID NO: 429115 - DNA, 120 bp, Artificial Sequence
  ENSG00000151883_74 (sequence is synthesized)
atacatttttaaaagcttgaaattgatgtgaacttttaaaaacacgtaggatctgtattacattatacatctcaaaacatttaaagtgaatatcattccagtatatgcaatatacctaag

SEQ ID NO: 429116 - DNA, 120 bp, Artificial Sequence
  ENSG00000151883_75 (sequence is synthesized)
ccccagaattagcacattgatttactagttgaaaatataacagtgaatcaccaaacttaagtgtatactttttgggagagaatgaaattacagtatttcttaatttactgtaatgtcatc

SEQ ID NO: 429117 - DNA, 120 bp, Artificial Sequence
  ENSG00000151883_76 (sequence is synthesized)
tttgtaattatgaattaataattcaatgagaggagacttggttgattaaattaacgctggtcctacacattatatctaaaggatcttcgtatatgactaatatcctcttggattatttta

SEQ ID NO: 429118 - DNA, 120 bp, Artificial Sequence
  ENSG00000151883_77 (sequence is synthesized)
acagttaaaatatacaaagtggcccattaaaaacagagttgacttttcactattgctgtttttctggtgagacatgtggacaggaaggacaggtgggcttttcaagtaactagctttctg

SEQ ID NO: 429119 - DNA, 120 bp, Artificial Sequence
  ENSG00000151883_78 (sequence is synthesized)
agtcgggggcgcgccgcatcccctcggacgcggcgcagagggacctcgccgccctctagcccttgccttctgcccggccaggcctcccctgacaccaccgaatgtggggctcaagtcctg

SEQ ID NO: 429120 - DNA, 120 bp, Artificial Sequence
  ENSG00000151883_79 (sequence is synthesized)
gcagagaccagagctgtctgcttcctcattcacatctaggaggagcaagagacttcccacaggtagaatttcattcttgttgcccaggccgggtgcaatagcgcgatctcagctcactgc

SEQ ID NO: 429121 - DNA, 120 bp, Artificial Sequence
  ENSG00000151883_80 (sequence is synthesized)
tcagccttctactagctggcattacaggaattcagagcttgctccagggatgtgaggacaaaagatgagtatgacttttaaaaggaattcagaacttgctctagattttgctttcttctc

SEQ ID NO: 429122 - DNA, 120 bp, Artificial Sequence
  ENSG00000151892_0 (sequence is synthesized)
cttccaggttgggtcggacctgaacccctaaaagcggaaccgcctcccgccctcgccatcccggagctgagtcgccggcggcggtggctgctgccagacccggagtttcctctttcactg

SEQ ID NO: 429123 - DNA, 120 bp, Artificial Sequence
  ENSG00000151892_1 (sequence is synthesized)
gatggagctgaactttgggcggccagagcagcacagctgtccggggatcgctgcacgctgagctccctcggcaagacccagcggcggctcgggatttttttgggggggcggggaccagcc

SEQ ID NO: 429124 - DNA, 120 bp, Artificial Sequence
  ENSG00000151892_2 (sequence is synthesized)
ccgcgccggcaccatgttcctggcgaccctgtacttcgcgctgccgctcttggacttgctcctgtcggccgaagtgagcggcggagaccgcctggattgcgtgaaagccagtgatcagtg

SEQ ID NO: 429125 - DNA, 120 bp, Artificial Sequence
  ENSG00000151892_3 (sequence is synthesized)
cctgaaggagcagagctgcagcaccaagtaccgcacgctaaggcagtgcgtggcgggcaaggagaccaacttcagcctggcatccggcctggaggccaaggatgagtgccgcagcgccat

SEQ ID NO: 429126 - DNA, 120 bp, Artificial Sequence
  ENSG00000151892_4 (sequence is synthesized)
ggaggccctgaagcagaagtcgctctacaactgccgctgcaagcggggtatgaagaaggagaagaactgcctgcgcatttactggagcatgtaccagagcctgcagggaaatgatctgct

SEQ ID NO: 429127 - DNA, 120 bp, Artificial Sequence
  ENSG00000151892_5 (sequence is synthesized)
ggaggattccccatatgaaccagttaacagcagattgtcagatatattccgggtggtcccattcatatcagtggagcacattcccaaagggaacaactgcctggatgcagcgaaggcctg

SEQ ID NO: 429128 - DNA, 120 bp, Artificial Sequence
  ENSG00000151892_6 (sequence is synthesized)
caacctcgacgacatttgcaagaagtacaggtcggcgtacatcaccccgtgcaccaccagcgtgtccaacgatgtctgcaaccgccgcaagtgccacaaggccctccggcagttctttga

SEQ ID NO: 429129 - DNA, 120 bp, Artificial Sequence
  ENSG00000151892_7 (sequence is synthesized)
caaggtcccggccaagcacagctacggaatgctcttctgctcctgccgggacatcgcctgcacagagcggaggcgacagaccatcgtgcctgtgtgctcctatgaagagagggagaagcc

SEQ ID NO: 429130 - DNA, 120 bp, Artificial Sequence
  ENSG00000151892_8 (sequence is synthesized)
caactgtttgaatttgcaggactcctgcaagacgaattacatctgcagatctcgccttgcggatttttttaccaactgccagccagagtcaaggtctgtcagcagctgtctaaaggaaaa

SEQ ID NO: 429131 - DNA, 120 bp, Artificial Sequence
  ENSG00000151892_9 (sequence is synthesized)
ctacgctgactgcctcctcgcctactcggggcttattggcacagtcatgacccccaactacatagactccagtagcctcagtgtggccccatggtgtgactgcagcaacagtgggaacga

SEQ ID NO: 429132 - DNA, 120 bp, Artificial Sequence
  ENSG00000151892_10 (sequence is synthesized)
cctagaagagtgcttgaaatttttgaatttcttcaaggacaatacatgtcttaaaaatgcaattcaagcctttggcaatggctccgatgtgaccgtgtggcagccagccttcccagtaca

SEQ ID NO: 429133 - DNA, 120 bp, Artificial Sequence
  ENSG00000151892_11 (sequence is synthesized)
gaccaccactgccactaccaccactgccctccgggttaagaacaagcccctggggccagcagggtctgagaatgaaattcccactcatgttttgccaccgtgtgcaaatttacaggcaca

SEQ ID NO: 429134 - DNA, 120 bp, Artificial Sequence
  ENSG00000151892_12 (sequence is synthesized)
gaagctgaaatccaatgtgtcgggcaatacacacctctgtatttccaatggtaattatgaaaaagaaggtctcggtgcttccagccacataaccacaaaatcaatggctgctcctccaag

SEQ ID NO: 429135 - DNA, 120 bp, Artificial Sequence
  ENSG00000151892_13 (sequence is synthesized)
ctgtggtctgagcccactgctggtcctggtggtaaccgctctgtccaccctattatctttaacagaaacatcatagctgcattaaaaaaatacaatatggacatgtaaaaagacaaaaac

SEQ ID NO: 429136 - DNA, 120 bp, Artificial Sequence
  ENSG00000151892_14 (sequence is synthesized)
caagttatctgtttcctgttctcttgtatagctgaaattccagtttaggagctcagttgagaaacagttccattcaactggaacattttttttttttccttttaagaaagcttcttgtga

SEQ ID NO: 429137 - DNA, 120 bp, Artificial Sequence
  ENSG00000151892_15 (sequence is synthesized)
tcctttggggcttctgtgaaaaacctgatgcagtgctccatccaaactcagaaggctttgggatatgctgtattttaaagggacagtttgtaacttgggctgtaaagcaaactggggctg

SEQ ID NO: 429138 - DNA, 120 bp, Artificial Sequence
  ENSG00000151892_16 (sequence is synthesized)
tgttttcgatgatgatgatgatcatgatgatgatcatcatgatcatgatgatgatcatcatgatcatgatgatgattttaacagttttacttctggcctttcctagctagagaaggagtt

SEQ ID NO: 429139 - DNA, 120 bp, Artificial Sequence
  ENSG00000151892_17 (sequence is synthesized)
aatatttctaaggtaactcccatatctcctttaatgacattgatttctaatgatataaatttcagcctacattgatgccaagcttttttgccacaaagaagattcttaccaagagtgggc

SEQ ID NO: 429140 - DNA, 120 bp, Artificial Sequence
  ENSG00000151892_18 (sequence is synthesized)
tttgtggaaacagctggtactgatgttcacctttatatatgtactagcattttccacgctgatgtttatgtactgtaaacagttctgcactcttgtacaaaagaaaaaacacctgtcaca

SEQ ID NO: 429141 - DNA, 120 bp, Artificial Sequence
  ENSG00000151892_19 (sequence is synthesized)
tccaaatatagtatctgtcttttcgtcaaaatagagagtggggaatgagtgtgccgattcaatacctcaatccctgaacgacactctcctaatcctaagccttacctgagtgagaagccc

SEQ ID NO: 429142 - DNA, 120 bp, Artificial Sequence
  ENSG00000151892_20 (sequence is synthesized)
tttacctaacaaaagtccaatatagctgaaatgtcgctctaatactctttacacatatgaggttatatgtagaaaaaaattttactactaaatgatttcaactattggctttctatattt

SEQ ID NO: 429143 - DNA, 120 bp, Artificial Sequence
  ENSG00000151892_21 (sequence is synthesized)
tgaaagtaatgatattgtctcatttttttactgatggtttaatacaaaatacacagagcttctttcccctcataagtagtgttcgctctgatatgaacttcacaaatacagctcatcaaa

SEQ ID NO: 429144 - DNA, 120 bp, Artificial Sequence
  ENSG00000151892_22 (sequence is synthesized)
agcagactctgagaagcctcgtgctgtagcagaaagttctgcatcatgtgactgtggacaggcaggaggaaacagaacagacaagcattgtcttttgtcattgctcgaagtgcaagcgtg

SEQ ID NO: 429145 - DNA, 120 bp, Artificial Sequence
  ENSG00000151892_23 (sequence is synthesized)
catacctgtggagggaactggtggctgcttgtaaatgttctgcagcatctcttgacacacttgtcatgacacaatccagtaccttggttttcaggttatctgacaaaggcagctttgatt

SEQ ID NO: 429146 - DNA, 120 bp, Artificial Sequence
  ENSG00000151892_24 (sequence is synthesized)
gggacatggaggcatgggcaggttctcctttctttggaaacacatccatgctgggatgcacagttcttttcctaaggattgtgtttactcctgactgcaacgtcttggccactgtttgga

SEQ ID NO: 429147 - DNA, 120 bp, Artificial Sequence
  ENSG00000151892_25 (sequence is synthesized)
gcagtttggtctgaaggtcattaaggatctgcttgcatcttgtttcatgtcctccgtgacagactgcagaccatgttagaagagaaggaaggtttgtggatcaagagggttgacattagg

SEQ ID NO: 429148 - DNA, 120 bp, Artificial Sequence
  ENSG00000151892_26 (sequence is synthesized)
tttggtgagatgagttgcttggcacagatcagcagaacaggaccctggtgataaggcatctggctttgctaaccacttatcatcttccattattctctttcttaactaagtagacccgaa

SEQ ID NO: 429149 - DNA, 120 bp, Artificial Sequence
  ENSG00000151892_27 (sequence is synthesized)
agtgcacttttgaagtctggtttagatggcgagattccgaatctacaatgatcgagtactggtggccacttttctccaacattaagtaaagaggaggagattccaccttcagaaagtgct

SEQ ID NO: 429150 - DNA, 120 bp, Artificial Sequence
  ENSG00000151892_28 (sequence is synthesized)
gggaagcattggctttcttcccacattggtagaagagatggaggaggaaaccagggtgcacatttctacagatcccctttgcctgctggtgtttgccttgtaagataagtcactgggggg

SEQ ID NO: 429151 - DNA, 120 bp, Artificial Sequence
  ENSG00000151892_29 (sequence is synthesized)
aaggggaaatctatgaaatccaagataaaggcatagtctttcagctctattggtgttaaaagtatatttgtgtccaaatgttaatcaacacaaatgtacagtactcagtactgacttttt

SEQ ID NO: 429152 - DNA, 120 bp, Artificial Sequence
  ENSG00000151892_30 (sequence is synthesized)
tcacttcaaaatgttttcaagggaaattcagcagacacccaactgtatttaattagtgaaaagatctataaagactcttactttgaataaacacattaagtaagtgtgtcaaaatatttg

SEQ ID NO: 429153 - DNA, 120 bp, Artificial Sequence
  ENSG00000151892_31 (sequence is synthesized)
gaatgccagttatctatgagcgcatatctcttacagagtgtattttgttttcattaaggtatctctgtgtatctacactggactaatttcatagggatctgattctatgtgatccactgt

SEQ ID NO: 429154 - DNA, 120 bp, Artificial Sequence
  ENSG00000151892_32 (sequence is synthesized)
agaaagctactgattacttctgcagtaacagcagctctaattagcatcagatgaccaaagcggaaatgggagtttcagcgctaacaagggcagccttcattgaagaatgcatgggtaggc

SEQ ID NO: 429155 - DNA, 120 bp, Artificial Sequence
  ENSG00000151892_33 (sequence is synthesized)
aatatataaattacattttgaaaagcctcatctgtcaccaacaaatatctcatttttcttcagtgataaaagcatattcaagttaccagctcctcaatttgaaaatcagttgctgattaa

SEQ ID NO: 429156 - DNA, 120 bp, Artificial Sequence
  ENSG00000151892_34 (sequence is synthesized)
ataaatagggggaagcatcttgttcagggacaacacgttagagagattcttatcaaagcaagccaagcaaggtttccgccattcagtgtgatcttagtttgacacggtgaccctaaaaca

SEQ ID NO: 429157 - DNA, 120 bp, Artificial Sequence
  ENSG00000151892_35 (sequence is synthesized)
ccatcatttgccccagaactggagcacaataagttaaatcatttacctgtctcacttcttcttggcgtgcttaaaagcaaaaatgattcgctacttcctgtccttcagtccgggcatttg

SEQ ID NO: 429158 - DNA, 120 bp, Artificial Sequence
  ENSG00000151892_36 (sequence is synthesized)
gggtgccactgaagacaggggttatctgctgaggtttgggtgtcttgcaggaagtatctcattgcagttgattttgatgaaaccaaacagtaactagggtccatgcagaccgtgactccc

SEQ ID NO: 429159 - DNA, 120 bp, Artificial Sequence
  ENSG00000151892_37 (sequence is synthesized)
tttttgaccgatacatgcttgagtatctttttaatagagcacatgaaggaagaagcacacaatatagagaaggaattgagaatgccaattacatatttatttttccatacctgatttttt

SEQ ID NO: 429160 - DNA, 120 bp, Artificial Sequence
  ENSG00000151892_38 (sequence is synthesized)
tcaagtctgtaataaaaaaagtataagttgagattaacataggttatttttcatgaagtatagcaaacgatctagaatgtgataggagtgtggtttccatttctttttttttttttttaa

SEQ ID NO: 429161 - DNA, 120 bp, Artificial Sequence
  ENSG00000151892_39 (sequence is synthesized)
cagacttttgtgctgtagtaagaatgtcttagaagttgtgtcttcgagttcctcaaacaccggacagggctcccccagagctgcctcagcctttgatttggtccatattcagacacttcc

SEQ ID NO: 429162 - DNA, 120 bp, Artificial Sequence
  ENSG00000151892_40 (sequence is synthesized)
tgtcttgcatacactctgaggatgggccgcttctagctgccgcccgtctccctcttgccttcttgtctctaaatcagacactcccaagcactccatctgctatactaggagagtgggaga

SEQ ID NO: 429163 - DNA, 120 bp, Artificial Sequence
  ENSG00000151892_41 (sequence is synthesized)
gccaaagcattttggagtccatgtaaagtgcctgggaaaagagatgtaagagcagtgggagtttatataattagcgaattcttttctcagaattcagcggaaatgtatttctgttgttat

SEQ ID NO: 429164 - DNA, 120 bp, Artificial Sequence
  ENSG00000151892_42 (sequence is synthesized)
tatttacaaaattgtggcctcagaggagctgtcttttggaaaataagttttcattcatgcagttagttagacatgcacgatgtacttgaatcaataaactgtggaccagaaaagggctgc

SEQ ID NO: 429165 - DNA, 120 bp, Artificial Sequence
  ENSG00000151892_43 (sequence is synthesized)
ttaaatgaattcacgtgttctaattctctttcgaggctgttgatgacctcctggattcatacccccatgatctgtcttgctcttgcctctgttctttgataaagcacatcagactatgtg

SEQ ID NO: 429166 - DNA, 120 bp, Artificial Sequence
  ENSG00000151892_44 (sequence is synthesized)
acacccatcttttcaagaacgacctaaaagcaatgacaacaggcaggagagaattaccactggcctgggcacagtgacagcagaaggcccacctgagcttggagagttggcgagataagg

SEQ ID NO: 429167 - DNA, 120 bp, Artificial Sequence
  ENSG00000151892_45 (sequence is synthesized)
caaaatcaaggtgcaacagtgggccatgttccaagggtgaatggatctgagagtccgctgatgttccttactgatcagaacagggaccttctaacgaaacagccagagttccttgaatca

SEQ ID NO: 429168 - DNA, 120 bp, Artificial Sequence
  ENSG00000151892_46 (sequence is synthesized)
ggcagaagttctttagagacaggaagccagagctattgataatatccgaacgacagaggaaggaatttcttattagaaattctaaaataaaacaagtggggatttggttggataccctta

SEQ ID NO: 429169 - DNA, 120 bp, Artificial Sequence
  ENSG00000151892_47 (sequence is synthesized)
gaagctacatttttctctcatccctaagatagatatctcaagtgtatatctgacacctcttggctttgacacggctctgcttctcaagtgaccatttgttttaagtctgttgtctagaat

SEQ ID NO: 429170 - DNA, 120 bp, Artificial Sequence
  ENSG00000151892_48 (sequence is synthesized)
tctttgtgggggctggacctctgaaaaagattctcactgcagaggctttaaatctgtgtttttttccactccctccgtcctgggatgtattcggtaggacatttcatttatatcaggata

SEQ ID NO: 429171 - DNA, 120 bp, Artificial Sequence
  ENSG00000151892_49 (sequence is synthesized)
ttggctgattcagctctctttcatcgttattattcaggcctccctccaccaccttgttctttattgcctaagtattgccctccccaattcttcatcgtaatagctctaaatttagtttga

SEQ ID NO: 429172 - DNA, 120 bp, Artificial Sequence
  ENSG00000151892_50 (sequence is synthesized)
cccaaattaatttttgttccaacagatatattttaagacagagaagcctctctcaggagccagatgatctgaagatgatgctaatccccaaatacgaagttcctccagctaactctcctc

SEQ ID NO: 429173 - DNA, 120 bp, Artificial Sequence
  ENSG00000151892_51 (sequence is synthesized)
tgagctccctcttcttagctttgggattggggatggtctcatccttgccaggaatccctttgttgctcccagtgtctctgatgagcttctcctccctcccagagacaatgcaggggtggt

SEQ ID NO: 429174 - DNA, 120 bp, Artificial Sequence
  ENSG00000151892_52 (sequence is synthesized)
tttcagcagaatgtgccacctgcacttctgattgttctgagacccagcccagaggggtggagaaggcgcacaaaccctattccaataaactgcctgcagagaaccacagcctgctaatag

SEQ ID NO: 429175 - DNA, 120 bp, Artificial Sequence
  ENSG00000151892_53 (sequence is synthesized)
tcgttgaggtctcagccccctaaggtctccaagctcatttgaccagcgcagctgcgacttcggctgtctgcctctggcaggtgccaatatcagcatcttgtcccactgccatggggagtt

SEQ ID NO: 429176 - DNA, 120 bp, Artificial Sequence
  ENSG00000151892_54 (sequence is synthesized)
aatttttgctccagggcagctgccaagcccagcaccggcatcaatagaaggttttctctgattttcttctcttcctctcaggctaggctttcttaccaatccccaattttcttctgtagg

SEQ ID NO: 429177 - DNA, 120 bp, Artificial Sequence
  ENSG00000151892_55 (sequence is synthesized)
gcgccaggagactggccagagatctttagactcttacttagtttgaacatctcttgctgctcacacccaggcttcttcagcagaaagcatgacccatagtaggtactcagaaactggttg

SEQ ID NO: 429178 - DNA, 120 bp, Artificial Sequence
  ENSG00000151892_56 (sequence is synthesized)
aatgaaaagccttgacatttaagggctttattctgtcatacggtagcaagaactggcctattggcatcgtattcctggcattgagctgtattgaccctgaatgtgtcctcctgaggtttt

SEQ ID NO: 429179 - DNA, 120 bp, Artificial Sequence
  ENSG00000151892_57 (sequence is synthesized)
tgagggtgacctaggagaaagggtctgaaaaagcactgggatccaagtgactttaaatctgcccgtggcatttcctgctgagaggcgagaaactagcatctctcccaacaggctcacatc

SEQ ID NO: 429180 - DNA, 120 bp, Artificial Sequence
  ENSG00000151892_58 (sequence is synthesized)
cgccaggaaggacagagcccaaaacgggggtagactttgtgggaaattcgccagttagtccgctgagattttaatctgcctcaagcacaggatgctgacaagaaaggtagaccactcccc

SEQ ID NO: 429181 - DNA, 120 bp, Artificial Sequence
  ENSG00000151892_59 (sequence is synthesized)
cgatcccagacaaaccccaggggtgacaacttctccatcagtatcctgagaagcaacatcaaatgcttaccaagtcagcacgtttactgagtgagtactctgacggaataaaccagcatt

SEQ ID NO: 429182 - DNA, 120 bp, Artificial Sequence
  ENSG00000151892_60 (sequence is synthesized)
tggagctgaacttgagaacacagggccctctgacagcagcttagggaaacacccatcccttccagattggcagaatccttccatttcatgtccttcggagacgctgtattctctttacaa

SEQ ID NO: 429183 - DNA, 120 bp, Artificial Sequence
  ENSG00000151892_61 (sequence is synthesized)
atcattcatgaaactgagactcagtctcccaggggtaagtcctgggccacgtgcaaacaatggcaaatccagctcttccatgatagagaaggcaaacacacccaccttcatcctgagcct

SEQ ID NO: 429184 - DNA, 120 bp, Artificial Sequence
  ENSG00000151892_62 (sequence is synthesized)
aaaaggccacctctgagcacttgggcagccactcctctgggcctcagagggccatgagcttggccaggtaggcacagcggcggggaagtcacagctgtcaggtaccggccatggtgcagg

SEQ ID NO: 429185 - DNA, 120 bp, Artificial Sequence
  ENSG00000151892_63 (sequence is synthesized)
tgggaataggagatgccagagctgctttagctgaggaaagcaaacagtcagcagtgctcaaaggagcaaaacttcgaatgtgcacattgacccctgacacctgcaagcataacacagatc

SEQ ID NO: 429186 - DNA, 120 bp, Artificial Sequence
  ENSG00000151892_64 (sequence is synthesized)
ctaagactagagtgaagtaggaagaagaattagaaaatccagtggatgtcctgagtatagggaaccagggccgttgaaaatcagtaaaggttgattacctggggcgagaccgggtgactg

SEQ ID NO: 429187 - DNA, 120 bp, Artificial Sequence
  ENSG00000151892_65 (sequence is synthesized)
ggggcgagaccgggtgactgtggcagtgcaggtgaaggtaccctggaccttctcagttcgctggcacataaggctccgccaataaagcgtggttctctctgtcacacacacacacacaca

SEQ ID NO: 429188 - DNA, 120 bp, Artificial Sequence
  ENSG00000151892_66 (sequence is synthesized)
cacacacacacacaatgattggagggctatatgatccagcattagcttcctggtgtgccaagcatgcttgatcgggaatttttttttattattattattttttagctgtagctgaaggca

SEQ ID NO: 429189 - DNA, 120 bp, Artificial Sequence
  ENSG00000151892_67 (sequence is synthesized)
tttctcggatgtggagaggagaatggaaatcgcagaaccaaatcagtttgccctgccatatttggctgtggtctgtcattgggcatttctgatgtgcttttctggattcaggaagagctg

SEQ ID NO: 429190 - DNA, 120 bp, Artificial Sequence
  ENSG00000151892_68 (sequence is synthesized)
attgtcctccgagggttgaaaaaaaaaaaacagtttcagaaacctgaatccagggccttatagttctcctcattatctatcttcttctcccttccctcgcccaagggagtgggggaaaca

SEQ ID NO: 429191 - DNA, 120 bp, Artificial Sequence
  ENSG00000151892_69 (sequence is synthesized)
cttttcactgcagagtttgctttaaagttttcccatcttgcgtgcattatcccttgatattaaaattattttctcagtttaatccaactcctgctgagaagctgtgtgagatttaggctg

SEQ ID NO: 429192 - DNA, 120 bp, Artificial Sequence
  ENSG00000151892_70 (sequence is synthesized)
tggggtttttttcttgtactcttttggatggtgttgcatttttcactcttaacccgagggtgtgtttcagcttatgttcgttctgtttcatgcaggtttatagcacggtagagtagaagg

SEQ ID NO: 429193 - DNA, 120 bp, Artificial Sequence
  ENSG00000151892_71 (sequence is synthesized)
cggcttctgatttttagggtatttttagaattcattcctgagtgaggggttcagacacccagtctcctcggaacaggggtgaggggtcgactgagctttgttgagaagcctccagttagg

SEQ ID NO: 429194 - DNA, 120 bp, Artificial Sequence
  ENSG00000151892_72 (sequence is synthesized)
cttcgggcgggtctccatgttatattgtgtgtttactgagcttcccactggtagaagatgacacatttgtccatcgtcctgtgtatctgctttccagaggacaccggagcattctcctgg

SEQ ID NO: 429195 - DNA, 120 bp, Artificial Sequence
  ENSG00000151892_73 (sequence is synthesized)
ggtcactcccacatggctgcctcacatagctgttttgcaacagcctttattgccaacacccttggaagaacatctcctgtagaagtacaagttttgcaatatggactttggaagtggttt

SEQ ID NO: 429196 - DNA, 120 bp, Artificial Sequence
  ENSG00000151892_74 (sequence is synthesized)
tgtgatgttcgaattttctgttagcctattgctcaagcactacagaatgtacatagtccctttggccatcctctcaccccagaatatcctaataaacattgttttcttttttaaaaaaaa

SEQ ID NO: 429197 - DNA, 120 bp, Artificial Sequence
  ENSG00000151892_75 (sequence is synthesized)
tctggccagaagaaatctggcctcggaacacgccattctccgcgccgcttccaataaccactaacatccctaacgagcatccgagccgagggctctgctcggaaatcgtcctggcccaac

SEQ ID NO: 429198 - DNA, 120 bp, Artificial Sequence
  ENSG00000151892_76 (sequence is synthesized)
tcggcccttcgagctctcgaagattaccgcatctatttttttttcttttttttcttttcctagcgcagataaagtgagcccggaaagggaaggagggggcggggacaccattgccctgaa

SEQ ID NO: 429199 - DNA, 120 bp, Artificial Sequence
  ENSG00000151892_77 (sequence is synthesized)
ggcacgccgggactgcgggccggcgcgctcgccctgggctggggtgcggaagcgcccgagtcctgggcaccgggcgagagtgtgagaggagcggacgcccaggagggagccgaggacgcg

SEQ ID NO: 429200 - DNA, 120 bp, Artificial Sequence
  ENSG00000151893_0 (sequence is synthesized)
agagccccggagcgcccaccgccgtcagccgcgtcttcaagctagtcggccccgcggagagcgagagaccctgcgcaccgcagccctctccgctgcgcccattcctgccgccggcgatgt

SEQ ID NO: 429201 - DNA, 120 bp, Artificial Sequence
  ENSG00000151893_1 (sequence is synthesized)
aactcggggaggcagcggtgcccgctggcccggggttgagacaggcggcaggtgcctgtgaggcgggcgggtgccgggggccagcaggatggaggaaagcatggaagaggaggagggggg

SEQ ID NO: 429202 - DNA, 120 bp, Artificial Sequence
  ENSG00000151893_2 (sequence is synthesized)
cagctacgaggcgatgatggacgaccagaaccacaacaactgggaggctgcggtggacggcttccggcagcccctgccacctccgccgcccccctcgtcgatcccggcccctgcccgaga

SEQ ID NO: 429203 - DNA, 120 bp, Artificial Sequence
  ENSG00000151893_3 (sequence is synthesized)
gcctccgggggggcagctgctggcggtgcccgcggtctccgtggacaggaaaggccccaaggaggggctcccgatggggccgcagccaccgccggaggctaatggggtgatcatgatgtt

SEQ ID NO: 429204 - DNA, 120 bp, Artificial Sequence
  ENSG00000151893_4 (sequence is synthesized)
gaagagctgcgacgcggccgccgccgtggccaaggcggcccccgcccccaccgccagctccaccatcaacatcaacacctccacctccaagttcttaatgaatgttataactattgaaga

SEQ ID NO: 429205 - DNA, 120 bp, Artificial Sequence
  ENSG00000151893_5 (sequence is synthesized)
ttataagagcacatactggccaaaattggatggtgccatagatcaacttttaactcagagtcctggtgactatatccccatatcctatgaacagatatacagttgtgtgtataaatgtgt

SEQ ID NO: 429206 - DNA, 120 bp, Artificial Sequence
  ENSG00000151893_6 (sequence is synthesized)
atgccagcagcactcggaacagatgtatagtgatctgattaaaaagataactaatcacttagagagagtctcaaaggagctgcaggccagccctccagatctctatattgaaagatttaa

SEQ ID NO: 429207 - DNA, 120 bp, Artificial Sequence
  ENSG00000151893_7 (sequence is synthesized)
tatagctcttggacaatatatgggagcattgcagagcattgtgcctcttttcatatatatgaataagttttacatcgaaaccaagcttaacagagacttaaaagatgaccttataaagct

SEQ ID NO: 429208 - DNA, 120 bp, Artificial Sequence
  ENSG00000151893_8 (sequence is synthesized)
gtttacggaacatgttgcagaaaagcacatttacagcctaatgcctttacttttagaagcccagtcaacaccatttcaggtcacaccttcaactatggcaaatattgtgaaaggcctgta

SEQ ID NO: 429209 - DNA, 120 bp, Artificial Sequence
  ENSG00000151893_9 (sequence is synthesized)
taccctcagaccagagtgggttcagatggctccaactctattttctaaatttattccaaacattctccctccggcggtggaatctgaactttctgaatatgctgctcaagatcagaaatt

SEQ ID NO: 429210 - DNA, 120 bp, Artificial Sequence
  ENSG00000151893_10 (sequence is synthesized)
tcaaagagaacttatacagaatggttttacaaggggtgaccagtcccggaagagagctggggatgagttggcttataatagctcgtcagcatgtgcaagttccagggggtacagatagtg

SEQ ID NO: 429211 - DNA, 120 bp, Artificial Sequence
  ENSG00000151893_11 (sequence is synthesized)
aatgtattgaatatgctttccttcctgaaaagaggacacactggagctgcagagactgtattcagagcacagtgggggctgcacacactcaggagctctgtcacaaagctgttcatggaa

SEQ ID NO: 429212 - DNA, 120 bp, Artificial Sequence
  ENSG00000151893_12 (sequence is synthesized)
gaggatgttggacttcttacttggtttgtaattttaaaacaaaaactaaaaaaaaaaaaaacgttgctgctagacttgggggtgattttgaaatgggacaatcttttaatgagtttatct

SEQ ID NO: 429213 - DNA, 120 bp, Artificial Sequence
  ENSG00000151893_13 (sequence is synthesized)
acagattctgtgaggaaaaagcatctcagaaagtgaccatttctaagtgaaatctgacagccaaaatcagcagcttcctccaaaaatataagagcagaagaattttttttttaagcactt

SEQ ID NO: 429214 - DNA, 120 bp, Artificial Sequence
  ENSG00000151893_14 (sequence is synthesized)
gttttgttcatttgtggacttggcattttggtgtattggtttcacatgtcaggatctcttttgctttaaaaccaagcagatcattacagtacagtatttttcacccacaaccaaaacaac

SEQ ID NO: 429215 - DNA, 120 bp, Artificial Sequence
  ENSG00000151893_15 (sequence is synthesized)
cccttttaaaagagttggtctttgtttagcattagaaagtcttgttaaaggaaaatgctaactctgcttttgctagaactttcccccatcagttcacaactttcttctactctgtgcctt

SEQ ID NO: 429216 - DNA, 120 bp, Artificial Sequence
  ENSG00000151893_16 (sequence is synthesized)
gagctttgtgcactttgcaactgtgtgaccatgttgtcaaactcctcctggagaagtgtatggtatctaaactcacccaccaagatggcaggtgtggccctgtagcaggatgctaattaa

SEQ ID NO: 429217 - DNA, 120 bp, Artificial Sequence
  ENSG00000151893_17 (sequence is synthesized)
gtgggaaaatagaaaccttttgcacatgggtcggattttcccctggttcaccagagcatattcatattaatgttggggaccaactctcctagagcatttccattccctgtgccacttaac

SEQ ID NO: 429218 - DNA, 120 bp, Artificial Sequence
  ENSG00000151893_18 (sequence is synthesized)
acgatgtctgtcaccagctgctatagtattggcagtactctagtttagggatgggcggtactttagcacggaagcttcccttagtattattgagagctacttcctgcgatgctctaggaa

SEQ ID NO: 429219 - DNA, 120 bp, Artificial Sequence
  ENSG00000151893_19 (sequence is synthesized)
gcagatacagttattaagtccaaatacacagtggtgtggggttcctgatcacttcattttaaatgaatgagataattacttaaaaaaagtctgtcatttgaacattatatttgagtgtga

SEQ ID NO: 429220 - DNA, 120 bp, Artificial Sequence
  ENSG00000151893_20 (sequence is synthesized)
tagggaagaagtagcactgctgtcctaaggctcccttccagctgtggcaaagctatatttctgtttctccacatccacagtgctttttagtccatcataaaagtttctgaagcttattct

SEQ ID NO: 429221 - DNA, 120 bp, Artificial Sequence
  ENSG00000151893_21 (sequence is synthesized)
agctgttgttgaaagcccaagaaaaatagatgtggcaagagaaaaatacttttcttctcaattttgcttgaatcttaattgagcataggcttctctactaggcaacatcagactaatagt

SEQ ID NO: 429222 - DNA, 120 bp, Artificial Sequence
  ENSG00000151893_22 (sequence is synthesized)
atttacctcttcagagaacttgaggggaaaagaaacatcccagggatgctgtcgcatgtctgctctgcaggttcttcatacagctgcctctgccaattcagtttattttttggggggagt

SEQ ID NO: 429223 - DNA, 120 bp, Artificial Sequence
  ENSG00000151893_23 (sequence is synthesized)
ggtgtgggtgggagagttagaagtgggatattgggagcaagtaagtcacccaataattgaagtccttgatttgtaaaactgttatacagagaagtaaagataaaggttgtcagatttatt

SEQ ID NO: 429224 - DNA, 120 bp, Artificial Sequence
  ENSG00000151893_24 (sequence is synthesized)
ttttaaagtacttaaccagagttcgtggattttgtggactttaattggactcaattcactctgtgagcatcctggattgcatcgatgaacactgaattactgtaagaacatagacaggct

SEQ ID NO: 429225 - DNA, 120 bp, Artificial Sequence
  ENSG00000151893_25 (sequence is synthesized)
ctcactatgacctggacagtttaagttgctacactggtaacattctagtatcaaggagaattccattcatcatgacattcacattttacttttctcaatggaatgcttgcttcaggctta

SEQ ID NO: 429226 - DNA, 120 bp, Artificial Sequence
  ENSG00000151893_26 (sequence is synthesized)
ccaatcacacctagaactgaagtctgagtgagtggtattaataatttttctgaaaggaataaaattggaatgtttctaaatgtggagaaattcttcagtatcctaataatatacccaaat

SEQ ID NO: 429227 - DNA, 120 bp, Artificial Sequence
  ENSG00000151893_27 (sequence is synthesized)
gctttttctgggagagagcattcttttacaaaagaactttccctataaaagcatcacagtataatgtgaattggcattaaaatctttggatgcttttgcattattaagttcatggagaaa

SEQ ID NO: 429228 - DNA, 120 bp, Artificial Sequence
  ENSG00000151893_28 (sequence is synthesized)
tatattctttttactatgtatgtattaataaaaagtgggcaaagtaaagtttgcaaaatttagtttctctaaatttttgcacagtgactgcagctggctatgggtcagctcttaatacaa

SEQ ID NO: 429229 - DNA, 120 bp, Artificial Sequence
  ENSG00000151893_29 (sequence is synthesized)
caaaaccttgactggaagtcactatagaaaggttgtacatagtctcccagtctacatgtcctggctgttaatcatcttggccccttgaggcacatcacagtttgaaggacctgtttaagt

SEQ ID NO: 429230 - DNA, 120 bp, Artificial Sequence
  ENSG00000151893_30 (sequence is synthesized)
tgaaatagactttgcttatttattgggattctaaaaaattctgagtgagtttgcagtatgagaggaaataagatttcctcctccttcctctcattttatattgactgtttgccagaaact

SEQ ID NO: 429231 - DNA, 65 bp, Artificial Sequence
  ENSG00000151893_31 (sequence is synthesized)
ctccttcctctcattttatattgactgtttgccagaaactgttttcttctgttttcttatatttt

SEQ ID NO: 429232 - DNA, 64 bp, Artificial Sequence
  ENSG00000151893_32 (sequence is synthesized)
gtattcttgccagtacagtatatggtttttctaccccaattacatactgggttttgtaccacat

SEQ ID NO: 429233 - DNA, 120 bp, Artificial Sequence
  ENSG00000151893_33 (sequence is synthesized)
gtttttctaccccaattacatactgggttttgtaccacatcactaaaggcccaaatcattgaagatacaaaaccgtacatgcaggctggttgtctggttagtcaatggctgatttgcttc

SEQ ID NO: 429234 - DNA, 120 bp, Artificial Sequence
  ENSG00000151893_34 (sequence is synthesized)
aactgtctagtatgtatgtgcagcctgaaactggctccttaaaaggaaagccgggtcagtcatcttgaaaaaatgacatgtaaaagtaaatcgataattgttttgagagacggtacatgt

SEQ ID NO: 429235 - DNA, 120 bp, Artificial Sequence
  ENSG00000151893_35 (sequence is synthesized)
tttaaaggttggccttaagcttcagtaacattgtcattttgtgaccttttgttgtcacacctgtaccctaacctgacaggaattaactactgtttttttgtggggcagaaagcaaaacct

SEQ ID NO: 429236 - DNA, 120 bp, Artificial Sequence
  ENSG00000151893_36 (sequence is synthesized)
ggtgttgtgacttttatcctaatggttcttaggcaaggttagtgagaagaaacacaaacccagatgcatgcattgtgcattattttgtagacaagctactttttcttctgtccctttaac

SEQ ID NO: 429237 - DNA, 120 bp, Artificial Sequence
  ENSG00000151893_37 (sequence is synthesized)
aaatttgcagcaattaccctccctttggggtctagagtgaaagctaatttgtgggtagatgagattgcagaagaatggatgtccatggctgtgaacactgcacactgcacatccatctcc

SEQ ID NO: 429238 - DNA, 120 bp, Artificial Sequence
  ENSG00000151893_38 (sequence is synthesized)
agtgctcacactgtgcagctaccactccctggctgcgtgccatgctgtcgggttgcagatttgcacacataaattcctcaggaagagtttgcatgagcatcacctcgcaatattctgtac

SEQ ID NO: 429239 - DNA, 120 bp, Artificial Sequence
  ENSG00000151893_39 (sequence is synthesized)
tgaccaaacaagggatttgaacgtttttcagcacaaaaggataacttccgagtggtggtctgtacgcatactagcaaaggtaatggtgatctagcaaacaaaattggtttctgcagttag

SEQ ID NO: 429240 - DNA, 120 bp, Artificial Sequence
  ENSG00000151893_40 (sequence is synthesized)
aagtgagcaggagcacttgtattatagtatttaaataatcctggttaatctctttttaagccgagtaacccctccagattttgcctttttattattgaggctggctttattttcttctac

SEQ ID NO: 429241 - DNA, 120 bp, Artificial Sequence
  ENSG00000151893_41 (sequence is synthesized)
tttttttcccgttttatagcagttaattatttttgtgattattatgcaagaagcattgcccttgagttaaactgttattgtttcataagcagctattaaaataactgagcattgttttat

SEQ ID NO: 429242 - DNA, 120 bp, Artificial Sequence
  ENSG00000151893_42 (sequence is synthesized)
gaacatacactaatctgagatactgaaaagctttgcaactaaaaagcaaaacaacctacattagtcatctagccattgtttggatgttttgagttgattttttatggtgcctcttttagc

SEQ ID NO: 429243 - DNA, 120 bp, Artificial Sequence
  ENSG00000151893_43 (sequence is synthesized)
ttggaatattacgtttactttaatccaagtctaggccttttaaagggtccttaaaattaaagttcagaatgtgaatccctttgacatctattacaggtttataggacctttttggttgtg

SEQ ID NO: 429244 - DNA, 120 bp, Artificial Sequence
  ENSG00000151893_44 (sequence is synthesized)
gttcaccccagtttctggccacaagaatatgagaaaggaaccctgttgttttccaagggaaatcattcctctctgtccccactgttgattaactaaagtcctggacaccttccttcctcc

SEQ ID NO: 429245 - DNA, 120 bp, Artificial Sequence
  ENSG00000151893_45 (sequence is synthesized)
actggccaagacccaccttgacccaccttgaacctcttttcagagccgagtggcatgaatatgtgtactgtttctgcttctgttgatggagtggctgtgggagaattaaaggaaatgcta

SEQ ID NO: 429246 - DNA, 120 bp, Artificial Sequence
  ENSG00000151893_46 (sequence is synthesized)
atttgagcttcattcataggggaacctactatatattgcatccctgctggttggaaattatcttcatctctggactgcattgtttagaaaaatgttaatggcttacaattctgagaactt

SEQ ID NO: 429247 - DNA, 120 bp, Artificial Sequence
  ENSG00000151893_47 (sequence is synthesized)
tattgtgtggctctggggttaagaattctgtggtttgaaaaaaaataaatattttgtattgattctcacgtcatttcaatgttgtgactatgtactaaatgcactaagactgggtattct

SEQ ID NO: 429248 - DNA, 120 bp, Artificial Sequence
  ENSG00000151893_48 (sequence is synthesized)
cttagaagagtgcgttttgttaaacagatggcagttcactctcattagttctatttgtcaatattacagccacacacttcaggataacttactcaaatgtgaagtcatgggaagctatgg

SEQ ID NO: 429249 - DNA, 120 bp, Artificial Sequence
  ENSG00000151893_49 (sequence is synthesized)
ctagtaacaggaatgcttatgaaaaatttggagggcaagcacgagcaagaggcttttgccactcactagcacagccagagcaaggatgaagcaatgaagtcttgttcctagtggtgcttg

SEQ ID NO: 429250 - DNA, 120 bp, Artificial Sequence
  ENSG00000151893_50 (sequence is synthesized)
tatgtcagaagccatagtgagctcagcacagggcgttctgcacatcatctctttaatccaagaaaaacaaaatggcggatgaaactcctattgacctgggatacaaagccactgactttg

SEQ ID NO: 429251 - DNA, 120 bp, Artificial Sequence
  ENSG00000151893_51 (sequence is synthesized)
gctcttgatcttttggtgggttctgaatcactccttctgtattagggcatatactttcactctaaaacattgtggtaaatgaaataaatcttgtacagatgtcgttggccttgttatgtt

SEQ ID NO: 429252 - DNA, 120 bp, Artificial Sequence
  ENSG00000151893_52 (sequence is synthesized)
atgttataaatcctgtacagatgtccttggccttaatacctggttcactggaactttgttataatatagaatatttgattttgcttatagcatattaatattgcctcctacatgacagcc

SEQ ID NO: 429253 - DNA, 120 bp, Artificial Sequence
  ENSG00000151893_53 (sequence is synthesized)
acactgagcacacatctgttaccacagttacttagcctgcagggtgagtgttgatcttgacttctgcaaccagtgctaaaaaacagtgtgtaacaatatacatatggtcatatctattct

SEQ ID NO: 429254 - DNA, 120 bp, Artificial Sequence
  ENSG00000151893_54 (sequence is synthesized)
atattcatatatagtatggatacggatatcagtatatttgtagtttttgttttttaaacactgtacagtttcttctgtggacctttaatcaacttttggacttaggttgtttttttcttt

SEQ ID NO: 429255 - DNA, 120 bp, Artificial Sequence
  ENSG00000151893_55 (sequence is synthesized)
gcatttattggtactatgcttttttataaccctttgtgttttcttgctatgaaattagtgtcatcccctaggttatttgtaaccttactttaaggttttagtttctcttgctatctctgt

SEQ ID NO: 429256 - DNA, 120 bp, Artificial Sequence
  ENSG00000151893_56 (sequence is synthesized)
agaggtgtcctttcctacagtattgtcagaatgccagttctcatcccttccatttttttgacctcagctctgttgtgatgttatctactttttggttatcacatgtggcagaattcagtg

SEQ ID NO: 429257 - DNA, 120 bp, Artificial Sequence
  ENSG00000151893_57 (sequence is synthesized)
actctgacaatttccattttcactcccctgccccacagttaagtagggtgtcatttaaactctttcccttttagcaggtttgttttttactaagtacaaaccttttctactagaaccagc

SEQ ID NO: 429258 - DNA, 120 bp, Artificial Sequence
  ENSG00000151893_58 (sequence is synthesized)
tctgtgtgtgtgtgtgtatatgtgtgaattttatttcttcgattggcctgtttctcaattatctaaaattctaaaataccttgaatatcaaaaagcatgatagtagaatgaatatcacac

SEQ ID NO: 429259 - DNA, 120 bp, Artificial Sequence
  ENSG00000151893_59 (sequence is synthesized)
atattaatagaacctgagagcaactagcttaactagctgtagtcttgagtaggttttttttttaatctgttttcctttattaagccctctccctccctaaattgttaagccagaagggca

SEQ ID NO: 429260 - DNA, 120 bp, Artificial Sequence
  ENSG00000151893_60 (sequence is synthesized)
taacaattcaaaactttctagtaatgtacctacatgtctaatagtatacctcaaaatatgtaaagaaaaagtggctcacacctgtaatcccaacactgagaggctgaggtgggaagattg

SEQ ID NO: 429261 - DNA, 120 bp, Artificial Sequence
  ENSG00000151893_61 (sequence is synthesized)
aggctgaggtgggaagattgcttgaagccaggatttgagaccagcctgggtaacacagaaccccatctctacaaaaaaattttttaaattagggccgagcatggtggctcacgcctgtaa

SEQ ID NO: 429262 - DNA, 120 bp, Artificial Sequence
  ENSG00000151893_62 (sequence is synthesized)
ctcgggaggctgaggcaggaaaatcgcctgaacccaggaggcagaggtttcagtgaaccaagattgcactattgtactccagcctgggcgacaagagtgaaactatctcaagcaaaaaac

SEQ ID NO: 429263 - DNA, 88 bp, Artificial Sequence
  ENSG00000151893_63 (sequence is synthesized)
ctccagcctgggcgacaagagtgaaactatctcaagcaaaaaacaaaaaaagttgggcctggcacagtggctcttgcctgtaatgtca

SEQ ID NO: 429264 - DNA, 89 bp, Artificial Sequence
  ENSG00000151893_64 (sequence is synthesized)
aaaaaaaattagcttgggtggctcaggcacaagaacttgaacccaggaagtggaggttacagtgggctaaggtcacaccactggactct

SEQ ID NO: 429265 - DNA, 88 bp, Artificial Sequence
  ENSG00000151893_65 (sequence is synthesized)
ctgcttgggtggctcaggcacaagaacttgaacccaggaagtggaggttacagtgggctaaggtcacaccactggactctggcctgac

SEQ ID NO: 429266 - DNA, 120 bp, Artificial Sequence
  ENSG00000151893_66 (sequence is synthesized)
ttgcttgagcccaggagtttgaggctgcattgagctatgatgataccactgcatttcagctaggataacagagtgagaccctgtcgagaaaaatatttaaaaagttaaaagaaaactaca

SEQ ID NO: 429267 - DNA, 120 bp, Artificial Sequence
  ENSG00000151893_67 (sequence is synthesized)
aaaaatatttaaaaagttaaaagaaaactacaaaaaggaaaaatgaacacactacaaagagaaataggtcagtctaccaacataatgggcattttcaacatacccctctcagtaattaat

SEQ ID NO: 429268 - DNA, 120 bp, Artificial Sequence
  ENSG00000151893_68 (sequence is synthesized)
agatcttgcagagactaaattatgaagattattaaggacatagaagatttaaatagtacagctaatcaatttgatctgacagatacataacacacacatacataaaacacattgtaccct

SEQ ID NO: 429269 - DNA, 120 bp, Artificial Sequence
  ENSG00000151893_69 (sequence is synthesized)
tcagtaggaaaataagtttttgcaaaccaagtctaacagtgtattcaaaatgtaacaaatgatgaccaaaatggattggtctcaggaatacaagattggctttttaatgtaattaagaaa

SEQ ID NO: 429270 - DNA, 120 bp, Artificial Sequence
  ENSG00000151893_70 (sequence is synthesized)
tgctgtttataataggacaagaaaaagtacctaagaataaattttaaaatgagaaaatgataaaaaaaaaacttaatggacctaaataagtgtagagaatataagggataacactcaata

SEQ ID NO: 429271 - DNA, 120 bp, Artificial Sequence
  ENSG00000151893_71 (sequence is synthesized)
ttatctaaatctcaactttttctccaaattgcaattccaaaaaaattcccaatgattttcactgtggaacctgacaatttgattcgtcgatataaatggaagagcaaagggccaaggata

SEQ ID NO: 429272 - DNA, 120 bp, Artificial Sequence
  ENSG00000151893_72 (sequence is synthesized)
tccaagacctttctgaatggattgtgaggggaactagcactacaagattctaacacttactgccaaaggtagtgattaaaacaatgactttggagtagggaagaatttcatcaacaagat

SEQ ID NO: 429273 - DNA, 120 bp, Artificial Sequence
  ENSG00000151893_73 (sequence is synthesized)
agaaaatgcagactatcagtagataagtaatttggctaccattgattgtaagtacttattaccaaacatgctgtagagtgaaaagagaagccaaatctggaataagatacaaatattcat

SEQ ID NO: 429274 - DNA, 120 bp, Artificial Sequence
  ENSG00000151893_74 (sequence is synthesized)
aatataactgctaaagagcacctgaatgcaaatcagcaatgaaaacaactcaggagagacggaccccaaacactagcaggcatttcacagaagaaacagaaatggcccataaatgtgaaa

SEQ ID NO: 429275 - DNA, 120 bp, Artificial Sequence
  ENSG00000151893_75 (sequence is synthesized)
agatgttcagcctcattagtcgtcaggtaatgcacattaaaagcatagataccatttccttgctgacaacttggcagaaattatgagaagtctgaaaataacaatctgagagtttatgac

SEQ ID NO: 429276 - DNA, 120 bp, Artificial Sequence
  ENSG00000151893_76 (sequence is synthesized)
aacaaaccttcacctgttgttggcgtgtaaatctgcacttctactttggagaacagtattatctaatgaaattgagcataggcacctcttaatagcccactatttatacttagaaaaact

SEQ ID NO: 429277 - DNA, 120 bp, Artificial Sequence
  ENSG00000151893_77 (sequence is synthesized)
catgtgcatgtgtaccaagaaacgtatacagggatgtttataacagcattatgtgtaataattaaaaggaatgaaggagggagccaaatgcccatctagcatacagtgaataaatgaagt

SEQ ID NO: 429278 - DNA, 120 bp, Artificial Sequence
  ENSG00000151893_78 (sequence is synthesized)
gtatgctgtggaattctctagagtggtcaaggcatcataccactgcgggcttcaacatggatgcatctcagaaatcattgagtgaagtcagaatagagccagcatgggtacctttatgta

SEQ ID NO: 429279 - DNA, 120 bp, Artificial Sequence
  ENSG00000151893_79 (sequence is synthesized)
aagttcaaaatcagaaaaaactaagtatattgtttagggactcagacacaagtagtaaagctataaaggaaagacagttattaacattcaggaacatagtttcctcaggagagggtggtg

SEQ ID NO: 429280 - DNA, 120 bp, Artificial Sequence
  ENSG00000151893_80 (sequence is synthesized)
gaggggaatgagaacagaggggagaacggggacttggaagcacttcataatatgaacgtttggaccattctaaacatgccagttctctgagttaatgtatattcagtgtaaagccaattc

SEQ ID NO: 429281 - DNA, 120 bp, Artificial Sequence
  ENSG00000151893_81 (sequence is synthesized)
agataaccaacagtatttatataatctaaaaaactcatggaagtataaacagatgaaaataggaaaatccccattgaaagtgaagaaaatggaaggaacttgctgtaccaaaaaaaatca

SEQ ID NO: 429282 - DNA, 120 bp, Artificial Sequence
  ENSG00000151893_82 (sequence is synthesized)
ctttctaagtgcaattaaattaaaagacttatgccagggtaaacagataagtcaatggaaggtaatttagaaaatagaaaactcaaatttagaatttagagtacactaaaggcggctttt

SEQ ID NO: 429283 - DNA, 120 bp, Artificial Sequence
  ENSG00000151893_83 (sequence is synthesized)
tgaaatcatgctgtccatggtcaattattttatgaaaggtgctggtataattagagaacattaaactgattcctatcataccattcaccaagagaaattccagattgtgaactaaaaaag

SEQ ID NO: 429284 - DNA, 120 bp, Artificial Sequence
  ENSG00000151893_84 (sequence is synthesized)
aaaaaaatgttgtaaaaactagaaagtagtattttttcttgggattggagaagttttttctaagaatacaagcaatgaaaccgaaaaccctattaaactcactcacctgcctttaatgcc

SEQ ID NO: 429285 - DNA, 120 bp, Artificial Sequence
  ENSG00000151893_85 (sequence is synthesized)
tgtgtgtgtgtgtgtgtgtgtgtacatagacatatatattttaaaatgtttaaatttgaacatatgttaccaatacatataaagcaaaagtagaaaatcaaaaagatgaagtaaaaatgt

SEQ ID NO: 429286 - DNA, 120 bp, Artificial Sequence
  ENSG00000151893_86 (sequence is synthesized)
gaaaatcaaaaagatgaagtaaaaatgttttaaaatattgtttgtggtatttgtggttaataaacctttgctctttctaaaaaaatgttcttttagagagagtcatgattaaaaatgctt

SEQ ID NO: 429287 - DNA, 120 bp, Artificial Sequence
  ENSG00000151893_87 (sequence is synthesized)
gtcatttttgaaactcctagttttaacactttataaaaacaacttaatgttcttaaggtaagtttattttcatgcttggttttaatgactattgtagctgaataagtcacttcattaatt

SEQ ID NO: 429288 - DNA, 120 bp, Artificial Sequence
  ENSG00000151893_88 (sequence is synthesized)
aagatctgtggatccaaatatggctgtgcttactgaaaatatttttgagttccatccaccaattttgcaaaagtgtgttgttgaaatttttataataaattttcatcttttccaatgtca

SEQ ID NO: 429289 - DNA, 120 bp, Artificial Sequence
  ENSG00000151893_89 (sequence is synthesized)
ggatttgctggagcaaaaaaattgagtagatactcatcattgtgaaatgtaaactcagagctcagttggaatgttctctgctagtggaaaccaactagtgtggtttttgcagaacctgtg

SEQ ID NO: 429290 - DNA, 120 bp, Artificial Sequence
  ENSG00000151893_90 (sequence is synthesized)
ggaaatttaactttgtatgttctttaccagaatgggattgcactaattttttcccctgcttaaatttggcttactatatattttaaaagaaaactttcccttttccatttaatttggtgt

SEQ ID NO: 429291 - DNA, 120 bp, Artificial Sequence
  ENSG00000151893_91 (sequence is synthesized)
gtaaagaactgattgtattgatttttgcttccttgggttttcctgactggttgcagttagcttttctaatacacatttggaagcttgttaatttgattatgatataaatttataaatgtt

SEQ ID NO: 429292 - DNA, 120 bp, Artificial Sequence
  ENSG00000151893_92 (sequence is synthesized)
ctaagatgtttaatatgtatttttaaataggtttggttagaactgaaatgtctgctatacttttattatcaaatatgttgatcctttcctcctgttttgatgtgaagtcagttttgttga

SEQ ID NO: 429293 - DNA, 120 bp, Artificial Sequence
  ENSG00000151893_93 (sequence is synthesized)
agcagatgtgttctggctgaatgctgagtaactaaatgtgacctgtactaatggaaagagtagcataattagcttcagatgaccactactcctgtgctctctagatttgccagccctcca

SEQ ID NO: 429294 - DNA, 120 bp, Artificial Sequence
  ENSG00000151893_94 (sequence is synthesized)
gctaccaaggaactgaggccttcaatctaatagcccgaggggctgtaaatcctgctgacggtccgagtgaacttggaatggatgttggtccagttgaatcttgagatgactgtggccctg

SEQ ID NO: 429295 - DNA, 120 bp, Artificial Sequence
  ENSG00000151893_95 (sequence is synthesized)
gctgacaccttgatcacagcctagcggcaaagcctgagacagagaattcagctaagctgtgcccagactcctgacccagggaaactctggaataaccgtgtgctggtttaagccactaaa

SEQ ID NO: 429296 - DNA, 120 bp, Artificial Sequence
  ENSG00000151893_96 (sequence is synthesized)
cgtgaggccgggcagggggcggggccggcgaatgcccgtcccgacccgtcgcgcctcccctgttagctccctgccagccgaggcggggcgaacctctgccctgttgcgtgggagtgactc

SEQ ID NO: 429297 - DNA, 120 bp, Artificial Sequence
  ENSG00000151893_97 (sequence is synthesized)
acagctcccgccccttttggctccgctttctcgcggccagtccctcgcaccacgtgccctcctggccgcgcccccagctgccctttccaactgcctgttggaagccgctgtaaaacgtcg

SEQ ID NO: 429298 - DNA, 120 bp, Artificial Sequence
  ENSG00000151914_0 (sequence is synthesized)
attgttgggccagtcatttgtgagctggtggccggaccacaggccacacacttcttccgtgcaaatcttcatgtattgaaactgcctgtgtattgtttttacgattggagacttggccaa

SEQ ID NO: 429299 - DNA, 120 bp, Artificial Sequence
  ENSG00000151914_1 (sequence is synthesized)
gaaaagatgagttccgggaacgcgtcctatcgctgctctatgtcttcctctgcggatttttccgatgaggatgatttcagccagaaatctggctccgcatccccagctccgggagacacc

SEQ ID NO: 429300 - DNA, 120 bp, Artificial Sequence
  ENSG00000151914_2 (sequence is synthesized)
ttaccctggaatttgcctaaacatgagagatcgaaaagaaagattcaagggggctcagtgctggaccctgccgagagggcagtgcttcggatagcagatgaacgggacaaagttcagaag

SEQ ID NO: 429301 - DNA, 120 bp, Artificial Sequence
  ENSG00000151914_3 (sequence is synthesized)
aaaacatttacaaaatggataaatcagcatctcatgaaggttcgaaaacatgtgaatgatctctatgaagacttaagggatggacacaatttgatttctcttttagaggttctttcagga

SEQ ID NO: 429302 - DNA, 120 bp, Artificial Sequence
  ENSG00000151914_4 (sequence is synthesized)
gataccttgcccagagaaaaaggtcggatgcgttttcacagactacagaatgtacaaattgcacttgactatttgaaaagacgccaggtgaaattagtgaatattagaaatgatgacata

SEQ ID NO: 429303 - DNA, 120 bp, Artificial Sequence
  ENSG00000151914_5 (sequence is synthesized)
acagatggaaatcccaaattgactttgggattaatctggacaataattttgcactttcagatatctgatatccatgttactggagagtcagaggatatgtctgcaaaagagagattgcta

SEQ ID NO: 429304 - DNA, 120 bp, Artificial Sequence
  ENSG00000151914_6 (sequence is synthesized)
ctctggacgcagcaggcaacagagggttatgctggaattcggtgtgaaaatttcactacctgctggagagatggaaaattatttaatgccatcattcataaatacaggccggacctgata

SEQ ID NO: 429305 - DNA, 120 bp, Artificial Sequence
  ENSG00000151914_7 (sequence is synthesized)
gatatgaatactgttgctgttcaaagcaaccttgcaaatttagagcatgctttttacgtagcagaaaaaattggtgttataagacttctggaccctgaagatgtcgatgtctcctcacct

SEQ ID NO: 429306 - DNA, 120 bp, Artificial Sequence
  ENSG00000151914_8 (sequence is synthesized)
gatgaaaaatcagtaataacttacgtgtcatctctctatgatgcatttcctaaagtccctgaaggtggggaaggcattggtgcaaatgatgttgaagtcaaatggattgaataccagaat

SEQ ID NO: 429307 - DNA, 120 bp, Artificial Sequence
  ENSG00000151914_9 (sequence is synthesized)
atggtgaactacctcatccaatggattagacaccatgtgaccacaatgtctgagagaacatttcctaataatcctgtagaactgaaggcactttataatcagtatttacagtttaaagaa

SEQ ID NO: 429308 - DNA, 120 bp, Artificial Sequence
  ENSG00000151914_10 (sequence is synthesized)
acagaaattccaccaaaggagacagaaaaatcaaaaattaaacgtctatataaattattagagatttggatagaatttggacgcatcaagctccttcaaggttatcatccaaatgacata

SEQ ID NO: 429309 - DNA, 120 bp, Artificial Sequence
  ENSG00000151914_11 (sequence is synthesized)
gaaaaagagtgggggaaactcattattgccatgctagagagagagaaggcccttcgtccagaagtagaaaggttagaaatgttgcaacagattgccaacagagttcagagggacagtgtc

SEQ ID NO: 429310 - DNA, 120 bp, Artificial Sequence
  ENSG00000151914_12 (sequence is synthesized)
atctgtgaagacaaactgattcttgctggaaatgctcttcagtctgattctaaaagattagaatcaggagtgcagtttcagaatgaagcagaaattgctgggtatatacttgaatgtgag

SEQ ID NO: 429311 - DNA, 120 bp, Artificial Sequence
  ENSG00000151914_13 (sequence is synthesized)
aaccttttacgccagcatgtaattgatgtacagattcttattgatggaaaatactaccaggcagatcaattggtacagagggttgcaaaactgcgtgacgaaattatggccttaaggaac

SEQ ID NO: 429312 - DNA, 120 bp, Artificial Sequence
  ENSG00000151914_14 (sequence is synthesized)
gaatgttcttctgtgtacagcaaaggacgcatactgacaacagaacagacaaagctcatgatatcaggaatcactcaaagtttaaactcaggatttgcacagaccttacaccctagtctg

SEQ ID NO: 429313 - DNA, 120 bp, Artificial Sequence
  ENSG00000151914_15 (sequence is synthesized)
acctcagggctgacccagagtttaacaccttccctaacctcttctagtatgacttctggcctgtcatcagggatgacttcccgcctgactccatctgtcactccagcttatacacctggt

SEQ ID NO: 429314 - DNA, 120 bp, Artificial Sequence
  ENSG00000151914_16 (sequence is synthesized)
ttcccatcaggattagttccaaatttcagttcaggagtagagccaaattcattgcaaactttgaagttgatgcagatccgaaaaccccttctaaagtcttctttgctggatcaaaattta

SEQ ID NO: 429315 - DNA, 120 bp, Artificial Sequence
  ENSG00000151914_17 (sequence is synthesized)
acagaagaagaaatcaatatgaaatttgttcaggatcttttgaattgggttgatgagatgcaggtacaactggaccgcactgagtggggctcagatttgccaagtgttgaaagccattta

SEQ ID NO: 429316 - DNA, 120 bp, Artificial Sequence
  ENSG00000151914_18 (sequence is synthesized)
gaaaatcataaaaatgttcatagagctattgaagaatttgaatctagtctcaaagaagctaaaatcagtgagattcaaatgacagcacctcttaaactgacttatgcagaaaagttgcac

SEQ ID NO: 429317 - DNA, 120 bp, Artificial Sequence
  ENSG00000151914_19 (sequence is synthesized)
agattagagagtcagtatgcaaaactcttgaatacatccaggaatcaagaacggcaccttgatacactccataattttgtaagtcgtgcgactaatgaacttatttggttgaatgaaaaa

SEQ ID NO: 429318 - DNA, 120 bp, Artificial Sequence
  ENSG00000151914_20 (sequence is synthesized)
gaagaggaggaagttgcttatgactggagtgagagaaacaccaacatagctaggaaaaaagattatcatgctgaattaatgagagaacttgatcaaaaggaagaaaatattaaatcagtt

SEQ ID NO: 429319 - DNA, 120 bp, Artificial Sequence
  ENSG00000151914_21 (sequence is synthesized)
caggagatagcagagcagctacttctagaaaatcatccagcccggttaactattgaggcctacagagcggcaatgcagacgcagtggagctggatcttacagctctgccagtgtgtggag

SEQ ID NO: 429320 - DNA, 120 bp, Artificial Sequence
  ENSG00000151914_22 (sequence is synthesized)
cagcacataaaggagaacacagcgtatttcgagtttttcaatgatgccaaagaagctactgattacttaaggaatctaaaagatgccattcagcggaagtacagctgtgatagatcaagc

SEQ ID NO: 429321 - DNA, 120 bp, Artificial Sequence
  ENSG00000151914_23 (sequence is synthesized)
agcattcacaagctagaagaccttgttcaggaatcaatggaagagaaagaagaacttctgcagtacaaaagcactatagcaaacctaatgggaaaagcaaaaacaataattcaactgaag

SEQ ID NO: 429322 - DNA, 120 bp, Artificial Sequence
  ENSG00000151914_24 (sequence is synthesized)
ccaaggaattctgactgtccactcaaaacttctattccgatcaaagctatctgtgactacagacaaattgagataaccatttacaaagacgatgaatgtgttttggcgaataactctcat

SEQ ID NO: 429323 - DNA, 120 bp, Artificial Sequence
  ENSG00000151914_25 (sequence is synthesized)
cgtgctaaatggaaggtcattagtcctactgggaatgaggctatggtcccatctgtgtgcttcaccgttcctccaccaaacaaagaagcggtggaccttgccaacagaattgagcaacag

SEQ ID NO: 429324 - DNA, 120 bp, Artificial Sequence
  ENSG00000151914_26 (sequence is synthesized)
tatcagaatgtcctgactctttggcatgagtctcacataaacatgaagagtgtagtatcctggcattatctcatcaatgaaattgatagaattcgagctagcaatgtggcttcaataaag

SEQ ID NO: 429325 - DNA, 120 bp, Artificial Sequence
  ENSG00000151914_27 (sequence is synthesized)
acaatgctacctggtgaacatcagcaagttctaagtaatctacaatctcgttttgaagattttctggaagatagccaggaatcccaagtcttttcaggctcagatataacacaactggaa

SEQ ID NO: 429326 - DNA, 120 bp, Artificial Sequence
  ENSG00000151914_28 (sequence is synthesized)
aaggaggttaatgtatgtaagcagtattatcaagaacttcttaaatctgcagaaagagaggagcaagaggaatcagtttataatctctacatctctgaagttcgaaacattagacttcgg

SEQ ID NO: 429327 - DNA, 120 bp, Artificial Sequence
  ENSG00000151914_29 (sequence is synthesized)
ttagagaactgtgaagatcggctgattagacagattcgaactcccctggaaagagatgatttgcatgaaagtgtgttcagaatcacagaacaggagaaactaaagaaagagctggaacga

SEQ ID NO: 429328 - DNA, 120 bp, Artificial Sequence
  ENSG00000151914_30 (sequence is synthesized)
cttaaagatgatttgggaacaatcacaaataagtgtgaggagtttttcagtcaagcagcagcctcttcatcagtccctaccctacgatcagagcttaatgtggtccttcagaacatgaac

SEQ ID NO: 429329 - DNA, 120 bp, Artificial Sequence
  ENSG00000151914_31 (sequence is synthesized)
caagtctattctatgtcttccacttacatagataagttgaaaactgttaacttggtgttaaaaaacactcaagctgcagaagccctcgtaaaactctatgaaactaaactgtgtgaagaa

SEQ ID NO: 429330 - DNA, 120 bp, Artificial Sequence
  ENSG00000151914_32 (sequence is synthesized)
gaagcagttatagctgacaagaataatattgagaatctaataagtactttaaagcaatggagatctgaagtagatgaaaagagacaggtattccatgccttagaggatgagttgcagaaa

SEQ ID NO: 429331 - DNA, 120 bp, Artificial Sequence
  ENSG00000151914_33 (sequence is synthesized)
gctaaagccatcagtgatgaaatgtttaaaacgtataaagaacgggaccttgattttgactggcacaaagaaaaagcagatcaattagttgaaaggtggcaaaatgttcatgtgcagatt

SEQ ID NO: 429332 - DNA, 120 bp, Artificial Sequence
  ENSG00000151914_34 (sequence is synthesized)
gacaacaggttacgggacttagagggcattggcaaatcactgaagtactacagagacacttaccatcctttagatgattggatccagcaggttgaaactactcagagaaagattcaggaa

SEQ ID NO: 429333 - DNA, 120 bp, Artificial Sequence
  ENSG00000151914_35 (sequence is synthesized)
aatcagcctgaaaatagtaaaaccctagccacacagttgaatcaacagaagatgctggtgtccgaaatagaaatgaaacagagcaaaatggacgagtgtcaaaaatatgcagaacagtac

SEQ ID NO: 429334 - DNA, 120 bp, Artificial Sequence
  ENSG00000151914_36 (sequence is synthesized)
tcagctacagtgaaggactatgaattacaaacaatgacctaccgggccatggtagattcacaacaaaaatctccagtgaaacgccgaagaatgcagagttcagcagatctcattattcaa

SEQ ID NO: 429335 - DNA, 120 bp, Artificial Sequence
  ENSG00000151914_37 (sequence is synthesized)
gagttcatggacctaaggactcgatatactgccctggtcactctcatgacacaatatattaaatttgctggtgattcattgaagaggctggaagaggaggagaagtcactggaagaagaa

SEQ ID NO: 429336 - DNA, 120 bp, Artificial Sequence
  ENSG00000151914_38 (sequence is synthesized)
aagaaagaacatgttgaaaaagccaaagaattgcaaaaatgggtatcaaatatcagcaagacattgaaagatgcagagaaggctggaaaacctcccttctctaagcaaaagatttccagt

SEQ ID NO: 429337 - DNA, 120 bp, Artificial Sequence
  ENSG00000151914_39 (sequence is synthesized)
gaggaaatatcaaccaagaaggaacaattatcggaagcacttcaaactatacagctttttttggcaaaacatggagacaaaatgacagatgaagaaagaaatgaattggaaaaacaagtg

SEQ ID NO: 429338 - DNA, 120 bp, Artificial Sequence
  ENSG00000151914_40 (sequence is synthesized)
aaaactcttcaggaaagttataatttattattcagtgaatctctgaaacagctacaagaatcacaaacctcaggagatgtaaaggtagaggagaagattgtagcagagcgtcagcaggag

SEQ ID NO: 429339 - DNA, 120 bp, Artificial Sequence
  ENSG00000151914_41 (sequence is synthesized)
tataaagagaaactccaagggatatgtgatcttcttacccaaactgaaaaccgcctaattggtcaccaagaagccttcatgattggagatggcacagttgagttaaagaaatatcagtcc

SEQ ID NO: 429340 - DNA, 120 bp, Artificial Sequence
  ENSG00000151914_42 (sequence is synthesized)
aagcaagaggaattacagaaagatatgcaaggaagtgcacaggcattggctgaagtagtgaaaaacacagagaacttcttaaaagagaatggtgaaaagctgtcacaggaagataaggct

SEQ ID NO: 429341 - DNA, 120 bp, Artificial Sequence
  ENSG00000151914_43 (sequence is synthesized)
ttgattgaacagaaacttaatgaagctaagataaagtgtgaacagcttaatttaaaagcagaacagtctaaaaaggagctggataaagttgtgacaacagcaatcaaggaagaaactgaa

SEQ ID NO: 429342 - DNA, 120 bp, Artificial Sequence
  ENSG00000151914_44 (sequence is synthesized)
aaggtagcagcagtgaagcagctggaagagagcaaaaccaaaatagaaaaccttttggactggttgtcaaatgttgacaaagactcagaaagggcagggacaaaacacaaacaggtaatc

SEQ ID NO: 429343 - DNA, 120 bp, Artificial Sequence
  ENSG00000151914_45 (sequence is synthesized)
gaacagaacgggacccattttcaagaaggtgatggcaagtcagcaattggagaagaggatgaagttaatggtaacctgttggagactgatgttgatgggcaagttggaaccactcaggag

SEQ ID NO: 429344 - DNA, 120 bp, Artificial Sequence
  ENSG00000151914_46 (sequence is synthesized)
aatctgaatcagcaatatcagaaagttaaggcccaacacgagaagatcatctctcagcaccaagcagtgatcatagccactcagtctgcacaagtgttgcttgagaaacagggtcagtat

SEQ ID NO: 429345 - DNA, 120 bp, Artificial Sequence
  ENSG00000151914_47 (sequence is synthesized)
ctctctcctgaagaaaaagagaaactgcaaaagaacatgaaggaactgaaagtgcattatgaaactgcactggctgagtcagagaagaaaatgaagttaactcactctctgcaggaagaa

SEQ ID NO: 429346 - DNA, 120 bp, Artificial Sequence
  ENSG00000151914_48 (sequence is synthesized)
ttagaaaagtttgatgctgactataccgagtttgagcactggctacagcagtcagaacaagaacttgaaaacctggaggcaggtgcagatgacatcaatggtttaatgaccaaattgaag

SEQ ID NO: 429347 - DNA, 120 bp, Artificial Sequence
  ENSG00000151914_49 (sequence is synthesized)
aggcagaagagtttctcagaagacgttatttctcacaaaggtgacttgagatacatcacaatttctggaaacagagtgttggaagctgccaaatcttgcagcaagagagacggtggcaag

SEQ ID NO: 429348 - DNA, 120 bp, Artificial Sequence
  ENSG00000151914_50 (sequence is synthesized)
gttgatacttctgcaacccacagagaagtgcagcgcaagttggatcatgctactgatcggttcaggtctctctactctaagtgcaatgttcttggaaataatcttaaagatctggtggat

SEQ ID NO: 429349 - DNA, 120 bp, Artificial Sequence
  ENSG00000151914_51 (sequence is synthesized)
aaatatcaacactatgaagatgcttcatgtggacttcttgctggactccaggcctgtgaggccacagcgagcaaacacttatctgaacctattgcggtggaccccaaaaatcttcaaagg

SEQ ID NO: 429350 - DNA, 120 bp, Artificial Sequence
  ENSG00000151914_52 (sequence is synthesized)
caattagaagagaccaaggctttgcaaggacagatatcaagtcagcaggttgctgtagagaaactgaagaaaacggctgaagtgcttttagatgccaggggatctttacttccagccaag

SEQ ID NO: 429351 - DNA, 120 bp, Artificial Sequence
  ENSG00000151914_53 (sequence is synthesized)
aatgatatccagaaaacacttgatgacattgttgggagatatgaggatctgtccaagtctgttaatgaacgaaatgaaaaactccagataaccttgacccgttcactgagtgtgcaggat

SEQ ID NO: 429352 - DNA, 120 bp, Artificial Sequence
  ENSG00000151914_54 (sequence is synthesized)
ggcttggatgaaatgctggactggatgggaaatgtggaaagttctctgaaagaacaaggtcaagtgcctttaaactctactgctcttcaggatattatcagtaaaaacattatgttggaa

SEQ ID NO: 429353 - DNA, 120 bp, Artificial Sequence
  ENSG00000151914_55 (sequence is synthesized)
caggatattgcaggtcgtcagagcagtataaatgccatgaatgaaaaagtgaagaaatttatggaaacaacagatccatccactgcatcctcactgcaagccaaaatgaaagacttgtct

SEQ ID NO: 429354 - DNA, 120 bp, Artificial Sequence
  ENSG00000151914_56 (sequence is synthesized)
gctcggttttcagaagcaagtcataaacacaaagaaactcttgccaaaatggaggagctaaaaaccaaagtagaactgtttgagaacctctcagaaaagctccagacatttttagaaaca

SEQ ID NO: 429355 - DNA, 120 bp, Artificial Sequence
  ENSG00000151914_57 (sequence is synthesized)
aaaactcaggctcttactgaagtagatgtgccaggaaaagatgttactgaattgtctcagtatatgcaggaatcaacttctgaatttttagaacacaagaaacatcttgaagttttgcat

SEQ ID NO: 429356 - DNA, 120 bp, Artificial Sequence
  ENSG00000151914_58 (sequence is synthesized)
agtctcttgaaggagatatccagccatggcttaccaagtgataaggctttggtccttgaaaaaacaaataatttgtcaaagaaattcaaggaaatggaggataccatcaaagaaaaaaaa

SEQ ID NO: 429357 - DNA, 120 bp, Artificial Sequence
  ENSG00000151914_59 (sequence is synthesized)
gaagctgtaacttcttgtcaagaacagttggatgctttccaagttcttgttaaatcattgaagtcatggataaaagaaacaacaaaaaaagttcccattgtacagccttcttttggtgca

SEQ ID NO: 429358 - DNA, 120 bp, Artificial Sequence
  ENSG00000151914_60 (sequence is synthesized)
gaggatttaggaaaatctttggaagacactaagaaattacaagaaaagtggagtttaaaaacaccagagattcagaaagtaaacaacagtgggatctcactatgtaacttaataagtgct

SEQ ID NO: 429359 - DNA, 120 bp, Artificial Sequence
  ENSG00000151914_61 (sequence is synthesized)
gtgaccacccctgcaaaggcaatagcagcagttaaatcaggtggagcagtattaaatggtgaaggaacagccacaaatactgaggaattttgggcaaataaaggtttaacatccattaaa

SEQ ID NO: 429360 - DNA, 120 bp, Artificial Sequence
  ENSG00000151914_62 (sequence is synthesized)
aaggacatgactgacataagtcatggttatgaagatcttggcctcttactcaaggacaaaatagcggaactgaacactaaactctccaaattgcaaaaggctcaggaagaatcaagtgca

SEQ ID NO: 429361 - DNA, 120 bp, Artificial Sequence
  ENSG00000151914_63 (sequence is synthesized)
atgatgcagtggttacagaaaatgaacaaaactgcaacaaaatggcagcagacacctgcacctacagatactgaagctgtgaagactcaagttgagcagaataagtcgtttgaggcagaa

SEQ ID NO: 429362 - DNA, 120 bp, Artificial Sequence
  ENSG00000151914_64 (sequence is synthesized)
ctgaagcagaatgtaaacaaagtacaggagttgaaagacaaattgacagagctgttggaggagaacccagatactcctgaggcccccagatggaaacagatgttgacagaaatagattct

SEQ ID NO: 429363 - DNA, 120 bp, Artificial Sequence
  ENSG00000151914_65 (sequence is synthesized)
aagtggcaagaactcaatcaattaacaattgatagacaacaaaaactggaagaatcctccaataatctaacccagttccagactgtagaggcccaattgaaacagtggcttgtggaaaaa

SEQ ID NO: 429364 - DNA, 120 bp, Artificial Sequence
  ENSG00000151914_66 (sequence is synthesized)
gaacttatggtcagtgttcttgggcccttgtcaattgacccaaatatgctaaacacacaaaggcagcaggtgcagattttgctgcaagaattcgccactcggaaacctcaatatgaacag

SEQ ID NO: 429365 - DNA, 120 bp, Artificial Sequence
  ENSG00000151914_67 (sequence is synthesized)
ctgacagcagctggtcagggcattctgagcaggcctggagaagacccttctttacgtgggattgtgaaagagcaactggcagctgtgacccaaaaatgggatagcctaacagggcaattg

SEQ ID NO: 429366 - DNA, 120 bp, Artificial Sequence
  ENSG00000151914_68 (sequence is synthesized)
agtgacagatgtgactggattgaccaagccattgttaaaagcacacagtatcaaagcctgctgagaagcctttctgataaactgagtgacttggataataaactcagcagcagtctggct

SEQ ID NO: 429367 - DNA, 120 bp, Artificial Sequence
  ENSG00000151914_69 (sequence is synthesized)
gtgagcacgcaccctgatgctatgaaccaacagttggaaacagcccaaaaaatgaagcaggagatacagcaggaaaagaagcagataaaagtggcccaggcactctgtgaggatttgtca

SEQ ID NO: 429368 - DNA, 120 bp, Artificial Sequence
  ENSG00000151914_70 (sequence is synthesized)
gcactggttaaagaagagtacttgaaagcagaacttagtaggcaactagaaggcatcttaaaatcatttaaggatgttgaacagaaagcagagaatcatgtccagcaccttcagtcggcc

SEQ ID NO: 429369 - DNA, 120 bp, Artificial Sequence
  ENSG00000151914_71 (sequence is synthesized)
tgtgcaagctctcatcaatttcagcaaatgtctagagattttcaggcttggctggatacaaagaaagaagagcaaaacaaatctcatccaatatctgccaaactcgatgtcttggagtca

SEQ ID NO: 429370 - DNA, 120 bp, Artificial Sequence
  ENSG00000151914_72 (sequence is synthesized)
ttaattaaagatcataaagactttagtaaaactttgaccgctcagtctcatatgtatgaaaaaaccattgcagaaggtgaaaatctgttattaaaaacacaagggtctgagaaggcagcc

SEQ ID NO: 429371 - DNA, 120 bp, Artificial Sequence
  ENSG00000151914_73 (sequence is synthesized)
agtagagactctctggccatggatagacaaatgccaaaacaacctggaggaaataaaattttgcttggatcctgctgaaggagagaattctattgccaagttaaagtctctgcagaagga

SEQ ID NO: 429372 - DNA, 120 bp, Artificial Sequence
  ENSG00000151914_74 (sequence is synthesized)
aatggaccaacactttggtatggtagaattactgaacaacacagccaatagcttgctcagtgtctgtgagatagataaagaagttgttacagatgagaataagtcactgatccagaaggt

SEQ ID NO: 429373 - DNA, 120 bp, Artificial Sequence
  ENSG00000151914_75 (sequence is synthesized)
ggacatggtcactgaacaacttcacagtaagaaattctgtctggagaacatgactcagaagtttaaagaatttcaagaagtttccaaagaatctaaaaggcagcttcagtgtgcaaagga

SEQ ID NO: 429374 - DNA, 120 bp, Artificial Sequence
  ENSG00000151914_76 (sequence is synthesized)
gcagctagatatccatgattcgctgggatcccaggcttacagtaacaaatacctgaccatgttgcaaactcagcagaaatcacttcaggccttgaagcatcaggtagatttggctaaaag

SEQ ID NO: 429375 - DNA, 120 bp, Artificial Sequence
  ENSG00000151914_77 (sequence is synthesized)
acttgcacaggaccttgtggtagaggcctcagactcaaagggaacctctgatgttttattacaagtggaaaccatagctcaagagcatagtacactaagtcagcaggttgatgaaaagtg

SEQ ID NO: 429376 - DNA, 120 bp, Artificial Sequence
  ENSG00000151914_78 (sequence is synthesized)
ttctttcttagaaaccaagcttcagggcattgggcatttccagaataccattcgagaaatgttttctcagttcgcagagtttgatgatgaactggatagcatggctccagtggggagaga

SEQ ID NO: 429377 - DNA, 120 bp, Artificial Sequence
  ENSG00000151914_79 (sequence is synthesized)
tgcagaaacattgcaaaagcaaaaggaaactataaaagcctttctaaagaaactagaagccctcatggcaagcaatgacaatgccaataaaacctgcaagatgatgttagccacagaaga

SEQ ID NO: 429378 - DNA, 120 bp, Artificial Sequence
  ENSG00000151914_80 (sequence is synthesized)
aacctctcctgaccttgttggaatcaaaagggacttggaggccttaagcaaacaatgcaacaagttactggaccgagcccaagccagagaagagcaggttgaagggacaattaagcgcct

SEQ ID NO: 429379 - DNA, 120 bp, Artificial Sequence
  ENSG00000151914_81 (sequence is synthesized)
tgaagaattttacagcaaattgaaagaattttctattctgctccagaaagccgaagaacatgaagagtcacaaggtcctgttggtatggaaacggagacaattaatcagcagcttaacat

SEQ ID NO: 429380 - DNA, 120 bp, Artificial Sequence
  ENSG00000151914_82 (sequence is synthesized)
gttcaaggtattccagaaagaagagattgaacccttgcaaggtaaacagcaagatgtaaactggttaggtcaaggccttattcagagtgctgccaaaagcactagcactcagggcttgga

SEQ ID NO: 429381 - DNA, 120 bp, Artificial Sequence
  ENSG00000151914_83 (sequence is synthesized)
gcatgacctggatgatgtcaatgcacggtggaagactctcaataagaaggtggctcagcgagcagcccagctgcaggaggccttgctgcactgtgggaggttccaggatgccctggagtc

SEQ ID NO: 429382 - DNA, 120 bp, Artificial Sequence
  ENSG00000151914_84 (sequence is synthesized)
cctgctcagctggatggtggacactgaggagcttgtggccaatcagaagcccccgtcggctgagttcaaagtggtaaaggcccagatacaagaacaaaagcttctccagagattgttgga

SEQ ID NO: 429383 - DNA, 120 bp, Artificial Sequence
  ENSG00000151914_85 (sequence is synthesized)
tgaccgaaaatctacggtggaggtaatcaaacgagaaggagaaaaaattgctacaacagcagagcccgcagataaagtgaagattttgaaacagctcagtctcttggatagcagatggga

SEQ ID NO: 429384 - DNA, 120 bp, Artificial Sequence
  ENSG00000151914_86 (sequence is synthesized)
ggcattgcttaataaagctgaaacaaggaatcgtcagttggaaggtatctcggtggtagcacagcaatttcatgaaaccttagaaccactgaacgagtggcttacaaccatagaaaagag

SEQ ID NO: 429385 - DNA, 120 bp, Artificial Sequence
  ENSG00000151914_87 (sequence is synthesized)
gctggtgaattgtgaacccataggaacccaagcatctaaacttgaggaacaaattgcacagcacaaagccttagaagatgacatcatcaatcacaataaacatttacaccaggctgttag

SEQ ID NO: 429386 - DNA, 120 bp, Artificial Sequence
  ENSG00000151914_88 (sequence is synthesized)
cattggccagtccttaaaggttttgagctccagggaggataaagatatggtgcagagtaaattagacttctctcaagtatggtacattgagattcaagagaaaagtcacagcaggtctga

SEQ ID NO: 429387 - DNA, 120 bp, Artificial Sequence
  ENSG00000151914_89 (sequence is synthesized)
gctcctccagcaggccttatgtaatgctaagatttttggggaagatgaagttgaactgatgaactggctgaatgaagtgcatgacaaactgagcaagctctcagtccaggattacagcac

SEQ ID NO: 429388 - DNA, 120 bp, Artificial Sequence
  ENSG00000151914_90 (sequence is synthesized)
tgaggggctatggaagcagcagtctgaacttcgggttctgcaagaggacatcttactcaggaaacaaaatgtagatcaggctttactaaatggtttagaactacttaaacaaaccacagg

SEQ ID NO: 429389 - DNA, 120 bp, Artificial Sequence
  ENSG00000151914_91 (sequence is synthesized)
tgatgaagttttaataattcaagataaattggaagccattaaagcaaggtacaaagacattactaaactgagcactgatgtggccaagactctggaacaggcgctgcagcttgcaaggcg

SEQ ID NO: 429390 - DNA, 120 bp, Artificial Sequence
  ENSG00000151914_92 (sequence is synthesized)
gctgcactccacacacgaagagctgtgtacctggctggacaaagtggaggtggaattactttcatatgaaactcaggttctgaaaggagaagaagcaagtcaagcacaaatgagaccaaa

SEQ ID NO: 429391 - DNA, 120 bp, Artificial Sequence
  ENSG00000151914_93 (sequence is synthesized)
ggaactgaaaaaggaagctaagaacaacaaagccttactggactcccttaatgaagtgagcagtgctttgctggaactggtaccatggagggcaagagaaggacttgagaaaatggtagc

SEQ ID NO: 429392 - DNA, 120 bp, Artificial Sequence
  ENSG00000151914_94 (sequence is synthesized)
tgaggacaatgagcgctaccgattagtgagcgacaccatcactcagaaggtggaggagatcgatgcagccattctgcgatcacagcagtttgaccaagcagctgatgctgagttatcctg

SEQ ID NO: 429393 - DNA, 120 bp, Artificial Sequence
  ENSG00000151914_95 (sequence is synthesized)
gattactgaaacagaaaaaaaattgatgtctctgggtgacatcaggcttgagcaagaccagacttctgctcagcttcaagttcaaaagacattcaccatggagattttgagacacaagga

SEQ ID NO: 429394 - DNA, 120 bp, Artificial Sequence
  ENSG00000151914_96 (sequence is synthesized)
tattattgatgaccttgttaaatctgggcataaaatcatgaccgcatgcagtgaagaggaaaagcaatcaatgaagaaaaaactggacaaggtactgaagaactatgataccatctgcca

SEQ ID NO: 429395 - DNA, 120 bp, Artificial Sequence
  ENSG00000151914_97 (sequence is synthesized)
gattaattcagaaaggtatctgcagctggaacgggcacagtccctggttaaccaattctgggaaacatatgaagaactttggccatggctgacagaaacacaatcaatcatctctcagct

SEQ ID NO: 429396 - DNA, 120 bp, Artificial Sequence
  ENSG00000151914_98 (sequence is synthesized)
tcccgccccagcccttgaatatgaaactctaaggcagcagcaggaagaacatcggcaactgcgtgagttgatagctgaacacaagcctcatatagataagatgaacaaaactgggccaca

SEQ ID NO: 429397 - DNA, 120 bp, Artificial Sequence
  ENSG00000151914_99 (sequence is synthesized)
gttactggaattgagccctggggaaggcttttctatccaagagaagtatgtggcagccgacaccctttacagtcaaattaaagaagatgtcaaaaagcgtgctgtggcactggatgaagc

SEQ ID NO: 429398 - DNA, 120 bp, Artificial Sequence
  ENSG00000151914_100 (sequence is synthesized)
catttctcaatcaactcagttccatgacaagatagatcagatccttgagagcctggaacgcatcgtggaacgtctgaggcagccaccctctatctctgcagaggttgagaagatcaagga

SEQ ID NO: 429399 - DNA, 120 bp, Artificial Sequence
  ENSG00000151914_101 (sequence is synthesized)
acagatcagtgaaaataagaatgtgtcagtagacatggaaaagctacagccgttgtatgaaactcttaaacagaggggagaggaaatgattgctagatctggggggactgataaagacat

SEQ ID NO: 429400 - DNA, 120 bp, Artificial Sequence
  ENSG00000151914_102 (sequence is synthesized)
atctgccaaagctgttcaggataagcttgaccaaatggttttcatttgggagaacatacacacactggtggaagagagggaagccaaactactggatgtgatggagctagcagaaaagtt

SEQ ID NO: 429401 - DNA, 120 bp, Artificial Sequence
  ENSG00000151914_103 (sequence is synthesized)
ctggtgtgatcacatgtcattgatagttaccattaaagatactcaagatttcatccgggacctggaagatcctggaattgatccttcagtagtaaaacaacagcaagaagcagcagagac

SEQ ID NO: 429402 - DNA, 120 bp, Artificial Sequence
  ENSG00000151914_104 (sequence is synthesized)
cataagggaagaaatagatggactacaggaggagctggatatagttattaacctaggttctgaactcattgcggcatgtggggagcctgataaacccattgtcaagaagagtatagatga

SEQ ID NO: 429403 - DNA, 120 bp, Artificial Sequence
  ENSG00000151914_105 (sequence is synthesized)
gttaaattcagcatgggattctctaaataaagcttggaaagaccggattgacaaacttgaggaggcaatgcaggctgccgttcagtaccaggatggactgcaggcggtatttgactgggt

SEQ ID NO: 429404 - DNA, 120 bp, Artificial Sequence
  ENSG00000151914_106 (sequence is synthesized)
agatattgcaggtggtaaattagcttcaatgtctccaattggaacagatctcgaaactgtcaagcagcagattgaagagctaaagcaatttaagtctgaggcctatcaacagcagataga

SEQ ID NO: 429405 - DNA, 120 bp, Artificial Sequence
  ENSG00000151914_107 (sequence is synthesized)
aatggaaagactgaatcatcaagcagagcttttgctaaagaaagtaacagaagagagtgacaaacacactgttcaagacccattaatggaactgaaattgatatgggatagcctggagga

SEQ ID NO: 429406 - DNA, 120 bp, Artificial Sequence
  ENSG00000151914_108 (sequence is synthesized)
gagaatcatcaacagacagcataaactggagggtgctctattagccttgggtcagttccaacatgccctggatgagctcctggcatggctgacacacaccgagggcttgctaagtgagca

SEQ ID NO: 429407 - DNA, 120 bp, Artificial Sequence
  ENSG00000151914_109 (sequence is synthesized)
gaaacctgttggaggagaccctaaagccattgaaattgaacttgccaagcatcatgtgctccaaaatgatgtattagcccatcagtccacagtggaagccgttaataaagcaggaaatga

SEQ ID NO: 429408 - DNA, 120 bp, Artificial Sequence
  ENSG00000151914_110 (sequence is synthesized)
tctaattgaatcaagtgcaggagaagaagcaagcaaccttcagaacaagctagaggttttaaatcaacgctggcaaaatgttttggaaaaaacagaacaaaggaagcagcagctggatgg

SEQ ID NO: 429409 - DNA, 120 bp, Artificial Sequence
  ENSG00000151914_111 (sequence is synthesized)
tgccttgcgccaggccaaagggttccatggcgaaattgaggatttgcagcagtggctgactgacacggagcgtcatctgttggcatctaaaccgctgggaggtttaccggaaacagccaa

SEQ ID NO: 429410 - DNA, 120 bp, Artificial Sequence
  ENSG00000151914_112 (sequence is synthesized)
ggagcagcttaatgtccatatggaagtctgtgctgcctttgaagctaaagaagaaacatataagagtctgatgcagaaaggccagcagatgcttgcaagatgcccaaaatctgcagagac

SEQ ID NO: 429411 - DNA, 120 bp, Artificial Sequence
  ENSG00000151914_113 (sequence is synthesized)
aaatattgaccaagacataaataacttgaaagaaaaatgggaatcggtggaaaccaaactcaatgaaaggaaaactaaactggaagaggctctcaacttggcaatggagttccacaattc

SEQ ID NO: 429412 - DNA, 120 bp, Artificial Sequence
  ENSG00000151914_114 (sequence is synthesized)
tctccaagacttcatcaactggcttactcaggctgaacagaccctaaatgtagcttctcggccaagtctcatcttggacacagtcttatttcaaattgacgaacacaaggtttttgccaa

SEQ ID NO: 429413 - DNA, 120 bp, Artificial Sequence
  ENSG00000151914_115 (sequence is synthesized)
tgaagtaaattctcatcgtgagcagataatagagctggacaaaactggaacccacctaaaatattttagtcagaaacaagatgttgttctaatcaagaatctacttatcagtgtacaaag

SEQ ID NO: 429414 - DNA, 120 bp, Artificial Sequence
  ENSG00000151914_116 (sequence is synthesized)
tcgatgggaaaaagtggttcaacggttggtagagagaggaagatctttggatgatgcaaggaagagagccaagcagttccatgaagcttggagtaaacttatggagtggctagaagagtc

SEQ ID NO: 429415 - DNA, 120 bp, Artificial Sequence
  ENSG00000151914_117 (sequence is synthesized)
agaaaagtctttggattctgaactggaaatcgcaaatgatccagacaaaataaaaacacaacttgcacaacataaggagtttcagaaatcactcggagccaagcattctgtctacgacac

SEQ ID NO: 429416 - DNA, 120 bp, Artificial Sequence
  ENSG00000151914_118 (sequence is synthesized)
caccaacaggactggacgttctctgaaggagaaaacctccctggctgatgacaacctgaaactggatgacatgctgagtgaactcagagacaaatgggataccatatgtggaaaatctgt

SEQ ID NO: 429417 - DNA, 120 bp, Artificial Sequence
  ENSG00000151914_119 (sequence is synthesized)
ggaaagacaaaacaaattggaggaagccctgttattttctggacaattcacagatgccctacaggctctcattgattggttatatagagttgaaccccagctggcagaagaccagcctgt

SEQ ID NO: 429418 - DNA, 120 bp, Artificial Sequence
  ENSG00000151914_120 (sequence is synthesized)
tcatggagacattgatttggtgatgaatctgatcgataatcacaaggccttccaaaaagagttggggaagaggaccagcagtgtgcaggccctgaagcgctcagcccgagaactcataga

SEQ ID NO: 429419 - DNA, 120 bp, Artificial Sequence
  ENSG00000151914_121 (sequence is synthesized)
aggcagtcgggatgactcctcctgggtcaaggtccagatgcaggaattaagcacacgctgggagaccgtgtgtgcactttctatatcaaagcaaacacggttagaagcagccctgcgtca

SEQ ID NO: 429420 - DNA, 120 bp, Artificial Sequence
  ENSG00000151914_122 (sequence is synthesized)
ggcagaggaattccactcggtggtacatgccctcttggagtggctggctgaggcggagcaaaccctgcgtttccatggtgtcctcccagatgatgaggatgctctccggactctcattga

SEQ ID NO: 429421 - DNA, 120 bp, Artificial Sequence
  ENSG00000151914_123 (sequence is synthesized)
tcagcataaagaattcatgaagaaactggaagaaaagagagctgaactaaataaagccaccactatgggcgacaccgttttggctatctgccaccccgactccatcactaccattaagca

SEQ ID NO: 429422 - DNA, 120 bp, Artificial Sequence
  ENSG00000151914_124 (sequence is synthesized)
ctggataacaatcatccgggcgaggtttgaggaggtgctggcctgggcaaagcaacatcagcagagattagcaagtgctctggctgggcttattgccaaacaggaattgttggaagcttt

SEQ ID NO: 429423 - DNA, 120 bp, Artificial Sequence
  ENSG00000151914_125 (sequence is synthesized)
gctggcttggttgcaatgggctgaaactacacttactgataaggataaagaagtcatcccccaggagatcgaagaggtgaaagcactcattgcagaacaccagaccttcatggaggaaat

SEQ ID NO: 429424 - DNA, 120 bp, Artificial Sequence
  ENSG00000151914_126 (sequence is synthesized)
gaccagaaaacagcctgatgttgataaagtaacgaagacctataagaggagagctgctgatccttcctcattacaatcccatattccagtcttggataagggacgagcaggaagaaaacg

SEQ ID NO: 429425 - DNA, 120 bp, Artificial Sequence
  ENSG00000151914_127 (sequence is synthesized)
ctttccagcatcaagcttgtatccctctgggtcacagacacaaattgaaaccaaaaatcctagggtaaacttactggtgagcaaatggcagcaagtctggctcctggcgttggaaagaag

SEQ ID NO: 429426 - DNA, 120 bp, Artificial Sequence
  ENSG00000151914_128 (sequence is synthesized)
gaggaaactcaatgatgccttggacagactagaggagctgagggaatttgctaactttgattttgatatctggcgcaaaaaatacatgcgatggatgaatcacaagaaatctcgagtgat

SEQ ID NO: 429427 - DNA, 120 bp, Artificial Sequence
  ENSG00000151914_129 (sequence is synthesized)
ggacttcttcaggagaattgataaagaccaggatgggaaaataacgcggcaggaatttattgatggaattctttcctcaaagtttccaaccagtcgcttggagatgagcgcagttgcaga

SEQ ID NO: 429428 - DNA, 120 bp, Artificial Sequence
  ENSG00000151914_130 (sequence is synthesized)
catctttgacagagatggcgatggatatattgactactatgaatttgtagcagcccttcacccaaataaagatgcatataaacctatcacagatgccgacaaaatcgaagatgaggtgac

SEQ ID NO: 429429 - DNA, 120 bp, Artificial Sequence
  ENSG00000151914_131 (sequence is synthesized)
aaggcaggtagctaagtgtaaatgtgcaaagcgatttcaagttgagcagattggtgataataaatacaggttcttcctgggaaatcagtttggagactcccagcaactgcgactggtccg

SEQ ID NO: 429430 - DNA, 120 bp, Artificial Sequence
  ENSG00000151914_132 (sequence is synthesized)
gatcctgcggagtactgtgatggttcgtgttggaggtggatggatggcacttgatgagttcttagtgaaaaatgatccttgcagggccaaaggaaggacaaacatggaactgcgtgagaa

SEQ ID NO: 429431 - DNA, 120 bp, Artificial Sequence
  ENSG00000151914_133 (sequence is synthesized)
gttcattttagcagatggtgccagccagggtatggctgctttccgaccccgaggccgaagatcccggccatcatcacgaggcgcttcacccaacagatccacttctgtgtccagtcaggc

SEQ ID NO: 429432 - DNA, 120 bp, Artificial Sequence
  ENSG00000151914_134 (sequence is synthesized)
tgcgcaggcggcctccccacaggtccctgccaccaccacacccaagattctccatcctttaacacgcaattatggtaaaccatggttgacaaacagcaaaatgtcaactccttgtaaagc

SEQ ID NO: 429433 - DNA, 120 bp, Artificial Sequence
  ENSG00000151914_135 (sequence is synthesized)
agcagagtgctcagactttcccgtgccatctgcagagggaacgccaatacaaggaagcaagcttcgacttccaggatatttatcagggaaaggcttccactctggggaggacagtggctt

SEQ ID NO: 429434 - DNA, 120 bp, Artificial Sequence
  ENSG00000151914_136 (sequence is synthesized)
gataacaactgcagctgccagagtccgaacacagtttgctgattccaagaagactcccagccgaccaggaagtcgagctggaagcaaagctggcagcagggccagcagccgccgaggcag

SEQ ID NO: 429435 - DNA, 120 bp, Artificial Sequence
  ENSG00000151914_137 (sequence is synthesized)
tgatgcatcagactttgacatttcagaaatccagtccgtgtgctcagatgtggaaactgtcccccagacacacagacctacaccccgagcaggttctcggccatccacagcgaagccttc

SEQ ID NO: 429436 - DNA, 120 bp, Artificial Sequence
  ENSG00000151914_138 (sequence is synthesized)
aaaaatccccacgccccagaggaaatcacctgccagcaaattggacaagtcctcaaagagatagtgcaattggttctaccaaggcccttccttgagcatttattatttaagtttgaacga

SEQ ID NO: 429437 - DNA, 120 bp, Artificial Sequence
  ENSG00000151914_139 (sequence is synthesized)
tgtaaaatatggtgtagaaattcttgtgaaatattgcaagaggcgagtttaaaattctgcagatggccttatttgtgtatttgtctttttattttatctgtataattttttttgtcagat

SEQ ID NO: 429438 - DNA, 120 bp, Artificial Sequence
  ENSG00000151914_140 (sequence is synthesized)
attctggggttaaagtcacatcatatgtgaggaggaaaagtttaacatgaactaacatttctgcactgtaacgtgccgggcacacactaaactcagttactgtacctacaggtaagtcta

SEQ ID NO: 429439 - DNA, 120 bp, Artificial Sequence
  ENSG00000151914_141 (sequence is synthesized)
catcctctctgacagccacagcactacatcaatccctgacgttagggatacctcatgacattttcctgtttttatggaaactctgagaagctgaatgatacatgcaggggatattttttg

SEQ ID NO: 429440 - DNA, 120 bp, Artificial Sequence
  ENSG00000151914_142 (sequence is synthesized)
agatgatttaaatgtaaaccaaaagatggaagacaaaaagacaaacacacccacacgcagtctttgcagtatctgacagagaactcacaggaagttacttcaagcacttgccagtactat

SEQ ID NO: 429441 - DNA, 120 bp, Artificial Sequence
  ENSG00000151914_143 (sequence is synthesized)
gatattcaagtaccttgcagcatttctctgccattgctttcaatgaggccagaggcatcctggatattagacctattatactgtaagaatataagtataaagtgcgttcatatacatgtg

SEQ ID NO: 429442 - DNA, 120 bp, Artificial Sequence
  ENSG00000151914_144 (sequence is synthesized)
aggttttcttttgcttgagtggacagtagcacctgtatcattgaactcattttgtatcagagcaattttgcttgcagaaagctatgaaataaaacacgtcccttaactgcattgctatgg

SEQ ID NO: 429443 - DNA, 120 bp, Artificial Sequence
  ENSG00000151914_145 (sequence is synthesized)
aattaattttttttccccagggaaaactagtgtatttttttatgagcaatatcaatttggagtgaccaaaagatacttaaaaatgggtttattttgatttctcatctgaaataatcatgt

SEQ ID NO: 429444 - DNA, 120 bp, Artificial Sequence
  ENSG00000151914_146 (sequence is synthesized)
acttcggcatggcgggttacctctcccctgctgcttacctgtacgtggaggagcaggagtatctccaggcctacgaggatgtcctggagaggtacaaagatgaacgggacaaagttcaga

SEQ ID NO: 429445 - DNA, 120 bp, Artificial Sequence
  ENSG00000151914_147 (sequence is synthesized)
ccattgatcagacaactggagaagtcctttcagtctttcaagcagttttaagaggcctcattgactatgacacaggaattaggttgcttgagacacagctaatgatttctggtctaattt

SEQ ID NO: 429446 - DNA, 120 bp, Artificial Sequence
  ENSG00000151914_148 (sequence is synthesized)
caccagaattaagaaagtgctttgaccttaaagatgccaaaagtcatggccttattgatgaacaaattctgtgccaactcaaagaactaagtaaagctaaggagattatttctgctgcgt

SEQ ID NO: 429447 - DNA, 120 bp, Artificial Sequence
  ENSG00000151914_149 (sequence is synthesized)
cacctaccacaattccagtactggatgctctagctcaaagcatgataacagaatccatggccatcaaagttcttgagatactgctttctacaggctctctggttattccagccacaggag

SEQ ID NO: 429448 - DNA, 120 bp, Artificial Sequence
  ENSG00000151914_150 (sequence is synthesized)
aacagttgaccctacagaaggctttccaacagaacttggtttcctcagcattattttctaaagttctggaaaggcaaaatatgtgcaaagatcttattgacccctgcacctctgagaagg

SEQ ID NO: 429449 - DNA, 120 bp, Artificial Sequence
  ENSG00000151914_151 (sequence is synthesized)
tttctttaatagatatggtacaaagaagtactttacaggaaaacacagggatgtggcttctacctgtgagaccacaagaaggaggtagaataacattaaaatgtggaagaaacataagca

SEQ ID NO: 429450 - DNA, 120 bp, Artificial Sequence
  ENSG00000151914_152 (sequence is synthesized)
ttttaagagcagctcatgaaggtctcatagaccgtgaaaccatgtttaggttgttaagtgcacagcttctttctggaggtctgatcaattccaactctggccaaagaatgactgttgaag

SEQ ID NO: 429451 - DNA, 120 bp, Artificial Sequence
  ENSG00000151914_153 (sequence is synthesized)
aagctgtcagagaaggggtgattgacagggacactgctagcagtatcctcacatatcaggttcaaactggtggaatcatccagtcaaaccctgccaagcgtttaactgtagacgaagcag

SEQ ID NO: 429452 - DNA, 120 bp, Artificial Sequence
  ENSG00000151914_154 (sequence is synthesized)
tacagtgtgatttaataacttccagcagtgctcttctggtcctggaagctcagcgaggctatgttggactcatttggccccattctggtgaaatatttcccacatcatcttccttgcagc

SEQ ID NO: 429453 - DNA, 120 bp, Artificial Sequence
  ENSG00000151914_155 (sequence is synthesized)
aagaattgattacaaatgaattggcctacaaaatcctgaatggcagacaaaaaatagctgctctttatattccagaaagttctcaagtcattggtttggatgctgctaaacagctaggaa

SEQ ID NO: 429454 - DNA, 120 bp, Artificial Sequence
  ENSG00000151914_156 (sequence is synthesized)
ttatagacaacaacacagcatcaattttaaaaaatataacactgcctgataaaatgccagatttaggagatttagaagcttgtaaaaatgccagaagatggctctctttttgtaaatttc

SEQ ID NO: 429455 - DNA, 120 bp, Artificial Sequence
  ENSG00000151914_157 (sequence is synthesized)
aaccctccacagttcatgattacagacaagaagaggatgtttttgatggagaagaacctgtcactactcagacctcagaagaaactaaaaaattatttctatcttatttaatgataaata

SEQ ID NO: 429456 - DNA, 120 bp, Artificial Sequence
  ENSG00000151914_158 (sequence is synthesized)
gctatatggatgcaaacacagggcaaaggcttttgctgtacgatggagacttggatgaggctgttggcatgctactggaaggctgtcatgcagaatttgatggaaacacagccataaaag

SEQ ID NO: 429457 - DNA, 120 bp, Artificial Sequence
  ENSG00000151914_159 (sequence is synthesized)
aatgtctcgatgtcttaagctcatctggtgtatttcttaataatgcttcaggtagagaaaaggatgaatgtacagctacaccaagtagtttcaataaatgtcactgtggagaacctgaac

SEQ ID NO: 429458 - DNA, 120 bp, Artificial Sequence
  ENSG00000151914_160 (sequence is synthesized)
atgaagagactcctgaaaatagaaagtgtgctatagatgaagaatttaatgaaatgagaaatactgttatcaatagtgaattttctcagtcaggaaaactggcaagtacaatatcaattg

SEQ ID NO: 429459 - DNA, 120 bp, Artificial Sequence
  ENSG00000151914_161 (sequence is synthesized)
atcctaaagttaacagttcacccagtgtgtgtgttcccagtctcatatcatatttaacacagactgaacttgcagacattagcatgcttagaagtgactctgaaaacatacttacaaact

SEQ ID NO: 429460 - DNA, 120 bp, Artificial Sequence
  ENSG00000151914_162 (sequence is synthesized)
atgaaaatcaaagccgagtggaaacaaatgaacgtgcaaatgaatgtagtcattctaaaaacattcaaaactttccaagtgatttaatagaaaatcctattatgaaatcaaaaatgagta

SEQ ID NO: 429461 - DNA, 120 bp, Artificial Sequence
  ENSG00000151914_163 (sequence is synthesized)
aattctgtggtgtgaatgaaacagagaatgaagataatacaaacagggattcacctatctttgactattcccccaggctaagtgccttgttaagtcatgataaattgatgcacagtcagg

SEQ ID NO: 429462 - DNA, 120 bp, Artificial Sequence
  ENSG00000151914_164 (sequence is synthesized)
gaagttttaatgatacacacaccccagagagcaatggaaataagtgtgaagccccagccttatcattcagtgacaaaaccatgttgtcaggtcaaagaataggagaaaaatttcaagacc

SEQ ID NO: 429463 - DNA, 120 bp, Artificial Sequence
  ENSG00000151914_165 (sequence is synthesized)
agtttctgggaattgcagctattaacatcagtttaccaggagagcagtatggacagaaatctttaaatatgatttctagtaatcctcaagtacaatatcacaatgataaatacatttcaa

SEQ ID NO: 429464 - DNA, 120 bp, Artificial Sequence
  ENSG00000151914_166 (sequence is synthesized)
atacttctggtgaggatgaaaaaacacatccaggttttcagcagatgcctgaagacaaggaagatgagtctgaaatagaagagtattcctgtgctgtgactccagggggtgatactgata

SEQ ID NO: 429465 - DNA, 120 bp, Artificial Sequence
  ENSG00000151914_167 (sequence is synthesized)
atgccattgtgtctcttacttgtgctacaccattgcttgatgaaaccatcagtgctagtgactatgaaacgtcactgctgaatgatcagcagaataacacaggaacagacactgatagtg

SEQ ID NO: 429466 - DNA, 120 bp, Artificial Sequence
  ENSG00000151914_168 (sequence is synthesized)
atgatgatttttatgatactcccttgtttgaagatgatgaccatgattctttgcttcttgatggtgatgatcgtgattgcctgcaccctgaggactacgacacactgcaagaggaaaatg

SEQ ID NO: 429467 - DNA, 120 bp, Artificial Sequence
  ENSG00000151914_169 (sequence is synthesized)
atgagacggcttctcctgctgatgttttttatgatgtctcaaaagagaatgaaaattccatggttccccagggggcaccagttggtagcttaagtgtgaagaacaaagcacattgtcttc

SEQ ID NO: 429468 - DNA, 120 bp, Artificial Sequence
  ENSG00000151914_170 (sequence is synthesized)
aggatttccttatggatgttgagaaagatgaattagattctggtgaaaaaatacatttaaatcctgttggctcagataaggtgaatggacagtcactggaaactggatcagaaagggaat

SEQ ID NO: 429469 - DNA, 120 bp, Artificial Sequence
  ENSG00000151914_171 (sequence is synthesized)
gcacaaatatccttgaaggtgatgaatctgactcattgactgattatgatattgtaggaggaaaagagagcttcactgcatcattaaaatttgatgacagtggcagttggagaggaagaa

SEQ ID NO: 429470 - DNA, 120 bp, Artificial Sequence
  ENSG00000151914_172 (sequence is synthesized)
aggaagagtatgtaactggacaggaatttcactccgatactgatcatttagattctatgcaaagtgaagaaagttatggggattatatatatgacagtaatgatcaggatgacgatgatg

SEQ ID NO: 429471 - DNA, 120 bp, Artificial Sequence
  ENSG00000151914_173 (sequence is synthesized)
atgatggcattgatgaagaaggaggaggtataagagatgagaatggaaagcccaggtgccaaaatgtggctgaagatatggatatccagttgtgtgcctctattttaaatgaaaacagtg

SEQ ID NO: 429472 - DNA, 120 bp, Artificial Sequence
  ENSG00000151914_174 (sequence is synthesized)
atgaaaatgaaaatattaatacaatgattcttctggataaaatgcacagttgtagctctttagaaaaacagcaaagggtaaatgttgtacagctagcatcacctagtgaaaataacttag

SEQ ID NO: 429473 - DNA, 120 bp, Artificial Sequence
  ENSG00000151914_175 (sequence is synthesized)
ttactgaaaaaagcaaccttccagaatatacaactgagattgctggaaaaagcaaagaaaatctgttgaaccatgagatggtacttaaggatgtattgccgcctatcattaaagacactg

SEQ ID NO: 429474 - DNA, 120 bp, Artificial Sequence
  ENSG00000151914_176 (sequence is synthesized)
aatctgaaaaaacttttggccctgcaagtatttcacatgataataataatatcagttcaacttctgaattaggtactgatctagcaaacacaaaggttaagttgattcaagggtcagaat

SEQ ID NO: 429475 - DNA, 120 bp, Artificial Sequence
  ENSG00000151914_177 (sequence is synthesized)
tgccagaattgactgattctgtgaaaggtaaagatgaatattttaagaatatgacaccaaaagttgactcatctcttgatcacatcatttgtactgagcctgatttaataggaaaacctg

SEQ ID NO: 429476 - DNA, 120 bp, Artificial Sequence
  ENSG00000151914_178 (sequence is synthesized)
ctgaggaaagccatttgtcattgatagcctctgtaactgacaaagatcctcaaggaaatggaagcgatctcattaaagggagagatggcaaaagtgatattctaatagaagatgaaacat

SEQ ID NO: 429477 - DNA, 120 bp, Artificial Sequence
  ENSG00000151914_179 (sequence is synthesized)
caattcagaaaatgtacttgggtgaaggagaagtgcttgtagaaggtctagtagaagaagaaaataggcatctcaaacttttgcctggtaaaaatacaagggatagtttcaagttaatta

SEQ ID NO: 429478 - DNA, 120 bp, Artificial Sequence
  ENSG00000151914_180 (sequence is synthesized)
atagtcagtttccatttccacaaatcacaaacaatgaagaacttaatcagaaaggaagccttaaaaaagcaactgtaactcttaaagatgaaccaaataatctacaaataatagttagta

SEQ ID NO: 429479 - DNA, 120 bp, Artificial Sequence
  ENSG00000151914_181 (sequence is synthesized)
aaagtcctgttcagtttgagaatcttgaagaaatttttgacacatcagtttccaaagagattagtgatgacattacttcagacattacatcgtgggaagggaatacacattttgaggagt

SEQ ID NO: 429480 - DNA, 120 bp, Artificial Sequence
  ENSG00000151914_182 (sequence is synthesized)
cattcactgatggacctgagaaagagcttgatctgtttacttacttaaaacattgtgctaaaaatataaaagcaaaagatgtagccaaaccaaatgaagatgtcccaagccatgttttaa

SEQ ID NO: 429481 - DNA, 120 bp, Artificial Sequence
  ENSG00000151914_183 (sequence is synthesized)
taactgcccctcccatgaaagaacatttacaattaggagttaataatacaaaagagaagtccactagtacccaaaaagactcacctcttaatgacatgatccaaagcaatgatctttgta

SEQ ID NO: 429482 - DNA, 120 bp, Artificial Sequence
  ENSG00000151914_184 (sequence is synthesized)
gtaaagaaagcatctcaggaggaggaacagaaatttctcagttcacaccagaaagtattgaagccacactttcaatattatctcgtaaacatgtagaagatgttgggaaaaatgattttc

SEQ ID NO: 429483 - DNA, 120 bp, Artificial Sequence
  ENSG00000151914_185 (sequence is synthesized)
tgcagtcggagcggtgtgcaaatggattaggaaatgataactccagtaacactttaaatactgactattcattcttagaaattaataataagaaagaaagaattgagcaacagctaccaa

SEQ ID NO: 429484 - DNA, 120 bp, Artificial Sequence
  ENSG00000151914_186 (sequence is synthesized)
aagaacaagccttgtctccaagatcccaagaaaaggaggttcagattcctgaattgtctcaggtatttgtggaggatgtaaaggatatcttaaaaagcaggttgaaagaaggtcatatga

SEQ ID NO: 429485 - DNA, 120 bp, Artificial Sequence
  ENSG00000151914_187 (sequence is synthesized)
accctcaagaggttgaagaaccttcagcctgtgcagacactaaaattttaattcaaaatttaattaaaaggattaccacatcacagttggtaaatgaggcatctactgtgcccagcgact

SEQ ID NO: 429486 - DNA, 120 bp, Artificial Sequence
  ENSG00000151914_188 (sequence is synthesized)
ctcaaatgagtgactcttctggagtttcccccatgactaactcatcagaactaaagccagaaagtagagatgatcctttctgtattggaaatcttaagtctgagcttctccttaatatat

SEQ ID NO: 429487 - DNA, 120 bp, Artificial Sequence
  ENSG00000151914_189 (sequence is synthesized)
tgaagcaagatcaacatagccaaaaaattacaggagtatttgaattgatgagagaattaactcatatggagtatgacctagagaaaagaggcattacgtctaaagtacttccactgcagc

SEQ ID NO: 429488 - DNA, 120 bp, Artificial Sequence
  ENSG00000151914_190 (sequence is synthesized)
ttgaaaatattttctacaaactgcttgctgatggatattcagagaaaatagaacatgttggagactttaatcaaaaagcatgttctacatctgagatgatggaagaaaagccacatattc

SEQ ID NO: 429489 - DNA, 120 bp, Artificial Sequence
  ENSG00000151914_191 (sequence is synthesized)
ttggtgatattaaaagcaaagaaggaaactactattctcctaatttagaaactgtaaaagaaattggactagaaagctctactgtgtgggcatcaacattgccaagagatgagaagctca

SEQ ID NO: 429490 - DNA, 120 bp, Artificial Sequence
  ENSG00000151914_192 (sequence is synthesized)
aggatctgtgtaatgatttcccaagccatttggaatgtacttcagggtctaaagagatggcttctggagatagctcaaccgaacaattttccagtgaattacagcagtgtttacagcaca

SEQ ID NO: 429491 - DNA, 120 bp, Artificial Sequence
  ENSG00000151914_193 (sequence is synthesized)
ctgaaaaaatgcatgagtatttgacattgcttcaagatatgaaaccccccttagacaaccaggaatctctggataacaacttggaagctttgaagaatcaacttagacagttggagacat

SEQ ID NO: 429492 - DNA, 120 bp, Artificial Sequence
  ENSG00000151914_194 (sequence is synthesized)
ttgaattgggattagctccaattgctgttattttaagaaaagatatgaagttggcagaagagtttttaaagtctcttcccagtgactttcccagaggccatgttgaagaattgagtatta

SEQ ID NO: 429493 - DNA, 120 bp, Artificial Sequence
  ENSG00000151914_195 (sequence is synthesized)
gccaccagagtttgaagaccgccttctcttccctcagcaacgtgtcttcagaaagaacgaaacagatcatgcttgcgatcgactctgaaatgtctaaactagcagtttcccatgaagaat

SEQ ID NO: 429494 - DNA, 120 bp, Artificial Sequence
  ENSG00000151914_196 (sequence is synthesized)
ttctgcataaacttaagtcattctcagattgggtatcagagaagagcaaatctgtgaaggatattgagattgtgaatgttcaagattctgagtatgtaaagaaacgtttggagtttctca

SEQ ID NO: 429495 - DNA, 120 bp, Artificial Sequence
  ENSG00000151914_197 (sequence is synthesized)
agaatgtattaaaagaccttggacataccaaaatgcagctggagactactgcctttgatgtgcagttcttcatttctgaatatgcacaggatctgtctcccaaccaaagcaaacaactgc

SEQ ID NO: 429496 - DNA, 120 bp, Artificial Sequence
  ENSG00000151914_198 (sequence is synthesized)
tgaggctcttaaatacaactcagaagtgttttcttgatgtacaggagtcagtaactacccaggtggaacgtttagagactcagttacatctagaacaagatcttgatgatcagaagattg

SEQ ID NO: 429497 - DNA, 120 bp, Artificial Sequence
  ENSG00000151914_199 (sequence is synthesized)
tagtgaaaaatgatccttgcagggttcatcatcatgggagtaaaatgttacgttcggaatcaaactcttcaattactactactcagcctactatagccaaaggaaggacaaacatggaac

SEQ ID NO: 429498 - DNA, 120 bp, Artificial Sequence
  ENSG00000151914_200 (sequence is synthesized)
aggaaatgccgcagatgcgccgcgcagcatccccggtgaaggcagcgcgccggtcctcccgcaccgctgccgcggcctcggcccggcccgaagcacgcgcctcgtgcagggccagcagag

SEQ ID NO: 429499 - DNA, 120 bp, Artificial Sequence
  ENSG00000151914_201 (sequence is synthesized)
cgcccgccggcccccgcccgccctcgccgcacgccccgctcctccgcttggcgtggcgctgctcgtcgccgcccctgggctcgctgagatttgccgctgctgaaacccgagagggactcg

SEQ ID NO: 429500 - DNA, 120 bp, Artificial Sequence
  ENSG00000151914_202 (sequence is synthesized)
tgagatttgccgctgctgaaacccgagagggactcgggctcccggagccgggcggcccaccatcggcctgcccggaggcctgggcgtttcctttgccggccctggcgccggcagccccct

SEQ ID NO: 429501 - DNA, 120 bp, Artificial Sequence
  ENSG00000151914_203 (sequence is synthesized)
gcgcccccgctctgcgtcttcggcttccgtgcttctccccagcgtgctgctccttcctcttttccagttcccaaggctgtgtcttgctgactgcgatactgtccgggggttacgaggggg

SEQ ID NO: 429502 - DNA, 120 bp, Artificial Sequence
  ENSG00000151914_204 (sequence is synthesized)
gcgggtgcctgtgccgccgccctccagccccgccgtcgagtcgccctcgcctcgcccgcaccatgatcgccgcggctttcctcgtcttgctgagaccctacagcatccaatgtgccctct

SEQ ID NO: 429503 - DNA, 120 bp, Artificial Sequence
  ENSG00000151914_205 (sequence is synthesized)
tcctcttgttgcttctgctgggcaccatcgccaccatcgtcttcttctgctgctggcaccgcaagctccagaaagggaggcatccgatgaaatcggtcttctcgggtcgttcaagaagcc

SEQ ID NO: 429504 - DNA, 120 bp, Artificial Sequence
  ENSG00000151914_206 (sequence is synthesized)
gagatgctgttttgagatcgcaccactttcgttctgagggattcagagcaagccctcggcatcttagaagacgagttgcagcggccgcagctgcccgtctggaagaagtgaagcccgtgg

SEQ ID NO: 429505 - DNA, 120 bp, Artificial Sequence
  ENSG00000151914_207 (sequence is synthesized)
tggaagttcaccatcagagtgagcaagaaacttcagtgaggaaacgaagaatcaagaagagcagccgagtccagccagaattttatcactctgttcaaggtgcttcaatcaggaggccta

SEQ ID NO: 429506 - DNA, 120 bp, Artificial Sequence
  ENSG00000151914_208 (sequence is synthesized)
cataaatacaggtatggaatttgtgtattttttccttatacaactgtaagacacatttctttcatctctgaattttaaaattatcttttattattatagaagcaaaagcatggcaaaaaa

SEQ ID NO: 429507 - DNA, 120 bp, Artificial Sequence
  ENSG00000151914_209 (sequence is synthesized)
ctcataacgttagacttaacttatttttctctgaagatttgttctgtgccttgatgtgaacaataccaggtccctgtgtttgtcttttaaatttctggagcatggtttatttaccagaat

SEQ ID NO: 429508 - DNA, 120 bp, Artificial Sequence
  ENSG00000151914_210 (sequence is synthesized)
ggtggagttctgcaagccatctttaagtggattacagttaaccagagctctgccgaaattaacattcaggctgttaaaatgcttgctcatttggaaattttaatctggaaatatcagact

SEQ ID NO: 429509 - DNA, 120 bp, Artificial Sequence
  ENSG00000151914_211 (sequence is synthesized)
aaaaagggaaatggactgacaatggaatgttctgagtgtttgagccactgttaagtgtgtgtttgtttattttctgtgttttggagtgtgtgaacggggactttgggagctgggaaaggt

SEQ ID NO: 429510 - DNA, 120 bp, Artificial Sequence
  ENSG00000151914_212 (sequence is synthesized)
ggacaaaggagatttttgttctctgttattgatgcactttattgtttagaatcatcctaaaatcaaccaggtaaaaggatagttgcatttatactgatgcactgctgatgaccttaaaca

SEQ ID NO: 429511 - DNA, 120 bp, Artificial Sequence
  ENSG00000151914_213 (sequence is synthesized)
cctcatgtattatgaaatatattatttgagcatgtgtctttatgctaaagacactccatagctctgttcagaagtatacttttttggaagatgctttatcttatttcttatctgtgtcaa

SEQ ID NO: 429512 - DNA, 120 bp, Artificial Sequence
  ENSG00000151914_214 (sequence is synthesized)
gagctgcaatatttgttttaactatctgcaaaatggggaagccactcagcagaccagactgtttacgtcagaatcccccatgtgtagggaagggtgaagaagaggaggacctaaatatcg

SEQ ID NO: 429513 - DNA, 120 bp, Artificial Sequence
  ENSG00000151914_215 (sequence is synthesized)
aagactgttacgtcccacagcggtcaatctatgatactgttagactaaatgaacagatagactctggttcaaaaggtagtctatcttccaggcattttacagatcgaactttaccctaca

SEQ ID NO: 429514 - DNA, 120 bp, Artificial Sequence
  ENSG00000151914_216 (sequence is synthesized)
gtcacagaacactggatgttagttctttatgctctaatggtgcccttacttcttccagtgtatttgagctgagaggtcgggaagctaacaaactagatgaaaagatgatctttgatgcac

SEQ ID NO: 429515 - DNA, 120 bp, Artificial Sequence
  ENSG00000151914_217 (sequence is synthesized)
tcaaactaaatagtgatatcattcgaaccacaggattacctaaagccaaatctcatgcggaaaagaaagagcatagacggtcatggcgaatgtttgtcccggccaattttatggattatg

SEQ ID NO: 429516 - DNA, 120 bp, Artificial Sequence
  ENSG00000151914_218 (sequence is synthesized)
caaacaaaagtgaaagctcttttgttgaacctgctgatatgtcagatgctgttaccaaggccagcaagtgcagatggggtactaattctctcacttcggaggaggatgactctggtttat

SEQ ID NO: 429517 - DNA, 120 bp, Artificial Sequence
  ENSG00000151914_219 (sequence is synthesized)
gtagccctccagcagagagggaagaaaaacagggcattttaactggagaccagtcacgaattaaaagtttgtcttctactgaagatattcttgtaacagaccaatacagaccattttttt

SEQ ID NO: 429518 - DNA, 120 bp, Artificial Sequence
  ENSG00000151914_220 (sequence is synthesized)
ctgttaattccattagcgaacagaaaatcccactgctttcatgtcaaagtgcccaccctgatgaaaatttcaaaatgattttacatgatgtttctccactagaggaagcaaaacatgtaa

SEQ ID NO: 429519 - DNA, 120 bp, Artificial Sequence
  ENSG00000151914_221 (sequence is synthesized)
atggtcaaagggaaatccacgatgaaaattgttgcctgcagaataatttgaaagagagccctgtgaagtgtgacccattaattatgccaagaaatagagaaaatgagcatatttttaacc

SEQ ID NO: 429520 - DNA, 120 bp, Artificial Sequence
  ENSG00000151914_222 (sequence is synthesized)
ttggagaagaggacgaaacatacggacctggagaatcccaaatcacagcacaaagtagggaactcttgaaggattcccctcaagatttagatctctctcacacagatctaggggagagtg

SEQ ID NO: 429521 - DNA, 120 bp, Artificial Sequence
  ENSG00000151914_223 (sequence is synthesized)
atgtagattgtggtagcaccagcttagtagaaaatgtgacacttttgacacaatatgattcaggagaatgcaacattgcatctaaagaggaagtggaggctcctctttctgcccaggaga

SEQ ID NO: 429522 - DNA, 120 bp, Artificial Sequence
  ENSG00000151914_224 (sequence is synthesized)
gcgaaatgctctataagaagttctccctgaaattcgtatcagcaagaaagaaagcagcacccagaaaaacaggggcccaggcaggaatattggacacagtctgcaatggctttcagttgg

SEQ ID NO: 429523 - DNA, 73 bp, Artificial Sequence
  ENSG00000151914_225 (sequence is synthesized)
acagctccggtctgcatttgagatgaacgggacaaagttcagaagaaaacatttacaaaatggataaatcagc

SEQ ID NO: 429524 - DNA, 120 bp, Artificial Sequence
  ENSG00000151914_226 (sequence is synthesized)
ggcttgtttgaatatatgaaattctttctcactaatggggacaagagtcattatcttcatagtcatagtgttcctctgtggggattcctgtatcacacaattgaacactagctaagaaga

SEQ ID NO: 429525 - DNA, 120 bp, Artificial Sequence
  ENSG00000151914_227 (sequence is synthesized)
ggaaaggaaaataattgcaaaatccaggccctcacccaccacaacatttaacagtagattttttcctcttttcattattctagagaaaaataatgctctatcattattgtatttttgtct

SEQ ID NO: 429526 - DNA, 120 bp, Artificial Sequence
  ENSG00000151914_228 (sequence is synthesized)
ggtttgtctacttttaatacatatatttcctggtcagaaataaatgtcatatattgcctatttccaagatgttgccaataatccaggaccccaaagagactctgccccactgttaacatc

SEQ ID NO: 429527 - DNA, 120 bp, Artificial Sequence
  ENSG00000151914_229 (sequence is synthesized)
agtgaagaggaggatgaatacaggagctcagagagcagttttgtgttcataggcacatggaatgttagggtcattctacacacataatctgttggcaaaattggcttcctgaaggcctat

SEQ ID NO: 429528 - DNA, 120 bp, Artificial Sequence
  ENSG00000151914_230 (sequence is synthesized)
taaaatctcaggtaccccaaactggtttttaaaaaatgtaaatgttttttgctgtatgaaagtcttatttagccagaaaaaaacatgaatagttagtaaaaggctttgcatcatcttctc

SEQ ID NO: 429529 - DNA, 120 bp, Artificial Sequence
  ENSG00000151914_231 (sequence is synthesized)
atctgctgttactttatctattctgtcatagaaaacttttctagagaaatgtgcgaaagagaggcatttgtcactattttcctctctcactgtggctataattctgtggcatatgtgatg

SEQ ID NO: 429530 - DNA, 120 bp, Artificial Sequence
  ENSG00000151914_232 (sequence is synthesized)
atatttgtcagaggtagcagtgaattattagaattcacttcatcagaaagccctgatgaagaaagacacattttgttgttaagtttgttctgtttgaaaagtttctagtttcttgcacct

SEQ ID NO: 429531 - DNA, 120 bp, Artificial Sequence
  ENSG00000151914_233 (sequence is synthesized)
ataagcaaaatggcctcagactgaagaggatggtcataaagtctgtgtggaacagatgtcagagtggaattttcagacttaatggagaggatctaagtaagctctggattttgaaatgag

SEQ ID NO: 429532 - DNA, 120 bp, Artificial Sequence
  ENSG00000151914_234 (sequence is synthesized)
tgaatctatggagctgtgatctcctacaaatcaaatggggaatgtctgtggatgtgtaagagctgagaaagaagaacaatatgtagatcctgccaaaactcctttgaaccctgaaaaata

SEQ ID NO: 429533 - DNA, 120 bp, Artificial Sequence
  ENSG00000151914_235 (sequence is synthesized)
ctctcctggaagaaaatatttcagaagaaaaccgatcaaaaaaactggaggtgacaaagagtcagttggggcaaacaatgaaaatgaaggcaagaagaagagcagcagtcagccttcaaa

SEQ ID NO: 429534 - DNA, 120 bp, Artificial Sequence
  ENSG00000151914_236 (sequence is synthesized)
agaacagccagctcctttatccaggggactggtacagcaggaatctgttaccctaaactctgcactgggagatggtattcagcaaaagaagacagaagttgtagctgacagcgttaaaca

SEQ ID NO: 429535 - DNA, 120 bp, Artificial Sequence
  ENSG00000151914_237 (sequence is synthesized)
gaaacttctgccgagtgctgtaagcagttggtctgactgtgtgaacacttctcctgctaaagacagtgaaacagaagtaaaagttagtgaactggatgaaaggatttcagaaaaagacag

SEQ ID NO: 429536 - DNA, 120 bp, Artificial Sequence
  ENSG00000151914_238 (sequence is synthesized)
cactccatattgcgcaaagaggaagaaacatttagatgatgtcaacacaagcgaaataacattccaggaaaaaactgatgttttttctttccgaaaggcagccagcttaagctctattcc

SEQ ID NO: 429537 - DNA, 120 bp, Artificial Sequence
  ENSG00000151914_239 (sequence is synthesized)
ctcgggtatagaaagatcactcgaaaaaagtgggtttcctgaagacccaccaaaaagttatagcagtattcaagaaaagcaaaacactgagagattttgccctcatgcaacacagcattt

SEQ ID NO: 429538 - DNA, 120 bp, Artificial Sequence
  ENSG00000151914_240 (sequence is synthesized)
tcagtttaaaaaaaagagatgccattccctttatactagtatgtcctctgtttctaaggacacagatggaaatgagatatctgatatccatgttactggagagtcagaggatatgtctgc

SEQ ID NO: 429539 - DNA, 120 bp, Artificial Sequence
  ENSG00000151914_241 (sequence is synthesized)
aatattcagctgccacttttcaccgttagaagtagagctttttccagacctcctaccttttagtctactttgaaaggtgaaagaaagaacatcgtttcaggaataaaaatgcacagtagt

SEQ ID NO: 429540 - DNA, 120 bp, Artificial Sequence
  ENSG00000151914_242 (sequence is synthesized)
agttatagttaccgtagcagtgattctgtgtttagtaacactaccagcactcgaaccagtcttgattcaaatgaaaatcttctcttggttcattgtggtccaacactgatcaactcttgc

SEQ ID NO: 429541 - DNA, 120 bp, Artificial Sequence
  ENSG00000151914_243 (sequence is synthesized)
cgtcagaaggcaacagtgcttgagaatagcaaacttacaggaaagataagtgagttggaaagaatggtagctgaactaaagaaacaaaagtcccgagtagaggaagaacttccgaaggtc

SEQ ID NO: 429542 - DNA, 120 bp, Artificial Sequence
  ENSG00000151914_244 (sequence is synthesized)
agggaggctgcagaaaatgaattgagaaagcagcagagaaatgtagaagatatctctctgcagaagataagggctgaaagtgaagccaagcagtaccgcagggaacttgaaaccattgtg

SEQ ID NO: 429543 - DNA, 120 bp, Artificial Sequence
  ENSG00000151914_245 (sequence is synthesized)
agagagaaggaagccgctgaaagagaactggagcgggtgaggcagctcaccatagaggccgaggctaaaagagctgccgtggaagagaacctcctgaattttcgcaatcagttggaggaa

SEQ ID NO: 429544 - DNA, 120 bp, Artificial Sequence
  ENSG00000151914_246 (sequence is synthesized)
aacacctttaccagacgaacactggaagatcatcttaaaagaaaagatttaagtctcaatgatttggagcaacaaaaaaataaattaatggaagaattaagaagaaagagagacaatgag

SEQ ID NO: 429545 - DNA, 120 bp, Artificial Sequence
  ENSG00000151914_247 (sequence is synthesized)
gaagaactcttgaagctgataaagcagatggaaaaagaccttgcatttcagaaacaggtagcagagaaacagttgaaagaaaagcagaaaattgaattggaagcaagaagaaaaataact

SEQ ID NO: 429546 - DNA, 120 bp, Artificial Sequence
  ENSG00000151914_248 (sequence is synthesized)
gaaattcagtatacatgtagagaaaatgcattgccagtgtgtccgatcacacaggctacatcatgcagggcagtaacgggtctccagcaagaacatgacaagcagaaagcagaagaactc

SEQ ID NO: 429547 - DNA, 120 bp, Artificial Sequence
  ENSG00000151914_249 (sequence is synthesized)
aaacagcaggtagatgaactaacagctgccaatagaaaggctgaacaagacatgagagagctgacatatgaacttaatgccctccagcttgaaaaaacgtcatctgaggaaaaggctcgt

SEQ ID NO: 429548 - DNA, 120 bp, Artificial Sequence
  ENSG00000151914_250 (sequence is synthesized)
ttgctaaaagataaactagatgaaacaaataatacactcagatgccttaagttggagctggaaaggaaggatcaggcggagaaagggtattctcaacaactcagagagcttggtaggcaa

SEQ ID NO: 429549 - DNA, 120 bp, Artificial Sequence
  ENSG00000151914_251 (sequence is synthesized)
aagagaagtagacagaatcacaagggcacatgctgtagctgagaagaatattcagcatttaaattcacaaattcattcttttcgagatgagaaagaattagaaagactacaaatctgcca

SEQ ID NO: 429550 - DNA, 120 bp, Artificial Sequence
  ENSG00000151914_252 (sequence is synthesized)
gagaaaatcagatcatctaaaagaacaatttgagaaaagccatgagcagttgcttcaaaatatcaaagctgaaaaagaaaataatgataaaatccaaaggctcaatgaagaattggagaa

SEQ ID NO: 429551 - DNA, 120 bp, Artificial Sequence
  ENSG00000151914_253 (sequence is synthesized)
aagtaatgagtgtgcagagatgctaaaacaaaaagtagaggagcttactaggcagaataatgaaaccaaattaatgatgcagagaattcaggcagaatcagagaatatagttttagagaa

SEQ ID NO: 429552 - DNA, 120 bp, Artificial Sequence
  ENSG00000151914_254 (sequence is synthesized)
acaaactatccagcaaagatgtgaagcactgaaaattcaggcagatggttttaaagatcagctacgcagcacaaatgaacacttgcataaacagacaaaaacagagcaggattttcaaag

SEQ ID NO: 429553 - DNA, 120 bp, Artificial Sequence
  ENSG00000151914_255 (sequence is synthesized)
aaaaattaaatgcctagaagaagacctggcgaaaagtcaaaatttggtaagtgaatttaagcaaaagtgtgaccaacagaacattatcatccagaataccaagaaagaagttagaaatct

SEQ ID NO: 429554 - DNA, 120 bp, Artificial Sequence
  ENSG00000151914_256 (sequence is synthesized)
gaatgcggaactgaatgcttccaaagaagagaagcgacgcggggagcagaaagttcagctacaacaagctcaggtgcaagagttaaataacaggttgaaaaaagtacaagacgaattaca

SEQ ID NO: 429555 - DNA, 120 bp, Artificial Sequence
  ENSG00000151914_257 (sequence is synthesized)
cttaaagaccatagaggagcagatgacccacagaaagatggttctgtttcaggaagaatctggtaaattcaaacaatcagcagaggagtttcggaagaagatggaaaaattaatggagtc

SEQ ID NO: 429556 - DNA, 120 bp, Artificial Sequence
  ENSG00000151914_258 (sequence is synthesized)
caaagtcatcactgaaaatgatatttcaggcattaggcttgactttgtgtctcttcaacaagaaaactctagagcccaagaaaatgctaagctttgtgaaacaaacattaaagaacttga

SEQ ID NO: 429557 - DNA, 120 bp, Artificial Sequence
  ENSG00000151914_259 (sequence is synthesized)
aagacagcttcaacagtatcgtgaacaaatgcagcaagggcagcacatggaagcaaatcattaccaaaaatgtcagaaacttgaggatgagctgatagcccagaagcgtgaggttgaaaa

SEQ ID NO: 429558 - DNA, 120 bp, Artificial Sequence
  ENSG00000151914_260 (sequence is synthesized)
cctgaagcaaaaaatggaccaacagatcaaagagcatgaacatcaattagttttgctccagtgtgaaattcaaaaaaagagcacagccaaagactgtaccttcaaaccagattttgagat

SEQ ID NO: 429559 - DNA, 120 bp, Artificial Sequence
  ENSG00000151914_261 (sequence is synthesized)
gacagtgaaggagtgccagcactctggagagctgtcctctagaaacactggacaccttcacccaacacccagatcccctctgttgagatggactcaagaaccacagccattggaagagaa

SEQ ID NO: 429560 - DNA, 120 bp, Artificial Sequence
  ENSG00000151914_262 (sequence is synthesized)
gtggcagcatcgggttgttgaacagatacccaaagaagtccaattccagccaccaggggctccactcgagaaagagaaaagccagcagtgttactctgagtacttttctcagacaagcac

SEQ ID NO: 429561 - DNA, 120 bp, Artificial Sequence
  ENSG00000151914_263 (sequence is synthesized)
cgagttacagataacttttgatgagacaaaccccattacaagactgtctgaaattgagaagataagagaccaagccctgaacaattctagaccacctgttaggtatcaagataacgcatg

SEQ ID NO: 429562 - DNA, 120 bp, Artificial Sequence
  ENSG00000151914_264 (sequence is synthesized)
tgaaatggaactggtgaaggttttgacacccttagagatagctaagaacaagcagtatgatatgcatacagaagtcacaacattaaaacaagaaaagaacccagttcccagtgctgaaga

SEQ ID NO: 429563 - DNA, 120 bp, Artificial Sequence
  ENSG00000151914_265 (sequence is synthesized)
atggatgcttgaagggtgcagagcatctggtggactcaagaaaggggatttccttaagaagggcttagaaccagagaccttccagaactttgatggtgatcatgcatgttcagtcaggga

SEQ ID NO: 429564 - DNA, 120 bp, Artificial Sequence
  ENSG00000151914_266 (sequence is synthesized)
tgatgaatttaaattccaagggcttaggcacactgtgactgccaggcagttggtggaagctaagcttctggacatgagaacaattgagcagctgcgactcggtcttaagactgttgaaga

SEQ ID NO: 429565 - DNA, 120 bp, Artificial Sequence
  ENSG00000151914_267 (sequence is synthesized)
agttcagaaaactcttaacaagtttctgacgaaagccacctcaattgcagggctttacctagaatctacaaaagaaaagatttcatttgcctcagcggccgagagaatcataatagacaa

SEQ ID NO: 429566 - DNA, 120 bp, Artificial Sequence
  ENSG00000151914_268 (sequence is synthesized)
aatggtggctttggcatttttagaagctcaggctgcaacaggttttataattgatcccatttcaggtcagacatattctgttgaagatgcagttcttaaaggagttgttgaccccgaatt

SEQ ID NO: 429567 - DNA, 120 bp, Artificial Sequence
  ENSG00000151914_269 (sequence is synthesized)
cagaattaggcttcttgaggcagagaaggcagctgtgggatattcttattcttctaagacattgtcagtgtttcaagctatggaaaatagaatgcttgacagacaaaaaggtaaacatat

SEQ ID NO: 429568 - DNA, 120 bp, Artificial Sequence
  ENSG00000151914_270 (sequence is synthesized)
cttggaagcccagattgccagtgggggtgtcattgaccctgtgagaggcattcgtgttcctccagaaattgctctgcagcaggggttgttgaataatgccatcttacagtttttacatga

SEQ ID NO: 429569 - DNA, 120 bp, Artificial Sequence
  ENSG00000151914_271 (sequence is synthesized)
gccatccagcaacacaagagttttccctaatcccaataacaagcaagctctgtattactcagaattactgcgaatgtgtgtatttgatgtagagtcccaatgctttctgtttccatttgg

SEQ ID NO: 429570 - DNA, 120 bp, Artificial Sequence
  ENSG00000151914_272 (sequence is synthesized)
ggagaggaacatttccaatctcaatgtcaagaaaacacatagaatttctgtagtagatactaaaacaggatcagaattgaccgtgtatgaggctttccagagaaacctgattgagaaaag

SEQ ID NO: 429571 - DNA, 120 bp, Artificial Sequence
  ENSG00000151914_273 (sequence is synthesized)
tatatatcttgaactttcagggcagcaatatcagtggaaggaagctatgttttttgaatcctatgggcattcttctcatatgctgactgatactaaaacaggattacacttcaatattaa

SEQ ID NO: 429572 - DNA, 120 bp, Artificial Sequence
  ENSG00000151914_274 (sequence is synthesized)
tgaggctatagagcagggaacaattgacaaagccttggtcaaaaagtatcaggaaggcctcatcacacttacagaacttgctgattctttgctgagccggttagtccccaagaaagattt

SEQ ID NO: 429573 - DNA, 120 bp, Artificial Sequence
  ENSG00000151914_275 (sequence is synthesized)
gcacagtcctgttgcagggtattggctgactgctagtggggaaaggatctctgtactaaaagcctcccgtagaaatttggttgatcggattactgccctccgatgccttgaagcccaagt

SEQ ID NO: 429574 - DNA, 120 bp, Artificial Sequence
  ENSG00000151914_276 (sequence is synthesized)
cagtacagggggcataattgatcctcttactggcaaaaagtaccgggtggccgaagctttgcatagaggcctggttgatgaggggtttgcccagcagctgcgacagtgtgaattagtaat

SEQ ID NO: 429575 - DNA, 120 bp, Artificial Sequence
  ENSG00000151914_277 (sequence is synthesized)
cacagggattggccatcccatcactaacaaaatgatgtcagtggtggaagctgtgaatgcaaatattataaataaggaaatgggaatccgatgtttggaatttcagtacttgacaggagg

SEQ ID NO: 429576 - DNA, 120 bp, Artificial Sequence
  ENSG00000151914_278 (sequence is synthesized)
gttgatagagccacaggttcactctcggttatcaatagaagaggctctccaagtaggtattatagatgtcctcattgccacaaaactcaaagatcaaaagtcatatgtcagaaatataat

SEQ ID NO: 429577 - DNA, 120 bp, Artificial Sequence
  ENSG00000151914_279 (sequence is synthesized)
atgccctcagacaaaaagaaagttgacatataaagaagccttagaaaaagctgattttgatttccacacaggacttaaactgttagaagtatctgagcccctgatgacaggaatttctag

SEQ ID NO: 429578 - DNA, 120 bp, Artificial Sequence
  ENSG00000151914_280 (sequence is synthesized)
cctctactattcttcctaatgggacatgtttaaataactgtgcaaggggtgatgcaggctggttcatgccactttttcagagtatgatgatatcggctacatatgcagtctgtgaattat

SEQ ID NO: 429579 - DNA, 120 bp, Artificial Sequence
  ENSG00000151914_281 (sequence is synthesized)
gtaacatactctatttcttgagggctgcaaattgctaagtgctcaaaatagagtaagttttaaattgaaaattacataagatttaatgcccttcaaatggtttcatttagccttgagaat

SEQ ID NO: 429580 - DNA, 120 bp, Artificial Sequence
  ENSG00000151914_282 (sequence is synthesized)
ggttttttgaaacttggccacactaaaatgtttttttttttacgtagaatgtgggataaacttgatgaactccaagttcacagtgtcatttcttcagaactccccttcattgaatagtga

SEQ ID NO: 429581 - DNA, 120 bp, Artificial Sequence
  ENSG00000151914_283 (sequence is synthesized)
tcatttattaaatgataaattgcactcgctgaaagagcacgtcatgaagcaccatggaatcaaagagaaagatataaattcgttcccacagccttcaagctgcagtgttttagattgctt

SEQ ID NO: 429582 - DNA, 120 bp, Artificial Sequence
  ENSG00000151914_284 (sequence is synthesized)
caaaaaatgaaaaagttttgcctttttctgtatatagtgaccttctttgcatattaaaatgtttaccacaatgtcccatttctagttaagtcttcgcacttgaaagctaacattatgaat

SEQ ID NO: 429583 - DNA, 120 bp, Artificial Sequence
  ENSG00000151914_285 (sequence is synthesized)
attatgtgttggaggaggggaaggattttcttcattctgtgtattttccttacatgtacagtagacgttctctattctatcagccttctatggtacctttttgtcaggacaattaggatt

SEQ ID NO: 429584 - DNA, 120 bp, Artificial Sequence
  ENSG00000151914_286 (sequence is synthesized)
gtaatgctaatgcaaaggcagcaattcaaagatcttctagtgcctcatgaataaagttgagatttaaaatttgtaacattgatggaacagctgggaggttagaccaatcattaaggaatg

SEQ ID NO: 429585 - DNA, 120 bp, Artificial Sequence
  ENSG00000151914_287 (sequence is synthesized)
tatgccatagctttctttgctaccataaacattttggaggtgcatctgctatgtgacatggtaaatatggttaagtgaatgaataaaatgttttagtaacctgtgtgtgatgaaaaaaaa

SEQ ID NO: 429586 - DNA, 120 bp, Artificial Sequence
  ENSG00000151914_288 (sequence is synthesized)
agacccagtttgggggcagggagggcggcggtggttggtgggggagatgtttaaatcattgagcatatgtgagtattttgctgttaatgctttttctgtgtcattctctgtagagttccg

SEQ ID NO: 429587 - DNA, 120 bp, Artificial Sequence
  ENSG00000151914_289 (sequence is synthesized)
cccggttaactattgaggtaaagctggaaagtgtaatggtgttggttgaatattgatatgattatttcccttcagattcttttattgctgagaagttgaaaattacaagccatctaactt

SEQ ID NO: 429588 - DNA, 120 bp, Artificial Sequence
  ENSG00000151914_290 (sequence is synthesized)
ttattaaaacctggctcagaaatgtttctgacaaattgtactgattgccttcagttctctggctctaagtatgtcacccatcacttagaataaaagtacccttgtcagcctctgtggctg

SEQ ID NO: 429589 - DNA, 120 bp, Artificial Sequence
  ENSG00000151914_291 (sequence is synthesized)
agaagatgtattgctgtaaatatgaagtaccttctctgtgtaagcattgccatattatttatttctgattgtgtaacattgcacaagtgacatagtattgccaagcctcattttcctacc

SEQ ID NO: 429590 - DNA, 120 bp, Artificial Sequence
  ENSG00000151914_292 (sequence is synthesized)
ttgatgagttcttagtgaaaaatgatccttgcagggttcatcatcatgggagtaaaatgttacgttcggaatcaaactcttcaattactactactcagcctactataggttggcaacctc

SEQ ID NO: 429591 - DNA, 120 bp, Artificial Sequence
  ENSG00000151914_293 (sequence is synthesized)
tcatccatcgcgtatggcttaactcatatccagctgagctggtgcttccaaatttaaattctgaaaatttgatgactttggttgtgttacacatgcaggtgttataagtgatcaaacaca

SEQ ID NO: 429592 - DNA, 120 bp, Artificial Sequence
  ENSG00000151914_294 (sequence is synthesized)
tgctaacacgttgctcaccgggttcttgtggagtgttctccgtgtgcgtatgtgtttgtatgagtgctgcatcactgactacctcacagatccttgggtctggtgtttgttattgcatgt

SEQ ID NO: 429593 - DNA, 120 bp, Artificial Sequence
  ENSG00000151914_295 (sequence is synthesized)
ggacattttattttatcttgtttgattattctgagtgtacaggaaatgtaaaccatttaaattagccttttaaaatcagaagactatagatcatactacataacagtctttattgttgaa

SEQ ID NO: 429594 - DNA, 120 bp, Artificial Sequence
  ENSG00000151914_296 (sequence is synthesized)
atatgtgtccgtttgagcagaacctggaagcaaactttaaaagtgatggggaagtattatttagtgtcagtgaaatacttttgcttttaattaccagatctaaaacctttttagaacttg

SEQ ID NO: 429595 - DNA, 120 bp, Artificial Sequence
  ENSG00000151914_297 (sequence is synthesized)
gaaagtgatttcattctctggtgctttaaaacagatttcaagaatgttttactatctttagttatgcacttaaacaattatgtaataaaatttaaaatcattcattcagtgacctgacac

SEQ ID NO: 429596 - DNA, 120 bp, Artificial Sequence
  ENSG00000151914_298 (sequence is synthesized)
taagtcattgcataagtatgtagatttgtgacatgacccatggtggtcatgaccaactgcttttaaaaataccgaaccaaaactgttttaaccttgccccttgaattatagcagtttatg

SEQ ID NO: 429597 - DNA, 120 bp, Artificial Sequence
  ENSG00000151914_299 (sequence is synthesized)
agtcagcagcttatgctataagggatttgattattatttacttcgagaaaactggcttccttgaaatctcctgatatgcatgtaaaactgtcatgtcatgtaaatcaaaggtaatattca

SEQ ID NO: 429598 - DNA, 120 bp, Artificial Sequence
  ENSG00000151914_300 (sequence is synthesized)
tagaatagttgtattggagttgactttatataaaaatgtcttacatcactctacttaaattcatcttgtatttcttctctctagtatctgagttcagaaaacttattccatttataatgt

SEQ ID NO: 429599 - DNA, 120 bp, Artificial Sequence
  ENSG00000151914_301 (sequence is synthesized)
tctctttatattggttatgctattttgatcttaccattctttttaaaagtcttattacatatttatttttccttttttctttctattctatcattatacccataagagagtttgttacac

SEQ ID NO: 429600 - DNA, 120 bp, Artificial Sequence
  ENSG00000151914_302 (sequence is synthesized)
ctgaaaagtgaaacaaactaaattaaaataaaataaaagaataaataaagaacattggtcaagtctacaaaagttaaaaatttaaaaatcacatggctttgcttatattgaaataaatgt

SEQ ID NO: 429601 - DNA, 120 bp, Artificial Sequence
  ENSG00000151914_303 (sequence is synthesized)
tttgtgtatggttaatacaaacttctctatttcctggcatttattcaatgagtaatgaatagcgtaatgttactttttacataaatgccatttctgtaaactcactgtctaaatatttac

SEQ ID NO: 429602 - DNA, 120 bp, Artificial Sequence
  ENSG00000151914_304 (sequence is synthesized)
tactctaggtaattgccagatcttttatatattaaaggtcatcaagaatgaattaatcatttagcattagtaatacaactggaaggctcaagaagttcaagtatgtaaaaatgctttgga

SEQ ID NO: 429603 - DNA, 120 bp, Artificial Sequence
  ENSG00000151914_305 (sequence is synthesized)
aagtcttctgaaaactattggactagtcctatcataaatgggatatttagatactgtaccatttgcatgtgtgcttgtgtgtgtgtgaatgtgtgtattggtgtatacgtgtgtgtttgt

SEQ ID NO: 429604 - DNA, 120 bp, Artificial Sequence
  ENSG00000151914_306 (sequence is synthesized)
gtctttctgcaggcacatctcattttaactgttagagttgaatcagtcaaataatcacttttgtgataggctcacttttgtgaatgatctgagtatcagaatagaaacctatagatatgg

SEQ ID NO: 429605 - DNA, 120 bp, Artificial Sequence
  ENSG00000151914_307 (sequence is synthesized)
ccaaatggtaatattcatttatgatgatttttttaaaaacacattaattttattgtgacagaatgttggttattaatgtttgaaagatctagttgcatacacagactcttggatcaaaaa

SEQ ID NO: 429606 - DNA, 120 bp, Artificial Sequence
  ENSG00000151914_308 (sequence is synthesized)
atcaaaaataaagagctctgggctcacttcttagatcagtctgtggccaaaataaatgaatttaattcctggcacatcagtttgtcaaaattaggcaggaaaaaaaaaaaaaaaaaaaaa

SEQ ID NO: 429607 - DNA, 120 bp, Artificial Sequence
  ENSG00000151914_309 (sequence is synthesized)
gaaatgctcttcagtctgtaagttaattttaggagccattggggttgtggtagaggagtcactgtgcgtttggatgaactaaaacttttacataatgtttggttgattcttcgtaatact

SEQ ID NO: 429608 - DNA, 120 bp, Artificial Sequence
  ENSG00000151914_310 (sequence is synthesized)
ctccactgaaacttaaagtttgttaaagattatgattggtgtttgctctcttgagagacaagaagagggaaaacatatttttgaaccaacaaggaaaactaaagaaagcccaagtaggct

SEQ ID NO: 429609 - DNA, 120 bp, Artificial Sequence
  ENSG00000151914_311 (sequence is synthesized)
caggcatgagccactgcacctggccacattttatattctttagaaattagtaaatgcctgcagtatgatggtttagattttttttaccctaaagataaagcatatgatttattcttcttc

SEQ ID NO: 429610 - DNA, 120 bp, Artificial Sequence
  ENSG00000151914_312 (sequence is synthesized)
aagtctcaatgtttaaggaaaaaagatttagaaatagtggtttttaaaagtttgatggaaaaacacatgagttcctgctggtgcattttacatgctttctaggtccttctgagttttagg

SEQ ID NO: 429611 - DNA, 120 bp, Artificial Sequence
  ENSG00000151914_313 (sequence is synthesized)
atcctgagggatttggttggtattgtttttgggttttcttcttgaaactcagtattaaaacactgaaaagtagcagatttttttctacctagagttttctgtttatccatcatgagccca

SEQ ID NO: 429612 - DNA, 120 bp, Artificial Sequence
  ENSG00000151914_314 (sequence is synthesized)
aataaagtcacaattgtatgttacctgctttacaaagaagccatttatgtttaattgactgttcattttgctttcttgtctgctgggatgacaaccgtgaaattcagtctggtagttttt

SEQ ID NO: 429613 - DNA, 120 bp, Artificial Sequence
  ENSG00000151914_315 (sequence is synthesized)
atgagttggacatgaacctattagaaatgatttaaagtataaaatcatttctcacaggctttcaaaacataaacctgtgatcagaaacctggaatctagaaatttattcaggacttgcag

SEQ ID NO: 429614 - DNA, 120 bp, Artificial Sequence
  ENSG00000151914_316 (sequence is synthesized)
aatttgtagcatatctacattattggagatctattgaaagggcaagaaaaagatgattgcctgttagtatcaacagttatggtacagacaactatgagagaaaccttttagatttggcag

SEQ ID NO: 429615 - DNA, 120 bp, Artificial Sequence
  ENSG00000151914_317 (sequence is synthesized)
ctgtatcattaataatgtgtcattggctattctaatattacagtaatctaaaatggcatattaatccagcctttaacaaattggtttaccagatcattagggatgcagaaattttagttg

SEQ ID NO: 429616 - DNA, 120 bp, Artificial Sequence
  ENSG00000151914_318 (sequence is synthesized)
actgtgaaatttatatgagtcatactcatttactttattctttttaagtgaaaactgcccttacagaaaagaaaatgagtttataaagatttctcacagagttcagtggaaaacggtttt

SEQ ID NO: 429617 - DNA, 120 bp, Artificial Sequence
  ENSG00000151914_319 (sequence is synthesized)
actgtaagagagagtttaatgaagaagaatcaaagcttattaaatttttcttagaatcattttattttggataagccctgggcaagtgggccagtgcttactttcatggctatgtttaat

SEQ ID NO: 429618 - DNA, 120 bp, Artificial Sequence
  ENSG00000151914_320 (sequence is synthesized)
tcctagaaacattttaaaattactgccttactaatattgtttctgtcataagaaagaaaaataatttttagaccaaagctttggtagtatacttgataacctttgtaatctttttttttt

SEQ ID NO: 429619 - DNA, 120 bp, Artificial Sequence
  ENSG00000151914_321 (sequence is synthesized)
caaactgtttcctttgggctaaatcagcatgcagccgtctaacacaaatcattacaaacccccttttctgagattttactaatcgctatgaactaagcaagaaattaaagtcggttgctt

SEQ ID NO: 429620 - DNA, 120 bp, Artificial Sequence
  ENSG00000151914_322 (sequence is synthesized)
agatggtgcctgaagagagagggcgttgctgcaagcgccctggctggagagcatgcctgcccggcaccgtgctgccctgaggagccgcggacagccccggagctcccttccggagttctt

SEQ ID NO: 429621 - DNA, 120 bp, Artificial Sequence
  ENSG00000151914_323 (sequence is synthesized)
tctgctgcctccaccgccaccgtctctctctagccccagctgaaatgaaggccataccgcggccacagaacttggttcagtttcaaaggctaatgtagtccctgggttttctgctcaatg

SEQ ID NO: 429622 - DNA, 120 bp, Artificial Sequence
  ENSG00000151914_324 (sequence is synthesized)
aactcaatgatgccttggacagactagaggaggtttggaaattcataccctcaacaccacattgtcatttgccctcattcctcataacacattgccattgccaaaatcttggtatttttt

SEQ ID NO: 429623 - DNA, 120 bp, Artificial Sequence
  ENSG00000151914_325 (sequence is synthesized)
aacttttctgataataagcaaactcttgctatttgagtacatttttaaatttccaaaataaataccacaagtatgtgtgattttgtgaaatattgatatatgggatttggatttagggaa

SEQ ID NO: 429624 - DNA, 120 bp, Artificial Sequence
  ENSG00000151914_326 (sequence is synthesized)
ataaacctgtgatcagaaacctggaatctagaaatttattcaggacttgcagaatttgtagcatatctacattattggagatctattgaaagggcaagaaaaagatgattgccttttgga

SEQ ID NO: 429625 - DNA, 120 bp, Artificial Sequence
  ENSG00000151914_327 (sequence is synthesized)
taaaccaattgaagtttttgtttatttgtttaattctggcagtcaaacaaatgccaccagagttttgttttcagccaatgccaacagttaattgaagtctttgtttctgctgtaggaatt

SEQ ID NO: 429626 - DNA, 120 bp, Artificial Sequence
  ENSG00000151914_328 (sequence is synthesized)
atctccattgttttccaggagtcttatttatttacttttttacctcatgtcaaaatttaatggtatatgaaactcttacatttaacattttaatttgtataacggcagcctgcattttgc

SEQ ID NO: 429627 - DNA, 120 bp, Artificial Sequence
  ENSG00000151914_329 (sequence is synthesized)
atattaggaaatatctttgacatctacatcatgcacattacctttaaagaaaaattcacaagaaaatactcaaatctcatatatttaggttgcttcatattattttatattttgttatga

SEQ ID NO: 429628 - DNA, 120 bp, Artificial Sequence
  ENSG00000151914_330 (sequence is synthesized)
ttagaggtaagttttcagatttcaaacaagaaagctactctaatccagaaccacaaagttaaaaatatggactcattttaataaatatgaaaagagaggataatgtcttctccacttgtg

SEQ ID NO: 429629 - DNA, 120 bp, Artificial Sequence
  ENSG00000151914_331 (sequence is synthesized)
cagtaatttttgcttttattcaaaatctcaattaactcggttcactctcttcaaaacagaagaacagtgtgacttcattactctttctctatttttttttttctcttttggaacatctct

SEQ ID NO: 429630 - DNA, 120 bp, Artificial Sequence
  ENSG00000151914_332 (sequence is synthesized)
tatatgtagtagctagataagaaatgtgctgagtttccccaatacagtgtgctacttctaaatgaaatattatttttatttttatacttaaaaaaataatcatcaatgtattcaaaattt

SEQ ID NO: 429631 - DNA, 120 bp, Artificial Sequence
  ENSG00000151914_333 (sequence is synthesized)
taacttaaatttgaaatcctaagattttcaaaaatatgtgtacagaaaatagtctgattatttggtttgaaattgggacaactgggtgcctgcacatctctaaactagatactacatcca

SEQ ID NO: 429632 - DNA, 120 bp, Artificial Sequence
  ENSG00000151914_334 (sequence is synthesized)
gaagcacagagtgtgagtatgtgtgtatgttctagagtcatacagaaagtttcctgttgaactaattgtgtctttcttccatttttcatttttatcagttcttcctgggaaatcaggtat

SEQ ID NO: 429633 - DNA, 120 bp, Artificial Sequence
  ENSG00000151914_335 (sequence is synthesized)
aaaccagtggaatgtattctcaagttcctgatgatttttttttaactttaattcatagtcattaaagcttgccatggccaatctttcccatgctgtctccctagctactacattgttggt

SEQ ID NO: 429634 - DNA, 120 bp, Artificial Sequence
  ENSG00000151914_336 (sequence is synthesized)
tggcgtggtgtttctgtaaacgctataagggtccttgatccaggattcctttttgccttgtgtctctcagatgaggagattacttttaagcaaaccagataatgaattgtagcttggctt

SEQ ID NO: 429635 - DNA, 120 bp, Artificial Sequence
  ENSG00000151914_337 (sequence is synthesized)
gctacaatgttacgaatgcaatttttaattcccattttttataatatgagcatatattttatgctagtactcattggaacacaaatttgattctccacacatctctgtgttaggctcatt

SEQ ID NO: 429636 - DNA, 120 bp, Artificial Sequence
  ENSG00000151914_338 (sequence is synthesized)
ggtgtttaactgtttaggacatacggtctacagtagctgagaaggatcagcctcaggcagtgacacaggaagacagagagccaagaggtctccttggcactcagccacaagtaacaagtt

SEQ ID NO: 429637 - DNA, 120 bp, Artificial Sequence
  ENSG00000151914_339 (sequence is synthesized)
ctctccaaagaagctatttgccatttgttcaaaatcaccaattttggggcttggcatctctgagtagaaatgttaactcagtaggctttaagtaatattccttttgaggaaagttatcgc

SEQ ID NO: 429638 - DNA, 120 bp, Artificial Sequence
  ENSG00000151914_340 (sequence is synthesized)
tataatatatgcagaatcttaaagtcacattttatgccatcttgatcgaatatttatattattggcacttaagtcaatataaaatgtttatgttgacatttaagtcagtataacctgtgt

SEQ ID NO: 429639 - DNA, 120 bp, Artificial Sequence
  ENSG00000151914_341 (sequence is synthesized)
agtggcactacatcatgatcagaattttgaaactaaggagatactctgttttgatttaaacatgttcatgaagcttttattttattttattttattttactttggaaagaaccatgctat

SEQ ID NO: 429640 - DNA, 120 bp, Artificial Sequence
  ENSG00000151914_342 (sequence is synthesized)
ctatagtatctgaccatattacattagatatgactctgccactccattttaaagccatattacatctcaagcttcaaattatctattacctttatttattgcaagcaaataatttattta

SEQ ID NO: 429641 - DNA, 120 bp, Artificial Sequence
  ENSG00000151914_343 (sequence is synthesized)
aaatagaaatagttacttggaatagatttttaaaacttccattagttatactataatactgaaatgttacttttccattcttgctattttcggagtcagcaaatgggagagcatctttta

SEQ ID NO: 429642 - DNA, 120 bp, Artificial Sequence
  ENSG00000151914_344 (sequence is synthesized)
tttgcagagagaatgagagaaatacctcaaaaggttttactcactgaaagcacagtcagcaacattagtctattttctcttgtcttgtgatttggttactgggaatatttagagaaattc

SEQ ID NO: 429643 - DNA, 120 bp, Artificial Sequence
  ENSG00000151914_345 (sequence is synthesized)
tgaagatgatgttagttgtctggagaatgcctaattaaaacagaaaattatttgtattcattacacttgaaatatcatctctataaggaacttttagttatttccttataacttttgttt

SEQ ID NO: 429644 - DNA, 120 bp, Artificial Sequence
  ENSG00000151914_346 (sequence is synthesized)
tgagtataatcttgaaccaaaatcatctagtcccattatctggttccttaagggtaattttctttaaatcccctcctttccctttgcttattagcggcaccaatttttttctaacaaaat

SEQ ID NO: 429645 - DNA, 120 bp, Artificial Sequence
  ENSG00000151914_347 (sequence is synthesized)
tatattatatccagcaccaaaacatactgggcataattttggtcatttattccaatagtgaatgtttcacattggtctgtcagcctaaagttcccaaagaacctgtggcagtcatgtaaa

SEQ ID NO: 429646 - DNA, 120 bp, Artificial Sequence
  ENSG00000151914_348 (sequence is synthesized)
ttttttttttttttttactttttctggataaatatggtgggcgggaaatactagaatccattttctttaggagacttttacatctacgattttccaaacaattataccaaccaaggaaag

SEQ ID NO: 429647 - DNA, 120 bp, Artificial Sequence
  ENSG00000151914_349 (sequence is synthesized)
tccaaacaattataccaaccaaggaaaggattttgtctgttatgacatagcaaagtaagagaaaagaaaattgaggtgatgaagaccgaaaatactggataataaaagtttaaaggtcaa

SEQ ID NO: 429648 - DNA, 120 bp, Artificial Sequence
  ENSG00000151914_350 (sequence is synthesized)
agtttttatgaaatgaagagcaggtgaggaaagccataattaaaaaatttttaaataataatccaatgctaacttgactctttgaagttgcagattagaacattaaaaatataaacatat

SEQ ID NO: 429649 - DNA, 120 bp, Artificial Sequence
  ENSG00000151914_351 (sequence is synthesized)
aatactatagctctctacatatcttccagcccaagtcctaagttagcttttaatttttctgttttgagatccttctgtcaatttttaagttctcaaccaatttacgttacacgtggtcat

SEQ ID NO: 429650 - DNA, 120 bp, Artificial Sequence
  ENSG00000151914_352 (sequence is synthesized)
ttgattgcaatttctaattaggtaccaattactcagtaggcccatttttcttcccccccaagaaaaaaacaataaaattgttataattttcttttacctgtgagctcactgtaatccttt

SEQ ID NO: 429651 - DNA, 120 bp, Artificial Sequence
  ENSG00000151914_353 (sequence is synthesized)
ttagcaaacaacaaatgttcacgtcagtgctgtctccttcagctaccaagtgggatcccaggtttcctcctgtagggcctcttggttttggtgatggtgtcaccatctggtacacataga

SEQ ID NO: 429652 - DNA, 120 bp, Artificial Sequence
  ENSG00000151914_354 (sequence is synthesized)
catatcagtcatcaggcttctccaccaaggccaccatggattgttatacatgttatacagtagccctgctctctcctggccaaagacacacctgcgagagaagtaaaacaagaacaaaag

SEQ ID NO: 429653 - DNA, 120 bp, Artificial Sequence
  ENSG00000151914_355 (sequence is synthesized)
ctcctgtttgttttatattttgaaaataatgtagcctaaggtaaaatgcaactccatttatgaagaaatcagaatacatagtgttctgttgggttgcttaggaaggttagcatggctgtg

SEQ ID NO: 429654 - DNA, 120 bp, Artificial Sequence
  ENSG00000151914_356 (sequence is synthesized)
gcacagtcttccaaatacatttttcttattgagccaatcccttgagtgcttcttttcctgatgcaacttttcttctaaaatgtgtgctaaaggccagatgtgagcaccctttgcatattc

SEQ ID NO: 429655 - DNA, 120 bp, Artificial Sequence
  ENSG00000151914_357 (sequence is synthesized)
atattctttaatttatccccatgttgaaatactggcattctctttacctcaatagtacatgcaaaagacacagtccctgccttactggtctgtcttctcagtgtgatgagagggtaatga

SEQ ID NO: 429656 - DNA, 120 bp, Artificial Sequence
  ENSG00000151914_358 (sequence is synthesized)
aaccatgtgggcatctgtagctggtggattaatgatattttagcatgagctttccattttcatgctgacactttctttaatagtggttattcttgctggtgtctagtgttagaataagca

SEQ ID NO: 429657 - DNA, 120 bp, Artificial Sequence
  ENSG00000151914_359 (sequence is synthesized)
cactttattttttcctccccgaactcacctgtatccaaaaggaatgcattgtaaaggaatgcatttaactttttgttatgctgagttggagttggcatggcaaaaagatgttcttgaaat

SEQ ID NO: 429658 - DNA, 120 bp, Artificial Sequence
  ENSG00000151914_360 (sequence is synthesized)
tctcaacgtgatctctggtgccaggtggccgttcttcccattaacgattgagcgcctcttcttttccgtcttttctttgtgtgcattgttgtgtgtgtataacccagccaaaggaaggac

SEQ ID NO: 429659 - DNA, 120 bp, Artificial Sequence
  ENSG00000151914_361 (sequence is synthesized)
agctagagatgagcagtaactacagtgtagtttgggaaagcaaaacatgtttcatgataaatttatgtggccggtagcagatgtacaaataaatattgaattataaaattacaatgaaaa

SEQ ID NO: 429660 - DNA, 120 bp, Artificial Sequence
  ENSG00000151914_362 (sequence is synthesized)
tactcattatcttcccattgcgtacaacactgatagtatgttctgccacgatatcatgcacaattcatacaaccattttattttcactctaattgttgtgtcaaagttttaaggattgta

SEQ ID NO: 429661 - DNA, 120 bp, Artificial Sequence
  ENSG00000151914_363 (sequence is synthesized)
ctatgtaatattgacattaaagtaaatatttcatcattgtttttggcaggtgacaaggcaggtagctaagtgtaaatgtgcaaagcgatttcaagttgagcagattggtgataataaata

SEQ ID NO: 429662 - DNA, 120 bp, Artificial Sequence
  ENSG00000151914_364 (sequence is synthesized)
aagtgaaataaagaacagaacagcagaagagaacacagctttctagttcttagcataatactcttatctactagagctctcctgatgaagaaaggcaaatctaatggtacctggctgttc

SEQ ID NO: 429663 - DNA, 120 bp, Artificial Sequence
  ENSG00000151914_365 (sequence is synthesized)
tattttgcagtaattgattatatagctctgaagcacaacttttgaaaatcatcttgaaagtttaaattctagagaattttgcatgcattttaggcatctataattatttggtgtgtggac

SEQ ID NO: 429664 - DNA, 120 bp, Artificial Sequence
  ENSG00000151914_366 (sequence is synthesized)
gtgtctcaatcaggacagtctgaagaaggaaattctaatagcaacattgccttgatccttctcccaccctccctcatgaatttaaattactgctagagggaggcattctaatcttcacat

SEQ ID NO: 429665 - DNA, 120 bp, Artificial Sequence
  ENSG00000151914_367 (sequence is synthesized)
acaagtgctgcgtgagtaatgtctcagcttggaagtatgatggactgccattcatctaaaatcaagttgttaaagtggtaaatttttcttcatataggctttttttttaatatattaagt

SEQ ID NO: 429666 - DNA, 120 bp, Artificial Sequence
  ENSG00000151914_368 (sequence is synthesized)
gttttcttgtaaaatatgtgtatctctatcttcttaatgggagtaatgaagcaattaaatttaaaactttttttttttcattgaagggatgaatccactatacagttttgtaaattgtgc

SEQ ID NO: 429667 - DNA, 120 bp, Artificial Sequence
  ENSG00000151914_369 (sequence is synthesized)
ctgcgatactgtccgggggactctgacacatcagagtttgtacggagagagtttagggaactgctgcacagatttcctgcagaatgatggggcagctcatgaaaaatgatcaagattgga

SEQ ID NO: 429668 - DNA, 120 bp, Artificial Sequence
  ENSG00000151914_370 (sequence is synthesized)
tctacctcctggggggccatagcgggagctgatgcactgggcaggaatctgtgctcaaggtgggggaggatgatgaccatgtttactttatgccttgttttaccgatagagccatttgcc

SEQ ID NO: 429669 - DNA, 120 bp, Artificial Sequence
  ENSG00000151914_371 (sequence is synthesized)
ctgcctgctggtgactaagctgtttggccctgccttctggttggacgaatcgattcctttgaaatgcaaggaaatatttacagacatttgcactaaactttcctaattactgcattagtt

SEQ ID NO: 429670 - DNA, 120 bp, Artificial Sequence
  ENSG00000151914_372 (sequence is synthesized)
ctcttatgcttttcaaaacactttcttgtctgttacttaatcctcacattaataataagtgacaggcagagaaaaaatgtgttaccttcatgactccatggcaatctcattgctgagaag

SEQ ID NO: 429671 - DNA, 120 bp, Artificial Sequence
  ENSG00000151914_373 (sequence is synthesized)
tgggagaattggaacaaaaacaacccattctttagcgtttcctcatttcttcctcctcattttcccaagcccctcatttccaccccttcccaccaactgggtgatgttagtattatatat

SEQ ID NO: 429672 - DNA, 120 bp, Artificial Sequence
  ENSG00000151914_374 (sequence is synthesized)
tacctctagagatgtctgtcaattattatggatctattatagcaaaaacagagaaaggttcaaacaacctcaagggacatattaacatttgctttaaatattgaaggctatgatgctgtg

SEQ ID NO: 429673 - DNA, 120 bp, Artificial Sequence
  ENSG00000151914_375 (sequence is synthesized)
ttcaaaattttttttaagtggaaactctctcaaagtctaagtagttattttgactagtgcaaaactgtgtttcatttcaaataacgtgatgaaacaaaaaaccaaaaaacaacatgtttc

SEQ ID NO: 429674 - DNA, 120 bp, Artificial Sequence
  ENSG00000151914_376 (sequence is synthesized)
tatgggagggactgtgaaataaaatcaaaacaatcaaggcattctgagaagaatgattttggtctttcacggttatgaattctgccaccttgagtggtatgtttcataatttgtggcttc

SEQ ID NO: 429675 - DNA, 120 bp, Artificial Sequence
  ENSG00000151914_377 (sequence is synthesized)
tcactccctcgtgttgttgagattctgtttaagttaggaatttagctagatcagcattgtcagatcttgggcaaatcatgtgcctcctcaggctcttgatttttcacattttcaaggtta

SEQ ID NO: 429676 - DNA, 120 bp, Artificial Sequence
  ENSG00000151914_378 (sequence is synthesized)
tgattaggtgagtgtgaggattaattgtggttatgtgtgtaaaagtattttgaaaacttgaacattctatgtatacaaatcacatatagatactacacttaagtgtatgtatagtataca

SEQ ID NO: 429677 - DNA, 120 bp, Artificial Sequence
  ENSG00000151914_379 (sequence is synthesized)
aatgactattaatattaataagagtaactcatgtatcagatgattataacattttaagctaataaagggaaaatcagttgtttaaaaatatacatgtaatttgtttcaatgcatttcctc

SEQ ID NO: 429678 - DNA, 120 bp, Artificial Sequence
  ENSG00000151914_380 (sequence is synthesized)
atgcatttcctccaaatagttctctggctgtgttttcattgaggaatattatattacattccctatgttcctcaagatacttgtttattttttttaactttgggagaattttttaaatgt

SEQ ID NO: 429679 - DNA, 120 bp, Artificial Sequence
  ENSG00000151914_381 (sequence is synthesized)
tgtgatctggaaaaagtgcaatgattgtataataaaatctcatacttatgattgttttagacattctctacaaactcatataaagattgtaaaaaaaaaacttctccaaatgttgcctat

SEQ ID NO: 429680 - DNA, 120 bp, Artificial Sequence
  ENSG00000151914_382 (sequence is synthesized)
gtattttgtctgtaaagactgtagaagtgatagagccaggaagtgaagtgatgtggtagcaagttatttaaaaatcactttttttctttttgcagttaagtttatttaaatgatgtctgt

SEQ ID NO: 429681 - DNA, 120 bp, Artificial Sequence
  ENSG00000151914_383 (sequence is synthesized)
atccattatttatttacttatcattctgtgtctgtctctgcctggctccataaaagcaatggaggcagcagaatatccagacacagtttttctctgctccatgccccctctatgcatgca

SEQ ID NO: 429682 - DNA, 120 bp, Artificial Sequence
  ENSG00000151914_384 (sequence is synthesized)
cttgccatcacttttatgctcagttttgggggtctccattttgttttctcttcaaccatgaattcatattgtttagaaagtttctttgaattctgagagagaatgagaaattagaagaga

SEQ ID NO: 429683 - DNA, 120 bp, Artificial Sequence
  ENSG00000151914_385 (sequence is synthesized)
aaatcaagtgagaaccccatgccttatttaattgaagagtttctcccccttcacctcctaaagaggaatagtagagagtttccacccatatgtaaagaagtggtgtcagtggaatatcat

SEQ ID NO: 429684 - DNA, 80 bp, Artificial Sequence
  ENSG00000151917_0 (sequence is synthesized)
gacatcacggccaggctgcggcagcgcgggcgcgcggacatggctgcggcggtttcggcggcgtccgcgggctgcacccg

SEQ ID NO: 429685 - DNA, 120 bp, Artificial Sequence
  ENSG00000151917_1 (sequence is synthesized)
gtccgcgccgtccgcgggtgcattggccgggtgcctctagcttcccggacacccggagcttccgcctatccagcctccctcggccaaattgctgcggagcccgtcgtcagggggcgccaa

SEQ ID NO: 429686 - DNA, 120 bp, Artificial Sequence
  ENSG00000151917_2 (sequence is synthesized)
ggagccagggggaaaaccgagaggcgctgacaggagcctcccggcggtgctaccctccacctcccacctccctgcgccccgccccgaggttggggctttgaagaatgcagccggggaaag

SEQ ID NO: 429687 - DNA, 120 bp, Artificial Sequence
  ENSG00000151917_3 (sequence is synthesized)
cattaacttttgagctacgtccagaatagcatcatcttcatgggtattccctactcctaggatttcagaaaacctttgataactaattgagaaaatgcagaagatcgtgcagacagatga

SEQ ID NO: 429688 - DNA, 120 bp, Artificial Sequence
  ENSG00000151917_4 (sequence is synthesized)
aattaccaatacacaagcttttagaaaaggaaagaggaaaagaacagagacaatggactcagaaaatgcaaatagtgacatggataaaggacagagagacccatattcgggaaatgcctt

SEQ ID NO: 429689 - DNA, 120 bp, Artificial Sequence
  ENSG00000151917_5 (sequence is synthesized)
tctgcctggtgaaagctccagtgaggatgaagagcctttagcagaattgtcaaaggaagaattgtgcgccaaaataaaaagcctgaaagaaaaactaacaaacacccggaaagaaaacag

SEQ ID NO: 429690 - DNA, 120 bp, Artificial Sequence
  ENSG00000151917_6 (sequence is synthesized)
ccgacttcgacagtctttggtcatgcttcaagtgttaccacaagcagtcacccagtttgaagaattggttggtatggccgaggctctgcttaagggtgggggaaccatgtctacatctgc

SEQ ID NO: 429691 - DNA, 120 bp, Artificial Sequence
  ENSG00000151917_7 (sequence is synthesized)
atccaccctctggagagcaacaaacaactcctcgccagattcatttgcctcaacatgcagtaattctaattctaactccagttcaccagtttccttaaagcctgaggaagagcatcagac

SEQ ID NO: 429692 - DNA, 120 bp, Artificial Sequence
  ENSG00000151917_8 (sequence is synthesized)
tgatgagaaacagttccagattgaaaaatggcagattgcccgttgtaacaagagcaagcctcagaagtttattaatgatttaatgcaagtactttacacaaatgaatacatggccactca

SEQ ID NO: 429693 - DNA, 120 bp, Artificial Sequence
  ENSG00000151917_9 (sequence is synthesized)
cagcctgacaggggcaaaatcctctacttcaagggacaaagctgtaaaaccagctatgaatcagaatgaagtccaagaaatcataggagtaacaaaacaattatttcccaatacggatga

SEQ ID NO: 429694 - DNA, 120 bp, Artificial Sequence
  ENSG00000151917_10 (sequence is synthesized)
gaagccaaatttaagcaaaaatcttaactctcaggatattaaatagatccttttggtattacaggtatctgaaacaaagcaccttcaattctaaatctagcactggattttgttggagaa

SEQ ID NO: 429695 - DNA, 120 bp, Artificial Sequence
  ENSG00000151917_11 (sequence is synthesized)
tctgcagccttcctggcagtgagaaagacagacatgtgcagtgacaggctgtaagacatatgtaacattgctgagctctcctaagggaccaacaagcttgctgaagaagctgcatgtaga

SEQ ID NO: 429696 - DNA, 120 bp, Artificial Sequence
  ENSG00000151917_12 (sequence is synthesized)
ttccaccctcagtactagtgatgcatcaaaccagagaatttctgccagtcaaataagcatgcaatatggtttctttggaaataagcatttcccaatccccaaatacccctctgtacagtt

SEQ ID NO: 429697 - DNA, 120 bp, Artificial Sequence
  ENSG00000151917_13 (sequence is synthesized)
aatctaacaggatagtcagagctcttatcatagcagccaaaacttcagcccataggttagtcattgtcctaaccaatcattgtacattgattattaccagtgacttcccattatagtttt

SEQ ID NO: 429698 - DNA, 120 bp, Artificial Sequence
  ENSG00000151917_14 (sequence is synthesized)
tggatctttagcataagcacatgcttgcaaaagtaaacagtgaaataattaatgttggcaaatatgagaacaacaaagtcagcccaaaatctgataatcatgtctaaccaagtaataatg

SEQ ID NO: 429699 - DNA, 120 bp, Artificial Sequence
  ENSG00000151917_15 (sequence is synthesized)
ttttagcaataaaattacaggattattctgttatctaaaaatgtataaaatgggaatatgaaaaaaatgacaacagcaagatgttttattttaatgttaagcaattccaccacacttctg

SEQ ID NO: 429700 - DNA, 120 bp, Artificial Sequence
  ENSG00000151917_16 (sequence is synthesized)
aagaataaacctaagtttttgtgattgttaaaacaatgcatcaattttcagggaaatctttttgtttgtttatttaccagacatgttctaactttgtattgcccaaagtatattaaatac

SEQ ID NO: 429701 - DNA, 120 bp, Artificial Sequence
  ENSG00000151917_17 (sequence is synthesized)
agatgtgtaatataaagcatcaatatcacctaacacatcgtatataagatataacatgatagatagttggtcgattacattgctatactgcttagttttaactggtttatttttattgta

SEQ ID NO: 429702 - DNA, 120 bp, Artificial Sequence
  ENSG00000151917_18 (sequence is synthesized)
gcagaaatgaactgaaaaaaaatatgggtttgataatcacacacatgaaagtaccattttgtaactcaacaaaagataaaacattcttcatcaaaaggcttctcgcttggtgtcaggttg

SEQ ID NO: 429703 - DNA, 120 bp, Artificial Sequence
  ENSG00000151917_19 (sequence is synthesized)
tcacatgtgaccactgtgcaatgcgaagccatacttcttcagtgcacaaagtcatgtttaaacttggaaaagaggatgctacagtagtttcaaagttcagtgttgtggacccaggaaatt

SEQ ID NO: 429704 - DNA, 120 bp, Artificial Sequence
  ENSG00000151917_20 (sequence is synthesized)
ttccataagtcttgcttgataacaatgtgattgtacaaaataaatgttcttaaggaaacaacttatgtaacatttgctacctttatgtaaacataaataaatcccatttaaaagataaaa

SEQ ID NO: 429705 - DNA, 120 bp, Artificial Sequence
  ENSG00000151917_21 (sequence is synthesized)
cttcgacagtctttggtcatgcttcaaggaaacaaactagatataacaacagagaagaccattttacatggaggcatgaaaactttgaatgttgttaccacaagcagtcacccagtttga

SEQ ID NO: 429706 - DNA, 120 bp, Artificial Sequence
  ENSG00000151917_22 (sequence is synthesized)
ctccaaaacgacatggatcacatctggttttgctcccagttttatccctcacacctagcgtagtggttggcaaatactgagaatctgtgtaacatggacttgggaggcagccagtctgaa

SEQ ID NO: 429707 - DNA, 120 bp, Artificial Sequence
  ENSG00000151917_23 (sequence is synthesized)
tttgaatcttggctcttctcttcactaactatgtttgactctggacaaattactttacttcttcttgcctaattgacttcatctggaaatggcaggaaacaaactagatataacaacaga

SEQ ID NO: 429708 - DNA, 120 bp, Artificial Sequence
  ENSG00000151917_24 (sequence is synthesized)
aaacacccggaaagaaaacagccgacttcgacagtctttggtcatgcttcaagcttggtccagagagctgccttagactctccaatgaatgtgttcaaacagctgcctctgttaccttga

SEQ ID NO: 429709 - DNA, 120 bp, Artificial Sequence
  ENSG00000151917_25 (sequence is synthesized)
tgtctctattattttggcttgctccaggttgggcagaagcccatgcaaggctactactgatcatgtttcatttctagctttgatgtctgggcactgatttccctaggtttaactatttgc

SEQ ID NO: 429710 - DNA, 120 bp, Artificial Sequence
  ENSG00000151917_26 (sequence is synthesized)
tcaatgtcaaggcagtgctgtggaaatctgtctgtgtaactggagtgctatgcagacctgtctgtgtgactgtcatgcaggcctgtctgtgtgattgtcagggagaattggcctgccaca

SEQ ID NO: 429711 - DNA, 120 bp, Artificial Sequence
  ENSG00000151917_27 (sequence is synthesized)
acttcactgcagcctgggtgacagacacagacaccatctcttaaaaaaagaaaaaagaaaaaaaaataggcaaatgatctgaacagatatttctcagtaagacatacaaatggccaacag

SEQ ID NO: 429712 - DNA, 120 bp, Artificial Sequence
  ENSG00000151917_28 (sequence is synthesized)
gtatatgaaaaaaatgctcaacatcactgatcaccagggaaatgcgtatcaaaaccacagtgaggtaacatctcaccccaggaagtatggctattatcaaaaagacaaaaacaaaacaaa

SEQ ID NO: 429713 - DNA, 120 bp, Artificial Sequence
  ENSG00000151917_29 (sequence is synthesized)
ttctagtgaagatgtggagaaaagcgaactctaatacactgtgggtatgaatgtaaaccagtgcagccactatggagacagcatcgttcacaatagataacatagggaatcaacttaagt

SEQ ID NO: 429714 - DNA, 120 bp, Artificial Sequence
  ENSG00000151917_30 (sequence is synthesized)
gtccaacaacagatgaatagataaagaaaatgtggcatatatacacaatggaatattattcatccataaaacagaatgaaatcctgtcatttttggcaacagggatgatcattatgttaa

SEQ ID NO: 429715 - DNA, 120 bp, Artificial Sequence
  ENSG00000151917_31 (sequence is synthesized)
gtgaaataagcgaggaatagaaagttaaacactgcatgttctcatttgtatacggaagctaaaaagaaaaaggttaatctcatagaagtaaaaagtagaacagaggatacaagaggctgg

SEQ ID NO: 429716 - DNA, 120 bp, Artificial Sequence
  ENSG00000151917_32 (sequence is synthesized)
gaaaggtagggagagatttattaaaggatacaaaattacagctagatgggaagaataagttctaatgttcaatacccctgtgggattactatagttaacaatagtatatattttcaagta

SEQ ID NO: 429717 - DNA, 120 bp, Artificial Sequence
  ENSG00000151917_33 (sequence is synthesized)
gctagaaggaggattttgaatgttcccaacataaaaaaatgataaatgtttgcagtaatagatatgctaattaccctgatctgacctttatacattatatgtatcaaaacatcattattt

SEQ ID NO: 429718 - DNA, 120 bp, Artificial Sequence
  ENSG00000151917_34 (sequence is synthesized)
gccctatgaaaatgtataattaaaatattaaataaaatcaaattttaaaaaaggattttctaatatggttccctgagtagtcctagaaacaggaactcaatagccaagagcactcctagc

SEQ ID NO: 429719 - DNA, 120 bp, Artificial Sequence
  ENSG00000151917_35 (sequence is synthesized)
aattagatgtgcccttgtaatatcattaaccattaaagggaacgatgactccttggataaatggctgattccatgtcttgcatacaaaatatacaaaatgagacttgtgaagaagcttga

SEQ ID NO: 429720 - DNA, 120 bp, Artificial Sequence
  ENSG00000151917_36 (sequence is synthesized)
gcaggaaatatacaggaacatcttgtcatatcagaaagcaaggaagttagaccatgcagatgtgtcaactagaagagcttcccacaagccaaagatgggacagtttgagcatgaataaga

SEQ ID NO: 429721 - DNA, 120 bp, Artificial Sequence
  ENSG00000151917_37 (sequence is synthesized)
atgacaaccacaatagatagacacatattgtattgatatatgtttaatgcatgagttcacagtggtattcaaaaaagaagaaaacgttatggtcatctgaaaacaaccaactcataattt

SEQ ID NO: 429722 - DNA, 120 bp, Artificial Sequence
  ENSG00000151917_38 (sequence is synthesized)
tgaaaattggcagatacaaaccaaaatcaagcgtgtatcctgccattactatatgaaatgaacttctgggtaaccaaacagttgataagaggaactttccctttgtagaactccagctaa

SEQ ID NO: 429723 - DNA, 120 bp, Artificial Sequence
  ENSG00000151917_39 (sequence is synthesized)
taaatgaagaaaataattagaatatcactattttgcaagccattgtgacataatgaatctatgcagtgaccatctgtagctggtaagatcacaaaaaagctaaccaggcattaaatacca

SEQ ID NO: 429724 - DNA, 120 bp, Artificial Sequence
  ENSG00000151917_40 (sequence is synthesized)
cctgatggaagttaaaacagtacctgaatccgatcaacccttcagatctaactaccaatctacatcaaatacagggaacaggagaatatgtcaaataccacctaaaggtgcaatcacagc

SEQ ID NO: 429725 - DNA, 120 bp, Artificial Sequence
  ENSG00000151917_41 (sequence is synthesized)
aaaatccgactgtaggaaattctccaggacaaatgacccagtttctacaattaataaattgcaagggaaaaaactaggaagggagaggaaacctatagtttatatggaagagacagcaac

SEQ ID NO: 429726 - DNA, 120 bp, Artificial Sequence
  ENSG00000151917_42 (sequence is synthesized)
cagttgtaatgtatagtccttactggatcttgattcgaacaaacttaaaaaataagaccatcagagaaatttgaacattgactaaggtttttttaaacgatattaaaaaactattgttaa

SEQ ID NO: 429727 - DNA, 120 bp, Artificial Sequence
  ENSG00000151917_43 (sequence is synthesized)
ctatttctggctgcagtagtggtgttaacagttataattttaaatacaccttttagagatgcctacagaaatatttacagataaaaatgagatgatgcctgtgctttgcatcaaataatt

SEQ ID NO: 429728 - DNA, 120 bp, Artificial Sequence
  ENSG00000151917_44 (sequence is synthesized)
tgggggataaaggggatcagggtataagtggattgagacttgccatgaattgaaatgggagaatttgctatttttgtttctgtttaaaattttccattaaaagtttaaaaaatatatcca

SEQ ID NO: 429729 - DNA, 120 bp, Artificial Sequence
  ENSG00000151917_45 (sequence is synthesized)
ggaaaacagcctacttatgaaaagatatttaaattctacaaaattgttggtgaatatttaactgatctgagtgatgaatgagtaagtataaaataaatggataatatactaagaaaagac

SEQ ID NO: 429730 - DNA, 120 bp, Artificial Sequence
  ENSG00000151917_46 (sequence is synthesized)
tgctactttcaactaaaatgaaaatttaaattatgtgtgtttaaaatgttataaaattaaaagataaacactttgagaaaaatatttgcaactcaagaaaaataaaagattaaaatgctt

SEQ ID NO: 429731 - DNA, 120 bp, Artificial Sequence
  ENSG00000151923_0 (sequence is synthesized)
accctgccctcccccttgtcccgggatcgctccgtcgcacccaccatgatggaagacgacgggcagccccggactctatacgtaggtaacctttccagagatgtgacagaagtccttata

SEQ ID NO: 429732 - DNA, 120 bp, Artificial Sequence
  ENSG00000151923_1 (sequence is synthesized)
cttcagttgttcagtcagattggaccctgtaaaagctgtaaaatgataacagagcatacaagcaatgacccatattgctttgtggaattttatgaacacagagatgcagctgctgcatta

SEQ ID NO: 429733 - DNA, 120 bp, Artificial Sequence
  ENSG00000151923_2 (sequence is synthesized)
gctgctatgaatgggagaaaaattttgggaaaggaggtcaaagtaaactgggcaaccacaccaagtagccagaaaaaagatacttccaatcacttccatgtgtttgttggggatttgagt

SEQ ID NO: 429734 - DNA, 120 bp, Artificial Sequence
  ENSG00000151923_3 (sequence is synthesized)
ccagaaattacaacagaagatatcaaatcagcatttgccccctttggtaaaatatcggatgcccgggtagttaaagacatggcaactggaaaatccaaaggctatggttttgtatctttt

SEQ ID NO: 429735 - DNA, 120 bp, Artificial Sequence
  ENSG00000151923_4 (sequence is synthesized)
tataacaaactggatgcagaaaatgcgattgtgcatatgggcggtcagtggttgggtggtcgtcaaatccgaaccaattgggccactcgtaaaccacctgcacctaaaagtacacaagaa

SEQ ID NO: 429736 - DNA, 120 bp, Artificial Sequence
  ENSG00000151923_5 (sequence is synthesized)
gcgtctgggttaacagatcagcttatgagacagacattctcaccatttggacaaattatggaaataagagttttcccagaaaagggctattcatttgtcagattttcaacccatgaaagt

SEQ ID NO: 429737 - DNA, 120 bp, Artificial Sequence
  ENSG00000151923_6 (sequence is synthesized)
gcagcccatgccattgtttcggtgaacggtactacgattgaaggacatgtggttaaatgctattggggtaaagaatctcctgatatgactaaaaacttccaacaggttgactatagtcaa

SEQ ID NO: 429738 - DNA, 120 bp, Artificial Sequence
  ENSG00000151923_7 (sequence is synthesized)
tggggccaatggagccaagtgtatggaaacccacaacagtatggacagtatatggcaaatgggtggcaagtaccgccttatggagtatacgggcaaccatggaatcaacaaggatttgga

SEQ ID NO: 429739 - DNA, 120 bp, Artificial Sequence
  ENSG00000151923_8 (sequence is synthesized)
gtagatcaatcaccttctgctgcttggatgggtggatttggtgctcagcctccccaaggacaagctcctccccctgtaatacctcctcctaaccaagccggatatggtatggcaagttac

SEQ ID NO: 429740 - DNA, 120 bp, Artificial Sequence
  ENSG00000151923_9 (sequence is synthesized)
caaacacagtgagccgggactctaaaaaaaaattgtaattcatgataggcttcgatttcctgtgacactctgaagacatgaaagtagacatcggaaaatgaaaatatttattttaaaaat

SEQ ID NO: 429741 - DNA, 120 bp, Artificial Sequence
  ENSG00000151923_10 (sequence is synthesized)
tgaaatgtttggaacctttagcacagatttgctttggtgaaggacacgtgtcttctagttctgcctttttaagtttttgttcatgatggatatgaacatgatttttctttatgtacaaaa

SEQ ID NO: 429742 - DNA, 120 bp, Artificial Sequence
  ENSG00000151923_11 (sequence is synthesized)
cagattggaccctgtaaaagctgtaaaatgataacagagcaacccgatagcagaagggtcaactcttctgttggattttctgttttgcagcatacaagcaatgacccatattgctttgtg

SEQ ID NO: 429743 - DNA, 120 bp, Artificial Sequence
  ENSG00000151923_12 (sequence is synthesized)
aaaataaagtcaataaagacaattctgactacaaattttgatataataggaaaaatggctaatacattttgattcttagatactattccatttttatcttgctgttcagtattttaactc

SEQ ID NO: 429744 - DNA, 120 bp, Artificial Sequence
  ENSG00000151923_13 (sequence is synthesized)
actgtgtttttaaaagagcaaaaaagggaggatcgtgaaaacctgggaatcacatataagttcatcctgaatcctgatactcccctccccttccctgaggtggaccacatttgaagtcag

SEQ ID NO: 429745 - DNA, 120 bp, Artificial Sequence
  ENSG00000151923_14 (sequence is synthesized)
cagagaaaaagtgtgatattcagaagaaatgcgtgattttggagtcgctttggaggaaatattttctttctctatgcctaaagaaactgaagccagactgaagttttgcaccctaaaaaa

SEQ ID NO: 429746 - DNA, 120 bp, Artificial Sequence
  ENSG00000151923_15 (sequence is synthesized)
ggaacagcattgtttgagttacttgagcaaatgttggtggtccacgttaagacatatttttaaaacttccaaaagtgtcgattattaaaattgtagtattttacatttcattttgggggg

SEQ ID NO: 429747 - DNA, 120 bp, Artificial Sequence
  ENSG00000151923_16 (sequence is synthesized)
aaatccaagtatggtgtttgtattgaagtcagacagtcatacttgtgcttttacatgaagtttaaatgatacatattgtaaatattcaataactacagtgtttaaaaagcatgcttcaac

SEQ ID NO: 429748 - DNA, 120 bp, Artificial Sequence
  ENSG00000151923_17 (sequence is synthesized)
atagaagtagcagcaatgtaattatttgaagtaacacttaacacactccgctgcattgaatgcagtggattgatcagaatgttaagactgacatttccaaggttggctactatgtaaaat

SEQ ID NO: 429749 - DNA, 120 bp, Artificial Sequence
  ENSG00000151923_18 (sequence is synthesized)
aaattaaaattacacaaattgtgcagaaaaagccttaattttaatttcatacaatctttgatgcattagtatgttctaaaatgtcattgggaattagttttttgtttttgtttttttttt

SEQ ID NO: 429750 - DNA, 120 bp, Artificial Sequence
  ENSG00000151923_19 (sequence is synthesized)
tttttttgctttacattacttggtatgtaaataccttgattaaaaccttgtaaaccaatttcaaggttactataagttgtatagtacaagtgttttttaaaaatcttggggtgtttttaa

SEQ ID NO: 429751 - DNA, 120 bp, Artificial Sequence
  ENSG00000151923_20 (sequence is synthesized)
aaattaagatatattttgcccaagaatttttttaacaagattgctaaaaacatcttatttagacacttcaatgtaccaatttataattggatattcagtttaaatagtacacagagttgt

SEQ ID NO: 429752 - DNA, 120 bp, Artificial Sequence
  ENSG00000151923_21 (sequence is synthesized)
gggcagtgtgcatggtataataagcctgagcagaggcttaagttgtatgtgtgcagagtttgtaaaggaatcaattggaagatgcagaagaccgaggtttgctttcaaggtatttttcag

SEQ ID NO: 429753 - DNA, 120 bp, Artificial Sequence
  ENSG00000151923_22 (sequence is synthesized)
gctgtgtgggtaaaatttgcctcaaatttctatcaaacaggaatgtaaaatagataaaatcctatgtatttgaattgtcagagctagggagtgcaaatgttttggcaatgtattcaaaat

SEQ ID NO: 429754 - DNA, 120 bp, Artificial Sequence
  ENSG00000151923_23 (sequence is synthesized)
gctggcctgggcaccaaagagaaaatagccttttacagttacatagtaagatgcgattagtacccacaaattactgttttctaaacatttgaagttttacgattagctttaaaataatga

SEQ ID NO: 429755 - DNA, 120 bp, Artificial Sequence
  ENSG00000151923_24 (sequence is synthesized)
ttttataaattggtggtcacaataattttggtattactttcctccttttcccacttagcaatatagccaaatgtattcaacataaaaattcatagggtctgaaattcatagctgggccaa

SEQ ID NO: 429756 - DNA, 120 bp, Artificial Sequence
  ENSG00000151923_25 (sequence is synthesized)
attttttatggcaccttagttttaccataatggtcatctattacactcttctgttataaaatatacccttatttcttttgtttatagtatctttgaggaatgtttttggaaaagttaatt

SEQ ID NO: 429757 - DNA, 120 bp, Artificial Sequence
  ENSG00000151923_26 (sequence is synthesized)
tatattttatagggagaacactcaataaattatgttaactgtgcccccgagttaaaaattttatgagtatatgtgaaacttgaacaactgaagactttttttaattgataaaaatgctta

SEQ ID NO: 429758 - DNA, 120 bp, Artificial Sequence
  ENSG00000151923_27 (sequence is synthesized)
gtatgcctgttttggtctgccagtaaattaagtagcttattgagataactaacagctaaatatagctgtagtgtttcctgactgtatattctatgatttaataaaattatccagactagt

SEQ ID NO: 429759 - DNA, 120 bp, Artificial Sequence
  ENSG00000151923_28 (sequence is synthesized)
tatattgccacagtaaacatgtgactgaagtgtccttcatcttaatctgaaagagggcaaaatttcatgatcagttaatggaagttatttcatattaagtggtttttttttttttttttt

SEQ ID NO: 429760 - DNA, 65 bp, Artificial Sequence
  ENSG00000151923_29 (sequence is synthesized)
tattaagtgacatgtagtgatgagaacttggctcaccgcaacctctgcttcccagattcaagcga

SEQ ID NO: 429761 - DNA, 120 bp, Artificial Sequence
  ENSG00000151923_30 (sequence is synthesized)
cacctggccattaagtggtttttaaaatacaaagctacttatccaaatgaaatgtaccatttaaaaactacaactgggccgggcgcagtggctcagcctgaccaacatgatgaaaccctg

SEQ ID NO: 429762 - DNA, 66 bp, Artificial Sequence
  ENSG00000151923_31 (sequence is synthesized)
cctgagccaagattgtgctattgcactccaccctgggaaatagagcaagactccgtctcaaaaaaa

SEQ ID NO: 429763 - DNA, 63 bp, Artificial Sequence
  ENSG00000151923_32 (sequence is synthesized)
aagactccgtctcaaaaaaaaaaaaagtgcaactgtagtggatcacctaaggtcaggagtttg

SEQ ID NO: 429764 - DNA, 87 bp, Artificial Sequence
  ENSG00000151923_33 (sequence is synthesized)
aaccccatctctactaaaaataacaaaaaaattagctgggcgtgctggtgggcgctggtagtgaacctgggaggtggaggttgcagt

SEQ ID NO: 429765 - DNA, 61 bp, Artificial Sequence
  ENSG00000151923_34 (sequence is synthesized)
gaattaattaaaagtatggctgttgagctaacagatgattttataacatgacccaatgcta

SEQ ID NO: 429766 - DNA, 120 bp, Artificial Sequence
  ENSG00000151923_35 (sequence is synthesized)
gttgagctaacagatgattttataacatgacccaatgctatcttgatccaacttaagcctaagaatcgttgctccccaccccgttcatcaaaaacatcagcagagactttttgggcatgc

SEQ ID NO: 429767 - DNA, 120 bp, Artificial Sequence
  ENSG00000151923_36 (sequence is synthesized)
aaggaaatgttttttatttcataattattttgagatttattttggtgatgtgtttctgactgactgccatattctttgttctcataatttctctactagtattttcactcccaacccccg

SEQ ID NO: 429768 - DNA, 120 bp, Artificial Sequence
  ENSG00000151923_37 (sequence is synthesized)
tgccattcccacttgatttttatgtctgctggcagtgagaggctaaaatggccaacttaagccaaagctgtaaacaacagttgaagtaagtctttcaataaagactagactatatgataa

SEQ ID NO: 429769 - DNA, 120 bp, Artificial Sequence
  ENSG00000151923_38 (sequence is synthesized)
gcagaagtgcttccctctctcatttccaggaccacaattcccagagacttcggcttcacgacgtttctctttttgcccgatctctcccggagctggctgggcttcggccggccagaggcc

SEQ ID NO: 429770 - DNA, 120 bp, Artificial Sequence
  ENSG00000151923_39 (sequence is synthesized)
cacagcgacgacgtgatccgtcgtgagcgggtcccagggtttcctcggcggcccttttttctctcccctcggtcgtcccccttgcaggctgtcgcggctggcctgagcggtgacctggcg

SEQ ID NO: 429771 - DNA, 120 bp, Artificial Sequence
  ENSG00000151923_40 (sequence is synthesized)
ggtcgcgcctgcgctctgccctgtttcctgcctggctggtggcggcggccattttgttcatcctcctcctcctcctgctcctcctggttggagcgcagtgtccggagcgggctgggggga

SEQ ID NO: 429772 - DNA, 120 bp, Artificial Sequence
  ENSG00000151923_41 (sequence is synthesized)
tctttaaggtttccatcttacatgtcacataaaagctttggaaactctgtaaaatgaacaataaaataaagcatatagctactttcagttgattgtatttcaaaattgattatttgcggt

SEQ ID NO: 429773 - DNA, 120 bp, Artificial Sequence
  ENSG00000151923_42 (sequence is synthesized)
attaactgaatcttaatactttcttttcacaggtgtcaccaccccaataaacttagacaatgataaataacagagtcctattcacataagggtgcttacttagtttttctcttccttgtc

SEQ ID NO: 429774 - DNA, 120 bp, Artificial Sequence
  ENSG00000151923_43 (sequence is synthesized)
tatggttctatcttcagaaaacaatatggtgtttagagcctagttcctacagttcctgttcttagaagacaaaatagactctaagatacgtaggtaacctttccagagatgtgacagaag

SEQ ID NO: 429775 - DNA, 120 bp, Artificial Sequence
  ENSG00000151923_44 (sequence is synthesized)
ggtgtttagagcctaggtagcaattatatatttaaagacttggatctttagcttgactatttcataaccagagcagaaagaaagtgaagtgtagaagctataatttggaacgaataaaga

SEQ ID NO: 429776 - DNA, 120 bp, Artificial Sequence
  ENSG00000151923_45 (sequence is synthesized)
tgtcatttcaatgaactaccaagagatgatcttactagatacgtaggtaacctttccagagatgtgacagaagtccttatacttcagttgttcagtcagattggaccctgtaaaagctgt

SEQ ID NO: 429777 - DNA, 120 bp, Artificial Sequence
  ENSG00000151923_46 (sequence is synthesized)
aaaaaagatacttccaatcacttccatgtgtttgttggggatttgagtccagaaattacaacagaagatatcaaatcagcatttgccccctttggtaaaatatcctgcccaaactccaaa

SEQ ID NO: 429778 - DNA, 120 bp, Artificial Sequence
  ENSG00000151923_47 (sequence is synthesized)
cttgaaggctaactgcaaggaactgtgcacactggaactcagttgtagattttttttctcatttctatttattcttattatacattatttatatatacatattttagtatttacatttta

SEQ ID NO: 429779 - DNA, 120 bp, Artificial Sequence
  ENSG00000151923_48 (sequence is synthesized)
acttactcactaaaatttctgtgtaaatttgttgttttcgtactggtgtgcttagcattgttgttagttttttattctcctttcttaaatttctgaaaatgtcaatttttcaaaatttac

SEQ ID NO: 429780 - DNA, 120 bp, Artificial Sequence
  ENSG00000151923_49 (sequence is synthesized)
tttcatatattttgtatcactaggcagaagacatttaactatttagagattgcatggtaaagtagttagtattgttacagtaatttatagaatcagtaaaccttagaggacactagtaaa

SEQ ID NO: 429781 - DNA, 120 bp, Artificial Sequence
  ENSG00000151923_50 (sequence is synthesized)
tagaatattagaaagggaaactgttgttcctattaatcttcaaatttgagcatttagtttagaaagcacaggctatttgattaggttgcatgtttattacatgtttttgtcctactgctt

SEQ ID NO: 429782 - DNA, 120 bp, Artificial Sequence
  ENSG00000151923_51 (sequence is synthesized)
ttttctaacaggtaaagaagcattagggagagttcaggaatggttgtagttaattagggctaactggaattttattttaaaaatgctcacaatacagtgtgtgtggttccttttagtttt

SEQ ID NO: 429783 - DNA, 120 bp, Artificial Sequence
  ENSG00000151923_52 (sequence is synthesized)
aattacaacagaagatatcaaatcagcatttgccccctttggtaaaatatcgtaagtatcataatcagtactacactcagtcatgataggcagaattgtatatgattaacttgtaattga

SEQ ID NO: 429784 - DNA, 120 bp, Artificial Sequence
  ENSG00000151923_53 (sequence is synthesized)
attaagattttctttctctagttagtatggttttgttttgtttcttatttttcatttatttattttggtttgttttgagtagtggatgttgttgaaaatgttaatgtcatttcagtgtct

SEQ ID NO: 429785 - DNA, 120 bp, Artificial Sequence
  ENSG00000151929_0 (sequence is synthesized)
gcggagctccgcatccaaccccgggccgcggccaacttctctggactggaccagaagtttctagccggccagttgctacctccctttatctcctccttcccctctggcagcgaggaggct

SEQ ID NO: 429786 - DNA, 120 bp, Artificial Sequence
  ENSG00000151929_1 (sequence is synthesized)
atttccagacacttccacccctctctggccacgtcacccccgcctttaattcataaaggtgcccggcgccggcttcccggacacgtcggcggcggagaggggcccacggcggcggcccgg

SEQ ID NO: 429787 - DNA, 120 bp, Artificial Sequence
  ENSG00000151929_2 (sequence is synthesized)
ccagagactcggcgcccggagccagcgccccgcacccgcgccccagcgggcagaccccaacccagcatgagcgccgccacccactcgcccatgatgcaggtggcgtccggcaacggtgac

SEQ ID NO: 429788 - DNA, 120 bp, Artificial Sequence
  ENSG00000151929_3 (sequence is synthesized)
cgcgaccctttgccccccggatgggagatcaagatcgacccgcagaccggctggcccttcttcgtggaccacaacagccgcaccactacgtggaacgacccgcgcgtgccctctgagggc

SEQ ID NO: 429789 - DNA, 120 bp, Artificial Sequence
  ENSG00000151929_4 (sequence is synthesized)
cccaaggagactccatcctctgccaatggcccttcccgggagggctctaggctgccgcctgctagggaaggccaccctgtgtacccccagctccgaccaggctacattcccattcctgtg

SEQ ID NO: 429790 - DNA, 120 bp, Artificial Sequence
  ENSG00000151929_5 (sequence is synthesized)
ctccatgaaggcgctgagaaccggcaggtgcaccctttccatgtctatccccagcctgggatgcagcgattccgaactgaggcggcagcagcggctcctcagaggtcccagtcacctctg

SEQ ID NO: 429791 - DNA, 120 bp, Artificial Sequence
  ENSG00000151929_6 (sequence is synthesized)
cggggcatgccagaaaccactcagccagataaacagtgtggacaggtggcagcggcggcggcagcccagcccccagcctcccacggacctgagcggtcccagtctccagctgcctctgac

SEQ ID NO: 429792 - DNA, 120 bp, Artificial Sequence
  ENSG00000151929_7 (sequence is synthesized)
tgctcatcctcatcctcctcggccagcctgccttcctccggcaggagcagcctgggcagtcaccagctcccgcgggggtacatctccattccggtgatacacgagcagaacgttacccgg

SEQ ID NO: 429793 - DNA, 120 bp, Artificial Sequence
  ENSG00000151929_8 (sequence is synthesized)
ccagcagcccagccctccttccaccaagcccagaagacgcactacccagcgcagcagggggagtaccagacccaccagcctgtgtaccacaagatccagggggatgactgggagccccgg

SEQ ID NO: 429794 - DNA, 120 bp, Artificial Sequence
  ENSG00000151929_9 (sequence is synthesized)
cccctgcgggcggcatccccgttcaggtcatctgtccagggtgcatcgagccgggagggctcaccagccaggagcagcacgccactccactccccctcgcccatccgtgtgcacaccgtg

SEQ ID NO: 429795 - DNA, 120 bp, Artificial Sequence
  ENSG00000151929_10 (sequence is synthesized)
cagcctgaaaacaaaccagaaagtaagccaggcccagttggaccagaactccctcctggacacatcccaattcaagtgatccgcaaagaggtggattctaaacctgtttcccagaagccc

SEQ ID NO: 429796 - DNA, 120 bp, Artificial Sequence
  ENSG00000151929_11 (sequence is synthesized)
ccacctccctctgagaaggtagaggtgaaagttccccctgctccagttccttgtcctcctcccagccctggcccttctgctgtcccctcttcccccaagagtgtggctacagaagagagg

SEQ ID NO: 429797 - DNA, 120 bp, Artificial Sequence
  ENSG00000151929_12 (sequence is synthesized)
gcagcccccagcactgcccctgcagaagctacacctccaaaaccaggagaagccgaggctcccccaaaacatccaggagtgctgaaagtggaagccatcctggagaaggtacaggggctg

SEQ ID NO: 429798 - DNA, 120 bp, Artificial Sequence
  ENSG00000151929_13 (sequence is synthesized)
gagcaggctgtagacaactttgaaggcaagaagactgacaaaaagtacctgatgatcgaagagtatttgaccaaagagctgctggccctggattcagtggaccccgagggacgagccgat

SEQ ID NO: 429799 - DNA, 120 bp, Artificial Sequence
  ENSG00000151929_14 (sequence is synthesized)
gtgcgtcaggccaggagagacggtgtcaggaaggttcagaccatcttggaaaaacttgaacagaaagccattgatgtcccaggtcaagtccaggtctatgaactccagcccagcaacctt

SEQ ID NO: 429800 - DNA, 120 bp, Artificial Sequence
  ENSG00000151929_15 (sequence is synthesized)
gaagcagatcagccactgcaggcaatcatggagatgggtgccgtggcagcagacaagggcaagaaaaatgctggaaatgcagaagatccccacacagaaacccagcagccagaagccaca

SEQ ID NO: 429801 - DNA, 120 bp, Artificial Sequence
  ENSG00000151929_16 (sequence is synthesized)
gcagcagcgacttcaaaccccagcagcatgacagacacccctggtaacccagcagcaccgtagcctctgccctgtaaaaatcagactcggaaccgatgtgtgctttagggaattttaagt

SEQ ID NO: 429802 - DNA, 120 bp, Artificial Sequence
  ENSG00000151929_17 (sequence is synthesized)
tgcatgcatttcagagactttaagtcagttggtttttattagctgcttggtatgcagtaacttgggtggaggcaaaacactaataaaagggctaaaaaggaaaatgatgcttttcttcta

SEQ ID NO: 429803 - DNA, 120 bp, Artificial Sequence
  ENSG00000151929_18 (sequence is synthesized)
tattcttactctgtacaaataaagaagttgcttgttgtttgagaagtttaaccccgttgcttgttgttctgcagccctgtctacttgggcacccccaccacctgttagctgtggttgtgc

SEQ ID NO: 429804 - DNA, 120 bp, Artificial Sequence
  ENSG00000151929_19 (sequence is synthesized)
actgtcttttgtagctctggactggaggggtagatggggagtcaattacccatcacataaatatgaaacatttatcagaaatgttgccattttaatgagatgattttcttcatctcataa

SEQ ID NO: 429805 - DNA, 120 bp, Artificial Sequence
  ENSG00000151929_20 (sequence is synthesized)
ttaaaatacctgactttagagagagtaaaatgtgccaggagccataggaatatctgtatgttggatgactttaatgctacattttaaaaaaagaaaataaagtaataatataactcaaaa

SEQ ID NO: 429806 - DNA, 120 bp, Artificial Sequence
  ENSG00000151929_21 (sequence is synthesized)
tcatgtggcacatgtgataccatgtgaggtatctggtgttactaagtcgtcacgtatttcgatgaagggtccacaggctcagaaaagatggaacgagtgactgtggagaagggtagaaca

SEQ ID NO: 429807 - DNA, 80 bp, Artificial Sequence
  ENSG00000151948_0 (sequence is synthesized)
gcggggccggtcgatggcccgggcggcggcggcggcatgcggctcctgttcctggcggtgctgcggccacacaccggcaa

SEQ ID NO: 429808 - DNA, 120 bp, Artificial Sequence
  ENSG00000151948_1 (sequence is synthesized)
acacaccggcaacgcggtcacggcccagcgcgttcgggcccatctagaggctgcagggcacgtgtgcgttttgaaggatgcctttgactttgaaagccgatctgagattgcaaacctcat

SEQ ID NO: 429809 - DNA, 120 bp, Artificial Sequence
  ENSG00000151948_2 (sequence is synthesized)
cttggctgagaactgcgaggctgccctggctcttcatctctataggggaggcaggcttttgcaaggccaccgaatcccttttggagtcatctttggtggaactgatgtaaatgaagatgc

SEQ ID NO: 429810 - DNA, 120 bp, Artificial Sequence
  ENSG00000151948_3 (sequence is synthesized)
caaccaggcggaaaaaaacacagtcatgggcagagttcttgaggaagccagatttgctgtcgctttcacagagtcaatgaaggaaatggcacaagcgcagtggccgcatgctaagggtaa

SEQ ID NO: 429811 - DNA, 120 bp, Artificial Sequence
  ENSG00000151948_4 (sequence is synthesized)
ggtctatgtccagagtcaaggaattgcaacaacaccaaacgccgcttttaactggaatacctttcttcaacgctctgagattaaccaaagtgctgataatttgcacatatttcttctgat

SEQ ID NO: 429812 - DNA, 120 bp, Artificial Sequence
  ENSG00000151948_5 (sequence is synthesized)
atgtggacttcgacaagttaaggatcctctctatctggtggacgcattttcagcctggcatcaggaggagcccaatgtgcacctggtgattgtgggtcctgaagtcgatccagtgtttac

SEQ ID NO: 429813 - DNA, 120 bp, Artificial Sequence
  ENSG00000151948_6 (sequence is synthesized)
aagggaagtgaaagccaaagtgaaaagagccgctggggtacgattgattggagagatgcctcaagaagatctgcacgcggtggtgaagaattgcttcgcggtggtgaatagctctgtctc

SEQ ID NO: 429814 - DNA, 120 bp, Artificial Sequence
  ENSG00000151948_7 (sequence is synthesized)
tgaaggcatgtcagctgcaattttggaggcaatggatttagaagtaccggtattggccaggaacatccccgggaatgctgccgtggtgaagcatgaagtcacagggctactgttttccaa

SEQ ID NO: 429815 - DNA, 120 bp, Artificial Sequence
  ENSG00000151948_8 (sequence is synthesized)
tcctcaggagtttgttcatctggcaaagagactggttagtgatcctgcattagaaaaggaaatcgtagtgaacggaagggaatacgtgagaatgtatcattcatggcaggtggaaagaga

SEQ ID NO: 429816 - DNA, 120 bp, Artificial Sequence
  ENSG00000151948_9 (sequence is synthesized)
cacctaccaacagctcatcaggaagctggaaggaagcactgaagattgagggccccgcctcatcagacacctgctctctgacacacagctctgggtgcacactcagagacagagttctgg

SEQ ID NO: 429817 - DNA, 120 bp, Artificial Sequence
  ENSG00000151948_10 (sequence is synthesized)
atcacgtgggcccagtgcagttcaaataaaaccagcctcagcggaatcctagaaaatgttagtcgtgagtccccagagccactgcattcatcccatatccttctgtgcgttcagatgctg

SEQ ID NO: 429818 - DNA, 120 bp, Artificial Sequence
  ENSG00000151948_11 (sequence is synthesized)
tcccaggcgtgttcaccagccagtcctgatggaggtgcatgagtgactgggttgactgggacagggaaaggggaactggttttcagggaatttgggagagaatttgattacctgccttag

SEQ ID NO: 429819 - DNA, 120 bp, Artificial Sequence
  ENSG00000151948_12 (sequence is synthesized)
cagacgtgtcagctgagccgagtcctcgcaggatttttgttgtgatctcaggactctgacaggcacgtgggtgacccgaggcttctctgaacactagaaagcgctgtgagtgagctcacg

SEQ ID NO: 429820 - DNA, 120 bp, Artificial Sequence
  ENSG00000151948_13 (sequence is synthesized)
cccggcacagctcacttttcaatggtggaattgaaagttgtgctttttagaaaagtggccaggctgcccgcaggccccgcccacctcttggctgaatttgagtggaaaaccaggaaggaa

SEQ ID NO: 429821 - DNA, 120 bp, Artificial Sequence
  ENSG00000151948_14 (sequence is synthesized)
caagcgccacgtcacgcatagcctgcaaatcgcccgcgtgaccctgagatggaggcctgaggctttgggtccagggtgggctcttccccttcccacatcagggacccggggatggatgtc

SEQ ID NO: 429822 - DNA, 120 bp, Artificial Sequence
  ENSG00000151948_15 (sequence is synthesized)
ggaagggtcaccagcctccagcctttggcaggatggagcttgggtctgcagggctttgcagccacacagcgaggtcagtccggggccagccgcgccatcatggtaatggtggcctcgccc

SEQ ID NO: 429823 - DNA, 120 bp, Artificial Sequence
  ENSG00000151948_16 (sequence is synthesized)
catccatgtcatccatgtcacatgaggacgtgcagtcttccttgtcctctcctagtggaatttgcctgggagaacctccactgaatactgaaattgttgcatgcctgtggattccttacg

SEQ ID NO: 429824 - DNA, 120 bp, Artificial Sequence
  ENSG00000151948_17 (sequence is synthesized)
acaatggggaacgcggtgtttcccacctcttgtgggtagaaagcagtctgctttgaggaggcgagaaggcaaagccagggcagggcgttgctgtgggaagcgttcggtgaaagcgggttt

SEQ ID NO: 429825 - DNA, 120 bp, Artificial Sequence
  ENSG00000151948_18 (sequence is synthesized)
cgacgcttaggagggccgagggagaagattccaccagcattgtccttgcttcaagttttaggatgtctgaactttcagctttcatgttttcaaccatcatttttttaatggcacaaccta

SEQ ID NO: 429826 - DNA, 120 bp, Artificial Sequence
  ENSG00000151948_19 (sequence is synthesized)
catcttgtttttaaaagaagtagcctcaaattaaactccttaaactctgatgccctggggatgagaacaactagcttggatctcgtgccgtgtaattcaatgtttcattccgctgcctcc

SEQ ID NO: 429827 - DNA, 120 bp, Artificial Sequence
  ENSG00000151948_20 (sequence is synthesized)
atcatgtaatagaatcgctttccagaaaggcagttaactggaagcagcagaggctcccagccgtgagaggactgctcaacaatgccccccatcgccgcccccccacccctcgcacccctt

SEQ ID NO: 429828 - DNA, 120 bp, Artificial Sequence
  ENSG00000151948_21 (sequence is synthesized)
gtgttttccctctgaggggcccaagggttatggctttcatgtctaggtgtggggacagaggagggagaggcagatcctgggccgggagaggatggcctggtctgaatctggagtaattaa

SEQ ID NO: 429829 - DNA, 120 bp, Artificial Sequence
  ENSG00000151948_22 (sequence is synthesized)
tgccacccaaagaaaaggccctgccaggtccaatgttgtcttagatctgatgatgctgctatttacaaaacactgatcgtccgaaagcttgaatctgttcctcctcgaatgaccctgtag

SEQ ID NO: 429830 - DNA, 120 bp, Artificial Sequence
  ENSG00000151948_23 (sequence is synthesized)
atgcctgacctccaccgtacctccacatcactattcatgtccttctaggaaaatgtgcacatgcctcacgcactatgtgggaagggcgtgtttttaaattaataaagtgtgtcaccatta

SEQ ID NO: 429831 - DNA, 120 bp, Artificial Sequence
  ENSG00000151948_24 (sequence is synthesized)
gtgggtcctgaaaacattgaaagaaaaacttctagtttgatgctaaaattctggctaatcaagagagaaggcctcagactgggagccatgagcaggcaacaacagtatctagaaggcatt

SEQ ID NO: 429832 - DNA, 120 bp, Artificial Sequence
  ENSG00000151948_25 (sequence is synthesized)
taataatgtggttttctttttcattgttttcattctgatgatcacatctcaggtacagtgcttgataccagctttccaattatgaaaattgcctttcaaaataaattgacttcacaaaaa

SEQ ID NO: 429833 - DNA, 80 bp, Artificial Sequence
  ENSG00000151952_0 (sequence is synthesized)
agcagccgcacccgccaaactttgggtgccggagcgcgcgcgcgcccgagccccgaggcgcagcggccggcctgggatgg

SEQ ID NO: 429834 - DNA, 80 bp, Artificial Sequence
  ENSG00000151952_1 (sequence is synthesized)
cacccgccaaactttgggtgccggagcgcgcgcgcgcccgagccccgaggcgcagcggccggcctgggatgggggctgcg

SEQ ID NO: 429835 - DNA, 120 bp, Artificial Sequence
  ENSG00000151952_2 (sequence is synthesized)
gcgccgcctgcgccagcgcccgctagccagcccgggagcagctggagccgccggagccctgcgcctggaggcgcccctccttgggccaccgggggccactcttcgctcgggtaaacagga

SEQ ID NO: 429836 - DNA, 120 bp, Artificial Sequence
  ENSG00000151952_3 (sequence is synthesized)
cactcttcgctcgggtaaacaggaaaggaaataccccctgtggattaaaatttaaaaaaaattctgttggggtcgaaggagggaggtggggtttgcctgcgcgcgtgttggactccggag

SEQ ID NO: 429837 - DNA, 120 bp, Artificial Sequence
  ENSG00000151952_4 (sequence is synthesized)
ggagagcaactcaggagcccgcgcggtcgtcgcctcccggcctggccatggactggcgggaagagggagcagggcgcccgggctgctcgggcccctagccgggcgctccctcgccaccgg

SEQ ID NO: 429838 - DNA, 120 bp, Artificial Sequence
  ENSG00000151952_5 (sequence is synthesized)
gctgcgggcctctaggggactgagacggtctcttgttcgcctggacggcgccggggagcggaggatctgcgctccgggtctccaggatgtgcccgtctgagatggggacgctgtggcacc

SEQ ID NO: 429839 - DNA, 120 bp, Artificial Sequence
  ENSG00000151952_6 (sequence is synthesized)
actggtcgccggtactcatcagcctggccgccctgttttccaaagtgacggaaggtcgagggatccttgagagcatccagaggttttccttgctgcccacctacctccccgtgacctacc

SEQ ID NO: 429840 - DNA, 120 bp, Artificial Sequence
  ENSG00000151952_7 (sequence is synthesized)
acatcaacaacgcggacgtctccttcttcctgaaggaggccaaccaggatatcatgaggaactccagcctgcagtcccgggtggagtcatttctgatttacaaatccaggaggctgcctg

SEQ ID NO: 429841 - DNA, 120 bp, Artificial Sequence
  ENSG00000151952_8 (sequence is synthesized)
tcctcaatgccagctacgggcctttctccatcgagcaagtggtgccccaggatttaatgctaccttccaacccatttggattcaccaacaaattttctcttaactggaaactaaaagccc

SEQ ID NO: 429842 - DNA, 120 bp, Artificial Sequence
  ENSG00000151952_9 (sequence is synthesized)
acatcctgcgggacaaagtctacctgagccggcccaaagtgcaggttctgttccacatcatgggcagagactgggacgaccgcagcgccggggagaagctgccgtgcctgagggtctttg

SEQ ID NO: 429843 - DNA, 120 bp, Artificial Sequence
  ENSG00000151952_10 (sequence is synthesized)
ctttccgagagacccgagaggtgcggggcagctgccggctgcagggggacctggggctgtgcgtggccgagctggagctcctgtccagctggttcagcccccccacggtggttgccggga

SEQ ID NO: 429844 - DNA, 120 bp, Artificial Sequence
  ENSG00000151952_11 (sequence is synthesized)
ggaggaagtccgtggaccagccggaggggacccccgtggagctctactacaccgtgcacccagggggtgagagaggggactgcgtcagggaagacgcgaggagaagcaatgggatccgga

SEQ ID NO: 429845 - DNA, 120 bp, Artificial Sequence
  ENSG00000151952_12 (sequence is synthesized)
caggccacagtgacatcgatgagtccgggccccccttgcagaggatcgggagcatcttcctttatcagacacacaggaaaccctccctgagagaactgcgtctggacaacagcgtggcca

SEQ ID NO: 429846 - DNA, 120 bp, Artificial Sequence
  ENSG00000151952_13 (sequence is synthesized)
tccactatataccaaagaccgtgaggaaaggagacgtgctgacttttcctgtttccatctccagaaattccactgaagatcgcttcacgttgagggcaaaggtgaagaaaggcgtgaaca

SEQ ID NO: 429847 - DNA, 120 bp, Artificial Sequence
  ENSG00000151952_14 (sequence is synthesized)
tcatcggcgtgcgagccagcagcccttccatttgggatgtcaaggagcgcacggattatactggaaagtatgcaccagctgtcatcgtttgtcagaagaaagcagctggctcagaaaaca

SEQ ID NO: 429848 - DNA, 120 bp, Artificial Sequence
  ENSG00000151952_15 (sequence is synthesized)
gtgcggatggcgcctcctacgaggtcatgcagatcgatgtggaggtggaagagcctggtgacctgccagccacacagctggtcacgtggcaggtcgagtaccccggagagatcacgtctg

SEQ ID NO: 429849 - DNA, 120 bp, Artificial Sequence
  ENSG00000151952_16 (sequence is synthesized)
acttgggagtgtccaagatctatgtgagcccaaaggacttgattggagttgtgccgctggctatggaggcagaaatcctgaacacagccatcctcacggggaagacggtggccgtcccgg

SEQ ID NO: 429850 - DNA, 120 bp, Artificial Sequence
  ENSG00000151952_17 (sequence is synthesized)
tgaaagtggtctccgtggaggacgacggcacagtgacagagctgctggagtctgtggagtgtagatcgtctgatgaagacgtgattaaggtttctgacagatgtgactacgtctttgtca

SEQ ID NO: 429851 - DNA, 120 bp, Artificial Sequence
  ENSG00000151952_18 (sequence is synthesized)
atgggaaagaaatgaaaggcaaggtcaacgtggtggtgaacttcacctaccagcacctgagcagccccctggagatgacggtgtgggtgccccggcttccgctgcagatcgaggtctccg

SEQ ID NO: 429852 - DNA, 120 bp, Artificial Sequence
  ENSG00000151952_19 (sequence is synthesized)
acaccgagctcaatcagatcaagggttggagagtgcccatcgtctccagcaggaggcctgccggggacagtgaagaggaggaggatgatgagcggaggggccgcggctgcaccctgcagt

SEQ ID NO: 429853 - DNA, 120 bp, Artificial Sequence
  ENSG00000151952_20 (sequence is synthesized)
accagcacgccatggtgcgggtcctgacgcagtttgtggctgaggcggccggccctgggggacacctggcccacctgctgggctcagactggcaagtggacatcacggagctgataaatg

SEQ ID NO: 429854 - DNA, 120 bp, Artificial Sequence
  ENSG00000151952_21 (sequence is synthesized)
acttcatgcaggtggaggagcccaggatcgccaagctgcaaggcggacagatcctgatggggcaggagcttgggatgaccaccattcagatcctgtctcctctgtcagacaccatcctcg

SEQ ID NO: 429855 - DNA, 120 bp, Artificial Sequence
  ENSG00000151952_22 (sequence is synthesized)
ctgaaaagaccatcactgtgctggacgagaaggtgaccatcacagacctcggggtgcagctggtgacagggctgtcactctccttgcagctcagcccaggaagcaacagggccatctttg

SEQ ID NO: 429856 - DNA, 120 bp, Artificial Sequence
  ENSG00000151952_23 (sequence is synthesized)
ccactgcagtggctcaggaacttctgcagaggccaaaacaggaagcagccatcagttgctgggtccagttcagtgatggctcagtcacgcccttggatatttacgatgggaaagacttct

SEQ ID NO: 429857 - DNA, 120 bp, Artificial Sequence
  ENSG00000151952_24 (sequence is synthesized)
ccttgatggccacatctttggatgagaaggtagtctccatccaccaagaccccaaattcaagtggcctatcattgctgcggaaacagaaggacaaggcaccctggtcaaggtggaaatgg

SEQ ID NO: 429858 - DNA, 120 bp, Artificial Sequence
  ENSG00000151952_25 (sequence is synthesized)
gccagaaatccaagcggaagagtgtgttagctgttggaacggcaaacatcaaagttaaatttggccaaaacgatgctaaccccaacaccagtgacagcagacacacaggggcaggggttc

SEQ ID NO: 429859 - DNA, 120 bp, Artificial Sequence
  ENSG00000151952_26 (sequence is synthesized)
acatggaaaacaatgtcagtgacagaaggcccaaaaaaccctcgcaggaatgggggagtcaggaaggacagtactatggcagttcttctatgggactcatggagggacggggcaccacga

SEQ ID NO: 429860 - DNA, 120 bp, Artificial Sequence
  ENSG00000151952_27 (sequence is synthesized)
cagacaggtccatcctgcagaagaagaaaggccaggaaagccttttagatgacaacagccacttgcagaccatccccagcgacctcaccagcttcccagcccaggtggacctccccagaa

SEQ ID NO: 429861 - DNA, 120 bp, Artificial Sequence
  ENSG00000151952_28 (sequence is synthesized)
gcaatggggaaatggatgggaatgaccttatgcaggcatccaaagggctgagcgacttagaaattgggatgtatgctttgttgggagtcttctgtttggccattttggtcttcttgataa

SEQ ID NO: 429862 - DNA, 120 bp, Artificial Sequence
  ENSG00000151952_29 (sequence is synthesized)
actgtgtgacctttgcattaaaatacagacacaaacaggttcccttcgaggagcaggaagggatgagtcactctcatgactgggttgggttaagcaaccggacagagctgttggagaatc

SEQ ID NO: 429863 - DNA, 120 bp, Artificial Sequence
  ENSG00000151952_30 (sequence is synthesized)
acatcaactttgcctcctcgcaagatgagcaaatcactgccattgacaggggcatggatttcgaggaaagtaaatatctcctcagcacaaactcccaaaaaagcatcaatgggcagctgt

SEQ ID NO: 429864 - DNA, 120 bp, Artificial Sequence
  ENSG00000151952_31 (sequence is synthesized)
tcaaacctttgggacccatcatcattgatgggaaagatcagaaaagtgagcccccaacatcccctacctcaaaaaggaaaagggtaaaatttaccaccttcaccgccgtctcctcagacg

SEQ ID NO: 429865 - DNA, 120 bp, Artificial Sequence
  ENSG00000151952_32 (sequence is synthesized)
acgagtaccccaccaggaactccatcgtgatgagtagcgaggatgacattaagtgggtctgccaggatctggaccctggggactgcaaagagctgcacaactacatggagaggttacatg

SEQ ID NO: 429866 - DNA, 120 bp, Artificial Sequence
  ENSG00000151952_33 (sequence is synthesized)
aaaatgtgtaagccagacacacacagacattggttctcactcacctttcagcctttaattccaggatgtgtagcaacggtgcccccggaagagaaacaaagcagcaggacaaaataagga

SEQ ID NO: 429867 - DNA, 120 bp, Artificial Sequence
  ENSG00000151952_34 (sequence is synthesized)
tgacactatccatacagcctcagccaatgaccccggctcggcggcgaggcctggagtccgcatcgacgcacacattccagagtacagtgtcttgcttaagaggtttatcatgcatggcaa

SEQ ID NO: 429868 - DNA, 120 bp, Artificial Sequence
  ENSG00000151952_35 (sequence is synthesized)
gatttttaagacttgaaacaaaaacgagttctgaatcactgagcgtctgagagcgtccaggaaagaacagcctctctctctcgaatcaaagcaatttggatattgtaaaatccacatggc

SEQ ID NO: 429869 - DNA, 120 bp, Artificial Sequence
  ENSG00000151952_36 (sequence is synthesized)
tccaatattcaatattgcagactatggaagaaaagtacaactcaggtggagcatccatggatcgcatccatggatcaatgggaggaagcgtgtcatcgaaactggagcagcacatcttgc

SEQ ID NO: 429870 - DNA, 120 bp, Artificial Sequence
  ENSG00000151952_37 (sequence is synthesized)
tgtgagcgcgatcacaggcagtccagtgccgccgtcagctgtgggaggcatgattgtgagtcattgtctctcaaaggctgggccagagctgtctcagatcatggacaggccaaggaagtg

SEQ ID NO: 429871 - DNA, 120 bp, Artificial Sequence
  ENSG00000151952_38 (sequence is synthesized)
gctgacaaggactgaaagggaacatgtgggctaacaggccacaaatacctttgtaactacatgccaaggacaaacacatggacgcaaatcctctgagcccttcagggtacttctttattt

SEQ ID NO: 429872 - DNA, 120 bp, Artificial Sequence
  ENSG00000151952_39 (sequence is synthesized)
gtaaactaaggatactgggcatagaatttgaatcaggttcaaagaaccacgctcttttgattcatatcaagttcacaatgtatccatttctattcctccactgcattgccatcctcccca

SEQ ID NO: 429873 - DNA, 120 bp, Artificial Sequence
  ENSG00000151952_40 (sequence is synthesized)
aagccgttggtcacctgtgggtgggggagggagagggcagtttgtagtatttgctgggtcttttttctccccctgggttttgtgtcaactcccaagtgacattctgtagagaagctcccc

SEQ ID NO: 429874 - DNA, 120 bp, Artificial Sequence
  ENSG00000151952_41 (sequence is synthesized)
ccgcaacctgggcatatgtcccacgccgtccgtctttgaagaggctggtctctaggcatgggcggtagtcacggtgaattccataccaggggatatacattcccttgctttactagaaag

SEQ ID NO: 429875 - DNA, 120 bp, Artificial Sequence
  ENSG00000151952_42 (sequence is synthesized)
aaaacagggccacttgggatgggtctttcactgttcatggcagatctcctgtccaaagatgtggcctcgaggctgttgagacaaatcggggtgcctgtgtggaacgtgcagggcgtgtgg

SEQ ID NO: 429876 - DNA, 120 bp, Artificial Sequence
  ENSG00000151952_43 (sequence is synthesized)
agttgggggggttctgggtgtgaaagtggtggatccagcaggaagcccagcctcacacacaccggacagcacagaaaccttcttcatcttggaggtgcgaagggataaggggcatcagtg

SEQ ID NO: 429877 - DNA, 120 bp, Artificial Sequence
  ENSG00000151952_44 (sequence is synthesized)
catgtggtgaagatgcaggtttgcaagcacttggtcctgcagtcagccccgaaaggttcagcattgcttaagaccagccatgactctggatatccctgaatcccttcacttatgaagcct

SEQ ID NO: 429878 - DNA, 120 bp, Artificial Sequence
  ENSG00000151952_45 (sequence is synthesized)
atgaagatgggggcaaggatacatcagagaattcctgcctcatctcacgctcactccaaggtagagaatggtgtgttgggtgattgccagccagataggatcctgcaaaagatggtcggg

SEQ ID NO: 429879 - DNA, 120 bp, Artificial Sequence
  ENSG00000151952_46 (sequence is synthesized)
ggcagcgggtggtgggcagaagaggccgtgctgttgaattgatcttctatttttccctctggtcattttctctctctctctgctcttcagttgtctgttttccagtctctctgtgtgtct

SEQ ID NO: 429880 - DNA, 120 bp, Artificial Sequence
  ENSG00000151952_47 (sequence is synthesized)
gtctctgtatctctctcctcctttgaacctatcttctccctgcttcctctccatctcatctctgtaattttgagtgtgtgtctttactccttcttcctctccatagaattgaattctctt

SEQ ID NO: 429881 - DNA, 120 bp, Artificial Sequence
  ENSG00000151952_48 (sequence is synthesized)
tagatcatgtgtgtgtaaatttcaccagtttaccctcccaaccttagccctctcccctgcaactgtggtgctcttgagactgaggtttctgcagccagtaagtcacctgctcctgtccgc

SEQ ID NO: 429882 - DNA, 120 bp, Artificial Sequence
  ENSG00000151952_49 (sequence is synthesized)
aagcttacctaccttgtttggttgggtgattaagctgtcaccccttttcaatgagaatcctttgctttcagtaacgtcctcatatttctttccattcttacctgtgtcatgttctgttga

SEQ ID NO: 429883 - DNA, 120 bp, Artificial Sequence
  ENSG00000151952_50 (sequence is synthesized)
atactgcagccgctgcccgcttccaaatccatctgcgtgtagaatgtactgtagattgtaagaatgtaatatatatttataaacttactgactgtaaatataaagtttgcattcagtggc

SEQ ID NO: 429884 - DNA, 120 bp, Artificial Sequence
  ENSG00000151952_51 (sequence is synthesized)
cgtttatagataccaaggatgaggatgtggatacctttcggagctattatttagtctcccacactctcccgaagacatgtcccaattcttgtttaggatgaaaactaaaggactcattgc

SEQ ID NO: 429885 - DNA, 120 bp, Artificial Sequence
  ENSG00000151952_52 (sequence is synthesized)
cttcccccaggaaagctaggagacaagacaagagaacaaaatccttacattgaacttgcttcttcccatcagcgctggcatggaggagccctcttgcaccaggtagaagttggcagcctg

SEQ ID NO: 429886 - DNA, 120 bp, Artificial Sequence
  ENSG00000151952_53 (sequence is synthesized)
agctctggagccagacttctggggctaaatcctggctctgcccttcctggtagaggaacataggcaggctcccccactcctgccggcttcctcatctggaatgtgggaatggcagtggtg

SEQ ID NO: 429887 - DNA, 120 bp, Artificial Sequence
  ENSG00000151952_54 (sequence is synthesized)
cctagcgttgtggttgttctgaggatgaaaggaatccgcatgtttggattccctgaaaagcggagcctgtgacgtgcacttgagaacaggtgctttatttggggaatgatctctggaggc

SEQ ID NO: 429888 - DNA, 120 bp, Artificial Sequence
  ENSG00000151952_55 (sequence is synthesized)
agaatgagggagtgagcagcaagacaggacacattttggaaaaccagcaggaggtgcatcattgagctagctcgcatggtgggcaacttctgtgaagtcccatcgagcccctctagggaa

SEQ ID NO: 429889 - DNA, 120 bp, Artificial Sequence
  ENSG00000151952_56 (sequence is synthesized)
ttctgcaggacaggcctcagaatccacccctgtgcctcgtcgagcccctctagggaactctgcaggacgggcctcagaatccaccccgtgcctgcaggggaaagtggtctgcacatgccc

SEQ ID NO: 429890 - DNA, 120 bp, Artificial Sequence
  ENSG00000151952_57 (sequence is synthesized)
tgttgaggacgttctcaggatacacccgcatgggagtgaagacagtagaaggggaagaagaggggctaagcaaggtcaggtccaggtgcagcacagccagctccttgaggagctcttaag

SEQ ID NO: 429891 - DNA, 120 bp, Artificial Sequence
  ENSG00000151952_58 (sequence is synthesized)
aatgagctgtgctgtgcatgggtccctccttgaggcaaacagcctgggcttctcaccccaccaggtagtcactgggcagagaagcggggtgagcaggacataactcccgggtaactctga

SEQ ID NO: 429892 - DNA, 120 bp, Artificial Sequence
  ENSG00000151952_59 (sequence is synthesized)
gggacacagctccactcacctaagggcagtcttctacggaagatgtggcaggagctgtcggcaacacacgcagcccctggggaggagtccaccaacctagccacagggaccccaggaagc

SEQ ID NO: 429893 - DNA, 120 bp, Artificial Sequence
  ENSG00000151952_60 (sequence is synthesized)
ctgggtactcagagagcacctttcataacagcgtctgctattattactcaaaagcaacacccaatgtctgctccataccaggacctcctcccccatagtaaggggaggaaagggaagcac

SEQ ID NO: 429894 - DNA, 120 bp, Artificial Sequence
  ENSG00000151952_61 (sequence is synthesized)
ctccaccagccagggcacttccctttcctcctccttgggccatgcaacgggatgaaagctcacctttccctccccttttctctctcacctcttcacaggtttctgacagatgtgactacg

SEQ ID NO: 429895 - DNA, 120 bp, Artificial Sequence
  ENSG00000151962_0 (sequence is synthesized)
gggaaacgagtggagacacgaggaccagcgcgagcggtcccggtgggctaccctccccctgcgacgaccccccctcgctctgaccgactggtcccctaaacggtggcggcggtttttggt

SEQ ID NO: 429896 - DNA, 120 bp, Artificial Sequence
  ENSG00000151962_1 (sequence is synthesized)
cgttgggccccgggatttaggaccaacatttgaagacccgaaggggaactgcaaccatgaatgaagaaaatatagatggaacaaatggatgcagtaaagttcgaactggtattcagaatg

SEQ ID NO: 429897 - DNA, 120 bp, Artificial Sequence
  ENSG00000151962_2 (sequence is synthesized)
aagcagcattacttgctttgatggaaaagactggttacaacatggttcaggaaaatggacaaaggaaatttggcggtcctcctccaggttgggaaggtccacctccacctagaggctgtg

SEQ ID NO: 429898 - DNA, 120 bp, Artificial Sequence
  ENSG00000151962_3 (sequence is synthesized)
aagtttttgtaggaaaaatacctcgtgatatgtatgaagatgagttagttcctgtatttgaaagagctgggaagatatatgaatttcgacttatgatggaatttagtggtgaaaatcgag

SEQ ID NO: 429899 - DNA, 120 bp, Artificial Sequence
  ENSG00000151962_4 (sequence is synthesized)
gttatgcttttgtgatgtacactacaaaagaagaagcccaattagccatcagaattcttaataattatgaaattcgaccagggaagtttattggtgtgtgtgtaagcctggataattgta

SEQ ID NO: 429900 - DNA, 120 bp, Artificial Sequence
  ENSG00000151962_5 (sequence is synthesized)
gattatttattggagctattcccaaggaaaagaagaaagaagaaattttagatgaaatgaagaaagttacagaaggagttgtagatgtcattgtttatccaagtgcaactgataagacca

SEQ ID NO: 429901 - DNA, 120 bp, Artificial Sequence
  ENSG00000151962_6 (sequence is synthesized)
aaaatcgtggttttgcatttgtggaatatgaatctcacagagctgctgctatggcaaggaggaaactaattccaggaacattccaactatggggccacaccattcaggtagattgggctg

SEQ ID NO: 429902 - DNA, 120 bp, Artificial Sequence
  ENSG00000151962_7 (sequence is synthesized)
acccagagaaagaggtggatgaggaaaccatgcagagagttaaagttctttatgtaagaaatttaatgatctcaactacagaggaaacaattaaagcagaattcaataaatttaagcctg

SEQ ID NO: 429903 - DNA, 120 bp, Artificial Sequence
  ENSG00000151962_8 (sequence is synthesized)
gtgcagttgaacgggtaaagaaacttagagattatgcttttgttcactttttcaaccgagaagatgcagtggctgccatgtctgttatgaatggaaaatgcattgatggagcaagtattg

SEQ ID NO: 429904 - DNA, 120 bp, Artificial Sequence
  ENSG00000151962_9 (sequence is synthesized)
aggtaacactagctaaaccagtaaataaagaaaacacttggagacagcatcttaatggtcagattagtccaaattctgaaaatctgattgtgtttgctaacaaagaagagagccacccaa

SEQ ID NO: 429905 - DNA, 120 bp, Artificial Sequence
  ENSG00000151962_10 (sequence is synthesized)
tctaggcaagctgccaactcttcctgctcgtctcaatggtcagcatagcccaagtccgcctgaagttgaaagatgcacttaccctttttatcctggaacaaagcttactccaattagtat

SEQ ID NO: 429906 - DNA, 120 bp, Artificial Sequence
  ENSG00000151962_11 (sequence is synthesized)
gtattctttaaaatccaatcattttaattctgcagtaatgcatttggattattactgcaacaaaaataactgggcaccaccagaatattatttatattcaacaacaagtcaagatgggaa

SEQ ID NO: 429907 - DNA, 120 bp, Artificial Sequence
  ENSG00000151962_12 (sequence is synthesized)
agtactcttggtgtataagatagttattcctgctattgcaaatggatcccagagttacttcatgccagacaaactctgtactacgttagaagatgcaaaggaactggcagcccagtttac

SEQ ID NO: 429908 - DNA, 120 bp, Artificial Sequence
  ENSG00000151962_13 (sequence is synthesized)
attacttcatttggactacaatttccatcgcagctcaataaatagtctttcccctgttagtgctaccctctcttctgggactcccagcgtgcttccttatacttcaaggccttattctta

SEQ ID NO: 429909 - DNA, 120 bp, Artificial Sequence
  ENSG00000151962_14 (sequence is synthesized)
tccaggctatcctttgtcaccaacaatatcacttgctaatggcagccatgttggacagcggctatgtatctccaatcaggcctccttcttctgaagaaaatactaacattagtatgaaaa

SEQ ID NO: 429910 - DNA, 120 bp, Artificial Sequence
  ENSG00000151962_15 (sequence is synthesized)
tttgtgtaaatttgtagtatgaaaacttgcaaattaaaatattgttttattttagaatcgggtttgcatatttggttttaaaaaggtatttattccaaagtactaaacatcagctataat

SEQ ID NO: 429911 - DNA, 120 bp, Artificial Sequence
  ENSG00000151962_16 (sequence is synthesized)
tcagaataacatggagttgtagaatttataaaaatgcaaagtttaaaaagttattcagtggtttctcttgataaaggtacagcaaactactattctttttaaacttctaggattttcttc

SEQ ID NO: 429912 - DNA, 120 bp, Artificial Sequence
  ENSG00000151962_17 (sequence is synthesized)
tactttctgagtgggcaatagaacctagtcatttatgtttttttttttttttgcataattttactaaatagtatttcacaaatattaaagcacttgaagacaatggttatagtagatttg

SEQ ID NO: 429913 - DNA, 120 bp, Artificial Sequence
  ENSG00000151962_18 (sequence is synthesized)
attaccaaggatcactatctgtactggagattagaacaattatatgaccagaagcatctaaccattatgtaaaaagaaatgatgagacaaaaagattaagatacaaattttgtgcagtac

SEQ ID NO: 429914 - DNA, 120 bp, Artificial Sequence
  ENSG00000151962_19 (sequence is synthesized)
taaagaaaaagcagtctaccattgtggtccttgaaaataactatagatatttttgttatttgttagacacaaattataattttgttgttaatgtatttaagcattttatagttatgcttt

SEQ ID NO: 429915 - DNA, 120 bp, Artificial Sequence
  ENSG00000151962_20 (sequence is synthesized)
gtgtttttgatattctttgtattgttaataacaagtgttatgggtttttaatgttgaaatcatgtgttaatttttgtacttgaattcaaattttttgacattaaatatgtgatgcttcta

SEQ ID NO: 429916 - DNA, 120 bp, Artificial Sequence
  ENSG00000151962_21 (sequence is synthesized)
tgagcttactctcctgcagttgatctcattcctgttggctaaacattaagtcccatgacaacattaagttaatgcacctatggtgtaggcatcatttatagtaccaggacagtattatag

SEQ ID NO: 429917 - DNA, 120 bp, Artificial Sequence
  ENSG00000151962_22 (sequence is synthesized)
aaaaaaaccttacctgtacattagatgacctaatttcttttcttccattcctagaaacaccataatgtttctaaataatgattttatagtcattgtcacacccttggcttattttacact

SEQ ID NO: 429918 - DNA, 120 bp, Artificial Sequence
  ENSG00000151962_23 (sequence is synthesized)
aaagaacatagttgagtttttggaaggtacaggatttaaaaatttggtctgtaatatacacacacacatataaatgttgcagttaatgaaacaggaaattattgatgcataagatgaatg

SEQ ID NO: 429919 - DNA, 120 bp, Artificial Sequence
  ENSG00000151962_24 (sequence is synthesized)
aatgtttattgtgaaacagtatttcaaatgttattttttaataatttggtttaattggatatttttctgtactataagttgataatggttttttgaagtaactataagttgataatggtt

SEQ ID NO: 429920 - DNA, 120 bp, Artificial Sequence
  ENSG00000151962_25 (sequence is synthesized)
taatggttttttgaagtttatttaataaaggtgattcattatactgttttatcataccagtaggacttttaatgttaaatcagtatgttgagttagataagtgtttatattagtatttaa

SEQ ID NO: 429921 - DNA, 120 bp, Artificial Sequence
  ENSG00000151962_26 (sequence is synthesized)
acacgcttacgccgacgaccaacgaccgctgcaggcccgggccgctgcctggccgttgtagggtccgcgcgtcccctggaggctttggacgccgtctggggcgtcccgacggctgggaac

SEQ ID NO: 429922 - DNA, 120 bp, Artificial Sequence
  ENSG00000151962_27 (sequence is synthesized)
actctcacgccgaatacacagtgggggctggcggcggtggctgcggggttcaccctcgtccttccccagccccgtcgagcagtgggagggcaagtgtccgagacgctgcttcctgccccg

SEQ ID NO: 429923 - DNA, 120 bp, Artificial Sequence
  ENSG00000151962_28 (sequence is synthesized)
actgttttttatcttttcttcatggactaccccttagaaccaaatttaaaagaagcttctttgtagagcaagagaaatgagacgttctctttttctataatcaaaactccaagaaatagt

SEQ ID NO: 429924 - DNA, 120 bp, Artificial Sequence
  ENSG00000151962_29 (sequence is synthesized)
agatatccaagaattcattctggtaagatctctgaaacattgcgtgagtaaaggaaaggtaatactgacaaaactctcaggatttgcagtgcagtgaatgctgaaataatctttaaccag

SEQ ID NO: 429925 - DNA, 120 bp, Artificial Sequence
  ENSG00000151962_30 (sequence is synthesized)
caatatagtatcatcaagatttccagtgttagaacattatgttaaaatgtgattattgtttaatgctttgtctctttaaattaaatttgtgtccataaagatgtacagcataattgttca

SEQ ID NO: 429926 - DNA, 120 bp, Artificial Sequence
  ENSG00000151967_0 (sequence is synthesized)
ttttctttgtgcctataatataattggctgattgtgcgggtgatgagcgccccctcccccagcccggtcccagctccatgttcctaagcctgcctcactggtttcggagggctggagagc

SEQ ID NO: 429927 - DNA, 120 bp, Artificial Sequence
  ENSG00000151967_1 (sequence is synthesized)
agctcagctcgctagctgcgcgcttcccggcacaggcagtgccactgcgcaggttgatcagcgaaacagcatccattttaatctgcggggagcccctgccttaccagggcgttctctccg

SEQ ID NO: 429928 - DNA, 120 bp, Artificial Sequence
  ENSG00000151967_2 (sequence is synthesized)
cccgccggtggatgctccgcgcctgccctccgcagcctcgctcagcagtcctgcgttggggtctgcgccctaggatgcactgagatggtacatcaggataactgctcgtatcaggcacag

SEQ ID NO: 429929 - DNA, 120 bp, Artificial Sequence
  ENSG00000151967_3 (sequence is synthesized)
aaaaatgagagagagtctatcagacagaagttggcacttggaagcttctttgatgatggcccaggaatttataccagctgtagcaaaagtgggaagccaagcctttcctcccgactgcag

SEQ ID NO: 429930 - DNA, 120 bp, Artificial Sequence
  ENSG00000151967_4 (sequence is synthesized)
agtgggatgaacttgcagatatgctttgtcaacgacagtggcagtgataaggacagtgatgctgatgacagtaagactgaaaccagcttggacacccccttgtctcccatgagcaaacag

SEQ ID NO: 429931 - DNA, 120 bp, Artificial Sequence
  ENSG00000151967_5 (sequence is synthesized)
agttcttcctattctgatagagacactactgaagaggagtctgaatccttggatgacatggacttccttacaaggcaaaagaaattgcaagctgaagccaaaatggcccttgccatggcc

SEQ ID NO: 429932 - DNA, 120 bp, Artificial Sequence
  ENSG00000151967_6 (sequence is synthesized)
atataagtgaatgcttgatgaaaagaagtttaaaacccaccgacctgagagacatgactattgggcagctacaagtgatagtcaatgatctccattcccagatagaaagcttgaatgaag

SEQ ID NO: 429933 - DNA, 120 bp, Artificial Sequence
  ENSG00000151967_7 (sequence is synthesized)
agttggtccagctgcttctcatccgagatgagctgcacacagagcaggatgccatgctggtggacattgaagacttgaccagacatgctgaaagtcagcagaagcacatggcagagaaaa

SEQ ID NO: 429934 - DNA, 120 bp, Artificial Sequence
  ENSG00000151967_8 (sequence is synthesized)
tgcctgcaaagtgaaaagaagccattcaaccagagaacaagctagaatttattttgcttctgtggttgtaaaaatgctgttgctaaaggtggcgcagaaacaaatatcagtgttagtcat

SEQ ID NO: 429935 - DNA, 120 bp, Artificial Sequence
  ENSG00000151967_9 (sequence is synthesized)
tgataatgtctgaagcttaatgtccagtgattggcctttgcttcttaatttattttaattttttacttgtgccacttaatatcaggcattttaataaaatattgttacaaaaaatgtaca

SEQ ID NO: 429936 - DNA, 120 bp, Artificial Sequence
  ENSG00000151967_10 (sequence is synthesized)
gtactgacaccaccacaaatcatggttaataaaagagagtagttttaactttatttttatttgtttagagattttaagttggaacagtattttcccattgactacttttcattcttcact

SEQ ID NO: 429937 - DNA, 120 bp, Artificial Sequence
  ENSG00000151967_11 (sequence is synthesized)
gtagttttaaagaagaactgtaaatgacggtgctatacaagtcaaaaaatacatgcctgcctcgtagtgaagttgtagctctccgtaatatgtatattttactcagttttcaacattttg

SEQ ID NO: 429938 - DNA, 120 bp, Artificial Sequence
  ENSG00000151967_12 (sequence is synthesized)
tgaatgttgactacctgaagttcctttttagatgtgctattaacattctgttggattcagagggttccttgaaagttttatgtataaatatgtaaaataaaaattaaaactttgtttcat

SEQ ID NO: 429939 - DNA, 120 bp, Artificial Sequence
  ENSG00000151967_13 (sequence is synthesized)
agattgctagtttcctcacagagctccagtccacactcggccctgaacgcggagttgaatcagctggctgaagctgagtgcctctcttttcctttcttgggaacaggaaaggtgctgtgg

SEQ ID NO: 429940 - DNA, 120 bp, Artificial Sequence
  ENSG00000151967_14 (sequence is synthesized)
agaggaattggggcgggatcattcaggggaaggtgacagcagatggtgggaaggccggagtcagcaagccaagtgtcaggggcagagtgagcctcagaaaacagcagctgcccggtgcca

SEQ ID NO: 429941 - DNA, 120 bp, Artificial Sequence
  ENSG00000151967_15 (sequence is synthesized)
gagcaaggaaaggccagggaggctgggcggggcagtgtctgtgggacagagtggggcaagaacacacacggccgggcacagcctcttagccagctctccatgtcagtatgagcagtaacc

SEQ ID NO: 429942 - DNA, 120 bp, Artificial Sequence
  ENSG00000151967_16 (sequence is synthesized)
agggaactgggcaattggcacatcagcctatcagaattcatgggaggttatttcttaagtgaaattctaaagagttaaaggatgaatttggacagtgatggaatggatgacatcatcagt

SEQ ID NO: 429943 - DNA, 120 bp, Artificial Sequence
  ENSG00000151967_17 (sequence is synthesized)
ggaaaaagtctcccgtcgctgatcttgtaagcagcaaaggctgaaatgcaaggaagtgtttgggagccagaaatggttgacactgtcccagtcctttcccagaattatgcaaacttgtgt

SEQ ID NO: 429944 - DNA, 120 bp, Artificial Sequence
  ENSG00000151967_18 (sequence is synthesized)
ttctctaaggcggtttgtaaaaagtcctgtcattgagaaatgattaagtttgtttctttttccttcctactgtaggactgaaaaatacagaagcaatagatttcacaaaagtaaagtttg

SEQ ID NO: 429945 - DNA, 120 bp, Artificial Sequence
  ENSG00000151967_19 (sequence is synthesized)
cagctgaagctcggtgttgtgatttccgggccatttagcttcttttctgttgtaaggtgaatcaggaacaaacatttcagagattaaagaagaaaagtttcttggaattgcatgctccta

SEQ ID NO: 429946 - DNA, 120 bp, Artificial Sequence
  ENSG00000151967_20 (sequence is synthesized)
aaatttgacaatgattaaaaagtcaaagttgtaataaaatagagatatataagctttcttaaagttaataactattttcatattaaaccattagagaaatcaccagcctgggcaacatgg

SEQ ID NO: 429947 - DNA, 74 bp, Artificial Sequence
  ENSG00000151967_21 (sequence is synthesized)
atggcaaaaccctgtctctataaaaaaatacaaacattagctgatcatgctgagcccaggagttcaaggctgca

SEQ ID NO: 429948 - DNA, 120 bp, Artificial Sequence
  ENSG00000151967_22 (sequence is synthesized)
gctatgatgacacctctgcactccagccggggcaacatagtgagaccctgtctctaacgagagagagtgtattagttcattttcatgttgccgataaagacatatccaagactgggcaat

SEQ ID NO: 429949 - DNA, 77 bp, Artificial Sequence
  ENSG00000151967_23 (sequence is synthesized)
ggctaatgaggccttgttttaaaaccatcatatctggtgagactcattcactatcacaagaacagtacaggaaagac

SEQ ID NO: 429950 - DNA, 120 bp, Artificial Sequence
  ENSG00000151967_24 (sequence is synthesized)
tgagactcattcactatcacaagaacagtacaggaaagacccacccccataattcaattacctcccactgggttcctgccacgacacatgggaattgtgggagttacaattcaggatgag

SEQ ID NO: 429951 - DNA, 120 bp, Artificial Sequence
  ENSG00000151967_25 (sequence is synthesized)
atttgggtgggtacacagccaaaccatatcagagagagagagagaaattagatatgctctaaaaattataaagagaaaataagctaaatccagttcttccctattgggcttagaaatatt

SEQ ID NO: 429952 - DNA, 120 bp, Artificial Sequence
  ENSG00000151967_26 (sequence is synthesized)
agctcatgtctttccttcccattacagaagttggctgaataatcatgggtgcctgttgctggaattctttcctctctgtgaggtctgtctatagccttttttaccaaagaccaacaaaga

SEQ ID NO: 429953 - DNA, 120 bp, Artificial Sequence
  ENSG00000151967_27 (sequence is synthesized)
ggaaactgttgtcgttgagtgcagtgcgacatcagaacatcactggatacatgagatcctgtccacgcaaagaacctacgtagggccttggcttcgagtcaatattttgttatgtctgtt

SEQ ID NO: 429954 - DNA, 120 bp, Artificial Sequence
  ENSG00000151967_28 (sequence is synthesized)
cacttcaggaaagttttgaggccaagaatcaaagacatatttcaaggttgttgtaaatatatttcccattattaactatactgctctctctgtttatgctaaaatctattttaaactaga

SEQ ID NO: 429955 - DNA, 120 bp, Artificial Sequence
  ENSG00000151967_29 (sequence is synthesized)
ccctttttctgttacttgagatttatcaactcaagtagcaagtcacattgagggagggaactctgagctgctctgagagaaggctcagaggatgttgtagcccatctctaagtggatgct

SEQ ID NO: 429956 - DNA, 120 bp, Artificial Sequence
  ENSG00000151967_30 (sequence is synthesized)
tcttagcaacaatattagctgccacgggaatatttaaattcctttgaagcgatctcaatctaagaacctattggtcttggcaaacttactattgctataattgtcattctcatatttcaa

SEQ ID NO: 429957 - DNA, 120 bp, Artificial Sequence
  ENSG00000151967_31 (sequence is synthesized)
taaagacaatatcacatagtgaataggagtcctggactttggagtttaagtctagctctgccattgacctgctatgaagttctaagcaagttacttaagtctcagttttctcatctataa

SEQ ID NO: 429958 - DNA, 120 bp, Artificial Sequence
  ENSG00000151967_32 (sequence is synthesized)
aatggggatgataatgcctgtgtcagagtatgattgtgaggattcagtgagataaagtattcaaagcacatagcacagtgcttgtagcatggtataaattattaaatagtagctgatact

SEQ ID NO: 429959 - DNA, 120 bp, Artificial Sequence
  ENSG00000151967_33 (sequence is synthesized)
caacccatattaaagacgagtcaaaaagcttttgatgctggtagtgttgtgttttgatgccagttgcatattaggtaatgtagtgtggatgtagggccccacattgggaaagacacagac

SEQ ID NO: 429960 - DNA, 120 bp, Artificial Sequence
  ENSG00000151967_34 (sequence is synthesized)
tgggaaagcttttaatcactgaattgcagtgggtgggtgagtgggtcttttaagagaaaactgggtcttaacgttcagtgtgtttgtggctctgttcactcctccatttcttctcctttg

SEQ ID NO: 429961 - DNA, 120 bp, Artificial Sequence
  ENSG00000151967_35 (sequence is synthesized)
cactcttgccaaagaagaaaagcccagggtggtctgaaatctaagaattaggcaaaaactagctcaagagaacttcttcctctacttccataaataactcacctagccttttctggtgcc

SEQ ID NO: 429962 - DNA, 120 bp, Artificial Sequence
  ENSG00000151967_36 (sequence is synthesized)
agctgttcagatggaggggaagcagaattccattgtccttaccaaatgcatgctttttagcaaccatcccccccttgtgatgaattgtcagtgcattacttctcacatctccgcctaaat

SEQ ID NO: 429963 - DNA, 120 bp, Artificial Sequence
  ENSG00000151967_37 (sequence is synthesized)
caggtctagttctggttttggaggactttaccttgaaggactgtcccctgggaagctgggcataagccatgtcatgctggcatgtttccagcacaagcagccatgtgatgagttctccaa

SEQ ID NO: 429964 - DNA, 120 bp, Artificial Sequence
  ENSG00000151967_38 (sequence is synthesized)
agcacaagctcttgtatgatccagttcttgatcgcctctgccatgcccagaaggcagggacactggcatctctctacagccacagtgccaccagattgttctcaccatggggaaactcca

SEQ ID NO: 429965 - DNA, 120 bp, Artificial Sequence
  ENSG00000151967_39 (sequence is synthesized)
ggacttgagtttttagctgggctttgctccaactgcctctttgtaaagaggtaaaaagaatgcttccctccctaggggacaaggaaactaggctaatgctggtcaaaattttgcacttct

SEQ ID NO: 429966 - DNA, 120 bp, Artificial Sequence
  ENSG00000151967_40 (sequence is synthesized)
ttgtagatttccttgcaggaaagcatgtcactgtaagtatataaagtacctggaatactgtaaacattcctatgagcacatatttactatggcatcttttctgagacagtccatatggaa

SEQ ID NO: 429967 - DNA, 120 bp, Artificial Sequence
  ENSG00000151967_41 (sequence is synthesized)
tctttaaaccaacagacagtaattgctattaatcccagaaacagtatttagagagtagaaggctctccaaagaaggaacacctcttggcacaatgatgtaaggagttaaccacatggtct

SEQ ID NO: 429968 - DNA, 120 bp, Artificial Sequence
  ENSG00000151967_42 (sequence is synthesized)
acaacaatcccagagaagctcgaaaacatatgtagtgataataatgctcccagcacctaccatagacctcatctcaatgtgtaatgctgggtaaaataattgtctaatgctgcaatgata

SEQ ID NO: 429969 - DNA, 120 bp, Artificial Sequence
  ENSG00000151967_43 (sequence is synthesized)
taaaaaatagttttggtagcaaaataaatgctggaaaaatatgtttaagctttcttttttaagacttacgggcagcactgttttgtatgttttacatattatattgccttatccctagcc

SEQ ID NO: 429970 - DNA, 120 bp, Artificial Sequence
  ENSG00000151967_44 (sequence is synthesized)
aaaaacaaaacaaaacagtaagccttctcatactctttgaacatatttgcctgcatctgaaatatcacaataacactcaaataatattattgccatctaaagatgtattcaggcactaca

SEQ ID NO: 429971 - DNA, 120 bp, Artificial Sequence
  ENSG00000151967_45 (sequence is synthesized)
ccaccagcaattataaaacatcccttttttgttagtttaagaagtttgcatgcaggtgttaagattatgggaaatcggtggtgaaatatacaatcagggcctacatttttttaaaaaaat

SEQ ID NO: 429972 - DNA, 120 bp, Artificial Sequence
  ENSG00000151967_46 (sequence is synthesized)
atataaattcttgtaaactatgatttacctgtgacagcagagatcttttctctgtctctcagaatagtattgtcatttcttttttggcaagaagaagaggcccctcctcttctctctaag

SEQ ID NO: 429973 - DNA, 120 bp, Artificial Sequence
  ENSG00000151967_47 (sequence is synthesized)
tgttaggctaatacttaggtttgcagtgtatgtttttataactttcagatggtgtgaccatcggaaacagggcaggcaaaaccatggagttaaaaggagaggagtcactaatttaaaggt

SEQ ID NO: 429974 - DNA, 120 bp, Artificial Sequence
  ENSG00000151967_48 (sequence is synthesized)
gttggaggcattctttgaattggagcagtcctaccatgggccccaggggcatgatgtccttgcctagcctgcctcttggtgggaagaagcttctacatctgctcttggctgcagaaaagt

SEQ ID NO: 429975 - DNA, 120 bp, Artificial Sequence
  ENSG00000151967_49 (sequence is synthesized)
aactttcctcattggagggacctgaggatacttaaacatccctaaaggcagcagccccagagtcctgcagccagatctcagaaggcggagggggtggctgtggggactgctgggacatgt

SEQ ID NO: 429976 - DNA, 120 bp, Artificial Sequence
  ENSG00000151967_50 (sequence is synthesized)
ggtccacctcttccctttacctgtacaactcctactattccagatgtccattcaaatcagtagttctcaatttgggttgcacaacagaaccatgtggggaggcttataaaatagtgatgc

SEQ ID NO: 429977 - DNA, 120 bp, Artificial Sequence
  ENSG00000151967_51 (sequence is synthesized)
ctggatcctaccccagatattcttatttaattatccttgtgggctagcgtgggcatgagaatttttttaaagctctgagataattctcacgcacagccaaatttgagaaccacaggtttg

SEQ ID NO: 429978 - DNA, 120 bp, Artificial Sequence
  ENSG00000151967_52 (sequence is synthesized)
gatgatgcttctttggagaagccctccctgacctccaaacacttggctctttagcattcattctccccttatatggactgtcagtgcattaaacttattacacctccatgtaaatcagga

SEQ ID NO: 429979 - DNA, 120 bp, Artificial Sequence
  ENSG00000151967_53 (sequence is synthesized)
ctgttcccaagggagttgaccctggtgtgtcagggtcattccatgctggcatgtttccagaacatgaacagccatgtcgtgggtctacaaaacagcaccagcaattatgtgacctgcttt

SEQ ID NO: 429980 - DNA, 120 bp, Artificial Sequence
  ENSG00000151967_54 (sequence is synthesized)
cgatcataagactgtgttaagaccttctcctcagtgttcctaacaacatcgcatctctgtcatgtggagcctagtggcactgtgttttatttgtctgctgtctctcccaacgtgactatg

SEQ ID NO: 429981 - DNA, 120 bp, Artificial Sequence
  ENSG00000151967_55 (sequence is synthesized)
aattccctgaaaacagaggtgatgtcattttcattctttactgtgtccccagagcctagcacagggcctgccaggcacattgtaagccctcaatagcaattgttgttttaaaaaaaaaaa

SEQ ID NO: 429982 - DNA, 65 bp, Artificial Sequence
  ENSG00000151967_56 (sequence is synthesized)
ctccacctcccgggttccagcgattctcccaccttagcctcctgagtagctgagattacacgcgt

SEQ ID NO: 429983 - DNA, 120 bp, Artificial Sequence
  ENSG00000151967_57 (sequence is synthesized)
tcttgaagacaaggggccttctttaaattttcacaagtctctgccttatacacagagtatgtgttcaataaatgtttgttggattgaattgcactttatgcaattgttgatgttctgagt

SEQ ID NO: 429984 - DNA, 120 bp, Artificial Sequence
  ENSG00000151967_58 (sequence is synthesized)
ccctaggatcagggtttcccatcgtaaccccagagataagctcagatccatacgttgtaacaaggagttggtgaagctgacctcagaagtccatgtacctggcttctcagcctcttggcc

SEQ ID NO: 429985 - DNA, 120 bp, Artificial Sequence
  ENSG00000151967_59 (sequence is synthesized)
agttgcccgcactttaaacatctcatgtgccagaattgggggtgcagtgcaaggcacaaaataaatgaatgactgggatgcacagacattccagccttcccagagacaatgcattaagaa

SEQ ID NO: 429986 - DNA, 120 bp, Artificial Sequence
  ENSG00000152034_0 (sequence is synthesized)
agaaaagagcacgacgcacccgatgctcggattggatgaagtggcaaaggtaaccccgctggttcgggcgtttggctgttcctgtgcctggacccccgctttggaaatggaggtggggct

SEQ ID NO: 429987 - DNA, 120 bp, Artificial Sequence
  ENSG00000152034_1 (sequence is synthesized)
ggctcccaacctgtctcagagaccctcgcactcctcccccaccttccgtcagctgggacccgctgagagccgtttttggtcacgcgcgcttagcggatagacctgcagtcccgcagagag

SEQ ID NO: 429988 - DNA, 120 bp, Artificial Sequence
  ENSG00000152034_2 (sequence is synthesized)
gaagggcgcccgggctgtccgccgcgcggggaggacgcgagcacccagctttaatccctggaaagtccacgaacaatgaatccatttcatgcatcttgttggaacacctctgccgaactt

SEQ ID NO: 429989 - DNA, 120 bp, Artificial Sequence
  ENSG00000152034_3 (sequence is synthesized)
ttaaacaaatcctggaataaagagtttgcttatcaaactgccagtgtggtagatacagtcatcctcccttccatgattgggattatctgttcaacagggctggttggcaacatcctcatt

SEQ ID NO: 429990 - DNA, 120 bp, Artificial Sequence
  ENSG00000152034_4 (sequence is synthesized)
gtattcactataataagatccaggaaaaaaacagtccctgacatctatatctgcaacctggctgtggctgatttggtccacatagttggaatgccttttcttattcaccaatgggcccga

SEQ ID NO: 429991 - DNA, 120 bp, Artificial Sequence
  ENSG00000152034_5 (sequence is synthesized)
gggggagagtgggtgtttggggggcctctctgcaccatcatcacatccctggatacttgtaaccaatttgcctgtagtgccatcatgactgtaatgagtgtggacaggtactttgccctc

SEQ ID NO: 429992 - DNA, 120 bp, Artificial Sequence
  ENSG00000152034_6 (sequence is synthesized)
gtccaaccatttcgactgacacgttggagaacaaggtacaagaccatccggatcaatttgggcctttgggcagcttcctttatcctggcattgcctgtctgggtctactcgaaggtcatc

SEQ ID NO: 429993 - DNA, 120 bp, Artificial Sequence
  ENSG00000152034_7 (sequence is synthesized)
aaatttaaagacggtgttgagagttgtgcttttgatttgacatcccctgacgatgtactctggtatacactttatttgacgataacaactttttttttccctctacccttgattttggtg

SEQ ID NO: 429994 - DNA, 120 bp, Artificial Sequence
  ENSG00000152034_8 (sequence is synthesized)
tgctatattttaattttatgctatacttgggagatgtatcaacagaataaggatgccagatgctgcaatcccagtgtaccaaaacagagagtgatgaagttgacaaagatggtgctggtg

SEQ ID NO: 429995 - DNA, 120 bp, Artificial Sequence
  ENSG00000152034_9 (sequence is synthesized)
atgtgggttattacctctccatctgtctcagctatgccagcagcagcattaacccttttctctacatcctgctgagtggaaatttccagaaacgtctgcctcaaatccaaagaagagcga

SEQ ID NO: 429996 - DNA, 120 bp, Artificial Sequence
  ENSG00000152034_10 (sequence is synthesized)
ctgagaaggaaatcaacaatatgggaaacactctgaaatcacacttttaggaaagtacatggatcaccatgagtctagacatgattgtctatcttactggtattatcagaaagggcaggt

SEQ ID NO: 429997 - DNA, 120 bp, Artificial Sequence
  ENSG00000152034_11 (sequence is synthesized)
gtaccgatatgtttatgcccattcttcttgtgtacttgtgactcttagcagcatggaagagaagtgtaaccatgcaaatacaatgagcttaatatgctaactttagcaagatgtaaaatg

SEQ ID NO: 429998 - DNA, 120 bp, Artificial Sequence
  ENSG00000152034_12 (sequence is synthesized)
ttgatctatattgtgggtagggaatgggatagtctgagatacccaggcttcatgatggtgtatattatttcagcatattataaactagtcactaatgaaaatggccatccatgaccattg

SEQ ID NO: 429999 - DNA, 120 bp, Artificial Sequence
  ENSG00000152034_13 (sequence is synthesized)
actcaaaactcaccaaggaacctgaccttgccctccacactgtggcctcactgtaacagtttcctcaaggttcctaggagggtatcaccttagagtgaagtctaaaatttggctattttt

SEQ ID NO: 430000 - DNA, 120 bp, Artificial Sequence
  ENSG00000152034_14 (sequence is synthesized)
tatctataaaaaatgtcagttttatatggtccaatactaataccctcaacaactaagccccaccttttagaataagttaccatttattgcacacatgcaatgtgtaagattacatgtaac

SEQ ID NO: 430001 - DNA, 120 bp, Artificial Sequence
  ENSG00000152034_15 (sequence is synthesized)
aaacctgtgaaataagtattattacctttgtttgctaaggctcagaaaggagaaatgataggcctaatgctgcaacagctatctaagagctgagctaacattcagctctgcctgtttctt

SEQ ID NO: 430002 - DNA, 120 bp, Artificial Sequence
  ENSG00000152034_16 (sequence is synthesized)
ttctactgcacgaccttgacaacctttacttatcatactggagaacccagtaacttggagtttcttttgctttctcctgtagccctacaagaggagaactaaagtctgatagaaatgagt

SEQ ID NO: 430003 - DNA, 120 bp, Artificial Sequence
  ENSG00000152034_17 (sequence is synthesized)
tgatgttttaagcatcattttggattatctttgttctcacacctgctaactgtagaaactggcatctgcactttaataataatactttacttctggactttaagcataattaggaaacat

SEQ ID NO: 430004 - DNA, 120 bp, Artificial Sequence
  ENSG00000152049_0 (sequence is synthesized)
attatgggattcagctgcctctgaaaacctgtagcccaataatggttattccccaggagccgcgcgaagcatgagctaattttcagtgagcgcggactttggggtaacggttccagcaca

SEQ ID NO: 430005 - DNA, 120 bp, Artificial Sequence
  ENSG00000152049_1 (sequence is synthesized)
gcacatccctttctcctcttttcactcatcgtcaccgctacctgaaaaccctggccgggtgctggggcttgaggagcagttcccacttcccagtctttttcacttttcacagctgcaaag

SEQ ID NO: 430006 - DNA, 120 bp, Artificial Sequence
  ENSG00000152049_2 (sequence is synthesized)
ttcagggagttgaactgcagtgctttcagttcactgctcactctgccacgatcaatctctgttgtaaattttcctcccagagcacgtgacgatgcacttcttgactatatatcccaactg

SEQ ID NO: 430007 - DNA, 120 bp, Artificial Sequence
  ENSG00000152049_3 (sequence is synthesized)
cagcagcggagttgtcagagcgcagagccggacagagcagaagaaccctcttggactggacgatttgggaattcaaaacttgggacaaactgtcagccttgcccctgctgtggaggcagc

SEQ ID NO: 430008 - DNA, 120 bp, Artificial Sequence
  ENSG00000152049_4 (sequence is synthesized)
ctcaatgctgaaaatggagcctctgaacagcacgcaccccggcaccgccgcctccagcagccccctggagtcccgtgcggccggcggcggcagcggcaatggcaacgagtacttctacat

SEQ ID NO: 430009 - DNA, 120 bp, Artificial Sequence
  ENSG00000152049_5 (sequence is synthesized)
tctggttgtcatgtccttctacggcattttcttgatcggaatcatgctgggctacatgaaatccaagaggcgggagaagaagtccagcctcctgctgctgtacaaagacgaggagcggct

SEQ ID NO: 430010 - DNA, 120 bp, Artificial Sequence
  ENSG00000152049_6 (sequence is synthesized)
ctggggggaggccatgaagccgctgcctgtggtgtcgggcctgaggtcggtgcaggtgcccctgatgctgaacatgctgcaggagagcgtggcgcccgcgctgtcctgcaccctctgttc

SEQ ID NO: 430011 - DNA, 120 bp, Artificial Sequence
  ENSG00000152049_7 (sequence is synthesized)
catggaaggggacagcgtgagctccgagtcctcctccccggacgtgcacctcaccattcaggaggagggggcagacgatgagctggaggagacctcggagacgcccctcaacgagagcag

SEQ ID NO: 430012 - DNA, 120 bp, Artificial Sequence
  ENSG00000152049_8 (sequence is synthesized)
cgaagggtcctcggagaacatccatcagaattcctagcacccccgggacccctgccggtggctccatcagccagcaaccttagagagaggaaagacagttttcaagtgtctggtttcact

SEQ ID NO: 430013 - DNA, 120 bp, Artificial Sequence
  ENSG00000152049_9 (sequence is synthesized)
ttcacagtgcggctgccactttgaagagacccttggtaaacccctgattcggggtggggtgggggactaggctcagccggaaccagcacctccaaggagtccgggaggtgcctgtggttt

SEQ ID NO: 430014 - DNA, 120 bp, Artificial Sequence
  ENSG00000152049_10 (sequence is synthesized)
gcacccaccactgaaaaagccgcggagatgcgcagcgcgtacactgactttggggcctgggtgttggggttctgatcagaatttggcgggatgatatgtttgccattttctcactggatg

SEQ ID NO: 430015 - DNA, 120 bp, Artificial Sequence
  ENSG00000152049_11 (sequence is synthesized)
ccctgggtagctcctgcagggtctgcctgttcccagggctgccgaatgcttaggacacgctgagagactagttgtgatttgctattttgcctagagctttgtccttctagatctgattgg

SEQ ID NO: 430016 - DNA, 120 bp, Artificial Sequence
  ENSG00000152049_12 (sequence is synthesized)
ctgtaagtatctctactgtgtacctgtggcattccttcacagtgggttacaagcttcttttggattagagggggatttttgatgggagaaagctggagatctgaacccagcccatttgca

SEQ ID NO: 430017 - DNA, 120 bp, Artificial Sequence
  ENSG00000152049_13 (sequence is synthesized)
ataagagatgatcttctattttgaccttttgtctaacttatgaccttgaactctgacctgtgaccatgcagcatcacatgatggcatgacgttctttggatcagaagagcttccccagaa

SEQ ID NO: 430018 - DNA, 120 bp, Artificial Sequence
  ENSG00000152049_14 (sequence is synthesized)
tctaacctgcactcccgatggtggttcaggagactcttcctgatctttctagaaggggtaaagtggggttgaacaaggccaagccgttagctctgctgctgctcagtttcccagcctagt

SEQ ID NO: 430019 - DNA, 120 bp, Artificial Sequence
  ENSG00000152049_15 (sequence is synthesized)
tttctgagctgggagaggacataatgtggtatttcgtcacgtagctgagacctagaagggcatactcaggcggagattgcacaaagctgggctccaagttctgtgcttcctgatcccgag

SEQ ID NO: 430020 - DNA, 120 bp, Artificial Sequence
  ENSG00000152049_16 (sequence is synthesized)
ccctgacactcatttgctgtgtggtcccgggcatgtcatcaagaagctcgctgtctgcatgaggctcccgacgatctccatccccagggggttgggaggatgtctttagattttaggact

SEQ ID NO: 430021 - DNA, 120 bp, Artificial Sequence
  ENSG00000152049_17 (sequence is synthesized)
ctgtgataaatattccacagcctggtgtgaggaagcttggaccaaatgcttcccctttggccggttagtctgaacaaggatctgctgatttaaaggagcagttggagattcagaacacat

SEQ ID NO: 430022 - DNA, 120 bp, Artificial Sequence
  ENSG00000152049_18 (sequence is synthesized)
ataactggggaattcagggcaagctaccaacccagccctgctgtagttttcccaggactgaaggaaagaggcagacaccacattctcctctgcaaagttctctggagaatgtgtgatgtt

SEQ ID NO: 430023 - DNA, 120 bp, Artificial Sequence
  ENSG00000152049_19 (sequence is synthesized)
aacactcccagctaagggaaagcaaagtctaaaggaaaacacacaggaatgcttccaatgtctccaagtattcctgtggtcaacagtttcgcagatccgttaggcccttaaagacaagga

SEQ ID NO: 430024 - DNA, 120 bp, Artificial Sequence
  ENSG00000152049_20 (sequence is synthesized)
cccttaaagacaaggaggaagtaaaaggtcaaatttaaatctatttaaaaaaacttttaaaaaaattatttatttattattattttttatttttaagacagaatctcgctctgttgccca

SEQ ID NO: 430025 - DNA, 120 bp, Artificial Sequence
  ENSG00000152049_21 (sequence is synthesized)
actttttttttttttaaagaaaaatgctctgcatggattggagacacagcaataactactgttgccatggaagggttaacagtgtaggagctggtttatcagtccgctttgacatacagc

SEQ ID NO: 430026 - DNA, 120 bp, Artificial Sequence
  ENSG00000152049_22 (sequence is synthesized)
taaaggaaatttatgtttgggggaaaaaggccctctgttcactttaaaattcagtgtggacttatgccaaagggggctgtttaagttgaaagaagccaagttaagtttggcctcttgcct

SEQ ID NO: 430027 - DNA, 120 bp, Artificial Sequence
  ENSG00000152049_23 (sequence is synthesized)
ggaatcacttgaattctgaaatttcactgcgacggacatgtgccttgtcacattttccattgcttaatcctgaagtttggtgcaagtctctctgcacctattaaaaagtgatgtatatac

SEQ ID NO: 430028 - DNA, 120 bp, Artificial Sequence
  ENSG00000152049_24 (sequence is synthesized)
ttccttcttattctgttgagttgtatagaattgtcttttgtatttaacactttgtaattttcacaatattttttaatttaaataaataaacacattttttccctcctgggaagtcatgaa

SEQ ID NO: 430029 - DNA, 120 bp, Artificial Sequence
  ENSG00000152049_25 (sequence is synthesized)
gccggacagagcagaagaaccctcttggactggacgatttgggaattcaaaacttgggacaaactgtcagccttgctccagcgccagagtggttcacattcaaccctcctcccccagtgc

SEQ ID NO: 430030 - DNA, 120 bp, Artificial Sequence
  ENSG00000152049_26 (sequence is synthesized)
agagagctcccacgactgatgactcctgaaggaaaaccctggaggttcagctttagcttgaggtttcagggcttccgaggcaatcgggcagcatcagtcttcagccactaagctgagaag

SEQ ID NO: 430031 - DNA, 83 bp, Artificial Sequence
  ENSG00000152049_27 (sequence is synthesized)
ggaggtgggctgatagcacaagcattggagaccagaatcaagagctaccatacagttgggaaaactggctagccatatgcaga

SEQ ID NO: 430032 - DNA, 120 bp, Artificial Sequence
  ENSG00000152056_0 (sequence is synthesized)
attgtgggaagcagccatggtctaagccgggcgcctcacctgtcagccgcaccggctccagcgctcgcctctcgccctcgcttctccagcgctccttgctcgcaaggcgggggaggcggc

SEQ ID NO: 430033 - DNA, 120 bp, Artificial Sequence
  ENSG00000152056_1 (sequence is synthesized)
ggcccagccacgatgatacatttcatattgctcttcagtcgacaagggaaattacggctacagaaatggtacatcactctccctgataaagagaggaagaagatcacccgggaaattgtt

SEQ ID NO: 430034 - DNA, 120 bp, Artificial Sequence
  ENSG00000152056_2 (sequence is synthesized)
cagattattctctcccgtggtcacaggacaagcagttttgttgactggaaggagctaaaacttgtttataaaaggtatgctagtttatatttttgctgtgcaatagaaaatcaggacaat

SEQ ID NO: 430035 - DNA, 120 bp, Artificial Sequence
  ENSG00000152056_3 (sequence is synthesized)
gagctcttgacgctagagattgtgcatcgttacgtggagctgctggacaaatattttggaaatgtctgtgagctggatattatctttaattttgaaaaggcttatttcatcctggacgag

SEQ ID NO: 430036 - DNA, 120 bp, Artificial Sequence
  ENSG00000152056_4 (sequence is synthesized)
tttataataggtggggaaattcaggaaacatccaagaaaattgctgtcaaagccattgaagactctgatatgttacaggagacaatggaagaatacatgaacaagcctacattttaactg

SEQ ID NO: 430037 - DNA, 120 bp, Artificial Sequence
  ENSG00000152056_5 (sequence is synthesized)
gaaatctacttgaagactccagcactacatgttatgaagctgtaaataagcaacgcctcccatccggttttttgatggagcctcaggcaccatgccaaaaataatttaaagggattcttt

SEQ ID NO: 430038 - DNA, 120 bp, Artificial Sequence
  ENSG00000152056_6 (sequence is synthesized)
ctttgttaactaacaaagttaaagttgtttaacatatttataattactatgtgtctgtattattaaaaaaaattatgtgtctgtgttatactgtataggtacttgtagctctaaatgttt

SEQ ID NO: 430039 - DNA, 120 bp, Artificial Sequence
  ENSG00000152056_7 (sequence is synthesized)
taactaccacctaacccaacagacaatatttgtaatgtattaactccatgttatgtttttaagctggtttagatacattagctgcaattttttttgcatttgacacaatattgtaataat

SEQ ID NO: 430040 - DNA, 120 bp, Artificial Sequence
  ENSG00000152056_8 (sequence is synthesized)
aatactttttctaaatgtttagttttctaaattgtataataattcaaaattatgttaatagtgcagagtttatatgtaatgctagacatttttcatacacttaatagtactgtaactgca

SEQ ID NO: 430041 - DNA, 120 bp, Artificial Sequence
  ENSG00000152056_9 (sequence is synthesized)
gacatttttcatacacttaatagtactgtaactgcaattcacatacaaaatgtctgattttaatgtgctgaattcatttattttttttagaattgggattatgaaaataaccaaagagta

SEQ ID NO: 430042 - DNA, 120 bp, Artificial Sequence
  ENSG00000152056_10 (sequence is synthesized)
tagaacttaataagtgtttttgatgccttagaagctgctatcttgactgaggttttaatttatcttttaattgaatataagggacattccaataaggttttctatgaactatatatttat

SEQ ID NO: 430043 - DNA, 120 bp, Artificial Sequence
  ENSG00000152056_11 (sequence is synthesized)
taaggtttatagagacctagagatacagcatctatgacttcctttattattctaaaatagtatgataagaattaatagcaataataattattgctactattttttaaaattcacgttcca

SEQ ID NO: 430044 - DNA, 120 bp, Artificial Sequence
  ENSG00000152056_12 (sequence is synthesized)
agcactcttagatgctggaaatttcatttcaaatatgttttaatgtatctctaatgcatttgaagacttattacatggcttacttagagcatttaagattatcacagcctatatggtaga

SEQ ID NO: 430045 - DNA, 120 bp, Artificial Sequence
  ENSG00000152056_13 (sequence is synthesized)
ttcctttccttcttttttcttttcttaccctttcctccccaaagaaaagatttgctgctgaccattattactgtaagtatatcacatttgtgcttcctggaatgaaaattctgtataacc

SEQ ID NO: 430046 - DNA, 89 bp, Artificial Sequence
  ENSG00000152056_14 (sequence is synthesized)
atcacatttgtgcttcctggaatgaaaattctgtataaccaggtcctaacagtgatcagacatattacagggaaatagcttgtaggccg

SEQ ID NO: 430047 - DNA, 72 bp, Artificial Sequence
  ENSG00000152056_15 (sequence is synthesized)
aggaccagtgcactccaggcgggtgacagagcaagactgcgtctcaagaaaaaaaaaaaaaaaaagaaaaag

SEQ ID NO: 430048 - DNA, 120 bp, Artificial Sequence
  ENSG00000152056_16 (sequence is synthesized)
aaaaaaaaaaaaagaaaaagtaaaagcttgtagtattctgtcttgctgcctgctatttgatgttttacctgtgcattttcaatgttagctttgaggtctggtatcattcatattagagtg

SEQ ID NO: 430049 - DNA, 120 bp, Artificial Sequence
  ENSG00000152056_17 (sequence is synthesized)
agtggtttgggacctccagtgatttcctagaagagtgtgtttcctgttggattctttaggagatcccatctggtagatttttagagaactcgatggaaaaatgttctctttagttcatct

SEQ ID NO: 430050 - DNA, 120 bp, Artificial Sequence
  ENSG00000152056_18 (sequence is synthesized)
cagcagacatatttagggaaaacagcaaagcaagcaggagaacaaagggaaaaattcaccaattcctcaatataaccattgttcaaaggaaataactcagattagcatataaaataatca

SEQ ID NO: 430051 - DNA, 120 bp, Artificial Sequence
  ENSG00000152056_19 (sequence is synthesized)
ttaggcttttactatccaatatttcttcaggttaccatgtaattacaattatggcatcagcttgaagtttatcatgtatgattgaccactgtgtttactttagctaaccttcagttttgt

SEQ ID NO: 430052 - DNA, 84 bp, Artificial Sequence
  ENSG00000152056_20 (sequence is synthesized)
tccttcctttcttccttccttcttctctctctctccttccctcccttccttccttcccttcctccctccctcctttctttcttt

SEQ ID NO: 430053 - DNA, 120 bp, Artificial Sequence
  ENSG00000152056_21 (sequence is synthesized)
cttccttccttcccttcctccctccctcctttctttctttctttttctcttttcttttcttttctttcttttctttcctcgcttcttgtcacccaggccagagtgcaatggtgtgatctc

SEQ ID NO: 430054 - DNA, 64 bp, Artificial Sequence
  ENSG00000152056_22 (sequence is synthesized)
gctgcacccggccaaattctttatttttcaatacaattttgtaaagatggacctcatgtaaatc

SEQ ID NO: 430055 - DNA, 120 bp, Artificial Sequence
  ENSG00000152056_23 (sequence is synthesized)
ttttcaatacaattttgtaaagatggacctcatgtaaatccatcatagtttttccggttcttttgaaatttgtcaccatatttggataaaggtatctcttgaacctcattcaaatatact

SEQ ID NO: 430056 - DNA, 120 bp, Artificial Sequence
  ENSG00000152056_24 (sequence is synthesized)
acacatgttctggataattccatattagacactttagttatggacagggcttctcagacttcaatcagtgtcacacatagaaagtaaatatatctcttctgggcaaggtggctcacgcct

SEQ ID NO: 430057 - DNA, 120 bp, Artificial Sequence
  ENSG00000152056_25 (sequence is synthesized)
ccctgtctcaaaaaaaaaaaaaaaaaaatgaaagtaagtaaacatatctatatggcacagtggggtaaatttgagggattttagggacatcttccatgggcctaggctaaaatagtcatt

SEQ ID NO: 430058 - DNA, 120 bp, Artificial Sequence
  ENSG00000152056_26 (sequence is synthesized)
cctaggctaaaatagtcattgtgttttctttatattatataattactataaaactaccaagagaaagacagtaaatgttaaatttctataaaacttccaaaataaaatgttttaacatgt

SEQ ID NO: 430059 - DNA, 120 bp, Artificial Sequence
  ENSG00000152056_27 (sequence is synthesized)
caaaccatgggagaaagatgatgatgatgatgatgatggtgttaataattataatattaaccagacttactgagtacttactctgtgctgggtacagtttctaaactatttatatgtatt

SEQ ID NO: 430060 - DNA, 120 bp, Artificial Sequence
  ENSG00000152056_28 (sequence is synthesized)
cacaagtaagatagtcctcatactgcatcagtagtgacttaaacttttttaaaacttttattttttgtggggggatctgttgaatttgggaagcctccagttttaataaaatttttttat

SEQ ID NO: 430061 - DNA, 120 bp, Artificial Sequence
  ENSG00000152056_29 (sequence is synthesized)
tttaggtcatttgcattttttagtatgcaaaataaatggaaaaattaaagtgcaataaaaatataatttgggaaatgaatgcagtaaaattgaaaacattgaaatattataatttaataa

SEQ ID NO: 430062 - DNA, 120 bp, Artificial Sequence
  ENSG00000152056_30 (sequence is synthesized)
aatataagtatctttacttatataggattaaatatatttctgataatctgtcctctataatgaattggtttaattatgtttttctgtttttagaaatgggcatctttttatttctggaaa

SEQ ID NO: 430063 - DNA, 120 bp, Artificial Sequence
  ENSG00000152056_31 (sequence is synthesized)
tgggcatctttttatttctggaaacaactttttaatgagattttatcaaacattagactatgactaattataatattcaaagccaataccaaaacgatggataaataaatgaataaaaca

SEQ ID NO: 430064 - DNA, 120 bp, Artificial Sequence
  ENSG00000152056_32 (sequence is synthesized)
aggcacattaatagaaaaaaatgaatgaaatcaattacgggttctacttgaaacacctaatctcattataatagcaataataaaacaatttgtacatactttattagtcgaacatttatt

SEQ ID NO: 430065 - DNA, 120 bp, Artificial Sequence
  ENSG00000152056_33 (sequence is synthesized)
aaaaatataagagcatagagcaaattaatttggaagaaaatttaaatcttttacatacaaataccctcaagaataataaatcatggagtattaataaaattaaaccagctgataatttta

SEQ ID NO: 430066 - DNA, 120 bp, Artificial Sequence
  ENSG00000152056_34 (sequence is synthesized)
taattttagaaagtgcttcatgcacagagacttttattcaagtcctctttgctttctgctagtgcttttttttttttcttgaaatgggatgggatctcactctgtcacccaggctggagt

SEQ ID NO: 430067 - DNA, 120 bp, Artificial Sequence
  ENSG00000152056_35 (sequence is synthesized)
aaacgtttgcggaaggaatacaggacacactcgcgcggcagaatcgcgaaaagtccccggtgttctccgcgcagggagttccccgcgcagggagttcctagcgggccacgcgctctcgcc

SEQ ID NO: 430068 - DNA, 120 bp, Artificial Sequence
  ENSG00000152056_36 (sequence is synthesized)
catattcgtgggaaaaactgtctccaggttgcttaatgtctgtgagctggatattatctttaattttgaaaaggcttatttcatcctggacgagtttataataggtggggaaattcagga

SEQ ID NO: 430069 - DNA, 120 bp, Artificial Sequence
  ENSG00000152056_37 (sequence is synthesized)
ctggtctacgcctgccttgaactccgaggttcctcagcttgctactataactcctgacttctgccttttctgacctctggtctgtgagctggatattatctttaattttgaaaaggctta

SEQ ID NO: 430070 - DNA, 120 bp, Artificial Sequence
  ENSG00000152056_38 (sequence is synthesized)
ggaggagaaaggggaaaggaagaaagaaggagagcaggagggcgaggagcggggggagcggggaggagggcgcggggaggaggcagcggggaggagcgtgcagggaggaggcagccgcgc

SEQ ID NO: 430071 - DNA, 120 bp, Artificial Sequence
  ENSG00000152061_0 (sequence is synthesized)
ctcagttccctccgccctcctcgggctccagcggtggcggagcgaacgggaccggcccggcttcagagcgcgaggtggagggtggaacgcgggcgcctgaaggagttgttgtctcggcag

SEQ ID NO: 430072 - DNA, 120 bp, Artificial Sequence
  ENSG00000152061_1 (sequence is synthesized)
cgcccgcggagacgtgaagaggtggttgtgggaagagaagtttgcagaactgaaatggaggtcagagcttcattacagaaggttagtggatcatctgattctgtggctacaatgaacagt

SEQ ID NO: 430073 - DNA, 120 bp, Artificial Sequence
  ENSG00000152061_2 (sequence is synthesized)
gaagaatttgttttggttcctcagtatgcagatgataattctacaaaacatgaagaaaaacctcaactgaagatagtttctaatggtgatgaacaattggaaaaagccatggaagagatt

SEQ ID NO: 430074 - DNA, 120 bp, Artificial Sequence
  ENSG00000152061_3 (sequence is synthesized)
ttgagagattccgagaaaaggccaagcagtcttcttgttgattgtcaaagttccagtgagatttcagaccattcgtttggagatattccagccagccaaacaaataagccatctcttcag

SEQ ID NO: 430075 - DNA, 120 bp, Artificial Sequence
  ENSG00000152061_4 (sequence is synthesized)
ttaattttggatccgtctaacacagaaatttctacacccagaccatcttctccaggtggactacctgaagaagatagtgttttatttaataaactgacctacttaggatgtatgaaggtt

SEQ ID NO: 430076 - DNA, 120 bp, Artificial Sequence
  ENSG00000152061_5 (sequence is synthesized)
tcttccccacgtaatgaagtagaggctttacgggcaatggcaaccatgaaatcttccagtcaatacccctttcctgttaccctgtatgtaccaaatgttccagaaggttctgtgagaatt

SEQ ID NO: 430077 - DNA, 120 bp, Artificial Sequence
  ENSG00000152061_6 (sequence is synthesized)
atagaccaatccagcaatgtggagatagcatcttttccaatctataaggtgttattctgtgcacgtggacatgacggaacaacagagagcaattgctttgcatttacagagagttcccat

SEQ ID NO: 430078 - DNA, 120 bp, Artificial Sequence
  ENSG00000152061_7 (sequence is synthesized)
ggttcggaagaatttcagatacatgttttctcctgtgaaattaaagaggcagtaagcagaattttgtacagtttctgtacagcattcaaacgttcttccagacaagtgtctgatgttaaa

SEQ ID NO: 430079 - DNA, 120 bp, Artificial Sequence
  ENSG00000152061_8 (sequence is synthesized)
gactcagttattcctacccccgacagtgatgtgtttaccttcagtgtctccttggaggtaaaagaagacgatggaaaaggaaactttagccctgtgcctaaggatagagataaattttat

SEQ ID NO: 430080 - DNA, 120 bp, Artificial Sequence
  ENSG00000152061_9 (sequence is synthesized)
ttcaaattaaagcaaggaatagagaagaaggttgtgattacagtgcagcaactttctaacaaagaattagctattgaaagatgttttggaatgttattaagcccaggtcgaaacgtgaag

SEQ ID NO: 430081 - DNA, 120 bp, Artificial Sequence
  ENSG00000152061_10 (sequence is synthesized)
aacagtgacatgcatttactggatatggaatccatgggaaagagctatgatgggagagcttatgtcatcactggcatgtggaaccccaatgcaccagtatttctggcacttaacgaggaa

SEQ ID NO: 430082 - DNA, 120 bp, Artificial Sequence
  ENSG00000152061_11 (sequence is synthesized)
accccaaaagataagcaagtatacatgactgtggcagtggatatggtagtcacagaggtggtggagcctgttcgctttctcctggagacagtagtccgtgtgtaccctgcaaatgagcga

SEQ ID NO: 430083 - DNA, 120 bp, Artificial Sequence
  ENSG00000152061_12 (sequence is synthesized)
agactttcacagagactttcttcatgagattgaaacagtctgagggaaaaggccataccaatgctggagatgcaatatatgaggtggtgagtctacagcgagagtctgacaaggaggaac

SEQ ID NO: 430084 - DNA, 120 bp, Artificial Sequence
  ENSG00000152061_13 (sequence is synthesized)
cagtcactcctactagtggagggggtccaatgtcaccccaggatgatgaagcagaagaggagagtgataatgaactctcaagtggaacaggtgatgtgtctaaggattgtcctgagaaga

SEQ ID NO: 430085 - DNA, 120 bp, Artificial Sequence
  ENSG00000152061_14 (sequence is synthesized)
tcctgtattcttggggagagttgctaggaaaatggcacagtaaccttggtgcacgaccgaaagggctgtctactctggtgaagagtggtgtccctgaagcattgagggcagaggtatggc

SEQ ID NO: 430086 - DNA, 120 bp, Artificial Sequence
  ENSG00000152061_15 (sequence is synthesized)
agttattggcaggctgccatgacaaccaggcaatgctggatagataccgaattcttatcacaaaggactcagcccaggagagtgttattactcgagatattcatcgtacatttcccgcac

SEQ ID NO: 430087 - DNA, 120 bp, Artificial Sequence
  ENSG00000152061_16 (sequence is synthesized)
atgattactttaaagatactggaggagatggtcaagaatcgctctataagatctgcaaggcctactctgtgtatgatgaagacattgggtactgtcaagggcagtcttttcttgctgctg

SEQ ID NO: 430088 - DNA, 120 bp, Artificial Sequence
  ENSG00000152061_17 (sequence is synthesized)
tattactgctgcatatgccagaggaacaagcattctgtgttttggtgaaaatcatgtacgactatggtttgagagacctctacagaaacaacttcgaagatcttcattgcaaattctacc

SEQ ID NO: 430089 - DNA, 120 bp, Artificial Sequence
  ENSG00000152061_18 (sequence is synthesized)
agttggagagactaatgcaggaacagctaccggacctgcatagccatttttctgatctgaacctggaagctcatatgtatgcatcccagtggtttctcactctttttactgccaagttcc

SEQ ID NO: 430090 - DNA, 120 bp, Artificial Sequence
  ENSG00000152061_19 (sequence is synthesized)
cactctgcatggtgttccacatcattgacttactgctttgtgagggtttgaacataatctttcatgtagctttggctctcctaaagacctcaaaggaagaccttctgcaggctgattttg

SEQ ID NO: 430091 - DNA, 120 bp, Artificial Sequence
  ENSG00000152061_20 (sequence is synthesized)
aaggtgctttaaagttctttagagttcagcttccaaagagatacagggcagaggaaaatgcaagaagactgatggagcaggcttgcaatattaaagtaccaaccaagaagctgaagaaat

SEQ ID NO: 430092 - DNA, 120 bp, Artificial Sequence
  ENSG00000152061_21 (sequence is synthesized)
atgagaaagaatatcagacaatgcgagagagtcagctgcaacaggaagacccaatggatagatacaagtttgtatatttgtaggtaactccagctgttgcatttatactgggaatcttca

SEQ ID NO: 430093 - DNA, 120 bp, Artificial Sequence
  ENSG00000152061_22 (sequence is synthesized)
taagaagctgagagaaagagaggggaaaaagaaagtggctttctactttcaaaaatgaaacaaaaaggaaaaatggcaaagtactgttttagctgtgcatgtcatatccacaaagacttt

SEQ ID NO: 430094 - DNA, 120 bp, Artificial Sequence
  ENSG00000152061_23 (sequence is synthesized)
tagcaggtgaactgttccaagactgacacaaggatgtttcaaacttgcctctgtctgtagaaaatgttaaaaataccaactcacttggaaggaaaaataaaaatcacaaaggtatattga

SEQ ID NO: 430095 - DNA, 120 bp, Artificial Sequence
  ENSG00000152061_24 (sequence is synthesized)
aacaggaagacccaatggatagatacaagagggagaaccgaagattacaggaggccagcatgaggttggaacaagagaatgatgaccttgcccatgaactagtaacaagcaaaattgctc

SEQ ID NO: 430096 - DNA, 120 bp, Artificial Sequence
  ENSG00000152061_25 (sequence is synthesized)
tacggaatgacttggatcaggcagaagacaaggcagatgtgttgaataaagagctccttttgaccaaacagaggctggtggagactgaagaggagaagaggaagcaagaggaagagactg

SEQ ID NO: 430097 - DNA, 120 bp, Artificial Sequence
  ENSG00000152061_26 (sequence is synthesized)
cccagctaaaagaagtcttcaggaaacagctagagaaggcagaatatgaaataaagaagactacagctatcattgctgagtataaacagatctgttcgcagttgagtaccaggctggaga

SEQ ID NO: 430098 - DNA, 120 bp, Artificial Sequence
  ENSG00000152061_27 (sequence is synthesized)
ctgcagtgacattttcagcaaggagggtgctttgaaactagcagccacaggcagagaggaccagggaattgaaacagatgatgagaaggactcacttaagaagcagctgagagagatgga

SEQ ID NO: 430099 - DNA, 120 bp, Artificial Sequence
  ENSG00000152061_28 (sequence is synthesized)
actggaactggcacaaaccaaactgcagttggtggaggccaagtgtaaaattcaggaacttgaacatcagagaggagcccttatgaatgaaatccaagctgcgaaaaactcttggtttag

SEQ ID NO: 430100 - DNA, 120 bp, Artificial Sequence
  ENSG00000152061_29 (sequence is synthesized)
caaaaccctgaactctatcaaaacggccacgggcacccagccattgcagccagcaccggtcacccagccacccaaggagagcacatagttccagccttacccaagcacaagagcacaatg

SEQ ID NO: 430101 - DNA, 120 bp, Artificial Sequence
  ENSG00000152061_30 (sequence is synthesized)
ttcaaaccaatggaaatctgggaggattcttcctggtgtccctttgaaggaaagtcaaggaggccagaaaacaagccagaatttttcagtagctctcactctttcttgtatgacactttt

SEQ ID NO: 430102 - DNA, 120 bp, Artificial Sequence
  ENSG00000152061_31 (sequence is synthesized)
caaagggatgctatttaaactgacctgttctatgttgaatacctattttccagcttctggaaggccatgttcagatccatcatagtattacacattattttgtttgcctgatgtttagtt

SEQ ID NO: 430103 - DNA, 120 bp, Artificial Sequence
  ENSG00000152061_32 (sequence is synthesized)
ggaaataagtaattcagaactaaatgcttttttatttagaattattcataattatttttatcttacataaaaatggagacatctgttattccaaggttgaagtgataagaagatctttgt

SEQ ID NO: 430104 - DNA, 120 bp, Artificial Sequence
  ENSG00000152061_33 (sequence is synthesized)
cacaggaaaaaaaaaattgaaacctaaacatcttaagttttcaggatttattcagataaagcacactgtggggccaggcatgaccactctcaggtttcctcctgagcctgattcccaggg

SEQ ID NO: 430105 - DNA, 120 bp, Artificial Sequence
  ENSG00000152061_34 (sequence is synthesized)
accgggagtgtggctggtttctgttgcctgttttgatactcttctcctggtgggtgtgtacactggcactgagctgcagtaggatttttccttggatagtctggtctggagctgggacag

SEQ ID NO: 430106 - DNA, 120 bp, Artificial Sequence
  ENSG00000152061_35 (sequence is synthesized)
cagctgctgctgtggaaaggccagctggcaagatgatggaagaaatctccattatggtagcctatgacgcccatgttttcagccagctgcacgatgaagacttcctcactagtctggtgg

SEQ ID NO: 430107 - DNA, 120 bp, Artificial Sequence
  ENSG00000152061_36 (sequence is synthesized)
tatgtagaagaatctggtaaatatggatattaacagcaataagctcctttttaacgatttaattctaccaagtaaatatttgggattactcgctttttgccttttatttaccaaaaaatt

SEQ ID NO: 430108 - DNA, 120 bp, Artificial Sequence
  ENSG00000152061_37 (sequence is synthesized)
ggtacatctggaaatgaagtgccaggaatagacgggctgttcagattatacgctaggtaaaaggaactgaaattttaataagtgtaggtcaggatcatttgggctgtggtattctaacag

SEQ ID NO: 430109 - DNA, 120 bp, Artificial Sequence
  ENSG00000152061_38 (sequence is synthesized)
atccttttaagaatgccacataggacttgtgagttcctaagtacaccaaagtatggacacagatgtgacttctggcaattataaagttaaaggtggatattgcaccttacagacttaggg

SEQ ID NO: 430110 - DNA, 120 bp, Artificial Sequence
  ENSG00000152061_39 (sequence is synthesized)
agcctttaccagagacgcctaaaaagccccaggttcagccattgtgctgaatagagtggaatatagaaccagggacagagtatttcatttaacgttgatatatacttgctaaggaaacac

SEQ ID NO: 430111 - DNA, 120 bp, Artificial Sequence
  ENSG00000152061_40 (sequence is synthesized)
taacaatactgtaactttgttaaaggacatagtattgaaatgggaaatagaggtcaggctcacatcatcttagtttaatgctgggcaactttttctgatttctgtagttccctgaaaatg

SEQ ID NO: 430112 - DNA, 120 bp, Artificial Sequence
  ENSG00000152061_41 (sequence is synthesized)
tgtccttcgtacccataaagagatacaaatgcatttgtaacatttttgattgaatataaaacctttacagaaatacttatctcatggaaaggtaaagctattgtttaaaaattagtggaa

SEQ ID NO: 430113 - DNA, 120 bp, Artificial Sequence
  ENSG00000152061_42 (sequence is synthesized)
atattttttcaattatatttaacatgcctataaaaatagtccttgcaggaaattatttgataagagcaaaactatttttattttataaactattttggaggcctctgatcctttcaaacc

SEQ ID NO: 430114 - DNA, 120 bp, Artificial Sequence
  ENSG00000152061_43 (sequence is synthesized)
aaccaaactactattagatatgtacaataacatttgttgatattaatcattggcctcattgttgaacatattatttgcaaagaatcttaaactctgtagtgccagaatgattctcatctg

SEQ ID NO: 430115 - DNA, 120 bp, Artificial Sequence
  ENSG00000152061_44 (sequence is synthesized)
tgccatattttgcaattaaaagtaacacacccttagaagaatcaaataagagccatctacatcccaggaggatgcaccaagttgctcacagtggatcttttcctctaaaatgatctttta

SEQ ID NO: 430116 - DNA, 120 bp, Artificial Sequence
  ENSG00000152061_45 (sequence is synthesized)
tgttctaaaaagtgaaatcccctttatctgtgtttatattctctacagcccataaaactgatgtgattgttatgttatactcatcagataatacttttcttacataaatctttcattgtt

SEQ ID NO: 430117 - DNA, 120 bp, Artificial Sequence
  ENSG00000152061_46 (sequence is synthesized)
gttctgacatctttcattacaaaatttattttcttaacaaaaaggaacataacccagcattccaagtgtctgtgttggctttaacattctctacatggtggtctagataagctaattttt

SEQ ID NO: 430118 - DNA, 120 bp, Artificial Sequence
  ENSG00000152061_47 (sequence is synthesized)
ttttttttttttttgtaaaatgtaatagctagaaaatgttatcttggcgcttgtttttgtaaatcatttagtataggctgttagctttactggtactttacgctttgattccaagaagcc

SEQ ID NO: 430119 - DNA, 120 bp, Artificial Sequence
  ENSG00000152061_48 (sequence is synthesized)
ttgtgcagttgccttatcaaatggccagctaaattaaagatgctcttttgtgttgtgaatttcatagttctgtacagagcttgtttcaatttacaaaaataagtacattccacagaatgc

SEQ ID NO: 430120 - DNA, 120 bp, Artificial Sequence
  ENSG00000152061_49 (sequence is synthesized)
ctaaagtgtgtaattttctttaaataatagtaggtgagggagaaacataatggctctaggtcaatcccttatctaaagaccttgttcaacttcatagtccctttccttttaaagaggaga

SEQ ID NO: 430121 - DNA, 67 bp, Artificial Sequence
  ENSG00000152061_50 (sequence is synthesized)
acggcattacattccatccagcctgggcgacaagagcaaaattccgtctcgaaaaatcaccaggtac

SEQ ID NO: 430122 - DNA, 120 bp, Artificial Sequence
  ENSG00000152061_51 (sequence is synthesized)
cgacaagagcaaaattccgtctcgaaaaatcaccaggtacatacctctcaagtttgataagtccatcttttgagttttcttttagctctttcaaaagattacgagggcaatacatatttt

SEQ ID NO: 430123 - DNA, 120 bp, Artificial Sequence
  ENSG00000152061_52 (sequence is synthesized)
ttttttttttattctccagccccatatcatacttgggtatgcctgttggtaccataagcctaaactctccttcactgcaatgcctttgagtcagtagcaatagtaaagactagaaacaaa

SEQ ID NO: 430124 - DNA, 120 bp, Artificial Sequence
  ENSG00000152061_53 (sequence is synthesized)
gaaaattcagaatttggtatgtgatatgattgttcatacaatatgttataatagcaatattccaaacaatatgtccttcactgtctattgttggaaaactcatgcatcccagcatgaagt

SEQ ID NO: 430125 - DNA, 120 bp, Artificial Sequence
  ENSG00000152061_54 (sequence is synthesized)
aactcctagttttaattttagttattttgagatatatttgagaattgcatctcttctcttgaatttcacttagaagagattaaccagccaaatatccaggaaagtttcaaaacattctag

SEQ ID NO: 430126 - DNA, 120 bp, Artificial Sequence
  ENSG00000152061_55 (sequence is synthesized)
tgtttttcatcctttgctaggatgcactctgtacaaaacattcctctgaaaatctaatatttgcagtatctaagaattgatcatttctattttcattaaattctgtggaaaaaattaaat

SEQ ID NO: 430127 - DNA, 120 bp, Artificial Sequence
  ENSG00000152061_56 (sequence is synthesized)
gaatgaaattcaacttcataattcagttcatcagcttttgtatcttgagaatctaaacacgtctttaaatctgaaagaaaccaagctggattttgcagtgcatatgtttgctagcttccc

SEQ ID NO: 430128 - DNA, 120 bp, Artificial Sequence
  ENSG00000152061_57 (sequence is synthesized)
acatcctgaaccatgtcaaaatttggttttatttagttacatataatttaatgcaaagaaattctgttacttaatgttctgtttatttatgagtgcctatcaggaacactaataggaatg

SEQ ID NO: 430129 - DNA, 120 bp, Artificial Sequence
  ENSG00000152061_58 (sequence is synthesized)
ccattcaaccagtgtcttctgcccctctcccagctgttaaattagtacttcttcattggctttctgaaatgtcctgagtaaagtagaaaagcaacctttgtatggatgtggggatattta

SEQ ID NO: 430130 - DNA, 120 bp, Artificial Sequence
  ENSG00000152061_59 (sequence is synthesized)
atagtatgtatcttgtttcatttttttcctatgatgtattaatatttatttttctccaacccctgctccattttcttaaaatattttccagttaataactagttgctttatttcctagct

SEQ ID NO: 430131 - DNA, 120 bp, Artificial Sequence
  ENSG00000152061_60 (sequence is synthesized)
gaagtgagaaaaccaacggaaaacaatacagatttgggcagaggagatagagttacatctttaaaggagtgagccagtcacccaggagaatcacatgtgtaactgatgtaggggtttaag

SEQ ID NO: 430132 - DNA, 120 bp, Artificial Sequence
  ENSG00000152061_61 (sequence is synthesized)
tcttcatactttcactaaaatctgtctactaactctcccaccaacctttgcatcaaacacttaggtacctgcctgattaggggggcccctttaagggaaaaaacttttaaaaaattaaat

SEQ ID NO: 430133 - DNA, 120 bp, Artificial Sequence
  ENSG00000152061_62 (sequence is synthesized)
gccttggttttgttttatcttctgggaaagaacacttttacttgattagcaagatgattatattatataacttgcccttaaaaacactccaaaatactgactccttttctccaattacaa

SEQ ID NO: 430134 - DNA, 120 bp, Artificial Sequence
  ENSG00000152061_63 (sequence is synthesized)
atgagtgtgaagaaattctgttgtatgatttgaacactattaggtttgtatgtgtgtttaattggaagaattttatatagagtatctctgctgcttttgtttacctgggtaccacacaac

SEQ ID NO: 430135 - DNA, 120 bp, Artificial Sequence
  ENSG00000152061_64 (sequence is synthesized)
caaatacacattgagatttcaagaaatgatgatgaaagccagaaggccagaccacagctctgcagcctgtttcctacaaccagatataaaactctttctcgtcgccatgctgatagtcac

SEQ ID NO: 430136 - DNA, 120 bp, Artificial Sequence
  ENSG00000152061_65 (sequence is synthesized)
actgaactagaactgtcccaacacattcttcctctctcataatggcttccatttaatacaggcaaagccctttaccttagcaaattctttatctttcaaaagtgaccaaaatgaggactt

SEQ ID NO: 430137 - DNA, 120 bp, Artificial Sequence
  ENSG00000152061_66 (sequence is synthesized)
caaccttggctgcacctcaataggagatgctgatcttgagttgtaatgagaaaagtgggcatataggagattttagtgactgcagtcagctgtctggcattcctttctcagtttgcatct

SEQ ID NO: 430138 - DNA, 120 bp, Artificial Sequence
  ENSG00000152061_67 (sequence is synthesized)
aaaagactacatatgtcaagcttatctccacctgaatttgctgcctgctataaaaacatttcattaatatatcccattcttcctacctccatctctggtttgtcattagtggtattctga

SEQ ID NO: 430139 - DNA, 120 bp, Artificial Sequence
  ENSG00000152061_68 (sequence is synthesized)
aaagcttaagaaaaaagaatcattgagtagaaagtgaacattttaagttattttcctttttcattggcaattagttaacatgtaaaatcttttccattaaactgtataacttttaataac

SEQ ID NO: 430140 - DNA, 120 bp, Artificial Sequence
  ENSG00000152061_69 (sequence is synthesized)
tatatattatatatgggataaaatatatggactgaattgtgagaatataaatgcatcgaaagactctggtgtcatgaaagcacaagaataaggctggagatggtcccagatccaagatgt

SEQ ID NO: 430141 - DNA, 120 bp, Artificial Sequence
  ENSG00000152061_70 (sequence is synthesized)
cccaaaagccttttgtatcagtttctctatttttggtattttgcataatgcatggatccttagttcaaatgagggacaaagtttctcagtcagccccacttcctttctttctaactccta

SEQ ID NO: 430142 - DNA, 120 bp, Artificial Sequence
  ENSG00000152061_71 (sequence is synthesized)
cctttcccttgcagaggaggtagtagagattctggaattgtctatttttatgaattccattattttgtccatggcatctctaatgaaaacaggttctagaataaaggagttgattagtct

SEQ ID NO: 430143 - DNA, 120 bp, Artificial Sequence
  ENSG00000152061_72 (sequence is synthesized)
gaacagtactaattaactacaaaataaacgttagtgatcagcctcttcctctataaacaatgaccaattagacgtttccgtaattccatgtattatgtatagtacactctataaatgtaa

SEQ ID NO: 430144 - DNA, 120 bp, Artificial Sequence
  ENSG00000152061_73 (sequence is synthesized)
atgtaatgcttgtctaaaaagtgcaatttattgtacattgtcccaacaaatgtttacttttataatcgttatgaacttgaattggattagtatcttgtttttatgtgtgaatgaagcctt

SEQ ID NO: 430145 - DNA, 120 bp, Artificial Sequence
  ENSG00000152061_74 (sequence is synthesized)
gtgaaataaacaaatgcaactgagaaggtaacaaggtgactgtttttgtgagccagtgatgttttcaatgctttgtgttgcccctttggccccattaagcagtaataaacatttgttctg

SEQ ID NO: 430146 - DNA, 120 bp, Artificial Sequence
  ENSG00000152061_75 (sequence is synthesized)
acacacacacacacacacactctcacacattctcacatgctagacccttctaagcagcttgtccgtttttacacatgtatctgaactctcctgcatcactcttggccattttctcgcatt

SEQ ID NO: 430147 - DNA, 120 bp, Artificial Sequence
  ENSG00000152061_76 (sequence is synthesized)
gcatcactcttggccattttctcgcattcgattgcttttgccgttttttatttagatcagtacttgatttcattttcattttccagtctactttggggttctcgcagtggataatttagc

SEQ ID NO: 430148 - DNA, 120 bp, Artificial Sequence
  ENSG00000152061_77 (sequence is synthesized)
caaaatgtttttcttgtggagacattagctgacaattcccaccacagactggcttgtacgtcctcccagggagacctaaacctggctcccctcccaccgcagttcttaatattgtggata

SEQ ID NO: 430149 - DNA, 120 bp, Artificial Sequence
  ENSG00000152061_78 (sequence is synthesized)
agagatccatctttctcattctggatacctacttagtgctcatggaagaaggggtgccctgcccagccccagctgctaagctcacacctcctgtcaaaaagtcccaggacatgcacgacg

SEQ ID NO: 430150 - DNA, 120 bp, Artificial Sequence
  ENSG00000152061_79 (sequence is synthesized)
agaggagcaagctggtgaatgagtatgcgtgtcgagtgctggaacttctggggatggggcatcgtctgtttgtgcctcggcttctggcgacctcaaaggaagaccttctgcaggctgatt

SEQ ID NO: 430151 - DNA, 120 bp, Artificial Sequence
  ENSG00000152061_80 (sequence is synthesized)
aagtatctttgttccattgaatgtttgcggtcacagagagaacttagagttatatgacactcaaaggaaaagcaaaagagcattaagaagtgtctgtttttgttattgccatttcataaa

SEQ ID NO: 430152 - DNA, 120 bp, Artificial Sequence
  ENSG00000152061_81 (sequence is synthesized)
tattttagtaggtgttcaatttcattggatattctttttttttaattgtctttgtacctatgattgaaaacagtagttggtctatgacttttgaggagagggagaaccgaagattacagg

SEQ ID NO: 430153 - DNA, 120 bp, Artificial Sequence
  ENSG00000152061_82 (sequence is synthesized)
gatggtagaatcctggcatttcatgttggcagccatcatttaacccacctgtgtgatttccgaatcactggagctcaacagcaaggaaatgagctttgaagacctggaaaatctgctgct

SEQ ID NO: 430154 - DNA, 120 bp, Artificial Sequence
  ENSG00000152061_83 (sequence is synthesized)
tggagagagagaaatgctgctgcagaaggatactgaattgctgcaagaagtttccataactaatgagttcgtggatgagagctgaagaggtttgtcgttaaaggaagatttctgaagcag

SEQ ID NO: 430155 - DNA, 120 bp, Artificial Sequence
  ENSG00000152061_84 (sequence is synthesized)
gagtagcagcatggctgccactactgtcactgtgatgcttatttcactataaaatccctcaaactgcaggcatcaacaatggtagaagggaatcccagtgagggtgatggccctcttgaa

SEQ ID NO: 430156 - DNA, 120 bp, Artificial Sequence
  ENSG00000152061_85 (sequence is synthesized)
cacctgtgacacaaggattgggaggtcccacagaagggttaggacacatttgacttgcaacacttggatgtgcttctgcaggactgtgctttagtagatttcaataatctatggcaaaag

SEQ ID NO: 430157 - DNA, 120 bp, Artificial Sequence
  ENSG00000152061_86 (sequence is synthesized)
agttggacaatccaaccagaagtatcttgaggtcaatgatctttgtataaggagaatgatatgctaggcttctgctgaagaattgcagaccaagcaaggtatcagaaagtgtagtgaaaa

SEQ ID NO: 430158 - DNA, 120 bp, Artificial Sequence
  ENSG00000152061_87 (sequence is synthesized)
agtgttaattgagtctttctaagattttatttctactagccagtgtaaccattctatgcaaagcagattttgatgatatttgtgtgttttaggatactattcagtattagaaactctgtt

SEQ ID NO: 430159 - DNA, 120 bp, Artificial Sequence
  ENSG00000152061_88 (sequence is synthesized)
acattatggaagcatgttttttgtcatctggtgttaaaggcattcagagatacttcttgataaatatcaagggcatcattgggaagatacttattcttattgcattgttttttcttgggg

SEQ ID NO: 430160 - DNA, 120 bp, Artificial Sequence
  ENSG00000152061_89 (sequence is synthesized)
agatacttattcttattgcattgttttttcttggggttgcagatatgacactgtataaaagaaaacgtgttccttgcatgggaaaatttctttttctttgagatggagtttcactcttgt

SEQ ID NO: 430161 - DNA, 120 bp, Artificial Sequence
  ENSG00000152061_90 (sequence is synthesized)
gcttactgcaacctacacctcttgggttcaagtgattctccagcctcagcttcccaagtagttgggattacaagcatgcatcaccacacctggataattttgtatttttagtagagacag

SEQ ID NO: 430162 - DNA, 120 bp, Artificial Sequence
  ENSG00000152061_91 (sequence is synthesized)
aaacaagtatttatttaattgttatgttagctaaatgcctcattttggaagataattcgaagttatcttgttagtgttttccttaaatcaattgatttttatgattttaaaaaagtttcc

SEQ ID NO: 430163 - DNA, 120 bp, Artificial Sequence
  ENSG00000152061_92 (sequence is synthesized)
tggtagtgtgcctcttattttagctccttcccatgaataatgtatttgagctagctgttttaaaaattttaatacatacctttcaaggtgcctttcatagaatgatttttcacatttatt

SEQ ID NO: 430164 - DNA, 75 bp, Artificial Sequence
  ENSG00000152061_93 (sequence is synthesized)
tttcaaggtgcctttcatagaatgatttttcacatttatttcttgggtgaactttttatttttttttttgaggca

SEQ ID NO: 430165 - DNA, 88 bp, Artificial Sequence
  ENSG00000152061_94 (sequence is synthesized)
ggtgaacattttcttgatatatggtgtttccaaaagagtgagttatctttcaccagtattaatgaaaagacttcatcttggagaaact

SEQ ID NO: 430166 - DNA, 120 bp, Artificial Sequence
  ENSG00000152061_95 (sequence is synthesized)
ttcaccagtattaatgaaaagacttcatcttggagaaactagctatgttatttattttaaataaatacctttgttacttaataacagtgtttggacttttaagatgtaatacatatttga

SEQ ID NO: 430167 - DNA, 120 bp, Artificial Sequence
  ENSG00000152061_96 (sequence is synthesized)
gaatttggaaaatattgaaataaaaaagaaaataaaaggtgcttaaaattccgccgcagttaagattttggtgtatctccattccagatatctacatgtgctctcctccctgcctcttca

SEQ ID NO: 430168 - DNA, 120 bp, Artificial Sequence
  ENSG00000152061_97 (sequence is synthesized)
aaaacaacagcaacaaactcaaacagatatacagttttgtgtttagtattttctatagatactgttttctggagaaagattgtattatttatcaataaaccttttccttctgcaaagaaa

SEQ ID NO: 430169 - DNA, 120 bp, Artificial Sequence
  ENSG00000152061_98 (sequence is synthesized)
gggcacatttggctatttttcaaagagagcatgtagttcaagaaatggcttattttgttttttattcttctttttgtggtctatttaggaaaacaaaatgaaggtggcctttgtctttca

SEQ ID NO: 430170 - DNA, 120 bp, Artificial Sequence
  ENSG00000152061_99 (sequence is synthesized)
ggaagctctgagtcactgaatagcaaagaaaaatatgaaagcaagaggaattgctttcacatctagaaaatgttgcaagataatctgaaatcttctggtgctggtgaatgcatgaagagg

SEQ ID NO: 430171 - DNA, 120 bp, Artificial Sequence
  ENSG00000152061_100 (sequence is synthesized)
tattggggaagggtaaaatggttgaggaaggaggttcgtggaatgtgagagcagaagatgctagtaggagctcattgatatgaactgccaggggatccgtaggtgtctaaagagggaagt

SEQ ID NO: 430172 - DNA, 120 bp, Artificial Sequence
  ENSG00000152061_101 (sequence is synthesized)
gaagccagtaggagactgagagattagaagaacagggcagtagaggatgaatttgcagtgaggttaaaggaacaatttattgggagaagggaatgtaggagggtagaagactttaaaatt

SEQ ID NO: 430173 - DNA, 120 bp, Artificial Sequence
  ENSG00000152061_102 (sequence is synthesized)
gatcttatataaaatgtagttggaaactgtcttaagtgttttataaagaatccttttgtgaaactaataatcttcctctaatttagttttataaccaggattttaatgtattatatatgt

SEQ ID NO: 430174 - DNA, 120 bp, Artificial Sequence
  ENSG00000152061_103 (sequence is synthesized)
tagtattttagtaactatatttaaatatttagattgttttaatttcttctagaaatgaaatactttcataaaatttagcttcagaactatggtagaattgaaacagaattgtcttgctgt

SEQ ID NO: 430175 - DNA, 64 bp, Artificial Sequence
  ENSG00000152061_104 (sequence is synthesized)
gcagttattggcaggctgccatgacaaccaggcaatgctggatagataccgaattcttatcaca

SEQ ID NO: 430176 - DNA, 120 bp, Artificial Sequence
  ENSG00000152061_105 (sequence is synthesized)
tccttcctctggaagcttcatctcagaagggcacctggctgtatgaggtgtcggttggcccctcctgggaggtgtctcccaattagactactcaggtgtcagggacccacttgaggaggc

SEQ ID NO: 430177 - DNA, 120 bp, Artificial Sequence
  ENSG00000152061_106 (sequence is synthesized)
ccgtttgttcaactatgccctgcccccagtactggagtccaggaaggcaggcaggcctccttgagctttggtgggctccacccagttcagtcttcccggctgctttgtttacctactcaa

SEQ ID NO: 430178 - DNA, 120 bp, Artificial Sequence
  ENSG00000152061_107 (sequence is synthesized)
gcggatgcccctccctcagccttgctgacacttgcggcttgatctcagactgctgtgttagcagtgagtgaggctccgtgggtgtgggactctccgagccaggtgcgggatataatctcc

SEQ ID NO: 430179 - DNA, 75 bp, Artificial Sequence
  ENSG00000152061_108 (sequence is synthesized)
aggtgcgggatataatctcctggtgtggtcccgattttccaggtactatctgtcatggcttcccttggctaggaa

SEQ ID NO: 430180 - DNA, 120 bp, Artificial Sequence
  ENSG00000152061_109 (sequence is synthesized)
ccttgcacttcccaggtgagcaatgccccacgctgctccttgggctgcacccactgtgtgacaagccccagtgagatgaacccggtacctctgttggaaatgcagaaatcacctgtcttc

SEQ ID NO: 430181 - DNA, 120 bp, Artificial Sequence
  ENSG00000152061_110 (sequence is synthesized)
ggagctgtagactggagctgttcctttttggccatcttggaacctcggttcaaacctgagttgtaatactcactcttcctgttgctgcctatgtaattttgtagaagttacctaattgct

SEQ ID NO: 430182 - DNA, 120 bp, Artificial Sequence
  ENSG00000152061_111 (sequence is synthesized)
tgcttccaagcttctgttggattttttgagaactgaatgacatagtacattttgaatgcttaatgtattgctttgtgcatggtattatttaataaatattagctttggttatacttgcaa

SEQ ID NO: 430183 - DNA, 120 bp, Artificial Sequence
  ENSG00000152061_112 (sequence is synthesized)
gatgaaatttagtcttacaccgagacagactattcacctagttaaatatgaagggtctatgaaggtctccatgacaccctgtaaccagctgcaatttgacattagacttgatgttctgat

SEQ ID NO: 430184 - DNA, 120 bp, Artificial Sequence
  ENSG00000152061_113 (sequence is synthesized)
tacttatactttttgttttagttcctttcctgagcctgaattgtacaaatatgtcctaaaacaccaacttattaagaggcttaatgcctgttaaatgcgtcagtgctcttggcagcttag

SEQ ID NO: 430185 - DNA, 120 bp, Artificial Sequence
  ENSG00000152061_114 (sequence is synthesized)
catgagtgctttctttgcatgggaggttgcagtttagaagcaactttatggatcatttcccaggttgatgttacatatgttcattttacaacctgtgtgcataatctctcagggtgaagg

SEQ ID NO: 430186 - DNA, 120 bp, Artificial Sequence
  ENSG00000152061_115 (sequence is synthesized)
taattaagagaaagcataatctacagaattgaagccaagtaatctaagattctgtttttaaactctttgctatataacattagttaagttgtttaccctcttaatttatccatttgtaaa

SEQ ID NO: 430187 - DNA, 120 bp, Artificial Sequence
  ENSG00000152061_116 (sequence is synthesized)
atgatagtttttgtttttaaagtgctctattacccttactttaaaagtcctgtctaccatatatttaaaactataagtggaaataatgaagaaactctgaacttgcttttgcttatatat

SEQ ID NO: 430188 - DNA, 120 bp, Artificial Sequence
  ENSG00000152061_117 (sequence is synthesized)
ggatatatcatattatatgcctaagattggagataaattttataacctgattttctcatggcagtgtacaaatgaaattattctgtaagtttttcaaaacagtaaaatcactatttttca

SEQ ID NO: 430189 - DNA, 120 bp, Artificial Sequence
  ENSG00000152061_118 (sequence is synthesized)
actgtttatgtcaaattgtaggagaacacccgttggaactttctttacattctcttgctgccgtgttttaaagaatgaagagagtgataatgaactctcaagtggaacaggtgatgtgtc

SEQ ID NO: 430190 - DNA, 120 bp, Artificial Sequence
  ENSG00000152061_119 (sequence is synthesized)
gtggcatcggaacattgtccatgggttttctggaacctagattcaaattttatcttgaagatacatgaatttctaatgtcagttaagaaaactagcaacatttgtgctacagaaaagata

SEQ ID NO: 430191 - DNA, 120 bp, Artificial Sequence
  ENSG00000152061_120 (sequence is synthesized)
aataaatttattagccttcccgtcacttgtcaactgtgacttacaatcagtgtttgaaaggtcataatgttcattaatattaataagaacatcatagatattacctttcctccccttaaa

SEQ ID NO: 430192 - DNA, 120 bp, Artificial Sequence
  ENSG00000152061_121 (sequence is synthesized)
cctgtactctatagctgtttaaggaagttggaaaacttttcaaaacatagattgtaatcatagcatcatgatgttcggggaagtaaatggtaacatcctttaccattaaaattgcttttc

SEQ ID NO: 430193 - DNA, 120 bp, Artificial Sequence
  ENSG00000152061_122 (sequence is synthesized)
agaataatctattggaaacaatattgtagtgtgcctcaggatatttattctttccactaactcatctttgtcaagaattattttacaaaggaaatttttgaataaacttttacttcctgc

SEQ ID NO: 430194 - DNA, 120 bp, Artificial Sequence
  ENSG00000152076_0 (sequence is synthesized)
cagcgacaggccccgcccccgccaaacgcctggcgccctccgtcgcccggtttccatggtgacggggcgccaggctagggcggcctggccactgagccggggtgcagtggcagcgggaga

SEQ ID NO: 430195 - DNA, 120 bp, Artificial Sequence
  ENSG00000152076_1 (sequence is synthesized)
gtacctggcgatggcgatatgagcggtgcgggggtggcggctgggacgcggccccccagctcgccgaccccgggctctcggcgccggcgccagcgcccctctgtgggcgtccagtccttg

SEQ ID NO: 430196 - DNA, 120 bp, Artificial Sequence
  ENSG00000152076_2 (sequence is synthesized)
aggccgcagagcccgcagctcaggcagagcgacccgcagaaacggaacctggacctggagaagagcctacagttcctgcagcagcagcactcggagatgctggccaagctccatgaggag

SEQ ID NO: 430197 - DNA, 120 bp, Artificial Sequence
  ENSG00000152076_3 (sequence is synthesized)
atcgagcatctgaagcgggaaaacaaggatctccgttacaagctcataatgaatcagacatcacagaagaaagatggcccctcaggaaaccacctttccagggcctctgctcccttgggc

SEQ ID NO: 430198 - DNA, 120 bp, Artificial Sequence
  ENSG00000152076_4 (sequence is synthesized)
gctcgctgggtctgcatcaacggagtgtgggtagagccgggaggacccagccctgccaggctgaaggagggctcctcacggacacacaggccaggaggcaagcatgggcgtcttgcgggc

SEQ ID NO: 430199 - DNA, 120 bp, Artificial Sequence
  ENSG00000152076_5 (sequence is synthesized)
ggtagcgccgacactgtgcgctctcctgcagacagcctctccacgtcaagcttccagtctgtcaagtccatctctaattcaggcaaggccaggccccagcccggctccttcaacaagcaa

SEQ ID NO: 430200 - DNA, 120 bp, Artificial Sequence
  ENSG00000152076_6 (sequence is synthesized)
aagcagaggcctctaacgcaggagctgcctgtatggggaacagccagcaccagggcaggcagatgggggcggcggcacaccccccaatgatcctgccccttcccctgcgaaagcccacca

SEQ ID NO: 430201 - DNA, 120 bp, Artificial Sequence
  ENSG00000152076_7 (sequence is synthesized)
cacttaggcagtgcgaagtgctcatccgcgagctgtggaataccaacctcctgcagacccaagagctgcagcacctcaagtccctcctggaagggagccagaggccccaggcagtcccgg

SEQ ID NO: 430202 - DNA, 120 bp, Artificial Sequence
  ENSG00000152076_8 (sequence is synthesized)
aggaagctagctttcccagggaccaagaagccacgcatttccccaaggtctccaccaagagcctctccaagaaatgcctgcttctgagcccacctgtggcggagcgtgccatcctgcccg

SEQ ID NO: 430203 - DNA, 120 bp, Artificial Sequence
  ENSG00000152076_9 (sequence is synthesized)
cactgaagcagaccccgaagaacaactttgccgagaggcagaagaggctgcaggcaatgcagaaacggcgcctgcatcgctcggtgctttgagctacccgcatctggtcagtgccaggcc

SEQ ID NO: 430204 - DNA, 120 bp, Artificial Sequence
  ENSG00000152076_10 (sequence is synthesized)
caccaacctgcagctggagattggctctctatagcatttcctgacacttccgctacttttaggcctggctaaattccaagatagataacactcaagatagataaagtacttgatctccaa

SEQ ID NO: 430205 - DNA, 120 bp, Artificial Sequence
  ENSG00000152076_11 (sequence is synthesized)
actgacaaactgtttattttctagctgttattttgctatttggcatttacataaaagcacacgatgaagcaggtatcgccttacctgttgaaactgaaaataaagcttgtttatttccaa

SEQ ID NO: 430206 - DNA, 120 bp, Artificial Sequence
  ENSG00000152076_12 (sequence is synthesized)
tggaagaggagcccctacttcacaacagcaagctggacaaggttcctggggtacaagggcaggccagctgcagcacctcaagtccctcctggaagggagccagaggccccaggcagtccc

SEQ ID NO: 430207 - DNA, 120 bp, Artificial Sequence
  ENSG00000152076_13 (sequence is synthesized)
gggcccttcagttcctgatgggatgctcttgccacccaggggagcccctccagactgtccttgcccacctggctgcactggcccctgtatgccaacccagtggggacaggttctggggga

SEQ ID NO: 430208 - DNA, 120 bp, Artificial Sequence
  ENSG00000152076_14 (sequence is synthesized)
cctggacagatgccgctacctctagccgtggctggatgatgttacgcagccaagcacagcacgtgctgctctcaggaagcccagggcctgaggtcattgcagtggggaggtgggcacagg

SEQ ID NO: 430209 - DNA, 120 bp, Artificial Sequence
  ENSG00000152076_15 (sequence is synthesized)
gtgctccccagacctccctcctccaagtagagctgaaatgggaaggaacccctgggacagcccctgccctgctagatctttgcctcagattgctgctgtggccaggcccaggatctccag

SEQ ID NO: 430210 - DNA, 120 bp, Artificial Sequence
  ENSG00000152076_16 (sequence is synthesized)
ccctatggctctgagtcctgacatgctgggggcccaggggctctggacacactccatccagggatcccttcctgccatctgggcagcaaccatggggacaaagggaggaagcagagtcct

SEQ ID NO: 430211 - DNA, 120 bp, Artificial Sequence
  ENSG00000152076_17 (sequence is synthesized)
ggtgcaagggcaggccaggtaagtcttgcctgcaccctaagggccccatgactacatttactaggctcacgccctgcagtcagccaactgctctgcccctagctccaggggcctgtctcc

SEQ ID NO: 430212 - DNA, 120 bp, Artificial Sequence
  ENSG00000152076_18 (sequence is synthesized)
gctgacatcaggaggacatctgactggtggatggagccagcctgggaacatcgtagctggggcagtgcctagggctctcccttcccagagagacatggagaatggggttgagggagggcc

SEQ ID NO: 430213 - DNA, 120 bp, Artificial Sequence
  ENSG00000152076_19 (sequence is synthesized)
cttccctagccgctgtggcaactccagtgagctgttctgggcaaagtgtggcccaagtcggcagccccagccctgcagtgctggggacgctgacaggacacgggaagaggccatgctctc

SEQ ID NO: 430214 - DNA, 120 bp, Artificial Sequence
  ENSG00000152076_20 (sequence is synthesized)
gcctctaggggtgctgaccaggtaccctctgctgggccaagctccaggatttggggatgaaggtgcagctgaaaagagccctgcaagctgaagccaccgggaggggattaagggggggtg

SEQ ID NO: 430215 - DNA, 120 bp, Artificial Sequence
  ENSG00000152076_21 (sequence is synthesized)
ggcaggaccagggaccagtcacagggcagtaaggcctcacagcaggcaccccagggtggggcagcaagcaggcaggaggggcctccccgggtggccgcctagggaggacgtaccctggct

SEQ ID NO: 430216 - DNA, 120 bp, Artificial Sequence
  ENSG00000152076_22 (sequence is synthesized)
gcccagcagcagccctgcttggccgtgtccccgccacaagcaggcaggacacaggagggatggcactgcccacggagccctgggctcatggcaccttctgcagagtgaactgggagcaga

SEQ ID NO: 430217 - DNA, 120 bp, Artificial Sequence
  ENSG00000152076_23 (sequence is synthesized)
gagcctcttttccccactctgtgaggccgggcattttcctcagcccagccctaaccctcaccattcctgtgatgggcccaggtgctggacgggccttgtccttgccgaggaaacccatgc

SEQ ID NO: 430218 - DNA, 120 bp, Artificial Sequence
  ENSG00000152076_24 (sequence is synthesized)
aggctgggtcccaagcctctcatgcagtttcattttacccaagatggggccagcttccactatgttgattgttctagagtgttcacaggcaccacccatgggcttcaccctcagaaccac

SEQ ID NO: 430219 - DNA, 120 bp, Artificial Sequence
  ENSG00000152076_25 (sequence is synthesized)
attgattccccccagaaccctccaaggcaggcttccctttacagaggaggaaactgaggcagggacaggggcttcttgggtacacacagctgttcctggaaaacttgggcggtgactgtt

SEQ ID NO: 430220 - DNA, 120 bp, Artificial Sequence
  ENSG00000152076_26 (sequence is synthesized)
ttcctcccttcccctgggggtcctgcagagtacctgtgctgacctgagcccacgaggggggccagtagcggcccctaaaccacttcctcagagaaaagtaaagtaatattctgaccaaga

SEQ ID NO: 430221 - DNA, 120 bp, Artificial Sequence
  ENSG00000152076_27 (sequence is synthesized)
gaaggcttgctgcccctggccacagcctgcctttggagggcactaggccagcaggtcagagtaggaacaggttctggtgatccctgagtttgcgggactgccctgagatgctacagagcg

SEQ ID NO: 430222 - DNA, 120 bp, Artificial Sequence
  ENSG00000152076_28 (sequence is synthesized)
cacactttcagcagcgcaaccagcaggacaggctcctgcatctgcacatcccgagaccaggcctggagcaagatgccccactgggtgtggggtcacgatcaagagcagcctggcagctag

SEQ ID NO: 430223 - DNA, 120 bp, Artificial Sequence
  ENSG00000152076_29 (sequence is synthesized)
ctggtcacccactgaagcccatctgacccttagggcaccttcagaggggagaaagggacaggccccagtcccagagacccccacctggtgcccagagcaccctgctcagtgggagagggg

SEQ ID NO: 430224 - DNA, 120 bp, Artificial Sequence
  ENSG00000152076_30 (sequence is synthesized)
aaccaggccctcttccccacattggcctgggcgctgcctggggaggtatgctgggtgggtggttagacgcacctgggcaggtcacctctggctgctgcaatgactgtttcagaaaggaga

SEQ ID NO: 430225 - DNA, 120 bp, Artificial Sequence
  ENSG00000152076_31 (sequence is synthesized)
ccggcgcggggccctaggccggccctgcctccccaggcacactcaacactgccgctcccgcagcacagaaacacagccatcaactccagcacacgcctgggctcagggggaacacaggac

SEQ ID NO: 430226 - DNA, 120 bp, Artificial Sequence
  ENSG00000152076_32 (sequence is synthesized)
ggaagggagccagaggccccaggcagtcccggaggaagctagctttcccagggaccaagaagccacgcatttccccaaggtctccaccaagagcctctccaagaaatggtaagtcccaca

SEQ ID NO: 430227 - DNA, 120 bp, Artificial Sequence
  ENSG00000152076_33 (sequence is synthesized)
ggcatggggacagtggggcagccctgcagcctgggccccagggagggagtggggaagggagcgtggcagcgcagaagcggagctcgctgaggcctctctgtgcccccgtgagggccatgc

SEQ ID NO: 430228 - DNA, 120 bp, Artificial Sequence
  ENSG00000152078_0 (sequence is synthesized)
aaggagcagctctgcggtaacccgagcccgcagtccgggcgggcgcgacggccgccgcggtagctggagcctccgcgactgcacctccaagcggcccggaacccgcggcttccctggctc

SEQ ID NO: 430229 - DNA, 120 bp, Artificial Sequence
  ENSG00000152078_1 (sequence is synthesized)
ccgtgagcatctcaccgggcggcactggccagcgccagccctcgggccggcccggatgagcagactcctgtagacacccgccgccctctcccggctcggcgcagccgccgcccgcgcgcg

SEQ ID NO: 430230 - DNA, 120 bp, Artificial Sequence
  ENSG00000152078_2 (sequence is synthesized)
actcgccccgggacccggcacaggttgaagaaatatggagatcaacacaaaactgctcatcagtgttacctgtatcagctttttcacctttcagcttcttttctactttgtaagttactg

SEQ ID NO: 430231 - DNA, 120 bp, Artificial Sequence
  ENSG00000152078_3 (sequence is synthesized)
gttttcagcaaaagtttctccaggtttcaatagtctcagcttcaaaaagaagattgaatggaactcaagggtagtatccacatgccattctttggtggttggtatttttggcctgtacat

SEQ ID NO: 430232 - DNA, 120 bp, Artificial Sequence
  ENSG00000152078_4 (sequence is synthesized)
tttcttattcgatgaggctactaaagctgatccactttggggtggtccatcacttgcaaacgtgaatattgctattgcctcaggctacctcatttctgatttgtccattataattttgta

SEQ ID NO: 430233 - DNA, 120 bp, Artificial Sequence
  ENSG00000152078_5 (sequence is synthesized)
ttggaaagtgattggtgacaaattttttataatgcatcattgtgcgtccctgtatgcatactaccttgtactgaaaaatggagtgctggcatacattgggaattttcgcctgcttgcaga

SEQ ID NO: 430234 - DNA, 120 bp, Artificial Sequence
  ENSG00000152078_6 (sequence is synthesized)
gctttccagcccgtttgtgaatcagcggtggttctttgaagctctgaagtatcccaagttttctaaagctatcgttatcaatggaatactcatgacagtagtattcttcatcgtgcggat

SEQ ID NO: 430235 - DNA, 120 bp, Artificial Sequence
  ENSG00000152078_7 (sequence is synthesized)
tgcctcaatgcttcctcattatggcttcatgtattccgtgtatggaacagaaccctacataaggcttggagttttaatccagttatcctgggtcattagttgtgttgttttggatgtgat

SEQ ID NO: 430236 - DNA, 120 bp, Artificial Sequence
  ENSG00000152078_8 (sequence is synthesized)
gaatgtcatgtggatgatcaaaatttcaaaaggttgcatcaaagtcatctctcacatcagacaagagaaagccaaaaatagtcttcagaatggaaaacttgattaaaagagtgctaccga

SEQ ID NO: 430237 - DNA, 120 bp, Artificial Sequence
  ENSG00000152078_9 (sequence is synthesized)
taagcaaacttcattactacccagcatatctgctgataggatgaattcttggcatgttcttgtgtacctttcttaattataattgttattcaggatttcagtgtcattttttttaaacct

SEQ ID NO: 430238 - DNA, 86 bp, Artificial Sequence
  ENSG00000152078_10 (sequence is synthesized)
gaaactaaaattaaaatttagttttcatcccaagatgtcttttctgcctttcttttgccttatttacaagcatggataaaaatctt

SEQ ID NO: 430239 - DNA, 120 bp, Artificial Sequence
  ENSG00000152078_11 (sequence is synthesized)
cctttcttttgccttatttacaagcatggataaaaatcttaaaggtttaaataaaaatgatcaatataatggtgaatcttttgagaaatctcttaactgcattggtattttttctctgtg

SEQ ID NO: 430240 - DNA, 120 bp, Artificial Sequence
  ENSG00000152078_12 (sequence is synthesized)
aaagatgactatgataatctggtacaaatggttttatgtcaccaattttgctgcaagaatgggaactgcttttaaatctgtaaatagctcttaacatttgttgtatgcactcttttctta

SEQ ID NO: 430241 - DNA, 120 bp, Artificial Sequence
  ENSG00000152078_13 (sequence is synthesized)
ctatggctgtcaacacttgtgtagggtttaatttctaaattgttggcatgttctttttctcaggctattcagaagtaacaacatttttcatttcagacatgcaatcacctattaatgatg

SEQ ID NO: 430242 - DNA, 120 bp, Artificial Sequence
  ENSG00000152078_14 (sequence is synthesized)
aaatattttaccactttgggaatatttaattagtttagtcatggagaatacttcccacattttaagattttttcaaatatcactgtcatttctattttagcattttatcaaattattgct

SEQ ID NO: 430243 - DNA, 120 bp, Artificial Sequence
  ENSG00000152078_15 (sequence is synthesized)
tttttattttataataaggcttaagacagattatagacctccttaagagatgagtttcttcttctaaaaatgcatgttgatagaggactatttaggctaatcggaggaatcattaagaaa

SEQ ID NO: 430244 - DNA, 120 bp, Artificial Sequence
  ENSG00000152078_16 (sequence is synthesized)
gaaagttttaacactgtttatccctatctgctttccttgcactttttctgtgaaaaatattttctgtttgcaaaatcttccctgagttctgaacccagcaccatcagtaccaaagtctta

SEQ ID NO: 430245 - DNA, 120 bp, Artificial Sequence
  ENSG00000152078_17 (sequence is synthesized)
tgcaatatgtatttattatgctcctgaaataggcctcttcttgatgagacccaaactattacaaaaatatcagtattcatattttactcacaattcatacccgtgcttacttagttggca

SEQ ID NO: 430246 - DNA, 120 bp, Artificial Sequence
  ENSG00000152078_18 (sequence is synthesized)
ttttagtgctttgaatttctatcttaaagcacagaaaaaaaaaggtaatttaatccaagtattctatcatcaaaattattgtctgattatatgaagataaatgactggcgactctggttg

SEQ ID NO: 430247 - DNA, 120 bp, Artificial Sequence
  ENSG00000152078_19 (sequence is synthesized)
tgtgtgtatgtgttttgcttttactttaattcttgcaatccaaatatagaattatatatttatctattattgcctttattctttaagcacttgagtttaatgattattcttacctgagaa

SEQ ID NO: 430248 - DNA, 120 bp, Artificial Sequence
  ENSG00000152078_20 (sequence is synthesized)
aggaagaaatttaattctaccagtgatgaatacttgaaattaattgaactcataccaaaagatgtaatccagtttctcagtttgaaggagaacgtttgactcactttcattgttcatgct

SEQ ID NO: 430249 - DNA, 120 bp, Artificial Sequence
  ENSG00000152078_21 (sequence is synthesized)
agctgaatataatcaagacttttgatttgatttgcttttattattcaatgcagatagagcctgataagttttagaacatttaaagaagattgaaatctcagtcagtaactaaatgataaa

SEQ ID NO: 430250 - DNA, 120 bp, Artificial Sequence
  ENSG00000152078_22 (sequence is synthesized)
atgagattgattggcttatactaggtacatttatttttgaaagaattaatgtaaaataatagttatttttaaagcagctaatattacactgataatttgttgctaaatttagtgctgtcc

SEQ ID NO: 430251 - DNA, 120 bp, Artificial Sequence
  ENSG00000152078_23 (sequence is synthesized)
acatcataggtgcttaaatatgtactggttaactagaggggggtaggaaagcaagcggttttatcttgttcttacctttttgcaggaaaagtggctttaaaaaaatttatataataaaac

SEQ ID NO: 430252 - DNA, 120 bp, Artificial Sequence
  ENSG00000152078_24 (sequence is synthesized)
tattttggaaattcattcttttagaaagagaccttgagataaatattttttgactctggatatttctatagttctgaacacagattttaaacccactatcaaaatgaaaacaatataaag

SEQ ID NO: 430253 - DNA, 120 bp, Artificial Sequence
  ENSG00000152078_25 (sequence is synthesized)
ctatattagtgagtctccatgtagcagtttgtttttatagttactgtttcatgcttaaaacttcattcttactttcattaatgttacccttcactggtatagccactcactaaataagta

SEQ ID NO: 430254 - DNA, 120 bp, Artificial Sequence
  ENSG00000152078_26 (sequence is synthesized)
caacatccagattaaatatcctgaagtaggttctatatatttcctcatacaacagacatggaatggaaatgccactagaaactgccctgctacttttaagtctgacctttgcaggaggta

SEQ ID NO: 430255 - DNA, 120 bp, Artificial Sequence
  ENSG00000152078_27 (sequence is synthesized)
cactttgctgttctatgattgtattcacctacctaaaatacaaatgaagacagaacatatcatttactgcacgatgaatttttcatttattaaatgaaaaacgtttgctagacattttaa

SEQ ID NO: 430256 - DNA, 120 bp, Artificial Sequence
  ENSG00000152078_28 (sequence is synthesized)
ttgactacacggattaatttaaatgattctatcaggcattctgatatttaacaactctattaaaatatttatagaaaaataaaagcaaattgatataaatttttgagcaattctattttt

SEQ ID NO: 430257 - DNA, 120 bp, Artificial Sequence
  ENSG00000152078_29 (sequence is synthesized)
aattctatttttgtagaaaaaagataacctgtaattataaagatgttttttgaatgtgtagtatcctagaaaataaaagttcttgtgaaacttaaaaaatgaatgaaaaccaactaatag

SEQ ID NO: 430258 - DNA, 120 bp, Artificial Sequence
  ENSG00000152078_30 (sequence is synthesized)
catgcaagatcatagatcctgcattaaatttttatttgtgaaaatttgaaaattatgagctataacttataaagtttgccttcttatgtctaaaatcttttaaaggattatttgcattta

SEQ ID NO: 430259 - DNA, 120 bp, Artificial Sequence
  ENSG00000152078_31 (sequence is synthesized)
tgtaaaactggaaatgaagttatatatgagtgcaaagaaattgacttctgctcaaatatgtgttgataccctacagtaaattgaattaaatttttatcccaactgtttgattttattatt

SEQ ID NO: 430260 - DNA, 120 bp, Artificial Sequence
  ENSG00000152078_32 (sequence is synthesized)
tcatggactagccttacgttaagtgaaatactatttatgttgttaccacccctaagagtgactctgatatattatggatgacccaggacggtcttaaaggtctagttttaaaaactgcct

SEQ ID NO: 430261 - DNA, 120 bp, Artificial Sequence
  ENSG00000152078_33 (sequence is synthesized)
agtttgtaagtatttgaatccagttcttttctaaattttaataatttgactcaaaatttttgctacagggtcaacttttaaattgtatatttcctctgaggcacactgggcatttggaga

SEQ ID NO: 430262 - DNA, 120 bp, Artificial Sequence
  ENSG00000152078_34 (sequence is synthesized)
atggttcttcactggtgtagagagccaggtttactgttggttgcaccatctgttatcaggcatgcagaaacatttttcttctggagaaacagaggggaaggtgttgttacagtgtacatg

SEQ ID NO: 430263 - DNA, 120 bp, Artificial Sequence
  ENSG00000152078_35 (sequence is synthesized)
tttcctctgtgtcgtttttaagggaaataaacatgttccaaaagatgctgttaaaataaatatttgaacacgttttctgtttctaggttgctcttaattccaaacatttaaataaatgtg

SEQ ID NO: 430264 - DNA, 120 bp, Artificial Sequence
  ENSG00000152078_36 (sequence is synthesized)
catttgaatagctttaggtggtttagtctattagctgaaatggaaaagttcatgtattgacatcatcaataatacttcataaaggtttatgtatttttatgtgtttggattccataagaa

SEQ ID NO: 430265 - DNA, 120 bp, Artificial Sequence
  ENSG00000152078_37 (sequence is synthesized)
gttgaacttagataattttatcaagagtagcacagtgtttctcaggtgcgagccagcatacagcgagacccttcatgtgtctctggatgcacatatatcttcccaaccttaaacacagct

SEQ ID NO: 430266 - DNA, 120 bp, Artificial Sequence
  ENSG00000152078_38 (sequence is synthesized)
cattgaaatacattaaagctactgaaagtgagttctgatgcaaaacacatgtgaggtgtgtaggaacaatgaaaagctagaggatctggagttagaggaggcattgagagtgcttttccc

SEQ ID NO: 430267 - DNA, 120 bp, Artificial Sequence
  ENSG00000152078_39 (sequence is synthesized)
ttaaacgccgtgatagtcctcccttgatctagaagtattctctttgaatccttccatctcttcctcctggtacaccagatgacttcatcagcatctccctcttttatgctaacacctttc

SEQ ID NO: 430268 - DNA, 120 bp, Artificial Sequence
  ENSG00000152078_40 (sequence is synthesized)
gctgtcaacttttgagacctccccatgtatctataagcttcccagtctcttatggcaaatttaaaagtttacaaataggttctctcattgaaaaaaagcattgtagtaaagtttaaagtg

SEQ ID NO: 430269 - DNA, 120 bp, Artificial Sequence
  ENSG00000152078_41 (sequence is synthesized)
gagctcagacaaatcatgacttattaagagactacaggaagccattcagcatttaataataactgtttacaacatgaggcaaagctaataatgttatggttttattaagagatctgtcat

SEQ ID NO: 430270 - DNA, 120 bp, Artificial Sequence
  ENSG00000152078_42 (sequence is synthesized)
ctctgtttttcttaaactggtttaacagtcagagctttgtaatgtgtttcagctgaagatttattataggcttgtaaattatctaaatgttctttttagaccccatgacaggagcacaga

SEQ ID NO: 430271 - DNA, 120 bp, Artificial Sequence
  ENSG00000152078_43 (sequence is synthesized)
ggaactgagataactctgtgttatgagagggtggatgctggcttgtgccaaaattattttagagtcctgctctttagggaaaactttgctatggtaatgtttctttgaaaacaaatttac

SEQ ID NO: 430272 - DNA, 120 bp, Artificial Sequence
  ENSG00000152078_44 (sequence is synthesized)
cagcaactgcgttacttggtgttttccaaagtacaacatccaaggcttgaaccttacccgtttctaggccagactaggccagcctctagttttgataataattcatacctttattggaat

SEQ ID NO: 430273 - DNA, 120 bp, Artificial Sequence
  ENSG00000152078_45 (sequence is synthesized)
atattttggatagcagtgaagaattgaaagcagctcctaaagattggtttgtttgctttgaaaatgtttacacttattcactctaagcagtggaccattttgatatcaggccctatacat

SEQ ID NO: 430274 - DNA, 120 bp, Artificial Sequence
  ENSG00000152078_46 (sequence is synthesized)
aagaccaaaaccagaaatatttctaaatctcaaagatttataagtacagtacctctggctgaaaactcgttaaacatctttggatattttttctttatatctttatgtaattatttctgt

SEQ ID NO: 430275 - DNA, 120 bp, Artificial Sequence
  ENSG00000152078_47 (sequence is synthesized)
aattaagtgtacattagggttatttgctacttaacaagcctaaaggtatagctgtatatagaatgtgctctgtgtttttctgtttcctgcttggtttgtttctggtatgactatgtctac

SEQ ID NO: 430276 - DNA, 120 bp, Artificial Sequence
  ENSG00000152078_48 (sequence is synthesized)
taaggaattttgtgtagataatactctcactaacttgtaaataggataagttatgagattttttggtattagaatttgtaataataatgacttttagattttatttgaaaaagctacttg

SEQ ID NO: 430277 - DNA, 120 bp, Artificial Sequence
  ENSG00000152078_49 (sequence is synthesized)
aaaagctacttggaaagcagtaaatagaactatagtgatatatatagatacatagatatatacttttttctgagaatgtataatatataattgtcaaagatttttggaagtctttcaaaa

SEQ ID NO: 430278 - DNA, 120 bp, Artificial Sequence
  ENSG00000152078_50 (sequence is synthesized)
cttaataccattttgagaacataccttctaatttatttccataaggctgaagaacttttatttacaaaatgtaagactagataatgtatgaatcagtgttactaggacttatcagtactt

SEQ ID NO: 430279 - DNA, 120 bp, Artificial Sequence
  ENSG00000152078_51 (sequence is synthesized)
aaaatagcaacttggcattctttattttgtttcctggttgttttatttggagggataataaatgtctaagttatttccattaaaattttgaaatgtttgtatactttatgtgtgccattt

SEQ ID NO: 430280 - DNA, 120 bp, Artificial Sequence
  ENSG00000152078_52 (sequence is synthesized)
taaagtatatgcaagttctaagcaataatctgcatgttatacaaggttgacatattttgtcctgaaatttttagttaacatttcaagaatgataaaatgaacaccctgtaaattaccctt

SEQ ID NO: 430281 - DNA, 120 bp, Artificial Sequence
  ENSG00000152078_53 (sequence is synthesized)
ctccccctcccctccatgaaaaccttgggattttcttgtgctagaacactaccacaatgtggtgcaaagctttgtattttgtggaaaaaaacaataaaatcacaattatttagtgcaaaa

SEQ ID NO: 430282 - DNA, 80 bp, Artificial Sequence
  ENSG00000152078_54 (sequence is synthesized)
ccgcgccagccgccaagcgcagcccgcggagaggggtgccgcggcttcccgcccctggcctagcgcggccgagagctcct

SEQ ID NO: 430283 - DNA, 120 bp, Artificial Sequence
  ENSG00000152078_55 (sequence is synthesized)
gcccggggctcccgggcgggctccggcaggtgcagaactcacatagatgaaatgatgggacagatgcagaagaggggactttccaccagttctacttacttcaaagcaaaatgattggct

SEQ ID NO: 430284 - DNA, 120 bp, Artificial Sequence
  ENSG00000152078_56 (sequence is synthesized)
ccgggcgccccgcattcctctcgcgtttctcgggctgcacgattccggctgccctgtctgcctggcggtgcctctcgggtctgagcttaaagcgggtgggtgcaaacctttgggcatcca

SEQ ID NO: 430285 - DNA, 120 bp, Artificial Sequence
  ENSG00000152082_0 (sequence is synthesized)
tttcttgaaagaggcatttaccgagcgcccaatgtatgcctggcactgggctgggtgctgccacctaagcgagcacgaccaatgcagtctatcagggaggcccagatcgccaagcagcgg

SEQ ID NO: 430286 - DNA, 120 bp, Artificial Sequence
  ENSG00000152082_1 (sequence is synthesized)
acccctgcggtccgccatgccactcccggctcctagagcgccgctcagcacaccgtgagcgcccaataactgttgggcttcaatgacgccgcggaggcggccccgtccccgcgctcccgc

SEQ ID NO: 430287 - DNA, 80 bp, Artificial Sequence
  ENSG00000152082_2 (sequence is synthesized)
ccctcccgccagggcagcccgggaggccagacgttgacgctgcagggagagggtggtgggcgcagccgctagggggcgcg

SEQ ID NO: 430288 - DNA, 120 bp, Artificial Sequence
  ENSG00000152082_3 (sequence is synthesized)
gagcaccgaggagatggagctgtacgagctggcgcaggcggcgggcggcgctatcgaccccgacgtgttcaagatcctggtggacctgctgaagctgaacgtggcccccctcgccgtctt

SEQ ID NO: 430289 - DNA, 120 bp, Artificial Sequence
  ENSG00000152082_4 (sequence is synthesized)
ccagatgctcaagtccatgtgtgccgggcagaggctagcgagcgagccccaggaccctgcggccgtgtctctgcccacgtcgagcgtgcccgagacccgagggagaaacaaaggcagcgc

SEQ ID NO: 430290 - DNA, 120 bp, Artificial Sequence
  ENSG00000152082_5 (sequence is synthesized)
tgccctcgggggagcattggccctggcggaacgcagcagccgcgaaggatccagccagaggatgccacgccagcccagcgctaccaggctgcccaaggggggcgggcctgggaagagccc

SEQ ID NO: 430291 - DNA, 120 bp, Artificial Sequence
  ENSG00000152082_6 (sequence is synthesized)
tacacggggcagcacctaggatggggcagagacttgttgcatctttgtccccagcaaaggctacatgttacctccttcaattgataataaacctttctgagatgcagagggtccaggtca

SEQ ID NO: 430292 - DNA, 120 bp, Artificial Sequence
  ENSG00000152082_7 (sequence is synthesized)
gcagcctgcggcctctccggttctgctccacagcccggctgccacacactcgcctctctctccaggccccccgggttccctccgcctctcttgctgcctgttctctccttttgcagggag

SEQ ID NO: 430293 - DNA, 120 bp, Artificial Sequence
  ENSG00000152082_8 (sequence is synthesized)
cttgtcgggtcttcagggaggtggccgcgccgggcggagagggctcaccggccccgcgtctgtccccgccaggatcctggtggacctgctgaagctgaacgtggcccccctcgccgtctt

SEQ ID NO: 430294 - DNA, 120 bp, Artificial Sequence
  ENSG00000152082_9 (sequence is synthesized)
gcttcgctgccagccttaggaggcacgtccaggtcaggtggacgcagagtgcgtaccccagggtggtccaggctgggtagggctcctccgcttagctcccctccacctcttcactcaggc

SEQ ID NO: 430295 - DNA, 120 bp, Artificial Sequence
  ENSG00000152082_10 (sequence is synthesized)
cttcatcctacaacgtcgggaatcaagacagtttggggctgggcgccctggctcacgcctataatctttgggaccccagggcgggaggatcgtttgaggccatgagttttagaccactct

SEQ ID NO: 430296 - DNA, 120 bp, Artificial Sequence
  ENSG00000152082_11 (sequence is synthesized)
tgaggggaggagaggaagctcagatggcagcaagctgaagggaagccgactctgagtcaggcccaagtctgcggcctgccatgctgcgtgctgtggggagctgagagcgcatgggcacct

SEQ ID NO: 430297 - DNA, 120 bp, Artificial Sequence
  ENSG00000152086_0 (sequence is synthesized)
attgcagttgggcgctcagcagctgtggcagccggttgaggtctggaagtagcgttgggctgaagcagcggagttcgccatgcgcgagtgtatctctatccacgtggggcaggcgggtgt

SEQ ID NO: 430298 - DNA, 120 bp, Artificial Sequence
  ENSG00000152086_1 (sequence is synthesized)
ccagatcggcaatgcctgctgggaactgtactgccttgaacatggaattcagcccgatggtcaaatgccaagtgataaaaccattggtggcggggacgactccttcaacacgttcttcag

SEQ ID NO: 430299 - DNA, 120 bp, Artificial Sequence
  ENSG00000152086_2 (sequence is synthesized)
tgagactggagctggcaagcacgtgcccagagcagtgtttgtggacctggagcccactgtggtcgatgaagtgcgcacagggacctacaggcagctcttccacccagagcagctgatcac

SEQ ID NO: 430300 - DNA, 120 bp, Artificial Sequence
  ENSG00000152086_3 (sequence is synthesized)
cgggaaggaagatgcagccagtaattacgccaggggccattacaccatcggcaaggagattgttgacctagtcctggaccggatccgcaaactggcggatctgtgcacaggactgcaggg

SEQ ID NO: 430301 - DNA, 120 bp, Artificial Sequence
  ENSG00000152086_4 (sequence is synthesized)
cttcctcatcttccacagctttgggggcggcactggctctgggttcgcatctctgctcatggagcggctctcagtggattacagcaagaagtccaagctagagtttgccatttacccagc

SEQ ID NO: 430302 - DNA, 120 bp, Artificial Sequence
  ENSG00000152086_5 (sequence is synthesized)
cccccaggtctccacagccgtggtggagccctacaactccatcctaaccacccacacgaccctggaacattctgactgtgccttcatggtcgacaatgaagccatctatgacatatgtcg

SEQ ID NO: 430303 - DNA, 120 bp, Artificial Sequence
  ENSG00000152086_6 (sequence is synthesized)
ctccctgcgatttgatggggccctgaatgtggacttgacggaattccagaccaacctcgtgccgtacccccgcatccacttccccctggccacctacgccccagtcatctcagctgagaa

SEQ ID NO: 430304 - DNA, 120 bp, Artificial Sequence
  ENSG00000152086_7 (sequence is synthesized)
ggcctaccacgagcagctgtctgtggccgagatcaccaatgcctgcttcgagccagccaatcagatggtcaagtgtgaccctcgccatggcaagtacatggcctgctgcatgttgtacag

SEQ ID NO: 430305 - DNA, 120 bp, Artificial Sequence
  ENSG00000152086_8 (sequence is synthesized)
gggggacgtggtccccaaagacgtcaatgcggccatcgccaccatcaagaccaagcgcactatccagtttgtggattggtgcccgactggatttaaggtgggcattaactaccagccccc

SEQ ID NO: 430306 - DNA, 120 bp, Artificial Sequence
  ENSG00000152086_9 (sequence is synthesized)
cacagtggtccccgggggagacctggccaaggtgcagcgggccgtgtgcatgctgagcaacaccacggccattgcggaggcctgggcccgcctggtccataagttcgatctcatgtatgc

SEQ ID NO: 430307 - DNA, 120 bp, Artificial Sequence
  ENSG00000152086_10 (sequence is synthesized)
caagtgggcctttgtgcactggtacgtgggcgaaggcatggaagagggagagttctctgaggcccgcgaggacctggcagctctagagaaggattgtgaagaggtgggcgtggattccgt

SEQ ID NO: 430308 - DNA, 120 bp, Artificial Sequence
  ENSG00000152086_11 (sequence is synthesized)
ggaagctgaggctgaagaaggcgaagcatactgaggggagggtgtggtgggttctcccctgccacccctaggatggctgctttcaagttgtttgcaattaaagattctgtataaaaccaa

SEQ ID NO: 430309 - DNA, 120 bp, Artificial Sequence
  ENSG00000152092_0 (sequence is synthesized)
atcgcagcgctaggaggaaggcggccggggctcaagatggctttagccgggctctgcgccctgctcgcctgctgctgggggccggcggcggtgctggccacggccgccggcgacgtggat

SEQ ID NO: 430310 - DNA, 120 bp, Artificial Sequence
  ENSG00000152092_1 (sequence is synthesized)
ccatccaaggagctggagtgcaagctcaaaagcatcacggtgtcggcactgcccttcctgcgcgagaacgacctgagcatcatgcacagcccctcggcctcggagcccaagctcctcttc

SEQ ID NO: 430311 - DNA, 120 bp, Artificial Sequence
  ENSG00000152092_2 (sequence is synthesized)
tcggtgcgcaacgacttcccgggagaaatggtcgtggtggacgacctggagaacacggagctgccctacttcgtgctggagatctcagggaacacagaggatatccctttggtgcgctgg

SEQ ID NO: 430312 - DNA, 120 bp, Artificial Sequence
  ENSG00000152092_3 (sequence is synthesized)
aggcagcagtggctggagaatggcactttgctttttcacattcatcaccaagatggtgccccaagccttcctggacaagaccccactgaagaaccccaacatgagtcggcagaagaggag

SEQ ID NO: 430313 - DNA, 120 bp, Artificial Sequence
  ENSG00000152092_4 (sequence is synthesized)
ctgaggatcctccacatctcagtcatgggtggcatgatcgctctgctgctgtccatcttgtgcctggtgatgatcctgtatactcgccggcgctggtgcaaacgccgccgggtcccgcag

SEQ ID NO: 430314 - DNA, 120 bp, Artificial Sequence
  ENSG00000152092_5 (sequence is synthesized)
ccccagaagagtgccagtgctgaggcagccaatgagattcactacattccttctgtgctgatcggcgggcacggacgggagagcctgcgcaatgcccgcgtgcagggccacaactccagt

SEQ ID NO: 430315 - DNA, 120 bp, Artificial Sequence
  ENSG00000152092_6 (sequence is synthesized)
ggcaccctgagcatccgggagacacctatcctggacggctatgagtatgacatcactgatctgcgccaccatctgcagagggagtgcatgaacggaggggaggactttgccagccaggtc

SEQ ID NO: 430316 - DNA, 120 bp, Artificial Sequence
  ENSG00000152092_7 (sequence is synthesized)
acgcgcaccctcgactccctgcagggctgcaatgaaaagtcggggatggacctcacaccaggaagtgacaatgccaagctgtcactgatgaacaagtataaagataatattatagccact

SEQ ID NO: 430317 - DNA, 120 bp, Artificial Sequence
  ENSG00000152092_8 (sequence is synthesized)
agccctgtggactccaaccaccagcaagccacccttctctctcacacctccagcagccagagaaagcggatcaacaacaaagcaagagctggttccgccttcttgaaccctgaaggggat

SEQ ID NO: 430318 - DNA, 120 bp, Artificial Sequence
  ENSG00000152092_9 (sequence is synthesized)
tctggcacagaggcagaaaacgacccccagctgaccttttacacggatccttcaaggagcaggaggcgtagtagagtgggttctccccgaagtcctgtgaataagaccaccttgaccctg

SEQ ID NO: 430319 - DNA, 120 bp, Artificial Sequence
  ENSG00000152092_10 (sequence is synthesized)
atcagcatcaccagctgtgtgattggcctcgtgtgctcctctcacgtcaactgccctctcgttgtcaagatcaccctgcatgtccctgagcacctgattgctgatgggagccgcttcatc

SEQ ID NO: 430320 - DNA, 120 bp, Artificial Sequence
  ENSG00000152092_11 (sequence is synthesized)
ttgctggaggggagccagctggatgccagtgactggctgaaccctgcccaagtggttctcttctctcagcagaactccagcggaccctgggccatggacctctgtgcccggcggctcctg

SEQ ID NO: 430321 - DNA, 120 bp, Artificial Sequence
  ENSG00000152092_12 (sequence is synthesized)
gacccctgtgaacaccaatgtgaccccgaaactggggaatgcctctgctatgaaggctacatgaaggatccagtacataagcacctttgcattcggaacgaatgggggacaaaccagggg

SEQ ID NO: 430322 - DNA, 120 bp, Artificial Sequence
  ENSG00000152092_13 (sequence is synthesized)
ccatggccttacacaatatttcagcgaggctttgacctggttttgggagagcagccctctgataaaatatttagattcacctacactcttggggagggcatgtggttgcccctcagcaag

SEQ ID NO: 430323 - DNA, 120 bp, Artificial Sequence
  ENSG00000152092_14 (sequence is synthesized)
agctttgtgattccaccagccgaactggccatcaatccatcagcaaagtgcaagacggacatgactgtgatggaggatgctgtggaggtcagagaggagctgatgacttcatcctccttc

SEQ ID NO: 430324 - DNA, 120 bp, Artificial Sequence
  ENSG00000152092_15 (sequence is synthesized)
gacagcctggaggttctcttagattcctttgggccggtgcgcgactgcagcaaagataacgggggctgcagtaagaatttccgctgtatttcagatcgcaagctggactccactggttgc

SEQ ID NO: 430325 - DNA, 120 bp, Artificial Sequence
  ENSG00000152092_16 (sequence is synthesized)
gtgtgcccatctggactcagtcccatgaaggacagctctggctgctatgaccgccacatcggggtggactgttccgacggcttcaacggcggctgtgagcagctgtgcctccagcagatg

SEQ ID NO: 430326 - DNA, 120 bp, Artificial Sequence
  ENSG00000152092_17 (sequence is synthesized)
gcgcccttcccggacgaccccaccttgtataacatcctcatgttctgtgggtgcatcgaggactacaagcttggtgtggatggacgctcttgccaactcatcacggagacctgtccagag

SEQ ID NO: 430327 - DNA, 120 bp, Artificial Sequence
  ENSG00000152092_18 (sequence is synthesized)
ggaagtgactgtggggaaagcagggagcttcccatgaaccagaccctctttggggagatgttctttggttacaacaaccattccaaggaagtggctgccggacaggtgctgaaaggaaca

SEQ ID NO: 430328 - DNA, 120 bp, Artificial Sequence
  ENSG00000152092_19 (sequence is synthesized)
ttcaggcaaaacaactttgctcgtggtttagaccagcaactgccagatggtcttgtggtggccactgtgcccctggagaatcaatgcctagaggagatctcggagcccacccctgaccct

SEQ ID NO: 430329 - DNA, 120 bp, Artificial Sequence
  ENSG00000152092_20 (sequence is synthesized)
gacttcctgactgggatggtgaacttcagtgaagtgtctgggtaccctgtgctgcagcactggaaggtccggtctgtgatgtaccacatcaaactcaaccaagtggccatctctcaggcc

SEQ ID NO: 430330 - DNA, 120 bp, Artificial Sequence
  ENSG00000152092_21 (sequence is synthesized)
ctcagcaatgctctccactcgctggatggggctacatctcgtgcagattttgtggcgctgttggaccagttcggcaaccattacatccaggaagctatctacggctttgaggagtcctgt

SEQ ID NO: 430331 - DNA, 120 bp, Artificial Sequence
  ENSG00000152092_22 (sequence is synthesized)
tctatctggtacccaaacaagcaggtccagcggcgactctggctggagtatgaagacatcagtaaaggcaactccccatcagatgagtctgaggagcgggaaagagaccccaaggtgctg

SEQ ID NO: 430332 - DNA, 120 bp, Artificial Sequence
  ENSG00000152092_23 (sequence is synthesized)
acattcccagaatacatcaccagcttgtcagactccggcaccaagcacatggcggctggagtccgcatggagtgccacagcaagggacgatgcccctcgtcctgccccctgtgtcatgtg

SEQ ID NO: 430333 - DNA, 120 bp, Artificial Sequence
  ENSG00000152092_24 (sequence is synthesized)
acatccagccctgacacccctgctgagccggttctgctggaggtgaccaaagcagcccccatctatgaactagtgaccaacaaccagacccagaggctcttgcaggaggctaccatgagc

SEQ ID NO: 430334 - DNA, 120 bp, Artificial Sequence
  ENSG00000152092_25 (sequence is synthesized)
tctctctggtgctcagggactggagatgtcatcgaggactggtgtcgatgtgactccactgcttttggagctgatggactccccacctgtgcgcctctcccacagcctgtgctgagactc

SEQ ID NO: 430335 - DNA, 120 bp, Artificial Sequence
  ENSG00000152092_26 (sequence is synthesized)
tccacggttcacgagcccagcagcactcttgtggtcctggagtgggaacactcagagccaccaatcggggtgcagattgtagattacctcctccgtcaagagaaagtcactgacaggatg

SEQ ID NO: 430336 - DNA, 120 bp, Artificial Sequence
  ENSG00000152092_27 (sequence is synthesized)
gaccactccaaagtggagacagaaacagtgctgagctttgtggacgacatcatctctggagcaaagtctccttgtgcaatgccatctcaggtgccggacaagcagctcaccaccatctct

SEQ ID NO: 430337 - DNA, 120 bp, Artificial Sequence
  ENSG00000152092_28 (sequence is synthesized)
ctgatcatacgatgcctggaacctgacaccatttacatgttcacgctgtggggagtggacaacacaggacggcgctccaggccaagcgacgtgatcgtgaagaccccatgccccgtggtg

SEQ ID NO: 430338 - DNA, 120 bp, Artificial Sequence
  ENSG00000152092_29 (sequence is synthesized)
ctagtgggaaggagcagcagaccgcctacaacaccctcctggatctgggttcccccaccttacaccgggtcctctaccactataaccagcactatgagagttttggggaattcacctggc

SEQ ID NO: 430339 - DNA, 120 bp, Artificial Sequence
  ENSG00000152092_30 (sequence is synthesized)
gatgtgaggatgagttaggtcccaggaaagctggtctcatcctttcccagcttggggacctcagcagttggtgcaatggactccttcaggaacccaagataagcttgcggcgcagctcac

SEQ ID NO: 430340 - DNA, 120 bp, Artificial Sequence
  ENSG00000152092_31 (sequence is synthesized)
tcaagtacctggggtgccgctacagcgagatcaaaccctacggacttgactgggcggagctcagccgggacctcaggaagacgtgtgaggagcagaccctgagtatcccctacaacgact

SEQ ID NO: 430341 - DNA, 120 bp, Artificial Sequence
  ENSG00000152092_32 (sequence is synthesized)
atggggacagcaaagagatctagcaccataaggccagggagctgctgccagaatgaagtaggaaagaggagggatccatctgggttggtctgtggatttttaatattttttaatggaaca

SEQ ID NO: 430342 - DNA, 120 bp, Artificial Sequence
  ENSG00000152092_33 (sequence is synthesized)
tgaaaacctccacagcaacatcgaaaccagggagaaagtgatccttgctccctgcagaacttcttcagtatgatgttctccatctgcatgattgggaaatctgccagccagtggcttcat

SEQ ID NO: 430343 - DNA, 120 bp, Artificial Sequence
  ENSG00000152092_34 (sequence is synthesized)
gcagtgccatatttctttagaggattactttggggtttgctttgccattaatttgttccattcatttttttttccctgagaagtttaccaaaatgctcaagagctctgccgtgctcccca

SEQ ID NO: 430344 - DNA, 120 bp, Artificial Sequence
  ENSG00000152092_35 (sequence is synthesized)
tgaaaagtctattaagtaggcaccctgtgctcactcagttcctaaatccattgcaactgggagcagaggtgaggccagaaagttgttaggcctgccgcaggccccaccctcaagcattcc

SEQ ID NO: 430345 - DNA, 120 bp, Artificial Sequence
  ENSG00000152092_36 (sequence is synthesized)
tcaggaagcgtctcactctgggagccttggccctgctcacagagagagacaatagaaaattgaggaaggtggcccttgtctgtgtctcctggttttcttcctaggccttgctatcactat

SEQ ID NO: 430346 - DNA, 120 bp, Artificial Sequence
  ENSG00000152092_37 (sequence is synthesized)
ttccatacccgaaaggtgaaaccagctttcattataggccccagtgggccacttgggttttgagatccttccttattttaagccaggactgggattaaatctccctctgtcagatctctg

SEQ ID NO: 430347 - DNA, 120 bp, Artificial Sequence
  ENSG00000152092_38 (sequence is synthesized)
tcccttcctctgaacaacatgatctttgagagggaacaagatgccatctgtcaactgcaccttcagaaaagtctacctgggagactagttagcagtccacattcaagaggagacttggag

SEQ ID NO: 430348 - DNA, 120 bp, Artificial Sequence
  ENSG00000152092_39 (sequence is synthesized)
tttattgttttttaaaaaaaccatgcttcctttggatagacttctccagcctaccaatatatatccatgtgcctggattatctttaacccccacacctcttaccttggacaggtaaggct

SEQ ID NO: 430349 - DNA, 120 bp, Artificial Sequence
  ENSG00000152092_40 (sequence is synthesized)
tggccgatgtctgattgggaccaggaggggtcaacactttcatatcagtgttacagtgaactaaagctattattgatcacaaaaaacttctgttcatccccaccttgctaaatttgcttg

SEQ ID NO: 430350 - DNA, 120 bp, Artificial Sequence
  ENSG00000152092_41 (sequence is synthesized)
tgttgctagttttgcaaatcgtttctctgatgaccataagcaggaggattccaccatggtcactgcccatccagtcacagggattctgtgtagggaagcaccactgattgcagttaacat

SEQ ID NO: 430351 - DNA, 120 bp, Artificial Sequence
  ENSG00000152092_42 (sequence is synthesized)
ctagagtgttgtttccatcccactgcccaagcattggcatggtcatgaatggtggcccagccaacaggaagcccagcctttcagaaagagcctggcaaggccctgttgactagcaatggc

SEQ ID NO: 430352 - DNA, 120 bp, Artificial Sequence
  ENSG00000152092_43 (sequence is synthesized)
cttagctgtcccacacaactcagtggcctgaacacacaccttcagccaccatgcctttgaccagggctcctcatctggaaacatatgagaaaggtcagcaaacagatgcaagacctataa

SEQ ID NO: 430353 - DNA, 120 bp, Artificial Sequence
  ENSG00000152092_44 (sequence is synthesized)
ggctagtcattgagctatattggttttttttctaaatagtagtagtgacagataacatttattgagtgcttgctgtatgccaggcgctgatgtaagcactttaggtatcattgaattctc

SEQ ID NO: 430354 - DNA, 120 bp, Artificial Sequence
  ENSG00000152092_45 (sequence is synthesized)
acagcaactcctgaggaaagtgctattcttgtctccattttagtgttgaggaaaacgaggcaaagagaggttatacaacttgcctcaaatcccttgtgcactgtaactcacactgagttt

SEQ ID NO: 430355 - DNA, 120 bp, Artificial Sequence
  ENSG00000152092_46 (sequence is synthesized)
cagtgtgatttcaggctgttggtctccagggcacaggatcttagctactctgggatacccagttctgttttcagtatcatctggcacacaactgtccaagctctcagccccacagggaac

SEQ ID NO: 430356 - DNA, 120 bp, Artificial Sequence
  ENSG00000152092_47 (sequence is synthesized)
ctgcccagagagctttacctttcccaagcatctgtggcatggacatgtcctctgtgcagtggaaggaggaggggcgaaagtacgcccttagcctttggagctagagcacccttgggaccc

SEQ ID NO: 430357 - DNA, 120 bp, Artificial Sequence
  ENSG00000152092_48 (sequence is synthesized)
ctagttccactgcacatggccctcctccccaccctcatgactgggaaggaagcctgtgatgaggctgagataaagcacagggtggtttcactctcctctctccttctttccaaacactga

SEQ ID NO: 430358 - DNA, 120 bp, Artificial Sequence
  ENSG00000152092_49 (sequence is synthesized)
aggatttatttcaaactctctaatgcacctgcctcagagattcccctactttcaaagcaaagatcagcagaaaaattggctgtcccacctgtggcaaatgctggagcctcagttaaagtg

SEQ ID NO: 430359 - DNA, 120 bp, Artificial Sequence
  ENSG00000152092_50 (sequence is synthesized)
cctcaaggggcaaatatttcaccattgccagagaagatgtgacaggccaatcagacagggcccagagcatctctttgctgctactgttttgccatccttctattcatatctgtgcagaac

SEQ ID NO: 430360 - DNA, 120 bp, Artificial Sequence
  ENSG00000152092_51 (sequence is synthesized)
acggtgttttaagcttgagtgaaaggagggtgaggctgccgatgccttcctgcccagaagtggatgatgtgggagttgacaggccagggagagggtgaagcaggtatcagagtcactcct

SEQ ID NO: 430361 - DNA, 120 bp, Artificial Sequence
  ENSG00000152092_52 (sequence is synthesized)
ctgtaccctctccttctgtttttattttaggcacactatcttcctctctcctatctttccctcagtctcccaagttcctctaccttctttatctttgtcttttacttcttctttctgtga

SEQ ID NO: 430362 - DNA, 120 bp, Artificial Sequence
  ENSG00000152092_53 (sequence is synthesized)
ccctccttttttggcctcctctttccccaagactttcttcctcctgtttctcgttgagttctccccactgaatgtgtgtatgtatgtacacacacacacacgtgtgcacacacaatgcac

SEQ ID NO: 430363 - DNA, 120 bp, Artificial Sequence
  ENSG00000152092_54 (sequence is synthesized)
acaactcctatgactggctcctacttacattcaagttaaaaaggctgatatgaacagggcaggggaaaatcttaggatggttgtacaattgactggaggattttttccccttggaagaca

SEQ ID NO: 430364 - DNA, 120 bp, Artificial Sequence
  ENSG00000152092_55 (sequence is synthesized)
ctattgatctcaacctgctgacttttcctaatgcttacctgaaggaacccatcctggctagaaagggtgatggtactggaccggtattcaaccttgagttttcaagctgccaaacaggtc

SEQ ID NO: 430365 - DNA, 120 bp, Artificial Sequence
  ENSG00000152092_56 (sequence is synthesized)
ttaagggaggtgcttatatcccaccaacactctcccagctcccatgtccccaagacctctggagtttcctcttgaatgtacatgaaccactgtaatagcattagacttttaattgagtgt

SEQ ID NO: 430366 - DNA, 120 bp, Artificial Sequence
  ENSG00000152092_57 (sequence is synthesized)
gcaatcgttttccatggagtttggtccgttcattattttttagttaactacacttcttgatattcaaatgttctattaaaaaaactgagtatgaagaaaaacactttactactgcagaag

SEQ ID NO: 430367 - DNA, 120 bp, Artificial Sequence
  ENSG00000152092_58 (sequence is synthesized)
gaagaaagaatataatatgaccatcttcaggtataacagtgttgtttaaaagagaattattgtatgattataaaagatgaaataattaactgaataataaaacaaagctattagtaagca

SEQ ID NO: 430368 - DNA, 120 bp, Artificial Sequence
  ENSG00000152092_59 (sequence is synthesized)
agctcccttcctctttcctttcgacgtccttccttccctttttctcctctcccccctcccccgctttcccttctccagataagcagctccgggaaacaaagaatccggggctctccagac

SEQ ID NO: 430369 - DNA, 120 bp, Artificial Sequence
  ENSG00000152092_60 (sequence is synthesized)
atcagagcttaaacccaggactctgcaagcggcatctcattccggggtccagggctctcccggctctccatcccctccctaacctcccccgcctcccgcgctcgctccctcgctccctcc

SEQ ID NO: 430370 - DNA, 120 bp, Artificial Sequence
  ENSG00000152092_61 (sequence is synthesized)
cagcctaaaatgtagctattgcatgagatgtgtgagctatttactcagatttatccagaagagcagatggctagaatcgaattcttttctaagtagagattacattgcatgtgttatctt

SEQ ID NO: 430371 - DNA, 120 bp, Artificial Sequence
  ENSG00000152092_62 (sequence is synthesized)
ttaggtcccaggcttccagcgtgttgggacagtcagaggagttgtagatgattggaggaaaggaagaagacggcagccagggtatttccccttctccctgcctcagatggcatctccagc

SEQ ID NO: 430372 - DNA, 120 bp, Artificial Sequence
  ENSG00000152092_63 (sequence is synthesized)
atctccttcatgacctctgtctcctccgtgtgaccttccatcccctcaaagcaggagctgcgccctgatgttgctaatctgataggttgctcctatttgtccttctataatcccaaagtc

SEQ ID NO: 430373 - DNA, 120 bp, Artificial Sequence
  ENSG00000152092_64 (sequence is synthesized)
ttcctaattggtttctcatcttgaacttcctctgtggaattacctaaaatgtattttgctttcctgactaggtcttgattaatatatacttcaaactaaaagttagtacatatcgtctga

SEQ ID NO: 430374 - DNA, 120 bp, Artificial Sequence
  ENSG00000152092_65 (sequence is synthesized)
aatcatgccagactcctctctctccttcatcgtcacatccaatcaatcaccacatcatgattgctctactccctcaatatcacttggagctctccagctctgattgctacaggcattcct

SEQ ID NO: 430375 - DNA, 120 bp, Artificial Sequence
  ENSG00000152092_66 (sequence is synthesized)
tggccatcctcttaaaaggacaccagtcatattggattttggcaccccctactccaggctgacctcatcttaactaattacacctgcaaagaccctatttccaaataagggatggatttg

SEQ ID NO: 430376 - DNA, 120 bp, Artificial Sequence
  ENSG00000152092_67 (sequence is synthesized)
cacaggtccattgccaagctcttgtcctgttcatttgtgagcaaagatgggtgtccggggacacatggcagactgtgcccattgacgggagtaagcgagctgaacaagctttcaggacca

SEQ ID NO: 430377 - DNA, 120 bp, Artificial Sequence
  ENSG00000152092_68 (sequence is synthesized)
ctgaacttgagaccttggctatatgagcccagggtaaaagtcaactgagccttgagatgcagaaccagagagaagtggagggaggaagacagtagttactattatcaccattttacagaa

SEQ ID NO: 430378 - DNA, 120 bp, Artificial Sequence
  ENSG00000152092_69 (sequence is synthesized)
aaaggaaactgaagcttggaaaggtcaaatatctttagctgtatcagttgcatgaagttagcaagagacttgaatccagaacttggacttgaatggagatctatctgacttcagagctaa

SEQ ID NO: 430379 - DNA, 120 bp, Artificial Sequence
  ENSG00000152092_70 (sequence is synthesized)
cccacaaaaccccagccatggtgagactgtcttggggtgatttgtatgggagactgcagggtcagtgttggtcagcgacggaccctgctctcagcatgctctttctgcctgactgctttc

SEQ ID NO: 430380 - DNA, 120 bp, Artificial Sequence
  ENSG00000152092_71 (sequence is synthesized)
agtgtctgcagcagctgctagcagggtgagagaggaggaagagagcagtcgtgagtctcaccagccatctgactccctacccacaaagaaaatgctgcagctgtgacatgtgtgtttgtc

SEQ ID NO: 430381 - DNA, 120 bp, Artificial Sequence
  ENSG00000152092_72 (sequence is synthesized)
agtgtgtgtcacatgtgcacgaccacatgtgtgtatgtgtgcataggtgggggcatctgtacctgtagatgcatttctgaatgtaggaaaatctcaatgctgcatagtactgttttcatg

SEQ ID NO: 430382 - DNA, 120 bp, Artificial Sequence
  ENSG00000152092_73 (sequence is synthesized)
gaactgttgatcctcagaaatagaaatgattgacagtttttcaaaaatgaatatgcatctcatataattgtaatgagatttgggatatcttaattcatcaataaaggggacaggaaggaa

SEQ ID NO: 430383 - DNA, 120 bp, Artificial Sequence; identical to SEQ ID NO: 330418
  ENSG00000152093_0 (sequence is synthesized)

SEQ ID NO: 430384 - DNA, 120 bp, Artificial Sequence; identical to SEQ ID NO: 330419
  ENSG00000152093_1 (sequence is synthesized)

SEQ ID NO: 430385 - DNA, 120 bp, Artificial Sequence; identical to SEQ ID NO: 330420
  ENSG00000152093_2 (sequence is synthesized)

SEQ ID NO: 430386 - DNA, 120 bp, Artificial Sequence; identical to SEQ ID NO: 330421
  ENSG00000152093_3 (sequence is synthesized)

SEQ ID NO: 430387 - DNA, 120 bp, Artificial Sequence
  ENSG00000152093_4 (sequence is synthesized)
cgctcccatactcctgggctttcggagagggtgcgtccgcgcggccgcgctgctgcaggaacggcggtacctgcgtgctgggcagcttctgcgtgtgcccggcccacttcaccggccgct

SEQ ID NO: 430388 - DNA, 120 bp, Artificial Sequence
  ENSG00000152093_5 (sequence is synthesized)
actgcgagcatgaccagaggcgcagtgaatgcggcgccctggagcacggagcctggaccctccgcgcctgccacctctgcaggtgcatcttcggggccctgcactgcctccccctccaga

SEQ ID NO: 430389 - DNA, 120 bp, Artificial Sequence
  ENSG00000152093_6 (sequence is synthesized)
ttgctgccctgcgcactcctgcaccgcctcctgcgcccggatgcgcccgcgcaccctcggtccctggtcccttccgtcctccagcgggagcggcgcccctgcggaaggccgggacttggg

SEQ ID NO: 430390 - DNA, 120 bp, Artificial Sequence
  ENSG00000152093_7 (sequence is synthesized)
catcgcctttaattttctatgttgtaaataatagatgtgtttagtttaccgtaagctgaagcactgggtgaatatttttattgggtaataaatattttcatgaaagcgcctttggctcca

SEQ ID NO: 430391 - DNA, 120 bp, Artificial Sequence
  ENSG00000152093_8 (sequence is synthesized)
gatccttgggagagggacacgtgtgtccccagcaccactgtgaccggtaggtagagacagcagaacaacagcgagaaggagccaaagctggagccagaaagcctggcaccgccaccttcc

SEQ ID NO: 430392 - DNA, 120 bp, Artificial Sequence
  ENSG00000152093_9 (sequence is synthesized)
cctgacagttagcaccttcctttcacaacatctcccttaagggggaagcgtctgctgtggaacccaccgcaaggcaacgcaggcagagttcagcctgaagagcgccaggccagcctcctc

SEQ ID NO: 430393 - DNA, 120 bp, Artificial Sequence
  ENSG00000152093_10 (sequence is synthesized)
tgtcttccgagcaccgcttctcaggtcgcttcccaatctgaggaggctgtcgtgtccacaaccagtccagggggatgtgcgccactagctgaggacgccaggcccggcgacaccacaaag

SEQ ID NO: 430394 - DNA, 120 bp, Artificial Sequence
  ENSG00000152093_11 (sequence is synthesized)
gcttggccatgcggaatgtgccctcaagagcacacacttcgggtagaaggcacttgcattgagctcttcagctttttaaatccactgtagttcatgagcctgtgtgacacaattactttt

SEQ ID NO: 430395 - DNA, 120 bp, Artificial Sequence
  ENSG00000152093_12 (sequence is synthesized)
acattttatattgtcaattagtttattggcattttcaatcttttcaactattggctatgaaaatatgaatttaacgtaacattcaaatgagtattaaagaaaaataaagtagaacttcat

SEQ ID NO: 430396 - DNA, 120 bp, Artificial Sequence
  ENSG00000152102_0 (sequence is synthesized)
cggcggggagcgcgggctgcggagaggcgggccgggccaagcggagccgagcgagcgggagcgcggcgtccgggaggcggcggagacgcggggctcggagggtcagcctcttatcgtagc

SEQ ID NO: 430397 - DNA, 120 bp, Artificial Sequence
  ENSG00000152102_1 (sequence is synthesized)
gctcggagggtcagcctcttatcgtagcaggtctcctcggcacgccccccttgtttcgccccacggccaagcccgccgcgggccggcgtgcgctggtcactgaggcccaggtcgccgccg

SEQ ID NO: 430398 - DNA, 120 bp, Artificial Sequence
  ENSG00000152102_2 (sequence is synthesized)
cggcgcgtttttgaaatcatgaatcctgtttatagtcctggatcttctggggttccctatgcaaatgccaaaggaattggttatccagctggttttcccatgggctatgcagcagcagct

SEQ ID NO: 430399 - DNA, 120 bp, Artificial Sequence
  ENSG00000152102_3 (sequence is synthesized)
cctgcctattctcctaacatgtatcctggagcgaatcctaccttccaaacaggttacactcctggcacaccttacaaagtgtcctgttcccccaccagcggggctgtgccaccgtactcc

SEQ ID NO: 430400 - DNA, 120 bp, Artificial Sequence
  ENSG00000152102_4 (sequence is synthesized)
tcctccccgaacccctaccagactgccgtgtaccctgtgcgaagtgcctacccccagcagagcccgtatgcacagcaaggcacgtactacacacagccgctgtatgcagcacctcctcac

SEQ ID NO: 430401 - DNA, 120 bp, Artificial Sequence
  ENSG00000152102_5 (sequence is synthesized)
gtcatccaccacaccacggtggtgcagcccaacggcatgcctgcaacggtgtaccctgctcccatcccccctcctagaggcaacggggtcaccatgggcatggtggctgggaccaccatg

SEQ ID NO: 430402 - DNA, 120 bp, Artificial Sequence
  ENSG00000152102_6 (sequence is synthesized)
gccatgtcagcaggtaccctgctgactgctcactccccaactcctgtcgccccccacccggtcactgtgcccacgtaccgggccccaggaacgcccacttacagctatgtgccccctcag

SEQ ID NO: 430403 - DNA, 120 bp, Artificial Sequence
  ENSG00000152102_7 (sequence is synthesized)
tggtgatcacctgcaaatgtttgaggacggagctgtgcagtcacattattggggattccacagctggtgctgcaggccttgcgcctccaaccaggactttcttcttaatgctctcgacac

SEQ ID NO: 430404 - DNA, 120 bp, Artificial Sequence
  ENSG00000152102_8 (sequence is synthesized)
ttagctaaacacgactatatcccggcccagcaggccccagcgccgttagtctccagctgactctgtgggttggtcttaaagcaaattctgttttgtggactgcctggcaattttttagct

SEQ ID NO: 430405 - DNA, 120 bp, Artificial Sequence
  ENSG00000152102_9 (sequence is synthesized)
aactgtaatgataaaaagggagtattaatctattctgaatcatatctagttgaatgcatgtttaaaaaaacaaacacaaaaagcttgctcaatctacctgcagtgactgatgcaaaacca

SEQ ID NO: 430406 - DNA, 120 bp, Artificial Sequence
  ENSG00000152102_10 (sequence is synthesized)
tcatatgcaaaatccaaaggaatggaaacgtattttacaacttgtatcactaatgcactgttgtaatgtatgcaaagtcttacagttataagtgttaaagtgaatttcttcatagagcat

SEQ ID NO: 430407 - DNA, 120 bp, Artificial Sequence
  ENSG00000152102_11 (sequence is synthesized)
ctgaaatatcttagatgattcttcaaccttttggggttgatgtgggttgccagttagggatgtggacattttagttttcagcgacctgtttctttggcactgactgtcctgggagggagt

SEQ ID NO: 430408 - DNA, 120 bp, Artificial Sequence
  ENSG00000152102_12 (sequence is synthesized)
tgcgaggtttgggagagagtagggaagccacagctgcttgggtgcagctggttcatggacatccctttgagtttaggcttggtggagtcagtggaacagggacatgcttaaagctcatca

SEQ ID NO: 430409 - DNA, 120 bp, Artificial Sequence
  ENSG00000152102_13 (sequence is synthesized)
tgaaagattatggtagtgtggccagtgaaatttggggcgaggggggtggtttatgtgtcagcaaagcagtttctctgctatctaaattttcattacagttctcttagagagatgatgttt

SEQ ID NO: 430410 - DNA, 120 bp, Artificial Sequence
  ENSG00000152102_14 (sequence is synthesized)
ttatatgtctttattggaaaagtcctatgtaaaactaaattattttcctgggatggaagaaatgtgaaagagaaacagccatgcttgcaggaggtattgtcctctgctttatttagctta

SEQ ID NO: 430411 - DNA, 120 bp, Artificial Sequence
  ENSG00000152102_15 (sequence is synthesized)
gaaaatcattcctttttttttttttttcctggagaaatgtttgaatcagctgaaaacaggtaggcattgctgtttttccccaacaaagaagggcaaaggtttcagctgtatgttatgaag

SEQ ID NO: 430412 - DNA, 120 bp, Artificial Sequence
  ENSG00000152102_16 (sequence is synthesized)
aaagtggtatatttaagaatgagttaaaagggaacaaaactttatttaaaattcctccaatttcttgtagaaaggcagggccgtggatatgtctggaaatgtagaaacctgtagctgctt

SEQ ID NO: 430413 - DNA, 120 bp, Artificial Sequence
  ENSG00000152102_17 (sequence is synthesized)
ctgggatcacccacctgatggtggtgacttgtctgctgaggccggctggaggggacgcttagagatggggcgagggggaggccagtgtctgttgtctgcgagcctctcctgccatctctt

SEQ ID NO: 430414 - DNA, 120 bp, Artificial Sequence
  ENSG00000152102_18 (sequence is synthesized)
ttgcagctgagggcacttggcacaaagcaagcacagacagcagagagggccaggcagtgctggagtgcgtttgctggcagggtttattgtgggagaggaatttgagtttaggatctgaat

SEQ ID NO: 430415 - DNA, 120 bp, Artificial Sequence
  ENSG00000152102_19 (sequence is synthesized)
cttgtacataagaaatgaaaaggcttccctccaccccgcccccaaaatatgcccgtcctgtatccatgagagtgcatgtcggttctcagtgagggtcagagtgggggtgggggatgtaag

SEQ ID NO: 430416 - DNA, 120 bp, Artificial Sequence
  ENSG00000152102_20 (sequence is synthesized)
gcctgggtccctttcagcggcctctagggcaggagcgtgcgtcttcttcccagtgcagtggtggtttgagtgctgtgggctctggtggggagggggctctgctcctcttcatttgctggt

SEQ ID NO: 430417 - DNA, 120 bp, Artificial Sequence
  ENSG00000152102_21 (sequence is synthesized)
agctgggtcagggcactggcgcccagtgaggatgcccactagcattctgccccagttggttggtggggggacacctgaccactgagcctttggtaaccttattttttatagtaagtactt

SEQ ID NO: 430418 - DNA, 120 bp, Artificial Sequence
  ENSG00000152102_22 (sequence is synthesized)
aagtttaggaatatttttgcatggatcattgtaaacagcagattctttattcctgatgtctattaacatagaatgtttactgataagtactttaaattgcttcatgagcacttaatccat

SEQ ID NO: 430419 - DNA, 120 bp, Artificial Sequence
  ENSG00000152102_23 (sequence is synthesized)
cttagtgtctatgtgtgggggcagacatttaccgcaggcacacagtttgtgcccctttcttcaagtctctgttggtaattccatctgtttagtggatggttggcaggattagtaggttct

SEQ ID NO: 430420 - DNA, 120 bp, Artificial Sequence
  ENSG00000152102_24 (sequence is synthesized)
aacggttccaggggttcagctgaccaagtagcagagaagtcttttttcccaattgagtgctaatagattaggataaaatactcacaatgttagtgtatgcttttaaaaagccccacacaa

SEQ ID NO: 430421 - DNA, 120 bp, Artificial Sequence
  ENSG00000152102_25 (sequence is synthesized)
caaaatggaaacatacatgtacaactcctgtgagggctggagtcttggggttcaggaggaggttagaagttacaggcatctcttcaggcttgcttggtacttggcacacacaggatggtg

SEQ ID NO: 430422 - DNA, 120 bp, Artificial Sequence
  ENSG00000152102_26 (sequence is synthesized)
ttttaaagagtgggctgcaccccccacacgccatttacatcagcttcataaacacttttcttcctccctgtaacttaaccttttttcccttttatgaagttgagaggctttatgaaataa

SEQ ID NO: 430423 - DNA, 120 bp, Artificial Sequence
  ENSG00000152102_27 (sequence is synthesized)
gtttgcattgcacatccgtgcagaaatctttctgactttgaaatttttaggacgtcagctgtcagatacgaaaggtagatatcaggtaagaatctggacttaggaaatagtcacaaaact

SEQ ID NO: 430424 - DNA, 120 bp, Artificial Sequence
  ENSG00000152102_28 (sequence is synthesized)
gtcataggttgtaattttatcaacattcgcttctagtaaaattaaagtcaattaagaaatagaacttgggtcaaaattctgttacaaagcttcataatttgtcccgaagcatatggtgga

SEQ ID NO: 430425 - DNA, 120 bp, Artificial Sequence
  ENSG00000152102_29 (sequence is synthesized)
gcattctgagaaatttgctttttgtgtgtttgacattcctaatttgggagtccttcagctgaattactattcttttagaagttgagacagcaggtaagcaaaggacctagttcatgtaaa

SEQ ID NO: 430426 - DNA, 120 bp, Artificial Sequence
  ENSG00000152102_30 (sequence is synthesized)
catggacatcatgatggctatttaaaaaatatttgttctacaccttctcccctgaggcttggggagtgtgttcagccgctgcagtttctctgctcatggaggtcttgtttggatctgtgc

SEQ ID NO: 430427 - DNA, 120 bp, Artificial Sequence
  ENSG00000152102_31 (sequence is synthesized)
tggcggctgagcatttagtgtgagccagtgacccatgaacttgccgctctgtgagggccagagtcagggccagtcatggtaatgggcctgaaggcacttccagaaccttttatgtctctc

SEQ ID NO: 430428 - DNA, 120 bp, Artificial Sequence
  ENSG00000152102_32 (sequence is synthesized)
gtgagccatctgttaagaacgttcttcttggtgtggtttgtaggcctacctgtcgctattctgggaaaccttcttgagtgctatgcaaatgtgttcacaggcaatgggggtggtcctgag

SEQ ID NO: 430429 - DNA, 120 bp, Artificial Sequence
  ENSG00000152102_33 (sequence is synthesized)
ccttggggtgggcacctggtcagtgagtgtcttgcccttccccagctgggcatacagtaccttgctctttctggtggcatcatctggctgtgatgaatgaggtctaggaaataatttgca

SEQ ID NO: 430430 - DNA, 120 bp, Artificial Sequence
  ENSG00000152102_34 (sequence is synthesized)
tgtgtcttgggggacacaacagtaacgagaggaaatacattattacagcaacttgcgacgtactaatacctgtcagtgttggcccccgtaaggtatgtaaggcacctgtgagtgccagtg

SEQ ID NO: 430431 - DNA, 120 bp, Artificial Sequence
  ENSG00000152102_35 (sequence is synthesized)
agtgctggtgaaaggccaacatgtactagttatgtaagtattggtgtctgctttaaaaaaggagacccagacttcacctgtcctttttaaacatttgagaacagtgttactctgagcagt

SEQ ID NO: 430432 - DNA, 120 bp, Artificial Sequence
  ENSG00000152102_36 (sequence is synthesized)
tgggccaccttcaccttatccgacagctgactgttggatgtgtccattgtcgccagtttggctgttgcccggacaggacaggacctccattgggcgcagcagcaggtggcaggggtgtgg

SEQ ID NO: 430433 - DNA, 120 bp, Artificial Sequence
  ENSG00000152102_37 (sequence is synthesized)
cttgaggtgggtggcagcgtctggtcctcctctctggtgctttctgagagggtctctaaagcagagtgtggttggcctgggggaaggcagagcacgtatttctcccctctagtacctctg

SEQ ID NO: 430434 - DNA, 120 bp, Artificial Sequence
  ENSG00000152102_38 (sequence is synthesized)
catttgtgagtgttccctctggctttctgaagggcagcagactcttgagtatactgcagaggacatgctttatcagtaggtcctgagggctccaggggctcaactgaccaagtaacacag

SEQ ID NO: 430435 - DNA, 120 bp, Artificial Sequence
  ENSG00000152102_39 (sequence is synthesized)
aagttggggtatgtggcctatttgggtcggaaactgcatgtttcagaaagtttgtctctttttcctactcattatttgaagaagagagagcctgtggggatagccttatcttggtccaca

SEQ ID NO: 430436 - DNA, 120 bp, Artificial Sequence
  ENSG00000152102_40 (sequence is synthesized)
ggactgaagtgaagtcacttgggaaggggagacagaggatgagcggcgtctgtgtagggacccccccccgggcctgcagaagggtggtgtgctcccaggactggcatgacaggtgtctcc

SEQ ID NO: 430437 - DNA, 120 bp, Artificial Sequence
  ENSG00000152102_41 (sequence is synthesized)
tcctcaccacaggctgtgcccatgagtccctgtgcagaccagtgggcaaggcagctgggccagatctcaggccagccgtttgtgctcctagcagggttgctgtgctggccacacggagag

SEQ ID NO: 430438 - DNA, 120 bp, Artificial Sequence
  ENSG00000152102_42 (sequence is synthesized)
gccctagagagcctcatggattgtaactaaagaagaaacggttcctttttgtttttttaaaaatgatttttaaataccgttttttacaccgttctctcggtactttttttaagctaagtc

SEQ ID NO: 430439 - DNA, 120 bp, Artificial Sequence
  ENSG00000152102_43 (sequence is synthesized)
agcattgtcttccagtgttaaaggcatccctcacctctgcattgaacttacgtatccatgccaaggaatggaatttccatcctgagccagttcagttaggtgtcaattgatactatttta

SEQ ID NO: 430440 - DNA, 120 bp, Artificial Sequence
  ENSG00000152102_44 (sequence is synthesized)
attttttatgcaatctgatgagatgagctcagatttaaaaatctcaaaagcacgtttattgtaacaagaattgttatgtattaatactgcagttttcaataaagattgacttgtgttgca

SEQ ID NO: 430441 - DNA, 120 bp, Artificial Sequence
  ENSG00000152104_0 (sequence is synthesized)
ctttccaactttttctcggcggagtgagcgcagcgggcgcagactcgggggcaggttgctgtgcttctccgggctcagccgcctgctctcctggctcaggtcctcggggagccctagaca

SEQ ID NO: 430442 - DNA, 120 bp, Artificial Sequence
  ENSG00000152104_1 (sequence is synthesized)
gacatcaagtggccactggcgctccttcccctcccagctgagccatcctccccggcctcctcgggcgggacagccccgtgcttaggtttttctccttttctcccccggtgcgcctctgct

SEQ ID NO: 430443 - DNA, 120 bp, Artificial Sequence
  ENSG00000152104_2 (sequence is synthesized)
cggactctcgcgccgggatcgcggcggaaacctccctcccctttcgcctcctgcggctccttcccttcgcccctcctccgccagtcactggaatcaattccgtggggaatcggctccgcc

SEQ ID NO: 430444 - DNA, 120 bp, Artificial Sequence
  ENSG00000152104_3 (sequence is synthesized)
gccgcgaaggacagcctttccgcgcgggactccggggcgccacgggggccatgtaagcagctatcttccagagggccacactgggcatggacacccttttccctgcctggaggagcacag

SEQ ID NO: 430445 - DNA, 120 bp, Artificial Sequence
  ENSG00000152104_4 (sequence is synthesized)
gtgatagtgtaattttccagtcacgaaactgctaaggccatctcaggggcgtgtgcgccaggataggcgggcggcgtccgaggaccacatagccatgccttttggtctgaagctccgccg

SEQ ID NO: 430446 - DNA, 120 bp, Artificial Sequence
  ENSG00000152104_5 (sequence is synthesized)
gacacggcgctacaacgtcctgagcaagaactgctttgtcacacggattcgcctgctggacagcaatgttatcgagtgcacgctgtcggtggaaagcacagggcaagaatgcctggaggc

SEQ ID NO: 430447 - DNA, 120 bp, Artificial Sequence
  ENSG00000152104_6 (sequence is synthesized)
tgtggcccagaggctggagctgcgagagacgcactactttggcctttggtttctcagcaagagccagcaagcacgatgggtggagctggagaaacctctgaagaaacatctggacaaatt

SEQ ID NO: 430448 - DNA, 120 bp, Artificial Sequence
  ENSG00000152104_7 (sequence is synthesized)
cgctaatgagcctttgcttttctttggagtcatgttctatgtgccaaatgtgtcatggcttcagcaagaggccacaagatatcagtattacctgcaagtcaaaaaagatgtgcttgaagg

SEQ ID NO: 430449 - DNA, 120 bp, Artificial Sequence
  ENSG00000152104_8 (sequence is synthesized)
gcgattacgatgtacattggaccaggtgattcggctagccggcctagctgtgcaagctgattttggagactataatcagtttgattctcaagatttcctcagagagtatgtgctatttcc

SEQ ID NO: 430450 - DNA, 120 bp, Artificial Sequence
  ENSG00000152104_9 (sequence is synthesized)
tatggatttggccctggaagaggctgttctggaggagctgacccagaaggtagcccaagaacacaaagcccacagtggaatcctgccagcagaagctgaactgatgtacatcaatgaagt

SEQ ID NO: 430451 - DNA, 120 bp, Artificial Sequence
  ENSG00000152104_10 (sequence is synthesized)
tgaacgtttggatggatttggacaggaaatcttccctgtaaaggacaatcatggaaactgtgtacaccttggcattttctttatggggattttcgtgaggaacagaattggaagacaagc

SEQ ID NO: 430452 - DNA, 120 bp, Artificial Sequence
  ENSG00000152104_11 (sequence is synthesized)
ggtaatatacaggtggaatgacatggggaatatcactcataacaagtcgaccattctagtggagctcatcaacaaagaagagactgccctctttcacacggatgatatcgaaaatgccaa

SEQ ID NO: 430453 - DNA, 120 bp, Artificial Sequence
  ENSG00000152104_12 (sequence is synthesized)
gtatatttctcggttgtttgccacacgacacaagttttacaaacaaaacaaaatctgcactgaacagtcaaattctccaccccccatcagacgccagcccacctggagccgatcctctct

SEQ ID NO: 430454 - DNA, 120 bp, Artificial Sequence
  ENSG00000152104_13 (sequence is synthesized)
gcccaggcagcagccgtacatcctgcctcccgttcacgtccagtgtggtgagcactactcggaaacgcacacctcgcaagacagcatttttcatgggaatgaagaagccttgtattgcaa

SEQ ID NO: 430455 - DNA, 120 bp, Artificial Sequence
  ENSG00000152104_14 (sequence is synthesized)
ctctcacaacagcctggacttaaattatttaaatggcactgtcaccaatggcagcgtgtgtagcgttcacagcgtcaactccctcaactgctcgcaaagtttcatccaggcctcccctgt

SEQ ID NO: 430456 - DNA, 120 bp, Artificial Sequence
  ENSG00000152104_15 (sequence is synthesized)
atcctccaacctcagtatccctgggagtgacatcatgcgggccgactacatcccgagccaccggcacagcgcgatcatcgtgccctcgtacaggccaacccccgattatgagacagtcat

SEQ ID NO: 430457 - DNA, 120 bp, Artificial Sequence
  ENSG00000152104_16 (sequence is synthesized)
gcgccagatgaagagggggatcctgcatacagacagccagagccagtctctgagaaacctcaacattatcaacacccatgcctacaaccagccagaggatctggtgtacagccaaccgga

SEQ ID NO: 430458 - DNA, 120 bp, Artificial Sequence
  ENSG00000152104_17 (sequence is synthesized)
gatgcgggagaggcacccctacactgtcccttatgggccacagggggtctacagcaacaaacttgtcagtccatctgaccagaggaacccaaagaataatgtggtaccaagcaagccggg

SEQ ID NO: 430459 - DNA, 120 bp, Artificial Sequence
  ENSG00000152104_18 (sequence is synthesized)
ggcaagcgccatctcgcacacggtgagcaccccagagctggccaacatgcagctgcagggcagccataactacagcacggcccacatgcttaagaactatctcttcaggccaccgccccc

SEQ ID NO: 430460 - DNA, 120 bp, Artificial Sequence
  ENSG00000152104_19 (sequence is synthesized)
ctacccacggccacgacctgccaccagcaccccagacctggccagccaccgccacaagtacgtcagcggcagcagcccggacctggtgacccggaaggtgcagctctcggtgaagacctt

SEQ ID NO: 430461 - DNA, 120 bp, Artificial Sequence
  ENSG00000152104_20 (sequence is synthesized)
ccaagaggacagctctccggtggttcatcagtctctccaggaggtgagcgagcccctcacggccaccaagcaccacggcactgtgaacaagcgccacagcctggaggtgatgaacagcat

SEQ ID NO: 430462 - DNA, 120 bp, Artificial Sequence
  ENSG00000152104_21 (sequence is synthesized)
ggtgcggggcatggaggccatgacgctcaagtcgctccacctccccatggctcgccgcaacacgctccgggagcagggaccgcccgaggaggggtcaggcagccacgaggtcccccagct

SEQ ID NO: 430463 - DNA, 120 bp, Artificial Sequence
  ENSG00000152104_22 (sequence is synthesized)
ccctcagtatcaccacaagaagaccttctctgatgccactatgctaatccacagcagcgagagtgaggaggaggaggaggaggctccagaatcggtgccccagatccccatgctccggga

SEQ ID NO: 430464 - DNA, 120 bp, Artificial Sequence
  ENSG00000152104_23 (sequence is synthesized)
gaagatggagtacagtgcccagctgcaggcggccctggcccgcatccccaacaagcccccgcctgagtaccccggtccaaggaagagtgtgagcaatggggctctgaggcaggaccaagc

SEQ ID NO: 430465 - DNA, 120 bp, Artificial Sequence
  ENSG00000152104_24 (sequence is synthesized)
cagccttcctcccgccatggccagagccagggtgctgaggcatgggccagccaaggccatcagcatgtctcggactgacccgccggctgtcaacggggcctctctcggcccatccatctc

SEQ ID NO: 430466 - DNA, 120 bp, Artificial Sequence
  ENSG00000152104_25 (sequence is synthesized)
ggaacccgacctgactagtgtgaaggagcgggtcaaaaaagagcctgtgaaggagagacctgtgtctgaaatgttttccctggaagacagcattatagagagagagatgatgatcaggaa

SEQ ID NO: 430467 - DNA, 120 bp, Artificial Sequence
  ENSG00000152104_26 (sequence is synthesized)
tctagagaagcagaagatggcaggcctggaggcacagaagaggccgctgatgttggcagcattgaatgggctctcggtggctcgagtctcagggcgggaagagaatcgagttgatgccac

SEQ ID NO: 430468 - DNA, 120 bp, Artificial Sequence
  ENSG00000152104_27 (sequence is synthesized)
ccgggttcccatggacgagaggttcagaaccctgaagaagaaactagaagagggaatggtgttcacagaatatgagcaaattccaaagaaaaaggcgaatggcattttcagcacagcagc

SEQ ID NO: 430469 - DNA, 120 bp, Artificial Sequence
  ENSG00000152104_28 (sequence is synthesized)
tctgccagaaaacgccgagcgcagccgaatccgtgaagttgtcccctatgaggagaatcgagtagagctgataccaaccaaagaaaataacacaggatacattaatgcctcccacatcaa

SEQ ID NO: 430470 - DNA, 120 bp, Artificial Sequence
  ENSG00000152104_29 (sequence is synthesized)
ggtggtggttggcggggcagaatggcactacatagccacccaggggcccctgccacacacgtgccacgacttctggcagatggtgtgggagcagggagtgaatgtgattgccatggtcac

SEQ ID NO: 430471 - DNA, 120 bp, Artificial Sequence
  ENSG00000152104_30 (sequence is synthesized)
tgcagaggaggagggtggacgaaccaaaagccaccgatactggcccaaactaggttcaaagcacagctcagccacctatggcaagttcaaggtcaccacgaagtttcgaacggattctgt

SEQ ID NO: 430472 - DNA, 120 bp, Artificial Sequence
  ENSG00000152104_31 (sequence is synthesized)
ttgctatgcaaccacgggcttgaaggtcaagcaccttttgtctgggcaagaaaggacggtgtggcatttacaatatactgactggccagatcacggctgtccagaagatgtccaaggatt

SEQ ID NO: 430473 - DNA, 120 bp, Artificial Sequence
  ENSG00000152104_32 (sequence is synthesized)
tttatcctacttggaggagatccagtcggtccgtcgccataccaacagcatgctggaaggcaccaagaaccggcacccgcccatcgtggtccactgtagtgctggggtgggaaggaccgg

SEQ ID NO: 430474 - DNA, 120 bp, Artificial Sequence
  ENSG00000152104_33 (sequence is synthesized)
cgtgctcattctttctgagctgatgatctactgcttggaacataacgaaaaggtggaagtgcccatgatgctgaggctcctcagggagcagaggatgttcatgatccagactatcgctca

SEQ ID NO: 430475 - DNA, 120 bp, Artificial Sequence
  ENSG00000152104_34 (sequence is synthesized)
gtacaagtttgtctaccaagtcctcatccagttcctccaaaactccagactcatttaatcaccccaatccagctcctggaggagggacccagctccatcgcgctggaggagagtcacctc

SEQ ID NO: 430476 - DNA, 120 bp, Artificial Sequence
  ENSG00000152104_35 (sequence is synthesized)
cagacaacatctgctccccccacaggggtgcaggtggctggcagcaaacaggctctctgaagacagtagccaagattattcacacataccatgtattattttatatgagataatttattt

SEQ ID NO: 430477 - DNA, 120 bp, Artificial Sequence
  ENSG00000152104_36 (sequence is synthesized)
ttttcccctttggaataacttttgtgaattattataatgcagtttccctagtaatatagtacttttcatttgaaccacatcttgactgatctgtattgtaatatatgtcagcaggtaagg

SEQ ID NO: 430478 - DNA, 120 bp, Artificial Sequence
  ENSG00000152104_37 (sequence is synthesized)
ttgcctgctggatcattttgaggacagaggcatgagggagcacatctcttgtgaagttgcagccagatttgtaaccaaccctgaaattcatcagcttaattcatttatcagcttgattca

SEQ ID NO: 430479 - DNA, 120 bp, Artificial Sequence
  ENSG00000152104_38 (sequence is synthesized)
ttcatcattcattgcttatatccaaagcaaagacggtaagaaaatgaattcatcctgaaatataaagaaaagggtctgaaggaacaaacacgattctcttatattttggggctcatgagc

SEQ ID NO: 430480 - DNA, 120 bp, Artificial Sequence
  ENSG00000152104_39 (sequence is synthesized)
cttgatagacagtttcctctcgtcttcatttccacccctcatcctcagtagtctcctctcccccacgccccaccccaacttcccccccaagcttgagttaaagacagaatagctaaagac

SEQ ID NO: 430481 - DNA, 120 bp, Artificial Sequence
  ENSG00000152104_40 (sequence is synthesized)
agtgctgcctttacaatgcagtaattgccatctttggggccgaaagacaagctctgtgttgtgcttttcttgaccaccccttatcctgggctctggagcttgtgtttccctgctggcgac

SEQ ID NO: 430482 - DNA, 120 bp, Artificial Sequence
  ENSG00000152104_41 (sequence is synthesized)
tgtaccttgggtatttgttgctacctctcctgtttgctcagtaggaccctgtctggtggcattgaggctctggaccagaccatctgtgcagttaaggctctaccctgattgagagaggat

SEQ ID NO: 430483 - DNA, 120 bp, Artificial Sequence
  ENSG00000152104_42 (sequence is synthesized)
agcagacctagaaagagaaaggagttgggcagggcctttgaggattgtgtttttcaggcagggccttgatgatcattgttttttatttaaataagatgtgtgtgctggacagagacctaa

SEQ ID NO: 430484 - DNA, 120 bp, Artificial Sequence
  ENSG00000152104_43 (sequence is synthesized)
aagttgaggtcactaagtcattggaaaggccatcaaggaaacagatggggaagctgatttatgggagctgtaaggcatttagctacataacaggggtcctggccaggaaacacatcaaat

SEQ ID NO: 430485 - DNA, 120 bp, Artificial Sequence
  ENSG00000152104_44 (sequence is synthesized)
gtgacccccgctgtgctgatatcatcttcaggctttggtctgcaagatcagaattaatcccactcgggaccccatagtccaaacttggggccacttgatgaacgatggtagaattgtcat

SEQ ID NO: 430486 - DNA, 120 bp, Artificial Sequence
  ENSG00000152104_45 (sequence is synthesized)
tggcagagccctgtgcttctttccttttcttcataaaatccactcgctggtcagttatcttcactttgaagcccagttcttagtttcttcctatggcttcattggtcagtgtccttctga

SEQ ID NO: 430487 - DNA, 120 bp, Artificial Sequence
  ENSG00000152104_46 (sequence is synthesized)
atttccaaggatggtacacaataaatcatgttttgtacttttttcctcttactgcattttgggggatttatcattctatgtctaccttttcttgagtacagctttgatatgcacctgttg

SEQ ID NO: 430488 - DNA, 120 bp, Artificial Sequence
  ENSG00000152104_47 (sequence is synthesized)
ttacgtggtgatgggaagtcacaggcgtgctctttctagttaatttgatgccacatcttccttgtcttttcagcttgggaaaaaggcggcagtggaggaaggcatggaatgcccacagtg

SEQ ID NO: 430489 - DNA, 81 bp, Artificial Sequence
  ENSG00000152104_48 (sequence is synthesized)
aaaaggcggcagtggaggaaggcatggaatgcccacagtggtcagttcaaagaacaaacgtgcaattaaaaaactgtagtc

SEQ ID NO: 430490 - DNA, 120 bp, Artificial Sequence
  ENSG00000152104_49 (sequence is synthesized)
ctgattctaagaattcgagactgcagtgagccgtgatcttgccactgtagtccaggctgggctacggagagaccctgcctccaaaaaaaaaaaaaaaaaaggaaaaaaggttgtcaagaa

SEQ ID NO: 430491 - DNA, 120 bp, Artificial Sequence
  ENSG00000152104_50 (sequence is synthesized)
aaactagatgttaggagaaaggaaaatttaattgcagttttttttcttagaattgactgctgtgagagttccatatgcctttcttcattgctgcttttgtcccccgtgagctaaaaagat

SEQ ID NO: 430492 - DNA, 120 bp, Artificial Sequence
  ENSG00000152104_51 (sequence is synthesized)
ggagtgacatcaaatcaaccagaaaaagtatgcctttgtgacatcccatcaccacatgccaacaggtatatattccccattaagttcttcggaataggaatcctctgtttcaacctggcc

SEQ ID NO: 430493 - DNA, 120 bp, Artificial Sequence
  ENSG00000152104_52 (sequence is synthesized)
aggtgttgtggtggctgtactctagttagactcggaatatctggggatggagggcttcccctgtgtcttctacttcaaggtctgaaggctcagtgaaggagtataatctgctgatctttg

SEQ ID NO: 430494 - DNA, 120 bp, Artificial Sequence
  ENSG00000152104_53 (sequence is synthesized)
tagattctggagttttgttgtatgtcctggaaagaaacccattagtattacatgtattttcagtgaacagagcttataacccttattataagaagctcatcaataagcaaaaagatactt

SEQ ID NO: 430495 - DNA, 120 bp, Artificial Sequence
  ENSG00000152104_54 (sequence is synthesized)
tgctgttagggatgttttagcaagtggtctcagttactggtttattgcgtgatgaacaacatcagtatttatcttttatctctaagccccaaggtgggcactgttagaatatgtctcatg

SEQ ID NO: 430496 - DNA, 120 bp, Artificial Sequence
  ENSG00000152104_55 (sequence is synthesized)
tggacagcatatagatctggtgcgtctttgaggtcgtcagagctcatgggcttccctgaaattcatccactgtccctgccgtatgctacgggaatattcattagtgtacaaaatgcaggg

SEQ ID NO: 430497 - DNA, 120 bp, Artificial Sequence
  ENSG00000152104_56 (sequence is synthesized)
aggaagtaggtttaatattcaactttctagccaaagtttatattgaaacccaaaagaaaacatttaagagttgttccacatatttcacttttaaaaacaaatgcctttggttctttagca

SEQ ID NO: 430498 - DNA, 120 bp, Artificial Sequence
  ENSG00000152104_57 (sequence is synthesized)
cattttgcattccttttcacatctccagtaaatgccaacatatctcctgttaaattagcagcagccatttaaagtcctttcggtggcatctgcataataattgcccagagatgctttata

SEQ ID NO: 430499 - DNA, 120 bp, Artificial Sequence
  ENSG00000152104_58 (sequence is synthesized)
tctgggaagcaagccaaggaataaaccttgaagcaaagtgtattaaattagttatctagttagagcttttggaatgatttcctgatgatgtatcaagtctgaagctggagctgtcagtgt

SEQ ID NO: 430500 - DNA, 120 bp, Artificial Sequence
  ENSG00000152104_59 (sequence is synthesized)
ctattgctgcagtttggatttgaagggagaaaatgtaaaatggaggaaaaaaaagttaccatctcacaacaaagccatcaaacattttccagccgctgttttcgaggttttccagttgaa

SEQ ID NO: 430501 - DNA, 120 bp, Artificial Sequence
  ENSG00000152104_60 (sequence is synthesized)
ctgtttggtttctttcatccacactcatttggatacattgacccgaggtattcatccttgtttactgtggtccctgaatcatgggggctgaatttgatgtcttcatccttgagatgagcc

SEQ ID NO: 430502 - DNA, 120 bp, Artificial Sequence
  ENSG00000152104_61 (sequence is synthesized)
tgctggcttagctgaggaatgtcctgctgaggtttcttaggtttccttgggttctaaggatatactggatataccatcttttagcaagagtatctggtagcatttacagatagcatagac

SEQ ID NO: 430503 - DNA, 120 bp, Artificial Sequence
  ENSG00000152104_62 (sequence is synthesized)
attggtatgcacttctttccccagataggaagtaaaggaggatttagttgcatgaaaaaaggatgttaaacattgattacataggagtaaagatgaatgagctgcaatattcagtcggag

SEQ ID NO: 430504 - DNA, 120 bp, Artificial Sequence
  ENSG00000152104_63 (sequence is synthesized)
ctaaacaataagatcagggaaggtaaaaatacctatgtggaatattttgaatcgtaagcttttgaggagcttaaattgagagaattttacttttaattttgtagattgagaagaggaacc

SEQ ID NO: 430505 - DNA, 120 bp, Artificial Sequence
  ENSG00000152104_64 (sequence is synthesized)
gctttttaaaattatagctaaactgtcattgttttcctaagagtcacttggccatctctggccccctctttcatcagcctgaagagagggtctttgtagactgctgagggtgggccttgt

SEQ ID NO: 430506 - DNA, 120 bp, Artificial Sequence
  ENSG00000152104_65 (sequence is synthesized)
aggacttgaccatggcttacacctacttaacctttatcctgctttctttcagcttgtgcttttcagttataaactccagtgggtacagcaggctggccttttcatccagctgattatttt

SEQ ID NO: 430507 - DNA, 120 bp, Artificial Sequence
  ENSG00000152104_66 (sequence is synthesized)
tccagcttaatatagattgacccatatgaaatttccaataatggaccatattttctgcaaatagacagtactcgcatggatcacctatatcttccccctgatacactgtgggtcccaaca

SEQ ID NO: 430508 - DNA, 120 bp, Artificial Sequence
  ENSG00000152104_67 (sequence is synthesized)
ccagatgtcatttctccagagcagtgctaatgaacacaaaaggtataccctgggtggcccagctcttttcacgaacgtgctgccctgctcatagtgatccttgcatcacttggtgaatgg

SEQ ID NO: 430509 - DNA, 120 bp, Artificial Sequence
  ENSG00000152104_68 (sequence is synthesized)
gccatctcctgggacatggaagttgcagaggtagatagtgcactgcagcttctcttaagccggattggccatcaggcatatcactctggagtttttagctgctgtcctttcccgatgaac

SEQ ID NO: 430510 - DNA, 120 bp, Artificial Sequence
  ENSG00000152104_69 (sequence is synthesized)
agtctgtattagctgacctcagcctacttgttacgtgacgtatgggtcccaaaagtgtcctttgtcaaaaagcagaatgtgccttctagtctccctttccccatctaatggtgtattcga

SEQ ID NO: 430511 - DNA, 120 bp, Artificial Sequence
  ENSG00000152104_70 (sequence is synthesized)
tggtgaagatgagtacagttgaccacccctatctgtgggttccacatccctatattcaaccaagtacagattgaaaaatatttggggaagaggggaaacccacaaagttccaaaaagcaa

SEQ ID NO: 430512 - DNA, 120 bp, Artificial Sequence
  ENSG00000152104_71 (sequence is synthesized)
aagttgaatttgccacatgctgaatactacattgaattcacacaaatgaagtgatgtgtaggcattgagttaggtattgtaaataatctagagatgatttaaagtatgcaagagatgtgc

SEQ ID NO: 430513 - DNA, 120 bp, Artificial Sequence
  ENSG00000152104_72 (sequence is synthesized)
ataggttatatgcaaatactgtgctattttatataaaagacttgaacatccatggattctggtattctcagagggtccttgattgccccctttggtaaaggacaactatttcgttactga

SEQ ID NO: 430514 - DNA, 120 bp, Artificial Sequence
  ENSG00000152104_73 (sequence is synthesized)
ttttcgtttggggaagatctgtcaatcccttgaggtgcgggggttggggggatggagggtacagggcattctaggatgtgtgccagggagcacagattcaagggatgggattgagtcaga

SEQ ID NO: 430515 - DNA, 120 bp, Artificial Sequence
  ENSG00000152104_74 (sequence is synthesized)
cctgtgttcttactcagtgtcagaaataactctgtggagctcctagagtaagacatttccggaagcaccacataattactgttgggctcttagggtagcccttttagggaattgagcatt

SEQ ID NO: 430516 - DNA, 120 bp, Artificial Sequence
  ENSG00000152104_75 (sequence is synthesized)
cccatgttttaccaacaattattctgctgctgtgttttattatattgccaatggttttgagacactcatcatgctcttatttagtgatttcttttcatgagcagagcaacagctcatcca

SEQ ID NO: 430517 - DNA, 120 bp, Artificial Sequence
  ENSG00000152104_76 (sequence is synthesized)
gcatggtttccaaatggagaaatttgggtcttctgtagaaaccacacaaattctccaatggcctacagccttatggttggcacactagttggccctatagggtggaaataaagctgtaag

SEQ ID NO: 430518 - DNA, 120 bp, Artificial Sequence
  ENSG00000152104_77 (sequence is synthesized)
atgttaaactgcatttgatacttctcttgaacgctgagcaaggaagcaaaatagttcttgtctttacttaagcttctaagacattttggggcaaaggaccttacagatggcgtctgttga

SEQ ID NO: 430519 - DNA, 120 bp, Artificial Sequence
  ENSG00000152104_78 (sequence is synthesized)
aagtaacagcaacgtgccagggagaaatgtgggggaaatctcatcaaattctgccacctcaaatgtgttgtccagaagtcagtgttattcagggggccctgtgaaacttgaccaccagct

SEQ ID NO: 430520 - DNA, 120 bp, Artificial Sequence
  ENSG00000152104_79 (sequence is synthesized)
tgcgccatcaacactcagcctttatccagcctgctctcagcttttgtgtttctgttagaaactcagataggtaagtatttttattcagtagactacctttcttatcttttcagcttaata

SEQ ID NO: 430521 - DNA, 120 bp, Artificial Sequence
  ENSG00000152104_80 (sequence is synthesized)
tagctgcatcttctttctcaaagccaaactaagatattctctattaaaatgtccatgagcctagcattgagtgtctggcatccatcaatttcatagactggaaaatgattgttgtttggt

SEQ ID NO: 430522 - DNA, 120 bp, Artificial Sequence
  ENSG00000152104_81 (sequence is synthesized)
acagtaaagaagaggatgtgcatcagttcctaccgtttgcagctttgtttttagccttcccattttaaaaataaattcaaggacattgagttacaaggcaggagggctggagctactggg

SEQ ID NO: 430523 - DNA, 120 bp, Artificial Sequence
  ENSG00000152104_82 (sequence is synthesized)
cagcctgaatatgacaagcatttgtgtggaaagtcattgctccttctgccacactttgggccatcaggatcattctttcccagaagtgccataaacttgctcaaaagtttctataaatgg

SEQ ID NO: 430524 - DNA, 120 bp, Artificial Sequence
  ENSG00000152104_83 (sequence is synthesized)
gaagagggagaggaaggatttttgcatcagtcctgaagttgctatccaaaagttctctgtttcacaaataattttctgaactctggaatgcctctcctactccctgcctccctttctgta

SEQ ID NO: 430525 - DNA, 120 bp, Artificial Sequence
  ENSG00000152104_84 (sequence is synthesized)
atgtcagagtgatggaaaccaccaagtggcatgctagggaaagcctgcagcagtgttggagtctatttcaccctagctcatagttttaaactgtcttcactgttgaggtagagcttgatg

SEQ ID NO: 430526 - DNA, 120 bp, Artificial Sequence
  ENSG00000152104_85 (sequence is synthesized)
aatgtcatggattatgatgtgtggtttatcatatttgcctggatttgctgatcaaaagcaccatcttccctcgcctgctgctggcagcctttccttgccttgcttgttagcagagcattc

SEQ ID NO: 430527 - DNA, 120 bp, Artificial Sequence
  ENSG00000152104_86 (sequence is synthesized)
tgcttacccatgtggctcccagagttagcagccccggctcttggatttcttgattcttctcccctgtgatctcagaggtgctgcagaggacattcccctttagagcaagtcatgtttcta

SEQ ID NO: 430528 - DNA, 120 bp, Artificial Sequence
  ENSG00000152104_87 (sequence is synthesized)
ttcaggccacaaaactgggatgtacatgcagtgactttggtgttccttgtcttgttcaggggaacgggtgggactgttgtgtgctgtcaccctcttcattccatgagcaccttgttcact

SEQ ID NO: 430529 - DNA, 72 bp, Artificial Sequence
  ENSG00000152104_88 (sequence is synthesized)
gcgatcgtgtctcactcctgttgcgcaggctggagtgcagcctccaaagtagctgggattataggcgtgcac

SEQ ID NO: 430530 - DNA, 120 bp, Artificial Sequence
  ENSG00000152104_89 (sequence is synthesized)
ctgggattacacccagcctctgctgccttttcatatttccccatctgctttatggatcaactctcaacagtacactttttcttttctttacctaccctatgagtgcaacccagatgtaag

SEQ ID NO: 430531 - DNA, 120 bp, Artificial Sequence
  ENSG00000152104_90 (sequence is synthesized)
agttaatcctcgtcagagaatcattgccttaaacctctcagaaatatgtaattaggaaatcttattttaattttttaaaaattgcttgtatagtttcaaagaataagatctggcaaatgg

SEQ ID NO: 430532 - DNA, 68 bp, Artificial Sequence
  ENSG00000152104_91 (sequence is synthesized)
gcggatgaaaataaccagaatgaaaatagctagaaaactcagcaagcaggaagctccctttctcaccc

SEQ ID NO: 430533 - DNA, 120 bp, Artificial Sequence
  ENSG00000152104_92 (sequence is synthesized)
gctagaaaactcagcaagcaggaagctccctttctcacccttttgttcccttgccgatagaatcagtcactattagaaaaaatgaaagacgctctgtttaaaacaatgatgacagcagta

SEQ ID NO: 430534 - DNA, 120 bp, Artificial Sequence
  ENSG00000152104_93 (sequence is synthesized)
cttaatatgtatttcgaggtgaacttatatagattgagagaggctgcatttggcagactgatgtataggaagacccatttgtttctagcttctccctgcagggaaaatgctttcgtcatt

SEQ ID NO: 430535 - DNA, 120 bp, Artificial Sequence
  ENSG00000152104_94 (sequence is synthesized)
atagcctctttacacagactggccattctagtgaaacaggtggtaaacctttgggctgcccagaaacattttatctgttttcacttacctaggaaggggaaagattagcgggtcatccaa

SEQ ID NO: 430536 - DNA, 120 bp, Artificial Sequence
  ENSG00000152104_95 (sequence is synthesized)
aatctgtatgtaagctatcttcattttcttccccaaccttctcctcctgggaaacacaaatgctatctcatctgacaaaaggttttagaggataaagctgaaaagattggattgggatct

SEQ ID NO: 430537 - DNA, 120 bp, Artificial Sequence
  ENSG00000152104_96 (sequence is synthesized)
ttttgtggcttggggcggagccttttgctaaaatctcaagaatgctgctttgagtttagctagggtggctctcagaactggggtgcctggcattctcagcatttctcaggggcctcccac

SEQ ID NO: 430538 - DNA, 120 bp, Artificial Sequence
  ENSG00000152104_97 (sequence is synthesized)
ctctgacaactgcagtgttagctaatacataccttgagcatagaactgaatgctgtaattcagagccattttttttttcaacttgaacattgtacaattttactgcaatttcctttgaac

SEQ ID NO: 430539 - DNA, 120 bp, Artificial Sequence
  ENSG00000152104_98 (sequence is synthesized)
tttcttgccactgtttggaatcttaaaaattcattagccttctcctttctgacataaagctactcttcatcagagatgagttcctatgtatgtcctttgttccttcaatagctaattaat

SEQ ID NO: 430540 - DNA, 120 bp, Artificial Sequence
  ENSG00000152104_99 (sequence is synthesized)
gtgcttgaggatacttcagtggaaaaaaaggtttaaatatgcaaattactaataaatgtgtaaccttatgtaacttgtgttacatcaagtaacaagctaatctagtttgtttcactggac

SEQ ID NO: 430541 - DNA, 120 bp, Artificial Sequence
  ENSG00000152104_100 (sequence is synthesized)
taggcttgtgctccctacttcagtattttgatgctttccttgatctttgtttcacaaaatgttgtgaattttggtatcattcaaaacaaatgacatttattaggtttcattttgaaacga

SEQ ID NO: 430542 - DNA, 120 bp, Artificial Sequence
  ENSG00000152104_101 (sequence is synthesized)
tgtacagacaagtccccaacttagaaaccggtttgttcttaaggttcttgcgtcagcccatagaagcccactgacctccaccacagcccaaatggagggctgtgatagccagatctggtt

SEQ ID NO: 430543 - DNA, 120 bp, Artificial Sequence
  ENSG00000152104_102 (sequence is synthesized)
ggcttttgtgggctgacccagacatttaatcaccatctcttatgttgttgccgtaagaaatgcattccaggttgggacttgggatcctgagagcacattcgccccctgtggtggccgctt

SEQ ID NO: 430544 - DNA, 120 bp, Artificial Sequence
  ENSG00000152104_103 (sequence is synthesized)
gccaccttgcaagatggaagcccagtctccttactaccaaactgtagttgtaagcagagggaggggtgagatgtttataggacattccctaagctggggagtgatttttatcactattca

SEQ ID NO: 430545 - DNA, 120 bp, Artificial Sequence
  ENSG00000152104_104 (sequence is synthesized)
tgtcaactgtactttggtatagactccctatcaatttaataatatgaaaagcctaaaataaaactatgcatgctattctatgtgctattttatatcagtaaataagcttatgcttgccag

SEQ ID NO: 430546 - DNA, 120 bp, Artificial Sequence
  ENSG00000152104_105 (sequence is synthesized)
ttgtatacacagttatgaggtgtatagaactgactttgacagtattttttgcactgtttcctatctgtttttataaagtcttatttagatattggaccttgttgatgttctcactgccct

SEQ ID NO: 430547 - DNA, 120 bp, Artificial Sequence
  ENSG00000152104_106 (sequence is synthesized)
tgtgcttgctataaaatgtttcatatgtgcctttacaaatgtgagatctttattctaacctttttttgtaaaagatatctattgatttccatatgcaataaacctttttttcagagaaaa

SEQ ID NO: 430548 - DNA, 120 bp, Artificial Sequence
  ENSG00000152104_107 (sequence is synthesized)
gccgcgaaggacagcctttccgcgcgggactccggggcgccacgggggccatgtaagcaggtggtggtcttttgaatggtttgcgtggagttgctgctgtccatcaccaagattgaagat

SEQ ID NO: 430549 - DNA, 120 bp, Artificial Sequence
  ENSG00000152104_108 (sequence is synthesized)
tgaagtcctcaccgtcttccagcaggcagcggtaggtggtgaccctagcctccagcttggccttgatgttcagcagggcctcgcactcctgggcttggtgttgcgcctcttcctgggtct

SEQ ID NO: 430550 - DNA, 120 bp, Artificial Sequence
  ENSG00000152104_109 (sequence is synthesized)
gcttggtgttgcgcctcttcctgggtctgggccagccctgacgccaggtgcagcaggatctcgttgagctgctccatctgcagggtgtagcggacctccacctccctcaggctgttctcc

SEQ ID NO: 430551 - DNA, 120 bp, Artificial Sequence
  ENSG00000152104_110 (sequence is synthesized)
ccaggtcgatctccaaggactggaccgtacgtcccagctccgtgagtgtcatctcagcagctccaacctgggcggactgggtggtgaccactgtggtgctctcctcagtccgctcagacc

SEQ ID NO: 430552 - DNA, 120 bp, Artificial Sequence
  ENSG00000152104_111 (sequence is synthesized)
agcacttgtccagctcctctcggttcttccgagccagcttgtcatattgggcccagatgtctgccatgatcgtggcgaggtcctgagatttgggggcatcaacctccatggtcaacccag

SEQ ID NO: 430553 - DNA, 87 bp, Artificial Sequence
  ENSG00000152104_112 (sequence is synthesized)
gtggtcgatctctgtctccagctgtggccaagtgacattggtgtcatcagtgaccttgcagagcccgtaatgctgctctccacagac

SEQ ID NO: 430554 - DNA, 120 bp, Artificial Sequence
  ENSG00000152104_113 (sequence is synthesized)
atctctgtctccagctgtggccaagtgacattggtgtcatcagtgaccttgcagagcccgtaatgctgctctccacagactggcgcctgagagtctgtctcatacttgactctaaagtca

SEQ ID NO: 430555 - DNA, 120 bp, Artificial Sequence
  ENSG00000152104_114 (sequence is synthesized)
cattgtcagtctgcagaacgatgcaggcattgtccacagtatttgctaagatctgagccctcaggtcctcgatgatcttgaagtaatggcccccagtctctgacctggggtcccttcttc

SEQ ID NO: 430556 - DNA, 120 bp, Artificial Sequence
  ENSG00000152104_115 (sequence is synthesized)
tccagcctccagttctcgatctccaggctcctcagtctgtccaggtaggaggccaggtggtctttcaggctttgcatggtctccttctcgttctggatgcctcctattcctgccaggccc

SEQ ID NO: 430557 - DNA, 120 bp, Artificial Sequence
  ENSG00000152104_116 (sequence is synthesized)
ccagccatccctgcggccaggccccgggaccccaagccatcccagaagctggtgtagcaggacacggagatctggaaaccagagcccctggcacgtgcataggctctggccacgctgttg

SEQ ID NO: 430558 - DNA, 120 bp, Artificial Sequence
  ENSG00000152104_117 (sequence is synthesized)
accagctgggcggctggacagagcccagggaccagtaattggtggagaagttggagcaagtggtgaaactcatgctgtctggggaggagaacgagaggacaggacccaggctttgccaac

SEQ ID NO: 430559 - DNA, 120 bp, Artificial Sequence
  ENSG00000152104_118 (sequence is synthesized)
gacctcagtatactactacttcaatacatatttattctgacattaaaataagacagtgaaaaagtaaaaacaaaacatacttgatacaaggttttataacttttatctcaatcaaatcat

SEQ ID NO: 430560 - DNA, 120 bp, Artificial Sequence
  ENSG00000152104_119 (sequence is synthesized)
agtaattatcactacagaattgaacaagtggtcaaacctgctcagattgctgagttttgtttcatattttaaagtcttaggagggaatttatttattgccctgttgcctaatattggatg

SEQ ID NO: 430561 - DNA, 120 bp, Artificial Sequence
  ENSG00000152104_120 (sequence is synthesized)
gctttaattccatggttttcagaattgcctattgccatatggtttacatacaaaataccacctgaaacataagaacgggtctttcctacggctttccccccacaaactgtaaatgaaaac

SEQ ID NO: 430562 - DNA, 120 bp, Artificial Sequence
  ENSG00000152104_121 (sequence is synthesized)
tttttattactgactgtatcctctcatttggtttaacttacaagtgtcatgttgcctgctgttacacttgtctttggcgtctgctcagaaataatggtgtctagacagacccataaatat

SEQ ID NO: 430563 - DNA, 120 bp, Artificial Sequence
  ENSG00000152104_122 (sequence is synthesized)
cctgggttatagttcctcatttaaggctctgagacttcacagcaggggcaagaagacttgcagggcagatacgagaaatcttcaggccacttaattcagagtccattggcagaataggca

SEQ ID NO: 430564 - DNA, 120 bp, Artificial Sequence
  ENSG00000152104_123 (sequence is synthesized)
gtgtgtgtgtgtgtgtgtgtgtgttaggctgggttgtagagatgggttttggaaatgatagttgggtcttgaaactactattggagtgcaaatgcctcctccctcatttggcggagaaac

SEQ ID NO: 430565 - DNA, 120 bp, Artificial Sequence
  ENSG00000152104_124 (sequence is synthesized)
tcctccctcatttggcggagaaacgtcaaaaatcctcagaacggaagaatccattctctttattttgggacacagcctggtaaaacttgtaagaaattatgacagctctgtgggaagcaa

SEQ ID NO: 430566 - DNA, 120 bp, Artificial Sequence
  ENSG00000152104_125 (sequence is synthesized)
gtgcaagtgtgggagaagcaagttgatgtgtgaagcagacatcagtgtgtgaaccagagtttatttgaacagtagtagttgctggtggcagaatgttaaaaatgtgagtattaagagtat

SEQ ID NO: 430567 - DNA, 120 bp, Artificial Sequence
  ENSG00000152104_126 (sequence is synthesized)
taatgatgtgactattaagacttggattagtgttgaagaaatgtgaacttgaatagatttgctatgaaagtcttcggattttttttcctgtaatggattttatttcaatttcagttcact

SEQ ID NO: 430568 - DNA, 120 bp, Artificial Sequence
  ENSG00000152104_127 (sequence is synthesized)
ttcttttgaaaggtaaggacccgtttgtttatgaagttttgattttttaggaggtaaatatttgaggcaaagttggtactgaggttcagagtaaatgggaatgaggatgttttatattaa

SEQ ID NO: 430569 - DNA, 120 bp, Artificial Sequence
  ENSG00000152104_128 (sequence is synthesized)
tatagaagttaagtaattacagagaaaagcttttaaaaattagtgcagtaaaatagggtgcttgtttatattgaattgttagatatcttggctgaatttataaaaagaaggttactactg

SEQ ID NO: 430570 - DNA, 120 bp, Artificial Sequence
  ENSG00000152104_129 (sequence is synthesized)
aactcttaaaaggttatcgtactcgtcgtaaatattttcgtaaactgctaatagttttgacaacaaaaggagtgcttatctttggaatatattctccttcactgaattatttattttgga

SEQ ID NO: 430571 - DNA, 120 bp, Artificial Sequence
  ENSG00000152104_130 (sequence is synthesized)
attttggaagagttgaggctaagggtgtaaaatatattatagagccaggcatcatggtgcacgcctgtgattccagcacttagggaggtcagtgtgggtggattgcttgagcccaggagt

SEQ ID NO: 430572 - DNA, 90 bp, Artificial Sequence
  ENSG00000152104_131 (sequence is synthesized)
acaaaaagtagccaggcatggtggtgcacccctgtagtcccagcttctttttggaggcagaggttgctataagctgagatcctaccactg

SEQ ID NO: 430573 - DNA, 120 bp, Artificial Sequence
  ENSG00000152104_132 (sequence is synthesized)
agactgaggtgggaggattgcttgagccttggaggcagaggttgctataagctgagatcctaccactgatgcacaccagcctgggtgaccgaaggagaccctgtctcaaaaaaaaaaaaa

SEQ ID NO: 430574 - DNA, 120 bp, Artificial Sequence
  ENSG00000152104_133 (sequence is synthesized)
tattatagatttttagagctttttggttaggggttgatcacttatgggaccccacactgtgttgccctcaaagagttactgttaccatgttcactccctaatactttctccttgcatttt

SEQ ID NO: 430575 - DNA, 120 bp, Artificial Sequence
  ENSG00000152104_134 (sequence is synthesized)
ccttccattccttttttcttccctcctagcctgaatgttggcctactagtgaaatctgcttatggcctaacctgatgggtaattaacagacaatatgttgtagttgttgacctaagaagg

SEQ ID NO: 430576 - DNA, 120 bp, Artificial Sequence
  ENSG00000152104_135 (sequence is synthesized)
cctgagactattagtctgttttaacatacctgcatctatgaggtatctgtagtcagctctgtttttcttaagtagaggtttatccattaccaacagtgaatgttcaatgcaaggaatagc

SEQ ID NO: 430577 - DNA, 120 bp, Artificial Sequence
  ENSG00000152104_136 (sequence is synthesized)
tttttaaaacatatggcaaatttgtggttctttagaatccattgtcatatagtggttaatatatatatatatttttttgagacacactctttcgcccaggctagagtgcagtggtgccac

SEQ ID NO: 430578 - DNA, 70 bp, Artificial Sequence
  ENSG00000152104_137 (sequence is synthesized)
cgcccaggctagagtgcagtggtgccatcagccttccaagtagttgagactacaggcatgtgccaccatg

SEQ ID NO: 430579 - DNA, 120 bp, Artificial Sequence
  ENSG00000152104_138 (sequence is synthesized)
tgttgatgtccacaagttgttagaggttgtttataaggaggatggtagccaaaactgttaatttctcccatgtctctgtagaaggaaaacctgtgcagcacgctctattttgctagtgta

SEQ ID NO: 430580 - DNA, 120 bp, Artificial Sequence
  ENSG00000152104_139 (sequence is synthesized)
ctcagttgtcaaatagatagccaacttgtgtgtgaccaatcgtcttttctccttcactctgctgctttgaagaccttggtctctgaaacacatacttttggtcaggtatctatgaccata

SEQ ID NO: 430581 - DNA, 120 bp, Artificial Sequence
  ENSG00000152104_140 (sequence is synthesized)
gagattaggacccatcttcttgactttttttggcagagagacagtgtctcactctgtcatgcccaggctagagtatagtggtgtgatcacagttcactgcagcctcaaactcctgggctt

SEQ ID NO: 430582 - DNA, 120 bp, Artificial Sequence
  ENSG00000152104_141 (sequence is synthesized)
aagtgatcctcccacctcagcttcctgtgtatctggggctacagacatgcgccaccacacacagctaaattttttaattttaatttttattttttggtagagatgaagatcttgctatat

SEQ ID NO: 430583 - DNA, 120 bp, Artificial Sequence
  ENSG00000152104_142 (sequence is synthesized)
aggctggtctcaaactcctggcttcaagtaattttcccaccttggcctcccaaagtcttagagctacaggtgtgagccaccatacccggccccatcttcttgacttacataggctgtggg

SEQ ID NO: 430584 - DNA, 86 bp, Artificial Sequence
  ENSG00000152104_143 (sequence is synthesized)
ccaccatacccggccccatcttcttgacttacataggctgtgggtatcatcaagctaaagcccattttttaaaacaaccatacctc

SEQ ID NO: 430585 - DNA, 86 bp, Artificial Sequence
  ENSG00000152104_144 (sequence is synthesized)
ccacattagaggcgtgagccactgcgcccagcccccatacctcagttcttaaagtatctcaagaatattaaaaccaattaccctac

SEQ ID NO: 430586 - DNA, 120 bp, Artificial Sequence
  ENSG00000152104_145 (sequence is synthesized)
cagttcttaaagtatctcaagaatattaaaaccaattaccctaccactcaagtatatccactgtgtttttatatattatttctaaactttctattaattatataactgtaatcatgttat

SEQ ID NO: 430587 - DNA, 120 bp, Artificial Sequence
  ENSG00000152104_146 (sequence is synthesized)
ttagaataatagtcacatagagcaatatattgtgagaatactttttctgcttttcttcccatttatctttttagtcacacttttctctgttgccacatattcttaatatacttagaatgt

SEQ ID NO: 430588 - DNA, 120 bp, Artificial Sequence
  ENSG00000152104_147 (sequence is synthesized)
taatggatgtatagctcattgagtagtatgttataattaacaatttccatttgttgactatttgggttatttccaggtgtttgtttggctactataaataaaataccattaacgtctttg

SEQ ID NO: 430589 - DNA, 120 bp, Artificial Sequence
  ENSG00000152104_148 (sequence is synthesized)
tttccactggaatttgggagtctcaggctgctctgggcaaatcgacatagacgcccaactccaggcacccagctccacatgccatcatccttatcagctgaaaagagaccagaagccgtt

SEQ ID NO: 430590 - DNA, 120 bp, Artificial Sequence
  ENSG00000152104_149 (sequence is synthesized)
gacattttccaactctcagcacacaggctgctttttatcattcctacggggcgggagggggcagggagagaaggctaagacaccgggtccagtacccagagattctagggagagatctct

SEQ ID NO: 430591 - DNA, 120 bp, Artificial Sequence
  ENSG00000152127_0 (sequence is synthesized)
ataattgcttagcttcttgttgcctagccagatttcccctcagcttacagttcctgaatcataagatattgaaccagcaaatttaagagttgacattttacttagaggtattcaagtgaa

SEQ ID NO: 430592 - DNA, 120 bp, Artificial Sequence
  ENSG00000152127_1 (sequence is synthesized)
aacatggcttctggtttattttgctgtattgtgccatgaccacttggctaattcttctcctccttcacagcagaatggaagtgaggaaaggcaaccagctgacacaggagccagagtgag

SEQ ID NO: 430593 - DNA, 120 bp, Artificial Sequence
  ENSG00000152127_2 (sequence is synthesized)
accagcagactctcacactcaacctacaccatgaatttgtgtctatcttctacgcgttaagagccaaggacaggtgaagttgccagagagcaatggctctcttcactccgtggaagttgt

SEQ ID NO: 430594 - DNA, 120 bp, Artificial Sequence
  ENSG00000152127_3 (sequence is synthesized)
cctctcagaagctgggctttttcctggtgacttttggcttcatttggggtatgatgcttctgcactttaccatccagcagcgaactcagcctgaaagcagctccatgctgcgcgagcaga

SEQ ID NO: 430595 - DNA, 120 bp, Artificial Sequence
  ENSG00000152127_4 (sequence is synthesized)
tcctggacctcagcaaaaggtacatcaaggcactggcagaagaaaacaggaatgtggtggatgggccatacgctggagtcatgacagcttatgatctgaagaaaacccttgctgtgttat

SEQ ID NO: 430596 - DNA, 120 bp, Artificial Sequence
  ENSG00000152127_5 (sequence is synthesized)
tagataacattttgcagcgcattggcaagttggagtcgaaggtggacaatcttgttgtcaatggcaccggaacaaactcaaccaactccactacagctgttcccagcttggttgcacttg

SEQ ID NO: 430597 - DNA, 120 bp, Artificial Sequence
  ENSG00000152127_6 (sequence is synthesized)
agaaaattaatgtggcagatatcattaacggagctcaagaaaaatgtgtattgcctcctatggacggctaccctcactgtgagggaaagatcaagtggatgaaagacatgtggcgttcag

SEQ ID NO: 430598 - DNA, 120 bp, Artificial Sequence
  ENSG00000152127_7 (sequence is synthesized)
atccctgctacgcagactatggagtggatggatccacctgctctttttttatttacctcagtgaggttgaaaattggtgtcctcatttaccttggagagcaaaaaatccctacgaagaag

SEQ ID NO: 430599 - DNA, 120 bp, Artificial Sequence
  ENSG00000152127_8 (sequence is synthesized)
ctgatcataattcattggcggaaattcgtacagattttaatattctctacagtatgatgaaaaagcatgaagaattccggtggatgagactacggatccggcgaatggctgacgcatgga

SEQ ID NO: 430600 - DNA, 120 bp, Artificial Sequence
  ENSG00000152127_9 (sequence is synthesized)
tccaagcaatcaagtccctggcagaaaagcagaaccttgaaaagagaaagcggaagaaagtcctcgttcacctgggactcctgaccaaggaatctggatttaagattgcagagacagctt

SEQ ID NO: 430601 - DNA, 120 bp, Artificial Sequence
  ENSG00000152127_10 (sequence is synthesized)
tcagtggtggccctcttggtgaattagttcaatggagtgatttaattacatctctgtacttactgggccatgacattaggatttcagcttcactggctgagctcaaggaaatcatgaaga

SEQ ID NO: 430602 - DNA, 120 bp, Artificial Sequence
  ENSG00000152127_11 (sequence is synthesized)
aggttgtaggaaaccgatctggctgcccaactgtaggagacagaattgttgagctcatttacattgatattgtaggacttgctcaattcaagaaaactcttggaccatcctgggttcatt

SEQ ID NO: 430603 - DNA, 120 bp, Artificial Sequence
  ENSG00000152127_12 (sequence is synthesized)
accagtgcatgctccgagtccttgattcatttggtactgaacccgaatttaatcatgcaaattatgcccaatcgaaaggccacaagaccccttggggaaaatggaatctgaaccctcagc

SEQ ID NO: 430604 - DNA, 120 bp, Artificial Sequence
  ENSG00000152127_13 (sequence is synthesized)
agttttataccatgttccctcataccccagacaacagctttctggggtttgtggttgagcagcacctgaactccagtgatatccaccacattaatgaaatcaaaaggcagaaccagtccc

SEQ ID NO: 430605 - DNA, 120 bp, Artificial Sequence
  ENSG00000152127_14 (sequence is synthesized)
ttgtgtatggcaaagtggatagcttctggaagaataagaagatctacttggacattattcacacatacatggaagtgcatgcaactgtttatggctccagcacaaagaatattcccagtt

SEQ ID NO: 430606 - DNA, 120 bp, Artificial Sequence
  ENSG00000152127_15 (sequence is synthesized)
acgtgaaaaaccatggtatcctcagtggacgggacctgcagttccttcttcgagaaaccaagttgtttgttggacttgggttcccttacgagggcccagctcccctggaagctatcgcaa

SEQ ID NO: 430607 - DNA, 120 bp, Artificial Sequence
  ENSG00000152127_16 (sequence is synthesized)
atggatgtgcttttctgaatcccaagttcaacccacccaaaagcagcaaaaacacagactttttcattggcaagccaactctgagagagctgacatcccagcatccttacgctgaagttt

SEQ ID NO: 430608 - DNA, 120 bp, Artificial Sequence
  ENSG00000152127_17 (sequence is synthesized)
tcatcgggcggccacatgtgtggactgttgacctcaacaatcaggaggaagtagaggatgcagtgaaagcaattttaaatcagaagattgagccatacatgccatatgaatttacgtgcg

SEQ ID NO: 430609 - DNA, 120 bp, Artificial Sequence
  ENSG00000152127_18 (sequence is synthesized)
aggggatgctacagagaatcaatgctttcattgaaaaacaggacttctgccatgggcaagtgatgtggccacccctcagcgccctacaggtcaagcttgctgagcccgggcagtcctgca

SEQ ID NO: 430610 - DNA, 120 bp, Artificial Sequence
  ENSG00000152127_19 (sequence is synthesized)
agcaggtgtgccaggagagccagctcatctgcgagccttctttcttccagcacctcaacaaggacaaggacatgctgaagtacaaggtgacctgccaaagctcagagctggccaaggaca

SEQ ID NO: 430611 - DNA, 120 bp, Artificial Sequence
  ENSG00000152127_20 (sequence is synthesized)
tcctggtgccctcctttgaccctaagaataagcactgtgtgtttcaaggtgacctcctgctcttcagctgtgcaggcgcccaccccaggcaccagagggtctgcccctgccgggacttca

SEQ ID NO: 430612 - DNA, 120 bp, Artificial Sequence
  ENSG00000152127_21 (sequence is synthesized)
tcaagggccaggtggctctctgcaaagactgcctatagcagctacctgctcagccctgcaccatgctgctggggaagacagtggccccagccccgtcaggcagggccagggacagaagtc

SEQ ID NO: 430613 - DNA, 120 bp, Artificial Sequence
  ENSG00000152127_22 (sequence is synthesized)
atgcagggactctggcaagagcctgaactttttcgtagaaggttctgaattggcattgcccttgctgcactccgagcaacccagtggagtcttcaccaaaacaaaacaagagcgtatgtc

SEQ ID NO: 430614 - DNA, 120 bp, Artificial Sequence
  ENSG00000152127_23 (sequence is synthesized)
aggccaggagcctggcttgtccctggcacaacatcatttctgtttctcaaggagcaactgtgggaagactgtcactgcagctgctccagggcaaaagaaagtctcaagagtcctttaaaa

SEQ ID NO: 430615 - DNA, 120 bp, Artificial Sequence
  ENSG00000152127_24 (sequence is synthesized)
caaaacaggaggaattgagctgatgggaaagaactctgaatgggaatattcctaaacccattaacttatttattcgggtgggagggaggggaccgcgggagggagaggagggattgatca

SEQ ID NO: 430616 - DNA, 120 bp, Artificial Sequence
  ENSG00000152127_25 (sequence is synthesized)
caggcttcttttatttccactgttaatcatccaccttcactatactgttgttctgtctgctttgggcagggtgcaggagagagaccgtgtgccgtggggctggtggcctgctcagggaca

SEQ ID NO: 430617 - DNA, 120 bp, Artificial Sequence
  ENSG00000152127_26 (sequence is synthesized)
gccatggggacctggcagctcaaaacagatggcagcagaacaaaagaaacttttgctttggaagcacagccaaactccccagggcatcgtcatagatggcacctagagcatgggctgcct

SEQ ID NO: 430618 - DNA, 120 bp, Artificial Sequence
  ENSG00000152127_27 (sequence is synthesized)
cagtcagggggacgtgcctgtgttgtccagagagcccagccagggacgaaaaaggagatgaggcccctttcctccatgtccccatgcccagacacataccttggccgtaatttcttttag

SEQ ID NO: 430619 - DNA, 120 bp, Artificial Sequence
  ENSG00000152127_28 (sequence is synthesized)
aatccctttgggaaggaaatacaggattgagggattttggagtttctggtaaactcaccctccctccagccccgctatgaggaggaaagtagagatgaaagactcacgctgttcatggac

SEQ ID NO: 430620 - DNA, 120 bp, Artificial Sequence
  ENSG00000152127_29 (sequence is synthesized)
ttggagaggattatctttgagccaagatttggacaggagtgaagtcggtccttaagaatttgtggcgcgaccggagctgggctcctgacaggtgggcttgtgttgtgtcccctctgatgg

SEQ ID NO: 430621 - DNA, 120 bp, Artificial Sequence
  ENSG00000152127_30 (sequence is synthesized)
caccaaagtccagggaagggggctcttgatgtctgctgggggagtgggggcagctcaggatgaatgcagtgccctgtcctggctactcacctgagggtgtagctcgcaaaggtgggaatc

SEQ ID NO: 430622 - DNA, 120 bp, Artificial Sequence
  ENSG00000152127_31 (sequence is synthesized)
tggtgctggcttttccttcaggcaggatcactctgacttgttgagtaatcagtcatcaggttggcctggtcagacacactggaccccaccttccaaaccctggacccccccatgctctgc

SEQ ID NO: 430623 - DNA, 120 bp, Artificial Sequence
  ENSG00000152127_32 (sequence is synthesized)
ctttgtataagttcccaccccactgaatcattgctgccatgctctgtacaagtttgtaagtttctgaaaagcccctgacatctccatgctgatgcaagtgagaccccttctgcctaatgt

SEQ ID NO: 430624 - DNA, 120 bp, Artificial Sequence
  ENSG00000152127_33 (sequence is synthesized)
gagcggttggcgtcctccacttggcctctgctgggcgcctcagtcgctcaatgatgtgctctgtgccggggcttccaagcacccttcctgctaacagagggcggcccagtggagcctccg

SEQ ID NO: 430625 - DNA, 120 bp, Artificial Sequence
  ENSG00000152127_34 (sequence is synthesized)
gggaaaggaagaattccgcttcatggggactagagttagtgtggggcctttaagtctgggaagttacattctgcttctttctcaattgctacacaaatgtgcagccagccttttttctta

SEQ ID NO: 430626 - DNA, 120 bp, Artificial Sequence
  ENSG00000152127_35 (sequence is synthesized)
ggcccactgagatccctgctcagtgcgtctcaattgtatctccagtctaagaggagggtggggggcacccggggcctcctccactccttaggtggcccccaagcacatctgccaggtaga

SEQ ID NO: 430627 - DNA, 120 bp, Artificial Sequence
  ENSG00000152127_36 (sequence is synthesized)
gtaccatggggaggcctctgccctgagcatcatcacaggggcgcctccagacctggctgagaatagcctctgcttgggcctaggaagaagggcagaagtccaaaggaaaccttggtgagt

SEQ ID NO: 430628 - DNA, 120 bp, Artificial Sequence
  ENSG00000152127_37 (sequence is synthesized)
gtgtgtgtgtgtgtgtgtgtgtatgagcctgtgcatttcttttaagcaagggcagtttcctgcagtaggagggcagatgactggcatccttgctgtaaggaagagctttttccttgtgaa

SEQ ID NO: 430629 - DNA, 120 bp, Artificial Sequence
  ENSG00000152127_38 (sequence is synthesized)
ctgtaaggaagagctttttccttgtgaatgggcctcttggctgtaccctagggtgtgggaatttgctagagttccctgacctgcaatccctgggccagtgccgccctctcctgggctctt

SEQ ID NO: 430630 - DNA, 120 bp, Artificial Sequence
  ENSG00000152127_39 (sequence is synthesized)
ccaggagcattgaacactgaggatgtcaatgcaagtatctgaccaacagggggagcctgcaggccgagcaaagtttaacccacttagccactgctacttaagcaaggaagctgaaaggta

SEQ ID NO: 430631 - DNA, 120 bp, Artificial Sequence
  ENSG00000152127_40 (sequence is synthesized)
accttagccctgccttgtgttccaaaagctgcaaggatcatttgctggctgtccctaagttcaaggcctccctaccttccccttcttttccaagtcacaacccgccctgcccgggccaga

SEQ ID NO: 430632 - DNA, 120 bp, Artificial Sequence
  ENSG00000152127_41 (sequence is synthesized)
cagcccagaagaacacttttctgccatttaaaaatccctctttcatcccccccagtccagtattgagtggaagtgcgccggagttccactgacagggcagctgctcttggagcaaacaag

SEQ ID NO: 430633 - DNA, 120 bp, Artificial Sequence
  ENSG00000152127_42 (sequence is synthesized)
cccacactccagttgtttagggcattatctgaagagtcagtgacccctgaatgtgtactggctcccaggcctcctcagacttggcccaggtctagtcagtgatcctggagaggaaactgg

SEQ ID NO: 430634 - DNA, 120 bp, Artificial Sequence
  ENSG00000152127_43 (sequence is synthesized)
ggagggggcttccaactgccctgcatggaagaggagaggaaggtgcccctgtgtgggctggaagcctgcggaggttttgccattgctgatcttgatagaatcctaaaccgatttatagct

SEQ ID NO: 430635 - DNA, 120 bp, Artificial Sequence
  ENSG00000152127_44 (sequence is synthesized)
gataacagttccatggggagagaaatcctaagttatgattaatgtttttccccgctataatatcttgcctgtttttttggattattttccccattgtgatcctaagctcttaaaaaactt

SEQ ID NO: 430636 - DNA, 120 bp, Artificial Sequence
  ENSG00000152127_45 (sequence is synthesized)
gagggaaaacattcatctaatttactaaaagagaaagctttccattgaaaggtagatactttgaggagtaaaaagacttctttgaatgctggtaaacaccgcatttattttgtgtatgca

SEQ ID NO: 430637 - DNA, 120 bp, Artificial Sequence
  ENSG00000152127_46 (sequence is synthesized)
gtttgatttgcacatgtataaatggagatgcttttcatttttgtttggactgggtttgtgtcactgctcattacagtttgcttttttgtgtgtttgctgtgcgtttggagatattagtca

SEQ ID NO: 430638 - DNA, 120 bp, Artificial Sequence
  ENSG00000152127_47 (sequence is synthesized)
gtttctttagtgatatttgtttccttgatgtgccttttcgtttttctttggggtttttggaatccggatgctgttgaagggcaatagcagactcctccagctaagagacaggacatgttc

SEQ ID NO: 430639 - DNA, 120 bp, Artificial Sequence
  ENSG00000152127_48 (sequence is synthesized)
ttgagccactgtagctgttgaagctggacaccagacgctccctataacccccccgccaggccatagcgtgtatgcatgtgcacttccacccacagaggagggtgtgaagccttgagaacc

SEQ ID NO: 430640 - DNA, 120 bp, Artificial Sequence
  ENSG00000152127_49 (sequence is synthesized)
tcaagaaagggctggattctgccatacctttgggtctaccttgggactgctggttgccaacgtgtcaaccagcctgtgttccctgccacccacgcacttgctgaggtgtggctgaggcag

SEQ ID NO: 430641 - DNA, 120 bp, Artificial Sequence
  ENSG00000152127_50 (sequence is synthesized)
aatcatgtgaatgggtgcatccaaggagttcagggccctgcttggagaagaaatactttagcatcatgaaagggaaagaacgtgcaccccttttttgtttctttagtgaatgcaagattt

SEQ ID NO: 430642 - DNA, 120 bp, Artificial Sequence
  ENSG00000152127_51 (sequence is synthesized)
aataaaagtgaataatgagcttcccctttgggagtggagcccagtgcagctcactgacagggttgacatcagtatgatgtgttggactgaaactgtatgtctgtaggtaggtgtgtgcct

SEQ ID NO: 430643 - DNA, 120 bp, Artificial Sequence
  ENSG00000152127_52 (sequence is synthesized)
tttagggcagaccacggtggccaccccatttctccaaggtggtttacctagcttgtgtatattagacattgccaccctcacctctggccaaaaattcttgatttaaaaagaaaagtctat

SEQ ID NO: 430644 - DNA, 120 bp, Artificial Sequence
  ENSG00000152127_53 (sequence is synthesized)
tttgttaacgacaggctctgttgtatgtgttactatcccaagcctggattattttatttatttaaaagtattttaatttccatattggctttattctaatcccatccatccctgtggagc

SEQ ID NO: 430645 - DNA, 120 bp, Artificial Sequence
  ENSG00000152127_54 (sequence is synthesized)
tgcagagcatcttcatgtgagtagacggatggacataaatagattcatgctcatttaggaagctgggagtttcgtgaagctgagggtgagttcctgtgattcttgttcgcttcaacaaaa

SEQ ID NO: 430646 - DNA, 120 bp, Artificial Sequence
  ENSG00000152127_55 (sequence is synthesized)
agtgggagaccaagtttttatagcaaaagaccaaattagctgtagagtcttgaatgcagaaaaaaattaccctagctttcttagcacttagggttttgtgaggattcagtgtttagcaca

SEQ ID NO: 430647 - DNA, 120 bp, Artificial Sequence
  ENSG00000152127_56 (sequence is synthesized)
gtgcttggcacatagtaagccctagtaaatgttaaatattgttattagtgtttcgtaaaacttgagaaatagagctgagctcattcccttcctgttgattcaaaaataatacctacatga

SEQ ID NO: 430648 - DNA, 120 bp, Artificial Sequence
  ENSG00000152127_57 (sequence is synthesized)
aaacatgattccaagttgattgaatgttgtaggaattactggtttagagtagcccagttctcggcctaccctgctggttgggatcttactgtattcttgaatgcactggtttgaaaatat

SEQ ID NO: 430649 - DNA, 120 bp, Artificial Sequence
  ENSG00000152127_58 (sequence is synthesized)
gccagacttcagcccccaaggaaacaaggctgcaagaatttatgaactccagctggaaaaggtaaaggtgacctttggctagccacatactggaccttaccccactgacgtctttcagaa

SEQ ID NO: 430650 - DNA, 120 bp, Artificial Sequence
  ENSG00000152127_59 (sequence is synthesized)
cattccaagggttttcctcaaggaacatttttgagctagaaattaaaatgggttctctggcagactgcaccccttgagtcaaagttaacagtattcctttgaatgcaataatagaggctt

SEQ ID NO: 430651 - DNA, 120 bp, Artificial Sequence
  ENSG00000152127_60 (sequence is synthesized)
ttctgcgttaagggagaaggaatgaccaattgaacttacacattccccaggcaggtccctttgccggcccctacaggctggggtggcccctcctgtcctcagggatcagactcccagact

SEQ ID NO: 430652 - DNA, 120 bp, Artificial Sequence
  ENSG00000152127_61 (sequence is synthesized)
ggttagttctgcatgtttccatcaaattaaaggttattccctggccgcctcctggagaaaaccaaccccaccctgccagctgggggcaatggggcagggattttggcctctcagaacagc

SEQ ID NO: 430653 - DNA, 120 bp, Artificial Sequence
  ENSG00000152127_62 (sequence is synthesized)
tcctagaggctgctcatgactgaatgttttcccaaatcacctaaatatcggtttgctttttgttttgggggagaggatttagcctcttacttccctgatggattcaaagttttatctatc

SEQ ID NO: 430654 - DNA, 120 bp, Artificial Sequence
  ENSG00000152127_63 (sequence is synthesized)
tccttatctcctgccctgtcttggcacaactctggatagattgcaggtgtggaatttgctggagtttggtgacttcgtcaaattcctttggattctgttccgccaaatcagcagtctcgt

SEQ ID NO: 430655 - DNA, 120 bp, Artificial Sequence
  ENSG00000152127_64 (sequence is synthesized)
cctgtggatgcagtgactggaatttcccatctgcaaagcatctctgtagcccagattttgtggagccttaagacactccctcaatgccaccctgaccccacggctggagaaccctgtgct

SEQ ID NO: 430656 - DNA, 120 bp, Artificial Sequence
  ENSG00000152127_65 (sequence is synthesized)
tatgtggtgggcagggccactgttgatggaggatggcggggacggggtggtgctcaaaggatctgtggtgctggaggtctacacgcctctcaggacagcgtgtcaggaacctcagagcag

SEQ ID NO: 430657 - DNA, 120 bp, Artificial Sequence
  ENSG00000152127_66 (sequence is synthesized)
cttcacatctgccaaagctgagagggagcgaacttgggaagcattttgctcattgtcctacccaagtattaatagcataatagttgatgccaaaggagatggtgacgtcccttccactgt

SEQ ID NO: 430658 - DNA, 120 bp, Artificial Sequence
  ENSG00000152127_67 (sequence is synthesized)
agttgctgtcacaaccttgacgtctttaagctaatggccgtttgcatctgtgtcttcaaacagatcctggttacagccattttgtgtgattcacttcgggggttaagtaatgcaggattc

SEQ ID NO: 430659 - DNA, 120 bp, Artificial Sequence
  ENSG00000152127_68 (sequence is synthesized)
tgcaaacaaggtgtcgccgtccaaatgtactgtcctggcatagagagcactgctttgttttccactgttgtagagaaaactagggagaactttatttttcaataaacttttcttgtgtga

SEQ ID NO: 430660 - DNA, 120 bp, Artificial Sequence
  ENSG00000152127_69 (sequence is synthesized)
agcccaggtagccgcgccgcaggctcggggcgtcgcgacctcgcgcctcgggccgcgtgggcacggcggccggcgggtgctcccggctgctgctgctgcccaacaaggagcagaatggaa

SEQ ID NO: 430661 - DNA, 120 bp, Artificial Sequence
  ENSG00000152127_70 (sequence is synthesized)
gaaggttgccagaaattgaggacggactcccgccctggtcgactgagctcccacaggagcgcctctgctgcgtctcggggctgagtgtggacgcgccgcgcgcggccccgccagggctgg

SEQ ID NO: 430662 - DNA, 80 bp, Artificial Sequence
  ENSG00000152127_71 (sequence is synthesized)
ccccgggcgcgatccagcccaggtagccgcgccgcaggctcggggcgtcgcgacctcgcgcctcgggccgcgtgggcacg

SEQ ID NO: 430663 - DNA, 120 bp, Artificial Sequence
  ENSG00000152127_72 (sequence is synthesized)
cgcgcctcgggccgcgtgggcacggcggccggcgggtgctcccggctgctgctgctgcccaacaaggaggcaatgggaaaacagtaagaggcagaccaacagtgatccagggctctgaaa

SEQ ID NO: 430664 - DNA, 120 bp, Artificial Sequence
  ENSG00000152127_73 (sequence is synthesized)
aaacagtaagaggcagaccaacagtgatccagggctctgaaagctaattgcttcaagatcctgctaccattttcttttgggccgcttgcaaagaagaatcctttgactgaagcataatgg

SEQ ID NO: 430665 - DNA, 80 bp, Artificial Sequence
  ENSG00000152128_0 (sequence is synthesized)
gcacttctgactcgagtccccgccgcgcttgtcgtcgccgccgccgggatccgcagccccgcgccatggagccggccgcg

SEQ ID NO: 430666 - DNA, 120 bp, Artificial Sequence
  ENSG00000152128_1 (sequence is synthesized)
cggctgccgcccccggcccggccccgctgagctccccggtgcgcgagccgccccagctggaggaggagcggcaggtgcggatcagcgagagcggccagttcagcgacgggctggaggacc

SEQ ID NO: 430667 - DNA, 120 bp, Artificial Sequence
  ENSG00000152128_2 (sequence is synthesized)
agttcagcgacgggctggaggaccgaggcttactagaaagcagcacccgcctgaaacctcacgaagcccagaactacaggaagaaggcattgtgggtgtcctggttctccatcattgtca

SEQ ID NO: 430668 - DNA, 120 bp, Artificial Sequence
  ENSG00000152128_3 (sequence is synthesized)
ccctggccctcgcggtggctgcctttactgtctccgttatgaggtacagcgcctctgcttttgggtttgcatttgatgccatcctggacgtcctgtcatcggcgattgtcctgtggcgtt

SEQ ID NO: 430669 - DNA, 120 bp, Artificial Sequence
  ENSG00000152128_4 (sequence is synthesized)
acagcaacgcggccgctgtgcactctgcccatagggagtacatagcctgtgtcatcttgggggtgatattccttctgtcatccatatgtatagtggtcaaagccatccatgacctctcaa

SEQ ID NO: 430670 - DNA, 120 bp, Artificial Sequence
  ENSG00000152128_5 (sequence is synthesized)
ctaggctgctcccagaagtggacgatttcctgttcagtgtctccattttaagtgggattctttgcagcatcctggccgtgttgaagttcatgctggggaaggttctgaccagtagagcac

SEQ ID NO: 430671 - DNA, 120 bp, Artificial Sequence
  ENSG00000152128_6 (sequence is synthesized)
tcataacagatgggtttaactccctcgtgggtggcgtgatgggcttctccattcttctgagcgcggaagtgttcaagcatgactcggcggtctggtacctggacggcagcataggcgttc

SEQ ID NO: 430672 - DNA, 120 bp, Artificial Sequence
  ENSG00000152128_7 (sequence is synthesized)
tgaagggggccagcatccgcatgagaccatcgagatgaggagtttccacataggcaaagggtgccaatatttaactgaacatctggtttctttttggaagttttctttcacatggtttgt

SEQ ID NO: 430673 - DNA, 120 bp, Artificial Sequence
  ENSG00000152128_8 (sequence is synthesized)
cattacaagacaaggtctgcccagccaggtggatctaccttgcccccatcacctgccgcccccatcaaacatgttgggacaatgcccataggaatggacctccttccccgtctccagctg

SEQ ID NO: 430674 - DNA, 120 bp, Artificial Sequence
  ENSG00000152128_9 (sequence is synthesized)
ggactggcgttttttagtctctggagtatgatggttctcatgggtaggatgagatctttggcagaaaggtcttcggtggtgctctgagcctgcgctgcataggactgagcagacccacct

SEQ ID NO: 430675 - DNA, 120 bp, Artificial Sequence
  ENSG00000152128_10 (sequence is synthesized)
cctccagcttgggtggccctgccactcctggttccaagtctctcctttcctggcaggtcttaagggaagattgtacccctcaccctttacatacccagaatcatcagtatgtcacttcct

SEQ ID NO: 430676 - DNA, 120 bp, Artificial Sequence
  ENSG00000152128_11 (sequence is synthesized)
aatttctatcagtgtatctcattatttcatactgttttactaatcctaagtctaaacagatttgctcaaaaggagaccattctattttttaaagtacttagtgatacacgtataagcttt

SEQ ID NO: 430677 - DNA, 120 bp, Artificial Sequence
  ENSG00000152128_12 (sequence is synthesized)
gcatggacgaattaaataagcacattgaccttttcttgtacattcagaacctgaacatccatgtgaaaactgggtccatttttgagagatgtgaaactacagtttatttgtaataaataa

SEQ ID NO: 430678 - DNA, 120 bp, Artificial Sequence
  ENSG00000152128_13 (sequence is synthesized)
atataatctatccgtatatgcatatatctatatgctgtgttaagtggtaatgggtacattacagtctgtgagagatggatcgctccctctgtaaggaacaagacgttctcagctgatgtc

SEQ ID NO: 430679 - DNA, 120 bp, Artificial Sequence
  ENSG00000152128_14 (sequence is synthesized)
acggtaggtttagattctgtagagtgttccccaacccgcaccgttctgtacctctcacaccactgcttgcccgggcagtagtggctgaccaataaagacctttacctgttttgtatggca

SEQ ID NO: 430680 - DNA, 120 bp, Artificial Sequence
  ENSG00000152128_15 (sequence is synthesized)
tcatcttccattcctgtgagcggccattgcatccctgccttggatcctgagtagatttgctcaggtcatccctgcctggcaatcttcctctgccccaggggaagccaggcctggcgtggg

SEQ ID NO: 430681 - DNA, 120 bp, Artificial Sequence
  ENSG00000152128_16 (sequence is synthesized)
aggttacgggcctgcacaaacctaccagcagggcctccttgggcagcgtggacctggagcttctcttggggccaccagtgtgttggggcaggggaggagctggtgtccttcgcggggaga

SEQ ID NO: 430682 - DNA, 120 bp, Artificial Sequence
  ENSG00000152128_17 (sequence is synthesized)
ccctagaagctaccttaagccattcccttcccttcccatgtggcctttgacagctctggtaaagtagaagtatcacatgtaagctgggagccccagtgggctgctgtgtgaaaggagatg

SEQ ID NO: 430683 - DNA, 120 bp, Artificial Sequence
  ENSG00000152128_18 (sequence is synthesized)
gcagtcactatctagtagctccagttctgtttttatggccatttctccaaccatgtagccaatactttgcaaaaaacttagcataatagactttacatttctcttctggagggaaaggaa

SEQ ID NO: 430684 - DNA, 120 bp, Artificial Sequence
  ENSG00000152128_19 (sequence is synthesized)
aaaacctcaggttacttagaggagactcgggagggaaaggatgcaggttgggatagaatgcccttctcaatctggataacctccatcaatgtatttaacctcattcttagttttctcatc

SEQ ID NO: 430685 - DNA, 120 bp, Artificial Sequence
  ENSG00000152128_20 (sequence is synthesized)
ggaaagcagggatgatgatgataatgtgacgtcacacgattgagaaaggttataggtaaccacacgtcctgaacacccaactcggaatctggcccagcagacactcagatatgagtcccc

SEQ ID NO: 430686 - DNA, 120 bp, Artificial Sequence
  ENSG00000152128_21 (sequence is synthesized)
aagtatttgaatgtctactgtgagcctggaactgtcctggggactgtggactcaacagaaaaccacacccctgcctctaggaggtttgcgttctagcgggcacgggcgagaccagctata

SEQ ID NO: 430687 - DNA, 120 bp, Artificial Sequence
  ENSG00000152128_22 (sequence is synthesized)
aaccacatatggcgtcagttcccagaagagaaataaagcaggtacagaatgatggtgggggtgacggctctattctgggaggtatctggtgacatttgagcagagacttgatgggcccag

SEQ ID NO: 430688 - DNA, 120 bp, Artificial Sequence
  ENSG00000152128_23 (sequence is synthesized)
gtggtggctatcactcgtgagagctttgggcatcattcctcccagcacatgctccagttacgtggaggcaggactggcatttgggtgattttcttggattgcttggcactgccatctagc

SEQ ID NO: 430689 - DNA, 120 bp, Artificial Sequence
  ENSG00000152128_24 (sequence is synthesized)
aacccctctaagtgatgcagaataggggtttgtggcaggggtgcgactttccacatggtggttgctggtgccgacgtcctggtaaagcggttgcctctgagtgtggtgttggtctgaagt

SEQ ID NO: 430690 - DNA, 120 bp, Artificial Sequence
  ENSG00000152128_25 (sequence is synthesized)
cagcagccgtgcagtcaggaaagaaggctgggcaaagagaaaggcgcaaggacaaactggcgcccatgaagatggcctggacctgtacgtgaccctcactgtctcagcctccatgacatt

SEQ ID NO: 430691 - DNA, 120 bp, Artificial Sequence
  ENSG00000152128_26 (sequence is synthesized)
gggcatcctgcagaagaagctggcgcctttgccacagagctatatgcacgcctggcttatgactcagcgaagctggagcggggagatgcagcaggagcggagaatccatgggctcggtgc

SEQ ID NO: 430692 - DNA, 120 bp, Artificial Sequence
  ENSG00000152128_27 (sequence is synthesized)
ggcccctctctcccctgggcgagcccgtggagccacagaatgcagaatgtgcctggctgagctgcggcagcaccggagccgcttcacctccacctttcactcatgcagatgtctctggga

SEQ ID NO: 430693 - DNA, 120 bp, Artificial Sequence
  ENSG00000152128_28 (sequence is synthesized)
gtcagcttcaactgggaaccacgtaggaaggaaattctgggcaacgtagttccagttgagctctgtgcacgcagtatatgcagccaccgtgagggagtctgttatttttttccactttat

SEQ ID NO: 430694 - DNA, 120 bp, Artificial Sequence
  ENSG00000152128_29 (sequence is synthesized)
aggtaggacagtggagggagggaggggttaagtgacctgcccagagtcacctagctagtaagtgggactcccgcttcagtgcttttgaagctgccacccagtgcttctactttttcgctc

SEQ ID NO: 430695 - DNA, 120 bp, Artificial Sequence
  ENSG00000152128_30 (sequence is synthesized)
caggaagcccacccgagtcctccaggagctggacctcggggccctccggtccatcgagagctcccccgagatgaagcctcccaggtacaggaaacttcccgcacagcccctggataggcc

SEQ ID NO: 430696 - DNA, 120 bp, Artificial Sequence
  ENSG00000152128_31 (sequence is synthesized)
gcggtggagctcagtcctggtctcttggaagttgaagtttctttatgtttcaccatgcatacttatttctcggtgacaagcttcctgtgtctctcttacgagaatgctgaccaggcttgt

SEQ ID NO: 430697 - DNA, 120 bp, Artificial Sequence
  ENSG00000152128_32 (sequence is synthesized)
ctggggctcaccgtgagcacccgatgcggctggcaggtggaggacgtttgtgtgtggatcatgtgtttgggccccttcacaacaactcgtaccttttactgccagctgctgccaggggct

SEQ ID NO: 430698 - DNA, 120 bp, Artificial Sequence
  ENSG00000152128_33 (sequence is synthesized)
gtaggcatcccactgccgcttacagagatccaagtgtttgtttcccagtaagccatggagtttagagttgagcaaaggcctgcctggcacacgactgccactgggtcggccgagccctgg

SEQ ID NO: 430699 - DNA, 120 bp, Artificial Sequence
  ENSG00000152128_34 (sequence is synthesized)
gtctgcagctccctttaggagctggaggaagggccaccaaagccatgggtggcgtttcttgagctgcatctcagggtggggcagcacaccccaggccctgtgccctaggggcctagatgg

SEQ ID NO: 430700 - DNA, 120 bp, Artificial Sequence
  ENSG00000152128_35 (sequence is synthesized)
ggtaagcacagattttctctaccgctggaaacttagggaggagggctttgcaaacagcgactgaatggagccaaaggggattcaggcatcatgggataagcaaagtgagtattcagtctc

SEQ ID NO: 430701 - DNA, 120 bp, Artificial Sequence
  ENSG00000152128_36 (sequence is synthesized)
caaatctgagacctcaaagttcttgaatttcctgactgcctcagtctcccagcctatgcttcctgagtcctgttagcacctggggctgttgacatgcaattctttggtcatgtgtcttag

SEQ ID NO: 430702 - DNA, 120 bp, Artificial Sequence
  ENSG00000152128_37 (sequence is synthesized)
tcagttctagctgttataacaaaacaccacagactgggtggcttataaaccacagacacttccatctcacagttctggaggctgggagtccaagacaaggtgccagcagattcagtgcct

SEQ ID NO: 430703 - DNA, 120 bp, Artificial Sequence
  ENSG00000152128_38 (sequence is synthesized)
ggtggggccccttttcctggttcatgagatggtggcttcttcctgtgtcctcacatgcggagggggcaagctggcactatgggacctcttttataagggcactcattccattagtgaggg

SEQ ID NO: 430704 - DNA, 120 bp, Artificial Sequence
  ENSG00000152128_39 (sequence is synthesized)
ctctgtccttgcagcctaatcacctcccagaggccccacctcctcataccgtcaccctggcaattaggtttccatgtgtgaattttggagggacacatactcagattgtagcatcatgtt

SEQ ID NO: 430705 - DNA, 120 bp, Artificial Sequence
  ENSG00000152128_40 (sequence is synthesized)
caccttattttctgtgggtgctgtctcctggacttaggctgagtcctgcacaaagagagcttccatgtggggctcctgaccccctcccactgtgtcccctgctgtgtaacctctgcatag

SEQ ID NO: 430706 - DNA, 120 bp, Artificial Sequence
  ENSG00000152128_41 (sequence is synthesized)
gagggactgaagagttgtcaagaggcctggtttgggacggtccttactggtcatttgaggaggtaaaacttccgtgaggtgattactttaaataagcttttaaatgtgaaataattttag

SEQ ID NO: 430707 - DNA, 120 bp, Artificial Sequence
  ENSG00000152128_42 (sequence is synthesized)
attaatagaagagttttacagatagtacagagagtgcccatatcccctccatccagcctgacctactgttaacatcgcacacagccacggcaaattaatctctaccatgagatgacagca

SEQ ID NO: 430708 - DNA, 120 bp, Artificial Sequence
  ENSG00000152128_43 (sequence is synthesized)
ctattcacgaaaccctagactttcttctcatgtccccggttttcccactgatgacctttttgtgttccaggatccagtctggatgccatgctgcatttacttgtcacatctccttaagtc

SEQ ID NO: 430709 - DNA, 120 bp, Artificial Sequence
  ENSG00000152128_44 (sequence is synthesized)
tccagtgtgtgacagtctctcggtcgttcctcatgtttcatgaccttgacacgtgaggagtcgggtattttgtagacggtccctccgtttgggtttgtttgatgttgtttcgcagttaaa

SEQ ID NO: 430710 - DNA, 120 bp, Artificial Sequence
  ENSG00000152128_45 (sequence is synthesized)
aaagtgcccttcttgtcacatcgtatcaggggccacatgttaccaacacaacttaataatggtgatgtgaaccttgatcacttggctaaggtggtgtctgcttggtttctccattggtaa

SEQ ID NO: 430711 - DNA, 120 bp, Artificial Sequence
  ENSG00000152128_46 (sequence is synthesized)
gctactgtttttccctttctctactctgtgttagatttgagtctgttaagtccagcccaaactcaagggcaggggatggggtggggagattaatctccaactcttggaggatggagtagc

SEQ ID NO: 430712 - DNA, 120 bp, Artificial Sequence
  ENSG00000152128_47 (sequence is synthesized)
aaagaatttgtgaacataggttgccaaaaccaccaccgtcattgacccatgttttcggagagatgctttgaccctatacagataccctgtttccagtgaagttgcttttcaaatggcttt

SEQ ID NO: 430713 - DNA, 120 bp, Artificial Sequence
  ENSG00000152128_48 (sequence is synthesized)
gttcagttttgaacatgatgcaggctgtctccctcttcccaggttctgacatgaggtttgtgaatttgattaataaaatgcatagggagaagccgatttctttgcctatttatgatgctg

SEQ ID NO: 430714 - DNA, 120 bp, Artificial Sequence
  ENSG00000152128_49 (sequence is synthesized)
catcagagttctgctggccgttgcattttaatattgggaaatctgaaggctgtgtctcttgggggtgacacatgggagcttgaagcagaagagctggatgggccccaatgtcaggagaat

SEQ ID NO: 430715 - DNA, 120 bp, Artificial Sequence
  ENSG00000152128_50 (sequence is synthesized)
agtggtgcttacttattgcatatgggactcacttgtttgcttgcgaaggtaaggtaacaacttagaggaagtgttaagataacgtcagtagcagacgatatttttagatgctattttctc

SEQ ID NO: 430716 - DNA, 120 bp, Artificial Sequence
  ENSG00000152128_51 (sequence is synthesized)
tacccatgtctatgaactctcaattgccctgtgtgaatttaaggggaaaaaatatggttttaagtagctctggccctaactgaccctgtggcaaattcagttggctctgttgaaggattg

SEQ ID NO: 430717 - DNA, 120 bp, Artificial Sequence
  ENSG00000152128_52 (sequence is synthesized)
ttaggctggtggtgtgtttacgtgttccaaaattctcagtcaactgcttggtgagttatctgtggaaaattctatatagaagatgctgttcttagcattctgaccaactctgttattgat

SEQ ID NO: 430718 - DNA, 120 bp, Artificial Sequence
  ENSG00000152128_53 (sequence is synthesized)
ctatgactgctactcattttagcagaatagtggggaggtcaatctcctacaggaaaataaatacgtaatggttttttaagtaaatataaattgggattatctgtttttgagcatcttttc

SEQ ID NO: 430719 - DNA, 120 bp, Artificial Sequence
  ENSG00000152128_54 (sequence is synthesized)
caattcctggtgacacataactgaggtgtgaaagcatgcagtatacccccacctggtggcagcacacctgactatttgtacttggaacaaggctgatctgtaaggcaagtgggttgcaga

SEQ ID NO: 430720 - DNA, 120 bp, Artificial Sequence
  ENSG00000152133_0 (sequence is synthesized)
aatagagtctgcactaggaaactggtgggagccgaggtccggaagtccgacgctggtcggtgggcgcatgcgcagcgcgcgctctacggcgctgaaccggggcgagcagagagctgtcag

SEQ ID NO: 430721 - DNA, 120 bp, Artificial Sequence
  ENSG00000152133_1 (sequence is synthesized)
atactatagccatatgaagttgaacatggcagaagaagaggactatatgtctgattccttcattaatgtccaagaagatatcagaccaggattgccaatgctaaggcaaatccgagaagc

SEQ ID NO: 430722 - DNA, 120 bp, Artificial Sequence
  ENSG00000152133_2 (sequence is synthesized)
ccgtcgaaaagaagaaaagcaacaggaagccaatttgaaaaacaggcagaagagtttaaaagaagaagaacaagaaagacgtgacattgggttgaagaatgcactaggctgtgaaaacaa

SEQ ID NO: 430723 - DNA, 120 bp, Artificial Sequence
  ENSG00000152133_3 (sequence is synthesized)
agggtttgccttgctccaaaagatgggctataaaagtggtcaggcacttggcaagagtgggggtggtattgttgaaccaattcctctcaatatcaaaacagggaaaagtggcattggtca

SEQ ID NO: 430724 - DNA, 120 bp, Artificial Sequence
  ENSG00000152133_4 (sequence is synthesized)
tgaggcatcattaaaacggaaagcagaggaaaaattggaaagctacagaaaaaagattcacatgaaaaaccaagctgaagaaaaagctgcagaacagtttcgaatgcgacttaaaaataa

SEQ ID NO: 430725 - DNA, 120 bp, Artificial Sequence
  ENSG00000152133_5 (sequence is synthesized)
gcaagatgaaatgaagctagaaggagatctcagaagaagccagcgagcctgtcaacaactggatgtccagaaaaatattcaggttcccagggaagcatggtactggttgaggcttgaaga

SEQ ID NO: 430726 - DNA, 120 bp, Artificial Sequence
  ENSG00000152133_6 (sequence is synthesized)
ggagactgaagaagatgaagaagaaaaagaacaggatgaagatgaatataagagtgaagatttaagcgtactggaaaaattacaaatattgactagttatttaagagaagaacatctata

SEQ ID NO: 430727 - DNA, 120 bp, Artificial Sequence
  ENSG00000152133_7 (sequence is synthesized)
ttgtatttggtgtggaacagcctatgaagataaagaagacctatcttcaaattgtccaggaccaacttctgcagatcatgactaagattattcccaataaagtggaaacttgaaaaatgt

SEQ ID NO: 430728 - DNA, 120 bp, Artificial Sequence
  ENSG00000152133_8 (sequence is synthesized)
tattacttcctagggatagacaatttagcagttggaaatctcaaattttttatgccagtaaagaaagggggactttatataatgttttgttctttttgtactttagaatatgaatgttca

SEQ ID NO: 430729 - DNA, 120 bp, Artificial Sequence
  ENSG00000152133_9 (sequence is synthesized)
ttgacttgaaaaaaataatgcaatggcatttcagaacacaagtatcacagagatggacagttacaatttattgctatattgtgatacgtgaggggtttaaggacaccaacaggtaacttc

SEQ ID NO: 430730 - DNA, 120 bp, Artificial Sequence
  ENSG00000152133_10 (sequence is synthesized)
ttattcccctcttcactttggaacaaattgagaaataagaaatgggagtcagaggaagagaaaaatatccactttatcagtgaataaactgatacagagaagaaggttgactttttctcc

SEQ ID NO: 430731 - DNA, 120 bp, Artificial Sequence
  ENSG00000152133_11 (sequence is synthesized)
agtcagagactgtaatatttctccctgattggagagaacagcgggtctctgccttgttggggcagagcccatctttgcattctgagaccagttagctttcaaggtcagggaaaccaccag

SEQ ID NO: 430732 - DNA, 120 bp, Artificial Sequence
  ENSG00000152133_12 (sequence is synthesized)
gggctggaccacacatgctcagttccttcttgtatcacccatgggataagacagttctctcttgggaaggaatgaatgagggttcagagagctttttcctacacttcttgctttgaagga

SEQ ID NO: 430733 - DNA, 120 bp, Artificial Sequence
  ENSG00000152133_13 (sequence is synthesized)
gcaaggagaagttcccttccctccatccaagcatgaagaggaggggaaaagtattcccctcaataaggctgatgtcagaggcaatgttcgaccagtactactaaattctaatccatttaa

SEQ ID NO: 430734 - DNA, 120 bp, Artificial Sequence
  ENSG00000152133_14 (sequence is synthesized)
ctgtgataatttctggtaaaatcatgagttttcatgacaatgtctatatccattatatgtgatctgttggaagttttggctagagaaacttaattgtgaggaaatttaaatattgtgtga

SEQ ID NO: 430735 - DNA, 120 bp, Artificial Sequence
  ENSG00000152133_15 (sequence is synthesized)
tgcaagtacttactgaatttggaaaccccttgatagcattcccagcaagtgatagttcaacctttgcttttattcttccagccacagagaactcactgctttaaaaccattccattactg

SEQ ID NO: 430736 - DNA, 120 bp, Artificial Sequence
  ENSG00000152133_16 (sequence is synthesized)
atacagctaaggacataccgtgtggcatactatgagagagctccatccagggtgaggcatcaaaatcatgaacctttttaaaagttcatatgctcaggtgtctctcctagtgattgattt

SEQ ID NO: 430737 - DNA, 120 bp, Artificial Sequence
  ENSG00000152133_17 (sequence is synthesized)
tgatttgtcttggctaaggtggttcctggatatctatatatttattttgaagtcccaagaatgagtgataagcacctgaggataagaactagtactgaggttaaggatggagcaccacca

SEQ ID NO: 430738 - DNA, 120 bp, Artificial Sequence
  ENSG00000152133_18 (sequence is synthesized)
ttctttggatagagttgtgatcacctgtgtgattttatagctcacctgttagttagattgagcaagagaacaaccccttttattagaaacagcatacataagaagattgtaaaaattaac

SEQ ID NO: 430739 - DNA, 120 bp, Artificial Sequence
  ENSG00000152133_19 (sequence is synthesized)
ctacacttgctagggtaagataatcagtagtacaatttgtattaatctctgacctaatatgacctaattcacttttcaagtttaacttggggagctttacaaaatagtaataaaagggtc

SEQ ID NO: 430740 - DNA, 120 bp, Artificial Sequence
  ENSG00000152133_20 (sequence is synthesized)
ccatcccaagagattctgatgccattagtcactgtgacttgggcatcactgcccttgattctaaaatgcagcctaccttgagccactaatctagttaacttctgggcctcagttcttcat

SEQ ID NO: 430741 - DNA, 120 bp, Artificial Sequence
  ENSG00000152133_21 (sequence is synthesized)
tctgggcctcagttcttcatccagaaaactaatcattatttttatgaatgtaaatatgtgtatatatataatatttatatgtttggatgctattgtttaatatttacttttttgttttta

SEQ ID NO: 430742 - DNA, 90 bp, Artificial Sequence
  ENSG00000152133_22 (sequence is synthesized)
tatttacttttttgtttttaaaaaaattataaaattggctgagcgcagtggttcactcctgtaatcccagcactttaggacgccaaggca

SEQ ID NO: 430743 - DNA, 86 bp, Artificial Sequence
  ENSG00000152133_23 (sequence is synthesized)
atacaaaaattagctgggcgtggtggcattcgcctgtaatcccagctactcagaaggcgtattgcagtgagctgagatcatgctgc

SEQ ID NO: 430744 - DNA, 63 bp, Artificial Sequence
  ENSG00000152133_24 (sequence is synthesized)
tcaaaaaaaaaaatttattaataaaacagaggagtacattttacccttgcaattccagtcaat

SEQ ID NO: 430745 - DNA, 120 bp, Artificial Sequence
  ENSG00000152133_25 (sequence is synthesized)
agaggagtacattttacccttgcaattccagtcaatactgtggtgtcatttcagccaacataccaacattcagtcaaatcccaaagccaaatggataatttcagatggaatggagttaga

SEQ ID NO: 430746 - DNA, 120 bp, Artificial Sequence
  ENSG00000152133_26 (sequence is synthesized)
caggaactggcttccctttctcctgttactatgaggacaacccacacctgctcagtggcctaaaatattttaaatatgttcatgacaattatgctgagaatgccaggataacactgatgg

SEQ ID NO: 430747 - DNA, 120 bp, Artificial Sequence
  ENSG00000152133_27 (sequence is synthesized)
aacccatgacttcaccaggattgtggtctacatttacaggcctagtactagaactagaccggcttagagagtgggagatatccctctgttgtccatcgaaagataaaaatacaggctttc

SEQ ID NO: 430748 - DNA, 120 bp, Artificial Sequence
  ENSG00000152133_28 (sequence is synthesized)
agataaaaatacaggctttcagccgggtgcagtggtgcatgcctttggtcccagctactcagggggctgagatggggaatcctttgagcccagaagtttgaaaccagcctgggcaacata

SEQ ID NO: 430749 - DNA, 120 bp, Artificial Sequence
  ENSG00000152133_29 (sequence is synthesized)
gggaataaaaaaaaaatcagactttcaatatgagtaacaagttatttttaggccttttatgactttataaataggcaataatgaacaccaagggaagcaaaacactgaaaagaattttaa

SEQ ID NO: 430750 - DNA, 120 bp, Artificial Sequence
  ENSG00000152133_30 (sequence is synthesized)
aatttgttgtagaacattaatacgaaatttgaaactgcaaaacaatgtaaaatttaatgtcatgttgtcatttacttttgtgtatattgtgccatgtttattttcaaagtcctatctaga

SEQ ID NO: 430751 - DNA, 120 bp, Artificial Sequence
  ENSG00000152133_31 (sequence is synthesized)
caaagtcctatctagaaattctaaaatgtctaattttcttaattaaaaatccagaattctgtagtttctgaaattcaaaataaatactttaacataccaaattggtttttctaataaaca

SEQ ID NO: 430752 - DNA, 120 bp, Artificial Sequence
  ENSG00000152133_32 (sequence is synthesized)
gcaccatttccttcatagggtgtctcagccttggcaacattagcactttgagttgtggtaatccgttgttgtggagagctgtcctgtgcattgcaagatgtttagcagcatctctggccc

SEQ ID NO: 430753 - DNA, 120 bp, Artificial Sequence
  ENSG00000152137_0 (sequence is synthesized)
attaatagccaggccttagtgccccgctcggggagggcggctccagctcctggagcaagaggagggcggagctgagcggagtggccaggggaggagagagtgtccggagaggccggctga

SEQ ID NO: 430754 - DNA, 120 bp, Artificial Sequence
  ENSG00000152137_1 (sequence is synthesized)
acttggacgcggcccctcccagctccccccacagcccagctgttccctccgcggattctccggggctggttcatcacctccgaatattcctgtgacaggagacgcttgcaaaacccgcct

SEQ ID NO: 430755 - DNA, 120 bp, Artificial Sequence
  ENSG00000152137_2 (sequence is synthesized)
ccagcctccagcagcaaataaatagaaggcttgcagcccagaaggagccagaagaagtttctaggcgcgcgtgccctgggtttattaagctcctggctccgctctagacctcagcggttc

SEQ ID NO: 430756 - DNA, 120 bp, Artificial Sequence
  ENSG00000152137_3 (sequence is synthesized)
tggctgccagcctgggcagcctgggaagcctgggaggacggtggcttgccggtctgtcgtgaggcagtgcggacggggaccctctgggattctgctggatctgccccgggggttaccttt

SEQ ID NO: 430757 - DNA, 120 bp, Artificial Sequence
  ENSG00000152137_4 (sequence is synthesized)
gggggctgggaccccagtcgaggggacacaaccgtccctggcagtggttggttctgcttctccctgcagaaaagcagcattttcggaagctgaagaataagctagcccagccacaccacc

SEQ ID NO: 430758 - DNA, 120 bp, Artificial Sequence
  ENSG00000152137_5 (sequence is synthesized)
ttgttgtgtgaccttgggcaggtggttctgtctctctgagcctctgtttctctctgagctgagcagccaccatggctgacggtcagatgcccttctcctgccactacccaagccgcctgc

SEQ ID NO: 430759 - DNA, 120 bp, Artificial Sequence
  ENSG00000152137_6 (sequence is synthesized)
gccgagaccccttccgggactctcccctctcctctcgcctgctggatgatggctttggcatggaccccttcccagacgacttgacagcctcttggcccgactgggctctgcctcgtctct

SEQ ID NO: 430760 - DNA, 120 bp, Artificial Sequence
  ENSG00000152137_7 (sequence is synthesized)
cctccgcctggccaggcaccctaaggtcgggcatggtgccccggggccccactgccaccgccaggtttggggtgcctgccgagggcaggacccccccacccttccctggggagccctgga

SEQ ID NO: 430761 - DNA, 120 bp, Artificial Sequence
  ENSG00000152137_8 (sequence is synthesized)
tgtttctaagaacttcacaaagaaaatccagcttcctgcagaggtggatcctgtgacagtatttgcctcactttccccagagggtctgctgatcatcgaagctccccaggtccctcctta

SEQ ID NO: 430762 - DNA, 120 bp, Artificial Sequence
  ENSG00000152137_9 (sequence is synthesized)
ctcaacatttggagagagcagtttcaacaacgagcttccccaggacagccaggaagtcacctgtacctgagatgccagtactggcccatccttgttttgtccccaaccctagggcttctc

SEQ ID NO: 430763 - DNA, 120 bp, Artificial Sequence
  ENSG00000152137_10 (sequence is synthesized)
tgattccaggatacattactttagctgaactcagatttagtgcaagtaaaatgttagagggtgcgggggtgaggactgaccacagattccctggatagtgtagtggtagatttctccaca

SEQ ID NO: 430764 - DNA, 120 bp, Artificial Sequence
  ENSG00000152137_11 (sequence is synthesized)
ggatagcgcaattggcaaatcatgcttggttgtgttaggccaaaatactagttttgctttctttaccttttctatcttgatgaaaatgttgcacattctatagttgcaaaacacataaaa

SEQ ID NO: 430765 - DNA, 120 bp, Artificial Sequence
  ENSG00000152137_12 (sequence is synthesized)
ggggacttaacatttcacgttgtatcttacttgcagtgaatgcaagggttacttttctctggggacctcccccatcacccaggttcctactctgggctcccgattcccatggctcccaaa

SEQ ID NO: 430766 - DNA, 120 bp, Artificial Sequence
  ENSG00000152137_13 (sequence is synthesized)
ccatgccgcatggtttggttaatgaaacccagtagctaaccccactgtgcttccacatgcctggcctaaaatgggtgatatacaggtcttatatccccatatggaatttatccatcaacc

SEQ ID NO: 430767 - DNA, 120 bp, Artificial Sequence
  ENSG00000152137_14 (sequence is synthesized)
acataaaaacaaacagtgccttctgccctctgcccagatgtgtccagcacgttctcaaagtttccacattagcactccctaaggacgctgggagcctgtcagtttatgatctgacctagg

SEQ ID NO: 430768 - DNA, 120 bp, Artificial Sequence
  ENSG00000152137_15 (sequence is synthesized)
tcccccctttcttctgtcccctgtgtttaagtcgggatttttacagagggagctgtctccagacagctccatcaggaaccaagcaaaggccagatagcctgacagataggctagtggtat

SEQ ID NO: 430769 - DNA, 120 bp, Artificial Sequence
  ENSG00000152137_16 (sequence is synthesized)
tgtgtatatgggcgggacgtgtgtgtcattattatttgagttatgctgttgtttaggggtaaataacagtaaataattaataataataataataataataaaggagctgacgttcttagc

SEQ ID NO: 430770 - DNA, 120 bp, Artificial Sequence
  ENSG00000152137_17 (sequence is synthesized)
gcattgtttctaagaacttcacaaagaaaatccaggaacataatacaactggatctaagcttaagcaaacacgtgatgagggaacaagtaaacaggcagacaaaatcgttactggagtag

SEQ ID NO: 430771 - DNA, 120 bp, Artificial Sequence
  ENSG00000152137_18 (sequence is synthesized)
cctatactgccatctttttctcattttttctgacaggatctatatcaattccttttttccattccttaattctattatttttaactacataagacattttgttacaggaaaaccagaaaa

SEQ ID NO: 430772 - DNA, 120 bp, Artificial Sequence
  ENSG00000152137_19 (sequence is synthesized)
cccgaaaacccagaagaaaatgaaaatcattcacattccctcctttcagagaaggctatgactattacattttcattgcttttttcccatcaactttcacatgcaccaacatatagagag

SEQ ID NO: 430773 - DNA, 120 bp, Artificial Sequence
  ENSG00000152137_20 (sequence is synthesized)
tattgtttttaatattattttacagaaatggtatcaaacttggtgtatttcctcctctttattagtacatatcacgagtgtctttccttgctaataaatatggattgagttaatgtttaa

SEQ ID NO: 430774 - DNA, 120 bp, Artificial Sequence
  ENSG00000152137_21 (sequence is synthesized)
ttccatcaattatcttatttcaccttcatagccagccttggaagtggacttaggtgggtctgtatggcagacaaggtccttgaggcttagataactagagtctctagggtaggcctaagt

SEQ ID NO: 430775 - DNA, 120 bp, Artificial Sequence
  ENSG00000152147_0 (sequence is synthesized)
ggtctccgctcaacgatccttcctcaaagcatggttgctgagtacccagagttgcgaggagttttttaactgatttagccaggtggcaatcatgagtgaatggatgaagaaaggcccctt

SEQ ID NO: 430776 - DNA, 120 bp, Artificial Sequence
  ENSG00000152147_1 (sequence is synthesized)
agaatggcaagattacatttacaaagaggtccgagtgacagccagtgagaagaatgagtataaaggatgggttttaactacagacccagtctctgccaatattgtccttgtgaacttcct

SEQ ID NO: 430777 - DNA, 120 bp, Artificial Sequence
  ENSG00000152147_2 (sequence is synthesized)
tgaagatggcagcatgtctgtgaccggaattatgggacatgctgtgcagactgttgaaactatgaatgaaggggaccatagagtgagggagaagctgatgcatttgttcacgtctggaga

SEQ ID NO: 430778 - DNA, 120 bp, Artificial Sequence
  ENSG00000152147_3 (sequence is synthesized)
ctgcaaagcatacagcccagaggatctggaagagagaaagaacagcctaaagaaatggcttgagaagaaccacatccccatcactgaacagggagacgctccaaggactctctgtgtggc

SEQ ID NO: 430779 - DNA, 120 bp, Artificial Sequence
  ENSG00000152147_4 (sequence is synthesized)
tggggtcctgactatagacccaccatatggtccagaaaattgcagcagctctaatgagattattctgtcgcgtgttcaggatcttattgaaggacatcttacagcttcccaatgagaggc

SEQ ID NO: 430780 - DNA, 120 bp, Artificial Sequence
  ENSG00000152147_5 (sequence is synthesized)
caggaagtgtgaacatactgatagaaaaagactatattttatccctcataaaatgttttaaatgtaaatgtacatgactgtgtgtgtgtatgtgtgtgtgtgtataattctttgttgttt

SEQ ID NO: 430781 - DNA, 120 bp, Artificial Sequence
  ENSG00000152147_6 (sequence is synthesized)
tggtaaaatcagaggagtgggttataagtgctaatttccttgggaaattaatgaactagggcaagtatagcatcccatgcataaaattagcacagggacatcagaattgtatgggtcttc

SEQ ID NO: 430782 - DNA, 62 bp, Artificial Sequence
  ENSG00000152147_7 (sequence is synthesized)
ataaaattagcacagggacatcagaattgtatggtttgagtgcagtggcgcaatctcagctc

SEQ ID NO: 430783 - DNA, 78 bp, Artificial Sequence
  ENSG00000152147_8 (sequence is synthesized)
cacttgtatgggtcttttcttgtgatggggttacacccccatttttgttaggcaagaaaagcatttggaaaaaaatgt

SEQ ID NO: 430784 - DNA, 120 bp, Artificial Sequence
  ENSG00000152147_9 (sequence is synthesized)
ccatttttgttaggcaagaaaagcatttggaaaaaaatgtaacatgttagattcaatataaaatattatggtaagatcatggtcttgttaagtctcttcactaactgtatgtgtctgttt

SEQ ID NO: 430785 - DNA, 80 bp, Artificial Sequence
  ENSG00000152147_10 (sequence is synthesized)
tggaacacagcattacctattgaattacagttttctggtttttttgtggagtttttgttttggtttttgagatggagttt

SEQ ID NO: 430786 - DNA, 77 bp, Artificial Sequence
  ENSG00000152147_11 (sequence is synthesized)
tggaacacagcattacctattgaattacagttttctggtttttttgtggagtttttgttttgtaatagtgcaatctc

SEQ ID NO: 430787 - DNA, 88 bp, Artificial Sequence
  ENSG00000152147_12 (sequence is synthesized)
atgagagcctccaaaagagggtcttgatatgttgcccaggcttgtcttcaactcctgggttcaagtgatccttccaccttggcctccc

SEQ ID NO: 430788 - DNA, 120 bp, Artificial Sequence
  ENSG00000152147_13 (sequence is synthesized)
ccttggcctcccaaagtgctgggaatataggtgtgagctgccatgtccagctgtaagaaatattttaaaatatttaagcttcagggcctttgaatacaggccctgataacatagctattt

SEQ ID NO: 430789 - DNA, 120 bp, Artificial Sequence
  ENSG00000152147_14 (sequence is synthesized)
acatagctattttcctgcatagttgtctaataacaagatggtatagcccagtgcttcttgcactttagcaagcatcagaatcagcaaatatttaggtttcagggcctttgaatacagtct

SEQ ID NO: 430790 - DNA, 120 bp, Artificial Sequence
  ENSG00000152147_15 (sequence is synthesized)
gataacacagctattttcctgcatagttgtctaataacaagatggtatagtccagtgcttcctgcatgttggcaagcatcagaatcagctgcagggcttttcaaaacagattgctggacc

SEQ ID NO: 430791 - DNA, 120 bp, Artificial Sequence
  ENSG00000152147_16 (sequence is synthesized)
ctcctcccaacagattctgattcagtagttctagttgggacccaggaatttgcatttccaacagactcccagataatgatgttaccgttcccagaccacacttgcagaagcagttcagaa

SEQ ID NO: 430792 - DNA, 120 bp, Artificial Sequence
  ENSG00000152147_17 (sequence is synthesized)
acttcaggggaacagaaagttcctccctcacggcttcaaagttccatgatcctgaaagcaaaatttagcacacatcacctttctcctagtggctaagactctcctgttcaaaccctggat

SEQ ID NO: 430793 - DNA, 120 bp, Artificial Sequence
  ENSG00000152147_18 (sequence is synthesized)
gtcttcagaaagcaaatagaaggggaatatgaacagactgaagtcagcaaggaaatgactgacaagatgagggaggcctttgaaaaggaagaagccagctgggcgcggtggctcacgcct

SEQ ID NO: 430794 - DNA, 65 bp, Artificial Sequence
  ENSG00000152147_19 (sequence is synthesized)
tcccagcactttgggaggcctaggcgggccgatcacttgaggccaggatttggctgggtgtggtg

SEQ ID NO: 430795 - DNA, 73 bp, Artificial Sequence
  ENSG00000152147_20 (sequence is synthesized)
aatctcagctactcaggaggctgaggcagcattccagcttgggcagcagaacgagactctgtctcaaaaaaaa

SEQ ID NO: 430796 - DNA, 120 bp, Artificial Sequence
  ENSG00000152147_21 (sequence is synthesized)
tctgtctcaaaaaaaaaaaaaaagccacgtaggaaattatccacagcatcaattggacttgatcttggctcagggaccaggcccggtgccttgatattggtagatttatttgccatcaga

SEQ ID NO: 430797 - DNA, 120 bp, Artificial Sequence
  ENSG00000152147_22 (sequence is synthesized)
ctaatgagctggggacattgactgtttcctggcaactgagtcctctgattgtgtaaacaatttgcctgcaaacaaaacctgagtgcttgaaagggtaagtgatcctgatctgccatagaa

SEQ ID NO: 430798 - DNA, 120 bp, Artificial Sequence
  ENSG00000152147_23 (sequence is synthesized)
accttcatgcttagggagtttccctagctaattcctcagctaagattctccccaggagtttcactcacctgtttccagtgcctcctttgggctgtcagcatctgtgattccacattcccc

SEQ ID NO: 430799 - DNA, 120 bp, Artificial Sequence
  ENSG00000152147_24 (sequence is synthesized)
agagggagattcctccccaaagctggttgtatttactgccagtcctgggctgtagccagggcagtctttgaacacattatcaagaatactttttaaaataaaagtctgtttcgacttcca

SEQ ID NO: 430800 - DNA, 64 bp, Artificial Sequence
  ENSG00000152147_25 (sequence is synthesized)
ggaatgcagtggcgagatctcggctctttgtaacctccacctcttgccaccacgtctggctaat

SEQ ID NO: 430801 - DNA, 120 bp, Artificial Sequence
  ENSG00000152147_26 (sequence is synthesized)
aacgccacgatctctccagtaaacctgaggccttccccatgctgtcccgccccctcctctccccgttttctacaccctccttgtcttctttcccgtctccctaccctctgcctcctttcg

SEQ ID NO: 430802 - DNA, 120 bp, Artificial Sequence
  ENSG00000152147_27 (sequence is synthesized)
tttttccccaggctagggaccctcagccttaacaatcttagtacggatgcattagaccggcctatgaaaggctgtacaatttaaccgctgatgttgcagccgtcgcgcccttctgctggg

SEQ ID NO: 430803 - DNA, 120 bp, Artificial Sequence
  ENSG00000152147_28 (sequence is synthesized)
ggacctggcctagtcagctactctgatctttggggctcatcagagcatgtaagtcttctcatgaatgtctcctcatgatggaaagaggctgcctcacctccaggccttatgtccaagcca

SEQ ID NO: 430804 - DNA, 120 bp, Artificial Sequence
  ENSG00000152154_0 (sequence is synthesized)
gcgcgagcccaccggcggctgcggcggggcgggaagccatggagccgcgggcgctcgtcacggcgctcagcctcggcctcagcctgtgctccctggggctgctcgtcacggccatcttca

SEQ ID NO: 430805 - DNA, 120 bp, Artificial Sequence
  ENSG00000152154_1 (sequence is synthesized)
gctcgtcacggccatcttcaccgaccactggtacgagaccgacccccggcgccacaaggagagctgcgagcgcagccgcgcgggcgccgaccccccggaccagaagaaccgcctgatgcc

SEQ ID NO: 430806 - DNA, 80 bp, Artificial Sequence
  ENSG00000152154_2 (sequence is synthesized)
agaaccgcctgatgccgctgtcgcacctgccgctgcgggactcgcccccgctggggcgccggctgctcccgggcggcccg

SEQ ID NO: 430807 - DNA, 120 bp, Artificial Sequence
  ENSG00000152154_3 (sequence is synthesized)
cgagtgcggccggcccctcttcgccacctactcgggcctctggaggaagtgctacttcctgggcatcgaccgggacatcgacaccctcatcctgaaaggtattgcgcagcgatgcacggc

SEQ ID NO: 430808 - DNA, 120 bp, Artificial Sequence
  ENSG00000152154_4 (sequence is synthesized)
catcaagtaccacttttctcagcccatccgcttgcgaaacattccttttaatttaaccaagaccatacagcaagatgagtggcacctgcttcatttaagaagaatcactgctggcttcct

SEQ ID NO: 430809 - DNA, 120 bp, Artificial Sequence
  ENSG00000152154_5 (sequence is synthesized)
cggcatggccgtagccgtccttctctgcggctgcattgtggccacagtcagtttcttctgggaggagagcttgacccagcacgtggctggactcctgttcctcatgacagggatattttg

SEQ ID NO: 430810 - DNA, 120 bp, Artificial Sequence
  ENSG00000152154_6 (sequence is synthesized)
ggtccatcttttgcgcctggtgcagtttaggctttattgtggcagctggaggtctctgcatcgcttatccgtttattagccggaccaagattgcacagctaaagtctggcagagactcca

SEQ ID NO: 430811 - DNA, 120 bp, Artificial Sequence
  ENSG00000152154_7 (sequence is synthesized)
cggtatgactgtcctcactgggcctgtccacagtgcgagcgactcctgaggggaacagcgcggagttcaggagtccaagcacaaagcggtcttttacattccaacctgttgcctgccagc

SEQ ID NO: 430812 - DNA, 120 bp, Artificial Sequence
  ENSG00000152154_8 (sequence is synthesized)
cctttctggattactgatagaaaatcatgcaaaacctcccaacctttctaaggacaagactactgtggattcaagtgctttaatgactatttatgcgttgactgtgagaatagggagcag

SEQ ID NO: 430813 - DNA, 120 bp, Artificial Sequence
  ENSG00000152154_9 (sequence is synthesized)
tgccatgggacatttctaggtgtagagaaagaagaaactgcaatggaaaaatttgtatgatttccatttatttcagaaagtttgtatgtaacaattacccgagagtcatttctacttgca

SEQ ID NO: 430814 - DNA, 120 bp, Artificial Sequence
  ENSG00000152154_10 (sequence is synthesized)
aaaggattcgtaacaaagcgagtataattttcttgtcattgtatcatgcttgttaaattttaatgcagcatcttcagaacttgtcctgatggtgtcttattgtgtcagcaccaaatattt

SEQ ID NO: 430815 - DNA, 120 bp, Artificial Sequence
  ENSG00000152154_11 (sequence is synthesized)
gtgcattatttgtggacgttccttgtcacaggaagattcttcttctgttgccttattgtttttttttttttaagtctcttctctgtctttgtactggaatcgaaatcataagataaacag

SEQ ID NO: 430816 - DNA, 120 bp, Artificial Sequence
  ENSG00000152154_12 (sequence is synthesized)
atcaaacgtgcttaagagctaactcgtgacactatgcagtattgtttgaagacctgttgttcaacctctgtctctttatgttaactggatttctgcattaaatgactgcccccttgttaa

SEQ ID NO: 430817 - DNA, 120 bp, Artificial Sequence
  ENSG00000152154_13 (sequence is synthesized)
gggaaagtgtgagaggaagagttggagaaaagtcgggggaaagtagggacagggttaaggggagagaggaggatgagggcggcgaggagagattaaaaggggaaggggggtcgctggaga

SEQ ID NO: 430818 - DNA, 120 bp, Artificial Sequence
  ENSG00000152154_14 (sequence is synthesized)
cagcaagatgagtggcacctgcttcggatattttgcaccatttccctctgtacttatgccgccagtatctcgtatgatttgaaccggctcccaaagctaatttatagcctgcctgctgat

SEQ ID NO: 430819 - DNA, 120 bp, Artificial Sequence
  ENSG00000152154_15 (sequence is synthesized)
ttacaagcacggaacagaggaggagatgggtcttgagtatatttgcagtgatttaaaagggaccacacatttccctagcacagaagctgttctaaggccagctcttgtgagtctgagaaa

SEQ ID NO: 430820 - DNA, 120 bp, Artificial Sequence
  ENSG00000152154_16 (sequence is synthesized)
agtttagaaggcgcaactgtggggatgggcccccttttccccactcatagagagatttctgtctggagatgtcagttccacttggtcaagaggaggttttcccttcccatcctcaccagg

SEQ ID NO: 430821 - DNA, 120 bp, Artificial Sequence
  ENSG00000152154_17 (sequence is synthesized)
aacgaaaaaagaagtccatctcatagcaggttgaaatgaagtgggagaaaaatctctggtcatcgttctatcgctccactgacactcggtgtctttttctttcagaagaggggcttgagc

SEQ ID NO: 430822 - DNA, 120 bp, Artificial Sequence
  ENSG00000152154_18 (sequence is synthesized)
agagagaatgcttagaggctaagcgatgggcaagtgagagggaaagagccgcgacagatagagctggctgcctaggggtctcagaggcttcatcctgcaggcggcaggcggcaggacaaa

SEQ ID NO: 430823 - DNA, 80 bp, Artificial Sequence
  ENSG00000152192_0 (sequence is synthesized)
agagctgtcggagaagcgggaccgcgaggccggcgcgcggcgctctgcgcggtcagagggagcgcctggcagcagcagga

SEQ ID NO: 430824 - DNA, 120 bp, Artificial Sequence
  ENSG00000152192_1 (sequence is synthesized)
gcgaccgccgcggctgcagcctccgaagggaggccgggtgagccggcgtacgcactttcccgcggactttcggagtgtttgtggatatacatgccaagccgccacgatgatgtccatgaa

SEQ ID NO: 430825 - DNA, 120 bp, Artificial Sequence
  ENSG00000152192_2 (sequence is synthesized)
cagcaagcagcctcactttgccatgcatcccaccctccctgagcacaagtacccgtcgctgcactccagctccgaggccatccggcgggcctgcctgcccacgccgccgctgcagagcaa

SEQ ID NO: 430826 - DNA, 120 bp, Artificial Sequence
  ENSG00000152192_3 (sequence is synthesized)
cctcttcgccagcctggacgagacgctgctggcgcgggccgaggcgctggcggccgtggacatcgccgtgtcccagggcaagagccatcctttcaagccggacgccacgtaccacacgat

SEQ ID NO: 430827 - DNA, 120 bp, Artificial Sequence
  ENSG00000152192_4 (sequence is synthesized)
gaacagcgtgccgtgcacgtccacttccacggtgcctctggcgcaccaccaccaccaccaccaccaccaccaggcgctcgaacccggcgatctgctggaccacatctcctcgccgtcgct

SEQ ID NO: 430828 - DNA, 80 bp, Artificial Sequence
  ENSG00000152192_5 (sequence is synthesized)
gatctgctggaccacatctcctcgccgtcgctcgcgctcatggccggcgcgggcggcgcgggcgcggcggccggcggcgg

SEQ ID NO: 430829 - DNA, 80 bp, Artificial Sequence
  ENSG00000152192_6 (sequence is synthesized)
ggcggcgggctcctgggcggctccgcgcaccctcacccgcatatgcacagcctgggccacctgtcgcaccccgcggcggc

SEQ ID NO: 430830 - DNA, 80 bp, Artificial Sequence
  ENSG00000152192_7 (sequence is synthesized)
agcctgggccacctgtcgcaccccgcggcggcggccgccatgaacatgccgtccgggctgccgcaccccgggctggtggc

SEQ ID NO: 430831 - DNA, 120 bp, Artificial Sequence
  ENSG00000152192_8 (sequence is synthesized)
ggcggcggccgtggtgggcgcagcgggcctggcgtccatctgcgactcggacacggacccgcgcgagctcgaggcgttcgcggagcgcttcaagcagcggcgcatcaagctgggcgtgac

SEQ ID NO: 430832 - DNA, 120 bp, Artificial Sequence
  ENSG00000152192_9 (sequence is synthesized)
gcaggccgacgtgggctcggcgctggccaacctcaagatcccgggcgtgggctcactcagccagagcaccatctgcaggttcgagtcgctcacgctctcgcacaacaacatgatcgcgct

SEQ ID NO: 430833 - DNA, 120 bp, Artificial Sequence
  ENSG00000152192_10 (sequence is synthesized)
caagcccatcctgcaggcgtggctcgaggaggccgagggcgcccagcgcgagaaaatgaacaagcctgagctcttcaacggcggcgagaagaagcgcaagcggacttccatcgccgcgcc

SEQ ID NO: 430834 - DNA, 120 bp, Artificial Sequence
  ENSG00000152192_11 (sequence is synthesized)
cgagaagcgctccctcgaggcctacttcgccgtgcagccccggccctcgtccgagaagatcgccgccatcgccgagaaactggacctcaaaaagaacgtggtgcgggtgtggttttgcaa

SEQ ID NO: 430835 - DNA, 120 bp, Artificial Sequence
  ENSG00000152192_12 (sequence is synthesized)
ccagagacagaagcagaagcggatgaaattctctgccacttactgagggggctgggaggtgtcgggcgggacagaatggggagctgaggaggcatttttggggggctttcctctgcttgc

SEQ ID NO: 430836 - DNA, 120 bp, Artificial Sequence
  ENSG00000152192_13 (sequence is synthesized)
ctcccctcggatttggagtgtccgttatcctgcctgcatttggggagtcccttctcgctctctttcctccacccattctctgattttcctgcctttgctgtcccctagccttgaggactg

SEQ ID NO: 430837 - DNA, 120 bp, Artificial Sequence
  ENSG00000152192_14 (sequence is synthesized)
gggtgctgggtgtggggattggagtatagggtaggggagaagggggggagcattcgggggagtggggagtggggggaaggaaagcggagacccgagcaggggttttaaggagcaggatgg

SEQ ID NO: 430838 - DNA, 120 bp, Artificial Sequence
  ENSG00000152192_15 (sequence is synthesized)
ttctggggtttgggtggggggagacgcgggaagggtaggaaaatggactgtttctgaccagagacacttacctaaatatcctggggaccaaggaactatgtacaaaaacaaacctaccaa

SEQ ID NO: 430839 - DNA, 120 bp, Artificial Sequence
  ENSG00000152192_16 (sequence is synthesized)
ccaccaaaaactagacaaataaagacaaactaaaacaaaacagaacaaaagcaaaggaaaatgctttagaaattttaactccggggagccataatctgcaacttcattttcccccataga

SEQ ID NO: 430840 - DNA, 120 bp, Artificial Sequence
  ENSG00000152192_17 (sequence is synthesized)
agagaaaaaagagcaccaccattattaccacctccccaaccctacacgcacgaactgagtcgaaaaacgaaaaccaaacgagcgagaagttgaagttctgggtatcaaagctagttgttc

SEQ ID NO: 430841 - DNA, 120 bp, Artificial Sequence
  ENSG00000152192_18 (sequence is synthesized)
cgggaagtgagtgggagcacagctgaaaagagagggtcagggggaggctggctgcttgcttaggtggaatccaagttttcccgtggccctgcctatactctggtggcctggtcctgttgg

SEQ ID NO: 430842 - DNA, 120 bp, Artificial Sequence
  ENSG00000152192_19 (sequence is synthesized)
ggtgggggtctttggagagaagggcatagtctttgagctactaaaaagcagaattccggagcttcgagatatcttattctaggaaaatgaaacaattttaacaacagttttttttcctct

SEQ ID NO: 430843 - DNA, 120 bp, Artificial Sequence
  ENSG00000152192_20 (sequence is synthesized)
tatgtcgaagatctagttttagacaatttcaaaataagcttttcccactcatagaactttaacttgccctttcagttttatcttttttttagagagaggtttaaactactgatttttcct

SEQ ID NO: 430844 - DNA, 120 bp, Artificial Sequence
  ENSG00000152192_21 (sequence is synthesized)
gttgattcaaatagactaatggggtgaaagttattaggagagatactctctcctgttttctccactgaacgagactcatcttgctcttctaggtcccgtttcttcctctcttggaggaca

SEQ ID NO: 430845 - DNA, 120 bp, Artificial Sequence
  ENSG00000152192_22 (sequence is synthesized)
tgaaattatagaaatgttgagaagttcctgctttcttttgcggtaggacttggctgtgagaaaatcacctaaatcccagaaaagaggaagacagatttaaagtgcccccacccccatttg

SEQ ID NO: 430846 - DNA, 120 bp, Artificial Sequence
  ENSG00000152192_23 (sequence is synthesized)
tttcaaagaggtctgcatgttgggcgaaaacagaacaactgtgtttccttttacttgttcttattattcaagagtcatttattacaggggataaatgttgggtagcaagaactttaattt

SEQ ID NO: 430847 - DNA, 120 bp, Artificial Sequence
  ENSG00000152192_24 (sequence is synthesized)
gcactaccagtctcccaaatagaaaatcatgtatagtatttcatagtaataatcaggtaccttacaagctgctggtggattttaaaaaattaagatagttgaaggtggttaggtaaaatg

SEQ ID NO: 430848 - DNA, 120 bp, Artificial Sequence
  ENSG00000152192_25 (sequence is synthesized)
cctgctttgtgtacaagatactctttggatctctcgtagagatggtttgttaccatcctttaatcataactaaaacattgaaaacagaacaaatgagaaaagaaaaaaaacctgccgatt

SEQ ID NO: 430849 - DNA, 120 bp, Artificial Sequence
  ENSG00000152192_26 (sequence is synthesized)
aacaagactgaaatcatgcatgatctgaaaggtgtggaaagaaacacaattaggtctcactctggttaggcattatttatttaattatgttgtatatcattgtttgcagggcaaacattc

SEQ ID NO: 430850 - DNA, 120 bp, Artificial Sequence
  ENSG00000152192_27 (sequence is synthesized)
tatgcatttgaaactgagcactaaactgggctagctttctggtagaccgttttgtggctagtgcgatttcacagtctactgcctgtttccactgaaaacatttttgtcatattcttgtat

SEQ ID NO: 430851 - DNA, 120 bp, Artificial Sequence
  ENSG00000152192_28 (sequence is synthesized)
tcaaagaaaaaggaaaaaagattattgtaaatattttatttaatgcacacattcacacagtggtaacagactgccagtgttcatcctgaaatgtctcacggattgatctacctgtccatg

SEQ ID NO: 430852 - DNA, 120 bp, Artificial Sequence
  ENSG00000152192_29 (sequence is synthesized)
tatgtctgctgagctttctccttggttatgttttttctcttttacctttctcctcccttacttctatcagaaccaattctatgcgccaaaatacaacagggggatgtgtcccagtacact

SEQ ID NO: 430853 - DNA, 120 bp, Artificial Sequence
  ENSG00000152192_30 (sequence is synthesized)
tacaaataaaacataactgaaagaagagcagttttatgatttgggtgcgtttttgtgtttatactgggccaggtcctggtagaacctttcaacaaacaaccaaacaaaaagaaaacacaa

SEQ ID NO: 430854 - DNA, 120 bp, Artificial Sequence
  ENSG00000152192_31 (sequence is synthesized)
agaaatggggggagggtagggtgttgaagggggacaaaaaggggagagattgagaatgatgtatttttttgctgaatcagaattcactttcagataactcatgaaaagtggtgctctaaa

SEQ ID NO: 430855 - DNA, 120 bp, Artificial Sequence
  ENSG00000152192_32 (sequence is synthesized)
taaaatgaattctatattagttgcctgtgtttataaaagttattattttttaactgcagaaactcttaaaccacagcacttgatccagagtggtgaaaaccaataaataaccaggcaccc

SEQ ID NO: 430856 - DNA, 120 bp, Artificial Sequence
  ENSG00000152192_33 (sequence is synthesized)
aaaaaacatttaaatttagggtcagggacagaggaatttggaggtttagatgtgatattctaccctaaaaacacctagtaactgaatggcttttctttggagggtaatacattttaaaac

SEQ ID NO: 430857 - DNA, 120 bp, Artificial Sequence
  ENSG00000152192_34 (sequence is synthesized)
atttagtgtgccacctactgctccacagtgactagagagcctctatttcttggtgacttgggactagatcagatgccaaatgtacaaagtttcttaagagttgagattatatcatctgaa

SEQ ID NO: 430858 - DNA, 120 bp, Artificial Sequence
  ENSG00000152192_35 (sequence is synthesized)
gtcatcttattttagccaaatctttttaatttcaccggcaaatctgtgaaggaaaacacttgatgttcaaaaagaatagtacattttaaaagctgcgattttaaacagttgttaatgtta

SEQ ID NO: 430859 - DNA, 120 bp, Artificial Sequence
  ENSG00000152192_36 (sequence is synthesized)
aaaaaaaaaagcactagaggtatttttaaacatagaactcttccataaaaagttgatttgtttttgctgttattgacttgaaacatcatcagttttaaataaaatgcatttgtaaaaaaa

SEQ ID NO: 430860 - DNA, 120 bp, Artificial Sequence
  ENSG00000152193_0 (sequence is synthesized)
gggacttccgtgttggcgggattctgaacgctgccatggctcagaccgtgcagaatgttacattgtcgctcactctgcccatcacgtgccacatttgcttggggaaggtacgtcagcctg

SEQ ID NO: 430861 - DNA, 120 bp, Artificial Sequence
  ENSG00000152193_1 (sequence is synthesized)
tcatatgcatcaacaaccatgtattttgttcgatttgtattgatttgtggttgaagaataatagccagtgtccagcttgcagagtccccatcactcctgaaaatccttgcaaagaaatta

SEQ ID NO: 430862 - DNA, 120 bp, Artificial Sequence
  ENSG00000152193_2 (sequence is synthesized)
taggaggaacaagtgaaagtgaacctatgctaagccatacggtcaggaagcatcttcggaaaactagacttgaattactacacaaagaatatgaggacgaaatagattgtttacagaaag

SEQ ID NO: 430863 - DNA, 120 bp, Artificial Sequence
  ENSG00000152193_3 (sequence is synthesized)
aagtagaagagcttaagagtaaaaatctcagcttggagtcacagatcaaaactattctggatcctttaaccttggtgcagggcaaccaaaatgaagacaaacatctagtcacagataatc

SEQ ID NO: 430864 - DNA, 120 bp, Artificial Sequence
  ENSG00000152193_4 (sequence is synthesized)
caagtaaaattaacccagaaactgtagcagagtggaagaaaaaactcagaacagctaatgaaatctatgaaaaagtgaaagatgatgtggataagctaaaggaggcaaataaaaaattga

SEQ ID NO: 430865 - DNA, 120 bp, Artificial Sequence
  ENSG00000152193_5 (sequence is synthesized)
aattggaaaatggtggtctggtgagggagaatttacgactgaaggctgaagttgataacagatcacctcaaaagtttggaaggtttgcagttgctgctcttcagtccaaagtagaacagt

SEQ ID NO: 430866 - DNA, 120 bp, Artificial Sequence
  ENSG00000152193_6 (sequence is synthesized)
atgagcgtgaaaccaatcgcctcaagaaagccctggaacgaagtgataagtatatagaggaactagaatctcaagttgcacagctaaaaaattcaagtgaagagaaagaagctatgaatt

SEQ ID NO: 430867 - DNA, 120 bp, Artificial Sequence
  ENSG00000152193_7 (sequence is synthesized)
ccatttgccagacagcactttctgcagatggcaaagggagcaaaggcagtgaggaggatgtggtgtcaaagaatcaaggcgatagtgccagaaagcagcctggctcatccacctccagtt

SEQ ID NO: 430868 - DNA, 120 bp, Artificial Sequence
  ENSG00000152193_8 (sequence is synthesized)
cttctcacctagcgaagccttccagcagcagactgtgtgacaccagttctgcaaggcaggaaagtaccagcaaagcagaccttaactgttctaagaacaaagacctatatcaagaacagg

SEQ ID NO: 430869 - DNA, 120 bp, Artificial Sequence
  ENSG00000152193_9 (sequence is synthesized)
tagaagtaatgttagatgtgacagatacaagtatggatacttatttggaaagagaatgggggaataaaccaagtgactgtgtaccctacaaagatgaagaactttatgatcttccagctc

SEQ ID NO: 430870 - DNA, 120 bp, Artificial Sequence
  ENSG00000152193_10 (sequence is synthesized)
cttgtactcctttgtcccttagttgccttcagctcagtactccagaaaatagagagagctctgtggtccaagcaggaggttccaaaaagcactcaaaccatctcagaaaattggtgtttg

SEQ ID NO: 430871 - DNA, 120 bp, Artificial Sequence
  ENSG00000152193_11 (sequence is synthesized)
atgatttttgtgattcttcaaatgtttctaataaagattcttcagaagatgatataagtagaagtgaaaatgaaaagaaatcagaatgtttttcttccccaaagacaggattttgggact

SEQ ID NO: 430872 - DNA, 120 bp, Artificial Sequence
  ENSG00000152193_12 (sequence is synthesized)
gttgttccacaagctatgcccaaaacttagattttgaaagttcagaggggaacacgatagcaaattctgttggagaaatatcttcaaaattgagtgagaaatcaggcttatgtttatcca

SEQ ID NO: 430873 - DNA, 120 bp, Artificial Sequence
  ENSG00000152193_13 (sequence is synthesized)
aaaggttgaattctattcgctcttttgaaatgaaccggacaagaacatccagtgaagcatcgatggatgctgcttaccttgacaaaatctctgagttggattcaatgatgtcagagtcag

SEQ ID NO: 430874 - DNA, 120 bp, Artificial Sequence
  ENSG00000152193_14 (sequence is synthesized)
gttttaagtcactggatttggatgggttatcaaagtcatctcaaggcagtgaatttcttgaggaacctgataagttggaagaaaaaactgagctaaacctttccaaaggttctctaacta

SEQ ID NO: 430875 - DNA, 120 bp, Artificial Sequence
  ENSG00000152193_15 (sequence is synthesized)
atgatcagttagaaaatggaagtgaatggaaacccacttctttttttctcctctctccatctgaccaagaaatgaatgaagatttttcactccattccagttcttgtccagtaactaatg

SEQ ID NO: 430876 - DNA, 120 bp, Artificial Sequence
  ENSG00000152193_16 (sequence is synthesized)
aaatcaaacccccaagctgcttgtttcagacagagttttcccagggcattttgttaagcagttcacatcgactatttgaagatcaaagatttgggtcatctttgtttaagatgtcctcag

SEQ ID NO: 430877 - DNA, 120 bp, Artificial Sequence
  ENSG00000152193_17 (sequence is synthesized)
agatgcacagtcttcataaccaccttcagtctccttggtctacttcctttgtgcctgaaaagaggaataaaaatgtgaatcaatcaacaaaaagaaaaatccagagcagcctttccagtg

SEQ ID NO: 430878 - DNA, 120 bp, Artificial Sequence
  ENSG00000152193_18 (sequence is synthesized)
ccagcccatcaaaagcaactaaaagttgactcattagaaaggtgtcatttgtggttttgtcctgagagaaatagaaaagttgttaaagttaccttttttcctcataaaagttctatacaa

SEQ ID NO: 430879 - DNA, 120 bp, Artificial Sequence
  ENSG00000152193_19 (sequence is synthesized)
attggaattgataatctttagtcaagtatcaagtcaggatggtggattaacctgtacccagaatacttattgttcattttgaaaagactttgttcttttcatttttatttgggagtcttt

SEQ ID NO: 430880 - DNA, 120 bp, Artificial Sequence
  ENSG00000152193_20 (sequence is synthesized)
gtgaccagagaagttagggaggaggttatttttgtgttttggggttggttggttggttggttttgtttttggttttgtttttttactgaatttgatatgtatctcggttggatatacatt

SEQ ID NO: 430881 - DNA, 120 bp, Artificial Sequence
  ENSG00000152193_21 (sequence is synthesized)
gtttttttaaaaaatgttatttaactgttagatacagtggcctgttgataagccccacttgtcttcagaacttggatttcttaaataaaacttttagtgttgtctatacactgctcaata

SEQ ID NO: 430882 - DNA, 120 bp, Artificial Sequence
  ENSG00000152193_22 (sequence is synthesized)
agacacttgagtttaagcttttcccagggtggaaattattttacctgtccctttttatttatgtttagtgatggcctagtttttctgcagggccatgatggagaaatagcactctagcct

SEQ ID NO: 430883 - DNA, 120 bp, Artificial Sequence
  ENSG00000152193_23 (sequence is synthesized)
tagtccaatattgatttactttctttttttaggttttatgtatatgtttgcattttttagcattgtgttttgtccagttttgtgaaaatgttctgctagtatgaaagaaaacattttcta

SEQ ID NO: 430884 - DNA, 120 bp, Artificial Sequence
  ENSG00000152193_24 (sequence is synthesized)
tatgaagacatttgttttatgttaggtagcttacattttctcctctgcgtgtgtgtgtatgtgtgtaaaatcagaaatttagcatactatggaaagaaggcatggagcacttgggtttag

SEQ ID NO: 430885 - DNA, 120 bp, Artificial Sequence
  ENSG00000152193_25 (sequence is synthesized)
aggaacctaaaacatcatagcttcattgttccagatgtaacaggtttgaaagagctcatcgccaagttcttgatccacttgcattccaggggagttttcttttgagtagtatgtttcttg

SEQ ID NO: 430886 - DNA, 120 bp, Artificial Sequence
  ENSG00000152193_26 (sequence is synthesized)
tttgcatgttcctgttctttgtggaaactatgcatggtagcatttttgcttgctgtgttttccatacttaagaaaaagaggtttcagttggctgatagaatatcttttatgtaggacaaa

SEQ ID NO: 430887 - DNA, 120 bp, Artificial Sequence
  ENSG00000152193_27 (sequence is synthesized)
acttttctgtgaagagtgttgagggggtgaagataggtaagaggtaagcacaatttttaatttaggctctgaaaaagtgtattgttctaaacgtatttggtatgcctatataggtcttta

SEQ ID NO: 430888 - DNA, 120 bp, Artificial Sequence
  ENSG00000152193_28 (sequence is synthesized)
aaaatgggtatgtatgctgtttaatgtgcactgaacattttacattaatattgtactgttttacattaatactgcatgcttttctatgtgaattgaataaagaatgtcataagcactgtg

SEQ ID NO: 430889 - DNA, 120 bp, Artificial Sequence
  ENSG00000152207_0 (sequence is synthesized)
aagttctctaagtttgaagcgtcagcttcaaccaaacaaattaatggctattctacattcaaaaatcaggaaatttaaatttattatgaaatgtaatgcagcatgtagtaaagacttaac

SEQ ID NO: 430890 - DNA, 120 bp, Artificial Sequence
  ENSG00000152207_1 (sequence is synthesized)
cagtgttttaaaactcaactttcaaagaaaagatagtattgctccctgtttcattaaaacctagagagatgtaatcagtaagcaagaaggaaaaagggaaattcacaaagtaactttttg

SEQ ID NO: 430891 - DNA, 120 bp, Artificial Sequence
  ENSG00000152207_2 (sequence is synthesized)
tgtctgtttctttttaacccagcatggagagaaaatttatgtccttgcaaccatccatctccgtatcagaaatggaaccaaatggcaccttcagcaataacaacagcaggaactgcacaa

SEQ ID NO: 430892 - DNA, 120 bp, Artificial Sequence
  ENSG00000152207_3 (sequence is synthesized)
ttgaaaacttcaagagagaatttttcccaattgtatatctgataatatttttctggggagtcttgggaaatgggttgtccatatatgttttcctgcagccttataagaagtccacatctg

SEQ ID NO: 430893 - DNA, 120 bp, Artificial Sequence
  ENSG00000152207_4 (sequence is synthesized)
tgaacgttttcatgctaaatctggccatttcagatctcctgttcataagcacgcttcccttcagggctgactattatcttagaggctccaattggatatttggagacctggcctgcagga

SEQ ID NO: 430894 - DNA, 120 bp, Artificial Sequence
  ENSG00000152207_5 (sequence is synthesized)
ttatgtcttattccttgtatgtcaacatgtacagcagtatttatttcctgaccgtgctgagtgttgtgcgtttcctggcaatggttcacccctttcggcttctgcatgtcaccagcatca

SEQ ID NO: 430895 - DNA, 120 bp, Artificial Sequence
  ENSG00000152207_6 (sequence is synthesized)
ggagtgcctggatcctctgtgggatcatatggatccttatcatggcttcctcaataatgctcctggacagtggctctgagcagaacggcagtgtcacatcatgcttagagctgaatctct

SEQ ID NO: 430896 - DNA, 120 bp, Artificial Sequence
  ENSG00000152207_7 (sequence is synthesized)
ataaaattgctaagctgcagaccatgaactatattgccttggtggtgggctgcctgctgccatttttcacactcagcatctgttatctgctgatcattcgggttctgttaaaagtggagg

SEQ ID NO: 430897 - DNA, 120 bp, Artificial Sequence
  ENSG00000152207_8 (sequence is synthesized)
tcccagaatcggggctgcgggtttctcacaggaaggcactgaccaccatcatcatcaccttgatcatcttcttcttgtgtttcctgccctatcacacactgaggaccgtccacttgacga

SEQ ID NO: 430898 - DNA, 120 bp, Artificial Sequence
  ENSG00000152207_9 (sequence is synthesized)
catggaaagtgggtttatgcaaagacagactgcataaagctttggttatcacactggccttggcagcagccaatgcctgcttcaatcctctgctctattactttgctggggagaatttta

SEQ ID NO: 430899 - DNA, 120 bp, Artificial Sequence
  ENSG00000152207_10 (sequence is synthesized)
aggacagactaaagtctgcactcagaaaaggccatccacagaaggcaaagacaaagtgtgttttccctgttagtgtgtggttgagaaaggaaacaagagtataaggagctcttagatgag

SEQ ID NO: 430900 - DNA, 120 bp, Artificial Sequence
  ENSG00000152207_11 (sequence is synthesized)
acctgttcttgtatccttgtgtccatcttcattcactcatagtctccaaatgactttgtatttacatcactcccaacaaatgttgattcttaatatttagttgaccattacttttgttaa

SEQ ID NO: 430901 - DNA, 120 bp, Artificial Sequence
  ENSG00000152207_12 (sequence is synthesized)
taagacctacttcaaaaattttattcagtgtattttcagttgttgagtcttaatgagggatacaggaggaaaaatccctactagagtcctgtgggctgaaatatcagactgggaaaaaat

SEQ ID NO: 430902 - DNA, 120 bp, Artificial Sequence
  ENSG00000152207_13 (sequence is synthesized)
gcaaagcacattggatcctacttttcttcagatattgaaccagatctctggcccatcaggctttctaaattcttcaaaagagccacaacttccccagcttctccagctcccctgtcctct

SEQ ID NO: 430903 - DNA, 120 bp, Artificial Sequence
  ENSG00000152207_14 (sequence is synthesized)
tcaatcccttgagatatagccaactaacgacgctactggaagccccagagcagaaaagaagcacatcctaagattcagggaaagactaactgtgaaaaggaaggctgtcctataacaaag

SEQ ID NO: 430904 - DNA, 120 bp, Artificial Sequence
  ENSG00000152207_15 (sequence is synthesized)
cagcatcaagtcccaagtaaggacagtgagagaaaagggggagaaggattggagcaaaagagaactggcaataagtaggggaaggaagaatttcattttgcattgggagagaggttctaa

SEQ ID NO: 430905 - DNA, 120 bp, Artificial Sequence
  ENSG00000152207_16 (sequence is synthesized)
cacactgaaggcaaccctatttctactgtttctctcttgccagggtattaggaaggacaggaaaagtaggaggaggatctggggcattgccctaggaaatgaaagaattgtgtatagaat

SEQ ID NO: 430906 - DNA, 120 bp, Artificial Sequence
  ENSG00000152207_17 (sequence is synthesized)
ggaagggggatcatcaaggacatgtatctcaaattttctttgagatgcaggttagttgaccttgctgcagttctccttcccattaattcattgggatggaagccaaaaataaaagaggtg

SEQ ID NO: 430907 - DNA, 120 bp, Artificial Sequence
  ENSG00000152207_18 (sequence is synthesized)
cctctgaggattagggttgagcactcaagggaaagatggagtagagggcaaatagcaaaagttgttgcactcctgaaattctattaacatttccgcagaagatgagtagggagatgctgc

SEQ ID NO: 430908 - DNA, 120 bp, Artificial Sequence
  ENSG00000152207_19 (sequence is synthesized)
gacaacaattgaatgcagtctccctgcagggcagattatgccaggcactttacatttgttgatcccatttgacattcacaccaaagctctgagttccattttacagctgaagaaattgaa

SEQ ID NO: 430909 - DNA, 120 bp, Artificial Sequence
  ENSG00000152207_20 (sequence is synthesized)
gcttagagaaattaagaagcttgtttaagtttacacagctagtaagagttttaaaaatctctgtgcagaagtgttggctgggtgctctccccaccactacccttgtaaacttccaggaag

SEQ ID NO: 430910 - DNA, 120 bp, Artificial Sequence
  ENSG00000152207_21 (sequence is synthesized)
attggttgaaagtctgaataaaagctgtcctttcctaccaatttcctccccctcctcactctcacaagaaaaccaaaagtttctcttcagagttgttgactcatagtacagtaaagggtg

SEQ ID NO: 430911 - DNA, 120 bp, Artificial Sequence
  ENSG00000152207_22 (sequence is synthesized)
gaggtgatatggcattctgaaagtagggagggactaagtcagtcatcatactaaacaaaaatcccagtaccctttccttatttagctaccagaatgatgacagacagactcaaaccctgt

SEQ ID NO: 430912 - DNA, 120 bp, Artificial Sequence
  ENSG00000152207_23 (sequence is synthesized)
caagacaggaccctggaggatcctcctatggggaaactgcataatctgaaaaaaaggctgacagatacaaatagttgaggatccttcaacacaaaagctgcgtgtctgccctattactca

SEQ ID NO: 430913 - DNA, 120 bp, Artificial Sequence
  ENSG00000152207_24 (sequence is synthesized)
cctgacgatgaagcccacaatgcaacaaatcccttccactcacagcatttggtcaacctgtcagagcctcattcttaattatgaaaagtagtcaatgaacacaatacatttgagggaaag

SEQ ID NO: 430914 - DNA, 120 bp, Artificial Sequence
  ENSG00000152207_25 (sequence is synthesized)
gccgtaacatgaaaggcaccaacaaataaatgtgagagtagatagagaccttttgagtataaaagatcctccaaaataagagattaaaccaagatagaggaaaacacagtagctgggaaa

SEQ ID NO: 430915 - DNA, 120 bp, Artificial Sequence
  ENSG00000152207_26 (sequence is synthesized)
caaggaatccaacgcaggagaaagtgaagagaattcccaggatgttggtgtgtagcaggcttagaaagcaagtcattcatgttggagcaggactcttaaaggactctaggagagatgtct

SEQ ID NO: 430916 - DNA, 120 bp, Artificial Sequence
  ENSG00000152207_27 (sequence is synthesized)
cccagaaaaagaagaaattaattgattcatacacattgagagggatttagatttctcttgcagagattgagataaactagtcgtaaatacatagaaaaataagcaagtaaaaacgcaata

SEQ ID NO: 430917 - DNA, 120 bp, Artificial Sequence
  ENSG00000152207_28 (sequence is synthesized)
cagtttttaagtgctagaggaaaagaaacttttgtattagagaggaaatataaccacagtacactacatggctcagctgtgaataatatttacatagaggataatgtgaatataatagtc

SEQ ID NO: 430918 - DNA, 86 bp, Artificial Sequence
  ENSG00000152207_29 (sequence is synthesized)
gaataatatttacatagaggataatgtgaatataatagtctcccattatctgtggttttgctttctgcagttcagttacagccagc

SEQ ID NO: 430919 - DNA, 120 bp, Artificial Sequence
  ENSG00000152207_30 (sequence is synthesized)
tgttgaaatctcgcactatcaccctccacccatgttctgggcagggcaaagtgggatggtgtgagatttctccagtggatccacaatgtatatgctacccacccatgagtcacttagtca

SEQ ID NO: 430920 - DNA, 120 bp, Artificial Sequence
  ENSG00000152207_31 (sequence is synthesized)
tcatccagttgctcagatcaactgttgtggtataacagtgcttgtgttaaagtcactcttattttacttactaatgtccccaaagcataagagtagtgatgctggcaaataagatacacc

SEQ ID NO: 430921 - DNA, 120 bp, Artificial Sequence
  ENSG00000152207_32 (sequence is synthesized)
aaagagaagctgtaaagtgcttcctctaacagaaaatgtgaaagttcttgacttaataaggaaagaaaaaaaacacatgctgaagttgctaagatctacagtaagaacaaatccatctgt

SEQ ID NO: 430922 - DNA, 120 bp, Artificial Sequence
  ENSG00000152207_33 (sequence is synthesized)
aaaattgtgaagaaggcaaaagaaatttgtgctagttttgctgttgcaccacaagctgcaaaaattatttattacaccccacggtgtgtgataaacacttagttaagatgaaaaggtatt

SEQ ID NO: 430923 - DNA, 120 bp, Artificial Sequence
  ENSG00000152207_34 (sequence is synthesized)
aaatttgtgggtggaagacatgaacagaaatgtgttccaattgacagcaatcgggtttggtactatttgggtttggtgctattcgtattcagggtcttggaatgcaactcccacagataa

SEQ ID NO: 430924 - DNA, 120 bp, Artificial Sequence
  ENSG00000152207_35 (sequence is synthesized)
gggggtgctgctggagtgaaatactgtgatataacctttttttcaggaaatgaagggagaagatgtgtacgtgtgtgggagaggtataagagacctaggttgccatattctatcacagaa

SEQ ID NO: 430925 - DNA, 120 bp, Artificial Sequence
  ENSG00000152207_36 (sequence is synthesized)
aatgcataataactaaatctggaaaatgatgaatagctgtacaaccatattatttagcaataggaggtaaatacaggtagaagcagaagaaagaatgggcaggggttacctctatggaga

SEQ ID NO: 430926 - DNA, 120 bp, Artificial Sequence
  ENSG00000152207_37 (sequence is synthesized)
agctggggtgggaggatagggtggggacttattttacgaactgtgtaattgcctaacttgtgaatatgtatttctgaagtaaaataaaaattaagttaaaattaaattttaaaattcaaa

SEQ ID NO: 430927 - DNA, 120 bp, Artificial Sequence
  ENSG00000152207_38 (sequence is synthesized)
aatgacaaaaaaccagtcattagaggggcagggcaattttaggtttcttctttttagacatagcccctaactggaaattttcacccttcttgagaagggagcttgcactaacatctacaa

SEQ ID NO: 430928 - DNA, 120 bp, Artificial Sequence
  ENSG00000152207_39 (sequence is synthesized)
tggcttctaaaaagcacagatgacctgctacacttcctgacttgcttgctattggttggcactgttcataaatataatttgctctttcacttttctttgaaatgagcaacctgaattact

SEQ ID NO: 430929 - DNA, 120 bp, Artificial Sequence
  ENSG00000152207_40 (sequence is synthesized)
cggaggagaaaggcaggagagatagaggcagcagaagccagggcagctgaaagacagagaccttcagtctgaaccaacaacaagcaaagttaaattatggatatccaagggagtctatag

SEQ ID NO: 430930 - DNA, 120 bp, Artificial Sequence
  ENSG00000152207_41 (sequence is synthesized)
aaggtccatgcaagacattttgactacttgtctgaactagatatcccttgaatgtgcacacaaaaagtgaatgggtcatttgataagggaaaactaggttccaagatggctgaataggaa

SEQ ID NO: 430931 - DNA, 120 bp, Artificial Sequence
  ENSG00000152207_42 (sequence is synthesized)
caagttggctttattactaattgcaacaaggcttttgaaagccttctgtcatcttcctggggatcacctcttcaggtgtacagagacagcatagggaaaactaggttccaagatggctga

SEQ ID NO: 430932 - DNA, 120 bp, Artificial Sequence
  ENSG00000152208_0 (sequence is synthesized)
aaaccggctccccgggcccgcctcgccaagctgcgttccgcgcctcacgcagaaagggaattttctctgcattactatctgcattaccttgaagttcactttttctacccctcttggaga

SEQ ID NO: 430933 - DNA, 120 bp, Artificial Sequence
  ENSG00000152208_1 (sequence is synthesized)
gggcttttttcccccctccctggtggaatctggctgctccgtttggaatctcctaatctttcctttccacttagattctggcagcgaagaccagtgattctctgcgggctgtaggggcgg

SEQ ID NO: 430934 - DNA, 120 bp, Artificial Sequence
  ENSG00000152208_2 (sequence is synthesized)
gggcgggggtcttttttggtccgagagggtgcggggaagggggcacatccggcgtgaggggggtgttggaagttgcagcggagctgggaccggagacccgcggcccccgcgcagcgatgg

SEQ ID NO: 430935 - DNA, 120 bp, Artificial Sequence
  ENSG00000152208_3 (sequence is synthesized)
gtctgatctgagccccagcctctccccctgcccaagagcagtagaggctggatatatttttcaaaagccaaactgcaaacaactctggcgatgccaaaattcccctccaagtgacacggc

SEQ ID NO: 430936 - DNA, 120 bp, Artificial Sequence
  ENSG00000152208_4 (sequence is synthesized)
tttgcgaaggaggtttcctcaggctgggctctttctgtcattcccttctgcctttctcggcgacgataaaaggctttgctctggcaataggaatttagaaaaaaagaaaaagctgcgcta

SEQ ID NO: 430937 - DNA, 120 bp, Artificial Sequence
  ENSG00000152208_5 (sequence is synthesized)
aactccaccgtgacctcaaactctttggactgtttgaaaaaaaaaaaattggaagaaaatccatcctccaagagaatcggcataggaggagatggaagttttcccctttctcttggtttt

SEQ ID NO: 430938 - DNA, 120 bp, Artificial Sequence
  ENSG00000152208_6 (sequence is synthesized)
gtccgtctggtggtctcgaacctgggactcggcgaatgcggattcgatcattcacatcggagcaatttttgatgaatctgccaaaaaggatgatgaggtatttcgcactgcggttggtga

SEQ ID NO: 430939 - DNA, 120 bp, Artificial Sequence
  ENSG00000152208_7 (sequence is synthesized)
ccttaaccagaatgaggagatcttacagactgagaaaatcacattttcagtgacgtttgttgatggcaacaaccctttccaagcagttcaagaagcctgtgaacttatgaatcaaggcat

SEQ ID NO: 430940 - DNA, 120 bp, Artificial Sequence
  ENSG00000152208_8 (sequence is synthesized)
cttggccctggtcagctccattggctgcacgtcagcaggatccctccagtctttggcagacgccatgcatatcccccacctcttcattcagcgctcaacagctgggaccccaaggagtgg

SEQ ID NO: 430941 - DNA, 120 bp, Artificial Sequence
  ENSG00000152208_9 (sequence is synthesized)
ctgtggactcacccggagcaacaggaatgatgactacactctctcagttcgcccacctgtctacttgcatgatgttatcctaagagtggtcacagagtatgcctggcagaaattcattat

SEQ ID NO: 430942 - DNA, 120 bp, Artificial Sequence
  ENSG00000152208_10 (sequence is synthesized)
attctatgatagtgaatacgatatccgtggaatacaggagttcttggacaaagtctctcagcagggaatggatgttgcacttcagaaggtagaaaacaacatcaataaaatgattaccac

SEQ ID NO: 430943 - DNA, 120 bp, Artificial Sequence
  ENSG00000152208_11 (sequence is synthesized)
tctctttgacaccatgagaatagaagaactgaatcgctatcgagacactcttaggcgagcgatccttgttatgaatcctgctacagccaaatccttcattactgaggttgtggagactaa

SEQ ID NO: 430944 - DNA, 120 bp, Artificial Sequence
  ENSG00000152208_12 (sequence is synthesized)
tttggttgcttttgactgtcactggatcattataaatgaggaaataaacgatgtggacgtacaggaacttgtaagaaggtcaattggaaggttaacgattattcggcagacatttccagt

SEQ ID NO: 430945 - DNA, 120 bp, Artificial Sequence
  ENSG00000152208_13 (sequence is synthesized)
tccccagaacataagtcagcggtgtttccgtggcaaccatcgaatatcttcaacattgtgtgatccaaaggatccatttgctcagaatatggagatttccaacctttacatatatgacac

SEQ ID NO: 430946 - DNA, 120 bp, Artificial Sequence
  ENSG00000152208_14 (sequence is synthesized)
ggtgcttctgcttgctaatgcttttcataagaagctggaggaccgaaagtggcacagcatggcaagtctgtcatgtatcagaaagaactcaaagccctggcagggtgggcgctccatgtt

SEQ ID NO: 430947 - DNA, 120 bp, Artificial Sequence
  ENSG00000152208_15 (sequence is synthesized)
ggagaccatcaagaagggtggagttagtgggttgactggagagctagaatttggagaaaatggaggcaatcccaatgtccactttgaaatccttggaaccaactatggagaagagcttgg

SEQ ID NO: 430948 - DNA, 120 bp, Artificial Sequence
  ENSG00000152208_16 (sequence is synthesized)
cagaggtgttcgaaaacttggttgctggaatcctgtcacaggtctgaatgggtcactgactgacaagaaattggagaataacatgcgtggagtggttctacgtgtagtaactgttctgga

SEQ ID NO: 430949 - DNA, 120 bp, Artificial Sequence
  ENSG00000152208_17 (sequence is synthesized)
agaaccttttgtgatggtctctgaaaatgtcttgggtaagccgaagaaataccagggcttctccattgatgttttggatgccttatctaactacctgggttttaactacgaaatttacgt

SEQ ID NO: 430950 - DNA, 120 bp, Artificial Sequence
  ENSG00000152208_18 (sequence is synthesized)
agcaccggatcacaaatacggaagcccacaagaagatgggacatggaatggcttggtaggagaacttgtctttaagagagccgacatagggatttctgctttaaccatcactccagatcg

SEQ ID NO: 430951 - DNA, 120 bp, Artificial Sequence
  ENSG00000152208_19 (sequence is synthesized)
tgaaaatgtggtggactttacgacacgttacatggactactcagtgggggtactacttcgaagggctgaaaagacagtggatatgtttgcctgtcttgcaccatttgatctctctctatg

SEQ ID NO: 430952 - DNA, 120 bp, Artificial Sequence
  ENSG00000152208_20 (sequence is synthesized)
ggcttgcattgctggcacagtccttctggtgggtctactggtctacctcttgaactggcttaatcccccacgattacaaatgggatcaatgacgtctactactctctacaactccatgtg

SEQ ID NO: 430953 - DNA, 120 bp, Artificial Sequence
  ENSG00000152208_21 (sequence is synthesized)
gtttgtgtatggatcttttgtacaacaaggcggggaagtcccgtacacgactctggctacccgaatgatgatgggggcttggtggctatttgctttgattgttatctcatcttacacggc

SEQ ID NO: 430954 - DNA, 120 bp, Artificial Sequence
  ENSG00000152208_22 (sequence is synthesized)
aaacctcgctgctttcctcactattacacgcattgaaagttccatccagtctctccaggacctttccaagcaaacagaaatcccttatggcacagtcctagactctgcggtatatgagca

SEQ ID NO: 430955 - DNA, 120 bp, Artificial Sequence
  ENSG00000152208_23 (sequence is synthesized)
tgtccgcatgaaaggactgaatccttttgagagggacagcatgtattcccaaatgtggcggatgatcaaccgaagcaatggatcggagaacaatgttctggagtcccaggcaggcattca

SEQ ID NO: 430956 - DNA, 120 bp, Artificial Sequence
  ENSG00000152208_24 (sequence is synthesized)
ctttcgtatgggatgcagctgtattggaatatgtggctatcaatgacccagattgttccttttacaccattggaaatactgttgctgatcggggatatggaattgcattacaacatggca

SEQ ID NO: 430957 - DNA, 120 bp, Artificial Sequence
  ENSG00000152208_25 (sequence is synthesized)
gtccttaccgagatgttttttcacaaaggatcctggagcttcagcagaatggtgacatggacatcctgaagcacaaatggtggcctaagaatggccagtgtgacctgtactcgtcagtgg

SEQ ID NO: 430958 - DNA, 120 bp, Artificial Sequence
  ENSG00000152208_26 (sequence is synthesized)
acacaaagcagaaaggaggcgccctggacataaagagctttgcaggggtcttttgtatcctggctgctggaattgtcctctcctgcttcatagccatgctggagacgtggtggaacaaga

SEQ ID NO: 430959 - DNA, 120 bp, Artificial Sequence
  ENSG00000152208_27 (sequence is synthesized)
ggaaaggctcccgggttccatcaaaagaggatgacaaggaaattgacctggagcacctccatagacgtgtaaatagcttgtgcacagatgacgacagcccccataaacagttttccacct

SEQ ID NO: 430960 - DNA, 120 bp, Artificial Sequence
  ENSG00000152208_28 (sequence is synthesized)
cgtcaattgatttgacccctctggacattgacactttgccaacacgacaagcactggagcaaatcagtgatttcaggaacactcatattaccacaacaacctttatcccagagcagatcc

SEQ ID NO: 430961 - DNA, 120 bp, Artificial Sequence
  ENSG00000152208_29 (sequence is synthesized)
agactcttagccgcacactgtcagctaaagctgcttctggtttcacttttggcaacgtgcctgagcaccgaactggcccttttaggcacagggcacctaatgggggctttttcaggagtc

SEQ ID NO: 430962 - DNA, 120 bp, Artificial Sequence
  ENSG00000152208_30 (sequence is synthesized)
ctataaaaacaatgtcatctattccttatcaaccaactcctaccctggggctcaatctgggtaatgatccagaccgaggcacctccatatgagcatcaaacaaatctcttcactgtttct

SEQ ID NO: 430963 - DNA, 120 bp, Artificial Sequence
  ENSG00000152208_31 (sequence is synthesized)
tttttaggactccctttgcaaggagcaactgtaatattgtgggactaacatggatgtaacgtttaaaaaaaagatcaggattattagtaacaattctagttttttcctcccaccttctcc

SEQ ID NO: 430964 - DNA, 120 bp, Artificial Sequence
  ENSG00000152208_32 (sequence is synthesized)
ctctcctctctcctctatgattttctctctttccccctcccttcctgtacattttcctccactttttttcattactcaacttgttccccaagaaggtagtgtactaggatcctattagtc

SEQ ID NO: 430965 - DNA, 120 bp, Artificial Sequence
  ENSG00000152208_33 (sequence is synthesized)
tgcttttcatatactgtacatcaagtataggaaatgtgcactgagtatactaaaagtatatgcaggattaattttacataaaggcctcttctgtaacatttctctattttttgaaataca

SEQ ID NO: 430966 - DNA, 120 bp, Artificial Sequence
  ENSG00000152208_34 (sequence is synthesized)
attgcaataacttcagtctttttacattcttctgctgcatccatacaatgctccactgctgttgagtgtcctttaactgtggaccaaaggcaacccctgcagtgtttataaaacaatttt

SEQ ID NO: 430967 - DNA, 120 bp, Artificial Sequence
  ENSG00000152208_35 (sequence is synthesized)
aagaccattcaggccacataagatgagaatgcaattttgtaggattacaaaaaagccattaatatgccagtcaagactacagttaaaactactcttgcactgcaacagtgcatatgacct

SEQ ID NO: 430968 - DNA, 120 bp, Artificial Sequence
  ENSG00000152208_36 (sequence is synthesized)
ttatgtgattgtacagtattaaaagttttttcttatgtacagtaaactttatcatatggcagaagcctctattgtgttaaataaattagtatttcatatatatacatatatatgcaccta

SEQ ID NO: 430969 - DNA, 120 bp, Artificial Sequence
  ENSG00000152208_37 (sequence is synthesized)
tataatgtgtatatatataaaaaggcagccattgctattgcaattcatttaataaagctttagtttaaacaaaagtattgtatacaggaactatgtatagtgcaggggttcttttcagtt

SEQ ID NO: 430970 - DNA, 120 bp, Artificial Sequence
  ENSG00000152208_38 (sequence is synthesized)
agaaaaggcaggttgctttaatgttattctgactcgcattgtttgccaacagaaaatattttatacttttgttattaaagcatccagggcaatttaatatttgttcctagatgtaactca

SEQ ID NO: 430971 - DNA, 120 bp, Artificial Sequence
  ENSG00000152208_39 (sequence is synthesized)
tttgaataggttttgcatttgttattcagcagtgtataaagctaaccttgataattttacttttaattaattatctaaatgaaaaatgctattagctgaaccacatccacaacagcacat

SEQ ID NO: 430972 - DNA, 120 bp, Artificial Sequence
  ENSG00000152208_40 (sequence is synthesized)
agagctctagaagagttgaaacatagatcattgaaggttaaaaatcctcttccaaagcagcaagtcaatcaatacaataatgatatttggggaggggtgggagcccttaagaactattga

SEQ ID NO: 430973 - DNA, 120 bp, Artificial Sequence
  ENSG00000152208_41 (sequence is synthesized)
tgtggccttaaattactgtcatttattatcctaaagaagaaaacataataaccataatgggctctcaactcaactcccttttttatttagttctatttggaggagttatgtattttttac

SEQ ID NO: 430974 - DNA, 120 bp, Artificial Sequence
  ENSG00000152208_42 (sequence is synthesized)
attagtgccaagtatatagaaggatgacagcaaaaacagtgcctctttgtgcacaatccttttaaagtagcattcttacttgttagaaatgtagaatgaactttgtttgtaatccttaaa

SEQ ID NO: 430975 - DNA, 120 bp, Artificial Sequence
  ENSG00000152208_43 (sequence is synthesized)
ttaaaatgtggtaagtaggaagcaagaacttattctgtgtttttacgcagccatacacttactttaatctaactcattctgtggctaggattgatataggaatcaacctatgtgatttgc

SEQ ID NO: 430976 - DNA, 120 bp, Artificial Sequence
  ENSG00000152208_44 (sequence is synthesized)
tttaggagaaattaaaaggtatattcttaagatatattatattttgatgctaattctgttctggggagcatcttgtattgtcactgttttgtactaaatcttcaaatattgtctactgtg

SEQ ID NO: 430977 - DNA, 120 bp, Artificial Sequence
  ENSG00000152208_45 (sequence is synthesized)
taaggcagaaaaatttcttatcatgcaaaaaccattttgtttccagggtaacaagtaactaagtgcatgcacaacttgttttcccttgtaacattcatgatctcatttacaactctgatt

SEQ ID NO: 430978 - DNA, 120 bp, Artificial Sequence
  ENSG00000152208_46 (sequence is synthesized)
ttaaaacaaaaaaatctttacaacaagctatatagggacataccagatgttgcagtgattttagctatcaacaaactgttaaccatgtacaatatttaaaataggcttattttgatgtat

SEQ ID NO: 430979 - DNA, 120 bp, Artificial Sequence
  ENSG00000152208_47 (sequence is synthesized)
cgcctattatacaaacacacaaaacatttttggaggcctcagttatgagtgacagagctttctgtgtataatttgtctaaataatttgtctaataaaaatgttttctaaacttgctctca

SEQ ID NO: 430980 - DNA, 120 bp, Artificial Sequence
  ENSG00000152208_48 (sequence is synthesized)
attggagtaaataaagtaaaaggagcaaatgaaagttgagtgggattcacatagcctgcagtcttcatgatttccacatggaaagagagaattggagctagcatttaaacactaacatac

SEQ ID NO: 430981 - DNA, 120 bp, Artificial Sequence
  ENSG00000152208_49 (sequence is synthesized)
tacattcatcttctgtacacttgcaaagtttgccaaactaaagcacagcagaacaacaacaaaatgttctttccctgaaacagagagagcccaggctaagccagagataacaaggagttg

SEQ ID NO: 430982 - DNA, 120 bp, Artificial Sequence
  ENSG00000152208_50 (sequence is synthesized)
agactaccaaaagaatgctgacttctaaaggttgggctaagagaagagcttttatgtttaggtagaaacaggatgctgattttaaaaaaacttcttcattcattaaacattttccagatg

SEQ ID NO: 430983 - DNA, 120 bp, Artificial Sequence
  ENSG00000152208_51 (sequence is synthesized)
acatggccttgtaataccctgcagtggaggatgggaaatgtagtctagctgagtgtcccagcagaaggagagaatggattttgatgatcatctagcagtttctaccacatgaacccttga

SEQ ID NO: 430984 - DNA, 120 bp, Artificial Sequence
  ENSG00000152208_52 (sequence is synthesized)
aaactacaatatctgaaagaaggaatgcttggccattaaggccatgtttgaaacttggcagcaatacctggagaagccaggcatccagtcatagcctgcaccaatcatcacaaatgggag

SEQ ID NO: 430985 - DNA, 120 bp, Artificial Sequence
  ENSG00000152208_53 (sequence is synthesized)
gacccctggatgacccataacctctaccagcacaagaactgctgatctgttttccaccttattgatttcaggacccattagatcctgtattcaaaactggtgagctaatgtattatctcc

SEQ ID NO: 430986 - DNA, 120 bp, Artificial Sequence
  ENSG00000152208_54 (sequence is synthesized)
taaattaaaaactcctatccagttcaaggaagctgacctcaccagattgtgacacacagaaatccttgctgtaatccactcatagaagagtaacgacaggactgctgctttcagccacag

SEQ ID NO: 430987 - DNA, 120 bp, Artificial Sequence
  ENSG00000152208_55 (sequence is synthesized)
gtcatggatcttgcctgcgccagcccattagccttagaaggatgcttctatgcagtggacttcttgcctagatgtcctggtcaagagcactcacactgaggtccaagtctataccacagt

SEQ ID NO: 430988 - DNA, 120 bp, Artificial Sequence
  ENSG00000152208_56 (sequence is synthesized)
agctttgtcctcagcttctatctgtgcacgattttaaactctgggtcttaggacttctcatagccagagatctagggagacatgaaggaccaaggagaatggcagaacttaaccagaaaa

SEQ ID NO: 430989 - DNA, 120 bp, Artificial Sequence
  ENSG00000152208_57 (sequence is synthesized)
agacagacggctcttctaatgcttattgaatcactggtaactgtggttaaacatctttggaggttttatcacagaattctctccatatttctagaacaacattatttcatacttaccaaa

SEQ ID NO: 430990 - DNA, 120 bp, Artificial Sequence
  ENSG00000152208_58 (sequence is synthesized)
attggctactttcctccacaccaagggacattacctttttccccaatggccatcaaatgtctacattttgcatggattcctggctaatgtagagcctccagtttgaatccacacttagta

SEQ ID NO: 430991 - DNA, 120 bp, Artificial Sequence
  ENSG00000152208_59 (sequence is synthesized)
catgtgtcattgtaaacaaagatcacttggatcttaggattacaccctggaattgcagtgcctgtatatactacccagcgctaagataagtttgttttccttatacccacttccacattc

SEQ ID NO: 430992 - DNA, 120 bp, Artificial Sequence
  ENSG00000152208_60 (sequence is synthesized)
atttataatacctcttcaatgcaaaatgtattttacaagtaaaatagggaagcatcatatgaaatatcccagcccctcatgaactcaatcagtttttattgaggaccactatgtgccaag

SEQ ID NO: 430993 - DNA, 120 bp, Artificial Sequence
  ENSG00000152208_61 (sequence is synthesized)
cactgtattacattttgggaatacaatgatgaatgagtcagaatcctttccctaagaagtttgcattccagtggggaatccagatgattaaacagcatgaagagtgctagaacaggctaa

SEQ ID NO: 430994 - DNA, 120 bp, Artificial Sequence
  ENSG00000152208_62 (sequence is synthesized)
caatggccataagtattccctcatctctgttccttaagcacccagggagctcccagttgcccaagctgatgcacagatgatctattatgccaaagcaacctaaaagattaaagccaacaa

SEQ ID NO: 430995 - DNA, 120 bp, Artificial Sequence
  ENSG00000152208_63 (sequence is synthesized)
gcagcagtccaggaggagcctctacaagtagtgatcccatgggttcttttactaatatattatttctaaataatctgactttcaaacaagttaggtgttcacttactgagcaccttcttc

SEQ ID NO: 430996 - DNA, 120 bp, Artificial Sequence
  ENSG00000152208_64 (sequence is synthesized)
attatgtcatcaaactgataaccctcaagttgtagctgctcacaggtgaaaatcaggctataaagtcaaaagacagagcttcaagtttgggtcttggtgcttaccatgactgtgggcaaa

SEQ ID NO: 430997 - DNA, 120 bp, Artificial Sequence
  ENSG00000152208_65 (sequence is synthesized)
acctacctcacagggttgttgtgagaatcaagtgaaaagtatgtgaaagaactttgtaaactttgttatttttaatcaccccatttccatgggttcttcatcttctctacgtaatacaat

SEQ ID NO: 430998 - DNA, 120 bp, Artificial Sequence
  ENSG00000152208_66 (sequence is synthesized)
actataattcacctgaaggatgtactcttacccactctgttcctacctctcacccttacacaagtgaattgtacaaagaagatgaagtacatgccttcctggatatctagtttcagatgg

SEQ ID NO: 430999 - DNA, 120 bp, Artificial Sequence
  ENSG00000152208_67 (sequence is synthesized)
aaattctgatacctcacagaatgacaaagaagtagtccggaggaccaaaaccggggctctactgccatagagacattccaccattaacataccactggacctggatatcagccagccctc

SEQ ID NO: 431000 - DNA, 120 bp, Artificial Sequence
  ENSG00000152208_68 (sequence is synthesized)
ttgatggacagttgtccacagagaacccattcttggccccagagaactactgcagtggttcagggaatcatctgggttctttctggctgccaggggagtcaccagccattccaggaaagc

SEQ ID NO: 431001 - DNA, 120 bp, Artificial Sequence
  ENSG00000152208_69 (sequence is synthesized)
gcatgcttccgaaaataaagcaagaagattggttaaaggagacactgaccccattaaacaaaatacaagccttccctgactgcctgacctgtgataattgggctgccaagggagatacct

SEQ ID NO: 431002 - DNA, 120 bp, Artificial Sequence
  ENSG00000152208_70 (sequence is synthesized)
agacacttatttaaagcaaggatttggtgacacatttcttcatttagcagtttatccctgatgccaacctgactcttacttctctgatttttgatttgtcgactccctgtctgtctaaca

SEQ ID NO: 431003 - DNA, 120 bp, Artificial Sequence
  ENSG00000152208_71 (sequence is synthesized)
gacctatgataagatgtgtttctggctttaaaatcccatatgctccccttacatacacacaaacacacaaacatccacacaatgaggaatgccagcatttttcctatctatcttacccac

SEQ ID NO: 431004 - DNA, 120 bp, Artificial Sequence
  ENSG00000152208_72 (sequence is synthesized)
ttgaccaagcttagcctggccttccatttctgattatttcatatggattctgattggctgatccaatttgagttcagtctcactggaccagtcgtaatgtattccaggctgaaactctga

SEQ ID NO: 431005 - DNA, 120 bp, Artificial Sequence
  ENSG00000152208_73 (sequence is synthesized)
ctccctttcagtcctgtgtagaagcttagagtgcccatgaagccacgataccgatacccagcaatcctttaaacaaagggaggtctttcaacttagaatacacatgcttatccaaaacta

SEQ ID NO: 431006 - DNA, 120 bp, Artificial Sequence
  ENSG00000152208_74 (sequence is synthesized)
aggccgtattagcatgtatctccaggaataacataaagtttctataaaagttctcctgagcgaatagaatggtgactatgtacaaaagatctgatagaattggcatccaagaaactttgt

SEQ ID NO: 431007 - DNA, 120 bp, Artificial Sequence
  ENSG00000152208_75 (sequence is synthesized)
aataaggtcttaagcctaaaatagaaaatttcaactacaattcattcttcagcttcctagagcaaggaaggcagatcacagggaaaaatcgattcattgtttatatcagtttccaaaata

SEQ ID NO: 431008 - DNA, 120 bp, Artificial Sequence
  ENSG00000152208_76 (sequence is synthesized)
ttttcaaatggaatggaaaataattcacaatttccttcttgctataagtcagaatggctgacttcacacaccaattcagtgaactaagaaattccaagactttttcctatggctataata

SEQ ID NO: 431009 - DNA, 120 bp, Artificial Sequence
  ENSG00000152208_77 (sequence is synthesized)
ttaaaagttaattttaatacctaaaaaacattagcaattaaaaacagtgtcttatattgtagtttacaaccaccacttgctgtgggaagggagccagagagactcagagtacccgccacc

SEQ ID NO: 431010 - DNA, 120 bp, Artificial Sequence
  ENSG00000152208_78 (sequence is synthesized)
caaggtcaaaggcactgagccaaaggatccagcaaagagcaggcccaagccaggaagaaaagctgttgctgaaatgtcagaccaagcatatgaaacaagatgatctccaggtcatggtag

SEQ ID NO: 431011 - DNA, 120 bp, Artificial Sequence
  ENSG00000152208_79 (sequence is synthesized)
ctgagaaaggagaatagacagatccaagctgggaaccaaattaagatgttggaacaggtaccagagtgaataagactgggcaggggatggagtcacctacggccacacgtttgtcgtaca

SEQ ID NO: 431012 - DNA, 120 bp, Artificial Sequence
  ENSG00000152208_80 (sequence is synthesized)
tgagttcagcaaatgacttagagaatcttattgaactactacattttttcataatataaaatatttccaattttaaagaagttgggtctttccttcaagaaacacaaatctggaagatgg

SEQ ID NO: 431013 - DNA, 120 bp, Artificial Sequence
  ENSG00000152208_81 (sequence is synthesized)
gagtgagtacacagaggatgtaatataaattaggatgttaaaattgcaatagaggcggttgaagcatctatggtcatttttgttggaggagatcagagaaaacctcactgagcaggtata

SEQ ID NO: 431014 - DNA, 120 bp, Artificial Sequence
  ENSG00000152208_82 (sequence is synthesized)
ggaggtatattataaatgacaggatatttcttccagggtgctttgttgggcaattgcaaggagagctttatgagttgcattggattcagaattatacgtgttatttctgaacaattctcc

SEQ ID NO: 431015 - DNA, 120 bp, Artificial Sequence
  ENSG00000152208_83 (sequence is synthesized)
tccagcaatttcataagtctaatggggagaaagtgctaagaatttgcgtctttgttctttttgatctcattatagaaaaatttctacttgcttaataaaaaaatataataagtaaaggtt

SEQ ID NO: 431016 - DNA, 120 bp, Artificial Sequence
  ENSG00000152208_84 (sequence is synthesized)
attttcttctaaacaagtaggtccataacatttcccacaggagaatttgtaattggtactcctttttccaaactctaaattattaaactaataaatgtgcttgacttttctggcctaaga

SEQ ID NO: 431017 - DNA, 120 bp, Artificial Sequence
  ENSG00000152213_0 (sequence is synthesized)
gcttccttcccatctcgctcttgggtcatgcctggccagcagaaagcagctccataggggaggagagccacgcaggatctcacagctgcagtctaatagtaacacagaggattcagcagt

SEQ ID NO: 431018 - DNA, 120 bp, Artificial Sequence
  ENSG00000152213_1 (sequence is synthesized)
ggccaccatgggttctgtgaattccagaggtcacaaggcggaagcccaggtggtgatgatgggcctggactcggcgggcaagaccacgctcctttacaagctgaagggccaccagctggt

SEQ ID NO: 431019 - DNA, 120 bp, Artificial Sequence
  ENSG00000152213_2 (sequence is synthesized)
ggagaccctgcccactgttggtttcaacgtggagcctctgaaagctcctgggcacgtgtcactgactctctgggacgttggggggcaggccccgctcagagccagctggaaggactatct

SEQ ID NO: 431020 - DNA, 120 bp, Artificial Sequence
  ENSG00000152213_3 (sequence is synthesized)
ggaaggcacagatatcctcgtgtacgtgctggacagcacagatgaagcccgcttacccgagtcggcggctgagctcacagaagtcctgaacgaccccaacatggctggcgtccccttctt

SEQ ID NO: 431021 - DNA, 120 bp, Artificial Sequence
  ENSG00000152213_4 (sequence is synthesized)
ggtgctggccaacaagcaggaggcacctgatgcacttccgctgcttaagatcagaaacaggctgagtctagagagattccaggaccactgctgggagctccggggctgcagtgccctcac

SEQ ID NO: 431022 - DNA, 120 bp, Artificial Sequence
  ENSG00000152213_5 (sequence is synthesized)
tggggaggggctgcccgaggccctgcagagcctgtggagcctcctgaaatctcgcagctgcatgtgtctgcaggcgagagcccatggggctgagcgcggagacagcaagagatcttgatc

SEQ ID NO: 431023 - DNA, 120 bp, Artificial Sequence
  ENSG00000152213_6 (sequence is synthesized)
cagacagagcagcatatctttgctcatacaaactagaagaaccagctgatccttgagaaatttacgcttagtctatcaaacaagaaatgctggcttggcccggtggctcatgcctgtaat

SEQ ID NO: 431024 - DNA, 120 bp, Artificial Sequence
  ENSG00000152213_7 (sequence is synthesized)
cccagcactgtgggagaccacggtgggggaatcccttgagcccaggagttggagagcaacatcacaacaccccatttctactaataatcaaaaaattggccgggcatggtggcatgtgcc

SEQ ID NO: 431025 - DNA, 120 bp, Artificial Sequence
  ENSG00000152213_8 (sequence is synthesized)
tctcaataataataataataataatgatgatactctaagaaaaaaatctcaacatacttcatttaatagctcgttaccaagtgtgaatgaagcaatatgtcataatagagtagccactgg

SEQ ID NO: 431026 - DNA, 120 bp, Artificial Sequence
  ENSG00000152213_9 (sequence is synthesized)
ttgcataataatagagacctaaattctcaaatagggaaagaggttttaaaatcaaatttgaggccaggtgcagtggctcatgggcggaggagggcagattacttgaggctaggagttcaa

SEQ ID NO: 431027 - DNA, 120 bp, Artificial Sequence
  ENSG00000152213_10 (sequence is synthesized)
attgtgctgctgcactccagcctgggtgaaaaagacaggctgtgtctccaaaaagaaaaaaaaaagtcaaattcaaatatcatctggacatgtcacaatggatcgcggatccttatgagt

SEQ ID NO: 431028 - DNA, 120 bp, Artificial Sequence
  ENSG00000152213_11 (sequence is synthesized)
tcacaatggatcgcggatccttatgagtgattttccccagtggcccctggggatgtgccactgtcactcagaagggcaagctaggcagggcccatacaacagcaggggtctgcaggttag

SEQ ID NO: 431029 - DNA, 120 bp, Artificial Sequence
  ENSG00000152213_12 (sequence is synthesized)
ttttttttctgatgctaattagcctctcccgattttatgacatcttgtgttgatctttttcaaaaactcattttcttttttttccttctcttttctccttcttgtagcacatatctttcg

SEQ ID NO: 431030 - DNA, 120 bp, Artificial Sequence
  ENSG00000152213_13 (sequence is synthesized)
ttaaagatcagatcaataaaatattttatttattcattaatttaacaaaaaaaacagagcatttagtttgtggcaaaaacactgagctttcgaatatgaatcatgtgctttaggtgggaa

SEQ ID NO: 431031 - DNA, 120 bp, Artificial Sequence
  ENSG00000152213_14 (sequence is synthesized)
ttgtgaattctgaagatacagatgacagtgacgaatgccttctgtctcatgattgacagggaaaaggaaggttgaccatagcatcctagaaggctcatcaggtgatcattacctagcatc

SEQ ID NO: 431032 - DNA, 120 bp, Artificial Sequence
  ENSG00000152213_15 (sequence is synthesized)
catgaagcacctgaaattatttgcaaaatgttacgctttggaccatttttccggggaaggagatccagaactttttaccagattttcaaagacatctgtgactcccaaaagttaacaatc

SEQ ID NO: 431033 - DNA, 120 bp, Artificial Sequence
  ENSG00000152213_16 (sequence is synthesized)
actgatgtggttgttgtatccctcatccaaccccagaacactttctgtaatctgagttttttaatggcaagtggcctatatttagcacctgttctcatgttaaacagctctgaatgttag

SEQ ID NO: 431034 - DNA, 120 bp, Artificial Sequence
  ENSG00000152213_17 (sequence is synthesized)
atattctttcttatcctggactggttctctctatctctggagtaatgcagtataaattggccatcagtaccctcctaaaatctgagatctgccaggcccctcttctaacaccaggttagg

SEQ ID NO: 431035 - DNA, 120 bp, Artificial Sequence
  ENSG00000152213_18 (sequence is synthesized)
catgcttggttatttccagtacttgtcagtcaacatgtttcaagacgctgtgttagacactagggatgcaaagatgaatgagataaggcctcaggcctcatggaaggtgagacagtaaag

SEQ ID NO: 431036 - DNA, 120 bp, Artificial Sequence
  ENSG00000152213_19 (sequence is synthesized)
acattactcccataaaaatgtgaggagagagactcagttcagcaactgtttattctgtttattgagcacttacttggaccaagcactgtggtcttggtgttttacatagactgtctctaa

SEQ ID NO: 431037 - DNA, 120 bp, Artificial Sequence
  ENSG00000152213_20 (sequence is synthesized)
ttctcacaactctgcaaaatatatatattcccattttataaaactacaaactgaggctcagagaaggtgtgacctcttgttgcttgaggcacagagttataaagtaacatatctggaatt

SEQ ID NO: 431038 - DNA, 120 bp, Artificial Sequence
  ENSG00000152213_21 (sequence is synthesized)
tgaaatcagatctgtttagggctaatgctgcatttttctacaacatcatgcctctagaaggtttaagctaggtaggctttcagccagcagacatgatggggagagccttctaataagagg

SEQ ID NO: 431039 - DNA, 120 bp, Artificial Sequence
  ENSG00000152213_22 (sequence is synthesized)
gaagagactgcttggaagcatgaagggaggtgtaagaaagataagtaagtcagtgtacttgcaacagaggcttgggatgaagggtgggtgaagttgacatcacgatagaaaacaaaactg

SEQ ID NO: 431040 - DNA, 120 bp, Artificial Sequence
  ENSG00000152213_23 (sequence is synthesized)
gaatgggagtttaggtccaatttgggcaaggttgtttgaatttcaataatcaggggtttgggtcaaggaagaaaaatcatgggacttgccatttaggaggataattttgtggtagtgtgg

SEQ ID NO: 431041 - DNA, 120 bp, Artificial Sequence
  ENSG00000152213_24 (sequence is synthesized)
aggtgaaataaagagaaaagggaaccttggagctgggaaggcaggaaaccggctagatgaccatcacacagcaaaggagggagtggaagagagatgagaaaattgagagctattattaag

SEQ ID NO: 431042 - DNA, 120 bp, Artificial Sequence
  ENSG00000152213_25 (sequence is synthesized)
aaaaacagttgagagaggaagaatttgaagagggctcaagattttgagtccacatgacagaaggactggaatgccatgaactggagaaggtgagcgctgaagaaccaggatgggacgggg

SEQ ID NO: 431043 - DNA, 120 bp, Artificial Sequence
  ENSG00000152213_26 (sequence is synthesized)
ctggaacagctgggttcagcttttgcagggtgggtacgtgtttggttatagctgctttcagattgttccattatctgtactcccaacaaccctgccggatatatttgttggctttcactc

SEQ ID NO: 431044 - DNA, 120 bp, Artificial Sequence
  ENSG00000152213_27 (sequence is synthesized)
gtcttccaggaggcccctgatcttctctgctcagggaccactcttatctgacccagagacagcacatatctttcgttaaagatcagatcaataaaatattttatttattcattaatttaa

SEQ ID NO: 431045 - DNA, 120 bp, Artificial Sequence
  ENSG00000152214_0 (sequence is synthesized)
atgagacccgctcgagcggaggaccagcagccagcccgacgctgatggttcttacctcgtactaaaacctttgctttgacacagttttagagttgcttaatattcgagcaagcacctgac

SEQ ID NO: 431046 - DNA, 120 bp, Artificial Sequence
  ENSG00000152214_1 (sequence is synthesized)
acgggtgactttctccttctttttttcctccggtccctcgggtaagatggaggtagaaaatgaagccagctgctccccgggcagcgcatcaggcgggtccagagagtacaaggtggtaat

SEQ ID NO: 431047 - DNA, 120 bp, Artificial Sequence
  ENSG00000152214_2 (sequence is synthesized)
gctgggagcagggggagttggtaaaagcgcaatgacaatgcagtttattagtcatcagttccctgattatcatgaccctactatagaagatgcttataagacccaggtcaggattgacaa

SEQ ID NO: 431048 - DNA, 120 bp, Artificial Sequence
  ENSG00000152214_3 (sequence is synthesized)
tgagccagcttacttggacatcttggacactgctggccaggcagaattcacagccatgcgggagcagtacatgcgaggtggggaaggcttcatcatctgctactccgtcactgaccgtca

SEQ ID NO: 431049 - DNA, 120 bp, Artificial Sequence
  ENSG00000152214_4 (sequence is synthesized)
tcaggaggctgccaagtttaaagagctcatttttcaggtccgccacacctatgaaattcccctggtgctggtgggtaacaaaattgatctggaacagttccgccaggtttctacagaaga

SEQ ID NO: 431050 - DNA, 120 bp, Artificial Sequence
  ENSG00000152214_5 (sequence is synthesized)
aggcttgagtcttgcccaagaatataattgtggtttttttgagacctctgcagccctcagattctgtattgatgatgcttttcatggcttagtgagggaaattcgcaagaaggagtccat

SEQ ID NO: 431051 - DNA, 120 bp, Artificial Sequence
  ENSG00000152214_6 (sequence is synthesized)
gccatccttgatggaaaagaaactgaagagaaaagacagcctgtggaagaagctcaaaggttctttgaagaagaagagagaaaatatgacatgatatctttgcttttgagttcctcacgc

SEQ ID NO: 431052 - DNA, 120 bp, Artificial Sequence
  ENSG00000152214_7 (sequence is synthesized)
tctctgaattttattagttggacaattccatatgtagcattctgcttcaatattatctctctatgtgtctctctctctttaaatatctgcctgtaggtaaaagcaagctctgcatatctg

SEQ ID NO: 431053 - DNA, 120 bp, Artificial Sequence
  ENSG00000152214_8 (sequence is synthesized)
tacctcttgagatagttttgttttgcctttaacagttggatggattttgtcaatcagctggatatgctgtttagtttttacaacatagtactaaataaaattgacattccaattgcctca

SEQ ID NO: 431054 - DNA, 120 bp, Artificial Sequence
  ENSG00000152214_9 (sequence is synthesized)
aaaattatgagaaagaaattatgcacatgatttttctaataagtcatggtggtcccatggtaaattgtgttggcctccataatatattttaccacatatgctattttgcagagtgccctt

SEQ ID NO: 431055 - DNA, 120 bp, Artificial Sequence
  ENSG00000152214_10 (sequence is synthesized)
ttacttggacatcttggacactgctggccagctgtgtgactggctgaaacacagatgggaagtagagctgtgggaaatcagaagaactgaaaagcagaattcacagccatgcgggagcag

SEQ ID NO: 431056 - DNA, 120 bp, Artificial Sequence
  ENSG00000152214_11 (sequence is synthesized)
ttatacttccattgttggattcttcctgtccattttggcatcaagttgtcttcaatatgccaattactactaaatctgtattgtcatcaagattttttttttgctgaattgcaatcccat

SEQ ID NO: 431057 - DNA, 120 bp, Artificial Sequence
  ENSG00000152214_12 (sequence is synthesized)
atactcaacttcttaattttaatattctaaggcattcaaaattgaacgcatcatttgccctcattcttagatttttatggcaataatggacagcaatgtccactaataaaactccctgcc

SEQ ID NO: 431058 - DNA, 120 bp, Artificial Sequence
  ENSG00000152214_13 (sequence is synthesized)
ccaaaacttaaatattacccttgattacttcattgtccacttgtacaattaataatcacatatttcttgaatacctgttatgtatctgtcactacttttgatagagggtggaggcagaga

SEQ ID NO: 431059 - DNA, 120 bp, Artificial Sequence
  ENSG00000152214_14 (sequence is synthesized)
aattctaggcagataggggcaggtcccctgtaaaaccccaccttcaagccaaggtagcctgaaacctgaggcccaaagtgagaacttctattcctgtttgcccaccctctcctgattggt

SEQ ID NO: 431060 - DNA, 120 bp, Artificial Sequence
  ENSG00000152214_15 (sequence is synthesized)
tctttctgaataatgtctttttaccaatcaatgttgccttttccaaaactacatactgcccgccccaccctgccctgcctatcctgtgcctataaagaccccagactcagtcagtagggg

SEQ ID NO: 431061 - DNA, 120 bp, Artificial Sequence
  ENSG00000152217_0 (sequence is synthesized)
gtaacttgcaggttaagtggagctagagagctacattgtaacctagttggatttttttggggggggaatgtatcagaatctaacgtgtcgttaatagaaagaagaacaggcaagaagtgg

SEQ ID NO: 431062 - DNA, 120 bp, Artificial Sequence
  ENSG00000152217_1 (sequence is synthesized)
tccagccggcgaagttgcagatctgatctcttctgaacacctcatcgtgtctccatccctgggaatctgaccctagcaactggaccactttgttcttggaattttgggtgtcctcttttc

SEQ ID NO: 431063 - DNA, 120 bp, Artificial Sequence
  ENSG00000152217_2 (sequence is synthesized)
tcacctttcccttttcccttttccccttccccctcctgagaactccggaagactgtagagattgtcatggagtccagggaaaccttaagcagctcccggcaaagagggggcgagtcagac

SEQ ID NO: 431064 - DNA, 120 bp, Artificial Sequence
  ENSG00000152217_3 (sequence is synthesized)
ttcctgccggtctcctcagccaagcccccagctgctcctggctgtgcaggagaacctttgctctccactccaggacctgggaaggggatcccggtgggcggagagcgcatggagccagag

SEQ ID NO: 431065 - DNA, 120 bp, Artificial Sequence
  ENSG00000152217_4 (sequence is synthesized)
gaggaggatgaactaggctcagggcgggatgtggattccaactccaacgcggacagtgagaaatgggtggcaggagatggtttggaagagcaggaattttctatcaaggaggcaaacttc

SEQ ID NO: 431066 - DNA, 120 bp, Artificial Sequence
  ENSG00000152217_5 (sequence is synthesized)
acagagggaagtctgaagctaaagattcagaccacaaagcgggctaagaaacccccaaagaatttggagaactatatatgtccacctgagatcaagatcaccatcaagcagtctggggac

SEQ ID NO: 431067 - DNA, 120 bp, Artificial Sequence
  ENSG00000152217_6 (sequence is synthesized)
cagaaggtgtcccgtgctggaaaaaatagcaaagccacgaaggaggaagaaagaagccactccaaaaagaagctcctcacagccagtgaccttgcagccagtgacctcaaaggatttcag

SEQ ID NO: 431068 - DNA, 120 bp, Artificial Sequence
  ENSG00000152217_7 (sequence is synthesized)
ccacaggcttacgagaggccccagaaacattcaactctccattatgacacgggcctcccacaggacttcaccggtgacaccttaaaaccaaagcaccagcaaaaaagcagcagccagaac

SEQ ID NO: 431069 - DNA, 120 bp, Artificial Sequence
  ENSG00000152217_8 (sequence is synthesized)
cacatggactggtccaccaactctgacagcggacccgtcactcagaattgcttcatcagtccagagtctggcagagaaactgcaagcaccagcaagatccccgctcttgagcccgtggct

SEQ ID NO: 431070 - DNA, 120 bp, Artificial Sequence
  ENSG00000152217_9 (sequence is synthesized)
tcctttgcaaaggcccagggtaagaaaggcagtgcagggaacacgtggagtcagttgtctaacaataacaaagatctgctcttgggaggtgtggctccatccccaagcagccacagctca

SEQ ID NO: 431071 - DNA, 120 bp, Artificial Sequence
  ENSG00000152217_10 (sequence is synthesized)
ccagccccacccagcagctctgctgagtgcaacgggcttcagcccttggtggatcaagatggaggaggtacaaaggagcccccagaaccacctacggtgggcagcaagaaaaagtccagt

SEQ ID NO: 431072 - DNA, 120 bp, Artificial Sequence
  ENSG00000152217_11 (sequence is synthesized)
aaaaaagatgtgataagtcagaccataccaaacccagacctggattgggtcaagaatgcccagaaagcatttgacaatacagaagggaaaagggaaggttattccgcagatagtgcccaa

SEQ ID NO: 431073 - DNA, 120 bp, Artificial Sequence
  ENSG00000152217_12 (sequence is synthesized)
gaggcatcaccagccaggcagaacgtgagttctgccagtaatcctgaaaatgactcaagtcatgtccggattactatccccatcaaggcaccctctctggatccaaccaaccataagagg

SEQ ID NO: 431074 - DNA, 120 bp, Artificial Sequence
  ENSG00000152217_13 (sequence is synthesized)
aaaaaaagacagtccattaaagcggtggtggaaaagatcatgccagagaaagccttggcttctggaatcaccatgagcagtgaagtagttaacaggatactttccaactctgaggggaat

SEQ ID NO: 431075 - DNA, 120 bp, Artificial Sequence
  ENSG00000152217_14 (sequence is synthesized)
aagaaggatccccgtgtccctaagttgagtaaaatgatagagaatgagtccccctcagttggccttgaaactggtggaaatgctgagaaagttatcccaggaggtgtgtctaagccgcgg

SEQ ID NO: 431076 - DNA, 120 bp, Artificial Sequence
  ENSG00000152217_15 (sequence is synthesized)
aagccacccatggtcatgacacctccaacgtgcacagatcactctccatccagaaagctgccagaaatccagcatccaaaatttgctgcaaaacgaaggtggacttgcagcaaaccaaaa

SEQ ID NO: 431077 - DNA, 120 bp, Artificial Sequence
  ENSG00000152217_16 (sequence is synthesized)
cctagcaccatgcttcgagaggcagttatggccacctctgataaactgatgctggagcccccgtctgcatatcccatcaccccatccagccctctctacaccaacacagacagtcttact

SEQ ID NO: 431078 - DNA, 120 bp, Artificial Sequence
  ENSG00000152217_17 (sequence is synthesized)
gtgatcactccagtcaaaaagaagcggggacgaccaaagaagcagcctttgctcacagtcgagacgattcatgagggaacttccaccagccccgtcagtcccatcagccgagagtttcct

SEQ ID NO: 431079 - DNA, 120 bp, Artificial Sequence
  ENSG00000152217_18 (sequence is synthesized)
ggcactaagaaaagaaagcgacgacgcaatttagcgaagttggcccagctagtgccgggagaggacaaacccatgagcgagatgaaatttcacaagaaagttggaaagctcggcgtgttg

SEQ ID NO: 431080 - DNA, 120 bp, Artificial Sequence
  ENSG00000152217_19 (sequence is synthesized)
gataagaagaccatcaaaactatcaataagatgaagacactcaagaggaaaaacatcttgaatcagatcttgtcctgttccagcagcgttgctctgaaggcaaaagctcccccagagacc

SEQ ID NO: 431081 - DNA, 120 bp, Artificial Sequence
  ENSG00000152217_20 (sequence is synthesized)
agccctggggcagcagccattgaaagcaaactgggcaagcagattaatgtcagcaagaggggaaccatctacattggcaagaagcggggcaggaagccaagagcagagctgccaccccca

SEQ ID NO: 431082 - DNA, 120 bp, Artificial Sequence
  ENSG00000152217_21 (sequence is synthesized)
tccgaagaacccaaaacagccatcaagcaccccaggcctgtttctagccagccggatgttccagccgtgccttccaactttcagtcacttgtggcgtcttcaccagcagctatgcaccca

SEQ ID NO: 431083 - DNA, 120 bp, Artificial Sequence
  ENSG00000152217_22 (sequence is synthesized)
ctttcaacacagttaggtgggtccaatggcaacctgagccctgccagcactgaaaccaatttttcagagttgaaaactatgccaaatctccagcccatcagtgctcttccaaccaaaacc

SEQ ID NO: 431084 - DNA, 120 bp, Artificial Sequence
  ENSG00000152217_23 (sequence is synthesized)
caaaagggaatacacagtggaacctggaagctgtctccacccagactgatggccaactccccttcacacctgtgcgagattggctccctaaaggaaatcacgctgtcccctgtgagcgag

SEQ ID NO: 431085 - DNA, 120 bp, Artificial Sequence
  ENSG00000152217_24 (sequence is synthesized)
tcccacagtgaggagacgatccccagcgacagcggcattgggacagacaacaacagcacttctgaccaagcggagaagagctcagaatcccgaaggaggtactcttttgatttctgctcc

SEQ ID NO: 431086 - DNA, 120 bp, Artificial Sequence
  ENSG00000152217_25 (sequence is synthesized)
ctggacaacccggaggccattccgtccgacaccagcacaaagaaccggcatggccaccggcaaaagcatctcattgtggacaactttctggcccacgaaagcctcaagaagccaaagcac

SEQ ID NO: 431087 - DNA, 120 bp, Artificial Sequence
  ENSG00000152217_26 (sequence is synthesized)
aagaggaaacggaaaagcctgcaaaaccgcgatgacctccagtttctggcagacctggaggagctaatcaccaagttccaagtgttcagaatctcccaccggagttacaccttctaccac

SEQ ID NO: 431088 - DNA, 120 bp, Artificial Sequence
  ENSG00000152217_27 (sequence is synthesized)
gagaatccatatcccagcatttttcggattaattttgatcactattacccggtgccatatatccagtatgacccgttgctctatcttcgtaggacttcagacttgaagtcaaagaagaag

SEQ ID NO: 431089 - DNA, 120 bp, Artificial Sequence
  ENSG00000152217_28 (sequence is synthesized)
cgtggtaggcctgcaaaaaccaatgacaccatgacaaaggtgccttttttacaagggttcagctaccctattcccagtggaagttactatgcaccctatggaatgccttacacatcaatg

SEQ ID NO: 431090 - DNA, 120 bp, Artificial Sequence
  ENSG00000152217_29 (sequence is synthesized)
cctatgatgaaccttggttattacggtcagtacccagctcctttgtacctatcgcacacgcttggagcagcttccccattcatgaggccaacagtgccaccacctcagttccacacaaac

SEQ ID NO: 431091 - DNA, 120 bp, Artificial Sequence
  ENSG00000152217_30 (sequence is synthesized)
tcccacgtaaagatgtccggtgcagctaagcataaagccaagcatggagtacacctgcagggacctgttagcatgggccttggtgacatgcagccttctctgaaccctcccaaggtaggc

SEQ ID NO: 431092 - DNA, 120 bp, Artificial Sequence
  ENSG00000152217_31 (sequence is synthesized)
agtgccagtctgtccagtggtcggctccataagaggaaacacaaacacaagcataagcacaaggaagaccggatcctagggacccatgacaacctgagtggtctttttgcaggcaaagcc

SEQ ID NO: 431093 - DNA, 120 bp, Artificial Sequence
  ENSG00000152217_32 (sequence is synthesized)
acaggcttctccagccacatcctgagcgagcggctgagtagcgcagacaaagagctcccgctggtgagtgagaagaacaagcataaggagaaacagaagcaccagcacagcgaagccggc

SEQ ID NO: 431094 - DNA, 120 bp, Artificial Sequence
  ENSG00000152217_33 (sequence is synthesized)
cacaaagcttctaagaacaactttgaggtggacaccctgtctacactgtcactttccgacgcccagcattggacacaggccaaggaaaaaggagacttgagcagtgagcctgtggactca

SEQ ID NO: 431095 - DNA, 120 bp, Artificial Sequence
  ENSG00000152217_34 (sequence is synthesized)
tgcacgaaaagatactctggcagtggcggggatggtggcagcacgagatcagagaacctggacgtgttcagtgaaatgaacccttcgaatgacaagtgggacagtgacgtgagtgggagt

SEQ ID NO: 431096 - DNA, 120 bp, Artificial Sequence
  ENSG00000152217_35 (sequence is synthesized)
aaaaggaggagctatgaaggctttggaacgtacagggaaaaggacatccaagccttcaagatgaaccgcaaggagagaagttcttatgactcctccatgtctccagggatgccaagtccc

SEQ ID NO: 431097 - DNA, 120 bp, Artificial Sequence
  ENSG00000152217_36 (sequence is synthesized)
cacttaaaagtggaccagacagcagtgcatagtaagaacgaaggctcagtgcccaccatgatgaccaggaagaagccagccgcagttgacagtgttacaattccaccagccccagtgtta

SEQ ID NO: 431098 - DNA, 120 bp, Artificial Sequence
  ENSG00000152217_37 (sequence is synthesized)
tctctccttgctgcatctgcagcaacgtcggatgcagtcggctcctccctgaagaagaggttcaagcggcgggagatcgaagccatccagtgcgaagtgcggaagatgtgcaactacacc

SEQ ID NO: 431099 - DNA, 120 bp, Artificial Sequence
  ENSG00000152217_38 (sequence is synthesized)
aagatcctgtccaccaagaagaacctggaccacgtgaacaagatcctgaaggccaagcggctgcagagacaatcaaaaacaggcaacaacttcgtgaagaagaggcgcgggcgtcccagg

SEQ ID NO: 431100 - DNA, 120 bp, Artificial Sequence
  ENSG00000152217_39 (sequence is synthesized)
aagcagcccacccagttcgatgaggactccagagaccaaatgccggtgctggaaaaatgcatcgacctgcccagcaaaagaggccagaagcccagcctgagcccgctggtgctggagccc

SEQ ID NO: 431101 - DNA, 120 bp, Artificial Sequence
  ENSG00000152217_40 (sequence is synthesized)
gctggtgctggagcccgccgccagccaagacaccatcatggccaccatcgaggcggtcatccacatggcccgggaggcgccgcccctgcccccgccaccgccgccgcccctgccgccacc

SEQ ID NO: 431102 - DNA, 120 bp, Artificial Sequence
  ENSG00000152217_41 (sequence is synthesized)
cagcccccacagcagtcgcccccgcagcagccccttccccaggaagaggaggtgaaagccaaaaggcagaggaagtcccgagggagtgagagcgaggtccttccctagggcgggtctggg

SEQ ID NO: 431103 - DNA, 120 bp, Artificial Sequence
  ENSG00000152217_42 (sequence is synthesized)
cgtctgcacctggggcctagggaactgacacgtgggaagcgcagtgagccggggcgggggcggaatcccccgctgcagggacacccacgcccttctctccagaagccgggcaggcagaat

SEQ ID NO: 431104 - DNA, 120 bp, Artificial Sequence
  ENSG00000152217_43 (sequence is synthesized)
ccggccagacgacggggctgagccatcaggagctcttgggaaagcaaagcagggagacaccttcagaagaagcttgtctgagcttcaccgcagctcccaccacgcggcgcttcagtacgg

SEQ ID NO: 431105 - DNA, 120 bp, Artificial Sequence
  ENSG00000152217_44 (sequence is synthesized)
ctggatcctccgcaggcgagcggaaggcccccaggaggagcaggctggtggcactctcctgacctcacgctgccaaggtgcgccctcgactcccgatttcatttgctggccaggaaaatc

SEQ ID NO: 431106 - DNA, 120 bp, Artificial Sequence
  ENSG00000152217_45 (sequence is synthesized)
gaaagggaaacaccctcaattaggaaacattccaaggggagaaaagctgcaaattgctcaactggcattgctgtaacccgttccatttaattggtttttatttcttttgattttcaagct

SEQ ID NO: 431107 - DNA, 120 bp, Artificial Sequence
  ENSG00000152217_46 (sequence is synthesized)
ctgctaagctttggggtaccaacgtcatcttcaggtgacctgaatctttcccttaaccgtacagtttctcgatggaattgtgtgatcagaaggtggaattctagtgataggcgacctcag

SEQ ID NO: 431108 - DNA, 120 bp, Artificial Sequence
  ENSG00000152217_47 (sequence is synthesized)
acccgcattcatgttctgtgtgcctcttctattgcacatacactgatttttagcattgtctattcctatttttcctttgcccattgtacttccatatatcttttcattaacttacttgct

SEQ ID NO: 431109 - DNA, 120 bp, Artificial Sequence
  ENSG00000152217_48 (sequence is synthesized)
gccttttttttttcttggtacacatttaaataaagtaatccttaacctgtgctgtaaagttcacccttggcatgctgttccaagaacctgggtttgaatcccaatcgttgtgaaacatac

SEQ ID NO: 431110 - DNA, 120 bp, Artificial Sequence
  ENSG00000152217_49 (sequence is synthesized)
tcagtattgataaaacctttttaataagtgatgcagagcagccaaggatatgttgacccagatgtcaaccaggctatttttatacttaaaacatgtcagcagagcataggcagaataaaa

SEQ ID NO: 431111 - DNA, 120 bp, Artificial Sequence
  ENSG00000152217_50 (sequence is synthesized)
tggtttaaataccccacagcaaatagagtaactgacaaaccaccaaaaactgaaaccccagacccaccagaaagacaagtgtctagcaatgccttggtacctgatctttttcattcaaat

SEQ ID NO: 431112 - DNA, 120 bp, Artificial Sequence
  ENSG00000152217_51 (sequence is synthesized)
aaaaaaaaaaaggaaacaaaaacacaatagaagtccattatcccttgataattatttcttaaaagcaaatgggagtaagtgttcttatctggaaaaataaataaataaaatgctcaaagg

SEQ ID NO: 431113 - DNA, 120 bp, Artificial Sequence
  ENSG00000152217_52 (sequence is synthesized)
ataaataaataaaatgctcaaagggtatcaccacttcaattttatcaagccaccttggacaaagtatccaaattgtggttgccttaataaactaaaacattattgtacataatgtaatta

SEQ ID NO: 431114 - DNA, 120 bp, Artificial Sequence
  ENSG00000152217_53 (sequence is synthesized)
taaatctatcagtctgcatggatgcaaactgtgtgtgacaaatcgtcttttaaatggtcaatttcagctgtacatttctcatccaagttgtactctagccattggtttagcgtggacaga

SEQ ID NO: 431115 - DNA, 120 bp, Artificial Sequence
  ENSG00000152217_54 (sequence is synthesized)
tactccatctctattatccatttccacagcccaaataaaatatgttaagcaggctcagaatgaatatgaagaattccatttccgtagatgttttctaaaagtcagattgtggaaatttca

SEQ ID NO: 431116 - DNA, 120 bp, Artificial Sequence
  ENSG00000152217_55 (sequence is synthesized)
aataagtattttcaatttcctccctcactccctcttaccttccccaagacatcaaacacctggcatggtagattatagaaagagacactgagagagagaattaaattttctaatgggaat

SEQ ID NO: 431117 - DNA, 120 bp, Artificial Sequence
  ENSG00000152217_56 (sequence is synthesized)
tagaatatctggtttacctccaaattaagtttctttacaggaagttgggaccagctggaaattgtattatcatttcggaacacaatattacttccttagagagagatggatttttgttgg

SEQ ID NO: 431118 - DNA, 120 bp, Artificial Sequence
  ENSG00000152217_57 (sequence is synthesized)
caacataaaagaataagtgatggggtatctatgtgagtaaatttttaaattccaagttaatatgcttgcaaacattactgctgcgttatggcaccaagagttggttgaaattacccacgt

SEQ ID NO: 431119 - DNA, 120 bp, Artificial Sequence
  ENSG00000152217_58 (sequence is synthesized)
agtcatactcctgtgctctgtcaccatggacttcacatcatttgctgcccactagttcaatcgcatttaatcctagcaatatgtaagtttaaaggactgcattcccctctactttaaagc

SEQ ID NO: 431120 - DNA, 120 bp, Artificial Sequence
  ENSG00000152217_59 (sequence is synthesized)
ttatatcctagatactcagtttgtgaccttggttgacctttggcatttcacgcaagttgaacagcaaaatcaaagcagccatttttaattcgtcattcccaagccctatctgagtggttc

SEQ ID NO: 431121 - DNA, 120 bp, Artificial Sequence
  ENSG00000152217_60 (sequence is synthesized)
caaagtcacctgagaggaaggtttaaattagtccctctcaccccaccattgctataaaacagcaacgttttcattccaattcagccataaagaggtttctcttcttactgggttttgaaa

SEQ ID NO: 431122 - DNA, 120 bp, Artificial Sequence
  ENSG00000152217_61 (sequence is synthesized)
tcatttccttttttctttcgtttgcccttcttccttcctgtgttgtactatctctccaaccacgtctataagcagactcaatcttcttgcagaggaagatgagctggcactctgcaaact

SEQ ID NO: 431123 - DNA, 120 bp, Artificial Sequence
  ENSG00000152217_62 (sequence is synthesized)
tctttaataaggacccaaagtttacttgacattaacctctagtaggtgagaaattccaaaaaagctttggggtacattagaatttccaaagctctgaaagatatttcaggagatttaaca

SEQ ID NO: 431124 - DNA, 120 bp, Artificial Sequence
  ENSG00000152217_63 (sequence is synthesized)
gcagagttgcaacttacacgtgaattctggtctatagtggtcatgtgagttaaattcgaatcctctacttgtatgaccctaggaatagattggaatactgcagaggaccaaagctgaggc

SEQ ID NO: 431125 - DNA, 120 bp, Artificial Sequence
  ENSG00000152217_64 (sequence is synthesized)
atgctaaacagctgcttggaggtggaagcaagttcagtcacctactcagcttcctctctccaccacccagttcctccctcagtatcacattatttttttcttctgcttttcattaaccta

SEQ ID NO: 431126 - DNA, 120 bp, Artificial Sequence
  ENSG00000152217_65 (sequence is synthesized)
actcatctcatcagtacaaccattttcttattctctaactacccccaattcctttagcctctccccacctgtccaaactcagctcagccgtgggccaatgcagcttacagacggttgcag

SEQ ID NO: 431127 - DNA, 120 bp, Artificial Sequence
  ENSG00000152217_66 (sequence is synthesized)
agctaggaagaaaacccagctctcccaaccctgatcgtggaggtctctggccccccaacactgccttctgggggctgcattttttttttttttttgagaagaggtcttttgggatgcatg

SEQ ID NO: 431128 - DNA, 120 bp, Artificial Sequence
  ENSG00000152217_67 (sequence is synthesized)
gtgctccacatacagcttcacaaaatatttcattataagagaaaccccttgatttttatttctttttcttttgttttctggattacctgccttcagtaagcagatgcagacccacttgta

SEQ ID NO: 431129 - DNA, 120 bp, Artificial Sequence
  ENSG00000152217_68 (sequence is synthesized)
aggagtctggttagtgatgagaaaaggatgaaatctagatacaaaagtcaccttgaaggtgatgatggatctttaatccacttgactaagtgtctggaagagctacttgctcttccaccc

SEQ ID NO: 431130 - DNA, 120 bp, Artificial Sequence
  ENSG00000152217_69 (sequence is synthesized)
ctcatctcaaatgagaggagcagaagtttaacttcctcaaatagcccagctctggctaaaacccaaagaagaaaggtcaaaggaagggaaagcatgtcaggggctggtttgtgacttggc

SEQ ID NO: 431131 - DNA, 120 bp, Artificial Sequence
  ENSG00000152217_70 (sequence is synthesized)
aggaccaggaaacagcagccactgacagcccagagaaggtgactaagggctggcagaagattagaatgttaatttggctgctgtccggactaggaggccatgttcaatggcagtcagaat

SEQ ID NO: 431132 - DNA, 120 bp, Artificial Sequence
  ENSG00000152217_71 (sequence is synthesized)
ttgtgttctgcgcattgctgggtctataaatatgataagcaagtggtgacagaattatagtataaggtgatgtactacatgcagatcataaaggctttggttttaagacttaagtagaaa

SEQ ID NO: 431133 - DNA, 120 bp, Artificial Sequence
  ENSG00000152217_72 (sequence is synthesized)
atccctctcctagcttattacccaacaatattcagataatgagcttttggagaatatctttttcctatcactagaaagatttacctgggaactgtctaaagtctacacacatatttccaa

SEQ ID NO: 431134 - DNA, 120 bp, Artificial Sequence
  ENSG00000152217_73 (sequence is synthesized)
agcctttaaataccaactgcagcatggagagagaggggtggcagaagctgaaatgcctcaaaagccatttaagtgttacgttgcaggattttcagtccttctcgttatgtaaaagtagat

SEQ ID NO: 431135 - DNA, 120 bp, Artificial Sequence
  ENSG00000152217_74 (sequence is synthesized)
aaatatagacgttattctcaacactaccctatagtatcacagtggtccaaatgccagagcttacagataatgtcatcacagtgcctagaaactcgaactgtaatatatcgtagcattttc

SEQ ID NO: 431136 - DNA, 120 bp, Artificial Sequence
  ENSG00000152217_75 (sequence is synthesized)
ttggtgtttcttaaagtttctttccacaatacaaggtcctctctgcctcttgtttcttggagagttcaccccactgatgagtcttccttccctgttggactcagtcatttggggaacagt

SEQ ID NO: 431137 - DNA, 120 bp, Artificial Sequence
  ENSG00000152217_76 (sequence is synthesized)
cttagaagcacatatcaaccaaggaagaaacttcctggatatctattgcccacttgcccaggtctaataaacactaaaggggggaaattgaaaggagctgccaactggtcaacgtggaag

SEQ ID NO: 431138 - DNA, 120 bp, Artificial Sequence
  ENSG00000152217_77 (sequence is synthesized)
ggcggttccaccctagattggtgtctttctttttcttcctttttttaaaaaaaatctatttcttaaataataataaatgcacatgatgtgttaaatatgtacatatatatttcaaaagaa

SEQ ID NO: 431139 - DNA, 120 bp, Artificial Sequence
  ENSG00000152217_78 (sequence is synthesized)
aaaatggggcacaagattgtcttacaagtcgtgctggctaatttttagtttgtattcataagtggtttttaaaagccttttttaaagtgtaatttgcatgttctactttgattgtatgta

SEQ ID NO: 431140 - DNA, 120 bp, Artificial Sequence
  ENSG00000152217_79 (sequence is synthesized)
aacatattttagaacaaaaaatgtatttgtattttattgaatatagaggcaagaaaattgtacattgtttgaaatgttctttttgtaacagtttttattcataaagcatttttgtacatt

SEQ ID NO: 431141 - DNA, 120 bp, Artificial Sequence
  ENSG00000152217_80 (sequence is synthesized)
taaaatgaacatggacttgctgttatttgaggcgtagatacatctagcatgcttactgtcatgctcctccatggtcttagatgttgggttttaaacatttttttctaaaagaaagctcag

SEQ ID NO: 431142 - DNA, 120 bp, Artificial Sequence
  ENSG00000152217_81 (sequence is synthesized)
tcttttccgctaccagatcaggttagcacagtatagagcacttaactattaaaaaaaaaaagttaatcctattcatatgttattcattgtgtgaaattaaagacattcaattcagtctaa

SEQ ID NO: 431143 - DNA, 120 bp, Artificial Sequence
  ENSG00000152217_82 (sequence is synthesized)
gctcgccgccgcctccgcgcgcccgggggccccggcgccccccgagctagggcggccagctcgcggctcgccgtttgacagatgctcatcgccatggagttgccgcagcagcacctttgg

SEQ ID NO: 431144 - DNA, 120 bp, Artificial Sequence
  ENSG00000152217_83 (sequence is synthesized)
ccagtaaggaggaagtctggaagagaagaggaggccaaggcatcccattcaaaaagcaattcctgtcccaggaacgtgccatgtgcttctcatgcccccggaacccattccccgcaaaac

SEQ ID NO: 431145 - DNA, 120 bp, Artificial Sequence
  ENSG00000152217_84 (sequence is synthesized)
ccggttctctcactcttccttttcacagtgaacctgcagtctgggcacaagaagtataacttcgcatggattctgcaaagcccacacctgtggtcattccctgttctttccattcaacaa

SEQ ID NO: 431146 - DNA, 120 bp, Artificial Sequence
  ENSG00000152217_85 (sequence is synthesized)
tggagacttgcccaagattgtaaactagtgagtgacagcatttgggcttatgatcttctctgcctgctagctagacattctctctgggtctaaaagataatccaaaaagatccagcttca

SEQ ID NO: 431147 - DNA, 120 bp, Artificial Sequence
  ENSG00000152217_86 (sequence is synthesized)
caatgctgccctgaagagataatgcattaggcggccctgatgcagcattcactgtcttccagggcaggcttgatcccatgagtttgcttgctcagacgatcacttaggaaacacatgcct

SEQ ID NO: 431148 - DNA, 120 bp, Artificial Sequence
  ENSG00000152217_87 (sequence is synthesized)
ttactctctaggccttttttctagcttgccttgtatcagctatgccatggatctttgctctcttaccccatgctatacagagtatgggctccaagccacagctggcctgtcaagtgtgtg

SEQ ID NO: 431149 - DNA, 120 bp, Artificial Sequence
  ENSG00000152217_88 (sequence is synthesized)
tcgctggtccaccatgggatacatttagaaacttttatagcaatttgacatttttgtgatatccaagcatgtgattgttttcctacggatttgtcttatagtattttaccaaagtttcca

SEQ ID NO: 431150 - DNA, 120 bp, Artificial Sequence
  ENSG00000152217_89 (sequence is synthesized)
cacaaaaagtatggattaaggacaaagtatctggtccttcatcaaagatcgtttgataagctctgttctagttaaccaacactgagctttcctagttttaataaaagagtaggatttgga

SEQ ID NO: 431151 - DNA, 120 bp, Artificial Sequence
  ENSG00000152217_90 (sequence is synthesized)
gtttggttgtcaacaagcacctttggggccaggacagaaacccgaaccttggatttctagcttctttccctagctaactgacaatgacctggtggcttgctctcctcctccagctcctct

SEQ ID NO: 431152 - DNA, 120 bp, Artificial Sequence
  ENSG00000152217_91 (sequence is synthesized)
cattctagcatggacaaaaccacctctttctgctctttcgttcctaatattctataggagaaaaatatatagagatcaagatgctcggaatgttaagtgttggggattcagcttaggaaa

SEQ ID NO: 431153 - DNA, 120 bp, Artificial Sequence
  ENSG00000152217_92 (sequence is synthesized)
gggttaaaccaatggcggcagagggtgggttgggtttggggttctcccctgcatttctctctttttggacaggacactcgcatgtctgtaatctttgcggcaaatgcctcctagtcaagg

SEQ ID NO: 431154 - DNA, 120 bp, Artificial Sequence
  ENSG00000152217_93 (sequence is synthesized)
cctgatagccaagttaatctcagactcctgcagaggcagacagttgaggtttgctgatcttggtcaggaaatgggccactgttatctctggccagagtggtgtttggaggttactatggg

SEQ ID NO: 431155 - DNA, 120 bp, Artificial Sequence
  ENSG00000152217_94 (sequence is synthesized)
caaactgtgtgaggatgtaggcaagggctttctggagacttttttgcaggggtgaaaatggacatcatcctgcctgtctctggaaaaggagtccacacaaagacacatacacacaaatct

SEQ ID NO: 431156 - DNA, 120 bp, Artificial Sequence
  ENSG00000152217_95 (sequence is synthesized)
cagctatacaaaagcccttgtgtgctcacatagagcctggtgtagttagaacatgtacataaagaaagatcaatccaaaggtgatcattaagggacttggcccctgccgctgtccccctt

SEQ ID NO: 431157 - DNA, 120 bp, Artificial Sequence
  ENSG00000152217_96 (sequence is synthesized)
gcaaaatgaaactttctgtcacccttcaactcagtgcctgcctcaaggtctcacagtgctgtacctttgtgggaaaataaattatagctaacggcagcgaacttccaggggtcgagcaaa

SEQ ID NO: 431158 - DNA, 120 bp, Artificial Sequence
  ENSG00000152217_97 (sequence is synthesized)
tatgtttctaattgcaggaatttcatgtatttgggcacgttttcttctttaaaggtgtttcacatccaggagcccactgcaccctccctacccttctcccatgtgagccacatcctgtgc

SEQ ID NO: 431159 - DNA, 120 bp, Artificial Sequence
  ENSG00000152217_98 (sequence is synthesized)
gcaccctctcactgctgaggaacctgaggacccagtcctgatgcacagtggccccagatcacacagagagctaggaacaggtgacagtgggaggctagaggaagagaattaacagaatca

SEQ ID NO: 431160 - DNA, 120 bp, Artificial Sequence
  ENSG00000152217_99 (sequence is synthesized)
tgtcatctcaccttgttaatcctcctgtctggaaagtagtgagtttttagacagagatggccagtaagccttttttgtcaaccactgaaaacctttaattaattactttttcacatattt

SEQ ID NO: 431161 - DNA, 120 bp, Artificial Sequence
  ENSG00000152217_100 (sequence is synthesized)
acacaaacttccagttgggctaagggaatgtgaaacaaaaacaaaagaaaatcaacatttaccgcctaccccacccacctccacacctacactcatacatggtggcaattccaggtaaat

SEQ ID NO: 431162 - DNA, 120 bp, Artificial Sequence
  ENSG00000152217_101 (sequence is synthesized)
attttgttttaatctgaaaatttataacattaaaggaaattgtgtggtgctgttttactgcttgaaaaggacacccggtagagactgagtttattggagttgtgtgtgtgcgcgtggttt

SEQ ID NO: 431163 - DNA, 120 bp, Artificial Sequence
  ENSG00000152217_102 (sequence is synthesized)
tggcatggtttccttcggagctgaacacgttctctccgtgtttgttgacctacacttttagatattagatttaaactaatagagcaaactttccagtgaaggagaagttagctatatttg

SEQ ID NO: 431164 - DNA, 120 bp, Artificial Sequence
  ENSG00000152217_103 (sequence is synthesized)
aggttcgtgcataacatttgagggcattatcctagaaaggcagcttccagcctcccccacaaccagccccacagcttccagtgcagatggctcgctcctctggttctgttcagcccttcc

SEQ ID NO: 431165 - DNA, 120 bp, Artificial Sequence
  ENSG00000152217_104 (sequence is synthesized)
atgttattccatttgcgtgtcatcaccctgaggcaagaaacataaatgcctatttttcactcctcaggatgcctgttcttgaggccaggaagtcctgggaaactggtggccagggtgtaa

SEQ ID NO: 431166 - DNA, 120 bp, Artificial Sequence
  ENSG00000152217_105 (sequence is synthesized)
tgcccagatcaaagttaattctctagtgaaaggcccagatgtgtctcgggtcaacagcatccttttgggtgctttttaaaacagaaatagaaagctgtccacaggcattgcactgccccc

SEQ ID NO: 431167 - DNA, 120 bp, Artificial Sequence
  ENSG00000152217_106 (sequence is synthesized)
tccagccccactgcaccaaactgctggcttctgttgttatttttccccttctctctttgggtttcagatgaaactgagtcccacacaataatgcatgggtgtgttcccctccaagaccca

SEQ ID NO: 431168 - DNA, 120 bp, Artificial Sequence
  ENSG00000152217_107 (sequence is synthesized)
tcattgactgtcaggaggggactcactgaggacccctcccagggataactatctgtcctctcagcttttgcatggtgcccacttaccacttgaatgtagaggttttctgtttgtttttct

SEQ ID NO: 431169 - DNA, 120 bp, Artificial Sequence
  ENSG00000152217_108 (sequence is synthesized)
tgatgcctgttcctgctttagactcttaaggaagatagttacaaaatctttgatgattttgaaagtgtgtagagtagtgactgtattgagctggcttttctgttgatttgtctctgtctt

SEQ ID NO: 431170 - DNA, 120 bp, Artificial Sequence
  ENSG00000152217_109 (sequence is synthesized)
ctctctgcttccagatagagaagaggaaggtaaggaagtgattacctacctttctccccatggttattggttactaaaaatgcgatgttcattcctggaaataaacacatgacttttcag

SEQ ID NO: 431171 - DNA, 120 bp, Artificial Sequence
  ENSG00000152217_110 (sequence is synthesized)
gttgagcctgaaagcccgtgttttctagggtattgtgttttagcaggtggtgatctccccagaggctggtgagcctggcctccgggccacagggtagagcttcttctagagtcaggcctg

SEQ ID NO: 431172 - DNA, 120 bp, Artificial Sequence
  ENSG00000152217_111 (sequence is synthesized)
gtgctggtaggcggtactattctcagcaagttttaaaggcacagatggaaaagcttctgaaattcacacctaacccaccctgactcttctacctccaaacacatctccttttaccttcta

SEQ ID NO: 431173 - DNA, 120 bp, Artificial Sequence
  ENSG00000152217_112 (sequence is synthesized)
acatcctgttcttgccttttgaagcaacagacacacttgagtaccctcctttctaagtctttgggttactggaaatgagaaccctcacttcttttgtctgtctggtcccctgcattccta

SEQ ID NO: 431174 - DNA, 120 bp, Artificial Sequence
  ENSG00000152217_113 (sequence is synthesized)
gcgtgagcctgtgcgtgtgctcacacgcgcattttggcagggctgaatcacaagaggactcgcagttgatacccagactcaccaaaaaattgagctgtgaatttggggaggcaggtacgt

SEQ ID NO: 431175 - DNA, 120 bp, Artificial Sequence
  ENSG00000152219_0 (sequence is synthesized)
agtggtagcgcggggactggctgggaagcggtcggtcgagtgtggcctgtgtggactcgcatcttgcccgaagccgggcggaggagagctcaagctaagggtgatcagcccatgacctaa

SEQ ID NO: 431176 - DNA, 120 bp, Artificial Sequence
  ENSG00000152219_1 (sequence is synthesized)
acctccagacaaaataaaacggaaaatttgctagaatcaagaatgatggatccatgttcagttggagtccagcttcgtactacaaatgagtgccataaaacctactatactcgtcacaca

SEQ ID NO: 431177 - DNA, 120 bp, Artificial Sequence
  ENSG00000152219_2 (sequence is synthesized)
ggttttaagactttgcaagaattgtcatcaaatgatatgcttttacttcaacttagaactggaatgacactttctgggaacaatacaatttgctttcatcatgtaaaaatttacattgac

SEQ ID NO: 431178 - DNA, 120 bp, Artificial Sequence
  ENSG00000152219_3 (sequence is synthesized)
agatttgaggatttacagaagtcatgttgtgacccatttaacatacacaagaaattagccaaaaaaaatttgcatgtaattgacttagatgatgccacttttctgagtgctaaatttgga

SEQ ID NO: 431179 - DNA, 120 bp, Artificial Sequence
  ENSG00000152219_4 (sequence is synthesized)
agacagcttgtacctggttggaagctttgtccaaaatgcacacagataatcaatggaagtgtggatgttgatactgaagaccgccagaaaaggaaacctgagtcagatggaagaactgct

SEQ ID NO: 431180 - DNA, 120 bp, Artificial Sequence
  ENSG00000152219_5 (sequence is synthesized)
aaagctttgaggtcattacaatttacgaatccaggaaggcaaactgaatttgctccagaaactggtaaaagagaaaaaagaaggcttacaaaaaatgcaaccgctggttcagacagacaa

SEQ ID NO: 431181 - DNA, 120 bp, Artificial Sequence
  ENSG00000152219_6 (sequence is synthesized)
gtgataccagcaaagagtaaggtctatgatagccagggtctcctgatttttagtgggatggacctctgtgactgcctggatgaagactgcttaggatgtttctatgcttgtcctgcctgt

SEQ ID NO: 431182 - DNA, 120 bp, Artificial Sequence
  ENSG00000152219_7 (sequence is synthesized)
ggttctaccaagtgtggagctgaatgccgctgtgaccgcaagtggctgtatgagcaaattgaaattgaaggaggagaaataattcataataaacatgctggataatctgcggtaccaaac

SEQ ID NO: 431183 - DNA, 120 bp, Artificial Sequence
  ENSG00000152219_8 (sequence is synthesized)
tatggagcctttaaaggtctttatttctaaaaatctgttactctaagatacattttaagcttgattatcatatgacaaagattttaaaaccatctcagtgtgccctaatttttcatcttg

SEQ ID NO: 431184 - DNA, 120 bp, Artificial Sequence
  ENSG00000152219_9 (sequence is synthesized)
gtgtaggcagtcctctatttgcatgtttcccatgggcacaaatttcagtgacctagatttagtttaaataccagtttccttaccaggaaggaaagaaaactggtaaggaaactgttgttg

SEQ ID NO: 431185 - DNA, 120 bp, Artificial Sequence
  ENSG00000152219_10 (sequence is synthesized)
ttaaaatctaggttaaaattttagttagcacattgtaactgagtaattacatgaagtacaaacctctctgctagctcttcagtctacaaatcgctatgtaaataacagatatgcttcatg

SEQ ID NO: 431186 - DNA, 120 bp, Artificial Sequence
  ENSG00000152219_11 (sequence is synthesized)
attgtgaccagtcatgttatttctttcaaattcttccagtggtttgtccctgtgcatctgttaattcagttcacgtacagcagagcatgtagttatgctgtctctctgtcatctacttga

SEQ ID NO: 431187 - DNA, 120 bp, Artificial Sequence
  ENSG00000152219_12 (sequence is synthesized)
cattctatagaagtgaacactcgaaagaactggtcaacaaagatgaaagtgcagcaaagcaatgaaaaatgataacactggaagtgaaattttaatcaaacataaatgaatttgtagaag

SEQ ID NO: 431188 - DNA, 120 bp, Artificial Sequence
  ENSG00000152219_13 (sequence is synthesized)
aagtcactgaccatgggaatgttgttcttgctgctgtgtattcataggagcttagtgaaggcaaacttaccaacacaaataagcaaagtggttgcaataaagacagatacgtcccagagg

SEQ ID NO: 431189 - DNA, 120 bp, Artificial Sequence
  ENSG00000152219_14 (sequence is synthesized)
aagtgatggttaaaaaaaaaaaactttacattaaaagatatttaatgtgaatatagaaatatttcacaacattgaaagcacaagcaataaaagggtggaagctgacccaaacttagaagg

SEQ ID NO: 431190 - DNA, 120 bp, Artificial Sequence
  ENSG00000152219_15 (sequence is synthesized)
agtatggcagtttgccgtgaacataaaagatgcttactcagtatggtaagttacttgccagaaaaaaaggcaagccctattcaaactactttgtttttacaatgaaataaaacactttaa

SEQ ID NO: 431191 - DNA, 120 bp, Artificial Sequence
  ENSG00000152219_16 (sequence is synthesized)
ttctatttctaatgttttaaattacagtgtactaaatatttttaaacatttttgcatttttttctacatttataactggtcttaagagtttttaatatttgagcagaaccttaaaggtca

SEQ ID NO: 431192 - DNA, 120 bp, Artificial Sequence
  ENSG00000152219_17 (sequence is synthesized)
tggaacaatcatcattttccctattgattattaagattgcaggaccatttttatggtcccacagtaccatgtgaaatgaggatcgcttgtagctgggaacagtgcttacttcagggaaaa

SEQ ID NO: 431193 - DNA, 120 bp, Artificial Sequence
  ENSG00000152219_18 (sequence is synthesized)
ctgattttgatagaaccgactagttgagtattaaactgttttggaaataatttatatatctaagtgctgaaatatatttctcttctccccacttattcaaataaaaaagttttaatacta

SEQ ID NO: 431194 - DNA, 120 bp, Artificial Sequence
  ENSG00000152219_19 (sequence is synthesized)
atgaaggacttggaaatcactgctttaaaaggaacattagagagggaagaactgctaaagctttgaggtcattacaatttacgaatccaggaaggcaaactgaatttgctccagaaactg

SEQ ID NO: 431195 - DNA, 120 bp, Artificial Sequence
  ENSG00000152219_20 (sequence is synthesized)
atacattgccacatagttcgttgccttgtaactttacctctgatttcctttttctcctccttaatttatcttaatccaattatctgtttgaagaaaaaaaaaattttttttattttttta

SEQ ID NO: 431196 - DNA, 120 bp, Artificial Sequence
  ENSG00000152219_21 (sequence is synthesized)
tgtttgaagaaaaaaaaaattttttttatttttttattttttgagatgagagtctcgctttgtcgcccgggctggagtccagtgacacgatctcggctcaccgcaacttccgcctcctgg

SEQ ID NO: 431197 - DNA, 120 bp, Artificial Sequence
  ENSG00000152219_22 (sequence is synthesized)
ctgcactaccacacctgactaatatttttgtatttttagtagacacgagatttcactatgttagccagtctagtctagaactcctggcatcaagtgatcaacccacattggcctcccaaa

SEQ ID NO: 431198 - DNA, 120 bp, Artificial Sequence
  ENSG00000152219_23 (sequence is synthesized)
gtgctgggattacaggcaggagccacaatgcctggctagaagaaacttttctaattattactgtgatagaagccattttatctgatttgattgggacctgtattagttcattttaaaaac

SEQ ID NO: 431199 - DNA, 120 bp, Artificial Sequence
  ENSG00000152219_24 (sequence is synthesized)
tgactaaaacacagtaaatgaatataaatatactctgtttttaccagctttaaaacttttttcagttaaaatgttcagtaacatattttaacactttaaagtgtattttattttttaact

SEQ ID NO: 431200 - DNA, 120 bp, Artificial Sequence
  ENSG00000152219_25 (sequence is synthesized)
ttgtaaatacagtattttgacctaaaacacagacatttattcgccattttttgttacctgaggccagagtcttctttttatatgattttgctgattattgtttttctctgcagaaaccat

SEQ ID NO: 431201 - DNA, 120 bp, Artificial Sequence
  ENSG00000152219_26 (sequence is synthesized)
atcaaaatgtgtttaagatttctctccagtttttgttttttttttaattttgcaaagcttaaaaacacttgtaaaattgctgaatcctagacttcacagtccctccctaccactcagatt

SEQ ID NO: 431202 - DNA, 120 bp, Artificial Sequence
  ENSG00000152219_27 (sequence is synthesized)
tcagtggttcacattttttctcaacagcagattttttcctaatgagttgcattggttgcatattttcttgagaatccaacttttttttttaatttgctttgaaaattatttatgaaaaat

SEQ ID NO: 431203 - DNA, 120 bp, Artificial Sequence
  ENSG00000152219_28 (sequence is synthesized)
ttcaaatagaaagtatggacagtagtgaagcacttatgtacatgtcaccaaaccttattttctgtaaatctttttggggaaaataatgttttttcccctcagaagtatccacaaatgtga

SEQ ID NO: 431204 - DNA, 120 bp, Artificial Sequence
  ENSG00000152219_29 (sequence is synthesized)
ttcccctcagaagtatccacaaatgtgatatatgttactcttatgtatattttagtatatattcatgtttcatctgtaaatcttatgtactatcttatctttttaaattttacctttaat

SEQ ID NO: 431205 - DNA, 120 bp, Artificial Sequence
  ENSG00000152219_30 (sequence is synthesized)
tttcacttaagattgtctttgagatttattcatgttgattcacgtaattcatgtagtttattcattttaactgttatgtgggagtcccttgtatgagtaacgatttcacatcctttacaa

SEQ ID NO: 431206 - DNA, 120 bp, Artificial Sequence
  ENSG00000152219_31 (sequence is synthesized)
ttaggttatttgtcatctttcactgccaaaggcagtgaatgctgaaagttttcgtatataacttgtgctcttattggagatatttttctccatctgacacccagaactgaaaagagctga

SEQ ID NO: 431207 - DNA, 120 bp, Artificial Sequence
  ENSG00000152219_32 (sequence is synthesized)
gtcccaaggtgtatgcttcctcagttttacaagaaattgcagaaaatgttctaaagcagttgcagcaatttacattcctaccaaagttattataaggagcatgtgagagttggacacatc

SEQ ID NO: 431208 - DNA, 120 bp, Artificial Sequence
  ENSG00000152219_33 (sequence is synthesized)
ttaaccagatatcagatttttaaattgatttcaagcaaatgtttaataaatgatatttaatttgcattttcctaggaactatgggggaaacagtttgtatgcatgtattggcttttgttc

SEQ ID NO: 431209 - DNA, 120 bp, Artificial Sequence
  ENSG00000152219_34 (sequence is synthesized)
tttctaattgatttttggaagtgaggagttactcgaatatttatgataataatcctaacacctttcaagtgtctttttttttctcctttagttatacagaaatgtgtaaattttacatat

SEQ ID NO: 431210 - DNA, 120 bp, Artificial Sequence
  ENSG00000152219_35 (sequence is synthesized)
aatcaaatatatccatctttttatttatttatttttttggtatctgcttgcttgtttgaaaaattcttccatacttccatgtcagaaaaccttctttattttctcataaacatgtttagt

SEQ ID NO: 431211 - DNA, 120 bp, Artificial Sequence
  ENSG00000152219_36 (sequence is synthesized)
ttttcttttcatgtttaaatctttaatccacttgttattgatttttgtttgtgcagaagagatctaattgtttttccatatggttaaagtcccttcttcattagtgtgtgatacccatcg

SEQ ID NO: 431212 - DNA, 120 bp, Artificial Sequence
  ENSG00000152219_37 (sequence is synthesized)
attaatagtaccacatgtcatatactgagccctcatctactcatggatctgtttgtttatactataccaataccatagttttaattagaataggtttaaagtaaatcaatatgttactgt

SEQ ID NO: 431213 - DNA, 120 bp, Artificial Sequence
  ENSG00000152219_38 (sequence is synthesized)
attttccttcaggattaccttggctttcttagacctttgctctttcatatagaccagcttgctaaattccaagggggtggcagtagaatatctgatggaactttgattgtaacagaactg

SEQ ID NO: 431214 - DNA, 120 bp, Artificial Sequence
  ENSG00000152219_39 (sequence is synthesized)
aatttacagatgtattcccagataattgacatattttttataatgagccactccatgatatatagctgcatttatttagggtaccgtttttgtcttgcagtttgataattttctccatga

SEQ ID NO: 431215 - DNA, 120 bp, Artificial Sequence
  ENSG00000152219_40 (sequence is synthesized)
aggtcttgttgtatgtcttttgtaagagtcacatattttgtaagatacagtgttttttggtttctagcatccctggtgaattctcttattagttctaatagtttgttaaacctcttgtat

SEQ ID NO: 431216 - DNA, 120 bp, Artificial Sequence
  ENSG00000152219_41 (sequence is synthesized)
ttctcatgtatcttaggataatatttcttatttcctcctttttaattcttatgtggtcttaaatataatctgtaattgcagatgttttcgtgaagttctgactttacagggaacgcttct

SEQ ID NO: 431217 - DNA, 120 bp, Artificial Sequence
  ENSG00000152219_42 (sequence is synthesized)
gtttgattattaaatgtctattataagacttcgataaataccttttttattccttattttcttttagataggtgttgaattttatcaaatgctttttcagtttcctagataaacttgcag

SEQ ID NO: 431218 - DNA, 120 bp, Artificial Sequence
  ENSG00000152223_0 (sequence is synthesized)
atgtgacagtccggaggccagaaccgggcaggttgcttgaagcgcaggggtttgacaaaaacaaacggtgacggcgccgcggaagggtctatggccgaggcggtgaagccccagcgccgg

SEQ ID NO: 431219 - DNA, 120 bp, Artificial Sequence
  ENSG00000152223_1 (sequence is synthesized)
gccaaggccaaggccagccggactaaaacaaaggaaaagaagaagtatgaaactcctcagagggaagagtccagtgaagtctcccttccaaaaacctccagagagcaggaaatcccttct

SEQ ID NO: 431220 - DNA, 120 bp, Artificial Sequence
  ENSG00000152223_2 (sequence is synthesized)
ctagcctgtgaattcaaaggagaccatctgaaggtggtaactgattcccagctccaggatgatgccagtggacaaaatgagagtgaaatgtttgatgtaccactcacctccttaactata

SEQ ID NO: 431221 - DNA, 120 bp, Artificial Sequence
  ENSG00000152223_3 (sequence is synthesized)
agcaatgaagagtccctgacgtgtaacacagagcccccaaaggaagggggagaggccagaccctgtgtgggggacagtgcagtcactccaaaggtccaccctggagacaatgttggaact

SEQ ID NO: 431222 - DNA, 120 bp, Artificial Sequence
  ENSG00000152223_4 (sequence is synthesized)
aaagtagaaacccccaagaacttcacagaggtagaggaaaatatgtcggtacaaggtggactttcagaaagtgcaccccaatctaatttttcttatactcagccagcaatggaaaatata

SEQ ID NO: 431223 - DNA, 120 bp, Artificial Sequence
  ENSG00000152223_5 (sequence is synthesized)
caagtcagagaaactcagaatagtaaagaagacaaacaaggcctggtttgttcttcagaggtgccacagaatgttggcttgcagagttcttgcccagccaaacatggttttcagacacct

SEQ ID NO: 431224 - DNA, 120 bp, Artificial Sequence
  ENSG00000152223_6 (sequence is synthesized)
agagtgaagaaactgtatccccagttgccagctgaaattgctggagaagcaccagctttggtggcagtgaaacccttgcttcgcagtgagcgactctacccagaactcccgtctcaactg

SEQ ID NO: 431225 - DNA, 120 bp, Artificial Sequence
  ENSG00000152223_7 (sequence is synthesized)
gaactagtaccatttactaaagaacagctaaaaatcttggagcctggttcatggctggaaaatgttgagtcatatttagaagaatttgacagcatggctcatcaagacaggcatgaattt

SEQ ID NO: 431226 - DNA, 120 bp, Artificial Sequence
  ENSG00000152223_8 (sequence is synthesized)
tatgagttgcttttgaactactcacgatgtaggaagcaactgctgctggctgaagctgagctgcttactctgacatctgattgccaaaatgctaaaagtcggctgtggcagtttaaggag

SEQ ID NO: 431227 - DNA, 120 bp, Artificial Sequence
  ENSG00000152223_9 (sequence is synthesized)
gaacaaatgtctgtacagggtatctgtgcagatcaagtgaaagttttcagctatcatcgctaccaaagagtagaaatgaatgaaaatgcactggtggagctaaagaagctattcgatgcc

SEQ ID NO: 431228 - DNA, 120 bp, Artificial Sequence
  ENSG00000152223_10 (sequence is synthesized)
aaatctgagcacctccaccagaccctggcccttcattcttatacttctgtgctctcaagattgcaagtggagtcttacatctatgcattgctcagtagttcagctgttctgagatcttca

SEQ ID NO: 431229 - DNA, 120 bp, Artificial Sequence
  ENSG00000152223_11 (sequence is synthesized)
gcaattcaccagcaaggccgagcgtctaagcagacagaaagcattccctctgatctgtgtcaactaaaggaatgcattagtgtcttattcatgttcaccaggagagttaatgaagatact

SEQ ID NO: 431230 - DNA, 120 bp, Artificial Sequence
  ENSG00000152223_12 (sequence is synthesized)
cagtttcatgatgatattcttctctggctgcagaaattggtatccgtgctacaaagagttggctgtcctggagatcacctcttccttctaaaccatattcttcgatgccccgctggtgtt

SEQ ID NO: 431231 - DNA, 120 bp, Artificial Sequence
  ENSG00000152223_13 (sequence is synthesized)
agtaaatgggctgttccttttatccagatcaaagtgttgcataacccatcaggggtctttcattttatgcaatcccttgccctgctgatgtctcctgtcaaaaatcgagctgagtttatg

SEQ ID NO: 431232 - DNA, 120 bp, Artificial Sequence
  ENSG00000152223_14 (sequence is synthesized)
tgccacatgaagcccagcgagcggaagccatcctcctcagggcctgggtctgggacttggacgctagtagacgaaggaggagaagaggatgaagaccctgagaccagttggattctcctt

SEQ ID NO: 431233 - DNA, 120 bp, Artificial Sequence
  ENSG00000152223_15 (sequence is synthesized)
aatgaagatgatttggttaccattttagcacagttcccctttcatgaactctttcagcatcttcttgggtttaaagcaaaaggtgattatttacctgaaacaacaagacctcaagagatg

SEQ ID NO: 431234 - DNA, 120 bp, Artificial Sequence
  ENSG00000152223_16 (sequence is synthesized)
atgaaaatttttgcctttgccaactcactagtggaacttctggctgtggggttagaaacctttaatagagcacgctataggcagtttgtgaagcgaattggttatatgatcaggatgact

SEQ ID NO: 431235 - DNA, 120 bp, Artificial Sequence
  ENSG00000152223_17 (sequence is synthesized)
cttggttatgtaagtgaccattgggcacagtatgtgagccataaccaaggctcaggattggcccaacagccctactctatggagaaactacaggttgaatttgatgaactgtttttgagg

SEQ ID NO: 431236 - DNA, 120 bp, Artificial Sequence
  ENSG00000152223_18 (sequence is synthesized)
gctgtcctacatgtgctgaaggccaaaagacttggcatttggctgtttatgtccgagatgccctttgggactctgtctgtgcaaatgctgtggaagctcttctacctcatgcaccaggtg

SEQ ID NO: 431237 - DNA, 120 bp, Artificial Sequence
  ENSG00000152223_19 (sequence is synthesized)
gagagcgagaacctgcagcagctctcctcctccctgcagcccgcccagtgcaagcagcagctccaagacccagaacattttaccaactttgagaagtgtctttcttctatgaatagctca

SEQ ID NO: 431238 - DNA, 120 bp, Artificial Sequence
  ENSG00000152223_20 (sequence is synthesized)
gaagagatttgccttctgactacctttgctcagatggctcaggccagaagaaccaatgtggacgaagacttcataaaaattattgttctggagatatatgaggtatcttatgtcaccttg

SEQ ID NO: 431239 - DNA, 120 bp, Artificial Sequence
  ENSG00000152223_21 (sequence is synthesized)
tctaccagagagactttttcaaaggttggtcgagagcttttagggactatcacagctgttcaccctgagataatttccgtccttctggatagagttcaagagaccattgaccaggttgga

SEQ ID NO: 431240 - DNA, 120 bp, Artificial Sequence
  ENSG00000152223_22 (sequence is synthesized)
atggtttctctatacttgtttaaagaactgcctttgtatctttggcaaccttctgcatctgagatagcggtgattcgggattggttattgaattacaacctgacagtggtgaagaataaa

SEQ ID NO: 431241 - DNA, 120 bp, Artificial Sequence
  ENSG00000152223_23 (sequence is synthesized)
ctggcctgtgttattcttgaaggactgaattggggatttgctaaacaggctacccttcatctggatcaagcagtccatgctgaagtggctttaatggttcttgaagcttatcagaagtac

SEQ ID NO: 431242 - DNA, 120 bp, Artificial Sequence
  ENSG00000152223_24 (sequence is synthesized)
cttgcacagaagccatatgctgggattctctctgaaagtatgaagcaggtttcatatttggccagtattgttcgatatggagagacacccgagacctcatttaaccaatgggcctggaat

SEQ ID NO: 431243 - DNA, 120 bp, Artificial Sequence
  ENSG00000152223_25 (sequence is synthesized)
ttaatcttgaggctaaaactgcacaaaaacgattatggaatacagccgaattgtccagctgttcccttctccgtcactgtgcctgacatgacagagtcacccacgtttcatcctctcttg

SEQ ID NO: 431244 - DNA, 120 bp, Artificial Sequence
  ENSG00000152223_26 (sequence is synthesized)
aaggctgtgaaagcgggcatgcccattggctgttatctagccttatctatgacagctgtgggccacagcattgagaagttctgtgcagaaggcatcccactattgggaattctggtccag

SEQ ID NO: 431245 - DNA, 120 bp, Artificial Sequence
  ENSG00000152223_27 (sequence is synthesized)
tcaagacatttgagaacagtggttcatgtcctggataagattctgcctttattttacccttgccagtattaccttctgaagaatgagcagtttttatcgcatctcctcttgttcctacac

SEQ ID NO: 431246 - DNA, 120 bp, Artificial Sequence
  ENSG00000152223_28 (sequence is synthesized)
ttggacagcggtgtccctcagggtgtcacacaacaggtcacccacaaggtggcacagcacctgacaggagccagccatggggacaacgtgaagcttctcaacagcatgatccaggcacac

SEQ ID NO: 431247 - DNA, 120 bp, Artificial Sequence
  ENSG00000152223_29 (sequence is synthesized)
atatctgtaagcactcagcccaatgaagtgggccccgttgctgtgttggagttctgggttcaggctctcataagccagcatctctggtaccgagaacaacctatcctcttcctcatggac

SEQ ID NO: 431248 - DNA, 120 bp, Artificial Sequence
  ENSG00000152223_30 (sequence is synthesized)
cacttgtgtaaagcagcttttcagctgatgcaggaagactgcatacagaaattactctaccaacaacataagaatgccttgggttaccactgtgaccggagtctgctctcatctttggta

SEQ ID NO: 431249 - DNA, 120 bp, Artificial Sequence
  ENSG00000152223_31 (sequence is synthesized)
agctggattgtggcaggcaacatcactccttcctttgtggagggcttggccacgcccactcaggtctggtttgcctggacagtgctcaacatggaatccatctttgaagaggactcccag

SEQ ID NO: 431250 - DNA, 120 bp, Artificial Sequence
  ENSG00000152223_32 (sequence is synthesized)
ctccggagagttattgaaggggaattggtgataaactctgctttcacccctgaccaagctctgaagaaagcccagacccagctgaagctccccatcgtgccatccctccagaggctgctg

SEQ ID NO: 431251 - DNA, 120 bp, Artificial Sequence
  ENSG00000152223_33 (sequence is synthesized)
atttatcgctgggcccaccaggctctggtcacaccttctgatcaccccctcctgccactcatttggcagaagttcttccttctgtatcttcaccgtccgggaccacagtatgggttaccc

SEQ ID NO: 431252 - DNA, 120 bp, Artificial Sequence
  ENSG00000152223_34 (sequence is synthesized)
atagatggttgtattggaagaaggttttttcaaagtcctgctcatatcaatttgttgaaagaaatgaagagacgtttgaccgaggtggctgacttccaccatgctgcaagcaaggccctc

SEQ ID NO: 431253 - DNA, 120 bp, Artificial Sequence
  ENSG00000152223_35 (sequence is synthesized)
cgtgttccagcagagggcagtgaagggctgccagagagccactctggcacccctggttacctgacttcaccagaactgcacaaggagctggtgaggctcttcaatgtatatatattatgg

SEQ ID NO: 431254 - DNA, 120 bp, Artificial Sequence
  ENSG00000152223_36 (sequence is synthesized)
ctagaagatgagaattttcaaaaaggagatacctatatcccttctctaccaaagcattatgatattcacaggctagcaaaagtgatgcagaatcagcaggatctgtggatggagtatttg

SEQ ID NO: 431255 - DNA, 120 bp, Artificial Sequence
  ENSG00000152223_37 (sequence is synthesized)
aacatggagcgcatctatcatgagtttcaggagactgttggtctgtggacacaggccaagcttgagtcccattccacaccctgcagtttgtccgtgcagctggacttcactgatcctttg

SEQ ID NO: 431256 - DNA, 120 bp, Artificial Sequence
  ENSG00000152223_38 (sequence is synthesized)
ctggctaaagaaagggttttaagtaacttgcggaagcatgaggctccccagcctccccttgctctgcacccgacgaagcctcctgtgccagttatttcctctgctgtgctattgagtcag

SEQ ID NO: 431257 - DNA, 120 bp, Artificial Sequence
  ENSG00000152223_39 (sequence is synthesized)
aaggacgccacccagctggtgtgcacagacctgaatctgttgcaacagcaggccagaaccgcagctcttcgggaatctcagcaggttgctctggatggtgagctgttagacacaatgcca

SEQ ID NO: 431258 - DNA, 120 bp, Artificial Sequence
  ENSG00000152223_40 (sequence is synthesized)
aagcagtatgtgaatcgtgaagaacagaccacactacatttggagtgcagaggcagcagcggtaagaaatgccaaggagccgcagttgtcacggttcagtttgaaggcatgcataagaat

SEQ ID NO: 431259 - DNA, 120 bp, Artificial Sequence
  ENSG00000152223_41 (sequence is synthesized)
gaagccataagccaacagcttcatgttttacggaaggaagtgaagcagttgcaagcagaagctgctaaaccaccatcacttaatattgtggaagctgctgtacatgcagaaaacttgatc

SEQ ID NO: 431260 - DNA, 120 bp, Artificial Sequence
  ENSG00000152223_42 (sequence is synthesized)
acggccttagtgaatgcctacaagttgcagcctacacctgggattcagaaagttggcattagccttttctttactattgtggattacgtcagcgatgagacgcagcgtcatcccccaaca

SEQ ID NO: 431261 - DNA, 120 bp, Artificial Sequence
  ENSG00000152223_43 (sequence is synthesized)
aggcagttctttacttcatgtattgagatcttgggacaggtatttatcagtggcattaaatcagagtgcagaaaagtacttgaaaccattctgaagaacagcaggctctgctccctgctg

SEQ ID NO: 431262 - DNA, 120 bp, Artificial Sequence
  ENSG00000152223_44 (sequence is synthesized)
tctcctttcttcactcccaatgctgcacctgcagagttcatacagctgtatgagcaagtggtgaagtttctaagtgaggacaacagtgatatgattttcatgctgctaaccaagttcgat

SEQ ID NO: 431263 - DNA, 120 bp, Artificial Sequence
  ENSG00000152223_45 (sequence is synthesized)
cttaaacaatggttaagcgccactaaacctcctctgtctgatcgtaccaggcttctggagtccattcacttggcacttactgcctggggccttgaaccagatgaggatattttgatgcca

SEQ ID NO: 431264 - DNA, 120 bp, Artificial Sequence
  ENSG00000152223_46 (sequence is synthesized)
tttaatcttttctgtaagcactggacttatcttcttctctaccagtttcctgaccagtacagtgacattctcaggctgcttatgcaaagctccgcggagcagcttctgagccccgagtgt

SEQ ID NO: 431265 - DNA, 120 bp, Artificial Sequence
  ENSG00000152223_47 (sequence is synthesized)
tggaaggccactctgagagccctgggctgctgcgcccccagctgccagcagggggcagcgtccaccgagggcgccgtgcttcccagctcttctgatgctctcttgtcagacaagcaggta

SEQ ID NO: 431266 - DNA, 120 bp, Artificial Sequence
  ENSG00000152223_48 (sequence is synthesized)
atggagactatacagtggctttcagactttttttataagcttcggttatccaagatggactttaaaagctttggtttattctcaaaatggagtccttatatggctgatgtgaagacattc

SEQ ID NO: 431267 - DNA, 120 bp, Artificial Sequence
  ENSG00000152223_49 (sequence is synthesized)
ttgggctaccttgtgaaaaggctgattgacttagaaatgacctgtttggcccaagacccaactgccagcaggaaaacagtgctgaaatccctacattcagtaatcattcagctctttaag

SEQ ID NO: 431268 - DNA, 120 bp, Artificial Sequence
  ENSG00000152223_50 (sequence is synthesized)
ccatggatcctggttttagaggacaacgaaagcagccaacagcggcattacccctggctagagagtgatactgtggtggcctcaagcattgtgcagctgttcactgactgtattgactca

SEQ ID NO: 431269 - DNA, 120 bp, Artificial Sequence
  ENSG00000152223_51 (sequence is synthesized)
ctgcatgagagttttaaagataagctgttgccaggtgatgcaggagccctttggttgcacctgatgcattattgtgaagcatgtacagcacccaaaatgccagagttcattctgtacgct

SEQ ID NO: 431270 - DNA, 120 bp, Artificial Sequence
  ENSG00000152223_52 (sequence is synthesized)
gccccaagagctgtttcttatttttggggtctgtactctgtgaagtcaactgggttagtgtgctctctgatgcctggaattccagtccccacccagaaacccgcagcatgattgtctgcc

SEQ ID NO: 431271 - DNA, 120 bp, Artificial Sequence
  ENSG00000152223_53 (sequence is synthesized)
tccttttcatgatgattttattggcaaaggaagttcaactggtagaccaaacagattcacctttacttagtctccttggacagacaagctcactttcatggcatcttgtggatattgtgt

SEQ ID NO: 431272 - DNA, 120 bp, Artificial Sequence
  ENSG00000152223_54 (sequence is synthesized)
cgtaccagagtgtgctaagttatttcagcagccattacccgccgtccatcatcctggcaaaagaatcttatgctgaattaatcatgaagctcctaaaagtgtctgcgggcctttctattc

SEQ ID NO: 431273 - DNA, 120 bp, Artificial Sequence
  ENSG00000152223_55 (sequence is synthesized)
ctactgacagccagaagcatcttgatgcagttccaaaatgccaagcttttactcatcagatggttcaattcctcagcaccctggaacaaaatggaaaaatcaccttagcagtcctagaac

SEQ ID NO: 431274 - DNA, 120 bp, Artificial Sequence
  ENSG00000152223_56 (sequence is synthesized)
aggaaatgtctaagctcttagacgatatcattgtctttaacccgcccgacatggacagccagacccgccacatggccctcagcagcctctttatggaagtcctgatgatgatgaacaacg

SEQ ID NO: 431275 - DNA, 120 bp, Artificial Sequence
  ENSG00000152223_57 (sequence is synthesized)
cgactattccaacagcagagttccttcggggcagtatccggacctggattggccaaaaaatgcatgggctggtggtgctgccccttttaacagcagcctgccagagcctggcgtccgtcc

SEQ ID NO: 431276 - DNA, 120 bp, Artificial Sequence
  ENSG00000152223_58 (sequence is synthesized)
gccacatggctgagactacagaagcctgcatcactgcctacttcaaagaaagccctctcaatcagaattcaggatggggacccattctggtatcccttcaggttcccgagctcaccatgg

SEQ ID NO: 431277 - DNA, 120 bp, Artificial Sequence
  ENSG00000152223_59 (sequence is synthesized)
aagagttcctgcaggagtgcctcaccttgggcagttacttgactctttacgtctacttgcttcagtgtttaaacagcgaacagactttaaggaatgaaatgaaagtgctgctcatcttaa

SEQ ID NO: 431278 - DNA, 120 bp, Artificial Sequence
  ENSG00000152223_60 (sequence is synthesized)
gcaagtggctggaacaggtgtacccaagctccgtggaggaagaggcaaagctgtttttgtggtggcaccaagtccttcagctctccctcattcagacagagcagaatgactccgtcctga

SEQ ID NO: 431279 - DNA, 120 bp, Artificial Sequence
  ENSG00000152223_61 (sequence is synthesized)
cagaatctgtcattcgaattctgctcttggttcagagcaggcagaacctcgtggctgaggagagactcagctctgggatcctgggggcaattgggtttggccggaagtcgcctttgtcta

SEQ ID NO: 431280 - DNA, 120 bp, Artificial Sequence
  ENSG00000152223_62 (sequence is synthesized)
acaggttccgagtggttgcccgaagcatggctgccttcctttcagttcaggttcctatggaagatcagatccgtttgaggcctggctctgaattacatctgacccccaaagctcagcagg

SEQ ID NO: 431281 - DNA, 120 bp, Artificial Sequence
  ENSG00000152223_63 (sequence is synthesized)
ctctgaatgctcttgaatccatggcatcaagtaagcagtatgttgaataccaggatcaaatattgcaagccacccaatttataaggcatcctggccattgccttcaagatgggaaaagct

SEQ ID NO: 431282 - DNA, 120 bp, Artificial Sequence
  ENSG00000152223_64 (sequence is synthesized)
tcttggctcttctcgttaactgtctgtatccagaagtgcattatttggaccacatacgatagttaacactgaggctcttgaaaaacccattgctgtttatgtttacatttaactttgctg

SEQ ID NO: 431283 - DNA, 120 bp, Artificial Sequence
  ENSG00000152223_65 (sequence is synthesized)
ttgcacaagtaactttgctcaattgcactgtagagctcagtttggccaatgtgtagttgactgagatgcaagttgggaggcgttagatattagataattttggggtgtgtgtgtgtgtgt

SEQ ID NO: 431284 - DNA, 120 bp, Artificial Sequence
  ENSG00000152223_66 (sequence is synthesized)
gtgtgtgttttcttagctcttaagaccttctggggactctttaagtttttatatttatccacaagagaaacttactaagttccacttgggtgcagagccactcacagttgccgaatgtcc

SEQ ID NO: 431285 - DNA, 120 bp, Artificial Sequence
  ENSG00000152223_67 (sequence is synthesized)
cagtcatctcacaagacctccagatggagttctttgtatgtttccacttctgtctctgttttatgtaaatgttccagatctgacaaccttggaagtcactcagtacccttacttttaaac

SEQ ID NO: 431286 - DNA, 120 bp, Artificial Sequence
  ENSG00000152223_68 (sequence is synthesized)
cccatttgtgttcctccaaagtaaagaagtcaattttgaaaaatttctgcatttctcaaatgtggacaaatacaatagttttaaagtattgtttttctcagaagggagataaaaatgccg

SEQ ID NO: 431287 - DNA, 120 bp, Artificial Sequence
  ENSG00000152223_69 (sequence is synthesized)
agttagttaaagtgggtcatgtgtaaaatacgaccacttgatcgtgattatagtgggcagtagagatgatgacaagtcaatttccatccagccgtgtatcctcatggagaagctgcctgt

SEQ ID NO: 431288 - DNA, 120 bp, Artificial Sequence
  ENSG00000152223_70 (sequence is synthesized)
ctgaatcaggatggcaagctggcagtctgggaggagcatgttttgcacagatgttttgtttggtccacttggtgaggagtgcagacagggctgcctctctctagtcgggagagtctgtgc

SEQ ID NO: 431289 - DNA, 120 bp, Artificial Sequence
  ENSG00000152223_71 (sequence is synthesized)
attccctcgggccctgaccctagcctcattcacatcacttgcccctgtcgacacctaagtttgcaccctttgatagacaccatgttcgatatctgaaaggctcagtgtcaggagacagag

SEQ ID NO: 431290 - DNA, 120 bp, Artificial Sequence
  ENSG00000152223_72 (sequence is synthesized)
actgagggagactgaagacctgattctctgttccctgcttgttttttaacttcaaactcagatgaagccaatggacctgctgaaacacttgtctgtggaaactgggtcaggtcgggagat

SEQ ID NO: 431291 - DNA, 120 bp, Artificial Sequence
  ENSG00000152223_73 (sequence is synthesized)
ctactgaaatttggctttttttccatagccacgtgccttctgttgttgacagttcattcattaccaaagcctgtgtgtaactttgccttgttctgtggccatcttcttgctcatgttatt

SEQ ID NO: 431292 - DNA, 120 bp, Artificial Sequence
  ENSG00000152223_74 (sequence is synthesized)
tctcctgggaatgagcagtttgacttctgttcccacgttcctcattctatcagctctagatggattttgcctgcatagctggcttaatatgtctttgtgtatgggtagtctgtagcctga

SEQ ID NO: 431293 - DNA, 120 bp, Artificial Sequence
  ENSG00000152223_75 (sequence is synthesized)
gaatatttacctaaaaatgtctaaacagccaccaagaatgtttataggggtataggaatatagttaacagagtgctaatctctcctcaaatgtccttttggaatgcttcccccaaaattg

SEQ ID NO: 431294 - DNA, 120 bp, Artificial Sequence
  ENSG00000152223_76 (sequence is synthesized)
ggaagttggtaggagcttttctttactttgaatttctttacttggacagaacgattctgccttaaagacacgctttgcagctctgataaagaacatccctgtttagtctcttgagtttta

SEQ ID NO: 431295 - DNA, 120 bp, Artificial Sequence
  ENSG00000152223_77 (sequence is synthesized)
caggccacaaaatgtccgtctcagagggatctgtctcagcttttcttatttttgcttctctccgttttcaaaattaatcatcttgttctctgtataagaaaatttgagaagctgtggaca

SEQ ID NO: 431296 - DNA, 120 bp, Artificial Sequence
  ENSG00000152223_78 (sequence is synthesized)
atttaatagtctgatctggcaacagcgatttttgtttggaaatattttgtgttttctttgaggaggatataattactgatatcctaggatgtgaaatttttgagtgacagtatgcacatt

SEQ ID NO: 431297 - DNA, 120 bp, Artificial Sequence
  ENSG00000152223_79 (sequence is synthesized)
agaaaattatgattaatctgtataatgttttttggtctgtaaaaattataaaaaataaaatcatttatctttggttgtaactgtttaaaaaccaaattatagggatatcacactatcttg

SEQ ID NO: 431298 - DNA, 120 bp, Artificial Sequence
  ENSG00000152223_80 (sequence is synthesized)
cttgtaaagtgtttcagctgttaaagttgctgtaggtttttatgcctgatgtcatttaatttatttgacattgaacttcattaataatcagagatggtcagtgaaagcgcttcctcttta

SEQ ID NO: 431299 - DNA, 120 bp, Artificial Sequence
  ENSG00000152223_81 (sequence is synthesized)
actctttcttgcttaaccttggaaggttgactcaactcctaggtgtctatgggaaactctgggctaggaacgtgctataaagacactgagctagttcagacatggccatgctgctgtagc

SEQ ID NO: 431300 - DNA, 120 bp, Artificial Sequence
  ENSG00000152223_82 (sequence is synthesized)
ctcctgggaaagaagggcggcagagagaccagcccgcctgttggcttgcaggggtaatgagccttggcttgaaaaaattgttggcctccagagagcacggggctgtggtttcagaatcag

SEQ ID NO: 431301 - DNA, 120 bp, Artificial Sequence
  ENSG00000152223_83 (sequence is synthesized)
tgatgggtgccgcacatcaagacgggaatcaagcaagaccaaggccctgtggactgagcagcgtggagggcgaacggctgcaggctccagacttcaccacagggtggccaacagtggcat

SEQ ID NO: 431302 - DNA, 120 bp, Artificial Sequence
  ENSG00000152223_84 (sequence is synthesized)
cgggaccaaataaagatgtctaacagcttcctgggagcaggaggaggcaggattctggttgccatgaaaaacatctctctccctctccatcactccccatgctgcagtgcacaggtgggt

SEQ ID NO: 431303 - DNA, 120 bp, Artificial Sequence
  ENSG00000152223_85 (sequence is synthesized)
tgcagaggcaggctgcatcccggaatcatgttgtcccactgcctattaatagaacaagtgaagggcagaatgctggaacacaccagacatagagggagggaggtcctgccagatgtgtct

SEQ ID NO: 431304 - DNA, 120 bp, Artificial Sequence
  ENSG00000152223_86 (sequence is synthesized)
acacaactgtctacatagcatgacagtagcagtggattcgggacccacctgtacatgtttccaaagctccttcctgcacactcgggacctcagctccaaggcgtgactcatttctcagtc

SEQ ID NO: 431305 - DNA, 120 bp, Artificial Sequence
  ENSG00000152223_87 (sequence is synthesized)
tcaccatcctttgttggctcagacatcgcatgcctctgccccactggggttgtgtgcctgcgtctctcacttctttgaggttggggaaagcctagtccagaaaatgaaaacccatagacc

SEQ ID NO: 431306 - DNA, 120 bp, Artificial Sequence
  ENSG00000152223_88 (sequence is synthesized)
agcctaacttcctttcaaccaagtgacggcctcctggttcctctcagttcatcatcaaaatcagtgtgtacatgtcatacaagccaagagtgttcatgtcctcgttcctttcaaatgaag

SEQ ID NO: 431307 - DNA, 120 bp, Artificial Sequence
  ENSG00000152223_89 (sequence is synthesized)
gtgatatatactttttcactgagtttttattcctgaaattctttcttctggagcaggaagcaaatgtcctggaatcgtagacttttacagtcagaagggtcattcacgttcatctagtgc

SEQ ID NO: 431308 - DNA, 120 bp, Artificial Sequence
  ENSG00000152223_90 (sequence is synthesized)
ccctctcactctgcagggatcctcctgcctctcctctgcccctgtccagtgcctggtggtccagcctgtgatgggcaggcctaggctgccatccgcaggctctgtagttctgctttctat

SEQ ID NO: 431309 - DNA, 120 bp, Artificial Sequence
  ENSG00000152223_91 (sequence is synthesized)
tgaaccaagatgtttctacgttgcctattggtcgtggttctgtccagagcagttcaggctggggctgttcacttgcccctccttgaggcagacctttagatattttcagttttcatcaca

SEQ ID NO: 431310 - DNA, 120 bp, Artificial Sequence
  ENSG00000152223_92 (sequence is synthesized)
tagatattttcagttttcatcacatgtctaacaccacttccaccccacccctcacctcttaggctaaatccaagctaaatcccccaatgtcttttttttttttttttttttgagacgagt

SEQ ID NO: 431311 - DNA, 80 bp, Artificial Sequence
  ENSG00000152223_93 (sequence is synthesized)
gtattttttagtagagacagggtttcacccagccattgagacaagctggtttcaaactcctgaccttgtggtccgcccgc

SEQ ID NO: 431312 - DNA, 120 bp, Artificial Sequence
  ENSG00000152223_94 (sequence is synthesized)
cccatctcccctgcaatgtctttagttagaccttttccaccatcatgtctaactgggctacggtttggggaaagtgtccaaattagtccgtgttatcctaaaaggggtgtgccccggatt

SEQ ID NO: 431313 - DNA, 120 bp, Artificial Sequence
  ENSG00000152223_95 (sequence is synthesized)
agcagggccagggctagggtgagacaaatgaggcacctggggcatacatttaagttggtgcttgcttgcaggtgccaagagagtgcttccttgggtttacccccgtggtgcctcctttac

SEQ ID NO: 431314 - DNA, 120 bp, Artificial Sequence
  ENSG00000152223_96 (sequence is synthesized)
ctcattctggccccagccctggggttagagtcgcaccagtgtggtccaagtggcataattatctccctaaatgcttgggcagcatcagctttcagtagctgtgccccatgggaggcacat

SEQ ID NO: 431315 - DNA, 120 bp, Artificial Sequence
  ENSG00000152223_97 (sequence is synthesized)
taagctagtggcaagttgagactgcagacctcagcttaatatcagttgttgcccaagacagatctcaccccacatcttcatgacaggcctaacaacaaggcactttgcccttaatcctct

SEQ ID NO: 431316 - DNA, 120 bp, Artificial Sequence
  ENSG00000152223_98 (sequence is synthesized)
actactgcctgctcttcattttgggccaactgtacagctcattttgagatagtagctgatcatttttctgatcagttaactttgtcttattaagcaaaatggagaatataatgttgggaa

SEQ ID NO: 431317 - DNA, 120 bp, Artificial Sequence
  ENSG00000152223_99 (sequence is synthesized)
ataagtgtgttgattaaaagaaagtatccccttctaccatcttccatttgtgtctgggttgtgctgggtaaagttctagacttactaacgcagacttcattttggtccggtttccacagc

SEQ ID NO: 431318 - DNA, 120 bp, Artificial Sequence
  ENSG00000152223_100 (sequence is synthesized)
atgcctcgggcatcagtgtccaggagtagctgtatttgaggtttccttcactctggtaggttcctgattcctgatgaaaataacttgaaaaaaaaataattatactactgatcctctttt

SEQ ID NO: 431319 - DNA, 120 bp, Artificial Sequence
  ENSG00000152223_101 (sequence is synthesized)
gggataatgaaattgcgaaggaatgttgttgattataacttttattttttaatgtacagatgtactgtctctcattgagcactgatagaatttatttttctttcaatagtttaaaatcac

SEQ ID NO: 431320 - DNA, 120 bp, Artificial Sequence
  ENSG00000152223_102 (sequence is synthesized)
ttatgtggagacacatacttaagtgtgttcaactcgttttcttcccacatatctagtgtgacctttaaaaaccacaactttattttggacattaaatgtgcaatattcactacttattca

SEQ ID NO: 431321 - DNA, 120 bp, Artificial Sequence
  ENSG00000152223_103 (sequence is synthesized)
ttgttccacatttttcatacttgtacaaagggtaagtttttatataatggtgagaaacaggaagaaatgacaactggttaagtaaaattctgcaaataaactagattcgaatttaattta

SEQ ID NO: 431322 - DNA, 120 bp, Artificial Sequence
  ENSG00000152223_104 (sequence is synthesized)
agggctgcagtcttttgagtattgaccccagcaccaggatgggatttaggaaactctaagagttgaaacactttcatttggatccttaaaccctcctactttcacatcatgtgtatattt

SEQ ID NO: 431323 - DNA, 120 bp, Artificial Sequence
  ENSG00000152223_105 (sequence is synthesized)
tgtgtgtcgtggatctgttcttaatacctctgtgggtagatagaattccttttaacccatgttaaatgtgaaaactttattcttctagaatcccttcttaaatagtgctttggtcgaaaa

SEQ ID NO: 431324 - DNA, 120 bp, Artificial Sequence
  ENSG00000152223_106 (sequence is synthesized)
atgggaccaatttaggaattttctgtttcctcataagtaattagggaaaattctgttgagttctgatcggaaggtaaagtgcgtcctcctgtgtgcttggcaggtttttatcgcatctcc

SEQ ID NO: 431325 - DNA, 120 bp, Artificial Sequence
  ENSG00000152223_107 (sequence is synthesized)
agcgcctttctaacactgttgttctaaataggcctcagacatctgtacctacttacaggttgtgatatacttcagtaggtttttcgacttaggatctaggttctccagaaagattaatgg

SEQ ID NO: 431326 - DNA, 120 bp, Artificial Sequence
  ENSG00000152223_108 (sequence is synthesized)
agtggtggaagacatgggatgtgtttttgatgaggatttcaggagttgaaacataagtgaaatagtatcctacaaaaggctttgaactattgataaattaattcaagatcttaccagttt

SEQ ID NO: 431327 - DNA, 120 bp, Artificial Sequence
  ENSG00000152223_109 (sequence is synthesized)
tgtggtggtagcacagtgttccctttcatgtgccctacttacgggaaaatggtttcatgtgccaacctccaaatttttgtaggcagttgtctagatcgctgctactgtcattgtagaaaa

SEQ ID NO: 431328 - DNA, 120 bp, Artificial Sequence
  ENSG00000152229_0 (sequence is synthesized)
agtggcagtcaggcctccccgctctgtgctacctgcggcccggctctcctccgcgcccccactcgcgctgcgatgacgcgctcactgttcaagggaaacttttggagtgcagacatcctc

SEQ ID NO: 431329 - DNA, 120 bp, Artificial Sequence
  ENSG00000152229_1 (sequence is synthesized)
agcaccatcggctatgacaacattatccaacatctgaacaatggccgcaagaactgcaaagagtttgaagactttctaaaagaaagggcagcaattgaagagaggtatggcaaagatctg

SEQ ID NO: 431330 - DNA, 120 bp, Artificial Sequence
  ENSG00000152229_2 (sequence is synthesized)
ctcaacctctctaggaagaagccgtgtggacagtctgaaatcaacaccctgaagcgggcccttgaagtcttcaagcagcaagtagacaatgtggcacaatgtcacattcagcttgcacag

SEQ ID NO: 431331 - DNA, 120 bp, Artificial Sequence
  ENSG00000152229_3 (sequence is synthesized)
agtttaagagaagaggccaggaagatggaagaattcagggaaaagcaaaaactacaacgaaaaaagacagagctcataatggatgctatccataaacaaaagagcttacaattcaagaaa

SEQ ID NO: 431332 - DNA, 120 bp, Artificial Sequence
  ENSG00000152229_4 (sequence is synthesized)
accatggatgcaaagaagaactatgagcagaaatgccgggacaaagatgaggcagaacaggccgtcagccggagtgccaacctggtgaacccgaagcaacaagaaaagctttttgtgaaa

SEQ ID NO: 431333 - DNA, 120 bp, Artificial Sequence
  ENSG00000152229_5 (sequence is synthesized)
ctggcaacttcaaagaccgcagtagaggactcagacaaagcatacatgctgcacatcggcaccctggataaggtccgagaagagtggcagagtgagcacatcaaggcctgcgaggcattt

SEQ ID NO: 431334 - DNA, 120 bp, Artificial Sequence
  ENSG00000152229_6 (sequence is synthesized)
gaggctcaagaatgtgaacgaataaacttcttccggaatgcattgtggttacatgtgaatcagctgtcacaacaatgtgtcaccagtgatgaaatgtacgaacaagtccgaaagagttta

SEQ ID NO: 431335 - DNA, 120 bp, Artificial Sequence
  ENSG00000152229_7 (sequence is synthesized)
gaaatgtgcagcattcagagggacattgaatactttgtgaatcaacgcaaaactggacagattccaccagcacccatcatgtatgagaatttctactcctcccagaagaatgcagtccca

SEQ ID NO: 431336 - DNA, 120 bp, Artificial Sequence
  ENSG00000152229_8 (sequence is synthesized)
gcaggaaaggctacagggcctaacttggcaaggagaggacccctcccaattcctaaaagctcaccagatgatcccaattactctttggttgatgactacagtttgctctatcagtaaaat

SEQ ID NO: 431337 - DNA, 120 bp, Artificial Sequence
  ENSG00000152229_9 (sequence is synthesized)
caatgaaaccagagctttttccggctagtgcttctgtgatatggaaagggcacccagagcagcaggacctatagccacgttatgtcagcaatgaagactttgaagtgaacccttgctata

SEQ ID NO: 431338 - DNA, 120 bp, Artificial Sequence
  ENSG00000152229_10 (sequence is synthesized)
attttttagagatttaaaatttatggtagacatttaggacaacataagcaagtagagttctgcagttttttgaagtttacaaattgccccattctgaagaattattctttcccagttact

SEQ ID NO: 431339 - DNA, 120 bp, Artificial Sequence
  ENSG00000152229_11 (sequence is synthesized)
caggttatgaatgaattaggttttcaacatgggaagcatgaaatccacttctggatttggagcatccacttgaggagcagaggtggcagcagaggattctgagccaccaactgcagtagt

SEQ ID NO: 431340 - DNA, 120 bp, Artificial Sequence
  ENSG00000152229_12 (sequence is synthesized)
ggctcctttggctttgggcagcctggctgtggagtttccacggcgacacacagcctcagtggtgcaagatttaaaattaccttcctttttggctggaagacttagaagccgcctgatcat

SEQ ID NO: 431341 - DNA, 120 bp, Artificial Sequence
  ENSG00000152229_13 (sequence is synthesized)
actttctcattttacagatgaggaaataaagcctacaagtgtgaaattaatttccttacagttttcctagctgatgagggacagaaccagaactagagcctgagcccaacccacatcact

SEQ ID NO: 431342 - DNA, 120 bp, Artificial Sequence
  ENSG00000152229_14 (sequence is synthesized)
attcttctaacccttcctgaagttgtgatgctcatgctgaaatttaagatgccaaatatttttgccagcactttttcagttgggagaatcaccagggtttaaatgtcagatttattttta

SEQ ID NO: 431343 - DNA, 120 bp, Artificial Sequence
  ENSG00000152229_15 (sequence is synthesized)
tgtggatccctgtgtatgctgaactacagagcatgatgtttaatctaatttaaggagccactgattgtaaaacatgccattattttatgttgcactaagaaggtggggtcgaggagttgc

SEQ ID NO: 431344 - DNA, 120 bp, Artificial Sequence
  ENSG00000152229_16 (sequence is synthesized)
caataaacttgggacagactattgatggccaagcccatctgaatttaagatgctaaagtatgaaaaaaatacatcttagaatcaatgaaataccatattttgattccattcctcaagata

SEQ ID NO: 431345 - DNA, 120 bp, Artificial Sequence
  ENSG00000152229_17 (sequence is synthesized)
attttagagttataaaaccagtcctcaattttgggtcttcacagagaatctttcccttgctagaccccagaattttaaatgcatccgtcttacactttcacaaatatttgggttttcctt

SEQ ID NO: 431346 - DNA, 120 bp, Artificial Sequence
  ENSG00000152229_18 (sequence is synthesized)
tttcactcacaaacagcagggaggtcatgtactttttgtacaacacctgtgcactatgagaaaatggtaccttttagttattgacaagttaaaatagcactctcagtttttcagtattac

SEQ ID NO: 431347 - DNA, 120 bp, Artificial Sequence
  ENSG00000152229_19 (sequence is synthesized)
agagagcaaatagtttcctctcctgctctgtgcagtagcttttccagaactatggacaaattgatcagaagaagattgattatttcctcatctttttttcttttttttgagacagagtct

SEQ ID NO: 431348 - DNA, 120 bp, Artificial Sequence
  ENSG00000152229_20 (sequence is synthesized)
ggcgtgagccactgcgcccggcctatttccccacctttcgtgtaaggtgctactgaacatgacagcttcttgtcatgacaggaaacttgcatcagttggatatccttttgagaaactgaa

SEQ ID NO: 431349 - DNA, 120 bp, Artificial Sequence
  ENSG00000152229_21 (sequence is synthesized)
aaactgaattttgcaaagggccaaatttccccaaactgaacgggctcaggaaatgttcctttacactcagaacattctattttaagtatattatttattgttggcagttcctcagggatt

SEQ ID NO: 431350 - DNA, 120 bp, Artificial Sequence
  ENSG00000152229_22 (sequence is synthesized)
tcccttttctctgtattggtcagtgtagttgatgtaaaaccgttttgtggatggaaaatatttttattttattgctcttttagtttggtaggttaaataaaggttcttggtaatttggga

SEQ ID NO: 431351 - DNA, 120 bp, Artificial Sequence
  ENSG00000152229_23 (sequence is synthesized)
tgttcattatactcctcagctcagctcccaccatcatgtaatcatgacctgagaaattacttactggagtccccacatggggactcagtccagatgggtatatgcatttctacaccccag

SEQ ID NO: 431352 - DNA, 120 bp, Artificial Sequence
  ENSG00000152229_24 (sequence is synthesized)
gccagttgtccttttttaaagttcacataggattcagaggtccagcttgcattcctcttcaggtctgctgccgctattcagactatgaatggaaaggggaaccctctgaattcaatagac

SEQ ID NO: 431353 - DNA, 120 bp, Artificial Sequence
  ENSG00000152229_25 (sequence is synthesized)
tctagcacatcccagctggacggctcccaaaaccacactcctcatcctggacaaggcaataggggaagggagaagtagtggaagagactcccgctccccctgaagaccataatgtagtcc

SEQ ID NO: 431354 - DNA, 120 bp, Artificial Sequence
  ENSG00000152229_26 (sequence is synthesized)
atgagaaaaggatcataactcctatcctatcattggagaaaatgaaacacaaagagttttggcatgttgctctccccaaatgaacagtgaagaatttcttgtgcctgggattgaggaaac

SEQ ID NO: 431355 - DNA, 120 bp, Artificial Sequence
  ENSG00000152229_27 (sequence is synthesized)
tggacttaagaagtcttggtcttttgctgtctctctagctcatgggcaaaaattggtctgtagtttctaagttaagatatgggcagagagaagcatgcaaaggcattataataagattgt

SEQ ID NO: 431356 - DNA, 120 bp, Artificial Sequence
  ENSG00000152229_28 (sequence is synthesized)
tttctggttgcagggctagctagatacctggaattttccttgaaggaactgaaacatgttctttcatctccagggtgggggtggagaagcctgacaggctcctaagtgggtccctgcgcc

SEQ ID NO: 431357 - DNA, 120 bp, Artificial Sequence
  ENSG00000152229_29 (sequence is synthesized)
ctcagttagaacattggtatctgggatcatcattactttttaccctcagaactatttccaagcctgtttgtgttactgtgatattaggatttgtttgcattctttgtgatatgagtttat

SEQ ID NO: 431358 - DNA, 120 bp, Artificial Sequence
  ENSG00000152229_30 (sequence is synthesized)
gagtttcctcagtggtgggggagaagcattctaaattggacaataagtttacagataactgaaggttgacactgtttcttaagtcacagctagccaaaatgaatggtccttttccttgca

SEQ ID NO: 431359 - DNA, 120 bp, Artificial Sequence
  ENSG00000152234_0 (sequence is synthesized)
tctggcattgcaagcctcgcttcgttgccacttcccagctcttcccgccttccgcggtataatcaacactacgagagatagagccgcctagaaccagtccggaggctgcggctgcagaag

SEQ ID NO: 431360 - DNA, 120 bp, Artificial Sequence
  ENSG00000152234_1 (sequence is synthesized)
taccgcctgcggagtaactgcaaagatgctgtccgtgcgcgttgctgcggccgtggtccgcgcccttcctcggcgggccggactggtctccagaaatgctttgggttcatctttcattgc

SEQ ID NO: 431361 - DNA, 120 bp, Artificial Sequence
  ENSG00000152234_2 (sequence is synthesized)
tgcaaggaacttccatgcctctaacactcatcttcaaaagactgggactgctgagatgtcctctattcttgaagagcgtattcttggagctgatacctctgttgatcttgaagaaactgg

SEQ ID NO: 431362 - DNA, 120 bp, Artificial Sequence
  ENSG00000152234_3 (sequence is synthesized)
gcgtgtcttaagtattggtgatggtattgcccgcgtacatgggctgaggaatgttcaagcagaagaaatggtagagttttcttcaggcttaaagggtatgtccttgaacttggaacctga

SEQ ID NO: 431363 - DNA, 120 bp, Artificial Sequence
  ENSG00000152234_4 (sequence is synthesized)
caatgttggtgttgtcgtgtttggaaatgataaactaattaaggaaggagatatagtgaagaggacaggagccattgtggacgttccagttggtgaggagctgttgggtcgtgtagttga

SEQ ID NO: 431364 - DNA, 120 bp, Artificial Sequence
  ENSG00000152234_5 (sequence is synthesized)
tgcccttggtaatgctattgatggaaagggtccaattggttccaagacgcgtaggcgagttggtctgaaagcccccggtatcattcctcgaatttcagtgcgggaaccaatgcagactgg

SEQ ID NO: 431365 - DNA, 120 bp, Artificial Sequence
  ENSG00000152234_6 (sequence is synthesized)
cattaaggctgtggatagcttggtgccaattggtcgtggtcagcgtgaactgattattggtgaccgacagactgggaaaacctcaattgctattgacacaatcattaaccagaaacgttt

SEQ ID NO: 431366 - DNA, 120 bp, Artificial Sequence
  ENSG00000152234_7 (sequence is synthesized)
caatgatggatctgatgaaaagaagaagctgtactgtatttatgttgctattggtcaaaagagatccactgttgcccagttggtgaagagacttacagatgcagatgccatgaagtacac

SEQ ID NO: 431367 - DNA, 120 bp, Artificial Sequence
  ENSG00000152234_8 (sequence is synthesized)
gatgctgccccacttcagtacctggctccttactctggctgttccatgggagagtattttagagacaatggcaaacatgctttgatcatctatgacgacttatccaaacaggctgttgct

SEQ ID NO: 431368 - DNA, 120 bp, Artificial Sequence
  ENSG00000152234_9 (sequence is synthesized)
taccgtcagatgtctctgttgctccgccgaccccctggtcgtgaggcctatcctggtgatgtgttctacctacactcccggttgctggagagagcagccaaaatgaacgatgcttttggt

SEQ ID NO: 431369 - DNA, 120 bp, Artificial Sequence
  ENSG00000152234_10 (sequence is synthesized)
ggtggctccttgactgctttgccagtcatagaaacacaggctggtgatgtgtctgcttacattccaacaaatgtcatttccatcactgacggacagatcttcttggaaacagaattgttc

SEQ ID NO: 431370 - DNA, 120 bp, Artificial Sequence
  ENSG00000152234_11 (sequence is synthesized)
tacaaaggtatccgccctgcaattaacgttggtctgtctgtatctcgtgtcggatccgctgcccaaaccagggctatgaagcaggtagcaggtaccatgaagctggaattggctcagtat

SEQ ID NO: 431371 - DNA, 120 bp, Artificial Sequence
  ENSG00000152234_12 (sequence is synthesized)
cgtgaggttgctgcttttgcccagttcggttctgacctcgatgctgccactcaacaacttttgagtcgtggcgtgcgtctaactgagttgctgaagcaaggacagtattctcccatggct

SEQ ID NO: 431372 - DNA, 120 bp, Artificial Sequence
  ENSG00000152234_13 (sequence is synthesized)
attgaagaacaagtggctgttatctatgcgggtgtaaggggatatcttgataaactggagcccagcaagattacaaagtttgagaatgctttcttgtctcatgtcgtcagccagcaccaa

SEQ ID NO: 431373 - DNA, 120 bp, Artificial Sequence
  ENSG00000152234_14 (sequence is synthesized)
gccttgttgggcactatcagggctgatggaaagatctcagaacaatcagatgcaaagctgaaagagattgtaacaaatttcttggctggatttgaagcttaaactcctgtggattcacat

SEQ ID NO: 431374 - DNA, 120 bp, Artificial Sequence
  ENSG00000152234_15 (sequence is synthesized)
caaataccagttcagttttgtcattgttctagtaaattagttccatttgtaaaagggttactctcatactccttatgtacagaaatcacatgaaaaataaaggttccataatgcatagtt

SEQ ID NO: 431375 - DNA, 120 bp, Artificial Sequence
  ENSG00000152234_16 (sequence is synthesized)
atcaaattgagaaattggtaagcaaatgcttcttgatctattttacttgaatattggtacagtcaactgggctagataattcaaggctgagctctttgtaagttttttttttgttttttt

SEQ ID NO: 431376 - DNA, 120 bp, Artificial Sequence
  ENSG00000152234_17 (sequence is synthesized)
ttttttttgtttttttttttgagactgattctcactctgtcactgaggctggagtgcagtggcaccctgtcggcccactgcaacctccgtctccgggttcaagcaattctcttgcctcag

SEQ ID NO: 431377 - DNA, 120 bp, Artificial Sequence
  ENSG00000152234_18 (sequence is synthesized)
tacaggtgtgagccaccgcacccggctgctctttgtaagtttctagagtactttgtgtttaagagaaattcctaaactggatatatgtggcaggctgacaatactgaagagcatagctgg

SEQ ID NO: 431378 - DNA, 120 bp, Artificial Sequence
  ENSG00000152234_19 (sequence is synthesized)
ctggcttctctgcccagaggatgtacctgcataaagaggtactgtaggcaggaaaataataggacagttaaaattctcagggaaatgaaaaaattgctggaacaaaagctgagaagatag

SEQ ID NO: 431379 - DNA, 120 bp, Artificial Sequence
  ENSG00000152234_20 (sequence is synthesized)
ctggaacaaaagctgagaagatagaatgcataggattatgaaaacttgtcaatatctcttttgtttgttttgtgacagggtctccatctctctcacccaggctggagtacagtggtgtga

SEQ ID NO: 431380 - DNA, 120 bp, Artificial Sequence
  ENSG00000152234_21 (sequence is synthesized)
agcctcctgagtagctggggttacaggcacataccaccacgcccagccaatttttctactttttgtagagggagggtcttgccatgttgtccaggctgatgatgaactccttggctcaag

SEQ ID NO: 431381 - DNA, 78 bp, Artificial Sequence
  ENSG00000152234_22 (sequence is synthesized)
tgcccggccatcttttaatattttcacagctactttatttcctctgttactagcttttcatagcctttgctcattctt

SEQ ID NO: 431382 - DNA, 120 bp, Artificial Sequence
  ENSG00000152234_23 (sequence is synthesized)
ccatcttttaatattttcacagctactttatttcctctgttactagcttttcatagcctttgctcattcttactgcattaaattttttttactgatttatttatttttttgagacagagt

SEQ ID NO: 431383 - DNA, 76 bp, Artificial Sequence
  ENSG00000152234_24 (sequence is synthesized)
tgcacctttagctgggaccacaggcccatgccaccacacccggctaacattttgtatttttagtagagacaaggtt

SEQ ID NO: 431384 - DNA, 76 bp, Artificial Sequence
  ENSG00000152234_25 (sequence is synthesized)
cccatgccaccacacccggctaatgctgctcttgagctcctgacctcgtggtctgcccgcctcagcttcccaaagt

SEQ ID NO: 431385 - DNA, 120 bp, Artificial Sequence
  ENSG00000152234_26 (sequence is synthesized)
actgatttatttatttacttttaatttttcatagcctttgctcattcttaatgtgttacctttttttttacttagttatttatttatttgagatggagtctccgtcgtccaggctggagt

SEQ ID NO: 431386 - DNA, 78 bp, Artificial Sequence
  ENSG00000152234_27 (sequence is synthesized)
acaggcactgatatataaaggcttttgtctgtaagggtcatacatggtcatgttctaaaatatttttcctagggttcc

SEQ ID NO: 431387 - DNA, 120 bp, Artificial Sequence
  ENSG00000152234_28 (sequence is synthesized)
catacatggtcatgttctaaaatatttttcctagggttcccccttccttgccattttattttgttgatggggatttgctgtaccgaaacttcattcttatccatctctctgtctccagta

SEQ ID NO: 431388 - DNA, 120 bp, Artificial Sequence
  ENSG00000152234_29 (sequence is synthesized)
agtcaaaatatatttacatatgtgggctccaatatctttggtaggaaaaggagagttcttaaagtactcataagtccttttcagtacttagaggaacactaaacttgatagcagttggtc

SEQ ID NO: 431389 - DNA, 120 bp, Artificial Sequence
  ENSG00000152234_30 (sequence is synthesized)
atttctgatcaactcttgctttctagctacttgagaaataacttctagatctgattttccttttctgaaataaggaagttacttttagttagaaggttctgcacatttcgtttttttttt

SEQ ID NO: 431390 - DNA, 120 bp, Artificial Sequence
  ENSG00000152234_31 (sequence is synthesized)
tacaggggtgagccactgcgcccggcttgttggagcattttatacctagtgtcagtggtgattactactttggagaaaaatactttggctaatggattggaattaatttattactgggag

SEQ ID NO: 431391 - DNA, 120 bp, Artificial Sequence
  ENSG00000152234_32 (sequence is synthesized)
ctaatggattggaattaatttattactgggagtatgtattgtttgtttgttgactggatctcgtagcccactcctggcacgtaaatgctcaataaacttctcaaatgaagacaaccatgt

SEQ ID NO: 431392 - DNA, 120 bp, Artificial Sequence
  ENSG00000152234_33 (sequence is synthesized)
gtaaatgctcaataaacttctcaaatgaagacaaccatgtttgtccattataaatcaaattccaaatgttaactactggtctggtctgatgagatttttttttttttttttttttttgag

SEQ ID NO: 431393 - DNA, 64 bp, Artificial Sequence
  ENSG00000152234_34 (sequence is synthesized)
caggctggtttcgaactcctgaccttagatgatccacgtgccaggcacagtgatatttaaaaat

SEQ ID NO: 431394 - DNA, 120 bp, Artificial Sequence
  ENSG00000152234_35 (sequence is synthesized)
ggcccacgccaggcacagtgatatttaaaaatgtgatttttaaatatcacatttaaaaatatgtgatatttttaaagaatatgatagcccaggcgcagtggcttacgcctgtaatctcag

SEQ ID NO: 431395 - DNA, 78 bp, Artificial Sequence
  ENSG00000152234_36 (sequence is synthesized)
cagtcccctgactcttaaaaaaagttgtgctagaagacttcaagatctcccctaaaactgtatagtcctttccctggt

SEQ ID NO: 431396 - DNA, 120 bp, Artificial Sequence
  ENSG00000152234_37 (sequence is synthesized)
ttcaagatctcccctaaaactgtatagtcctttccctggtgtttttgctgagctatagagtccagccctttctgttacagcaatgaaccatgagattcaaatactgctttttactaagta

SEQ ID NO: 431397 - DNA, 120 bp, Artificial Sequence
  ENSG00000152234_38 (sequence is synthesized)
cttacagactaatgacataggagacctcataggcacctggctgtttttaaccaggcaggcctaaatacactgcccaagtggcccttctgtgtggcaacaaaatggctgtcataaaattgt

SEQ ID NO: 431398 - DNA, 120 bp, Artificial Sequence
  ENSG00000152234_39 (sequence is synthesized)
gtctgtgtgcatttatcttatcactgggggtggtgaacatttgagaaggcacttgacctttgaaatgtgaagttttatggatttcagacttgtattttaaaaactatttgttaactgtaa

SEQ ID NO: 431399 - DNA, 120 bp, Artificial Sequence
  ENSG00000152234_40 (sequence is synthesized)
tctggcattgcaagcctcgcttcgttgccacttcccagctcttcccgccttccgcggtataatcaacactacgagagatagagccgcctagaaccaggtctccagaaatgctttgggttc

SEQ ID NO: 431400 - DNA, 120 bp, Artificial Sequence
  ENSG00000152234_41 (sequence is synthesized)
atctttcattgctgcaaggaacttccatgcctctaacactcatcttcaaaagactgtagagatgggattttgctgtgttggccaggctggtccaaactcttggcctcaagtggtccgccc

SEQ ID NO: 431401 - DNA, 120 bp, Artificial Sequence
  ENSG00000152234_42 (sequence is synthesized)
gcctcccaaagtgctggtattactggcgtgagccactgcacccaacccctgtatgctaagatgaagaataccacctatactaccctgtgtgccttgaaagagaaagacacactttgttaa

SEQ ID NO: 431402 - DNA, 120 bp, Artificial Sequence
  ENSG00000152234_43 (sequence is synthesized)
cgccggctcgggcgctctctgcaggagggcgaggggctgtggcgaatgccgccatcttgcacccgtggcttctccggctggacagagcaggcgacacaggtgcccttttgctcgtcacct

SEQ ID NO: 431403 - DNA, 120 bp, Artificial Sequence
  ENSG00000152234_44 (sequence is synthesized)
gcgcagaggcagaatggtacagggcagacagttaactcgatggtgtccagagacagggcctcaagattcctgtcttcggctgacagcggccctagaagggggatcttgggtgaaggtcag

SEQ ID NO: 431404 - DNA, 82 bp, Artificial Sequence
  ENSG00000152234_45 (sequence is synthesized)
caggctgtctcagtggggagaaaccttgcacaatacccaggctttattgggcagagggccctgcagccttccacagtgcatt

SEQ ID NO: 431405 - DNA, 120 bp, Artificial Sequence
  ENSG00000152234_46 (sequence is synthesized)
gactggagaatggcgatgacttttacgaagtatactgcctgcaaacacatttttaccaaagcacatcctgcacagccctaaatccgttaaaccttaagtcaacacagcacatgtttctgc

SEQ ID NO: 431406 - DNA, 69 bp, Artificial Sequence
  ENSG00000152234_47 (sequence is synthesized)
aatccgttaaaccttaagtcaacacagcacatgtttctgcgagcacagggttggggctatggttacaga

SEQ ID NO: 431407 - DNA, 120 bp, Artificial Sequence
  ENSG00000152234_48 (sequence is synthesized)
gtctgatctctctttctttcccccacagggaagtccttttaagtttaggaagatttatatttactttctctttttaaaggaaaacctcaattgctattgacacaatcattaaccagaaac

SEQ ID NO: 431408 - DNA, 120 bp, Artificial Sequence
  ENSG00000152234_49 (sequence is synthesized)
atttagtcccattgctattatcttaagtcccattgctgctgattgtagaatagcttctacttaatgaaggcatattttaattacttcctaatgggctgaactttttaatacaaatcagta

SEQ ID NO: 431409 - DNA, 120 bp, Artificial Sequence
  ENSG00000152234_50 (sequence is synthesized)
agtaggtaagacaatgtaaaacagtagtacatttaaaggttttgttggtttctttaaagtggaagctgtttgattctgattaactctttttttgttgtttgagacggagtttcactcttg

SEQ ID NO: 431410 - DNA, 120 bp, Artificial Sequence
  ENSG00000152234_51 (sequence is synthesized)
tgagccactgcgcctggcctgattaactcttaatggtaaatatttttagcacttaggtaatttttatagtagcctccaatttaaaaccacaatattgataaaattgtaaaatatattttc

SEQ ID NO: 431411 - DNA, 120 bp, Artificial Sequence
  ENSG00000152234_52 (sequence is synthesized)
gacggacaggtattattttaatgattaaaagaaatgttaaaaaagatttggataattctaaggcattggttgagactaatggtatattgactgatttgctaaatgcattttactttttat

SEQ ID NO: 431412 - DNA, 120 bp, Artificial Sequence
  ENSG00000152234_53 (sequence is synthesized)
tatggaaaatttcaaatacatagaaaagttaggagaatggcatagtgaaaccccatgtatctgtcacccagttattgcatagagtagcatgtttcgttctagtttcatttttaaccacta

SEQ ID NO: 431413 - DNA, 120 bp, Artificial Sequence
  ENSG00000152234_54 (sequence is synthesized)
ctgttctcccttctagataattttgaatcaaatagaaattatatcacttcatttgtatgtatttcagtataaatatgttgcctattatgtttttttctcatctcatgcacatctcctaat

SEQ ID NO: 431414 - DNA, 120 bp, Artificial Sequence
  ENSG00000152234_55 (sequence is synthesized)
tgcagcaataaaatatacaggtcaggtcgtgaaagatttggggtactgatgctttgcattgttaggttttgagtttcagctttttggcataatgacttaaatttgaagatagttgatttc

SEQ ID NO: 431415 - DNA, 120 bp, Artificial Sequence
  ENSG00000152234_56 (sequence is synthesized)
tcagggtcttcccaggcctacagagctgcatcacatatcacggcctgtactacgtgttgttatctgttatctttcatcaaaggcacttttacttaaactacatttgttttttgatttttg

SEQ ID NO: 431416 - DNA, 120 bp, Artificial Sequence
  ENSG00000152234_57 (sequence is synthesized)
atttttttttttttttgagacgaagtttcattcttacggcctaggctgaagtgcaatggcgcaaccttggctcattgcaacctccacctcctggattcacgcgattctcctgcctcagcc

SEQ ID NO: 431417 - DNA, 73 bp, Artificial Sequence
  ENSG00000152234_58 (sequence is synthesized)
gggattacaggtgtgagcccccatgcccggccctgtattctgttttttaaagagagacagtgtcttgcagctt

SEQ ID NO: 431418 - DNA, 90 bp, Artificial Sequence
  ENSG00000152234_59 (sequence is synthesized)
gcagtggtgccatcatagctcactgcaggcttgaactcctgggctcaagcagtcctgcagccttagcttcctgagtagctaagactacgt

SEQ ID NO: 431419 - DNA, 120 bp, Artificial Sequence
  ENSG00000152234_60 (sequence is synthesized)
aggctggtcttgaactcctggccttatgccatcttcccacctctcaaagtgctggcattataggcgtgagccaccatgcccggcctcaaactatctttctttttctttctttcttttttt

SEQ ID NO: 431420 - DNA, 88 bp, Artificial Sequence
  ENSG00000152234_61 (sequence is synthesized)
ctttcttttttttttttttttttaatatatttttagtagaaatggtaaaacctctaccattttggccaggctgatcttgaacccctga

SEQ ID NO: 431421 - DNA, 120 bp, Artificial Sequence
  ENSG00000152234_62 (sequence is synthesized)
ggctgatcttgaacccctgaccttaagtggtccacccgcctcagagtcctaaagtgctgggattacaggtgtgagttaccatgcccggcccaaactacatttcttattatcatttgagtg

SEQ ID NO: 431422 - DNA, 120 bp, Artificial Sequence
  ENSG00000152234_63 (sequence is synthesized)
taaatgataggggcttcacaaccaggaaaacttaagtatatttaatgtcttcctttcaggaattaaggcctgttagagtcccctcccccacttggctatatgaatatgtaatttggcaga

SEQ ID NO: 431423 - DNA, 120 bp, Artificial Sequence
  ENSG00000152234_64 (sequence is synthesized)
tttaaaagaaagttaatacgtttttattttgtcaagtcatttcagcaaaatatttatactcaaaacagtattaacactgtcagattataaacagtgcttatggactatactgaaagatta

SEQ ID NO: 431424 - DNA, 120 bp, Artificial Sequence
  ENSG00000152234_65 (sequence is synthesized)
tgcctcaagccttgaaaatataagaaataactgttttctgtcaggggtgggaggaaggattattaagtggagttctaggtcattgatattgtgaagaatagataatttacagggacatgt

SEQ ID NO: 431425 - DNA, 120 bp, Artificial Sequence
  ENSG00000152234_66 (sequence is synthesized)
tatcaggtatgaatgcaattgttggcatctttttttaaagttatgtttaagatatgaagttaaaattattttcaaatctgtagttaggctagtcattaaaactttttccaggtcagaact

SEQ ID NO: 431426 - DNA, 66 bp, Artificial Sequence
  ENSG00000152234_67 (sequence is synthesized)
ttattattattattttgagatggagtttttgcccttgttacccaggcttgagtgcaatggtgtgat

SEQ ID NO: 431427 - DNA, 120 bp, Artificial Sequence
  ENSG00000152234_68 (sequence is synthesized)
ttacagctgtgagccactgtgcctggcccagattatttttttaattgaattgaattgtcttccatagggactgctgagatgtcctctattcttgaagagcgtattcttggagctgatacc

SEQ ID NO: 431428 - DNA, 120 bp, Artificial Sequence
  ENSG00000152234_69 (sequence is synthesized)
tattaaaagttctaactaaaatttgctcaatggaaggattatattttagtcttggaatggtaaatggtaatggggacattagaatctaatacgaggattaatagtaaaatttcagctggg

SEQ ID NO: 431429 - DNA, 120 bp, Artificial Sequence
  ENSG00000152234_70 (sequence is synthesized)
aaaaatctcagtatggtaattctgtggagaaaaaaaaaaagcccatccaggtctccagaaatgctttgggttcatctttcattgctgcaaggaacttccatgcctctaacactcatcttc

SEQ ID NO: 431430 - DNA, 120 bp, Artificial Sequence
  ENSG00000152234_71 (sequence is synthesized)
atagactctcaggttcttaaaccatattgttaccatttagccctgtcatggttctcttgttatagtcaaatgaactactgttacatatttttcttttgatattagtatggcttctttgtt

SEQ ID NO: 431431 - DNA, 120 bp, Artificial Sequence
  ENSG00000152234_72 (sequence is synthesized)
ctggtaatggcccttgggtagaaacagaaagaacatacactaggtaatggaatctttgtgacctctggaagacttcctttttccttttctaaaaggcattagaaaaaatgtaagttctta

SEQ ID NO: 431432 - DNA, 120 bp, Artificial Sequence
  ENSG00000152240_0 (sequence is synthesized)
cctagtaaagtggcgggagccgcagctatggagccgcaggaggagagagaaacgcaggttgctgcgtggttaaaaaaaatatttggagatcatcctattccacagtatgaggtgaaccca

SEQ ID NO: 431433 - DNA, 120 bp, Artificial Sequence
  ENSG00000152240_1 (sequence is synthesized)
cggaccacagagattttacatcacctttcagaacgcaacagggtccgggacagggatgtctacctggtaatagaggacttgaagcagaaagcaagtgaatacgagtcagaagccaagtat

SEQ ID NO: 431434 - DNA, 120 bp, Artificial Sequence
  ENSG00000152240_2 (sequence is synthesized)
cttcaagaccttctcatggagagtgtgaatttttcccccgccaatctctctagcactggttccaggtatctgaatgctttggttgacagtgcggtggcccttgaaacaaaggatacctcg

SEQ ID NO: 431435 - DNA, 120 bp, Artificial Sequence
  ENSG00000152240_3 (sequence is synthesized)
ctagctagttttatccctgcagtgaatgatttgacctctgatctctttcgtaccaaatccaaaagtgaagaaatcaagattgaactggaaaaacttgaaaaaaatttaactgcaacttta

SEQ ID NO: 431436 - DNA, 120 bp, Artificial Sequence
  ENSG00000152240_4 (sequence is synthesized)
cagaggaattcagatttggaatcaaggctgcagaggagcaactttcagccagaggcatggatgcttctctgtctcatcagtccttagtagcactatcagagaaactggcaagattaaagc

SEQ ID NO: 431437 - DNA, 120 bp, Artificial Sequence
  ENSG00000152240_5 (sequence is synthesized)
aacagactatacctttgaagaaaaaattggagtcctatttagacttaatgccgaatccgtctcttgctcaagtgaaaattgaagaagcaaagcgagaactagatagcattgaagctgaac

SEQ ID NO: 431438 - DNA, 120 bp, Artificial Sequence
  ENSG00000152240_6 (sequence is synthesized)
ttacaagaagagtagacatgatggaactgtgacaaaagccaaataaacatccttttccctaacaaagtaaattgaataggactttacagagttctttttcctcttggcatttcctaataa

SEQ ID NO: 431439 - DNA, 120 bp, Artificial Sequence
  ENSG00000152240_7 (sequence is synthesized)
caaaactttctgtgttcttagattacagaatatcataattgatagaatatggtttcttactgtgtgttgcatttttgtgcccaaatacatagttttcatattaaaaagccttttctctta

SEQ ID NO: 431440 - DNA, 120 bp, Artificial Sequence
  ENSG00000152240_8 (sequence is synthesized)
agaaaacaatagccttttcaacaaaagggacaactggatatccatatgctcaagaatgaagttggactcaaactcacacaaaatagaagaattctctcaaaatgaataaagcgcctaaaa

SEQ ID NO: 431441 - DNA, 120 bp, Artificial Sequence
  ENSG00000152240_9 (sequence is synthesized)
tgctataaggtcttaaagactttttgttctcagcataattctatatgaaaaattggcaataaatacaaagcactgaatttagttacttcatgtctttgccagtgagtataattaatttgg

SEQ ID NO: 431442 - DNA, 120 bp, Artificial Sequence
  ENSG00000152240_10 (sequence is synthesized)
agagcaagactcggtctcaaaaaaaaaagaagaaaaagaaaaatatttgatggtggtcacttttcaaataattttttaactgaactcctttttttggtaattgtaggagcaactttcagc

SEQ ID NO: 431443 - DNA, 120 bp, Artificial Sequence
  ENSG00000152240_11 (sequence is synthesized)
tatcagagaatccgtctcttgctcaagtgaaaattgaagaagcaaagcgagaactagtaagtagttcctgtaattttttcagatttttttaaaaagaaaataaatgctaatatagctaaa

SEQ ID NO: 431444 - DNA, 120 bp, Artificial Sequence
  ENSG00000152240_12 (sequence is synthesized)
gtcttcttcatccttctttcctttctcctcagtggtaagctgcagtcctaaagttactgtgtatcattctcctgcatcttttaatacttttttggctgtgtacgtgtgtatatatttttt

SEQ ID NO: 431445 - DNA, 120 bp, Artificial Sequence
  ENSG00000152242_0 (sequence is synthesized)
agtgaggcgcccagcggaacggcctctggtgacattttcttgggggcggcgcggacgactgaagggacttggtggtagaggctgcggaggcggcgaggttcactttggtcccggcagggg

SEQ ID NO: 431446 - DNA, 120 bp, Artificial Sequence
  ENSG00000152242_1 (sequence is synthesized)
ctctgaccgcgacccactgctcgctgccggggcttgttccgaggaggagaaggcggcggtggccgtcgcgtcctgagtcaccgcagcggggaagagtcccggccgggggttcggtgcgtg

SEQ ID NO: 431447 - DNA, 120 bp, Artificial Sequence
  ENSG00000152242_2 (sequence is synthesized)
ccccgacggggcgcgcgcgaagcgagcgagaaggcacggagtcgccgcggagcgcaggttgctttcctgttgcatctttgatatcatttcctagactctactccatgatttaacttgaaa

SEQ ID NO: 431448 - DNA, 120 bp, Artificial Sequence
  ENSG00000152242_3 (sequence is synthesized)
ttctgaaatgaagatggaggaggcagtgggaaaagttgaagaactcattgagtccgaagccccaccaaaagcatctgaacaagagacagccaaggaggaagatggatctgtagaactgga

SEQ ID NO: 431449 - DNA, 120 bp, Artificial Sequence
  ENSG00000152242_4 (sequence is synthesized)
atctcaagttcagaaagatggtgtagcggattctacagttatttcttcaatgccctgcttgttgatggaactgagaagggactcttctgagtctcagttagcatccacagagagtgacaa

SEQ ID NO: 431450 - DNA, 120 bp, Artificial Sequence
  ENSG00000152242_5 (sequence is synthesized)
gcctacaactggccgagtttatgagagtgactcctctaatcactgcatgctttccccttcctctagtggtcacctggctgattcagatacgttgtcttccgcagaagagaatgaaccctc

SEQ ID NO: 431451 - DNA, 120 bp, Artificial Sequence
  ENSG00000152242_6 (sequence is synthesized)
tcaggcagaaacggcggtagaaggagacccttcaggagtgtctggtgccacagttgggcgcaagtctaggcggtcccgatctgaaagtgaaacttccactatggctgccaagaaaaaccg

SEQ ID NO: 431452 - DNA, 120 bp, Artificial Sequence
  ENSG00000152242_7 (sequence is synthesized)
gcaatccagtgataaacagaatggccgagtcgccaaggttaaaggtcatcggagccaaaagcacaaggagaggatcaggctactgaggcagaaacgggaggctgctgcaaggaagaaata

SEQ ID NO: 431453 - DNA, 120 bp, Artificial Sequence
  ENSG00000152242_8 (sequence is synthesized)
taacctgctgcaggacagtagtaccagtgatagtgacctgacttgtgactcaagcacgagctcatcagatgatgatgaagaggtttcagggagcagcaagacaatcactgcagagatacc

SEQ ID NO: 431454 - DNA, 120 bp, Artificial Sequence
  ENSG00000152242_9 (sequence is synthesized)
agatggacctccagttgtagctcattatgatatgtctgacaccaactctgacccagaagtggtaaatgtggacaatttattggcggctgcagtagttcaagagcacagtaattctgtagg

SEQ ID NO: 431455 - DNA, 120 bp, Artificial Sequence
  ENSG00000152242_10 (sequence is synthesized)
cggccaggacacaggagctacctggaggaccagcgggcttctagaggagctgaatgcagaggcaggtcatttggatccaggattcctagcaagtgacaaaacatctgctggcaatgcgcc

SEQ ID NO: 431456 - DNA, 120 bp, Artificial Sequence
  ENSG00000152242_11 (sequence is synthesized)
actcaatgaagaaattaacattgcgtcttcagatagtgaagtagagattgtgggagttcaggaacatgcaaggtgtgttcatcctcgaggtggtgtgattcagagtgtttcttcatggaa

SEQ ID NO: 431457 - DNA, 120 bp, Artificial Sequence
  ENSG00000152242_12 (sequence is synthesized)
gcatggctcgggcacgcagtatgttagcaccaggcaaacacagtcatggactgctgtgactccccagcagacttgggcttcaccagcagaagttgttgaccttaccttggatgaggatag

SEQ ID NO: 431458 - DNA, 120 bp, Artificial Sequence
  ENSG00000152242_13 (sequence is synthesized)
caggcgtaaatacctactgtaatacaatgtcactgtgtttcctctgcactgttcccttccacttcctcatcctctttgtgacatggaagttcattgtcatagcttcagcttcagaagctg

SEQ ID NO: 431459 - DNA, 120 bp, Artificial Sequence
  ENSG00000152242_14 (sequence is synthesized)
tttgtggcatttgtaggattcaaactcatggaaaattccctcctcttcccccctttttttaattaaaagaagtcacttaggaaaataacatcacagagaaaagaatttcttctttccctc

SEQ ID NO: 431460 - DNA, 120 bp, Artificial Sequence
  ENSG00000152242_15 (sequence is synthesized)
agtaggaatatagaatgatgaattttattagacaactttattttacttggtgacttttaatcttaggaaactctgccttccttttagaataatattttaattgccaggcaaaatgggttt

SEQ ID NO: 431461 - DNA, 120 bp, Artificial Sequence
  ENSG00000152242_16 (sequence is synthesized)
cagtttttgaatcttgtatttatttttctgtataatgaaattaatatctagacttgaccactatctgcccaccccattggcactcccatcttagggcattcgcacacatatcagtcaggt

SEQ ID NO: 431462 - DNA, 120 bp, Artificial Sequence
  ENSG00000152242_17 (sequence is synthesized)
ccttattggcacctagtagggcatgtgcatttaaaaacttgtccttaaaaatagaagacagaagtattaaaattatattttcttttattttaagtcttctgccttctttcttgagtttgc

SEQ ID NO: 431463 - DNA, 120 bp, Artificial Sequence
  ENSG00000152242_18 (sequence is synthesized)
tcctgttgacttcccacagcacagataattgacatgtccctttgtgtttataaatactactaaggtgacctagttgttctccttgttgcaataattaataactctttgcaaaatgtctcc

SEQ ID NO: 431464 - DNA, 120 bp, Artificial Sequence
  ENSG00000152242_19 (sequence is synthesized)
tttgagacagaggcatttcagatagatacccaccatgaggtgttctgggcatctgaaggtattaagagttcagtgggaaaaatctctctccctcgcctttttttctggtttagtcaaata

SEQ ID NO: 431465 - DNA, 120 bp, Artificial Sequence
  ENSG00000152242_20 (sequence is synthesized)
acgggtgaacatagaaacctgttgggaagaatatgaaaagttatgtggcctctgaggctacaggcacttgcaaatccgagaggaaagtgccgtctttcatagctggtctctgtataaaga

SEQ ID NO: 431466 - DNA, 120 bp, Artificial Sequence
  ENSG00000152242_21 (sequence is synthesized)
gtatgtagcaacaactgtttaacatccgagatgaagtggacctgatgctgtatttgggtatttttctcctctaccttctaaaaaaaaataccataagaagaatcagaatgtaccataaga

SEQ ID NO: 431467 - DNA, 120 bp, Artificial Sequence
  ENSG00000152242_22 (sequence is synthesized)
tagcaaagggtagcaggagcttcagggaattcaggaaatgccagcattggaattttgtggcattagttactaccttctttcttataatatgttgtagttactagtgaattcttttaaaag

SEQ ID NO: 431468 - DNA, 120 bp, Artificial Sequence
  ENSG00000152242_23 (sequence is synthesized)
aaagcaatacctagagttagaacactatgtactctgcacagggggagtgaagtaatattggcttagaagacttcaccttttgtttttcatggtttttgtttgttttgtttttgtttttgt

SEQ ID NO: 431469 - DNA, 120 bp, Artificial Sequence
  ENSG00000152242_24 (sequence is synthesized)
attgttaccgttgctatggccctttgcctgtctctccaaatcccctggtggctcttcttatcattaagagtatgagaattaccattttcagttttcattcagcaaacaaatttaccaagt

SEQ ID NO: 431470 - DNA, 120 bp, Artificial Sequence
  ENSG00000152242_25 (sequence is synthesized)
gcctgctctgcataaggcactgtgaggggtgggtgctctgggggctgctgagatgaatgacacacaccgcacatacacatgcatcagtgtctgcctgcctccacctgcccagcctgttct

SEQ ID NO: 431471 - DNA, 120 bp, Artificial Sequence
  ENSG00000152242_26 (sequence is synthesized)
tcttcttcttcttcatcttcttcttttttttttttttttgtaaagacaagtttattcctttacgcttcttgttgcattagttctcctgtatgttccttcttccacaggaatgtatttgtg

SEQ ID NO: 431472 - DNA, 120 bp, Artificial Sequence
  ENSG00000152242_27 (sequence is synthesized)
catatgttctttgatcttctctgatagcatctcatttgatctggcctctgtccttcatcagcttttattttttttatttttattttctgcttttgttagataaggcttttaagatcatga

SEQ ID NO: 431473 - DNA, 120 bp, Artificial Sequence
  ENSG00000152242_28 (sequence is synthesized)
acctccagctttagcaactcatatatcagtctctcacatggccacaattctagacaaaaaccaaagacccagaggccagagcaaagtaggaccttctgaagattcactactggtgtatcc

SEQ ID NO: 431474 - DNA, 120 bp, Artificial Sequence
  ENSG00000152242_29 (sequence is synthesized)
ttggaccttcacattttactttaggattaatttattgaattttactgttacacatagtttttgacttgaattaaaatactagacaaagcagaaatgtacaatttctggtctgtgttttcc

SEQ ID NO: 431475 - DNA, 120 bp, Artificial Sequence
  ENSG00000152242_30 (sequence is synthesized)
aggaaattcatagagaagagaatagagtggatgatgtgacttgaagtttttgcagcttattttttcccccactgtcagggcagaggcccattttaatgaatgtttttgcatgacctgttc

SEQ ID NO: 431476 - DNA, 120 bp, Artificial Sequence
  ENSG00000152242_31 (sequence is synthesized)
ttatgttaaccacatattttttttcccaattccacacagcaggtgatttcccgtgtgacatattttcttcatagtccctaatatagtcatcctctacagagttggcgtgctgtgtgcact

SEQ ID NO: 431477 - DNA, 120 bp, Artificial Sequence
  ENSG00000152242_32 (sequence is synthesized)
gtggattaggaacagagtggagctgtaaccagtctcttctctggccctttgcctttatgtcagcttgcacttttgcctcacttattcctagtccagctcccaactgcctgacttaatgga

SEQ ID NO: 431478 - DNA, 120 bp, Artificial Sequence
  ENSG00000152242_33 (sequence is synthesized)
ccagaacggagatttggatattaagatgcagagggggaggggaagggatggtagagatagacagctctcccctactaggttgggtcatttcccctaataactatagagagactgtgtttc

SEQ ID NO: 431479 - DNA, 120 bp, Artificial Sequence
  ENSG00000152242_34 (sequence is synthesized)
aactctcttttcattgctgtttccagaagagtggagagtgtggtttcaggcaaggtattaatgatacaattccgtggtatacagctcctgtgacatttgaagtttcttttaaaggggttt

SEQ ID NO: 431480 - DNA, 120 bp, Artificial Sequence
  ENSG00000152242_35 (sequence is synthesized)
ttcttaatcaaagttttacatttggtagcataagtagttctttatgcttcacaggacattgtcttcagagtaatctctctgctaaaatggtacatgtgggtcacagattggtttatgcca

SEQ ID NO: 431481 - DNA, 120 bp, Artificial Sequence
  ENSG00000152242_36 (sequence is synthesized)
ctgacttggttaagtttccaccccctccaatttgtgaaaaacagagcagtgacctagctgttgcatcatcatgactgccatgtaacctgtaattgctgctctccagtaattgtcttttca

SEQ ID NO: 431482 - DNA, 120 bp, Artificial Sequence
  ENSG00000152242_37 (sequence is synthesized)
ttttgatggtaggggccagactgaatgaataatgcattcttttttattcaatttatttcattcagtttattcttggcaatcaaacatcccataaactttgcttttattatcaattatgaa

SEQ ID NO: 431483 - DNA, 120 bp, Artificial Sequence
  ENSG00000152242_38 (sequence is synthesized)
tatgaattgtctggtttactaatgtagtcatttgttcatctttacttttagcagattagcaccataactaacttaaaactaagtttgttacctgctttttatactgtcacaaaggttttt

SEQ ID NO: 431484 - DNA, 120 bp, Artificial Sequence
  ENSG00000152242_39 (sequence is synthesized)
gaaaaagctggggacactattttgtcttttagttttaaacttttttaaggcaaagcaagctccccaatccctgttctccaatatgtgtatgatgtgacttccatgtagatataaaaatga

SEQ ID NO: 431485 - DNA, 120 bp, Artificial Sequence
  ENSG00000152242_40 (sequence is synthesized)
ttgtgccctaaccaaacttcctcagattgtgcactgtttgtttaaaataatcacgtattttagtctgatgctgttgtattttttcattttatttaaaacactacttacttcttattctct

SEQ ID NO: 431486 - DNA, 120 bp, Artificial Sequence
  ENSG00000152242_41 (sequence is synthesized)
taacaaattttaaaaggtagtgatcttaaaaaaaaatcactggataactaggaaatatttttgttgttgttttgtttcttaaagagtacagaggccattgaagccttttgctcctcttac

SEQ ID NO: 431487 - DNA, 120 bp, Artificial Sequence
  ENSG00000152242_42 (sequence is synthesized)
cgtgaaaatgaaatgttagccattgtatggctaggaaccaatgcacttggcagttaatggatctgctgttgctggagtgtgagcgtggacttgatgcagtgatgacaaatcattgcttag

SEQ ID NO: 431488 - DNA, 120 bp, Artificial Sequence
  ENSG00000152242_43 (sequence is synthesized)
aattaatgttttcaaatgtgcaactctagtttttaaaacaaaatttggttctttacattcattatttcgtttttgtttccctttagtatttaatggtctttggagaaaaaataataaaac

SEQ ID NO: 431489 - DNA, 120 bp, Artificial Sequence
  ENSG00000152242_44 (sequence is synthesized)
agagtgttatatatatattttttggtgcaagataagattttctgttttttgaaataagtctgtagcataaaggttaaactattttaagacaaaataaaatagagtgtatttaaacaatga

SEQ ID NO: 431490 - DNA, 77 bp, Artificial Sequence
  ENSG00000152242_45 (sequence is synthesized)
cacaccttggcctctcaaagtgctgagattctgtgggattcgcacctggcctaaaacataggtattaatagttatat

SEQ ID NO: 431491 - DNA, 120 bp, Artificial Sequence
  ENSG00000152242_46 (sequence is synthesized)
aactcctgacctcaggtggtccatccgtcttggccccccagagtgctgccacagcgctcagtctgatttatttcttaaaagttgtatgcagaatgatttaaagtgtattaagtctgcttg

SEQ ID NO: 431492 - DNA, 120 bp, Artificial Sequence
  ENSG00000152242_47 (sequence is synthesized)
ttaatgaaagaaacaatatagtgaattcttttttaaccaaagtaccctaaattgatattactggtaatttttatttttaacatatagctgactttgcctaaaggtatacagttacatgaa

SEQ ID NO: 431493 - DNA, 120 bp, Artificial Sequence
  ENSG00000152242_48 (sequence is synthesized)
tgttataagaaagatggcaaacaggctttgtgttatcatttgtttaaaatagcaaattatgggcaagttatcttacaaaaaggtagccttttaaattaattgtaccttttatattttatt

SEQ ID NO: 431494 - DNA, 120 bp, Artificial Sequence
  ENSG00000152242_49 (sequence is synthesized)
tagcttatgttgattttcatctccccttttaaaaaattatttaaatagtacagtgagggtgaaatgaaaaagattttgtggaatgccacatgtcagaaaatacagtgtcaaaacaatttc

SEQ ID NO: 431495 - DNA, 120 bp, Artificial Sequence
  ENSG00000152242_50 (sequence is synthesized)
agtaaattttttttctcaaaatcctcttcaaaaataccatatgcccttaatcctagtacagataaaaaacatgtcattttaatttgtttagaagttacgagattgtgaattgtaagtaac

SEQ ID NO: 431496 - DNA, 120 bp, Artificial Sequence
  ENSG00000152242_51 (sequence is synthesized)
agggaataacttccaagtttctttactcatttttcccccgatttctatttttatttcctctgaagtttaggaaagttagtggaagttgcaaccaaactgtttgtttgctagtattgagta

SEQ ID NO: 431497 - DNA, 120 bp, Artificial Sequence
  ENSG00000152242_52 (sequence is synthesized)
gatattctcatgttgtattaaattaccacagtgtaaaatagaagatgtcataaaaagtgaaggaataatccacaaagaagtgtattctatggcaattaagtcttattcctaatataactt

SEQ ID NO: 431498 - DNA, 120 bp, Artificial Sequence
  ENSG00000152242_53 (sequence is synthesized)
taagatttgggaagaatgttatgaaattactgtttttattttattgcattttcttaatatccttttcctcactgtgcatttgacatgtaacctagatgaataaaaattttgaaaaagaaa

SEQ ID NO: 431499 - DNA, 120 bp, Artificial Sequence
  ENSG00000152242_54 (sequence is synthesized)
agatattggtgccgctgcccgagaagagctcagccgagtctccccgagcccagctatcggcatccgcgaaaaagcggggagagaagggcacgggctctccgctggagcgactctgggatt

SEQ ID NO: 431500 - DNA, 120 bp, Artificial Sequence
  ENSG00000152242_55 (sequence is synthesized)
gctctgtgtaaatttgaagactgcagtctattaacaagacatggccaatttataaaacctgttctgaggtttccagtgaactttagcacatcaggaaaaacaaaattaaagggttaatga

SEQ ID NO: 431501 - DNA, 120 bp, Artificial Sequence
  ENSG00000152242_56 (sequence is synthesized)
tagggacaagattatttttaagtaatggaatttctcataagtctgtctgtaacacattacctgaactcccaatcattgcctttttggcactgcttagatttaatactcactgttcggcat

SEQ ID NO: 431502 - DNA, 120 bp, Artificial Sequence
  ENSG00000152242_57 (sequence is synthesized)
cattactgagtacattctcctcaggaataggcaccttgctttattatatagccactgcacttgagcttatagtgtctgaaataacacattctatcttttgttaaagttttctaataattt

SEQ ID NO: 431503 - DNA, 120 bp, Artificial Sequence
  ENSG00000152242_58 (sequence is synthesized)
ttcctccaaaaacagtagttttatgtgtttcccccatattcaatgcatgagaagctagttatccttgttacaaatctttctatcctcacgttgaaaagaatgtctttctgaaaaatttcc

SEQ ID NO: 431504 - DNA, 120 bp, Artificial Sequence
  ENSG00000152242_59 (sequence is synthesized)
cattagttccccaagttttaaaaaagtttgttagaaatccgcttgttctagctctcattggtataagggtctgtaacttattacatatttggtaaatctgctttccccattcttattgca

SEQ ID NO: 431505 - DNA, 120 bp, Artificial Sequence
  ENSG00000152242_60 (sequence is synthesized)
aaggcagtcttgagatttcatagtggaagaaagatgtatctgaatggttcttaagtagtgaattcttattatccaagagatccttacaatatgatcaggaacattttgtaaactgtatgg

SEQ ID NO: 431506 - DNA, 120 bp, Artificial Sequence
  ENSG00000152242_61 (sequence is synthesized)
cattgaataggtcatggcagtattgtttattgccacattgaagaggggcaagtttgggttttctaaagttttatgggtgactatgttttttctctccctgttttctgaaagctttctgtt

SEQ ID NO: 431507 - DNA, 120 bp, Artificial Sequence
  ENSG00000152242_62 (sequence is synthesized)
tctacatgtgaagacagcatattgctgatatacaaagaacatttcaagagaaatcatattggttaatggaatctatagcttcccaaacttatataaattcagtaacaagaatgattggtt

SEQ ID NO: 431508 - DNA, 120 bp, Artificial Sequence
  ENSG00000152242_63 (sequence is synthesized)
ttaaagcactttataggtgttcaagttctgataataagtcttgtccatataatataaatatgagtctcaaacgatctttagaaatgctttttactgttttaatatctctattggattcct

SEQ ID NO: 431509 - DNA, 120 bp, Artificial Sequence
  ENSG00000152242_64 (sequence is synthesized)
ttgctattgttccttgtaataaaactaccgggagggggatttcaatgaagctcatcagttaaatgtatgagagaaacagactttggggttgttctaaggcaggttttaggtatatatttt

SEQ ID NO: 431510 - DNA, 120 bp, Artificial Sequence
  ENSG00000152242_65 (sequence is synthesized)
agttttacatgtattaatatttttaaaaaaaccttattaatacctgtaaaattgtgcattcctatatcctcttctaacctcttaatcaagaccttgatggaactcttaatacaatactta

SEQ ID NO: 431511 - DNA, 120 bp, Artificial Sequence
  ENSG00000152242_66 (sequence is synthesized)
cttccacttactaagcaggattttatgtaactaccccaatactttgcctttttgtggaaaggaagaaggtgggtaaacaaaatttaaagtcagaaccctattgtaaggtggcttgagaaa

SEQ ID NO: 431512 - DNA, 120 bp, Artificial Sequence
  ENSG00000152242_67 (sequence is synthesized)
tgtcttcataggcactttccctgttttgcttaaataggttagatgtgctttgttcatattttcctaatcttctttctaattgagtatcttgaccactgcttaaaacttaaaacaccagtg

SEQ ID NO: 431513 - DNA, 120 bp, Artificial Sequence
  ENSG00000152242_68 (sequence is synthesized)
tctgtttcttgtctcttctgaattgtgtactaactgaacaccaaagtaaattaatttgaatctatagtttggtttctattgttcacaccatttagtaactttgtggcttttgaaaataca

SEQ ID NO: 431514 - DNA, 120 bp, Artificial Sequence
  ENSG00000152242_69 (sequence is synthesized)
catagttttctaaggtaatcctggagaatcaaatggtagattgaggtacagggtcactgtatgtgactgcctgtgtgtgtgctggcagttttgggaggtcttatggtatacctgccattc

SEQ ID NO: 431515 - DNA, 120 bp, Artificial Sequence
  ENSG00000152242_70 (sequence is synthesized)
ccataagacaggtatgaatgatctttactggaattatgcaaagcagcaaaaatggaacaacttagagttcaaatattaggaatttcatttcaattgtccatattgttgtctcttgaaaaa

SEQ ID NO: 431516 - DNA, 120 bp, Artificial Sequence
  ENSG00000152242_71 (sequence is synthesized)
ttgtgacattgtgaatttttaatgtaacagtgatgtatctttcagtttactgagtcaccttatgactttggggaagagaggaggcacgttcaaccttatagtaagagcagttgtcgaaaa

SEQ ID NO: 431517 - DNA, 120 bp, Artificial Sequence
  ENSG00000152242_72 (sequence is synthesized)
gttgcctaaattgtaaaggtaggataaattatgaactgacttgagttcaacaacatggacattcaggtgaacttaagctggatgggcctaacagaatctcttggatgtcggaatgttaat

SEQ ID NO: 431518 - DNA, 120 bp, Artificial Sequence
  ENSG00000152242_73 (sequence is synthesized)
tcagctgtttacacagaatggaaaccaagtggaaaagtaaaaaccgattattgccatactctttcattaaggtacaaccaatttagtaattcagaaaatgctctttataagcttttgttt

SEQ ID NO: 431519 - DNA, 120 bp, Artificial Sequence
  ENSG00000152242_74 (sequence is synthesized)
gggctcagcttaaaagttgaaggcattatcctaaataattcctgttaggatatcctaataccttaatcctaaatgttatgccaaataattgtaactgttaatgcatattcttttagagag

SEQ ID NO: 431520 - DNA, 120 bp, Artificial Sequence
  ENSG00000152242_75 (sequence is synthesized)
tgcaaataattaataatgcagaccagtgtagtgcatgatcatactttaattgagtttgatatctgggcaacagatgtttatgacgattttttaaagttagcagttaactgacaggcagct

SEQ ID NO: 431521 - DNA, 120 bp, Artificial Sequence
  ENSG00000152253_0 (sequence is synthesized)
gaaatcggaaagttggcggggctgcgggagctgagcctagagtccggctgttggctagagtgggcgcggatctggtgtggggaaggcggcgggactcaggcctgcctgcgaagcattgtc

SEQ ID NO: 431522 - DNA, 120 bp, Artificial Sequence
  ENSG00000152253_1 (sequence is synthesized)
ctacataatggtagaggacgaactggcacttttcgataaaagcataaatgaattttggaataaattcaaaagtacggacacctcctgtcagatggcgggactaagagatacctacaagga

SEQ ID NO: 431523 - DNA, 120 bp, Artificial Sequence
  ENSG00000152253_2 (sequence is synthesized)
ttccatcaaagcatttgcagaaaagctgtctgtgaaattaaaggaagaagaacgaatggttgagatgtttctggaatatcaaaatcagatcagcaggcaaaataagctcattcaagaaaa

SEQ ID NO: 431524 - DNA, 120 bp, Artificial Sequence
  ENSG00000152253_3 (sequence is synthesized)
aaaggataacttgttaaaattgattgctgaagtaaaaggcaaaaagcaggaattggaagtactgactgcaaatatccaggatcttaaggaagaatattctaggaagaaggaaactatttc

SEQ ID NO: 431525 - DNA, 120 bp, Artificial Sequence
  ENSG00000152253_4 (sequence is synthesized)
tactgctaataaagcgaatgcagagaggttgaaaaggctgcagaaatctgcagacttgtataaagatcgacttggactagaaattcgaaaaatttatggtgagaaattgcagtttatttt

SEQ ID NO: 431526 - DNA, 120 bp, Artificial Sequence
  ENSG00000152253_5 (sequence is synthesized)
cctgagagcccatttatgttttccttacatctcaatgaagcaagggactatgaagtgtcagatagtgcccctcatcttgagggcctagcagaatttcaagagaatgtaaggaagaccaac

SEQ ID NO: 431527 - DNA, 120 bp, Artificial Sequence
  ENSG00000152253_6 (sequence is synthesized)
aatttttcagcttttcttgccaatgttcggaaagcttttactgccacggtttataattaacatacaaatagtgtatataaaaacggtttatttttcttctctattacatatctctttttt

SEQ ID NO: 431528 - DNA, 120 bp, Artificial Sequence
  ENSG00000152253_7 (sequence is synthesized)
acatctcaatgaagcaagggactatgaagagtaaaaaacatacaaacaagaaaaaaaggagcagaggctgatgccaagagaaaactctcctcttttggaacaaagcacattcatgtgcta

SEQ ID NO: 431529 - DNA, 120 bp, Artificial Sequence
  ENSG00000152253_8 (sequence is synthesized)
agacaaagcctgaatcctggaaaaagccaactctttgaacaggaattagagtgtgatcggctcagttgacgtacagggaaacctttatttgaagccgataaatgacttgtcgtgggcgag

SEQ ID NO: 431530 - DNA, 120 bp, Artificial Sequence
  ENSG00000152253_9 (sequence is synthesized)
cccttcgggtgctattaatactttcgggtcacagcggagactctggctgttgttcagaaaagaactacgaatcccagaatgccctgttcccccattttcccctcgagaatccaaggcatt

SEQ ID NO: 431531 - DNA, 120 bp, Artificial Sequence
  ENSG00000152253_10 (sequence is synthesized)
cggggcggggcggggcgggtggaagatagtgcccatcttctattagcagcaggatgtatgagcacagatgacaatccggtccatgctgttcatcagacaaagcctgaatcctggaaaaag

SEQ ID NO: 431532 - DNA, 120 bp, Artificial Sequence
  ENSG00000152253_11 (sequence is synthesized)
gaatggttgagatgtttctggaatatcaaaatcgtactgtgctaaatgccttacattgaccacctccttcagtcctcatgatagttctccaggagatcagcaggcaaaataagctcattc

SEQ ID NO: 431533 - DNA, 120 bp, Artificial Sequence
  ENSG00000152254_0 (sequence is synthesized)
agctccaattgctctatgtttagaattgcctctttttcaagatggatttccttcacaggaatggagtgctcataattcagcatttgcagaaggactaccgagcttactacacttttctaa

SEQ ID NO: 431534 - DNA, 120 bp, Artificial Sequence
  ENSG00000152254_1 (sequence is synthesized)
attttatgtccaatgttggagaccccaggaatatctttttcatttattttccactttgttttcaatttaatcagacagttggaaccaagatgatatgggtagcagtcattggggattggt

SEQ ID NO: 431535 - DNA, 120 bp, Artificial Sequence
  ENSG00000152254_2 (sequence is synthesized)
taaatcttatatttaaatggatattatttggtcatcgaccttactggtgggtccaagaaactcagatttacccaaatcactcaagtccatgccttgaacagttccctactacatgtgaaa

SEQ ID NO: 431536 - DNA, 120 bp, Artificial Sequence
  ENSG00000152254_3 (sequence is synthesized)
caggtccaggaagtccatctggccatgcaatgggcgcatcctgtgtctggtatgtcatggtaaccgctgccctgagccacactgtctgtgggatggataagttctctatcactctgcaca

SEQ ID NO: 431537 - DNA, 120 bp, Artificial Sequence
  ENSG00000152254_4 (sequence is synthesized)
gactgacctggtcatttctttggagtgttttttggttgattcaaatcagtgtctgcatctccagagtattcatagcaacacattttcctcatcaagttattcttggagtaattggtggca

SEQ ID NO: 431538 - DNA, 120 bp, Artificial Sequence
  ENSG00000152254_5 (sequence is synthesized)
tgctggtggcagaggcctttgaacacactccaggcatccaaacggccagtctgggcacatacctgaagaccaacctctttctcttcctgtttgcagttggcttttacctgcttcttaggg

SEQ ID NO: 431539 - DNA, 120 bp, Artificial Sequence
  ENSG00000152254_6 (sequence is synthesized)
tgctcaacattgacctgctgtggtccgtgcccatagccaaaaagtggtgtgctaaccccgactggatccacattgacaccacgccttttgctggactcgtgagaaaccttggggtcctct

SEQ ID NO: 431540 - DNA, 120 bp, Artificial Sequence
  ENSG00000152254_7 (sequence is synthesized)
ttggcttgggctttgcaatcaactcagagatgttcctcctgagctgccgagggggaaataactacacactgagcttccggttgctctgtgccttgacctcattgacaatactgcagctct

SEQ ID NO: 431541 - DNA, 120 bp, Artificial Sequence
  ENSG00000152254_8 (sequence is synthesized)
accatttcctccagatcccgactcacgaagagcatttattttatgtgctgtctttttgtaaaagtgcatccattcccctaactgtggttgctttcattccctactctgttcatatgttaa

SEQ ID NO: 431542 - DNA, 120 bp, Artificial Sequence
  ENSG00000152254_9 (sequence is synthesized)
tgaaacaaagcggaaagaagagtcagtagagtggtgcctagagttagtgctctgtgtcacagatcacccttctccatccaccagtagagccacagagtaggcacagaccagaggcttcta

SEQ ID NO: 431543 - DNA, 120 bp, Artificial Sequence
  ENSG00000152254_10 (sequence is synthesized)
atccgacttcacagaatagcggcacaggccccattccccatagagatgtttagtttggccttcgcactggtctttttttttaatccttcagttaccaatatttagatacaagaatatttg

SEQ ID NO: 431544 - DNA, 120 bp, Artificial Sequence
  ENSG00000152254_11 (sequence is synthesized)
acataaaaatcggaagttctgtatttcttgaaaaatctgatagtatgacaacacagagcctgcatccccagctggagacaactgaccagagctgcatactaacagtccccagtaggaggc

SEQ ID NO: 431545 - DNA, 120 bp, Artificial Sequence
  ENSG00000152254_12 (sequence is synthesized)
tcccagcaggagccccactatgattcctttatcttcttaaggccaggctgcatctgattcctgttgacattttagtggggaccacagccatatccagtttcagttttcagatgaggaaat

SEQ ID NO: 431546 - DNA, 120 bp, Artificial Sequence
  ENSG00000152254_13 (sequence is synthesized)
ggaagcctatttaggtaaaagaacttgcctggagtcacgccaccttcagagcaggaattagaacccaaggcttctgacacatatccccattacactgtgtgtttgagtgtgcacacatgc

SEQ ID NO: 431547 - DNA, 85 bp, Artificial Sequence
  ENSG00000152254_14 (sequence is synthesized)
aatagcggctcactgcagcctcaaactcctggctcaaatgatcctccctcctcagcctcccattagctaagactacaggtgtgca

SEQ ID NO: 431548 - DNA, 82 bp, Artificial Sequence
  ENSG00000152254_15 (sequence is synthesized)
cggctcactgcagcctcaaactcctggctcaaatgatcctccctcctcagcctcccattagctaaaatattttttagagcca

SEQ ID NO: 431549 - DNA, 120 bp, Artificial Sequence
  ENSG00000152254_16 (sequence is synthesized)
gcctcaaggagttcccttgaggatgttccacccatgtcagcctcccacagtgctgggattgcaggcttgagccattgtattaatagttggcctacactgtcttttgtttcttcatttaca

SEQ ID NO: 431550 - DNA, 120 bp, Artificial Sequence
  ENSG00000152254_17 (sequence is synthesized)
agaggtaaaaatcagtaagaatgaatgctttcatttagattctatgatgactgccatataaatcagctaccttttcagaaatgacattgaaatactgcatcctctttgacttatacccca

SEQ ID NO: 431551 - DNA, 120 bp, Artificial Sequence
  ENSG00000152254_18 (sequence is synthesized)
cacatacatgcagggtctaggtgggaccaacagtggctccagatgtatatacacacgggtccagggacaacagaacaggccaggctacagtatggacttgaacctctgcttcacttctgg

SEQ ID NO: 431552 - DNA, 120 bp, Artificial Sequence
  ENSG00000152254_19 (sequence is synthesized)
tctctgttttacagtagtgctcaccaatatttcaataaattctactgaacttactctaatagaacattattcaacccccaaagacttatctcttcactatgacatctccatactttattt

SEQ ID NO: 431553 - DNA, 120 bp, Artificial Sequence
  ENSG00000152254_20 (sequence is synthesized)
ttaggagacagactttcaaaaccagagaaatcaggtgccttcctcaaggtcatgctccaacccaggccaactattaaatgcttgcatctgttagctggattagtctctatgtatactgaa

SEQ ID NO: 431554 - DNA, 120 bp, Artificial Sequence
  ENSG00000152254_21 (sequence is synthesized)
ctgtgatgaaaatctatagctttgttttagaaaattattgttgatggactattaatattatattaacaatttctcagtaagtgtgttttttcctcattgaatctaggaatgctgggcttt

SEQ ID NO: 431555 - DNA, 120 bp, Artificial Sequence
  ENSG00000152254_22 (sequence is synthesized)
aagttgataactgtgtcatttcaatcaagtacaaggattttgaggcagattttgctagatatcttagtaatcccccacaatgttttatgtaactcttctcagaatatcaatacattaatt

SEQ ID NO: 431556 - DNA, 120 bp, Artificial Sequence
  ENSG00000152254_23 (sequence is synthesized)
attttagatgacatattaaataatctatgaatattaatgaaaacaatacagttgaagtgagtgttgtttaacatgatagtagctgaggataacaaacctcaaaaaatcaaagtattaatt

SEQ ID NO: 431557 - DNA, 120 bp, Artificial Sequence
  ENSG00000152254_24 (sequence is synthesized)
actcctttccaagtatatgtatagagcatgtgtcattgcttttataaaacgcacttaatagctttctttctaaaaggcaactgaactttctaaaaggtaaataaactgaacttgatatta

SEQ ID NO: 431558 - DNA, 120 bp, Artificial Sequence
  ENSG00000152256_0 (sequence is synthesized)
cagcggcgcagggggccgggctccggctaggagggtgggggccgcgccggtgacagccgatccccgcccctgctgcccgccacgtccctcacgtaccactcggcagaggcgcggggaaac

SEQ ID NO: 431559 - DNA, 120 bp, Artificial Sequence
  ENSG00000152256_1 (sequence is synthesized)
cactcggcagaggcgcggggaaacctggcgtactggctgtggcttctctagcgggactcggcatgaggctggcgcggctgcttcgcggagccgccttggccggcccgggcccggggctgc

SEQ ID NO: 431560 - DNA, 120 bp, Artificial Sequence
  ENSG00000152256_2 (sequence is synthesized)
gcgccgccggcttcagccgcagcttcagctcggactcgggctccagcccggcgtccgagcgcggcgttccgggccaggtggacttctacgcgcgcttctcgccgtccccgctctccatga

SEQ ID NO: 431561 - DNA, 120 bp, Artificial Sequence
  ENSG00000152256_3 (sequence is synthesized)
agcagttcctggacttcggatcagtgaatgcttgtgaaaagacctcatttatgtttctgcggcaagagttgcctgtcagactggcaaatataatgaaagaaataagtctccttccagata

SEQ ID NO: 431562 - DNA, 120 bp, Artificial Sequence
  ENSG00000152256_4 (sequence is synthesized)
atcttctcaggacaccatccgttcaattggtacaaagctggtatatccagagtcttcaggagcttcttgattttaaggacaaaagtgctgaggatgctaaagctatttatgactttacag

SEQ ID NO: 431563 - DNA, 120 bp, Artificial Sequence
  ENSG00000152256_5 (sequence is synthesized)
atactgtgatacggatcagaaaccgacacaatgatgtcattcccacaatggcccagggtgtgattgaatacaaggagagctttggggtggatcctgtcaccagccagaatgttcagtact

SEQ ID NO: 431564 - DNA, 120 bp, Artificial Sequence
  ENSG00000152256_6 (sequence is synthesized)
ttttggatcgattctacatgagtcgcatttcaattagaatgttactcaatcagcactctttattgtttggtggaaaaggcaaaggaagtccatctcatcgaaaacacattggaagcataa

SEQ ID NO: 431565 - DNA, 120 bp, Artificial Sequence
  ENSG00000152256_7 (sequence is synthesized)
atccaaactgcaatgtacttgaagttattaaagatggctatgaaaatgctaggcgtctgtgtgatttgtattatattaactctcccgaactagaacttgaagaactaaatgcaaaatcac

SEQ ID NO: 431566 - DNA, 120 bp, Artificial Sequence
  ENSG00000152256_8 (sequence is synthesized)
caggacagccaatacaagtggtttatgtaccatcccatctctatcacatggtgtttgaacttttcaagaatgcaatgagagccactatggaacaccatgccaacagaggtgtttaccccc

SEQ ID NO: 431567 - DNA, 120 bp, Artificial Sequence
  ENSG00000152256_9 (sequence is synthesized)
ctattcaagttcatgtcacgctgggtaatgaggatttgactgtgaagatgagtgaccgaggaggtggcgttcctttgaggaaaattgacagacttttcaactacatgtattcaactgcac

SEQ ID NO: 431568 - DNA, 120 bp, Artificial Sequence
  ENSG00000152256_10 (sequence is synthesized)
caagacctcgtgttgagacctcccgcgcagtgcctctggctggttttggttatggattgcccatatcacgtctttacgcacaatacttccaaggagacctgaagctgtattccctagagg

SEQ ID NO: 431569 - DNA, 120 bp, Artificial Sequence
  ENSG00000152256_11 (sequence is synthesized)
gttacgggacagatgcagttatctacattaaggctctgtcaacagactcaatagaaagactcccagtgtataacaaagctgcctggaagcattacaacaccaaccacgaggctgatgact

SEQ ID NO: 431570 - DNA, 120 bp, Artificial Sequence
  ENSG00000152256_12 (sequence is synthesized)
ggtgcgtccccagcagagaacccaaagacatgacgacgttccgcagtgcctagacacacttgggacatcggaaaatccaaatgtggcttttgtattaaatttggaaggtatggtgttcag

SEQ ID NO: 431571 - DNA, 120 bp, Artificial Sequence
  ENSG00000152256_13 (sequence is synthesized)
aactatattataccaagtactttatttatcgttttcacaaaactatttgagtagaataaatggaaactgaattccatttgtgcccgttaaacctcctaaaggatgaaattgcacctattt

SEQ ID NO: 431572 - DNA, 120 bp, Artificial Sequence
  ENSG00000152256_14 (sequence is synthesized)
tacacttatattttcacagttaattgaacatatttttaaacaactgtagttttgggcaacttttcactttgtggtagacttcagaagtgtggaaatcttcgggtttctataggaaactag

SEQ ID NO: 431573 - DNA, 120 bp, Artificial Sequence
  ENSG00000152256_15 (sequence is synthesized)
ttttttttttttaagaaatactttcatttatgtttgctagaaacattttctaaatgatagtgattagctggttagccatcttcctgttatttggaggagttctgccatcttttattcggt

SEQ ID NO: 431574 - DNA, 120 bp, Artificial Sequence
  ENSG00000152256_16 (sequence is synthesized)
agtgacagctgtaatatggtcttcatgtttatcagtgacttgactacaagtaaagcagaaaacagttggcctgtaatcacagaaccagccacccttcggcgtctacatgcattgtcttag

SEQ ID NO: 431575 - DNA, 120 bp, Artificial Sequence
  ENSG00000152256_17 (sequence is synthesized)
ctctgaggttaatttaccatttttaaattttattgtaaagaagtgtaatgactagctctctgtggatctatgccaaaatcatgggccatcttttctaagtgtacttctgattaatgcaag

SEQ ID NO: 431576 - DNA, 120 bp, Artificial Sequence
  ENSG00000152256_18 (sequence is synthesized)
gggaaatttttatactgaaaacaaacaaacaaactagcagctactaaaatagagaagaaattgagggcaaagtaatatgtctccaaaactgaactgattgcttgttgagattacctagaa

SEQ ID NO: 431577 - DNA, 120 bp, Artificial Sequence
  ENSG00000152256_19 (sequence is synthesized)
agcttttggaaaaaaatagagcttttctgcatcctactccagatacactgaatcggaatccctagggctagagcctagaaatctcactttttaaaatgcttccaaggtaagtctgatgcc

SEQ ID NO: 431578 - DNA, 120 bp, Artificial Sequence
  ENSG00000152256_20 (sequence is synthesized)
taccctaggttgggaaccactctttcaaagtaaacagtgatgacacagcatttgctaaagtaacatctgtaggttttggtttccacctatttaaagtcagatttatagactcgaggagac

SEQ ID NO: 431579 - DNA, 120 bp, Artificial Sequence
  ENSG00000152256_21 (sequence is synthesized)
agaaactgaatcccacacctggtgcaattagaagcataattagaagcagaagaacaaaatgccacgtaaccaaagcatcagagccatcattgcacgtgtctttttttcttttttcttttt

SEQ ID NO: 431580 - DNA, 120 bp, Artificial Sequence
  ENSG00000152256_22 (sequence is synthesized)
tttttttcaagacagggtctcgctcttttgcccaggatggagtacagtggcatggtcaaggctcactgcagcttcaatcttctgggctcaagtaatccttccacctcagcctcccatata

SEQ ID NO: 431581 - DNA, 120 bp, Artificial Sequence
  ENSG00000152256_23 (sequence is synthesized)
gctggaactacagttgtgcactaccacacccagctaattttttgatttcttgtggagatgaggtctcagtatgttcccaggctagtgttgaactcctgagctcaagaaatcctcctgcct

SEQ ID NO: 431582 - DNA, 120 bp, Artificial Sequence
  ENSG00000152256_24 (sequence is synthesized)
attacaggcgtgagccaccacacatggcctattgcacaagtcttgacaaacaacatatattttctaaaactatccagatttcattatcagggaaaagtttgcttaggtttattacagcag

SEQ ID NO: 431583 - DNA, 120 bp, Artificial Sequence
  ENSG00000152256_25 (sequence is synthesized)
gcttaggtttattacagcagtccttggcatttgtatggtaatttgtactttacaaatactttgatatattataactctattggtctttgaaacaaagcgatacagtgtaggtggtatcat

SEQ ID NO: 431584 - DNA, 120 bp, Artificial Sequence
  ENSG00000152256_26 (sequence is synthesized)
tctctttctcactcagtgtggcccagagttgctcagaattggagcagagcctgagacgtatctgcagatcctgtcatcagctggcaagtccaggagactgtgtcatttagagactgtgtt

SEQ ID NO: 431585 - DNA, 120 bp, Artificial Sequence
  ENSG00000152256_27 (sequence is synthesized)
gttagttatccctcaacatcttctaaggtggcaggaaataatattggaaataacattttaaagtaaaaattttaaagtttaaagaagagttttgccacttaaacaggggagctttgtctg

SEQ ID NO: 431586 - DNA, 120 bp, Artificial Sequence
  ENSG00000152256_28 (sequence is synthesized)
gaaaatacactgagttgaaacacttcatccttggaaggattatataagatgaacagttgtgataaatgtgtagattagagggatgtgaatgggcagttagtccagtgccctcatttaaga

SEQ ID NO: 431587 - DNA, 120 bp, Artificial Sequence
  ENSG00000152256_29 (sequence is synthesized)
ggccaagatcctgattcagaggaggcatcctttgcccagagctgcttagctaatctgaccaaatgttgggaaaaatgtctcacctaacccactattccttaattatggattttgtgaaaa

SEQ ID NO: 431588 - DNA, 120 bp, Artificial Sequence
  ENSG00000152256_30 (sequence is synthesized)
tgtgaaaaacaatagaacatgttaatgagtaatttatattagttcgatgtattacaattttttagctttaaattacagttttcttataatgttgaaatgttttagaatcctttgaatcta

SEQ ID NO: 431589 - DNA, 120 bp, Artificial Sequence
  ENSG00000152256_31 (sequence is synthesized)
tttcctaaatgaaacatttgtacaacatttgatgtttttacttatgaaatattctcctcccccaagaaaatttaaactttttctctctatttaaaagctaagaaatgttttaaaggaaaa

SEQ ID NO: 431590 - DNA, 120 bp, Artificial Sequence
  ENSG00000152256_32 (sequence is synthesized)
atgaaattatcttcctttagcttatttttaaggtaaaacagctttttactctgttattgtggtaatggacagaatattacatacaaaaatattctgggagagctttttcctagttggttt

SEQ ID NO: 431591 - DNA, 120 bp, Artificial Sequence
  ENSG00000152256_33 (sequence is synthesized)
taaatcattgtgccacctgaaaggtttttagattttataggagctaatttgtccaccagcattaatgtaacacagtgtagttatgaaaatatattgaaggacaggaagtggacacgaagt

SEQ ID NO: 431592 - DNA, 120 bp, Artificial Sequence
  ENSG00000152256_34 (sequence is synthesized)
gatttttgtaacctgagcagttaatgaatgtgccaacattttctaggaagggacagcaagaatattctgctctgtagttaaaatactggctggcttttgatgtcttcatgcttaattgtg

SEQ ID NO: 431593 - DNA, 120 bp, Artificial Sequence
  ENSG00000152256_35 (sequence is synthesized)
atcactttcttgcactgtgatgtttttacgtgaatatgttgaagtagaagtctaccatattattttataaaatgttttctgtatggcaataaactgaaaacatggatcaacccttctttt

SEQ ID NO: 431594 - DNA, 120 bp, Artificial Sequence
  ENSG00000152256_36 (sequence is synthesized)
gaaaataaactgagtcaatttagccttttaaaaatatagtcatctcttttaaatagaatcctcttccaccatcaaggctcaacattttgtaagcatccaaaaaattggtaattagggggc

SEQ ID NO: 431595 - DNA, 120 bp, Artificial Sequence
  ENSG00000152256_37 (sequence is synthesized)
ttgcactaaatttcactatcttcagtagagaggaactgtttggaacttagatttccaatgtgtatattctaatggagaaagcaagaggtagagtttgtatgtttgacttaccttagattt

SEQ ID NO: 431596 - DNA, 120 bp, Artificial Sequence
  ENSG00000152256_38 (sequence is synthesized)
ttattttccatacatactgcaaatgattgacttgttgcataaatgaagatcttctgttgtgtgcttttcaaacactgtaaataaatttgaaatttgaataactttccacagtataactgt

SEQ ID NO: 431597 - DNA, 120 bp, Artificial Sequence
  ENSG00000152256_39 (sequence is synthesized)
aaaaaaaaaaaaaaaaagtcttaatttaaccagcattaccctctgcttgtaccaattgaatggcagaactactatagtcaaaaataaattcctatcctatttttaattgatgggatatag

SEQ ID NO: 431598 - DNA, 120 bp, Artificial Sequence
  ENSG00000152256_40 (sequence is synthesized)
gcagcacaatttcccttcattgttgaagccaacaagttccgtaacagaactccagaggtaaatagctgggaaaactgttagttttaaggtcccactgttgctctgtgaatgactaatcag

SEQ ID NO: 431599 - DNA, 120 bp, Artificial Sequence
  ENSG00000152256_41 (sequence is synthesized)
aggaagccaaaaatcagccaactaatttcagtttatgtctttaattgtgatgtaagtgtgaagtttctacatatgggtaatcagggttgagttaggtagtttgcaaacatgacttttgct

SEQ ID NO: 431600 - DNA, 120 bp, Artificial Sequence
  ENSG00000152256_42 (sequence is synthesized)
ggaggaacttttaatcatgtcttattaatttctggtcccaataattaattttcttacagtcaaacccaatgcacttgaaaaataatataattaatactgtgtgaagaattttttgcatgt

SEQ ID NO: 431601 - DNA, 120 bp, Artificial Sequence
  ENSG00000152256_43 (sequence is synthesized)
taaaaaaagcaaaccactagtttgcttagttctggcattcataaactactgtaccttctgttctattgacatgtttggaaaaaagaattgaacatatgtaccacccccctctttctagag

SEQ ID NO: 431602 - DNA, 120 bp, Artificial Sequence
  ENSG00000152256_44 (sequence is synthesized)
tctccacagttctttagcaattgctaaccataggtttttaatagcaaaagacaagattgtcagtttttggtgcaaaactctactctttttggttgacttggaaaagctgttgtttatatt

SEQ ID NO: 431603 - DNA, 120 bp, Artificial Sequence
  ENSG00000152256_45 (sequence is synthesized)
gggaattgtgacagctgtcttttactttgttaaattagcaattatttagcaaaaatacagagtttcaccccagtaaaataaacttccacgtgagagttgtgttcattcaagggttatttt

SEQ ID NO: 431604 - DNA, 120 bp, Artificial Sequence
  ENSG00000152256_46 (sequence is synthesized)
ttgagagtggaagtacatttcctgcatttgtcacagataatatcagaaattttgttgttttgattaaaatgttgccatctacttataagttaaaaatgctgagaaggttttttttggaaa

SEQ ID NO: 431605 - DNA, 120 bp, Artificial Sequence
  ENSG00000152256_47 (sequence is synthesized)
cagtttatgaggccaggacatttttaagtttgactcaaatataaaaagccacagtattcttgccatggttttgtacttagatgtctctcattatggaattcagaatgtgacagttatagt

SEQ ID NO: 431606 - DNA, 120 bp, Artificial Sequence
  ENSG00000152256_48 (sequence is synthesized)
actacatgaaaatacttaatatagagttctacagttacagtattgcatgaaaatacagtatggtatgaaattatttgtccaaaactgtactccagaaatggagcccatatgattatataa

SEQ ID NO: 431607 - DNA, 120 bp, Artificial Sequence
  ENSG00000152256_49 (sequence is synthesized)
ctataaaataggatgggacagagaaaaatatgtctgtattacagcataaacatatctggtttaatatgaactatttcttttcatctctttactctcagtatctccataatggccagtatg

SEQ ID NO: 431608 - DNA, 120 bp, Artificial Sequence
  ENSG00000152256_50 (sequence is synthesized)
tagtaggcacctgtaattgtgaagcagcctcattgtctggggtaaataccaaggttcttggtctcatggccaaggagatcgaggtcgcagacacacacagtttggagcaggagtttaata

SEQ ID NO: 431609 - DNA, 120 bp, Artificial Sequence
  ENSG00000152256_51 (sequence is synthesized)
ggcaaaaggaaacagctctgttacagagaggggttccgagcaggttgccaagttgtagtaaaaatgtcagggtttttataaatgggctagtgaggagggggctcatgaggaggggatatc

SEQ ID NO: 431610 - DNA, 120 bp, Artificial Sequence
  ENSG00000152256_52 (sequence is synthesized)
ttatcctcctagggtccgaggacgctttagttgggaccaggtgtgctatctgtacagagcatagctttttatcagctcttatcccattccttgaccacataggctcttagactcttattc

SEQ ID NO: 431611 - DNA, 120 bp, Artificial Sequence
  ENSG00000152256_53 (sequence is synthesized)
tatgttgtcttcgtccagcttatctggaagggagagtttctctgtctgttcccatacatcttgcagctgcaggcatccccccggtctgcttttagcttccttatcttagtgcccctaaag

SEQ ID NO: 431612 - DNA, 120 bp, Artificial Sequence
  ENSG00000152256_54 (sequence is synthesized)
ggaaaggaatgtgcttattaagggccactgttttactggggttaactgcatgaggtcaaaaagagctatatttgagctgctgtttgttaaaagaaaagttttctgccggggactcgcttt

SEQ ID NO: 431613 - DNA, 120 bp, Artificial Sequence
  ENSG00000152256_55 (sequence is synthesized)
accctgtctacctaaattctttctgccttctataacaattgtatgctcagtaaatacataaggaataatgaacttaataacatttttttccattctcaaaatgatacttaaatgactcag

SEQ ID NO: 431614 - DNA, 120 bp, Artificial Sequence
  ENSG00000152256_56 (sequence is synthesized)
tacaacaaagaaactgagtagtaaccagtgcaaaactagcaaaaggatgaaatacacaagaaaatgagagaatttaagaggagtagcaaaacagcactgctaaagttacgggtttatttt

SEQ ID NO: 431615 - DNA, 120 bp, Artificial Sequence
  ENSG00000152256_57 (sequence is synthesized)
aaagtttaaaatagaagtaaacaagcaaacatactgataatggttaggctttctgtccccaccgcacaaatctcatcttgaattataatctcaacatgttaagggagagaccagatgaaa

SEQ ID NO: 431616 - DNA, 120 bp, Artificial Sequence
  ENSG00000152256_58 (sequence is synthesized)
gtaattggatcatggggttggtttctcccatgctgttctcgtgatagttcccatgagatctgatggttttataagtatttggtagttcctcctgcattcattcttcctgctgccctgtga

SEQ ID NO: 431617 - DNA, 120 bp, Artificial Sequence
  ENSG00000152256_59 (sequence is synthesized)
gaggcttctgcagccttgcggaactgtgagtcaatcctttttattataaattaccccgtctcaggcagttctttatagcagtgtggggatggactaatactcgctgggttagctggggta

SEQ ID NO: 431618 - DNA, 120 bp, Artificial Sequence
  ENSG00000152256_60 (sequence is synthesized)
ggtaaagccacagctgtggcagcaaccagctagtgggtgtcccttgatggaggctttgcaggctgcagcagaagggacccttcagataaacctccagtcaggaaaggaaaaggcccaaat

SEQ ID NO: 431619 - DNA, 120 bp, Artificial Sequence
  ENSG00000152256_61 (sequence is synthesized)
gcccaaataaacagtatttagatttttttttaaaggacataactaccaatagagatttaaaataatcataagaataccattaactttatgataaaaattttgtaagtggagaagaaatgg

SEQ ID NO: 431620 - DNA, 120 bp, Artificial Sequence
  ENSG00000152256_62 (sequence is synthesized)
ctaggaaaacagtagaagatccatctaagattttgacaatttaaatcaaccactaaggaagtggaatcagtaatcacaagtccacctcgccaaaagacaatttttgaaagatgaatgtta

SEQ ID NO: 431621 - DNA, 120 bp, Artificial Sequence
  ENSG00000152256_63 (sequence is synthesized)
ccaaaacatcaagaaactgataattcctgtcttatagaaactttgaaatgagagaaagctacccaacccatttcagaaagttagtaaaatctcaaagctacacttgagcaaagactgtga

SEQ ID NO: 431622 - DNA, 120 bp, Artificial Sequence
  ENSG00000152256_64 (sequence is synthesized)
aatattaatagaccaatcttgtttatgaacatagatggaaaaattgctgatgaaatattggcacattgaatgtagcagtgcataaaatattgtatcatgagcaaaaggagaatctttccc

SEQ ID NO: 431623 - DNA, 120 bp, Artificial Sequence
  ENSG00000152256_65 (sequence is synthesized)
aggaacaggaggatgttttaataaaaatatgtaatttacctctctacagattaaaggagaaaaactatatgatcacatcaacagaaacaggaaattcagtttctttgggggatagttgta

SEQ ID NO: 431624 - DNA, 120 bp, Artificial Sequence
  ENSG00000152256_66 (sequence is synthesized)
attaaaagtgcttaactcacttatataagccattagtggatgttacaataaacctcgtatagtgtcagatgtaagacagacatactggaattgtctatgaggttggatccatgggcctgc

SEQ ID NO: 431625 - DNA, 120 bp, Artificial Sequence
  ENSG00000152256_67 (sequence is synthesized)
catggaaaatttgttgagtaatacgtccaaggcgtcaccatttgccaggcgttgcaagtatcaccatttgcaaggtgttaacaaaaagttacctgcctatggattctcctttctaactct

SEQ ID NO: 431626 - DNA, 120 bp, Artificial Sequence
  ENSG00000152256_68 (sequence is synthesized)
gacctaatattttggagcatagaggaaagaaacatcttatgtttctgtgtttgggtaaacattagacttataaaagggcctagggtttttttgtttggtaaaccattgcctttcctgctt

SEQ ID NO: 431627 - DNA, 120 bp, Artificial Sequence
  ENSG00000152256_69 (sequence is synthesized)
tggtgtggcaaatcttcctttggagaaaaaggtccctttaatcttaaaaccaactctcagtgaccaacaaaagcaacaaataggaacaaccacccattaagaaccatcaggtgatgcctc

SEQ ID NO: 431628 - DNA, 120 bp, Artificial Sequence
  ENSG00000152256_70 (sequence is synthesized)
atttgctgtggtgcacagctgaacttgattgttactcttggatcagggttggcttgataaggactcacttaaccaatggaaagtaaggttaaatctttgtaagcaatgctcctgatgcga

SEQ ID NO: 431629 - DNA, 120 bp, Artificial Sequence
  ENSG00000152256_71 (sequence is synthesized)
atcacctggagatcttgagcaaatgcagactggttcagcagatctggagtggggcctgagattctgcatttctaacaagtttcctggtgatattaatgctgctggtctgtgagccatact

SEQ ID NO: 431630 - DNA, 120 bp, Artificial Sequence
  ENSG00000152256_72 (sequence is synthesized)
ttgagtagcaaaggactaaaggttgtgagataaactgcttttagcagcccaaagggccagctggaaagacgagaccagttacagagcaaatggcaagacagatctggtaatctgattctt

SEQ ID NO: 431631 - DNA, 120 bp, Artificial Sequence
  ENSG00000152256_73 (sequence is synthesized)
agagtacttaaaaaagataagaaggatctattcctgatatacagggtacttggtggatgtgtccatgacctcgagatcgaaaacccattagttaatctttgtgacatctgaattttaagg

SEQ ID NO: 431632 - DNA, 120 bp, Artificial Sequence
  ENSG00000152256_74 (sequence is synthesized)
atcttacccagtgaacatataactagtggaaatcctgataattggctaatgcaaggaagtgatacccatgtgtaatgcttatctttgtatccatttcatggggaaggtcatggaagacga

SEQ ID NO: 431633 - DNA, 120 bp, Artificial Sequence
  ENSG00000152256_75 (sequence is synthesized)
cagcaaacttgagtggttaatgagagcttcactaatgttgtctgctgcaggcaataagtgaagtctctggcagtgggaagcatggacccaagaccgaaagctctggcactttatagcagt

SEQ ID NO: 431634 - DNA, 120 bp, Artificial Sequence
  ENSG00000152256_76 (sequence is synthesized)
ggtggggggtagataggacttagtgtggccccttaaagagcaaggtccaagtgattttctctggtgaatgtcgatgtggatctagtctccagggttagatccaggcaggtaacatcaaag

SEQ ID NO: 431635 - DNA, 120 bp, Artificial Sequence
  ENSG00000152256_77 (sequence is synthesized)
tcagttgataagacctcttatgcctgtgaatggaaggccctgataaaacttcattattaatgttctgcattaatttagcggatgactatagtcatttcacataatctaatacatgaatgt

SEQ ID NO: 431636 - DNA, 120 bp, Artificial Sequence
  ENSG00000152256_78 (sequence is synthesized)
cctgtatgggtgactgctgagggtttaacaaaggagagtccatttatatttggctggtaagatcgatgcttctgtcactactgatgggcaaggatattaacatcaatatctaaaaaaatt

SEQ ID NO: 431637 - DNA, 120 bp, Artificial Sequence
  ENSG00000152256_79 (sequence is synthesized)
ctgagatttggattgtgatgtgttaaatttctagaccaatttgaggagaatttaacaatagcttttcaatttatgaacatggcgtatatcttttttggcggggggtgaggacagagtctt

SEQ ID NO: 431638 - DNA, 76 bp, Artificial Sequence
  ENSG00000152256_80 (sequence is synthesized)
ggcgtatatcttttttggcggggggtgaggacagagtcttgctctgagattacccaggctggagttgaagcaattc

SEQ ID NO: 431639 - DNA, 82 bp, Artificial Sequence
  ENSG00000152256_81 (sequence is synthesized)
agcgccatcatgcctgactaattttcgtatttttagcagagacagggtgtcgccacctcaagggatccacctgccttggcct

SEQ ID NO: 431640 - DNA, 120 bp, Artificial Sequence
  ENSG00000152256_82 (sequence is synthesized)
ggccagacatagcatatatcttcctttacatagattgcctttgatttctttcattgttactttgtagttttcagcttacagattccgcgcatattttgttagacttaaatctaagtattt

SEQ ID NO: 431641 - DNA, 120 bp, Artificial Sequence
  ENSG00000152256_83 (sequence is synthesized)
gctttttttttaacttacaaatttttttaaaaaaacgtttttcctctccaatgttcattgctaatacatttcacgtttgaatctccagttcagaaaaatcatggcctctggagttttact

SEQ ID NO: 431642 - DNA, 120 bp, Artificial Sequence
  ENSG00000152256_84 (sequence is synthesized)
gaggactagagatagctaagtaacatagttccaccttattcacttggtctttgatgtggtgtccataattgagtaaatggcagtatgtccaatggcaacaccatgaacttgactttgccc

SEQ ID NO: 431643 - DNA, 120 bp, Artificial Sequence
  ENSG00000152256_85 (sequence is synthesized)
tcttgtctagccctctccatttagacttggaagggtcagcagtaaaatttcactggcccagtccagggctgcttgagtgttactgttttgtgccacaatatgatgtggccagactacttt

SEQ ID NO: 431644 - DNA, 120 bp, Artificial Sequence
  ENSG00000152256_86 (sequence is synthesized)
tctagtttcgagattattttggagctttatattgggtatgttcttatccaactatcattaggggcattgatctctgatgcccttttctttcttatcttccaaatggcaggcagtaaatgg

SEQ ID NO: 431645 - DNA, 120 bp, Artificial Sequence
  ENSG00000152256_87 (sequence is synthesized)
cttattaagcaagtataagattcaagatctcagccccaaagatacatttgtagatgccaggcttaacattcctgaggctctcagagaaaacttttccctctatagactccccattttaag

SEQ ID NO: 431646 - DNA, 120 bp, Artificial Sequence
  ENSG00000152256_88 (sequence is synthesized)
aaggaggcacagggcttggttggcccatttagttagtgacacacctatattactctccttggcatcttaccccagcccatccattgggttgtgtcagtcttttatttctaagtgaggatc

SEQ ID NO: 431647 - DNA, 120 bp, Artificial Sequence
  ENSG00000152256_89 (sequence is synthesized)
cagtcaacaggaggcacaagagatagaaccaaataccataatgcctccttctattccactatgaacagtcaaggacactggaggcctctgggtgggacacataggcgttcaagagcctct

SEQ ID NO: 431648 - DNA, 120 bp, Artificial Sequence
  ENSG00000152256_90 (sequence is synthesized)
gaggcctctgggtgggacacataggcgttcaagagcctctgagcttaaagatatgtgagtggagctaactagactgtccaggtttggtctacactgtaattttttttttttttttttttt

SEQ ID NO: 431649 - DNA, 69 bp, Artificial Sequence
  ENSG00000152256_91 (sequence is synthesized)
tttggaagcagagtcttgctcttttgcccaggccagagtgtagtggtgtgatctcagctcagtgcagcg

SEQ ID NO: 431650 - DNA, 62 bp, Artificial Sequence
  ENSG00000152256_92 (sequence is synthesized)
agcaggcatgaaccaccgtgctcagcctctctgtaaatcttgagtcggcactgagctcatga

SEQ ID NO: 431651 - DNA, 120 bp, Artificial Sequence
  ENSG00000152256_93 (sequence is synthesized)
cagcctctctgtaaatcttgagtcggcactgagctcatgaaagctgtgctgagtgggtttctttagattttcattttcatgtttgccccatttatgctaatattaattattggaaaataa

SEQ ID NO: 431652 - DNA, 120 bp, Artificial Sequence
  ENSG00000152256_94 (sequence is synthesized)
ttcacctactttgcttctctctgaccaacataggggcaggatctgtggaaagacatttaccacctgtttgaaaaggtcagcgtgctgatattcactaactactacccccacaactccccc

SEQ ID NO: 431653 - DNA, 120 bp, Artificial Sequence
  ENSG00000152256_95 (sequence is synthesized)
tcccccaaacctgatagatgctataatttctgcagtccaatcactattcttcccaaactccatgagccagattttatacatactttgcgtgaccataaaactctgtactattatagacat

SEQ ID NO: 431654 - DNA, 120 bp, Artificial Sequence
  ENSG00000152256_96 (sequence is synthesized)
aaaaccatttaatttcatagataccttcagtggtggcatcactgggtcctctcttggatagcatagtcctatgaccaaatgggtcagtcgttgatcaggcttcatgagaatatgatcgct

SEQ ID NO: 431655 - DNA, 120 bp, Artificial Sequence
  ENSG00000152256_97 (sequence is synthesized)
gggagaaatatacagctaatttaacaacaaatgactgtcctaattctggagacctgggaagtattgatgagagtatagtgatcataagcagacattgggtgctttagcaaagccaatttg

SEQ ID NO: 431656 - DNA, 120 bp, Artificial Sequence
  ENSG00000152256_98 (sequence is synthesized)
cctgcatcctctggaaggtaaagaagatctcctctctcttagaacttaatcaaactcttggcatccacagaaggctaggaggatgtaatgaatacttaccatttttgtggaagcccacaa

SEQ ID NO: 431657 - DNA, 120 bp, Artificial Sequence
  ENSG00000152256_99 (sequence is synthesized)
ccttttgaatggcctttctatactttagtgaacctccatgttatgaaccttacttcctcaagtctcttttgctgctaggaggcagacagtaacttcggtaattagaaacatctgcactca

SEQ ID NO: 431658 - DNA, 120 bp, Artificial Sequence
  ENSG00000152256_100 (sequence is synthesized)
gcaacatgaagcacaagttctgtgcagttgtccatatgctgtcatgagttttgccatatgtatcatctggctttcagaggacctttcatggttgtcaggttaagttcctgatacagaagt

SEQ ID NO: 431659 - DNA, 120 bp, Artificial Sequence
  ENSG00000152256_101 (sequence is synthesized)
ggcatcagtgctggtgttaatggctgcagtaaagtcaaattcctagattttagtgctctgtggtagcagagagaatggtggtagtttattttttctttccttttttttttaaaaaaaaaa

SEQ ID NO: 431660 - DNA, 120 bp, Artificial Sequence
  ENSG00000152256_102 (sequence is synthesized)
aaaaacctttttcatgttgaagttcacatgacctacaactaaccattttaaagtgtaattcagtgtcattcagtacatccacaatgtgcaatcaccacctctgtctagttccaaaacatt

SEQ ID NO: 431661 - DNA, 120 bp, Artificial Sequence
  ENSG00000152256_103 (sequence is synthesized)
tttatcaccctaaaaggaaaccttgcacccattaaacagtggtagtttctctatcatgccacttttgtagcatgctttggggtcttattcctgggatctttctctacagtggtatgatta

SEQ ID NO: 431662 - DNA, 120 bp, Artificial Sequence
  ENSG00000152256_104 (sequence is synthesized)
tataagggtggaaatataaaagagtaagcctttagaaacagtttgtgtctaaattagctctcaggcatattgtcttcaaaggaatgttttaaaccagccaaagactaacatcaacatgct

SEQ ID NO: 431663 - DNA, 120 bp, Artificial Sequence
  ENSG00000152256_105 (sequence is synthesized)
tacattttgagtccaaaattaaaatccaaaatagccaagcatggtggctcacgcctataatcccaactactccagaggctgaggtgtgatagaatttcttgaacctaggcgttccaggct

SEQ ID NO: 431664 - DNA, 120 bp, Artificial Sequence
  ENSG00000152256_106 (sequence is synthesized)
gcactccagcctgggtgacagagcgaggttgcttctaaaacaaaaatttgaaatagtaagtgctttgattttttttaatatagaatcaaacaattgtgaaaatataattggctaagtttc

SEQ ID NO: 431665 - DNA, 120 bp, Artificial Sequence
  ENSG00000152256_107 (sequence is synthesized)
tgaaaatataattggctaagtttcatatacagttctttctaaaactccttctgttctctaagatgtagtttgaaccagccaaggatgatggcttcaacatgtctccagttgttttgccac

SEQ ID NO: 431666 - DNA, 120 bp, Artificial Sequence
  ENSG00000152256_108 (sequence is synthesized)
tccagggcctgactcaaaccaaaataagacttgctgttaccctgagacaagccaactgtcattgctttagcaaccactacggctacaggttgttgcatcatgccaagctctgtgttcttt

SEQ ID NO: 431667 - DNA, 120 bp, Artificial Sequence
  ENSG00000152256_109 (sequence is synthesized)
ctaactagtagaatggagtgggatggtatcgtgatggtgaacccaaaacaatggtactaggaaggaggttggccaaactcagagtggaggctgaccctgtatctggttgtagcagagtcg

SEQ ID NO: 431668 - DNA, 120 bp, Artificial Sequence
  ENSG00000152256_110 (sequence is synthesized)
gtcctaggggaacaggctcagcagcagcaaggatgcaaggaccagaaggcagcaggggaaggaaaaggagcaggggataggggaactttaggagcagagtagtgttgataactggcatct

SEQ ID NO: 431669 - DNA, 120 bp, Artificial Sequence
  ENSG00000152256_111 (sequence is synthesized)
ggaacctacagtttccagttcagagcagtacaccatactcagtgtatacttacactccaagacatttcctgggcagtgatctagaaatgatatttttaaaaggagctgtgtttcagtgtt

SEQ ID NO: 431670 - DNA, 120 bp, Artificial Sequence
  ENSG00000152256_112 (sequence is synthesized)
agactgtagttatccaagcagtatcagatagtgtgcagtttttgtagtaaaaggtaaaaatctgaataataaagtttattaataacagttttagttaatacttgactgacattgagaccc

SEQ ID NO: 431671 - DNA, 120 bp, Artificial Sequence
  ENSG00000152256_113 (sequence is synthesized)
ttgatgcaaaaaggtaagtagaagagaaggctgtaaacacaagaccatcataccctgtggggaatttacaatctaaatataacaaacatatagagtgagataggagaaaagaaatgggat

SEQ ID NO: 431672 - DNA, 120 bp, Artificial Sequence
  ENSG00000152256_114 (sequence is synthesized)
gataatgatattgctgtactaaagtctatttaggaaatggaaatatatagcaagaggagtcagctacttgggcattgatcaaagaaaaataaacatatagaaggaaagaaaggtcgtttt

SEQ ID NO: 431673 - DNA, 120 bp, Artificial Sequence
  ENSG00000152256_115 (sequence is synthesized)
agtttataacattttccttccgattctaggtgattatatagctagtttactcttccacccccaagattctggggtattttggctaatgttatttgcaatgtccataaactcagaagaagt

SEQ ID NO: 431674 - DNA, 120 bp, Artificial Sequence
  ENSG00000152256_116 (sequence is synthesized)
tagtattaacggggatatgaaagaacctccagttactatgcaagaaattttaaatttccatcatgttaaattgtacaactgtttatcattcactctgctgtaagtctatgtgaaaccaaa

SEQ ID NO: 431675 - DNA, 120 bp, Artificial Sequence
  ENSG00000152256_117 (sequence is synthesized)
tccgtggatttaccaatggccattttatcacctccaaactatcttttatttttttgaattgtatctctctccttattccattttcttctgtttgattaaaatcctgcatgttctcctgca

SEQ ID NO: 431676 - DNA, 120 bp, Artificial Sequence
  ENSG00000152256_118 (sequence is synthesized)
ataatatgctcctttttcaggtaaagagacggaggctcagagaggttaaacagctcactcaaaggcacagagccagtacatggcagtacatctcttctcccggggccgccgtcgcggtga

SEQ ID NO: 431677 - DNA, 120 bp, Artificial Sequence
  ENSG00000152256_119 (sequence is synthesized)
tactatttagggccacacgtcccagtgttcagctttcgtatttacgtactactgtttggcaagcggggactcctgaagctctctgaccctggaaaatgcgtggcttgcgtcacagaggag

SEQ ID NO: 431678 - DNA, 120 bp, Artificial Sequence
  ENSG00000152256_120 (sequence is synthesized)
cgtttctggaacgcgctcgcagcacgacaccgcggtgtgtgcaagcggaacgccgccctgtccttgagccttttggctgagattgggagggcagaggaagcaggaaggatcagtgaatgc

SEQ ID NO: 431679 - DNA, 120 bp, Artificial Sequence
  ENSG00000152256_121 (sequence is synthesized)
ttaaatgtggttataagaattgtgattctttggcatatttccatcaaattttaaaacttcaaatagtgcatatgtacttgaaaattacactttctcttttctaaaaagctgtatttttaa

SEQ ID NO: 431680 - DNA, 120 bp, Artificial Sequence
  ENSG00000152266_0 (sequence is synthesized)
gcagtccaattcatcagttgtctttagtttactcagcatcagctactaacatacctgaacgaagatcttgttctaagacattgtatgtgaagatgatacctgcaaaagacatggctaaag

SEQ ID NO: 431681 - DNA, 120 bp, Artificial Sequence
  ENSG00000152266_1 (sequence is synthesized)
ttatgattgtcatgttggcaatttgttttcttacaaaatcggatgggaaatctgttaagaagagatctgtgagtgaaatacagcttatgcataacctgggaaaacatctgaactcgatgg

SEQ ID NO: 431682 - DNA, 120 bp, Artificial Sequence
  ENSG00000152266_2 (sequence is synthesized)
agagagtagaatggctgcgtaagaagctgcaggatgtgcacaattttgttgcccttggagctcctctagctcccagagatgctggttcccagaggccccgaaaaaaggaagacaatgtct

SEQ ID NO: 431683 - DNA, 120 bp, Artificial Sequence
  ENSG00000152266_3 (sequence is synthesized)
tcccagtgaaaatgaaaacagatattgtcagagttctgctctagacagtgtagggcaacaatacatgctgctaattcaaagctctattaagatttccaagtgccaatatttctgatataa

SEQ ID NO: 431684 - DNA, 120 bp, Artificial Sequence
  ENSG00000152266_4 (sequence is synthesized)
caaactacatgtaatccatcactagccatgataactgcaattttaattgattattctgattccacttttattcatttgagttattttaattatcttttctattgtttattctttttaaag

SEQ ID NO: 431685 - DNA, 120 bp, Artificial Sequence
  ENSG00000152266_5 (sequence is synthesized)
tatgttattgcataatttataaaagaataaaattgcacttttaaacctctcttctaccttaaaatgtaaaacaaaaatgtaatgatcataagtctaaataaatgaagtatttctcactca

SEQ ID NO: 431686 - DNA, 120 bp, Artificial Sequence
  ENSG00000152266_6 (sequence is synthesized)
ccttttagtatccaattatctgaaacttaagaagagtgtgcaccgcccaatgggtgtgtgtatgtgctgctttgaacctatagttgagatccagagaattgggagtgacatcatctgtaa

SEQ ID NO: 431687 - DNA, 120 bp, Artificial Sequence
  ENSG00000152270_0 (sequence is synthesized)
agtcccgagaggtgcccgagggaaaaggaggcggcagctaaactggtcctggagagaagccccttccgcccctctcctcagccagcatgtcccggactccgccgctcctcagtccgcgcg

SEQ ID NO: 431688 - DNA, 120 bp, Artificial Sequence
  ENSG00000152270_1 (sequence is synthesized)
cccgggccgtggcggccggcgcagccctgacgggttgcgaaccagggggcgccccgaacgcgggggttggggtctgggagcgcgagcggccgctacggtacgagcggggtgtgctgagtc

SEQ ID NO: 431689 - DNA, 120 bp, Artificial Sequence
  ENSG00000152270_2 (sequence is synthesized)
gctgagtcccgtggccacccccggccccagccatgaggagggacgagcgagacgccaaagccatgcggtccctgcagccgccggatggggccggctcgccccccgagagtctgaggaacg

SEQ ID NO: 431690 - DNA, 120 bp, Artificial Sequence
  ENSG00000152270_3 (sequence is synthesized)
gctacgtgaagagctgcgtgagccccttgcggcaggaccctccgcgcggcttcttcttccacctctgccgcttctgcaacgtggagctgcggccgccgccggcctctccccagcagccgc

SEQ ID NO: 431691 - DNA, 120 bp, Artificial Sequence
  ENSG00000152270_4 (sequence is synthesized)
ctgctcccccttctgccgggcgcgcctctcgctgggcgccctggctgcctttgtcctcgccctgctgctgggcgcggaacccgagagctgggctgccggggccgcctggctgcggacgct

SEQ ID NO: 431692 - DNA, 120 bp, Artificial Sequence
  ENSG00000152270_5 (sequence is synthesized)
cgctgctgagcgtgtgttcgcacagcttgagccccctcttcagcatcgcctgtgccttcttcttcctcacctgcttcctcacccggaccaagcggggacccggcccgggccggagctgcg

SEQ ID NO: 431693 - DNA, 120 bp, Artificial Sequence
  ENSG00000152270_6 (sequence is synthesized)
gctcctggtggctgctggcgctgcccgcctgctgttacctgggggacttcttggtgtggcagtggtggtcttggccttggggggatggcgacgcagggtccgcggccccgcacacgcccc

SEQ ID NO: 431694 - DNA, 120 bp, Artificial Sequence
  ENSG00000152270_7 (sequence is synthesized)
cggaggcggcagcgggcaggttgctgctggtgctgagctgcgtagggctgctgctgacgctcgcgcacccgctgcggctccggcactgcgttctggtgctgctcctggccagcttcgtct

SEQ ID NO: 431695 - DNA, 120 bp, Artificial Sequence
  ENSG00000152270_8 (sequence is synthesized)
ggtgggtctccttcaccagcctcgggtcgctgccctccgccctcaggccgctgctctccggcctggtggggggcgctggctgcctgctggccctggggttggatcacttctttcaaatca

SEQ ID NO: 431696 - DNA, 120 bp, Artificial Sequence
  ENSG00000152270_9 (sequence is synthesized)
gggaagcgcctcttcatcctcgactgtccagtgccgccgaagaaaaagtgcctgtgatccgaccccggaggaggtccagctgcgtgtcgttaggagaaactgcagccagttactatggca

SEQ ID NO: 431697 - DNA, 120 bp, Artificial Sequence
  ENSG00000152270_10 (sequence is synthesized)
gttgcaaaatattcaggagaccgtcgttgccttgtatttccagagaacagatgattctttgggattgggacttaaaacaatggtataagcctcattatcaaaattctggaggtggaaatg

SEQ ID NO: 431698 - DNA, 120 bp, Artificial Sequence
  ENSG00000152270_11 (sequence is synthesized)
gagttgatctttcagtgctaaatgaggctcgcaatatggtgtcagatcttctgactgatccaagccttccaccacaagtcatttcctctctacggagtattagtagcttaatgggtgctt

SEQ ID NO: 431699 - DNA, 120 bp, Artificial Sequence
  ENSG00000152270_12 (sequence is synthesized)
tctcaggttcctgtaggccaaagattaatcctctcacaccatttcctggattttacccctgttctgaaatagaggacccagctgagaaaggggatagaaaacttaacaagggactaaata

SEQ ID NO: 431700 - DNA, 120 bp, Artificial Sequence
  ENSG00000152270_13 (sequence is synthesized)
ggaatagtttgccaactccacagctgaggagaagctcaggaacttcaggattgctacctgttgaacagtcttcaaggtgggatcgtaataatggcaaaagacctcaccaagaatttggca

SEQ ID NO: 431701 - DNA, 120 bp, Artificial Sequence
  ENSG00000152270_14 (sequence is synthesized)
tttcaagtcaaggatgctatctaaatgggccttttaattcaaatctactgactatcccgaagcaaaggtcatcttctgtatcactgactcaccatgtaggtctcagaagagctggtgttt

SEQ ID NO: 431702 - DNA, 120 bp, Artificial Sequence
  ENSG00000152270_15 (sequence is synthesized)
tgtccagtctgagtcctgtgaattcttccaaccatggaccagtgtctactggctctctaactaatcgatcacccatagaatttcctgatactgctgattttcttaataagccaagcgtta

SEQ ID NO: 431703 - DNA, 120 bp, Artificial Sequence
  ENSG00000152270_16 (sequence is synthesized)
tcttgcagagatctctgggcaatgcacctaatactccagatttttatcagcaacttagaaattctgatagcaatctgtgtaacagctgtggacatcaaatgctgaaatatgtttcaacat

SEQ ID NO: 431704 - DNA, 120 bp, Artificial Sequence
  ENSG00000152270_17 (sequence is synthesized)
ctgaatcagatggtacagattgctgcagtggaaaatcaggtgaagaagaaaacattttctcgaaagaatcattcaaacttatggaaactcaacaagaagaggaaacagagaagaaagaca

SEQ ID NO: 431705 - DNA, 120 bp, Artificial Sequence
  ENSG00000152270_18 (sequence is synthesized)
gcagaaaattatttcaggaaggtgataagtggctaacagaagaggcacagagtgaacagcaaacaaatattgaacaggaagtatcactggacctgattttagtagaagagtatgactcat

SEQ ID NO: 431706 - DNA, 120 bp, Artificial Sequence
  ENSG00000152270_19 (sequence is synthesized)
taatagaaaagatgagcaactggaattttccaatttttgaacttgtagaaaagatgggagagaaatcaggaaggattctcagtcaggttatgtataccttatttcaagacactggtttat

SEQ ID NO: 431707 - DNA, 120 bp, Artificial Sequence
  ENSG00000152270_20 (sequence is synthesized)
tggaaatatttaaaattcccactcaacaatttatgaactattttcgtgcattagaaaatggctatcgagacattccttatcacaatcgtatacatgccacagatgtgctacatgcagttt

SEQ ID NO: 431708 - DNA, 120 bp, Artificial Sequence
  ENSG00000152270_21 (sequence is synthesized)
ggtatctgacaacacggccagttcctggcttacagcagatccacaatggttgtggaacaggaaatgaaacagattctgatggtagaattaaccatgggcgaattgcttatatttcttcga

SEQ ID NO: 431709 - DNA, 120 bp, Artificial Sequence
  ENSG00000152270_22 (sequence is synthesized)
agagctgctctaatcctgatgagagttatggctgcctgtcttcaaacattcctgcattagaattgatggctctatacgtggcagctgccatgcatgattatgatcacccagggaggacaa

SEQ ID NO: 431710 - DNA, 120 bp, Artificial Sequence
  ENSG00000152270_23 (sequence is synthesized)
atgcatttctagtggctacaaatgcccctcaggcagttttatacaatgacagatctgttctggaaaatcatcatgctgcgtcagcttggaatctatatctttctcgcccagaatacaact

SEQ ID NO: 431711 - DNA, 120 bp, Artificial Sequence
  ENSG00000152270_24 (sequence is synthesized)
ggcaaatgatgtaaatagtaatggcatagaatggagtaatgaaaatgatcgcctcttggtatgccaggtgtgcatcaaactggcagatataaatggcccagcaaaagttcgagacttgca

SEQ ID NO: 431712 - DNA, 120 bp, Artificial Sequence
  ENSG00000152270_25 (sequence is synthesized)
tttgaaatggacagaaggcattgtcaatgaattttatgagcagggagatgaagaagcaaatcttggtctgcccatcagtccattcatggatcgttcttctcctcaactagcaaaactcca

SEQ ID NO: 431713 - DNA, 120 bp, Artificial Sequence
  ENSG00000152270_26 (sequence is synthesized)
agaatcttttatcacccacatagtgggtcccctgtgtaactcctatgatgctgctggtttgctaccaggtcagtggttagaagcagaagaggataatgatactgaaagtggtgatgatga

SEQ ID NO: 431714 - DNA, 120 bp, Artificial Sequence
  ENSG00000152270_27 (sequence is synthesized)
agacggtgaagaattagatacagaagatgaagaaatggaaaacaatctaaatccaaaaccaccaagaaggaaaagcagacggcgaatattttgtcagctaatgcaccacctcactgaaaa

SEQ ID NO: 431715 - DNA, 120 bp, Artificial Sequence
  ENSG00000152270_28 (sequence is synthesized)
ccacaagatatggaaggaaatcgtagaggaagaagaaaaatgtaaagctgatgggaataaactgcaggtggagaattcctccttacctcaagcagatgagattcaggtaattgaagaggc

SEQ ID NO: 431716 - DNA, 120 bp, Artificial Sequence
  ENSG00000152270_29 (sequence is synthesized)
agatgaagaggaatagcgacagtttgagtaaaagaaaagtcatattgaagaagcccagagggttgtgcccaggggcagaaatcattgcctagtgttcaccggctgactctcaactgacca

SEQ ID NO: 431717 - DNA, 120 bp, Artificial Sequence
  ENSG00000152270_30 (sequence is synthesized)
ttcccatgtggacaggccttaatactgtgagaggatccttgctctgctggcagtttcccactcctatgcactttcacaggaactagaaaactattcttaaaccaaaaataccatccgtgt

SEQ ID NO: 431718 - DNA, 120 bp, Artificial Sequence
  ENSG00000152270_31 (sequence is synthesized)
tgacccatgttgcagagcccttacttaaatccttcactggtgtatgaatactttgtcataatgctgctttgctgggtagtgagctcttatttttcactgggggtcagctataactaaaaa

SEQ ID NO: 431719 - DNA, 120 bp, Artificial Sequence
  ENSG00000152270_32 (sequence is synthesized)
ctcaagtgacatatttcagttaccaaagtggccaggaactttttgcttttatgaaaatagattcatattgtatttcccagtgtgtcttttatgtctttgaatgttttggagaaaagtcta

SEQ ID NO: 431720 - DNA, 120 bp, Artificial Sequence
  ENSG00000152270_33 (sequence is synthesized)
tgcctgtctaaaaatgaatccagtgttgcctttctgagggatttctgctcaatgcaatacactgttcagtgctattctcccagctaggtttatccatgaaggactgagtgacctttgttg

SEQ ID NO: 431721 - DNA, 120 bp, Artificial Sequence
  ENSG00000152270_34 (sequence is synthesized)
tatttaacaaaatccaggtgcatcaatttctgatgctttttactattgtgtattatctactatgtgtgttttatttctgctgagagtattcaggtttgccatggacatcagaagtttgaa

SEQ ID NO: 431722 - DNA, 120 bp, Artificial Sequence
  ENSG00000152270_35 (sequence is synthesized)
ttccagtcttatcttatgttccatggctgaattttaaagctgtttaggtttaacaatgaagggatttattctttagtcaaaattgttgtttttactctagctcaggattcgtatttttaa

SEQ ID NO: 431723 - DNA, 120 bp, Artificial Sequence
  ENSG00000152270_36 (sequence is synthesized)
agatttagttaatatgaacacagcacagatttgttagaagaaaaaaaatttgctgtaataccaaaactaacctcatcaaagatacagaaaaaaagaaatatagtgagccctaaaggacac

SEQ ID NO: 431724 - DNA, 120 bp, Artificial Sequence
  ENSG00000152270_37 (sequence is synthesized)
atacattgaataaataattggaacatgtggttatctttagatccacatcttagctgtcatttgttcactctaaaactgatgttcatctttctgttaatttccctctgcctaaagactaca

SEQ ID NO: 431725 - DNA, 120 bp, Artificial Sequence
  ENSG00000152270_38 (sequence is synthesized)
tgacagaaatgacctatcactacttattatttctgaagcctaactgcaagactgatttctgagaacaagtaaagaactggaatacttatttttcatataaaaatctaaatgtgttaataa

SEQ ID NO: 431726 - DNA, 120 bp, Artificial Sequence
  ENSG00000152270_39 (sequence is synthesized)
atcatttcatacaaaagtacattattaaataaccacattattaaaataattgcaagaaaatggaccatatttacaatgttttgtaaacttgctagtgtgtggatatgtaccctacttgtg

SEQ ID NO: 431727 - DNA, 120 bp, Artificial Sequence
  ENSG00000152270_40 (sequence is synthesized)
aaatacatttgaagatataaagagcagccaaaatgatggcaaaatggtaggctaatattttctattattattggagaacatatcatattttggaatcatgcaattttgcacacagtgaaa

SEQ ID NO: 431728 - DNA, 120 bp, Artificial Sequence
  ENSG00000152270_41 (sequence is synthesized)
ccattaattttccaaggtaattcctttagaatatggtattggcatgcagtttcttacttatctagaatatttggcttatctgaaagatatcaatttaagatctctggaagtgttagaatt

SEQ ID NO: 431729 - DNA, 120 bp, Artificial Sequence
  ENSG00000152270_42 (sequence is synthesized)
tttgatccttcacagtgtcaatatttaatgaatcactaagctttatttattagacgtgttgagtgagtgctgagttccttgctgccacttttgttaccattgtcacacactatgtgtaaa

SEQ ID NO: 431730 - DNA, 120 bp, Artificial Sequence
  ENSG00000152270_43 (sequence is synthesized)
ccagtcccaccacttattactaataaaattttgactgataatttatatttgcacttacaatatatatatcctgtccttatatttctctagagtacattttccatcatgtttaagtgtatt

SEQ ID NO: 431731 - DNA, 120 bp, Artificial Sequence
  ENSG00000152270_44 (sequence is synthesized)
tctgctattatttcctctcctgcagaatacatacaagtgtatgtgtataaagtcatacatgtacaagcatgcatattgagattgaatcacatttccatactgtctgttattttattgggt

SEQ ID NO: 431732 - DNA, 120 bp, Artificial Sequence
  ENSG00000152270_45 (sequence is synthesized)
tttatattgggtttctttagtttatgttgttttctcaaaagcagcattttaaattacgaatactggacttattggatttaattataaatccaattactactggaaactcatttttacata

SEQ ID NO: 431733 - DNA, 120 bp, Artificial Sequence
  ENSG00000152270_46 (sequence is synthesized)
atatagtccttaaattatttaacccttgctaagtaattgacatatgtaacaataactagcctaaagaaacccaaaaaagtatctctcccgagctgaaacttaaaaattcgtaagtgtaag

SEQ ID NO: 431734 - DNA, 120 bp, Artificial Sequence
  ENSG00000152270_47 (sequence is synthesized)
aaagaatgtgagaatatattaaatgcacactgtaccattagatgaaatcttacttgagaaattgccataagccatattacagatcttactttgttactgaatcagattaatttcttgtta

SEQ ID NO: 431735 - DNA, 120 bp, Artificial Sequence
  ENSG00000152270_48 (sequence is synthesized)
taataattttcatcataaattttctatttttaaagccgctggtactagaaatattcttttaatgctatatctatgtacctactgacacatttttctccataaaagtacttttaaaaatta

SEQ ID NO: 431736 - DNA, 120 bp, Artificial Sequence
  ENSG00000152270_49 (sequence is synthesized)
gttactgctctgtattgaaaaccagttctgttttacttcaaagcctttgctatacagtatacatggaggaaaatgagtgaccaggtgatcatatggggatcttaagaaataccagaagtt

SEQ ID NO: 431737 - DNA, 120 bp, Artificial Sequence
  ENSG00000152270_50 (sequence is synthesized)
gttcttttggaaacttgtaagcttcttttaaaatcttacttcctgtcggtctaagaagggcactcttgatgaatgcttcttagttgtttgtgagggttgtggcttaaagtagctaagctt

SEQ ID NO: 431738 - DNA, 120 bp, Artificial Sequence
  ENSG00000152270_51 (sequence is synthesized)
tataattctgttggctctgtcaaatgaaaagtctatccattccaaaactgaacaaataagttttatttctgtgtgagaacaaatggttacttggaatttactgggatttttctttttcca

SEQ ID NO: 431739 - DNA, 120 bp, Artificial Sequence
  ENSG00000152270_52 (sequence is synthesized)
cagtatatgataggtcaagggattccattcatcatatactgataggtccaaggatgagggaaaaacttcatacaagggaaatataagtgtttttctgatgttcaagtggcagtaggtgtg

SEQ ID NO: 431740 - DNA, 120 bp, Artificial Sequence
  ENSG00000152270_53 (sequence is synthesized)
ggaagccgttgcaagcagtatctcccaagagtgagcttattctcctattgtagatatcaggatatcattgctttccttttctgcactgtatcatgttttagttattttatggaaatctat

SEQ ID NO: 431741 - DNA, 120 bp, Artificial Sequence
  ENSG00000152270_54 (sequence is synthesized)
cagagtggaagagcaaaaggtcagttggaagagaaaaaagatgaaactgaaactaaaagtggttaaatatacttacattaggtatcaattactacttgtatattatccatgttacatttt

SEQ ID NO: 431742 - DNA, 120 bp, Artificial Sequence
  ENSG00000152270_55 (sequence is synthesized)
atcaagtaagtataattaatatctgtgatgaatatctaaataatatctgtgatcactaaataatatctgtgatgcaacttttgacacttaaagttacactcacaatatttctgtgccata

SEQ ID NO: 431743 - DNA, 120 bp, Artificial Sequence
  ENSG00000152270_56 (sequence is synthesized)
ttctgtgccataagattttctttaactaaactaataagttaactagaaccttcattgaggtagattttttaaaaatatattttaattataagggaaaaagaaaatgataaaaacaaaatt

SEQ ID NO: 431744 - DNA, 120 bp, Artificial Sequence
  ENSG00000152270_57 (sequence is synthesized)
tatgaaaaatattgctaatataatctgggctcagaatcaactaatatttctatattaaggataagatttttttcttttctgatgtggaccactgttctataaaggggaaaaaatagatgg

SEQ ID NO: 431745 - DNA, 120 bp, Artificial Sequence
  ENSG00000152270_58 (sequence is synthesized)
aaggccatatctgagacaaagcaaagcagttggcaacatattttattagggaagtaaagatatccaactttcattttttggtaaactttttatcaaattataacatacatgcaggaaagt

SEQ ID NO: 431746 - DNA, 120 bp, Artificial Sequence
  ENSG00000152270_59 (sequence is synthesized)
gtacagctcaattttcagaagttaaacatcccatgtaactggtactgatatgaagaaatagaatgtttccagtatctcagaagcctcacatatgcccaattccagtcattacctatatcc

SEQ ID NO: 431747 - DNA, 120 bp, Artificial Sequence
  ENSG00000152270_60 (sequence is synthesized)
ccaaagataaatcctatccgacttctaataactagttttgctaatttttgaactttatatatacacaaatggaataatatgtgtacttttttaggattaattttttgaacacctaagtaa

SEQ ID NO: 431748 - DNA, 120 bp, Artificial Sequence
  ENSG00000152270_61 (sequence is synthesized)
tatatgtttatatcagataaaatgaaaatagaagtatttaatataaggagaaaaaaggaaaatcactcataaaacatcaagcaataactgtgttaacttttgatgtctatctttattgat

SEQ ID NO: 431749 - DNA, 120 bp, Artificial Sequence
  ENSG00000152270_62 (sequence is synthesized)
ctttcccattatgctaaatttacttaataattctaatagcttatttgaagattctttgagtcttgacgtacacaaaaatgttatctatgaataaagacagatttatttatttatttcaaa

SEQ ID NO: 431750 - DNA, 120 bp, Artificial Sequence
  ENSG00000152270_63 (sequence is synthesized)
acctatgccttttatttctttttctcatgttattgtactttctaggaccttcaacgcagtgttgaatggaagtggtatgagtaggcagccttgtttttcttcatgaactcagggaaaaaa

SEQ ID NO: 431751 - DNA, 120 bp, Artificial Sequence
  ENSG00000152270_64 (sequence is synthesized)
tgttcaacatatcaccactaatgttttttgtagataccctttagcagattaaggaagttttattctaattctagtttactaaggactttttttctcttaagttatgagtgggtatataat

SEQ ID NO: 431752 - DNA, 120 bp, Artificial Sequence
  ENSG00000152270_65 (sequence is synthesized)
tttatcagatgctttttctgcatctattcaaatgattcgagatttttttctaattattctactaatgtggtgaattacattgtttatgtttgttaaaccatccctgtattcccagaataa

SEQ ID NO: 431753 - DNA, 120 bp, Artificial Sequence
  ENSG00000152270_66 (sequence is synthesized)
agtaaatttgatcaagatgtattttgtttaaatatttatcactagattctatttgttaatgttttgtttagaaattttgaatttgtgtttatgagagagtgttggcctataaattcttac

SEQ ID NO: 431754 - DNA, 120 bp, Artificial Sequence
  ENSG00000152270_67 (sequence is synthesized)
ttttcataatgttcttggcattatattggtatcacggttaccaagaaccttgatatcaagataaaataaggtgagatatttaccctttctattacctcgaaaagtttgggtaagattaaa

SEQ ID NO: 431755 - DNA, 120 bp, Artificial Sequence
  ENSG00000152270_68 (sequence is synthesized)
aattggtattatttcctcctttaatgtttggaagaatgctctggtgaagctatctcaccttgaagaattattttgtggtcaaattttaagttatggattcaatttctttaatagttttag

SEQ ID NO: 431756 - DNA, 120 bp, Artificial Sequence
  ENSG00000152270_69 (sequence is synthesized)
tatcatttagattttccatcttttcttctaacaattgagttacttgtgtttttctaggaattcctttttttgttgttgttccttctggcatttgtgagactgctgaaagccctattttaa

SEQ ID NO: 431757 - DNA, 120 bp, Artificial Sequence
  ENSG00000152270_70 (sequence is synthesized)
tttcaaaatagaaatctttttgaggatttctacttggtttatctctctcttagccactgtttataaattggcaaatacctttagaggaaaagcaggtctgaatttaagctcactactttg

SEQ ID NO: 431758 - DNA, 120 bp, Artificial Sequence
  ENSG00000152270_71 (sequence is synthesized)
ttttctcatcactttgggatcttgtttggcaccccctgtcttcatagctctgaactccaatttcggtctcccagccccttgggactatagatctctactctgttttctggcctcttttgt

SEQ ID NO: 431759 - DNA, 120 bp, Artificial Sequence
  ENSG00000152270_72 (sequence is synthesized)
gcttctcatcctctctgctctgtgccagttatgaatcagcagaaaattcctagagggaaaagagtagcacagaatgttggatttcttttaatcttttctcttaattctgggttcttggcc

SEQ ID NO: 431760 - DNA, 120 bp, Artificial Sequence
  ENSG00000152270_73 (sequence is synthesized)
ttttatgccctggctgtttggttgtgttttgatgccttgaaatgtatgctatttatattttatttcagcttttctagttgttctagacagaagagttggtctgatacaaaccagtccctc

SEQ ID NO: 431761 - DNA, 120 bp, Artificial Sequence
  ENSG00000152270_74 (sequence is synthesized)
ttagctggaaaattaggcaagcctcttaagacactctgaacctattccctcacctacaaattgagaataataccagttccctcaaagggctaattaatatgtgcctggtacttaatacaa

SEQ ID NO: 431762 - DNA, 120 bp, Artificial Sequence
  ENSG00000152270_75 (sequence is synthesized)
atgtgggccaatattatataaatttcaatagtaataaatactaatctgaacttgaagtataagacaggaatgagcatttttttctttaaaaggccagagagtaagtattttagcatttgc

SEQ ID NO: 431763 - DNA, 120 bp, Artificial Sequence
  ENSG00000152270_76 (sequence is synthesized)
tggaaacatatgaccattgctaccttttgccgtccccagtgcttctcattgcctcctttgtcctcttctccctcccactcctcttctttttcaataaccatttaaaacataaaaactatt

SEQ ID NO: 431764 - DNA, 120 bp, Artificial Sequence
  ENSG00000152270_77 (sequence is synthesized)
cttaactttctgttcaacaatcaagattttgctaaatataagtgaatggaaaataggaatttaagttcagcttttaaaattgtggcaaataatttgaatattcaatttgatctgccataa

SEQ ID NO: 431765 - DNA, 120 bp, Artificial Sequence
  ENSG00000152270_78 (sequence is synthesized)
gttatcatgtcactctcttgctcatttctctcgtttcacccagtgtaaaagtctttgtcatgtacgtaaaagaacttacacaacatggttccctcccttactctcttgtacttctctgtc

SEQ ID NO: 431766 - DNA, 120 bp, Artificial Sequence
  ENSG00000152270_79 (sequence is synthesized)
tttgtcttctactactttctccttcatttactctgttccagctgcactggcctccttgttattccccaaacaagtcagacaggcttctgactcaggtctttgcacttgctagtctctctg

SEQ ID NO: 431767 - DNA, 120 bp, Artificial Sequence
  ENSG00000152270_80 (sequence is synthesized)
cctgggatgcttatttcccacactttgtcatgtctttacataagcatttccttcttagtgaggcataccccaactatcctctctaaaattgcattgcgttctatcacatctttttccctt

SEQ ID NO: 431768 - DNA, 120 bp, Artificial Sequence
  ENSG00000152270_81 (sequence is synthesized)
aacttactttattttctctttttagcagcttgttcaaaatctattatatacgaccctttattactcatattacttagcttggaatccagtgttctcaaaaatttggtcccaacatgtctt

SEQ ID NO: 431769 - DNA, 120 bp, Artificial Sequence
  ENSG00000152270_82 (sequence is synthesized)
tccaacctgtttttcattgctttcttatataatctgtacttcaacaatttcatattccctgtatagcattattttaccacttaaaaattgtattttaccacttttatacttttatttatg

SEQ ID NO: 431770 - DNA, 120 bp, Artificial Sequence
  ENSG00000152270_83 (sequence is synthesized)
ctgtgtccattttgtgcagtacacttccccaatacatttttgttttgttttattgtaaacaaatataaatataatcctaccaaatttttagggcccagctcaaatgctaccccttccata

SEQ ID NO: 431771 - DNA, 120 bp, Artificial Sequence
  ENSG00000152270_84 (sequence is synthesized)
aaatttctgttaccatccaaatggaaggtttctatatctcttttgaacgctaatgccattttgtctgtatatataatttttttctttttttgagacgaagtttctctcttgttgcccagg

SEQ ID NO: 431772 - DNA, 120 bp, Artificial Sequence
  ENSG00000152270_85 (sequence is synthesized)
accacacttggccattttgtctgtatttttatctcttcactttctgttaataataacagtactatctttgcctttagttatatatactatactttatatgctctgcatgtgttaccatat

SEQ ID NO: 431773 - DNA, 120 bp, Artificial Sequence
  ENSG00000152270_86 (sequence is synthesized)
gtaactctctcttttcctccttgctaagtacagttattaagtctggaaataatgtaagaggcaatcaagtgagaactacaaaaaatagaaagaggaaggcagactggctagggaccctag

SEQ ID NO: 431774 - DNA, 120 bp, Artificial Sequence
  ENSG00000152270_87 (sequence is synthesized)
tacaggaaaaacaacacagtgacagagtctcttatgacccacacccaacagcaaacctggtctaggcccccactctcaacctagcaacataaggtgacacaggtaggcttattctttccc

SEQ ID NO: 431775 - DNA, 120 bp, Artificial Sequence
  ENSG00000152270_88 (sequence is synthesized)
cagattaaacaagagccctgccaacactaggcaagtctggtggctctagcaagggggaattgatttggaaccactggcaatcagtgaccagggagaagcattctccttccctcctgggca

SEQ ID NO: 431776 - DNA, 120 bp, Artificial Sequence
  ENSG00000152270_89 (sequence is synthesized)
tgagactccccttccccactgacagacactgggtggccagtgtgcctggcaagggggatgtcctcacaaatgcctagcccagaaagtgatctttgttcctgtcacctggagactcctttc

SEQ ID NO: 431777 - DNA, 120 bp, Artificial Sequence
  ENSG00000152270_90 (sequence is synthesized)
tctcccctaaaggtaccagatgacccaacctgaggaagctctctttccccctactgtaaggcaccagtgtggactgtggactagtgggaacccaacgggcaccaaatgctagatgacgag

SEQ ID NO: 431778 - DNA, 120 bp, Artificial Sequence
  ENSG00000152270_91 (sequence is synthesized)
tgtgaaatttggagtaaattgacagattttcagaataaaatgtttcttttttctctgtacatgttaaaaatatactttgtattgatactttcatgtgccatcactaatattacatatata

SEQ ID NO: 431779 - DNA, 80 bp, Artificial Sequence
  ENSG00000152284_0 (sequence is synthesized)
gcggagcaggcggcggcggtggcgagttggggagccctaggctcggcgctgccggaggggcccgagccgagccgcctgcg

SEQ ID NO: 431780 - DNA, 80 bp, Artificial Sequence
  ENSG00000152284_1 (sequence is synthesized)
ccccggccgggcagcgccgggcccgcttcccgcggggccacgccctgtcaaactttgttgcggcggctagcgcagcgggc

SEQ ID NO: 431781 - DNA, 120 bp, Artificial Sequence
  ENSG00000152284_2 (sequence is synthesized)
ccggggcggccggcggaggggacgacctcggggcgaacgacgagctgatccccttccaggacgaggggggcgaggagcaggagccgagcagcgatagcgcctcggcgcagcgggacctag

SEQ ID NO: 431782 - DNA, 120 bp, Artificial Sequence
  ENSG00000152284_3 (sequence is synthesized)
acgaggtcaagtcgtccctggtcaacgagtcggagaaccagagcagcagctcggactcggaggcggagaggcgcccgcagcccgtccgggacactttccagaagccgcgggactatttcg

SEQ ID NO: 431783 - DNA, 120 bp, Artificial Sequence
  ENSG00000152284_4 (sequence is synthesized)
ccgaagtgagaaggcctcaggacagcgcgttctttaaaggacccccgtaccctgggtaccccttcctgatgatcccggacctgagcagcccgtacctctccaacggacccctgtctcccg

SEQ ID NO: 431784 - DNA, 120 bp, Artificial Sequence
  ENSG00000152284_5 (sequence is synthesized)
gaggagcgcgcacctacctgcagatgaaatggcccctcctcgatgtcccctccagcgccacagtcaaggacacgaggtcaccatctccagcacacttgtctaataaagttcctgtcgttc

SEQ ID NO: 431785 - DNA, 120 bp, Artificial Sequence
  ENSG00000152284_6 (sequence is synthesized)
agcacccgcatcacatgcatccgctgactcccctcatcacctacagcaatgaccacttctcccccggctcccctcccacccacctctccccagagatcgatccaaagacaggaatccccc

SEQ ID NO: 431786 - DNA, 120 bp, Artificial Sequence
  ENSG00000152284_7 (sequence is synthesized)
ggccccctcacccatccgagctgtcaccgtattacccactctctcccggagctgtcggacaaatcccccaccccctcggctggctcgtcccacagcaaggccagcccatgtactcccttc

SEQ ID NO: 431787 - DNA, 120 bp, Artificial Sequence
  ENSG00000152284_8 (sequence is synthesized)
ctcccggtggcttccggcacccttaccccgccctcgccatgaacgcctcgatgtccagcctggtctccagtcggttctctcctcacatggtggctcctgcccaccctggcctgcccacct

SEQ ID NO: 431788 - DNA, 120 bp, Artificial Sequence
  ENSG00000152284_9 (sequence is synthesized)
cagggatcccccaccctgccatcgtctcccccatcgtcaagcaggaaccggcaccccccagcctgagccctgcagtgagcgtgaaatcaccagtcaccgtgaaaaaggaggaggaaaaga

SEQ ID NO: 431789 - DNA, 120 bp, Artificial Sequence
  ENSG00000152284_10 (sequence is synthesized)
agccccacgtgaagaagcctctgaatgccttcatgttgtatatgaaggagatgagggccaaggtggtggctgagtgcaccctgaaggaaagtgcagccattaaccagatccttggaagaa

SEQ ID NO: 431790 - DNA, 120 bp, Artificial Sequence
  ENSG00000152284_11 (sequence is synthesized)
actatggtaagaaaaagaagaggaagagagaaaagcagctgtcccagacacagtcacagcagcaagtccaggaggcagagggtgccctggcctccaagagcaagaagccatgtgttcagt

SEQ ID NO: 431791 - DNA, 120 bp, Artificial Sequence
  ENSG00000152284_12 (sequence is synthesized)
acctgccccccgagaagccctgtgacagccctgcctcctcccacgggagcatgctggactccccggccactccctctgcagctttggcctcaccagctgcccctgctgccacccattcgg

SEQ ID NO: 431792 - DNA, 120 bp, Artificial Sequence
  ENSG00000152284_13 (sequence is synthesized)
agcaagcccagcccctctccctcaccaccaaaccagaaacccgggcccagctggctctccactctgccgccttcctgtcggctaaggctgcagcctcctcctctgggcagatgggcagcc

SEQ ID NO: 431793 - DNA, 120 bp, Artificial Sequence
  ENSG00000152284_14 (sequence is synthesized)
agcctcccctcctgtcccggcccctcccccttgggtccatgcccacagctctgctggcctctcccccgtccttccccgccacgctccatgcccaccaggccctcccggtgctacaggccc

SEQ ID NO: 431794 - DNA, 120 bp, Artificial Sequence
  ENSG00000152284_15 (sequence is synthesized)
agcctctttccctggtcaccaagtctgcccactaagctccccccgacccctgcaggctgtcacatgactcattgagtagtaatgattcagaagaaaaagaaaaaggagactttattggtc

SEQ ID NO: 431795 - DNA, 120 bp, Artificial Sequence
  ENSG00000152284_16 (sequence is synthesized)
aatatttgaccactctggactgttctgtaaagtggctggtaacaacagcactttacagtttgtagatgtaaccagtagctgatcttaaggcttttttaaaaaacaaaacaaaacaacaaa

SEQ ID NO: 431796 - DNA, 120 bp, Artificial Sequence
  ENSG00000152284_17 (sequence is synthesized)
aaaaaatctttataagaaagagaactgaaaagtagcgtgctattcgtcctgtaggtgctgtggtggatggacctgggcagagggcacttctctctcttacctctcttgcactttctgtct

SEQ ID NO: 431797 - DNA, 120 bp, Artificial Sequence
  ENSG00000152284_18 (sequence is synthesized)
cctgtctcttctcgcccctgccgcctgccccagcttccccgactccatctgcagctctgccattgtgacatttcctgttacccagcccaagttttcatcgtctgctcaataccgtgggtt

SEQ ID NO: 431798 - DNA, 120 bp, Artificial Sequence
  ENSG00000152284_19 (sequence is synthesized)
cttcttcgtcctctgtcctctgcccagtgtgaggccatcaccatgtgagaagacatcttggcctgatttgctgccaccagcgtcccctccctcagtgggcccgaactcgccagccccagc

SEQ ID NO: 431799 - DNA, 120 bp, Artificial Sequence
  ENSG00000152284_20 (sequence is synthesized)
tttcagtggagaaagcggtcctctgaaatggtttcctcccaacccccgcatttaaagggactcaaggtgcctgccacttcctcagcgaagaagtctgtgttcctccccgtccttgccagt

SEQ ID NO: 431800 - DNA, 120 bp, Artificial Sequence
  ENSG00000152284_21 (sequence is synthesized)
ggcgatcatcccttcacaatcccagagtggcaggcgggaccggccccatggtctggctcctgtcacctgggtccgtgccagcacaatctgccaaagttctagagaccctgttcccttccc

SEQ ID NO: 431801 - DNA, 120 bp, Artificial Sequence
  ENSG00000152284_22 (sequence is synthesized)
catcacctcacatgcttcttctgtgtgtatttctttttgtttttatggtttttggagcaatttaaactcccagttgtttattttcacaaaagaaaataaaattgcagttgcaagaccttt

SEQ ID NO: 431802 - DNA, 120 bp, Artificial Sequence
  ENSG00000152284_23 (sequence is synthesized)
aaacaggtgcttggggcagctaaaaataaccaccctgggaagtgaaactgtggcagtgccaaggagctaagaacgtggtgatttaccagaagtcttcagaggcaagccatcttcaattca

SEQ ID NO: 431803 - DNA, 120 bp, Artificial Sequence
  ENSG00000152284_24 (sequence is synthesized)
gaaggggaatcccacatgtgtgttgaatatgaggcattgtttaagacacctcctgccctcaccacattggcaaactgacagcgtcaacttgaaacaagtctgcacattgtggccattttc

SEQ ID NO: 431804 - DNA, 120 bp, Artificial Sequence
  ENSG00000152284_25 (sequence is synthesized)
gggctcaagagatcctcccacctcagccttctcagtagctgggactacaggatataagtggattcgtatggtgtgtagccttttgattctggcttcctctgctcactaatatgcacttga

SEQ ID NO: 431805 - DNA, 120 bp, Artificial Sequence
  ENSG00000152284_26 (sequence is synthesized)
ttgaaattcatccacattgctgcagtacctgcagatgaaatggcccctcctcgatgtcccctccagcgccacagtcaaggacacgaggtcaccatctccagcacacttgtctaataaagt

SEQ ID NO: 431806 - DNA, 84 bp, Artificial Sequence
  ENSG00000152284_27 (sequence is synthesized)
ctgggtaccccttcctgatgatcccggacctgagcagcccgtacctctccaacggacccctgtctcccggaggagcgcgcacct

SEQ ID NO: 431807 - DNA, 120 bp, Artificial Sequence
  ENSG00000152284_28 (sequence is synthesized)
tcagctaagtacttacctttatagtcagagataacgcctactctacacctgcaagtatcattctcccaccctaccttttctcctggctgattccagcaatgtgggactggctggggggta

SEQ ID NO: 431808 - DNA, 120 bp, Artificial Sequence
  ENSG00000152284_29 (sequence is synthesized)
aggggctagcacatggtacaagaccagctcccaagagcaagtgttgagtgcaaccactatggaaaacagtatagaggttcttcaaaaaacaaaaaattaattaaaaattaaagaattata

SEQ ID NO: 431809 - DNA, 120 bp, Artificial Sequence
  ENSG00000152284_30 (sequence is synthesized)
ctgtctttatagcattcacacagagttgccaggggaaggcaaagcatttttggagcccctctttggagaaataacagtcactacaagttacagataatgaggaagacacatgtggaggag

SEQ ID NO: 431810 - DNA, 120 bp, Artificial Sequence
  ENSG00000152284_31 (sequence is synthesized)
gaatccaaagtttatttctccatgaatgaggcgggctttctagagacttggttcaccagtgactcttgtcattggtcttgtgggtcctgtccctctcttccaggacgctggcttctgtat

SEQ ID NO: 431811 - DNA, 120 bp, Artificial Sequence
  ENSG00000152284_32 (sequence is synthesized)
gagttgacagagggcaaggacaatgacacaagcacctgctaggctccagagcaccagggacatagggcaggatgctcccatttgatgttcgttaaggtgctctggcagggcgagggaaca

SEQ ID NO: 431812 - DNA, 120 bp, Artificial Sequence
  ENSG00000152291_0 (sequence is synthesized)
agagggcggaagcgctatccgagcaggatgcggttcgtggttgccttggtcctcctgaacgtcgcagcggcgggagccgtgccgctcttggccaccgaaagcgtcaagcaagaagaagct

SEQ ID NO: 431813 - DNA, 120 bp, Artificial Sequence
  ENSG00000152291_1 (sequence is synthesized)
ggagtacggccttctgcaggaaacgtctccacccaccccagcttgagccaacggcctggaggctctaccaagtcgcatccggagccgcagactccaaaagacagccctagcaagtcgagt

SEQ ID NO: 431814 - DNA, 120 bp, Artificial Sequence
  ENSG00000152291_2 (sequence is synthesized)
gcggaggcgcagaccccagaagacacccccaacaagtcgggtgcggaggcaaagacccaaaaagacagctccaacaagtcgggtgcggaggcaaagacccaaaaaggcagcactagcaag

SEQ ID NO: 431815 - DNA, 120 bp, Artificial Sequence
  ENSG00000152291_3 (sequence is synthesized)
tcgggttcggaggcgcagaccacaaaagacagcactagtaagtcgcatccggagctgcagactccaaaagacagcactggcaaatcgggtgcggaggcgcagaccccagaagacagcccc

SEQ ID NO: 431816 - DNA, 120 bp, Artificial Sequence
  ENSG00000152291_4 (sequence is synthesized)
aacaggtcgggtgcggaggcaaagacccaaaaagacagccctagcaagtcaggttcggaggcgcagaccacaaaagatgtccctaataagtcgggtgcggacggccagaccccaaaagac

SEQ ID NO: 431817 - DNA, 120 bp, Artificial Sequence
  ENSG00000152291_5 (sequence is synthesized)
ggctccagcaagtcgggtgcggaggatcagaccccaaaagacgtccctaacaagtcgggtgcggagaagcagactccaaaagacggctctaacaagtccggtgcagaggagcagggccca

SEQ ID NO: 431818 - DNA, 120 bp, Artificial Sequence
  ENSG00000152291_6 (sequence is synthesized)
atagacgggcccagcaagtcgggtgcggaggagcagacctcaaaagacagccctaacaaggtggttccagagcagccttcccggaaagaccattccaagcccatctccaacccttctgat

SEQ ID NO: 431819 - DNA, 120 bp, Artificial Sequence
  ENSG00000152291_7 (sequence is synthesized)
aacaaggagctccccaaggctgacacaaaccagcttgctgacaaagggaagctttctcctcatgctttcaaaaccgaatctggggaggaaactgacctcatttctcccccgcaggaggaa

SEQ ID NO: 431820 - DNA, 120 bp, Artificial Sequence
  ENSG00000152291_8 (sequence is synthesized)
gttaagtcttcagagcctactgaggatgtggagcccaaagaggctgaagatgatgatacaggacccgaggagggctcaccgcccaaagaagagaaagaaaagatgtccggttctgcctcc

SEQ ID NO: 431821 - DNA, 120 bp, Artificial Sequence
  ENSG00000152291_9 (sequence is synthesized)
agtgagaaccgtgaagggacactttcggattccacgggtagcgagaaggatgacctttatccgaacggttctggaaatggcagcgcggagagcagccacttctttgcatatctggtgact

SEQ ID NO: 431822 - DNA, 120 bp, Artificial Sequence
  ENSG00000152291_10 (sequence is synthesized)
gcagccattcttgtggctgtcctctatatcgctcatcacaacaagcggaagatcattgcttttgtcctggaaggaaaaagatctaaagtcacccggcggccaaaggccagtgactaccaa

SEQ ID NO: 431823 - DNA, 120 bp, Artificial Sequence
  ENSG00000152291_11 (sequence is synthesized)
cgtttggaccagaagtcctaacagaatggtatattcctctggaaaaagatgaacgtcaccaatggattgtgctgctctcgtttcagctttgatttttttgtccttgagaaccttgtcctc

SEQ ID NO: 431824 - DNA, 120 bp, Artificial Sequence
  ENSG00000152291_12 (sequence is synthesized)
cctgctgatttgtttctaaatcaaaagaaatgaagaaaaaagtactgtgacctgagagacaccctcctctagaatttagtggcgggtctgggctggcagaggtagggggctgctttgggc

SEQ ID NO: 431825 - DNA, 120 bp, Artificial Sequence
  ENSG00000152291_13 (sequence is synthesized)
tttgcacctgcactttggtgacattgttcttctgtgttccctttatttatgctggtggcttccatccgttcctcctctgagggtgagtggaggggtatatggaaacacggctatgaccaa

SEQ ID NO: 431826 - DNA, 120 bp, Artificial Sequence
  ENSG00000152291_14 (sequence is synthesized)
agggagatcccagcctgggcaggctgcgctgctgaccaccctccctggggcccgggctctgtaggaaagttggtccttgactgtggcattgcactctgcactgtttctctctgcagacct

SEQ ID NO: 431827 - DNA, 120 bp, Artificial Sequence
  ENSG00000152291_15 (sequence is synthesized)
aggggaaaactgcaggtggaagtgcttttctactaaggcctcttactttgggggggatgtgccctacagaagacatagaagatggggaaatgccaatgggcaaagagctactttgaatac

SEQ ID NO: 431828 - DNA, 120 bp, Artificial Sequence
  ENSG00000152291_16 (sequence is synthesized)
ataattctcttcaaagacttcagcagcaaaccaaaacagcaggttaaaaaaaaagatgcttttttgggtgcaagtctaacctgtctagcatgagatcttcttgattttctgattatttta

SEQ ID NO: 431829 - DNA, 120 bp, Artificial Sequence
  ENSG00000152291_17 (sequence is synthesized)
tgtagcttgagacaaagtgaatcaacttccacttagttgtaccgagcataaaacagaacttgggcttcctggcagtgaggccactgtcccatcacagatttttaaaataaatatgatttg

SEQ ID NO: 431830 - DNA, 120 bp, Artificial Sequence
  ENSG00000152291_18 (sequence is synthesized)
aagtagtgtgatctttcacacaatcatactcagtaggaactttttgaaatagggcaagtttatgtttcatgcgagaaaacatgaaggagggttttggttttggtctgcagtttttccaaa

SEQ ID NO: 431831 - DNA, 120 bp, Artificial Sequence
  ENSG00000152291_19 (sequence is synthesized)
gggcttttatgagatacatttcccacaaagtccattttgcctttgttgcctaaaacagacaaaatagacttagatttattaatagaaactatactctctgccaattttacctcagtgtat

SEQ ID NO: 431832 - DNA, 120 bp, Artificial Sequence
  ENSG00000152291_20 (sequence is synthesized)
ttaatggtcctttaatctgatataagatgccaagggtatttgataaaaattcttcttccatgccatgtcaggagttaatacaaatgaagaaattccgtgggttcccctgggataagtgag

SEQ ID NO: 431833 - DNA, 120 bp, Artificial Sequence
  ENSG00000152291_21 (sequence is synthesized)
ggtagtgtcttggacaacactattgtttgaaggtttatcttttctaatcatgctctaccgcattgtagagagcctaaagagagttgtttctgagctgatctcagggaaatacaaataact

SEQ ID NO: 431834 - DNA, 120 bp, Artificial Sequence
  ENSG00000152291_22 (sequence is synthesized)
tgggagatgagggaaataagatgaattctgtgctgtcaaggcagtaagtctgaagaaaggaccatgcttcttatattatcttccaccttgcttaaaacagcccatagctttgagttgaca

SEQ ID NO: 431835 - DNA, 120 bp, Artificial Sequence
  ENSG00000152291_23 (sequence is synthesized)
ttttcattcttggcggatagcctactttatgaaggtaaggaatgaactcctacccttcttgggtcattctctgtactgatgcgttagtcttataatactttgcaccaacctgaggaatct

SEQ ID NO: 431836 - DNA, 120 bp, Artificial Sequence
  ENSG00000152291_24 (sequence is synthesized)
tctaggcttctctagcatcccctaagactgtggctatttcacgtctctctccctgcctgccttccttttcccttcctttcccctcctcatgttttctggttgtgcccatctgtaccagct

SEQ ID NO: 431837 - DNA, 120 bp, Artificial Sequence
  ENSG00000152291_25 (sequence is synthesized)
ctatttgttattcatcccgctgctcaacttctccagtatgttgcttcccttaagttgccattcattctcttcatgacttttactaactcacttcggtctctgtctgtcaactaaactttt

SEQ ID NO: 431838 - DNA, 120 bp, Artificial Sequence
  ENSG00000152291_26 (sequence is synthesized)
ctaaaggttaccagttatccaatcaccaaatccatggctttttctcaaagcttagtcttgtccttggcagaactggacactattgaccatccaaatggaaattcccctttcttggtgtct

SEQ ID NO: 431839 - DNA, 120 bp, Artificial Sequence
  ENSG00000152291_27 (sequence is synthesized)
ctgacaaatggtcctttgccttatcttgtgctggtggtgaagaggccctcaaagccaggcctctctattcctttgactgtctcctcagccattaacccattcttcatcctcggagtgagt

SEQ ID NO: 431840 - DNA, 120 bp, Artificial Sequence
  ENSG00000152291_28 (sequence is synthesized)
gattcccaagtctttgtcttggcttaatccctaaagaacccagttctgctggtatcgaatagttcagcttggttgtcattgaaaggaatttctctcttctgtccatcagcctgtccctcc

SEQ ID NO: 431841 - DNA, 120 bp, Artificial Sequence
  ENSG00000152291_29 (sequence is synthesized)
caactgtctaggacagtcttcggtcacctaaattcctaactgcagacttttgccctttttctctctcatcaccaaagtcccatccatttttttttaataaaagatcctcagctacagtct

SEQ ID NO: 431842 - DNA, 120 bp, Artificial Sequence
  ENSG00000152291_30 (sequence is synthesized)
ttccattttccttgcttctcttattgcacacccccagcccattttgcttctctcttggattttgttttttcagatccacatttattgggtttcctgtccagcttcttggaaaggagctca

SEQ ID NO: 431843 - DNA, 120 bp, Artificial Sequence
  ENSG00000152291_31 (sequence is synthesized)
ctcttggaaagactgatctttccaaaatattttccctggtctgaagctttggtgtgaacttctcaaggcttagagaatccagttacagaccttttggggttcaggatgctatagattgac

SEQ ID NO: 431844 - DNA, 120 bp, Artificial Sequence
  ENSG00000152291_32 (sequence is synthesized)
accctcctgcctgtttttctctgcatcccaacctggccaaggcccctcctgtggggtgcccatctgtgcctttattccggctgtgccctcgactttccagcttcccatgtttctttggtt

SEQ ID NO: 431845 - DNA, 120 bp, Artificial Sequence
  ENSG00000152291_33 (sequence is synthesized)
aggtttctctcccttccttctttctccttccccaatccgcctgtttcgtcagggcccagtttgtttcctcatacaccttcctcactaccccaccccacatggttgactctttccctcagc

SEQ ID NO: 431846 - DNA, 120 bp, Artificial Sequence
  ENSG00000152291_34 (sequence is synthesized)
tccaccagctcttcatcatgccactcatttcagaacttgagcaaaacagggcagtcaggatctgatgtctttctggtctccctaagaaaactaagctcttgagggacagcccttggcaat

SEQ ID NO: 431847 - DNA, 120 bp, Artificial Sequence
  ENSG00000152291_35 (sequence is synthesized)
gctttcctatctgctgatcatggtgaccttccttaggacttccagagttcagttccttctggcagagaggttttctttctccatgccatatggatgtgactcaaatgaggggtcccacag

SEQ ID NO: 431848 - DNA, 120 bp, Artificial Sequence
  ENSG00000152291_36 (sequence is synthesized)
cttttcctggctaccacttgctgtgaccttatacatgttggggtttgctcttaaagaggagagcaggaagaaaggttggtttcagaaaccaagagggtcggcagtggacgcgtacatttt

SEQ ID NO: 431849 - DNA, 120 bp, Artificial Sequence
  ENSG00000152291_37 (sequence is synthesized)
gtcacggagtccacagagctgagcttttgagcagactctgagaagtatcattgcttgtgttgaaagaatacaacaggatttaagtttctctttagaaattgcactgaagaaaggccgggc

SEQ ID NO: 431850 - DNA, 120 bp, Artificial Sequence
  ENSG00000152291_38 (sequence is synthesized)
aaaaaaaaaaaaaaaagaaagaaatagcattgaagaaaataccgcacatcagaggaaagcttattttctgcatggtgtcttttcaaagatagaatatttgaagcatgttttctagcgatt

SEQ ID NO: 431851 - DNA, 120 bp, Artificial Sequence
  ENSG00000152291_39 (sequence is synthesized)
atagaatatttgaagcatgttttctagcgattgtgtggatgagggtgagctggctgaggcatcgctcaagctggggggtggtgtgtaagaagcacgtggagccacaagaggcacctccta

SEQ ID NO: 431852 - DNA, 120 bp, Artificial Sequence
  ENSG00000152291_40 (sequence is synthesized)
tagtcagctaagggcttccctttctgcgcccagcttttgggtgaagggtgatttctattagacacatctgtgcttcagtcatagatgttaatagaggaagcagttttcctgctgcagatt

SEQ ID NO: 431853 - DNA, 120 bp, Artificial Sequence
  ENSG00000152291_41 (sequence is synthesized)
cctgaatagagttgctgaaagagtctacttctggactcaggggaagttgaaggccagtctgtgtagaaaggctgaggcaacggggaaagacctgacagctagttacatacgctctgacat

SEQ ID NO: 431854 - DNA, 120 bp, Artificial Sequence
  ENSG00000152291_42 (sequence is synthesized)
agtactcccatgatggcttccagtgacacatgtgctgatagaattctaaacctctggaatttccctgctggcgacttctatggccgttgactgtacagggtaacctgatgccagatgcta

SEQ ID NO: 431855 - DNA, 120 bp, Artificial Sequence
  ENSG00000152291_43 (sequence is synthesized)
tgggcgtgatgagaactagagcattgcagcatggaggaaactgtgaggcaccagatcctgtgcttctgcaggccattttctgaaaacccctgttaggaaggttggatttggcgtgacttg

SEQ ID NO: 431856 - DNA, 120 bp, Artificial Sequence
  ENSG00000152291_44 (sequence is synthesized)
cttgagcaagagtcctggggagagattttgaggtttaatttaacggtatatccagagctaacagtgactcaactcgtctagttctgcaagtcagatgtacacttagagtctctctgtgaa

SEQ ID NO: 431857 - DNA, 120 bp, Artificial Sequence
  ENSG00000152291_45 (sequence is synthesized)
gggtttgggtctgagctgtatagtatgtcaaactgccagtaagccagcccctcaccctctgatagatattcctttaatgcaccagacttcatgtttgataaatgattaatggttgaaatt

SEQ ID NO: 431858 - DNA, 120 bp, Artificial Sequence
  ENSG00000152291_46 (sequence is synthesized)
gtttctcttcttttgtgttttcccagttaatagatggtcactgtttccacaatgttttatactttcagctttttgtaacttaactataattacttaattttatttttttaaagcttgttg

SEQ ID NO: 431859 - DNA, 120 bp, Artificial Sequence
  ENSG00000152291_47 (sequence is synthesized)
tggtctaatgagaagtatttttcagtgcataatgtttttctgagcttctgtaaatgccatcccaatgtggtttggttttgttgaacagaaaccaaaataaatttcaaaatgttaaagcaa

SEQ ID NO: 431860 - DNA, 120 bp, Artificial Sequence
  ENSG00000152291_48 (sequence is synthesized)
acttccgcggccagtgcgagaggcgagggagctccagctctgcctgtaaggtctcggaagtacgaggcggaggggacgaaaaacggggggccagactgttgtggctgtggtggagacgag

SEQ ID NO: 431861 - DNA, 120 bp, Artificial Sequence
  ENSG00000152291_49 (sequence is synthesized)
aaaccaggaagaagaggctcgcctcccactcggcgacagtaagcgaagcagccgaaggcgagcgccgacatcagcagctgccccctaaatcccgcccttcgtcttggcggcagcgggaga

SEQ ID NO: 431862 - DNA, 120 bp, Artificial Sequence
  ENSG00000152291_50 (sequence is synthesized)
gtcagatggacccagtagtgggcttgcatttgccatgaagcagcagtggctgattctggggatgcggttgctgttgctgttgcattcgccctttttagacaacaaactagaaacatctag

SEQ ID NO: 431863 - DNA, 120 bp, Artificial Sequence
  ENSG00000152291_51 (sequence is synthesized)
atacacatatctgtgacgttagagctagcagagaccttggaatactctacagcagctacctcccttcacagatgaggaaataggcccacgcagaaacactcttttttttttttttccgct

SEQ ID NO: 431864 - DNA, 120 bp, Artificial Sequence
  ENSG00000152291_52 (sequence is synthesized)
aagtttctactgcaagttagtggcaaactcaggacctgatagcaactccctagtctcccagtcctgagctttctgcattctgccagcgctccataaactttaataggcatttgaatcacc

SEQ ID NO: 431865 - DNA, 120 bp, Artificial Sequence
  ENSG00000152291_53 (sequence is synthesized)
actttaataggcatttgaatcaccttggggaattttgataaaaagcattatctgattcattagatgtggggtggagcctatatttctacattcttttttttttttttggagatggagttt

SEQ ID NO: 431866 - DNA, 120 bp, Artificial Sequence
  ENSG00000152292_0 (sequence is synthesized)
agctcctctgcctctgccatggacaagctcagtgggagcaggccccggctggggccaccgctcccaccccccagatgtgtggactccccaggttggagagaagatgctcccagcccttcc

SEQ ID NO: 431867 - DNA, 120 bp, Artificial Sequence
  ENSG00000152292_1 (sequence is synthesized)
ttcctgcctgccccagggacttggagacacaagcatcccttcctccaggcccaggaggaggacgaggaggaaaataagtatgagctgcccccctgtgaggctctgcccctcagtctagcc

SEQ ID NO: 431868 - DNA, 120 bp, Artificial Sequence
  ENSG00000152292_2 (sequence is synthesized)
cctgcccaccttcctggcactgaggaggactccttgtacctggatcactctggccccctgggtccatcaaagccatcgccacccctgcctcagcccaccatggtgagaggcctctccaga

SEQ ID NO: 431869 - DNA, 120 bp, Artificial Sequence
  ENSG00000152292_3 (sequence is synthesized)
agtccctccttccccacccgccccatcccaggctgccatttcccactgaagggagcagtgagcctgccggtggccggaaagcagggacctatctttgggaggcgagagcagggtgcatcg

SEQ ID NO: 431870 - DNA, 120 bp, Artificial Sequence
  ENSG00000152292_4 (sequence is synthesized)
tccagagtggtgccaggccctccaaagaaacctgatgaggacctctacttggaatgtgagccggatccagtcctggctttgactcagactctcagcttccaagtcctgatgccctcaggc

SEQ ID NO: 431871 - DNA, 120 bp, Artificial Sequence
  ENSG00000152292_5 (sequence is synthesized)
cctctgcccaggacatcagtggtgcccaggcctaccacagccccccaggaaactcggaatggaacagcagatgctgcctctaaagaaggaaggaaatcgtctcttccctctgtagccccc

SEQ ID NO: 431872 - DNA, 120 bp, Artificial Sequence
  ENSG00000152292_6 (sequence is synthesized)
ggggcctataccgtgcgccccagctcagggcctcatggctcccagcccttcaccctggcagtgcttctccgaggccgggtcttcaacattcccatccggcggctggatggcggacgccac

SEQ ID NO: 431873 - DNA, 120 bp, Artificial Sequence
  ENSG00000152292_7 (sequence is synthesized)
tatgccctgggccgggagggcaggaaccgtgaggagctcttctcctccgtggcggccatggtccagcacttcatgtggcaccctctgccccttgtggacagacacagcggcagccgggaa

SEQ ID NO: 431874 - DNA, 120 bp, Artificial Sequence
  ENSG00000152292_8 (sequence is synthesized)
ctcacctgcctgctcttccccaccaagccttgaggccacagcgaagtacacaccgcctttggccccagtttgcttcttgtcccgccccaccttgggctgtcttcctctctccttccccac

SEQ ID NO: 431875 - DNA, 120 bp, Artificial Sequence
  ENSG00000152292_9 (sequence is synthesized)
ccctcctcaccctagcctttcccagtgcccacaagcagcattaatggggaaagcctgcctggaggcccagggaagggtcctggagaccccaccccatgctcacctagagccttccactgc

SEQ ID NO: 431876 - DNA, 120 bp, Artificial Sequence
  ENSG00000152292_10 (sequence is synthesized)
cctctctgttgcctctccaaggctgacaccctcttcctggcctccaggaatgcaggtgtctgcccagttcactaggtcctggatgaaggaaccgtggtggcctagaccagtcaggggaca

SEQ ID NO: 431877 - DNA, 120 bp, Artificial Sequence
  ENSG00000152292_11 (sequence is synthesized)
gcacaggcactgctggaacagcaaaggatcctctcacatctacttgtgggcctagggcaccctgagagggactggcctaccttgcacaagttcacattcaataaacatttgttgaatgaa

SEQ ID NO: 431878 - DNA, 120 bp, Artificial Sequence
  ENSG00000152292_12 (sequence is synthesized)
cctctgcccaggacatcagtggtgcccaggcctaccacagccccccaggaaactcggaatcccccactgggagtgcctcagctgctgaggacagtgatctgctgactcagccttggtact

SEQ ID NO: 431879 - DNA, 120 bp, Artificial Sequence
  ENSG00000152292_13 (sequence is synthesized)
ccaggaaggaaatcgtctcttccctctgtagcccccactgggagtgcctcagctgctgagacagggacaccactttgttctgcctgagggggactcagttgagcataggagatgggaaca

SEQ ID NO: 431880 - DNA, 120 bp, Artificial Sequence
  ENSG00000152292_14 (sequence is synthesized)
gttcaagaccagcctggacaacatatcaacaggacacagaatggtctgcctgggcctcagtcacattggaggagcagagagagaaggagccatgaggagtcactcaagggttttaggcag

SEQ ID NO: 431881 - DNA, 120 bp, Artificial Sequence
  ENSG00000152292_15 (sequence is synthesized)
tgggttcaagctattctcctgcctcaacaacctcctgagggctgggattacaggagatgcaaatgatgggaacaatggagcccttgtccccaggccatttgtggcagatcctgggctcca

SEQ ID NO: 431882 - DNA, 120 bp, Artificial Sequence
  ENSG00000152292_16 (sequence is synthesized)
ccccccaggaaactcggaatgtaagaggctgatggtcaggggagaagagagggaggcagggagggaggctcagggtgggacctggggcccggcctcttctgatcagacctcctgtatgcc

SEQ ID NO: 431883 - DNA, 120 bp, Artificial Sequence
  ENSG00000152292_17 (sequence is synthesized)
cctcttctgatcagacctcctgtatgccagggaacagcagatgctgcctctaaaggtgagtaaaggctggtccaaaggtagtgagttatcccaactgattgttcacagtcagttacagat

SEQ ID NO: 431884 - DNA, 120 bp, Artificial Sequence
  ENSG00000152292_18 (sequence is synthesized)
ttctcactactgcacttgactagacttaaaaaaaaaaaaaaaaaactaggtgaatgcaggcatcttcagcatgaatgcaggtggtcctgccagggcctgccccagccccagccctgcagg

SEQ ID NO: 431885 - DNA, 120 bp, Artificial Sequence
  ENSG00000152292_19 (sequence is synthesized)
ccagactccctcaggccccaagttactgaggatgtccctgaagctctgactccagctgagatcaggcctgaggggaccctcttgggcattttccggtgcctgcaccaaatcaggaagctc

SEQ ID NO: 431886 - DNA, 120 bp, Artificial Sequence
  ENSG00000152292_20 (sequence is synthesized)
ctagtctgtgccccaagatcacgcctcatttggaggtcacacgaggcctggctggtgggtcctgccagggcactggatctggagagtggaggaagcactgggtgccggggtttgggctcg

SEQ ID NO: 431887 - DNA, 120 bp, Artificial Sequence
  ENSG00000152292_21 (sequence is synthesized)
gggccatgtacgcctcctcctaccccccacccccgcagctgtcccctagaagccacctttgcccacccccaccccaccccaccccaccccagctcaataatctgcttcttctagaaggaa

SEQ ID NO: 431888 - DNA, 120 bp, Artificial Sequence
  ENSG00000152292_22 (sequence is synthesized)
ggaaatcgtctcttccctctgtagcccccactgggagtgcctcagctgctgaggtgaggaggggctgggagcaggctgtagggagaggttccgggagcagagcctgagagtccttaccca

SEQ ID NO: 431889 - DNA, 120 bp, Artificial Sequence
  ENSG00000152292_23 (sequence is synthesized)
ggaaccctcttgggctgaagggtgcaccactgcaagaacacattgaacacacgtgtgcggcaccccgccgtgccccagacagggacaccactttgttctgcctgagggggactcagttga

SEQ ID NO: 431890 - DNA, 120 bp, Artificial Sequence
  ENSG00000152292_24 (sequence is synthesized)
ctgctgactcagccttggtactcggggaactgtgaccgctatgctgttgagagtgccctgctccacttacaaaaggtgggcagccacggaccccgggtcttctccaaaaccccttttgct

SEQ ID NO: 431891 - DNA, 120 bp, Artificial Sequence
  ENSG00000152292_25 (sequence is synthesized)
cacaggctgtggctggccgagcagtggggagcaggagggccaggagggttctggccccatcatgggtcagggcagtgggagggccattggaagatgaggttgatggctggggtctcctcc

SEQ ID NO: 431892 - DNA, 120 bp, Artificial Sequence
  ENSG00000152292_26 (sequence is synthesized)
gggaaaaatcttcattttgtatctttctggggtgggcagaaatgacagagcccagagccctgaactccttccagacacctggccctctggtgggggaggtgcccctcctgccatggctca

SEQ ID NO: 431893 - DNA, 120 bp, Artificial Sequence
  ENSG00000152292_27 (sequence is synthesized)
gtctgcacagggtcgaggtggggcctttgtgcctttaatgaacccagctgggaggagggcggggtccaggatcttcagactcttgtctacctcccccaggactcaatgtcgcacccagca

SEQ ID NO: 431894 - DNA, 120 bp, Artificial Sequence
  ENSG00000152292_28 (sequence is synthesized)
tttgctaggatgcaaactagagacacccatcacacagctccccacgctggaggaccagggcagaggcgcaccctagagtcagtttgatctagccttggacataagagtctggccagtggc

SEQ ID NO: 431895 - DNA, 120 bp, Artificial Sequence
  ENSG00000152292_29 (sequence is synthesized)
gtgcccatgggtgcagcagcaggaaagttgcctgaggcctggaacggggcagcaaaatggcagtggagcggcatggggcaaacaggaaggaagatatctagaaaaatgtcaaaagtcccc

SEQ ID NO: 431896 - DNA, 120 bp, Artificial Sequence
  ENSG00000152292_30 (sequence is synthesized)
gttggggccgtgggagatgaagatggtgggtggggggttgggcccacagcctgctaagcaggcagagtggcctcctgaacccttcctccatcgcctagagcaaactcccattcctggaag

SEQ ID NO: 431897 - DNA, 120 bp, Artificial Sequence
  ENSG00000152292_31 (sequence is synthesized)
gaggagcagcccagaccctgagactggactaggtctgttagggtccctgtgtggccggcaggactcgtggtgaagcccggggaaggcctgggtcctccaggtcagggatgtaggtcccag

SEQ ID NO: 431898 - DNA, 120 bp, Artificial Sequence
  ENSG00000152292_32 (sequence is synthesized)
ggtgtgcaggccgcggtatctgaccatcgtcggcgccctgcgcccaggcatcaattttacatggcagagtcaagaatgccctcttggtcgagtgcagtggctcacacctgtgatcccaac

SEQ ID NO: 431899 - DNA, 120 bp, Artificial Sequence
  ENSG00000152292_33 (sequence is synthesized)
caagaagagaggccgcatcacaaaccaacctttatggcaccttgatcttagacttctagctccagaacagagatgcaaatgatgggaacaatggagcccttgtccccaggccatttgtgg

SEQ ID NO: 431900 - DNA, 80 bp, Artificial Sequence
  ENSG00000152315_0 (sequence is synthesized)
gaggacgtggggagctggcgccacaggagctaccgaggcggcggccgggggagcctcgcggcctgcgggagagcccggcg

SEQ ID NO: 431901 - DNA, 80 bp, Artificial Sequence
  ENSG00000152315_1 (sequence is synthesized)
gagcgccggggcccttatttcccgggggtgtgggcgagactccgccgacgcccggtgccgtgggcctgggggctgccccc

SEQ ID NO: 431902 - DNA, 120 bp, Artificial Sequence
  ENSG00000152315_2 (sequence is synthesized)
cgggccacctgaacgaggacaacgcgcgctttctgctgctggccgcgctcatcgtgctctacctgctgggcggcgccgccgtcttctccgcgctggagctggcgcacgagcgccaggcca

SEQ ID NO: 431903 - DNA, 120 bp, Artificial Sequence
  ENSG00000152315_3 (sequence is synthesized)
agcagcgctgggaggagcgcctggccaacttcagccgcggccacaacctgagccgcgacgagctgcgcggcttcctccgccactacgaggaggccactcgggccggcatccgcgtggaca

SEQ ID NO: 431904 - DNA, 120 bp, Artificial Sequence
  ENSG00000152315_4 (sequence is synthesized)
acgtccgcccgcgctgggacttcaccggcgccttctacttcgtgggcaccgtcgtttccaccatagggtttgggatgacaactccggcgacagtaggaggaaaaatctttctgatctttt

SEQ ID NO: 431905 - DNA, 120 bp, Artificial Sequence
  ENSG00000152315_5 (sequence is synthesized)
acggccttgttgggtgttccagcaccatcttgttcttcaacctcttcctggagcgcctgatcaccatcatcgcctacatcatgaagtcgtgccaccagcggcagctccggagacgagggg

SEQ ID NO: 431906 - DNA, 120 bp, Artificial Sequence
  ENSG00000152315_6 (sequence is synthesized)
ccctgccccaggagagcctgaaggatgcggggcagtgtgaggtggacagcctggccggctggaagccctccgtgtactacgtcatgctgatcctatgcacagcctccatcctcatctctt

SEQ ID NO: 431907 - DNA, 120 bp, Artificial Sequence
  ENSG00000152315_7 (sequence is synthesized)
gctgcgcctcagccatgtacacccccattgaaggctggagctactttgactcactctacttctgttttgtggctttcagcaccattggctttggggacctggtcagcagccagaacgccc

SEQ ID NO: 431908 - DNA, 120 bp, Artificial Sequence
  ENSG00000152315_8 (sequence is synthesized)
actatgagagccaaggcctctatcgctttgccaacttcgtcttcatcctcatgggtgtctgctgcatctactccttgttcaatgtcatctctatcctcatcaaacagtccttgaactgga

SEQ ID NO: 431909 - DNA, 120 bp, Artificial Sequence
  ENSG00000152315_9 (sequence is synthesized)
aaatggacagcgggtgctgcccgcaatgccagagaggactcttgcgatcacgcaggaacgtggtgatgccaggcagcgtccggaaccgctgcaacatctccatagagacagacggggtgg

SEQ ID NO: 431910 - DNA, 120 bp, Artificial Sequence
  ENSG00000152315_10 (sequence is synthesized)
cagagagtgacacggacgggcgccggctctcaggggagatgatctccatgaaggacttgctggcagccaacaaggcctcgttggccatcctgcagaagcaactgtctgagatggccaacg

SEQ ID NO: 431911 - DNA, 120 bp, Artificial Sequence
  ENSG00000152315_11 (sequence is synthesized)
gctgcccccaccagaccagcacactggcccgggacaatgaattctcagggggggtgggagcctttgcaatcatgaacaacaggttggcagagaccagtggggacaggtagaagccaggag

SEQ ID NO: 431912 - DNA, 120 bp, Artificial Sequence
  ENSG00000152315_12 (sequence is synthesized)
tggatgctgggcagaggccagagtagaatggaggatgattgccgcccaggggacgagctcagccctgcgccttggctctgttccttctgggagctgttcccgggagcctccgcaagcatc

SEQ ID NO: 431913 - DNA, 120 bp, Artificial Sequence
  ENSG00000152315_13 (sequence is synthesized)
tttagaaatctgatctcggctccaaccaacagccaccttccagggatggggggcctgaagcctcgatgcttgtctcctgatccttattctttaagtctaaattcagtcttttcaaaacaa

SEQ ID NO: 431914 - DNA, 120 bp, Artificial Sequence
  ENSG00000152315_14 (sequence is synthesized)
atcacaaaagcagcattagacattgccttgtttcattaatcttgtttcagagctttagctgcctgaggagataggttttccttaagccttgatttcctgaagctctctctgttccttatt

SEQ ID NO: 431915 - DNA, 120 bp, Artificial Sequence
  ENSG00000152315_15 (sequence is synthesized)
tgggaacaaaaattgcgaagactcatctttccctagaactctgaatggatgaatttttaaaagtggggagaatgtttggggatgtgtctgggctttctttttgccaggcttccttcaaag

SEQ ID NO: 431916 - DNA, 120 bp, Artificial Sequence
  ENSG00000152315_16 (sequence is synthesized)
catacctgccaatggtgtctgcatagggaaaatgtctgttgtactctttatacctgtttctgttttttgttgtccctttctttttatttttaaggccttaatgcctggctgtggcgtctg

SEQ ID NO: 431917 - DNA, 120 bp, Artificial Sequence
  ENSG00000152315_17 (sequence is synthesized)
tgagacctcaatgtaataagaaaattaaattcagcttcaggcctttaaactgcagcaagatggtggtgtaggggtgtgggacggggagagactcacttttgtaactaaagaacatagctt

SEQ ID NO: 431918 - DNA, 120 bp, Artificial Sequence
  ENSG00000152315_18 (sequence is synthesized)
aacattttccctttgaatggtcacacagaccatttcatttttaccagggcttggggacccaatgcaaagatgatgactatttaataaaatggaaaatttaataaatcctcattttattaa

SEQ ID NO: 431919 - DNA, 120 bp, Artificial Sequence
  ENSG00000152332_0 (sequence is synthesized)
gggactcgggtgcaccacggcttccggtgtcatggctgcttgaagtcccgggagtcggtgaggcggctgcaggtccctccctgcggagccgctggtccggctggcggagatgtgaccgcg

SEQ ID NO: 431920 - DNA, 120 bp, Artificial Sequence
  ENSG00000152332_1 (sequence is synthesized)
ggcccggccggcctgcctcaggcgtcgcgtcagctcccgtgtccgtgcccttaacccacaccgatggcgggatccggctgcgcctggggcgcggagccgccgcgttttctggaggccttc

SEQ ID NO: 431921 - DNA, 120 bp, Artificial Sequence
  ENSG00000152332_2 (sequence is synthesized)
gggcggctgtggcaggtacagagccgtctgggtagcggctcctccgcctcggtgtatcgggttcgctgctgcggcaaccctggctcgccccccggcgccctcaagcagttcttgccgcca

SEQ ID NO: 431922 - DNA, 120 bp, Artificial Sequence
  ENSG00000152332_3 (sequence is synthesized)
ggaaccaccggggctgcggcctctgccgccgagtatggtttccgcaaagagagggcggcgctggaacagttgcagggtcacagaaacatcgtgactttgtatggagtgtttacaatccac

SEQ ID NO: 431923 - DNA, 120 bp, Artificial Sequence
  ENSG00000152332_4 (sequence is synthesized)
ttttctccaaatgtgccatcacgctgtctgttgcttgaactcctggatgtcagtgtttcggaattgctcttatattccagtcaccagggttgttccatgtggatgatacagcattgtgcc

SEQ ID NO: 431924 - DNA, 120 bp, Artificial Sequence
  ENSG00000152332_5 (sequence is synthesized)
cgagatgttttggaggcccttgcttttcttcatcatgagggctatgtccatgcggacctcaaaccacgtaacatattgtggagtgcagagaatgaatgttttaaactcattgactttgga

SEQ ID NO: 431925 - DNA, 120 bp, Artificial Sequence
  ENSG00000152332_6 (sequence is synthesized)
cttagcttcaaagaaggcaatcaggatgtaaagtatattcagacagacgggtatcgggctccagaagcagaattgcaaaattgcttggcccaggctggcctgcagagtgatacagaatgt

SEQ ID NO: 431926 - DNA, 120 bp, Artificial Sequence
  ENSG00000152332_7 (sequence is synthesized)
acctcagctgttgatctgtggagcctaggaatcattttactggaaatgttctcaggaatgaaactgaaacatacagtcagatctcaggaatggaaggcaaacagttctgctattattgat

SEQ ID NO: 431927 - DNA, 120 bp, Artificial Sequence
  ENSG00000152332_8 (sequence is synthesized)
cacatatttgccagtaaagcagtggtgaatgccgcaattccagcctatcacctaagagaccttatcaaaagcatgcttcatgatgatccaagcagaagaattcctgctgaaatggcattg

SEQ ID NO: 431928 - DNA, 120 bp, Artificial Sequence
  ENSG00000152332_9 (sequence is synthesized)
tgcagcccattctttagcattccttttgcccctcatattgaagatctggtcatgcttcccactccagtgctaagactgctgaatgtgctggatgatgattatcttgagaatgaagaggaa

SEQ ID NO: 431929 - DNA, 120 bp, Artificial Sequence
  ENSG00000152332_10 (sequence is synthesized)
tatgaagatgttgtagaagatgtaaaagaggagtgtcaaaaatatggaccagtggtatctctacttgttccaaaggaaaatcctggcagaggacaagtctttgttgagtatgcaaatgct

SEQ ID NO: 431930 - DNA, 120 bp, Artificial Sequence
  ENSG00000152332_11 (sequence is synthesized)
ggtgattccaaagctgcgcagaaattactgactggaaggatgtttgatgggaagtttgttgtggctacattctacccgctgagtgcctacaagaggggatatctgtatcaaaccttgctt

SEQ ID NO: 431931 - DNA, 120 bp, Artificial Sequence
  ENSG00000152332_12 (sequence is synthesized)
taatcagtaacctaaggactgtttcctttttctcctcttccatttcttgggttattccacatatgaatgcaggactacccccttaccattttaagaaggtactttatacatttatttaat

SEQ ID NO: 431932 - DNA, 120 bp, Artificial Sequence
  ENSG00000152332_13 (sequence is synthesized)
cctactaatgtgcagccattgcccaagcagtgactgcgttgcatacatttggcactgagtaggacaagacctctcagctatacattgaggggttttagagcatccatgtgggcaaccctt

SEQ ID NO: 431933 - DNA, 120 bp, Artificial Sequence
  ENSG00000152332_14 (sequence is synthesized)
ttttgtgcgggagagcaggtgttgctcttcagtatgtagcctaaaaaaatcttaattatttcatggatcatgaagcaaggatgaataatatcatgtcttggtaaatactaacaaatttgt

SEQ ID NO: 431934 - DNA, 120 bp, Artificial Sequence
  ENSG00000152332_15 (sequence is synthesized)
taggtttggtgacatcatttacagattatttctttatgttgtccagtggttcttccttattgttgatatccataagctggcactggatgctctcagtaatgttaagtaattgtcaagcag

SEQ ID NO: 431935 - DNA, 120 bp, Artificial Sequence
  ENSG00000152332_16 (sequence is synthesized)
cagttacctactgtgttcttaacactgagttgtgaattttttcttaaagcagtactgtagtactgaatattcctttaaaggaactgcagtgagcctatctaagtttttttaaattaaggc

SEQ ID NO: 431936 - DNA, 120 bp, Artificial Sequence
  ENSG00000152332_17 (sequence is synthesized)
ttttaaaatagaaagctgatgcttgatcttgcacaatttttatgtctagtatgtatgcttgagtgaatgtgcgagtatgaatgattagagaaaatttgagtcagtgtactttatagtgtg

SEQ ID NO: 431937 - DNA, 120 bp, Artificial Sequence
  ENSG00000152332_18 (sequence is synthesized)
aatcctgtgagctaatacagtctatacttatttcttccctacctgtttcacatccgtaagatttaagatatacattttttgagaggtagtctgtctgatacaatgtaaatgacaaaacat

SEQ ID NO: 431938 - DNA, 120 bp, Artificial Sequence
  ENSG00000152332_19 (sequence is synthesized)
aattcctgagaggcccagaacaaactggagtctagcctggagttaaattgagacttctaaaatgattggaacaaagactaagttgtgccagatgtaaatcaacccctcttttagtttact

SEQ ID NO: 431939 - DNA, 120 bp, Artificial Sequence
  ENSG00000152332_20 (sequence is synthesized)
ttagactttgtattagctcatcttttttgtagtaaatctatagttttaaggtttctcaagatgtggctctacctactatgatgaaaattgaagtgggtcaaaagaattagatgtacagtg

SEQ ID NO: 431940 - DNA, 120 bp, Artificial Sequence
  ENSG00000152332_21 (sequence is synthesized)
aagggaaaagaaaaaaaatgggcgaagagagggtggaaaataaaaggattcttttttcttcctttctgtttctcgtatccctgctccctttttcctccccttccctcattctttgcctct

SEQ ID NO: 431941 - DNA, 120 bp, Artificial Sequence
  ENSG00000152332_22 (sequence is synthesized)
atccttagctgaagacaaactagaggagcagcatcccaggtagtttggcttttgactgcaaggtagttaagaaaggtgtagatataatgaggtagaagtagaaaggaagaaaaactcaaa

SEQ ID NO: 431942 - DNA, 120 bp, Artificial Sequence
  ENSG00000152332_23 (sequence is synthesized)
gaattcttaaaaggattcatagcaacataatgtgtccctgagtagaggatgctgctatgcgtgagttcatggacacaagttgattacatggtttttagaattataattatggattcttct

SEQ ID NO: 431943 - DNA, 120 bp, Artificial Sequence
  ENSG00000152332_24 (sequence is synthesized)
tatttcatggtaggttgtctttaaagatataaaaattaggatgcctttatgaagcactgattataccaaaaaaaaaagacaagttatatacaggttattaatttttttatttatttattt

SEQ ID NO: 431944 - DNA, 120 bp, Artificial Sequence
  ENSG00000152332_25 (sequence is synthesized)
tttcctaaggaaaaagtcttctatctttccctgctggaagcctcctcatatttccttatgtttgccatgcaggttgctgagagtccagttagaatttgcattttacagaatgaaatactt

SEQ ID NO: 431945 - DNA, 120 bp, Artificial Sequence
  ENSG00000152332_26 (sequence is synthesized)
taccccattcaaacaattattgtttgacattttagttatttataattgtcaaattcaggactctcctttaatgtttattatgaaaccaaatttggcataaggaggctgatttatgaatta

SEQ ID NO: 431946 - DNA, 120 bp, Artificial Sequence
  ENSG00000152332_27 (sequence is synthesized)
ccaaagggtcttgtggcatgttccccaatacatgcccttagaaggaagaactattattttttattttggccctttcaggagttgattataaattggtttgttttcaagtcagaattcaag

SEQ ID NO: 431947 - DNA, 120 bp, Artificial Sequence
  ENSG00000152332_28 (sequence is synthesized)
tgggcagaacccgtattgtgaagacctaaactttcctaaatgttcatatgggtagcagattttgtggtgattagaaacatcaggtccttaaatacgatgaacatgggatacaaaggaatt

SEQ ID NO: 431948 - DNA, 120 bp, Artificial Sequence
  ENSG00000152332_29 (sequence is synthesized)
ctttataagggcaagtatcctaagttagcacatttacttttctctcccctccgcccccaaaagaaaaatccttacaaataaactgcaggtaggcttctaagcctagtcctgcagtatgct

SEQ ID NO: 431949 - DNA, 120 bp, Artificial Sequence
  ENSG00000152332_30 (sequence is synthesized)
gctaacatcttgatgccaatcttcacagcattctttgattgtcatcttattgctgatacattcatacatatatttagtgcttgacactgtagaattttgttacagaagatggttactaga

SEQ ID NO: 431950 - DNA, 120 bp, Artificial Sequence
  ENSG00000152332_31 (sequence is synthesized)
ttttaagggagctgagggaataattgatgagccttgaattaaccatgcatttaattagattttttgttgttgttgttgttgttttgagatgatgtcttgctctgttgcccaggctggagt

SEQ ID NO: 431951 - DNA, 84 bp, Artificial Sequence
  ENSG00000152332_32 (sequence is synthesized)
aggtttgtttacaggcgcttgccaccacacctggctagatgttttatattaaagccagagaattgaaaaagaaatgcctcctgt

SEQ ID NO: 431952 - DNA, 120 bp, Artificial Sequence
  ENSG00000152332_33 (sequence is synthesized)
tatattaaagccagagaattgaaaaagaaatgcctcctgtgattgaaattattttatagctcttagcccgttctaccaaagatcacattagcagattacccctccctcctgtgatattat

SEQ ID NO: 431953 - DNA, 120 bp, Artificial Sequence
  ENSG00000152332_34 (sequence is synthesized)
ctttcttaaacctgaaccaaatatcaaaagatacaagtttcatgattaggatgaaatatatacatagggattttggtttattgaagttattgaaagacctagaaattttctttttgagag

SEQ ID NO: 431954 - DNA, 120 bp, Artificial Sequence
  ENSG00000152332_35 (sequence is synthesized)
ggtaaagaggtgagggttcatgtcacttaacccctacccttttgggcaaattttgtctcaggtagtgtttcattccctaaattaatacctgtgcttccttgcctctcaccttcccagtta

SEQ ID NO: 431955 - DNA, 120 bp, Artificial Sequence
  ENSG00000152332_36 (sequence is synthesized)
cttctttggggtattactgtggcacattgtacacccagaaaaggcacatacagtgattattttgtgggaaatacttgattcttttgaaatatatttggagggggtagctagctagccact

SEQ ID NO: 431956 - DNA, 120 bp, Artificial Sequence
  ENSG00000152332_37 (sequence is synthesized)
gtcaaaactaatgctgtatttacaggacaaaaacaagtagagttggacacctcagtaagagacagcattaactaaaagtactgactgccttttaaaggaatttttaaaactattctcttg

SEQ ID NO: 431957 - DNA, 120 bp, Artificial Sequence
  ENSG00000152332_38 (sequence is synthesized)
caataagagatccgcatttattaccactggatgtcttccttttttgtggccaccaatatagcagctctctttagagggattccctttctgctatgccttgagccaaactggctgctttta

SEQ ID NO: 431958 - DNA, 120 bp, Artificial Sequence
  ENSG00000152332_39 (sequence is synthesized)
gaacaaaaaccataagtatggttttactcgaacttctctttgtttttattgagagaaatattgccttctttttggtactccagctgctaaagagtgctgagatatgttaaattatttttt

SEQ ID NO: 431959 - DNA, 120 bp, Artificial Sequence
  ENSG00000152332_40 (sequence is synthesized)
aaaagaaaatctccaaatacttatttaacttgtcttctagattcatgttgcttatattttaactattgagcaagtttattataaggaatgctgccatatagagaaagctgaagagaaacc

SEQ ID NO: 431960 - DNA, 120 bp, Artificial Sequence
  ENSG00000152332_41 (sequence is synthesized)
atgggcagaaggcttttttctgtcttattacactggaccttcactctggtaagggcatcagttacttttctggaataaaaggcggagttagagcacttatcagatgctgtttcatggctt

SEQ ID NO: 431961 - DNA, 120 bp, Artificial Sequence
  ENSG00000152332_42 (sequence is synthesized)
gttttagttaatttatcatgcagataactaacatttgggtatctttttgttttaggtcttattttctgactgttaggcctatcttacacataagttctactatcagtatacttggcagca

SEQ ID NO: 431962 - DNA, 120 bp, Artificial Sequence
  ENSG00000152332_43 (sequence is synthesized)
tgacttttttttttttttacagttaatttaatgaaaatcagcaccattgtaaatgatagtaattgtaacaacatagttactgggtgaaggagtaggggagacactcagtaaccatctatt

SEQ ID NO: 431963 - DNA, 120 bp, Artificial Sequence
  ENSG00000152332_44 (sequence is synthesized)
tacctagacacttatgcaggggtacatgctaggtggctttattcagattcgggtacattggaatcacatcatgactttgagtctgatggctgtgtagataaagatttaagcaagtgcctt

SEQ ID NO: 431964 - DNA, 120 bp, Artificial Sequence
  ENSG00000152332_45 (sequence is synthesized)
gtgtttgctggaaaatattaaaactcatttgggtgaaagcttcccagatgatgataattaatagcacttctgcctttttcctggagtaacttttagattgagtcacatatgatagtataa

SEQ ID NO: 431965 - DNA, 120 bp, Artificial Sequence
  ENSG00000152332_46 (sequence is synthesized)
aagtccaaaattttctgggtttacctttgttttatttttcatatatatattcactgtctgcctggaaatagccttggtttaccttatttttttgtatatgtaaaactattcatatttgat

SEQ ID NO: 431966 - DNA, 120 bp, Artificial Sequence
  ENSG00000152332_47 (sequence is synthesized)
tttattccaatattatatatgatggaaaagccagaattgtctggcagaatttaattcttccttggatctctagttctgtttttaatatcaggttccttcatcaaattttactactgtagc

SEQ ID NO: 431967 - DNA, 120 bp, Artificial Sequence
  ENSG00000152332_48 (sequence is synthesized)
tctgtgatataatttcatttcttgtcaattatggtcacatatagacaagtacttggtcacaattagctcaaaagaatccccatttcttaaggtgctcagtcaatcacctttattttgaga

SEQ ID NO: 431968 - DNA, 120 bp, Artificial Sequence
  ENSG00000152332_49 (sequence is synthesized)
tggtagtttttcaagttagtattacttactagctttcttgatgaatataaaaatgttgtctccatcatacagagctgagcctcttgtggtatattaagataagtcccattcttaatcaca

SEQ ID NO: 431969 - DNA, 120 bp, Artificial Sequence
  ENSG00000152332_50 (sequence is synthesized)
gaagaacatggatattttagtttttggagtacccagaattgtaaagattttgtttcattttgttttaggatagcttctctgcctaatactataggatatgtcatgttcgttattgtagcc

SEQ ID NO: 431970 - DNA, 120 bp, Artificial Sequence
  ENSG00000152332_51 (sequence is synthesized)
acctccctcagatgtttttcactatttttaaattatataatgaccagtagattcacagtagcatgtacttgacaagtgccatggatatttaagaagaaggtaaataattttaatattttt

SEQ ID NO: 431971 - DNA, 120 bp, Artificial Sequence
  ENSG00000152332_52 (sequence is synthesized)
tgctgtaattttataggagcagtggactgtaagagaaatatctataaatcagagagtatttaggaaactttgtattttataggtggtcattaaagtgatcttcaggatataagatagttt

SEQ ID NO: 431972 - DNA, 120 bp, Artificial Sequence
  ENSG00000152332_53 (sequence is synthesized)
acacaaactttattctcctgataggaaatttttattcattttcctaccactcagcacttttgttctgccttgtactgcttatgaggattaatgttttaaatttgctttatttgtgctttt

SEQ ID NO: 431973 - DNA, 120 bp, Artificial Sequence
  ENSG00000152332_54 (sequence is synthesized)
cagagagttgtcataattgtggcagttgtgtttgtggcactgtaaatgctgaaattcatgggaaacttaccaaatgactgcttgagtgttatttcccattaaattgggtagctgtcacaa

SEQ ID NO: 431974 - DNA, 120 bp, Artificial Sequence
  ENSG00000152332_55 (sequence is synthesized)
taaccagaagaaatcttgtggcccttttgaagaaagccatgtatgttttgttacctaggttcatagtattttaatttaaaggcaaagagaagcattctacttatttgtcttataaaccat

SEQ ID NO: 431975 - DNA, 120 bp, Artificial Sequence
  ENSG00000152332_56 (sequence is synthesized)
taatcgttttttgtgcagaagagagcttattttgttatactgctttgtataatggaaataagtcacattctgggggaaaaaaactggaattgtttgtattttgtttttttggggggggat

SEQ ID NO: 431976 - DNA, 120 bp, Artificial Sequence
  ENSG00000152332_57 (sequence is synthesized)
ctttatgtgaaaaatcagagctacttgttaccataagcccttactatcaacaagataattatttgtaatcacttttttatcccaggttggaattgctttccccttctaagttatcttccc

SEQ ID NO: 431977 - DNA, 120 bp, Artificial Sequence
  ENSG00000152332_58 (sequence is synthesized)
ttaataatatttatgataccaggacagtgagggtataagagcaaatgtagtgaggtattcaaaaatcctgcatatatggactcaaaagttctttagttatttgaattatatatagctata

SEQ ID NO: 431978 - DNA, 120 bp, Artificial Sequence
  ENSG00000152332_59 (sequence is synthesized)
ttattttattagcttgggttgtcagaagattgccaattttaagagtaaagaggagagagataagtaataaaaatagaggaggggaagaaaatggctcccttactggtcttagtaatcttc

SEQ ID NO: 431979 - DNA, 120 bp, Artificial Sequence
  ENSG00000152332_60 (sequence is synthesized)
tatatagttaatgagctaaaaaatgatacttaaagttccaggtttggtaccgctagcatagaaacattgcctttcctacacattcctcatcattgtttcctcagaaaattattttaagag

SEQ ID NO: 431980 - DNA, 120 bp, Artificial Sequence
  ENSG00000152332_61 (sequence is synthesized)
tttgtgaaaccagattaaatatctatattcagtttggcctaatttttaaaaataaatatttatactccagcttttgtgtatttggtgtacatcaccacttatgcaaatcaaggatcagaa

SEQ ID NO: 431981 - DNA, 120 bp, Artificial Sequence
  ENSG00000152332_62 (sequence is synthesized)
aactggaggttagccatctccattatttccttttgcacattgggtacagtgggtggcattagtatgcactagctgcaaagtcacagcaccttatggaaataagtatgtttattataataa

SEQ ID NO: 431982 - DNA, 120 bp, Artificial Sequence
  ENSG00000152332_63 (sequence is synthesized)
aaaaaagttaagctgcatctctgtagattatttactttgcagactgtaaagctgccctatcttttccagcagaatttactcttccattcttaattcttttttgaaatatcttaaataatt

SEQ ID NO: 431983 - DNA, 120 bp, Artificial Sequence
  ENSG00000152332_64 (sequence is synthesized)
taacattcctttataacttcttaacagtgtcaaaactggggtagaagggattttattttttcccaaaagggttccatctttgctatctgttgatcagccttagaaaatctaagtatgatc

SEQ ID NO: 431984 - DNA, 120 bp, Artificial Sequence
  ENSG00000152332_65 (sequence is synthesized)
aataaattttaatggttgatggcatcctgtgtcagctggagtagttggttgtgaatattaaaacctagtactattttccctcagtaacatgtaattgctacattttttataagaaggtat

SEQ ID NO: 431985 - DNA, 120 bp, Artificial Sequence
  ENSG00000152332_66 (sequence is synthesized)
ggttagaaaaaaatgtgaaagatcacttaaaccaaagccagttacaaggagtaatctctcctgttggtttaccttcacctcagaactacaagaatattacaatacatagtgaatagttgt

SEQ ID NO: 431986 - DNA, 120 bp, Artificial Sequence
  ENSG00000152332_67 (sequence is synthesized)
ctgtaacatttctaccagttgtttcagtagcatattggtcttggcatttcttggcactgtggttctgctgtattatttgtgatgtcttattgtttgtgagcttttgttttttttttaaag

SEQ ID NO: 431987 - DNA, 120 bp, Artificial Sequence
  ENSG00000152332_68 (sequence is synthesized)
aaaaaacaaaaactaagtgggactatgtatgtagatgtgtgtcagtaccaaaaagttattttctcaaatccctaaatttctgatttccattcaagtcttttaaactctttcctgctgaat

SEQ ID NO: 431988 - DNA, 120 bp, Artificial Sequence
  ENSG00000152332_69 (sequence is synthesized)
agcaaagaacttttattttccactttcctatattcctaaaaagtgtgaacaatgcgtttcagttgactgtattgcatacttttttgctgaagactttttctgtaaacacaattgccttgt

SEQ ID NO: 431989 - DNA, 120 bp, Artificial Sequence
  ENSG00000152332_70 (sequence is synthesized)
tcagttttgttgtaaactgacttaccataagatgcactgttgataatgctttctgatgtgtgtttgataagagtgataaaataaaagcttaaaaataaaggagttgctttttaatttcaa

SEQ ID NO: 431990 - DNA, 120 bp, Artificial Sequence
  ENSG00000152332_71 (sequence is synthesized)
agaaataaccttttcttttctctcgcagtttaaaatgtagtggttgaagccaaatatttttaaatgacaagggtagtttagtaggggcttacaagtcattttaacctaaattactgaaat

SEQ ID NO: 431991 - DNA, 120 bp, Artificial Sequence
  ENSG00000152332_72 (sequence is synthesized)
gccaggggatgcagtaaatcaaaagaatttcagtgccaccgtgtaaaaaaaggacataatgtttgggtcaggtaggaggagccagtgaagcatgagagctctggaattattaaaagtact

SEQ ID NO: 431992 - DNA, 120 bp, Artificial Sequence
  ENSG00000152332_73 (sequence is synthesized)
taacctacatagaatggttttttaaattttatgcgtgtttggctaattgctgagttactattcctggtctcttcagtgttggggctgtatctcgtggcagaatgcatatgatagttctgc

SEQ ID NO: 431993 - DNA, 120 bp, Artificial Sequence
  ENSG00000152332_74 (sequence is synthesized)
caaatcctcttttctccatggtttatcatttctttgcagtgtccttattatcagcagtgcctaataggtaagagacaatccaaagaagacttctttatgagcgctatatggaaatgtaca

SEQ ID NO: 431994 - DNA, 120 bp, Artificial Sequence
  ENSG00000152332_75 (sequence is synthesized)
gcttgcctctgagaactgcccagttaatgaaccaaagaattatggtaatcaaggactaaaaatttttagcatttagcttggcagtgggtttactgcactcttagggaagtaaattcactg

SEQ ID NO: 431995 - DNA, 120 bp, Artificial Sequence
  ENSG00000152348_0 (sequence is synthesized)
gcagtgcgcacgctccgactcggccgtggcggacctgactgaaggaggccgcggacctgactgaaggaggccacggccacttctggttggcctcggggcgcgctggctcggctcttcctc

SEQ ID NO: 431996 - DNA, 120 bp, Artificial Sequence
  ENSG00000152348_1 (sequence is synthesized)
cgccctcgaggcccccgcagtcccatcattcagttccgtagggtcaccggcgcggcagtggcctcgcagggcgctgggtccctctccccagctctcctccccctggccccgtcgccccgc

SEQ ID NO: 431997 - DNA, 120 bp, Artificial Sequence
  ENSG00000152348_2 (sequence is synthesized)
cctcgccgggctgggctgcggggtcaggggccgagcggagagggttatcatttaacatggaagaagatgagttcattggagaaaaaacattccaacgttattgtgcagaattcattaaac

SEQ ID NO: 431998 - DNA, 120 bp, Artificial Sequence
  ENSG00000152348_3 (sequence is synthesized)
attcacaacagataggtgatagttgggaatggagaccatcaaaggactgttctgatggctacatgtgcaaaatacactttcaaattaagaatgggtctgtgatgtcacatctaggagcat

SEQ ID NO: 431999 - DNA, 120 bp, Artificial Sequence
  ENSG00000152348_4 (sequence is synthesized)
ctacccatggacagacatgtcttcccatggaggaggctttcgagctacccttggatgattgtgaagtgattgaaactgcagcagcgtccgaagtgattaaatatgagtatcatgtcttat

SEQ ID NO: 432000 - DNA, 120 bp, Artificial Sequence
  ENSG00000152348_5 (sequence is synthesized)
attcctgtagctaccaagtgcctgtactttactttagggcaagctttttagatgggagacctttaactctgaaggacatatgggaaggagttcatgagtgctataagatgcgactgctac

SEQ ID NO: 432001 - DNA, 120 bp, Artificial Sequence
  ENSG00000152348_6 (sequence is synthesized)
agggaccatgggacactattacgcaacaggaacatccaatacttgggcaacccttttttgtacttcatccctgcaagacgaatgaattcatgactcctgtattaaagaattctcagaaaa

SEQ ID NO: 432002 - DNA, 120 bp, Artificial Sequence
  ENSG00000152348_7 (sequence is synthesized)
tcaataagaatgtcaactatatcacatcatggctgagcattgtagggccagttgttgggctgaatctacctctgagttatgccaaagcaacgtctcaggatgaacgaaatgtcccttaac

SEQ ID NO: 432003 - DNA, 120 bp, Artificial Sequence
  ENSG00000152348_8 (sequence is synthesized)
aagattcttctattgagtttaggaattgcggcacgaagaatgccaagagtttacctggccagccctggctttaataggactgataccatggaatatttcatctcaccaagatgtgacatg

SEQ ID NO: 432004 - DNA, 120 bp, Artificial Sequence
  ENSG00000152348_9 (sequence is synthesized)
catggattatttttcccttggacacaaatgtctacagcaactggtgtttgataggctgaatgtttagaagaaacacttcaaagggatacatcatggccaggcatggtggctcacacctgt

SEQ ID NO: 432005 - DNA, 79 bp, Artificial Sequence
  ENSG00000152348_10 (sequence is synthesized)
ctgggtacaaaaaaatacaaaaatttgcctgtttatggtggtgtgttcctgtagtcccagctccccaggaggctgaggt

SEQ ID NO: 432006 - DNA, 89 bp, Artificial Sequence
  ENSG00000152348_11 (sequence is synthesized)
tgtcggtacaaaaaaatacaaaaatttgcctgtttatggtggtgtgttcctgtagtcccagctccccaggaggctgaggtgggaggttg

SEQ ID NO: 432007 - DNA, 120 bp, Artificial Sequence
  ENSG00000152348_12 (sequence is synthesized)
aaaaaaaagacacatcactataaatagcaaaaaaacaaatctaacttattaatactaggaataccaacattattagggcacttgcaggttattcttttctaggccaagtacttcacttcc

SEQ ID NO: 432008 - DNA, 120 bp, Artificial Sequence
  ENSG00000152348_13 (sequence is synthesized)
atttgtctgacatggagattgagggagaaatgtatttgtgtgttcattttaatgtaagatatataaaaattaaattactggatttacctgtccctgaaactggtgttataaacatgacct

SEQ ID NO: 432009 - DNA, 120 bp, Artificial Sequence
  ENSG00000152348_14 (sequence is synthesized)
atcttaagtgattttcccacaatcaaactcaggaacaatagattatttctgttttactccaaaagagagagagagagtgagtgtgagtgtgtgtgtgtgtgtgtgtgtatgtgtgggtgt

SEQ ID NO: 432010 - DNA, 120 bp, Artificial Sequence
  ENSG00000152348_15 (sequence is synthesized)
ttgtgtagatagttgtaaaacaaagaaaaaacacaatattttactgtgagataatatgttttaccagcaaagtgtggcatagtaattagaagttttctaaaaagctataggagatattta

SEQ ID NO: 432011 - DNA, 120 bp, Artificial Sequence
  ENSG00000152348_16 (sequence is synthesized)
aacattaaaatttctttttgacctatagtaataaaacaatggtcattttacccctctgcttctcaaccccacagctgctctgctgtactctttgagggctcttgagcgagtcttcatgtc

SEQ ID NO: 432012 - DNA, 120 bp, Artificial Sequence
  ENSG00000152348_17 (sequence is synthesized)
cctgagacttattttcctcatctttaatttgaaactaacaagctacctcatagggttgctgtgagaaccacatgagatcattaatgcatgataagatattgtaaagtattatacgaatat

SEQ ID NO: 432013 - DNA, 120 bp, Artificial Sequence
  ENSG00000152348_18 (sequence is synthesized)
tcattaaatgctcacctttcttgtatataattggtattcactaaggctgtaaataagtttcatagccagttaagtattaagataaacctaacctggaacaattttttttttggttgcttg

SEQ ID NO: 432014 - DNA, 120 bp, Artificial Sequence
  ENSG00000152348_19 (sequence is synthesized)
ttttgttttttgctttcatttgctaggagctgaaacgaagattaaaatgtcattggctttttagagagtctagattagtgtgtctttgaatgagggatatacttaaaatcacctgaggat

SEQ ID NO: 432015 - DNA, 120 bp, Artificial Sequence
  ENSG00000152348_20 (sequence is synthesized)
cgtttacagctacagatgctggggccacctgacacagtctctctgggggtgattctgctctggagaacctctggtctggatatacctttattgtgacattgatttgtattgttttgctct

SEQ ID NO: 432016 - DNA, 120 bp, Artificial Sequence
  ENSG00000152348_21 (sequence is synthesized)
actgacaggccttttccaatccatacaagctgaacttgcttcctaatgtttgtctaggccttacatggatagtaaggaagcttaggagacatgtacacaaggcagcccacttgtaggaaa

SEQ ID NO: 432017 - DNA, 120 bp, Artificial Sequence
  ENSG00000152348_22 (sequence is synthesized)
ctgcttcaggtgaggacatcattcaccagtggatcaccgagcaccgtgacagcaccctcagtccacgtctgcagattaagagctgaactctcacagagaaagtggaagtagagaaagggt

SEQ ID NO: 432018 - DNA, 120 bp, Artificial Sequence
  ENSG00000152348_23 (sequence is synthesized)
taattcaaactgctagaaaagctaaaagtaaattttaaaatgctgagctgcccatattcatgctaggatgagagccggcttaaatgcttgctgggcattttggtatttaccacttagcat

SEQ ID NO: 432019 - DNA, 120 bp, Artificial Sequence
  ENSG00000152348_24 (sequence is synthesized)
gttttcaacttctgtgagggattttccccccaatctccctaatgtaaacacagatttctcagcaagtcatttctcaagccatgtcatttctagtgtaaaataaattataataatgtgtca

SEQ ID NO: 432020 - DNA, 71 bp, Artificial Sequence
  ENSG00000152348_25 (sequence is synthesized)
aattaagaatgggtctgtgatgtcacatctaggagcatctacccatggacagacatgtcttcccatggagg

SEQ ID NO: 432021 - DNA, 120 bp, Artificial Sequence
  ENSG00000152348_26 (sequence is synthesized)
ttcatttttgcaatcaatagcttagttagactcaaattgcaaactgtcattgcctgtagtaggcagtggcatagaactcaattcagctcttttaacctgagttttaagctgctttcagat

SEQ ID NO: 432022 - DNA, 120 bp, Artificial Sequence
  ENSG00000152348_27 (sequence is synthesized)
tgccccacacatacatggttcaggagtcagccagagacttgggctgagtttaaacatagaatctggggttgtcctcttctggctgtcttctttcttgggcatctgcatcattctctagca

SEQ ID NO: 432023 - DNA, 120 bp, Artificial Sequence
  ENSG00000152348_28 (sequence is synthesized)
cctatggtttttccaggctctttcccccagtttcctccagtcagaaagatggcaagagtttttgctgcctgccctcccccagtccttgtgccaacaccaccaccattgcagctgcctcca

SEQ ID NO: 432024 - DNA, 120 bp, Artificial Sequence
  ENSG00000152348_29 (sequence is synthesized)
gggaaaaactgcaaaaaccaaatcacttgctccaggtgttgactcctcttcaaaatctatttttgttaaatctccaaagcctcaaataggttttcttcctagaatttatatctgttattt

SEQ ID NO: 432025 - DNA, 120 bp, Artificial Sequence
  ENSG00000152348_30 (sequence is synthesized)
gtagcaggattggtctgtaaggcactcagtcttctacatcatgggtcagcagattacagcccttgggttaaatccagccacctgcttgttttattaataaagttttgttggaactaaacc

SEQ ID NO: 432026 - DNA, 120 bp, Artificial Sequence
  ENSG00000152348_31 (sequence is synthesized)
gctgcggggtcaggggccgagcggagaggggtgagtattccccacagcccttgccggttgtctcctcccggctctgcttcccacacggtccttgccccactcctaggacagggaggaagg

SEQ ID NO: 432027 - DNA, 120 bp, Artificial Sequence
  ENSG00000152348_32 (sequence is synthesized)
gcacgcgcgggtaggcgggaaacagcccagtcctgaacaaaaggccggggaagcgggtccccgccggtaactgcaggcctgtgctggccgccgcgagcggggaagggcgaggacactccc

SEQ ID NO: 432028 - DNA, 120 bp, Artificial Sequence
  ENSG00000152348_33 (sequence is synthesized)
ggaatatcaccaacagcatgacctttgcgaccaaatccagcaaccagaacttcatcattttcctggaataaaataagaagtttatttctggtgttggtggcgatcacaaaaatactttca

SEQ ID NO: 432029 - DNA, 120 bp, Artificial Sequence
  ENSG00000152348_34 (sequence is synthesized)
gatagagttgaaatactcacctcaataaagttcaagcaaccgtcattgggtacaaaggctgtgattttcttgccattcttgatcagctggacccttacacacttcctaatggcagaattt

SEQ ID NO: 432030 - DNA, 120 bp, Artificial Sequence
  ENSG00000152348_35 (sequence is synthesized)
ggctgtttggcttcaactcctctgaaatacaaaaggcacagcactgtgagctggctttctgaaaaagattatcttttcatattaactagagaactaatgagaaactgtttctatcttttc

SEQ ID NO: 432031 - DNA, 120 bp, Artificial Sequence
  ENSG00000152348_36 (sequence is synthesized)
aatctaacctcaaatggctgagctgaagtcctgtgatgtcaacctagttttctgccagtcttaatttcattagcacaatgggggaaatttctagaccttttacagttataaaagtagact

SEQ ID NO: 432032 - DNA, 120 bp, Artificial Sequence
  ENSG00000152348_37 (sequence is synthesized)
ggagtggcagcgtgggcctgtagtcccaactacttgcgaggctgacgtgggaggatctatgcctagaacgtcaagatggccagcctgtgtgacaagggaccctatctcaaaaaaaaaaaa

SEQ ID NO: 432033 - DNA, 120 bp, Artificial Sequence
  ENSG00000152359_0 (sequence is synthesized)
gcagtttgaaactgtcaggttgccgtctaggtagcggttgtgcttgctgaggctgcacttgctgacactgcagctgcgacgcggctaagaggcgcagagcgaggagtcgggatttggtcg

SEQ ID NO: 432034 - DNA, 120 bp, Artificial Sequence
  ENSG00000152359_1 (sequence is synthesized)
cgagcggcgacgagcatttgtgcagaatgtcatcagatgaggagaaatactcacttccagttgtgcaaaatgactccagtcgaggcagttctgtctcttcgaatcttcaggaagaatatg

SEQ ID NO: 432035 - DNA, 120 bp, Artificial Sequence
  ENSG00000152359_2 (sequence is synthesized)
aagaactgcttcattatgctatagtgactccaaatattgaaccctgtgcttcacagtcatctcatcctaagggagaattggtgccagatgtcagaatttctacaattcatgatattcttc

SEQ ID NO: 432036 - DNA, 120 bp, Artificial Sequence
  ENSG00000152359_3 (sequence is synthesized)
atagtcaaggaaataactctgaagtaagagaaactgcaatagaagttggaaaaggatgtgatttccatatttcaagtcattcaaagacagatgagtcatcaccagtgttatcgccaagga

SEQ ID NO: 432037 - DNA, 120 bp, Artificial Sequence
  ENSG00000152359_4 (sequence is synthesized)
agccttctcacccagtcatggattttttcagttcacatcttttagctgactcttcctcaccagcaacaaattctagtcatacagatgcccatgaaatacttgtgagcgattttcttgttt

SEQ ID NO: 432038 - DNA, 120 bp, Artificial Sequence
  ENSG00000152359_5 (sequence is synthesized)
ctgatgaaaaccttcagaagatggaaaatgtgcttgatctttggagttcaggtcttaagacaaacatcatatctgaactaagtaaatggagacttaattttattgactggcaccgaatgg

SEQ ID NO: 432039 - DNA, 120 bp, Artificial Sequence
  ENSG00000152359_6 (sequence is synthesized)
aaatgagaaaagagaaagaaaaacatgcagcacatttaaaacaactgtgtaatcagatcaatgaattgaaggagctgcaaaaaacctttgaaatctccattgggagaaaagatgaggtga

SEQ ID NO: 432040 - DNA, 120 bp, Artificial Sequence
  ENSG00000152359_7 (sequence is synthesized)
tttctagcttgtctcatgccataggcaagcaaaaggaaaagatagagttgatgagaacattcttccactggcgaatcggccatgtcagagccagacaggatgtttatgaaggtaaactag

SEQ ID NO: 432041 - DNA, 120 bp, Artificial Sequence
  ENSG00000152359_8 (sequence is synthesized)
ctgaccagtactaccagagaactttactgaagaaagtctggaaagtctggcgttccgtagtgcaaaagcagtggaaagatgtggtagaaagagcttgtcaagcaagagctgaagaagttt

SEQ ID NO: 432042 - DNA, 120 bp, Artificial Sequence
  ENSG00000152359_9 (sequence is synthesized)
agccaaagttgctatgttatctggagctttggaaaatgcaaaagctgagattcaaagaatgcaacatgaaaaagagcactttgaagattccatgaaaaaagctttcatgaggggtgtatg

SEQ ID NO: 432043 - DNA, 120 bp, Artificial Sequence
  ENSG00000152359_10 (sequence is synthesized)
tgcattaaatcttgaagccatgactatatttcaaaacagaaatgatgcagggatagactccacaaataataaaaaggaagagtatggtcctggtgttcaaggaaaagaacattctgctca

SEQ ID NO: 432044 - DNA, 120 bp, Artificial Sequence
  ENSG00000152359_11 (sequence is synthesized)
tttggatccttcagctcctccgatgcccttaccagttacatcaccactgctgccatccccaccagccgccgtcggaggagccagcgcgactgccgttccctcagctgcttcgatgacttc

SEQ ID NO: 432045 - DNA, 120 bp, Artificial Sequence
  ENSG00000152359_12 (sequence is synthesized)
taccagggctgcttccgcatcttctgttcacgttcctgtttctgctcttggtgcaggatctgcagctactgctgcatcagaagaaatgtatgtgccaagagttgtaacctctgcacaaca

SEQ ID NO: 432046 - DNA, 120 bp, Artificial Sequence
  ENSG00000152359_13 (sequence is synthesized)
gaaagcaggaagaactattacagcccggatcacaggaagatgtgattttgcttcaaaaaatagaattagcagcagtttagctataatgggagtttctcctcccatgagctcagttgttgt

SEQ ID NO: 432047 - DNA, 120 bp, Artificial Sequence
  ENSG00000152359_14 (sequence is synthesized)
ggaaaaacatcatccagtcacagtgcaaaccattcctcaagcaactgcagcaaaatatccccggaccattcatcctgaaagtagtacctcagcttccagatcacttggaaccagatcagc

SEQ ID NO: 432048 - DNA, 120 bp, Artificial Sequence
  ENSG00000152359_15 (sequence is synthesized)
tcacacccagtctctcacaagtgttcattccataaaagtggttgactaaagtgaatatgtccatagtggggtcttttaatccctctggtcttaccaagggttagaagtcttttggtttta

SEQ ID NO: 432049 - DNA, 120 bp, Artificial Sequence
  ENSG00000152359_16 (sequence is synthesized)
acttttccatattgttagaacatcatggagacatcatgttcatctgttcaaaattacaagaggctttttcaagctctaccatgctttgtaactatatgtagaaattattttaatgttatt

SEQ ID NO: 432050 - DNA, 120 bp, Artificial Sequence
  ENSG00000152359_17 (sequence is synthesized)
ttttatttaagcaattaagtaaaacttttttaaattaaaaaagaaactggactttatttctttaatatgtttagcctgttgctgattacagcatcaaaatatataaatttattttcacta

SEQ ID NO: 432051 - DNA, 120 bp, Artificial Sequence
  ENSG00000152359_18 (sequence is synthesized)
ctttagcttatttgtattaatatacaacattttgtggtttgatgaatattatctatgtagtaagaggaataatttcagcatattatttattagcaggattttaaaatgctattattgcta

SEQ ID NO: 432052 - DNA, 120 bp, Artificial Sequence
  ENSG00000152359_19 (sequence is synthesized)
ttcaagatatctcttaatttaaaatattactgagtttattaatgatactgacaggattgtgaaaatgcctgtccagatcagtgattcttctcaaccatttatgtgtattagtatcatcta

SEQ ID NO: 432053 - DNA, 120 bp, Artificial Sequence
  ENSG00000152359_20 (sequence is synthesized)
ggggagctttttacattttaatatattattcctgactctcgtgtgacagcttgatttttctttgaacttcatttgactcttacttttatgaagaataataaagttgaagcaatgctatgg

SEQ ID NO: 432054 - DNA, 120 bp, Artificial Sequence
  ENSG00000152359_21 (sequence is synthesized)
tgatgaccttttgtcaaaaagtctttttcctgagagttcatagactagtaaacacttacataacatgttgagaagataaaaatttatgatgactggtacttgttctgccttttcctgtta

SEQ ID NO: 432055 - DNA, 120 bp, Artificial Sequence
  ENSG00000152359_22 (sequence is synthesized)
cagttttttttttttttttaatatatatacttgtttttctcaaacctgctataaatctacgtttctgctgttgggaaattaatttcagaaacatcgtttcttccaaactgtaaaaattat

SEQ ID NO: 432056 - DNA, 120 bp, Artificial Sequence
  ENSG00000152359_23 (sequence is synthesized)
aaattgctaagttagagggcaagtcttttaaaagatttaatgggatattagatagtttggccaattcaagtttttatgtaaaccaatgcactgtttcccaactttcaggcatttgcgtac

SEQ ID NO: 432057 - DNA, 120 bp, Artificial Sequence
  ENSG00000152359_24 (sequence is synthesized)
cagtgtaaggattttcatcctatctttatgccacctgttacgccatcatttagtgtttttctttaaaagtctgctttgtctttgttaaaagggaagattagcaaatcttaaagaggcttt

SEQ ID NO: 432058 - DNA, 120 bp, Artificial Sequence
  ENSG00000152359_25 (sequence is synthesized)
agtttgatctcagactactgtgctagtaatcagtgagacttcgtgggcgtaggaccctctgagccagacaaacatcatatctgaactaagtaaatggagacttaattttattgactggca

SEQ ID NO: 432059 - DNA, 120 bp, Artificial Sequence
  ENSG00000152377_0 (sequence is synthesized)
acatcgctgcgggctcacaaagcggccagacgctcggcggcggcgtgtggcaggagcgcaggggcgcgagccggcgatcagccttcccggcgaccgtgccgcgggagctcgagcaactcg

SEQ ID NO: 432060 - DNA, 120 bp, Artificial Sequence
  ENSG00000152377_1 (sequence is synthesized)
gactaggggacccgggccggcccccaagatgccggcgatcgcggtgttggcggcggccgccgcggcgtggtgcttcctccaagtcgagagccggcacctggacgcgctcgccggaggcgc

SEQ ID NO: 432061 - DNA, 120 bp, Artificial Sequence
  ENSG00000152377_2 (sequence is synthesized)
gggccccaaccacggcaatttcctagacaatgaccagtggctgagcaccgtctcccagtacgaccgggacaagtactggaaccgctttcgagacgatgattatttcagaaactggaatcc

SEQ ID NO: 432062 - DNA, 120 bp, Artificial Sequence
  ENSG00000152377_3 (sequence is synthesized)
caacaagccctttgaccaagccctggacccatccaaggacccctgcctgaaggtaaaatgcagccctcacaaagtgtgtgtgacccaggactaccagaccgccctgtgtgtcagccgcaa

SEQ ID NO: 432063 - DNA, 120 bp, Artificial Sequence
  ENSG00000152377_4 (sequence is synthesized)
gcacctgctccccaggcaaaagaaggggaacgtggcccagaaacactgggttggaccttcgaatttggtcaagtgcaagccctgtcccgtggcacagtcagccatggtctgcggctcaga

SEQ ID NO: 432064 - DNA, 120 bp, Artificial Sequence
  ENSG00000152377_5 (sequence is synthesized)
tggccactcctacacatccaagtgcaaattggagttccatgcttgttctactggcaaaagcctcgccaccctctgtgatgggccctgtccctgtctcccagagcctgagccaccaaagca

SEQ ID NO: 432065 - DNA, 120 bp, Artificial Sequence
  ENSG00000152377_6 (sequence is synthesized)
caaggcagaaaggagtgcctgcacagacaaggagttgcggaaccttgcctcccggctgaaggattggtttggagctctccacgaggatgcgaacagagtcatcaagcccaccagctccaa

SEQ ID NO: 432066 - DNA, 120 bp, Artificial Sequence
  ENSG00000152377_7 (sequence is synthesized)
cacagcccaaggcaggtttgacactagcatcctgcccatctgcaaggactccctgggctggatgttcaacaagttggacatgaactatgacctcctgcttgacccttcagagatcaatgc

SEQ ID NO: 432067 - DNA, 120 bp, Artificial Sequence
  ENSG00000152377_8 (sequence is synthesized)
catctacctggataagtacgagccctgtatcaagcctcttttcaactcgtgtgactccttcaaggatggcaagctttctaacaatgagtggtgctactgcttccagaagcctggaggtct

SEQ ID NO: 432068 - DNA, 120 bp, Artificial Sequence
  ENSG00000152377_9 (sequence is synthesized)
cccttgccagaatgaaatgaacagaattcagaagctgagtaaggggaaaagcctgttgggggccttcatacctcggtgtaatgaggagggctattacaaagccacacagtgccacggcag

SEQ ID NO: 432069 - DNA, 120 bp, Artificial Sequence
  ENSG00000152377_10 (sequence is synthesized)
cacggggcagtgctggtgtgtggacaaatatgggaatgagttggctggctccaggaaacagggtgctgtgagctgtgaagaggagcaggaaacctcaggggattttggcagtggtgggtc

SEQ ID NO: 432070 - DNA, 120 bp, Artificial Sequence
  ENSG00000152377_11 (sequence is synthesized)
cgtggtcctgctggatgacctagaatatgaacgggagctgggaccaaaggacaaagaggggaagctgagggtgcacacccgagccgtgacagaggatgatgaggatgaggatgatgacaa

SEQ ID NO: 432071 - DNA, 120 bp, Artificial Sequence
  ENSG00000152377_12 (sequence is synthesized)
agaggatgaggtcgggtacatatggtagtgcccacaagaaagaggacacaagttttgcacaaaattgcaagtcacttcctattcctgcatttgtatctaagactccaaggcaccaaggtc

SEQ ID NO: 432072 - DNA, 120 bp, Artificial Sequence
  ENSG00000152377_13 (sequence is synthesized)
tcttctccattgttgctctctatacccgacctaaggtttggaagacaactgcttgttcccagaggattctgattttgcatatgtttgtatgggagaaagggtgttgtgttttttttttgt

SEQ ID NO: 432073 - DNA, 120 bp, Artificial Sequence
  ENSG00000152377_14 (sequence is synthesized)
tgttgtttattttttggatagggaagtcattggcttaattagagcctccttcctttctgtgagatttttccaacaagcatgtgatttacgtggaattctgacagtgcagggagccccaac

SEQ ID NO: 432074 - DNA, 120 bp, Artificial Sequence
  ENSG00000152377_15 (sequence is synthesized)
cctcttaaatgtcaaagaccctttttgattacccacactggtggttattacagcatggttcccagccttacagtgtctaagtgcttctcttgtgtcctgtagatgttgtgaaaaagaaaa

SEQ ID NO: 432075 - DNA, 120 bp, Artificial Sequence
  ENSG00000152377_16 (sequence is synthesized)
aaacaaaaaatacaccacactgtactttttccccctgcccccgttactgccggtgattattattaaaaattagtttttttcacatcattatatctggcttcctataaacaacagccttaa

SEQ ID NO: 432076 - DNA, 120 bp, Artificial Sequence
  ENSG00000152377_17 (sequence is synthesized)
ttcagtcaagactccctttggggaattcattttattaaaaattggtgtctggatacttccctgtacatgcataaatatgcatgcatgtacagaaagactgtatgtgtgtgccttgcacac

SEQ ID NO: 432077 - DNA, 120 bp, Artificial Sequence
  ENSG00000152377_18 (sequence is synthesized)
acacccatacctctcagaaaaagtgtttgggtatcttaaaaactcgaaaaacaatgataaatttctcagcttgtccagacctggaacaaaatttctggaataagaaatttgtattaaagt

SEQ ID NO: 432078 - DNA, 120 bp, Artificial Sequence
  ENSG00000152377_19 (sequence is synthesized)
ccttttttgcactaacagttggctcttgtagcctgcaggctgaggaagtctcttctctgtgcatcagcagagttactgaaagcctctgattgagaaaaaacctccgtctgcctaaatcac

SEQ ID NO: 432079 - DNA, 120 bp, Artificial Sequence
  ENSG00000152377_20 (sequence is synthesized)
cccacacgacacgggcagcttcacaagccatctctttcatttctgcttgaagccccttggctgcagcaatcctgtctgccataggtttcttccttccttacctactcaagggctttttct

SEQ ID NO: 432080 - DNA, 120 bp, Artificial Sequence
  ENSG00000152377_21 (sequence is synthesized)
aaggcatgcacacatatctcctgttctctgagagtaccatggtgttccttaaaagaagaaaatttctaattctgaactcaatgttttgcttttactccctttctactgacaaatcatgat

SEQ ID NO: 432081 - DNA, 120 bp, Artificial Sequence
  ENSG00000152377_22 (sequence is synthesized)
aagggcacaaaagctgtacagatttttttttttaaccactcaatcccaaatggaggcctacaaagaacatcgtaataacacatggaagcaaaccctgggtttttaagagcaaattctgtc

SEQ ID NO: 432082 - DNA, 120 bp, Artificial Sequence
  ENSG00000152377_23 (sequence is synthesized)
cccccctcactcccccaagtgacaagatactaatgaagaaagttcttcaccatagtgtttgttttaactaaactcattggagtctagttccaaatttggtagggtcatcatctctacatt

SEQ ID NO: 432083 - DNA, 120 bp, Artificial Sequence
  ENSG00000152377_24 (sequence is synthesized)
ccttaggatttctctccctatcaagctggcccagatacaagtaccaaacagtagtctctgaagttcccccatttccttcagtaccagtctataagctactgtccgccactgattttcatt

SEQ ID NO: 432084 - DNA, 120 bp, Artificial Sequence
  ENSG00000152377_25 (sequence is synthesized)
tatcagggtgtcctaatcagaatcagccacccaagcaagcctctctggcccacatatctatctcttgccttcccccatgaacttcagcctgtccacacaaaagccacataaactcaagca

SEQ ID NO: 432085 - DNA, 120 bp, Artificial Sequence
  ENSG00000152377_26 (sequence is synthesized)
agaaatatgttcagccaaaacatgattatagtggcagctgaccaatcccccatcccaaattgaccatttagatgtaccaactcaccttaaattagcatgttccaatccagtcggcattgc

SEQ ID NO: 432086 - DNA, 120 bp, Artificial Sequence
  ENSG00000152377_27 (sequence is synthesized)
ctgaatacagtagcatcatacctatagttggtcttagataagaaatgaactacttgatatagcaaagtcctttggcttcgtaaataaccctgaggttttgtacttactttccccatagga

SEQ ID NO: 432087 - DNA, 120 bp, Artificial Sequence
  ENSG00000152377_28 (sequence is synthesized)
agacagaccataggcaaactctgttttgggatctcaactccatcacctttgtttcaatattttttttctctcttgaacaaaactgagataatttagaaaacaggtgcttaattgcaataa

SEQ ID NO: 432088 - DNA, 120 bp, Artificial Sequence
  ENSG00000152377_29 (sequence is synthesized)
aattactatgaagtatattaaaaatcacgacattgtaaaatctcactttagatcatcaaagaaaaccattgttactatctcctttgagcttaggaaaatgtacaagagaacaaattaaaa

SEQ ID NO: 432089 - DNA, 120 bp, Artificial Sequence
  ENSG00000152377_30 (sequence is synthesized)
ttgaaaaattgatttcacttagaaaaacttctaggaacagggtgaaccactgattttaatttgcctaattatcttatgacaagtatcaaattaagatgacacttaaagatccttagcatt

SEQ ID NO: 432090 - DNA, 120 bp, Artificial Sequence
  ENSG00000152377_31 (sequence is synthesized)
aacttaatgatggagaagagtgctcaatagacagttcccagtaaggtaatgagatgccattttcagagacattctaagaagatattttgattcattaaaacattaaataaaaagccctcc

SEQ ID NO: 432091 - DNA, 120 bp, Artificial Sequence
  ENSG00000152377_32 (sequence is synthesized)
tcagattggaacccccaaatcgatggagccacattaataatacttttcatgcctcactttgacatgacagcattcgatttttttaaagatctttaatactttccatgagtactaaagatt

SEQ ID NO: 432092 - DNA, 120 bp, Artificial Sequence
  ENSG00000152377_33 (sequence is synthesized)
gtaatgagttaccttatccttagaagtagaatgtttgctttcttcttcttggaaatagtcctccaaaaagtccacttgtaccagtgacaagaagtcacttgtatagtgaccaagtacaca

SEQ ID NO: 432093 - DNA, 120 bp, Artificial Sequence
  ENSG00000152377_34 (sequence is synthesized)
taaaatactgattataaaaatattgtaataaaccacttcctcatttgatacaggtattaagctgaatcctcactaattcacttttgaaaagttcttaatgaacagttttattcttattcc

SEQ ID NO: 432094 - DNA, 120 bp, Artificial Sequence
  ENSG00000152377_35 (sequence is synthesized)
atgaacagctcttttaatacaatttccttggtatccaacttaaatcccagaattttgttccaccatggttagttatttgccatatgaatgtattcttgtttctaccaatattctaggcat

SEQ ID NO: 432095 - DNA, 120 bp, Artificial Sequence
  ENSG00000152377_36 (sequence is synthesized)
gagaataccttaatactgagttggagattttgtatctgtttctcctcctttacgcccattttcctacccacagcagcaaatgacaacgtgtctgtccaggtctgtccccctgctcatccc

SEQ ID NO: 432096 - DNA, 120 bp, Artificial Sequence
  ENSG00000152377_37 (sequence is synthesized)
aggatgccactcacatttttttcttcttgttaccttgaccacgctgtacagtaacatccaagagcccattctacagtgggtggttttggtctttttataactttttctcaaagtcactga

SEQ ID NO: 432097 - DNA, 120 bp, Artificial Sequence
  ENSG00000152377_38 (sequence is synthesized)
tgtttgttcctgttaaatgtatagcattgtaatgagagcccatcaaatcctgagtgtcagtttgttgtccctattgtagatgaaatagtgatgtagcaaaaacctagtaaattctgaatg

SEQ ID NO: 432098 - DNA, 120 bp, Artificial Sequence
  ENSG00000152377_39 (sequence is synthesized)
cttttccacgtagacttatctggaatgtgaacacaactctttggttaatagtaaatgcttaactgtagtcctgagtaggtgcatttctgtctgtctcaataaattttactttgtctgcaa

SEQ ID NO: 432099 - DNA, 120 bp, Artificial Sequence
  ENSG00000152377_40 (sequence is synthesized)
ggttcattttaagaggaggtaggaggcaggctggagcctgtgactctcctatggatcccttctgaggctgctggtgtccttgttttgggtgggtgtcacaggtgcccggcctgtgccctg

SEQ ID NO: 432100 - DNA, 120 bp, Artificial Sequence
  ENSG00000152377_41 (sequence is synthesized)
gtgactctcctatggatcccttctgaggctgctggtgtccttgttttgggtgggtgtcacaggtgcccggcctgtgccctgatgatttcctgagaccaccccttgcagcaggatgattat

SEQ ID NO: 432101 - DNA, 120 bp, Artificial Sequence
  ENSG00000152377_42 (sequence is synthesized)
acttctagggaagagaggctacctgcttctgtcagttctggagtagactctagaattcctcccaaacctgactcaattagaaaggcttgagaaagccagaactgccccttggaaggtgaa

SEQ ID NO: 432102 - DNA, 120 bp, Artificial Sequence
  ENSG00000152377_43 (sequence is synthesized)
cctttgaatcctgggcatgtgccagacagctgggaagaaaccaacttaattcaagttggtcagagattcccgtgtggatggacagaatggctggggctctcctcacttgtttactggcca

SEQ ID NO: 432103 - DNA, 120 bp, Artificial Sequence
  ENSG00000152377_44 (sequence is synthesized)
ctgagcaggggagcagctgtggaaagctgggtgttctgcagatgcatcccacaagcttgggttggtatcctcaccagaagtatgacctgaggccctattgtgtgccagcacctatgctgg

SEQ ID NO: 432104 - DNA, 120 bp, Artificial Sequence
  ENSG00000152377_45 (sequence is synthesized)
gcacttggacatgaatcctccctgtgaggagctcacattccatctgggacaacaaatgaggagatgacagtgtcctgcagatgattatttcagaaactggaatcccaacaagccctttga

SEQ ID NO: 432105 - DNA, 120 bp, Artificial Sequence
  ENSG00000152377_46 (sequence is synthesized)
cattaggtttcttgcttctcagaagacacctctccttggtctgggagggcttcagacacgggggttggctccgcacaacagcaagcgagctggtgggagtggcgtaaaggtgaacatggg

SEQ ID NO: 432106 - DNA, 120 bp, Artificial Sequence
  ENSG00000152377_47 (sequence is synthesized)
tctcctccactgcgtggtggaggcagcttctttgcatttcttgaaatcacagactcctagagcactatgggttcagcagcaaatgagacagacacaaacccggaccctgcctttgtgccg

SEQ ID NO: 432107 - DNA, 120 bp, Artificial Sequence
  ENSG00000152377_48 (sequence is synthesized)
atctgtttacagtggaaagtcaagaatgagaccactggaaggctagcaaaataggcccaatccccaaatccaaaccttgggctaagacaaaattaggagtctgctattaataggatcttt

SEQ ID NO: 432108 - DNA, 120 bp, Artificial Sequence
  ENSG00000152377_49 (sequence is synthesized)
tggtgtcctaggcagcctctctctaagagcattagctgtgcctgggtgttaatctcttggcatgagtttagtggaaaatgtaatctcctctggcaaaactgcaagagcaagctttatgcg

SEQ ID NO: 432109 - DNA, 120 bp, Artificial Sequence
  ENSG00000152380_0 (sequence is synthesized)
gcgcggacggcgggcgtcgtcaccatggcagcatccgctggaggcccaggatcttggagtgaaaatatactggaatattttctgagaaatagccagattacagcagaagacggtgctgag

SEQ ID NO: 432110 - DNA, 120 bp, Artificial Sequence
  ENSG00000152380_1 (sequence is synthesized)
atcacctggtatcatgcagctaaccacaaggcacaaacaaatgaggcactgaaaagtactgctcacatgatagaggctgatgtccttcttccaagtgatggatcagaacacagccagcca

SEQ ID NO: 432111 - DNA, 120 bp, Artificial Sequence
  ENSG00000152380_2 (sequence is synthesized)
attatggcccatccccctgaaacaaacagtgataatactctacaggagtggctgactgaagttatgaaaagcaataaaggcatcaagctggatttcaaaagtctggcagttgtagaacca

SEQ ID NO: 432112 - DNA, 120 bp, Artificial Sequence
  ENSG00000152380_3 (sequence is synthesized)
tccatgatgctcttggaaaatgtgaagaggcatctgaagcgtcctgtatggattaatgccgatattcttcctggtccaaatggaaatagcaaagtaatagatgcaaaaccatttttagac

SEQ ID NO: 432113 - DNA, 120 bp, Artificial Sequence
  ENSG00000152380_4 (sequence is synthesized)
accgtgatatccttctttccagacgtgacgttttccctgggttggacaacaggatggcatcctgagaaagtcaatgaagggtacagttggacaatggtgaaagagatggaatatatatgt

SEQ ID NO: 432114 - DNA, 120 bp, Artificial Sequence
  ENSG00000152380_5 (sequence is synthesized)
aatgaactaagtcagcctgtaacgttccctgtcagagcagcattagtcaggcagtcttgttctcagttactttggctgttaaagaaatcaaacaggtacagcctgactatttggactgga

SEQ ID NO: 432115 - DNA, 120 bp, Artificial Sequence
  ENSG00000152380_6 (sequence is synthesized)
tttactttacattagagaccattttgacaaaaaacaagttttctatgacatcttggaaccacaaaaccatgaatttaaacaagccattggaatcaaagttaatctctaagaagaagattc

SEQ ID NO: 432116 - DNA, 120 bp, Artificial Sequence
  ENSG00000152380_7 (sequence is synthesized)
tcaattatttcctgtgttttggtttcataatccttctctccattggtctgaattaattaccatataaattatggttattgattgacgttccaagtcatctaatcaagaaacgtttattgt

SEQ ID NO: 432117 - DNA, 120 bp, Artificial Sequence
  ENSG00000152380_8 (sequence is synthesized)
atgcttactctgtgggcatatgtccttataatagtgcacttacataaaagatttggaaagaagagatttatttacacacgtggcctagtctaataataattcaggaaaatgatactctgc

SEQ ID NO: 432118 - DNA, 120 bp, Artificial Sequence
  ENSG00000152380_9 (sequence is synthesized)
accccttcataaaaatagttttgataaactaaagatgattggcagaatccatatgtcataaaacaggtataaatcacatgtgcttggcacttgcattacagagattatgaaaaatatggt

SEQ ID NO: 432119 - DNA, 120 bp, Artificial Sequence
  ENSG00000152380_10 (sequence is synthesized)
actcttttcctttttcctagaaaactggttattttagagataacaaaaaaggaagagggcttttaaaatgtttttaattttcacaggggtcagcagctgtctcatatcaagatctattaa

SEQ ID NO: 432120 - DNA, 120 bp, Artificial Sequence
  ENSG00000152380_11 (sequence is synthesized)
tccatttcctgaaactgtagattaaattagatagatctagaatttccatgtgattgagaagcatgctagtggctaagtgttttttttatatttcttatttctatagtatctgatttatag

SEQ ID NO: 432121 - DNA, 120 bp, Artificial Sequence
  ENSG00000152380_12 (sequence is synthesized)
tggacaatatactgttggagagcagttttagtctttgttatgtatcatttgttttccaagtttcttactgccaccaccttcattcaggtccttgttctactagtaaaactttatgaacta

SEQ ID NO: 432122 - DNA, 120 bp, Artificial Sequence
  ENSG00000152380_13 (sequence is synthesized)
gtgccgcggctccgtttggttccgcttcgctggcgcccgccgggctcttcccccgccgaggcctgtggtttgtggagtcgaatttccctgccaccagtgcccggttagcaggggcgccag

SEQ ID NO: 432123 - DNA, 85 bp, Artificial Sequence
  ENSG00000152380_14 (sequence is synthesized)
ttacagcagaagacggtgctgagatcacctggtatcatgcagctaaccacaaggcacaaacaaatgaggcactgaaaaagacgag

SEQ ID NO: 432124 - DNA, 85 bp, Artificial Sequence
  ENSG00000152380_15 (sequence is synthesized)
actttacttttattaagatgagtggattggtcacgtgagatggcagtgacaaaaacttcagtttaaaatgccttatggatctgta

SEQ ID NO: 432125 - DNA, 120 bp, Artificial Sequence
  ENSG00000152380_16 (sequence is synthesized)
tgtgagtgtgtatgagagacagagatagaaagggcatgaaaattgattatttaaagacagtgtgtgtgagagaaaggtagacagaaaaggaatgaaaactgatgatataagcgcacagac

SEQ ID NO: 432126 - DNA, 120 bp, Artificial Sequence
  ENSG00000152380_17 (sequence is synthesized)
tccctcaccggattggagctccttgatgaaccttaacttacttaacatcgtatattttacccctattcctcacaaaagtttttgtacatagtaggtgctcagtaagtgttagctgtcttt

SEQ ID NO: 432127 - DNA, 120 bp, Artificial Sequence
  ENSG00000152380_18 (sequence is synthesized)
ctttttcattatatattcacaaaaaattatgagtggataaattagcttctttttaaatttcatcataatttcagaaatcagccaggtgtgatggctcacacccgtaatcccagcactttg

SEQ ID NO: 432128 - DNA, 120 bp, Artificial Sequence
  ENSG00000152380_19 (sequence is synthesized)
acggcgggcgtcgtcaccatggcagcatccgctggaggcccagaaacgtaacaacaaagcctggatgacagcacgtctgtttacagcatgatttacagaatattttaagcccactgtggg

SEQ ID NO: 432129 - DNA, 120 bp, Artificial Sequence
  ENSG00000152380_20 (sequence is synthesized)
gacctgctgctcaggaaaaaaaatatttctttcaagatattactgttgattgacaaggcacctggtcacccaagagctctgatggagatgtgcaaagagattgatgctgttttcctgcat

SEQ ID NO: 432130 - DNA, 120 bp, Artificial Sequence
  ENSG00000152380_21 (sequence is synthesized)
gcttgcatctattctgcagcccgtggatcaaaggcaatcccttttccgggcacatacccaaaggaaatgaaatcaccactttgtaaagatatctgcactcccatgttcattgcagcatta

SEQ ID NO: 432131 - DNA, 120 bp, Artificial Sequence
  ENSG00000152380_22 (sequence is synthesized)
caccacgcccggccaagaactttacttttattaagcctgatgcctttaacagaaaactcagatgagtggattggtcacgtgagatggcagtgacaaaaacttcagtttaaaatgccttat

SEQ ID NO: 432132 - DNA, 120 bp, Artificial Sequence
  ENSG00000152380_23 (sequence is synthesized)
ggatctgtattggcattccttcccgctgatgaaattctaggagcttttagtaaattaaagctgcatttgcatgaagaagccagagaaattactgactggtttgaagataatgacgtgcat

SEQ ID NO: 432133 - DNA, 120 bp, Artificial Sequence
  ENSG00000152380_24 (sequence is synthesized)
ggtcggataagaagacatgccctggagttgctgtttgaccatcagtattgtttccaccaaatttgtgatctgcatataagtgcatgtgaaatggatttccacatacccaaaacagcatag

SEQ ID NO: 432134 - DNA, 120 bp, Artificial Sequence
  ENSG00000152380_25 (sequence is synthesized)
agtactgccgtctcttaggaagagagagggaaatgtgaggaggggtcggtgagtgttctcccctccagtatccatctccaaaattcatagcctcccattatgatattcactacaagtctg

SEQ ID NO: 432135 - DNA, 120 bp, Artificial Sequence
  ENSG00000152382_0 (sequence is synthesized)
ggtctgcggtcgggctgagacacgcggagcaatggcgacctttgtgagcgagctggaggcggccaagaagaacttaagcgaggccctgggggacaacgtgaaacaatactgggctaacct

SEQ ID NO: 432136 - DNA, 120 bp, Artificial Sequence
  ENSG00000152382_1 (sequence is synthesized)
aaagctgtggttcaagcagaagatcagcaaagaggagtttgaccttgaagctcatagacttctcacacaggataatgtccattctcacaatgatttcctcctggccattctcacgcgttg

SEQ ID NO: 432137 - DNA, 120 bp, Artificial Sequence
  ENSG00000152382_2 (sequence is synthesized)
tcagattttggtttctacaccagatggtgctggatctttgccttggccagggggttccgcagcaaaacctggaaaacccaagggaaagaaaaagctttcttctgttcgtcagaaatttga

SEQ ID NO: 432138 - DNA, 120 bp, Artificial Sequence
  ENSG00000152382_3 (sequence is synthesized)
tcatagattccagcctcaaaatcctctctcaggagcccagcaatttgtggcaaaggatccccaagatgatgacgacttgaaactttgttcccacacaatgatgcttcccactcgaggcca

SEQ ID NO: 432139 - DNA, 120 bp, Artificial Sequence
  ENSG00000152382_4 (sequence is synthesized)
gcttgaagggagaatgatagtgactgcttatgagcatgggctggacaatgtcaccgaggaggctgtttcagctgttgtctatgctgtggagaatcaccttaaagatatactgacgtcagt

SEQ ID NO: 432140 - DNA, 120 bp, Artificial Sequence
  ENSG00000152382_5 (sequence is synthesized)
tgtgtcaagaaggaaagcttatcggttacgagatggtcattttaaatatgcctttggcagtaacgtgaccccgcagccatacctgaagaatagtgtagtagcttacaacaacttaataga

SEQ ID NO: 432141 - DNA, 120 bp, Artificial Sequence
  ENSG00000152382_6 (sequence is synthesized)
aagccctccagcttttactgctccctgtgctggtcagaatccagcttctcacccaccccctgatgatgctgagcagcaggctgcactcctgctggcatgctccggagacactctacctgc

SEQ ID NO: 432142 - DNA, 120 bp, Artificial Sequence
  ENSG00000152382_7 (sequence is synthesized)
atctttgcctccggtgaacatgtacgatctttttgaagctttgcaggtgcacagggaagtcatccctacacatactgtctatgctcttaacattgaaaggatcatcacgaaactctggca

SEQ ID NO: 432143 - DNA, 120 bp, Artificial Sequence
  ENSG00000152382_8 (sequence is synthesized)
aggaggggcttttgctgtgctaaattaggatttgagggtgtgggaccctcaccgaattcattgattactgaaaattgaatgttttttgggtccacatttcaaggctgaagtgtatagtgt

SEQ ID NO: 432144 - DNA, 120 bp, Artificial Sequence
  ENSG00000152382_9 (sequence is synthesized)
atatataacctttcctatggaaatgtgacattgagtacattttgtgttgctgttgtgaagccattaatataaatctttggtaatgacccatatctctatatgtatgtgttcccagttgtg

SEQ ID NO: 432145 - DNA, 120 bp, Artificial Sequence
  ENSG00000152382_10 (sequence is synthesized)
ggagcaggcactaatgaaatcctgtgcctggaatggagatatttaggtacctgaggcttagtgtcctgtggtctgcatgtaagatagatgacatcctagaacaaagaagctgttttaact

SEQ ID NO: 432146 - DNA, 120 bp, Artificial Sequence
  ENSG00000152382_11 (sequence is synthesized)
taatccccctgatcagcaggatatctgtgtgttcagtgacatcatacattctgtatctagaagtctaaaatttctgcctttctcctaaagaatgtgttcttgcattttggttgaaataac

SEQ ID NO: 432147 - DNA, 120 bp, Artificial Sequence
  ENSG00000152382_12 (sequence is synthesized)
ctacacagtgttaaaaatcagatacctcctttagtgaccagttcaaattttaatagcgataggtagcccctgagaaatttatcactataactccacaggaaatatgacttggaagtgctc

SEQ ID NO: 432148 - DNA, 120 bp, Artificial Sequence
  ENSG00000152382_13 (sequence is synthesized)
tgtgtactaaacaaaataaagcccctctttgcatttaaaaccaaagtcaaaacaaaactcttgtaatgcaattaattaactttatgtcttcccatgactcaagttttgttaaatatgccc

SEQ ID NO: 432149 - DNA, 120 bp, Artificial Sequence
  ENSG00000152382_14 (sequence is synthesized)
aaaaactttgattggcagtttcttcggttaattattcctatagaatgtattttaagaaatctatacaaattggatatatgcttggtaattctccagtttctaggaggtacctatttctac

SEQ ID NO: 432150 - DNA, 120 bp, Artificial Sequence
  ENSG00000152382_15 (sequence is synthesized)
cgtttcaagtgatgaagtgaaaataatttacattcgatagtgttactgataacaaacctacttaagagatatgttgctttttacttaagggatagtgttgatagataaattagaatgtat

SEQ ID NO: 432151 - DNA, 120 bp, Artificial Sequence
  ENSG00000152382_16 (sequence is synthesized)
agataggtttgtgaaagtctaaataatggttgtatagatatgtatatatggttcacatatctggatctgtgtatttgattttgtactttaaatgtgacaaataaaccttttgggagaaaa

SEQ ID NO: 432152 - DNA, 120 bp, Artificial Sequence
  ENSG00000152382_17 (sequence is synthesized)
gggatctctagagagacatgtctgatttaaaaagagatgttcaatataaagtagttttatacttggaaaatggaaaaataaccatgttgttttcataatatcaatttcaaacagggacaa

SEQ ID NO: 432153 - DNA, 120 bp, Artificial Sequence
  ENSG00000152382_18 (sequence is synthesized)
accatcttcactacaaaatcttttatattagccttaagcaaaaggtactggggcataactccaggtggtgatggagaacatgaatgggctatcagaatctccctgaggaaggctgagatt

SEQ ID NO: 432154 - DNA, 120 bp, Artificial Sequence
  ENSG00000152382_19 (sequence is synthesized)
ttatgaatgaaaaagactgagaaaaatagtcatgactgtatcttaggttctgtgttgagaattctaagtagaaaataacagcaattaagtagttactctacatagcattatcttggaata

SEQ ID NO: 432155 - DNA, 120 bp, Artificial Sequence
  ENSG00000152382_20 (sequence is synthesized)
tttgttactagatctgccatattggttagctaggctttttaagatttaattgaatcattcattatatgtttatacttttagaacctacttacggttagatttaaaatgctctgatttgtt

SEQ ID NO: 432156 - DNA, 120 bp, Artificial Sequence
  ENSG00000152382_21 (sequence is synthesized)
tgaatatagttcaatacttctccttctctttcagttatttttaacacagtgccatacattctgtgatcaccaaggtattaattgaatagaataaactactacgcaaactaccattattcc

SEQ ID NO: 432157 - DNA, 120 bp, Artificial Sequence
  ENSG00000152382_22 (sequence is synthesized)
ccttaatccatgtcttcattattaccttgtattggatgtgaatctgtgattatttgtgcatgaattaactcttttttcccttaacccctgtggtatagttttggtggcattaatttggag

SEQ ID NO: 432158 - DNA, 120 bp, Artificial Sequence
  ENSG00000152402_0 (sequence is synthesized)
gaggcgggagcagagagggaaagggggcgagataggcgcgcaggcggcagaagcctctgcctctgcctccccttctgcttgggccgcagccctccccgccccgccgaccgcggtcacaca

SEQ ID NO: 432159 - DNA, 80 bp, Artificial Sequence
  ENSG00000152402_1 (sequence is synthesized)
ctctcggagcctccccgtgagcgggagcgcggcgcacggcgatgcgccgaggcgggcgctgaggcggcgccgcgcgagca

SEQ ID NO: 432160 - DNA, 80 bp, Artificial Sequence
  ENSG00000152402_2 (sequence is synthesized)
gccccggggactcccgccccgccgggcgcgaccgcagcgccccgcggccccgacgcgcttaacgttgtcgcttgccggtc

SEQ ID NO: 432161 - DNA, 120 bp, Artificial Sequence
  ENSG00000152402_3 (sequence is synthesized)
cggccccgacgcgcttaacgttgtcgcttgccggtcccgccaccgccgcctccgccgccgctcgcgtcctcgccgccaccgcctcggccgctgcagctccgccggcagcatgtctcgaag

SEQ ID NO: 432162 - DNA, 120 bp, Artificial Sequence
  ENSG00000152402_4 (sequence is synthesized)
gaagatttcgtccgagtccttcagctccctgggctccgactacctggagaccagcccggaggaggagggggagtgccccctgtctaggctctgctggaatggcagccggagcccgcccgg

SEQ ID NO: 432163 - DNA, 80 bp, Artificial Sequence
  ENSG00000152402_5 (sequence is synthesized)
cccgaccccggctgcttctgccgccgccgccgctgccactgccggggccaggagggtgcagcgccggaggcgggtcaacc

SEQ ID NO: 432164 - DNA, 120 bp, Artificial Sequence
  ENSG00000152402_6 (sequence is synthesized)
ggtcaacctggactcgctgggcgagagcatcagccgcctgacggcgccctcgcctcagacgatacagcagactctcaagaggacactgcagtattatgaacatcaagttattggttacag

SEQ ID NO: 432165 - DNA, 120 bp, Artificial Sequence
  ENSG00000152402_7 (sequence is synthesized)
ggatgcagaaaagaatttccacaatatctctaacagatgctcctatgcagaccactccaacaaagaagaaattgaagatgtctcaggaattcttcagtgtactgctaatatactcggttt

SEQ ID NO: 432166 - DNA, 120 bp, Artificial Sequence
  ENSG00000152402_8 (sequence is synthesized)
gaagtttgaggaaattcaaaaaagatttggtgaagagttctttaatatatgctttcatgagaatgagagagtccttcgagctgtaggtggcactttgcaggacttttttaacggctttga

SEQ ID NO: 432167 - DNA, 120 bp, Artificial Sequence
  ENSG00000152402_9 (sequence is synthesized)
tgctttgttggaacacattagaacttcttttggaaaacaggccactctggagtcaccatctttcctatgcaaagagctccctgaaggtactctcatgctccactacttccaccctcacca

SEQ ID NO: 432168 - DNA, 120 bp, Artificial Sequence
  ENSG00000152402_10 (sequence is synthesized)
tattgtggggtttgcaatgctggggatgattaaggctgcaggaaagaagatctatcggctggatgtggaagtggaacaggttgcaaatgagaagctatgctctgatgtttcaaacccagg

SEQ ID NO: 432169 - DNA, 120 bp, Artificial Sequence
  ENSG00000152402_11 (sequence is synthesized)
caattgtagctgtcttactttccttatcaaagaatgtgaaaatactaatatcatgaagaaccttccacagggaacctcccaagttcctgcggacctcagaattagcatcaacaccttctg

SEQ ID NO: 432170 - DNA, 120 bp, Artificial Sequence
  ENSG00000152402_12 (sequence is synthesized)
tagagccttccctttccacttgatgtttgatcccagcatgtcagtccttcagttgggggaaggtctaaggaagcagcttcgatgtgacactcacaaagtgctcaagtttgaggactgctt

SEQ ID NO: 432171 - DNA, 120 bp, Artificial Sequence
  ENSG00000152402_13 (sequence is synthesized)
cgagattgtatctccaaaggttaatgccacctttgaaagggtcctgctgcgactgtctaccccgtttgtgattagaaccaagcctgaggcttctggctctgaaaataaagacaaggtgat

SEQ ID NO: 432172 - DNA, 120 bp, Artificial Sequence
  ENSG00000152402_14 (sequence is synthesized)
ggaagtcaaaggacaaatgatccatgttccagaatcaaattccattttatttttgggctctccatgtgtggacaagttggatgaactcatgggccgagggctacatctctcagacatccc

SEQ ID NO: 432173 - DNA, 120 bp, Artificial Sequence
  ENSG00000152402_15 (sequence is synthesized)
tatccatgatgccacccgagatgtcattttggttggtgagcaggcaaaggcccaagatgggttgaagaaaaggatggataaattaaaggcaactttagaaagaactcaccaggccctgga

SEQ ID NO: 432174 - DNA, 120 bp, Artificial Sequence
  ENSG00000152402_16 (sequence is synthesized)
agaagagaaaaagaagacagtggatcttctatattctattttccctggtgatgtagcccagcaattatggcaagggcagcaagtacaggccagaaagtttgatgatgtcaccatgctctt

SEQ ID NO: 432175 - DNA, 120 bp, Artificial Sequence
  ENSG00000152402_17 (sequence is synthesized)
ttcagacattgttggcttcacagccatatgtgcccagtgtactcccatgcaagtaatcagcatgctgaatgaactgtacaccagatttgaccaccagtgtggatttttggatatttataa

SEQ ID NO: 432176 - DNA, 120 bp, Artificial Sequence
  ENSG00000152402_18 (sequence is synthesized)
ggtggaaacaataggtgatgcctactgtgttgcagcagggctccacagaaaaagcctctgccatgctaaacccattgctctgatggccttgaagatgatggaactttcagaagaggtgct

SEQ ID NO: 432177 - DNA, 120 bp, Artificial Sequence
  ENSG00000152402_19 (sequence is synthesized)
gacacctgatggaagaccgattcagatgaggataggaattcactcaggctccgtgctggctggagttgttggggtgcgaatgccacgttattgcctgtttggaaataatgtcacactggc

SEQ ID NO: 432178 - DNA, 120 bp, Artificial Sequence
  ENSG00000152402_20 (sequence is synthesized)
aagcaaattcgagtcgggaagtcaccctcggcgcatcaatgtcagcccaaccacttaccaattattaaaacgagaagaaagtttcacattcattccgcggtctcgtgaagagcttccaga

SEQ ID NO: 432179 - DNA, 120 bp, Artificial Sequence
  ENSG00000152402_21 (sequence is synthesized)
caactttccaaaggaaattcctgggatctgctatttcctggaggtaaggactggtccaaagccaccaaagccttctctttcttcgtcgagaataaaaaaggtttcctacaacatcggcac

SEQ ID NO: 432180 - DNA, 120 bp, Artificial Sequence
  ENSG00000152402_22 (sequence is synthesized)
catgttcctccgggagacaagcctctgagacctgctacagatcaaagactcctccaaaaagcacaagcccagaacatgggtcaccaatggggggtggaaagagattgtgtctctttcatt

SEQ ID NO: 432181 - DNA, 120 bp, Artificial Sequence
  ENSG00000152402_23 (sequence is synthesized)
gctttgttgagaacaagcagcaaaatttctgtattatgtcaggcaataatcctactaaaaggtggaggtgaccgctgtcaataaaaagccggaggatgagggaaataagatgtgtccatt

SEQ ID NO: 432182 - DNA, 120 bp, Artificial Sequence
  ENSG00000152402_24 (sequence is synthesized)
catatgagtggttttggtcatatatatacacatatattttaattacaagtgtgggtcccctttcagaactaaccaataaatagattccatgttttcttgtttatcacacatacaagtatc

SEQ ID NO: 432183 - DNA, 120 bp, Artificial Sequence
  ENSG00000152402_25 (sequence is synthesized)
tttccctatatatttgtaccacttttgagagccagttttgattatatattcctacatttagtgagttggtgggtgaggaatattttctaagtttctttttctgaacagacatttcataca

SEQ ID NO: 432184 - DNA, 120 bp, Artificial Sequence
  ENSG00000152402_26 (sequence is synthesized)
tgtatcatggcagtgtggtaaacttcccaactggaagaattgtaactcggcaaaatattttagggatattacctatttttatacatatctcttctagataactacatttcgcacaacatt

SEQ ID NO: 432185 - DNA, 120 bp, Artificial Sequence
  ENSG00000152402_27 (sequence is synthesized)
attagattttcagaatctgcttctgtattgttagtatattatatataatgctaacctattaatctaatatagtttcccttatttagagagatcagtgcttcgactgagaatacatataac

SEQ ID NO: 432186 - DNA, 120 bp, Artificial Sequence
  ENSG00000152402_28 (sequence is synthesized)
caaggatttcagataccaagaaagcattatatgtctgcttagtaaatatatcttttagatttaactaatgtagcatggaatccagaggaaatggaatttcctaacaccagatgtatctgt

SEQ ID NO: 432187 - DNA, 120 bp, Artificial Sequence
  ENSG00000152402_29 (sequence is synthesized)
aaccaagattaaagaaaggtctttttgccaccttctaacaaatatcagttaaaatgaaatgctttgctacactggatccttttcaacttagcacttacaaatataggtagcttttgcaac

SEQ ID NO: 432188 - DNA, 120 bp, Artificial Sequence
  ENSG00000152402_30 (sequence is synthesized)
actaaactgcattctaataaacagcattcagctaaatgacatgttagttacccccttcctcttccccagttgatgcctcctaagagccgactgctattcttgagaacaaattcctggata

SEQ ID NO: 432189 - DNA, 120 bp, Artificial Sequence
  ENSG00000152402_31 (sequence is synthesized)
ctggcattagtgacaaagaagtgtcaggacagtttgccaagaatgttgtttcttcttgtacaacacaaagcaaggaaacctctgtattttatggctttgaggttttaaaaaatgttctgc

SEQ ID NO: 432190 - DNA, 120 bp, Artificial Sequence
  ENSG00000152402_32 (sequence is synthesized)
agtttgattgatatggcttttaaattcagtgaatcactttcatgaatactgaagtaggtataatcttcagaactagtaatcattatagttacagataggattccatcgcatgtcctgctc

SEQ ID NO: 432191 - DNA, 120 bp, Artificial Sequence
  ENSG00000152402_33 (sequence is synthesized)
aaatgaagacctgttctcattaatcaatactgcatgaaaatattactggctcacactaaaattaggagcatcaggtgtccagagttttcctgtttgggttcagatataaaatctaagttt

SEQ ID NO: 432192 - DNA, 120 bp, Artificial Sequence
  ENSG00000152402_34 (sequence is synthesized)
ctattgaggttaataagctggaagcatttgtttcctttaagccttggagaggtcattttcttactcattgatagcttatgtctactgaatgcaatattcttttctgttcagggattttgg

SEQ ID NO: 432193 - DNA, 120 bp, Artificial Sequence
  ENSG00000152402_35 (sequence is synthesized)
ctgcattatgatttggttatgacataactcagttaaggaatatatttactaatttccaatgtagtctatgaggttcatttaatgtttttaaattttctatgtgtgtggctagaaggcatt

SEQ ID NO: 432194 - DNA, 120 bp, Artificial Sequence
  ENSG00000152402_36 (sequence is synthesized)
tgtagatatgcaaatatttgttataatcctgatcccttttataatttgagttattttcttgccctgggggtttacaaggacacgagtgcaacactctttatatggagaagacaggaaata

SEQ ID NO: 432195 - DNA, 120 bp, Artificial Sequence
  ENSG00000152402_37 (sequence is synthesized)
gaccttgagctctaaacctttgcctgaccccctcttctgtgggcctgtgtttctggacaatggggaggtttacagccagtatgagcagagcagactgggagcacctcaatcctcatgctt

SEQ ID NO: 432196 - DNA, 120 bp, Artificial Sequence
  ENSG00000152402_38 (sequence is synthesized)
atattagaaaatgccttagcaatgttgatgggctccttgtagcactggagcatggggagggaacaagctcactgatgtcatttatgcctattgtcttcagtaacttagaacttattatgg

SEQ ID NO: 432197 - DNA, 120 bp, Artificial Sequence
  ENSG00000152402_39 (sequence is synthesized)
tatattaaatcaataaaatgttggtgatgaacaatgtgttttgtaaccataaggctgaaagggacttccaggaatatccaatctatttctctcactttttataaagatttgtctaagcaa

SEQ ID NO: 432198 - DNA, 120 bp, Artificial Sequence
  ENSG00000152402_40 (sequence is synthesized)
ctactctaaacacatatttattatctccatacttaagaatatctacgggaagcatatttgaaaagcatcattggaaatccacctcaatactagtgataggcctggagagaagtattgtat

SEQ ID NO: 432199 - DNA, 120 bp, Artificial Sequence
  ENSG00000152402_41 (sequence is synthesized)
ttatatatctcaatttatcagaagaatcacaaattctgtattagtttatatgattttacttagagaataagtatccatttacattgccataaatgtcacgatgaagaacgtgccagagat

SEQ ID NO: 432200 - DNA, 120 bp, Artificial Sequence
  ENSG00000152402_42 (sequence is synthesized)
ttcttatttatcactgacaggatgtcaactacatttttcatacattataacctaagtgtattttcacagctatagtccgagataatggtccaatttgttatcattttgctaatctattat

SEQ ID NO: 432201 - DNA, 120 bp, Artificial Sequence
  ENSG00000152402_43 (sequence is synthesized)
agttgattattgtagttacaatgttgctatatatgtttatgaggtactatataaaatgtctgttcattcaaacttcaatcacagaagttagaagatggagaaaaaattatatttttattt

SEQ ID NO: 432202 - DNA, 120 bp, Artificial Sequence
  ENSG00000152402_44 (sequence is synthesized)
gtcctacacaatgccatctacatctcttctcttaggaattgtgattgtaacaatgtggtggcatttgttatttcatatgacttttatctatacagtattctcacttacttacaaactatt

SEQ ID NO: 432203 - DNA, 120 bp, Artificial Sequence
  ENSG00000152402_45 (sequence is synthesized)
accaacagcatgcattttagtatggcagatacaagaaatttgtgtgatgttcccttagaaaccaaatgatattaaattggggaaatggttttaacccactctgcaagggatactttaaaa

SEQ ID NO: 432204 - DNA, 120 bp, Artificial Sequence
  ENSG00000152402_46 (sequence is synthesized)
tataatttggcacctatagctcttgcattttaatattcttttaagctgctgtttggaagaaggcaccttataactagccattagcaccaaagcatcacgttggtatcaggattattttga

SEQ ID NO: 432205 - DNA, 120 bp, Artificial Sequence
  ENSG00000152402_47 (sequence is synthesized)
tggagagaatgtcatcatttgcaaataaatcagttatctaacaaaatcagaatcccccaatatgtactcagaatgtactaccctgtatcttctttgtggaccttaatcattaggtaacat

SEQ ID NO: 432206 - DNA, 120 bp, Artificial Sequence
  ENSG00000152402_48 (sequence is synthesized)
tggccataataaaaaataataatatgcttcagaaacatagtagttggatctcttgtctatataacgtagagaaggggaagaagacatagcttccaggtaacatgggacccaattgcgtac

SEQ ID NO: 432207 - DNA, 120 bp, Artificial Sequence
  ENSG00000152402_49 (sequence is synthesized)
aatctgcctttatattcatctcttgctctatattttaagtaatttcagattttccttttaatatctgattatgtggaatcaagtgagctttgatctgggactctgagacagacattgatg

SEQ ID NO: 432208 - DNA, 120 bp, Artificial Sequence
  ENSG00000152402_50 (sequence is synthesized)
cctgagacttgagagtgggtctgtaggttcagcacttcaaatgttgtttcttacagtcttgcactccttcctcttgtccagtaacaacggtgtcaggacacagtagtttagtgtgaatat

SEQ ID NO: 432209 - DNA, 120 bp, Artificial Sequence
  ENSG00000152402_51 (sequence is synthesized)
gtgtgtctttccaggaaaaacaaagcaaaagaggataataacaacttaaacaaaatctcattcacaaggggagcaagacttttaattttgcaaatgcctccaaagagttccagcaataaa

SEQ ID NO: 432210 - DNA, 120 bp, Artificial Sequence
  ENSG00000152402_52 (sequence is synthesized)
gcaaaattaaattgatagataacaaaaggcaaagccatggagaattctgaaaaccccaccaggctctgtgttttgtatagaatcatactgctgctgaatgaaattgtgtatctaaagtcg

SEQ ID NO: 432211 - DNA, 120 bp, Artificial Sequence
  ENSG00000152402_53 (sequence is synthesized)
taaggcatcaggtaggagctcaaaattatgaccataattaaatatatttgttgaaggctccttgggtccctgactttctgagagcaggtgttgtggatggttaaggcaaaaagtaaaact

SEQ ID NO: 432212 - DNA, 120 bp, Artificial Sequence
  ENSG00000152402_54 (sequence is synthesized)
tttacacacaggtttctgtcttgtcattttgagaatgactcagtccattctggaccctttcttactccattctgtcactagaaaccatctcaccccctcacgcctggccacagcaaacag

SEQ ID NO: 432213 - DNA, 120 bp, Artificial Sequence
  ENSG00000152402_55 (sequence is synthesized)
cattctctcttcacttctgaacccagaatggctacagaaagggttgctggtgcctcattcaggcggataggaaggaccacacacagtcaggcctgagcaacaatgtacttctgaagtgta

SEQ ID NO: 432214 - DNA, 120 bp, Artificial Sequence
  ENSG00000152402_56 (sequence is synthesized)
gtaatgaactggatgtgccggggcattgattatatctgcagcttcaccctctgctctttcttcaaaacacagtctgactccaagcacttcatacagcttcactgaatgttcctttgaaat

SEQ ID NO: 432215 - DNA, 120 bp, Artificial Sequence
  ENSG00000152402_57 (sequence is synthesized)
taattataaatgactctgaataggctttgggtagcaccaggcgtctttcagctgacaatatctagaaactcaagttcaagaaccaagccctatatcgtagcttagttttttctactatta

SEQ ID NO: 432216 - DNA, 120 bp, Artificial Sequence
  ENSG00000152402_58 (sequence is synthesized)
gattatagaccttcagctacaaaaattatgtcatttcagaggcttctataatcatagcttaataatagatataacccaaaaatcatgatgcatgagactgaattattgaagtttaacata

SEQ ID NO: 432217 - DNA, 120 bp, Artificial Sequence
  ENSG00000152402_59 (sequence is synthesized)
tttctaaacgatttatgggcagctcttgatatgaatgttcctaaaccacaaccagctggtttaacatacacataaattgtgttcatgtgattgaacaaaatttattgttaaatgggtaag

SEQ ID NO: 432218 - DNA, 120 bp, Artificial Sequence
  ENSG00000152402_60 (sequence is synthesized)
ttgacctcagctatggactcaatttcaagatcctcgtagtggtgaatgaagagcagacactgatattacatacagattaacaatcttgtcaggctatactgagatagtgtgcaaaattcc

SEQ ID NO: 432219 - DNA, 120 bp, Artificial Sequence
  ENSG00000152402_61 (sequence is synthesized)
ttcctcacacttgatccaaacaattgaaacctgcgtatgactgttcttccatcccttgttttcttccttcctttgttccttctttcctttaattaaaaaaggtcactgatacatttataa

SEQ ID NO: 432220 - DNA, 120 bp, Artificial Sequence
  ENSG00000152402_62 (sequence is synthesized)
cacaggaagtatcacagctaatcccatattctaaaatagttttataaagtgattaatatttttagtttgtgtgtatgcatctgtgtttattgaatgtagatgtttcatgattgaaagaag

SEQ ID NO: 432221 - DNA, 120 bp, Artificial Sequence
  ENSG00000152402_63 (sequence is synthesized)
taagtttctttggaaggacttgggaatgcagagaagtaaagtttgtgtctttatttctaatatgttataaccagatcacggtttcagttaagtacctcattgccatcccatccttaagaa

SEQ ID NO: 432222 - DNA, 120 bp, Artificial Sequence
  ENSG00000152402_64 (sequence is synthesized)
atgacctagttcagtggttcagctgatctgcttggaagtatctggctggcttcataagaattccgtagggagttttaggaatacagaagactagtctttaccttcagagatttggattca

SEQ ID NO: 432223 - DNA, 120 bp, Artificial Sequence
  ENSG00000152402_65 (sequence is synthesized)
gtaggtctcaggtagggcctaggaatctgtgtttagaaaatcactctaagtaatgctaatatacagccagacttgggaatcattgaaaagtattcaaataatcccaattactaggaataa

SEQ ID NO: 432224 - DNA, 120 bp, Artificial Sequence
  ENSG00000152402_66 (sequence is synthesized)
atacaagttgactgggatagtgatgttatttcatttgtagttattttgaaaagttaaatactctaggcctcataccattatttctttcacaaattttaattttagctttgatttccaatt

SEQ ID NO: 432225 - DNA, 120 bp, Artificial Sequence
  ENSG00000152402_67 (sequence is synthesized)
tcttctttctgagcatgaatcttcaaacttagagacagacgtcaacactgataagcatgagggatgaatattgctcactatagggctattaggcatactagatacagtaccattttctta

SEQ ID NO: 432226 - DNA, 120 bp, Artificial Sequence
  ENSG00000152402_68 (sequence is synthesized)
gttactgccagagctgtgcagtatattacaacatttgctaatcctcaccaccgaggtaaaaactatgacctttgggacacagaagcaaatatcaaagtgacagccttacttctgaatgct

SEQ ID NO: 432227 - DNA, 120 bp, Artificial Sequence
  ENSG00000152402_69 (sequence is synthesized)
ttgatttttatgtcatgaaaagacatcaacttaatacttagtctcactatgtacttttcatattgaattgtacattatctgaaaactgatttccaagcaataccgtgtaacaacctttca

SEQ ID NO: 432228 - DNA, 120 bp, Artificial Sequence
  ENSG00000152402_70 (sequence is synthesized)
agcaataatttaagccatggtgatgatgccatatgaagcttgcacttctttgcatttcatagagcctttgtgaaaacagaaacatgttttatacaagcaataatatagctggtgtggact

SEQ ID NO: 432229 - DNA, 120 bp, Artificial Sequence
  ENSG00000152402_71 (sequence is synthesized)
ttttaaagatactcattattctgtagcaaaatgagcagcaagtaatgactcagattaaaaatattcgggcaaatgacatgtttaatctatctcagaagttattcatttgcaaacatgctg

SEQ ID NO: 432230 - DNA, 120 bp, Artificial Sequence
  ENSG00000152402_72 (sequence is synthesized)
taaagtgattaatatacatcagattatttctggtgcataattttaaacatggctataaaaatatgatttctattcctgtcaaagagatttgtgtattatttataatgttgcccaattttt

SEQ ID NO: 432231 - DNA, 120 bp, Artificial Sequence
  ENSG00000152402_73 (sequence is synthesized)
ggatctttgtagtatataatagtaaggaagaagttaaggatggataaatgagtggaagtagagcataggttggaagaggtgattgagaaagtaggctttgcaaaaatatagatgggtctt

SEQ ID NO: 432232 - DNA, 120 bp, Artificial Sequence
  ENSG00000152402_74 (sequence is synthesized)
gcggcagatttattcaaatgttggtttgatatggtcttggaagatgaaagagtaaagataaaagagctcattattactgttttcaatgatagctacacaagtttttggtaagtatgatag

SEQ ID NO: 432233 - DNA, 120 bp, Artificial Sequence
  ENSG00000152402_75 (sequence is synthesized)
tattttgacttcagaatatgattgactgaaagtcacctgtagcacaataaataaaagtctgaaaatgattattcagtaatactgaaaaaacactaaagctttcagatttcgaaatgaaaa

SEQ ID NO: 432234 - DNA, 120 bp, Artificial Sequence
  ENSG00000152402_76 (sequence is synthesized)
aatcatgtttttagtctacttaaaatacaattttaatagaatgtggcatagtcaatgataatcagttctttagtagttaaatttacttcatcatttagaataatgtataaggattacagc

SEQ ID NO: 432235 - DNA, 120 bp, Artificial Sequence
  ENSG00000152402_77 (sequence is synthesized)
taaaatcaactagtaaatttatgtttatactgaacagtatctaaacatcagattatgatttagcatataagcttaggattcattcctaagcatctaaataagatgacagctcctattatt

SEQ ID NO: 432236 - DNA, 120 bp, Artificial Sequence
  ENSG00000152402_78 (sequence is synthesized)
gccctgcaaggtaaacaatcccctaaacatgaatatgaacccatttgaatggtgggtgtgttcgatattttgtctttacctttctattactcatagcaaaacttaattttagcattctcc

SEQ ID NO: 432237 - DNA, 120 bp, Artificial Sequence
  ENSG00000152402_79 (sequence is synthesized)
tgcccacagtttggaaaatttccctatcaaaatcaaaccggattgttgatttactgaggctttgacaattatcctcttgtatatcactggatccttaaatccttagtaagaatggttttg

SEQ ID NO: 432238 - DNA, 120 bp, Artificial Sequence
  ENSG00000152402_80 (sequence is synthesized)
ggttaaataaataatggaaaatatttaatttgaatctattaaattacactgaagttatccttccagttaattcagctagttgctgatcagatcattctttatattagacttaagtattgt

SEQ ID NO: 432239 - DNA, 120 bp, Artificial Sequence
  ENSG00000152402_81 (sequence is synthesized)
tgcttattatttaaaagcagaaaagaaaaaccaaatggcaggtctgagtaatagttactttttgattcttttgatacatatttttaaactgaagaaatcactttatattcagtcttcttc

SEQ ID NO: 432240 - DNA, 120 bp, Artificial Sequence
  ENSG00000152402_82 (sequence is synthesized)
tgtggactttttgctatttgcagataaagaaggaattctacttaatatatttttactgtggtctattaaatgtcattaaacctatatctaagaggaaagtaataactgaaataaaatcag

SEQ ID NO: 432241 - DNA, 120 bp, Artificial Sequence
  ENSG00000152402_83 (sequence is synthesized)
gaatgtgcaaaattgtttcttcatacctcactttctgaagacacttctttgcattctgctgcctggcatttacacagcagactcaggacaaagggacaaatggagtgagtgaggtgggca

SEQ ID NO: 432242 - DNA, 120 bp, Artificial Sequence
  ENSG00000152402_84 (sequence is synthesized)
ggagctttagaagagatgaagcaaagagagttagttttttattcaggaagatgtagagactcttaaaggagaggcaatttccgtaacaaacacctctggtttaatggaagccacatgatt

SEQ ID NO: 432243 - DNA, 120 bp, Artificial Sequence
  ENSG00000152402_85 (sequence is synthesized)
tatttgactactggtcactcatttttaaaaagaaaagagaaagacaaaaaaagagaaacccttcacaagccatttttagttttcctaggaggtagtgccaacctctcggcagctgcacat

SEQ ID NO: 432244 - DNA, 120 bp, Artificial Sequence
  ENSG00000152402_86 (sequence is synthesized)
ctcagtgaagctgggatagaagcttacagagctacaaatagatgctttctgaaggtggcagatagaactagtcttggttacaatgattaaggtaaatgaaagtgtcagaacatctgggtt

SEQ ID NO: 432245 - DNA, 120 bp, Artificial Sequence
  ENSG00000152402_87 (sequence is synthesized)
gaaggaacaaagaaggcccaataccagctctgccatatgccacagaaaaccctgctaaaattagcatagaaaaacagactaacactatgcaagtgatattaaaacaaactatattttttc

SEQ ID NO: 432246 - DNA, 120 bp, Artificial Sequence
  ENSG00000152402_88 (sequence is synthesized)
cttttataacatgcctggctgagctagcattcagtgagaagaatatacttttgtcttatgaatcatttaaaaacatttgttgttgttctgacattaaataaattacatattcccttagtt

SEQ ID NO: 432247 - DNA, 120 bp, Artificial Sequence
  ENSG00000152402_89 (sequence is synthesized)
gaaaaatttaatcacaaataataggaaatatttattttgtgtcctgaaatttttaaacttttggcggctgtactctacgccatattcttcttcacattcttctcaaattgggtttggctg

SEQ ID NO: 432248 - DNA, 120 bp, Artificial Sequence
  ENSG00000152402_90 (sequence is synthesized)
ctagcaaaacaagtgtggaactttagagcagaaaaatgtccatctgtctcttacagaatgtgccagagtatttgagctggagagagaatcaccccatagcatttaatggtattctgtgag

SEQ ID NO: 432249 - DNA, 120 bp, Artificial Sequence
  ENSG00000152402_91 (sequence is synthesized)
acacgaagactctagtcttctaaacttaaaagtggttaggtagtaccttaatcatcaaagatttttcacttacatgtaactggttaattcatatagagtttgtttagaacagaaacttta

SEQ ID NO: 432250 - DNA, 120 bp, Artificial Sequence
  ENSG00000152402_92 (sequence is synthesized)
aaaggagggaacaaacctgagcaatttttaatcaaaattatcagttagaaaaagaatttaagacaaagatttattgtcctgaaagagtcaactcactcatatccaaaacttagaatgtca

SEQ ID NO: 432251 - DNA, 120 bp, Artificial Sequence
  ENSG00000152402_93 (sequence is synthesized)
gagacttttgaaagttttctgaatgtgtcaacttcttcagcaatgagagattcaattaatgttgtttctaggttccttagagttttatcctctgatgataacacttaattgtgaattaca

SEQ ID NO: 432252 - DNA, 120 bp, Artificial Sequence
  ENSG00000152402_94 (sequence is synthesized)
tttaagtgatttttactttatattttccatttgttacagaaaaaaagtcataaatatgacagacttaaaaattgtggcattgagccagggtttgcaaatttggcaatattattttactta

SEQ ID NO: 432253 - DNA, 120 bp, Artificial Sequence
  ENSG00000152402_95 (sequence is synthesized)
aaatattacactttttaaaataacataaacattaaggataatagtcaaataatactgtattttcagcttgttcacattagaatatagaacaacgcattgtaaacttctcggaataaaatc

SEQ ID NO: 432254 - DNA, 120 bp, Artificial Sequence
  ENSG00000152402_96 (sequence is synthesized)
taagtcaaaaccaatttatgttcaaatcatttgaacaacaaatatgaatattgttacatcacctctgactctctgactagtaagaaactatgcatttccatacccaatgaaacctcaatt

SEQ ID NO: 432255 - DNA, 120 bp, Artificial Sequence
  ENSG00000152402_97 (sequence is synthesized)
cctacagcaattctacttttattgcctcccaagaactatttcttcatggtcaatatcactctttaaaagctagcaaaatatgactttcttctgaggtttgggcaatctggatcaatattt

SEQ ID NO: 432256 - DNA, 120 bp, Artificial Sequence
  ENSG00000152402_98 (sequence is synthesized)
atgtatctaaccacttgaaaggctgtctccttttttggccttttaaattaaaacttccataaaatgaagcaaaatatgaaaacagctagttgatttatcaataatgtgaaaccctccttc

SEQ ID NO: 432257 - DNA, 120 bp, Artificial Sequence
  ENSG00000152402_99 (sequence is synthesized)
tgaatttttttggtaaaaattaccacactgaaaccaaaacttaaccttggcttggactctcagataaattgcttttgtattctttgactacaaagtattctcaaaaagaagaaattattt

SEQ ID NO: 432258 - DNA, 120 bp, Artificial Sequence
  ENSG00000152402_100 (sequence is synthesized)
ctgatggtagatcaaactctagccaagaaggtctagataaactagaggactgtataattatctaaagtaattcagggggacttttagaaaaattctttaatttttgttcctgtgtaaaaa

SEQ ID NO: 432259 - DNA, 120 bp, Artificial Sequence
  ENSG00000152402_101 (sequence is synthesized)
ttattattaatggatggcagcccaaattactattcttcttttaaaatttgtttcaagtgtgtcaccaggcactcataaaattcatttatttgttatataactcaatgacctgaaataata

SEQ ID NO: 432260 - DNA, 120 bp, Artificial Sequence
  ENSG00000152402_102 (sequence is synthesized)
ggtgctcattgctttttcatttgatccttaaaaacaattttattctgtctaaaaaaaattctcctgctaaaatccaaatgattacctggctataggaggagtcccattttatgaacatgt

SEQ ID NO: 432261 - DNA, 120 bp, Artificial Sequence
  ENSG00000152402_103 (sequence is synthesized)
atgaaatatttagttggattcagatgaaatgcaacttagagaaaggaatggataccagtagagaagatggaaagagacacaaaaatcagactttgcttacatcaaaattaggtctgttgt

SEQ ID NO: 432262 - DNA, 120 bp, Artificial Sequence
  ENSG00000152402_104 (sequence is synthesized)
ctaatcctgttaacctagaggcaagctgaaaatagatggtaaggataaatagatttttaaacacagtatttatatttaacagaatgtcataaaaatgacagaatgccatgaaattcagca

SEQ ID NO: 432263 - DNA, 120 bp, Artificial Sequence
  ENSG00000152402_105 (sequence is synthesized)
tgtcaaaactttgataaaacaaacaagaaatttaataaatatgctaattagagtgaatatttaaagggacaaaaataacttgtcacatcatagatgtctccccagtgcagaatttattat

SEQ ID NO: 432264 - DNA, 120 bp, Artificial Sequence
  ENSG00000152402_106 (sequence is synthesized)
ctgctgggaaaatttggttttatgtcttcaatcaatatttgctgcattatctaattaaacattagtatattttttgtgctaatgagaaaccatgcaagagtccaaatatcaagtgtggtg

SEQ ID NO: 432265 - DNA, 120 bp, Artificial Sequence
  ENSG00000152402_107 (sequence is synthesized)
acagcttgaatcagttgagtttggtgttcatgaataaaattcttgatgaatgtgaaatgaatggtttatatacataagttttatgtgcagtaaattaattaggctttaaaacttgttagc

SEQ ID NO: 432266 - DNA, 120 bp, Artificial Sequence
  ENSG00000152402_108 (sequence is synthesized)
atgcttagctcctcttttttccattgaattatcttcctatcttccttccttccttcctttccttcctttccttccctccctctttgctttatttctttctagctcttataagataaatga

SEQ ID NO: 432267 - DNA, 120 bp, Artificial Sequence
  ENSG00000152402_109 (sequence is synthesized)
caatagtactttactatttgggctggagcctccctttttcactttcacatgattgaacactttgtggatttgtgagaaaaggggaaagaagatgagcacgtagatgcagatcagttgagg

SEQ ID NO: 432268 - DNA, 120 bp, Artificial Sequence
  ENSG00000152402_110 (sequence is synthesized)
atagaagtgactgagagaattgggaccttgacttccagagactgtcagtcaagagaaatgtgggtctataaaaatctatgtgtgttcattttcattgaatttaaacactttttcaagaag

SEQ ID NO: 432269 - DNA, 120 bp, Artificial Sequence
  ENSG00000152402_111 (sequence is synthesized)
tatcagggtcaatctgtttggacaatctcctatttttacccccttacaaatgtcttaagttagaaaaacctcttattttcaagtagtcatttttttttatgtgagtaccacactgctaaa

SEQ ID NO: 432270 - DNA, 120 bp, Artificial Sequence
  ENSG00000152402_112 (sequence is synthesized)
gactgaaatagaaaaaaaaaatgctttttctgtttgtagggaaattgctttctgaaaactactcccaataagatgtatacatcaaatgcaacttgattttactggctctttatctagaga

SEQ ID NO: 432271 - DNA, 120 bp, Artificial Sequence
  ENSG00000152402_113 (sequence is synthesized)
taactgatgcactgtcttctttcttagatacccttctgtaattcagcttggcatagtatgatgttttgagttcttattgagggtttggaaacatttgtcatcaattttatgtctactcta

SEQ ID NO: 432272 - DNA, 120 bp, Artificial Sequence
  ENSG00000152402_114 (sequence is synthesized)
ttgaaaaagcaatatacaatgtattccatatttcttagctctgtgtctttgaggttttaaacctatattcagatagctgtttttagctacaattttgagtattcaccagaatttacaaat

SEQ ID NO: 432273 - DNA, 120 bp, Artificial Sequence
  ENSG00000152402_115 (sequence is synthesized)
tgccattttattaaatacaaaaaaaaaaaaagtacagcttggatcaagagatcaaacatttacaaatctcaatccaaagccattatttttcagggaaaattaaatcatttctagcagagt

SEQ ID NO: 432274 - DNA, 120 bp, Artificial Sequence
  ENSG00000152402_116 (sequence is synthesized)
atttgactcctaagggaaaataagtcaaatatcttctttaagagtaagggcattcttccattgtaggtatttctaattgactttataataatttgaacaaatcttgaacaagatttaaag

SEQ ID NO: 432275 - DNA, 120 bp, Artificial Sequence
  ENSG00000152402_117 (sequence is synthesized)
atctcccaaacttaaaattgtattctttctggttttttatttttatgtattaagattatattcaaaccacttaattatcttcatgacataagtttgtgttaatagaaaattatacagaaa

SEQ ID NO: 432276 - DNA, 120 bp, Artificial Sequence
  ENSG00000152402_118 (sequence is synthesized)
tacagaaaaaaacatgatttgttcctctgtggaaagatatgcttcaatgagttaaatacccttgaattttggttctcatttcttatttggacttttctgttatgtacctcaggggtctta

SEQ ID NO: 432277 - DNA, 120 bp, Artificial Sequence
  ENSG00000152402_119 (sequence is synthesized)
aattctaacagatgaagtagtcaaaggggtataaaatacttgaaaaaaattaaaacttcaaaagggacgaatttctctgttaacttttgtttatcctatactgacttattttgaaattgt

SEQ ID NO: 432278 - DNA, 120 bp, Artificial Sequence
  ENSG00000152402_120 (sequence is synthesized)
gaaaaaacaggcagctaccatataaattggtatctatgaaaatactgattactttcttcctgtgattttcactgttaagaaaacctttgtcttgaaatgatggacaatcttaatacttgt

SEQ ID NO: 432279 - DNA, 120 bp, Artificial Sequence
  ENSG00000152402_121 (sequence is synthesized)
tcagataaagaaatgtgactttcaatacctttaccatttgtatttctttagggaaatattttaataatgattgtaaaaatagaagaaatatggttgagaaaaatagaagaaattaagatg

SEQ ID NO: 432280 - DNA, 120 bp, Artificial Sequence
  ENSG00000152402_122 (sequence is synthesized)
aaatttgaacagttgtaatccacagtcccatttttccctctattttattgccttctactaagttattgaaggcccagatctgcaaaatttacaagctactaattcattgtctcctttaag

SEQ ID NO: 432281 - DNA, 120 bp, Artificial Sequence
  ENSG00000152402_123 (sequence is synthesized)
aatttggagcaaaaattattccgactatgcggaaatgaattcacatcatcatggcaggttttgactatgagggaattcaggttaggttcaaatagaataatggtccatggagaaaaatac

SEQ ID NO: 432282 - DNA, 120 bp, Artificial Sequence
  ENSG00000152402_124 (sequence is synthesized)
tttctgatttttcttcaagttggatggaaaggtttttctttatttaaaaaaaaaaaaaaaaagtcctcctgagaattttgccttcgaaaaagaagttttataacagctgcctgtagctac

SEQ ID NO: 432283 - DNA, 120 bp, Artificial Sequence
  ENSG00000152402_125 (sequence is synthesized)
attataacttcggtaattaagtgacaaaactgtctcattatgcttttaaaatactgattaagtgcattccagaaataatacatatcattcatttcaaaatcaacctacctgaattctgac

SEQ ID NO: 432284 - DNA, 120 bp, Artificial Sequence
  ENSG00000152402_126 (sequence is synthesized)
tcttcaatcatgagtagccattttacaaaaccaaagggtctcatttcccaaacagtactttaaatatcatcctaatagtaatatcctaatagtaataatcctattaatactcacttcaat

SEQ ID NO: 432285 - DNA, 120 bp, Artificial Sequence
  ENSG00000152402_127 (sequence is synthesized)
gcataaaataaacagccaatgcacttccatcaagtctgcaggcactatataataataaataggtttccaaaatcacttaataaaaacacacagttataatgtgctcggccttcattagca

SEQ ID NO: 432286 - DNA, 120 bp, Artificial Sequence
  ENSG00000152402_128 (sequence is synthesized)
tcctctgcatggggtggttttcatttaacctgaattattttaacattttggctaatttgtttgctgcaatttcatgggtctaaatttttggtttggtttgcaatgtaaatcatattgtat

SEQ ID NO: 432287 - DNA, 120 bp, Artificial Sequence
  ENSG00000152402_129 (sequence is synthesized)
gctcctttgttattagatttactttgtgaataatatcttttaaaaattgagttatcaaaaacttaaattataatgtcatcaactaataccaggtaaatatactaatatatatgtagggca

SEQ ID NO: 432288 - DNA, 120 bp, Artificial Sequence
  ENSG00000152402_130 (sequence is synthesized)
ggcatgattaaattgcatatattttgaaatgtcaaactattttttgtttttttaaaaaaatgaatgcatctcttaaacctgtaccattaattttaaaaaagtttcatttggtatttcata

SEQ ID NO: 432289 - DNA, 120 bp, Artificial Sequence
  ENSG00000152402_131 (sequence is synthesized)
ttttctttatctagtagtacaggtttaaagaaactttttctgattgaaatgataaaatatgcctcatttcactagaattttaagaataatacatgtaaaagtataactcatataagatta

SEQ ID NO: 432290 - DNA, 120 bp, Artificial Sequence
  ENSG00000152402_132 (sequence is synthesized)
aactcatataagattataaatatccacaatatcttctttgattttcatgtaacaccactttttactcattcttttatttgttattattcgaaatcattcacaatgtaaatagcatgtttc

SEQ ID NO: 432291 - DNA, 120 bp, Artificial Sequence
  ENSG00000152402_133 (sequence is synthesized)
atgatgtaaaatgtctttgcatttacagactgcagaacaaggtgaatttgtatatgaaaaataagtgatggaaacgtgggattcttataaaacaaagtggaaatgatagttctgtgttat

SEQ ID NO: 432292 - DNA, 120 bp, Artificial Sequence
  ENSG00000152402_134 (sequence is synthesized)
atttacataattcattacaaaattgtctagttaagtcatgcatttatttaccttaaaagtgtccaaactgtcacttataaaatatttaaatcaataaataataccaaaaaggagtctgaa

SEQ ID NO: 432293 - DNA, 120 bp, Artificial Sequence
  ENSG00000152402_135 (sequence is synthesized)
tgatggaagaccgattcagccccagaggagtgaactccttttctcctttcctgtttccatccagctggttccagatcagcatcaaagtgaaacggatttgggtactgaaaagatgaggat

SEQ ID NO: 432294 - DNA, 120 bp, Artificial Sequence
  ENSG00000152404_0 (sequence is synthesized)
aattttcttgcggcttcttagctttacgatggcaacaagtatggcggctgctagtggtagatttgaaagtgcgaagagtatcgaagagcggaaagaacagacccggaatgccagggccga

SEQ ID NO: 432295 - DNA, 120 bp, Artificial Sequence
  ENSG00000152404_1 (sequence is synthesized)
ggtgttgcgccaggctaaagccaattttgaaaaagaagaaaggcgtaaagaacttaagcgacttcggggtgaggatacatggatgctacctgatgtgaatgagagaattgaacagttctc

SEQ ID NO: 432296 - DNA, 90 bp, Artificial Sequence
  ENSG00000152404_2 (sequence is synthesized)
ggatgctacctgatgtgaatgagagaattgaacagttctcacaggaacactctgtgaagaaaaagaagaaaaaagacaagcattcgagca

SEQ ID NO: 432297 - DNA, 120 bp, Artificial Sequence
  ENSG00000152404_3 (sequence is synthesized)
ctcatcaagctctgaagatgagtgggttgaggctgttccatcccagactcctgacaaggaaaaagcctggaaagtgaaagatgaaaagtcaggaaaagatgacacccaaattatcaagag

SEQ ID NO: 432298 - DNA, 120 bp, Artificial Sequence
  ENSG00000152404_4 (sequence is synthesized)
ggatgagtggatgactgttgattttatgtctgttaaaactgtgtcatcatcatcactcaaagctgaaaaggaaactatgaggaaaatagagcaagagaaaaaccaagcgcttgaacagtc

SEQ ID NO: 432299 - DNA, 120 bp, Artificial Sequence
  ENSG00000152404_5 (sequence is synthesized)
caaactgatggaaagagaattgaatccgtactggaaggatggtgggacaggtcttccacctgaagactgtagtgtgtcatcgattactaaagtttcagtggtagaagatggtggattaag

SEQ ID NO: 432300 - DNA, 120 bp, Artificial Sequence
  ENSG00000152404_6 (sequence is synthesized)
ctggctaaggaaatcttatctaagaatgaaggaacaagctgagaaacaaagtagaaactttgaggacattgtagccgaaagatatgggtcaatggaaatatttcagtcaaaattagaaga

SEQ ID NO: 432301 - DNA, 120 bp, Artificial Sequence
  ENSG00000152404_7 (sequence is synthesized)
tgctgaaaaagctgcatccacgaaagaagattatagacgggaacggtggaggaaacccacatattcagataaagcacaaaattgtcaagaaagtagagaatcagacttagtaaaatatgg

SEQ ID NO: 432302 - DNA, 120 bp, Artificial Sequence
  ENSG00000152404_8 (sequence is synthesized)
taacagttcaagggatagatatgctacaacagatactgcaaaaaatagcaataatgaaaaatttattggtgatgaaaaagataagagacctgggtctttagaaacgtgtagaagagaatc

SEQ ID NO: 432303 - DNA, 120 bp, Artificial Sequence
  ENSG00000152404_9 (sequence is synthesized)
taacccaaggcaaaatcaagagttttcttttggcaatttgagagctaaattcttgagaccctctgatgatgaagaactgtcatttcacagcaagggcagaaaatttgaaccacttagttc

SEQ ID NO: 432304 - DNA, 120 bp, Artificial Sequence
  ENSG00000152404_10 (sequence is synthesized)
atcttcagcattggtagctcagggctctttgtgtagtggttttagaaaacccaccaagaacagtgaagaaagattaacatcatggagtcgctctgatgggagaggagacaagaaacattc

SEQ ID NO: 432305 - DNA, 120 bp, Artificial Sequence
  ENSG00000152404_11 (sequence is synthesized)
aaatcaaaagccatcggaaaccagtactgatgaacaccaacatgttccagaagacccaagagaaaaatcacaagatgaagtcttgagagatgaccctccaaaaaaagaacatctacggga

SEQ ID NO: 432306 - DNA, 120 bp, Artificial Sequence
  ENSG00000152404_12 (sequence is synthesized)
tacaaagtctacatttgctggcagtccagagcgtgagtccattcacatcctgagtgttgatgagaagaacaagttgggagccaagattatcaaagcagagatgatggggaatatggaatt

SEQ ID NO: 432307 - DNA, 120 bp, Artificial Sequence
  ENSG00000152404_13 (sequence is synthesized)
aattcaaagaaactataacacagataccaaaaaaatctggggtagagaatgaagaccagcaagaagtaatccttgtcagaacagatcagtctggaagagtatggcctgtgaacacacccg

SEQ ID NO: 432308 - DNA, 120 bp, Artificial Sequence
  ENSG00000152404_14 (sequence is synthesized)
gaaaatctctggaatcacaaggaggaagaagaaagagacagatggtttcaacccatgaggaaagagaaagggtcagatactttcatgatgatgataatctaagcctaaatgatttagtca

SEQ ID NO: 432309 - DNA, 120 bp, Artificial Sequence
  ENSG00000152404_15 (sequence is synthesized)
aaaatgaaaagatgggaacagcagaaaatcaaaacaagctctttatgagaatggcatctaagtttatgggaaaaacagatggagactattacaccctggatgacatgtttgtctccaaag

SEQ ID NO: 432310 - DNA, 120 bp, Artificial Sequence
  ENSG00000152404_16 (sequence is synthesized)
cagctgagagagaacgtcttggtgaagaggaagagaaccaaaggaaaaaagctattgctgagcatcggagtcttgctgcacaaatggaaaaatgtctgtattgttttgacagctctcaat

SEQ ID NO: 432311 - DNA, 120 bp, Artificial Sequence
  ENSG00000152404_17 (sequence is synthesized)
ttcccaagcatcttattgttgcaataggtgttaaggtttatttatgtttacccaacgtacggtctcttactgaggggcactgcctgatagtccctttgcagcaccatagagcagctactt

SEQ ID NO: 432312 - DNA, 120 bp, Artificial Sequence
  ENSG00000152404_18 (sequence is synthesized)
tgttggatgaagacatctgggaggagatccagatgttcagaaaatcattggtaaagatgtttgaagataaaggattagactgcatttttttggaaactaatatgagcatgaagaaacagt

SEQ ID NO: 432313 - DNA, 120 bp, Artificial Sequence
  ENSG00000152404_19 (sequence is synthesized)
atcacatggtttatgaatgtattcctcttcccaaggaagtgggtgacatggctcccatctattttaagaaagccataatggaatctgatgaagagtggtccatgaacaagaagttgatag

SEQ ID NO: 432314 - DNA, 120 bp, Artificial Sequence
  ENSG00000152404_20 (sequence is synthesized)
atctctcttcaaaagatatcagaaagtctgtacccagagggttaccttacttctctgtggattttggccttcacggagggtttgcccatgtcattgaagatcagcacaaattccctcatt

SEQ ID NO: 432315 - DNA, 120 bp, Artificial Sequence
  ENSG00000152404_21 (sequence is synthesized)
actttggaaaggaaatcataggtgggatgctggatatagaaccaagactttggaggaaaggcatccgagaaagctttgaggatcagaggaaaaaagcactgcagtttgctcagtggtgga

SEQ ID NO: 432316 - DNA, 120 bp, Artificial Sequence
  ENSG00000152404_22 (sequence is synthesized)
aaccatatgacttcaccaaaagtaaaaactattgaggtgtaccttccattttaaaatttttcttcagatcccgttcagttttatttccattgcatctaatgaagcaactgaccctcaggt

SEQ ID NO: 432317 - DNA, 120 bp, Artificial Sequence
  ENSG00000152404_23 (sequence is synthesized)
cacaggcagagagagtcacagcagcagactgctctgggtcagtgacaactgtacatcaggagattgtgttgttttcttcttcacctgctcctatctatggacttcattttagtcaccatg

SEQ ID NO: 432318 - DNA, 120 bp, Artificial Sequence
  ENSG00000152404_24 (sequence is synthesized)
gagtaaaaacatatattcgatgatctgctcacattcctgctctctacctacttcttggtattccgaattgttcagttaatttagagaaggccttttctgaagggatatctaaaaagcata

SEQ ID NO: 432319 - DNA, 120 bp, Artificial Sequence
  ENSG00000152404_25 (sequence is synthesized)
ggaaatccttggttcagagggaagtgggtctgcttcatggttgttaagtctactgtctggcttcttttgcatttttaaaaataagacgatttaattttaatttcataggattttatagaa

SEQ ID NO: 432320 - DNA, 120 bp, Artificial Sequence
  ENSG00000152404_26 (sequence is synthesized)
aagctcttaattttctactagcagtatatagtatcacttctattctttttgttaaaggaaaaggaaatgtccccaaagtattaaagaattaaatgatactgaaaatttgtatgattcaaa

SEQ ID NO: 432321 - DNA, 120 bp, Artificial Sequence
  ENSG00000152404_27 (sequence is synthesized)
gggaggagatccaggtcagcataataaatgttcattatcattttaaaactcatgagcaatttttgtaaattattgtgataaattccaataggtataacttcatttaatgattttagtttc

SEQ ID NO: 432322 - DNA, 120 bp, Artificial Sequence
  ENSG00000152404_28 (sequence is synthesized)
taaacttaaacacgtgtgttttcatagttgtatatatctgtggatcatgatgtttccatcattttatttcccttgtgtactccagattttgagaccttttatctacgaaataaactgtga

SEQ ID NO: 432323 - DNA, 120 bp, Artificial Sequence
  ENSG00000152409_0 (sequence is synthesized)
agtcgaatggcaacattgtggcgatgctgaggcgcagagtttaggagacgggttcatcagtcaggccggctccgggctttctgcagcagcaccaggggcgggggcggggatcttgacctg

SEQ ID NO: 432324 - DNA, 120 bp, Artificial Sequence
  ENSG00000152409_1 (sequence is synthesized)
gatcttgacctgggcgagcgaccgggacgcatacagcgccggcctgaccccgcgggacccgcgcctcaccaccggagcgccgcagacgcagctccacggcctcgcgcggggggcggcggg

SEQ ID NO: 432325 - DNA, 120 bp, Artificial Sequence
  ENSG00000152409_2 (sequence is synthesized)
gctgcggcagcgcggagcttgtaaacagatccggccgcaggtgaccatgtgaactacctgctcccgggacgcttattgtccttctctcgatccgcgccacaaaggagctcggcggtcggg

SEQ ID NO: 432326 - DNA, 120 bp, Artificial Sequence
  ENSG00000152409_3 (sequence is synthesized)
cggtcggggcgcggagggacaggcgaacgagccgggagagccggccggcgcactaagatggctgaaggcgcccggcgagggtgagcggggggcgcggcgcagccagcggggagtcctcgg

SEQ ID NO: 432327 - DNA, 120 bp, Artificial Sequence
  ENSG00000152409_4 (sequence is synthesized)
ggccggcggcccttccccgcggcgagaagccggagccaccatgtcgttcgcgctggaggagacgctcgagtcggactgggtggctgtgcggccccatgtgttcgacgagcgcgagaaaca

SEQ ID NO: 432328 - DNA, 120 bp, Artificial Sequence
  ENSG00000152409_5 (sequence is synthesized)
caaattcgtctttattgtggcctggaacgagattgagggcaagtttgccataacctgccacaaccggacggcccagaggcagaggagcggctcccgggagcaagcgggggcgcgaggggg

SEQ ID NO: 432329 - DNA, 80 bp, Artificial Sequence
  ENSG00000152409_6 (sequence is synthesized)
cccggcagcccggcgggcaggggtcggcccgaggccactgcctctgcaactctggttaggagccccgggccccggcggag

SEQ ID NO: 432330 - DNA, 120 bp, Artificial Sequence
  ENSG00000152409_7 (sequence is synthesized)
ctcggcctgggcggagggcggctctcctcggagcactcgcagccttctgggggacccgcggctgcggagtcctggcagcaaaggggcggagagtcgtcttaggagcccagtgcgggccaa

SEQ ID NO: 432331 - DNA, 120 bp, Artificial Sequence
  ENSG00000152409_8 (sequence is synthesized)
acccatcccgggtcagaaaacatctgaagccgacgatgcggcgggggcagccgctgcagcagcccggccggcgcccagagaggcccaggtgtcctctgtacggatagtgagcgcctctgg

SEQ ID NO: 432332 - DNA, 120 bp, Artificial Sequence
  ENSG00000152409_9 (sequence is synthesized)
gacggtctccgaggagatagaggtgctggaaatggtgaaggaggacgaggcacctctggcgctctcggacgcggagcagccgccgcccgccaccgagctggagtctccggccgaagagtg

SEQ ID NO: 432333 - DNA, 120 bp, Artificial Sequence
  ENSG00000152409_10 (sequence is synthesized)
cagctgggccggactgttttctttccaggacctgcgcgccgtgcaccagcagctgtgctcggtgaactcgcagttggagccgtgcctgccggtgttccccgaggaaccttcgggcatgtg

SEQ ID NO: 432334 - DNA, 120 bp, Artificial Sequence
  ENSG00000152409_11 (sequence is synthesized)
gactgtgctgtttgggggcgcccccgagatgaccgagcaggaaatcgacactctgtgttaccagctccaggtctacctgggccacggcctggacacctgcggctggaagatcctctccca

SEQ ID NO: 432335 - DNA, 120 bp, Artificial Sequence
  ENSG00000152409_12 (sequence is synthesized)
ggtgctcttcaccgagaccgatgatcccgaggagtattacgaaagcctcagcgagctgcggcagaagggctacgaagaagtgcttcagcgggccaggaagcgcatccaggagctcttgga

SEQ ID NO: 432336 - DNA, 120 bp, Artificial Sequence
  ENSG00000152409_13 (sequence is synthesized)
taagcacaagaatacagagagcatggtggagcttctggacttgtatcagatggaggatgaagcctacagcagccttgcagaagctacaaccgaactctatcagtatttactacagccatt

SEQ ID NO: 432337 - DNA, 120 bp, Artificial Sequence
  ENSG00000152409_14 (sequence is synthesized)
ccgagacatgagagaacttgccatgctacgaagacagcagatcaagatttccatggagaatgattatctgggacctcgaagaattgagagtctacaaaaagaagatgctgattggcagcg

SEQ ID NO: 432338 - DNA, 120 bp, Artificial Sequence
  ENSG00000152409_15 (sequence is synthesized)
gaaagctcacatggctgtactgtctattcaagatcttactgtcaagtactttgaaataacagctaaagctcaaaaagctgtgtatgatcgaatgcgagctgatcagaagaaatttggtaa

SEQ ID NO: 432339 - DNA, 120 bp, Artificial Sequence
  ENSG00000152409_16 (sequence is synthesized)
agcatcatgggcagcggctgctgaacggatggaaaaactccagtatgcagtttctaaggaaactttgcagatgatgagagctaaagagatatgcttggaacagcggaaacatgcactaaa

SEQ ID NO: 432340 - DNA, 120 bp, Artificial Sequence
  ENSG00000152409_17 (sequence is synthesized)
ggaagagatgcagagtttgcggggtggtacagaagcgatagcacgattggatcagttagaagctgattattatgatctgcaacttcagttgtatgaagtacagtttgaaatcttgaagtg

SEQ ID NO: 432341 - DNA, 120 bp, Artificial Sequence
  ENSG00000152409_18 (sequence is synthesized)
tgaagagttactattgacagcgcaactagaaagcatcaaaagacttatatcagaaaaaagagatgaagtggtatactatgacacttacgaaagcatggaggccatgctggagaaggaaga

SEQ ID NO: 432342 - DNA, 120 bp, Artificial Sequence
  ENSG00000152409_19 (sequence is synthesized)
gatggcagcatctgcgtacttacagagagaagagctgcagaaacttcagcagaaagcacgccagctggaagcaagacgtggacgggtttctgccaagaaatcctacctcagaaataaaaa

SEQ ID NO: 432343 - DNA, 120 bp, Artificial Sequence
  ENSG00000152409_20 (sequence is synthesized)
ggaaatatgtattgcaaaacacaatgaaaaaatccaacagcgcactcggattgaagatgaatatagaacccatcacacagtacaactaaagagagaaaaattacatgatgaagaagaaag

SEQ ID NO: 432344 - DNA, 120 bp, Artificial Sequence
  ENSG00000152409_21 (sequence is synthesized)
aaaaagtgcctgggttagccaagagagacagagaacactggatagacttcgaacatttaaacagaggtatcctgggcaagtcatacttaaatcaaccagattacgactagctcatgcaag

SEQ ID NO: 432345 - DNA, 120 bp, Artificial Sequence
  ENSG00000152409_22 (sequence is synthesized)
aagaaaaggtgcagcaagtcctgttctccaagaggatcattgtgactctttaccaagtgtgttacaggtagaagagaaaactgaagaggtgggagaaggaagagtcaagcgtgggccatc

SEQ ID NO: 432346 - DNA, 120 bp, Artificial Sequence
  ENSG00000152409_23 (sequence is synthesized)
acagacaacagaaccccagagccttgtgcaacttgaagatacttcattaacacaacttgaagccacctcattacctctcagtggtgttacctctgaactgcctcccactatatctcttcc

SEQ ID NO: 432347 - DNA, 120 bp, Artificial Sequence
  ENSG00000152409_24 (sequence is synthesized)
acttttgaataacaacctcgaaccatgttctgttaccataaatccactcccatcccctcttcctccaacaccaccacctcccccacctcctccccctcccccaccaccaccacctctgcc

SEQ ID NO: 432348 - DNA, 120 bp, Artificial Sequence
  ENSG00000152409_25 (sequence is synthesized)
tgttgctaaggacagtggcccagagacactggagaaagatctgcctagaaaggaggggaatgagaagaggatcccaaagtcagccagtgccccctcagcacacctctttgacagcagcca

SEQ ID NO: 432349 - DNA, 120 bp, Artificial Sequence
  ENSG00000152409_26 (sequence is synthesized)
gctggtcagtgcacggaagaagctcagaaagactgctgaaggtttgcagaggaggagagtgagctcacccatggatgaggtgctagcctccttgaagcgtggtagttttcatctgaaaaa

SEQ ID NO: 432350 - DNA, 120 bp, Artificial Sequence
  ENSG00000152409_27 (sequence is synthesized)
ggttgaacagcgaactctgcctccttttcctgatgaagatgatagtaataatatcttggcacaaataaggaaaggggtaaaattgaagaaggtacagaaggatgttttgagagaatcctt

SEQ ID NO: 432351 - DNA, 120 bp, Artificial Sequence
  ENSG00000152409_28 (sequence is synthesized)
cacacttctacccgatacagaccctctaacacggagcatccatgaagctcttagaagaattaaagaagcatccccagagtcagaggacgaagaggaggctttaccttgcacagactggga

SEQ ID NO: 432352 - DNA, 120 bp, Artificial Sequence
  ENSG00000152409_29 (sequence is synthesized)
gaactaacaagtgacataacagaagaaaaatatcattcaagattggttctgattcttttggaaaatgacagtttaagcacttggttcctcagttggataacattagatccaaagttcatt

SEQ ID NO: 432353 - DNA, 120 bp, Artificial Sequence
  ENSG00000152409_30 (sequence is synthesized)
ggttcagtggtgtgaagaaaggaagcacaattggcaggttatcactttccagtcgttccaatagatgatggttaacatgaattttacatgtgcaatgttcctgactgcaatgaagaaaag

SEQ ID NO: 432354 - DNA, 120 bp, Artificial Sequence
  ENSG00000152409_31 (sequence is synthesized)
gccttctggagatttctgttttttaagcacattctccttccatccacatatttacatccttgtaatggccagttaagctagggcttgctgtaagttggaagaacactgggttgacagaga

SEQ ID NO: 432355 - DNA, 120 bp, Artificial Sequence
  ENSG00000152409_32 (sequence is synthesized)
tctactgtgagctgtattgggactgctttgagaaccatctttcaatgcactgaaaagtcatctgaaaaaatagcttcttccatatcagcttatattaaatactgtgacactctgagaaag

SEQ ID NO: 432356 - DNA, 120 bp, Artificial Sequence
  ENSG00000152409_33 (sequence is synthesized)
tttatcatcatgatagctgtaagtcaggcattaaaatcaaatggaaatacacctaaaatgtccgcattactcatttccaaaggatttttcataaagatgttcagcaacatctgaaaagct

SEQ ID NO: 432357 - DNA, 120 bp, Artificial Sequence
  ENSG00000152409_34 (sequence is synthesized)
gcatttatggagatacatctattaatatgttcacaacatgatacatttaacatggcatatttttaggagtcttatactttgtaaggttttgaagtttccgtgcttttaaatcactcttca

SEQ ID NO: 432358 - DNA, 120 bp, Artificial Sequence
  ENSG00000152409_35 (sequence is synthesized)
tatttcttgaatttataatagtttgaattttatgtgcatccttgtttatggaaggcagtactttgataatatttcaaattatttttattttgtttgaattattgcttgattgctatgact

SEQ ID NO: 432359 - DNA, 120 bp, Artificial Sequence
  ENSG00000152409_36 (sequence is synthesized)
gacatgactttcctattgagaatcaaaaatcaagattcaatcatagggatgcagatcttaactcttttcacaaattaccattttaagtttttatttttatgctccacagtgaaaagcatg

SEQ ID NO: 432360 - DNA, 120 bp, Artificial Sequence
  ENSG00000152409_37 (sequence is synthesized)
atagtcactaaaattttaaacttatacacagctttaggtgctgattttggctgtgatggagtcctgaaggacacatttatatgttccagattttcagcaggattgttgtgggcttgaata

SEQ ID NO: 432361 - DNA, 120 bp, Artificial Sequence
  ENSG00000152409_38 (sequence is synthesized)
catgtagatcattggactcagtgtgcagtaccctgtacatataattctgcataagacagatcttggcctttctgtggagggagttaagaactaaaataccaaaaatcactttatttcttt

SEQ ID NO: 432362 - DNA, 120 bp, Artificial Sequence
  ENSG00000152409_39 (sequence is synthesized)
taagacaattatctggcctaaacccagaaagcagtactggagcaaaagcccagtgtatatgaattggtattcctagagaaaaaaagaaatgctcacacctttgttattttaaagtgtttt

SEQ ID NO: 432363 - DNA, 120 bp, Artificial Sequence
  ENSG00000152409_40 (sequence is synthesized)
cttgaaaataattagggagaaaattttctggcaacaggttatgtaagacaacaactttttttattatttcaaaacaaaacaggcacatgccaccatgccccagctaatttttatattttt

SEQ ID NO: 432364 - DNA, 120 bp, Artificial Sequence
  ENSG00000152409_41 (sequence is synthesized)
tcttgaactcctggactcaagcaatctgccagcctcggcctgctaaagtgctaggattataggcgtgagcctctgtgcccagcctgacaaaatcttttatttatttaaatgttagtaata

SEQ ID NO: 432365 - DNA, 120 bp, Artificial Sequence
  ENSG00000152409_42 (sequence is synthesized)
tgacaaaatcttttatttatttaaatgttagtaatacgtttattgatgagactaggagcttctctgcagcatcttcataatacattggttttagttcccacactattcccacatcttatc

SEQ ID NO: 432366 - DNA, 120 bp, Artificial Sequence
  ENSG00000152409_43 (sequence is synthesized)
tgggaagattagaaatacagatgtaatatggaagcttcaacagcatgggggtggtgatagtgtcctatttgcccttggtaaaatattaaagcgtatttcttaacccaaagagtgattggt

SEQ ID NO: 432367 - DNA, 120 bp, Artificial Sequence
  ENSG00000152409_44 (sequence is synthesized)
tatatgaatatatttgaaaaagttaaagcaaatttgcaaacctttacaaaatcatgtatcaattttatgctatccagtttttacgtacccatgtgtcaacatttcatatatccagttctt

SEQ ID NO: 432368 - DNA, 120 bp, Artificial Sequence
  ENSG00000152409_45 (sequence is synthesized)
tgggtgctggttcactttttttcatttattcaaattcagaaaaatacggacggatctaatgttaaattaaccagaaaccctggaacattcatatcttgagagggaatttgctactctttt

SEQ ID NO: 432369 - DNA, 120 bp, Artificial Sequence
  ENSG00000152409_46 (sequence is synthesized)
acttttgggatttcattataaaataggctcattttatacatatgtcctgtggtctgtcttccagagtgtgctgtaatcataagtctctagcaaagagtggagggtggagggtgtgtagaa

SEQ ID NO: 432370 - DNA, 120 bp, Artificial Sequence
  ENSG00000152409_47 (sequence is synthesized)
ctccactcagcctcatggatacatctacaagtctctcaacccatcctgttacagttctccatgagagtcacctcacacttggaaaagaaggaggttaaagcagagtattgttggcagcca

SEQ ID NO: 432371 - DNA, 120 bp, Artificial Sequence
  ENSG00000152409_48 (sequence is synthesized)
gctatgcccatcctcttgtaaataactttccaacacacccatttccttgccttaaggtgcaggttcctacttctacaaaatttcaaatgattgcaggtcaaaaacctttggagttactca

SEQ ID NO: 432372 - DNA, 120 bp, Artificial Sequence
  ENSG00000152409_49 (sequence is synthesized)
caaataataataaaatttcaaataactagggtctacttgtccatcaagatgacattaccagtggaacccacctgttaattttaaagtagcttcagaacccaacaaaaattatgtaagcct

SEQ ID NO: 432373 - DNA, 120 bp, Artificial Sequence
  ENSG00000152409_50 (sequence is synthesized)
ggttaaatgtccttttttcttcttgcctctaataaaatcaggatcttcggccttgatactaaatatgtgtatatttagttatgatggtacttgtagatgctcacatttccagttccaaac

SEQ ID NO: 432374 - DNA, 120 bp, Artificial Sequence
  ENSG00000152409_51 (sequence is synthesized)
tcgcccgtactttttatgtgcttcaaaatattggacacatttctgttaatatatgatttctgtatccacaaaccgctgtttgcttatgctgagtcaatttagaagttaatttccaatcta

SEQ ID NO: 432375 - DNA, 120 bp, Artificial Sequence
  ENSG00000152409_52 (sequence is synthesized)
gtctcaactgcaatgcatttaaaataggtaaaacaagtaaatgagtttgggacattttgagattaatgttactgcccacttgactgtcaatttcaaatggctcctaatgcaaccaaaatt

SEQ ID NO: 432376 - DNA, 120 bp, Artificial Sequence
  ENSG00000152409_53 (sequence is synthesized)
ataaccaatgtagcatgtgtaggaaaggtatttttaattatttaaaatcattgtgtatattacagcagtatgaggaatgcctggctaaagaggattttttaaaagatgaagaatggtttt

SEQ ID NO: 432377 - DNA, 120 bp, Artificial Sequence
  ENSG00000152409_54 (sequence is synthesized)
gcttgtattatataggcttactgagtttgtgagcagcataaaaacaatcattccttaattcttcattgtggaactgaaatatttctgtaatgcattttttaaaaggagactcctagacac

SEQ ID NO: 432378 - DNA, 120 bp, Artificial Sequence
  ENSG00000152409_55 (sequence is synthesized)
agctgtaatagtgggaatagaaatgtagagcttttctcataacacaaaaccagaaaataattttcagcactttgacttactctatgtaataaggaaaaaaattgtttccacaaagttgaa

SEQ ID NO: 432379 - DNA, 120 bp, Artificial Sequence
  ENSG00000152409_56 (sequence is synthesized)
ctatgtagtaatatttggtaacatatggcatggccactttatatcacagaatgtgtgtcaagttgcaaagcatacttgggccatagtagacactaagaattaaaactcttaaatcagtga

SEQ ID NO: 432380 - DNA, 120 bp, Artificial Sequence
  ENSG00000152409_57 (sequence is synthesized)
aacaaaaactaatgggcagcattctctctgtttggaatgggatcagtatacaattaatacaatttaattttacacattccctaagacaccatttttaagttacagtcacatgagtgtttg

SEQ ID NO: 432381 - DNA, 120 bp, Artificial Sequence
  ENSG00000152409_58 (sequence is synthesized)
tataaatttaagtcaatgcttttagcctaggcaaagctaaatacaaggtttttggggttttcttttttcagctttattattgaagtattacaaacttaacatcagataccaatgtgtaaa

SEQ ID NO: 432382 - DNA, 120 bp, Artificial Sequence
  ENSG00000152409_59 (sequence is synthesized)
aagtactattgggtccttaagggctctatcagggagttgaaatttcatacgctttaccaggttacttgtaaaaaatgaacagctgtaagacatttcaaaaccattgcagacacattgtta

SEQ ID NO: 432383 - DNA, 120 bp, Artificial Sequence
  ENSG00000152409_60 (sequence is synthesized)
aaatgcagccatttgataatgaaagcagaaaccttaagttttacctaattattgcactaaatgtaaatgataacataaaattaagtgtgcattttaaacagattctatttcccacttact

SEQ ID NO: 432384 - DNA, 120 bp, Artificial Sequence
  ENSG00000152409_61 (sequence is synthesized)
gcttagcatagaaaaagagctatggttagaggagtgaccagcaagatttatttcagatggaaaaggggtgagaaagtggaagcaccttactgttagagcatgttgcatctatttagtgct

SEQ ID NO: 432385 - DNA, 120 bp, Artificial Sequence
  ENSG00000152409_62 (sequence is synthesized)
actgaacaattcagtagttatttctgaactttgctgcaaagtgctctttagttaaagcacattaagaagggtcactgcttaattgctttgtaaaatgaagcaatggtattttttatccga

SEQ ID NO: 432386 - DNA, 120 bp, Artificial Sequence
  ENSG00000152409_63 (sequence is synthesized)
tatagtgtaatttaaaagttttcctacaaagtgagtttatattgttgcctaaactatgttatgtaagcaaagggtttggaaaggcgggagggagtctagattcggcgagagtgtgcgttt

SEQ ID NO: 432387 - DNA, 120 bp, Artificial Sequence
  ENSG00000152409_64 (sequence is synthesized)
gtgtgtgtgaatgtatgaaaagtttccccattgggttattcttaagatgtgtttattgtaaagttttctacgttttgcccacagtaaatgtacaacttcgcaattgtaggatttaattga

SEQ ID NO: 432388 - DNA, 120 bp, Artificial Sequence
  ENSG00000152409_65 (sequence is synthesized)
ttgaattccaaatttatactgtctcttcccttctgcagagacattatgccactgtaaggtgcatgtacagaaaatacctctgaggttgacttgttaaataactgatgaatgttatttcac

SEQ ID NO: 432389 - DNA, 120 bp, Artificial Sequence
  ENSG00000152409_66 (sequence is synthesized)
actgaatctcaaagcagtcatttgttttgcgggttaggggaaagttttgttttttgctggtgttttttgttgtttttaattaggcacactaagagtggctaaatttgggggaattggtgg

SEQ ID NO: 432390 - DNA, 120 bp, Artificial Sequence
  ENSG00000152409_67 (sequence is synthesized)
ataggaaagaccttgaaaagtgatgtgtagatgaaaacacaaggtatggatgttggttacagagttcagttttaacaagggaaatttggggattttttttttttttacttgcatgttcta

SEQ ID NO: 432391 - DNA, 120 bp, Artificial Sequence
  ENSG00000152409_68 (sequence is synthesized)
tgggtagctatcaaagggtgtaacaaattattccagcttttcccaatactaattatattggttttaaaaagtctgcataatcactaggtggcattttcccttcatttgtgaaccaagagg

SEQ ID NO: 432392 - DNA, 120 bp, Artificial Sequence
  ENSG00000152409_69 (sequence is synthesized)
ggtaaatgatgctacccatacagtgacttctgagttctttaactttgacagaatctccattgtttcattgaatttctcattgtattatatgtctttccaagtgtgcaaactataatatgt

SEQ ID NO: 432393 - DNA, 120 bp, Artificial Sequence
  ENSG00000152409_70 (sequence is synthesized)
agttaatgaaaaatggaaggctgcagattattttgcatgaataattaattgcccattagggctaaggagactgacatgatttttatcggttctgggtaaatgaaaattttaatggaaaac

SEQ ID NO: 432394 - DNA, 120 bp, Artificial Sequence
  ENSG00000152409_71 (sequence is synthesized)
tcattcaccatttactagctttgtgcaatattataaaaggtagaagcaaaacactagcacattgtgctttgcttggcttgtaaggatggctttagtaccattacattaaatggacagtgt

SEQ ID NO: 432395 - DNA, 120 bp, Artificial Sequence
  ENSG00000152409_72 (sequence is synthesized)
gcacagtgtattgtaaatgccaactcttgcaaatttacaatacttaaatatgttcaattaacatcctaaagtattaaaagtacagaggaaaaactaagcaagcatttatagcaataccat

SEQ ID NO: 432396 - DNA, 120 bp, Artificial Sequence
  ENSG00000152409_73 (sequence is synthesized)
gaaatctccagtaatcgttttgactgttgccttttgctctttagtgcagcttttctgcattgtaattgtattgctttgtatttcatgttttttacactcatgacttcagagttaagtact

SEQ ID NO: 432397 - DNA, 120 bp, Artificial Sequence
  ENSG00000152409_74 (sequence is synthesized)
tgtacaccaagtattgcaatcacctttctcttgttgtacatgcaatgtaacaacctacagttttggtgcttttaacaatattcctctttttctttaataaaggatatttatttgaattaa

SEQ ID NO: 432398 - DNA, 120 bp, Artificial Sequence
  ENSG00000152409_75 (sequence is synthesized)
gtacagtttgaaatcttgaagtgtgaagagttactattgacagcgcaactagaaagcatcaaaagacttatatcagaaaataattttcagcactttgacttactctatgtaataaggaaa

SEQ ID NO: 432399 - DNA, 120 bp, Artificial Sequence
  ENSG00000152413_0 (sequence is synthesized)
actctgccgccgcgctagcttcacgccggcggcgctgaccgggaaagcagcaccctcttctctgccagccggccggccggcggaggcggaggcagcggcaggcttcaggccgccggggct

SEQ ID NO: 432400 - DNA, 120 bp, Artificial Sequence
  ENSG00000152413_1 (sequence is synthesized)
ggcgctgctctgcccggcggtagccggaggcgggcgctgatggaagtgtgaagaggcggcggcggggcccggggaatgtgaggcggcgcgtggcggcggcgcggagcgtgagagacgagg

SEQ ID NO: 432401 - DNA, 120 bp, Artificial Sequence
  ENSG00000152413_2 (sequence is synthesized)
agtaggggtgggggcgctggagcggcggctgcgcttcggcttcgagcccagctctcctggccccaacgcgggcttagcctcccgccttggctcgggcaggcgcccgtcgacccttcggcc

SEQ ID NO: 432402 - DNA, 120 bp, Artificial Sequence
  ENSG00000152413_3 (sequence is synthesized)
cctttcgcccgccctggagctgggggcagggtgccagtggaagcgtggggcttggctctgtgattcattcattctccgccgacgggagcctcagacccgctgtgctctgaagagaggagg

SEQ ID NO: 432403 - DNA, 120 bp, Artificial Sequence
  ENSG00000152413_4 (sequence is synthesized)
gaagagggggcagccgcgaatgaagggccgggcaccagccgggctccattgtgctcggcggcggggggcgggaaggggctgagggaggtgggatcgggtcccctcctccagctctccggc

SEQ ID NO: 432404 - DNA, 120 bp, Artificial Sequence
  ENSG00000152413_5 (sequence is synthesized)
gtgcgctgcgcccccagcctgctgccagcctggaaatggctccgtttattctcttcgggagaatgaatcgatcctgcctagccttctcttcgtcctccccacctcttctctgctccgagt

SEQ ID NO: 432405 - DNA, 120 bp, Artificial Sequence
  ENSG00000152413_6 (sequence is synthesized)
cttaggaggagaaacatttaaaaagacagattccaatgtggagtgccgtgcaggttgcgagctgccgggtttgcacttcgaggagattttcctgtgtagtttttttcctaatgtgagcgc

SEQ ID NO: 432406 - DNA, 120 bp, Artificial Sequence
  ENSG00000152413_7 (sequence is synthesized)
agggaagccgtggcattactgcttttgggatttttattcacgtgcacgtcgcgtttggttgctcgctccacccccggagacctggtgtggtggagaaatttgaacccgcagccttagctc

SEQ ID NO: 432407 - DNA, 120 bp, Artificial Sequence
  ENSG00000152413_8 (sequence is synthesized)
cgaaaaggccgagttacctggctctccctgagtgtcgaggaggacatgagtgaaatgaccagcgaactcattttttataggactcggtgaagccggattctgcatttccctacttgtaga

SEQ ID NO: 432408 - DNA, 120 bp, Artificial Sequence
  ENSG00000152413_9 (sequence is synthesized)
ctcattttgtggaatagagttgatcgctgtctcctccgcaaagcattttaactcgaataagcaaatgccgcctctgtttgaacgttttggtatttacaagagagaaatcattttacctaa

SEQ ID NO: 432409 - DNA, 120 bp, Artificial Sequence
  ENSG00000152413_10 (sequence is synthesized)
gagaactaattgaattggcagcatccttgaaatacctccggacaaggatctgggggtgggggtggaaaagcaactgcgaaatagcagacggagaaattcctttggaagttattccgtagc

SEQ ID NO: 432410 - DNA, 120 bp, Artificial Sequence
  ENSG00000152413_11 (sequence is synthesized)
ataagagctgaaacttcagagcaagttttcattgggcaaaatgggggaacaacctatcttcagcactcgagctcatgtcttccaaattgacccaaacacaaagaagaactgggtacccac

SEQ ID NO: 432411 - DNA, 120 bp, Artificial Sequence
  ENSG00000152413_12 (sequence is synthesized)
cagcaagcatgcagttactgtgtcttatttctatgacagcacaagaaatgtgtataggataatcagtttagatggctcaaaggcaataataaatagtaccatcaccccaaacatgacatt

SEQ ID NO: 432412 - DNA, 120 bp, Artificial Sequence
  ENSG00000152413_13 (sequence is synthesized)
tactaaaacatctcagaagtttggccagtgggctgatagccgggcaaacaccgtttatggattgggattctcctctgagcatcatctttcgaaatttgcagaaaagtttcaggaatttaa

SEQ ID NO: 432413 - DNA, 120 bp, Artificial Sequence
  ENSG00000152413_14 (sequence is synthesized)
agaagctgctcgactagcaaaggaaaaatcacaagagaagatggaacttaccagtacaccttcacaggaatccgcaggcggggatcttcagtctcctttaacaccggaaagtatcaacgg

SEQ ID NO: 432414 - DNA, 120 bp, Artificial Sequence
  ENSG00000152413_15 (sequence is synthesized)
gacagatgatgaaagaacacctgatgtgacacagaactcagagccaagggctgaaccaactcagaatgcattgccattttcacatagttcagcaatcagcaaacattgggaggctgaact

SEQ ID NO: 432415 - DNA, 120 bp, Artificial Sequence
  ENSG00000152413_16 (sequence is synthesized)
ggctaccctcaaaggaaataatgccaaactcactgcagccctgctggagtccactgccaatgtgaaacaatggaaacagcaacttgctgcctatcaagaggaagcagaacgtctgcacaa

SEQ ID NO: 432416 - DNA, 120 bp, Artificial Sequence
  ENSG00000152413_17 (sequence is synthesized)
gcgggtgactgaacttgaatgtgttagtagccaagcaaatgcagtacatactcataagacagaattaaatcagacaatacaagaactggaagagacactgaaactgaaggaagaggaaat

SEQ ID NO: 432417 - DNA, 120 bp, Artificial Sequence
  ENSG00000152413_18 (sequence is synthesized)
agaaaggttaaaacaagaaattgataatgccagagaactacaagaacagagggattctttgactcagaaactacaggaagtagaaattcggaacaaagacctggagggacaactgtctga

SEQ ID NO: 432418 - DNA, 120 bp, Artificial Sequence
  ENSG00000152413_19 (sequence is synthesized)
cttagagcaacgtctggagaaaagtcagaatgaacaagaagcttttcgcaataacctgaagacactcttagaaattctggatggaaagatatttgaactaacagaattacgagataactt

SEQ ID NO: 432419 - DNA, 120 bp, Artificial Sequence
  ENSG00000152413_20 (sequence is synthesized)
ggccaagctactagaatgcagctaaggaaagtgaaatttcagtgccaattaattaaaagatacactgtctctcttcataggactgtttaggctctgcatcaagattgcacaaaaaaaaaa

SEQ ID NO: 432420 - DNA, 120 bp, Artificial Sequence
  ENSG00000152413_21 (sequence is synthesized)
aaaaaaaaattgaatatcactcctccaggaggaggatcttttgaaattggaattgtatatttcactgtaaattttagaatccagcttgtagctagttggggaaaaaagatgaaaaacttg

SEQ ID NO: 432421 - DNA, 120 bp, Artificial Sequence
  ENSG00000152413_22 (sequence is synthesized)
aactacaaattacctccatgtatattattggccatagttaactagaaagttataaatagacacttaatgcaatcttttttcctgatattagccaatgggagaattaacaatgtctaggtc

SEQ ID NO: 432422 - DNA, 120 bp, Artificial Sequence
  ENSG00000152413_23 (sequence is synthesized)
acatcccctttttgtgttcaacacagtgaagattatctgctttttaaattaatttatttacgatatctagagctgtgttttgtgcaaaaacttagtgatgaaagcctgtcttttgttgta

SEQ ID NO: 432423 - DNA, 120 bp, Artificial Sequence
  ENSG00000152413_24 (sequence is synthesized)
aagcagtgccattaccaattaattcttgccaggagtgagagagagctgtatctttaattgaaatatactataactgggtgtatagagttcttcccttttttgtgctggaagatatttcac

SEQ ID NO: 432424 - DNA, 120 bp, Artificial Sequence
  ENSG00000152413_25 (sequence is synthesized)
tctggtgactactctggtacactctggtgttctctaatcttgtctgttgtatagtttacttttccatattgattccatgtatttatgagaagatattgtctcccattttattacacattt

SEQ ID NO: 432425 - DNA, 120 bp, Artificial Sequence
  ENSG00000152413_26 (sequence is synthesized)
taaagccaactaacgaaggcagctgagtccctcagaaatttttctttttaagtttctaataaatttgacacacagtactgaaatacagcagcccgtcattgacaggctggtctagcaatg

SEQ ID NO: 432426 - DNA, 120 bp, Artificial Sequence
  ENSG00000152413_27 (sequence is synthesized)
ttaagtatatttacagaatatgcagttacatttatttatatattttgcaagaaatcttttctgaatgatcaatgcatttcaatttacgaataataatggttattggggaactgtttatta

SEQ ID NO: 432427 - DNA, 120 bp, Artificial Sequence
  ENSG00000152413_28 (sequence is synthesized)
tagataattttaaggtgtatagctattttaaagggggtccatttacatcaaacagctgatcagaggactctatctaaattgtgatcgtggcagatagagatggagtcatgtactctatct

SEQ ID NO: 432428 - DNA, 120 bp, Artificial Sequence
  ENSG00000152413_29 (sequence is synthesized)
ggctctacacatcaatcacatcttgattcaaacctcacaaggcaatattctgaattgttaactaggtatttcaaaacaggaattaaattcaataggctcttctcagtgaacaggttttaa

SEQ ID NO: 432429 - DNA, 120 bp, Artificial Sequence
  ENSG00000152413_30 (sequence is synthesized)
tgttgttttgatgtaattttaaaagacttttagcaaacatgcatttctttatatgatatatttcttttacgaagctattttaaaagtaagccaagtgctgtctagtctgcttataaagta

SEQ ID NO: 432430 - DNA, 120 bp, Artificial Sequence
  ENSG00000152413_31 (sequence is synthesized)
ggaattgcatcagagtacatatattcttgctgtacaatgcctgtgatgttgaggagggttcttttttaaagtgtatgcttgagtaactgactctatggagtctataaatgcactgacttc

SEQ ID NO: 432431 - DNA, 120 bp, Artificial Sequence
  ENSG00000152413_32 (sequence is synthesized)
ttgtttgtaccccaaaatgatcgaattgttaagtacaaaattaagctaattaaccaatttgtaaccattttttcactcataaacagctactcaatactagacaattttgttttttatgta

SEQ ID NO: 432432 - DNA, 120 bp, Artificial Sequence
  ENSG00000152413_33 (sequence is synthesized)
tgtgtatgtacgtaaatacatacatattaatttacattagagtgaaaaataaatggtttgtttctgaagttagtttcttaagtgagttttcaggtgtctctgaaaaatttataacaatca

SEQ ID NO: 432433 - DNA, 120 bp, Artificial Sequence
  ENSG00000152413_34 (sequence is synthesized)
tgtattatatgtgctgtaacatcatgtacgttacctccatctattttaggatattttcctcacctatatattatagggagaataatttagatacacatgctcagagctgagatatttctc

SEQ ID NO: 432434 - DNA, 120 bp, Artificial Sequence
  ENSG00000152413_35 (sequence is synthesized)
tgataaatcaggtaacaaaatgtatttgattgatggaattttgaagtaaatgtgtttttatccatcagtttctgagtaacaaagagcaccaagttttaatttaaataggagatttaacac

SEQ ID NO: 432435 - DNA, 120 bp, Artificial Sequence
  ENSG00000152413_36 (sequence is synthesized)
tagggatcagggagtttagtatgaagagttaaaaaaatttaaaaaacagtgtaagctgttgaaatggcaagtgaattattttaatgatgtaataaaatatttttaaattttgacatagtg

SEQ ID NO: 432436 - DNA, 120 bp, Artificial Sequence
  ENSG00000152413_37 (sequence is synthesized)
atcatttaatgaaaaaactcaccaaaatgtctccatttgaattgtattgataatgtgggacatatgtgtgattcaatatatacatatacccatatgtatatacagaaaattatttttaat

SEQ ID NO: 432437 - DNA, 120 bp, Artificial Sequence
  ENSG00000152413_38 (sequence is synthesized)
actttcctactgataatgaaatttaaaattggaaattttgtgagtgtttttcttgtccaatagagcctaattgtttccttttttagtgatttaacaatctcttgagggctgcacctttaa

SEQ ID NO: 432438 - DNA, 120 bp, Artificial Sequence
  ENSG00000152413_39 (sequence is synthesized)
attcccagattgtcaatagacatgtacagtatatgggataaggtggacacaagtgcacatataaataaaatcttcttaagacttttaactattcatttacagtaggagagtatgtagaaa

SEQ ID NO: 432439 - DNA, 120 bp, Artificial Sequence
  ENSG00000152413_40 (sequence is synthesized)
tcatcatccacaagtcataattaggttgtgtgcctactgtagttttttccatttctgtattatataaacatttgcatattaaaatttgatttttcccagagacaagtattatatactgta

SEQ ID NO: 432440 - DNA, 120 bp, Artificial Sequence
  ENSG00000152413_41 (sequence is synthesized)
tctatatttaaatcaaactgtggtaatatatttctcagaaaataatgttggggactatagcctgaacatgtggacttgaagcgacatggaggaggaggttgatcccattgtgtataagtt

SEQ ID NO: 432441 - DNA, 120 bp, Artificial Sequence
  ENSG00000152413_42 (sequence is synthesized)
acaaaaattgaaaaaaaaaaagaaaagcaaaaatacagtttttattttgaaatacatttgttctctggagaatgtactttatctttttttcctccagtcttttacagatatttaaaagca

SEQ ID NO: 432442 - DNA, 120 bp, Artificial Sequence
  ENSG00000152413_43 (sequence is synthesized)
ttcctccagtcttttacagatatttaaaagcatttaaatgatgacagcatttacttaaatctttcaggtgctactggattttgcattagtgtgttatgttgtgaaatcctaactttgaca

SEQ ID NO: 432443 - DNA, 120 bp, Artificial Sequence
  ENSG00000152413_44 (sequence is synthesized)
taaaaggttttataagtattcccctgcctggaaaattagtttttgttctcctctctctctctttctcttttccactttctttctgcagactaaaacatgctcacgaagttgcatctctcc

SEQ ID NO: 432444 - DNA, 120 bp, Artificial Sequence
  ENSG00000152413_45 (sequence is synthesized)
ttgtctctatagaagatctccagcaccatcatagatttgatgttctgctgtcattgaactgttgggaagcagttagaggaaaagctcactttttttttcaggtggaaataaaaggaacac

SEQ ID NO: 432445 - DNA, 120 bp, Artificial Sequence
  ENSG00000152413_46 (sequence is synthesized)
tcaaaattaagccaacaccaccactacctttaaaaactagtttatttgccctgttaaaattaaatgtattctttaacatgtgggctacagtctcccatgtttttatttaactgaagcata

SEQ ID NO: 432446 - DNA, 120 bp, Artificial Sequence
  ENSG00000152413_47 (sequence is synthesized)
tacacttcggtcatttatctccttgtggtcctgattttgtcagtactggaatgggaggcaggtcggggaaagtttgtttgatggcagtggattcttattgttgttttaaccattgcattt

SEQ ID NO: 432447 - DNA, 120 bp, Artificial Sequence
  ENSG00000152413_48 (sequence is synthesized)
tcattatagggattctctactgtcattaatcacttaatttaagttatcctaacctttctatgactaagccatgtaaatgattatttttcccttttcctagttttatatctttgaagaatc

SEQ ID NO: 432448 - DNA, 120 bp, Artificial Sequence
  ENSG00000152413_49 (sequence is synthesized)
tattcactctaccttgagtgtcttaatatttctcaaaattaatttttatatatttattcagaatatactattcacttatttggggctatgtatttagcaagaaactctttaaagttgaaa

SEQ ID NO: 432449 - DNA, 120 bp, Artificial Sequence
  ENSG00000152422_0 (sequence is synthesized)
cggaagtagctgatactctcattggttgcaaaaccttgatctgtgaaagcgggcgttttggaagataccggaagtagagtcacggagaggtattaagaaatggagagaaaaataagcaga

SEQ ID NO: 432450 - DNA, 120 bp, Artificial Sequence
  ENSG00000152422_1 (sequence is synthesized)
atccaccttgtttctgaacccagtataactcattttctacaagtatcttgggagaaaacactggaatctggttttgttattacacttactgatggtcattcagcatggactgggacagtt

SEQ ID NO: 432451 - DNA, 120 bp, Artificial Sequence
  ENSG00000152422_2 (sequence is synthesized)
tctgaatcagagatttcccaagaagctgatgacatggcaatggaaaaagggaaatatgttggtgaactgagaaaagcattgttgtcaggagcaggaccagctgatgtatacacgtttaat

SEQ ID NO: 432452 - DNA, 120 bp, Artificial Sequence
  ENSG00000152422_3 (sequence is synthesized)
ttttctaaagagtcttgttatttcttctttgagaaaaacctgaaagatgtctcattcagacttggttccttcaacctagagaaagttgaaaacccagctgaagtcattagagaacttatt

SEQ ID NO: 432453 - DNA, 120 bp, Artificial Sequence
  ENSG00000152422_4 (sequence is synthesized)
tgttattgcttggacaccattgcagaaaatcaagccaaaaatgagcacctgcagaaagaaaatgaaaggcttctgagagattggaatgatgttcaaggacgatttgaaaaatgtgtgagt

SEQ ID NO: 432454 - DNA, 120 bp, Artificial Sequence
  ENSG00000152422_5 (sequence is synthesized)
gctaaggaagctttggagactgatctttataagcggtttattctggtgttgaatgagaagaaaacaaaaatcagaagtttgcataataaattattaaatgcagctcaagaacgagaaaag

SEQ ID NO: 432455 - DNA, 120 bp, Artificial Sequence
  ENSG00000152422_6 (sequence is synthesized)
aaactgcaatctgttctgaaatgactgctgaccgagatccagtctatgatgagagtactgatgaggaaagtgaaaaccaaactgatctctctgggttggcttcagctgctgtaagtaaag

SEQ ID NO: 432456 - DNA, 120 bp, Artificial Sequence
  ENSG00000152422_7 (sequence is synthesized)
atgattccattatttcaagtcttgatgtcactgatattgcaccaagtagaaaaaggagacagcgaatgcaaagaaatcttgggacagaacctaaaatggctcctcaggagaatcagcttc

SEQ ID NO: 432457 - DNA, 120 bp, Artificial Sequence
  ENSG00000152422_8 (sequence is synthesized)
aagaaaaggaaaattctaggcctgattcttcactacctgagacgtctaaaaaggagcacatctcagctgaaaacatgtctttagaaactctgagaaacagcagcccagaagacctctttg

SEQ ID NO: 432458 - DNA, 120 bp, Artificial Sequence
  ENSG00000152422_9 (sequence is synthesized)
atgagatttaacagtctcaaaaaatactttgatgttcactagactatgttttctattcatttctttaaaatgaaaaaggagaatttcaagtcagcagccgctattaccgtatcttacaat

SEQ ID NO: 432459 - DNA, 120 bp, Artificial Sequence
  ENSG00000152422_10 (sequence is synthesized)
ttaattacatacacagtgaattgaaaccattgtgcaaaatggattacacatgtatacaaagatacgatttgatgatgacactggcacattattctaaactattcattcagcatgcctata

SEQ ID NO: 432460 - DNA, 120 bp, Artificial Sequence
  ENSG00000152422_11 (sequence is synthesized)
attacataaattgtatgagactttttgttgcaaaggacacatttatcatattcattcacacatattatatgtgatagctgtccaacatcctgtctgggaagattttgaaaacaggacaaa

SEQ ID NO: 432461 - DNA, 120 bp, Artificial Sequence
  ENSG00000152422_12 (sequence is synthesized)
gaaaacatcattttaaaatgtcttcagctttttttgaatagacgtattcaaacatattctgaacattgatgtttgaacattttaatttgtgtgatgatgtagaaaatataattttagttt

SEQ ID NO: 432462 - DNA, 120 bp, Artificial Sequence
  ENSG00000152422_13 (sequence is synthesized)
cgggatttagatcacgtcccgcaggccggcggaagtagctgatactctcattggttgcaaaaccttgatctgtgaaagcgggcgttttggaagataccggaagtagagtcacggagaggt

SEQ ID NO: 432463 - DNA, 120 bp, Artificial Sequence
  ENSG00000152422_14 (sequence is synthesized)
gatcttaaaaattatgttttcattttgaacgtttttaaagttatttttaagaaaatgtcattttggaattgtaaaatgtttgaatcaatgtattgtttcagtatttggttaatttctatt

SEQ ID NO: 432464 - DNA, 120 bp, Artificial Sequence
  ENSG00000152422_15 (sequence is synthesized)
tttaaagctgaaatgctgagaacgtaagcaaaaatttttttctcatggtttttatagattaattagaaatggcatgtaggatacaaaaaatattggaatccaactagtgttcagtaaagt

SEQ ID NO: 432465 - DNA, 120 bp, Artificial Sequence
  ENSG00000152422_16 (sequence is synthesized)
gtttcaatctaatttactgcttgaaagagacccgtatggcattcaaattagccatttaatttggttatgcttggcattttttttcaagtaaaatgtctccttctcatcatctgtttattt

SEQ ID NO: 432466 - DNA, 120 bp, Artificial Sequence
  ENSG00000152422_17 (sequence is synthesized)
ctatcaagttttggcattgtgtactttattttcactgttttcactctttggttctgattaccctgcatcagtctgtatttcaatttaggtgtgatgagttgcgaagttgaaacacttaat

SEQ ID NO: 432467 - DNA, 120 bp, Artificial Sequence
  ENSG00000152422_18 (sequence is synthesized)
atttcgttacagcaaaacaatgagcatttataaagaatattatcagtttaatccaaaatgaatgttcaaatcatttgtatctttgggtatgtgtatgtatgctctgaaaatttatttttt

SEQ ID NO: 432468 - DNA, 120 bp, Artificial Sequence
  ENSG00000152422_19 (sequence is synthesized)
ggaagcaaaatcagagagaaaagatgctaagctgctgcctttgaataaggaggaacgtgagccaacagatccaagaactgaagctctaggcagtggaaaagccaaggaaactgatcttcc

SEQ ID NO: 432469 - DNA, 120 bp, Artificial Sequence
  ENSG00000152422_20 (sequence is synthesized)
cttcgagcctccggagggagtgtagccctgccaacacctttattttagccccataacagtcatttcagacttgtggcctccagaattttaagagaataaatttttattgtattaagccat

SEQ ID NO: 432470 - DNA, 120 bp, Artificial Sequence
  ENSG00000152430_0 (sequence is synthesized)
acaccagtcttcggaagtcgcccgtcaaccggcttcttctacctcagtaaagccttaaggtcacctcaacctctcgaaacccaccagtcccagaggccgactcttctcaagtggaggaga

SEQ ID NO: 432471 - DNA, 120 bp, Artificial Sequence
  ENSG00000152430_1 (sequence is synthesized)
ggggaaggcgtgcatggagctttgcctgaccgctcgctctctcctccccagccgtctgagagaaggcgagaggggtcccagaaccgagccctcgctccgcacgccccacgcccgccccgc

SEQ ID NO: 432472 - DNA, 120 bp, Artificial Sequence
  ENSG00000152430_2 (sequence is synthesized)
tgtgccgtgcgctctgcccctgagacgccccggctcggagtcccagggccacagccgaaactcgccctcccgcgcccctctccggcttgcagcgcccgcccgcaccgccacctgccaccc

SEQ ID NO: 432473 - DNA, 120 bp, Artificial Sequence
  ENSG00000152430_3 (sequence is synthesized)
gaggcgacgcagtccgcttctccccacccgccaggtggcaggttcagggccggggtccgagcctgcttccctgcagctgccacagccaccctcgccgccagggggcgagagtcccaggca

SEQ ID NO: 432474 - DNA, 120 bp, Artificial Sequence
  ENSG00000152430_4 (sequence is synthesized)
ggacaagcagcgctgctgccttggcgtgaaggtggtttcaaactttaggcttcttttccctaccccgcgtctctgaagagcagagaggaagatggaaaccgagtccgggccgcaaacatc

SEQ ID NO: 432475 - DNA, 120 bp, Artificial Sequence
  ENSG00000152430_5 (sequence is synthesized)
aaaccagatgcaaacagattcattatctccatcccctaatcctgtgtcacctgtgcctttgaataacccaacaagtgccccaagatatggaacagtgatccctaatcgcatctttgtagg

SEQ ID NO: 432476 - DNA, 120 bp, Artificial Sequence
  ENSG00000152430_6 (sequence is synthesized)
aggaattgattttaagacaaacgaaagtgatttaagaaaatttttttcccagtatgggtctgtgaaagaagtgaagattgtaaatgacagagctggagtatccaaagggtatggtttcgt

SEQ ID NO: 432477 - DNA, 120 bp, Artificial Sequence
  ENSG00000152430_7 (sequence is synthesized)
cacttttgaaacacaagaagatgcacaaaaaattttacaagaggctgaaaaacttaattataaggataagaagctgaacattggtccagcaataagaaaacaacaagtagggatccctcg

SEQ ID NO: 432478 - DNA, 120 bp, Artificial Sequence
  ENSG00000152430_8 (sequence is synthesized)
ttctagtataatgccagcagctggaacaatgtatctaacaacttcaactggatatccttatacttaccataatggtgttgcttattttcatactccagaggtaacttcggtcccaccgcc

SEQ ID NO: 432479 - DNA, 120 bp, Artificial Sequence
  ENSG00000152430_9 (sequence is synthesized)
ttggccttcacgttctgtatgtagctcccctgtgatggtagctcagcccatttatcagcaacctgcatatcactaccaggccaccacacagtatttaccaggacagtggcagtggagtgt

SEQ ID NO: 432480 - DNA, 120 bp, Artificial Sequence
  ENSG00000152430_10 (sequence is synthesized)
tcctcagccttctgcctcttctgctccattcttatacctgcaaccttctgaggttatttatcaaccagtggaaattgcacaggatggtggatgtgttcctcctccactgtctctgatgga

SEQ ID NO: 432481 - DNA, 120 bp, Artificial Sequence
  ENSG00000152430_11 (sequence is synthesized)
aacttcagttccagagccttattctgatcatggagttcaagcaacatatcaccaggtttatgctccaagtgccatcactatgcctgcgcctgtgatgcagcctgagccaattaaaacagt

SEQ ID NO: 432482 - DNA, 120 bp, Artificial Sequence
  ENSG00000152430_12 (sequence is synthesized)
gtggagcattcattattaagacaattgggcagctctattccagctcaactgatttcttgtccaatgatccttgcgtggccgagatccagcttcaacgaaccagctagaagctgcccgttg

SEQ ID NO: 432483 - DNA, 120 bp, Artificial Sequence
  ENSG00000152430_13 (sequence is synthesized)
gttaatacctcaccatactcagttattccactataagctgtctaaatttgatgaaatttgctttttcagctgttctacaaaattatttaggtagatgtggcatgttggttttttatgtgc

SEQ ID NO: 432484 - DNA, 120 bp, Artificial Sequence
  ENSG00000152430_14 (sequence is synthesized)
taacctaactgtaatgaccttttctacaacatgttttatccattccataaataataaccacattgggaatagtgaggtgtcttttattttctctgctttgtgttattttttcttatcaaa

SEQ ID NO: 432485 - DNA, 120 bp, Artificial Sequence
  ENSG00000152430_15 (sequence is synthesized)
taatgacaattctatttttgctttgctgttttgtcatttaatatgcttttgtctaatttttaattcatttattactgttactccttatttaattttgcgtctgccatggttttcagaatc

SEQ ID NO: 432486 - DNA, 120 bp, Artificial Sequence
  ENSG00000152430_16 (sequence is synthesized)
tgaatagtatttatacttcttttttataacattttccaaatattagaaataccatcaacatgatcagtattcttgccttttcatgtaatttgactatattaaattttttctccagtgttt

SEQ ID NO: 432487 - DNA, 120 bp, Artificial Sequence
  ENSG00000152430_17 (sequence is synthesized)
gagacaatattgaaatcttcctataacataatttatttggtatcaaattttataaaatatggatccacctttggaattttgataaaagggttcatctctgacatgatcccataacactga

SEQ ID NO: 432488 - DNA, 120 bp, Artificial Sequence
  ENSG00000152430_18 (sequence is synthesized)
ctgaaattccaccaaattactgttctttgaatgctttaatccttaaaccttttcttctgatatgcaaccaatatattcaattatatatgtgattaatttttaaaaggacaattgttttca

SEQ ID NO: 432489 - DNA, 120 bp, Artificial Sequence
  ENSG00000152430_19 (sequence is synthesized)
taaaatgcaaaactattttttacaccaaaggaaaattttagattctgattctaaatccgatttttactataaaattggaaaatagatgggaggggtgtcattcattgttcaaaaggtaca

SEQ ID NO: 432490 - DNA, 120 bp, Artificial Sequence
  ENSG00000152430_20 (sequence is synthesized)
gaacaaatcataggggtttttaatctctaaaatttctacagtagtacaggaaatattcctctttacattcatttgcagttctttcactgacctcctaattttaggtggagggggcagggg

SEQ ID NO: 432491 - DNA, 120 bp, Artificial Sequence
  ENSG00000152430_21 (sequence is synthesized)
gagccataaaagttggtattaccctaataaatctatctctttcctcccctgtttcaaccccacatgtattccatgctcagcagcagcagcagaaatagtaggatatagatcacaaaggtt

SEQ ID NO: 432492 - DNA, 120 bp, Artificial Sequence
  ENSG00000152430_22 (sequence is synthesized)
tttctggtgagtcaaatagggtgttttcttttgaaactgtaatgaatatgtttgccagtcaaatggcttcatgagaacagtagaaccttatgaatgtatactagcatacaaggatctcaa

SEQ ID NO: 432493 - DNA, 120 bp, Artificial Sequence
  ENSG00000152430_23 (sequence is synthesized)
atacattaattattctcagttttaggaatgtaaatagattaagtcccacaatgaaatttcagaagtttttgttctgtaagtaaaaaattactaaccactgatgttcaagattttctttta

SEQ ID NO: 432494 - DNA, 120 bp, Artificial Sequence
  ENSG00000152430_24 (sequence is synthesized)
atagcactatccttgagaaccaaaaagtttatgttttgattttcaaatgttaaacaagatgctaaacaaatcctggactgttaataaaaattaattatgtattattggataaggaatttt

SEQ ID NO: 432495 - DNA, 120 bp, Artificial Sequence
  ENSG00000152430_25 (sequence is synthesized)
aatcagggagcgccgcgcgagggtggggaccagctgcgcacgaggccagcggcggggtcgctgccgttgaggcttcccgccactgctgctggcggatttgtggggcaaaatttctcgctg

SEQ ID NO: 432496 - DNA, 120 bp, Artificial Sequence
  ENSG00000152430_26 (sequence is synthesized)
gctagccttcttttccctcccgcactttggtggggagggggtggatcctcgtttcggtgcccaagttcacgatgacccgagagaactcgaggaagttgtcgccgcggccatttcccccag

SEQ ID NO: 432497 - DNA, 120 bp, Artificial Sequence
  ENSG00000152430_27 (sequence is synthesized)
agatctcgaggttgattctcaaggggaggggccagtgagggcacattgctttggaggagtagtttaataaactctctagtgctggaagttttagcaaacggaggagccttcaaacccggc

SEQ ID NO: 432498 - DNA, 120 bp, Artificial Sequence
  ENSG00000152430_28 (sequence is synthesized)
aacagtccccatctaggtgtttccgtaacacatgcggaattattgctagtggaatttcaggctttctttgttgtttaactcaatgcatcgctaattgtttataatgaacttagatgttgc

SEQ ID NO: 432499 - DNA, 120 bp, Artificial Sequence
  ENSG00000152430_29 (sequence is synthesized)
caatgcatcgctaattgtttataatgaacttagatgttgcctccacctgagccttgctattgctaacattaaaatattttgtaggcctggcgcgatggctcccgcctgtaatcccagcac

SEQ ID NO: 432500 - DNA, 120 bp, Artificial Sequence
  ENSG00000152433_0 (sequence is synthesized)
agtgacacaggcacaactgacagtggcagaagctcagctgacaaggactggggacggcggtgtccttgtcttgcctttgtcgcccccgcccctctcttccctggctggacttgcggagtc

SEQ ID NO: 432501 - DNA, 120 bp, Artificial Sequence
  ENSG00000152433_1 (sequence is synthesized)
cccgccgaagaacccgagggtcccctggcgatggcagaaatgaaccctgcacagggtcatgtggtttttgaagacgtggccatatatttctcccaggaggagtgggggcatctcgatgag

SEQ ID NO: 432502 - DNA, 120 bp, Artificial Sequence
  ENSG00000152433_2 (sequence is synthesized)
gctcagagattgctgtaccgtgatgtgatgctggagaatttggcccttttgtcctcactaggttgttgccatggagctgaggatgaggaggcacctttagagccaggtgtttctgtagga

SEQ ID NO: 432503 - DNA, 120 bp, Artificial Sequence
  ENSG00000152433_3 (sequence is synthesized)
gtgtcacaggtcatggctccaaagccctgtctatctacccagaatacccagccctgtgagacatgtagctcacttctgaaggacattctgcgtctggctgagcatgacggaacacacccc

SEQ ID NO: 432504 - DNA, 120 bp, Artificial Sequence
  ENSG00000152433_4 (sequence is synthesized)
gagcagggactgtacacgtgtccagcacatcttcaccagcaccaaaaggagcagattagagagaaactttctagaggggatggaggaagaccgacatttgtgaagaaccacagagttcac

SEQ ID NO: 432505 - DNA, 120 bp, Artificial Sequence
  ENSG00000152433_5 (sequence is synthesized)
atggcagggaagaccttcttgtgcagtgaatgtgggaaagcctttagccacaaacataaactttctgaccatcagaaaatccacactggagaaagaacttataagtgcagcaaatgtggg

SEQ ID NO: 432506 - DNA, 120 bp, Artificial Sequence
  ENSG00000152433_6 (sequence is synthesized)
atattgtttatggaaaggtccacactcaatagacatcagagaactcacactggagaaaggccttatgagtgcaatgaatgtgggaaagcctttctttgtaagtctcaccttgttcgtcac

SEQ ID NO: 432507 - DNA, 120 bp, Artificial Sequence
  ENSG00000152433_7 (sequence is synthesized)
cagacaatccactctggagaaaggccttatgagtgcagtgaatgtgggaaattgtttatgtggagttccacactcattacacatcagagggttcacactggaaagaggccttatggttgc

SEQ ID NO: 432508 - DNA, 120 bp, Artificial Sequence
  ENSG00000152433_8 (sequence is synthesized)
agtgaatgtgggaagttctttaagtgcaactcaaacctctttaggcattacagaattcatacaggaaaaaggtcttatggttgcagtgaatgtgggaaattctttatggaaaggtctaca

SEQ ID NO: 432509 - DNA, 120 bp, Artificial Sequence
  ENSG00000152433_9 (sequence is synthesized)
ctcagtagacatcagagagttcacactggagaaaggccttatgagtgcaatgaatgtgggaaattcttcagcttgaaatccgtcctcattcaacaccaaagagttcacactggagaacgg

SEQ ID NO: 432510 - DNA, 120 bp, Artificial Sequence
  ENSG00000152433_10 (sequence is synthesized)
ccttatgaatgcagtgagtgtgggaaggccttccttacaaagtcccacctcatttgtcatcagacagttcacactgcagcaaagcagtgcagtgaatgtgggaaattctttaggtataac

SEQ ID NO: 432511 - DNA, 120 bp, Artificial Sequence
  ENSG00000152433_11 (sequence is synthesized)
cagcaggcagtacacactggagaaagactgaatgccgtgaacgtgggtaattatgtaggtacagctctccagtcgctatgtatcagagaattcacactgcagaaatgtgtgttcagcaaa

SEQ ID NO: 432512 - DNA, 120 bp, Artificial Sequence
  ENSG00000152433_12 (sequence is synthesized)
ctcgggacattattttggtttgactctcatctcattagacattggagagtttacactgaagaagagtcttttcaataaagtagaaagtggtaaagattcaacatgcaagattgtacttat

SEQ ID NO: 432513 - DNA, 120 bp, Artificial Sequence
  ENSG00000152433_13 (sequence is synthesized)
tgggcttcagaatatccacactagtgaaagtcttctgagtacagcaaatgtgtgacattattttgctactactccacactacttagacatcatgtagttcacactggaaaaaggccacgt

SEQ ID NO: 432514 - DNA, 120 bp, Artificial Sequence
  ENSG00000152433_14 (sequence is synthesized)
atgtgccttgaatgtagccaaaatgacgaacaacacccagaaatctgtgatttagcactgagaactagtattatatggtttttaaaaaacaatggtgaagtacatgccacataaaatttg

SEQ ID NO: 432515 - DNA, 120 bp, Artificial Sequence
  ENSG00000152433_15 (sequence is synthesized)
ccatcttaactattgtaatgtcttgtttaatacttgaagtacattaacattgttgagcaaagaatatcctgaactctttatcttgtaaaatgaaactctataaccaccattaaaaaaaca

SEQ ID NO: 432516 - DNA, 120 bp, Artificial Sequence
  ENSG00000152433_16 (sequence is synthesized)
actcattcccacattcttcagtccctggcgaccaccatatttttaagtcattatgactctgactattcttggtacttctcagaagaagaatcttagagtgtttttcattattttttttca

SEQ ID NO: 432517 - DNA, 120 bp, Artificial Sequence
  ENSG00000152433_17 (sequence is synthesized)
cttaggataatatcctcaaagttcattcattttttagcatgtgtcagaaattttaaggctgagcaatatttcattgtttgcatttaccacatttcctttatttctgacatctattcatgg

SEQ ID NO: 432518 - DNA, 120 bp, Artificial Sequence
  ENSG00000152433_18 (sequence is synthesized)
acacttgggttacttctacctctggctattgtgaatattgctactacaagcataagggcacaaatatctctttgagaccctgctttcaattcttattgggtaccccaaaaagtggaactg

SEQ ID NO: 432519 - DNA, 120 bp, Artificial Sequence
  ENSG00000152433_19 (sequence is synthesized)
ctggatcacatggtacttctaactttaattctttgatgaactgagaaacttttccataaaacttgcaccgttttacattcctaacattccacaaaagttgtgatttgtcctcattctaat

SEQ ID NO: 432520 - DNA, 120 bp, Artificial Sequence
  ENSG00000152433_20 (sequence is synthesized)
ccatagaaggcaacatttctaacaggtttctaggtgattttgttgttgctgatgtagggactacattttgagaactgtcctatcccatttttataacaatgcagagcttctctgtaaata

SEQ ID NO: 432521 - DNA, 120 bp, Artificial Sequence
  ENSG00000152433_21 (sequence is synthesized)
ccccttgtttctatgttctatcctgtgagccttttcattttgttaatttttcccagtgtttacaaccaggaaatagcttgtcatctttgatacaaaacagaaatctttgcaaaataccaa

SEQ ID NO: 432522 - DNA, 120 bp, Artificial Sequence
  ENSG00000152433_22 (sequence is synthesized)
aaacactacataattgatttgacccaaatttgcctataattatcaacataccatggaaaattttagtatcctctaaaattttaaaagctaaaaatatacacctcagtttttgaaattcta

SEQ ID NO: 432523 - DNA, 120 bp, Artificial Sequence
  ENSG00000152433_23 (sequence is synthesized)
ctacatcatttatactgaaaacatatagtaaaccattaatccaagaacagtaatagctgatatatatgatgagcaacgagtgtttgacaccggtaagagtcctatgaggtgggagccatt

SEQ ID NO: 432524 - DNA, 120 bp, Artificial Sequence
  ENSG00000152433_24 (sequence is synthesized)
tacaacctatttacagatgagagcactgaagctccagcaggttcagttcttttctagagtcacagtgctgctaagagccaacagtgaagtcggaggagctgagtttatacaatcaacttg

SEQ ID NO: 432525 - DNA, 120 bp, Artificial Sequence
  ENSG00000152433_25 (sequence is synthesized)
gtgcccaggatggtaggggagatggaaacacatttagctgttagtttgtccctgtgtttaatgggtggtaaatataagtagaaaataaatagagaacttaagtaaatacagtttgaaaag

SEQ ID NO: 432526 - DNA, 120 bp, Artificial Sequence
  ENSG00000152439_0 (sequence is synthesized)
gttcgctgcggcgaccagctccggaaagcgcggtggggacgcgctgtgttctcgcagctcagaggcgggtctgaggctcggtggcggcgcccagggtggcccgggccctttcctcggtcg

SEQ ID NO: 432527 - DNA, 120 bp, Artificial Sequence
  ENSG00000152439_1 (sequence is synthesized)
ttgtctcaccgccacaggctccgatggcggcggccacgctgagggaccccgctcagcagggctatgtgacctttgaggacgtggctgtctacttctcccaggaggaatggagattgcttg

SEQ ID NO: 432528 - DNA, 120 bp, Artificial Sequence
  ENSG00000152439_2 (sequence is synthesized)
atgacgctcagaggctcctctaccgcaatgtgatgctggagaactttacacttctggcctctctgggacttgcatcttccaagacccatgaaataacccagctggagtcatgggaggagc

SEQ ID NO: 432529 - DNA, 120 bp, Artificial Sequence
  ENSG00000152439_3 (sequence is synthesized)
ccttcatgcctgcttgggaagttgtgacttcagccatactgagaggtagttggcaaggagccaaggctgaggcagctgctgagcagagtgcttctgtagaagtgcccagttcaaacgttc

SEQ ID NO: 432530 - DNA, 120 bp, Artificial Sequence
  ENSG00000152439_4 (sequence is synthesized)
agcaacaccagaagcagcactgtggagagaaacccttaaaaagacaagagggcagggtcccagttttgaggagttgcagagtccacctatcagagaagtccttgcaaagcagggaagttg

SEQ ID NO: 432531 - DNA, 120 bp, Artificial Sequence
  ENSG00000152439_5 (sequence is synthesized)
ggaaggatcttctgaccagctcaggtgttctcaagcaccaggtgactcacacgggagagaagtcacataggagctccaaaagtagggaggcctttcatgctggaaaaaggcattacaaat

SEQ ID NO: 432532 - DNA, 120 bp, Artificial Sequence
  ENSG00000152439_6 (sequence is synthesized)
gcagtgaatgtgggaaagcctttggtcagaaatatttacttgttcagcaccagagactgcacactggggaaaagccttatgaatgcagtgaatgtgggaagttatttagccataagtcca

SEQ ID NO: 432533 - DNA, 120 bp, Artificial Sequence
  ENSG00000152439_7 (sequence is synthesized)
acctttttatacaccaaatagttcacactggagaaaggccttatgggtgtagtgactgtggaaaatcctttagccgtaatgctgacctcattcaacaccagagagttcacactggagaaa

SEQ ID NO: 432534 - DNA, 120 bp, Artificial Sequence
  ENSG00000152439_8 (sequence is synthesized)
agccttttacatgcagtgaatgtggaaaagctttcaggcataattccacacttgttcagcatcacagaatccacactggagtaaggccttatgagtgcagtgaatgtggaaaattgttta

SEQ ID NO: 432535 - DNA, 120 bp, Artificial Sequence
  ENSG00000152439_9 (sequence is synthesized)
ttcacactggagaaaggccttatgagtgcagtgaatgtgggaaattttttagccaaagctcaagcctcatgcaacatcgaaaagttcacactggagaaaaaccttttaagtgcaatgaat

SEQ ID NO: 432536 - DNA, 120 bp, Artificial Sequence
  ENSG00000152439_10 (sequence is synthesized)
gtgggagattctttagtgagaattccagccttgttaaacatcagagggttcacactggagcaaagccttatgagtgcagggaatgtgggaaattttttcgccacagctccagtcttgtta

SEQ ID NO: 432537 - DNA, 120 bp, Artificial Sequence
  ENSG00000152439_11 (sequence is synthesized)
aacatcgaaggattcacactggagaaatacaatgattgtgagaaatcctttagctggtgtttcaacctcattcaacaccagaaagttcacagtgtaaaaaagtcttgaaggttactaatg

SEQ ID NO: 432538 - DNA, 120 bp, Artificial Sequence
  ENSG00000152439_12 (sequence is synthesized)
gaaatccattagctatacctccaaactcattcaacactggacagttcacagagtggacaatgtagtgaatatggtaaaaggcctcagccaaaggcctaaccgtattcaacaccagaaagt

SEQ ID NO: 432539 - DNA, 120 bp, Artificial Sequence
  ENSG00000152439_13 (sequence is synthesized)
ttagactggagaaaggccttagactgtcgctgaatcaatatgacctgacttaaagcagaaacagccaggcgtggtggctgacacctgttattctcaccactttgggaggctgaagcgggc

SEQ ID NO: 432540 - DNA, 120 bp, Artificial Sequence
  ENSG00000152439_14 (sequence is synthesized)
cattccttctccagtatcctgaagtagctattgtaataggcctgggctgtgtatactaccaccttctctccctgagctgccccacagctgtgcaggaaagggtttgggggtcaggagtct

SEQ ID NO: 432541 - DNA, 120 bp, Artificial Sequence
  ENSG00000152439_15 (sequence is synthesized)
tgcagtcagcttgatggatcttatccctggtggcctctctgtggcctggtgacactgtgcagatctgtggtagttctattcccctacattctgcctgtctcctctagccaacatacctgg

SEQ ID NO: 432542 - DNA, 120 bp, Artificial Sequence
  ENSG00000152439_16 (sequence is synthesized)
tcctgcaagaccctcctccaaggttctttctgtactattttgttttctttcctgtggtccatgatgagataagtcattctggctcagtgctgccactcacctgtcgttttccttaggact

SEQ ID NO: 432543 - DNA, 120 bp, Artificial Sequence
  ENSG00000152439_17 (sequence is synthesized)
aagtggcgcccgaacagggacgtgagtgaagaaggtctgctggagcagagaaagtgaaactgaccagaagaatgagaaaccccaggacaagtctgctggcagtggatataaggagatgga

SEQ ID NO: 432544 - DNA, 120 bp, Artificial Sequence
  ENSG00000152439_18 (sequence is synthesized)
caatccgtgtgggtgccctcaaggtgtgtgtgaccatggaacgggagactggagaaatccatggatctcaactgtgggcccagctcctccagtacgagccatgagctagttgaatctgaa

SEQ ID NO: 432545 - DNA, 120 bp, Artificial Sequence
  ENSG00000152439_19 (sequence is synthesized)
tgcaaagacagaacaaggaccgactggagtcacactgacatcaacccccataaaatggggacagctcaagaaaaccacacaggaagctgagaaactgctggagcaaaacccctgactcca

SEQ ID NO: 432546 - DNA, 120 bp, Artificial Sequence
  ENSG00000152439_20 (sequence is synthesized)
tgtttatggccatgctagctgtaatatcctgtgcggtatgttttccctgtgcagaggcaaaaacttattgggcatatattcctaacccaccagtagtacgaccggtactcgggagcaaca

SEQ ID NO: 432547 - DNA, 120 bp, Artificial Sequence
  ENSG00000152439_21 (sequence is synthesized)
tgggagtgggaagtttctgaatcagggtaacatagggcagaatttgtctgctgaagagcaacattatatgcagtcacttaaaggtttacttaaacaatctggtgctcaggttagttctca

SEQ ID NO: 432548 - DNA, 120 bp, Artificial Sequence
  ENSG00000152439_22 (sequence is synthesized)
aacactagctaagctgctgcaggaggttatcacgcataacccatggtttccacagacagacactcttgatgtggaaaactggggtgaagatttgcttacggcataggatatgagacttac

SEQ ID NO: 432549 - DNA, 120 bp, Artificial Sequence
  ENSG00000152439_23 (sequence is synthesized)
aaattaaactattggcaatccaggatttaaaatgttaaagaaaatgagatatcagagcagacaaggcttaggaaagtccctacaggaaaaccctgatcctatatcaataactgggcaaac

SEQ ID NO: 432550 - DNA, 120 bp, Artificial Sequence
  ENSG00000152439_24 (sequence is synthesized)
agatagaaaagggctaggtcgtcagatttctgatgtgggtcattgatatttctcctccacccactgctttgccactagagtggctaacaaacctgtatgggtggatcaatggcccctttc

SEQ ID NO: 432551 - DNA, 120 bp, Artificial Sequence
  ENSG00000152439_25 (sequence is synthesized)
acaggagaaactaactcaactccatcagctagtaaaagagcgattggatgcaggacatattgaagagtcagcccctggaattcaccagtatttgtaataccaaaaaagtcaggaaaatgg

SEQ ID NO: 432552 - DNA, 120 bp, Artificial Sequence
  ENSG00000152439_26 (sequence is synthesized)
ggactgctacatgatttgagagctattaatgcacagattaaaccaatgggtgcattacagcaaggtctgccatccctggcaggcatttccaagagactggcctcttgtagtaatagatct

SEQ ID NO: 432553 - DNA, 120 bp, Artificial Sequence
  ENSG00000152439_27 (sequence is synthesized)
tattgttttttttactatactattacatcagcaggataggcctggatatgccttctctgtgccttctgttaatcaaagggagcctgtctcttgttatcaatggaaagttttgccccaagg

SEQ ID NO: 432554 - DNA, 120 bp, Artificial Sequence
  ENSG00000152439_28 (sequence is synthesized)
cgtgcttaacagtcctacattatatcagaattttgtaggacaggcattaaaggagccttgtaatgtgtttcccactggctatgtcattcattatatggatgatattcttttggccgctcc

SEQ ID NO: 432555 - DNA, 120 bp, Artificial Sequence
  ENSG00000152439_29 (sequence is synthesized)
tacagatcaaatcttacatcagttattcagagaaacaaaacaggctttgactaaatggaatctcaaaatagctcctgaaaaggtgcaaaccacctccccataccagtacttaggcactat

SEQ ID NO: 432556 - DNA, 120 bp, Artificial Sequence
  ENSG00000152439_30 (sequence is synthesized)
tattactgaaagaagtgttcagcctcagaaagtagtcatctgtagggacagattacaaactttgaatgatttccaacaattatcaggggacattaattggctgcacccaatgctaggtat

SEQ ID NO: 432557 - DNA, 120 bp, Artificial Sequence
  ENSG00000152439_31 (sequence is synthesized)
tgctacttattaactcaaacacctttatcagaccctccaaggagattcttcattagactctcctcggcaacttactaaggaggcagaagctgaattatagcttgtagaacagatgcttca

SEQ ID NO: 432558 - DNA, 120 bp, Artificial Sequence
  ENSG00000152439_32 (sequence is synthesized)
gcaacaacatgccacctggttacagccacaaaagcctttgcttctgtttattcttcctacctcccattctccaacaggacttttaggccaattcatacacaaatctgtaatagtattaga

SEQ ID NO: 432559 - DNA, 120 bp, Artificial Sequence
  ENSG00000152439_33 (sequence is synthesized)
atggcttttttatccaatcagacagtgaaatctttgcaaatttatctttctttaattactcaacttataacaataggtaggcatagatcaaaaatgtttatgggatgtgatccagacaaa

SEQ ID NO: 432560 - DNA, 120 bp, Artificial Sequence
  ENSG00000152439_34 (sequence is synthesized)
attattgttcccttggattcccaacaacaggccacagcatgggaaatgtcgactgcatggcaaatcactctcacagattttgtaggaataatagataaccattatccatcagacaaaatt

SEQ ID NO: 432561 - DNA, 120 bp, Artificial Sequence
  ENSG00000152439_35 (sequence is synthesized)
ttgcaattttatgaagttcacccttttacccttcctgtaatcactcatcacaagcctattccaggcagacagacctattttactgatgactcttctaaaggctgtgcagctatttatgga

SEQ ID NO: 432562 - DNA, 120 bp, Artificial Sequence
  ENSG00000152439_36 (sequence is synthesized)
cctaagcatactgaaacaataaagacctctggagtttcagctcaatgctcagaattagtggcagttattcaagttttacagctcaccgctttatctcctattaacattgtctgtgattca

SEQ ID NO: 432563 - DNA, 120 bp, Artificial Sequence
  ENSG00000152439_37 (sequence is synthesized)
gcctatattgtaaatgtagccagtcacattgagactgccactattaaaagcaccctagaaccagagctgtataatttgtttctaagacttcaacaagctgttcactctcatgctgctcct

SEQ ID NO: 432564 - DNA, 120 bp, Artificial Sequence
  ENSG00000152439_38 (sequence is synthesized)
tttcatatttctcatatttgctatcacacacaacttcctggaccactatctctaggtaacaataaagcagataaactaatcggttctgtatttcaacaagcccaatcttctcatgcattc

SEQ ID NO: 432565 - DNA, 120 bp, Artificial Sequence
  ENSG00000152439_39 (sequence is synthesized)
ctgcatcaaaacacctctgcccttactcgtatgtttcatctgccttgcagccaggcttgagctattgcgcaagcctaccccacttgccagcctgtccctggcgttgcacccatggaagga

SEQ ID NO: 432566 - DNA, 120 bp, Artificial Sequence
  ENSG00000152439_40 (sequence is synthesized)
ctcagctatgttcatgtgactacagacacttactcccatatgctacatgtcacgtgccaaactggggaaacagctggtcatgtctgatgacattgtctgtcaccttttgcccatatgggg

SEQ ID NO: 432567 - DNA, 120 bp, Artificial Sequence
  ENSG00000152439_41 (sequence is synthesized)
gtccctacacaatgaaaaactgacaatggacctgcttatgttagtcatgcttttcaaaattttttacagttatgggcaatcactcataaaacagaaattccttacaatcctcaaggacaa

SEQ ID NO: 432568 - DNA, 120 bp, Artificial Sequence
  ENSG00000152439_42 (sequence is synthesized)
ggaatcatagagtgggcacatcaaacattacaatgcatgttgaaaaaacaaaaatggggactaggagaccagctaccacctcaaacaaaattacatttagccttatttactttaaatttt

SEQ ID NO: 432569 - DNA, 120 bp, Artificial Sequence
  ENSG00000152439_43 (sequence is synthesized)
ttgactcctggtatggatattaagactctggcagaatgacattggcaaatgttagagggaaaaaggaaagtttacccaaaggtattacagaaatccccggaagaaggacaatggaaaggc

SEQ ID NO: 432570 - DNA, 120 bp, Artificial Sequence
  ENSG00000152439_44 (sequence is synthesized)
gagagtgattagattctcagaacaatggtatcaattatactgcaccattggagggacttctttatgtgtcacccaggatgcatcactcaaccgcagttgccttgcaattcagtcccaagc

SEQ ID NO: 432571 - DNA, 120 bp, Artificial Sequence
  ENSG00000152439_45 (sequence is synthesized)
atgcttgagttaccatggaaaaattatgtacctattaggccttagctctattaatattactggtgtagttactaatcactcctggccccatcacccaaattgtattgattgtacagaatg

SEQ ID NO: 432572 - DNA, 120 bp, Artificial Sequence
  ENSG00000152439_46 (sequence is synthesized)
ggctccctttgataattctcacccctgtccttggactcagtgtcttggccccttagctaaacaacagtccatgttaatgggagacattatcgactggggtccccatggtcatttagatgg

SEQ ID NO: 432573 - DNA, 120 bp, Artificial Sequence
  ENSG00000152439_47 (sequence is synthesized)
gagaagtgagaatcagacctcatggcataaattttgctggcactggtggcgaaacttgaacatctcttcgctacatcccaatctgctacacaacttgcttggcacagaatgggctttagc

SEQ ID NO: 432574 - DNA, 120 bp, Artificial Sequence
  ENSG00000152439_48 (sequence is synthesized)
ccacctttgcctcaatggcattatcaaggaaagagaggtccaattcaggagtcaatatggaagacagcactcccatttatgaatggcagcatttgggttgggacactatccaataatagt

SEQ ID NO: 432575 - DNA, 120 bp, Artificial Sequence
  ENSG00000152439_49 (sequence is synthesized)
aataatgctcaatgcagttttaatgttacctttgtagaaaatactaccacacagtttacaatttgtatttttaatccgtatgtttttctagcagcaaaaaaggaccaactccgggtaaac

SEQ ID NO: 432576 - DNA, 120 bp, Artificial Sequence
  ENSG00000152439_50 (sequence is synthesized)
aatgcccaatcgatttgtgatgcctgtcaactgtatcattgccttaatcatagcacaatacaaacacacagcatatccaccctaataattctaggtcacattcctggattatagattcct

SEQ ID NO: 432577 - DNA, 120 bp, Artificial Sequence
  ENSG00000152439_51 (sequence is synthesized)
gtaaatctgtccgagccttgggaggccacccccgctttacattttgtaaaactccttcttattcagcttactcatcgtgctcgtagagctttaggcatgataatttttgctataatttcc

SEQ ID NO: 432578 - DNA, 120 bp, Artificial Sequence
  ENSG00000152439_52 (sequence is synthesized)
ctagtcacactaataacctctgctgtgttgtcctcagtagcactgcacagctccattcaaacagctcaatgtgtgaaaaattggatgtgcacagccgaccaggaatggatgcttcaaaat

SEQ ID NO: 432579 - DNA, 120 bp, Artificial Sequence
  ENSG00000152439_53 (sequence is synthesized)
aaaattaacaccaagatacaaacagaagtggcaatgttaaagactactgttctgtggctaggataacaaatacaaagcctgaagttgcagcagcaattgcattgtcattttaaccctatt

SEQ ID NO: 432580 - DNA, 120 bp, Artificial Sequence
  ENSG00000152439_54 (sequence is synthesized)
catatttgtgtaactaatttggaatataatcaaagtgaatatccaaggaactttgtaaaggcccatttacagggagttttacattcaatgttacttttgatattaatgattcacaaagta

SEQ ID NO: 432581 - DNA, 120 bp, Artificial Sequence
  ENSG00000152439_55 (sequence is synthesized)
aaatccttaacttgaataagcagactcaagtgcttcagccctctttaaaagcttgggcagaattccagcaaggtttagggagccttaacccttggacctacttcaaacagcacctcaatg

SEQ ID NO: 432582 - DNA, 120 bp, Artificial Sequence
  ENSG00000152439_56 (sequence is synthesized)
tcttttttgtgattatcggaataatgttattatgtttctgttttttgttcatagtctgtaaaatcagctggaccaccaaccggcaattgagagctgcacagcctgcaattacctttattc

SEQ ID NO: 432583 - DNA, 120 bp, Artificial Sequence
  ENSG00000152439_57 (sequence is synthesized)
aattgagagctgcacagcctgcaattacctttattcaattaatacaaaaacagaaaaggggggaggttggaggccgaaagaatgagggtcgtgaccaactcagtataccactggaggcta

SEQ ID NO: 432584 - DNA, 120 bp, Artificial Sequence
  ENSG00000152439_58 (sequence is synthesized)
atgctggcaagctgacaactgcatctgccaccagaaggaatgctgagggcagtcataccccacgtgcagtgttccttgtggttatctataggaacatctggaggctgttgtataaagaaa

SEQ ID NO: 432585 - DNA, 120 bp, Artificial Sequence
  ENSG00000152439_59 (sequence is synthesized)
gcaattatgtgagcctgtgataaatcaagcagctgaccaaccattacctcttcctccctgttgattctacctaataaatacaaagggctgtagaagctcagggcccttgttccctagaag

SEQ ID NO: 432586 - DNA, 120 bp, Artificial Sequence
  ENSG00000152443_0 (sequence is synthesized)
agtggccattttgattggtgttgggtgtattttccagtgagagaccgcggagtgttgggtcgtgtagaagtgactgaacccagaaggtggagacgagacgttgtcccgactgcacagagg

SEQ ID NO: 432587 - DNA, 120 bp, Artificial Sequence
  ENSG00000152443_1 (sequence is synthesized)
ctgctctgcagctccttaaaggcgctaggcgtgacccgcaccaaggccgggatcgggaccaccgtgcccgggtacctgcactgctcgccccctcctttcgaccccgctttccccacccag

SEQ ID NO: 432588 - DNA, 120 bp, Artificial Sequence
  ENSG00000152443_2 (sequence is synthesized)
tcggatggcggcggccgcgctgaggcccccggctcagggcactgtgacctttgaagatgtggctgtgaacttttcccaggaggaatggagtctccttagtgaggctcagagatgccttta

SEQ ID NO: 432589 - DNA, 120 bp, Artificial Sequence
  ENSG00000152443_3 (sequence is synthesized)
tcatgacgtgatgctggagaacctgacacttatatcttctctaggttgttggtatggagcaaaagacgagacaccttctaagcagaccctttctatacaacaggagtccccactcaggac

SEQ ID NO: 432590 - DNA, 120 bp, Artificial Sequence
  ENSG00000152443_4 (sequence is synthesized)
acattggacaggtgtatgtaccaagaaggtccacctctggggaatgtgtggccctctcctgggagatatcttacaccagggaacacaacacaatcagaaattgaatgggtttggggcata

SEQ ID NO: 432591 - DNA, 120 bp, Artificial Sequence
  ENSG00000152443_5 (sequence is synthesized)
tgaaaaaaaattggatgacgatgcaaaccatcatcaagaccagaagcagcacattggagagaaatcgtacagaagcaatgccaagggaacatcttttgtaaagaactgtaaattccatat

SEQ ID NO: 432592 - DNA, 120 bp, Artificial Sequence
  ENSG00000152443_6 (sequence is synthesized)
gtcacatgagccatttatctttcatgaggttgggaaagactttttgtccagcttgagattactccaacaagaggacattcacacttcagggaagtcaaactttgaaactaagcatgggat

SEQ ID NO: 432593 - DNA, 120 bp, Artificial Sequence
  ENSG00000152443_7 (sequence is synthesized)
accccttcagggtggaaaaactcattacatctgtggagagtccacaataccgtttagcaacaaacactcacttgtccttcaccagagacttctccctagagaaggaccttatgtatgcag

SEQ ID NO: 432594 - DNA, 120 bp, Artificial Sequence
  ENSG00000152443_8 (sequence is synthesized)
tgattctgggaaattcactagcaaaagtaatagttttaataatcatcagggagttcgcactggaaaaagaccttatcagtgtggacaatgtgatgaatcattttggtataaggcccacct

SEQ ID NO: 432595 - DNA, 120 bp, Artificial Sequence
  ENSG00000152443_9 (sequence is synthesized)
cactgaacaccagagagttcacactggagaaagaccttatgagtgtggagaatgtgataaatcttttagtcataagcacagtcttgttgaccatcagcgagttcacactggagaaagacc

SEQ ID NO: 432596 - DNA, 120 bp, Artificial Sequence
  ENSG00000152443_10 (sequence is synthesized)
ttatgaatgtgacgaatgtgggaaatcttttagccataagcgcagccttgttcaccaccagcgagttcacactggagaaagaccttatcagtgtggagaatgtgggaaatcgtttaatca

SEQ ID NO: 432597 - DNA, 120 bp, Artificial Sequence
  ENSG00000152443_11 (sequence is synthesized)
caagtgcaacctcattcagcatcagcgagttcacactggagaaagaccttttgagtgtacggcatgtgggaagttatttaggagcaactcccacctaaaggaacaccagagagttcacac

SEQ ID NO: 432598 - DNA, 120 bp, Artificial Sequence
  ENSG00000152443_12 (sequence is synthesized)
tggagaaagaccctatgagtgtaaagaatgtaggaaatcatttaggtacaagtcacacctcactgaacaccagagagttcacactggagaaaggccatatgagtgtagagaatgtgggaa

SEQ ID NO: 432599 - DNA, 120 bp, Artificial Sequence
  ENSG00000152443_13 (sequence is synthesized)
atgttttcatcaaaagggcagtctcattcaacatcagcagatccactctggagaaaggccacatgagtgtggagaatgtgggaaatgttttcatcaaaagggcagtctcattcgacatca

SEQ ID NO: 432600 - DNA, 120 bp, Artificial Sequence
  ENSG00000152443_14 (sequence is synthesized)
gcagattcactctggagaaaggccacatgagtgtggagaatgtggaaagtgttttcgtcaaaagggaaacctcattaaacatcaacgagttcacacgggagaaagacatcatgaatgttg

SEQ ID NO: 432601 - DNA, 120 bp, Artificial Sequence
  ENSG00000152443_15 (sequence is synthesized)
aaaatttggcagatctgttggtaaaaagagcaccctcattcaacattcgtgagatcacactggaaagcacttatgagtatggagaatgtgcaaaatcatctagccaaaaggttggcctca

SEQ ID NO: 432602 - DNA, 120 bp, Artificial Sequence
  ENSG00000152443_16 (sequence is synthesized)
ttcaacaatagcaagatcacactggggaaaggctttctgagtgtagagaatgtatgaaatcctgtacatagaagttttgcctcaccaaataccagaagggtcacactggagaaagaccct

SEQ ID NO: 432603 - DNA, 120 bp, Artificial Sequence
  ENSG00000152443_17 (sequence is synthesized)
atagttatggggaatttgggaaattacctaacaagaagtcccacctcactgaacactactgagttcacagttgagaaaggccatatgactgtaaggaatttgtaaaattatttagccaga

SEQ ID NO: 432604 - DNA, 120 bp, Artificial Sequence
  ENSG00000152443_18 (sequence is synthesized)
agagctgcattactattcatcagataatttacaatggagaaaggccacataataatttctcacataataaatgtgagaaatcatttccgtacagctctgcgctccatgttcgtaagagtt

SEQ ID NO: 432605 - DNA, 120 bp, Artificial Sequence
  ENSG00000152443_19 (sequence is synthesized)
cacactggacaaagccttatgagagcagcgagtagaaaatcctttgtgggaaaactctggtttcattaaacacaggagagttcatgctagagaaaggcctcaacagtgtagcaaatatgg

SEQ ID NO: 432606 - DNA, 120 bp, Artificial Sequence
  ENSG00000152443_20 (sequence is synthesized)
aaagacattcactagaagctctgccctgcaagttcacactagagaaagcccttctcagtgaagtaaatttggaaaattgattagtcaaacctctatgctccttcaaaatcagagttcaca

SEQ ID NO: 432607 - DNA, 120 bp, Artificial Sequence
  ENSG00000152443_21 (sequence is synthesized)
tgcagagcatttgcgagggcttcactcttctttcactggataccagaatgttgacaggagaaaaataacatagatgtgtgggaatattacttcttgtccagtgtaactgtgggagagagc

SEQ ID NO: 432608 - DNA, 120 bp, Artificial Sequence
  ENSG00000152443_22 (sequence is synthesized)
ccttatgaggacaccatcaacctatattgaatgtcatatgtccagtagctgcataaattccaggtatatgggagctgtattgcatttcttatcctgcgtatgtccttgccagatttattt

SEQ ID NO: 432609 - DNA, 120 bp, Artificial Sequence
  ENSG00000152443_23 (sequence is synthesized)
cattcttaggtctctggcaaaagccatttcatctctaccacttggcaggtacctacagtgcatcactcatgcactccatcatattccagaaaaaaagttcaagttgtctcccattcagca

SEQ ID NO: 432610 - DNA, 120 bp, Artificial Sequence
  ENSG00000152443_24 (sequence is synthesized)
gtggtatttttgagtagcctctgcactcgttcctttctcatttctctatgaagagttaggccatggacctgactcagttctggcctagagcagaagtgtccaatcttttggctttcctgg

SEQ ID NO: 432611 - DNA, 120 bp, Artificial Sequence
  ENSG00000152443_25 (sequence is synthesized)
tccacattggaagaagaattgtcttgtgccgcatatgaaatacattaacactaatgatagctgatgaacttttttaaaaaatcacacaaaaaccctcataatgttttaagaaagtttaca

SEQ ID NO: 432612 - DNA, 120 bp, Artificial Sequence
  ENSG00000152443_26 (sequence is synthesized)
tgtgttgggctgcattcaaagctgtcctgagatacatgcggcccacaagctgcgggttggaccagcttggcctagagaatttttctgattacttgacaagatgggctgtctttcctagga

SEQ ID NO: 432613 - DNA, 120 bp, Artificial Sequence
  ENSG00000152443_27 (sequence is synthesized)
aggaatctcatgattgtcatgattcttaaaatggaattttccagcctcttaactcaccaacccaagtacaagctgcctctcattgttctggtttctgctatgatgaagtccttatttaag

SEQ ID NO: 432614 - DNA, 120 bp, Artificial Sequence
  ENSG00000152443_28 (sequence is synthesized)
cttccttcaatcttgggaattgtattgactgtattgtgtgaattgtatactcactgcattgtgtggcttagatacaacatggttctggtaccatgaaggattctggtaccatgaaagttt

SEQ ID NO: 432615 - DNA, 120 bp, Artificial Sequence
  ENSG00000152443_29 (sequence is synthesized)
gttggggttactaaactgtgtgactcttagggaacagtatgaaggcagaatatagctctgcatttgtggcctagtttggatggctgcctaaggcctccaaataaagacttcagggctttg

SEQ ID NO: 432616 - DNA, 120 bp, Artificial Sequence
  ENSG00000152443_30 (sequence is synthesized)
tgatctttatttttagatgaaatagtgcaataatatgtgttttcataaatcaacctgagtaggggacagttttagtgacacactttggtgcttctgagaacagcacaaaattattctctt

SEQ ID NO: 432617 - DNA, 120 bp, Artificial Sequence
  ENSG00000152443_31 (sequence is synthesized)
gtttataatggatattgcattctgctcagtactggtgagggaaatctgttctcaagtcctacagtgcattcatgtgtcctgaagtccagaattctgtaggatagtgtcctacgttataag

SEQ ID NO: 432618 - DNA, 120 bp, Artificial Sequence
  ENSG00000152443_32 (sequence is synthesized)
cctggagaaagaaatcataattctttaatttttatttttttagggaaatgatgtcactctgaaactcaggctggaatacactggcatggtcatacctcactgcggcctcaaactcctggg

SEQ ID NO: 432619 - DNA, 120 bp, Artificial Sequence
  ENSG00000152443_33 (sequence is synthesized)
gcctcagcctcccgagtacctgagattagcccaggtaatttaagaattttttatagagatagggttttgctattttaccctgactgatgttcaactcctggcctcaagtaatcctctagc

SEQ ID NO: 432620 - DNA, 120 bp, Artificial Sequence
  ENSG00000152443_34 (sequence is synthesized)
tacaggtgtgagccaccatgcccagcccaaaaataatttttgtagaattagcatttctaggtagtgaagcagactgcaacagaatagttgggatatactttttttaaaaaggcatccaca

SEQ ID NO: 432621 - DNA, 120 bp, Artificial Sequence
  ENSG00000152443_35 (sequence is synthesized)
agaatagttgggatatactttttttaaaaaggcatccacaatgattcagtcactatgtctgtgatggacaagcaggtacagaaattttcaggacctccataattatgaatctagtgtagc

SEQ ID NO: 432622 - DNA, 120 bp, Artificial Sequence
  ENSG00000152443_36 (sequence is synthesized)
ttaggtcattgtcagactaaatctaaaggttttgtggatttctgtagcctatctgggctgcataccaaaaagccatccctgaattagtaggaggaagaggatagggagaaaggaaatctc

SEQ ID NO: 432623 - DNA, 120 bp, Artificial Sequence
  ENSG00000152443_37 (sequence is synthesized)
ttagtccagtgatgtggcctttgcaaccagccagcattccaatttaatcaggtggaaatgatcttcctggctcataagtatttggtatcacacaggctaattgccccccttagggcgtga

SEQ ID NO: 432624 - DNA, 120 bp, Artificial Sequence
  ENSG00000152443_38 (sequence is synthesized)
tgagagttaggagagtcaatgtaaaatcacataacctatttgtcaaaaataatgttaaatccagatagttctttcaaattaaatttttaaagctgtaataagactgggcatggtgactca

SEQ ID NO: 432625 - DNA, 120 bp, Artificial Sequence
  ENSG00000152443_39 (sequence is synthesized)
tgcctgttatcccaacactttgggagtccagggtgggagtattgcttgaggtaagaagtttgagactagcctgggtcccatagtaagaccctgtctcttaaaaaataaatactatctttc

SEQ ID NO: 432626 - DNA, 120 bp, Artificial Sequence
  ENSG00000152443_40 (sequence is synthesized)
tctctggcctctccatgctccagacaatcactgaattacaatatttgcttaacagtagattaatgtcaattttctggaattttatatgactgatataacatgtttcctcttttcatacct

SEQ ID NO: 432627 - DNA, 120 bp, Artificial Sequence
  ENSG00000152443_41 (sequence is synthesized)
gagtactctcctgagccctatttatttagatgttcttcttttttctttattattatttttatttcacatagcagggatgcatattttgacattcatcaatcatgatatatgagtagttca

SEQ ID NO: 432628 - DNA, 120 bp, Artificial Sequence
  ENSG00000152443_42 (sequence is synthesized)
ttctttttatcttagaatatgacatgctatggaaatcactgtatacgaattcatctgcttatggatatgttattgcttcttatttttgtctgttaggaataaaactgcttgttaagcaca

SEQ ID NO: 432629 - DNA, 120 bp, Artificial Sequence
  ENSG00000152443_43 (sequence is synthesized)
atgtggctgtgaacttttcccaggaggaatggagtctccttagtgaggctcagagatgcctttatcatgacgtgatgctggagaacctgacacttatatcttctctagggaaatgatgtc

SEQ ID NO: 432630 - DNA, 120 bp, Artificial Sequence
  ENSG00000152443_44 (sequence is synthesized)
actgctctttaaatggcaatggtattaggtgaatggaagttggtccgtgttgctgaaggggcactgtgacctttgaagatgtggctgtgaacttttcccaggaggaatggagtctcctta

SEQ ID NO: 432631 - DNA, 120 bp, Artificial Sequence
  ENSG00000152454_0 (sequence is synthesized)
gggacttccgttgtcctccttgtggcggtcgttttggcatttgtctggactgattacttggtagaaagccccggagcgctgggtcagcatcatccgtgactgactgagaaggcgcgagag

SEQ ID NO: 432632 - DNA, 120 bp, Artificial Sequence
  ENSG00000152454_1 (sequence is synthesized)
gagtcttccccgctgcacagaggcgtggctgaggctcggcggcgcccagggtacccaggcccggcccggaataaggacatcctctctggccccgctccgctcacagagtcagatggcggc

SEQ ID NO: 432633 - DNA, 120 bp, Artificial Sequence
  ENSG00000152454_2 (sequence is synthesized)
ggccgagctgacggccccggcccagggcattgtgacctttgaggacgtggctgtttacttctcctggaaggagtggggtcttcttgatgaggctcagaaatgcctgtaccacgatgtgat

SEQ ID NO: 432634 - DNA, 120 bp, Artificial Sequence
  ENSG00000152454_3 (sequence is synthesized)
gctggagaacttgacacttacaacctccctgggtggttctggagcaggggatgaggaggcaccttatcagcagagcacttctccacagcgggtgtcacaggttaggattcctaaggccct

SEQ ID NO: 432635 - DNA, 120 bp, Artificial Sequence
  ENSG00000152454_4 (sequence is synthesized)
tccttctccccagaagaccaacccctgtgagatatgtggcccagtcttgagacagattttgcacttggttgaacaccaaggaacacaccatggtcagaaactgtatacagacggggcatg

SEQ ID NO: 432636 - DNA, 120 bp, Artificial Sequence
  ENSG00000152454_5 (sequence is synthesized)
taggaaacaattacaatttactgcataccttcatcagcaccagaagcagcatgttggacagaaacacttcagaagcaatgggggcagagacatgtttttgagcagctgcacatttgaagt

SEQ ID NO: 432637 - DNA, 120 bp, Artificial Sequence
  ENSG00000152454_6 (sequence is synthesized)
atctgggaagcccttcacttgcaaggaggttgggaaggatttcctggtgagatcaagatttcttcagcaacaggctgctcacaccagaaagaagtcaaacagaaccaagagtgcagtggc

SEQ ID NO: 432638 - DNA, 120 bp, Artificial Sequence
  ENSG00000152454_7 (sequence is synthesized)
ctttcacagtgtaaaaaatcattacaactggggagaatgtgtgaaagctttcagctacaaacatgtacgtgttcagcaccagggagacctcattagggaaagatcttacatgtgcagtga

SEQ ID NO: 432639 - DNA, 120 bp, Artificial Sequence
  ENSG00000152454_8 (sequence is synthesized)
atgtgggaaatcttttagcacaagctgtagcctcagtgatcatttgagagttcacacttcagaaaagccttatacatgtggagaatgtgggaaatcctataggcaaagctctagccttat

SEQ ID NO: 432640 - DNA, 120 bp, Artificial Sequence
  ENSG00000152454_9 (sequence is synthesized)
aatgtggaaaattatttaacaggaagtatgaccttcttatacatcagagagttcatactggagaaaggccttacaagtgcagtgaatgtgggaaatcctttagccatagctctagcctca

SEQ ID NO: 432641 - DNA, 120 bp, Artificial Sequence
  ENSG00000152454_10 (sequence is synthesized)
ttacacaccagagaattcatactggaatgaggccttatgagtgcagtgaatgtgggaaatcttttatccatagttctagccttattacacaccagagagttcacactggtacaaggcctt

SEQ ID NO: 432642 - DNA, 120 bp, Artificial Sequence
  ENSG00000152454_11 (sequence is synthesized)
atatgtgcagtgaatgtgggaaatcctttagccagagctgtcacctcattaaacaccggagacttcacattggagaagggccttatgagtgtagtgaatgtgggaaattgtttacttata

SEQ ID NO: 432643 - DNA, 120 bp, Artificial Sequence
  ENSG00000152454_12 (sequence is synthesized)
gatctcgtttcttccaacaccagagagttcatactggagtaagatctcatgaatgtcatgaatgtggaaaattatttagcaggaaatttgacctcattgtacatgagagagttcacacag

SEQ ID NO: 432644 - DNA, 120 bp, Artificial Sequence
  ENSG00000152454_13 (sequence is synthesized)
gagaaaggccatatgagtgcagtgaatgtggaaaatcctttacctgtaaatcctacctcatctcacactggaaagttcatactggagcaaggccttatgaatgtggggagtgtgggaaat

SEQ ID NO: 432645 - DNA, 120 bp, Artificial Sequence
  ENSG00000152454_14 (sequence is synthesized)
catttactcatagctctacgctccttcaacaccagagagttcacactggagaaaggccttatgagtgcaatgaatgtgggaagttttttagccagagctccagcctcattagacatagga

SEQ ID NO: 432646 - DNA, 120 bp, Artificial Sequence
  ENSG00000152454_15 (sequence is synthesized)
gaagtcacaccggagaaaggccttatgagtgcagtgagtgttggaaatcctttagtaaccactctagcctcgttaaacaccgaagagttcataccggagaaaggccttatgaatgcagtg

SEQ ID NO: 432647 - DNA, 120 bp, Artificial Sequence
  ENSG00000152454_16 (sequence is synthesized)
aatgtggaaaatcctttagccagagctctaacctcactaatcaccagcgaattcacagtggggaaaggccttatgagtgtagtgactgtggaaaattttttaccttcaactccaacctcc

SEQ ID NO: 432648 - DNA, 120 bp, Artificial Sequence
  ENSG00000152454_17 (sequence is synthesized)
taaaacatcagaacgttcacaagggataaaggttaggtaacacacatagggctgttacggactgagaagtgtccctgcaaaattcacagacataaataaataaatacgtattttcaataa

SEQ ID NO: 432649 - DNA, 120 bp, Artificial Sequence
  ENSG00000152455_0 (sequence is synthesized)
aggcgcgaggaggtgaggctggagcgcggccccctcgccttccctgttcccaggcaagctcccaaggcccgggcggcggggccgtcccgcgggccagccagatggcgacgtggcggttcc

SEQ ID NO: 432650 - DNA, 120 bp, Artificial Sequence
  ENSG00000152455_1 (sequence is synthesized)
gcggttccccgcccgccgcgaccccaactccgggacgcacgctgcggacgcctatcctcccccaggccgctgacccgcctccctgcccggccggctcccgccgcggaggatatggaatat

SEQ ID NO: 432651 - DNA, 120 bp, Artificial Sequence
  ENSG00000152455_2 (sequence is synthesized)
tatcttgtaaaatggaaaggatggccagattctacaaatacttgggaacctttgcaaaatctgaagtgcccgttactgcttcagcaattctctaatgacaagcataattatttatctcag

SEQ ID NO: 432652 - DNA, 120 bp, Artificial Sequence
  ENSG00000152455_3 (sequence is synthesized)
gtaaagaaaggcaaagcaataactccaaaagacaataacaaaactttgaaacctgccattgctgagtacattgtgaagaaggctaaacaaaggatagctctgcagagatggcaagatgaa

SEQ ID NO: 432653 - DNA, 120 bp, Artificial Sequence
  ENSG00000152455_4 (sequence is synthesized)
ctcaacagaagaaagaatcataaaggaatgatatttgttgaaaatactgttgatttagagggcccaccttcagacttctattacattaacgaatacaaaccagctcctggaatcagctta

SEQ ID NO: 432654 - DNA, 120 bp, Artificial Sequence
  ENSG00000152455_5 (sequence is synthesized)
gtcaatgaagctacctttggttgttcatgcacagattgcttctttcaaaaatgttgtcctgctgaagctggagttcttttggcttataataaaaaccaacaaattaaaatcccacctggt

SEQ ID NO: 432655 - DNA, 120 bp, Artificial Sequence
  ENSG00000152455_6 (sequence is synthesized)
actcccatctatgaatgcaactcaaggtgtcagtgtggtcctgattgtcccaataggattgtacaaaaaggcacacagtattcgctttgcatctttcgaactagcaatggacgtggctgg

SEQ ID NO: 432656 - DNA, 120 bp, Artificial Sequence
  ENSG00000152455_7 (sequence is synthesized)
ggtgtaaagacccttgtgaagattaaaagaatgagttttgtcatggaatatgttggagaggtaatcacaagtgaagaagctgaaagacgaggacagttctatgacaacaagggaatcacg

SEQ ID NO: 432657 - DNA, 120 bp, Artificial Sequence
  ENSG00000152455_8 (sequence is synthesized)
tatctctttgatctggactatgagtctgatgaattcacagtggatgcggctcgatacggcaatgtgtctcattttgtgaatcacagctgtgacccaaatcttcaggtgttcaatgttttc

SEQ ID NO: 432658 - DNA, 120 bp, Artificial Sequence
  ENSG00000152455_9 (sequence is synthesized)
attgataacctcgatactcgtcttccccgaatagcattgttttccacaagaaccataaatgctggagaagagctgacttttgattatcaaatgaaaggttctggagatatatcttcagat

SEQ ID NO: 432659 - DNA, 120 bp, Artificial Sequence
  ENSG00000152455_10 (sequence is synthesized)
tctattgaccacagcccagccaaaaagagggtcagaacagtatgtaaatgtggagctgtgacttgcagaggttacctcaactgaactttttcaggaaatagagctgatgattataatatt

SEQ ID NO: 432660 - DNA, 120 bp, Artificial Sequence
  ENSG00000152455_11 (sequence is synthesized)
tttttcctaatgttaacatttttaaaaatacatatttgggactcttattatcaaggttctacctatgttaatttacaattcatgtttcaagacatttgccaaatgtattaccgatgcctc

SEQ ID NO: 432661 - DNA, 120 bp, Artificial Sequence
  ENSG00000152455_12 (sequence is synthesized)
tttacagcttagtatatgtgtacttaagtctatgtgaacagagaaatgcctcccgtagtgtttgaaagcgttaagctgataatgtaattaacaactgctgagagatcaaagattcaactt

SEQ ID NO: 432662 - DNA, 120 bp, Artificial Sequence
  ENSG00000152455_13 (sequence is synthesized)
gccatacacctcaaattcggagaaacagttaatttgggcaaatctacagttctgtttttgctactctattgtcattcctgtttaatactcactgtacttgtatttgagacaaataggtga

SEQ ID NO: 432663 - DNA, 120 bp, Artificial Sequence
  ENSG00000152455_14 (sequence is synthesized)
tactgaattttatactgttttctacttttccattaaaacattggcacctcaatgataaagaaatttaaggtataaaattaaatgtaaaaattaatttcagcttcatttcgtatttcgaag

SEQ ID NO: 432664 - DNA, 120 bp, Artificial Sequence
  ENSG00000152455_15 (sequence is synthesized)
caatctagactgttgtgatgagtgtatgtctgaacctgtaattcttaaaagacttcttaatcttctagaagaaaaatctccgaagagctctctctagaagtccaaaatggctagccatta

SEQ ID NO: 432665 - DNA, 120 bp, Artificial Sequence
  ENSG00000152455_16 (sequence is synthesized)
tgcttctttgaaaggacatgataatgggaccaggatggttttttggagtaccaagcaaggggaatggagcactttaagggcgcctgttagtaacatgaattggaaatctgtgtcgagtac

SEQ ID NO: 432666 - DNA, 120 bp, Artificial Sequence
  ENSG00000152455_17 (sequence is synthesized)
ctctgatctaaacggtaaaacaagctgcctggagagcagctgtacctaacaatactgtaatgtacattaacattacagcctctcaatttcaggcaggtgtaacagttcctttccaccaga

SEQ ID NO: 432667 - DNA, 120 bp, Artificial Sequence
  ENSG00000152455_18 (sequence is synthesized)
tttaatatttttatacttcctgcaggttcttcttaaaaagtaatctatatttttgaactgatacttgttttatacataaattttttttagatgtgataaagctaaacttggccaaagtgt

SEQ ID NO: 432668 - DNA, 120 bp, Artificial Sequence
  ENSG00000152455_19 (sequence is synthesized)
gtgcctgaattattagacctttttattagtcaacctacgaagactaaaatagaatatattagttttcaagggagtgggaggcttccaacatagtattgaatctcaggaaaaactattctt

SEQ ID NO: 432669 - DNA, 120 bp, Artificial Sequence
  ENSG00000152455_20 (sequence is synthesized)
tcatgtctgattctgagatttctaattgtgttgtgaaaatgataaatgcagcaaatctagctttcagtattcctaatttttacctaagctcattgctccaggctttgattacctaaaata

SEQ ID NO: 432670 - DNA, 120 bp, Artificial Sequence
  ENSG00000152455_21 (sequence is synthesized)
agcttggataaaattgaaccaacttcaagaatgcagcacttcttaatctttagctctttcttgggagaagctagactttattcattatattgctatgacaacttcactctttcataatat

SEQ ID NO: 432671 - DNA, 120 bp, Artificial Sequence
  ENSG00000152455_22 (sequence is synthesized)
acttcactctttcataatatataggataaattgtttacatgattggaccctcagattctgttaaccaaaattgcagaatggggggccaggcctgtgtggtggctcacacctgtgatccca

SEQ ID NO: 432672 - DNA, 120 bp, Artificial Sequence
  ENSG00000152455_23 (sequence is synthesized)
gccagtttgaatgaaagctctacaagatggcggcggtcggggccgaggcgcgaggagcttggtgtgtgccttgcctagtttcacttgatactcttcaggaattatgtagaaaagaaaagc

SEQ ID NO: 432673 - DNA, 120 bp, Artificial Sequence
  ENSG00000152455_24 (sequence is synthesized)
tgaactatttaattttgtcagtgaaatctttttctgcattactggagactgtcgagagattgtctttctttttttaaccacgtgtttgcagtttttcatgttcacttttttttttttttt

SEQ ID NO: 432674 - DNA, 120 bp, Artificial Sequence
  ENSG00000152455_25 (sequence is synthesized)
aattttcaaagagcatttcctttgcgggttgtgttttgaatcctcaactagataaaaatgtttaggaaaagcacacaaacacaccttgagtagataagaggaacctcctttatacgtgat

SEQ ID NO: 432675 - DNA, 120 bp, Artificial Sequence
  ENSG00000152455_26 (sequence is synthesized)
atcccgtcagaccgcgccagtttgaatgaaagctctacaagatggcggcggtcggggccgaggcgcgaggaggtgaggctggagcgcggccccctcgccttccctgttcccagcttggtg

SEQ ID NO: 432676 - DNA, 120 bp, Artificial Sequence
  ENSG00000152457_0 (sequence is synthesized)
ggcttcccggaagtggcggcgcggtcagggctggccttggcttcagctgcggttttggggtcccggactctgggatcggcggcgctatgagttctttcgaggggcagatggccgagtatc

SEQ ID NO: 432677 - DNA, 120 bp, Artificial Sequence
  ENSG00000152457_1 (sequence is synthesized)
caactatctccatagaccgcttcgatagggagaacctgagggcccgcgcctacttcctgtcccactgccacaaagatcacatgaaaggattaagagcccctaccttgaaaagaaggttgg

SEQ ID NO: 432678 - DNA, 120 bp, Artificial Sequence
  ENSG00000152457_2 (sequence is synthesized)
agtgcagcttgaaggtttatctatactgttcacctgtgactaaggagttgttgttaacgagcccgaaatacagattttggaagaaacgaattatatctattgaaatcgagactcctaccc

SEQ ID NO: 432679 - DNA, 120 bp, Artificial Sequence
  ENSG00000152457_3 (sequence is synthesized)
agatatctttagtggatgaagcatcaggagagaaggaagagattgttgtgactctcttaccagctggtcactgtccgggatcagttatgtttttatttcagggcaataatggaactgtcc

SEQ ID NO: 432680 - DNA, 120 bp, Artificial Sequence
  ENSG00000152457_4 (sequence is synthesized)
tgtacacaggagacttcagattggcgcaaggagaagctgctagaatggagcttctgcactccgggggcagagtcaaagacatccaaagtgtatatttggatactacgttctgtgatccaa

SEQ ID NO: 432681 - DNA, 120 bp, Artificial Sequence
  ENSG00000152457_5 (sequence is synthesized)
gattttaccaaattccaagtcgggaggagtgtttaagtggagtcttagagctggtccgaagctggatcactcggagcccgtaccatgttgtgtggctgaactgcaaagcggcttatggct

SEQ ID NO: 432682 - DNA, 120 bp, Artificial Sequence
  ENSG00000152457_6 (sequence is synthesized)
atgaatatctgttcaccaaccttagtgaagaattaggagtccaggttcatgtgaataagctagacatgtttaggaacatgcctgagatccttcatcatctcacaacagaccgcaacactc

SEQ ID NO: 432683 - DNA, 120 bp, Artificial Sequence
  ENSG00000152457_7 (sequence is synthesized)
agatccatgcatgccggcatcccaaggcagaggaatattttcagtggagcaaattaccctgtggaattacttccagaaatagaattccactccacataatcagcattaagccatccacca

SEQ ID NO: 432684 - DNA, 120 bp, Artificial Sequence
  ENSG00000152457_8 (sequence is synthesized)
tgtggtttggagaaaggagcagaaaaacaaatgtaattgtgaggactggagagagttcatacagagcttgtttttcttttcactcctcctacagtgagattaaagatttcttgagctacc

SEQ ID NO: 432685 - DNA, 120 bp, Artificial Sequence
  ENSG00000152457_9 (sequence is synthesized)
tctgtcctgtgaacgcatatccaaatgtcattccagttggcacaactatggataaagttgtcgaaatcttaaagcctttatgccggtcttcccaaagtacggagccaaagtataaaccac

SEQ ID NO: 432686 - DNA, 120 bp, Artificial Sequence
  ENSG00000152457_10 (sequence is synthesized)
tgggaaaactgaagagagctagaacagttcaccgagactcagaggaggaagatgactatctctttgatgatcctctgccaatacctttaaggcacaaagttccatacccggaaacttttc

SEQ ID NO: 432687 - DNA, 120 bp, Artificial Sequence
  ENSG00000152457_11 (sequence is synthesized)
accctgaggtattttcaatgactgcagtatcagaaaagcagcctgaaaaactgagacaaaccccaggatgctgcagagcagagtgtatgcagagctctcgtttcacaaactttgtagatt

SEQ ID NO: 432688 - DNA, 120 bp, Artificial Sequence
  ENSG00000152457_12 (sequence is synthesized)
gtgaagaatccaacagtgaaagtgaagaagaagtaggaatcccagcttcactgcaaggagatctgggctctgtacttcacctgcaaaaggctgatggggatgtaccccagtgggaagtat

SEQ ID NO: 432689 - DNA, 120 bp, Artificial Sequence
  ENSG00000152457_13 (sequence is synthesized)
tctttaaaagaaatgatgaaatcacagatgagagtttggaaaacttcccttcctccacagtggcagggggatctcagtcaccaaagcttttcagtgactctgatggagaatcaactcaca

SEQ ID NO: 432690 - DNA, 120 bp, Artificial Sequence
  ENSG00000152457_14 (sequence is synthesized)
tctcctcccagaattcttcccagtcaacacacataacagaacaaggaagtcaaggctgggacagccaatctgatactgttttgttatcttcccaagagagaaacagtggggatattactt

SEQ ID NO: 432691 - DNA, 120 bp, Artificial Sequence
  ENSG00000152457_15 (sequence is synthesized)
ccttggacaaagctgactacagaccaacaatcaaagagaatattcctgcctctctcatggaacaaaatgtaatttgcccaaaggatacttactctgatttgaaaagcagagataaagatg

SEQ ID NO: 432692 - DNA, 120 bp, Artificial Sequence
  ENSG00000152457_16 (sequence is synthesized)
tgacaatagttcctagtactggagaaccaactactctaagcagtgagacacatatacccgaggaaaaaagtttgctaaatcttagcacaaatgcagattcccagagctcttctgattttg

SEQ ID NO: 432693 - DNA, 120 bp, Artificial Sequence
  ENSG00000152457_17 (sequence is synthesized)
aagttccctcaactccagaagctgagttacctaaacgagagcatttacaatatttatatgagaagctggcaactggtgagagtatagcagtcaaaaaaagaaaatgctcactcttagata

SEQ ID NO: 432694 - DNA, 120 bp, Artificial Sequence
  ENSG00000152457_18 (sequence is synthesized)
cctaagaattcaaagcgtttcaacctagagcaaccactaaaaaacctgcacagagatgacagtcaatattacaatagagaaaatacagtacttaaaaatgttcaaataacctggttgggt

SEQ ID NO: 432695 - DNA, 120 bp, Artificial Sequence
  ENSG00000152457_19 (sequence is synthesized)
tcacacttgtaatcccagcactttgaggtgggcaatggcttgagcccaggagttcgacaccagcctggccaacacagtgaaatgtgtctctacttacaaaaaaaaaaaaaaaaaaaaaag

SEQ ID NO: 432696 - DNA, 60 bp, Artificial Sequence
  ENSG00000152457_20 (sequence is synthesized)
tctctagtctgggtgacagagcaagaccctgtttaaaaaagaaaaaggccaggcacggtg

SEQ ID NO: 432697 - DNA, 67 bp, Artificial Sequence
  ENSG00000152457_21 (sequence is synthesized)
gccatgactgtgccactgcacctctagtctgggtgacagagcaagaccctgtttaaaaaacaaggca

SEQ ID NO: 432698 - DNA, 70 bp, Artificial Sequence
  ENSG00000152457_22 (sequence is synthesized)
gaactaaacccatacgtatcaatgattacattaaatgtaaatggtctaagtgcatcaatgacaagagaca

SEQ ID NO: 432699 - DNA, 120 bp, Artificial Sequence
  ENSG00000152457_23 (sequence is synthesized)
ttaaatgtaaatggtctaagtgcatcaatgacaagagacacggaaaaaaccaacataacccagtgatctgctgtctataaagaaagtcaattcaagtgattgataggttaaaaggatgga

SEQ ID NO: 432700 - DNA, 120 bp, Artificial Sequence
  ENSG00000152457_24 (sequence is synthesized)
aaaataatcctaaacgtatatgcacctaacagctccaaaaatttatgaagctagaacagctgaaaagagacaaactaatgcacaattacagctagggattaatttaacatccctccttag

SEQ ID NO: 432701 - DNA, 120 bp, Artificial Sequence
  ENSG00000152457_25 (sequence is synthesized)
taacagaactagtatatacacattaatcagtaagaatatagaactgaaaatcataagccgactggattaaattgacatttatagaacacaccaccccaaactagcagaatgtatctcctg

SEQ ID NO: 432702 - DNA, 120 bp, Artificial Sequence
  ENSG00000152457_26 (sequence is synthesized)
aagtacacatggaacattcagcatgatcatatctttgctcataaacacacctgatttaaattgacaaacttggatctagtatgataaactgatggctatagacaaaatcagcaccttatt

SEQ ID NO: 432703 - DNA, 120 bp, Artificial Sequence
  ENSG00000152457_27 (sequence is synthesized)
tatccccaaagatgttaagtcacttaaccttgatgtgaatacggtggccaaattagaagcggacaattagaatataaaagaaaatgctcaagaattaaatggtggccaggcacagtaact

SEQ ID NO: 432704 - DNA, 120 bp, Artificial Sequence
  ENSG00000152457_28 (sequence is synthesized)
cctgcctgcaatcccagtactttgggaggctcgcttgagctcagggttttgagtccagcctgggcaacacacagggagaccctgtctccacaaaatgttagccagacatggtggtgtgca

SEQ ID NO: 432705 - DNA, 120 bp, Artificial Sequence
  ENSG00000152457_29 (sequence is synthesized)
ggtgtgcacctgtagtcctcgctacttggaaggcttaggtggcaggatggattgagcccaggaggttgaaactgcagtgagctgattgtgcccagcctgggcaacaaagcaagaccccat

SEQ ID NO: 432706 - DNA, 120 bp, Artificial Sequence
  ENSG00000152457_30 (sequence is synthesized)
aaataaattaaaaaaaactaaagtatatgtgttattctgtgagtcattcaacattcttgaagtccatcaatgtgttaggcttttgtgttatgtatgaggatttttaacaagttttaacag

SEQ ID NO: 432707 - DNA, 120 bp, Artificial Sequence
  ENSG00000152457_31 (sequence is synthesized)
atattcaggaacacttagttattgtgacatttcatagattatggaagcaaaagcagagacaccacttaaaacaatttgcagatcagttaaactaacacttgatatgcattatcatgatgc

SEQ ID NO: 432708 - DNA, 120 bp, Artificial Sequence
  ENSG00000152457_32 (sequence is synthesized)
tgcatggcaatccgaccaaaaagtattggatccaccagactaaccagggtaacaagactcagagttagtatacacataactatacacatttgtatatattcactgttaactaaaacttag

SEQ ID NO: 432709 - DNA, 120 bp, Artificial Sequence
  ENSG00000152457_33 (sequence is synthesized)
ttttaacagtgtaccttatgatcgaaagtggttgttcaaaaaatgcctgtaaacattcctctgaatatattcctgttattttataatcacattaatattacatactgttacgtttgtttt

SEQ ID NO: 432710 - DNA, 120 bp, Artificial Sequence
  ENSG00000152457_34 (sequence is synthesized)
atatgtgagtctggcattataaatgctggctgaatgaattgggctaagacaactacaacagatgtgatcaagaaaccgatagtgattaccagaaattatatttggtgcttactctgatga

SEQ ID NO: 432711 - DNA, 120 bp, Artificial Sequence
  ENSG00000152457_35 (sequence is synthesized)
tgctcttaagttttttacagactatatgaactcctttaattttcacaaccaccctttgaggtagatacatttctaatccccatgtacaaatgagacaaaggcacagaggttagttcacat

SEQ ID NO: 432712 - DNA, 120 bp, Artificial Sequence
  ENSG00000152457_36 (sequence is synthesized)
agctatgaggcacaggcagaattcaaacacaggcagtttggcttcagagaccatgatcttaactgctatgctctgatgtctctccaaaaaagtataaacatgagcagggttaattgtagc

SEQ ID NO: 432713 - DNA, 120 bp, Artificial Sequence
  ENSG00000152457_37 (sequence is synthesized)
tgagcagggttaattgtagcagctacttggtttttacgtcaagaatcataaaccacaagaggaaacatgaagtttttgttttttacttttcaagatggagtctcgctctgtcactcaggc

SEQ ID NO: 432714 - DNA, 65 bp, Artificial Sequence
  ENSG00000152457_38 (sequence is synthesized)
tctcgctctgtcactcaggctggaatgcagtggccctatctcagctcactgcaacctcagcctcc

SEQ ID NO: 432715 - DNA, 68 bp, Artificial Sequence
  ENSG00000152457_39 (sequence is synthesized)
cctctaccgtgtccagccgaaacatgaagtttcaaaatgccaagatgtatcacagaagacactcagca

SEQ ID NO: 432716 - DNA, 120 bp, Artificial Sequence
  ENSG00000152457_40 (sequence is synthesized)
gtttcaaaatgccaagatgtatcacagaagacactcagcagtcagccacatttatcttggagaagagttccaggacttaaatgtttgaatagtataaactagttttttaaaaagtctgcc

SEQ ID NO: 432717 - DNA, 120 bp, Artificial Sequence
  ENSG00000152457_41 (sequence is synthesized)
tgaagccgaagattaaatactttaaaaagttcactgggtgatcttggcatgttgacattatcttaacagtctaagcttgttaccttacaccaacctgacaggttcattagaagcacatga

SEQ ID NO: 432718 - DNA, 120 bp, Artificial Sequence
  ENSG00000152457_42 (sequence is synthesized)
atacatataaaaggcataaaagactgggtcaatgaatatgagctctgaattctaaaattcctttgcatttctaggcagtacttaccatagtatgtttacgtacctggtgagtgacaatgc

SEQ ID NO: 432719 - DNA, 120 bp, Artificial Sequence
  ENSG00000152457_43 (sequence is synthesized)
tcaaaaatttctgaagtattcatccacattatgctagcgaaatgtcaaattgtcctttaatattcaaatgcatgaaccatcactccttggccttttggccaagatcaagtgtagtatcaa

SEQ ID NO: 432720 - DNA, 120 bp, Artificial Sequence
  ENSG00000152457_44 (sequence is synthesized)
atgcatgaaccatgaaagctatcttaaaaggaaagtaacatttaaaggaattgaatataaaccttcggttaatcttgctagcacgtagtcaatacatcagtatttttctgccccttttat

SEQ ID NO: 432721 - DNA, 120 bp, Artificial Sequence
  ENSG00000152457_45 (sequence is synthesized)
agtcttactggaaatgactgtaaaacagaaacaaagctaagccatggtaaatagaacattaaatgcccaacctaatttattttgctaagagaaactgatgaactaaaagagaaacaacta

SEQ ID NO: 432722 - DNA, 120 bp, Artificial Sequence
  ENSG00000152457_46 (sequence is synthesized)
ttgtctacattttagatatgggggaaaaaaccctgagattactaattatgtatcaccatcctcttaatgtagatcctgaaaatgatggtatcaatataatacatacagtggattcacctt

SEQ ID NO: 432723 - DNA, 120 bp, Artificial Sequence
  ENSG00000152457_47 (sequence is synthesized)
ttaaactggatctattacctttgatatttgtcttacactgaaaaattctgacatcttcaggaaaccaatatgatggataagctaaatgttgacttaaaatagttaaaccccttaataaca

SEQ ID NO: 432724 - DNA, 120 bp, Artificial Sequence
  ENSG00000152457_48 (sequence is synthesized)
tcctttagtttctattatttcactgcttaagttcagcatctgaataacaaaggtaacataagtagtacttaagatcccaaaggcccattacattctatcaataaagacaaaacaaaacta

SEQ ID NO: 432725 - DNA, 120 bp, Artificial Sequence
  ENSG00000152457_49 (sequence is synthesized)
cggaacgaagaatgatttctaagcgcagttccgcagcccactcacctcgtcggctggggccacctgctctgggagtttcgatttcccttcccgcgactgcacctccacagacatgggcaa

SEQ ID NO: 432726 - DNA, 120 bp, Artificial Sequence
  ENSG00000152457_50 (sequence is synthesized)
cgccttaccagagcaacacctgtgtttgttgggcgggaatgagccttgcactgggcagggctcagggcccatcgcgtgcagcgaagcgcgggtgatttaaacccaagcagcgggcgccta

SEQ ID NO: 432727 - DNA, 120 bp, Artificial Sequence
  ENSG00000152457_51 (sequence is synthesized)
cagttcaccgagactcagggtctcactctgtcactcaggctagaatgcggtggtgccatcatgactccctgtatcctttaactcctgggatcaagcgatcttcctgcctcagcctcctga

SEQ ID NO: 432728 - DNA, 120 bp, Artificial Sequence
  ENSG00000152457_52 (sequence is synthesized)
atagagatgtggggtctcactatgttgcccacactggtctggaactcctgggctcaagtgagcctccagccttgacctccccaagtgctgggattaactgtaactggttgatttatgact

SEQ ID NO: 432729 - DNA, 120 bp, Artificial Sequence
  ENSG00000152457_53 (sequence is synthesized)
ttttaaacaggatttgagcagtacattggaacactgcattactttcattataattaggatgttcaaaaagctatacaactatagctctctacaggacacaactgaatgttaaggactaaa

SEQ ID NO: 432730 - DNA, 120 bp, Artificial Sequence
  ENSG00000152457_54 (sequence is synthesized)
tctgcaagtatatgctctaaatatgatccaggcacatttttcctataacttatatatatgcagttacaaatggaaaattgttaaaaatacaggggagaagctatgttaactttggaatgg

SEQ ID NO: 432731 - DNA, 120 bp, Artificial Sequence
  ENSG00000152457_55 (sequence is synthesized)
aaggttttgtttttgtagaatatgttattttcatgcaattctgtaagtctaagatcgtcatctacagttctgctcttaagaacacaagttttatgacacgctcggcttaagaaaccaaaa

SEQ ID NO: 432732 - DNA, 120 bp, Artificial Sequence
  ENSG00000152457_56 (sequence is synthesized)
gtgtctaaagtactttatgttaccaaccaaatttggctgctgcactcattaagaatgcaacttaaaaaattttggttaacaaaaagagtaatttgattatacaagatcttgtatactgaa

SEQ ID NO: 432733 - DNA, 120 bp, Artificial Sequence
  ENSG00000152457_57 (sequence is synthesized)
taatttataataatctaccactgtctaaaagtgtaagaatcaaaacagccatctaatttagtttcagaattatagatgaatacagataattataggtgacccaattccaactaaaaaatc

SEQ ID NO: 432734 - DNA, 120 bp, Artificial Sequence
  ENSG00000152457_58 (sequence is synthesized)
cagagttgacaactccagatatgtagccatgcttgtgtctttctagtcacagctcaacctacccttcagtttgaagcagtgtggtgccatggtgaagactactgattttagagctttgaa

SEQ ID NO: 432735 - DNA, 120 bp, Artificial Sequence
  ENSG00000152457_59 (sequence is synthesized)
tagagctttgaatctcggttcttattactatgtgacctgtgtgaccttgggcaaggtactcaatttctctacaataatggacataacagtactacttctcaaaaaaaaaaaaaaaaaaaa

SEQ ID NO: 432736 - DNA, 120 bp, Artificial Sequence
  ENSG00000152457_60 (sequence is synthesized)
cagtactacctcactgagttttggagaggattagtgaattaatacatcaagtgcttagaatagtatgtgacacacggcaaatactttttacatttatatatatatatacatatatatgat

SEQ ID NO: 432737 - DNA, 120 bp, Artificial Sequence
  ENSG00000152457_61 (sequence is synthesized)
ttgtatacaaataaatttgctagtatttgtatggtagttttgagaatggtcttcacagttcaaaagtaagttacagattatggatgcaataaatgcttgtgtatattttacaaaactcat

SEQ ID NO: 432738 - DNA, 120 bp, Artificial Sequence
  ENSG00000152457_62 (sequence is synthesized)
aaatatagtatctttcatgttgatccaaaatagagttctgccaactacatttaatcatatttggtcaaatagatgaagtaaattaaaactttcaagtttcaaagcagcatgtgttacatc

SEQ ID NO: 432739 - DNA, 120 bp, Artificial Sequence
  ENSG00000152457_63 (sequence is synthesized)
tgagtttcttcttaggacttttgggtaaaaacagttgtcatattttaaattttacaaatcctaggtttgactagtaggaatgtgtatttgttgaaagatgactatatcaatttgttttaa

SEQ ID NO: 432740 - DNA, 120 bp, Artificial Sequence
  ENSG00000152457_64 (sequence is synthesized)
cgtatattttttattcatataaaagttttttatttctaaatatgccagtgaactcttctcctaaatctgaataaatttctacatatctgcaaatgaaaatatcaaaatgtaccaagtatc

SEQ ID NO: 432741 - DNA, 120 bp, Artificial Sequence
  ENSG00000152457_65 (sequence is synthesized)
tcttaaagagataaaaaggtaattttccaaaagtataaaccttgcatgtccatcatttactacgtggcaaatgaaacatacctctccaacatattccatgacaaaactcattcttttaat

SEQ ID NO: 432742 - DNA, 120 bp, Artificial Sequence
  ENSG00000152457_66 (sequence is synthesized)
cttcacaagggtctttacaccccagccacgtccattgctagttcgaaagatgcaaagcgaatactgtgtgcctttttgtacaatcctattgggacaatcaggaccacactgacaccttga

SEQ ID NO: 432743 - DNA, 120 bp, Artificial Sequence
  ENSG00000152457_67 (sequence is synthesized)
tagcatttagtatatggttaattttccccactactgaggcaaggctcttcttggttcttttacaaatgcccatggatcatgaggttttccactctggctgttgggaccaggacaagacac

SEQ ID NO: 432744 - DNA, 120 bp, Artificial Sequence
  ENSG00000152457_68 (sequence is synthesized)
aaacgaattagcagtcacaacagcagggttgttcctgttgtctctggcattcagcttgaagttactacaggtcagcccggccagcagtcaggaaggaaagctggaagagaagtggagggg

SEQ ID NO: 432745 - DNA, 120 bp, Artificial Sequence
  ENSG00000152457_69 (sequence is synthesized)
aacagagacaaactggaaggcagaatggcccactaggacagaccgaaacccacttctgtctctcacttcctctggcctcaatagtgctggtctcccgctttggctctgaagcacatgcac

SEQ ID NO: 432746 - DNA, 88 bp, Artificial Sequence
  ENSG00000152457_70 (sequence is synthesized)
aggagtaaataagtgcaattcttttgttgttcttttttggagatgaggtgtctctgtgttgcccaggctggcctcaaatctgagtagc

SEQ ID NO: 432747 - DNA, 120 bp, Artificial Sequence
  ENSG00000152457_71 (sequence is synthesized)
tgggatcacagacatgtaccactgtgcccagctaagaaatgcaattctgagaccttgggtttttgtgtatattatagttaatgcccagctaaattctaacttatttgaaaagggatttgt

SEQ ID NO: 432748 - DNA, 120 bp, Artificial Sequence
  ENSG00000152457_72 (sequence is synthesized)
taaacataagcaactgaccttcttggacaaggaaagcaatatattaaaaaagagaaaaaaaaaagaatctttgagtcccattggtgattctcagctcttactgtggatcagaatcacctg

SEQ ID NO: 432749 - DNA, 120 bp, Artificial Sequence
  ENSG00000152457_73 (sequence is synthesized)
gggaatatttaaatgtactgatttctaggcccactagtactcagtgttcaggagatctttgggagtgaggcccaggcattggatatttttttcccaagaggtccctggtgatccccacgt

SEQ ID NO: 432750 - DNA, 120 bp, Artificial Sequence
  ENSG00000152457_74 (sequence is synthesized)
gcagccagcattgagaaccacagccataagagagttctgcttctctttccccagcctccctttatctcccctaacaacctgtttcatcgtagagattgttgatccatgtgattttccttt

SEQ ID NO: 432751 - DNA, 120 bp, Artificial Sequence
  ENSG00000152463_0 (sequence is synthesized)
acctcatttcctgtgtcctctctttctttggcaatccaaagaaagtcatctttcagattgtctgctcagagttcatctcaaagcctggcaaggattggagaggtcaataagagtcagcgc

SEQ ID NO: 432752 - DNA, 120 bp, Artificial Sequence
  ENSG00000152463_1 (sequence is synthesized)
ctttaaaaagaaatctactcactcttctgtgtgcataaggccgagcagaggttcttcgtctcaagaggaactgacttctgttgagcactcaacacgccacagagaccagccatcttgcaa

SEQ ID NO: 432753 - DNA, 120 bp, Artificial Sequence
  ENSG00000152463_2 (sequence is synthesized)
cctcacctcacagcatggagagaggagaccaacctaagagaaccaggaatgaaaacattttcaactgcttatacaaaaaccctgaggcaacttttaagctgatttgctttccctggatgg

SEQ ID NO: 432754 - DNA, 120 bp, Artificial Sequence
  ENSG00000152463_3 (sequence is synthesized)
gaggtggctccactcattttgccaaatggggccaagatactcatgatttgctggaagtgcactccttaaggcttcctggaagagaaagcagagttgaagaacctcttgaaaatgacatct

SEQ ID NO: 432755 - DNA, 120 bp, Artificial Sequence
  ENSG00000152463_4 (sequence is synthesized)
cccagttagttgatgaagttgtttgtgctctgcagccagtcatccaggataaaccatttgcattttttggccacagtatgggatcctacattgcttttaggactgcactaggtctaaaag

SEQ ID NO: 432756 - DNA, 120 bp, Artificial Sequence
  ENSG00000152463_5 (sequence is synthesized)
aaaacaatcaaccagaaccattgcatttatttttgtcaagtgcaactcctgtacattcaaaggcctggcatcgcattcccaaagatgatgaattgtcagaagaacaaataagtcattacc

SEQ ID NO: 432757 - DNA, 120 bp, Artificial Sequence
  ENSG00000152463_6 (sequence is synthesized)
accatctaaggctgttctttcctgtgacttgacatgttttgttggatctgaagacatagcaaaggacatggaagcctggaaagatgtaaccagtggaaatgctaaaatttaccagcttcc

SEQ ID NO: 432758 - DNA, 120 bp, Artificial Sequence
  ENSG00000152463_7 (sequence is synthesized)
agggggtcacttttatcttctggatcctgcgaacgagaaattaatcaagaactacataatcaagtgtctagaagtatcatcgatatccaatttttagatattttccctttcacttttaaa

SEQ ID NO: 432759 - DNA, 120 bp, Artificial Sequence
  ENSG00000152463_8 (sequence is synthesized)
ataatcaaagtaatatcatactcttctcagttattcagatatagctcagttttattcagattggaaattacacattttctactgtcagggagattcgttacataaatatatttacgtatc

SEQ ID NO: 432760 - DNA, 76 bp, Artificial Sequence
  ENSG00000152463_9 (sequence is synthesized)
actgtcagggagattcgttacataaatatatttacgtatctggggacaaaggtcaagccagtaaagaatacttctg

SEQ ID NO: 432761 - DNA, 90 bp, Artificial Sequence
  ENSG00000152463_10 (sequence is synthesized)
ttctggcagagtcttttatcttcctattaaaatctcacttgattctcctttatgggaagtttgtcgacaaaattcatgattagtaaatta

SEQ ID NO: 432762 - DNA, 120 bp, Artificial Sequence
  ENSG00000152463_11 (sequence is synthesized)
tatgggaagtttgtcgacaaaattcatgattagtaaattatccattttttccttcagttagtttaatggtgaagatgattaacaggggaaatgcttgaagtaaatgattgtttcaatggc

SEQ ID NO: 432763 - DNA, 85 bp, Artificial Sequence
  ENSG00000152463_12 (sequence is synthesized)
tggcagacctcacgttgtcatatggattggagaggtcaataagagtcagcgcctttaaaaagaaatctactcactcttctgtgtg

SEQ ID NO: 432764 - DNA, 90 bp, Artificial Sequence
  ENSG00000152463_13 (sequence is synthesized)
atctcggcgctcaagtgatcctcctgcttcagcctacccatgtgctggcgtgagccaccgtaggcgtgagccaccgtgcctggccaaaat

SEQ ID NO: 432765 - DNA, 120 bp, Artificial Sequence
  ENSG00000152463_14 (sequence is synthesized)
acctaagagaaccaggcaggccaccccttgtgccaccaggctcttcctccatcccaggggctccgataccctgcctttgaatgaaaacattttcaactgcttatacaaaaaccctgaggc

SEQ ID NO: 432766 - DNA, 120 bp, Artificial Sequence
  ENSG00000152463_15 (sequence is synthesized)
tgcattttttggccacaggtatttgatatctgttttaaaagacttcaggggagtttcttctatctgaagtttgaggttaatgttattctttgtgttttgtaagatgcatacctttgtatt

SEQ ID NO: 432767 - DNA, 120 bp, Artificial Sequence
  ENSG00000152463_16 (sequence is synthesized)
ggttagacagcatgttaggtaattatggccatcacaacttttacaattcaccagtttgtatggtaagtatacctattttttttccttttaggcaaataaagtcaacacttgtaaaaccaa

SEQ ID NO: 432768 - DNA, 120 bp, Artificial Sequence
  ENSG00000152463_17 (sequence is synthesized)
tggaggcacccccaagcattttgctgaagccaaggaatttgtgaaacaatgtagtcccatcataagggcagatctgaacattgttagaagttgcaccctggaaagatgtaaccagtggaa

SEQ ID NO: 432769 - DNA, 120 bp, Artificial Sequence
  ENSG00000152464_0 (sequence is synthesized)
gggcgccggtgctgttgccttcaggtgaccacggattcgccatcgtgagttccaggtgggcgcgcggggcccacgtagggcaggaggccagccccggggggatcgggcccgggactctgc

SEQ ID NO: 432770 - DNA, 120 bp, Artificial Sequence
  ENSG00000152464_1 (sequence is synthesized)
ggaatctggaggccgaagcccgcgcgcacgcagggtctctgctgcttccccaacgcctgttgcgtggccgcaggacccgccgccctcccggttgggccgcccagtcccgggccgggcgcg

SEQ ID NO: 432771 - DNA, 120 bp, Artificial Sequence
  ENSG00000152464_2 (sequence is synthesized)
tgcacccagagcttccgcgtttctagtccggctcctctgctggattgcagcgccggctgggcaccaggagtacaaagcgaaaacccccgccggcccttctgttctccacggtctccaagg

SEQ ID NO: 432772 - DNA, 120 bp, Artificial Sequence
  ENSG00000152464_3 (sequence is synthesized)
agacacggacaacagaacaacacttccgtgtgctaaatagtaaagcaccaagacagggtcagatgtgttactgggctggagtgtggtggcacaatcacgctcactgcatccttgacctcc

SEQ ID NO: 432773 - DNA, 120 bp, Artificial Sequence
  ENSG00000152464_4 (sequence is synthesized)
cagcctcccaagtagctgggactacaggattttcaaaatggctgcagctcctcaagcaccggggcggggatctctccgtaagacgagacctctggttgtgaagacgtcgttgaacaaccc

SEQ ID NO: 432774 - DNA, 120 bp, Artificial Sequence
  ENSG00000152464_5 (sequence is synthesized)
tgtgaagacgtcgttgaacaacccatacatcatccgctggagcgctctggagagcgaggatatgcacttcatcctacagacgcttgaggacaggcttaaagctattggacttcagaagat

SEQ ID NO: 432775 - DNA, 120 bp, Artificial Sequence
  ENSG00000152464_6 (sequence is synthesized)
aaagcagagagaaatgcagcattgctgttgatattagtgagaatctgaaggagaagaaaacagatgctaagcagcaagtgtcagggtggacgcctgcacacgtcaggaagcagcttgcca

SEQ ID NO: 432776 - DNA, 120 bp, Artificial Sequence
  ENSG00000152464_7 (sequence is synthesized)
ttggcgttaacgaagttaccagagccctggaaaggagggaactgctgttagttctggtgtgtaaatcagtcaagcctgccatgatcacctcacacttgattcagttaagcctaagcagaa

SEQ ID NO: 432777 - DNA, 120 bp, Artificial Sequence
  ENSG00000152464_8 (sequence is synthesized)
gtgtccctgcctgtcaggtcccccggctcagtgagagaatcgcccccgtcattggcttaaaatgtgttctagccttggcgttcaaaaagaacaccactgactttgtggacgaagtaagag

SEQ ID NO: 432778 - DNA, 120 bp, Artificial Sequence
  ENSG00000152464_9 (sequence is synthesized)
ccatcatccccagagtccccagtttaagtgtaccatggcttcaagacagaattgaagattctggggaaaatttagagactgaacctctggaaagccaagacagagagcttttggacactt

SEQ ID NO: 432779 - DNA, 120 bp, Artificial Sequence
  ENSG00000152464_10 (sequence is synthesized)
catttgaagatctgtcaaaacctaagagaaagcttgctgacggtcggcaggcttctgtaacattacaaccccttaaaataaagaaactgattccaaaccctaataagataaggaaaccac

SEQ ID NO: 432780 - DNA, 120 bp, Artificial Sequence
  ENSG00000152464_11 (sequence is synthesized)
ccaaaagtaaaaaagctactccaaagtaatcttgcataaacttgtcatgtcatacagtttgtgaaaggacaccttgtaaagaagccttgaaactaataaaatgagttatacttacataga

SEQ ID NO: 432781 - DNA, 120 bp, Artificial Sequence
  ENSG00000152464_12 (sequence is synthesized)
gcgcacgcgcggcgcaggcgcactgggcgccggtgctgttgccttcaggtgaccacggattcgccatcgtgagttccaggattttcaaaatggctgcagctcctcaagcaccggggcggg

SEQ ID NO: 432782 - DNA, 120 bp, Artificial Sequence
  ENSG00000152464_13 (sequence is synthesized)
ctcgttgtgtcgtttccgggtcgcgcgacgctgtgggccgctttcccctctccggagtgacctaacacaggataacgaaacctgcactgctccgagcgcttcctccccggcccgtcgcgt

SEQ ID NO: 432783 - DNA, 61 bp, Artificial Sequence
  ENSG00000152464_14 (sequence is synthesized)
ttaacgaagttaccagagccctggaaaggagggaactgctgttagttctcgcctcctgggt

SEQ ID NO: 432784 - DNA, 120 bp, Artificial Sequence
  ENSG00000152464_15 (sequence is synthesized)
agtgttgaaaaaaagcagacaatctgaggatgatgttgacttggggatccaaaggcacaggtgacaacatcaaaactacctgcaagtctcacttcatggaacacaacagaaactctgcat

SEQ ID NO: 432785 - DNA, 120 bp, Artificial Sequence
  ENSG00000152465_0 (sequence is synthesized)
agtacggcgggaggcactagagggagctgcggccgctccggcccggccccgagcaccgcctccccagccagcgccgccgcgatggcggaggacagcgagtctgcggccagccagcagagc

SEQ ID NO: 432786 - DNA, 120 bp, Artificial Sequence
  ENSG00000152465_1 (sequence is synthesized)
ctggaactggacgaccaggacacgtgcgggatagacggggacaatgaggaggagacggagcacgccaaaggaagtcctggagggtatttgggagccaaaaagaaaaagaagaaacagaag

SEQ ID NO: 432787 - DNA, 120 bp, Artificial Sequence
  ENSG00000152465_2 (sequence is synthesized)
agaaaaaaggagaaaccaaattccggaggcaccaagtcagactcggcatctgattcccaggagattaaaattcagcagccttcgaaaaatcccagtgttccaatgcagaagttgcaggat

SEQ ID NO: 432788 - DNA, 120 bp, Artificial Sequence
  ENSG00000152465_3 (sequence is synthesized)
atccagagagcaatggagctgctatccgcatgccagggcccagccaggaacattgatgaggctgcaaagcacagataccagttttgggacacacaaccggtaccaaaactagatgaagtc

SEQ ID NO: 432789 - DNA, 120 bp, Artificial Sequence
  ENSG00000152465_4 (sequence is synthesized)
ataacatctcatggtgcaattgaaccagataaagacaacgtacgccaagaaccgtattctttgccacagggttttatgtgggacactttagacttgagtgatgccgaagtgctcaaggag

SEQ ID NO: 432790 - DNA, 120 bp, Artificial Sequence
  ENSG00000152465_5 (sequence is synthesized)
ttatacacgttgttaaatgagaattacgtagaagatgatgacaatatgttccgatttgactattcacccgagttcctgttgtgggctctgcgtccaccaggctggctcctgcagtggcac

SEQ ID NO: 432791 - DNA, 120 bp, Artificial Sequence
  ENSG00000152465_6 (sequence is synthesized)
tgtggggtcagagtgtcttcaaataaaaaactggtcgggttcataagtgccatcccagcaaacattcggatttatgacagtgtgaagaagatggtagaaatcaactttctttgtgttcat

SEQ ID NO: 432792 - DNA, 120 bp, Artificial Sequence
  ENSG00000152465_7 (sequence is synthesized)
aagaagttgagatcgaaacgggtagccccagtgctaatccgagagatcactagaagagtgaacctggaagggatcttccaggctgtgtacaccgcgggagtggttcttcctaagcccata

SEQ ID NO: 432793 - DNA, 120 bp, Artificial Sequence
  ENSG00000152465_8 (sequence is synthesized)
gccacatgcagatactggcatcgatcactaaaccccagaaaattggtagaagtgaaattttctcacttgagtagaaatatgactttacagagaacaatgaagctatacagacttccagat

SEQ ID NO: 432794 - DNA, 120 bp, Artificial Sequence
  ENSG00000152465_9 (sequence is synthesized)
gttacaaagacttcaggtttgagaccaatggaaccaaaagatatcaaatcagttcgagaattaatcaacacttacctgaagcagtttcatctggctccagtgatggatgaagaggaagta

SEQ ID NO: 432795 - DNA, 120 bp, Artificial Sequence
  ENSG00000152465_10 (sequence is synthesized)
gcccactggttcctcccccgggagcacattattgacacgtttgtagtggagagccccaacggtaaactgactgatttcctgagcttctatacgctcccctccacggtgatgcaccaccct

SEQ ID NO: 432796 - DNA, 120 bp, Artificial Sequence
  ENSG00000152465_11 (sequence is synthesized)
gctcacaagagcctcaaagccgcctactcattctacaacatccacacagagacgcccctgctggacctcatgagcgacgcgctcatcctggctaaatcgaaaggatttgatgtattcaat

SEQ ID NO: 432797 - DNA, 120 bp, Artificial Sequence
  ENSG00000152465_12 (sequence is synthesized)
gcactggatttgatggaaaataagacattcttggaaaaactcaagtttggtataggagatggcaatttgcagtattacctgtacaattggaggtgtccaggtacagattctgaaaaggtt

SEQ ID NO: 432798 - DNA, 120 bp, Artificial Sequence
  ENSG00000152465_13 (sequence is synthesized)
ggactagtactacaatagatggatatttttatttctagaactctgacatcatcatttgttaatatttaatgatttctggaactgccattccaaagaagaataaaagcacaactcaagtga

SEQ ID NO: 432799 - DNA, 120 bp, Artificial Sequence
  ENSG00000152465_14 (sequence is synthesized)
aattgaagtagtcgataatcagaaaagatgacaaaagtccacatgtgacatttgtacgtttctagctagaatgttaaacttcatcctttttttactgttgacctatttgtgggagggatg

SEQ ID NO: 432800 - DNA, 120 bp, Artificial Sequence
  ENSG00000152465_15 (sequence is synthesized)
aaaggctacaaagagcacattcttgtaattttcaaatttttgcctgtctcttgaagaggtattttttcacccttagaaaagggactgtttttctatggactaagtagaagttacagagtc

SEQ ID NO: 432801 - DNA, 120 bp, Artificial Sequence
  ENSG00000152465_16 (sequence is synthesized)
atgtaagaaaatctttgctattgtgtggagagaaattgctgcatttctgtttcttaagtgatggtacatttgtccatgtaacagaacaaaagatccatttggaaattttttttactggta

SEQ ID NO: 432802 - DNA, 120 bp, Artificial Sequence
  ENSG00000152465_17 (sequence is synthesized)
tcaccttacatggtatcactgggaacatttatggaatcaacacttctgtagctcagtgacaggtggtggttgtttaagtgcagagcaatattaaaatgtactggtgactagtacatgtat

SEQ ID NO: 432803 - DNA, 120 bp, Artificial Sequence
  ENSG00000152465_18 (sequence is synthesized)
ttctccataagcagagttgccgaatcaataaacatgcaagtttgtactttgatctttaccaggtcagtggattgcttcaaaagcagagttttgtgcaagcactcactgtgctctctgaaa

SEQ ID NO: 432804 - DNA, 120 bp, Artificial Sequence
  ENSG00000152465_19 (sequence is synthesized)
actaactagacttttctgctgttgtgcaaagttcagtttcttctcagcaacatcaaggatatatgaagaaaaggaaataaaaaactgtaaagtcaaaagagatgcctggtggaacttatt

SEQ ID NO: 432805 - DNA, 120 bp, Artificial Sequence
  ENSG00000152465_20 (sequence is synthesized)
cgtgctatcagggcattgatagtttgaatgtttttattacttatgcaaaattgcacatactcctctatgctgattttatcatgaaaactgtcatgtgtcatgctaatggaaaatgtctta

SEQ ID NO: 432806 - DNA, 120 bp, Artificial Sequence
  ENSG00000152465_21 (sequence is synthesized)
tttgtaaataagtattcataattttgttactgatggtgtttttaatctagaatttgaaaaactttcatggcttacagatgtgtgtttatattgccaataatctgcgggaaaaataagatg

SEQ ID NO: 432807 - DNA, 120 bp, Artificial Sequence
  ENSG00000152465_22 (sequence is synthesized)
tgtgtttatattgccaataatctgcgggaaaaataagatgctaaccgaggccacgtagcctggcctcaactcagataccacaaagtagatgccttggctgggtgtggtggctcacgcctg

SEQ ID NO: 432808 - DNA, 120 bp, Artificial Sequence
  ENSG00000152465_23 (sequence is synthesized)
ttccctgcttttactgggccagtgcctaggaagttcagtgcagaagttaattgttttagacatgatggcatttccttcaagttatgagtccagtgaaaccaatcatatcttatcccaggc

SEQ ID NO: 432809 - DNA, 120 bp, Artificial Sequence
  ENSG00000152465_24 (sequence is synthesized)
aggggccaccaaactatggcctgtgggctaaatccagcccattgcttatttttgtgtagcccacaggctaagaatgtttttattttctggaatggttgaggagaaaaagccaaaaaatga

SEQ ID NO: 432810 - DNA, 120 bp, Artificial Sequence
  ENSG00000152465_25 (sequence is synthesized)
catcattttgtgacatgtgcaaattacacaaaattcaaattccggtgtccctcaataaggttttattggaacatagccatactttttttttttttttttttaggacagggtctcactcta

SEQ ID NO: 432811 - DNA, 120 bp, Artificial Sequence
  ENSG00000152465_26 (sequence is synthesized)
ttgtccaggctagaatacagtggcacagtcaacagctcactgcagccccaaactcctgggttaaaatgatcctcctgcttcagcgtctttttgaagaaaaagaactagctgggcgtgcat

SEQ ID NO: 432812 - DNA, 89 bp, Artificial Sequence
  ENSG00000152465_27 (sequence is synthesized)
cagcgtctttttgaagaaaaagaactagctgggcgtgcataccaccacgcctggctaagtttttctcccgtgctggtctttaactcctg

SEQ ID NO: 432813 - DNA, 120 bp, Artificial Sequence
  ENSG00000152465_28 (sequence is synthesized)
ggattatagacatgagccaccactcttggccacagccactttcatttacatattgcctatggctgcttcacactacaaagctgagttgagttgttgtgacagattgtgtggcctgcaaag

SEQ ID NO: 432814 - DNA, 120 bp, Artificial Sequence
  ENSG00000152465_29 (sequence is synthesized)
cctaagatattcactctctggtcttttacagaaagtttgttgaccttggtcactacgaaggagttggaactctcctttctataggttgccgtgattctaaagaccaacccacagctgtga

SEQ ID NO: 432815 - DNA, 120 bp, Artificial Sequence
  ENSG00000152465_30 (sequence is synthesized)
catccctgagactaccaccagagggcgactgggccccacagtagtacataatataggacctctcttggagataatggaagacttggaatttcagatggttccaccctaattgcattagcg

SEQ ID NO: 432816 - DNA, 120 bp, Artificial Sequence
  ENSG00000152465_31 (sequence is synthesized)
ttctttcttaacaggagaaaggcttcaagaaacaaaacagtcctcattcactggaacagggtttgagataccagcattaagtaaatgagattttgacttaacctggagtcaaggctctaa

SEQ ID NO: 432817 - DNA, 120 bp, Artificial Sequence
  ENSG00000152465_32 (sequence is synthesized)
acctggagtcaaggctctaatttaggactttacttcccactcattttcatgccacaaagtctatacaaagtaggttttcaaataattgcagaatcagccaggcacggtggctcacacctg

SEQ ID NO: 432818 - DNA, 74 bp, Artificial Sequence
  ENSG00000152465_33 (sequence is synthesized)
agatcacttgaggtcaggagtcttacaaaaactagccggacatgggggtgtgcacctgtaatcccagctattca

SEQ ID NO: 432819 - DNA, 120 bp, Artificial Sequence
  ENSG00000152465_34 (sequence is synthesized)
agtaaaataaataactgcagcattgccagttggaaactttgtcatgagcttacctcacggtgacagttacactgctcctttaaagagtcatttacataatttgttatcaaattattaacc

SEQ ID NO: 432820 - DNA, 120 bp, Artificial Sequence
  ENSG00000152465_35 (sequence is synthesized)
acttttaaatagaataataactacatttgcctccataattgaagcagattactaattaacattttcgagaattaaactgcttgcttatgaagtagctattaaaactaaattgaaatgcaa

SEQ ID NO: 432821 - DNA, 120 bp, Artificial Sequence
  ENSG00000152465_36 (sequence is synthesized)
tatcaacagcaatgctgcatttctctctgctttcttttttcagaaaaggtgttttgttctttttcttcttatcttcaatcttctgaagtccaatagctttaagcctgtcctcaagcgtct

SEQ ID NO: 432822 - DNA, 120 bp, Artificial Sequence
  ENSG00000152465_37 (sequence is synthesized)
gtaggatgaagtgcatatcctcgctctccagagcgctccagcggatgatgtatgggttgttcaacgacgtcttcacaaccagaggtctcgtcttacggagagatccccgccccggtgctt

SEQ ID NO: 432823 - DNA, 120 bp, Artificial Sequence
  ENSG00000152465_38 (sequence is synthesized)
gaggagctgcagccattttgaaaatccttccaagaagcaaaatgacaacagaaaaaattcatgttagcgacaactgcatgacttaagaatatcttgactgtactctctgattcttattta

SEQ ID NO: 432824 - DNA, 120 bp, Artificial Sequence
  ENSG00000152465_39 (sequence is synthesized)
gcatgagccactgcgcccggcctgtactctgattctggataagctagagcaagcctgattatataagtccaattaggtgagcatacgcttgtcttccttttaaagattaagtaattttat

SEQ ID NO: 432825 - DNA, 120 bp, Artificial Sequence
  ENSG00000152465_40 (sequence is synthesized)
gattaagtaattttatttttccccatttttcttacccgattttgaatgctctacgaaggctctttaaaatactcaggactatgggtgagtagtgtttaattttccccatttttttatatg

SEQ ID NO: 432826 - DNA, 120 bp, Artificial Sequence
  ENSG00000152465_41 (sequence is synthesized)
actttgtctttattcctatacaagcaatatgtgaaagttttaattattgcaatcatagtacaattccatttgtctatttcatttattaaaaatattctgtttctacttgttcataattaa

SEQ ID NO: 432827 - DNA, 120 bp, Artificial Sequence
  ENSG00000152465_42 (sequence is synthesized)
gcgctgctgcatcagatgtgtagggactttgttgtgactgtgtgttgaatgccactagtaactggaagctcttgacagcctccttaaaatggactttggcacccaaataacgaaggggta

SEQ ID NO: 432828 - DNA, 120 bp, Artificial Sequence
  ENSG00000152465_43 (sequence is synthesized)
cactgtgcttttgtgtgtgtgtggatacctgctgtgtttttcccttttctcagtgaatttgtatttagattgtcgttctagaagaaagtctcagtgtgagcttgttaggtttttttgaaa

SEQ ID NO: 432829 - DNA, 120 bp, Artificial Sequence
  ENSG00000152465_44 (sequence is synthesized)
ttacactttaatatttgattacttttcgttcagaagatattcacattgtaatttttctgggtgtctgtctaattacctgaatagcacaacaccatctggcagcagatttcagcgggagca

SEQ ID NO: 432830 - DNA, 120 bp, Artificial Sequence
  ENSG00000152467_0 (sequence is synthesized)
ggtgcggggatggggtccgcccgcggcgttgggcgcgctcgccagcccaggggtcgccatgaccgagtggcccaggcccgagcgaagcccgcgcgcggtcacatgggagcccgacaccat

SEQ ID NO: 432831 - DNA, 120 bp, Artificial Sequence
  ENSG00000152467_1 (sequence is synthesized)
agcgaagcccgcgcgcggtcacatgggagcccgacaccatttggaggagattcagagaagcccctgattgctgattctgtccgcctgccacaccggctctgtccggagccactgggactc

SEQ ID NO: 432832 - DNA, 120 bp, Artificial Sequence
  ENSG00000152467_2 (sequence is synthesized)
gggatccagtccacacacacccctcagaggggcactgtggccagagaaatgcttccacggcccaaagcccctgcctcccccagacgcccccagaccccaaccccgagtgagcaggacgca

SEQ ID NO: 432833 - DNA, 120 bp, Artificial Sequence
  ENSG00000152467_3 (sequence is synthesized)
gaccctgggccagcaagccccagggacaccgaagcccagcgtctgcgcttccggcagttccagtaccacgtggcgagcgggccgcacctcgcgctgggccagctctggacgctgtgccgc

SEQ ID NO: 432834 - DNA, 120 bp, Artificial Sequence
  ENSG00000152467_4 (sequence is synthesized)
cagtggctgaggcccgaggcgcgctccaaggagcagatgctggagctgctggtgctggagcagttcctgggcgcgctgcccagcaagatgcggacctgggtgcagtcacagggcccccga

SEQ ID NO: 432835 - DNA, 120 bp, Artificial Sequence
  ENSG00000152467_5 (sequence is synthesized)
agctgcagggaggccgccagcctggtggaggacctcacacagatgtgccagcaggaagttctggtatctctggactcggtcgaaccccaggactggagtttcggtgaggaggaagatggg

SEQ ID NO: 432836 - DNA, 120 bp, Artificial Sequence
  ENSG00000152467_6 (sequence is synthesized)
aagagtccaaggtcccagaaagaaccatcgcaggcgtctgagctgattctggatgcagtggcagcagccccagcactccccgaggaaagtgagtggctggagactacccagctccagcag

SEQ ID NO: 432837 - DNA, 120 bp, Artificial Sequence
  ENSG00000152467_7 (sequence is synthesized)
agtctgcacaccagggcggaggccgaagcgccccgcgcccctggcttgctggggtcccgggcccgcttgcctctgaagccgagtatctgggacgagcctgaggaccttctcgcagggccc

SEQ ID NO: 432838 - DNA, 120 bp, Artificial Sequence
  ENSG00000152467_8 (sequence is synthesized)
ctcagagaatcagtccccgaaggagaaacaggaacactgaccagagcggccgccaccagccatccctcaagcacaccaaaggtggtacccaagaggctgttgcaggcatctcggtagtgc

SEQ ID NO: 432839 - DNA, 120 bp, Artificial Sequence
  ENSG00000152467_9 (sequence is synthesized)
cgcgtgggccccgaggtgggcggcccttccagtgtgccgactgtgggatggtcttcacctgggtcacccacttcatcgagcaccagaagacccatcgcgaggaagggccctttccgtgcc

SEQ ID NO: 432840 - DNA, 120 bp, Artificial Sequence
  ENSG00000152467_10 (sequence is synthesized)
ccgagtgtggcaaggtcttcctgcacaactccgtcctcactgagcatggcaagatccacctgctggagccaccgaggaagaaagccccccggagcaagggcccccgggagtccgtcccac

SEQ ID NO: 432841 - DNA, 120 bp, Artificial Sequence
  ENSG00000152467_11 (sequence is synthesized)
ccagggatggagcccagggcccagtggcccctcgcagccccaaaagacccttccagtgtagcgtctgcgggaaggccttcccctggatggtccacctcattgaccaccagaagctccaca

SEQ ID NO: 432842 - DNA, 120 bp, Artificial Sequence
  ENSG00000152467_12 (sequence is synthesized)
cggcccacggccacatgtgaatggccagcctcgggcctcggccacccggccctgagtccctggggggagctgatgggccccagaagatgggggacatcccccagccccaccaacccctgg

SEQ ID NO: 432843 - DNA, 120 bp, Artificial Sequence
  ENSG00000152467_13 (sequence is synthesized)
ccaccttgggactcctcttgaaggacacaagctgtttctcggaagaccctggacacctgctccgaagccaagcacgggatggggcttcccagggtctcagctgagaagcagcagttccac

SEQ ID NO: 432844 - DNA, 120 bp, Artificial Sequence
  ENSG00000152467_14 (sequence is synthesized)
agcacagcctggtcagtcctgcgcactatagttttgcaagtggcttgaagaggagtttcattcgcgtcccatctttcagaagccttgtccaggtctccctgttagcacctgactcagcgg

SEQ ID NO: 432845 - DNA, 120 bp, Artificial Sequence
  ENSG00000152467_15 (sequence is synthesized)
cagcttctgccgctgggttttcatttcactgtggatatccctgaggccatgagggtgggagccggcctgggcagctccaactccagagaagggtacagctgaccccggctgccctcctgc

SEQ ID NO: 432846 - DNA, 120 bp, Artificial Sequence
  ENSG00000152467_16 (sequence is synthesized)
cagcttagcccccttggaacctaacagataaacagggttttgtttttttccttttttgggtaaagtacatgcaacataaaatttaccatttcagtcattaaaaatgaacagttcagtggc

SEQ ID NO: 432847 - DNA, 120 bp, Artificial Sequence
  ENSG00000152467_17 (sequence is synthesized)
gaaggtgagaggcgcaggcttcctgccccgggccgggccagggggcctgacgtctccgaggaccgaactgccctccttcccgcccacatcgctcccacccctgcccggcccctcccgacc

SEQ ID NO: 432848 - DNA, 120 bp, Artificial Sequence
  ENSG00000152467_18 (sequence is synthesized)
agcaaacctctcctgccccgcggctgtgtttttaattatttttacatataaatgtgctgcacgcctcatctgcctcgaatttctcactcagtcggtgattaaagatccctccatttccca

SEQ ID NO: 432849 - DNA, 120 bp, Artificial Sequence
  ENSG00000152475_0 (sequence is synthesized)
ggcggcccggaggtggcgggaggacggctccgcgctgcatgcggggcggggaccagggacccgtgcgggccgcctccagagaatgaggctgccagccttgagagcaccaccgttacctgg

SEQ ID NO: 432850 - DNA, 120 bp, Artificial Sequence
  ENSG00000152475_1 (sequence is synthesized)
ttgaagaggggaggggaagtccagcattggcctctgcagcgtggatctcccggccaggctctcagctgtcaggtgagtctcacctcacacctctcagaagacatggacaatggcagtgaa

SEQ ID NO: 432851 - DNA, 120 bp, Artificial Sequence
  ENSG00000152475_2 (sequence is synthesized)
tggagccaggaggacccggagtgtcggcttgccactgagaaacggagggcaggaatcctacaaccagaactctgcgccccaggatggaggctccagcccagaaggctgggcagggaggac

SEQ ID NO: 432852 - DNA, 120 bp, Artificial Sequence
  ENSG00000152475_3 (sequence is synthesized)
tccccaaggccgatgcccagggtgcctccggggcccgggagaagaggcccgaggagccgaggcccctcgaagaggaccgagctgggagccgccccactcaaaagggggacctgcgtggag

SEQ ID NO: 432853 - DNA, 120 bp, Artificial Sequence
  ENSG00000152475_4 (sequence is synthesized)
ggctcccggggctgcagcctcggggtgagccccggcccggggacccggcacagcgccgggaccagacccctcgtgcgggagccgtgcggccccacctcttctcagaaccctgagctggtt

SEQ ID NO: 432854 - DNA, 120 bp, Artificial Sequence
  ENSG00000152475_5 (sequence is synthesized)
gccccacctcttctcagaaccctgagctggttatccccgaggggctgcaagcccgggagggcccctgtaggagcccagcgcgtggcggggactgcagcaggaactcctgcctggcgtggc

SEQ ID NO: 432855 - DNA, 120 bp, Artificial Sequence
  ENSG00000152475_6 (sequence is synthesized)
atcgcggggcgcccgctggggagacgccacccgtgtgtgacccctgtccggagcggatccagaaccacccccggactcaactgtgtgaggtccacacggactgttggccgtgccaaccag

SEQ ID NO: 432856 - DNA, 120 bp, Artificial Sequence
  ENSG00000152475_7 (sequence is synthesized)
ggactggcgctccgacctgcccgaggaccccaaagccgacctcccgcgggaggaaccccttggtggagcagccccgggcttgcgcgtgcggcgaggcctttgcgtggagggccctgcgga

SEQ ID NO: 432857 - DNA, 120 bp, Artificial Sequence
  ENSG00000152475_8 (sequence is synthesized)
cggccaaacctcgcgacctcgccctattgtccccgaccccccggcccagcgactgtacgcttgcgacgagtgcggcaaggccttcacgcgcacctccagcctgctgcagcaccagcgcat

SEQ ID NO: 432858 - DNA, 120 bp, Artificial Sequence
  ENSG00000152475_9 (sequence is synthesized)
ccacacgggcgagcggccctacgagtgcgccgagtgcggcaaggccttcgtgcgctgctccggcctgtaccgccaccagaagacgcactcggccgagcgccaccggcgtggccccgtcct

SEQ ID NO: 432859 - DNA, 120 bp, Artificial Sequence
  ENSG00000152475_10 (sequence is synthesized)
ggcgcggcgcgccttccggctggggtgcccgccctgcggggactacagcgagcggagtccccgacgggggtcgggagccggggagaagccgtacgagtgcgccgactgcgccaaggcctt

SEQ ID NO: 432860 - DNA, 120 bp, Artificial Sequence
  ENSG00000152475_11 (sequence is synthesized)
cgggctgttctcgcacctcgtggagcaccggcgcgtgcacaccggcgagaagccctacgcgtgccccgagtgcggcaaggccttcaaccagcgctcgaacctgagccggcaccagcgcac

SEQ ID NO: 432861 - DNA, 120 bp, Artificial Sequence
  ENSG00000152475_12 (sequence is synthesized)
tcacagcagcgccaagccctacgcgtgcccactgtgcgaaaaggccttcaagggccgctcgggcctggtgcaacaccagcgcgcgcacaccggcgagcggccctatggctgctccgagtg

SEQ ID NO: 432862 - DNA, 120 bp, Artificial Sequence
  ENSG00000152475_13 (sequence is synthesized)
cggaaagaccttccgcggctgctccgagctgcgccagcacgagcgcctgcactcgggcgagaagccctacatctgccgcgactgcggcaaggccttcgtgcgcaactgcagcctggtgcg

SEQ ID NO: 432863 - DNA, 120 bp, Artificial Sequence
  ENSG00000152475_14 (sequence is synthesized)
ccacctgcgcacgcacacgggcgagcggccctacgcgtgcggagattgcggccgcgccttcagccaacgctccaacctcaacgagcaccggaagcggcacgggggccgcgccgcgccttg

SEQ ID NO: 432864 - DNA, 120 bp, Artificial Sequence
  ENSG00000152475_15 (sequence is synthesized)
actgcagggagccgagagtcgacgcgtcgcccaagcgaaccctgcgtcgaggaggggcctttgtcccggaaaacccaccaacgtttgtaactttgattaaacttcactttgtacacatgg

SEQ ID NO: 432865 - DNA, 80 bp, Artificial Sequence
  ENSG00000152484_0 (sequence is synthesized)
agtgcctgagcgccggcggcgacgacggcagcggcggcccagcgggctcggtggttgggtccgcggcggctcggggtccg

SEQ ID NO: 432866 - DNA, 120 bp, Artificial Sequence
  ENSG00000152484_1 (sequence is synthesized)
ctcccccgcccgccgccgccgctgtgattgggtggaagatggcgctggccggatggaaatcctaatgacagtctccaaattcgcctccatctgtaccatgggcgccaatgcttcggcatt

SEQ ID NO: 432867 - DNA, 120 bp, Artificial Sequence
  ENSG00000152484_2 (sequence is synthesized)
agagaaagagattggtccagaacagtttccggtcaatgagcactattttggattagtcaattttgggaatacctgctactgcaattcagttcttcaagcactttatttttgtcgtccatt

SEQ ID NO: 432868 - DNA, 120 bp, Artificial Sequence
  ENSG00000152484_3 (sequence is synthesized)
tcgggaaaaagttcttgcgtataagagtcaacctaggaaaaaggagagccttcttacatgcttagcagatctcttccatagcatagccactcagaagaaaaaggttggagtaataccccc

SEQ ID NO: 432869 - DNA, 120 bp, Artificial Sequence
  ENSG00000152484_4 (sequence is synthesized)
taagaagttcatcacaagattacggaaagaaaatgagctttttgacaactacatgcaacaagatgcccatgaattcttaaattacctactaaatacaattgctgatattttacaagaaga

SEQ ID NO: 432870 - DNA, 120 bp, Artificial Sequence
  ENSG00000152484_5 (sequence is synthesized)
gagaaagcaggaaaaacaaaatggtcgtttacctaatggtaatattgataatgaaaataataacagcacaccagacccaacgtgggttcatgagatttttcagggaacattaactaatga

SEQ ID NO: 432871 - DNA, 120 bp, Artificial Sequence
  ENSG00000152484_6 (sequence is synthesized)
aaccagatgtcttacttgtgaaactataagcagcaaagatgaagattttttagacctttctgttgacgtggaacaaaatacatcaattactcactgcttaaggggtttcagcaacacaga

SEQ ID NO: 432872 - DNA, 120 bp, Artificial Sequence
  ENSG00000152484_7 (sequence is synthesized)
aactctgtgcagtgaatacaagtattactgtgaagagtgtcgcagcaaacaggaagcacacaaacggatgaaagttaaaaaactgcccatgattctagctctacacctgaagagatttaa

SEQ ID NO: 432873 - DNA, 120 bp, Artificial Sequence
  ENSG00000152484_8 (sequence is synthesized)
atatatggatcaacttcatcgatatacaaaactctcttaccgggtagtttttcctttagaacttcgtctgtttaacacttcaggtgatgccaccaatccagacagaatgtacgaccttgt

SEQ ID NO: 432874 - DNA, 120 bp, Artificial Sequence
  ENSG00000152484_9 (sequence is synthesized)
tgctgttgtggttcactgtggaagtggtcccaatcgaggccattatattgcaatagttaagagtcatgatttttggttgttgtttgatgacgacattgtagaaaaaatagatgcacaagc

SEQ ID NO: 432875 - DNA, 120 bp, Artificial Sequence
  ENSG00000152484_10 (sequence is synthesized)
tattgaagaattctacgggttgacatcagatatctcaaagaactctgagtctggttacatccttttctatcagtctcgggactgagagggaaccgtgatgaagagacactttctgcctca

SEQ ID NO: 432876 - DNA, 120 bp, Artificial Sequence
  ENSG00000152484_11 (sequence is synthesized)
tttcttctctggttattttggaaaggatcaagcactgatttttcaagaaaagagaaatgcaggaagctcagggggcagtagcacactttgcacacgataaagcaaagacgatggattgac

SEQ ID NO: 432877 - DNA, 120 bp, Artificial Sequence
  ENSG00000152484_12 (sequence is synthesized)
aagcccttccgatcatggtagttgatttatttgctcaggtatcatgctgtctgtacagttccatacaacaaggaggtgaaatcagagataccagctcctcttttaaaacagccttccagt

SEQ ID NO: 432878 - DNA, 120 bp, Artificial Sequence
  ENSG00000152484_13 (sequence is synthesized)
cattggcacgcattttctctttattaattgcaccaataatgctttgaattccttgggggtgcagtagaaagaatcggaatctgtgccgtattgataaggagatgatgttgaacacactgc

SEQ ID NO: 432879 - DNA, 120 bp, Artificial Sequence
  ENSG00000152484_14 (sequence is synthesized)
ataaatttgcctggttcagtatgtatagaagcatattcagtggtcttttcaagagtaaaccagaaatacttttgggcccaacacttgcagttgccttcctgatgtaaaaactaacatgct

SEQ ID NO: 432880 - DNA, 120 bp, Artificial Sequence
  ENSG00000152484_15 (sequence is synthesized)
agataatccagtgtcgggaagacaaagatgttttgcttctctgaagaagcttataataatatacagtatatgtatatgtagggagcaattggtcaaaagtggctttttgtttccccaagg

SEQ ID NO: 432881 - DNA, 120 bp, Artificial Sequence
  ENSG00000152484_16 (sequence is synthesized)
ggaaagactggctttgtaattataattttttccttatttattttacttaaaactggtagagtctaagtattatatgaagtgcccatgattctgtcagtaaatttgaacatatttttatta

SEQ ID NO: 432882 - DNA, 120 bp, Artificial Sequence
  ENSG00000152484_17 (sequence is synthesized)
gttaatgtcagtttaagttgtccttttgtttgtttctatttttaaggtgaattttaatttctatctgaaatcagttaagataccttgagaaaaactgcagtgagaggagataaatatcct

SEQ ID NO: 432883 - DNA, 120 bp, Artificial Sequence
  ENSG00000152484_18 (sequence is synthesized)
ttaaaaaactattttaaaaattcctgtagttgttggaataattaaaaattctggtgcagtggtggtataccaatctttagaattcttaagtattctaatgtttcaagttgagatcatgct

SEQ ID NO: 432884 - DNA, 120 bp, Artificial Sequence
  ENSG00000152484_19 (sequence is synthesized)
tgggaaaatcatgtcatagcatttatgttattttcagatgccattttttaccctggaaagaagtcataatgttcatcataaccctagcagcctggatagtgagctaaacaaacccttcaa

SEQ ID NO: 432885 - DNA, 120 bp, Artificial Sequence
  ENSG00000152484_20 (sequence is synthesized)
agattaaattttaatcaagtagaccgggaatacaaaagacaagtccttccttcccttccccccacctttacaaatcttactggaagggtgttcagaaattaaaatctgtgtttgctaaga

SEQ ID NO: 432886 - DNA, 120 bp, Artificial Sequence
  ENSG00000152484_21 (sequence is synthesized)
cttcattctgttgggggttttaagaagtaatatatgtaacataaaatatatgtaaacgattgcagtttttttggacgtttttccatgcatcagtaagttgtctgacagtagccaaatgta

SEQ ID NO: 432887 - DNA, 120 bp, Artificial Sequence
  ENSG00000152484_22 (sequence is synthesized)
acttgcagaaaattattgaaaattatattcagaataatagcaatcaggccttggatgttctttattaaactcttttcaggcagtaaatttaaaaaaaattgtcattttctaaagtccttt

SEQ ID NO: 432888 - DNA, 120 bp, Artificial Sequence
  ENSG00000152484_23 (sequence is synthesized)
tgctaaaactgttgactatggaaaacaacaaaaaggaattttttagtctgctgctattattaacatttattatctgtatcttttggctcaggaaatgacttcacctattttttccataag

SEQ ID NO: 432889 - DNA, 120 bp, Artificial Sequence
  ENSG00000152484_24 (sequence is synthesized)
cagacctttaacagagtcacttaattgggctgcttaaacagatgttctgggagaaaattataatatttagtatttgtacaaaatatcaaaaagtattttgacaagtttctttttaagata

SEQ ID NO: 432890 - DNA, 120 bp, Artificial Sequence
  ENSG00000152484_25 (sequence is synthesized)
gttcctaaagccttaccctggctagaggtgttttgtacaaattatatataagccagcctgatctaccaacatgccacagagaatcacaatcaacagtgtggggaaagtcagggcagtgga

SEQ ID NO: 432891 - DNA, 120 bp, Artificial Sequence
  ENSG00000152484_26 (sequence is synthesized)
agtggatgcactctttttattttgaaggcttaaaccaaattgtcttggaattaaagctgtatttctgcagctttcggtacagagaaaaagaggaaagtgaagctgtgtcagttttaacat

SEQ ID NO: 432892 - DNA, 120 bp, Artificial Sequence
  ENSG00000152484_27 (sequence is synthesized)
tagctatatcaacatgtttaagaaagatagatgaagtcatttgcataaaggtacagcattgaaatactatgttgtgtttgtttttacatttttgcattaaaaaaaaacatgccgtaaaag

SEQ ID NO: 432893 - DNA, 120 bp, Artificial Sequence
  ENSG00000152484_28 (sequence is synthesized)
ccaagttaaatttcatattaaagcaagttctagtgtatgtgttgagttcctggtaatcacatacttgttcacatctacaccgtacttcatagtatgatttgtcaggggagggattgtggg

SEQ ID NO: 432894 - DNA, 120 bp, Artificial Sequence
  ENSG00000152484_29 (sequence is synthesized)
gtgacagttttacatttactttttcttcttaatgcagctggatctaagtaaaatgttttgaagtttatcagaaactaaatgtacttttaaaacgtatagggtcagggttgggggaaaaat

SEQ ID NO: 432895 - DNA, 120 bp, Artificial Sequence
  ENSG00000152484_30 (sequence is synthesized)
acaggtatagtaagtaagaaaagtgacccatgaagaaagcatcgtgaggttgtatgttggttgactgtgattaaaatgcggggctggtgtaagttgtaagtggtggctgattgccgtgta

SEQ ID NO: 432896 - DNA, 120 bp, Artificial Sequence
  ENSG00000152484_31 (sequence is synthesized)
actatgtacatgattgttgggatggctgtcccatattttgtatattggaataaaaatttctataaattattgtaactaaaagtaaatattctaaattaagtcccacttcttaagtcacat

SEQ ID NO: 432897 - DNA, 120 bp, Artificial Sequence
  ENSG00000152484_32 (sequence is synthesized)
ggcttctgtcttggaaattttacctttaaaagattatttaagacaggaaccaggaggcttgggaacagggaaagagggaaatgttgtattatgtgggtcttggggcctctaaccatcagt

SEQ ID NO: 432898 - DNA, 120 bp, Artificial Sequence
  ENSG00000152484_33 (sequence is synthesized)
atagggttttttctttccttgatggcagtagaaagacctcattttcataacataactactcttgatactttctttaaaaacactttttattaaagattctatcatgaggtatttggctgg

SEQ ID NO: 432899 - DNA, 120 bp, Artificial Sequence
  ENSG00000152484_34 (sequence is synthesized)
gagctgggaggctaaagcgctcatgtcctggctcttcagtgaatttaactgtgtgaccttgggcaagtcacttaacctctctgtgcttcagtctccctgtcttgtaaaatgggagtaata

SEQ ID NO: 432900 - DNA, 120 bp, Artificial Sequence
  ENSG00000152484_35 (sequence is synthesized)
cctacctcacagggttgttgtggggattaattagagataatgtctgtaaagcatttaaggttcttgaagaaggcactatataaatacaaaataatatctattaaagttggtttatttgtg

SEQ ID NO: 432901 - DNA, 120 bp, Artificial Sequence
  ENSG00000152484_36 (sequence is synthesized)
aatttacattgagtaaaaattcttaattctatcactaacagttaatgttcattaagtattactaggtaaatgatattctactcaatgtttattttacaaaaactgtgtaccctgaagtga

SEQ ID NO: 432902 - DNA, 120 bp, Artificial Sequence
  ENSG00000152484_37 (sequence is synthesized)
tttcctatgtctagcgattatttaatcatcataaaccagtacagttaaaatatttggctttgaggctttcctgatgatgtaaacttttttcttggtgaagagggttgagggagatagcac

SEQ ID NO: 432903 - DNA, 120 bp, Artificial Sequence
  ENSG00000152484_38 (sequence is synthesized)
tccccattgcccatcccccacacccccagtttctgcttttcctacataggatgttgtacattctcttagcatgttattgtaagactggtttggtatcaataaatggaataataaacatca

SEQ ID NO: 432904 - DNA, 120 bp, Artificial Sequence
  ENSG00000152484_39 (sequence is synthesized)
ggctcccctcctcccccgcccgccgccgccgctgtgattgggtggaagatggcgctggccggatggaaatcctaatgacagtctccaaattcgcctccatctgtaccatggagtggtgaa

SEQ ID NO: 432905 - DNA, 120 bp, Artificial Sequence
  ENSG00000152484_40 (sequence is synthesized)
atattgaaggatgaatcattgaagactccatttcccaactggatgattgttctttctcacagtttacattttaggaaagcatttgtattaaatggactatattaaaatgattttggagaa

SEQ ID NO: 432906 - DNA, 120 bp, Artificial Sequence
  ENSG00000152492_0 (sequence is synthesized)
atttccgggctccggatatttggtatcgattggggccggggacgcggagcaggtggccgcggcggggcagctgggccgccagcttggtgcctcggggaccgtctcccgctgctttggtca

SEQ ID NO: 432907 - DNA, 120 bp, Artificial Sequence
  ENSG00000152492_1 (sequence is synthesized)
cgacccgctccgttctccggcctgcgagccctgccggccggactttgcgccgcgtccggcgctgctgctgcgctcggggccccgctcggcgccggcggtgaccgggaagcccgcgttaaa

SEQ ID NO: 432908 - DNA, 120 bp, Artificial Sequence
  ENSG00000152492_2 (sequence is synthesized)
ggaagcccgcgttaaaggggcaaccgggaccctggcccggtatggctgaagtcagcatcgaccagtccaagctgcctggagtcaaggaagtatgccgagattttgctgtcctggaggacc

SEQ ID NO: 432909 - DNA, 120 bp, Artificial Sequence
  ENSG00000152492_3 (sequence is synthesized)
acaccctggctcacagcctgcaggaacaagagattgagcatcatttggcatcgaacgttcagcggaaccgtttggtccagcatgatctccaggtggctaagcagctccaagaggaagatc

SEQ ID NO: 432910 - DNA, 120 bp, Artificial Sequence
  ENSG00000152492_4 (sequence is synthesized)
tgaaagcgcaggcccagctccagaagcgctacaaagaccttgaacaacaagactgtgaaattgctcaggaaattcaggagaagctggctattgaggcagagagacgacgcattcaggaga

SEQ ID NO: 432911 - DNA, 120 bp, Artificial Sequence
  ENSG00000152492_5 (sequence is synthesized)
agaaggatgaggacatagctcgccttttgcaagaaaaggagttacaggaagagaaaaagagaaagaaacactttccagagttccctgcaacccgtgcttatgcagatagttactattatg

SEQ ID NO: 432912 - DNA, 120 bp, Artificial Sequence
  ENSG00000152492_6 (sequence is synthesized)
aagatggagaccaaccagggtcaaggagggccagggaattgggttctggattctcaagaccttgtagactccaaagagatggaaagactgtgaagcacaagaaagagaaaccagaacatc

SEQ ID NO: 432913 - DNA, 120 bp, Artificial Sequence
  ENSG00000152492_7 (sequence is synthesized)
cactggagaacttggaagagccagaacaacattgttcatcgaagagatccctgtcatcctctagctcgggcaaagggagggacaatccccatattaacaatgagcagcatgaaaggaaac

SEQ ID NO: 432914 - DNA, 120 bp, Artificial Sequence
  ENSG00000152492_8 (sequence is synthesized)
ggtccactcaggagaggcctcggagacctctgcttcccacgatcagtggtgaagtgtttctgagcactgaatgtgatgactgggagactaagattaaccatcagactcgaaattgggaaa

SEQ ID NO: 432915 - DNA, 120 bp, Artificial Sequence
  ENSG00000152492_9 (sequence is synthesized)
aacagtctcgacaccaagatcgactttcacccaagtcctcacaaaaagcagggcttcactgcaaggaagttgtatatgggagggaccatgggcaaggtgagcacagaaaaaggagacaca

SEQ ID NO: 432916 - DNA, 120 bp, Artificial Sequence
  ENSG00000152492_10 (sequence is synthesized)
ggcccaggactcctccattctcagagagtgaggagcagctccacctccatgacgcaggaatgaagccaagagtgatgaaagaagctgtatctactccatcacgaatggcccacagggatc

SEQ ID NO: 432917 - DNA, 120 bp, Artificial Sequence
  ENSG00000152492_11 (sequence is synthesized)
aggaatggtatgatgctgaaattgccagaaaactgcaagaagaagaacttttggctacccaggtggacatgagagccgctcaagtagctcaagatgaagaaatcgctcgacttctaatgg

SEQ ID NO: 432918 - DNA, 120 bp, Artificial Sequence
  ENSG00000152492_12 (sequence is synthesized)
ctgaagaaaagaaagcttacaaaaaagccaaggagcgggagaaatcatctttggacaaaagaaagcaagaccccgagtggaagccaaaaacagctaaagcagcaaattccaagtcaaaag

SEQ ID NO: 432919 - DNA, 120 bp, Artificial Sequence
  ENSG00000152492_13 (sequence is synthesized)
agagtgatgaacctcaccattctaagaatgaaaggccagcacggccaccaccacctatcatgacagatggtgaagatgcggattacactcattttacaaaccagcagagttccacacggc

SEQ ID NO: 432920 - DNA, 120 bp, Artificial Sequence
  ENSG00000152492_14 (sequence is synthesized)
atttctcaaaatcagagtcctctcataaaggttttcattacaaacattaaaaacctaggaatctgccttgaaaatggactcactatagcaaatattactgggtgatacagaatgaattct

SEQ ID NO: 432921 - DNA, 120 bp, Artificial Sequence
  ENSG00000152492_15 (sequence is synthesized)
acacttactttttttctcctgtgtttgcattcctgggatttatcctcaagtgcatttctgaccataagtaattttaattcatttcaaatgttttggttattcatgatcacttgggcagta

SEQ ID NO: 432922 - DNA, 120 bp, Artificial Sequence
  ENSG00000152492_16 (sequence is synthesized)
taagaaaatgtagcttctgaatattggccacctctatgctgcatatacttcttgggatatagtatctaagacctttgtaaactgccattttgttaggtatggagtttggtatctagggag

SEQ ID NO: 432923 - DNA, 120 bp, Artificial Sequence
  ENSG00000152492_17 (sequence is synthesized)
taggccttatttagcaattcaaattttatggagatgaatgatcaaagtgaaacaatgtttggatgcaacgcagaataaaagaatataagaaatagctttttgttgcattaatgtatgata

SEQ ID NO: 432924 - DNA, 120 bp, Artificial Sequence
  ENSG00000152492_18 (sequence is synthesized)
ttttgaaggacagagcctttgctttttgtattctttaagaaaagcacaaccataaagtattttaaaaaaagaaacacttggagcaattgaaatatgttattctgactagatggactgtag

SEQ ID NO: 432925 - DNA, 120 bp, Artificial Sequence
  ENSG00000152492_19 (sequence is synthesized)
aggttttgcatttctcagccctcctggggagattggcctagatagcattctttaacacttcctctgcttttgcctcagtagcaaggctttcctaagctcctgggcaatggaacatttatt

SEQ ID NO: 432926 - DNA, 120 bp, Artificial Sequence
  ENSG00000152492_20 (sequence is synthesized)
agtatttattgacaaaaatttagttctctgaaattttaactcatatatatgaaaaactttgtattccatctcttctttttcatttacttgtagagccaaggaaatggaattgaaagatga

SEQ ID NO: 432927 - DNA, 120 bp, Artificial Sequence
  ENSG00000152492_21 (sequence is synthesized)
ttgcataagtaatgatgccatccttctctctggctgtagactgaggcttttctcttgcttcaagtcagagcagtatttgttgataacctctcaataatgtttggtttacatgccagtaat

SEQ ID NO: 432928 - DNA, 120 bp, Artificial Sequence
  ENSG00000152492_22 (sequence is synthesized)
aacctctcaataatgtttggtttacatgccagtaattaaattaattcaacatgaagttgaatttgatgaagtggtcatctatccaagtatttggtttttgttttgttttgttttgttttt

SEQ ID NO: 432929 - DNA, 120 bp, Artificial Sequence
  ENSG00000152492_23 (sequence is synthesized)
tccagccagccaagtatttggttttaaacatttgtattcctttgtgcaagggattgtattcctctgtacaagacctttaagcacctcttcaagaaatttagtctttgtgtagctgctaac

SEQ ID NO: 432930 - DNA, 120 bp, Artificial Sequence
  ENSG00000152492_24 (sequence is synthesized)
cttactgcaatatttattttcccttattttcccatactacttagttgacaaatggcaatcaagctcacttgttctccctctctctgtctcccccccatgtacacatatatatatcccttc

SEQ ID NO: 432931 - DNA, 120 bp, Artificial Sequence
  ENSG00000152492_25 (sequence is synthesized)
agcttgacttgctattatttttcattgtataaatatgaaattcttggcatttcaatatggcatttgtttagggaaaaaatatgtaggtcactagagaaaaatgttaatttttttcccact

SEQ ID NO: 432932 - DNA, 120 bp, Artificial Sequence
  ENSG00000152492_26 (sequence is synthesized)
gtgaattgccttctgtttgccttatcttttcagatagtctttaaagttgggcaatattcaggcagctatttagaacagtttctcagagtggatttgggtctctcatttgagaaagatttg

SEQ ID NO: 432933 - DNA, 120 bp, Artificial Sequence
  ENSG00000152492_27 (sequence is synthesized)
tagtttcaatgaagtttgtatattataggaatttaagtaaaatcatctgagttaagttttgggcaaatgttaatcagaaagataatctacatccctactttatgtagtcattttggagaa

SEQ ID NO: 432934 - DNA, 120 bp, Artificial Sequence
  ENSG00000152492_28 (sequence is synthesized)
atggaggaaaaggaaaataacaggactttttatagctgtgataaaatgggtaaagaaaaacctccatttaaataaggaaggggagacaaaatggaaggtcctggccttaagtcaaattcc

SEQ ID NO: 432935 - DNA, 120 bp, Artificial Sequence
  ENSG00000152492_29 (sequence is synthesized)
agatagtgctttcaatatccaaagcttaggccttgtttacttatagtaatgctatatttttctttatctgccctgtgatttcgcttcgtgtccttcaaagtttttttattgtaattttaa

SEQ ID NO: 432936 - DNA, 120 bp, Artificial Sequence
  ENSG00000152492_30 (sequence is synthesized)
aggaaaaaaacaatgtatttttatttgataactaggcaaaatcatttgccattttttatttcataaatatttatttttctatctcatacaatgatcagttttactttaaaaattctgcat

SEQ ID NO: 432937 - DNA, 120 bp, Artificial Sequence
  ENSG00000152492_31 (sequence is synthesized)
ttctcttgcctctcatgtacttcatccagttatttattattgtaaaatgttaactggagatactgcattcaaaaaaaagtcggaccacttaacacttaccaggaatgttagtgtttcagc

SEQ ID NO: 432938 - DNA, 120 bp, Artificial Sequence
  ENSG00000152492_32 (sequence is synthesized)
tgttttagtaagtgaccaagtaagctatcaccttgtgatagctaattcaacatctttattgaaaatttgttactttttttaaaggtttttaaaagattacaattttaaaatattttatgt

SEQ ID NO: 432939 - DNA, 120 bp, Artificial Sequence
  ENSG00000152492_33 (sequence is synthesized)
tttctcattcaaataatataataatgtttgagactatagaagcaactcaactgtattttaatgaactgccagacacttttcactgtgttctctgctttttactttgtcatttttatataa

SEQ ID NO: 432940 - DNA, 120 bp, Artificial Sequence
  ENSG00000152492_34 (sequence is synthesized)
atgtgaaagcattttgttgttgttgttgttgttcctgctgctagaacacatgcagtttaatttttaggcccacagtgtattatgctttaatgttgtgatgtaaactaatacttctggcct

SEQ ID NO: 432941 - DNA, 120 bp, Artificial Sequence
  ENSG00000152492_35 (sequence is synthesized)
gggaaaacctttctgtttctgtatctttgtcctttggaggccaggcctcattaacaccagtattgttgaataagcacaatatatgacggagccttatcataaggctgcttgacatagaca

SEQ ID NO: 432942 - DNA, 120 bp, Artificial Sequence
  ENSG00000152492_36 (sequence is synthesized)
cccactctcctccacattttataaatcattgtttggaagtaaagttagataagagtcaaattaaatgttttgacttgaaaaatatttgacttttgcgttcaaaccactgttagacgtaag

SEQ ID NO: 432943 - DNA, 120 bp, Artificial Sequence
  ENSG00000152492_37 (sequence is synthesized)
tattttattagacataagtattttattttgggactagacagttgctttacatgtatttaagggaacattgtgattttcagaaagtggctttacatactattgaattgctatttcccaagt

SEQ ID NO: 432944 - DNA, 120 bp, Artificial Sequence
  ENSG00000152492_38 (sequence is synthesized)
tactttacaaccagcagcagcataccaataaattacaaaagcagaaaatgaaaattaaccctaggtgttctgatgatagagaaatagctaaattagaaaagaaagatatggatagatgct

SEQ ID NO: 432945 - DNA, 120 bp, Artificial Sequence
  ENSG00000152492_39 (sequence is synthesized)
tttaggaggaaaacctttttagaatggcaatgaccacttggatctaggtcaacatattccaaaatgtgtgaccttgggctttgtgtttactgaactcactctagaaaattctggacctga

SEQ ID NO: 432946 - DNA, 120 bp, Artificial Sequence
  ENSG00000152492_40 (sequence is synthesized)
ttcattaaccccgcttttcttctctaatgtgtcctgaagctgagctagatgatgagtaaattctttgctgactgttgctcatcactttctctcaaagttagaacttttcagtataaaaat

SEQ ID NO: 432947 - DNA, 120 bp, Artificial Sequence
  ENSG00000152492_41 (sequence is synthesized)
aattagcttttaactgattattaattttctttaatagtttctgtcaaaacttgtctaaaatttgtgttgtgccaaattggaaatacccactataatatggtgcattcagtttactccaca

SEQ ID NO: 432948 - DNA, 120 bp, Artificial Sequence
  ENSG00000152492_42 (sequence is synthesized)
agtggttaacattttaagtcctagattttttatgtcttgcctttgtataagcatcgctttggggaataccaagatgattcattattcagtgattattttcttgaaagataactatgatga

SEQ ID NO: 432949 - DNA, 120 bp, Artificial Sequence
  ENSG00000152492_43 (sequence is synthesized)
ttggctgtaaaatcttcaccctaataaaggagtgagatctctgtgtaaacagctttctgaaggactgataatagaatagaacttgcagccaaaggctttttcccttttgagaagacggta

SEQ ID NO: 432950 - DNA, 120 bp, Artificial Sequence
  ENSG00000152492_44 (sequence is synthesized)
tttgtgtaaggagtgctaaggtagacttcattgtacatagagtgccatattctgttgaaacgatcataacaaaatcaaaacctcatgcttcagcaaaaaggaaaaaagatttttaaatta

SEQ ID NO: 432951 - DNA, 120 bp, Artificial Sequence
  ENSG00000152492_45 (sequence is synthesized)
ctttgtctattacttactgctcatagagaagtgactatataaaatggtccaattttctcatttctggtggtgcctgtgagtcttaaagccatatctgcttatcttactgttgatagaata

SEQ ID NO: 432952 - DNA, 120 bp, Artificial Sequence
  ENSG00000152492_46 (sequence is synthesized)
ctttttttctttttagcccatgataagtaatatgggcaggtagaagcaaactggagactgtcctgttaatgctgcatggggcacaatgtctttcaaattattggtggaagaatctctttt

SEQ ID NO: 432953 - DNA, 120 bp, Artificial Sequence
  ENSG00000152492_47 (sequence is synthesized)
atccatggcgagaggtaagaatattaaagagtcaggatattgttgctcctggtatttaacaactgtcattagaaatgctgaaatttaattgtagagaagtcaagaaagaaagagtaaact

SEQ ID NO: 432954 - DNA, 120 bp, Artificial Sequence
  ENSG00000152492_48 (sequence is synthesized)
gagaaaatcttactactacagagtcacttttacaatgagacctgcactttatgccagcactgtttgtgaggagcagtactgccttaaattagtttgactctgactgatgtcagtgtacgt

SEQ ID NO: 432955 - DNA, 120 bp, Artificial Sequence
  ENSG00000152492_49 (sequence is synthesized)
tacttcctttatgtgactgacagtcagctttccattgagatataacattcacagatgatccccaagtatccttgtcatcagaagctttggaccttttctgccactgacttgtggctgatc

SEQ ID NO: 432956 - DNA, 120 bp, Artificial Sequence
  ENSG00000152492_50 (sequence is synthesized)
tgtaacacaataaatacataattttatttcatgttgtctgtccacctctgaataagcagtggcatgaccaaaaagactggtagaaggagagaatttcttggccaaatccttcataccagg

SEQ ID NO: 432957 - DNA, 120 bp, Artificial Sequence
  ENSG00000152492_51 (sequence is synthesized)
taccacttcttgagtaactgagagttgactgtcttctatggtgactacatagaagatatttccaaaggttctgttatgcagtgaagacattcagattatttgtaagaatttcaccaacac

SEQ ID NO: 432958 - DNA, 120 bp, Artificial Sequence
  ENSG00000152492_52 (sequence is synthesized)
ccttgtgtattgaaatgcttaaccattaacagggaaaaaaaaggagaaaaccgaacaaaacagagacatttacttgaaatgggaggtttgctaatgtgaagagtgtttctgttttattac

SEQ ID NO: 432959 - DNA, 120 bp, Artificial Sequence
  ENSG00000152492_53 (sequence is synthesized)
ttataagagaaaagcaggaaaacttttgctttgataagaaagacaccagagtggtgattctgtttgatgccacaggctaacacaatcgtgtaatcatgttgagttgtagaaatatatggc

SEQ ID NO: 432960 - DNA, 120 bp, Artificial Sequence
  ENSG00000152492_54 (sequence is synthesized)
cctaaaaaccattctctttcccttatatatataaatatgtgaacactgcctagtaacattttaatagatttaagatgcatttgtacattctcagcaaactagaagaaaatgttttttctc

SEQ ID NO: 432961 - DNA, 120 bp, Artificial Sequence
  ENSG00000152492_55 (sequence is synthesized)
tttttgagttaacttcatagcatagagaaccagcactgtgcaggtttcagcatttcagataagggcataattaattgtgtaacttaatgccctgttattcattgctgaggttcatataaa

SEQ ID NO: 432962 - DNA, 120 bp, Artificial Sequence
  ENSG00000152492_56 (sequence is synthesized)
gaatagaaaaattgaaagatgggtttgggcgacattttcttcccaaaagatcaagtaaggagtaagaacaagtaagggaagacagctaagagaacatactatgacatatcatagaattgg

SEQ ID NO: 432963 - DNA, 120 bp, Artificial Sequence
  ENSG00000152492_57 (sequence is synthesized)
gatacatttttgttgcactggatttcaggctatactgctaaaataatttctacctgttaaattttgtgagagggtttttgacatcagaatttttgtatttctggtcaaattggtcttgga

SEQ ID NO: 432964 - DNA, 120 bp, Artificial Sequence
  ENSG00000152492_58 (sequence is synthesized)
aatccctatggtctctaatttcagctcttgctgtaaactgcaagccaaatgctctttctcagaaagagctatatttttctcttcttacaggcaacccaatatttatttcataaagtgtta

SEQ ID NO: 432965 - DNA, 120 bp, Artificial Sequence
  ENSG00000152492_59 (sequence is synthesized)
taaatattgagaagatacactggggagatagcatataaaaatgatgctccaaaatgagaattctatatggggctttccctaagaagaatccatcccagcacatattttgaaaaggtgctg

SEQ ID NO: 432966 - DNA, 120 bp, Artificial Sequence
  ENSG00000152492_60 (sequence is synthesized)
aattaaaaagtacaagagtttgctcatataaatcaagttgcccaggaaacctgaggtgatgctatcatttgtctcataatttagaaacgtgatctcttgagagagagactacgcattgcc

SEQ ID NO: 432967 - DNA, 120 bp, Artificial Sequence
  ENSG00000152492_61 (sequence is synthesized)
tgggcactttcagattccttaggaagtgcccctttgatatttggaatgtggatatatttataaaacaaatggattgttattccaaatccacatggatttataaccaagccccagaagaat

SEQ ID NO: 432968 - DNA, 120 bp, Artificial Sequence
  ENSG00000152492_62 (sequence is synthesized)
aggcagctttgaaatagctagttcgtggaattgaacagaaccttgatggaatgcagttgcctgtgtgaggacagaaaacaaagaggctgcctcagaccacatgcctatctagagattaag

SEQ ID NO: 432969 - DNA, 120 bp, Artificial Sequence
  ENSG00000152492_63 (sequence is synthesized)
tgaatttgtgagggacattttgtggatgccttaaagatgaccagtggtgggttctgatgggaatatatacactcatctggactaggccaatggaagcagtctctttcagttcacctccgt

SEQ ID NO: 432970 - DNA, 120 bp, Artificial Sequence
  ENSG00000152492_64 (sequence is synthesized)
acagcacaagttgttcctgctcatgacctcattgaggaaaatgagaattgtggtgctggtgactttcatgtgtcttgggaggttgaggtgttcaacatcgttaaggcactcccaaaacgc

SEQ ID NO: 432971 - DNA, 120 bp, Artificial Sequence
  ENSG00000152492_65 (sequence is synthesized)
aaacctccttttttaaatgccaattgtacatctacattaattcatctatgcaaacttgtgttttcatggtttgttttttacactatatttctcattaggttctttaaacatcaggtttaa

SEQ ID NO: 432972 - DNA, 120 bp, Artificial Sequence
  ENSG00000152492_66 (sequence is synthesized)
tattgatattatgaataatttttaaaccaaagtattctataagtctgtgtgctttgttttcctggatggtttgaccaaggtaaacatcagtcttgtccttctctcttaataaagtcatcc

SEQ ID NO: 432973 - DNA, 120 bp, Artificial Sequence
  ENSG00000152492_67 (sequence is synthesized)
atttgttaagtcagtggtctctgtctcatgtttttgttttgtttctttacagcattcaaggacagggaaacttacgagagtcttattataattattattatttacaaaatgaccctaata

SEQ ID NO: 432974 - DNA, 120 bp, Artificial Sequence
  ENSG00000152492_68 (sequence is synthesized)
ggtctgtttagtaacagtgaaattttttcttactccatttccatacactttctgtaaatatgtataacatgataatgatgcctggtgtattgaaatcctcaataaatactgccaagtgtg

SEQ ID NO: 432975 - DNA, 120 bp, Artificial Sequence
  ENSG00000152492_69 (sequence is synthesized)
ggaaagactatgttttaggtgacccgtgtggcctttttgttgaggcctttaggatacaaggcccccacctaaagacgcgaccctcccgtaggaggggggcagggcccgggggcgggagca

SEQ ID NO: 432976 - DNA, 120 bp, Artificial Sequence
  ENSG00000152492_70 (sequence is synthesized)
cagcggggccccagcctcaggcggcgcgtcactgagcacaaaggagacaacagcgaggcggcagcgggcgctgatcttcgctcgccagccactcgcaattgcggttacagacctgcagct

SEQ ID NO: 432977 - DNA, 120 bp, Artificial Sequence
  ENSG00000152492_71 (sequence is synthesized)
aattcctgcatcatgatctattctatccttagactcaaccataaaacactcctttaattttgttcataaagtgaccttagggacctgggactgtttctcttatccccaggcactgggtac

SEQ ID NO: 432978 - DNA, 120 bp, Artificial Sequence
  ENSG00000152492_72 (sequence is synthesized)
ggacctgggactgtttctcttatccccaggcactgggtacatttagatgtgtggcaggattctatttgaatctaataaattcatgttttgttttgttttgtttttattatactttaagtt

SEQ ID NO: 432979 - DNA, 120 bp, Artificial Sequence
  ENSG00000152495_0 (sequence is synthesized)
ctctctcgctcctgcgttcgcaggcggcggctggcggccggcttctcgctcgggcagcggcggcggcggcggcggcggcttccggagtcccgctgcgaagatgctcaaagtcacggtgcc

SEQ ID NO: 432980 - DNA, 120 bp, Artificial Sequence
  ENSG00000152495_1 (sequence is synthesized)
ctcctgctccgcctcgtcctgctcttcggtcaccgccagtgcggccccggggaccgcgagcctcgtcccggattactggatcgacggctccaacagggatgcgctgagcgatttcttcga

SEQ ID NO: 432981 - DNA, 120 bp, Artificial Sequence
  ENSG00000152495_2 (sequence is synthesized)
ggtggagtcggagctgggacggggtgctacatccattgtgtacagatgcaaacagaaggggacccagaagccttatgctctcaaagtgttaaagaaaacagtggacaaaaaaatcgtaag

SEQ ID NO: 432982 - DNA, 120 bp, Artificial Sequence
  ENSG00000152495_3 (sequence is synthesized)
aactgagataggagttcttcttcgcctctcacatccaaacattataaaacttaaagagatatttgaaacccctacagaaatcagtctggtcctagaactcgtcacaggaggagaactgtt

SEQ ID NO: 432983 - DNA, 120 bp, Artificial Sequence
  ENSG00000152495_4 (sequence is synthesized)
tgataggattgtggaaaagggatattacagtgagcgagatgctgcagatgccgttaaacaaatcctggaggcagttgcttatctacatgaaaatgggattgtccatcgtgatctcaaacc

SEQ ID NO: 432984 - DNA, 120 bp, Artificial Sequence
  ENSG00000152495_5 (sequence is synthesized)
agagaatcttctttatgcaactccagccccagatgcaccactcaaaatcgctgattttggactctctaaaattgtggaacatcaagtgctcatgaagacagtatgtggaaccccagggta

SEQ ID NO: 432985 - DNA, 120 bp, Artificial Sequence
  ENSG00000152495_6 (sequence is synthesized)
ctgcgcacctgaaattcttagaggttgtgcctatggacctgaggtggacatgtggtctgtaggaataatcacctacatcttactttgtggatttgaaccattctatgatgaaagaggcga

SEQ ID NO: 432986 - DNA, 120 bp, Artificial Sequence
  ENSG00000152495_7 (sequence is synthesized)
tcagttcatgttcaggagaattctgaattgtgaatattactttatctccccctggtgggatgaagtatctctaaatgccaaggacttggtcagaaaattaattgttttggatccaaagaa

SEQ ID NO: 432987 - DNA, 120 bp, Artificial Sequence
  ENSG00000152495_8 (sequence is synthesized)
acggctgactacatttcaagctctccagcatccgtgggtcacaggtaaagcagccaattttgtacacatggataccgctcaaaagaagctccaagaattcaatgcccggcgtaagcttaa

SEQ ID NO: 432988 - DNA, 120 bp, Artificial Sequence
  ENSG00000152495_9 (sequence is synthesized)
ggcagcggtgaaggctgtggtggcctcttcgcgcctgggaagtgccagcagcagccatggcagcatccaggagagccacaaggctagccgagacccttctccaatccaagatggcaacga

SEQ ID NO: 432989 - DNA, 120 bp, Artificial Sequence
  ENSG00000152495_10 (sequence is synthesized)
ggacatgaaagctattccagaaggagagaaaattcaaggcgatggggcccaagccgcagttaagggggcacaggctgagctgatgaaggtgcaagccttagagaaagttaaaggtgcaga

SEQ ID NO: 432990 - DNA, 120 bp, Artificial Sequence
  ENSG00000152495_11 (sequence is synthesized)
tataaatgctgaagaggcccccaaaatggtgcccaaggcagtggaggatgggataaaggtggctgacctggaactagaggagggcctagcagaggagaagctgaagactgtggaggaggc

SEQ ID NO: 432991 - DNA, 120 bp, Artificial Sequence
  ENSG00000152495_12 (sequence is synthesized)
agcagctcccagagaagggcaaggaagctctgctgtgggttttgaagttccacagcaagatgtgatcctgccagagtactaaacagcttccttcagatctggaagccaaacaccggcatt

SEQ ID NO: 432992 - DNA, 120 bp, Artificial Sequence
  ENSG00000152495_13 (sequence is synthesized)
ttatgtactttgtccttcagcaagaaaggtgtggaagcatgatatgtactatagtgattctgtttttgaggtgcaaaaaacatacatatataccagttggtaattctaacttcaatgcat

SEQ ID NO: 432993 - DNA, 120 bp, Artificial Sequence
  ENSG00000152495_14 (sequence is synthesized)
gtgactgctttatgaaaataatagtgtcttctatggcatgtaatggatacctaataccgatgagttaaatcttgcaagttaacacaacgtaacacttaaaagcatacattttcagcaacc

SEQ ID NO: 432994 - DNA, 120 bp, Artificial Sequence
  ENSG00000152495_15 (sequence is synthesized)
agtggcacatatttgaagtgaatagtagcaaattgtttttgctttgaaaatctagccatcctacatcctttggatttcttcacaaggcagtaattcctttgaactactgcttagctaata

SEQ ID NO: 432995 - DNA, 120 bp, Artificial Sequence
  ENSG00000152495_16 (sequence is synthesized)
ctaggtagtgctaaaagacatgttcccataacttttacaacattttactttttatcattgatgtgttcaaactgtttacaaggagatgcttatagatgatagttgtacatatgtgcaaaa

SEQ ID NO: 432996 - DNA, 120 bp, Artificial Sequence
  ENSG00000152495_17 (sequence is synthesized)
aaaaatccacttgcaatggtaagaaattgaagtatccttaaaggccatgaagccatatgtccctaaagcctgtgtggagaatgctttattttattcttatttatatacactatattaata

SEQ ID NO: 432997 - DNA, 120 bp, Artificial Sequence
  ENSG00000152495_18 (sequence is synthesized)
ataaccaaaatgttctaagattctgccattttacaaccctggaggaagtaatttacaaactcacgctgagttccattctttccttcacctgctctccaataagatgactttctgatagac

SEQ ID NO: 432998 - DNA, 120 bp, Artificial Sequence
  ENSG00000152495_19 (sequence is synthesized)
aaagcttagggtgtaataaacagggaagaaaagaaggtaagactgtacttaaactgatgaagataagattgattccttttcattttccagataaaattgtatttactcatgaatttatac

SEQ ID NO: 432999 - DNA, 120 bp, Artificial Sequence
  ENSG00000152495_20 (sequence is synthesized)
aactttacagataagaacattttaatggataaactctataattaccaagttgcaaatatttagaaaattctatttcacaggttagtgccaaaatgtcttcatagagtaggaataatattc

SEQ ID NO: 433000 - DNA, 120 bp, Artificial Sequence
  ENSG00000152495_21 (sequence is synthesized)
attccattttaagattattcattattgactttaatagagtaagaaaacattattgtttatcaaagctctttttttatccaattgatggttatctacacatatcacttataaactaaagtt

SEQ ID NO: 433001 - DNA, 120 bp, Artificial Sequence
  ENSG00000152495_22 (sequence is synthesized)
atgaaaagctagtatgtctttttctcgtatttggaatgaaagtacccacattttacaatgtagtgttgagaatgtggctgccaataaatttagcacaatgcaatttatttaccttaaaaa

SEQ ID NO: 433002 - DNA, 120 bp, Artificial Sequence
  ENSG00000152495_23 (sequence is synthesized)
acaaacaaaaacaaaaataaagaaaaatactgatttcaaatcagactcttaaaaagctggaacattagacctgatattttattatgatttttcccagaataagtttaatttctctttgac

SEQ ID NO: 433003 - DNA, 120 bp, Artificial Sequence
  ENSG00000152495_24 (sequence is synthesized)
tttcatagaaacactttccccttatagaaattgcactatctccaatttatttctagtttgagttgaaatgaatattttatcagattaattatgtgtcacatttttggtgggttttctcaa

SEQ ID NO: 433004 - DNA, 120 bp, Artificial Sequence
  ENSG00000152495_25 (sequence is synthesized)
ttttaaaaaagaattcattttaaaaaataattattttcagagaccaaataaagacaataaaaatgactatcacataaaaatccttgttaaaaaagagatcttaaattatgttggctctcc

SEQ ID NO: 433005 - DNA, 120 bp, Artificial Sequence
  ENSG00000152495_26 (sequence is synthesized)
ctcaaaactattaaattagaaaacgaaactaaagctccagtttgtagaggctgttggacctcagtagacattcttcttttcaatcacaaatctctctctactactgttctcatgggaaga

SEQ ID NO: 433006 - DNA, 120 bp, Artificial Sequence
  ENSG00000152495_27 (sequence is synthesized)
aaacaaggtaggacttcttatctttcatagtttaagaatctgacaggtcactgatatggagcccctgaagaagcacatcatctgggctcagaagattattttttgttttgttttatttgt

SEQ ID NO: 433007 - DNA, 120 bp, Artificial Sequence
  ENSG00000152495_28 (sequence is synthesized)
actatctagtagagagcacttttcttattccctctttccttccttcctcatttaattattccctctcagaattcccatgttgtccattataaggggctcgctatttttaacctttaagaa

SEQ ID NO: 433008 - DNA, 120 bp, Artificial Sequence
  ENSG00000152495_29 (sequence is synthesized)
ctcgctatttttaacctttaagaatgtcttctttgttaagcattaagatttccatttaagaggatcaatttcctgttgtactttttaccatgagactgaaacacacacacacacacacac

SEQ ID NO: 433009 - DNA, 120 bp, Artificial Sequence
  ENSG00000152495_30 (sequence is synthesized)
gttggaagagcaaagagagggaagggggtctttttagaaagtggcacttggcgcttagctgaaagatcagaacacatcattcctccctgcccacccccatattgttccaagggcagttgt

SEQ ID NO: 433010 - DNA, 120 bp, Artificial Sequence
  ENSG00000152495_31 (sequence is synthesized)
tacattatttcaacactagagtagggcggactgcattgtttggccctgagaactatagaaacaacgttgcaaataccatgcccaatgtgtattttagaatttactcatttaaatgagtgc

SEQ ID NO: 433011 - DNA, 120 bp, Artificial Sequence
  ENSG00000152495_32 (sequence is synthesized)
atattaccattcctccatgtgagtactcgagttgataattccctctatctttttaaacccataaactacatttttaaaaaaatcaatgggagttttaaattttgactcatgttaaagata

SEQ ID NO: 433012 - DNA, 120 bp, Artificial Sequence
  ENSG00000152495_33 (sequence is synthesized)
agattctgataatgactatatagtgactaatttcattgtttcagtaggaaacaaatcaaactttcaaaaatgttggtcatttcagtcaaattattcaaagatttcatatacatacatcct

SEQ ID NO: 433013 - DNA, 120 bp, Artificial Sequence
  ENSG00000152495_34 (sequence is synthesized)
aagttaggataattatgttaacatttttgaaagaacagccaatgtttatattgcttgttaaaatggaatgtattgtctatctcaaagattacttagctaaataatagtagacaaatggag

SEQ ID NO: 433014 - DNA, 120 bp, Artificial Sequence
  ENSG00000152495_35 (sequence is synthesized)
atttaatttcacaaaatacttcataacatcactcctaattggcaatatagtcacaaagcaaaagaattcaaatttcagcaaacaataaattacattttacattttagagctaacacttat

SEQ ID NO: 433015 - DNA, 120 bp, Artificial Sequence
  ENSG00000152495_36 (sequence is synthesized)
cacattacattatgggtttttattttgagataagttcagctacatagcataaactaggtttttttttataaccatgaaggacagtcttgaattatttcccccattaacaaagtctaattg

SEQ ID NO: 433016 - DNA, 120 bp, Artificial Sequence
  ENSG00000152495_37 (sequence is synthesized)
gaatccagtattttttctcaaactgtaatttcacttgtcccaggacacataaataggtaaaaattagaataatatcgtggtagaagttaattgtccagaacaagtgcattatataaatat

SEQ ID NO: 433017 - DNA, 120 bp, Artificial Sequence
  ENSG00000152495_38 (sequence is synthesized)
aatgcaagcacatgtcatttaagattttctattagtcacattttaagaaaaatagatgaaagtatagtatttttaatccaattcatccaaattattctatcgatatatagtcaatattaa

SEQ ID NO: 433018 - DNA, 120 bp, Artificial Sequence
  ENSG00000152495_39 (sequence is synthesized)
aatttaatgtgatattttgaattctttatttttatactgttttcaaaatcaagagtgtatgttaggcctttgggacatcaagtgctcaatagtcacatgtggctagtggctaccatatta

SEQ ID NO: 433019 - DNA, 120 bp, Artificial Sequence
  ENSG00000152495_40 (sequence is synthesized)
gacagcactagtctagagtactttttattttaagcaaagtgacacttgaagttctatgcttagatttaagtggcctcagttttcacattgaggagctggtgggaggccacaaagaaagtg

SEQ ID NO: 433020 - DNA, 120 bp, Artificial Sequence
  ENSG00000152495_41 (sequence is synthesized)
tttcagaaatgttacacactgagtaaaagcttattgaccactcctgcccattcatttacttcagaggagaaatgattcctaacatgacttcaaagaacgggcattactaaattatctact

SEQ ID NO: 433021 - DNA, 120 bp, Artificial Sequence
  ENSG00000152495_42 (sequence is synthesized)
gaccaatccctctgattcctgatgggccctggagtcttgactacagcctagagtctcctgagtactgccatgatgccaatagcattcttgcttaccaaaatctactctcagccaactatg

SEQ ID NO: 433022 - DNA, 120 bp, Artificial Sequence
  ENSG00000152495_43 (sequence is synthesized)
tgtcttcattcaggaagaactgcacatagaatctgattttgaggcctggattaagcttcatgccatccttgtatcacaggcaatatgtctttctggaaatctaatgaaccataccaaatc

SEQ ID NO: 433023 - DNA, 120 bp, Artificial Sequence
  ENSG00000152495_44 (sequence is synthesized)
tgcatgatgaagattgtgtaatgatggtgatatcatgccagttatcctcaaagtgggaatatgaccattagctggcattttttaagatttccttagaagggtttaatcaacactgccatt

SEQ ID NO: 433024 - DNA, 120 bp, Artificial Sequence
  ENSG00000152495_45 (sequence is synthesized)
acacatggatttaacaaaagacttttgaaaattttttacatactgattttagaataatcctcaaggttctatagtcatttttagtggaagacttaaaaagaaaggaacaatttttactgt

SEQ ID NO: 433025 - DNA, 120 bp, Artificial Sequence
  ENSG00000152495_46 (sequence is synthesized)
gacttcaatttcatagtattttaaacatattttgtaattcagaatgtttagcaatccctatgtcctgtttcacatgcatggtaactgatggtgggttgcctacaggctgaagatttggag

SEQ ID NO: 433026 - DNA, 120 bp, Artificial Sequence
  ENSG00000152495_47 (sequence is synthesized)
agagccattttgtttcataaatcagtttttattgcacagaagcagctggttgtatttcaagttggaaaaagaaaagtaaatgccagaaaaggcaaaggataaacttagtaagccatttat

SEQ ID NO: 433027 - DNA, 120 bp, Artificial Sequence
  ENSG00000152495_48 (sequence is synthesized)
tttgttttagaattgtttttgcaaagcaaatttttttaaaaaaaggtcaacaaagtgaatcagcactagcattttcttgatggttgactcaatgtataattaacaaatatacatagcaga

SEQ ID NO: 433028 - DNA, 120 bp, Artificial Sequence
  ENSG00000152495_49 (sequence is synthesized)
tctagatttactttagatggtgcaaaatttccagatagtaacctatgtaaaaggatttgtaatttccttgtaattcctgcctattagtccatattctgatttccttatgttcatcactga

SEQ ID NO: 433029 - DNA, 120 bp, Artificial Sequence
  ENSG00000152495_50 (sequence is synthesized)
tatgttcctgatcagggtcattgctagtagttgagcatttactggttgaacattgtttaatggttagatgttatgtgtgtctgcatttaaaaaaattgtgtacatgttatttcactattg

SEQ ID NO: 433030 - DNA, 120 bp, Artificial Sequence
  ENSG00000152495_51 (sequence is synthesized)
gtattacaatattcataaccacatgataaacagaaatgtacccaataatttcctataaaatttttcaaagtccttttattcccctgacacactcagggtgaatttttgtctccttggcaa

SEQ ID NO: 433031 - DNA, 120 bp, Artificial Sequence
  ENSG00000152495_52 (sequence is synthesized)
ataagaaaaaaaaggagagagaccactggagagatatcagcaaaccacccacagtaaccaagttcagtatttcctctttctatattttgaccaatatattaagagcaaattttgtcatta

SEQ ID NO: 433032 - DNA, 120 bp, Artificial Sequence
  ENSG00000152495_53 (sequence is synthesized)
ttactccttgtggctattacctgagatcagataatataatctcagctcataaagcttggccatgtctatacttatcttggagagcaataacaaacttgattaatttgtttggttatttaa

SEQ ID NO: 433033 - DNA, 120 bp, Artificial Sequence
  ENSG00000152495_54 (sequence is synthesized)
aattccaactttcataaatgctctgtgatgtactcaagacgattgggttgtgtgatactaacttccttcaagaactcagtctgttccctgttgtctggttcagaggtccaccagggcaaa

SEQ ID NO: 433034 - DNA, 120 bp, Artificial Sequence
  ENSG00000152495_55 (sequence is synthesized)
atagaagccttgccgagaaagtgaactgtcttactccttcaaaggaatcagatgttgctctagagaagactccaggcatctacctggttgagctcaaatgaggcaagtgggagaaaacct

SEQ ID NO: 433035 - DNA, 120 bp, Artificial Sequence
  ENSG00000152495_56 (sequence is synthesized)
cttctcatcctctgattgaaagtgatacaatttgaatattggtatattgtcattggtcagtaatggaaaaatgagattccaccagtgggttactcttttcttgtcttggtttgctatgcc

SEQ ID NO: 433036 - DNA, 120 bp, Artificial Sequence
  ENSG00000152495_57 (sequence is synthesized)
ttatcccagatcagtgttttgttccatccctatggtcatctctaaagccctgacaggagcatcccagactggagaaatgcagcgtatctgtggcccagaattttgtttgatactctaaac

SEQ ID NO: 433037 - DNA, 120 bp, Artificial Sequence
  ENSG00000152495_58 (sequence is synthesized)
agcaatgcaaagactgcaaaatcacactattctaaacagttgttttcagctcattttgaagattgacctggaaaacatatagatacagaatatatacatttaatcgttgcttgtgattca

SEQ ID NO: 433038 - DNA, 120 bp, Artificial Sequence
  ENSG00000152495_59 (sequence is synthesized)
ttgtgtcaaaataacatttaattttcactctgattaatctttattttccatttaaaagattatttcaggctacttaaatacaagaccttgcattctaatttttgaaagcggttgttttcc

SEQ ID NO: 433039 - DNA, 120 bp, Artificial Sequence
  ENSG00000152495_60 (sequence is synthesized)
ctgagctctctctcaactttgacagtttgtgaatgataaaaagttactaggtttgtcctttccttgatagatgtagagcagttcatctgttttgtaaaggtacagttaagcataactata

SEQ ID NO: 433040 - DNA, 81 bp, Artificial Sequence
  ENSG00000152495_61 (sequence is synthesized)
gttcatctgttttgtaaaggtacagttaagcataactataggctgggcgtgatatggcagatcacctgaggtcaggagttt

SEQ ID NO: 433041 - DNA, 120 bp, Artificial Sequence
  ENSG00000152495_62 (sequence is synthesized)
cagcctggacaacaagagcgaaactccgtcaaaaaaaaatatatatatatgaccataaattgaaaactatcatctcatactgcctccttttaacctgacctattttatatacctacaata

SEQ ID NO: 433042 - DNA, 120 bp, Artificial Sequence
  ENSG00000152495_63 (sequence is synthesized)
cagttaatatgcagcagcgtagagaacaaatagcatattcataatttgtaattttgtttttctttttacggcacccttaagtctcagtaatattttaaaagtcctctataagccaaaaga

SEQ ID NO: 433043 - DNA, 120 bp, Artificial Sequence
  ENSG00000152495_64 (sequence is synthesized)
acgttgtaacatatccatttattaaggagttaggcctaaacatagtaatagtagtccattccatgtccaacagatgttgctgtgtttctttcaacatttttcaatgtcttgtgagtttag

SEQ ID NO: 433044 - DNA, 120 bp, Artificial Sequence
  ENSG00000152495_65 (sequence is synthesized)
tgagtgggtacagctgagttggggtttaggtgatttcttatgcccaatgaactaaaggtatcagtaaaagattattagtaaacaaattagttatttatgctcttacttgaatgtcagtca

SEQ ID NO: 433045 - DNA, 120 bp, Artificial Sequence
  ENSG00000152495_66 (sequence is synthesized)
ttcattttatctctcgtctttgagatacacacattaaaacttatgtgcatatttttttaaagagtaatttccacataattccccaagaactgaactcaaatctccaaaaatttttcagaa

SEQ ID NO: 433046 - DNA, 120 bp, Artificial Sequence
  ENSG00000152495_67 (sequence is synthesized)
ctcaagcaaccaatgattcacagagcaaatctaccaaagccccatttttattggaacacaggcatgctcatttatgtacatattgtttgtggctgcttttatgttgtcaaggcagagttg

SEQ ID NO: 433047 - DNA, 120 bp, Artificial Sequence
  ENSG00000152495_68 (sequence is synthesized)
agtactttcaacagagaccatatggactgcaaagcctaaaatgtgtatctggacccttacagtaaaacaatgaccctgggttttcatggcaccccaatgcctttttggtgacttgcagga

SEQ ID NO: 433048 - DNA, 120 bp, Artificial Sequence
  ENSG00000152495_69 (sequence is synthesized)
atacagattcctatattccagtttgtttttttttttttctccttagcttaaggttcgtattcccatttgcttctgagaaagttaggaaaattttgttttatgttgcagatgctctcacaa

SEQ ID NO: 433049 - DNA, 120 bp, Artificial Sequence
  ENSG00000152495_70 (sequence is synthesized)
caataattgtgctggagatagatacaacttagtgaaattttcctacagaactaaaaacgcaaaattgcatcactcctgaagaaaagaaatttagagtatgaattgagttggttgagagta

SEQ ID NO: 433050 - DNA, 120 bp, Artificial Sequence
  ENSG00000152495_71 (sequence is synthesized)
gaattaaaaagatttctagcactttgagcatgttttagaaatttgatccttacatttaaaattatgtaaatgacatctttcactggcatttgctcacatttaagtcaatctacagctgtt

SEQ ID NO: 433051 - DNA, 120 bp, Artificial Sequence
  ENSG00000152495_72 (sequence is synthesized)
acttactaagctaagaaataagaagatccctatggttctgaatctctcataatattctgaagtaatttatatcaattgaattttcattaatcattttaggaaatattatgttttattttg

SEQ ID NO: 433052 - DNA, 120 bp, Artificial Sequence
  ENSG00000152495_73 (sequence is synthesized)
tggcattatatgacaatgactttctcaacaatagctcagggaatacgcaaacagccagctcttttatgtaagaaagccattttctaatccccacgctttcctgagtgttacgtattttat

SEQ ID NO: 433053 - DNA, 120 bp, Artificial Sequence
  ENSG00000152495_74 (sequence is synthesized)
ttctttgaaaagagagggccttgagtaaatgctttcgtttgctttccttacatatttagaaatccaagaagggcccttgtcttagtctatttctgtcacagagaaattgttcattccaaa

SEQ ID NO: 433054 - DNA, 120 bp, Artificial Sequence
  ENSG00000152495_75 (sequence is synthesized)
atatccaccttaagggaagctagtgaccgagatatggagaaaaacataggcattcatgacctttgtgtttccgtttgactttcaacatctgtaaccaaaaggtcacaaatgaaatattta

SEQ ID NO: 433055 - DNA, 120 bp, Artificial Sequence
  ENSG00000152495_76 (sequence is synthesized)
gtagaaagtgcaatatcaatttattaggagtacctaaaattataactctaaataatatacagcaatattattgctctattattacagcaatcaataatataatatagccactaggataca

SEQ ID NO: 433056 - DNA, 120 bp, Artificial Sequence
  ENSG00000152495_77 (sequence is synthesized)
ctcgctgtagaactcagaacaaaagatatcaatcttctgccagtccgcatcattatgtgtagcagagactttactggaatgagtgaggggaaagataacaaaatgtagattaggattcca

SEQ ID NO: 433057 - DNA, 120 bp, Artificial Sequence
  ENSG00000152495_78 (sequence is synthesized)
cattctcccctgcccatcttcttgattgctcagtttgaagacgatcattgatggacaaatactttagaaatgaatgaagtcaatagctaatgtttctcccagaaactaaacaacatagtt

SEQ ID NO: 433058 - DNA, 120 bp, Artificial Sequence
  ENSG00000152495_79 (sequence is synthesized)
taggggatattaggcctacattctaatcacattgtaaggaagtgattttctaattttgaagcttcccaggagcagccccctccaggaacaattttccctgtgaactttcactgagaaact

SEQ ID NO: 433059 - DNA, 120 bp, Artificial Sequence
  ENSG00000152495_80 (sequence is synthesized)
attatatgccatggaggagtcaaagatgaattaaatccaatgctatcctccaggagtgagctttgtagttggagagaaaagccaaccttatagatacaacctgtacatatataacctatg

SEQ ID NO: 433060 - DNA, 120 bp, Artificial Sequence
  ENSG00000152495_81 (sequence is synthesized)
ctgcatttaggcagatgataagccctaggaatggaaagagggaaaagctcccttttgccaggaatgatgaaggaaagctttatggaaacacaggctgtatgtgaaagatgggtgaatctt

SEQ ID NO: 433061 - DNA, 120 bp, Artificial Sequence
  ENSG00000152495_82 (sequence is synthesized)
tgcaggtagggaagaagtagggggcatgtctggctgagaaccggcctgatcatagagtggaaaaatgaaaggcagaggtgaaggaagaatactaaatgtgaaaggctgaaatacacaggg

SEQ ID NO: 433062 - DNA, 120 bp, Artificial Sequence
  ENSG00000152495_83 (sequence is synthesized)
aagtgttgccagtgtgcaacagaatctcatctcgtgcaaaattgaattagacttccttactccttccttactctgggtaggtccatgtgcagcctttcctcagagcatctagcctgacat

SEQ ID NO: 433063 - DNA, 120 bp, Artificial Sequence
  ENSG00000152495_84 (sequence is synthesized)
acttggctcatctgctgtgcttctaagccaaataaaaatcatcaaacacatcgaagatatttttgggagtcaccaggttaaagcaaagcctcagtcactgaaagcaaaaactgaattggc

SEQ ID NO: 433064 - DNA, 120 bp, Artificial Sequence
  ENSG00000152495_85 (sequence is synthesized)
caggtctccactgacaaaacagagtaaatgatagtatgacagataatttcaagttttccaagactccaatttctgaaaaatgtctcatgactccaaaaaatcacgtacttcctaaaatgt

SEQ ID NO: 433065 - DNA, 120 bp, Artificial Sequence
  ENSG00000152495_86 (sequence is synthesized)
tgccagtggaggaccgaatcaaggttattgctgacctcattttttcaaccttttcagttatttgacctgaataggcaatcccccaggatttctgattgaattctacctgaaagtttagat

SEQ ID NO: 433066 - DNA, 120 bp, Artificial Sequence
  ENSG00000152495_87 (sequence is synthesized)
tttaaaagacaacctgtaggaagctaagtctcaggcaacaaaatttaaaaccatcagaacttgtttctccaaacatcaacctgctcctgtcaagtcctttttcatctctcccttttgtcc

SEQ ID NO: 433067 - DNA, 120 bp, Artificial Sequence
  ENSG00000152495_88 (sequence is synthesized)
ctttacatactgttttgtaagttccttttgatatcatttattgcaggcagtatttttacatccatcttcaagaaacttgggagacatttagacatttagtatgtgtacttttagttgtct

SEQ ID NO: 433068 - DNA, 120 bp, Artificial Sequence
  ENSG00000152495_89 (sequence is synthesized)
tgcctctttatttcagataatgcctgtgattagtgaatggcggcattattcctgaagacaaatgaaggaagatagggagcaagattgactgtcatttgaatgatggaagagaagtagaat

SEQ ID NO: 433069 - DNA, 120 bp, Artificial Sequence
  ENSG00000152495_90 (sequence is synthesized)
tactgtgaggttacaaaaatcgtaagttagcagacattgagaaaggaaaacttcctacttgggcttttcaggcttatgtgacattatctggatgtgttttctagtctttcctaaaggaga

SEQ ID NO: 433070 - DNA, 120 bp, Artificial Sequence
  ENSG00000152495_91 (sequence is synthesized)
aatttttattcctgggttgctgaaagctttctggactaaaaggatataagcagctcaatagcagcatagaggattagattaatggaacagcactgcatacaggaaagctacatctccaat

SEQ ID NO: 433071 - DNA, 120 bp, Artificial Sequence
  ENSG00000152495_92 (sequence is synthesized)
agtttaggctgcaagtcagtagccaaacacaagagcatgtaagatttggaggacaaagtataaatattttaagtttacacaaccaagattataggctaccttcccaacttctaatttgaa

SEQ ID NO: 433072 - DNA, 120 bp, Artificial Sequence
  ENSG00000152495_93 (sequence is synthesized)
gagcactgaaaatggagctgtgaacacttcatttttaaaacctgacaatatggtgctattgactacttaatacaaagatatattacaatatttttaggtaaatgtattaagtctggcctg

SEQ ID NO: 433073 - DNA, 120 bp, Artificial Sequence
  ENSG00000152495_94 (sequence is synthesized)
ggcataaatgtacatacagaaaatgtttgtagagaattcatcaaaatcatgcccatttgctgttgtagagctacagtattcttcaatggtggtgactgaccagtgagtttctacttctta

SEQ ID NO: 433074 - DNA, 120 bp, Artificial Sequence
  ENSG00000152495_95 (sequence is synthesized)
cagatgggacacaacagtcatgggctgtctcagctgcccaaagcctgaggcagaccacatgagagctgtggcttcttcttggattcaggttggataacccaattcagtaattaaatatgt

SEQ ID NO: 433075 - DNA, 120 bp, Artificial Sequence
  ENSG00000152495_96 (sequence is synthesized)
aaattttggggggggttggggggtgttttctaggaacttgaagagtacgtgacattataaaaaatgggtgttggaagactaattgtagaaatttgacctgagggccaatgttacttggtg

SEQ ID NO: 433076 - DNA, 120 bp, Artificial Sequence
  ENSG00000152495_97 (sequence is synthesized)
taagttcactcagacagacatgtcagaacatgcccaaagaagcctatatcttgctgctgggaaatgtaaagcagttggcatgtagaatacgataataaatcatttaagaaaccaccaaaa

SEQ ID NO: 433077 - DNA, 120 bp, Artificial Sequence
  ENSG00000152495_98 (sequence is synthesized)
caccctgtgcagtgatcctttccattctcttctttgttgagcctaaactcacactgaaaaatctgggaaaagagcatctgagacagagtactatcaagtgccaagtgaaaggacccaaca

SEQ ID NO: 433078 - DNA, 120 bp, Artificial Sequence
  ENSG00000152495_99 (sequence is synthesized)
gtggagactatcctggcttcctggaagatgagcagtgagccggtgtaaaagaagaggaagaatactaggagagttcagcacaatggacagggccaaggcattattagtatatactagtgg

SEQ ID NO: 433079 - DNA, 120 bp, Artificial Sequence
  ENSG00000152495_100 (sequence is synthesized)
gagacaaaggcaaaaaagaattcaatcaggaatgattttggtccagatttgggactaaaactagatgtttctccttatttacctgataaaggatgattaagcctttattgacacaggcac

SEQ ID NO: 433080 - DNA, 120 bp, Artificial Sequence
  ENSG00000152495_101 (sequence is synthesized)
ctcactaagacaaggacttcaggtgagattttcctagaagagttctccagtccctgcagatggaccacaactacgttgagctcttcacatcttcccgcctcatcgcccagagtgggctga

SEQ ID NO: 433081 - DNA, 120 bp, Artificial Sequence
  ENSG00000152495_102 (sequence is synthesized)
aggcattgcaatcagaaagaacaaaagcttttgacccatactagcataaaacctgctctgtttttcttgatggtcaaattaatttggcaacaacttgaaagccaataaagtttgtaaaaa

SEQ ID NO: 433082 - DNA, 120 bp, Artificial Sequence
  ENSG00000152495_103 (sequence is synthesized)
cacaggcaatttatatatttgtctatatctagggtcacaaaagtggcgagtggcataaccagggcttgaacacacttcctgactcccaatagtctctgcctcatatcaggtcacccctac

SEQ ID NO: 433083 - DNA, 120 bp, Artificial Sequence
  ENSG00000152495_104 (sequence is synthesized)
taagcccaggactgtggattattttatttgctgaccttcctgggaatttattgactgcccatcctcacaagcaggggtaaacctccaagaatgggctgccattgattggattccattctt

SEQ ID NO: 433084 - DNA, 120 bp, Artificial Sequence
  ENSG00000152495_105 (sequence is synthesized)
taggcaaatcatgccctcaagccactgacttcttggattataaaatgatttttaaactctgggcttagtccttcaagtaccctcaaggggttagaaagaactataaaccccaagatagaa

SEQ ID NO: 433085 - DNA, 120 bp, Artificial Sequence
  ENSG00000152495_106 (sequence is synthesized)
acataaggtagtattccataagttctgggatactctcccttttgtttgccatttaatccccacagaaagaatgatgatgcatgaatgattccattctgttaccatagagatgtactttaa

SEQ ID NO: 433086 - DNA, 120 bp, Artificial Sequence
  ENSG00000152495_107 (sequence is synthesized)
gttctgaattctaggtgattgtgaagcgcagcccagaattattttgctggttctgccttcaaagaacttccagtccacaggcaagtgaggagctgtttcttgacttctgttggaaagccg

SEQ ID NO: 433087 - DNA, 120 bp, Artificial Sequence
  ENSG00000152495_108 (sequence is synthesized)
tctgccactttgggggtctcaggtggtacatggccctgtcttctcatactccctcagctactgctacctgaagctgtgcctacctacagtggcccctgaggacttaaacaatttttttct

SEQ ID NO: 433088 - DNA, 120 bp, Artificial Sequence
  ENSG00000152495_109 (sequence is synthesized)
cacatatatttagtggtactgctgggaaatggaataagatctggaagtttgtaagctgagggcaagcccaggtcatcctaaaaacctcgctaagtttatggttctttattatttcaggtc

SEQ ID NO: 433089 - DNA, 120 bp, Artificial Sequence
  ENSG00000152503_0 (sequence is synthesized)
tggttaacagcttatgggcggggagctcggcaaaactcagactaaaaacagaaaaagagaaaagaaaggacaaattcgatacacccgcgtcggtcctccagagtttgtgaaggggtgtaa

SEQ ID NO: 433090 - DNA, 120 bp, Artificial Sequence
  ENSG00000152503_1 (sequence is synthesized)
acatgtcggagtctggggagatgagtgaatttggctacatcatggaattgatagctaaaggcaaggttaccattaagaatatcgaaagggagctcatttgcccagcatgcaaggagctgt

SEQ ID NO: 433091 - DNA, 120 bp, Artificial Sequence
  ENSG00000152503_2 (sequence is synthesized)
ttacccacccattgattctcccttgccaacatagtatctgtcataaatgtgtaaaagaactcctgctgactctcgatgattcattcaacgatgtgggatcagacaactccaatcaaagca

SEQ ID NO: 433092 - DNA, 120 bp, Artificial Sequence
  ENSG00000152503_3 (sequence is synthesized)
gtcctcgacttcggctcccctcccctagtatggataaaattgaccgaattaacagaccaggctggaagcgcaattcattgaccccgaggacaactgttttcccttgccctggctgtgagc

SEQ ID NO: 433093 - DNA, 120 bp, Artificial Sequence
  ENSG00000152503_4 (sequence is synthesized)
atgatgtggatcttggagaacgaggaatcaatggtctgtttcgaaacttcactttggaaactattgtggaaagatatcgtcaagcagctagggcagccacagccattatgtgtgaccttt

SEQ ID NO: 433094 - DNA, 120 bp, Artificial Sequence
  ENSG00000152503_5 (sequence is synthesized)
gtaaaccaccacctcaagaatccacaaaaagctgcatggactgtagtgcaagttactgcaatgaatgcttcaaaattcatcacccttggggtactataaaagctcaacatgagtatgttg

SEQ ID NO: 433095 - DNA, 120 bp, Artificial Sequence
  ENSG00000152503_6 (sequence is synthesized)
gtccaactactaacttcagacccaagattttaatgtgcccagaacatgaaacagagagaataaacatgtactgtgaattatgtaggaggccagtttgccatctgtgtaagttgggtggta

SEQ ID NO: 433096 - DNA, 120 bp, Artificial Sequence
  ENSG00000152503_7 (sequence is synthesized)
atcatgccaaccaccgtgtaaccactatgagcagtgcctacaaaaccttaaaggaaaagctttcaaaggatattgattaccttattggtaaggaaagccaggtgaagagtcaaatatctg

SEQ ID NO: 433097 - DNA, 120 bp, Artificial Sequence
  ENSG00000152503_8 (sequence is synthesized)
aactaaacttgttaatgaaagaaacagagtgtaatggagagagggctaaagaagaagcaattacacattttgaaaagctctttgaagttctggaagagaggaaatcatctgttttgaaag

SEQ ID NO: 433098 - DNA, 120 bp, Artificial Sequence
  ENSG00000152503_9 (sequence is synthesized)
caattgactcctctaagaaactaagattagacaaatttcagactcaaatggaagagtaccagggacttctagagaacaatggacttgtgggatatgctcaagaagtgctaaaggagacag

SEQ ID NO: 433099 - DNA, 120 bp, Artificial Sequence
  ENSG00000152503_10 (sequence is synthesized)
atcagtcttgctttgtgcagacagcaaagcagctccacctcagaatacagaaagccacagaatctttgaagagctttagacctgcagctcagacttcttttgaagactatgttgttaata

SEQ ID NO: 433100 - DNA, 120 bp, Artificial Sequence
  ENSG00000152503_11 (sequence is synthesized)
cctctaaacaaacagaacttcttggagaattatcctttttctctagtggcatagacgtgccagagatcaatgaggaacagagcaaagtttataacaatgccttgataaattggcaccatc

SEQ ID NO: 433101 - DNA, 120 bp, Artificial Sequence
  ENSG00000152503_12 (sequence is synthesized)
cagaaaaggataaagctgatagctatgttcttgaatatcggaaaatcaatagagatgatgaaatgtcatggaatgagatagaagtgtgtggaacaagtaaaataattcaagacttggaaa

SEQ ID NO: 433102 - DNA, 120 bp, Artificial Sequence
  ENSG00000152503_13 (sequence is synthesized)
acagtagtacctatgctttcagagtaagagcttacaagggttcaatctgtagtccttgcagcagagaattgattcttcatactcctccagctccagttttcagcttcctctttgatgaaa

SEQ ID NO: 433103 - DNA, 120 bp, Artificial Sequence
  ENSG00000152503_14 (sequence is synthesized)
aatgtggctataataatgaacacctcctgctgaacttgaagagagaccgtgtagagagtagagctggatttaatcttctgcttgctgcagaacgcatccaagtgggttattacacaagct

SEQ ID NO: 433104 - DNA, 120 bp, Artificial Sequence
  ENSG00000152503_15 (sequence is synthesized)
tagactacatcattggagatactggcattacaaaaggaaaacacttctgggccttccgtgtggaaccatattcatacctggtaaaagtgggagttgcttctagcgataaactacaagaat

SEQ ID NO: 433105 - DNA, 120 bp, Artificial Sequence
  ENSG00000152503_16 (sequence is synthesized)
cacaaccatttaccttagttactataggcatgcagaaattttttatacccaagtcacctacttcttctaatgaacctgaaaatagagttctccctatgccaacaagtattgggattttcc

SEQ ID NO: 433106 - DNA, 120 bp, Artificial Sequence
  ENSG00000152503_17 (sequence is synthesized)
ttgactgtgataaaggcaaagtagatttctatgatatggatcagatgaaatgcctttatgaacgccaagtggactgttcacatacactgtatccagcatttgcattaatgggcagtggag

SEQ ID NO: 433107 - DNA, 120 bp, Artificial Sequence
  ENSG00000152503_18 (sequence is synthesized)
gaattcagcttgaagaacccatcacagcaaaatatctggaataccaagaggacatgtagttgaaacatctgatgtgactcaggataaaaactgtaaacaaagcaatgccttagcgttaac

SEQ ID NO: 433108 - DNA, 120 bp, Artificial Sequence
  ENSG00000152503_19 (sequence is synthesized)
cttcgtaactaattacatatcgctgagtgttctgtcaccccacttgtgtttgagtatgattcttcttgaaatacagaaaatctaaacagccttgtgtcttcatgtcgttgttctgccttt

SEQ ID NO: 433109 - DNA, 120 bp, Artificial Sequence
  ENSG00000152503_20 (sequence is synthesized)
cacaaatgatgaaagtgaagatgttctttccaagttaatactgaagtggttaactttgcaactggactgtcttttactttatgtacaggatatctaatttatttctgtcagctggtgttg

SEQ ID NO: 433110 - DNA, 120 bp, Artificial Sequence
  ENSG00000152503_21 (sequence is synthesized)
ctgacactttccttatggtgggggggatacaaaagtatttattatgattctcttctgtttgacttttcatttttatatcatgtttatgtcctaagagaagatattttttaaatgccttat

SEQ ID NO: 433111 - DNA, 120 bp, Artificial Sequence
  ENSG00000152503_22 (sequence is synthesized)
ggataggaattagtactaagcaatgtgtcttgcatttgttttcaataggaaaacaaagttctagataggttaaaagaaaaacaccataaaagtggtagtatatttaagtggaaaattatg

SEQ ID NO: 433112 - DNA, 120 bp, Artificial Sequence
  ENSG00000152503_23 (sequence is synthesized)
tattttaaagtgtgtaactattaaaaatatattgcctggaaaaggaatactactgttttgttttgttaagaccacaaactgtattgctaaggacattttaagagtctgcttagccataac

SEQ ID NO: 433113 - DNA, 120 bp, Artificial Sequence
  ENSG00000152503_24 (sequence is synthesized)
actcatttaacagcatgggtagtaagcatggtttcttgcagaaaacacaaagttctcagctaacacattaaacttctcactttatatactttttttcagagaaatttatctttagttttt

SEQ ID NO: 433114 - DNA, 120 bp, Artificial Sequence
  ENSG00000152503_25 (sequence is synthesized)
cttattctgtgaaaatatttgttcttatgtcaaagaattatttttcagatatattggtaaagatggactgatattaaaagtcatatttattcttttacccccttactgtgttttgtgatt

SEQ ID NO: 433115 - DNA, 120 bp, Artificial Sequence
  ENSG00000152503_26 (sequence is synthesized)
ttcatttttggcccaattattacatatcaggttttcctgatttatatttacatgtttgaaaagttcattatatattttagtagcgttacatatattataaatttttgtaacatttaaatg

SEQ ID NO: 433116 - DNA, 120 bp, Artificial Sequence
  ENSG00000152503_27 (sequence is synthesized)
ttcacttatgtggcattttctgtttctcattggtaataagcatttctaatataagcaagtaaaaatacaaatttaattacttagaaatgataactaagatcacaatgactgtgtaccctt

SEQ ID NO: 433117 - DNA, 120 bp, Artificial Sequence
  ENSG00000152503_28 (sequence is synthesized)
taaaatatcttttaatttgaggaattacattctatctaaattgtgtgtctgtttttgaaaggtgttgctttcaagtaggtggtttttatttaaagtacttatttttttgaggttaaaata

SEQ ID NO: 433118 - DNA, 120 bp, Artificial Sequence
  ENSG00000152503_29 (sequence is synthesized)
ttcagaaactacttttatgcattgtagcagtaatcatttatggaatgcttttgacatgttttaacagggtaaccaaaacttttaggcctgttttttttggttgtccttgttgttatattt

SEQ ID NO: 433119 - DNA, 120 bp, Artificial Sequence
  ENSG00000152503_30 (sequence is synthesized)
ttaatggaaatctgttactcaggctggtagcattaaattagctttttaccctcaactcaagtagcaaatatcatggagaacttcagtgtttagcaggctgttaatttcccatctatgaat

SEQ ID NO: 433120 - DNA, 120 bp, Artificial Sequence
  ENSG00000152503_31 (sequence is synthesized)
agcactttatgatgtaggctaaactaagcaaataatgcagcgttatgtggatcattatgcaataaagctgctaaagtcacatttgtggttgatactcaagccttgtacaagcacatatga

SEQ ID NO: 433121 - DNA, 120 bp, Artificial Sequence
  ENSG00000152503_32 (sequence is synthesized)
tgtagacatttttaaatgtgaagctttaacaggaataggatagctgtttcaaaccttgtgcaattgtaaataaattgtttagctgtgtttctttcatttttaataaaaaattaaaaagaa

SEQ ID NO: 433122 - DNA, 120 bp, Artificial Sequence
  ENSG00000152503_33 (sequence is synthesized)
gtccacgccccgcggtgccccgcccaggtctctgcgcggcgccgttcccagccgcagtccgcaggagccgctgctgcagccggcagctgggcgggattcccggggtagtcgctgggagca

SEQ ID NO: 433123 - DNA, 120 bp, Artificial Sequence
  ENSG00000152503_34 (sequence is synthesized)
aagctcgcttctcccgcgcctgtgcttttgcctgccccggcttacttctccccgcgtcggtccgctggccacgtacagctgaccagctcatcttccagcttcggaccgaggctccacggc

SEQ ID NO: 433124 - DNA, 120 bp, Artificial Sequence
  ENSG00000152503_35 (sequence is synthesized)
cgccgcagggacccgcccaccagaccctgcgctcggtagccggtgtgagtggaacgtgccgctgatgacacctggcagaaggcagccatggagggcgatggctcagattcgccggttacc

SEQ ID NO: 433125 - DNA, 120 bp, Artificial Sequence
  ENSG00000152503_36 (sequence is synthesized)
gatggggcttttttccagatcttcgcgccgagagccggggacggccaacctgccggcatgcgataaaggccggggaatgtctagctggggccgcgctgagccgagtgcggacccgctttg

SEQ ID NO: 433126 - DNA, 120 bp, Artificial Sequence
  ENSG00000152503_37 (sequence is synthesized)
tgtgcgcgtttgtttgtctccgctgcggtccgaaccgctgccgcgacccccgaggaggcggggcctccgcgcgcccggctccgcctggtgagggtttcacggcctctgctgccgccgccg

SEQ ID NO: 433127 - DNA, 120 bp, Artificial Sequence
  ENSG00000152503_38 (sequence is synthesized)
tgccggattggagacgaggctaccgctgcagacagggctgtgggaagacgacggaacttgccacagcgacagacttctcccaaacaggaaataaaagtgggaagcattttaaaacctaaa

SEQ ID NO: 433128 - DNA, 120 bp, Artificial Sequence
  ENSG00000152503_39 (sequence is synthesized)
ccgccctcgtttgttccgttagatcgcgcagccccgaccgctgcacccggatcctagcaagccgggcgaggctgcccgggagccctcgatggccttcatttcacccaagcccgcttcttg

SEQ ID NO: 433129 - DNA, 120 bp, Artificial Sequence
  ENSG00000152503_40 (sequence is synthesized)
gagcattcccggttgacttctaaaggtggagaggcccgctgtccctttgaaatctctgaggttggaaagcagtctctcccaagaagaacttaggacaattcctctctctgttttgtgggg

SEQ ID NO: 433130 - DNA, 120 bp, Artificial Sequence
  ENSG00000152503_41 (sequence is synthesized)
gttggagggggagagttggtctggagtaggctcctaaccatttcaacgtaagcttatttcctaccactctcctcaggctcaaatcctgccccgccccgcagccccagcactagcccattt

SEQ ID NO: 433131 - DNA, 120 bp, Artificial Sequence
  ENSG00000152503_42 (sequence is synthesized)
aagacccctgttttgtgtgtgattatacaggatttgaacactgaatattaaccatggaatagcagacctttgagactgacttgctttattttcctctgtggggttcggttccactttgta

SEQ ID NO: 433132 - DNA, 120 bp, Artificial Sequence
  ENSG00000152503_43 (sequence is synthesized)
gttcgggtttgtaatgtaaagaataatgggaaactggtctaattatgagagttaagagagtagaggcctgtagttggcctgccctccgccccaccatccctcaaagttgagaccactgag

SEQ ID NO: 433133 - DNA, 120 bp, Artificial Sequence
  ENSG00000152503_44 (sequence is synthesized)
ttaaccatcctcttaatttctctcacttttcccccagatttgtttcatccttgtactggacttctcaagctctgtacataattaaaaatacatagctttacatttttacaaacttaatac

SEQ ID NO: 433134 - DNA, 120 bp, Artificial Sequence
  ENSG00000152503_45 (sequence is synthesized)
ctggaatatatgcttgttgtaaagtattcaaacttcacagaaaggttcacagagtaaaaagtctaagttcatgcccacctccaatctcattccttccccagtggcagcagtttgtgtgtc

SEQ ID NO: 433135 - DNA, 120 bp, Artificial Sequence
  ENSG00000152503_46 (sequence is synthesized)
tgtttctatttcttgtttagtatataccaatagaatggtggtaccctgcctgtctgatctcagagcaaaccaattaatatgcaccatggtcattaggacttgacccagccatgaatttaa

SEQ ID NO: 433136 - DNA, 120 bp, Artificial Sequence
  ENSG00000152503_47 (sequence is synthesized)
aggatgccggattggagacgaggctaccgctgcagacagggctgtgggaagacgacggaacttgccacagcgacagacttctcccaaacaggaaataaaagtgggaagcattttaaaacc

SEQ ID NO: 433137 - DNA, 80 bp, Artificial Sequence
  ENSG00000152518_0 (sequence is synthesized)
ggggcgggccgggcaccccggggcgcggaggagcgctcctcgcttctctccttcccccctgccgcactccgccggaccct

SEQ ID NO: 433138 - DNA, 120 bp, Artificial Sequence
  ENSG00000152518_1 (sequence is synthesized)
cccgccggcccgcgccgctgcactcgccctctcctctcgccccccggcaaactttcggcccctccccgcccctcgcccgttattcgtcgtggctcaagcccggccacgccgccccaaggg

SEQ ID NO: 433139 - DNA, 120 bp, Artificial Sequence
  ENSG00000152518_2 (sequence is synthesized)
ctcctcccgacctcccggcctgccgctccggccactgcgggatccagaaacatgtcgaccacacttctgtccgccttctacgatgtcgacttcttgtgcaagacagagaaatccctggcc

SEQ ID NO: 433140 - DNA, 120 bp, Artificial Sequence
  ENSG00000152518_3 (sequence is synthesized)
aacctcaacctgaacaacatgctggacaagaaggcggtggggacgcctgtggccgccgcccccagctcgggcttcgcgccgggattcctccgacggcactcggccagcaacctgcatgca

SEQ ID NO: 433141 - DNA, 120 bp, Artificial Sequence
  ENSG00000152518_4 (sequence is synthesized)
ctcgcccaccccgcgcccagccccggcagctgctcgcccaagttcccgggcgccgctaacggcagcagctgcggcagcgcggcggccggcggtccgacctcctacggcacccttaaggag

SEQ ID NO: 433142 - DNA, 120 bp, Artificial Sequence
  ENSG00000152518_5 (sequence is synthesized)
ccgtcggggggcggcggcacagccctgctcaacaaggagaacaaattccgggaccgctcgtttagcgagaacggcgatcgcagccagcacctcctgcacctgcagcagcagcagaagggg

SEQ ID NO: 433143 - DNA, 120 bp, Artificial Sequence
  ENSG00000152518_6 (sequence is synthesized)
ggcggcggctcccagatcaactccacgcgctacaagaccgagctgtgccggcccttcgaggagagcggcacgtgcaagtacggcgaaaagtgccagttcgcgcatggcttccacgagctg

SEQ ID NO: 433144 - DNA, 120 bp, Artificial Sequence
  ENSG00000152518_7 (sequence is synthesized)
cgcagcctgactcgccatccgaagtacaagaccgagctgtgccgcacctttcataccatcggcttctgcccctatgggccgcgctgccacttcatccacaacgcggacgagcggcggccc

SEQ ID NO: 433145 - DNA, 120 bp, Artificial Sequence
  ENSG00000152518_8 (sequence is synthesized)
gcgccgtcggggggcgcctccggggacctgcgtgcctttggcacgcgcgatgcgttgcacctgggcttcccgcgggagccgcggcccaagttgcaccacagcctcagcttctcgggcttc

SEQ ID NO: 433146 - DNA, 120 bp, Artificial Sequence
  ENSG00000152518_9 (sequence is synthesized)
ccgtcgggccaccatcagcccccgggcggcctcgagtcgccgctgctgctcgacagccccacgtcgcgcacgccgccgccgccctcctgctcttcggcctcgtcctgctcctcctccgcc

SEQ ID NO: 433147 - DNA, 120 bp, Artificial Sequence
  ENSG00000152518_10 (sequence is synthesized)
ctgctcctcctccgcctcctcctgttcctcggcctccgcggcctccacgccctcgggcgccccgacatgctgcgcctccgcggcggccgcggctgcggccgctctgctgtacggcaccgg

SEQ ID NO: 433148 - DNA, 120 bp, Artificial Sequence
  ENSG00000152518_11 (sequence is synthesized)
ctggcgccgggggccccgtgcgcggcctgctcgtcggcctcgtgcgccaacaacgccttcgccttcggtccggagctcagcagcctcatcacgccgctcgccatccagacccacaacttt

SEQ ID NO: 433149 - DNA, 120 bp, Artificial Sequence
  ENSG00000152518_12 (sequence is synthesized)
ccatccagacccacaactttgccgccgtggccgccgccgcctactaccgcagtcagcagcagcagcagcagcagggcctggcgccccccgcgcagccgccggcgccgcccagcgcgaccc

SEQ ID NO: 433150 - DNA, 120 bp, Artificial Sequence
  ENSG00000152518_13 (sequence is synthesized)
cctccctcgccgcccttcagcttccagctgccgcgccgcctgtccgactcgcccgtgttcgacgcgccccccagccccccggactcgctgtcggaccgcgacagctacctaagcggctcc

SEQ ID NO: 433151 - DNA, 120 bp, Artificial Sequence
  ENSG00000152518_14 (sequence is synthesized)
ctgagctccggcagcctcagcggctctgagtctcccagcctcgaccctggccgccgcctgccaatcttcagccgcctctccatctccgacgactgaggcaagagggcgccagtgaggagg

SEQ ID NO: 433152 - DNA, 120 bp, Artificial Sequence
  ENSG00000152518_15 (sequence is synthesized)
cagactgcaagcccgaccgagcacttggactcgaactctgtgccgggaggggcccccacccctcctttttcggtttcctcttgtctttttttttttatttttattacgaagtttcattct

SEQ ID NO: 433153 - DNA, 120 bp, Artificial Sequence
  ENSG00000152518_16 (sequence is synthesized)
ttttgagcaaaaaagtcgaactttttctgttgaacaaaatattcacaacagggcagttgtgatacgaatagaacaaaaaaaaaaaaaaaacacttaaactttgttaggactccgatgagt

SEQ ID NO: 433154 - DNA, 120 bp, Artificial Sequence
  ENSG00000152518_17 (sequence is synthesized)
ttgggacttcaggaaaaatcaacccagcaccagcagctaccaaccaccattccatctcttcacttgaacagcattagttaagtccagatgtgggaacccttctcttggaagaagttccta

SEQ ID NO: 433155 - DNA, 120 bp, Artificial Sequence
  ENSG00000152518_18 (sequence is synthesized)
attgtgtctcagaccggtgtaaacaaaccagccagccgccaccttgctaaacctataagctttttaaaatccaatatattctgccaagaatatgccttgatagttagccctcagcccata

SEQ ID NO: 433156 - DNA, 120 bp, Artificial Sequence
  ENSG00000152518_19 (sequence is synthesized)
ggtgttttttgttttttaacagaattatatatgtctgggggtgaaaaaacccttgcattccaaaggtccatactggttacttggtttcattgccaccacttagtggatgttcagtttaga

SEQ ID NO: 433157 - DNA, 120 bp, Artificial Sequence
  ENSG00000152518_20 (sequence is synthesized)
accattttgtctgctccctctggaagccttgcgcagagcttactttgtaattgttggagaataactgctgaatttttagctgttttgagttgattcgcaccactgcaccacaactcaata

SEQ ID NO: 433158 - DNA, 120 bp, Artificial Sequence
  ENSG00000152518_21 (sequence is synthesized)
gcaccacaactcaatatgaaaactatttaacttatttattatcttgtgaaaagtatacaatgaaaattttgttcatactgtatttatcaagtatgatgaaaagcaatagatatatattct

SEQ ID NO: 433159 - DNA, 120 bp, Artificial Sequence
  ENSG00000152518_22 (sequence is synthesized)
atgattgccattattaatcggcaaaatgtggagtgtatgttcttttcacagtaatatatgccttttgtaacttcacttggttattttattgtaaatgagtacaaaattcttaatttaaga

SEQ ID NO: 433160 - DNA, 120 bp, Artificial Sequence
  ENSG00000152518_23 (sequence is synthesized)
gattgtatgtaatatttatttcattaatttctttccttgtttacgtaaattttgaaagattgcatgatttcttgacagaaatcgatcttgatgctgtggaagtagtttgaggaacatcct

SEQ ID NO: 433161 - DNA, 120 bp, Artificial Sequence
  ENSG00000152518_24 (sequence is synthesized)
atgagttttcttagaatgtataaaggttgtagcccatccaacttcaaagaaaaaaatgaccacatactttgcaatcaggctgaaatgtggcatgcttttctaattccaactttataaact

SEQ ID NO: 433162 - DNA, 120 bp, Artificial Sequence
  ENSG00000152518_25 (sequence is synthesized)
agcaaaaaagtgtttgcttattccaccagttctactgtgacatactcgagtataaagacatgtagcaataacggggagtggggggggagtctcacagtgcctttggaagggcccgaactt

SEQ ID NO: 433163 - DNA, 120 bp, Artificial Sequence
  ENSG00000152518_26 (sequence is synthesized)
gccttaaatcttcctcaaccaaataagtattttattagtgcttgagagaatctgaatgtaggatgggttcaactgcacaaaaggaaaagatttttaccactttttttatatagatataaa

SEQ ID NO: 433164 - DNA, 120 bp, Artificial Sequence
  ENSG00000152518_27 (sequence is synthesized)
gtgaagcaaccgccttagtgctgaaatatgtagtacatgaatatgccttgtttaattacagaaaattccaaaacttgtactatttttttttccatgtagaaaggcaggaatgtctcctaa

SEQ ID NO: 433165 - DNA, 120 bp, Artificial Sequence
  ENSG00000152518_28 (sequence is synthesized)
gctttcctggacagcagatgaatgagcggtagctttagtttgtacgtaggtacagttggagcactatatgtactctctggactactttggacagaagtaggtttttgaatgtaacaagat

SEQ ID NO: 433166 - DNA, 120 bp, Artificial Sequence
  ENSG00000152518_29 (sequence is synthesized)
aagtcaacttgagttgtaatatattttggggaatcagctcactacaaattgtgactgtaaacattgtactgtaaatgttttgtagttttcccccaataaaatttttgggaaaaaaaggta

SEQ ID NO: 433167 - DNA, 120 bp, Artificial Sequence
  ENSG00000152520_0 (sequence is synthesized)
acccgcccaggcttttatccggcaccggcagcgtcttcctttcctcccccgtctatggtggtggcggcggcggctcctcgggcggcggcggaagacgaggctgcggcgttgccatgaaca

SEQ ID NO: 433168 - DNA, 120 bp, Artificial Sequence
  ENSG00000152520_1 (sequence is synthesized)
ccctcggccgccgcctccccttcctcctcctcgctggcggcggcggtggcggtggtggccccgccgggggtcgggggtgtccccggcggggcggcggtaggagtgaagctgaagtactgc

SEQ ID NO: 433169 - DNA, 120 bp, Artificial Sequence
  ENSG00000152520_2 (sequence is synthesized)
gagtgaagctgaagtactgccgctactacgctaaggataagacttgcttctacggggaggagtgtcagttcctgcatgaggaccctgccgccggggctgccccgggcctcggcctccata

SEQ ID NO: 433170 - DNA, 120 bp, Artificial Sequence
  ENSG00000152520_3 (sequence is synthesized)
catagcaacagcgtccccctggctctggctggtgcacccgtggccggctttccgccgggagccgtcgcgggcgggggagctgggccgccccccgggcccaagaagccggacctgggggac

SEQ ID NO: 433171 - DNA, 120 bp, Artificial Sequence
  ENSG00000152520_4 (sequence is synthesized)
ggaccggagccgcagccggcggaggaggcagtagcgggggactcgatggaccgcggctggcaattccaggaatggatggaggtgctttaactgatacaagtctcacagattcctatttta

SEQ ID NO: 433172 - DNA, 120 bp, Artificial Sequence
  ENSG00000152520_5 (sequence is synthesized)
gcaccagctttattggagtcaatggatttggaagccctgtagaaacaaaatatcccctgatgcagagaatgactaatagtagcagctccccaagccttctaaatgacagtgccaagccat

SEQ ID NO: 433173 - DNA, 120 bp, Artificial Sequence
  ENSG00000152520_6 (sequence is synthesized)
attcagcccatgatcctctaacatcacctgcttcatccttgtttaatgactttggtgccctcaacatctctcagagacgaaagccaaggaagtatcgcctggggatgctggaggagaggc

SEQ ID NO: 433174 - DNA, 120 bp, Artificial Sequence
  ENSG00000152520_7 (sequence is synthesized)
tagttccgatgggatcaaaggcacgaaaagcaaagaaccctattggctgccttgctgacaggtgtaaatcaggagtacccatcaatatggtttggtggaacagagtcacagaaaacaatt

SEQ ID NO: 433175 - DNA, 120 bp, Artificial Sequence
  ENSG00000152520_8 (sequence is synthesized)
tacagacaccaaatcctactgcaagcgagtttattcctaaaggaggatcaacctccaggctgagtaacgtgtcccagtcaaatatgtctgccttctctcaagttttctctcacccatcca

SEQ ID NO: 433176 - DNA, 120 bp, Artificial Sequence
  ENSG00000152520_9 (sequence is synthesized)
tgggaagccctgctactgctggattagcgccaggaatgtcgttgtctgctgggtcttcccctcttcattcccccaagattactccacatacttctcctgctcccagaagaagaagtcaca

SEQ ID NO: 433177 - DNA, 120 bp, Artificial Sequence
  ENSG00000152520_10 (sequence is synthesized)
ctccaaatccagcaagttacatggtgccttctagtgcctctacatctgttaataatcctgtttctcagactccgtcttctggtcaggtgatccaaaaggaaactgttggtgggacgactt

SEQ ID NO: 433178 - DNA, 120 bp, Artificial Sequence
  ENSG00000152520_11 (sequence is synthesized)
acttctatacagacacaactccagcacctttgactggaatggtgtttccaaactatcatatttatcctccaactgcacctcacgttgcttatatgcaaccgaaagcaaacgcaccttcct

SEQ ID NO: 433179 - DNA, 120 bp, Artificial Sequence
  ENSG00000152520_12 (sequence is synthesized)
tcttcatggctgatgaactccgacaggagctgatcaacagacatttaataacaatggctcaaattgatcaagcagatatgccagcagttcctacagaggttgacagctaccatagcctat

SEQ ID NO: 433180 - DNA, 120 bp, Artificial Sequence
  ENSG00000152520_13 (sequence is synthesized)
tccctctagaaccactgccacctcccaaccggatacagaaatcaagtaattttggatatattacatcttgctacaaagctgtaaacagcaaagatgatctgccatattgccttcggagga

SEQ ID NO: 433181 - DNA, 120 bp, Artificial Sequence
  ENSG00000152520_14 (sequence is synthesized)
tacatggttttcgtcttgttaacacaaagtgcatggtgttggtcgacatgtggaagaaaattcaacactcaaatatcgtaactttgcgtgaagtatttaccactaaagcatttgctgagc

SEQ ID NO: 433182 - DNA, 120 bp, Artificial Sequence
  ENSG00000152520_15 (sequence is synthesized)
cctctcttgtgtttgcatatgatttccatgctggaggagaaactatgatgagcagacactttaatgaccctaatgctgatgcctacttcaccaagagaaagtggggtcagcacgagggac

SEQ ID NO: 433183 - DNA, 120 bp, Artificial Sequence
  ENSG00000152520_16 (sequence is synthesized)
cattgcccaggcagcatgctggattattgccagaatctcttatttgggcatatattgtccaactaagttctgcattgcgtaccattcatacagcaggtttggcatgtcgagttatggatc

SEQ ID NO: 433184 - DNA, 120 bp, Artificial Sequence
  ENSG00000152520_17 (sequence is synthesized)
caacaaagattctgataactggcaaaacaaggttgcgagtaaattgtgttggagtttttgatgttttaacatttgataacagtcaaaataataatccattggcattaatggcccagtacc

SEQ ID NO: 433185 - DNA, 120 bp, Artificial Sequence
  ENSG00000152520_18 (sequence is synthesized)
agcaagcagatctgatatcattaggaaaagttgtgttggctttggcttgcaactctttggcaggaattcagcgagagaatttacagaaagccatggaactggtgacaatcaactattcct

SEQ ID NO: 433186 - DNA, 120 bp, Artificial Sequence
  ENSG00000152520_19 (sequence is synthesized)
ctgacctgaagaatctgattttgtatttgttgactgaccaaaacaggatgcgaagtgtaaatgacatcatgcccatgattggtgctcgattttatactcaattggatgctgctcaaatga

SEQ ID NO: 433187 - DNA, 120 bp, Artificial Sequence
  ENSG00000152520_20 (sequence is synthesized)
gaaatgatgtcatagaggaagaccttgcaaaggaggttcaaaatggaagactgtttaggctcctagcaaaattgggaacaatcaatgagaggccggagtttcagaaggatcccacttggt

SEQ ID NO: 433188 - DNA, 120 bp, Artificial Sequence
  ENSG00000152520_21 (sequence is synthesized)
cagagactggagaccgttatctgttgaaactctttagggatcatctttttcatcaggtgacagaagcaggtgctccctggattgacctcagtcatataatttcttgtcttaacaagctag

SEQ ID NO: 433189 - DNA, 120 bp, Artificial Sequence
  ENSG00000152520_22 (sequence is synthesized)
atgctggtgtgccagaaaaaataagcctgatttccagagatgagaagagtgtacttgtggtgacctacagtgacttaaagcgctgctttgaaaatacttttcaagaactgattgcagctg

SEQ ID NO: 433190 - DNA, 120 bp, Artificial Sequence
  ENSG00000152520_23 (sequence is synthesized)
ttgcactacagctgaacttttcatcatctcattcacatttgggaaacgaacaggagatgagcaaagctgcttgcacttcagtcaggtacactgttacttgaaaggaagaatgtttcactt

SEQ ID NO: 433191 - DNA, 120 bp, Artificial Sequence
  ENSG00000152520_24 (sequence is synthesized)
acccaagagctatggctgccattggaggctgttatctgtgaagaatttattttagatttaggagcaccatcaggtgaatgatgttcctgcttttgttttttccacttgtatatgcactaa

SEQ ID NO: 433192 - DNA, 120 bp, Artificial Sequence
  ENSG00000152520_25 (sequence is synthesized)
ttttaattttttaaagactttttctgatctttgaacttttgccacattgtatacttataatgggaaactttgcaaggacatttttgggaagcaatgctgggcagcgtttttgccattgag

SEQ ID NO: 433193 - DNA, 120 bp, Artificial Sequence
  ENSG00000152520_26 (sequence is synthesized)
ggttgcagaatttgctctttttgggatgggttgccctgaataacattacggaccaggtaaataatttcatagaagttcagtatagtacgtaattcttgtaagagtatcgtatgcaagctc

SEQ ID NO: 433194 - DNA, 120 bp, Artificial Sequence
  ENSG00000152520_27 (sequence is synthesized)
tctgtatgccacccactgttagttcaaattgagatttttgttttgttttgttcttaagaacataccaagaaaataccagtgaattgttggatatgaattccctgttagttgatttaaatc

SEQ ID NO: 433195 - DNA, 120 bp, Artificial Sequence
  ENSG00000152520_28 (sequence is synthesized)
ctttctgaataaagatcagataaacagtaactgaaggagcatgtatagctctttccttcaaattcaactagagcctttttaaaaagacatttgcctgctagtcagatacatttacattta

SEQ ID NO: 433196 - DNA, 120 bp, Artificial Sequence
  ENSG00000152520_29 (sequence is synthesized)
tacatttatgcaaattttttaaataggagaaaattaagaaattgtgttaaaggcctaaagttcaggagtgtattactttaggttctttccagtttgctggtttttttttttttttttttt

SEQ ID NO: 433197 - DNA, 120 bp, Artificial Sequence
  ENSG00000152520_30 (sequence is synthesized)
tgggcgggggggaggtttatgaagttttgctctttgaaccacagctttattatggtcctttacactggagacagacacagagacactgttcagaagatgaactaaactcagcagtggtct

SEQ ID NO: 433198 - DNA, 120 bp, Artificial Sequence
  ENSG00000152520_31 (sequence is synthesized)
ggtatcaagagctttctgatgttttacagcctgaatttggagggataacgatctgctgtgcctttgcagtcactgcttagcccaaagtaatagtacttttgataataactcactctgtgc

SEQ ID NO: 433199 - DNA, 120 bp, Artificial Sequence
  ENSG00000152520_32 (sequence is synthesized)
gatattcctgaataagtccatctcaaaagtttgggattttcctcctcttaactttcttaatatttggacatgcagttgtcgccaaacttgggtattcatggaatttctagtaaatgaaat

SEQ ID NO: 433200 - DNA, 120 bp, Artificial Sequence
  ENSG00000152520_33 (sequence is synthesized)
acctatactttgatactgaagactgccaaatacataggaattttctttcttaaaaaacagtaatgaagactatatctcctttcccagcactgaatgttttactagcactgggtgctcacc

SEQ ID NO: 433201 - DNA, 120 bp, Artificial Sequence
  ENSG00000152520_34 (sequence is synthesized)
atgcaactgaagaaaatgtggaaactcaaaaggtcaggacagacttccaagcacttgcaactgatgttactgtcttcaattttaataattacacatatttgtatatttcagagaagtttt

SEQ ID NO: 433202 - DNA, 120 bp, Artificial Sequence
  ENSG00000152520_35 (sequence is synthesized)
taatatttctctgtccactttttataagctttaaaatgattttctctgccttgagatttgcatcaagaaaaagcacctctcttcacctgaaagctttgaagactagagacacgctttaca

SEQ ID NO: 433203 - DNA, 120 bp, Artificial Sequence
  ENSG00000152520_36 (sequence is synthesized)
cgttttaacaagtatattgagtccacgtttggtagcatcagttgttgagttaaaaagaaaattattgcatttgatctggatggattttaaaagaatataatgttcaatattaaaaggata

SEQ ID NO: 433204 - DNA, 120 bp, Artificial Sequence
  ENSG00000152520_37 (sequence is synthesized)
attcacatttgccaccataatgttcttttttatgtaaaaagaagaacttggagacattaacatgaaaaagtcttttatcattagctcatgtatttgaggaagagcagctgtctttttata

SEQ ID NO: 433205 - DNA, 120 bp, Artificial Sequence
  ENSG00000152520_38 (sequence is synthesized)
tgttttttgacaaatcatattgtattcttttgtacaaaaaagaactacttgtattctagaagaaatatgaaatgcttaatttataagcgggctggagattttttccaatattgttttctt

SEQ ID NO: 433206 - DNA, 120 bp, Artificial Sequence
  ENSG00000152520_39 (sequence is synthesized)
tgaaaatgaaaggggatcatctattttagttttggggtctgggaactttttgaaaatttaatttgtggaccaatgttttgtgaaagctaaagagggcaggggttaaaatagggcttgaat

SEQ ID NO: 433207 - DNA, 120 bp, Artificial Sequence
  ENSG00000152520_40 (sequence is synthesized)
ttctcattctgtatagaccagcaaacttccctgtgcaaggcaagtttacatcacaaatccaagaatgtttgcatcctaaatgctagtttgcttcagcccctagttaacctcaggacttgg

SEQ ID NO: 433208 - DNA, 120 bp, Artificial Sequence
  ENSG00000152520_41 (sequence is synthesized)
tttgcatataaaaggtagacagctgatatgttttcatgaataaatattgtcagccagaaaaggttggtgtcaggtaatgcatatttttttaagctttgttttatatttatttttcattta

SEQ ID NO: 433209 - DNA, 120 bp, Artificial Sequence
  ENSG00000152520_42 (sequence is synthesized)
gtttttattgggaatggttttcaaagaactctcagttctgcctaggtgtttttgggggagccctgttttccatagtgtaattccatttaagaggttgtctaaaagtctttttaattaata

SEQ ID NO: 433210 - DNA, 120 bp, Artificial Sequence
  ENSG00000152520_43 (sequence is synthesized)
gaaagattttaatatccaagagtagtcaaattaaggatataaactttccacaccttcctgtcgtgacagataaaagcacagaaaggacaacccttgaaatcatgtaacgttggtcatttc

SEQ ID NO: 433211 - DNA, 120 bp, Artificial Sequence
  ENSG00000152520_44 (sequence is synthesized)
aatattttgtacctgttttaaattctgttagtgtatttacttcattgtaaatatttttgagggtacctttgtattttgcttttgaccttggttctgtgatttggatgtcaacaacttccc

SEQ ID NO: 433212 - DNA, 120 bp, Artificial Sequence
  ENSG00000152520_45 (sequence is synthesized)
taaaaagcaccagtgtgttaggttctaatgtcatgacccaatttgtgttattcatctttaatcctgttttcagtctctatgtgtacagcagtatttttaataaagaattacagagataaa

SEQ ID NO: 433213 - DNA, 120 bp, Artificial Sequence
  ENSG00000152520_46 (sequence is synthesized)
gagtaagaattaacatggatatttacttgttttcctttattaaagacaaattttgttcattttaaagtatttcagtgttttaagcctagattttaatttattttggggtggtgtctatgc

SEQ ID NO: 433214 - DNA, 120 bp, Artificial Sequence
  ENSG00000152520_47 (sequence is synthesized)
agactttgaacatgtatctccccctcccctccctctcttttcttcctttcctttcccctctctatttctttctctctcttttcctttctattcttttgcttctgtcttgctctgtcacct

SEQ ID NO: 433215 - DNA, 120 bp, Artificial Sequence
  ENSG00000152520_48 (sequence is synthesized)
ttttgttggttgttttctctagggaacaagctaccctctgagtcagcactggacttgaagataaatcctacaattcatgaaactgactgattcgactaaaggatggatagtttgggcagc

SEQ ID NO: 433216 - DNA, 120 bp, Artificial Sequence
  ENSG00000152520_49 (sequence is synthesized)
gttggacagctctatgaggggtctgtttgtttaactgaagggattgttgagttcagcaacttttaattcccctaatcataaggggttgctgttgtgaaaacagggtttgtgaaggaatca

SEQ ID NO: 433217 - DNA, 120 bp, Artificial Sequence
  ENSG00000152520_50 (sequence is synthesized)
gttctggcaattaacatcagtattcttactgacttcgtttttattttattgtcaaacttctttaaagtggataaattttactgctttttttgccagcaagaatttgtatgcactgagagg

SEQ ID NO: 433218 - DNA, 120 bp, Artificial Sequence
  ENSG00000152520_51 (sequence is synthesized)
aagctttgcagtctacttatgaatccaagtttctttttttaaaatatatgaggttataaacatttctctcaagtaaactttttgacacttggattatttcatctttacaaaggaatgtcg

SEQ ID NO: 433219 - DNA, 120 bp, Artificial Sequence
  ENSG00000152527_0 (sequence is synthesized)
ccccgccctctccgagctcggcttgaggcgggcgcgggctgagagtccggggatcccgggggccagtcgcggccgggacatcgggcgctgcggccggggacccgctgctgagatagacag

SEQ ID NO: 433220 - DNA, 120 bp, Artificial Sequence
  ENSG00000152527_1 (sequence is synthesized)
aatatggcagagctttctgagccagagggaccagtagattggaaggaacgatgtgtagctctggagtcccaactcatgaaatttagagttcaagcaagcaagatacgagagcttttagca

SEQ ID NO: 433221 - DNA, 120 bp, Artificial Sequence
  ENSG00000152527_2 (sequence is synthesized)
gagaagatgcaacagcttgagagacaagttattgatgctgaacgtcaagcagaaaaagcttttcaacaggtacaagttatggaagataaattaaaagcagctaatattcaaaccagtgaa

SEQ ID NO: 433222 - DNA, 120 bp, Artificial Sequence
  ENSG00000152527_3 (sequence is synthesized)
tcagagacaagattatataataagtgtcaagatctggagtcgctaatacaggaaaaagatgacgtcattcaaaacttggaattgcaacttgaagagcagaaacaaataagaatacaagaa

SEQ ID NO: 433223 - DNA, 120 bp, Artificial Sequence
  ENSG00000152527_4 (sequence is synthesized)
gctaaaataatagaagagaaagcagctaagataaaagaatgggtaacagttaagttaaatgagctggaattggagaatcagaatcttcgtttgatcaaccaaaaccaaactgaagagata

SEQ ID NO: 433224 - DNA, 120 bp, Artificial Sequence
  ENSG00000152527_5 (sequence is synthesized)
agaacaatgcagtcaaaactacaagaagttcaaggaaagaagtcatccactgtctctacactaaagctttcggaaggccagcgcctgagcagtttgacctttgggtgctttttatctcga

SEQ ID NO: 433225 - DNA, 120 bp, Artificial Sequence
  ENSG00000152527_6 (sequence is synthesized)
gcaaggagtcctcctcaagtagtaaaatctgaggaaatgagcaagatatcatcgaaagaacctgagttcactgaaggaaaagacatggaagaaatggaaattccagaaaagtctgttgat

SEQ ID NO: 433226 - DNA, 120 bp, Artificial Sequence
  ENSG00000152527_7 (sequence is synthesized)
aaccaagttctagaaaacaacagaggccagagaacattgcatcaaaccccttgtggctcagaacagaatcggaaaacaagaacaagctttgccacagatggtggcatctcccagaattct

SEQ ID NO: 433227 - DNA, 120 bp, Artificial Sequence
  ENSG00000152527_8 (sequence is synthesized)
ggggctcctgtgagtgactggagctctgatgaggaagacgggagcaaaggaagatccaagtccagatgcacatccaccctctccagtcacacatctgaggaaggggtccagtgtagcagg

SEQ ID NO: 433228 - DNA, 120 bp, Artificial Sequence
  ENSG00000152527_9 (sequence is synthesized)
atgggaagtgaaatgtatctgacagcatctgatgacagcagctctatatttgaggaagagacttttggcataaagagaccagaacacaagaagctatattcttggcagcaggaggcacag

SEQ ID NO: 433229 - DNA, 120 bp, Artificial Sequence
  ENSG00000152527_10 (sequence is synthesized)
tggaaagctctaaatagtcctcttggaaagggaaattctgaattaagtaaaaaggaacaagatagttcctcggatgaactgaataaaaaatttcaatcccagagactcgattattcatct

SEQ ID NO: 433230 - DNA, 120 bp, Artificial Sequence
  ENSG00000152527_11 (sequence is synthesized)
tcatcgagtgaagccaacaccccaagccctattttgaccccagctttaatgccaaagcatcctaactcactctctggaaaaggaacacaattagtgccttcatcacacctgccaccccca

SEQ ID NO: 433231 - DNA, 120 bp, Artificial Sequence
  ENSG00000152527_12 (sequence is synthesized)
aagttaaggattcctaatgttttcagtataagtgtagcactagccaaaaggcacttaagccagccacagttaagctctgacaggatgtttggtacaaatagaaacgctataagcatgata

SEQ ID NO: 433232 - DNA, 120 bp, Artificial Sequence
  ENSG00000152527_13 (sequence is synthesized)
cgaccactgagacctcaggaaactgatcttgatctagttgatggagacagtacagaagttttagagaatatggacacgagttgtgatgatggattattttcctatgactccttggactct

SEQ ID NO: 433233 - DNA, 120 bp, Artificial Sequence
  ENSG00000152527_14 (sequence is synthesized)
ccaaattcagatgaccaggaacactgtgactcagcaaagaaggtggcatacagcaaacctccaactcctcccctgcaccgttttccttcttgggaaagcagaatttatgctgtagccaaa

SEQ ID NO: 433234 - DNA, 120 bp, Artificial Sequence
  ENSG00000152527_15 (sequence is synthesized)
tcaggtattcgaatgtctgaggccttcaatatggagagtgttaataaaaattctgctgcaaccctttcctatactacatcaggactttatacatctctgatatacaagaacatgaccacc

SEQ ID NO: 433235 - DNA, 120 bp, Artificial Sequence
  ENSG00000152527_16 (sequence is synthesized)
ccagtgtatacaactttgaaggggaaggcgacccaaataagtagcagccctttcctggatgactcatctgggtcagaggaagaagacagctccagatccagctcccggacgtcagagtca

SEQ ID NO: 433236 - DNA, 120 bp, Artificial Sequence
  ENSG00000152527_17 (sequence is synthesized)
gactcacgcagtaggagtgggccaggcagccccagagccatgaaacgaggtgtgtctctctcctctgtggcttctgaaagtgattatgctattcctcctgatgcttactccacagacacg

SEQ ID NO: 433237 - DNA, 120 bp, Artificial Sequence
  ENSG00000152527_18 (sequence is synthesized)
gagtactcacagccagagcagaagctcccaaaaacttgctcatcttccagtgataatgggaaaaatgaaccactggaaaaatctggttatttattaaaaatgagtggtaaagtcaagtct

SEQ ID NO: 433238 - DNA, 120 bp, Artificial Sequence
  ENSG00000152527_19 (sequence is synthesized)
tggaagcggcggtggtttgttcttaaaggtggtgaattactttactacaaatctccgagtgatgtaattagaaaaccccagggccatattgaacttagtgcatcctgtagtattttaaga

SEQ ID NO: 433239 - DNA, 120 bp, Artificial Sequence
  ENSG00000152527_20 (sequence is synthesized)
ggagataacaaacaaacagttcagttgaccactgaaaaacacacatactatctgactgcagattctcccaatatattggaagagtggattaaagtgttacagaatgttcttcgagtacaa

SEQ ID NO: 433240 - DNA, 120 bp, Artificial Sequence
  ENSG00000152527_21 (sequence is synthesized)
gctgccaacccactttccctgcagcctgagggcaaacccaccatgaagggattgctcactaaggtaaaacatggatattccaagagagtctggtgtacactaataggaaagacattatat

SEQ ID NO: 433241 - DNA, 120 bp, Artificial Sequence
  ENSG00000152527_22 (sequence is synthesized)
tattttcggagtcaagaagataagtttcctttaggtcagatcaaactctgggaggctaaagtggaagaggttgacagatcttgtgattcagatgaagattatgaagccagtggacgaagt

SEQ ID NO: 433242 - DNA, 120 bp, Artificial Sequence
  ENSG00000152527_23 (sequence is synthesized)
ctgttatccacacattatactatcgttatccatcccaaagaccaaggtccaacttacctcctaattggatccaagcatgaaaaggacacttggctttatcatctgactgttgcagctgga

SEQ ID NO: 433243 - DNA, 120 bp, Artificial Sequence
  ENSG00000152527_24 (sequence is synthesized)
agcaacaatgtaaacgttggatctgaatttgaacaactggtttgcaaattgctaaatatagacggggagccttcctctcagatatggagacaccccactttgtgtcacagtaaagaagga

SEQ ID NO: 433244 - DNA, 120 bp, Artificial Sequence
  ENSG00000152527_25 (sequence is synthesized)
atcatttcccctctgacaactctaccttccgaagccctgcagacagaagctattaaattatttaagacctgccagctttttataaatgctgcagttgactctcctgcaattgattaccac

SEQ ID NO: 433245 - DNA, 120 bp, Artificial Sequence
  ENSG00000152527_26 (sequence is synthesized)
atatctttagcccagagtgctttgcaaatctgcctgacacatcctgagctgcagaatgaaatttgctgtcagcttattaaacagacaagacgaagacagccacagaatcaaccaggacca

SEQ ID NO: 433246 - DNA, 120 bp, Artificial Sequence
  ENSG00000152527_27 (sequence is synthesized)
ttgcagggctggcagctcttggcactctgcgttgggctcttccttccccatcatcctttcctgtggctcctcaggcttcacctaaagaggaatgcagattccaggacagaatttggaaaa

SEQ ID NO: 433247 - DNA, 120 bp, Artificial Sequence
  ENSG00000152527_28 (sequence is synthesized)
tatgccatttactgccagcgttgtgtagaaagaacgcaacaaaatggtgacagagaagcaagaccctcaaggatggaaattctttcaactcttctccgaaacccttatcaccattctttg

SEQ ID NO: 433248 - DNA, 120 bp, Artificial Sequence
  ENSG00000152527_29 (sequence is synthesized)
tataccaggtagttggttttgacgcatctaccacagtggaagaatttttgaatactttgaaccaggacacaggaatgaggaaaccagcgcagtctggatttgcgttgttcactgacgatc

SEQ ID NO: 433249 - DNA, 120 bp, Artificial Sequence
  ENSG00000152527_30 (sequence is synthesized)
cttctggcagagatttagagcattgtcttcaaggaaacatcaagatttgtgacattatttccaaatgggaacaggcttccaaagaacagcagcctggaaaatgtgaaggtacaaggactg

SEQ ID NO: 433250 - DNA, 120 bp, Artificial Sequence
  ENSG00000152527_31 (sequence is synthesized)
ttcgtctgacatacaaaaacagactatatttctcagtgcaagctcgtggagagactgatagagaaaagttgctgttaatgtatcagacaaatgatcaaatcataaatggactttttcctc

SEQ ID NO: 433251 - DNA, 120 bp, Artificial Sequence
  ENSG00000152527_32 (sequence is synthesized)
tgaacaaagatctggcattagaaatggcagctcttttatctcaggtagagattggagattttgaaagacctttctcaactccagcagggcatgttaccaatcagtgcaaagtgaatcaaa

SEQ ID NO: 433252 - DNA, 120 bp, Artificial Sequence
  ENSG00000152527_33 (sequence is synthesized)
ctctaaagcaagtcatagagaaattttatcctaaaaggtatagagatggctgttctgaagagcagttaaggcagctttgccagcgactttcaaccagatggatggccctccggggacaca

SEQ ID NO: 433253 - DNA, 120 bp, Artificial Sequence
  ENSG00000152527_34 (sequence is synthesized)
gtgctgctgactgtgtgcgcatttatttgacagtagccaggaagtggccattctttggtgccaagttgtttcttgcaaaacccataactccatcatcacttggaagtactttcttgtggc

SEQ ID NO: 433254 - DNA, 120 bp, Artificial Sequence
  ENSG00000152527_35 (sequence is synthesized)
tggctgtacatgaggatggtttaagcctcttagaatacaactccatgaggttaatagtcagctatgtgtacaagagtctaatgacctttggaggctatcaagatgattttatggtagtca

SEQ ID NO: 433255 - DNA, 120 bp, Artificial Sequence
  ENSG00000152527_36 (sequence is synthesized)
ttaacaatacacattcaaaggacaaaccaacagagaaattactttttgccatggcaaaacccaagattcttgaaatcactcttttgatcgccagttacataaacaacttccatcagcaaa

SEQ ID NO: 433256 - DNA, 120 bp, Artificial Sequence
  ENSG00000152527_37 (sequence is synthesized)
aggcagcatttcaccacctctctgctccagcactgctctcagcccagacccggggaccccaagccagaatgatgggaagccagcctcttctgtcaagcagcagaccgaccaaaggcccca

SEQ ID NO: 433257 - DNA, 120 bp, Artificial Sequence
  ENSG00000152527_38 (sequence is synthesized)
ccttactctgaaagctggggagcctgaacattcactccttgtcctccatgctgtggctgtatcagctccctacaagttcgtttacacctggcagcacggcagccacacaccggtattcca

SEQ ID NO: 433258 - DNA, 120 bp, Artificial Sequence
  ENSG00000152527_39 (sequence is synthesized)
aaccttaacaatgaagggggttagtctcttttatttgattcttaaatattcaaataaatattaacagtaaaacataaacacaaaatttgccaacacactaattttcttatagagtaaatg

SEQ ID NO: 433259 - DNA, 120 bp, Artificial Sequence
  ENSG00000152527_40 (sequence is synthesized)
agtaagaattcatcattttttccatctcccttctcccttgtcatcagacacattgtgcaatgtggcttttcttttcttttctttttttcccctttttaatattctggcaatctttagaaa

SEQ ID NO: 433260 - DNA, 120 bp, Artificial Sequence
  ENSG00000152527_41 (sequence is synthesized)
gggagattccaaactcccatttggtaaaccagttgattatttggaaatgttcactgccaaaatagtaagtgctataactaaatgcgcttttaattaatgatatagtgtttggaaaggagt

SEQ ID NO: 433261 - DNA, 120 bp, Artificial Sequence
  ENSG00000152527_42 (sequence is synthesized)
agaacatgcagcataagaaactgctgcagagtggtgcgaggagtacattttcagagcaggtgcagtacatcttccggctctatgaatcattatgtgagaaagcaggataacattaggtaa

SEQ ID NO: 433262 - DNA, 120 bp, Artificial Sequence
  ENSG00000152527_43 (sequence is synthesized)
cctgagcctcctgtgtggtattagaaagtataccgtcaccttttcacatcactggagtgtaaaatttaaaacaagatggtgattcctgacattccttggctgtcagtgctgcccagattc

SEQ ID NO: 433263 - DNA, 120 bp, Artificial Sequence
  ENSG00000152527_44 (sequence is synthesized)
agaagaatattgcccacatttcactgtatttggtgctgggtcattttgaccttgctttgttaataatatctttaaaaacaaagacaatccttaaagctttgctcctcacacattaccttc

SEQ ID NO: 433264 - DNA, 90 bp, Artificial Sequence
  ENSG00000152527_45 (sequence is synthesized)
aagacaatccttaaagctttgctcctcacacattaccttctaattatagtttgaaaatagattccctacacatacatacatatgtatgca

SEQ ID NO: 433265 - DNA, 64 bp, Artificial Sequence
  ENSG00000152527_46 (sequence is synthesized)
aagcaatcctccagaaattttattttatttttttgaggcagggtctcactctggttgcccaggc

SEQ ID NO: 433266 - DNA, 120 bp, Artificial Sequence
  ENSG00000152527_47 (sequence is synthesized)
atagctcactgtagcctcgaccttccgggatcaagcaatcccacttcagcctcttgaatagctgggactagaagcatgcaccaccatgcccatctaatatttgtatttttagtagagaca

SEQ ID NO: 433267 - DNA, 65 bp, Artificial Sequence
  ENSG00000152527_48 (sequence is synthesized)
ccaccatgcccatctaatatttgtatttttagtagagacaggatctccctatgttgtccagccta

SEQ ID NO: 433268 - DNA, 120 bp, Artificial Sequence
  ENSG00000152527_49 (sequence is synthesized)
tttttaaaagaaaagagaaaataattcttctgtcaaaggaggttaaattttagttgatagagtacttaaatgcattactttattaggttatgtaagtggtcagtgcattccagtatgtgt

SEQ ID NO: 433269 - DNA, 120 bp, Artificial Sequence
  ENSG00000152527_50 (sequence is synthesized)
gtgtcacaacagtgtagttcatattcatgataaaaatgaaactgtgataagacatgaaaattatattattaaaatgttcaattgtaatggtaatcatgagtatacttaattttatttatg

SEQ ID NO: 433270 - DNA, 120 bp, Artificial Sequence
  ENSG00000152527_51 (sequence is synthesized)
gaatatttgtatttattttttggacatatatttatcactttgtcattttttttaaccaatttgagaaatgttagctgctgaattaatttgttgcccgagccttcatattttcttctttgc

SEQ ID NO: 433271 - DNA, 120 bp, Artificial Sequence
  ENSG00000152527_52 (sequence is synthesized)
tgccttctccctgtggcaatgtactgttctcacattaagccttttaaaaatgttccatactgtattagcatccttagaagggacagaactaagaaatacattgctcaaataatattttac

SEQ ID NO: 433272 - DNA, 120 bp, Artificial Sequence
  ENSG00000152527_53 (sequence is synthesized)
tttattgataatgacaaaaagaatattttttaaaccccatcaaaatagatttcaattgactgtttcccctacatcttttgagccacagtcgcccatcgaataagcaaatttgtttttgag

SEQ ID NO: 433273 - DNA, 120 bp, Artificial Sequence
  ENSG00000152527_54 (sequence is synthesized)
aataaactggtaaccagtttgtgatgactctcagaagccttttggctgggttacagaagagtttctaagttcctagagagccatttaataattagttggtgagccagaggcttgacagag

SEQ ID NO: 433274 - DNA, 120 bp, Artificial Sequence
  ENSG00000152527_55 (sequence is synthesized)
ctgttacttatgtgtgagggctttattctcaggcagtagtttattcatcatttggtaagcccctccccacactcctctaatttaaacaagtagtgaaggcttatcttaaactgtgtagta

SEQ ID NO: 433275 - DNA, 120 bp, Artificial Sequence
  ENSG00000152527_56 (sequence is synthesized)
ccttagacttggcatttatttttgatagagcagagataaaatattttgatggaaggaaatcaattttctgtaactgatgatgtgaaaattttattttctgggaaattatatagccattca

SEQ ID NO: 433276 - DNA, 120 bp, Artificial Sequence
  ENSG00000152527_57 (sequence is synthesized)
aaaattcaaagtatgttattatgattggttacaagagaataatgttacatgtttaattgtaatatttgtctcctatcattttcttccctttcagtcataataaatgatttacaaaaccca

SEQ ID NO: 433277 - DNA, 64 bp, Artificial Sequence
  ENSG00000152527_58 (sequence is synthesized)
ataactgggattacaggtacaagttatggaagataaattaaaagcagctaatattcaaaccagt

SEQ ID NO: 433278 - DNA, 120 bp, Artificial Sequence
  ENSG00000152527_59 (sequence is synthesized)
ggtacattttcagaagaatgtatgaaacaaatattggtacaggaagcctttggttatcattgatgtggagctaggaaaatatttcctttgttatgttaaatctcttagggaagattgcaa

SEQ ID NO: 433279 - DNA, 120 bp, Artificial Sequence
  ENSG00000152527_60 (sequence is synthesized)
taaatacttgaaaaactgacagagaatatttttaagtgaaaagtgcatttgcatttcaagtatgaatgacttagcattagtgggtgttcattcaataaaagcaactattttgtttcctta

SEQ ID NO: 433280 - DNA, 120 bp, Artificial Sequence
  ENSG00000152527_61 (sequence is synthesized)
taaacactttgcatattgtcatcgctctaggaaacatgtacattactttatatgatagcaatattctgagaatttcttatgtttgtatgtacctccaaggtaacaccacttggtgaaata

SEQ ID NO: 433281 - DNA, 120 bp, Artificial Sequence
  ENSG00000152527_62 (sequence is synthesized)
ggcttgagactttataatcattaaatatattaaaccttgctgtttaatattttcctttttgaagtcttttaggaatctacataatattaaggtaaaattctaggtttaatactgtgataa

SEQ ID NO: 433282 - DNA, 120 bp, Artificial Sequence
  ENSG00000152527_63 (sequence is synthesized)
agagcaagtcatccaagagaatgcaaggtggaagatgcagtgcgtcttatgacctactctcagaagtcatacttcatcatttccacaatatcctgttggttgcaaaggtcagccctatgt

SEQ ID NO: 433283 - DNA, 120 bp, Artificial Sequence
  ENSG00000152527_64 (sequence is synthesized)
ccaacctaatggaaaggagataggataattcagtgtttctttattcactttggggggttagtttgatgccttggaagtatgtgaaactccacgaatttttggttaaaactataatgtaag

SEQ ID NO: 433284 - DNA, 120 bp, Artificial Sequence
  ENSG00000152527_65 (sequence is synthesized)
ttaggtgtgtgttgagtaactcccaccacactttacctttcttcctttatactcttctttcctcatatttaatctcctaggtattttcagctgtccaactgtgaagctattttaaggaag

SEQ ID NO: 433285 - DNA, 120 bp, Artificial Sequence
  ENSG00000152527_66 (sequence is synthesized)
ggttatctggtaaatgaattctcaataagatgttagttatataatgtactgtgaaattcaggaatgtttgtattttaatatagaatctgaaaatgacagttcttatatgaacttcagatg

SEQ ID NO: 433286 - DNA, 120 bp, Artificial Sequence
  ENSG00000152527_67 (sequence is synthesized)
ccataacaccaaagtgggaaatatattggtgagcagagggagtgtgctgccaagcaagtcacactgtaggggcagctgctgcccattttactcacacataaggccagtcttgccagaaat

SEQ ID NO: 433287 - DNA, 120 bp, Artificial Sequence
  ENSG00000152527_68 (sequence is synthesized)
ctgttaaatttaaaacacaggctgttgagatattctagtatatgtaatttaaagtcagacactttatttctgaaatgtcttcaataaccattattttcttatattgctcctttggagggt

SEQ ID NO: 433288 - DNA, 120 bp, Artificial Sequence
  ENSG00000152527_69 (sequence is synthesized)
tcaaggaaagctttgtctttgggcatggcagttaagaatcatttgtaagtttctgaaatttggaaaatttgcagtgtggctaatttgagactggaacattctgagttcataatatctaat

SEQ ID NO: 433289 - DNA, 120 bp, Artificial Sequence
  ENSG00000152527_70 (sequence is synthesized)
cacatgttcgttccaataatttatcttcttatatgcaagatcttcttattttatttatagttgattttgtcatttgtattaagaaacctcttctttagttgctaaaactatgctatttta

SEQ ID NO: 433290 - DNA, 82 bp, Artificial Sequence
  ENSG00000152527_71 (sequence is synthesized)
aagaaacctcttctttagttgctaaaactatgctattttattatagtctttaatcattctgctcctcatttcaataagtagg

SEQ ID NO: 433291 - DNA, 68 bp, Artificial Sequence
  ENSG00000152527_72 (sequence is synthesized)
attatccgggcatggtggcaggtgcctgtaagtcccagctgctcgggaggccgaggcaggagaatggt

SEQ ID NO: 433292 - DNA, 120 bp, Artificial Sequence
  ENSG00000152527_73 (sequence is synthesized)
ctgtaacacatttaagcaagaaagggaaaatgtgacaaataaacaagatataaaatcataaccccaaaattaggtaaactggagtaacaaagttatttccacaaaaatttaattgctgta

SEQ ID NO: 433293 - DNA, 120 bp, Artificial Sequence
  ENSG00000152527_74 (sequence is synthesized)
attctcacaaagtggttaaaatattctaactgatatggagtcatttatttagaaactgggacttgagatttagcatgtttgcttctgtgttaagtaatgacgtttgaataatgaacaagg

SEQ ID NO: 433294 - DNA, 120 bp, Artificial Sequence
  ENSG00000152527_75 (sequence is synthesized)
caagcccaacgaacagcaaagaagctactctttacaagaagagtaaactttgcaagaagtttaattcaggagttttccaaaactttaaccaatctaatctccacgataagaaaaaaaaaa

SEQ ID NO: 433295 - DNA, 120 bp, Artificial Sequence
  ENSG00000152556_0 (sequence is synthesized)
agacttggtatagtgggagagcctgactgagagtggatcatgacccatgaagagcaccatgcagccaaaaccctggggattggcaaagccattgctgtcttaacctctggtggagatgcc

SEQ ID NO: 433296 - DNA, 120 bp, Artificial Sequence
  ENSG00000152556_1 (sequence is synthesized)
caaggtatgaatgctgctgtcagggctgtggttcgagttggtatcttcaccggtgcccgtgtcttctttgtccatgagggttatcaaggcctggtggatggtggagatcacatcaaggaa

SEQ ID NO: 433297 - DNA, 120 bp, Artificial Sequence
  ENSG00000152556_2 (sequence is synthesized)
gccacctgggagagcgtttcgatgatgcttcagctgggaggcacggtgattggaagtgcccggtgcaaggactttcgggaacgagaaggacgactccgagctgcctacaacctggtgaag

SEQ ID NO: 433298 - DNA, 120 bp, Artificial Sequence
  ENSG00000152556_3 (sequence is synthesized)
cgtgggatcaccaatctctgtgtcattgggggtgatggcagcctcactggggctgacaccttccgttctgagtggagtgacttgttgagtgacctccagaaagcaggtaagatcacagat

SEQ ID NO: 433299 - DNA, 120 bp, Artificial Sequence
  ENSG00000152556_4 (sequence is synthesized)
gaggaggctacgaagtccagctacctgaacattgtgggcctggttgggtcaattgacaatgacttctgtggcaccgatatgaccattggcactgactctgccctgcatcggatcatggaa

SEQ ID NO: 433300 - DNA, 120 bp, Artificial Sequence
  ENSG00000152556_5 (sequence is synthesized)
attgtagatgccatcactaccactgcccagagccaccagaggacatttgtgttagaagtaatgggccgccactgtggatacctggcccttgtcacctctctgtcctgtggggccgactgg

SEQ ID NO: 433301 - DNA, 120 bp, Artificial Sequence
  ENSG00000152556_6 (sequence is synthesized)
gtttttattcctgaatgtccaccagatgacgactgggaggaacacctttgtcgccgactcagcgagacaaggacccgtggttctcgtctcaacatcatcattgtggctgagggtgcaatt

SEQ ID NO: 433302 - DNA, 120 bp, Artificial Sequence
  ENSG00000152556_7 (sequence is synthesized)
gacaagaatggaaaaccaatcacctcagaagacatcaagaatctggtggttaagcgtctgggatatgacacccgggttactgtcttggggcatgtgcagaggggtgggacgccatcagcc

SEQ ID NO: 433303 - DNA, 120 bp, Artificial Sequence
  ENSG00000152556_8 (sequence is synthesized)
tttgacagaattctgggcagcaggatgggtgtggaagcagtgatggcacttttggaggggaccccagataccccagcctgtgtagtgagcctctctggtaaccaggctgtgcgcctgccc

SEQ ID NO: 433304 - DNA, 120 bp, Artificial Sequence
  ENSG00000152556_9 (sequence is synthesized)
ctcatggaatgtgtccaggtgaccaaagatgtgaccaaggccatggatgagaagaaatttgacgaagccctgaagctgagaggccggagcttcatgaacaactgggaggtgtacaagctt

SEQ ID NO: 433305 - DNA, 120 bp, Artificial Sequence
  ENSG00000152556_10 (sequence is synthesized)
ctagctcatgtcagacccccggtatctaagagtggttcgcacacagtggctgtgatgaacgtgggggctccggctgcaggcatgaatgctgctgttcgctccactgtgaggattggcctt

SEQ ID NO: 433306 - DNA, 120 bp, Artificial Sequence
  ENSG00000152556_11 (sequence is synthesized)
atccagggcaaccgagtgctcgttgtccatgatggtttcgagggcctggccaaggggcagatagaggaagctggctggagctatgttgggggctggactggccaaggtggctctaaactt

SEQ ID NO: 433307 - DNA, 120 bp, Artificial Sequence
  ENSG00000152556_12 (sequence is synthesized)
gtcatcattgggggctttgaggcttacacagggggcctggaactgatggagggcaggaagcagtttgatgagctctgcatcccatttgtggtcattcctgctacagtctccaacaatgtc

SEQ ID NO: 433308 - DNA, 120 bp, Artificial Sequence
  ENSG00000152556_13 (sequence is synthesized)
cctggctcagacttcagcgttggggctgacacagcactcaatactatctgcacaacctgtgaccgcatcaagcagtcagcagctggcaccaagcgtcgggtgtttatcattgagactatg

SEQ ID NO: 433309 - DNA, 120 bp, Artificial Sequence
  ENSG00000152556_14 (sequence is synthesized)
ggtggctactgtggctacctggctaccatggctggactggcagctggggccgatgctgcctacatttttgaggagcccttcaccattcgagacctgcaggcaaatgttgaacatctggtg

SEQ ID NO: 433310 - DNA, 120 bp, Artificial Sequence
  ENSG00000152556_15 (sequence is synthesized)
caaaagatgaaaacaactgtgaaaaggggcttggtgttaaggaatgaaaagtgcaatgagaactataccactgacttcattttcaacctgtactctgaggaggggaagggcatcttcgac

SEQ ID NO: 433311 - DNA, 120 bp, Artificial Sequence
  ENSG00000152556_16 (sequence is synthesized)
agcaggaagaatgtgcttggtcacatgcagcagggtgggagcccaaccccatttgataggaattttgccactaagatgggcgccaaggctatgaactggatgtctgggaaaatcaaagag

SEQ ID NO: 433312 - DNA, 120 bp, Artificial Sequence
  ENSG00000152556_17 (sequence is synthesized)
agttaccgtaatgggcggatctttgccaatactccagattcgggctgtgttctggggatgcgtaagagggctctggtcttccaaccagtggctgagctgaaggaccagacagattttgag

SEQ ID NO: 433313 - DNA, 120 bp, Artificial Sequence
  ENSG00000152556_18 (sequence is synthesized)
catcgaatccccaaggaacagtggtggctgaaactgaggcccatcctcaaaatcctagccaagtacgagattgacttggacacttcagaccatgcccacctggagcacatcacccggaag

SEQ ID NO: 433314 - DNA, 120 bp, Artificial Sequence
  ENSG00000152556_19 (sequence is synthesized)
cggtccggggaagctgccgtctaaacctctctggagtgaggggaatagattacctgatcatggtcagctcacaccctaataagtccacatcttctcagtgttttagctgtttttttcatt

SEQ ID NO: 433315 - DNA, 120 bp, Artificial Sequence
  ENSG00000152556_20 (sequence is synthesized)
aggtttccttttattctgtaccttgcagccatgaccagttctggccaggagctggaggagcaggcagtgggtgggagctccttttaggtagaatttaacatgacttctgccccagcttta

SEQ ID NO: 433316 - DNA, 120 bp, Artificial Sequence
  ENSG00000152556_21 (sequence is synthesized)
tctgtcacacaaggctgggcacctctagtgctactgctagatatcacttactcagttagaattttcctaaaaataagctttatttatttctttgtgataacaaagagtcttggttcctct

SEQ ID NO: 433317 - DNA, 120 bp, Artificial Sequence
  ENSG00000152556_22 (sequence is synthesized)
actacttttactacagtgacaaattgtaactacactaataaatgccaactggtcactgtgcttttgcttctcctgttatcatcttcctaagtggaatgtaatactgtcagccccatgtat

SEQ ID NO: 433318 - DNA, 120 bp, Artificial Sequence
  ENSG00000152556_23 (sequence is synthesized)
cagacacttgtctgatgaagcagtaaagacgttaagggtatcacagggggtggaggaagggattatctctagtacactacttgctggctgtctgaaaaattgtcactgccaaactctaaa

SEQ ID NO: 433319 - DNA, 120 bp, Artificial Sequence
  ENSG00000152556_24 (sequence is synthesized)
aacagttctaaatagtgactgagaaggtttgttgctggagtcagggaataaggcagccaaatactctttgcacagttctttagtgggaagagaaattaacaataaatatcaagcactgtg

SEQ ID NO: 433320 - DNA, 120 bp, Artificial Sequence
  ENSG00000152556_25 (sequence is synthesized)
agacttggtatagtgggagagcctgactgaggtggctctagccagtctaattgccgttcctttagctagtggcatcttgattcctgctgtgtcttaactgaccattgtcttaaattctag

SEQ ID NO: 433321 - DNA, 120 bp, Artificial Sequence
  ENSG00000152556_26 (sequence is synthesized)
ggtagtagataaaaggctttatatgaatattacaagaatcaccaccactccaaatataataagtgtaccaaatatgaagtaaaatgactttaacaaggctgacttgaaagtgataaagaa

SEQ ID NO: 433322 - DNA, 120 bp, Artificial Sequence
  ENSG00000152556_27 (sequence is synthesized)
gcaagttactgctaacaagatagtggaaatactgcacaggcaccgataaacagaaatcaccaagctcaaggaaagagaaacgaggcatagatccagagatcacgttagggtacaccaaga

SEQ ID NO: 433323 - DNA, 120 bp, Artificial Sequence
  ENSG00000152556_28 (sequence is synthesized)
accacagaaagccgagcttcccggtgaaaacagctctccccagagaagacccagctctggcgggaaagccccggaatcgcaaccggcctttccccaagtacggctgggcgctgggatggg

SEQ ID NO: 433324 - DNA, 120 bp, Artificial Sequence
  ENSG00000152556_29 (sequence is synthesized)
atgttcgtccatcacccctcccccctttcccaaggacaatctgcaagaaagcagcggcggaggagagctaagactaaaaggcaagaggggccattgagtgaagagcaagggggagagctg

SEQ ID NO: 433325 - DNA, 120 bp, Artificial Sequence
  ENSG00000152556_30 (sequence is synthesized)
ggagtgaggtgggaagagtggatcatgacccatgaagagcaccatgcagccaaaaccctggggattggcaaagccattgctgtcttaacctctggtggagatgcccaaggtatgaatgct

SEQ ID NO: 433326 - DNA, 120 bp, Artificial Sequence
  ENSG00000152556_31 (sequence is synthesized)
gcttccgcccagtccagcccgggccggctgaccgggtccgacacagtctcctggaccaggctccctccatcctcacccctcccccagcttcccgccgccactcaccgaaccggaaccggc

SEQ ID NO: 433327 - DNA, 120 bp, Artificial Sequence
  ENSG00000152556_32 (sequence is synthesized)
tgccatgcgaaggggtttccggccgggcgcggaacgcaaaacccgggaaccgccgcgaaccggaaccgccttcacagcaccggaagagtcgctaggaggcagccatgcataaagacgagt

SEQ ID NO: 433328 - DNA, 120 bp, Artificial Sequence
  ENSG00000152556_33 (sequence is synthesized)
ttcatctgaaatttttcatgtgtgtgattcagtctcgccagttagtcaggactcctcagagaacagctggggaagcttctacttccagcatgctcataccaaagccaccaccaaagacag

SEQ ID NO: 433329 - DNA, 120 bp, Artificial Sequence
  ENSG00000152556_34 (sequence is synthesized)
agcaccggaagagtcgctaggtggctgaagaggagggggctggggcaggaggtcaaagaacagagttaaggaccagtggggcgcctgcgcggtgtggcgaggcccgagaagcgaagggag

SEQ ID NO: 433330 - DNA, 120 bp, Artificial Sequence
  ENSG00000152556_35 (sequence is synthesized)
atttaatatgcagtgtctagtgaaggctctacctaggtgctaagtaatggtgcctgccataaagtggtctgagaatgagccagaattctccaccagtatcccaaagtcatggctgcccag

SEQ ID NO: 433331 - DNA, 120 bp, Artificial Sequence
  ENSG00000152556_36 (sequence is synthesized)
tttctgatggtggcactagcgatatcacatctcagggagataccacagagtaggagagttggagaaatgtttacgtgagacgcagaagtagtcaagaaatatcactcgggtctcaaggaa

SEQ ID NO: 433332 - DNA, 120 bp, Artificial Sequence
  ENSG00000152556_37 (sequence is synthesized)
ggcgggagatgaagccggtaccacagaaagccgagcttcccggtgaaaacagctctccccagagaagacccagctctggcgggaaagccccggaatcgcaaccggcctttccccaaagtg

SEQ ID NO: 433333 - DNA, 120 bp, Artificial Sequence
  ENSG00000152556_38 (sequence is synthesized)
tcacagggaaggtctggccctgaaaataaccttaccagaggactggagccagagccagaagtggagctgaaatctgccagtcctcatgtgatggagatgaggtgacctgaaaccagacca

SEQ ID NO: 433334 - DNA, 120 bp, Artificial Sequence
  ENSG00000152556_39 (sequence is synthesized)
cttaaaggacgaaggaactgagacagcctttcggagtctcaaaaaaatcctaagagtatcctgaggatttccacagtcctttatgctacttgctccatgttgttttaggcttctcatgtg

SEQ ID NO: 433335 - DNA, 120 bp, Artificial Sequence
  ENSG00000152556_40 (sequence is synthesized)
ctcaattttcctgtctcttccccaaattccaattccccttcccctccccgccatcactgatcaactaggactctacccaagaagagctttgaacagatcagtgccaatataactaagttt

SEQ ID NO: 433336 - DNA, 120 bp, Artificial Sequence
  ENSG00000152556_41 (sequence is synthesized)
aatatctgtctgtttttgtctacgtgcgtgtcattgtgggtctgtaagggatgcttatacatgagtctgcatgaatttctgtgtcctgtgcctctataactgtcttagagatttcaggag

SEQ ID NO: 433337 - DNA, 120 bp, Artificial Sequence
  ENSG00000152556_42 (sequence is synthesized)
aatgaagccagagaggccttagaatccatagcccattcccttctggcttctgagtctcctgacattgcttctccccttggtccttctgcacatctctccctggttccctgcccctgattg

SEQ ID NO: 433338 - DNA, 120 bp, Artificial Sequence
  ENSG00000152556_43 (sequence is synthesized)
cctcccacaaagaaccattacaagacaagaggctgagctgtccatggtttacccaagtctctgcttgttttcttcctttgactctgcgtaaccctctctctgtccctctgttggtccctt

SEQ ID NO: 433339 - DNA, 120 bp, Artificial Sequence
  ENSG00000152556_44 (sequence is synthesized)
gagttttgcttgcttgcgttccagtttccatggcagcttttcgcggtggccctaaatctgcggaaacctgtggcttcccccgacagatagggacctgagatctaaatcgatctcaggcta

SEQ ID NO: 433340 - DNA, 120 bp, Artificial Sequence
  ENSG00000152556_45 (sequence is synthesized)
acatcttgaagagtctagatactatggatgatccagacaccgtgggaagcatacctgttttcaaaactgaatgtgcagaggtagagatacaagtaagcaagaggaagagggcagtggtaa

SEQ ID NO: 433341 - DNA, 120 bp, Artificial Sequence
  ENSG00000152556_46 (sequence is synthesized)
cacctgggagagcgtttcgatgatgcttcagctggtatgttccagagaactccctgtcccatatttgctctgtccttgtttcatcccactctgttttgggctcatggtctcctaaattcc

SEQ ID NO: 433342 - DNA, 120 bp, Artificial Sequence
  ENSG00000152556_47 (sequence is synthesized)
ctgtcatgtggtttcatgggaaggaattcagtgacaagagagggaccctatttgccctttactcttagcatttgaaaataccaccctggtttcctggggcagggagagggtggaggagtg

SEQ ID NO: 433343 - DNA, 120 bp, Artificial Sequence
  ENSG00000152556_48 (sequence is synthesized)
atcacaggatgctttgctctttatggaaaggtcataaacaagactatggggactgacacataagcagatcttactctagggtcacagggaaggtctggccctgaaaataaccttaccaga

SEQ ID NO: 433344 - DNA, 120 bp, Artificial Sequence
  ENSG00000152556_49 (sequence is synthesized)
aactgagtgtggtcccaaacagtgagctactctttatatcaagcaaatgggaatgtttgaaaatgattcttcagctgggcatggtggctcacacttctaatcccagcactttgggaggcc

SEQ ID NO: 433345 - DNA, 120 bp, Artificial Sequence
  ENSG00000152556_50 (sequence is synthesized)
ttagacactcagtttaaaccctcttatcctatcttcactggaagagcaaagcaatctcctaccttgttttgtcaataagaagggaatattattaagccccagtaatcctgttgattacca

SEQ ID NO: 433346 - DNA, 120 bp, Artificial Sequence
  ENSG00000152556_51 (sequence is synthesized)
tagtgggcatgtttctctagaagtaagtagaatctttggggttccgatggcaagaatacagagtcatcaagctttagatgaaatctgtttggggaggtaaagcccagtaagttctttgct

SEQ ID NO: 433347 - DNA, 120 bp, Artificial Sequence
  ENSG00000152556_52 (sequence is synthesized)
gcagttcttaattgtgagactcagtcttgtgatttggaaaagggctcgagtatcctgactctctaggctgagccaagatggggcagcctgagccagactgtctttgttctctgggctcct

SEQ ID NO: 433348 - DNA, 120 bp, Artificial Sequence
  ENSG00000152556_53 (sequence is synthesized)
agtggaggttgggaagcctctcctccttccccctccctctttgcctccacctggctcctccccatgttcgtccatcacccctcccccctttcccaaggacaatctgcaagaaagcagcgg

SEQ ID NO: 433349 - DNA, 120 bp, Artificial Sequence
  ENSG00000152556_54 (sequence is synthesized)
ggtgaggagatgacgggaagctcactagctacagaaatcagaggcgtgaacgaagccaaagatctccatggctccaggcccaaaacatgagcttctgctgcttccttttctgattctctc

SEQ ID NO: 433350 - DNA, 120 bp, Artificial Sequence
  ENSG00000152558_0 (sequence is synthesized)
ggcaagcggcgggaggggaaacgtgcgcggccgaaggggaagcggagccggcgccggctgcgcagaggagccgctctcgccgccgccacctcggctgggagcccacgaggctgccgcatc

SEQ ID NO: 433351 - DNA, 120 bp, Artificial Sequence
  ENSG00000152558_1 (sequence is synthesized)
gccgcatcctgccctcggaacaatgggactcggcgcgcgaggtgcttgggccgcgctgctcctggggacgctgcaggtgctagcgctgctgggggccgcccatgaaagcgcagccatggc

SEQ ID NO: 433352 - DNA, 120 bp, Artificial Sequence
  ENSG00000152558_2 (sequence is synthesized)
ggcatctgcaaacatagagaattctgggcttccacacaactccagtgctaactcaacagagactctccaacatgtgccttctgaccatacaaatgaaacttccaacagtactgtgaaacc

SEQ ID NO: 433353 - DNA, 120 bp, Artificial Sequence
  ENSG00000152558_3 (sequence is synthesized)
accaacttcagttgcctcagactccagtaatacaacggtcaccaccatgaaacctacagcggcatctaatacaacaacaccagggatggtctcaacaaatatgacttctaccaccttaaa

SEQ ID NO: 433354 - DNA, 120 bp, Artificial Sequence
  ENSG00000152558_4 (sequence is synthesized)
gtctacacccaaaacaacaagtgtttcacagaacacatctcagatatcaacatccacaatgaccgtaacccacaatagttcagtgacatctgctgcttcatcagtaacaatcacaacaac

SEQ ID NO: 433355 - DNA, 120 bp, Artificial Sequence
  ENSG00000152558_5 (sequence is synthesized)
tatgcattctgaagcaaagaaaggatcaaaatttgatactgggagctttgttggtggtattgtattaacgctgggagttttatctattctttacattggatgcaaaatgtattactcaag

SEQ ID NO: 433356 - DNA, 120 bp, Artificial Sequence
  ENSG00000152558_6 (sequence is synthesized)
aagaggcattcggtatcgaaccatagatgaacatgatgccatcatttaaggaaatccatggaccaaggatggaatacagattgatgctgccctatcaattaattttggtttattaatagt

SEQ ID NO: 433357 - DNA, 120 bp, Artificial Sequence
  ENSG00000152558_7 (sequence is synthesized)
ttaaaacaatattctctttttgaaaatagtataaacaggccatgcatataatgtacagtgtattacgtaaatatgtaaagattcttcaaggtaacaagggtttgggttttgaaataaaca

SEQ ID NO: 433358 - DNA, 120 bp, Artificial Sequence
  ENSG00000152558_8 (sequence is synthesized)
tctggatccttatagaccgttcatacaatggttttagcaagttcatagtaagacaaacaagtcctatctttttttttttggctggggtgggggcattggtcacatatgaccagtaattga

SEQ ID NO: 433359 - DNA, 120 bp, Artificial Sequence
  ENSG00000152558_9 (sequence is synthesized)
aagacgtcatcactgaaagacagaatgccatctgggcatacaaataagaagtttgtcacagcactcaggattttgggtatcttttgtagctcacataaagaacttcagtgcttttcagag

SEQ ID NO: 433360 - DNA, 120 bp, Artificial Sequence
  ENSG00000152558_10 (sequence is synthesized)
ctggatatatcttaattactaatgccacacagaaattatacaatcaaactagatctgaagcataatttaagaaaaacatcaacattttttgtgctttaaactgtagtagttggtctagaa

SEQ ID NO: 433361 - DNA, 120 bp, Artificial Sequence
  ENSG00000152558_11 (sequence is synthesized)
acaaaatactccaagaaaaagaaaattttcaaataaaacccaaaataatagctttgcttagccctgttagggatccattggagcattaaggagcacatatttttattaacttcttttgag

SEQ ID NO: 433362 - DNA, 120 bp, Artificial Sequence
  ENSG00000152558_12 (sequence is synthesized)
ctttcaatgttgatgtaatttttgttctctgtgtaatttaggtaaactgcagtgtttaacataataatgttttaaagacttagttgtcagtattaaataatcctggcattatagggaaaa

SEQ ID NO: 433363 - DNA, 120 bp, Artificial Sequence
  ENSG00000152558_13 (sequence is synthesized)
ttcatttaattttaattttatattttgtgaatattttaagaactgtagagctgctttcaatatctagaaatttttaattgagtgtaaacacacctaactttaagaaaaagaaccgcttgt

SEQ ID NO: 433364 - DNA, 120 bp, Artificial Sequence
  ENSG00000152558_14 (sequence is synthesized)
atgattttcaaaagaacatttagaattctatagagtcaaaactatagcgtaatgctgtgtttattaagccagggattgtgggacttcccccaggcaactaaacctgcaggatgaaaatgc

SEQ ID NO: 433365 - DNA, 120 bp, Artificial Sequence
  ENSG00000152558_15 (sequence is synthesized)
tatattttctttcatgcactgtcgatattactcagatttggggaaatgacatttttatactaaaacaaacaccaaaatattttagaataaattcttagaaagttttgagaggaattttta

SEQ ID NO: 433366 - DNA, 120 bp, Artificial Sequence
  ENSG00000152558_16 (sequence is synthesized)
gagaggacatttcctccttcctgatttggatattccctcaaatccctcctcttactccatgctgaaggagaagtactctcagatgcattatgttaatggagagaaaaagcacagtattgt

SEQ ID NO: 433367 - DNA, 120 bp, Artificial Sequence
  ENSG00000152558_17 (sequence is synthesized)
agagacaccaatattagctaatgtattttggagtgttttccattttacagtttatattccagcactcaaaactcagggtcaagttttaacaaaagaggtatgtagtcacagtaaatacta

SEQ ID NO: 433368 - DNA, 120 bp, Artificial Sequence
  ENSG00000152558_18 (sequence is synthesized)
agatggcatttctatctcagagggccaaagtgaatcacaccagtttctgaaggtcctaaaaatagctcagatgtcctaatgaacatgcacctacatttaataggagtacaataaaactgt

SEQ ID NO: 433369 - DNA, 120 bp, Artificial Sequence
  ENSG00000152558_19 (sequence is synthesized)
tgtcagcttttgttttacagagaacgctagatattaagaattttgaaatggatcatttctacttgctgtgcattttaaccaataatctgatgaatatagaaaaaaatgatccaaaatatg

SEQ ID NO: 433370 - DNA, 120 bp, Artificial Sequence
  ENSG00000152558_20 (sequence is synthesized)
gatatgattggatgtatgtaacacatacatggagtatggaggaaattttctgaaaaatacatttagattagtttagtttgaaggagaggtgggctgatggctgagttgtatgttactaac

SEQ ID NO: 433371 - DNA, 120 bp, Artificial Sequence
  ENSG00000152558_21 (sequence is synthesized)
ttggccctgactggttgtgcaaccattgcttcatttctttgcaaaatgtagttaagatatactttattctaatgaaggccttttaaatttgtccactgcattcttggtatttcactactt

SEQ ID NO: 433372 - DNA, 120 bp, Artificial Sequence
  ENSG00000152558_22 (sequence is synthesized)
caagtcagtcagaacttcgtagaccgacctgaagtttctttttgaatacttgtttctttagcactttgaagatagaaaaaccactttttaagtactaagtcatcatttgccttgaaagtt

SEQ ID NO: 433373 - DNA, 120 bp, Artificial Sequence
  ENSG00000152558_23 (sequence is synthesized)
tcctctgcattgggtttgaagtagtttagttatgtctttttctctgtatgtaagtagtataatttgttactttcaaatacccgtactttgaatgtaggtttttttgttgttgttatctat

SEQ ID NO: 433374 - DNA, 120 bp, Artificial Sequence
  ENSG00000152558_24 (sequence is synthesized)
aaaaattgagggaaatggttatgcaaaaaaatattttgctttggaccatatttcttaagcataaaaaaaatgctcagttttgcttgcattccttgagaatgtatttatctgaagatcaaa

SEQ ID NO: 433375 - DNA, 120 bp, Artificial Sequence
  ENSG00000152558_25 (sequence is synthesized)
acaaacaatccagatgtataagtactaggcagaagccaattttaaaatttccttgaataatccatgaaaggaataattcaaatacagataaacagagttggcagtatattatagtgataa

SEQ ID NO: 433376 - DNA, 120 bp, Artificial Sequence
  ENSG00000152558_26 (sequence is synthesized)
ttttgtattttcacaaaaaaaaagttaaactcttcttttctttttattataatgaccagcttttggtatttcattgttaccaagttctatttttagaataaaattgttctccttctaaaa

SEQ ID NO: 433377 - DNA, 120 bp, Artificial Sequence
  ENSG00000152558_27 (sequence is synthesized)
aggtttggaccagtcacccgctggccccggggccgcctgctgaggaaattgcctggtgcttcccctctcgctttttggatgcggcggtcgcaggccgggacgggtgcgcataacctgttg

SEQ ID NO: 433378 - DNA, 120 bp, Artificial Sequence
  ENSG00000152558_28 (sequence is synthesized)
acatttaagtcattattctgtctggcaaaaataatatagaaactttatatgcctagatttcccttaattcctaattaaatgttcttaacacagaaaatcagagagctttaattacaatgt

SEQ ID NO: 433379 - DNA, 120 bp, Artificial Sequence
  ENSG00000152558_29 (sequence is synthesized)
aacccaaacacttggtgaggcccttaccctgtgattttagtttgggacaaagccttgggcctctgagttcactaacatggaaagatgcaagaaccaggctgatgtcatcaatatcagtag

SEQ ID NO: 433380 - DNA, 120 bp, Artificial Sequence
  ENSG00000152558_30 (sequence is synthesized)
taaatcatcaagagactctccaacatgtgccttctgaccatacaaatgaaacttccaacagtactgtgaaaccaccaacttcagttgcctcagactccagtaatacaacggtcaccacca

SEQ ID NO: 433381 - DNA, 120 bp, Artificial Sequence
  ENSG00000152558_31 (sequence is synthesized)
aacgaataaagcactctgaaaagttgcttaattgggacatagaaatctcttacattttttccaaatctaaaggtgtactaatttaaaaattaaaaccctactgagaaggtgcagttaaat

SEQ ID NO: 433382 - DNA, 120 bp, Artificial Sequence
  ENSG00000152558_32 (sequence is synthesized)
aagaaaatcctattttatccctccattgtatgaaattaggggtgttggttgggtggtgcaagacctagagatgcctgtgagtagaatcggcctctcctgaaatggtccactccactcaga

SEQ ID NO: 433383 - DNA, 120 bp, Artificial Sequence
  ENSG00000152558_33 (sequence is synthesized)
acatgtaagtgagattttcgctggtggagggtgtcaatgcctgaagggttgaagatcaggagcaatgactggattacagaatgaagaggacttactgaacaattcgcttccaaaagaaaa

SEQ ID NO: 433384 - DNA, 120 bp, Artificial Sequence
  ENSG00000152578_0 (sequence is synthesized)
agtggcagaagagggctaggctgagagggaagccaggactgtaggagagggaggcagcccgtcctcctcacgaacctgcaaggatgcggcaggggcctgggggcatggggaggtactaac

SEQ ID NO: 433385 - DNA, 120 bp, Artificial Sequence
  ENSG00000152578_1 (sequence is synthesized)
cccccggagcccccgattggggcttgcagacctggcccgtgggcggattttctgcctagcgcagccgagaagcagaggtgccaggaaaaccaagagaggggcgctgggggtgcccatccc

SEQ ID NO: 433386 - DNA, 120 bp, Artificial Sequence
  ENSG00000152578_2 (sequence is synthesized)
cagagtcggtccctctgcgaaccgaggaagaaaagaggagggagtcagcgagtggtcagaagggaaaacctgacaccagactggctccggagcgtccgggagactggggcgctccgcgcc

SEQ ID NO: 433387 - DNA, 120 bp, Artificial Sequence
  ENSG00000152578_3 (sequence is synthesized)
atcgtcttcaatgcttctctgaacagcctttaggaagagtgcgagagaaagagagagagcgcgcgccagggagaggagaaaagaagatgaggattatttccagacagattgtcttgttat

SEQ ID NO: 433388 - DNA, 120 bp, Artificial Sequence
  ENSG00000152578_4 (sequence is synthesized)
tttctggattttggggactcgccatgggagcctttccgagcagcgtgcaaataggtggtctcttcatccgaaacacagatcaggaatacactgcttttcgattagcaatttttcttcata

SEQ ID NO: 433389 - DNA, 120 bp, Artificial Sequence
  ENSG00000152578_5 (sequence is synthesized)
acaccagccccaatgcgtcggaagctccttttaatttggtacctcatgtggacaacattgagacagccaacagttttgctgtaacaaacgccttctgttcccagtattctagaggagtat

SEQ ID NO: 433390 - DNA, 120 bp, Artificial Sequence
  ENSG00000152578_6 (sequence is synthesized)
ttgccatttttggactctatgataagaggtcggtacataccttgacctcattctgcagcgccttacatatctccctcatcacaccaagtttccctactgagggggagagccagtttgtgc

SEQ ID NO: 433391 - DNA, 120 bp, Artificial Sequence
  ENSG00000152578_7 (sequence is synthesized)
tgcaactaagaccttcgttacgaggagcactcttgagtttgctggatcactacgaatggaactgttttgtcttcctgtatgacacagacaggggatactcgatactccaagctattatgg

SEQ ID NO: 433392 - DNA, 120 bp, Artificial Sequence
  ENSG00000152578_8 (sequence is synthesized)
aaaaagcaggacaaaatggttggcatgtcagcgctatatgtgtggaaaattttaatgatgtcagctataggcaacttctagaagaacttgacagaagacaagagaagaagtttgtaatag

SEQ ID NO: 433393 - DNA, 120 bp, Artificial Sequence
  ENSG00000152578_9 (sequence is synthesized)
actgtgagatagagagacttcaaaacatattagaacagattgtaagtgttggaaagcatgttaaaggctaccattatatcattgcaaacttgggattcaaggatatttctcttgagaggt

SEQ ID NO: 433394 - DNA, 120 bp, Artificial Sequence
  ENSG00000152578_10 (sequence is synthesized)
ttatacatggtggagccaatgttactggattccagttggtggattttaatacacctatggtaatcaaactaatggatcgctggaagaaactagatcagagagagtatccaggatctgaga

SEQ ID NO: 433395 - DNA, 120 bp, Artificial Sequence
  ENSG00000152578_11 (sequence is synthesized)
ctcctccaaagtacacctctgctctgacttatgatggagtccttgtgatggctgaaactttccgaagtcttaggaggcagaaaattgatatctcaaggagaggaaatgctggggattgtc

SEQ ID NO: 433396 - DNA, 120 bp, Artificial Sequence
  ENSG00000152578_12 (sequence is synthesized)
tggcaaatcctgctgctccatggggccagggaattgacatggagaggacactcaaacaggttcgaattcaagggctgacagggaatgttcagtttgaccactatggacgtagagtcaatt

SEQ ID NO: 433397 - DNA, 120 bp, Artificial Sequence
  ENSG00000152578_13 (sequence is synthesized)
acacaatggatgtgtttgagctgaaaagcacaggacctagaaaggttggttactggaatgatatggataagttagtcttgattcaagatgtaccaactcttggcaatgacacagctgcta

SEQ ID NO: 433398 - DNA, 120 bp, Artificial Sequence
  ENSG00000152578_14 (sequence is synthesized)
ttgagaacagaacagtggttgtaaccacaattatggaatccccatatgttatgtacaagaaaaatcatgaaatgtttgaaggaaatgacaagtatgaaggatactgtgtagatttggcat

SEQ ID NO: 433399 - DNA, 120 bp, Artificial Sequence
  ENSG00000152578_15 (sequence is synthesized)
ctgaaattgcaaaacatattggtatcaagtataaaattgccattgtccctgatggaaaatatggagcaagggatgcagacacaaaaatctggaatgggatggtaggagaacttgtttatg

SEQ ID NO: 433400 - DNA, 120 bp, Artificial Sequence
  ENSG00000152578_16 (sequence is synthesized)
ggaaagcagagattgctattgcccctctgacaatcactttggtacgagaggaggtcattgacttttctaagcccttcatgagtttgggcatatctatcatgatcaaaaagcctcagaaat

SEQ ID NO: 433401 - DNA, 120 bp, Artificial Sequence
  ENSG00000152578_17 (sequence is synthesized)
ccaaaccaggagtgttttccttcttggatcctctggcctatgagatttggatgtgcatagtctttgcctacattggtgtcagcgtggtcttattcctagttagtagatttagtccatatg

SEQ ID NO: 433402 - DNA, 120 bp, Artificial Sequence
  ENSG00000152578_18 (sequence is synthesized)
agtggcacacagaagagccagaggacggaaaggaaggacccagcgaccagcctcccaatgagtttggcatctttaacagcctctggttttccctgggtgcttttatgcagcaaggatgtg

SEQ ID NO: 433403 - DNA, 120 bp, Artificial Sequence
  ENSG00000152578_19 (sequence is synthesized)
acatttcacccagatccctctcaggtcgaattgttggaggtgtttggtggttctttacactcatcattatatcatcttatactgctaacctcgctgctttcctgacggttgagcgaatgg

SEQ ID NO: 433404 - DNA, 120 bp, Artificial Sequence
  ENSG00000152578_20 (sequence is synthesized)
tctctcccatagaaagtgcagaagacctggccaaacaaacagaaattgcctatggaacactggattcaggatcaacaaaagaattcttcagaagatcaaaaatagcagtgtatgaaaaga

SEQ ID NO: 433405 - DNA, 120 bp, Artificial Sequence
  ENSG00000152578_21 (sequence is synthesized)
tgtggacctacatgcgatcagcagagccatcagtattcactaggactacagctgagggagtagctcgtgtccgcaaatccaagggcaaatttgcctttctcctggagtccactatgaatg

SEQ ID NO: 433406 - DNA, 120 bp, Artificial Sequence
  ENSG00000152578_22 (sequence is synthesized)
tgtaaaccttgccgttttgaaactcagtgaggcaggcgtcttagacaagctgaaaaacaaatggtggtacgataaaggtgaatgtggacccaaggactctggaagcaaggacaagacgag

SEQ ID NO: 433407 - DNA, 120 bp, Artificial Sequence
  ENSG00000152578_23 (sequence is synthesized)
tgccttgagcctgagcaatgtagcaggcgtcttctacattctggttggcggcttgggcttggcaatgctggtggctttgatagagttctgttacaagtccagggcagaagcgaagagaat

SEQ ID NO: 433408 - DNA, 120 bp, Artificial Sequence
  ENSG00000152578_24 (sequence is synthesized)
gaagctgaccttttctgaagccataagaaacaaagccagattatccatcactgggagtgtgggagagaatggccgcgtcttgacgcctgactgcccaaaggctgtacacactggaactgc

SEQ ID NO: 433409 - DNA, 120 bp, Artificial Sequence
  ENSG00000152578_25 (sequence is synthesized)
aatcagacaaagttcaggattggctgtcattgcatcggacctaccataaaaaccaaaaaaataattgagtgccttaattaaactgttggtgactggtggaaacgcagccctgagggacac

SEQ ID NO: 433410 - DNA, 120 bp, Artificial Sequence
  ENSG00000152578_26 (sequence is synthesized)
gccacgcgcgggtctttgctaaaccaatcctttggctgagagcgggaagtccgtcctaacgcgctggccggacatcagcagcagcaacgtgtgcatgagctcagctcggaaacccaaact

SEQ ID NO: 433411 - DNA, 120 bp, Artificial Sequence
  ENSG00000152578_27 (sequence is synthesized)
cagattttatatcaggaaaactcacaattgaggtttttttcggggagtgggtgggggagggatctgggatgggtgtattaacagcaacaaatttcattcgagtggactcaaaaactaatc

SEQ ID NO: 433412 - DNA, 120 bp, Artificial Sequence
  ENSG00000152578_28 (sequence is synthesized)
agacttatgagttagcgcattaaactgtgaagttcttgctcagaaaggcctttgtcttcaccggaaaggataaaatagttgtagaagtccgtgaacatgctaacctgtgtctccagaaca

SEQ ID NO: 433413 - DNA, 120 bp, Artificial Sequence
  ENSG00000152578_29 (sequence is synthesized)
tccatatagtccatggaagaaaatccagctgagaaaacaaatcactaaactgtgataagaaaataatgaacaaacatgtaaaacctgtgggaaaaaaaaataaaggaagtatgtacactt

SEQ ID NO: 433414 - DNA, 120 bp, Artificial Sequence
  ENSG00000152578_30 (sequence is synthesized)
actttggagaaaacaaatactgaaacatgcttgctttttaactgacgtaaattcagtagaggacaacacaattcttttttctaaccatcttagggaacaatacattgcaataattgatat

SEQ ID NO: 433415 - DNA, 120 bp, Artificial Sequence
  ENSG00000152578_31 (sequence is synthesized)
aaatgccatcactgtaataaactttagagacttttttttataaaagttgttggtcatcttcttgtttgctgtaaccttcactatgtcacatgagtcgattcaccgattgcatttgtctca

SEQ ID NO: 433416 - DNA, 120 bp, Artificial Sequence
  ENSG00000152578_32 (sequence is synthesized)
caaccaggaagaaaagcaaaaggaagaaaacgtttaggttcaatcatcagtctgcggtgtagactcgaaagagatgacaggtcactcatgttaatggtattatttataatctcattctgt

SEQ ID NO: 433417 - DNA, 120 bp, Artificial Sequence
  ENSG00000152578_33 (sequence is synthesized)
gtacaacattgtggtttttgtacccaccaaaaagaataaaacagcagatgttcttacaatatctacagagcttaaaagttttttcttatcgttataaaagttatttgagaaattataaga

SEQ ID NO: 433418 - DNA, 120 bp, Artificial Sequence
  ENSG00000152578_34 (sequence is synthesized)
ctataagagagattgtattagtggtgggccatagtggaaaatgtagctagccctcattattttttgcatactaagctacccctccttttcagatctttgactcattaacagattaaactg

SEQ ID NO: 433419 - DNA, 120 bp, Artificial Sequence
  ENSG00000152578_35 (sequence is synthesized)
tcaaagatggagtctttgagttggggaatgaatcactgtcctaacaacaacataccttgtaattgtgtgttgaaattttacttgactgtattttgctgcataaaattatgtgtctcttgg

SEQ ID NO: 433420 - DNA, 120 bp, Artificial Sequence
  ENSG00000152578_36 (sequence is synthesized)
gcttcttcccttattcctattgttccctttaaatcatatgaaggcattcataatagcttggggtagataacaaatgaagaattagtctttgttttcaactggaaattgtaaagaaaatta

SEQ ID NO: 433421 - DNA, 120 bp, Artificial Sequence
  ENSG00000152578_37 (sequence is synthesized)
tactcatgtttatttataaaaatcaccttatgtatgaattaaactaacatggttcaaaagaaggtttggttcatttgaaataataaataagtactctaatacagataaaaatcatgtact

SEQ ID NO: 433422 - DNA, 120 bp, Artificial Sequence
  ENSG00000152578_38 (sequence is synthesized)
tagggtattggcagaaagcacaagttaggatgatttcagaagtctggccttgaaggatgagttgagttttaacaggaggagaaggtgttaagagccatatgagtgagcagtggcccaaag

SEQ ID NO: 433423 - DNA, 120 bp, Artificial Sequence
  ENSG00000152578_39 (sequence is synthesized)
ccatgcacatcagtggctcatttaaggaatgaatgccattagatgggctactgagagtacagggatattatggaagataaagttggaaaagctgaaggattgattttcttccatcaactc

SEQ ID NO: 433424 - DNA, 120 bp, Artificial Sequence
  ENSG00000152578_40 (sequence is synthesized)
ggaaaagctgaaggattgattttcttccatcaactctcaagatcccattcgccattcaatctctgtgctgcagtaagagcaatcttaaacagtataaatcacacacacacacacacacac

SEQ ID NO: 433425 - DNA, 120 bp, Artificial Sequence
  ENSG00000152578_41 (sequence is synthesized)
caagctcttgagaagatcacatgagccccttcatgacctggcgcttgcttatttcttccaggacttctctcacttctatccagctattcccgtcagcaaatgaacctccaaagcagcaca

SEQ ID NO: 433426 - DNA, 120 bp, Artificial Sequence
  ENSG00000152578_42 (sequence is synthesized)
tggagcactgcatagactatttcctcagtgcgtaactcctccctgtctcctctttacctgagtaacttgtactcatccttcaatactccaactgaattttacttaccctgaaaagatttc

SEQ ID NO: 433427 - DNA, 120 bp, Artificial Sequence
  ENSG00000152578_43 (sequence is synthesized)
catggctatccaccacccccctgcctgtgagactgagttaggtgccctttttcatgtctttcccccatcacggcacttaccatactgcgttgtaattgcctgtgtactcgtctgtataac

SEQ ID NO: 433428 - DNA, 120 bp, Artificial Sequence
  ENSG00000152578_44 (sequence is synthesized)
tactagactgtaagctccttgagggcagggactgtgtctatcttgttcacagttgtatccccagcacccagcacagtgcctggcatattgtaggtgcttaataaatatttgttgaatgaa

SEQ ID NO: 433429 - DNA, 120 bp, Artificial Sequence
  ENSG00000152578_45 (sequence is synthesized)
aatacattgagcagcgaaagccatgtgacacgatgaaagtgggaggaaatctggattccaaaggctatggagtagcaacgcccaagggttcctcattaagaaatgctgttaacctcgcag

SEQ ID NO: 433430 - DNA, 120 bp, Artificial Sequence
  ENSG00000152578_46 (sequence is synthesized)
atttgcagccggacagaaaacctctcccagggctatggagactgcgggaaaaatctggcggctcgcgatggattgctaaggagaactagtcataatcttaaaccaccgaaacctctttcc

SEQ ID NO: 433431 - DNA, 120 bp, Artificial Sequence
  ENSG00000152578_47 (sequence is synthesized)
aagaaagaaaagagttccgcgctgttcgaccattcctaactaaggctcaagtcttgttctccagtgtagtaaatttaagcttatttttcatgtgggattcttcttggatgaccaactctg

SEQ ID NO: 433432 - DNA, 120 bp, Artificial Sequence
  ENSG00000152578_48 (sequence is synthesized)
gactaccagaaaaaaaaaattttaagttctgtgacttttctgagatactagaacaaaagaagaattaatcttcatctttctcaagaaatagatgttgacaaagaatcacttagcgattct

SEQ ID NO: 433433 - DNA, 120 bp, Artificial Sequence
  ENSG00000152578_49 (sequence is synthesized)
gacatatcaattcccctatcttgaaatgaggtcactgtatgtaaatgatggaattatatcactccatttccaagggtagattttctataagtaaatatctcggaatttgtgtgcttgttt

SEQ ID NO: 433434 - DNA, 120 bp, Artificial Sequence
  ENSG00000152578_50 (sequence is synthesized)
tctgaatatatacagttgttttctttaaagatctcttggaattttgcctgttctgtgtgaaataaagtgttttaatgtgcattataggtatgatatagagaatctcctttccatccttgt

SEQ ID NO: 433435 - DNA, 120 bp, Artificial Sequence
  ENSG00000152578_51 (sequence is synthesized)
tactaaagggactggacaaataaatcttaaaaccaaaatactgaattaattttgcaagcatggctagtttttaggaagcatgctatcaaaaaaaaaaagactaaaaatgactgaaaaaat

SEQ ID NO: 433436 - DNA, 120 bp, Artificial Sequence
  ENSG00000152578_52 (sequence is synthesized)
aatactagtatctttttgtatgaaaatgtaatctttatataaataatacctctgatatttgcaactgcataatcgttcagtaattcaaaaagacatactagaatcctttttctgaaagtg

SEQ ID NO: 433437 - DNA, 120 bp, Artificial Sequence
  ENSG00000152578_53 (sequence is synthesized)
ttccttcaatttgcttttgttgaaaacggtagtccaggacctatgatatccctccacttcattcattatgaaagaaatcccttgtagataaacaagatattggcatctgcatgtaattat

SEQ ID NO: 433438 - DNA, 120 bp, Artificial Sequence
  ENSG00000152578_54 (sequence is synthesized)
ccccagattcagctgaaaactcccaacacagatggaattggctagacattttaatatatgtgatacctatatctagatatagaaggctgagagtgagcactggatataattcattttgat

SEQ ID NO: 433439 - DNA, 120 bp, Artificial Sequence
  ENSG00000152578_55 (sequence is synthesized)
tgaaattgatatggtgttattgttcttccagttgtctgtcctttgtgtatgttcttatttatatgttgatacactgtaacactatatgctattgctaaataaaattgattgagaaattca

SEQ ID NO: 433440 - DNA, 120 bp, Artificial Sequence
  ENSG00000152578_56 (sequence is synthesized)
tatgtgctctacaacaagagcataaactccataactgcttgccttttagggcctagcacagagctcaatgtatttaattacttgattgctgattcaaatttaaacaatggaaattacata

SEQ ID NO: 433441 - DNA, 120 bp, Artificial Sequence
  ENSG00000152578_57 (sequence is synthesized)
ttctcccagcttttaatttggagtgtgaggtttgagagttttcattccatgactatcttcaggaccaaatcacaatcttttatcaccaaggacctttttggttcttaagtctcaatgtat

SEQ ID NO: 433442 - DNA, 120 bp, Artificial Sequence
  ENSG00000152578_58 (sequence is synthesized)
ttagaaagctatttctcacatattcttaagacttgaatgagtgaaagactctgtgtgaatcttgaagagctcttggcctccagttttcgaaaatattaatgttgaagattaatcccatct

SEQ ID NO: 433443 - DNA, 120 bp, Artificial Sequence
  ENSG00000152578_59 (sequence is synthesized)
aaaaatagtacaaaaattctaaatttgtgggtgcaccatttttagaggcacacttactttagagaagtgctacatgagaaacagcaacataaattactaaagcaataaaataaaagaaaa

SEQ ID NO: 433444 - DNA, 120 bp, Artificial Sequence
  ENSG00000152578_60 (sequence is synthesized)
tagcaacgcccaagggttcctcattaaggaggaggacagaggagaactaaccagctccaggaccaagaaatgctgttaacctcgcagttttaaaactgaatgaacaaggcctcttggaca

SEQ ID NO: 433445 - DNA, 120 bp, Artificial Sequence
  ENSG00000152578_61 (sequence is synthesized)
gaaagtgaagtttcaggtctgctgaggctgagatcaaccaattggtgaaggactcaagaattcttactgcatatctgttcctggaagaatatgatgctaagagaaaaagaaccaaatttt

SEQ ID NO: 433446 - DNA, 120 bp, Artificial Sequence
  ENSG00000152578_62 (sequence is synthesized)
ttaatttttttagaaagaatttcaagattcccacagttgcctggtttcaggacaaatcagagttaaaaacaagacttcgtttcagggatatttagttgttttttttttcttttccttaat

SEQ ID NO: 433447 - DNA, 120 bp, Artificial Sequence
  ENSG00000152578_63 (sequence is synthesized)
ttatttttcttttctttcttctcctccctctctttgcttcttcctgactttctcttttattcattatctgtctagatcattcaagttaaattttcctttaacattttagtgttattccta

SEQ ID NO: 433448 - DNA, 120 bp, Artificial Sequence
  ENSG00000152578_64 (sequence is synthesized)
tcatccgaatgtcaatttagtgaaaattgtactcaagctagttttttattcttttcctttggtttttcttatttgcttttcacttgagtaagcataggtcttgcttttaaagaagaaaca

SEQ ID NO: 433449 - DNA, 120 bp, Artificial Sequence
  ENSG00000152578_65 (sequence is synthesized)
tgaagactatggaaggcttgctaatagtgagaaaaagaggggagtggtggtgtggaggatatatatttgagtcggttggttgacgctgcagatgatctggtgatgtcacttgaggctgcc

SEQ ID NO: 433450 - DNA, 120 bp, Artificial Sequence
  ENSG00000152578_66 (sequence is synthesized)
ctgcccttatattctggggtgtaaatgtctcttactatcacataatgcatatatcctgtggatataactccatgaatccttacctcgatgccaaatcacattaggctcccatccacctga

SEQ ID NO: 433451 - DNA, 120 bp, Artificial Sequence
  ENSG00000152578_67 (sequence is synthesized)
aaccaacccagctttatctattattccacacaatgaaactaaacgggtgacctcacctaatgccgtaagaaagcagttgtacaattcctcccactctcaccaggacactgtataacttaa

SEQ ID NO: 433452 - DNA, 120 bp, Artificial Sequence
  ENSG00000152578_68 (sequence is synthesized)
tgtaaaaaaaaaatacaatcaactgtgcatgttagtttaaaacacattgaaacatgatcagtcaatagcagttgtattgctttttccttctggaaggaagtgcatgtttcaaatacctcc

SEQ ID NO: 433453 - DNA, 120 bp, Artificial Sequence
  ENSG00000152578_69 (sequence is synthesized)
tcacatttatatgctaatttaccactgttttaaattcataaattcagataatgactatagattatttaagaagtaggaatagtttctacatacaattttgcatgttttcacagttaataa

SEQ ID NO: 433454 - DNA, 120 bp, Artificial Sequence
  ENSG00000152578_70 (sequence is synthesized)
aatgttcaagctgaattgtaaagcctttttgtcatatcaagctgggaacatttttatttaaaattctttcagtacaagaaagtgtgctgaacaaagaaacaagtgaaattgaaaacagag

SEQ ID NO: 433455 - DNA, 120 bp, Artificial Sequence
  ENSG00000152578_71 (sequence is synthesized)
tttttaaatttgtctggaggacatctgtttcatcaacttaaattatttaatttgtatgtgttggctgttaattcatatagcagataacatgataaaattttcttaatttttggtgtctct

SEQ ID NO: 433456 - DNA, 120 bp, Artificial Sequence
  ENSG00000152578_72 (sequence is synthesized)
ttaaccgttaattctttttagaacttagtttcatgaggagcttgaagcatatgtcacttttgcaaagtgaataattatattatttttcaggaaggctataggttctatgagttactactt

SEQ ID NO: 433457 - DNA, 120 bp, Artificial Sequence
  ENSG00000152578_73 (sequence is synthesized)
aatttttaaaaatctcttgacatatttggtgataaaatcaatattgcattaaagcaaaagggtgttatttttattcagaagtgcacataaattagaacaaggtttgtgggtagtcctttt

SEQ ID NO: 433458 - DNA, 120 bp, Artificial Sequence
  ENSG00000152578_74 (sequence is synthesized)
tgtaaaatttctcagttaatagttttatgttccaagttttaaaagggatgtcagcattctaagtagttctaaggaaagcattctttttaatacgtaaatattatttgtttatttaaatat

SEQ ID NO: 433459 - DNA, 120 bp, Artificial Sequence
  ENSG00000152578_75 (sequence is synthesized)
ttgtttatttaaatatttttctcatgtctctcctaagattctgtcaatcttactacttttaaaaataatctatgatccaaatacatgtgaaggtactttatcaatagtaattattttaac

SEQ ID NO: 433460 - DNA, 120 bp, Artificial Sequence
  ENSG00000152578_76 (sequence is synthesized)
ttaaattttgaaagatttccttacaagtggcagatatatgttttattttgtttcatttttacaaagtaagatcttaaatattctaaagtttgtattgtgacttccagtaatgtaaactat

SEQ ID NO: 433461 - DNA, 120 bp, Artificial Sequence
  ENSG00000152578_77 (sequence is synthesized)
atgaggctaatcctcttttcctcctttttgtttgttaacctcatttgggataactgtaactagtattattttatttatgtaataaaaatatatgtgaaataaagtgttactggtaaagta

SEQ ID NO: 433462 - DNA, 120 bp, Artificial Sequence
  ENSG00000152580_0 (sequence is synthesized)
atgaaggtaaaaggcagaggaatcacctgcttgctggtctcctttgctgtgatctgcctggtcgccacccctgggggcaaggcctgtcctcgccgctgtgcctgttatatgcctacggag

SEQ ID NO: 433463 - DNA, 120 bp, Artificial Sequence
  ENSG00000152580_1 (sequence is synthesized)
gtacactgcacatttcggtacctgacttccatcccagacagcatcccgcccaatgtggaacgcatcaatttaggatacaacagcttggttagattgatggaaacagatttttctggcctg

SEQ ID NO: 433464 - DNA, 120 bp, Artificial Sequence
  ENSG00000152580_2 (sequence is synthesized)
accaaactggagttactcatgcttcacagcaatggcattcacacaatccctgacaagaccttctcagatttgcaggccttgcaggtcttaaaaatgagctataataaagtccgaaaactt

SEQ ID NO: 433465 - DNA, 120 bp, Artificial Sequence
  ENSG00000152580_3 (sequence is synthesized)
cagaaagatactttttatggcctcaggagcttgacacgattgcacatggaccacaacaatattgagtttataaacccagaggttttttatgggctcaactttctccgcctggtgcacttg

SEQ ID NO: 433466 - DNA, 120 bp, Artificial Sequence
  ENSG00000152580_4 (sequence is synthesized)
gaaggaaatcagctcactaagctccacccagatacatttgtctctttgagctacctccagatatttaaaatctctttcattaagttcctatacttgtctgataacttcctgacctccctc

SEQ ID NO: 433467 - DNA, 120 bp, Artificial Sequence
  ENSG00000152580_5 (sequence is synthesized)
cctcaagagatggtctcctatatgcctgacctagacagcctttacctgcatggaaacccatggacctgtgattgccatttaaagtggttgtctgactggatacaggagaagccagatgta

SEQ ID NO: 433468 - DNA, 120 bp, Artificial Sequence
  ENSG00000152580_6 (sequence is synthesized)
ataaaatgcaaaaaagatagaagtccctctagtgctcagcagtgtccactttgcatgaaccctaggacttctaaaggcaagccgttagctatggtctcagctgcagctttccagtgtgcc

SEQ ID NO: 433469 - DNA, 120 bp, Artificial Sequence
  ENSG00000152580_7 (sequence is synthesized)
aagccaaccattgactcatccctgaaatcaaagagcctgactattctggaagacagtagttctgctttcatctctccccaaggtttcatggcaccctttggctccctcactttgaatatg

SEQ ID NO: 433470 - DNA, 120 bp, Artificial Sequence
  ENSG00000152580_8 (sequence is synthesized)
acagatcagtctggaaatgaagctaacatggtctgcagtattcaaaagccctcaaggacatcacccattgcattcactgaagaaaatgactacatcgtgctaaatacttcattttcaaca

SEQ ID NO: 433471 - DNA, 120 bp, Artificial Sequence
  ENSG00000152580_9 (sequence is synthesized)
tttttggtgtgcaacatagattacggtcacattcagccagtgtggcaaattttggctttgtacagtgattctcctctgatactagaaaggagccacttgcttagtgaaacaccgcagctc

SEQ ID NO: 433472 - DNA, 120 bp, Artificial Sequence
  ENSG00000152580_10 (sequence is synthesized)
tattacaaatataaacaggtggctcctaagcctgaagacatttttaccaacatagaggcagatctcagagcagatccctcttggttaatgcaagaccaaatttccttgcagctgaacaga

SEQ ID NO: 433473 - DNA, 120 bp, Artificial Sequence
  ENSG00000152580_11 (sequence is synthesized)
actgccaccacattcagtacattacagatccagtactccagtgatgctcaaatcactttaccaagagcagagatgaggccagtgaaacacaaatggactatgatttcaagggataacaat

SEQ ID NO: 433474 - DNA, 120 bp, Artificial Sequence
  ENSG00000152580_12 (sequence is synthesized)
actaagctggaacatactgtcttggtaggtggaaccgttggcctgaactgcccaggccaaggagaccccaccccacacgtggattggcttctagctgatggaagtaaagtgagagcccct

SEQ ID NO: 433475 - DNA, 120 bp, Artificial Sequence
  ENSG00000152580_13 (sequence is synthesized)
tatgtcagtgaggatggacggatcctaatagacaaaagtggaaaattggaactccagatggctgatagttttgacacaggcgtatatcactgtataagcagcaattatgatgatgcagat

SEQ ID NO: 433476 - DNA, 120 bp, Artificial Sequence
  ENSG00000152580_14 (sequence is synthesized)
attctcacctataggataactgtggtagaacctttggtcgaagcctatcaggaaaatgggattcatcacacagttttcattggtgaaacacttgatcttccatgccattctactggtatc

SEQ ID NO: 433477 - DNA, 120 bp, Artificial Sequence
  ENSG00000152580_15 (sequence is synthesized)
ccagatgcctctattagctgggttattccaggaaacaatgtgctctatcagtcatcaagagacaagaaagttctaaacaatggcacattaagaatattacaggtcaccccgaaagaccaa

SEQ ID NO: 433478 - DNA, 120 bp, Artificial Sequence
  ENSG00000152580_16 (sequence is synthesized)
ggttattatcgctgtgtggcagccaacccatcaggggttgattttttgattttccaagtttcagtcaagatgaaaggacaaaggcccttggagcatgatggagaaacagagggatctgga

SEQ ID NO: 433479 - DNA, 120 bp, Artificial Sequence
  ENSG00000152580_17 (sequence is synthesized)
cttgatgagtccaatcctattgctcatcttaaggagccaccaggtgcacaactccgtacatctgctctgatggaggctgaggttggaaaacacacctcaagcacaagtaagaggcacaac

SEQ ID NO: 433480 - DNA, 120 bp, Artificial Sequence
  ENSG00000152580_18 (sequence is synthesized)
tatcgggaattaacactccagcgacgtggagattcaacacatcgacgttttagggagaataggaggcatttccctccctctgctaggagaattgacccacaacattgggcggcactgttg

SEQ ID NO: 433481 - DNA, 120 bp, Artificial Sequence
  ENSG00000152580_19 (sequence is synthesized)
gagaaagctaaaaagaatgctatgccagacaagcgagaaaataccacagtgagcccacccccagtggtcacccaactcccaaacatacctggtgaagaagacgattcctcaggcatgctc

SEQ ID NO: 433482 - DNA, 120 bp, Artificial Sequence
  ENSG00000152580_20 (sequence is synthesized)
gctctacatgaggaatttatggtcccggccactaaagctttgaaccttccagcaaggacagtgactgctgactccagaacaatatctgatagtcctatgacaaacataaattatggcaca

SEQ ID NO: 433483 - DNA, 120 bp, Artificial Sequence
  ENSG00000152580_21 (sequence is synthesized)
gaattctctcctgttgtgaattcacaaatactaccacctgaagaacccacagatttcaaactgtctactgctattaaaactacagccatgtcaaagaatataaacccaaccatgtcaagc

SEQ ID NO: 433484 - DNA, 120 bp, Artificial Sequence
  ENSG00000152580_22 (sequence is synthesized)
caaatacaaggcacaaccaatcaacattcatccactgtctttccactgctacttggagcaactgaatttcaggactctgaccagatgggaagaggaagagagcatttccaaagtagaccc

SEQ ID NO: 433485 - DNA, 120 bp, Artificial Sequence
  ENSG00000152580_23 (sequence is synthesized)
ccaataacagtaaggactatgatcaaagatgtcaatgtcaaaatgcttagtagcaccaccaacaaactattattagagtcagtaaataccacaaatagtcatcagacatctgtaagagaa

SEQ ID NO: 433486 - DNA, 120 bp, Artificial Sequence
  ENSG00000152580_24 (sequence is synthesized)
gtgagtgaacccaggcacaatcacttctattctcacactactcaaatacttagcacctccacgttcccttcagatccacacacagctgctcattctcagtttccgatccctagaaatagt

SEQ ID NO: 433487 - DNA, 120 bp, Artificial Sequence
  ENSG00000152580_25 (sequence is synthesized)
acagttaacatcccgctgttcagacgctttgggaggcagaggaaaattggcggaagggggcggattatcagcccatatagaactccagttctgcgacggcatagatacagcattttcagg

SEQ ID NO: 433488 - DNA, 120 bp, Artificial Sequence
  ENSG00000152580_26 (sequence is synthesized)
tcaacaaccagaggttcttctgaaaaaagcactactgcattctcagccacagtgctcaatgtgacatgtctgtcctgtcttcccagggagaggctcaccactgccacagcagcattgtct

SEQ ID NO: 433489 - DNA, 120 bp, Artificial Sequence
  ENSG00000152580_27 (sequence is synthesized)
tttccaagtgctgctcccatcaccttccccaaagctgacattgctagagtcccatcagaagagtctacaactctagtccagaatccactattactacttgagaacaaacccagtgtagag

SEQ ID NO: 433490 - DNA, 120 bp, Artificial Sequence
  ENSG00000152580_28 (sequence is synthesized)
aaaacaacacccacaataaaatatttcaggactgaaatttcccaagtgactccaactggtgcagtcatgacatatgctccaacatccatacccatggaaaaaactcacaaagtaaacgcc

SEQ ID NO: 433491 - DNA, 120 bp, Artificial Sequence
  ENSG00000152580_29 (sequence is synthesized)
agttacccacgtgtgtctagcaccaatgaagctaaaagagattcagtgattacatcgtcactttcaggtgctatcaccaagccaccaatgactattatagccattacaaggttttcaaga

SEQ ID NO: 433492 - DNA, 120 bp, Artificial Sequence
  ENSG00000152580_30 (sequence is synthesized)
aggaaaattccctggcaacagaactttgtaaataaccataacccaaaaggcagattaaggaatcaacataaagttagtttacaaaaaagcacagctgtgatgcttcctaaaacatctcct

SEQ ID NO: 433493 - DNA, 120 bp, Artificial Sequence
  ENSG00000152580_31 (sequence is synthesized)
gctttacccagagacaaagtctcccctttccatttcaccacactttcaacaagtgtgatgcaaattccatctaataccttgactaccgctcaccacactacgaccaaaacacacaatcct

SEQ ID NO: 433494 - DNA, 120 bp, Artificial Sequence
  ENSG00000152580_32 (sequence is synthesized)
ggaagtcttccaacaaagaaggagcttcccttcccaccccttaaccctatgcttcctagtattataagcaaagactcaagtacaaaaagcatcatatcaacgcaaacagcaataccagca

SEQ ID NO: 433495 - DNA, 120 bp, Artificial Sequence
  ENSG00000152580_33 (sequence is synthesized)
acaactcctaccttccctgcatctgtcatcacttatgaaacccaaacagagagatctagagcacaaacaatacaaagagaacaggagcctcaaaagaagaacaggactgacccaaacatc

SEQ ID NO: 433496 - DNA, 120 bp, Artificial Sequence
  ENSG00000152580_34 (sequence is synthesized)
tctccagaccagagttctggcttcactacacccactgctatgacacctcctgttctaaccacagccgaaacttcagtcaagcccagtgtctctgcattcactcattccccaccagaaaac

SEQ ID NO: 433497 - DNA, 120 bp, Artificial Sequence
  ENSG00000152580_35 (sequence is synthesized)
acaactgggatttcaagcacaatcagttttcattcaagaactcttaatctgacagatgtgattgaagaactagcccaagcaagtactcagactttgaagagcacaattgcttctgaaaca

SEQ ID NO: 433498 - DNA, 120 bp, Artificial Sequence
  ENSG00000152580_36 (sequence is synthesized)
actttgtccagcaaatcacaccagagtaccacaactaggaaagcaatcattagacactcaaccataccaccattcttgagcagcagtgctactctaatgccagttcccatctcccctccc

SEQ ID NO: 433499 - DNA, 120 bp, Artificial Sequence
  ENSG00000152580_37 (sequence is synthesized)
tttactcagagagcagttactgacaacgtggcgactcccatttccgggcttatgacaaatacagtggtcaagctgcacgaatcctcaaggcacaatgctaaaccacagcaattagtagca

SEQ ID NO: 433500 - DNA, 120 bp, Artificial Sequence
  ENSG00000152580_38 (sequence is synthesized)
gaggttgcaacatcccccaaggttcacccaaatgccaagttcacaattggaaccactcacttcatctactctaatctgttacattctactcccatgccagcactaacaacagttaaatca

SEQ ID NO: 433501 - DNA, 120 bp, Artificial Sequence
  ENSG00000152580_39 (sequence is synthesized)
cagaattctaaattaactccatctccctgggcagaaaaccaattttggcacaaaccatactcagaaattgctgaaaaaggcaaaaagccagaagtaagcatgttggctactacaggcctg

SEQ ID NO: 433502 - DNA, 120 bp, Artificial Sequence
  ENSG00000152580_40 (sequence is synthesized)
tccgaggccaccactcttgtttcagattgggatggacagaagaacacaaagaagagtgactttgataagaaaccagttcaagaagcaacaacttccaaactccttccctttgactctttg

SEQ ID NO: 433503 - DNA, 120 bp, Artificial Sequence
  ENSG00000152580_41 (sequence is synthesized)
tctaggtatatatttgaaaagcccaggatagttggaggaaaagctgcaagttttactattccagctaactcagatgcctttcttccctgtgaagctgttggaaatcccctgcccaccatt

SEQ ID NO: 433504 - DNA, 120 bp, Artificial Sequence
  ENSG00000152580_42 (sequence is synthesized)
cattggaccagagtcccatcaggacttgatttatctaagaggaaacagaatagcagggtccaggttctccccaatggtaccctgtccatccagagggtggaaattcaggaccgcggacag

SEQ ID NO: 433505 - DNA, 120 bp, Artificial Sequence
  ENSG00000152580_43 (sequence is synthesized)
tacttgtgttccgcatccaatctgtttggcacagaccaccttcatgtcaccttgtctgtggtttcctatcctcccaggatcctggagagacgtaccaaagagatcacagttcattccgga

SEQ ID NO: 433506 - DNA, 120 bp, Artificial Sequence
  ENSG00000152580_44 (sequence is synthesized)
agcactgtggaactgaagtgcagagcagaaggtaggccaagccctacagttacctggattcttgcaaaccaaacagttgtctcagaatcatcccagggaagtaggcaggctgtggtgacg

SEQ ID NO: 433507 - DNA, 120 bp, Artificial Sequence
  ENSG00000152580_45 (sequence is synthesized)
gttgacggaacattggtcctccacaatctcagtatttatgaccgtggcttttacaaatgtgtggccagcaacccaggtggccaggattcactgctggttaaaatacaagtcattgcagca

SEQ ID NO: 433508 - DNA, 120 bp, Artificial Sequence
  ENSG00000152580_46 (sequence is synthesized)
caagtcattgtaggcacttggggtgaaagtttaaaactgccctgtactgcaaaaggaactcctcagcccagcgtttactgggtcctctctgatggcactgaagtgaaaccattacagttt

SEQ ID NO: 433509 - DNA, 120 bp, Artificial Sequence
  ENSG00000152580_47 (sequence is synthesized)
accaattccaagttgttcttattttcaaatgggactttgtatataagaaacctagcctcttcagacaggggcacttatgaatgcattgctaccagttccactggttcggagcgaagagta

SEQ ID NO: 433510 - DNA, 120 bp, Artificial Sequence
  ENSG00000152580_48 (sequence is synthesized)
gtaatgcttacaatggaagagcgagtgaccagccccaggatagaagctgcatcccagaaaaggactgaagtgaattttggggacaaattactactgaactgctcagccactggggagccc

SEQ ID NO: 433511 - DNA, 120 bp, Artificial Sequence
  ENSG00000152580_49 (sequence is synthesized)
aaaccccaaataatgtggaggttaccatccaaggctgtggtcgaccagcagcatagagtgggcagctggatccacgtctaccctaatggatccctgtttattggatcagtaacagaaaaa

SEQ ID NO: 433512 - DNA, 120 bp, Artificial Sequence
  ENSG00000152580_50 (sequence is synthesized)
gacagtggtgtctacttgtgtgtggcaagaaacaaaatgggggatgatctgatactgatgcatgttagcctaagactgaaacctgccaaaattgaccacaagcagtattttagaaagcaa

SEQ ID NO: 433513 - DNA, 120 bp, Artificial Sequence
  ENSG00000152580_51 (sequence is synthesized)
gtgctccatgggaaagatttccaagtagattgcaaagcttccggctccccagtgccagagatatcttggagtttgcctgatggaaccatgatcaacaatgcaatgcaagccgatgacagt

SEQ ID NO: 433514 - DNA, 120 bp, Artificial Sequence
  ENSG00000152580_52 (sequence is synthesized)
ggccacaggactaggagatatacccttttcaacaatggaactttatacttcaacaaagttggggtagcggaggaaggagattatacttgctatgcccagaacaccctagggaaagatgaa

SEQ ID NO: 433515 - DNA, 120 bp, Artificial Sequence
  ENSG00000152580_53 (sequence is synthesized)
atgaaggtccacttaacagttataacagctgctccccggataaggcagagtaacaaaaccaacaagagaatcaaagctggagacacagctgtccttgactgtgaggtcactggggatccc

SEQ ID NO: 433516 - DNA, 120 bp, Artificial Sequence
  ENSG00000152580_54 (sequence is synthesized)
aaaccaaaaatattttggttgctgccttccaatgacatgatttccttctccattgataggtacacatttcatgccaatgggtctttgaccatcaacaaagtgaaactgctcgattctgga

SEQ ID NO: 433517 - DNA, 120 bp, Artificial Sequence
  ENSG00000152580_55 (sequence is synthesized)
gagtacgtatgtgtagcccgaaatcccagtggggatgacaccaaaatgtacaaactggatgtggtctctaaacctccattaatcaatggtctgtatacaaacagaactgttattaaagcc

SEQ ID NO: 433518 - DNA, 120 bp, Artificial Sequence
  ENSG00000152580_56 (sequence is synthesized)
acagctgtgagacattccaaaaaacactttgactgcagagctgaagggacaccatctcctgaagtcatgtggatcatgccagacaatattttcctcacagccccatactatggaagcaga

SEQ ID NO: 433519 - DNA, 120 bp, Artificial Sequence
  ENSG00000152580_57 (sequence is synthesized)
atcacagtccataaaaatggaaccttggaaattaggaatgtgaggctttcagattcagccgactttatctgtgtggcccgaaatgaaggtggagagagcgtgttggtagtacagttagaa

SEQ ID NO: 433520 - DNA, 120 bp, Artificial Sequence
  ENSG00000152580_58 (sequence is synthesized)
gtactggaaatgctgagaagaccgacatttagaaatccatttaatgaaaaaatagttgcccagctgggaaagtccacagcattgaattgctctgttgatggtaacccaccacctgaaata

SEQ ID NO: 433521 - DNA, 120 bp, Artificial Sequence
  ENSG00000152580_59 (sequence is synthesized)
atctggattttaccaaatggcacacgattttccaatggaccacaaagttatcagtatctgatagcaagcaatggttcttttatcatttctaaaacaactcgggaggatgcaggaaaatat

SEQ ID NO: 433522 - DNA, 120 bp, Artificial Sequence
  ENSG00000152580_60 (sequence is synthesized)
cgctgtgcagctaggaataaagttggctatattgagaaattagtcatattagaaattggccagaagccagttattcttacctatgcaccagggacagtaaaaggcatcagtggagaatct

SEQ ID NO: 433523 - DNA, 120 bp, Artificial Sequence
  ENSG00000152580_61 (sequence is synthesized)
ctatcactgcattgtgtgtctgatggaatccctaagccaaatatcaaatggactatgccaagtggttatgtagtagacaggcctcaaattaatgggaaatacatattgcatgacaatggc

SEQ ID NO: 433524 - DNA, 120 bp, Artificial Sequence
  ENSG00000152580_62 (sequence is synthesized)
accttagtcattaaagaagcaacagcttatgacagaggaaactatatctgtaaggctcaaaatagtgttggtcatacactgattactgttccagtaatgattgtagcctaccctccccga

SEQ ID NO: 433525 - DNA, 120 bp, Artificial Sequence
  ENSG00000152580_63 (sequence is synthesized)
attacaaatcgtccacccaggagtattgtcaccaggacaggggcagcctttcagctccactgtgtggccttgggagttcccaagccagaaatcacatgggagatgcctgaccactccctt

SEQ ID NO: 433526 - DNA, 120 bp, Artificial Sequence
  ENSG00000152580_64 (sequence is synthesized)
ctctcaacggcaagtaaagagaggacacatggaagtgagcagcttcacttacaaggtaccctagtcattcagaatccccaaacctccgattctgggatatacaaatgcacagcaaagaac

SEQ ID NO: 433527 - DNA, 120 bp, Artificial Sequence
  ENSG00000152580_65 (sequence is synthesized)
ccacttggtagtgattatgcagcaacgtatattcaagtaatctgacatgaaataataaagtcaacaacatctgggcagaatttattttttggaagaagtttaatcaaaggcagccatagg

SEQ ID NO: 433528 - DNA, 120 bp, Artificial Sequence
  ENSG00000152580_66 (sequence is synthesized)
catgtaaatgaatttgaatacatttacagtattaaatttacaatgaacatgcaaaataaaaggacttgtaaataaatgcattatgaactgatgatactgatttatttaatggatctcaaa

SEQ ID NO: 433529 - DNA, 120 bp, Artificial Sequence
  ENSG00000152580_67 (sequence is synthesized)
acaaacttttaacttaaggcacttttattttgccaacaaataacaataaacaaacattgaaacggttcactataaaataacaaatggctaatgtacctgaatttttcagtaaaaaaatga

SEQ ID NO: 433530 - DNA, 120 bp, Artificial Sequence
  ENSG00000152580_68 (sequence is synthesized)
acttctaataccagttgcctagtgtccacctcctatcaatgttacaagcatggcactcagaacagagacaatggaaaatattaaatctgcaatctttatgatgtaaatttaccatcctga

SEQ ID NO: 433531 - DNA, 120 bp, Artificial Sequence
  ENSG00000152580_69 (sequence is synthesized)
tgtataaatattttgtggtttataaatttttttgctaaaacctacagaaaataagcactgaactgtcttatgattcaccatttgttcacactgaaaattttcattgatggggaatacaaa

SEQ ID NO: 433532 - DNA, 120 bp, Artificial Sequence
  ENSG00000152580_70 (sequence is synthesized)
aatgttttaataactgcatttaaaaataaatgcaggctcacttttccacatgtaaaaagcaatgtaatacctgcacatcataaaatgtgaaaagggggttatttttgtccaaatacaccc

SEQ ID NO: 433533 - DNA, 120 bp, Artificial Sequence
  ENSG00000152580_71 (sequence is synthesized)
attaaaaaggttttaaaaatacaatgaaacttctttataactttaaaatctagctcaggcacccctggtttggagctgtttataaggaaatttttctgagcaggaatcgttgctctataa

SEQ ID NO: 433534 - DNA, 120 bp, Artificial Sequence
  ENSG00000152580_72 (sequence is synthesized)
gcatttcatttcattaattctttatgggatgggaaaatgcttgggagggtctaggtctattatatataatgaagtttcactgtatttaaaatctgatcaatcctacacaaaatgtgtttt

SEQ ID NO: 433535 - DNA, 120 bp, Artificial Sequence
  ENSG00000152580_73 (sequence is synthesized)
tgtaattcactgaatttatattacatgcttaattcaacctgaattaatttggggaatattaaatgattgatcttatctaaatctaggggtggggttttccagtgtaatttctccagcatc

SEQ ID NO: 433536 - DNA, 120 bp, Artificial Sequence
  ENSG00000152580_74 (sequence is synthesized)
tattcaaacattcacctagtacttacttaagaattataggagctttataaatgggaaaaaaatgccataggtcttagatatctcagtgcacaaaaccgagaattactaataagttagccc

SEQ ID NO: 433537 - DNA, 120 bp, Artificial Sequence
  ENSG00000152580_75 (sequence is synthesized)
ctgccaatcatttgagacatgtggaatagcgcccttgggttttcatcacactgactttcagttagccccatctcagcctaaaatgtgacctggttgcaacttatgtctgatgttagtacc

SEQ ID NO: 433538 - DNA, 120 bp, Artificial Sequence
  ENSG00000152580_76 (sequence is synthesized)
ctgtggctggaagtggtcaaagctacgcattgatctcctctacttccaggccaagaagggtaaatgcaatgactgacaaatgcaaccctattaagaaaaagcctacagtgtaaacaagag

SEQ ID NO: 433539 - DNA, 120 bp, Artificial Sequence
  ENSG00000152580_77 (sequence is synthesized)
agtctatgggcttcttatatccaagaactgtgattgattgataggtatagctgactccatttgatttcaaggtcttgtctttaaggggagctggggtctcgctccatcttattctaaggt

SEQ ID NO: 433540 - DNA, 120 bp, Artificial Sequence
  ENSG00000152580_78 (sequence is synthesized)
ttattctaaggtaatttcctctggtaaggtaaagtaccaggttctgccacagggctttaccttgtgaccatcttaatgcaaaagaatgcatttgcaagaaaagaaaaaaaaaaaaaaaaa

SEQ ID NO: 433541 - DNA, 120 bp, Artificial Sequence
  ENSG00000152580_79 (sequence is synthesized)
caagatacagaattaacagggagaaaatctgaagactaaagtaattctagttattttctttataatgcgcaggggtaaaacagcattcctcaactttcaatagaatcgtggaattaatta

SEQ ID NO: 433542 - DNA, 120 bp, Artificial Sequence
  ENSG00000152580_80 (sequence is synthesized)
gagtcgtagcataacttcctcacctaaaaaaagaaaaaagatatgccccacagctttcatgtgcaaaatgattaataatttaactcacctctgcaaagtataaagtgcatacaaatgcta

SEQ ID NO: 433543 - DNA, 120 bp, Artificial Sequence
  ENSG00000152580_81 (sequence is synthesized)
tgcaattataacactcattcttaaaacagtattactgttgtttgcaatgctgagctacaaaatatatggttcaaactgaactggcaaagaaatttggaaagaaataatgatggaacatga

SEQ ID NO: 433544 - DNA, 120 bp, Artificial Sequence
  ENSG00000152580_82 (sequence is synthesized)
ctcactcactaggcacaacattcacatttcggttgatttgccaatgcagtcattatatagatatattactttgaagaaaacaacttcattagcttatctaagtatgtttcttgagaggaa

SEQ ID NO: 433545 - DNA, 120 bp, Artificial Sequence
  ENSG00000152580_83 (sequence is synthesized)
aaaatctgatatacaaaaccagcaaaaatgtgtacagatagatgatacatcttctgaaagcagatagactattaatttagtgaaaagaatagtttttaatgttttggcaaagtcttttcc

SEQ ID NO: 433546 - DNA, 120 bp, Artificial Sequence
  ENSG00000152580_84 (sequence is synthesized)
agcccagagtaaacacaaaatgggcaggctggagtgaaatattttcacagtgtacaaagcagttcacatggatgttgccacagcaaagtaagctgacatgtatttgaggtcatttgcatg

SEQ ID NO: 433547 - DNA, 120 bp, Artificial Sequence
  ENSG00000152580_85 (sequence is synthesized)
agtcaaactttgcaatgagtaactcacccaggaagatataaattatttatagataatgatttgcaaaagaaaatgtctactaaagttgtactagctacattttaaaaaaagtagatttac

SEQ ID NO: 433548 - DNA, 120 bp, Artificial Sequence
  ENSG00000152580_86 (sequence is synthesized)
atggtctgctcattatagacaagtctattcacagtatgcttgactatattatatgtaaaatcatatggcaaaagaaaatgaaataacagagaacatgggaaaatatcccccacatatgtt

SEQ ID NO: 433549 - DNA, 120 bp, Artificial Sequence
  ENSG00000152580_87 (sequence is synthesized)
ttaaaatgccctgcaattttcacattcaaaattttatgcatctaaatctaaaaaaatattatatagaatactcttaagttacacaaactgataatttactggtttcttttttactctaat

SEQ ID NO: 433550 - DNA, 120 bp, Artificial Sequence
  ENSG00000152580_88 (sequence is synthesized)
aggagcaaattaccacatacttgaacaaagttaaaatagttactatttctttataataaatttgatgtataatttacttgtgctttttgcaccaatttataaatacagtatatgcaatac

SEQ ID NO: 433551 - DNA, 120 bp, Artificial Sequence
  ENSG00000152580_89 (sequence is synthesized)
acaaccaagactgacactgacagtaataattaaattcaaaagagcaaatacttaccatacaaaataaacagcaaatacaccttttatgaaaaccagagccttctggactttggggccaga

SEQ ID NO: 433552 - DNA, 120 bp, Artificial Sequence
  ENSG00000152580_90 (sequence is synthesized)
ttctctggaaaccatgtcaagtgtgagcactggaatctcaagccagctactggatttttttttccccttaaggtggcataaggttcaggagaaccaaaactggcaataaatagttggacg

SEQ ID NO: 433553 - DNA, 120 bp, Artificial Sequence
  ENSG00000152580_91 (sequence is synthesized)
attccactgcagttctttcaggcctttaggatttacatgttgtaccttcacaatgactctcatcaatgatcttgcctcaaaacaaatttgagtacagctacttctaacaggtttccgcac

SEQ ID NO: 433554 - DNA, 120 bp, Artificial Sequence
  ENSG00000152580_92 (sequence is synthesized)
aagtgagcagcttcacttacaagattcagaagtgtgaaggatgcccatacggagtcactccttgctgtggctggttgcctaaggagaaaaataaattgaaccaaaattacagacacaaaa

SEQ ID NO: 433555 - DNA, 120 bp, Artificial Sequence
  ENSG00000152580_93 (sequence is synthesized)
ataatgtggaggttaccatccaaggctgtggtcgaccagcagcataggattctggatttttacttctcagaggcagaagccatgccatgctcctgctgtaaccacaagaccgaataccca

SEQ ID NO: 433556 - DNA, 120 bp, Artificial Sequence
  ENSG00000152580_94 (sequence is synthesized)
tctccaggaaataccattgtttgctgaattaaacacagacacacacacacacacacaaacaaaaacaaaaatgtatttactgtagttcccagctacttggaaggctgaggtggaaagatc

SEQ ID NO: 433557 - DNA, 120 bp, Artificial Sequence
  ENSG00000152580_95 (sequence is synthesized)
acttgagcctaagagtctgagactgcagtgagccatgatcacattgctgcaccccagcctggctgacaagattgagcctctgtctctaaaataaattaaaattaaaattctgataatgta

SEQ ID NO: 433558 - DNA, 120 bp, Artificial Sequence
  ENSG00000152580_96 (sequence is synthesized)
gatgcccaagccatgctgcacacatattaagtcaaattctggaggtgagactcagacatcattattattttaaactccacaagtgttttaatgtttagccaagtttaagaaccaatactt

SEQ ID NO: 433559 - DNA, 120 bp, Artificial Sequence
  ENSG00000152580_97 (sequence is synthesized)
ttagaaagcattaggaaagaatgccagtatagcatggtggaaagcgtaaggcttgagaaccagccctgtgacctaagagtgggcagctggatccacgtctaccctaatggatccctgttt

SEQ ID NO: 433560 - DNA, 120 bp, Artificial Sequence
  ENSG00000152582_0 (sequence is synthesized)
ctttcgcctagttccagcctggatacgcttccatagcaaagggttgcccttggctacaggaggacgcgggctggcaggcttggttcctggcgagtttctaagcccccgcctgcggtctga

SEQ ID NO: 433561 - DNA, 120 bp, Artificial Sequence
  ENSG00000152582_1 (sequence is synthesized)
ggcaccggctgaaccatgtcggagatcctgtgccagtggctcaacaaggagttgaaggtgtcccggaccgtgagtcccaagtcatttgcaaaggcattttccagtggctatctacttgga

SEQ ID NO: 433562 - DNA, 120 bp, Artificial Sequence
  ENSG00000152582_2 (sequence is synthesized)
gaagttctacacaagtttgaacttcaggatgatttttcagaatttttggacagcagggtttcaagtgccaaacttaataatttttctcgcttggagccaacacttaaccttctgggtgtg

SEQ ID NO: 433563 - DNA, 120 bp, Artificial Sequence
  ENSG00000152582_3 (sequence is synthesized)
cagtttgatcagaatgtggcccatggcatcatcacagaaaagcctggggtggcaacaaagctgttatatcaattgtacattgctcttcagaaaaagaagaaaagtggactgactggagtg

SEQ ID NO: 433564 - DNA, 120 bp, Artificial Sequence
  ENSG00000152582_4 (sequence is synthesized)
gagatgcaaaccatgcaacgtctgacaaatttaagacttcaaaacatgaaaagtgatacttttcaagagagacttagacacatgataccacgtcaaactgatttcaatctgatgcggatt

SEQ ID NO: 433565 - DNA, 120 bp, Artificial Sequence
  ENSG00000152582_5 (sequence is synthesized)
acatacaggtttcaagaaaaatataaacacgtgaaagaagatcttgcccatttgcattttgagaaacttgaaagatttcaaaaactcaaggaagagcaaagatgttttgatattgaaaag

SEQ ID NO: 433566 - DNA, 120 bp, Artificial Sequence
  ENSG00000152582_6 (sequence is synthesized)
caatacttaaacagaagacgacaaaatgaaataatggccaaaatccaagcagctattatacagattcctaaacctgcatcaaatcgtactttgaaagcactcgaggcccaaaaaatgatg

SEQ ID NO: 433567 - DNA, 120 bp, Artificial Sequence
  ENSG00000152582_7 (sequence is synthesized)
aaaaagaaaaaagaggcagaagatgtggctgatgaaattaagaagttcgaagcattaataaaaaaggatctccaagcaaaagaaagtgcatccaagacttctttagatacagcaggccag

SEQ ID NO: 433568 - DNA, 120 bp, Artificial Sequence
  ENSG00000152582_8 (sequence is synthesized)
acaaccaccgatttgttaaatacttactcagatgacgagtacattaaaaaaatccagaagcgccttgaagaagatgcttttgcacgagagcaaagggagaaaagacggcggaaattgtta

SEQ ID NO: 433569 - DNA, 120 bp, Artificial Sequence
  ENSG00000152582_9 (sequence is synthesized)
atggaccagttaatagcccacgaagcacaagaggaggcttatcgggaggaacagctgattaaccggctgatgcggcagtcccagcaggagcgcaggattgccgtgcagctcatgcatgtt

SEQ ID NO: 433570 - DNA, 120 bp, Artificial Sequence
  ENSG00000152582_10 (sequence is synthesized)
cggcatgaaaaggaagttttatggcaaaacagaattttcagagaaaaacaacatgaggaaagacgacttaaagatttccaggatgctcttgatcgagaagcggctttggcaaaacaagcc

SEQ ID NO: 433571 - DNA, 120 bp, Artificial Sequence
  ENSG00000152582_11 (sequence is synthesized)
aagattgactttgaagaacaattccttaaagaaaagagatttcatgatcagattgctgtggaaagagctcaagctcgttatgaaaagcattattcagtatgtgcagaaattttggatcaa

SEQ ID NO: 433572 - DNA, 120 bp, Artificial Sequence
  ENSG00000152582_12 (sequence is synthesized)
atagttgatttgtccactaaagtggcagactatcgaatgttgacaaataatctgattccgtataagttgatgcatgattggaaggaactattttttaatgcaaaacccatatatgaacaa

SEQ ID NO: 433573 - DNA, 120 bp, Artificial Sequence
  ENSG00000152582_13 (sequence is synthesized)
gcctctgttaagacactacctgctaacccctcaagagaacaacttacagaactggagaaaagggacttgctagataccaatgattatgaagaatataagaacatggttggagagtgggcc

SEQ ID NO: 433574 - DNA, 120 bp, Artificial Sequence
  ENSG00000152582_14 (sequence is synthesized)
ttaccagaagaaatggttgacaatttaccaccctccaacaattgcatactgggccatattcttcacaggctagctgaaaaatctcttcctcctcgagcggaatcaacaacacctgaatta

SEQ ID NO: 433575 - DNA, 120 bp, Artificial Sequence
  ENSG00000152582_15 (sequence is synthesized)
ccttcatttgctgttaaaggatgcttattggggaaaacattaagtggaaaaactaccattttaaggtctctacaaaaagactttcctatacagatactttctattgacactcttgtccaa

SEQ ID NO: 433576 - DNA, 120 bp, Artificial Sequence
  ENSG00000152582_16 (sequence is synthesized)
gaagctatccaagcatttcatgacaatgaaaaagtcagtgaggttctaccaattcagaaaaatgatgaagaagatgctctaccagttctgcaagaggagattaaagaaagccaggatcca

SEQ ID NO: 433577 - DNA, 120 bp, Artificial Sequence
  ENSG00000152582_17 (sequence is synthesized)
caacatgtattttcagctggtccagtttcagatgaagtattaccagaaacagaaggtgaaacaatgcttagtgctaatgctgataaaacaccaaaagctgaagaagtcaaatcaagtgat

SEQ ID NO: 433578 - DNA, 120 bp, Artificial Sequence
  ENSG00000152582_18 (sequence is synthesized)
agtttcttaaaactcactacacgtgctcagcttggtgcaaaatcagaacagttgctgaagaaaggaaagagcattcctgatgtgctgcttgttgacatcatagtaaatgctattaatgag

SEQ ID NO: 433579 - DNA, 120 bp, Artificial Sequence
  ENSG00000152582_19 (sequence is synthesized)
atacctgtgaatcaagactgtatcctagatggttttccaatgactttaaaccaagcacagcttctggaagaagctcttacaggctgcaatagaaacctcacagaagtggaaagaaaaaaa

SEQ ID NO: 433580 - DNA, 120 bp, Artificial Sequence
  ENSG00000152582_20 (sequence is synthesized)
gcacaaaaatccacattggctattgatcctgcgacttccaaagaaatacctcttccctctcctgcatttgattttgtcatattattagatgtttcagatacttcctcaatgagtcgcatg

SEQ ID NO: 433581 - DNA, 120 bp, Artificial Sequence
  ENSG00000152582_21 (sequence is synthesized)
aatgatattatagctgaagaattgtcctataaaactgctcacgaagatatcagtcaacgtgtagctgctgaaaaccaagataaggatggagaccaaaatttaagagaccagatacaacat

SEQ ID NO: 433582 - DNA, 120 bp, Artificial Sequence
  ENSG00000152582_22 (sequence is synthesized)
agaattataggcttcttggacaactggcctttattggagcaatggttttcagagccagaaaatattttgataaaaatcaatgctgaaatagataaggaatctttatgtgaaaaagtaaaa

SEQ ID NO: 433583 - DNA, 120 bp, Artificial Sequence
  ENSG00000152582_23 (sequence is synthesized)
caaaaaaaaagaataaagttgagaagaaattagaagaaaaggaagctgagaaaaaagcagcagcttccctggctgagcttccacttcctacacctcctcctgctcctcctcctgaaccag

SEQ ID NO: 433584 - DNA, 120 bp, Artificial Sequence
  ENSG00000152582_24 (sequence is synthesized)
aaaaagagaaggaaattcatcaaagccatgtggcttcaaaaactcctactgcaaaaggaaaacctcaatcagaagccccgcatggtaagcaagaatctcttcaggaaggaaaagggaaga

SEQ ID NO: 433585 - DNA, 120 bp, Artificial Sequence
  ENSG00000152582_25 (sequence is synthesized)
aaggtgagaccgcactcaaaagaaaaggttctcctaaaggaaaatcatcaggaggaaaagtaccagtaaagaaatcacctgctgactctacagatacatcacctgttgcaatagtgccac

SEQ ID NO: 433586 - DNA, 120 bp, Artificial Sequence
  ENSG00000152582_26 (sequence is synthesized)
agccacctaagccaggatcagaagaatgggtctatgtgaatgaaccagttcctgaggaaatgcctttgtttttagtaccttactgggaactaatagaaaattcctatataaacaccatca

SEQ ID NO: 433587 - DNA, 120 bp, Artificial Sequence
  ENSG00000152582_27 (sequence is synthesized)
aaacagtactcaggcatctgagggaagaccagcatactgtgcttgcttacttatatgagattagaacaagtttccaggagtttctaaagcgtccggatcacaagcaagattttgtagctc

SEQ ID NO: 433588 - DNA, 120 bp, Artificial Sequence
  ENSG00000152582_28 (sequence is synthesized)
aatggcaggctgatttcaactcccttcctgatgacctgtgggatgatgaggaaacaaaggctgaactacatcaacgagtgaatgatctgcgagaccgcctgtgggacatttgtgatgccc

SEQ ID NO: 433589 - DNA, 120 bp, Artificial Sequence
  ENSG00000152582_29 (sequence is synthesized)
ggaaggaagaggcggagcaggagcggcttgacatcattaatgagagctggttacaggacactcttggaatgacaatgaaccatttcttttccctgatgcaggcagagctgaaccgtttcc

SEQ ID NO: 433590 - DNA, 120 bp, Artificial Sequence
  ENSG00000152582_30 (sequence is synthesized)
aagatacaaagagactccttcaagattattactggggaatggaaagtaaaatcccagtagaggacaacaagagatttactcgaatccctttggtccaactggatagtaaagacaattctg

SEQ ID NO: 433591 - DNA, 120 bp, Artificial Sequence
  ENSG00000152582_31 (sequence is synthesized)
aaagccagcttagaattcctctagttcctcgaatatccatttctctggaaacagttacacccaaaccaaaaacaaaatcagtactgaagggcaagatggataactccctagaaaacgttg

SEQ ID NO: 433592 - DNA, 120 bp, Artificial Sequence
  ENSG00000152582_32 (sequence is synthesized)
agtccaactttgaggccgatgaaaagttggtcatggacacctggcagcaggcttctttagcagtatctcacatggtggctgctgaaattcatcagaggcttatggaagaagaaaaagaaa

SEQ ID NO: 433593 - DNA, 120 bp, Artificial Sequence
  ENSG00000152582_33 (sequence is synthesized)
accagccagcagaccccaaagaaaaatctcctcagatgggtgcaaataaaaaagtcaaaaaggagccacccaagaaaaaacaggaagacaaaaaacccaaaggtaaatcaccacctatgg

SEQ ID NO: 433594 - DNA, 120 bp, Artificial Sequence
  ENSG00000152582_34 (sequence is synthesized)
cagaagcaactcctgtcatagtaacaacagaggaaattgctgaaatcaaaaggaaaaatgaactgagggtcaaaataaaagaagaacaccttgctgccttgcaatttgaagaaatagcca

SEQ ID NO: 433595 - DNA, 120 bp, Artificial Sequence
  ENSG00000152582_35 (sequence is synthesized)
cgcaatttcgacttgaactgataaagacaaaagcattggctcttcttgaagatttagtaacaaaggtggttgatgtatataaactcatggaaaaatggcttggtgagaggtatttgaatg

SEQ ID NO: 433596 - DNA, 120 bp, Artificial Sequence
  ENSG00000152582_36 (sequence is synthesized)
aaatggccagtacagaaaaattaactgacgtagctcgctatcacattgaaacatctacaaaaattcagaatgaactttatttaagccaagaagacttcttcattaatggcaatataaaag

SEQ ID NO: 433597 - DNA, 120 bp, Artificial Sequence
  ENSG00000152582_37 (sequence is synthesized)
tcttcccagatcctcccccatcaatacgtcctccacctgtagaaaaggaagaagatggtaccctgaccattgaacagcttgacagtcttcgagatcagttcttagatatggcacctaaag

SEQ ID NO: 433598 - DNA, 120 bp, Artificial Sequence
  ENSG00000152582_38 (sequence is synthesized)
gcataataggaaataaagcatttactgacattctgatcgatttggtgaccctgaaccttggcacaaacaactttcctagtaattggatgcaccttacccaacctgaattacaggaattaa

SEQ ID NO: 433599 - DNA, 120 bp, Artificial Sequence
  ENSG00000152582_39 (sequence is synthesized)
catctttattaacagtcaactccgagttcgtggactggcggaagttcctgttagtaacctcaatgccttggcccattcccttggaggaggagctccttgagacccttcagaagttcaagg

SEQ ID NO: 433600 - DNA, 120 bp, Artificial Sequence
  ENSG00000152582_40 (sequence is synthesized)
ctgtggataaggagcagttgggcaccatcacttttgagcagtatatgcaggctggtctgtggtttacaggagatgaagatataaaaattccagaaaatcctcttgaaccccttccattta

SEQ ID NO: 433601 - DNA, 120 bp, Artificial Sequence
  ENSG00000152582_41 (sequence is synthesized)
ataggcaggagcatcttatagagtttttctttaggctatttgctgactatgagaaggatccaccccagcttgactacacacagatgctgctttactttgcttgccacccagacaccgtgg

SEQ ID NO: 433602 - DNA, 120 bp, Artificial Sequence
  ENSG00000152582_42 (sequence is synthesized)
aaggagtctacagggccctcagtgtggctgttggaactcatgtcttccaacaagtcaaagcttccattccaagtgcagaaaagacctcctcaactgatgcaggtccagctgaggaatttc

SEQ ID NO: 433603 - DNA, 120 bp, Artificial Sequence
  ENSG00000152582_43 (sequence is synthesized)
ctgaacctgaggaaaatgctgcaagagaagaaaggaaattaaaagacgacacggagaaaagggaacagaaggatgaagaaatccctgaaaatgcaaacaatgaaaagatgtccatggaaa

SEQ ID NO: 433604 - DNA, 120 bp, Artificial Sequence
  ENSG00000152582_44 (sequence is synthesized)
cactactcaaagtgttcaaagggggaagtgaagcacaggactccaatagatttgccagccacctaaagatagagaacatttatgcagagggcttcataaaaacatttcaagacctaggtg

SEQ ID NO: 433605 - DNA, 120 bp, Artificial Sequence
  ENSG00000152582_45 (sequence is synthesized)
ccaagaacctggagccaattgaagtcgctgttctcttgaagcatccttttattcaagacctgatttcaaattattcagactataagtttcctgatattaaaataattctccaaaggagtg

SEQ ID NO: 433606 - DNA, 120 bp, Artificial Sequence
  ENSG00000152582_46 (sequence is synthesized)
aacatgtacaaggaagtgatggagagagatcaccttcaagacatacagaggaaaagaaatgaagacaaaagagtgtgatttttttaattctgcaataaatcttccaaaaattaaatgtga

SEQ ID NO: 433607 - DNA, 120 bp, Artificial Sequence
  ENSG00000152582_47 (sequence is synthesized)
gtacacatcatctatgtagtggaaatgatagtgtgtgcaaaaggttgggcaccacttccatcaggaaaacagtgtgcaagatggagaaactaaggacaaaccccagagaaactggacaaa

SEQ ID NO: 433608 - DNA, 120 bp, Artificial Sequence
  ENSG00000152582_48 (sequence is synthesized)
cccagcagaagaaaggaagaactgcaactcagaaatcacataaccaccaagcaggtctggaccacacatgctaaatgtgcatccactatggcgagtcccaggcctttaacagcagggact

SEQ ID NO: 433609 - DNA, 120 bp, Artificial Sequence
  ENSG00000152582_49 (sequence is synthesized)
aaggagggcagaggctgacaccaaccccctttcatactgtagcactacatccctctcagataccagtttaacacgaagtctccctgtttgactcctgtgagttgtgtattgaactacaaa

SEQ ID NO: 433610 - DNA, 120 bp, Artificial Sequence
  ENSG00000152582_50 (sequence is synthesized)
gtgtttgctgagttgaaaataaaagcgctttcactttgatagaatgtagattgtgtatcttgacttctcaatgatagcaagttacattttgcagttttcttcctatacccacaaatgaaa

SEQ ID NO: 433611 - DNA, 120 bp, Artificial Sequence
  ENSG00000152582_51 (sequence is synthesized)
ctattcagacttaaatatcttcctgtgtgcctaaacgtttttgttctaagttgctgatccttttaaatattaaattattaattaatattaaaattaattttattgcctgtattagtataa

SEQ ID NO: 433612 - DNA, 120 bp, Artificial Sequence
  ENSG00000152582_52 (sequence is synthesized)
tcagtaaagaattataaattatagtctatctacattcagactttgggcaacttcaatcatatgaaacaaggctttacactcagatggaagtggaaaagccctcggagtagctaaaagcgt

SEQ ID NO: 433613 - DNA, 120 bp, Artificial Sequence
  ENSG00000152582_53 (sequence is synthesized)
agttgttacaaagcccaacttctttgccatgtaggaggagacatggagtcatcacacctaggtctactgattagagtaagaccacagacgagaagaggaaaaggcacagagtaacaggta

SEQ ID NO: 433614 - DNA, 120 bp, Artificial Sequence
  ENSG00000152582_54 (sequence is synthesized)
acttcaggcagatcaagaggatacacgtctgtgtgctgaactatagagttacatttatgtaatgagtaagaacatcttaataaaataagaatgagtatagctggttttccaccagaataa

SEQ ID NO: 433615 - DNA, 120 bp, Artificial Sequence
  ENSG00000152582_55 (sequence is synthesized)
gggaacaaattaacagcaaccattagaactagaatttatatgtaattgtaaatcttcaggactatgtgattataaaagtatagaaacaagctcctgccatctcagtaaacatatatttat

SEQ ID NO: 433616 - DNA, 120 bp, Artificial Sequence
  ENSG00000152582_56 (sequence is synthesized)
ggacacagagataaagagcctagatagagaacacttttagtttaagtttgttctagatccttaaccgctatggaccataagtctagcattaagtggcagacaatgaatataatgacaaaa

SEQ ID NO: 433617 - DNA, 120 bp, Artificial Sequence
  ENSG00000152582_57 (sequence is synthesized)
gtgaagtgcttaattgttgtaatgcatgatattggtagagtgtcagtatccatttgtgtgtgtatataaaacaaatgaggctctggtttctagtttcagctttataaatggctgactgtg

SEQ ID NO: 433618 - DNA, 120 bp, Artificial Sequence
  ENSG00000152582_58 (sequence is synthesized)
cagttacaccatgtctacctaagtatctttgatactgtgtcatgaccacatttctaaactctatagtctttctgcctcacggagatttgagataggtcttaatttttaaaattaaactta

SEQ ID NO: 433619 - DNA, 120 bp, Artificial Sequence
  ENSG00000152582_59 (sequence is synthesized)
ttcatattaaacaaagacatatgaagactttagtaagatatattatgatatattaaagaccattctgctccaggaaattagaaattaactacaggcaaaatacacacatcctaaaaaatg

SEQ ID NO: 433620 - DNA, 120 bp, Artificial Sequence
  ENSG00000152582_60 (sequence is synthesized)
tttttatcatgtcaacaataaaacacaaagacatgaattaaacatacacccttttcccgctgtctcattaggaaattaaaaaacaattcagaggtctggaggaaaatggaaatatttaaa

SEQ ID NO: 433621 - DNA, 70 bp, Artificial Sequence
  ENSG00000152582_61 (sequence is synthesized)
aaacaattcagaggtctggaggaaaatggaaatatttaaaatgctttttagaactggggaagacaggcca

SEQ ID NO: 433622 - DNA, 120 bp, Artificial Sequence
  ENSG00000152582_62 (sequence is synthesized)
gtgagccgagattgccccactgcactctagcctgggggatagagtgaaactctacctccaaaaaaaagaaaagaaaaataactgaggaagacagttttcacagtgggtcaggtgagccta

SEQ ID NO: 433623 - DNA, 120 bp, Artificial Sequence
  ENSG00000152582_63 (sequence is synthesized)
tgagcctagaattatcgaatatcgtcctttaacctatagctatgactctaggttaaagctcctcctcagcttgctccagtcaagagtatctatgtatttgagccatttcctgaaaccaga

SEQ ID NO: 433624 - DNA, 120 bp, Artificial Sequence
  ENSG00000152582_64 (sequence is synthesized)
ctctagtgtttctgatcagaccagctcagtctttaagtttctgaagtttgtttgctattttataattatattcttgaatactgtgcattgaagaaataataaatctattgttgctttaaa

SEQ ID NO: 433625 - DNA, 120 bp, Artificial Sequence
  ENSG00000152582_65 (sequence is synthesized)
taaaaaatatccatggcttatatatgatgagctattaaatcttatgttctgcgccttgtgtcgtaagcatggagtgaagtcagggggaagtcaagtgaattttttttatggtactgacaa

SEQ ID NO: 433626 - DNA, 120 bp, Artificial Sequence
  ENSG00000152582_66 (sequence is synthesized)
ctttaggactgaatttctcaatgcacatcatctcagcgaggctcatgccaaggcctcattaatggaagcaacaagtagctctccagtgaacagagccaccaccaaactaatgatgaggac

SEQ ID NO: 433627 - DNA, 120 bp, Artificial Sequence
  ENSG00000152582_67 (sequence is synthesized)
catgagcaaagtaaccctcgggagagtagagaacttattcagatcatgccatgctattgccaagaccggacgtcccctcaaagattttatttggatgtgcaaattagatgatatgaaagg

SEQ ID NO: 433628 - DNA, 120 bp, Artificial Sequence
  ENSG00000152582_68 (sequence is synthesized)
tgttgatattggcccagtattcagaactaaaaaatcagcaagaatgtttacatactttattgctgaagtagaacgaaaaaatctaagagagaaattagaaaaaagtaaatttttctctgt

SEQ ID NO: 433629 - DNA, 120 bp, Artificial Sequence
  ENSG00000152582_69 (sequence is synthesized)
catcagtgatggaatcatagacagtttaatcaaagaagccgaacttgtctatgtgcagtttgcacatgcaggaaaggtgcactgtcaaattgttggggtacagatagtagaaagaaatga

SEQ ID NO: 433630 - DNA, 120 bp, Artificial Sequence
  ENSG00000152582_70 (sequence is synthesized)
tcctctggcaataaaaaatgccattgagaaaactctagagataaatcttcaacttagactgtcgagccaagactgggcaaagaagctggttggttttggaagtgatggtacccatagcat

SEQ ID NO: 433631 - DNA, 120 bp, Artificial Sequence
  ENSG00000152582_71 (sequence is synthesized)
agagggagagaacaacgaggtggccctactattaagagaaatacaaccatgtgtacaaactgtatattgctttgcacatcaccttgaactatcttacaaagcggtgttccagaacattcc

SEQ ID NO: 433632 - DNA, 120 bp, Artificial Sequence
  ENSG00000152582_72 (sequence is synthesized)
tctgtacaatgatgtcaaagacctccttcacagcatttatcacttttatcacaattctcctcttcataagagtgctctgagaactgctttcaaaggccttcaccttcgacctgtgatgcc

SEQ ID NO: 433633 - DNA, 120 bp, Artificial Sequence
  ENSG00000152582_73 (sequence is synthesized)
ttctcaaataggagacaggaagtggcttcatggattacaggcagccctccagaactttctcaagggatatcctgcaattgttcggcaactgcactcagcaggcagaggcaaaagtgacac

SEQ ID NO: 433634 - DNA, 120 bp, Artificial Sequence
  ENSG00000152582_74 (sequence is synthesized)
cagtcaaaagaaacccaaagaacttctggagtcccttctccaagctgacattgttaaatttgcccacttcttgttggatgtcatgaatgtccttagcattctgtcctgtgtcaataagaa

SEQ ID NO: 433635 - DNA, 120 bp, Artificial Sequence
  ENSG00000152582_75 (sequence is synthesized)
tagaaattcctcaattgctgacatatttgccactttagagtcaatgctggaaatgctccaaatgtatcaaacaagactagggccaaaagaacgcatggtggattcagccacacactttca

SEQ ID NO: 433636 - DNA, 120 bp, Artificial Sequence
  ENSG00000152582_76 (sequence is synthesized)
tggtaactgcctcagagggaaagaaaacatttctgctgtgagaaacattgttttaacacatcttatcaagagacttcaaggctgtttcagagatgccagccaaaatgtggtgagggctac

SEQ ID NO: 433637 - DNA, 120 bp, Artificial Sequence
  ENSG00000152582_77 (sequence is synthesized)
cgtgattggaagttttaaattgtggcccacaaagataaatcaagaatttggagaaaaagaggtatccatcctgactgcacattatgaaccagtattagaagctgccaatgtgaaacttag

SEQ ID NO: 433638 - DNA, 120 bp, Artificial Sequence
  ENSG00000152582_78 (sequence is synthesized)
tgaagtggatactgaatggagcatgttgaaattagagatttatgccagatttcagaacattcgaaaattgacctgggattttgtgaattccatttacttacacaagtatccaaatatcct

SEQ ID NO: 433639 - DNA, 120 bp, Artificial Sequence
  ENSG00000152582_79 (sequence is synthesized)
gacactagtcgacctagtgttgacccttcctgcaagttcagctgaagcagaacatggctttagtcagatgaaatggaccaagtcacatatgcatgcaaaaatcaaggctgaaagtatgac

SEQ ID NO: 433640 - DNA, 120 bp, Artificial Sequence
  ENSG00000152582_80 (sequence is synthesized)
ggatgtcctaattattcagttgaattctccagacattaataattttgaccctaggaaagctatccatttatggaatgcaagaacaccgtcttcaactggtgacacaagatctaattcaga

SEQ ID NO: 433641 - DNA, 120 bp, Artificial Sequence
  ENSG00000152582_81 (sequence is synthesized)
ttgctcatcaaactcagaaaatgaaagtgattagcaatatgcaaatgttgacatttttgttgcttagcaatgtagctcttttgcatagtaaaaaataaaataaaataaatggtttccaga

SEQ ID NO: 433642 - DNA, 120 bp, Artificial Sequence
  ENSG00000152582_82 (sequence is synthesized)
agcctggaatttaaaagtaaaacagtaacttctcttcacatcaaacaaaaggcatttggcttcttccaaacatacagagtaaaaagcccaagattgtttcttctatagctttctaacttc

SEQ ID NO: 433643 - DNA, 120 bp, Artificial Sequence
  ENSG00000152582_83 (sequence is synthesized)
acttatgtattcctgtgttctttcacactcttttggtggagctgtatgctgctacacaatggtgttattttgatgtcatttttttcagttattcctaagggtgaccagactatgattacg

SEQ ID NO: 433644 - DNA, 120 bp, Artificial Sequence
  ENSG00000152582_84 (sequence is synthesized)
gtctgagttcccttaggcctggcatacaattcattatttttcctcaataattctaagtgatagttgcattaggtaattaacttagagtcaaattgaaagagagcttctcttttcatctgt

SEQ ID NO: 433645 - DNA, 120 bp, Artificial Sequence
  ENSG00000152582_85 (sequence is synthesized)
gaacaaaatttataagtttatgtaattatgttattgcaaccatatcactacatgctttggccatttaagtaacaaaggcaaatattaaaacagttttcacatttcatgctaaatcctcag

SEQ ID NO: 433646 - DNA, 120 bp, Artificial Sequence
  ENSG00000152582_86 (sequence is synthesized)
gtaaacaattcttatgtaaactgtaagtactgtcttataacactttgttttgccccgtatccattagagattgtggaaatgtattgcagcttacaagatttttaaaatgctttgagcctc

SEQ ID NO: 433647 - DNA, 120 bp, Artificial Sequence
  ENSG00000152582_87 (sequence is synthesized)
gctacataataaatcctttttctttaacattaattttgtgatattccttatttcatttctactaataaaaatagacatgttttgtttgcattttcccttgttttaatttgtatgtttgta

SEQ ID NO: 433648 - DNA, 120 bp, Artificial Sequence
  ENSG00000152582_88 (sequence is synthesized)
ctactttttagatgcttaaactatacataagctattatctattgttcctagtaatcttaggggagtggtctgaaaaaacatcaagcatagtaattgtctgggtagacagatttcagaatt

SEQ ID NO: 433649 - DNA, 120 bp, Artificial Sequence
  ENSG00000152582_89 (sequence is synthesized)
tttaaaatgctttaatttatttattagcatttttctttgtatgggctgtgtacttttgcttcaaaaaccattgttaaaaagtatttcttttgtaatcaatctaaataatagacttttttt

SEQ ID NO: 433650 - DNA, 120 bp, Artificial Sequence
  ENSG00000152582_90 (sequence is synthesized)
acaggcaaaatgaaagaggaggaagtctgggttttatgaatagcatagattcaaacaatcttttattcaaagattgaaataaaaagtatcgggtgccaactgtgatttttagaagaactg

SEQ ID NO: 433651 - DNA, 120 bp, Artificial Sequence
  ENSG00000152582_91 (sequence is synthesized)
ttgtaaagcctttgagattagacagactagagctacattactgaaattgccaactactaactgtgtgaccttaggtgaccagttcattaagggctaatagatttccatttttcaattaat

SEQ ID NO: 433652 - DNA, 120 bp, Artificial Sequence
  ENSG00000152582_92 (sequence is synthesized)
ggaaagggaatgctactatacctacttcatttaaaataacatgagttaaacacttagctgagtgcacttcatgttggatgcatataatacatatccatttctttcctcaccatcctactc

SEQ ID NO: 433653 - DNA, 120 bp, Artificial Sequence
  ENSG00000152582_93 (sequence is synthesized)
tccccatcccactccatctcacccttagaagtaaaggtgtaacaatcatagcttttggatagaaattttgagtggatcaacagcaatggaatgaggagtgaggctttttattagaaaaat

SEQ ID NO: 433654 - DNA, 120 bp, Artificial Sequence
  ENSG00000152582_94 (sequence is synthesized)
tacaaaatgagtcccggaaggtcagtaagtgcaacatgaaaaaaatctatgaaaagattatttgacctaattattcactgatagtacatactcaacaaaggtttgtgggacaaagggtga

SEQ ID NO: 433655 - DNA, 120 bp, Artificial Sequence
  ENSG00000152582_95 (sequence is synthesized)
ataaaatgaatgaattacaatgaacaaagaaaagtgcaaaataacactaacaagtaaatattacaagaagataaccttgtggttaaaagataaggaaaaatatgagattatgagaaatta

SEQ ID NO: 433656 - DNA, 120 bp, Artificial Sequence
  ENSG00000152582_96 (sequence is synthesized)
aatgtatactatattttaattaaatgaatctgtatttgtagcactaagagaattattattaaggattgactagaaccttaaaagatatatgtggatgtttgttttgtacggttgtaaaat

SEQ ID NO: 433657 - DNA, 120 bp, Artificial Sequence
  ENSG00000152582_97 (sequence is synthesized)
atactagacctattacatccacctaaagtataatgccatgtaagaaaatgctttgacagtatcaacctgtgttaaggtatttctttccattgtaaattaaaagtcattttatttgacaga

SEQ ID NO: 433658 - DNA, 64 bp, Artificial Sequence
  ENSG00000152582_98 (sequence is synthesized)
gcaatctcggctggctgcaagctccgcctccctcccagtagccaggactacaggcctttcaacg

SEQ ID NO: 433659 - DNA, 120 bp, Artificial Sequence
  ENSG00000152582_99 (sequence is synthesized)
tgttagccaggattcttatttgtagtaatcaagcacactgattctaacttaacagagcagaacatcaatgtattagttttcaaagagggctctatttgccctaggtccgtggttaccaag

SEQ ID NO: 433660 - DNA, 120 bp, Artificial Sequence
  ENSG00000152582_100 (sequence is synthesized)
aaacaaggctattttctaattgttgtaggccaaggatttcagagggcttgataggggtctgggacttgtgtctatggaatagcaggaatagaagatgaacttgggtcatgtgaagggtat

SEQ ID NO: 433661 - DNA, 120 bp, Artificial Sequence
  ENSG00000152582_101 (sequence is synthesized)
tgttgtaatatctcatacatttcactcatctgtatatgaaaatatacagcaatgaaaaggtagatttattttgtgacttacgtgcctatattccgcttcttctcccataccaagcttgac

SEQ ID NO: 433662 - DNA, 120 bp, Artificial Sequence
  ENSG00000152582_102 (sequence is synthesized)
ttcttttacccagatgtgaataaagtcaggttctattacctgtggggaattcaatgagaaattgagtaattggaaaagccaagggaaagactcaattgtgtggtcacagaccacggggaa

SEQ ID NO: 433663 - DNA, 120 bp, Artificial Sequence
  ENSG00000152582_103 (sequence is synthesized)
aaaagaagccagagagacttggctgacaaatgtaataaagagagaaggtcagcaggctggagaaaactgtcaaaaagtcccctgagaaagagctgcagacaacttagagtaggtaaggaa

SEQ ID NO: 433664 - DNA, 120 bp, Artificial Sequence
  ENSG00000152582_104 (sequence is synthesized)
gcagaactgagtagtgagatgtgggatgtggaaacagtgagaccaagagagatgaggaaggagggctgagagttctactctgcatctagaatggacttcccttagtgttttcttaaaaga

SEQ ID NO: 433665 - DNA, 120 bp, Artificial Sequence
  ENSG00000152582_105 (sequence is synthesized)
tgacattaaaaatttaagttgcttctcaatgatgatatatctagaaatcagatcacagggctgcccagagctaggaggggcctcactctaatagttgtaacatttcccagaagtggcgat

SEQ ID NO: 433666 - DNA, 120 bp, Artificial Sequence
  ENSG00000152582_106 (sequence is synthesized)
aaagcatgtttcagccatgggattctttgcttctgctccaaataaaaatgtatatgaaaagcatcagatataaagcagttcttcactttagtttcagtggaactgaaacctccacacccc

SEQ ID NO: 433667 - DNA, 120 bp, Artificial Sequence
  ENSG00000152582_107 (sequence is synthesized)
atcgtcagaactccattaccctccttccaccagtaccatcctcattgcccctgaggctcctccagatgacagtcatcagtgtgaaatctttgatccagtctaaatctatcgtttttctgt

SEQ ID NO: 433668 - DNA, 120 bp, Artificial Sequence
  ENSG00000152582_108 (sequence is synthesized)
aaggaaagggaggcacatgacagttcagtgaggtgctccagttacatgtctggctagtggtatagccccagccaaagtccaggtctcctgactccccatcatctcatgtcctcaaactac

SEQ ID NO: 433669 - DNA, 120 bp, Artificial Sequence
  ENSG00000152582_109 (sequence is synthesized)
agctgaacaaaggtagccctcacctcccccttcctctgaagtggcttctgtgactgtgggtggacgaaggaactcaaggaaattctctttcccatcttaggccaatgaatcaacaaattt

SEQ ID NO: 433670 - DNA, 120 bp, Artificial Sequence
  ENSG00000152582_110 (sequence is synthesized)
attatatgcagaatgcttcaccaagctctggacaagttataaaaccaaaatgaagtcttttcctgctcttaataacctaatgagagaaatatagacagtgacctgaagacagcttgatac

SEQ ID NO: 433671 - DNA, 120 bp, Artificial Sequence
  ENSG00000152582_111 (sequence is synthesized)
tgtggaaagatcattggatttgggtgatttttagtttcgtgactttgaacaataatgaaatttcctttaacttctgttttccccctccttccttgttacactattggaaggatcacatgc

SEQ ID NO: 433672 - DNA, 120 bp, Artificial Sequence
  ENSG00000152582_112 (sequence is synthesized)
aggccccaaagtagactcagaaacctttggaaaggggattccattgtttaatataagttctgacagaaataaatgaaattataccttttaatccaaaggccaaaaacacaattttgcata

SEQ ID NO: 433673 - DNA, 120 bp, Artificial Sequence
  ENSG00000152582_113 (sequence is synthesized)
atttaagggcttagaagaacaaagtcaaagtttacgcctttctcaccttgttttccagctgcaaattaaaacaataattattcaacacccactctctaaagaggacactgtgctgagtgc

SEQ ID NO: 433674 - DNA, 120 bp, Artificial Sequence
  ENSG00000152582_114 (sequence is synthesized)
aaaaacccaattgcacttcagcgtcctataatctaactgagattttaaaagactcacttgaatttgtgttaaacagagaaatataaccacttgcatggcaaagtggaagtcagagaaatt

SEQ ID NO: 433675 - DNA, 120 bp, Artificial Sequence
  ENSG00000152582_115 (sequence is synthesized)
cagatcaggatactatgactctacacaggcttgggtgggataggaagagctctccaggttggcagtacaagtatccagtacttgctaagctctgtgctgcgtttttaaaatgcatcattt

SEQ ID NO: 433676 - DNA, 120 bp, Artificial Sequence
  ENSG00000152582_116 (sequence is synthesized)
cagttcatcctcacaactaccttatgaggtatgttatgttaccccattgtatgaattaggaaactgaggtgcaaaggaggaacagtctgtgaacacaatatagaaaatgcagttcatact

SEQ ID NO: 433677 - DNA, 120 bp, Artificial Sequence
  ENSG00000152582_117 (sequence is synthesized)
tataacattgaggagatgagtttgtttgaagtaaatggttcaaaattgtaagagataacaagttatagagaaataaagtgttgatatggtttgactgtgtccccatccaaatctcatctt

SEQ ID NO: 433678 - DNA, 120 bp, Artificial Sequence
  ENSG00000152582_118 (sequence is synthesized)
gggagggacctggtgggagatgattgaatcgtgggggcggtgctttcctgtgctgttttcgtgatagtgaatggtctcacaagatgtgatgtttttaaaaacgggagtttctctgcacaa

SEQ ID NO: 433679 - DNA, 120 bp, Artificial Sequence
  ENSG00000152582_119 (sequence is synthesized)
ttttaaaaacgggagtttctctgcacaagctctcgatttgcctgctgccatccatgtgactttctcctccttgccttctgccgtgattgtgaggcttcccccaccatgtgaaactgtaag

SEQ ID NO: 433680 - DNA, 120 bp, Artificial Sequence
  ENSG00000152582_120 (sequence is synthesized)
ttgggtatgtctttatcagcagcatggaaagggactaatacaggtgtggccagttaattttaatgtgttaaagcctctggaatagatttggagggcagcacagtatccacagaagtattt

SEQ ID NO: 433681 - DNA, 120 bp, Artificial Sequence
  ENSG00000152582_121 (sequence is synthesized)
gatttggagggcagcacagtatccacagaagtatttttaagcaagggagtgattgtggcacatcagtaaacctaatcttttagctatgaagtaatgaaattcatgcagtaggaagttatt

SEQ ID NO: 433682 - DNA, 120 bp, Artificial Sequence
  ENSG00000152582_122 (sequence is synthesized)
aagagtcagtggcaggagagatgaaaatggtacaaggacaagatggaaagaggccctctggggacggaaagaggaatatgcaatcaatggttcatgtggaagaggtgatatcataggaaa

SEQ ID NO: 433683 - DNA, 120 bp, Artificial Sequence
  ENSG00000152582_123 (sequence is synthesized)
gatattatagaccagcaggatcctgggctgagtgggagcctagccactagggttgggtgcaacatgcagttctgcagtgctcggggtctatggaggaacctgaagaacatcttcacagag

SEQ ID NO: 433684 - DNA, 120 bp, Artificial Sequence
  ENSG00000152582_124 (sequence is synthesized)
ctgacaaatttaagacttcaaaacatgaaaagtgatacttttcaagaggtaggtacataaaaaagcataataagcatgtcacagtgtaaaatttgataaagagaaatgacaatgatattg

SEQ ID NO: 433685 - DNA, 120 bp, Artificial Sequence
  ENSG00000152582_125 (sequence is synthesized)
agtgtgccctgaaattggtcagggaaaagtctgtggagcaaaactttggagggagaaattgaagagggtaaagagattttgtggcaaggctacagagaatgtttacagttaggggaacag

SEQ ID NO: 433686 - DNA, 120 bp, Artificial Sequence
  ENSG00000152582_126 (sequence is synthesized)
ctgctggaaactctgtagacaagaagcgtgaggataggagcatgatgtttgggaaatgtttaggagactgctctgcttttctttctccaactgcatgaactccaggcgagtagaagagga

SEQ ID NO: 433687 - DNA, 120 bp, Artificial Sequence
  ENSG00000152582_127 (sequence is synthesized)
ggctttctctgtgtgaggaaccacctcctcccacccaagctggagaattaacccatatgcaagaataacagttgtaattaccacagaatttacaaggctatacaatacgagtgctctgag

SEQ ID NO: 433688 - DNA, 120 bp, Artificial Sequence
  ENSG00000152582_128 (sequence is synthesized)
gacacctagtctcttggctaattgctgggttctgaaattttcaatagataaattttatatatttgtacctatgagtgtattatattgcctattctgttattctgaatcactaaactaatg

SEQ ID NO: 433689 - DNA, 120 bp, Artificial Sequence
  ENSG00000152583_0 (sequence is synthesized)
aaaaaatgcataaagagccaagtgcttatattctggccaagttatgaggctctgagaacaagagcttgaggggaagactgttaaccccatccacgccaccagaattagctctttcccttt

SEQ ID NO: 433690 - DNA, 120 bp, Artificial Sequence
  ENSG00000152583_1 (sequence is synthesized)
tggtttgcaagcactgcctgtaaagccctcgcatgagaggccagcctgctagggaaatccaggaatctgcaacaaaaacgatgacagtctgaaatactctctggtgccaacctccaaatt

SEQ ID NO: 433691 - DNA, 120 bp, Artificial Sequence
  ENSG00000152583_2 (sequence is synthesized)
ctcgtctgtcacttcagacccccactagttgacagagcagcagaatttcaactccagtagacttgaatatgcctctgggcaaagaagcagagctaacgaggaaagggatttaaagagttt

SEQ ID NO: 433692 - DNA, 120 bp, Artificial Sequence
  ENSG00000152583_3 (sequence is synthesized)
ttcttgggtgtttgtcaaacttttattccctgtctgtgtgcagaggggattcaacttcaatttttctgcagtggctctgggtccagccccttacttaaagatctggaaagcatgaagact

SEQ ID NO: 433693 - DNA, 120 bp, Artificial Sequence
  ENSG00000152583_4 (sequence is synthesized)
gggctttttttcctatgtctcttgggaactgcagctgcaatcccgacaaatgcaagattattatctgatcattccaaaccaactgctgaaacggtagcacctgacaacactgcaatcccc

SEQ ID NO: 433694 - DNA, 120 bp, Artificial Sequence
  ENSG00000152583_5 (sequence is synthesized)
agtttaagggctgaagctgaagaaaatgaaaaagaaacagcagtatccacagaagacgattcccaccataaggctgaaaaatcatcagtactaaagtcaaaagaggaaagccatgaacag

SEQ ID NO: 433695 - DNA, 120 bp, Artificial Sequence
  ENSG00000152583_6 (sequence is synthesized)
tcagcagaacagggcaagagttctagccaagagctgggattgaaggatcaagaggacagtgatggtcacttaagtgtgaatttggagtatgcaccaactgaaggtacattggacataaaa

SEQ ID NO: 433696 - DNA, 120 bp, Artificial Sequence
  ENSG00000152583_7 (sequence is synthesized)
gaagatatgagtgagcctcaggagaaaaaactctcagagaacactgattttttggctcctggtgttagttccttcacagattctaaccaacaagaaagtatcacaaagagagaggaaaac

SEQ ID NO: 433697 - DNA, 120 bp, Artificial Sequence
  ENSG00000152583_8 (sequence is synthesized)
caagaacaacctagaaattattcacatcatcagttgaacaggagcagtaaacatagccaaggcctaagggatcaaggaaaccaagagcaggatccaaatatttccaatggagaagaggaa

SEQ ID NO: 433698 - DNA, 120 bp, Artificial Sequence
  ENSG00000152583_9 (sequence is synthesized)
gaagaaaaagagccaggtgaagttggtacccacaatgataaccaagaaagaaagacagaattgcccagggagcatgctaacagcaagcaggaggaagacaatacccaatctgatgatatt

SEQ ID NO: 433699 - DNA, 120 bp, Artificial Sequence
  ENSG00000152583_10 (sequence is synthesized)
ttggaagagtctgatcaaccaactcaagtaagcaagatgcaggaggatgaatttgatcagggtaaccaagaacaagaagataactccaatgcagaaatggaagaggaaaatgcatcgaac

SEQ ID NO: 433700 - DNA, 120 bp, Artificial Sequence
  ENSG00000152583_11 (sequence is synthesized)
gtcaataagcacattcaagaaactgaatggcagagtcaagagggtaaaactggcctagaagctatcagcaaccacaaagagacagaagaaaagactgtttctgaggctctgctcatggaa

SEQ ID NO: 433701 - DNA, 120 bp, Artificial Sequence
  ENSG00000152583_12 (sequence is synthesized)
cagaaatcatggagttgatgatgatggcgatgatgatggcgatgatggcggcactgatggccccaggcacagtgcaagtgatgactacttcatcccaagccaggcctttctggaggccga

SEQ ID NO: 433702 - DNA, 120 bp, Artificial Sequence
  ENSG00000152583_13 (sequence is synthesized)
gagagctcaatccattgcctatcacctcaaaattgaggagcaaagagaaaaagtacatgaaaatgaaaatataggtaccactgagcctggagagcaccaagaggccaagaaagcagagaa

SEQ ID NO: 433703 - DNA, 120 bp, Artificial Sequence
  ENSG00000152583_14 (sequence is synthesized)
ctcatcaaatgaggaggaaacgtcaagtgaaggcaacatgagggtgcatgctgtggattcttgcatgagcttccagtgtaaaagaggccacatctgtaaggcagaccaacagggaaaacc

SEQ ID NO: 433704 - DNA, 120 bp, Artificial Sequence
  ENSG00000152583_15 (sequence is synthesized)
tcactgtgtctgccaggatccagtgacttgtcctccaacaaaaccccttgatcaagtttgtggcactgacaatcagacctatgctagttcctgtcatctattcgctactaaatgcagact

SEQ ID NO: 433705 - DNA, 120 bp, Artificial Sequence
  ENSG00000152583_16 (sequence is synthesized)
ggaggggaccaaaaaggggcatcaactccagctggattattttggagcctgcaaatctattcctacttgtacggactttgaagtgattcagtttcctctacggatgagagactggctcaa

SEQ ID NO: 433706 - DNA, 120 bp, Artificial Sequence
  ENSG00000152583_17 (sequence is synthesized)
gaatatcctcatgcagctttatgaagccaactctgaacacgctggttatctaaatgagaagcagagaaataaagtcaagaaaatttacctggatgaaaagaggcttttggctggggacca

SEQ ID NO: 433707 - DNA, 120 bp, Artificial Sequence
  ENSG00000152583_18 (sequence is synthesized)
tcccattgatcttctcttaagggactttaagaaaaactaccacatgtatgtgtatcctgtgcactggcagtttagtgaacttgaccaacaccctatggatagagtcttgacacattctga

SEQ ID NO: 433708 - DNA, 120 bp, Artificial Sequence
  ENSG00000152583_19 (sequence is synthesized)
acttgctcctctgcgagcatctctggtgcccatggaacactgcataacccgtttctttgaggagtgtgaccccaacaaggataagcacatcaccctgaaggagtggggccactgctttgg

SEQ ID NO: 433709 - DNA, 120 bp, Artificial Sequence
  ENSG00000152583_20 (sequence is synthesized)
aattaaagaagaggacatagatgaaaatctcttgttttgaacgaagattttaaagaactcaactttccagcatcctcctctgttctaaccacttcagaaatatatgcagctgtgatactt

SEQ ID NO: 433710 - DNA, 120 bp, Artificial Sequence
  ENSG00000152583_21 (sequence is synthesized)
gtagatttatatttagcaaaatgttagcatgtatgacaagacaatgagagtaattgcttgacaacaacctatgcaccaggtatttaacattaactttggaaacaaaaatgtacaattaag

SEQ ID NO: 433711 - DNA, 120 bp, Artificial Sequence
  ENSG00000152583_22 (sequence is synthesized)
taaagtcaacatatgcaaaatactgtacattgtgaacagaagtttaattcatagtaatttcactctctgcattgacttatgagataattaatgattaaactattaatgataaaaataatg

SEQ ID NO: 433712 - DNA, 120 bp, Artificial Sequence
  ENSG00000152583_23 (sequence is synthesized)
catttgtattgttcataatatcatgtgcacttcaagaaaatggaatgctactcttttgtggtttacgtgtattattttcaatatcttaataccctaataaagagtccataaaaatccaaa

SEQ ID NO: 433713 - DNA, 120 bp, Artificial Sequence
  ENSG00000152583_24 (sequence is synthesized)
aacttcaatttttctgcagtggctctgggtccagccccttacttaaagatctggaaagcatgaagactgggctttttttcctatgtctcttgggaactgcagctgcaatcccggtgaaaa

SEQ ID NO: 433714 - DNA, 120 bp, Artificial Sequence
  ENSG00000152583_25 (sequence is synthesized)
gtctcttgggaactgcagctgcaatcccggtgaaaaggagataagaagcaaaggagcaaaccaaacctaatatgaatcctgtactttggccagaagccgtggctcacatctgtaatccca

SEQ ID NO: 433715 - DNA, 120 bp, Artificial Sequence
  ENSG00000152583_26 (sequence is synthesized)
attgtctgaggcaaaaagacatcaagtcctttcatgctgtcctgggaaaggcggtttggaacaagttatcctgattctagagacaggggattcaacttcaatttttctgcagtggctctg

SEQ ID NO: 433716 - DNA, 120 bp, Artificial Sequence
  ENSG00000152583_27 (sequence is synthesized)
taaagttattcaatctcctgagcctaacagcaatgtagaaacggaactttttgcttttccaaaaggccataagatgttttattgaaagaaactttcaatatcaagtaatccaaccaacct

SEQ ID NO: 433717 - DNA, 120 bp, Artificial Sequence
  ENSG00000152583_28 (sequence is synthesized)
aaaaagacatcaagtcctttcatgctgtcctgggaaaggcggtttggaacaagttatcctgattctagagacgatgcaaagcactgtgctaggcaccaggagaatgcagaaagggcacat

SEQ ID NO: 433718 - DNA, 120 bp, Artificial Sequence
  ENSG00000152591_0 (sequence is synthesized)
atgcaaaagtccaggacagtgggccactttcagtcttcaaagagaaagataagaaattctggattttcaaaatccttttgaagccttttaagccattgattattattattcctaaagaaa

SEQ ID NO: 433719 - DNA, 120 bp, Artificial Sequence
  ENSG00000152591_1 (sequence is synthesized)
atgaagataattacatatttttgcatttgggcagtagcatgggccattccagttcctcaaagcaaaccactggagagacatgtcgaaaaatccatgaatttgcatctcctagcaagatca

SEQ ID NO: 433720 - DNA, 120 bp, Artificial Sequence
  ENSG00000152591_2 (sequence is synthesized)
aatgtgtcagtacaggatgagttaaatgccagtggaaccatcaaagaaagtggtgtcctggtgcatgaaggtgatagaggaaggcaagagaatacccaagatggtcacaagggagaaggg

SEQ ID NO: 433721 - DNA, 120 bp, Artificial Sequence
  ENSG00000152591_3 (sequence is synthesized)
aatggctctaagtgggcagaagtaggagggaagagtttttctacatattccacattagcaaacgaagaggggaatattgagggctggaatggggacacaggaaaagcagaaacatatggt

SEQ ID NO: 433722 - DNA, 120 bp, Artificial Sequence
  ENSG00000152591_4 (sequence is synthesized)
catgatggaatacatgggaaagaagaaaacatcacagcaaatggcatccagggacaagtaagcatcattgacaatgctggagccacaaacagaagcaacactaatggaaatactgataag

SEQ ID NO: 433723 - DNA, 120 bp, Artificial Sequence
  ENSG00000152591_5 (sequence is synthesized)
aatacccaaaatggggatgttggcgatgcaggtcacaatgaggatgtcgctgttgtccaagaagatggacctcaagtagctggaagcaataacagtacagacaatgaggatgaaataatt

SEQ ID NO: 433724 - DNA, 120 bp, Artificial Sequence
  ENSG00000152591_6 (sequence is synthesized)
gagaattcctgtagaaacgagggtaatacaagtgaaataacacctcagatcaacagcaagagaaatgggactaaggaagctgaggtaacaccaggcactggagaagatgctggcctggat

SEQ ID NO: 433725 - DNA, 120 bp, Artificial Sequence
  ENSG00000152591_7 (sequence is synthesized)
aattccgatgggagtcctagtgggaatggagcagatgaggatgaagacgagggttctggtgatgatgaagatgaagaagcagggaatggaaaagacagtagtaataacagcaagggccag

SEQ ID NO: 433726 - DNA, 120 bp, Artificial Sequence
  ENSG00000152591_8 (sequence is synthesized)
gagggccaggaccatgggaaagaagatgatcatgatagtagcataggtcaaaattcagatagtaaagaatattatgaccctgaaggcaaagaagatccccataatgaagttgatggagac

SEQ ID NO: 433727 - DNA, 120 bp, Artificial Sequence
  ENSG00000152591_9 (sequence is synthesized)
aagacctccaagagtgaggagaattctgctggtattccagaagacaatggcagccaaagaatagaggacacccagaagctcaaccatagagaaagcaaacgcgtagaaaatagaatcacc

SEQ ID NO: 433728 - DNA, 120 bp, Artificial Sequence
  ENSG00000152591_10 (sequence is synthesized)
aaagaatcagagacacatgctgttgggaagagccaagataagggaatagaaatcaagggtcccagcagtggcaacagaaatattaccaaagaagttgggaaaggcaacgaaggtaaagag

SEQ ID NO: 433729 - DNA, 120 bp, Artificial Sequence
  ENSG00000152591_11 (sequence is synthesized)
gataaaggacaacatggaatgatcttgggcaaaggcaatgtcaagacacaaggagaggttgtcaacatagaaggacctggccaaaaatcagaaccaggaaataaagttggacacagcaat

SEQ ID NO: 433730 - DNA, 120 bp, Artificial Sequence
  ENSG00000152591_12 (sequence is synthesized)
acaggtagtgacagcaatagtgatggatatgacagttatgattttgatgataagtccatgcaaggagatgatcccaatagcagtgatgaatctaatggcaatgatgatgctaattcagaa

SEQ ID NO: 433731 - DNA, 120 bp, Artificial Sequence
  ENSG00000152591_13 (sequence is synthesized)
agtgacaataacagcagtagccgaggagatgcttcttataactctgatgaatcaaaagataatggcaatggcagtgactcaaaaggagcagaagatgatgacagtgatagcacatcagac

SEQ ID NO: 433732 - DNA, 120 bp, Artificial Sequence
  ENSG00000152591_14 (sequence is synthesized)
actaataatagtgacagtaatggcaatggtaacaatgggaatgatgacaatgacaaatcagacagtggcaaaggtaaatcagatagcagtgacagtgatagtagtgatagcagcaatagc

SEQ ID NO: 433733 - DNA, 120 bp, Artificial Sequence
  ENSG00000152591_15 (sequence is synthesized)
agtgatagtagtgacagcagtgacagtgacagcagtgatagcaacagtagcagtgatagtgacagcagtgacagtgacagcagtgatagcagtgacagtgatagtagtgatagcagcaat

SEQ ID NO: 433734 - DNA, 120 bp, Artificial Sequence
  ENSG00000152591_16 (sequence is synthesized)
agcagtgacagtagtgacagcagtgatagcagtgacagtagtgatagtagtgacagcagtgacagcaagtcagacagcagcaaatcagagagcgacagcagtgatagtgacagtaagtca

SEQ ID NO: 433735 - DNA, 120 bp, Artificial Sequence
  ENSG00000152591_17 (sequence is synthesized)
gacagcagtgacagcaacagcagtgacagtagtgacaacagtgatagcagcgacagcagcaatagcagtaacagcagtgatagtagtgacagcagtgatagcagtgacagcagcagtagc

SEQ ID NO: 433736 - DNA, 120 bp, Artificial Sequence
  ENSG00000152591_18 (sequence is synthesized)
caacagcagtgatagtagtgacagtagtgacagcagcaatagcagtgagagcagtgatagtagtgacagcagtgatagtgacagcagtgatagtagtgacagcagtaatagtaacagcag

SEQ ID NO: 433737 - DNA, 120 bp, Artificial Sequence
  ENSG00000152591_19 (sequence is synthesized)
cgatagtgacagcagcaacagcagcgatagcagtgacagcagcaacagcagtgacagcagtgatagcagtgacagcagcaacagcagtgacagtagcgatagcagtgacagcagcaacag

SEQ ID NO: 433738 - DNA, 120 bp, Artificial Sequence
  ENSG00000152591_20 (sequence is synthesized)
cagtgacagcagtgatagcagtgacagcagtgatagtagtgacagcagcaacagcagtgatagcaacgacagcagcaatagcagtgacagcagtgatagcagcaacagcagtgatagcag

SEQ ID NO: 433739 - DNA, 120 bp, Artificial Sequence
  ENSG00000152591_21 (sequence is synthesized)
caacagcagtgatagcagtgatagcagtgacagcagtgatagcgacagcagcaatagcagtgacagcagtaatagtagtgacagcagcgatagcagcaacagcagtgatagcagcgacag

SEQ ID NO: 433740 - DNA, 120 bp, Artificial Sequence
  ENSG00000152591_22 (sequence is synthesized)
cagcgatagcagtgacggcagtgatagcgacagcagcaatagaagtgacagtagtaatagtagtgacagcagcgatagcagtgacagcagcaacagcagtgacagcagtgatagcagtga

SEQ ID NO: 433741 - DNA, 120 bp, Artificial Sequence
  ENSG00000152591_23 (sequence is synthesized)
cagcaacgaaagcagcaatagcagtgacagcagtgatagcagcaacagcagtgatagtgacagcagtgatagcagcaacagcagtgacagcagtgatagcagcaacagcagtgatagcag

SEQ ID NO: 433742 - DNA, 120 bp, Artificial Sequence
  ENSG00000152591_24 (sequence is synthesized)
tgaaagcagtaatagtagtgacaacagcaatagcagtgacagcagcaacagcagtgacagcagtgatagcagtgacagcagtaatagtagtgacagcagcaatagcagtgacagcagcaa

SEQ ID NO: 433743 - DNA, 120 bp, Artificial Sequence
  ENSG00000152591_25 (sequence is synthesized)
cagcagtgacagcagtgatagcaatagcagcgacagcagtgacagcagcaacagcagcgatagcagtgacagcagtgatagcagtgacagcagtgacagcagtgatagcagcaacagcag

SEQ ID NO: 433744 - DNA, 120 bp, Artificial Sequence
  ENSG00000152591_26 (sequence is synthesized)
tgatagcagtgacagcagtgacagcagtgatagcagtaatagtagtgacagcagcaatagcagtgacagcagcaacagcagtgacagcagcgatagcagtgacagcagcgatagcagtga

SEQ ID NO: 433745 - DNA, 120 bp, Artificial Sequence
  ENSG00000152591_27 (sequence is synthesized)
cagcagcgatagcagtgacagcagtgacagcagcaatagcagtgacagcagtgacagcagcgacagcagtgatagcagtgacagcagtgacagcagcgacagcagtgatagcagtgaaag

SEQ ID NO: 433746 - DNA, 120 bp, Artificial Sequence
  ENSG00000152591_28 (sequence is synthesized)
cagtgatagcagtgacagcagcaatagcagtgacagcagcgatagcagcgacagcagcgacagcagcgatagcagtgacagcagcgatagcagtgacagcagtgacagcagcaatagcag

SEQ ID NO: 433747 - DNA, 120 bp, Artificial Sequence
  ENSG00000152591_29 (sequence is synthesized)
tgacagcagtgacagcagcgacagcagtgatagcagtgacagcagcaacagcagtgacagcagtgacagcagtgaaagcagcgacagcagtgacagcagcgacagcagtgacagcagcga

SEQ ID NO: 433748 - DNA, 120 bp, Artificial Sequence
  ENSG00000152591_30 (sequence is synthesized)
tagcagcgacagcagcgacagcagcgatagcagtgacagcagcaatagcagtgatagcagcgacagcagtgatagcagtgacagcagcgacagcagcgatagcagcgacagcagcgatag

SEQ ID NO: 433749 - DNA, 120 bp, Artificial Sequence
  ENSG00000152591_31 (sequence is synthesized)
tagtgatagcagtgacagcagtgacagcagcgacagcagtgacagcagcgacagcagtgacagcagcgacagcagtgacagcaatgaaagcagcgacagcagtgacagcagcgatagcag

SEQ ID NO: 433750 - DNA, 120 bp, Artificial Sequence
  ENSG00000152591_32 (sequence is synthesized)
tgacagcagcaacagcagtgacagcagcgacagcagtgatagcagtgacagcacatctgacagcaatgatgagagtgacagccagagcaagtctggtaacggtaacaacaatggaagtga

SEQ ID NO: 433751 - DNA, 120 bp, Artificial Sequence
  ENSG00000152591_33 (sequence is synthesized)
cagtgacagtgacagtgaaggcagtgacagtaaccactcaaccagtgatgattagaacaaaagaaaaacccgtaagattccttttgtgaaaagtttggtaatgggataggaaaaaaagat

SEQ ID NO: 433752 - DNA, 120 bp, Artificial Sequence
  ENSG00000152591_34 (sequence is synthesized)
ttccaagaaagtaaagaaaggggagaaataaacataagacgtatgtaaacaaaaacaactgggggaatcaaatcaaacagttggattcagaaccaagacctaactcctgcagagacagac

SEQ ID NO: 433753 - DNA, 120 bp, Artificial Sequence
  ENSG00000152591_35 (sequence is synthesized)
tctgaatgcatgacctttggtacatgcctgttaatattcatgttctgaaaatattttgttaaaagtgtaaatctaaacataaaagaacaattaaaatattctttaatacttcacacagaa

SEQ ID NO: 433754 - DNA, 120 bp, Artificial Sequence
  ENSG00000152592_0 (sequence is synthesized)
agaatatcaacacaagagtggcttcattgggcatagatttcctctttgagaacatcaacctgatttttgagactttttgaaaaaattctttgtgaactacggagggtagaggtatcacac

SEQ ID NO: 433755 - DNA, 120 bp, Artificial Sequence
  ENSG00000152592_1 (sequence is synthesized)
ccaactatgaagatcagcatcctgctcatgttcctttggggattatcctgtgctctcccagtaaccaggtatcaaaataatgaatctgaggattctgaagaatggaagggtcatttggct

SEQ ID NO: 433756 - DNA, 120 bp, Artificial Sequence
  ENSG00000152592_2 (sequence is synthesized)
caggcaccaacaccacccttggagagcagtgagtcatcagaaggcagtaaagttagctcagaggaacaggcaaatgaagaccccagtgacagcactcagtcagaggagggcctgggctct

SEQ ID NO: 433757 - DNA, 120 bp, Artificial Sequence
  ENSG00000152592_3 (sequence is synthesized)
gatgatcatcaatacatttataggctagctggtggcttctccaggagcacaggaaaaggaggagatgataaagatgacgatgaagatgacagtggagatgacacctttggtgacgatgac

SEQ ID NO: 433758 - DNA, 120 bp, Artificial Sequence
  ENSG00000152592_4 (sequence is synthesized)
agtggcccagggcccaaagacagacaagaaggaggaaactccagactgggaagtgatgaggactctgatgacaccatacaagccagtgaagagagtgccccacaagggcaagacagtgcc

SEQ ID NO: 433759 - DNA, 120 bp, Artificial Sequence
  ENSG00000152592_5 (sequence is synthesized)
caagataccaccagtgagagcagggaacttgacaatgaggaccgggtggacagcaagcctgagggaggtgactccactcaagagagtgagagtgaagagcactgggtgggaggtggcagt

SEQ ID NO: 433760 - DNA, 120 bp, Artificial Sequence
  ENSG00000152592_6 (sequence is synthesized)
gatggggagagcagccatggagacggctccgagttggacgatgagggaatgcagagtgatgacccagagagcatcaggagtgaaaggggaaactccagaatgaacagtgcaggcatgaaa

SEQ ID NO: 433761 - DNA, 120 bp, Artificial Sequence
  ENSG00000152592_7 (sequence is synthesized)
tcaaaagaatctggagaaaacagtgagcaagcaaacactcaagattcaggtggcagccaattgctggagcatcccagtaggaaaatttttaggaagtctcgcatctcagaggaagatgac

SEQ ID NO: 433762 - DNA, 120 bp, Artificial Sequence
  ENSG00000152592_8 (sequence is synthesized)
agaagcgagcttgatgacaacaacacaatggaagaagtcaagagtgactctacagaaaacagcaactccagagacactggcctcagccaacccaggagagacagcaagggtgactctcaa

SEQ ID NO: 433763 - DNA, 120 bp, Artificial Sequence
  ENSG00000152592_9 (sequence is synthesized)
gaagacagcaaggagaatctgtcccaggaagagagccaaaacgtagatggtcccagcagtgagtccagccaagaggccaacctgtcatctcaagagaacagcagtgagtctcaggaagag

SEQ ID NO: 433764 - DNA, 120 bp, Artificial Sequence
  ENSG00000152592_10 (sequence is synthesized)
gtggtgagtgagtccaggggagataaccccgaccccacaactagttatgtagaagaccaggaagacagtgactccagcgaggaggacagctcgcacacactctcccactcaaaaagtgaa

SEQ ID NO: 433765 - DNA, 120 bp, Artificial Sequence
  ENSG00000152592_11 (sequence is synthesized)
gtcccctgaggatgagaacagctccagccaggagggcctccagtctcacagcagctcagcagagagtcagagcgaggaaagccattctgaggaagacgacagtgactctcaagacagcag

SEQ ID NO: 433766 - DNA, 120 bp, Artificial Sequence
  ENSG00000152592_12 (sequence is synthesized)
cagatccaaagaagatagcaactccacggagagcaaatcaagcagtgaggaagatggccagttgaaaaacattgagatagagagccggaaattaacagttgatgcctatcacaacaaacc

SEQ ID NO: 433767 - DNA, 120 bp, Artificial Sequence
  ENSG00000152592_13 (sequence is synthesized)
cattggggaccaagatgacaatgactgccaagacggctattagcatcagctgtcctaagaagcagttgtcacataaaggagtcttagggacttgaaaatgtatcatgataactataattt

SEQ ID NO: 433768 - DNA, 120 bp, Artificial Sequence
  ENSG00000152592_14 (sequence is synthesized)
attgatgttttgatcaaaagaataaccagatgccatatttttcctgaaaggaattgctggacattacacttgtttttagggtgtcatcatttcacagaggtttaaatactgtggagtgac

SEQ ID NO: 433769 - DNA, 120 bp, Artificial Sequence
  ENSG00000152592_15 (sequence is synthesized)
accagaacacagccaaagaggctagaagcaagaaaggatctgcatgataactttgcagctgagatagttcctaattcatcaacgtaacaaacaaagctattgggtgtccatgatatacca

SEQ ID NO: 433770 - DNA, 120 bp, Artificial Sequence
  ENSG00000152592_16 (sequence is synthesized)
ggcactatgctaggtgttgagaatgtaaagcaggttaagacttgtttcttgctcctgaggagcgtatagaaggacccacaaagctacagagttaaagagggatatgtataagagaaacaa

SEQ ID NO: 433771 - DNA, 120 bp, Artificial Sequence
  ENSG00000152592_17 (sequence is synthesized)
gaattgttacaacccagtatggtgagtgccaagacagagagctatgaacacgatatctatctgggaacactgagaagggtgaccaatgcgttggagaacgagggagggcttcatagcaga

SEQ ID NO: 433772 - DNA, 120 bp, Artificial Sequence
  ENSG00000152592_18 (sequence is synthesized)
agacattggagttggaaggttgcatagggtttcctcattggagaccgggaaattctattcttgggataaataatagtaaattctataggattcaatacttagtttgcaaaagcactttga

SEQ ID NO: 433773 - DNA, 120 bp, Artificial Sequence
  ENSG00000152592_19 (sequence is synthesized)
aattatggcacagtgagttgttttggataagaaaatctttttctcccaattaatttaccaattcatcatttttttttttttgtagaactcccataaacatcaccttactaatcactggtg

SEQ ID NO: 433774 - DNA, 120 bp, Artificial Sequence
  ENSG00000152592_20 (sequence is synthesized)
atgataagaaggattgggtcaggaagagtgggagaaagaaattcctctttacgtagatactttttagctttattttttctaaaatcagtttgcgtgcaatgctagaaaaaaactgttctc

SEQ ID NO: 433775 - DNA, 120 bp, Artificial Sequence
  ENSG00000152592_21 (sequence is synthesized)
tgagtcctttacagagcaaaattctgtatgtaagattcaattgatttttgacaaataccatttgaaatattacctcaacataaaatacttgttttgtaataaagattataatacccagaa

SEQ ID NO: 433776 - DNA, 120 bp, Artificial Sequence
  ENSG00000152595_0 (sequence is synthesized)
caggtattctgaaggtgaaagataccagagattctcaaagatgcgagttttctgtgtgggactactccttttcagtgtgacctgggcagcaccaacatttcaaccacagactgagaaaac

SEQ ID NO: 433777 - DNA, 120 bp, Artificial Sequence
  ENSG00000152595_1 (sequence is synthesized)
taagcaaagctgtgtggaagagcagaggcaggaagaaaaaaacaaagacaatattggttttcaccatttgggcaagagaataaatcaagagctatcatctaaagaaaatattgtccagga

SEQ ID NO: 433778 - DNA, 120 bp, Artificial Sequence
  ENSG00000152595_2 (sequence is synthesized)
aagaaagaaagatttgtccctttctgaagccagtgagaataagggaagtagtaaatctcaaaattatttcacaaatagacagagactgaataaagaatatagtatcagtaacaaagagaa

SEQ ID NO: 433779 - DNA, 120 bp, Artificial Sequence
  ENSG00000152595_3 (sequence is synthesized)
tactcacaatggcctgaggatgtcaatttatcctaagtcaactgggaataaagggtttgaggatggagatgatgctatcagcaaactacatgaccaagaagaatatggcgcagctctcat

SEQ ID NO: 433780 - DNA, 120 bp, Artificial Sequence
  ENSG00000152595_4 (sequence is synthesized)
cagaaataacatgcaacatataatggggccagtgactgcgattaaactcctgggggaagaaaacaaagagaacacacctaggaatgttctaaacataatcccagcaagtatgaattatgc

SEQ ID NO: 433781 - DNA, 120 bp, Artificial Sequence
  ENSG00000152595_5 (sequence is synthesized)
taaagcacactcgaaggataaaaagaagcctcaaagagattcccaagcccagaaaagtccagtaaaaagcaaaagcacccatcgtattcaacacaacattgactacctaaaacatctctc

SEQ ID NO: 433782 - DNA, 120 bp, Artificial Sequence
  ENSG00000152595_6 (sequence is synthesized)
aaaagtcaaaaaaatccccagtgattttgaaggcagcggttatacagatcttcaagagagaggggacaatgatatatctcctttcagtggggacggccaaccttttaaggacattcctgg

SEQ ID NO: 433783 - DNA, 120 bp, Artificial Sequence
  ENSG00000152595_7 (sequence is synthesized)
taaaggagaagctactggtcctgacctagaaggcaaagatattcaaacagggtttgcaggcccaagtgaagctgagagtactcatcttgacacaaaaaagccaggttataatgagatccc

SEQ ID NO: 433784 - DNA, 120 bp, Artificial Sequence
  ENSG00000152595_8 (sequence is synthesized)
tgttgatgtcagccttgtagagggcagcaacgatatcatgggtagtaccaattttaaggagctccctggaagagaaggaaacagagtggatgctggcagccaaaatgctcaccaagggaa

SEQ ID NO: 433785 - DNA, 120 bp, Artificial Sequence
  ENSG00000152595_9 (sequence is synthesized)
ggttgagtttcattaccctcctgcaccctcaaaagagaaaagaaaagaaggcagtagtgatgcagctgaaagtaccaactataatgaaattcctaaaaatggcaaaggcagtaccagaaa

SEQ ID NO: 433786 - DNA, 120 bp, Artificial Sequence
  ENSG00000152595_10 (sequence is synthesized)
gggtgtagatcattctaataggaaccaagcaaccttaaatgaaaaacaaaggtttcctagtaagggcaaaagtcagggcctgcccattccttctcgtggtcttgataatgaaatcaaaaa

SEQ ID NO: 433787 - DNA, 120 bp, Artificial Sequence
  ENSG00000152595_11 (sequence is synthesized)
cgaaatggattcctttaatggccccagtcatgagaatataataacacatggcagaaaatatcattatgtaccccacagacaaaataattctacacggaataagggtatgccacaagggaa

SEQ ID NO: 433788 - DNA, 120 bp, Artificial Sequence
  ENSG00000152595_12 (sequence is synthesized)
aggctcctggggtagacaaccccattccaacaggaggtttagttcccgtagaagggatgacagtagtgagtcatctgacagtggcagttcaagtgagagcgatggtgactagtccaccag

SEQ ID NO: 433789 - DNA, 120 bp, Artificial Sequence
  ENSG00000152595_13 (sequence is synthesized)
gagttcccagcggggtgacagtctgaagacctcgtcacctgtgagttgatgtagaggagagccacctgacagctgaccaggtgaagagaggatagagtgaagaactgagtgagccaagaa

SEQ ID NO: 433790 - DNA, 120 bp, Artificial Sequence
  ENSG00000152595_14 (sequence is synthesized)
tcctggtctccttgggggaatttttgctatcttaatagtcacagtataaaattctattaaaggctataatgtttttaagcaaaaaaaaatcattacagatctatgaaataggtaacattt

SEQ ID NO: 433791 - DNA, 120 bp, Artificial Sequence
  ENSG00000152595_15 (sequence is synthesized)
gagtaggtgtcatttaaaaatagttggtgaatgtcacaaatgccttctatgttgtttgctctgtagacatgaaaataaacaatatctctcgatgataatttgtattaagtaatctataag

SEQ ID NO: 433792 - DNA, 120 bp, Artificial Sequence
  ENSG00000152595_16 (sequence is synthesized)
gggcagcaccagggttctctcttttatatgattgatccaccatgatgcctgcttccactgtagcacacccattcaaacacggcccagtccgcccattggttcccagtgccacatctgaga

SEQ ID NO: 433793 - DNA, 120 bp, Artificial Sequence
  ENSG00000152595_17 (sequence is synthesized)
taggctaggagtttctgaaagaaagagacatttcaaccacagactgagaaaactaagcaaagctgtgtggaagagcagaggataacatacaagggtcactatgagaaacatgggcattat

SEQ ID NO: 433794 - DNA, 120 bp, Artificial Sequence
  ENSG00000152595_18 (sequence is synthesized)
aaatcaaactgatgtaaaggctcctcaagcctctctactacaaaactctgggtcccagaatcttcctgatccccatcccatgcctcggcccacatctcgctctgcttcaggacctgtggc

SEQ ID NO: 433795 - DNA, 120 bp, Artificial Sequence
  ENSG00000152601_0 (sequence is synthesized)
ttacatcttatagcacccagtgaattatgatatggggctgcggtttatttgctctggcgacaatatggcttacttgccgtggaatatcccggtatttcagaagtaacatattatttttaa

SEQ ID NO: 433796 - DNA, 120 bp, Artificial Sequence
  ENSG00000152601_1 (sequence is synthesized)
agagggagctttgctttctctaaatcacatggtgcaaagttgggaatacagtggcctgtaaattacaaatattatttacaaactagaaggaaagctgacatgtgtttgtgcctgtgtgac

SEQ ID NO: 433797 - DNA, 120 bp, Artificial Sequence
  ENSG00000152601_2 (sequence is synthesized)
agtttcactaaggaattccaaaactgtggatagcctgttacttgagaaaaatacacggtggcagtcttgcagatgtttttcccgcctgttagccctccaggttcaaaaactgtttggtgc

SEQ ID NO: 433798 - DNA, 120 bp, Artificial Sequence
  ENSG00000152601_3 (sequence is synthesized)
attttaaggcggcagtctcaccagatcgcaggattctagtctaattggcttctaaccttcaatctaaccttgccggcttccttgcaaagcccggtgcaagggcctctttcaaaatgaacc

SEQ ID NO: 433799 - DNA, 120 bp, Artificial Sequence
  ENSG00000152601_4 (sequence is synthesized)
cactggtgtgcctagcagtcggtagaagaagcgggagggcgtccggtctgcacgcccgccgcgaggttacaatgctgaacgcatgagatggaagataccaacgggaggccgaggggatcc

SEQ ID NO: 433800 - DNA, 120 bp, Artificial Sequence
  ENSG00000152601_5 (sequence is synthesized)
acggcgcccgcgcgggctccggcttcctcctgctctcggcgccgctgggcgaccgcccatgacccgctcttgcgggctctgtccggttgacaggcgaccctgtggcccggggaagcgcgg

SEQ ID NO: 433801 - DNA, 120 bp, Artificial Sequence
  ENSG00000152601_6 (sequence is synthesized)
gagggcgccggcggaaagttgaagagcgtttttctcgccgccgcgtgcattaggagctcgacgagtccgccctgggcttcctggtggggctgggcgggcgggggaggggccgcgcagcag

SEQ ID NO: 433802 - DNA, 120 bp, Artificial Sequence
  ENSG00000152601_7 (sequence is synthesized)
cagcggaagccagacctcggcgataagaggctgcacagcgacatgcaacagtcttttcactgcagctgaatgagttgtggcgcccacaatgctcccatgacaaggagctgacaagttcca

SEQ ID NO: 433803 - DNA, 120 bp, Artificial Sequence
  ENSG00000152601_8 (sequence is synthesized)
ttttccgtcgcgggcatcttggaatcatgactcccacaatgccttgggcacttggtcgacagtggggccgcctctgaaaaaaaaatgtgagaggttggtactaagaagtgcctttcctga

SEQ ID NO: 433804 - DNA, 120 bp, Artificial Sequence
  ENSG00000152601_9 (sequence is synthesized)
cgtctctgctgcttggaaccgcttctagagcagtctctgcttttgccttgcttgctgccagctagactgtgacgacagcacatccaccctccacctctagcccagacacccccatttcta

SEQ ID NO: 433805 - DNA, 120 bp, Artificial Sequence
  ENSG00000152601_10 (sequence is synthesized)
cttataatcaagagaaaagctctaagtatctggcattgccctaggctgctttagtgttaaaagaaaagtttgctgaaaaagtaagatatcttctgccaggaaatcaaggaggaaaaaaaa

SEQ ID NO: 433806 - DNA, 120 bp, Artificial Sequence
  ENSG00000152601_11 (sequence is synthesized)
aatcattttctcgattttgctctaaactgctgcatctgtctatgccaaactaatcaataccgattgcaccaccaaactccattgcaaattcagctgtgaggagattccctttcagacaac

SEQ ID NO: 433807 - DNA, 120 bp, Artificial Sequence
  ENSG00000152601_12 (sequence is synthesized)
tttgctgaaagcagcttggaaattcggtgtcgaagggtctgccacgttttcatgcttgcattttgggctccaaattggcactgggaaggggttactgagagcacaaggctgataccaggc

SEQ ID NO: 433808 - DNA, 120 bp, Artificial Sequence
  ENSG00000152601_13 (sequence is synthesized)
cctacttttaaacgttcatctacttacaatcctagtatttctctaaaaaccaaaacctctttgaattaacagtttcatgctgtgaatttctagtgggagatcttttccttgatattgacg

SEQ ID NO: 433809 - DNA, 120 bp, Artificial Sequence
  ENSG00000152601_14 (sequence is synthesized)
acacaattttccatgtacttttaaagcagggagtggggaaaagtattttgaggggacattttcatcatcagttcagctttttttttttggttgttgctcttttttgggggggttgggttt

SEQ ID NO: 433810 - DNA, 120 bp, Artificial Sequence
  ENSG00000152601_15 (sequence is synthesized)
gttggtttcactgaaacatttaactacctgtaaaatctaaacatggctgttagtgtcacaccaattcgggacacaaaatggctaacactggaagtatgtagagagttccagagggggact

SEQ ID NO: 433811 - DNA, 120 bp, Artificial Sequence
  ENSG00000152601_16 (sequence is synthesized)
tgctcacggccagacacggaatgtaaatttgcacatccttcgaaaagctgccaagttgaaaatggacgagtaatcgcctgctttgattcattgaaaggccgttgctccagggagaactgc

SEQ ID NO: 433812 - DNA, 120 bp, Artificial Sequence
  ENSG00000152601_17 (sequence is synthesized)
aaatatcttcatccacccccacatttaaaaacgcagttggagataaatggacgcaataacttgattcagcagaagaacatggccatgttggcccagcaaatgcaactagccaatgccatg

SEQ ID NO: 433813 - DNA, 120 bp, Artificial Sequence
  ENSG00000152601_18 (sequence is synthesized)
atgcctggtgccccattacaacccgtgccaatgttttcagttgcaccaagcttagccaccaatgcatcagcagccgcctttaatccctatctgggacctgtttctccaagcctggtcccg

SEQ ID NO: 433814 - DNA, 120 bp, Artificial Sequence
  ENSG00000152601_19 (sequence is synthesized)
gcagagatcttgccgactgcaccaatgttggttacagggaatccgggtgtccctgtacctgcagctgctgcagctgctgcacagaaattaatgcgaacagacagacttgaggtatgtcga

SEQ ID NO: 433815 - DNA, 120 bp, Artificial Sequence
  ENSG00000152601_20 (sequence is synthesized)
gagtaccaacgtggcaattgcaaccgaggagaaaatgattgtcggtttgctcatcctgctgacagcacaatgattgacaccaatgacaacacagtcactgtgtgtatggattacatcaaa

SEQ ID NO: 433816 - DNA, 120 bp, Artificial Sequence
  ENSG00000152601_21 (sequence is synthesized)
gggagatgctctcgggaaaagtgcaaatactttcatccccctgcacatttgcaagccaagatcaaggctgcccaataccaggtcaaccaggctgcagctgcacaggctgcagccaccgca

SEQ ID NO: 433817 - DNA, 120 bp, Artificial Sequence
  ENSG00000152601_22 (sequence is synthesized)
gctgccatgactcagtcggctgtcaaatcactgaagcgacccctcgaggcaacctttgacctgggaattcctcaagctgtacttcccccattaccaaagaggcctgctcttgaaaaaacc

SEQ ID NO: 433818 - DNA, 120 bp, Artificial Sequence
  ENSG00000152601_23 (sequence is synthesized)
aacggtgccaccgcagtctttaacactggtattttccaataccaacaggctctagccaacatgcagttacaacagcatacagcatttctcccaccagttcccatggtgcacggtgctacg

SEQ ID NO: 433819 - DNA, 120 bp, Artificial Sequence
  ENSG00000152601_24 (sequence is synthesized)
ccagccactgtgtccgcagcaacaacatctgccacaagtgttcccttcgctgcaacagccacagccaaccagatacccataatatctgccgaacatctgactagccacaagtatgttacc

SEQ ID NO: 433820 - DNA, 120 bp, Artificial Sequence
  ENSG00000152601_25 (sequence is synthesized)
cagatgtagaattttcatcactaaacaatcatgctaaagaggaaaggacagtgtgcttggttagagtaaaggacgaggtcattagccatattgtatatatcgtcaagcaacacacacaaa

SEQ ID NO: 433821 - DNA, 120 bp, Artificial Sequence
  ENSG00000152601_26 (sequence is synthesized)
cggaaatccactgcacactgttgcctatacactttgtacatttaattgatatttgtgctgaggtgatattcctgtctaaaagaacaacattgtctttcttttctagcacagagttatgca

SEQ ID NO: 433822 - DNA, 120 bp, Artificial Sequence
  ENSG00000152601_27 (sequence is synthesized)
ttcaaagatgcatacctagttagtttcctatatattcatgccatcttgaaaagacagactatggtgtaaccatgattctattatgtattggtacgtctgtagaccaagatataatttttt

SEQ ID NO: 433823 - DNA, 120 bp, Artificial Sequence
  ENSG00000152601_28 (sequence is synthesized)
aaaaataagtttatttctttcaaggtttacaaataacaaaggtgcaccttgtatttaaaattgccattatagatgagagcgtgcatgcacagtcatttttgtttaagagtaatattttta

SEQ ID NO: 433824 - DNA, 120 bp, Artificial Sequence
  ENSG00000152601_29 (sequence is synthesized)
atgtaatagattgtaagacgtggtgagggagggatctgacagagatgaatgtgccaagcaaaaccacaactgtgtatattttaaagcacatcatggctttaagtaccatgttgttaagga

SEQ ID NO: 433825 - DNA, 120 bp, Artificial Sequence
  ENSG00000152601_30 (sequence is synthesized)
ttctcatgaagtgccatagactgtacatcaaattagagtattatttcttcagtgttattgttttcagagccacattttgttgcatatttgctagtactaatcagtcaaagggcaccattc

SEQ ID NO: 433826 - DNA, 120 bp, Artificial Sequence
  ENSG00000152601_31 (sequence is synthesized)
tttttttttttttttgaaaccaaagctgtctcagaaatggccaatttaactttacagtaacaatagacagcacaacacaaactctctcaatacagataaactcacacatactggagatat

SEQ ID NO: 433827 - DNA, 120 bp, Artificial Sequence
  ENSG00000152601_32 (sequence is synthesized)
atatataatagatatatataaaattattttaatgcattgtagtgtaatatttatgcatactatactgtataacatgttattcaaaagggattgccatttctgagacacagtaacaaaaaa

SEQ ID NO: 433828 - DNA, 120 bp, Artificial Sequence
  ENSG00000152601_33 (sequence is synthesized)
atgaggaaattattttgcttctatttatagcctctgtcaaaagtcaaaagactataaatgctttgcaaaaatggtttcacgtttgcttaaatgcttcatcacagtcacattcaaaatagt

SEQ ID NO: 433829 - DNA, 120 bp, Artificial Sequence
  ENSG00000152601_34 (sequence is synthesized)
gactctaaacaaagaagaaagcagcactgtcatcagatgcatgataaaccaaaatatgaaaatgggaaatgtttaattaacctagtaattgggtgggttaagtacatgggtgaattttat

SEQ ID NO: 433830 - DNA, 120 bp, Artificial Sequence
  ENSG00000152601_35 (sequence is synthesized)
atgtgatttttgttttgttttgttttgttcagattaactgcttatagccttagaaagccttttacaaaattaaaaaaaaaatagatgtgcattcagtttttaagaatggaatcatccaaa

SEQ ID NO: 433831 - DNA, 120 bp, Artificial Sequence
  ENSG00000152601_36 (sequence is synthesized)
ggaattcctttttttgaggtttggatgttgcagctagtaaaggatatttttgctctgttcagcagttctaaaaattgctgaagtaggggccaggtcactggtagttatagtatggaatgg

SEQ ID NO: 433832 - DNA, 120 bp, Artificial Sequence
  ENSG00000152601_37 (sequence is synthesized)
gagaagtgaaagttcagttatagaactttccatacttccaagtttactgcaagtttttatgcttgagagagatgctttctaatataagactgatgtgttgattttactgattgtactgta

SEQ ID NO: 433833 - DNA, 120 bp, Artificial Sequence
  ENSG00000152601_38 (sequence is synthesized)
catctattaaagccttagattattacattacgggttggaacccataccaatgtaatttcaatcgtgttaagaaagtaatggtgacttcacatgttattgtagttagttacattatagaat

SEQ ID NO: 433834 - DNA, 120 bp, Artificial Sequence
  ENSG00000152601_39 (sequence is synthesized)
tcttgttaaaatgtagtttttcatttcctacatttattagattttcattttctattaacaattgaataccatttcagtttatagacttgttttattagattttaccaatgaatttttcaa

SEQ ID NO: 433835 - DNA, 120 bp, Artificial Sequence
  ENSG00000152601_40 (sequence is synthesized)
tgaatttttcaaaatacaaaaaaaagtagtttttccttcataacatactcagttttgaattacatgtagtgtcacatgaatattcgtattgttaactaaatgatttatattttactgatt

SEQ ID NO: 433836 - DNA, 120 bp, Artificial Sequence
  ENSG00000152601_41 (sequence is synthesized)
taatattacagtgtaagaatgtcagtcattgttagttcttgtctagttttcattaaaagaacaaagatcttttatatggatatcttataaatatataatcattgctaagtaagaagttaa

SEQ ID NO: 433837 - DNA, 120 bp, Artificial Sequence
  ENSG00000152601_42 (sequence is synthesized)
gttgttgctatcgcaacaatcctggcagacaattgagtaatattttgatgatttattttgtttgtaattagttattataagaagatctagatcctagatattagaataaaatttattttc

SEQ ID NO: 433838 - DNA, 120 bp, Artificial Sequence
  ENSG00000152601_43 (sequence is synthesized)
tactgtatccatttcaaatgttaaaatattgtttaatatttttgaaatccctgagtatcaggccttgttataaataagctgcataatcaataaatagaacaagggactttttgttgataa

SEQ ID NO: 433839 - DNA, 120 bp, Artificial Sequence
  ENSG00000152601_44 (sequence is synthesized)
tccaaatactcaaagtttacgtaatgaaaattatagcgtgtgtgcaaactcttgagggttgattatgctgcaatttagcatgttggaacgtctagggagaaggttgactttttgcacttc

SEQ ID NO: 433840 - DNA, 120 bp, Artificial Sequence
  ENSG00000152601_45 (sequence is synthesized)
tgtatatagtcaaaagagagaaacctgtataatagtaagatcttattttgaataaaaacgtctataattacaaggagttttgttaaggctaatacaatgacagactgagcaaaattgctt

SEQ ID NO: 433841 - DNA, 120 bp, Artificial Sequence
  ENSG00000152601_46 (sequence is synthesized)
gcaaaagtggcacagagttagcactccataccccttcaaacatgttgctttgctttcttgtggacagcttgtagtttgccaggattttttcagctggaaagatacgccatcctttcaaac

SEQ ID NO: 433842 - DNA, 120 bp, Artificial Sequence
  ENSG00000152601_47 (sequence is synthesized)
cctcatgactgacaaaaactccatggggccaaatctgcctgaagatcattaccaaaaatagcaggtacttctaccattaaggtgaaatcatggatcagatattccttacatttttcaaaa

SEQ ID NO: 433843 - DNA, 120 bp, Artificial Sequence
  ENSG00000152601_48 (sequence is synthesized)
ctactgcatgtttaaaacttcaacaaaaaaagagagaaagaactatactaagaacatatattattcagatcagtttctgccaatttcagtggtttattgttcacaaaaaaatcttcaaaa

SEQ ID NO: 433844 - DNA, 120 bp, Artificial Sequence
  ENSG00000152601_49 (sequence is synthesized)
caagtattgactttcacaaaatttaaatcataaacaggcaaaccaaacagcacactgtagctatagttgttatgtgattgttttttaattgctgtaggatcctgttctttcagcaggtga

SEQ ID NO: 433845 - DNA, 120 bp, Artificial Sequence
  ENSG00000152601_50 (sequence is synthesized)
aaaataaaacgcagttcaaatttcatggttttaattttcaactcagaagcactcaaaaatgcaaaatgtgataatgggcacttgtttaaaagaattagtgtatccagccttcactccagc

SEQ ID NO: 433846 - DNA, 120 bp, Artificial Sequence
  ENSG00000152601_51 (sequence is synthesized)
tggttaaaaatgttgcacttatcagcaaccctaccactttcatctgctgaaaggacaaatgtgcttggttttactattatgtaatcacaacttactttctgcttgtagttgcttaaaatt

SEQ ID NO: 433847 - DNA, 120 bp, Artificial Sequence
  ENSG00000152601_52 (sequence is synthesized)
atgtattttgtcttgggctgcaatttgttttatgcttattttattattactgcagtagttgactttgctgtatggaaaaataaagtgaaattgccctaataaaacttctctttcttaagt

SEQ ID NO: 433848 - DNA, 120 bp, Artificial Sequence
  ENSG00000152601_53 (sequence is synthesized)
acctttggtagaactattatgatggattcaatacaatccatctatggtgcaaatcaatgataaagaactctcatgcgtctaccatgtatgactgtagaattgctggtgtaagcagaacta

SEQ ID NO: 433849 - DNA, 120 bp, Artificial Sequence
  ENSG00000152601_54 (sequence is synthesized)
tagcagagcaaatttcaacatgcccttggccacctgggttgtaggggacactttactttttgcattgtgctgtgaccatttcatgcataatcttggatcttcatactatttgacaaccaa

SEQ ID NO: 433850 - DNA, 120 bp, Artificial Sequence
  ENSG00000152601_55 (sequence is synthesized)
aagaaagaaaagggaatggatatatatatacacacatatattatatctacatatacatacatatgtatatgcctacagtacattagcaatgctggaaatagctgatgccacaaaatgcag

SEQ ID NO: 433851 - DNA, 120 bp, Artificial Sequence
  ENSG00000152601_56 (sequence is synthesized)
cctgcatgcatgcagaagtttatagctggcccttcatctgcatcgattggtgttgaaggtccttggtatgtttcgacagccccatccttgatgcttctacactgttgggtgcaacatcct

SEQ ID NO: 433852 - DNA, 120 bp, Artificial Sequence
  ENSG00000152601_57 (sequence is synthesized)
gtcctgcagcagcaggaaaaatggtatgagaagcttcattatgcttggagcacattttcgtgccatttgccaatgctgtaaaattgtgtaaaaatgtcagctgagaactggaaataaaac

SEQ ID NO: 433853 - DNA, 120 bp, Artificial Sequence
  ENSG00000152601_58 (sequence is synthesized)
agggacatattaatatacacgccagactgtggattgtagtatgttgaattagcctaagatgtctaaattgaaagaacagcaacaaaatgcctttgtgtatctgatttcattattctccca

SEQ ID NO: 433854 - DNA, 120 bp, Artificial Sequence
  ENSG00000152601_59 (sequence is synthesized)
acaacattgctgaaatgggattagtatcattttatagaagagacttaagcatagagtaatgagttgctttgctcagggtcacacagccagtaaatggatctctggggctagcacccgtgt

SEQ ID NO: 433855 - DNA, 120 bp, Artificial Sequence
  ENSG00000152601_60 (sequence is synthesized)
catcagtcctctgacagtctcaatccattgtgctgcctctctcaggttagcaggcattaatttcaggttgaagaatcaagctacaaatccgaagttcttaactttgggaactattgaaat

SEQ ID NO: 433856 - DNA, 120 bp, Artificial Sequence
  ENSG00000152601_61 (sequence is synthesized)
aagtcaactctatattggtttcttattgtattttctctcaagttctctaattctcttgcccatttaaaatacaataaaaggtgtcatcaggattcagaaatatgttctgaagtaaactta

SEQ ID NO: 433857 - DNA, 120 bp, Artificial Sequence
  ENSG00000152601_62 (sequence is synthesized)
ggctcttacctagttcttttgaattactgctttataattcttacctggtatttttaatttggaaaaaaaaagttagacaccctaatttgaacgaaaatgttagaaatttggttgcacaaa

SEQ ID NO: 433858 - DNA, 120 bp, Artificial Sequence
  ENSG00000152601_63 (sequence is synthesized)
aataggcaagacatttccttatctgatttctggatgattactaagtaactgaaaccacgggggtgcgtgtgtgtgtgtgtgtgtaggccaacaaaaagggcttctttcaattactgctct

SEQ ID NO: 433859 - DNA, 120 bp, Artificial Sequence
  ENSG00000152601_64 (sequence is synthesized)
gcatgaatttttgatagttttacttatttcctaaaagctggtaacatttatagaatagtatttaacatgaagattttaaagttagttgctactttggcatttaagtttacattaacttac

SEQ ID NO: 433860 - DNA, 120 bp, Artificial Sequence
  ENSG00000152601_65 (sequence is synthesized)
tgttatgttgaccagataaggactatcacctcacagctgaatttcacttttctttaaaaatttaatattaaaatgttttcatctcttaattgttggcttgcttgcatggatcattcatta

SEQ ID NO: 433861 - DNA, 120 bp, Artificial Sequence
  ENSG00000152601_66 (sequence is synthesized)
cagccaaccagccccatccttgatgcttctacactgttgggtgcaacatcctgtcctgcagcagcaggaaaaatgatacccataatatctgccgaacatctgactagccacaagtatgtt

SEQ ID NO: 433862 - DNA, 120 bp, Artificial Sequence
  ENSG00000152601_67 (sequence is synthesized)
ccgcctctgaaaaaaaaatgtgagagcagtcactcaggaaatgttgtttaaggggaaccttctggatccttttcatggcaccatggcaagaagaagctgtatcttatctatggaagataa

SEQ ID NO: 433863 - DNA, 120 bp, Artificial Sequence
  ENSG00000152601_68 (sequence is synthesized)
gtgacattgagtggttacacagaagacctgcttctacaacatttggaaacattgtgaaacattactattcagttgctatttttccatctcaaaatatttttttttagttgctgctcactt

SEQ ID NO: 433864 - DNA, 120 bp, Artificial Sequence
  ENSG00000152601_69 (sequence is synthesized)
atggccacagaacagtccctttttgagtaaagcagcaaggttgcttaatgacatgctatgtggttaacaagattcaactgccacatcaaggactttaaataatttcaagattttaaatgt

SEQ ID NO: 433865 - DNA, 120 bp, Artificial Sequence
  ENSG00000152601_70 (sequence is synthesized)
atttatgaaatgaactcattacagcagctaatcaatgcaaactttgtcctttttctttgtctttctaagagaaactgaatttaatttaaatttaaattacagtgtctaaaacttggtaaa

SEQ ID NO: 433866 - DNA, 120 bp, Artificial Sequence
  ENSG00000152601_71 (sequence is synthesized)
atattttaaatttgaataagaggaaaaaaaaaacatgaatttatttatgatggagcttcatacccaggacagtagcttcttaaatgttagtaaaataattatgttaagcattaaaacaat

SEQ ID NO: 433867 - DNA, 120 bp, Artificial Sequence
  ENSG00000152601_72 (sequence is synthesized)
ggaaggtgtgagtccctctgagtcgagcggcgcgcgggtcttcccggcggctcccgcatccctggccccggggctgccatcccgcccggttttcatctgggccaaatatgtgcacgcaaa

SEQ ID NO: 433868 - DNA, 120 bp, Artificial Sequence
  ENSG00000152601_73 (sequence is synthesized)
ggttaattctctgcttgctacccataaattacgcatgacatgtttagctgggctgccttatatggagagtgctgtatttcaggccagtttgccttttgccaagtttacagggcggaagac

SEQ ID NO: 433869 - DNA, 120 bp, Artificial Sequence
  ENSG00000152601_74 (sequence is synthesized)
aactgcatgttgggtaaattcaaaacccacatgctcgtcctcttgcagtggaataagtcacatctgatggacattttctgtgcttatagcatagtaatgaacgtctgacaggcgcgacct

SEQ ID NO: 433870 - DNA, 120 bp, Artificial Sequence
  ENSG00000152601_75 (sequence is synthesized)
ttcataagacaacccacactattggctttctgcccagaatattgctgcaacactatctgtgattggttatctctctatcatgcattgcttcacaaggggaaacggcccctttttttaata

SEQ ID NO: 433871 - DNA, 120 bp, Artificial Sequence
  ENSG00000152601_76 (sequence is synthesized)
attttcacagtttccccgcgccgcttcattgttcggactccggcgggtctgcccgtggctgaaggaggaagtgcgaggaggtgctcgccggccgcggttctcccgggcaggggcgggccg

SEQ ID NO: 433872 - DNA, 120 bp, Artificial Sequence
  ENSG00000152601_77 (sequence is synthesized)
ctcgcggtagttggtttcgcgtccctcagcacctcctgcccgggggaaggcgggagggtgagccgcagccgctcctgcgcccttccctgccgcgggctctgcggacgctgtcacggcaca

SEQ ID NO: 433873 - DNA, 66 bp, Artificial Sequence
  ENSG00000152601_78 (sequence is synthesized)
ggaaaaaaaataatgtaactagagaagagagttgagcagagaactgagctctttgaagtgctggta

SEQ ID NO: 433874 - DNA, 120 bp, Artificial Sequence
  ENSG00000152601_79 (sequence is synthesized)
gagagttgagcagagaactgagctctttgaagtgctggtagtttgtctcaacccatgaagcagcttaacaagcaactataactaagcatagaggttggtactaagaagtgcctttcctga

SEQ ID NO: 433875 - DNA, 120 bp, Artificial Sequence
  ENSG00000152611_0 (sequence is synthesized)
aaggtggcttgggagggaccagttttcctagatgcaggagacagcgtccatagtttcagttcgaagcaactggtggcaaaaggttagcatttaagatggcagggacagcgcgccatgacc

SEQ ID NO: 433876 - DNA, 120 bp, Artificial Sequence
  ENSG00000152611_1 (sequence is synthesized)
gagagatggcgatccaggccaagaaaaagctcaccacggccaccgaccccattgaaagactccgactgcagtgcctggccaggggctctgctgggatcaaaggacttggcagagtgttta

SEQ ID NO: 433877 - DNA, 120 bp, Artificial Sequence
  ENSG00000152611_2 (sequence is synthesized)
gaattatggatgacgataataatcgaacccttgattttaaagaatttatgaaagggttaaatgattatgctgtggtcatggaaaaagaagaggtggaagaacttttccggaggtttgata

SEQ ID NO: 433878 - DNA, 120 bp, Artificial Sequence
  ENSG00000152611_3 (sequence is synthesized)
aagatggaaatggaacaatagacttcaatgaatttcttctcacattaagacctccaatgtccagagccagaaaagaggtaatcatgcaagcttttagaaagttagacaagactggagatg

SEQ ID NO: 433879 - DNA, 120 bp, Artificial Sequence
  ENSG00000152611_4 (sequence is synthesized)
caatcgaagaccttcgtgaagtatataatgcaaaacaccacccaaagtaccagaatggggaatggagtgaggaacaagtatttaggaaatttctggataactttgattcaccctatgaca

SEQ ID NO: 433880 - DNA, 120 bp, Artificial Sequence
  ENSG00000152611_5 (sequence is synthesized)
aagatggattggtgacccctgaggagttcatgaactactatgcaggtgtgagcgcatccattgacactgatgtgtacttcatcatcatgatgagaaccgcctggaagctttaagcacatg

SEQ ID NO: 433881 - DNA, 120 bp, Artificial Sequence
  ENSG00000152611_6 (sequence is synthesized)
acctggggaccaggccctgggacagccatgtggctccaaatgactaaatgtcagctcaaaaaccagaatcgtatttgatttcacactcatcctaatgtttttttctgtgtcaaaatattg

SEQ ID NO: 433882 - DNA, 120 bp, Artificial Sequence
  ENSG00000152611_7 (sequence is synthesized)
cattttctggggccaaaaaacaggcagaaataaaagacattgagtagccaactgtgagtttgccttgcctaagactgtttcctttgttctaaaataggacttaaataaaatgagctctgt

SEQ ID NO: 433883 - DNA, 120 bp, Artificial Sequence
  ENSG00000152611_8 (sequence is synthesized)
gagaaaaggcagaaccagagtagagattgacagtgagctgagccaatcaggctgtgaatctgcagcagtgatcccaggtcctccaattaatactaagagagtggaccagggcccctgagg

SEQ ID NO: 433884 - DNA, 120 bp, Artificial Sequence
  ENSG00000152620_0 (sequence is synthesized)
gcacttaacctctgcccgtccggcgcgaagttagaggcccgggcggcgcggacggcgcgcactcccggcggtagggagctgaggcaaggggcccgagcccaagcccgcggccgcggcccg

SEQ ID NO: 433885 - DNA, 80 bp, Artificial Sequence
  ENSG00000152620_1 (sequence is synthesized)
gcccacgatgacttgctaccgaggcttcttgctgggcagctgttgtcgcgtggcgggcggccgggcggcggcgctgcggg

SEQ ID NO: 433886 - DNA, 120 bp, Artificial Sequence
  ENSG00000152620_2 (sequence is synthesized)
cggcggcacctggggcaggggcagccgcgcgagctggcgggctgtggcagccgcgcggacggcggcttccgcccctcccgggtggtggtggtggccaaaaccacccggtacgagttcgag

SEQ ID NO: 433887 - DNA, 120 bp, Artificial Sequence
  ENSG00000152620_3 (sequence is synthesized)
ccggtacgagttcgagcagcagcggtaccgttacgcggagctctcggaggaggacctgaagcagctgcttgcattgaaaggctctagttacagtggacttcttgaacgacatcatattca

SEQ ID NO: 433888 - DNA, 120 bp, Artificial Sequence
  ENSG00000152620_4 (sequence is synthesized)
caccaaaaatgtagaacatattatagatagtttacggaatgagggaattgaggttcgtctagtaaagaggagagaatatgatgaagagactgttcgatgggcagatgctgtcatagctgc

SEQ ID NO: 433889 - DNA, 120 bp, Artificial Sequence
  ENSG00000152620_5 (sequence is synthesized)
aggaggtgatggcacaatgctgctggcagcgagtaaagtcttggacagacttaaaccagttataggggtaaacactgatccagaacggtctgagggtcatttatgcctgcccgttcgata

SEQ ID NO: 433890 - DNA, 120 bp, Artificial Sequence
  ENSG00000152620_6 (sequence is synthesized)
tacacattcctttccagaagccttacagaagttctatcgtggtgagttcaggtggttgtggaggcagagaatcaggttataccttgaagggactggcataaaccctgtacctgtggacct

SEQ ID NO: 433891 - DNA, 120 bp, Artificial Sequence
  ENSG00000152620_7 (sequence is synthesized)
tcacgagcagcagctaagcttgaatcagcacaatagagcccttaacattgaaagagctcatgatgaaaggtctgaggcttcaggaccccaacttctgccagtgagagcactaaatgaagt

SEQ ID NO: 433892 - DNA, 120 bp, Artificial Sequence
  ENSG00000152620_8 (sequence is synthesized)
cttcattggggagagtctgtcatccagggcttcctactatgagatttcagttgatgatggtccatgggaaaaacagaagagttcagggctcaatttgtgtactggaacaggatcaaaggc

SEQ ID NO: 433893 - DNA, 120 bp, Artificial Sequence
  ENSG00000152620_9 (sequence is synthesized)
ctggtcattcaatattaacagggttgcaactcaggctgtagaagatgttttaaatattgcaaaacgacaaggaaatttgagtcttccattgaacagagaattggtagagaaagtaacaaa

SEQ ID NO: 433894 - DNA, 120 bp, Artificial Sequence
  ENSG00000152620_10 (sequence is synthesized)
tgaatataatgaatcactgctctacagtccggaagaaccaaaaatacttttcagtattcgagaaccaatagcaaatagagttttctcaagcagtcgtcagcgttgtttctcctcaaaggt

SEQ ID NO: 433895 - DNA, 120 bp, Artificial Sequence
  ENSG00000152620_11 (sequence is synthesized)
ttgtgttcgttctcgttgttgggatgcctgtatggttgtggatggaggaacttcttttgagtttaatgatggtgcaattgcttcgatgatgatcaataaagaagatgagcttcgaactgt

SEQ ID NO: 433896 - DNA, 120 bp, Artificial Sequence
  ENSG00000152620_12 (sequence is synthesized)
gcttcttgaacagtgaaggatttcctcatgacaaattttgattactggcgagaatatttttacttcagaaacagactaccagtcgtaaagtgacattttttggttattgttgagactgct

SEQ ID NO: 433897 - DNA, 120 bp, Artificial Sequence
  ENSG00000152620_13 (sequence is synthesized)
tgcccgtgggctcagaagtgagatttgcattattcttctgttggattctgatagaaaaaaagacattcactgtataagaaaatggatggactgaaccaattagaattgataccagtgaaa

SEQ ID NO: 433898 - DNA, 120 bp, Artificial Sequence
  ENSG00000152620_14 (sequence is synthesized)
tttttatattgcttacaattggtaaccaagagtgctgatacctttttaaatttagaggggcaggcttaaataaaggactaaatatttaggatttgaaacttaactgtataagtgtgtttt

SEQ ID NO: 433899 - DNA, 120 bp, Artificial Sequence
  ENSG00000152620_15 (sequence is synthesized)
ccttccctttcctcctaattgtgggattgtcagaactgaacacatatcatttgattagtgcatattttttatagtacctgaaaaccaagattttgaaaaaattttcaagacagagaattt

SEQ ID NO: 433900 - DNA, 120 bp, Artificial Sequence
  ENSG00000152620_16 (sequence is synthesized)
gtgctaataattttctaatttcggaacacgatgatgttatgactattgatttaaaaatttcaaataataatttttgaaattatagatgaatgctttcatttgagtttcattctgtaattc

SEQ ID NO: 433901 - DNA, 120 bp, Artificial Sequence
  ENSG00000152620_17 (sequence is synthesized)
agcagttctgggtgaaatacagatagcaaaacaaatcatgatgctgttacaaatgtattagttatccaataagtgttttaagtcaatttttttaaaatgatatgagtcttacaggtttct

SEQ ID NO: 433902 - DNA, 120 bp, Artificial Sequence
  ENSG00000152620_18 (sequence is synthesized)
tccatctttaaaatgctcaaacatggattcagggactaaaaggatgaactgattagacattttctattaggagtttggtaaaatattgtaaaaatatcttcacctgtgttaggagtatta

SEQ ID NO: 433903 - DNA, 120 bp, Artificial Sequence
  ENSG00000152620_19 (sequence is synthesized)
tcagaaagaatggattctttaataaatatgtaaaacacagtagttttggaattgccttccttagtattgtggttttcacctagcttatattccaagatttacagaatagcttttaggata

SEQ ID NO: 433904 - DNA, 120 bp, Artificial Sequence
  ENSG00000152620_20 (sequence is synthesized)
agatgttaggactttttttttttccccatgagaattcctttatttttggaggaaattattatctaattattgatctacttataagtaatcctagaatttttgccaaaagatcctgtcgtt

SEQ ID NO: 433905 - DNA, 120 bp, Artificial Sequence
  ENSG00000152620_21 (sequence is synthesized)
gcataatcaaacagttggtattctcgtgccgttgttcaaagtcatgtgtttctttcatttggtgctgaaaatttctgttcaatcattgacaaatatttattgaacacccactctgtgcca

SEQ ID NO: 433906 - DNA, 120 bp, Artificial Sequence
  ENSG00000152620_22 (sequence is synthesized)
tgtaaaactatgtcaggtgctggatatgttgatgaatgaaacagactctatccttatacaatttgagtcttgtgggctcagaagtaaattctgtgaaagctggacggatagtcgaattga

SEQ ID NO: 433907 - DNA, 120 bp, Artificial Sequence
  ENSG00000152620_23 (sequence is synthesized)
gtgctcttagttttgccaatatttaacatgttgttcttatcaattttttaaaataaatgttaatgtacaaagttaatctaggttttgatgtatatccagagaatcaatttttcttaaagt

SEQ ID NO: 433908 - DNA, 120 bp, Artificial Sequence
  ENSG00000152620_24 (sequence is synthesized)
atctgcgtagacattcatagcaaagaatttatgacatatcagatagaaatacattaaaatgtagtgttttcccagagattgatctggctttttttttttgatatacataagataccactt

SEQ ID NO: 433909 - DNA, 120 bp, Artificial Sequence
  ENSG00000152620_25 (sequence is synthesized)
acataagataccactttataaagaagctccatactatagaacctcccctaacaggcttaaaataccttctttttttttttttttttttttgagaacggagtcttgctttgtcacccaggc

SEQ ID NO: 433910 - DNA, 120 bp, Artificial Sequence
  ENSG00000152620_26 (sequence is synthesized)
ccttcttaaaggaaaaatgccaactccatccttaatctcaaggaaatctgattgtccaaatagatctgttaatatgtaacatattaataggtaacttgctgtgtaaaattataagccata

SEQ ID NO: 433911 - DNA, 120 bp, Artificial Sequence
  ENSG00000152620_27 (sequence is synthesized)
ttttaaaaggttttaaaaatacttattgtgctccatttgtgatataatttctaacatttctgctctgtgatgggggtttatttgtaagaataagaggcaaaggaatgttagcatagcaaa

SEQ ID NO: 433912 - DNA, 120 bp, Artificial Sequence
  ENSG00000152620_28 (sequence is synthesized)
aatgtgtttgaatgagttaaccttttaatcgcaaccctatgtgaataaaattactccactgttacctcttctttttaacatttcttatttccctctcaaggggtcattatttgaaaacta

SEQ ID NO: 433913 - DNA, 120 bp, Artificial Sequence
  ENSG00000152620_29 (sequence is synthesized)
gttttcacaaaatgttatgtttcagaagtgtttccccactgctgtgtattattattctgtgccctgttgacttcattcactgttaacatttgacatagaatgattagttattaaatcagg

SEQ ID NO: 433914 - DNA, 120 bp, Artificial Sequence
  ENSG00000152620_30 (sequence is synthesized)
gtgaagtgcttacctggtcagtgtaggctcttcagataattttgacttaatatttttgatactccttgtgcatttacattcatggcccctgtacattaaatcatattacatgttttacta

SEQ ID NO: 433915 - DNA, 120 bp, Artificial Sequence
  ENSG00000152620_31 (sequence is synthesized)
atcgcctaacagaattctacctctttctcaggccgcagccaatggcgcggcccctcggatccggagccgccgcgggctctgattggccgatagagttagcctgggggcgggagaagagcg

SEQ ID NO: 433916 - DNA, 120 bp, Artificial Sequence
  ENSG00000152620_32 (sequence is synthesized)
cttcattggggagagtctgtcatccagaatgtcttattcttgggctgtagcagtggacaatttaagaagaagtatacccactctaaagggactggcttcctactatgagatttcagttga

SEQ ID NO: 433917 - DNA, 120 bp, Artificial Sequence
  ENSG00000152620_33 (sequence is synthesized)
tgaacacaatattattttaatttaagaatgctttcctttttgtataatattttttgctgagcaaagcacaagctatatctagctcagtatcttggactttatgggttcttgatagagttt

SEQ ID NO: 433918 - DNA, 120 bp, Artificial Sequence
  ENSG00000152620_34 (sequence is synthesized)
gacttaatttaagttacttgggagattttgtacaagcacattaggtgtttccgttataattgaaaagagaataaatattcaaatctgtcattgataaggaagctataggctttaggtgtt

SEQ ID NO: 433919 - DNA, 120 bp, Artificial Sequence
  ENSG00000152620_35 (sequence is synthesized)
aggaagctataggctttaggtgtttctgatataatttattcatggaataactggtaactagtttttattaactatttaatttggttaaattattataatgtctactctttaatttattct

SEQ ID NO: 433920 - DNA, 120 bp, Artificial Sequence
  ENSG00000152620_36 (sequence is synthesized)
attatgcaggcgtgagtgaaacgaataaacaaacaaacaaaacccactagctggggcctccatttcttccccgcccacctttctcccgcgtggggtctcccgtttcccaatcgccacgct

SEQ ID NO: 433921 - DNA, 120 bp, Artificial Sequence
  ENSG00000152620_37 (sequence is synthesized)
gaggtgacaatcaagctgttggccaggacagcagtatataaagacgactggaactggagaacacacttttttagctcatcacatggcttttggcagaaggcttcagttcctcaccatgtt

SEQ ID NO: 433922 - DNA, 120 bp, Artificial Sequence
  ENSG00000152620_38 (sequence is synthesized)
acttttttagctcatcacatggcttttggcagaaggcttcagttcctcaccatgttggtctctccaaagggttgttcatgttatctcttcctctagagcagccatgcatgtcatttgctg

SEQ ID NO: 433923 - DNA, 80 bp, Artificial Sequence
  ENSG00000152642_0 (sequence is synthesized)
gcagtggttcttgggagtggcgaagcgggtcctgccccgctgtcagctgcggcccccggcgccgggcgggggtggccgcg

SEQ ID NO: 433924 - DNA, 120 bp, Artificial Sequence
  ENSG00000152642_1 (sequence is synthesized)
ccgctgcgggcaaggctgaacaggcggaggtgggcagccggccagggaagcacggtccaggcggctacattcggcccggccatggcagcggcgcccctgaaagtgtgcatcgtgggctcg

SEQ ID NO: 433925 - DNA, 120 bp, Artificial Sequence
  ENSG00000152642_2 (sequence is synthesized)
gggaactggggttcagctgttgcaaaaataattggtaataatgtcaagaaacttcagaaatttgcctccacagtcaagatgtgggtctttgaagaaacagtgaatggcagaaaactgaca

SEQ ID NO: 433926 - DNA, 120 bp, Artificial Sequence
  ENSG00000152642_3 (sequence is synthesized)
gacatcataaataatgaccatgaaaatgtaaaatatcttcctggacacaagctgccagaaaatgtggttgccatgtcaaatcttagcgaggctgtgcaggatgcagacctgctggtgttt

SEQ ID NO: 433927 - DNA, 120 bp, Artificial Sequence
  ENSG00000152642_4 (sequence is synthesized)
gtcattccccaccagttcattcacagaatctgtgatgagatcactgggagagtgcccaagaaagcgctgggaatcaccctcatcaagggcatagacgagggccccgaggggctgaagctc

SEQ ID NO: 433928 - DNA, 120 bp, Artificial Sequence
  ENSG00000152642_5 (sequence is synthesized)
atttctgacatcatccgtgagaagatgggtattgacatcagtgtgctgatgggagccaacattgccaatgaggtggctgcagagaagttctgtgagaccaccatcggcagcaaagtaatg

SEQ ID NO: 433929 - DNA, 120 bp, Artificial Sequence
  ENSG00000152642_6 (sequence is synthesized)
gagaacggccttctcttcaaagaacttctgcagactccaaattttcgaattaccgtggttgatgatgcagacactgttgaactctgtggtgcgcttaagaacatcgtagctgtgggagct

SEQ ID NO: 433930 - DNA, 120 bp, Artificial Sequence
  ENSG00000152642_7 (sequence is synthesized)
gggttctgcgacggcctccgctgtggagacaacaccaaagcggccgtcatccgcctgggactcatggaaatgattgcttttgccaggatcttctgcaaaggccaagtgtctacagccacc

SEQ ID NO: 433931 - DNA, 120 bp, Artificial Sequence
  ENSG00000152642_8 (sequence is synthesized)
ttcctagagagctgcggggtggccgacctgatcaccacctgttacggagggcggaaccgcagggtggccgaggccttcgccagaactgggaagaccattgaagagttggagaaggagatg

SEQ ID NO: 433932 - DNA, 120 bp, Artificial Sequence
  ENSG00000152642_9 (sequence is synthesized)
ctgaatgggcaaaagctccaaggaccgcagacttctgctgaagtgtaccgcatcctcaaacagaagggactactggacaagtttccattgtttactgcagtgtatcagatctgctacgaa

SEQ ID NO: 433933 - DNA, 120 bp, Artificial Sequence
  ENSG00000152642_10 (sequence is synthesized)
agcagaccagttcaagagatgttgtcttgtcttcagagccatccagagcatacataaagtgaatcatgcaacgtgttgggggaagttctgcctttctgatcaatcttttgggttcacgtg

SEQ ID NO: 433934 - DNA, 120 bp, Artificial Sequence
  ENSG00000152642_11 (sequence is synthesized)
gaaaccaggacttggcaacatgatgtttgactgtaatctcatcacggatatgtatgaatttttacaggttcgtttttgaattgtgagaggcagttcattagcaaagatgtactgggcagt

SEQ ID NO: 433935 - DNA, 120 bp, Artificial Sequence
  ENSG00000152642_12 (sequence is synthesized)
aactaaacacacatgcaaacatgtgaatggtggtttattcctcattctgtggatgtttctatgagccaaaatttgatgtctttttttcaaaattgcttatgaaatttccacacaatcgta

SEQ ID NO: 433936 - DNA, 120 bp, Artificial Sequence
  ENSG00000152642_13 (sequence is synthesized)
gcttataagattggaacgatctcagccaaatattttaggtgtaattcatatgtatttgagtggaggattttttttctcatttttctagtgttaaattttaaccagcattaacatggtaga

SEQ ID NO: 433937 - DNA, 120 bp, Artificial Sequence
  ENSG00000152642_14 (sequence is synthesized)
gtggaggagtgagtgtgttcaaagatcaacatatttaacttttaaacactatctcaaagccagcataattaactactttgattgtgggctgacctttgtttttttaacaatcaggcattt

SEQ ID NO: 433938 - DNA, 120 bp, Artificial Sequence
  ENSG00000152642_15 (sequence is synthesized)
ttaattagataatccactcatgtatttccccctcactgcagttgtctgcatttttagcctcttttctcttcgttagttgtcagaatatgccttcgtcaaggctcagaggtaacaagacag

SEQ ID NO: 433939 - DNA, 120 bp, Artificial Sequence
  ENSG00000152642_16 (sequence is synthesized)
tttatcttaaacatcacagatccactggggggtgcaaggggctactgttagtcctcttgttagatgcagtcactcctcctggtcacctagtgagcagggacagagccaggagtcaagtgc

SEQ ID NO: 433940 - DNA, 120 bp, Artificial Sequence
  ENSG00000152642_17 (sequence is synthesized)
agtgccaaggtgcatgaccctctgagaagtcactgggctgatttgacctccgactcattggttgtgcaaatgccatgtgcagcctttcctgaggccataggagggcttcctgcagctgag

SEQ ID NO: 433941 - DNA, 120 bp, Artificial Sequence
  ENSG00000152642_18 (sequence is synthesized)
atctatgcaggccatcctctcaacaagtgccactccaagggcggtcctcggtgcagcagcatcagcttcacttgtgggggggtgggggaaggggcggtctcagaaatgcaggttcccagg

SEQ ID NO: 433942 - DNA, 120 bp, Artificial Sequence
  ENSG00000152642_19 (sequence is synthesized)
tcccaccctggacttctgaaggggtgtggcatctgtgtttctgatgcttactacaatatgtgaaccactactttagaaaatctgctttaacttggtattcctctaattgtgttccctagg

SEQ ID NO: 433943 - DNA, 120 bp, Artificial Sequence
  ENSG00000152642_20 (sequence is synthesized)
aaatgactgtcccaagagccagtgattattccaggtgttccctggaaaggtcaagtgagtctgggaaacactatgtctgtacacctcttgaaggtgtcgaatgtatgtttatacatcagt

SEQ ID NO: 433944 - DNA, 120 bp, Artificial Sequence
  ENSG00000152642_21 (sequence is synthesized)
ggaacccatttttctagcctagcaagtcccaaacacattacactgaagagattttggtgaggaaacttgctggagttttcagggaacactgttctaggcttaggtgaccttaggatcact

SEQ ID NO: 433945 - DNA, 120 bp, Artificial Sequence
  ENSG00000152642_22 (sequence is synthesized)
caagtagacccttcactccctgcgagaaattaggatgaataactacctgtggcattgttggttctgaacttttacagttcaggcctgctgtgaatctttgatgaagctttaaggtgacac

SEQ ID NO: 433946 - DNA, 120 bp, Artificial Sequence
  ENSG00000152642_23 (sequence is synthesized)
tgttgtacaagatgtcagctttgctgaaacgcacattacctggaataagtgctttaattgtagaattagaatgggatttactgtactgttttaaatgagattggcttcagaatccattac

SEQ ID NO: 433947 - DNA, 120 bp, Artificial Sequence
  ENSG00000152642_24 (sequence is synthesized)
agttaccttacatagcacttgatacgtgttaaatgaacatatgaatgtaatttatatattcctagaatttaagttactttgtgagatttgggcctgtccctcaatgccagtttaggattt

SEQ ID NO: 433948 - DNA, 120 bp, Artificial Sequence
  ENSG00000152642_25 (sequence is synthesized)
ctttttttctataccttgaaatgattataaaatagattttcatgggaattttaaaaactctatccaaaacatttttggagcattttaaagccccatacacagaagtatacgaaagcacac

SEQ ID NO: 433949 - DNA, 120 bp, Artificial Sequence
  ENSG00000152642_26 (sequence is synthesized)
aaaacactccaagtttcagcagttttagcgccaccattaacccactttgcttgtctcatgaaaaatctttgttaaagtttgtacacaggtaacaaaaagttactttaaaagatatataaa

SEQ ID NO: 433950 - DNA, 120 bp, Artificial Sequence
  ENSG00000152642_27 (sequence is synthesized)
gggctgtaagctaattgtggtgtctagtaagtagcataatgagatgtgaggagttggaactttgcgtgttttgcgtattttcatctgcattcagcttcttactctgggtttgtactcgag

SEQ ID NO: 433951 - DNA, 120 bp, Artificial Sequence
  ENSG00000152642_28 (sequence is synthesized)
tgttatttctttacaaatgcccttgtaattaccactctgaagtctgctgactgtgtctcttgaacatacttaggatattctgcacattatggaaaaaggtaaattttagaagtttctgct

SEQ ID NO: 433952 - DNA, 120 bp, Artificial Sequence
  ENSG00000152642_29 (sequence is synthesized)
ctactaactgtagatatttatgactctgcgagttatctatttttataaccacctgtggtccattgttcattttaattcacatttcttatgaagtatggtaacagggagggagacacctag

SEQ ID NO: 433953 - DNA, 120 bp, Artificial Sequence
  ENSG00000152642_30 (sequence is synthesized)
attagcagctcaatttgtactacttcagccaatctgtgaatgtaaaaactacactgttgccttgctaggatccaccctcctataatatggaacaaatatctgaatgaaatccaccctagg

SEQ ID NO: 433954 - DNA, 120 bp, Artificial Sequence
  ENSG00000152642_31 (sequence is synthesized)
agacggagtcaaactaaacttgtggtttttcatttaacttttgactacagcatggccccatggcatccacaccaagagggtgttgtgatgaggtgccggtgtgcaaagggaactttagtt

SEQ ID NO: 433955 - DNA, 120 bp, Artificial Sequence
  ENSG00000152642_32 (sequence is synthesized)
tttccactggttcttatctgctagccttttacatacatgtgtactatatttgtttatagactgtaggtggatatataatttaaaagcttgatttaataaacatttaaccccctaaacttg

SEQ ID NO: 433956 - DNA, 120 bp, Artificial Sequence
  ENSG00000152642_33 (sequence is synthesized)
tatgctgtgagaagtgaggagagtggttacctttggtggtggaggtgggctggaaggggttctcgggagcttcctgaagcactggctgtgcttttctccttgatcagtgtgctggctatg

SEQ ID NO: 433957 - DNA, 120 bp, Artificial Sequence
  ENSG00000152642_34 (sequence is synthesized)
ggggtatgctcagtttgtgaaaattcttcaatccgtgcacttaggatttgtgtacttttctgtatgaatgttatggttgcataaagcattccatttaaaacaaaacaaaaagtaaagtag

SEQ ID NO: 433958 - DNA, 120 bp, Artificial Sequence
  ENSG00000152642_35 (sequence is synthesized)
tttgtccaaacattatttaaccaaagactactatcagccgttctgattttctgtccaatgctcttcaactgctgaccccaaatatgggctctttgtcctagaaaggggaatatggaagcc

SEQ ID NO: 433959 - DNA, 120 bp, Artificial Sequence
  ENSG00000152642_36 (sequence is synthesized)
ctgtctctcctttcgtcatctctttcacccaggtgtacaagagcagagcccggcattgagtattttgaagatggagccaatgtccctggtctgcccctgcctcggcatcccccaccacct

SEQ ID NO: 433960 - DNA, 120 bp, Artificial Sequence
  ENSG00000152642_37 (sequence is synthesized)
attcggcccggccatggcagcggcgcccctgaaagtgtgcatcgtgggctcggggaactggtgagcggcggcgggctggaggccggggctccgcttccaggaagcgcctctcccgggcgg

SEQ ID NO: 433961 - DNA, 120 bp, Artificial Sequence
  ENSG00000152642_38 (sequence is synthesized)
atgtatttattttttgttgagacagggtctcactgtccttcagtctggagtgcagtggccctatcctggctcactgaagcctcgacctcctgggcacatgcaattctcccgcctcagcct

SEQ ID NO: 433962 - DNA, 120 bp, Artificial Sequence
  ENSG00000152661_0 (sequence is synthesized)
aaaagcttttacgaggtatcagcacttttctttcattagggggaaggcgtgaggaaagtaccaaacagcagcggagttttaaactttaaatagacaggtctgagtgcctgaacttgcctt

SEQ ID NO: 433963 - DNA, 120 bp, Artificial Sequence
  ENSG00000152661_1 (sequence is synthesized)
ttcattttacttcatcctccaaggagttcaatcacttggcgtgacttcactacttttaagcaaaagagtggtgcccaggcaacatgggtgactggagcgccttaggcaaactccttgaca

SEQ ID NO: 433964 - DNA, 120 bp, Artificial Sequence
  ENSG00000152661_2 (sequence is synthesized)
aggttcaagcctactcaactgctggagggaaggtgtggctgtcagtacttttcattttccgaatcctgctgctggggacagcggttgagtcagcctggggagatgagcagtctgcctttc

SEQ ID NO: 433965 - DNA, 120 bp, Artificial Sequence
  ENSG00000152661_3 (sequence is synthesized)
gttgtaacactcagcaacctggttgtgaaaatgtctgctatgacaagtctttcccaatctctcatgtgcgcttctgggtcctgcagatcatatttgtgtctgtacccacactcttgtacc

SEQ ID NO: 433966 - DNA, 120 bp, Artificial Sequence
  ENSG00000152661_4 (sequence is synthesized)
tggctcatgtgttctatgtgatgcgaaaggaagagaaactgaacaagaaagaggaagaactcaaggttgcccaaactgatggtgtcaatgtggacatgcacttgaagcagattgagataa

SEQ ID NO: 433967 - DNA, 120 bp, Artificial Sequence
  ENSG00000152661_5 (sequence is synthesized)
agaagttcaagtacggtattgaagagcatggtaaggtgaaaatgcgaggggggttgctgcgaacctacatcatcagtatcctcttcaagtctatctttgaggtggccttcttgctgatcc

SEQ ID NO: 433968 - DNA, 120 bp, Artificial Sequence
  ENSG00000152661_6 (sequence is synthesized)
agtggtacatctatggattcagcttgagtgctgtttacacttgcaaaagagatccctgcccacatcaggtggactgtttcctctctcgccccacggagaaaaccatcttcatcatcttca

SEQ ID NO: 433969 - DNA, 120 bp, Artificial Sequence
  ENSG00000152661_7 (sequence is synthesized)
tgctggtggtgtccttggtgtccctggccttgaatatcattgaactcttctatgttttcttcaagggcgttaaggatcgggttaagggaaagagcgacccttaccatgcgaccagtggtg

SEQ ID NO: 433970 - DNA, 120 bp, Artificial Sequence
  ENSG00000152661_8 (sequence is synthesized)
cgctgagccctgccaaagactgtgggtctcaaaaatatgcttatttcaatggctgctcctcaccaaccgctcccctctcgcctatgtctcctcctgggtacaagctggttactggcgaca

SEQ ID NO: 433971 - DNA, 120 bp, Artificial Sequence
  ENSG00000152661_9 (sequence is synthesized)
gaaacaattcttcttgccgcaattacaacaagcaagcaagtgagcaaaactgggctaattacagtgcagaacaaaatcgaatggggcaggcgggaagcaccatctctaactcccatgcac

SEQ ID NO: 433972 - DNA, 120 bp, Artificial Sequence
  ENSG00000152661_10 (sequence is synthesized)
agccttttgatttccccgatgataaccagaattctaaaaaactagctgctggacatgaattacagccactagccattgtggaccagcgaccttcaagcagagccagcagtcgtgccagca

SEQ ID NO: 433973 - DNA, 120 bp, Artificial Sequence
  ENSG00000152661_11 (sequence is synthesized)
gcagacctcggcctgatgacctggagatctagatacaggcttgaaagcatcaagattccactcaattgtggagaagaaaaaaggtgctgtagaaagtgcaccaggtgttaattttgatcc

SEQ ID NO: 433974 - DNA, 120 bp, Artificial Sequence
  ENSG00000152661_12 (sequence is synthesized)
tggggtagatgggtggagagggaggggataagagaggtgcatgttggtatttaaagtagtggattcaaagaacttagattataaataagagttccattaggtgatacatagataagggct

SEQ ID NO: 433975 - DNA, 120 bp, Artificial Sequence
  ENSG00000152661_13 (sequence is synthesized)
ttttctccccgcaaacacccctaagaatggttctgtgtatgtgaatgagcgggtggtaattgtggctaaatatttttgttttaccaagaaactgaaataattctggccaggaataaatac

SEQ ID NO: 433976 - DNA, 120 bp, Artificial Sequence
  ENSG00000152661_14 (sequence is synthesized)
ttcctgaacatcttaggtcttttcaacaagaaaaagacagaggattgtccttaagtccctgctaaaacattccattgttaaaatttgcactttgaaggtaagctttctaggcctgaccct

SEQ ID NO: 433977 - DNA, 120 bp, Artificial Sequence
  ENSG00000152661_15 (sequence is synthesized)
ccaggtgtcaatggacttgtgctactatatttttttattcttggtatcagtttaaaattcagacaaggcccacagaataagattttccatgcatttgcaaatacgtatattctttttcca

SEQ ID NO: 433978 - DNA, 120 bp, Artificial Sequence
  ENSG00000152661_16 (sequence is synthesized)
tccacttgcacaatatcattaccatcactttttcatcattcctcagctactactcacattcatttaatggtttctgtaaacatttttaagacagttgggatgtcacttaacatttttttt

SEQ ID NO: 433979 - DNA, 120 bp, Artificial Sequence
  ENSG00000152661_17 (sequence is synthesized)
ttgagctaaagtcagggaatcaagccatgcttaatatttaacaatcacttatatgtgtgtcgaagagtttgttttgtttgtcatgtattggtacaagcagatacagtataaactcacaaa

SEQ ID NO: 433980 - DNA, 120 bp, Artificial Sequence
  ENSG00000152661_18 (sequence is synthesized)
cacagatttgaaaataatgcacatatggtgttcaaatttgaacctttctcatggatttttgtggtgtgggccaatatggtgtttacattatataattcctgctgtggcaagtaaagcaca

SEQ ID NO: 433981 - DNA, 120 bp, Artificial Sequence
  ENSG00000152661_19 (sequence is synthesized)
ctttttttttctcctaaaatgtttttccctgtgtatcctattatggatactggttttgttaattatgattctttattttctctcctttttttaggatatagcagtaatgctattactgaa

SEQ ID NO: 433982 - DNA, 120 bp, Artificial Sequence
  ENSG00000152661_20 (sequence is synthesized)
atgaatttcctttttctgaaatgtaatcattgatgcttgaatgatagaattttagtactgtaaacaggctttagtcattaatgtgagagacttagaaaaaatgcttagagtggactatta

SEQ ID NO: 433983 - DNA, 120 bp, Artificial Sequence
  ENSG00000152661_21 (sequence is synthesized)
aatgtgcctaaatgaattttgcagtaactggtattcttgggttttcctacttaatacacagtaattcagaacttgtattctattatgagtttagcagtcttttggagtgaccagcaactt

SEQ ID NO: 433984 - DNA, 120 bp, Artificial Sequence
  ENSG00000152661_22 (sequence is synthesized)
tgatgtttgcactaagattttatttggaatgcaagagaggttgaaagaggattcagtagtacacatacaactaatttatttgaactatatgttgaagacatctaccagtttctccaaatg

SEQ ID NO: 433985 - DNA, 120 bp, Artificial Sequence
  ENSG00000152661_23 (sequence is synthesized)
ccttttttaaaactcatcacagaagattggtgaaaatgctgagtatgacacttttcttcttgcatgcatgtcagctacataaacagttttgtacaatgaaaattactaatttgtttgaca

SEQ ID NO: 433986 - DNA, 120 bp, Artificial Sequence
  ENSG00000152661_24 (sequence is synthesized)
ttccatgttaaactacggtcatgttcagcttcattgcatgtaatgtagacctagtccatcagatcatgtgttctggagagtgttctttattcaataaagttttaatttagtataaacata

SEQ ID NO: 433987 - DNA, 120 bp, Artificial Sequence
  ENSG00000152661_25 (sequence is synthesized)
aggcggggcggctcaaggggaaagggcagggaggagagaccctcgggaagctgatgacgcgtccggggcaagtcagcctgtttccgagacgcgcgcctcacggtcgtagcagcgctgcgc

SEQ ID NO: 433988 - DNA, 120 bp, Artificial Sequence
  ENSG00000152661_26 (sequence is synthesized)
ccaccctgcccctttagtgacccagccagcctttgctgggggtttctgataacgctcatcgataagctctccttgctcccaaaaggcgtgcttctctttctctccaggtggtgcccaggc

SEQ ID NO: 433989 - DNA, 120 bp, Artificial Sequence
  ENSG00000152669_0 (sequence is synthesized)
ggcctccttcgcactttcgagtgcgcgtttgctgcccgccgcagcccgggcgttgaaggtagtaaagcggccacccggccgcatcatggtgaccccctgtcccaccagcccctcgagccc

SEQ ID NO: 433990 - DNA, 120 bp, Artificial Sequence
  ENSG00000152669_1 (sequence is synthesized)
cgccgcccgagcggggaggcgggacaacgaccagaaccttcgcgccccggtgaagaagagcaggcgtccgcgcctccggaggaagcagccgctgcatcccctgaacccgtgcccgctccc

SEQ ID NO: 433991 - DNA, 120 bp, Artificial Sequence
  ENSG00000152669_2 (sequence is synthesized)
gggagactccggcatttgcgacctgttcgagtcccccagctccggctcagacggcgcagagagcccctctgcggcgcggggtggtagccccctgcccggcccggcccagcccgtggcgca

SEQ ID NO: 433992 - DNA, 120 bp, Artificial Sequence
  ENSG00000152669_3 (sequence is synthesized)
gctagatctacagaccttccgcgactacggccagagctgctacgccttccgcaaggcgcaggagagccacttccacccgcgggaggcgctggcacggcagccacaagtgacggcggaatc

SEQ ID NO: 433993 - DNA, 120 bp, Artificial Sequence
  ENSG00000152669_4 (sequence is synthesized)
ccgctgtaagctgctcagctggctgatcccggtgcaccgccaattcggcctctccttcgagtcgctgtgcctgacggtgaacactctggaccgcttcctcaccaccacgccggtggctgc

SEQ ID NO: 433994 - DNA, 120 bp, Artificial Sequence
  ENSG00000152669_5 (sequence is synthesized)
cttgcaaacaggtggaggtgcacccgccgcgcgtgaagcagcttctggccctctgctgcggcgccttctcccggcagcagctctgcaacctcgagtgcatcgtgctgcacaagctgcact

SEQ ID NO: 433995 - DNA, 120 bp, Artificial Sequence
  ENSG00000152669_6 (sequence is synthesized)
tcaccctgggtgcgcccaccattagcttcttcctggagcatttcacgcacgctcgcgtggaggcggggcaggctgaggcctccgaagctctggaagcgcaagccctggcgcggggggtgg

SEQ ID NO: 433996 - DNA, 120 bp, Artificial Sequence
  ENSG00000152669_7 (sequence is synthesized)
cagagctgagtctggccgactatgccttcaccagctactccccttccctcctggcgatctgctgcctggcgctggcggaccgcatgctgcgggtctcgcggcccgtggacttgcgactgg

SEQ ID NO: 433997 - DNA, 120 bp, Artificial Sequence
  ENSG00000152669_8 (sequence is synthesized)
gagaccacccggaggcggcgctggaggactgtatgggcaagttgcagctgctggtggccataaacagtacttccttgactcacatgctgcccgttcagatctgcgagaagtgcagcctgc

SEQ ID NO: 433998 - DNA, 120 bp, Artificial Sequence
  ENSG00000152669_9 (sequence is synthesized)
ccccgagctcgaaataaaacagatccttcgtttccttttagtccctggcccggctgctggacctctcccgtagcctcagaagagtgcagtactggtccacagagaaggcttcaggacctg

SEQ ID NO: 433999 - DNA, 120 bp, Artificial Sequence
  ENSG00000152669_10 (sequence is synthesized)
cttggtcagctgcaggttgtaaatagtgtacgatactagcatctggtattttatttattttgcagcgagcacatgaggaagctgagtctttcaccaataaacagttgtggtttgtctaaa

SEQ ID NO: 434000 - DNA, 120 bp, Artificial Sequence
  ENSG00000152669_11 (sequence is synthesized)
acgccgccgctcttcctctcctcccaggctctctcctctcctgccggctcggccctccgagcgcccgggcccgcgacagcccaggtcccgccccgagtcgaagcacaaggggccgtggag

SEQ ID NO: 434001 - DNA, 120 bp, Artificial Sequence
  ENSG00000152669_12 (sequence is synthesized)
gggcgtcaccggcctcattttacagatggagaaaagtggggcgtagacggcttgagggacttgccccgtcccaagctggctactggggcacggtagagaggaattcgtttccgggttgag

SEQ ID NO: 434002 - DNA, 120 bp, Artificial Sequence
  ENSG00000152669_13 (sequence is synthesized)
tctggactcctaccgaactcgggcaagttatttaacacccctgagcttctttcttcatctgcaaaatggaacccctccccttcctttgaattgctgagcccattacgcgaggtgacggcg

SEQ ID NO: 434003 - DNA, 120 bp, Artificial Sequence
  ENSG00000152670_0 (sequence is synthesized)
gtgggcgcctgcgagggcttgggagagcaagccgcggagagaacttgaagccaccatgggagatgaagattgggaagcagaaatcaaccctcatatgtcttcctatgttcccatatttga

SEQ ID NO: 434004 - DNA, 120 bp, Artificial Sequence
  ENSG00000152670_1 (sequence is synthesized)
gaaggataggtattctggagaaaatggagacaattttaacaggactccagcttcatcatcagaaatggatgatggaccttctcgaagagatcatttcatgaaaagtggatttgcctctgg

SEQ ID NO: 434005 - DNA, 120 bp, Artificial Sequence
  ENSG00000152670_2 (sequence is synthesized)
gcggaattttggaaacagagatgctggtgagtgtaataagcgagataatacatccacaatgggtggttttggagttggaaagagttttggaaacagaggtttttcaaacagcaggtttga

SEQ ID NO: 434006 - DNA, 120 bp, Artificial Sequence
  ENSG00000152670_3 (sequence is synthesized)
agatggtgatagctctggtttctggagagagtctagtaatgactgcgaagataatccaacacggaacagagggttttccaagagaggcggctatcgagatggaaataattcagaagcttc

SEQ ID NO: 434007 - DNA, 120 bp, Artificial Sequence
  ENSG00000152670_4 (sequence is synthesized)
agggccatacagaagaggtggaagaggtagtttccgaggttgccgtggaggatttggtctaggaagtccaaataatgacttagacccagacgaatgtatgcagcgcactggtggcctttt

SEQ ID NO: 434008 - DNA, 120 bp, Artificial Sequence
  ENSG00000152670_5 (sequence is synthesized)
tggttctagaagaccagtattaagtggcacaggtaatggtgatacttctcaaagcagaagtggcagtggaagtgaacgaggtggttacaaaggtttaaatgaagaagtaataacaggctc

SEQ ID NO: 434009 - DNA, 120 bp, Artificial Sequence
  ENSG00000152670_6 (sequence is synthesized)
tggaaagaattcttggaagtcagaagcagaaggaggagaaagtagtgatactcaaggaccaaaagtgacctacataccccctcctccacctgaggatgaggactccatctttgcacatta

SEQ ID NO: 434010 - DNA, 120 bp, Artificial Sequence
  ENSG00000152670_7 (sequence is synthesized)
tcagacaggcataaacttcgacaaatacgacactattcttgtggaagtgtctggacatgatgcaccaccagcaattctgacttttgaagaagctaatctctgtcagacactgaataacaa

SEQ ID NO: 434011 - DNA, 120 bp, Artificial Sequence
  ENSG00000152670_8 (sequence is synthesized)
cattgctaaagctggttatactaagcttactcctgtgcaaaaatacagtattcctatcatacttgcaggacgagatttgatggcttgcgctcaaacagggtctgggaagactgcggcttt

SEQ ID NO: 434012 - DNA, 120 bp, Artificial Sequence
  ENSG00000152670_9 (sequence is synthesized)
tctcctaccaattttggctcatatgatgcatgatggaataactgccagtcgttttaaagagttgcaggaaccagagtgtattattgtagcaccaactcgagaattggtcaaccagattta

SEQ ID NO: 434013 - DNA, 120 bp, Artificial Sequence
  ENSG00000152670_10 (sequence is synthesized)
tttggaagccagaaaattttcttttgggacttgtgtaagagctgttgttatatatgggggaacccagctgggacattcaattcgacaaatagtacaaggctgtaatatattatgtgctac

SEQ ID NO: 434014 - DNA, 120 bp, Artificial Sequence
  ENSG00000152670_11 (sequence is synthesized)
gttggatatgggttttggtccagaaatgaagaagttaatttcttgcccaggaatgccatcaaaggaacagcgccaaacccttatgttcagtgcaacttttccagaggaaattcaaaggtt

SEQ ID NO: 434015 - DNA, 120 bp, Artificial Sequence
  ENSG00000152670_12 (sequence is synthesized)
ggctgcagagtttttaaagtcaaattatctgtttgttgctgttggacaagtgggtggagcatgtagagatgttcagcagaccgttctccaagttggccagttctcaaaaagagaaaagct

SEQ ID NO: 434016 - DNA, 120 bp, Artificial Sequence
  ENSG00000152670_13 (sequence is synthesized)
cgttgaaattctgcgaaacataggggatgaaagaactatggtctttgttgaaactaagaaaaaagcagattttattgcaacttttctttgtcaagaaaaaatatcaactacaagtattca

SEQ ID NO: 434017 - DNA, 120 bp, Artificial Sequence
  ENSG00000152670_14 (sequence is synthesized)
tggtgatcgggaacagagagagcgggagcaagctcttggagattttcgctttggaaagtgcccagttcttgttgctacttcagtagctgccagagggctggatattgaaaatgtgcaaca

SEQ ID NO: 434018 - DNA, 120 bp, Artificial Sequence
  ENSG00000152670_15 (sequence is synthesized)
tgttatcaattttgatcttccttctaccattgatgaatatgttcatcgaattgggcgtactggtcgttgtgggaatactggcagagcaatttccttttttgatcttgaatcggataacca

SEQ ID NO: 434019 - DNA, 120 bp, Artificial Sequence
  ENSG00000152670_16 (sequence is synthesized)
tttagcacagcctctagtaaaagtattgacagatgctcaacaggatgttcctgcatggttggaagaaattgcctttagtacatacattcctggcttcagtggtagtacaagaggaaacgt

SEQ ID NO: 434020 - DNA, 120 bp, Artificial Sequence
  ENSG00000152670_17 (sequence is synthesized)
gtttgcatcagttgataccagaaagggcaagagcactttgaacacagctgggttttcttcttcacaagctcccaatccagtagatgatgagtcatgggattaaagccaaaacatccttca

SEQ ID NO: 434021 - DNA, 120 bp, Artificial Sequence
  ENSG00000152670_18 (sequence is synthesized)
agtctgtggttttgatgcagagaagaaaatagttttgatttttgagtttttaacagaagtataaaacttaacattctcatagctcctgtccttgtattctcactcctacacttaaaaaaa

SEQ ID NO: 434022 - DNA, 120 bp, Artificial Sequence
  ENSG00000152670_19 (sequence is synthesized)
aaatccttactgactagttatgtgagatgctaaaacttacaacattgcagttactgatacaaatggtgttaactgggaatattaaagcattctaaatgtctttcttatttctggtatatt

SEQ ID NO: 434023 - DNA, 120 bp, Artificial Sequence
  ENSG00000152670_20 (sequence is synthesized)
ctttagggggcttagacatgtttaatgtttaaatgccaagtcttactatagtgtttattgatcttataaaacaagcaaataggatatgatacacttttggttaaaaattactgggtctca

SEQ ID NO: 434024 - DNA, 120 bp, Artificial Sequence
  ENSG00000152670_21 (sequence is synthesized)
tttttacttgagtctttaaaacagtagtgtgtcactataatgtgataatctttaagagaaagtagaatacttaagcctttcaaagtgattttgatttttagatcatcagatgtatgatga

SEQ ID NO: 434025 - DNA, 120 bp, Artificial Sequence
  ENSG00000152670_22 (sequence is synthesized)
aaatggttaaatgtttgtgatgggagctctgtactcaatggcataacaatgtttatttttataatatacaatctttccttgaaataaaggatgaaacacttttcccttaagttttccatc

SEQ ID NO: 434026 - DNA, 120 bp, Artificial Sequence
  ENSG00000152670_23 (sequence is synthesized)
agaataaacatttctgggaatggggtctaggaatttatttttaaccaactctccagagtctagtaatgactgcgaagataatccaacacggaacagagggttttccaagagaggcgataa

SEQ ID NO: 434027 - DNA, 120 bp, Artificial Sequence
  ENSG00000152670_24 (sequence is synthesized)
agtgggccgcttttctacgggaactggcctgaactcggccgtacgggctccccagtaaccgacctttggccaaagtgtggatggagtaggaggagttttgaagccgtccttcgaagcctt

SEQ ID NO: 434028 - DNA, 120 bp, Artificial Sequence
  ENSG00000152670_25 (sequence is synthesized)
tctgcctcggggtctcagagtcccacgggtgcccaaagtctgggcttgaggcctgcagaggaggcgaaggggccttattcctggcttcttcactgcgttttctctgaacagacatgaact

SEQ ID NO: 434029 - DNA, 120 bp, Artificial Sequence
  ENSG00000152670_26 (sequence is synthesized)
ttctcaattctaaattttaaagtgagtgtaccacctgggaatagaacagcgaaagatgtgaagttaagaaagattttataatgtggcaattatatagtccagaaatctcaaccattaggc

SEQ ID NO: 434030 - DNA, 120 bp, Artificial Sequence
  ENSG00000152670_27 (sequence is synthesized)
tgtacttaacacagagacactaaactggtaaaactgattttgaaggagctggatgaaaaacactgatcgtgaaaacctttgaagaaaaatactttggtatatgttttctgcttttaatat

SEQ ID NO: 434031 - DNA, 120 bp, Artificial Sequence
  ENSG00000152670_28 (sequence is synthesized)
tggggtctaggaatttatttttaaccaactctccagagtctagtaatgactgcgaagataatccaacacggaacagagggttttccaagagaggcggtaaggaccacattttggaacaat

SEQ ID NO: 434032 - DNA, 120 bp, Artificial Sequence
  ENSG00000152670_29 (sequence is synthesized)
gcagtggaagtgaacgaggtaagttcttattttgtttacccgaaagaagttaaaatcattgtattccaaatttaatttttttctgtacttcactggttggaaacaaatttaatttttgaa

SEQ ID NO: 434033 - DNA, 120 bp, Artificial Sequence
  ENSG00000152670_30 (sequence is synthesized)
ggtaactgttattgcttttatacactgtgaggaccataaatttacacagcctgttttagatagttccttaataccctccaggttattgcctctctgatccagcaattccattataggaat

SEQ ID NO: 434034 - DNA, 120 bp, Artificial Sequence
  ENSG00000152670_31 (sequence is synthesized)
tatatactatagatgtatttggaaataaatgtacaaggatgttcactgagatgtcatttataataagtaaaaactgaaaatcacctaaaattcataaataaaaaactgtttaagtccggg

SEQ ID NO: 434035 - DNA, 120 bp, Artificial Sequence
  ENSG00000152672_0 (sequence is synthesized)
actgccattggtccacgggacggcccttccaggagccagtggctgggagcagtgctggaggatcaaggaagcagagatggacggtgaggcagtccgcttctgcacagataaccagtgtgt

SEQ ID NO: 434036 - DNA, 120 bp, Artificial Sequence
  ENSG00000152672_1 (sequence is synthesized)
ctccctgcacccccaagaggtggactctgtggcaatggctcctgcagcccccaagataccgaggctcgttcaggctaccccggcatttatggctgtgaccttggtcttctctcttgtgac

SEQ ID NO: 434037 - DNA, 120 bp, Artificial Sequence
  ENSG00000152672_2 (sequence is synthesized)
tctctttgtagtggttcaacagcagacaagacctgttccgaagcctgtgcaagccgtaattctgggagacaacattactgggcatttaccttttgaacccaacaatcatcaccactttgg

SEQ ID NO: 434038 - DNA, 120 bp, Artificial Sequence
  ENSG00000152672_3 (sequence is synthesized)
cagggaggcagaaatgcgagagcttatccagacatttaaaggccacatggagaattccagtgcctgggtagtagaaatccagatgttgaagtgcagagtggacaatgtcaattcgcagct

SEQ ID NO: 434039 - DNA, 120 bp, Artificial Sequence
  ENSG00000152672_4 (sequence is synthesized)
ccaggtgctcggtgatcatctgggaaacaccaatgctgacatccagatggtaaaaggagttctaaaggatgccactacattgagtttgcagacacagatgttaaggagttccctggaggg

SEQ ID NO: 434040 - DNA, 120 bp, Artificial Sequence
  ENSG00000152672_5 (sequence is synthesized)
aaccaatgctgagatccagaggctcaaggaagaccttgaaaaggcagatgctttaactttccagacgctgaatttcttaaaaagcagtttagaaaacaccagcattgagctccacgtgct

SEQ ID NO: 434041 - DNA, 120 bp, Artificial Sequence
  ENSG00000152672_6 (sequence is synthesized)
aagcagaggcttagaaaatgcaaactctgaaattcagatgttgaatgccagtttggaaacggcaaatacccaggctcagttagccaatagcagtttaaagaacgctaatgctgagatcta

SEQ ID NO: 434042 - DNA, 120 bp, Artificial Sequence
  ENSG00000152672_7 (sequence is synthesized)
tgttttgagaggccatctagatagtgtcaatgacttgaggacccagaaccaggttttaagaaatagtttggaaggagccaatgctgagatccagggactaaaggaaaatttgcagaacac

SEQ ID NO: 434043 - DNA, 120 bp, Artificial Sequence
  ENSG00000152672_8 (sequence is synthesized)
aaatgctttaaactcccagacccaggcctttataaaaagcagttttgacaacactagtgctgagatccagttcttaagaggtcatttggaaagagctggtgatgaaattcacgtgttaaa

SEQ ID NO: 434044 - DNA, 120 bp, Artificial Sequence
  ENSG00000152672_9 (sequence is synthesized)
aagggatttgaaaatggtcacagcccagacccaaaaagcaaatggccgtctggaccagacagatactcagattcaggtattcaagtcagagatggaaaatgtgaataccttaaatgccca

SEQ ID NO: 434045 - DNA, 120 bp, Artificial Sequence
  ENSG00000152672_10 (sequence is synthesized)
cttcagccttaacttcccagacccagatgttagacagcaatctgcagaaggccagtgccgagatccagaggttaagaggggatctagagaacaccaaagctctaaccatggaaatccagc

SEQ ID NO: 434046 - DNA, 120 bp, Artificial Sequence
  ENSG00000152672_11 (sequence is synthesized)
aggagcagagtcgcctgaagaccctccatgtggtcattacttcacaggaacagctacaaagaacccaaagtcagcttctccagatggtcctgcaaggctggaagttcaatggtggaagct

SEQ ID NO: 434047 - DNA, 120 bp, Artificial Sequence
  ENSG00000152672_12 (sequence is synthesized)
tatattatttttctagtgtcaagaagtcttggcatgaggctgagcagttctgcgtgtcccagggagcccatctggcatctgtggcctccaaggaggagcaggcatttctggtagagttca

SEQ ID NO: 434048 - DNA, 120 bp, Artificial Sequence
  ENSG00000152672_13 (sequence is synthesized)
caagtaaagtgtactactggatcggtctcactgacaggggcacagagggctcctggcgctggacagatgggacaccattcaacgccgcccagaacaaagcgcctggttccaagggatcct

SEQ ID NO: 434049 - DNA, 120 bp, Artificial Sequence
  ENSG00000152672_14 (sequence is synthesized)
gcccactcagaaagtatattattgtgaattctgggatgggagcttgcagcttcatagacacccctccctgtccctggatcctcagtaactaagagcaacctgagcacagacaccctcagg

SEQ ID NO: 434050 - DNA, 120 bp, Artificial Sequence
  ENSG00000152672_15 (sequence is synthesized)
gtactccttctcccagccctgtcctcatcctagggccactaggggatgaaggacccatctcaagtcagctccctagactcatcccatgtcagctccctaggagccacagcaccaggaagg

SEQ ID NO: 434051 - DNA, 120 bp, Artificial Sequence
  ENSG00000152672_16 (sequence is synthesized)
gatgctgccttcatctaacagtataaagccctgttgtcttcgggttttgggaaaagaatcagtctgacaactggcggcacaagaatgggcagactgaagactgtgtccaaattcagcaga

SEQ ID NO: 434052 - DNA, 120 bp, Artificial Sequence
  ENSG00000152672_17 (sequence is synthesized)
agtggaatgacatgacctgtgacaccccctatcagtgggtgtgcaagaagcccatgggccagggtgtggcctgagggcaggccagagctgaggggctgctcctgcttgccaatactgacc

SEQ ID NO: 434053 - DNA, 120 bp, Artificial Sequence
  ENSG00000152672_18 (sequence is synthesized)
ctcctcctcgatgccttcggagcctctgagctctgcttgttctctgggaccttccgttggccttgtggacttcctgccttgttctttgattcagccctttcaaacatgcttacctcgagt

SEQ ID NO: 434054 - DNA, 120 bp, Artificial Sequence
  ENSG00000152672_19 (sequence is synthesized)
gacccagtgacatcagtggcttctcaagggaagagccttgctgtgcccctgtagcctcagcacccagcacaggcctgtcagacagcaggtcctcaataaatactcgctggatcaacaaaa

SEQ ID NO: 434055 - DNA, 120 bp, Artificial Sequence
  ENSG00000152683_0 (sequence is synthesized)
agaacggcttccggcgggagctgtgcagctccttatcatggggacaattcatctctttcgaaaaccacaaagatccttttttggcaagttgttacgggaatttagacttgtagcagctga

SEQ ID NO: 434056 - DNA, 120 bp, Artificial Sequence
  ENSG00000152683_1 (sequence is synthesized)
ccgaaggtcctggaagatactgctctttggtgtaataaacttgatatgtactggcttcctgcttatgtggtgcagttctactaatagtatagctttaactgcctatacttacctgaccat

SEQ ID NO: 434057 - DNA, 120 bp, Artificial Sequence
  ENSG00000152683_2 (sequence is synthesized)
ttttgatctttttagtttaatgacatgtttaataagttactgggtaacattgaggaaacctagccctgtctattcatttgggtttgaaagattagaagtcctggctgtatttgcctccac

SEQ ID NO: 434058 - DNA, 120 bp, Artificial Sequence
  ENSG00000152683_3 (sequence is synthesized)
agtcttggcacagttgggagctctctttatattaaaagaaagtgcagaacgctttttggaacagcccgagatacacacgggaagattattagttggtacttttgtggctctttgtttcaa

SEQ ID NO: 434059 - DNA, 120 bp, Artificial Sequence
  ENSG00000152683_4 (sequence is synthesized)
cctgttcacgatgctttctattcggaataaaccttttgcttatgtctcagaagctgctagtacgagctggcttcaagagcatgttgcagatcttagtcgaagcttgtgtggaattattcc

SEQ ID NO: 434060 - DNA, 120 bp, Artificial Sequence
  ENSG00000152683_5 (sequence is synthesized)
gggacttagcagtatcttccttccccgaatgaatccatttgttttgattgatcttgctggagcatttgctctttgtattacatatatgctcattgaaattaataattattttgccgtaga

SEQ ID NO: 434061 - DNA, 120 bp, Artificial Sequence
  ENSG00000152683_6 (sequence is synthesized)
cactgcctctgctatagctattgccttgatgacatttggcactatgtatcccatgagtgtgtacagtgggaaagtcttactccagacaacaccaccccatgttattggtcagttggacaa

SEQ ID NO: 434062 - DNA, 120 bp, Artificial Sequence
  ENSG00000152683_7 (sequence is synthesized)
actcatcagagaggtatctaccttagatggagttttagaagtccgaaatgaacatttttggaccctaggttttggctcattggctggatcagtgcatgtaagaattcgacgagatgccaa

SEQ ID NO: 434063 - DNA, 120 bp, Artificial Sequence
  ENSG00000152683_8 (sequence is synthesized)
tgaacaaatggttcttgctcatgtgaccaacaggctgtacactctagtgtctactctaactgttcaaattttcaaggatgactggattaggcctgccttattgtctgggcctgttgcagc

SEQ ID NO: 434064 - DNA, 120 bp, Artificial Sequence
  ENSG00000152683_9 (sequence is synthesized)
caatgtcctaaacttttcagatcatcacgtaatcccaatgcctcttttaaagggtactgatgatttgaacccagttacatcaactccagctaaacctagtagtccacctccagaattttc

SEQ ID NO: 434065 - DNA, 120 bp, Artificial Sequence
  ENSG00000152683_10 (sequence is synthesized)
atttaacactcctgggaaaaatgtgaacccagttattcttctaaacacacaaacaaggccttatggttttggtctcaatcatggacacacaccttacagcagcatgcttaatcaaggact

SEQ ID NO: 434066 - DNA, 120 bp, Artificial Sequence
  ENSG00000152683_11 (sequence is synthesized)
tggagttccaggaattggagcaactcaaggattgaggactggttttacaaatataccaagtagatatggaactaataatagaattggacaaccaagaccatgatagactctaacttattt

SEQ ID NO: 434067 - DNA, 120 bp, Artificial Sequence
  ENSG00000152683_12 (sequence is synthesized)
ttataaggaatattgactccttggcttccaatttatttagtaatccaactttgcattgactgtttaatcatttactctaaatgttagataatagtagtcttgttcacatttcatgaaacc

SEQ ID NO: 434068 - DNA, 120 bp, Artificial Sequence
  ENSG00000152683_13 (sequence is synthesized)
tatgaaactatatttttgtaaaatgtatttgtgacagtgaaatcctcgtaaatgttaaaggctttaaataggcttcctttagaaaatgtgtttctttaaatttggattttggtatctttg

SEQ ID NO: 434069 - DNA, 120 bp, Artificial Sequence
  ENSG00000152683_14 (sequence is synthesized)
gttttgtagttgactgcagtgtgatgtgaccttacctttataagagccacttgatggagtagatctgtcacattactaagatacgatatttctttttttttccgagacggagtcttgctc

SEQ ID NO: 434070 - DNA, 120 bp, Artificial Sequence
  ENSG00000152683_15 (sequence is synthesized)
tttttttttccgagacggagtcttgctctgccactgtgcccggccaatacattattattaacttaaggctgtactttattaaggcttccttagtttttgttttgttttgttttttgagat

SEQ ID NO: 434071 - DNA, 120 bp, Artificial Sequence
  ENSG00000152683_16 (sequence is synthesized)
cctggccgatattttctttaatgaaatttataaatatgcttcttgaataatacacattttgggaaagggaaaaatgtctgttcaaaaagtaaaagtctcttttatagcttttccaaactt

SEQ ID NO: 434072 - DNA, 120 bp, Artificial Sequence
  ENSG00000152683_17 (sequence is synthesized)
aattgctaaatttttctttgaggttctcctgaattatgtcttacaaactaaaagcaaaaatttttagcagaaattttggaatacattctatctagcacaatttgaatttttaattatcaa

SEQ ID NO: 434073 - DNA, 120 bp, Artificial Sequence
  ENSG00000152683_18 (sequence is synthesized)
gatttttgttaaagtttctctcctttaaaaattttagtacatttgtaaatagtccatggttctcagtgttttattttgattaagtgactacccaacttttggtgatatgcagtgaaagaa

SEQ ID NO: 434074 - DNA, 120 bp, Artificial Sequence
  ENSG00000152683_19 (sequence is synthesized)
tctttcctgacacattttcattcattggctttttaatttcttattttattaacaaaatatatcagatatattaccaaaacacatggagttccatacataatatggaatttgatgtctttt

SEQ ID NO: 434075 - DNA, 120 bp, Artificial Sequence
  ENSG00000152683_20 (sequence is synthesized)
caagttgcacaaagaatttgagcatatataattttaccaaagcataatggaccttagattatagaatacagcattgttaggtctgcagtgggcagtttctttttgttttgctttgtcaaa

SEQ ID NO: 434076 - DNA, 120 bp, Artificial Sequence
  ENSG00000152683_21 (sequence is synthesized)
aatgggaaattgttaactgtgatgaaatgtgagaattacatagattatgttattttttagttgttttccaaatgcagagtttaaggactttctaacatggctagtattacttccaaaaag

SEQ ID NO: 434077 - DNA, 120 bp, Artificial Sequence
  ENSG00000152683_22 (sequence is synthesized)
tataacaagcagcagtcacacatgacctaggagggttttttattgttttattttattatgcattccataacagttttaaaatgggattttgagaatggacttaactttcctggaatccaa

SEQ ID NO: 434078 - DNA, 120 bp, Artificial Sequence
  ENSG00000152683_23 (sequence is synthesized)
tgctcctggagatttatgactttcccagccatcagccagctatctagagaagatttttgtttttcttttgcaacagtttcttcagtcaactcattcactttcaaataggagcagcacttt

SEQ ID NO: 434079 - DNA, 120 bp, Artificial Sequence
  ENSG00000152683_24 (sequence is synthesized)
gaaatcctttttcttcactgtggattaaaaacatccaagaagccatctctgtcaagcagaattgtcatctgtggtaataagtgaccatgtcctaaatacctttttcttagtgaggagttg

SEQ ID NO: 434080 - DNA, 120 bp, Artificial Sequence
  ENSG00000152683_25 (sequence is synthesized)
gtcattgtctttggcatctgcaacccctgttcaggcatgtgacctgctaaagaaatacagcctacactaccttgactactggggaaaatgatacttcgtaaaatgtaataaggcaacctg

SEQ ID NO: 434081 - DNA, 120 bp, Artificial Sequence
  ENSG00000152683_26 (sequence is synthesized)
ttccttggcctttatcttatgttttccaactattactgtatctgttattggtctactattacaggatgattcttcttcctccattgatctcaactaaatatgaattagggtcatgcatga

SEQ ID NO: 434082 - DNA, 120 bp, Artificial Sequence
  ENSG00000152683_27 (sequence is synthesized)
aatctgaactgccgtgtcctgagttatggttaagaggtatgtgctgccaccccatgcatgtcttccccatccccataggattttaaagtgttcaggtaccaaacacagttctgtgtgagg

SEQ ID NO: 434083 - DNA, 120 bp, Artificial Sequence
  ENSG00000152683_28 (sequence is synthesized)
ttttatgcctacttcctcaacaccaattcagaggcaacacctgtgcatctgtcccaccaaaggtgctttaatacctaccttcactatttgagaaaggacactcacagttgcctgtgggtt

SEQ ID NO: 434084 - DNA, 120 bp, Artificial Sequence
  ENSG00000152683_29 (sequence is synthesized)
atgaaagaattggccctacgtcctgcatgtaagatgttacaggggacattgggccaggcattattatatagagaagtcttatttgccaagctctgactaacttctggatatgaaaataag

SEQ ID NO: 434085 - DNA, 120 bp, Artificial Sequence
  ENSG00000152683_30 (sequence is synthesized)
gaacttgcccagcataggcctataggcagcagccttactagtaaatcttgccacagaatcacttgaagctagacagagaaagaagttcaatttaaatatttgtcccattgtttgtgatta

SEQ ID NO: 434086 - DNA, 120 bp, Artificial Sequence
  ENSG00000152683_31 (sequence is synthesized)
ggatgtaagctttgtggaatgtaattaaccctgctttacgaagtcaccatattataataggaaaaacactgcctaggaggcaagagatctgaattccagttctgatgctgccactgtgta

SEQ ID NO: 434087 - DNA, 120 bp, Artificial Sequence
  ENSG00000152683_32 (sequence is synthesized)
aggaagtagttttataacccatgggcaaatcatctgagctttctcatctgtaaagttagggagaggaattaattagttgatctgtaaaataatcagcttcaaaacgttatggctaaatct

SEQ ID NO: 434088 - DNA, 120 bp, Artificial Sequence
  ENSG00000152683_33 (sequence is synthesized)
gtagaatgtatgcccaattgctaaacggatgttgtgcccagaattttatctagtgactacctcaacatacaggccaagcgttacctacaccaacacccaagccattaatttgaggtgcca

SEQ ID NO: 434089 - DNA, 120 bp, Artificial Sequence
  ENSG00000152683_34 (sequence is synthesized)
tgagaataggtgaaccacagcctaacaccatttaggtttttgtgtttttttcaggcttgcctctacttaaatatatttagatgagagagttctcttagacttctttctttgtaaggaagg

SEQ ID NO: 434090 - DNA, 120 bp, Artificial Sequence
  ENSG00000152683_35 (sequence is synthesized)
gttatttggggaagtgttggaaaaaagattagggcagggtacccttagtttatatagggtacaaaagaatgggaaacatcttccctttcttctttaatctctgaagtcatgtttggaatt

SEQ ID NO: 434091 - DNA, 120 bp, Artificial Sequence
  ENSG00000152683_36 (sequence is synthesized)
acatataatgtagcaggtactggagaggacctgaatttcaagcttctgatttagctgtttgtaaacttccaagttttgcttgactaaagaatgctgatcttttttgggagtctgatctcc

SEQ ID NO: 434092 - DNA, 120 bp, Artificial Sequence
  ENSG00000152683_37 (sequence is synthesized)
ttctaatatcagaaagtgctttttatattccagattgcttgaattaaactgtttggattaaagaacatatatggagtttcctctctggttttaaataatctttctttattcagtagctat

SEQ ID NO: 434093 - DNA, 120 bp, Artificial Sequence
  ENSG00000152683_38 (sequence is synthesized)
taataatttatctcatattcagcgaatatttattgagaatattgttgagaatctcttacatgccaggcactatactaagttaatatgcattcagtataccagttggtgtgacccagacca

SEQ ID NO: 434094 - DNA, 120 bp, Artificial Sequence
  ENSG00000152683_39 (sequence is synthesized)
aaggtaacacaaagatgaatgagaattccttcaaggcgccgataatcctagtaggagagctaagacacaaaactgttgcatgtttttaatcatcaaattaaacttctttccacgtcctta

SEQ ID NO: 434095 - DNA, 78 bp, Artificial Sequence
  ENSG00000152683_40 (sequence is synthesized)
ggcctaccaaagtgctgggataacaggcgtgagctaccgtgcctgagcaatagtttaatgacatgtttaataagttac

SEQ ID NO: 434096 - DNA, 120 bp, Artificial Sequence
  ENSG00000152683_41 (sequence is synthesized)
agtctctcagaccacttttctccaccaatccgaaatgatgctcctatcaagaccttaattcacaccttctcaccttcatccgagagaggaaataataaattactactgttaaaataatat

SEQ ID NO: 434097 - DNA, 120 bp, Artificial Sequence
  ENSG00000152683_42 (sequence is synthesized)
ttatggtttgaaagattagaagtcctggctgtatttgcctccacagtcttggcacagttgggagctctctttatattaaaagaaagtgcagaacgctttttggaacagcccgagatacac

SEQ ID NO: 434098 - DNA, 120 bp, Artificial Sequence
  ENSG00000152684_0 (sequence is synthesized)
acccgccttcctaccaccttaggggatttggcccggagaacgagatcaccctctcaatgaaaggcagatgtccctttaaggtttgcttctacagcccgtggactttagcctaaacacgga

SEQ ID NO: 434099 - DNA, 120 bp, Artificial Sequence
  ENSG00000152684_1 (sequence is synthesized)
cccgcgaagctggctttatttgtccatgtctcggacagagcctgggaagctgccagtgagatttcagagaccaagagcgcgaaggggcgggcgatgtggcaatccgtctgggatgtgaaa

SEQ ID NO: 434100 - DNA, 120 bp, Artificial Sequence
  ENSG00000152684_2 (sequence is synthesized)
agcgtggagcgcatttagaggaattcgacgaaaacacaggaaatcactcctctcccgctcctgggcgccgctgccactggggcagaggactgggaaccgcggcagcgggataagtggccc

SEQ ID NO: 434101 - DNA, 120 bp, Artificial Sequence
  ENSG00000152684_3 (sequence is synthesized)
ccggtcctgccctgcgaaccagcgcggccccctggcgctgaggctgctccggccatggcccctcggccccgcgcccgcccaggggtcgctgtcgcctgctgctggctcctcactgacagg

SEQ ID NO: 434102 - DNA, 120 bp, Artificial Sequence
  ENSG00000152684_4 (sequence is synthesized)
tgctgctggctcctcactgacagggatggaagagaaaacttaggaagttgaagtttggcattaaaataaaggactcgccaccactctgtgcaccttcttgagggagttcattcgtccgga

SEQ ID NO: 434103 - DNA, 120 bp, Artificial Sequence
  ENSG00000152684_5 (sequence is synthesized)
gcgcctcacagcttagtgcgcctgcgcacgcgcgaactgcggccccgcctctcctttggggacgggagacgtgcgtcgggtcgcgggacgggggctgcgcatgcgccttcatttcgtcag

SEQ ID NO: 434104 - DNA, 120 bp, Artificial Sequence
  ENSG00000152684_6 (sequence is synthesized)
cccgctgttgcgtgctgccagcgggaactgtgtaggggtagattttcgctgcagtgttccccgagcctgttagacgcagcgcgccgggagactgagagaggaaaggatagaggaagtgct

SEQ ID NO: 434105 - DNA, 120 bp, Artificial Sequence
  ENSG00000152684_7 (sequence is synthesized)
gccctaggctgcatgagtcgaagcaagcgtgtttccttcccgccaggcaagtgcccttagaaaccgggccccgcccccttcctggcctgcattcccatcccctctcccggggcggaggtg

SEQ ID NO: 434106 - DNA, 120 bp, Artificial Sequence
  ENSG00000152684_8 (sequence is synthesized)
aggacctccttggttcctttggttctgtcagtgagccccttccttggccatgaagctcgtgaggaagaacatcgagaaggacaatgcgggccaggtgaccctggtccccgaggagcctga

SEQ ID NO: 434107 - DNA, 120 bp, Artificial Sequence
  ENSG00000152684_9 (sequence is synthesized)
ggacatgtggcacacttacaacctcgtgcaggtgggcgacagcctgcgcgcctccaccatccgcaaggtacagacagagtcctccacgggcagcgtgggcagcaaccgggtccgcactac

SEQ ID NO: 434108 - DNA, 120 bp, Artificial Sequence
  ENSG00000152684_10 (sequence is synthesized)
cctcactctctgcgtggaggccatcgacttcgactctcaagcctgccagctgcgggttaaggggaccaacatccaagagaatgagtatgtcaagatgggggcttaccacaccatcgagct

SEQ ID NO: 434109 - DNA, 120 bp, Artificial Sequence
  ENSG00000152684_11 (sequence is synthesized)
ggagcccaaccgccagttcaccctggccaagaagcagtgggatagtgtggtactggagcgcatcgagcaggcctgtgacccagcctggagcgctgatgtggcggctgtggtcatgcagga

SEQ ID NO: 434110 - DNA, 120 bp, Artificial Sequence
  ENSG00000152684_12 (sequence is synthesized)
aggcctcgcccatatctgcttagtcactcccagcatgaccctcactcgggccaaggtggaggtgaacatccctaggaaaaggaaaggcaattgctctcagcatgaccgggccttggagcg

SEQ ID NO: 434111 - DNA, 120 bp, Artificial Sequence
  ENSG00000152684_13 (sequence is synthesized)
gttctatgaacaggtggtccaggctatccagcgccacatacactttgatgttgtaaagtgcatcctggtggccagcccaggatttgtgagggagcagttctgcgactacctgtttcaaca

SEQ ID NO: 434112 - DNA, 120 bp, Artificial Sequence
  ENSG00000152684_14 (sequence is synthesized)
agcagtgaagaccgacaacaaactgctcctggaaaaccggtccaaatttcttcaggtacatgcctcctccggacacaagtactccctgaaagaggccctttgtgaccctactgtggctag

SEQ ID NO: 434113 - DNA, 120 bp, Artificial Sequence
  ENSG00000152684_15 (sequence is synthesized)
ccgcctttcagacactaaagctgctggggaagtcaaagccttggatgacttctataaaatgttacagcatgaaccggatcgagctttctatggactcaagcaggtggagaaggccaatga

SEQ ID NO: 434114 - DNA, 120 bp, Artificial Sequence
  ENSG00000152684_16 (sequence is synthesized)
agccatggcaattgacacattgctcatcagcgatgagctcttcaggcatcaggatgtagccacacggagccggtatgtgaggctggtggacagtgtgaaagagaatgcaggcaccgttag

SEQ ID NO: 434115 - DNA, 120 bp, Artificial Sequence
  ENSG00000152684_17 (sequence is synthesized)
gatattctctagtcttcacgtttctggggaacagctcagccagttgactggggtagctgccattctccgcttccctgttcccgaactttctgaccaagagggtgattccagttctgaaga

SEQ ID NO: 434116 - DNA, 120 bp, Artificial Sequence
  ENSG00000152684_18 (sequence is synthesized)
ttacagtacatttctcagcatccttgtgacagaaagctgcaagaatggcactttttgattcatacagggatttcttatgtctttggctacactagatattttgtgattggcaagacatgt

SEQ ID NO: 434117 - DNA, 120 bp, Artificial Sequence
  ENSG00000152684_19 (sequence is synthesized)
atttaaacaataaactaaaaggaaataatctccacgtactaccatcttgattaaattgtgtaattttttataggaattatgagttatctgtagtacttggaaacagaaaatgtgtgtatt

SEQ ID NO: 434118 - DNA, 120 bp, Artificial Sequence
  ENSG00000152684_20 (sequence is synthesized)
taaagacgatgcctatgcagtatattgtttgggatagattgcaaaatttcacactgcatgctttgaaacagttttccttagaaaaagcttttgctatcttatcctgtttacattatttct

SEQ ID NO: 434119 - DNA, 120 bp, Artificial Sequence
  ENSG00000152684_21 (sequence is synthesized)
ttattttaattctgcttggtgttcttgcattgcatttaatgatcccttttctccccacctccacacactacattttttttagatttaaatagttttactattttaaatgattgccgtaca

SEQ ID NO: 434120 - DNA, 120 bp, Artificial Sequence
  ENSG00000152684_22 (sequence is synthesized)
attagtagacttgaagacaagttttaaatatttttcttcaaaggcttgttaaaccaatcatgttaaaaggaaattcttggttttggtttgttgttgttagcattagtcatatttgattta

SEQ ID NO: 434121 - DNA, 120 bp, Artificial Sequence
  ENSG00000152684_23 (sequence is synthesized)
gagggtaacttaaatcagttatttttagctttttagaactttgatctgctagggattgtcaaaataatctccttgaggcatctttatttttaaaatgagattaaagtatgtgatttgctt

SEQ ID NO: 434122 - DNA, 120 bp, Artificial Sequence
  ENSG00000152684_24 (sequence is synthesized)
gttatgtggctaattagtggcaaagctggaagtcattcccagtctggactttagttctttgcgccaaaacatgctatattatttatttatttttttgcttgtcaaagttatacttaattc

SEQ ID NO: 434123 - DNA, 120 bp, Artificial Sequence
  ENSG00000152684_25 (sequence is synthesized)
tgttttatatttgtatgtggcattaatttgggtttgcacatttttattggactattttagttgtgaagaagcctgttctaaagtttaagtcacatgactagtatgtggcagttgacttaa

SEQ ID NO: 434124 - DNA, 120 bp, Artificial Sequence
  ENSG00000152684_26 (sequence is synthesized)
actccaatactctttactatcattgacttaaactctgatactctttactataattatggaattgtgcaaatacctctgagtttaaaatattatttttattatttttggtgcacattccta

SEQ ID NO: 434125 - DNA, 120 bp, Artificial Sequence
  ENSG00000152684_27 (sequence is synthesized)
aaagttaaggaaggagcctcagtaatggaattgcttcttgaccttttgcaaacctcaatttagcaaaataattaggaacgatctaatagtgatgatacagtttttaactgctggatcagc

SEQ ID NO: 434126 - DNA, 120 bp, Artificial Sequence
  ENSG00000152684_28 (sequence is synthesized)
gacgcctatttcaagtagtgatactaactaaactttcgccggtctttcctgtgtctgtgggccttcctcctggtgtgacagacttggggatttcttgtaaacttcctaactagtctgaac

SEQ ID NO: 434127 - DNA, 120 bp, Artificial Sequence
  ENSG00000152684_29 (sequence is synthesized)
ctttttatttcttattgggaactgacacttccctatactttaaaactcacatatgtatatttttgtacatctatctcctaattcaaaagtaattgagattgtcatttcattataattccg

SEQ ID NO: 434128 - DNA, 120 bp, Artificial Sequence
  ENSG00000152684_30 (sequence is synthesized)
tgagtatctttaaattactatcaaatatgttactaaataatttaataagaatatagaaatgaagccactgagatccttaaagttgaaacctgattgttattatattttcagtaaggattt

SEQ ID NO: 434129 - DNA, 120 bp, Artificial Sequence
  ENSG00000152684_31 (sequence is synthesized)
ggagatttttggacatttttactctcataatctatgcagtactgaaatgaggtctaataaatataaccaatacatgttaggccataggttcttaaatttagctacctgttcacctcaact

SEQ ID NO: 434130 - DNA, 120 bp, Artificial Sequence
  ENSG00000152684_32 (sequence is synthesized)
tgagagctcttaaaaccctcagtgtccaggttgcagctcagactagttaaataacgttttatccctagaaatgttttttttaaagctacccagatgattccaataggcgtcaaggctaat

SEQ ID NO: 434131 - DNA, 120 bp, Artificial Sequence
  ENSG00000152684_33 (sequence is synthesized)
agccactgattcaggccttgctattcaaaagtatggtccgtaaaccagcagcatccctgagagcttgttggaaactagaattcagggatcttttgtagacctactgagacaggcgctacc

SEQ ID NO: 434132 - DNA, 120 bp, Artificial Sequence
  ENSG00000152684_34 (sequence is synthesized)
tgtaccaacatctctagatgattcctgtgcataataaaatctgataaacaaaggcaataggttattcttcctgtgctggtaaatctctggcaggggtccccagtcaggaaaaagatttga

SEQ ID NO: 434133 - DNA, 120 bp, Artificial Sequence
  ENSG00000152684_35 (sequence is synthesized)
gtattaaggtctttcaaaaaagttaactggccatactcaactgtctataaaacctctataaatttctgtttttatgtctatgaattattaaataaaatttaactcatttttaagaaatta

SEQ ID NO: 434134 - DNA, 120 bp, Artificial Sequence
  ENSG00000152689_0 (sequence is synthesized)
atttagccaaacaacctttaattcattgagctcaaagcttagcagcttcaatgttgttgttaggcataaacagcttgcaaatttcaattttttttctctcctcacttttgaactagattt

SEQ ID NO: 434135 - DNA, 120 bp, Artificial Sequence
  ENSG00000152689_1 (sequence is synthesized)
gggcaatggaggtgatgacagcattttagaagacagaacaggaattctaggtgtttaggcacgttgaagagaaacttgctagaggtgatgaagtggaaagaaaaagacaattcactatag

SEQ ID NO: 434136 - DNA, 120 bp, Artificial Sequence
  ENSG00000152689_2 (sequence is synthesized)
ggatcaacattattgcagttctgcaaaggatattttcttttaaaacatccatatctcttctttgccatggaaactacacccaatctacctgaacctgcggcacccctctgatgacccatt

SEQ ID NO: 434137 - DNA, 120 bp, Artificial Sequence
  ENSG00000152689_3 (sequence is synthesized)
tggattctctgatttcactgccaagattctcagttctccaaaatacttatcattcaggttgaataaaccagttctacagactgcttcttccatgcatttcccaatgatgctagctgccct

SEQ ID NO: 434138 - DNA, 120 bp, Artificial Sequence
  ENSG00000152689_4 (sequence is synthesized)
taaaattctttcagatttggaactgtatctgtatggaaacaacagagttttcttgaagtacaactaaggacaggtcaccactaggcactaacatcgctgacttgcatgattatggagatg

SEQ ID NO: 434139 - DNA, 120 bp, Artificial Sequence
  ENSG00000152689_5 (sequence is synthesized)
gtctatctgatgctgaaaatgtctctagttttttgacaacggctaaataaccatgggatcaagtggccttgggaaagcagcaacattagatgaactgctgtgcacttgcattgagatgtt

SEQ ID NO: 434140 - DNA, 120 bp, Artificial Sequence
  ENSG00000152689_6 (sequence is synthesized)
tgatgacaatggagagctggataatagttatttgccaagaatagttctactgatgcaccgatggtatttatcttccactgaattggcagaaaaacttctctgcatgtatcgaaatgccac

SEQ ID NO: 434141 - DNA, 120 bp, Artificial Sequence
  ENSG00000152689_7 (sequence is synthesized)
tggagaaagctgcaatgaatttcgattaaagatctgctacttcatgaggtactggattctgaagtttcctgcagagtttaatttggatcttggtttgattcgtatgactgaggaatttcg

SEQ ID NO: 434142 - DNA, 120 bp, Artificial Sequence
  ENSG00000152689_8 (sequence is synthesized)
ggaagtagctagtcaactaggatatgaaaaacacgtcagcctcatcgacatatccagcattccttcctatgactggatgagaagagtcacacagaggaaaaaagtatccaagaagggaaa

SEQ ID NO: 434143 - DNA, 120 bp, Artificial Sequence
  ENSG00000152689_9 (sequence is synthesized)
agcctgtctgctgtttgaccatctggagcccattgaattggctgagcacctcacttttctggagcataaatcttttagaaggatctcattcactgattaccaaagctatgtcatccatgg

SEQ ID NO: 434144 - DNA, 120 bp, Artificial Sequence
  ENSG00000152689_10 (sequence is synthesized)
ctgcctggagaataatccaaccttggaaagatcgattgctttatttaatggaatctctaagtgggtccagttgatggttcttagcaaaccaaccccccagcaaagggcagaagtcatcac

SEQ ID NO: 434145 - DNA, 120 bp, Artificial Sequence
  ENSG00000152689_11 (sequence is synthesized)
aaagtttatcaatgttgcaaagaagctccttcagctcaaaaattttaacaccctgatggcagtggtgggaggcctcagtcatagttccatttcacgcctcaaagagacccattctcatct

SEQ ID NO: 434146 - DNA, 120 bp, Artificial Sequence
  ENSG00000152689_12 (sequence is synthesized)
ttcttcagaagttacaaagaactggaatgaaatgacagagttggtctcctccaacggcaattactgcaattaccgcaaggcctttgccgactgcgatggcttcaaaatccccatccttgg

SEQ ID NO: 434147 - DNA, 120 bp, Artificial Sequence
  ENSG00000152689_13 (sequence is synthesized)
agtacacttgaaagacttgatagctgtccatgtcattttcccagactggacagaggagaacaaagtgaacattgtgaaaatgcaccagctctccgttaccctgagtgaactagtctccct

SEQ ID NO: 434148 - DNA, 120 bp, Artificial Sequence
  ENSG00000152689_14 (sequence is synthesized)
gcagaatgcctctcaccacttagaacccaacatggatttgatcaacctgctcacgctttccctggacctctatcacactgaagatgatatttacaaactgtcactggtgctggagcctag

SEQ ID NO: 434149 - DNA, 120 bp, Artificial Sequence
  ENSG00000152689_15 (sequence is synthesized)
aaattctaaatcgcagcctacctcccctacgacgcccaacaagcctgtggtacccctggagtgggcattaggggtgatgccaaagccagaccccacggtcatcaacaagcacataaggaa

SEQ ID NO: 434150 - DNA, 120 bp, Artificial Sequence
  ENSG00000152689_16 (sequence is synthesized)
attagtggagtctgtatttagaaactatgatcacgaccatgatgggtacatttcccaagaggactttgaaagtatagctgccaattttcccttcttggattccttctgtgttctggacaa

SEQ ID NO: 434151 - DNA, 120 bp, Artificial Sequence
  ENSG00000152689_17 (sequence is synthesized)
agatcaggatggcctaattagtaaagatgaaatgatggcttacttcctgagagctaaatcccaactacactgtaaaatgggaccaggatttatccataattttcaggagatgacctatct

SEQ ID NO: 434152 - DNA, 120 bp, Artificial Sequence
  ENSG00000152689_18 (sequence is synthesized)
caagccaaccttctgcgaacactgtgcgggatttctctggggcataatcaagcaaggatacaaatgcaaagactgtggagccaattgtcacaaacagtgcaaagacctcctggttctggc

SEQ ID NO: 434153 - DNA, 120 bp, Artificial Sequence
  ENSG00000152689_19 (sequence is synthesized)
agcccctcgctgcccccagcgcaggatgaggtgtttgagttccctggagtcactgctggacacagggatttagacagcagagccatcacactggttacaggctcttctcgcaagatctct

SEQ ID NO: 434154 - DNA, 120 bp, Artificial Sequence
  ENSG00000152689_20 (sequence is synthesized)
gtgaggctacagagggccaccaccagccaggccacccagactgaacctgtctggtcagaggctggctggggggactcggggtcccacaccttccctaaaatgaaatccaagttccatgac

SEQ ID NO: 434155 - DNA, 120 bp, Artificial Sequence
  ENSG00000152689_21 (sequence is synthesized)
aaagcagcaaaggacaaaggctttgccaaatgggaaaatgagaagcccagggtgcatgctggtgtggatgttgtagaccggggcacggagtttgaacttgaccaggatgaaggagaagag

SEQ ID NO: 434156 - DNA, 120 bp, Artificial Sequence
  ENSG00000152689_22 (sequence is synthesized)
accagacaggatggtgaggatggctgacttcaggctgcggaaactgaaggcaataatgttggcttttggaaggggcaagacgagaaactctgaagaaagctctgactctcaggaagttat

SEQ ID NO: 434157 - DNA, 120 bp, Artificial Sequence
  ENSG00000152689_23 (sequence is synthesized)
ctggaaagatacctggatgtttactgccttgggacactgtgggatctccatgtttggactatgggacagagaattgaccctaactaactaactatgaactatttatttcctcctccccta

SEQ ID NO: 434158 - DNA, 120 bp, Artificial Sequence
  ENSG00000152689_24 (sequence is synthesized)
cccctagttaagtgccacaaagactgtgttatgtagtcagtacttttttctcatgtatctttctctagaccatttatatacgggtgaaatgaaagcttttttgcatgtacttgatactca

SEQ ID NO: 434159 - DNA, 120 bp, Artificial Sequence
  ENSG00000152689_25 (sequence is synthesized)
gtctgtaaactcagacttcgctttttttgtgagactatcctttcaatatttttataaacttttgtgtgtgctgtggcagggaacagttaacaaggagtttatttagaggggtttttttca

SEQ ID NO: 434160 - DNA, 120 bp, Artificial Sequence
  ENSG00000152689_26 (sequence is synthesized)
ttgtttttcttgttttgttttgttttgttttgttcttcttggtgtgctttttggatgggaccagaacttaacattttcctgaggactaggaagctcatcagacactggaatgcagtgatt

SEQ ID NO: 434161 - DNA, 120 bp, Artificial Sequence
  ENSG00000152689_27 (sequence is synthesized)
gattcttctaatgatggtcaactgcaaggagaaactgtttacatccttcccactacacagttgctatgatatgtaacaagtcacacatgtatatatcacacaagtcttaccaattctgcg

SEQ ID NO: 434162 - DNA, 120 bp, Artificial Sequence
  ENSG00000152689_28 (sequence is synthesized)
tcactaggaagctatagcatggtcgtgaaagctctcctaatacttacttaaatagccatggaagaaaattatgcttgtcccttctgactgggttaagccatctttcttaagattcctgaa

SEQ ID NO: 434163 - DNA, 120 bp, Artificial Sequence
  ENSG00000152689_29 (sequence is synthesized)
gtagaaatagcaattaagaaattaattcaagttttgacggttaacatttagcagaaaaacaaaccattgaataagctactaggtgaaatgcaaaacaaccatcaatttttttaaactcaa

SEQ ID NO: 434164 - DNA, 120 bp, Artificial Sequence
  ENSG00000152689_30 (sequence is synthesized)
taattttgtgaaaaaaaaaaccaccaccaaacttttggttgtaaaagagaacccttgttcccttcctaagaaactgccttccacaattaaagaatactcatagaaagaaaataatcataa

SEQ ID NO: 434165 - DNA, 120 bp, Artificial Sequence
  ENSG00000152689_31 (sequence is synthesized)
atcatatttgattaacatttcatttaagcttttaaaatatcaattttttaaatagctcccatttacccaaaataactagttatgggtctatttcttccatgattagaggagagagaactt

SEQ ID NO: 434166 - DNA, 120 bp, Artificial Sequence
  ENSG00000152689_32 (sequence is synthesized)
gattcaagatactgaaaaatagagctgggactgagcctgtgaatgacaggaatgatctattaccaggtgactagtcggaaactacacagacgtgcactggtctgcatttgggggctaaag

SEQ ID NO: 434167 - DNA, 120 bp, Artificial Sequence
  ENSG00000152689_33 (sequence is synthesized)
tgtatatattccatttaaaatggaatttgtttgtatttggggcagtcttcagtaaagcctttctcctttcttttctccattgaggacagttctgctcagcaaaattgttgagtacctgtt

SEQ ID NO: 434168 - DNA, 120 bp, Artificial Sequence
  ENSG00000152689_34 (sequence is synthesized)
ctgggcaggtcccacgctatatgcacaaagttaagaaaaacttggtcttagcccttgggagctgacagcccatgggcattaaggcaaagtagttccagtgatttaaaatacggttccaaa

SEQ ID NO: 434169 - DNA, 120 bp, Artificial Sequence
  ENSG00000152689_35 (sequence is synthesized)
tacgctaaaaccaacttgtgccaaccagatttacagattggaaatactgcagatgatgtgaagttatcagttggaggagctgtgattaagctggataataagagaacgtgccatctgtaa

SEQ ID NO: 434170 - DNA, 120 bp, Artificial Sequence
  ENSG00000152689_36 (sequence is synthesized)
agcactcagaaggcagccatccctagatgttggtttcatgtatattacactatctactactatccataaatgcaataatatgcatgttaacaacattaaaaacagcaaacagcaatctaa

SEQ ID NO: 434171 - DNA, 120 bp, Artificial Sequence
  ENSG00000152689_37 (sequence is synthesized)
gtacagaaaagctttttgtgtgtttaaaaaaattgaagaaaattcaggaagaaacgtgttaataaacattgtactgttcttttgcttctcaaaggaattattcacttgccactttggtta

SEQ ID NO: 434172 - DNA, 120 bp, Artificial Sequence
  ENSG00000152689_38 (sequence is synthesized)
tttttgagttttcgtacataggaagttttatattgccagccttcctgtgataaagatattaaatgtaacttgagtaaaaaataaaaaagaataactatgtatatacatatataaattaca

SEQ ID NO: 434173 - DNA, 120 bp, Artificial Sequence
  ENSG00000152689_39 (sequence is synthesized)
gataccctttacactagattagcaggcaaaactatgatggtttgtgatatccatgcttgtagaagtaataagaagaaagggaacacagaagctttattttatagtggagtcctgactcta

SEQ ID NO: 434174 - DNA, 120 bp, Artificial Sequence
  ENSG00000152689_40 (sequence is synthesized)
taaagagagggcactagaagaccctttctctttccagaatgttctgcgattgtccaggaatctgatggaacccctgaaaacaaccctctggcaggtaggaacaatttagcaggcacttag

SEQ ID NO: 434175 - DNA, 76 bp, Artificial Sequence
  ENSG00000152689_41 (sequence is synthesized)
ttatgctatctttcaaagaaagaccaatttcaactatttcatgaccatgcacttacacaatctgtggaattatctt

SEQ ID NO: 434176 - DNA, 120 bp, Artificial Sequence
  ENSG00000152689_42 (sequence is synthesized)
atctttggtgataaaaagttgtgtaatttgtattctcttcagataggcaaagagtgactggataaccgatttgcgacatgccactcatgatatttccaaagcctatggacatttgacttt

SEQ ID NO: 434177 - DNA, 120 bp, Artificial Sequence
  ENSG00000152689_43 (sequence is synthesized)
atggacatttgactttggaaacagggtcagcttagtcttcagacaccgtatttgcttaggataattttgtttgtttgttttttcagacagagtcccactctgtcacccaagctggagtgc

SEQ ID NO: 434178 - DNA, 120 bp, Artificial Sequence
  ENSG00000152689_44 (sequence is synthesized)
acttagaacccaacatggatttgatcaacctgctcacgggaatatctggagaggacatttgccttacatcccaattcacgtaaccaggagttttaaaagctgatgtttctgttgcgtggg

SEQ ID NO: 434179 - DNA, 120 bp, Artificial Sequence
  ENSG00000152689_45 (sequence is synthesized)
ccatcgctgagccagttatccatttgacacatggaaatacccaagggtgttctggttctcttgagagagcatctccttgccttactgtgtggcttatttggattcttggttggctgtggt

SEQ ID NO: 434180 - DNA, 120 bp, Artificial Sequence
  ENSG00000152689_46 (sequence is synthesized)
agtgcttctgtcatctcatctccagcagatgctggtgccagtcatcacaggacttggaagctgagtcaggaggaagggaacatgctcctccaagtctgcactaactcctgataacaggga

SEQ ID NO: 434181 - DNA, 120 bp, Artificial Sequence
  ENSG00000152689_47 (sequence is synthesized)
attcagaaggaaggagtcacttggttttctctctttatttatgtaaccttcacagtgcgaggcttcaagctgggactcagggtacagaggtgcaaaagacagatgtgctgcccactttca

SEQ ID NO: 434182 - DNA, 120 bp, Artificial Sequence
  ENSG00000152689_48 (sequence is synthesized)
tgaggcttagagcctggcacagttgtctgttgtgggaattacaaaatagtaggcaactgcccacggctgatgtattttatttggcccatacggaatcctaaacttttgtcgttgttagtt

SEQ ID NO: 434183 - DNA, 120 bp, Artificial Sequence
  ENSG00000152689_49 (sequence is synthesized)
cccagtgtttgaaaattgggatagtttatctaaaactccagatttctggcttctcttaacaaatcagaagacttggcaactcaaggtccaacgttaggctgacagcaatttgtcatcact

SEQ ID NO: 434184 - DNA, 120 bp, Artificial Sequence
  ENSG00000152689_50 (sequence is synthesized)
gagcagtgatgttcatcacaaaccgcacctctccctgtgacttccctaacagagagtggtgtcaggtcccacttatcatcacacatttttttttattgtggcgctaaggggaaagatccc

SEQ ID NO: 434185 - DNA, 120 bp, Artificial Sequence
  ENSG00000152689_51 (sequence is synthesized)
taaataaattacatctgcaaagactctgttttccaaataagacgtttctatcaaaatgtaccttttacgcatcctacttggctcttttatataatggtatggctcccaaaggcatttgtt

SEQ ID NO: 434186 - DNA, 120 bp, Artificial Sequence
  ENSG00000152689_52 (sequence is synthesized)
tgtgacatgcggatgtttcctttcctgtaaaaaggcagagcctgggaggtgggagtgattactgttcaggggaaggtgaatacgatgtctcttctttgtaagcaggattgtcatgatctt

SEQ ID NO: 434187 - DNA, 120 bp, Artificial Sequence
  ENSG00000152689_53 (sequence is synthesized)
gaaatgatactggggagattttacagttaagtcggttttattttgtttagaaaaaaaactttgtgacaaagtgcaggtaaaagaaacgtgacctgattatgaagtccttaatttaaatgt

SEQ ID NO: 434188 - DNA, 120 bp, Artificial Sequence
  ENSG00000152689_54 (sequence is synthesized)
tatattcaagcagctgctagaacagtgactagaacaatccctgacacatagtagattactgataaatatttgttgaatgaatgatttgaaaatgaaattttatgacaccaacttcatttt

SEQ ID NO: 434189 - DNA, 120 bp, Artificial Sequence
  ENSG00000152689_55 (sequence is synthesized)
taaaggaagtagaacaggaaaaggaatctttgaaaacatcttcgcctctgagttttctctggcttcctccttctttcttttcccccacactccacctcatacacatgttagataaaatat

SEQ ID NO: 434190 - DNA, 120 bp, Artificial Sequence
  ENSG00000152689_56 (sequence is synthesized)
gttaaagaaaacttttcattcctacatggtcaaagaagggagcccgcactggttatgttcatggccagggaagtgatgtgattcattgagtgtcctagctttaaaggactaggtgagaat

SEQ ID NO: 434191 - DNA, 120 bp, Artificial Sequence
  ENSG00000152689_57 (sequence is synthesized)
ggttcaggtttattttaagcctcatgacttctgttttaggtgagtggaaacatgcactgtaaggctttacagagtttatccatgttctccagcctggatctgtgttgttgtccttgccta

SEQ ID NO: 434192 - DNA, 120 bp, Artificial Sequence
  ENSG00000152689_58 (sequence is synthesized)
caatgatcttcctctctcttttgtccaaattaagtcccaatcctcctggttaagtcccaattcacaaggacctccatgaatccatcctgatcatttctgtctccggggcccctatgcata

SEQ ID NO: 434193 - DNA, 120 bp, Artificial Sequence
  ENSG00000152689_59 (sequence is synthesized)
gtaataatataactaataacaaatgcgataataacagtaacattaacactataaaataacacttcttgagattttattgtgtaccaggtcctgtgtgaaatactttacatgcattatttc

SEQ ID NO: 434194 - DNA, 120 bp, Artificial Sequence
  ENSG00000152689_60 (sequence is synthesized)
catttccattttccagatgcagaaactgagtgtcagagaggaaattacttgctaaaggttacagagctagccagtggcaggctgcatgcttgaacccagccctgcctgaccacacagcct

SEQ ID NO: 434195 - DNA, 120 bp, Artificial Sequence
  ENSG00000152689_61 (sequence is synthesized)
ctgccctcgtgtatttactatgctgcctccctgatttctgaccggttcctggagcacttaaagtggagcaactacttcacactcagcatgtgctgttttattgctacgaacacatctttt

SEQ ID NO: 434196 - DNA, 120 bp, Artificial Sequence
  ENSG00000152689_62 (sequence is synthesized)
taggttcaggccctgtttattcaaataaattatcagggccttgagggcaagaaatgattttatatcagcttgcctcactaggacttagcacaatgctctcaaataataggagcctagtta

SEQ ID NO: 434197 - DNA, 120 bp, Artificial Sequence
  ENSG00000152689_63 (sequence is synthesized)
actgctcctttatttcaacagttctttaatcaaacttcaaaggcagcatttattacatttacaagtcttattgtttgcatctgtccccacttccagcctggaaacatcacatatccctca

SEQ ID NO: 434198 - DNA, 120 bp, Artificial Sequence
  ENSG00000152689_64 (sequence is synthesized)
tccgtgactcagcactgagcacctgggagctgctcagtaaatattgctgaggaattgagttgatggttctcgtcaatactgatgattaaccaggattaacgttttctcttttaaatttca

SEQ ID NO: 434199 - DNA, 120 bp, Artificial Sequence
  ENSG00000152689_65 (sequence is synthesized)
ttttccatctctgcgtgccgtctttttattgttctgcatttactcaaattattagacagtgaacttaaaacattcaacttgaaaaaaaattcagcaacgtaaataaataaataaatgtaa

SEQ ID NO: 434200 - DNA, 120 bp, Artificial Sequence
  ENSG00000152689_66 (sequence is synthesized)
tttgccacctctgtcattgtcaacagctcaagggattggggattagaatcactcatgaaaaacccacataggtcccactaagatgcccaataaattgattacccaagggcaggaaagaaa

SEQ ID NO: 434201 - DNA, 120 bp, Artificial Sequence
  ENSG00000152689_67 (sequence is synthesized)
tcctgtaagttggatagtttctccttttgtatagttttggaattttatgacacagcagcccgatgttactgagattagaaaaatcacctaatgtaggacaaggctctgtcagagttttcc

SEQ ID NO: 434202 - DNA, 81 bp, Artificial Sequence
  ENSG00000152689_68 (sequence is synthesized)
cgtcgtagaagtgccgatgggggaacacggaaacatctcgggtacaggaaactgcgatcctgaattaaatgtctactttaa

SEQ ID NO: 434203 - DNA, 120 bp, Artificial Sequence
  ENSG00000152689_69 (sequence is synthesized)
gtacaggaaactgcgatcctgaattaaatgtctactttaatggattggtaggtacatctgctggtgcaacagaattgagtctttgggatagaatgtgctttttgctgggagaagatattt

SEQ ID NO: 434204 - DNA, 83 bp, Artificial Sequence
  ENSG00000152689_70 (sequence is synthesized)
aacagctgctctcggcgtgctccggcacttggcagctggacaggcagagtgctgatgtgaaaaataccacgacaaaaccaccc

SEQ ID NO: 434205 - DNA, 120 bp, Artificial Sequence
  ENSG00000152689_71 (sequence is synthesized)
atctgcccgcctgggcctcccaaagtgcttggattagaggcgtgagccaccgtgccgggccgcagcttagggtaatgtttttaaaggaacttagtgatcatttttctgtcttgaagactc

SEQ ID NO: 434206 - DNA, 120 bp, Artificial Sequence
  ENSG00000152689_72 (sequence is synthesized)
aggaacttagtgatcatttttctgtcttgaagactcatatagtcaagttggagttataccaactatggcatgatgtaacgttaccttttagagacaatttggttgtttcctgaggtatga

SEQ ID NO: 434207 - DNA, 120 bp, Artificial Sequence
  ENSG00000152689_73 (sequence is synthesized)
aaactgcagtctgctcttcagtgtgcacgctccttgcccaacaaaaccatcggcattcttgaaagttctgcctgagtatagcacctttattcctgtggaggtatagtgcattctaactac

SEQ ID NO: 434208 - DNA, 120 bp, Artificial Sequence
  ENSG00000152689_74 (sequence is synthesized)
catgaatagtgtccactgtgatcatttccctctgcacgattatctgcccacaactgagagagtcttaacttgctagaataatggggacgcttcactatctgtcagtttcccaatatggca

SEQ ID NO: 434209 - DNA, 120 bp, Artificial Sequence
  ENSG00000152689_75 (sequence is synthesized)
attcagttcattgtatgacagcatcatcagaatgttgccaagatcataaaaatagcagtgcatgttgcctgatgattttacagtgcatattgtcatggccagggcttagaggtaggggaa

SEQ ID NO: 434210 - DNA, 120 bp, Artificial Sequence
  ENSG00000152689_76 (sequence is synthesized)
aaacatgtggacagctttgtgacaagagtctctcttatagtgtttctttctaaagtaactttttctgagtatgaatgtgaaaggtagccttctttgaattaaaaaatattctgaaaaatg

SEQ ID NO: 434211 - DNA, 120 bp, Artificial Sequence
  ENSG00000152689_77 (sequence is synthesized)
attgtctgtatttagaaactatgatcacgaccatgatgggtacatttcccaagaggactttgaaagtatagctgccaattttcccttcttggattccttctgtgttctggacaaagatca

SEQ ID NO: 434212 - DNA, 120 bp, Artificial Sequence
  ENSG00000152689_78 (sequence is synthesized)
aagactcagagccccagcttgaaggaaacagctgctctcggcgtgctccggcacttggcagctggacaggcagagtgctgatgtgaaaaataccacgacaaaaccaccctagttctccaa

SEQ ID NO: 434213 - DNA, 120 bp, Artificial Sequence
  ENSG00000152689_79 (sequence is synthesized)
ttttacaatcataaatcaagctctgtatttagatagagtgtctatccaaagccagtaaattaagatgaataaatagtctttggttatccagctgttttgtgaatatatatagatgtctag

SEQ ID NO: 434214 - DNA, 120 bp, Artificial Sequence
  ENSG00000152689_80 (sequence is synthesized)
acttggcagctggacaggcagagtgctgatgtgaaaaataccacgacaaaaccaccctagtgttcatttcactgggcaggttgtctaccagaaccaaggggcctctttgaattttctttc

SEQ ID NO: 434215 - DNA, 120 bp, Artificial Sequence
  ENSG00000152700_0 (sequence is synthesized)
gctgatgcgaactggggccacggcagccatcgcgctttgcagttcggtctcctggtgtacggccaacgccaagtaggggattgcgttccctccagtcgcagaccctatcagatttggata

SEQ ID NO: 434216 - DNA, 120 bp, Artificial Sequence
  ENSG00000152700_1 (sequence is synthesized)
tgtccttcatatttgattggatttacagtggtttcagcagtgtgctacagtttttaggattatataagaaaactggtaaactggtatttcttggattggataatgcaggaaaaacaacat

SEQ ID NO: 434217 - DNA, 120 bp, Artificial Sequence
  ENSG00000152700_2 (sequence is synthesized)
tgctacacatgctaaaagatgacagacttggacaacatgtcccaacattacatcccacttccgaagaactgaccattgctggcatgacgtttacaacttttgatctgggtggacatgttc

SEQ ID NO: 434218 - DNA, 120 bp, Artificial Sequence
  ENSG00000152700_3 (sequence is synthesized)
aagctcgaagagtgtggaaaaactaccttcctgctatcaatggcattgtatttctggtggattgtgcagaccacgaaaggctgttagagtcaaaagaagaacttgattcactaatgacag

SEQ ID NO: 434219 - DNA, 120 bp, Artificial Sequence
  ENSG00000152700_4 (sequence is synthesized)
atgaaaccattgctaatgtgcctatactgattcttgggaataagatcgacagacctgaagccatcagtgaagagaggttgcgagagatgtttggtttatatggtcagacaacaggaaagg

SEQ ID NO: 434220 - DNA, 120 bp, Artificial Sequence
  ENSG00000152700_5 (sequence is synthesized)
ggagtatatctctgaaagaactgaatgcccgacccttagaagttttcatgtgtagtgtgctcaaaagacaaggttacggagaaggcttccgctggatggcacagtacattgattaacaca

SEQ ID NO: 434221 - DNA, 120 bp, Artificial Sequence
  ENSG00000152700_6 (sequence is synthesized)
aactcacattggttccaggtctcaacgttcaggcttactcagagatttgattgctcaacatgcataacttgaattcaatagacttttgctggttataaaacagatgttttttagattatt

SEQ ID NO: 434222 - DNA, 120 bp, Artificial Sequence
  ENSG00000152700_7 (sequence is synthesized)
aatattaaatcaacttaatttgaatgagaattgaaaactgattcaagtaagtttgagtatcacaatgttagctttctaattccataaaagtacttggtttttacagtttataatctgaca

SEQ ID NO: 434223 - DNA, 120 bp, Artificial Sequence
  ENSG00000152700_8 (sequence is synthesized)
tcaccccagcgccatttgtaaagagcaactttccagcagtacatttgaagcactttttaacaacatgaaactataaaccatatttaaaagctcatcatgttaaattttttatgtactttt

SEQ ID NO: 434224 - DNA, 120 bp, Artificial Sequence
  ENSG00000152700_9 (sequence is synthesized)
ctggaactagtttttaaattttagattatatgtccacctatcttaagtgtacagttaataattagcttattcaatgattgcatgatgccttacagttttcaataactttttttcttatgc

SEQ ID NO: 434225 - DNA, 120 bp, Artificial Sequence
  ENSG00000152700_10 (sequence is synthesized)
aaacgtcatgcaataaaacaaactctaatgtttggcatccttgttgggcaaatgtttcatttaaatgtgtcttatctagctagtatactctgaaaatttgagtatttaatattaggcata

SEQ ID NO: 434226 - DNA, 120 bp, Artificial Sequence
  ENSG00000152700_11 (sequence is synthesized)
tgaagtggttgttgggaaaggagattccttcagaatatttagaatagcgtttaaggctctcaaggcttaggtatttaccatgagatggttgtggtcagttgcacctgataccatgtatcc

SEQ ID NO: 434227 - DNA, 120 bp, Artificial Sequence
  ENSG00000152700_12 (sequence is synthesized)
ctgaatcatgtgtatttttattagtaatgcagccactaccattgctgatggggtctgtgtcctagtccctgtgggattggccttctgaagaaaagcacatttatggtacacaaggttgat

SEQ ID NO: 434228 - DNA, 120 bp, Artificial Sequence
  ENSG00000152700_13 (sequence is synthesized)
tctcagtttggtaggctctatagttccatcccagctgtctaattctgaagtgctccagtcttattggtgcccaatggggtaatctgtgcctcttccccaaaagcaatgacaggcaccagt

SEQ ID NO: 434229 - DNA, 120 bp, Artificial Sequence
  ENSG00000152700_14 (sequence is synthesized)
gtctccacatttagatatattcccagtctctgtacatttaacagtactctctggggcaagcaataagtaggaccttgtgtgcagtttcattgtagagacatgtatatctgaggaataaaa

SEQ ID NO: 434230 - DNA, 120 bp, Artificial Sequence
  ENSG00000152700_15 (sequence is synthesized)
cagcttgttctgtgtcagtctgagatatgtggagattttgttcctatcctatagctcttttgtattctttggcatattttatatcctggtagaagaaaacaagtgcttgtttccaatttt

SEQ ID NO: 434231 - DNA, 120 bp, Artificial Sequence
  ENSG00000152700_16 (sequence is synthesized)
cctggtagaagaaaacaagtgcttgtttccaattttcttttttcttatttgctctcaggtagttcttactccatacaacaaagactttttgtttgttgggcttttttttttttttttttt

SEQ ID NO: 434232 - DNA, 71 bp, Artificial Sequence
  ENSG00000152700_17 (sequence is synthesized)
taccatgcctgacctgacttttgtttttagatattatgcttgccatgtgatagggcctgcaagcctcattg

SEQ ID NO: 434233 - DNA, 120 bp, Artificial Sequence
  ENSG00000152700_18 (sequence is synthesized)
tattatgcttgccatgtgatagggcctgcaagcctcattgctaggcttactaagaaaattttagtttttcaaaagcattataatttcctaagaaactgaattctttttttatatgtttga

SEQ ID NO: 434234 - DNA, 120 bp, Artificial Sequence
  ENSG00000152700_19 (sequence is synthesized)
gattcccatcattagtaatataagatgaaaggtaagtgccaaaaatgtatttttaaagaccctcaagtttaagatttatcctgattataagccaagttttatagtatatttaaccaattc

SEQ ID NO: 434235 - DNA, 120 bp, Artificial Sequence
  ENSG00000152700_20 (sequence is synthesized)
catcaagaataattttaatatcaaaaattagtgttttctgtagccattgtccatgtcagagttacagtcctttttgtcattgataatataacctatgaagcagataaggattgaggaata

SEQ ID NO: 434236 - DNA, 120 bp, Artificial Sequence
  ENSG00000152700_21 (sequence is synthesized)
tgactggaaggaattactatttagctaagctgacaaggtcgcttcttaagatgacatttggtttcagtaatctgactattctgttttcactttcatcttctttctaaatgaaaacaaaag

SEQ ID NO: 434237 - DNA, 120 bp, Artificial Sequence
  ENSG00000152700_22 (sequence is synthesized)
tgctccctcccttcctggaaacctcagtaacactatgggaaaagtagaacatgacattgcagcctattgatttcttcttccagataggtttaaagtactccttaagttctgactaaatag

SEQ ID NO: 434238 - DNA, 120 bp, Artificial Sequence
  ENSG00000152700_23 (sequence is synthesized)
aactaagccttattaaaaataactgcctcttgttcatgttatctgtaccttcagggacctgcctttcttcaagtatttcctagagtatctattatgatactgaagaagctaattatttgt

SEQ ID NO: 434239 - DNA, 120 bp, Artificial Sequence
  ENSG00000152700_24 (sequence is synthesized)
gttgtaaatgggtataaatgaaaaaaaaacatactggtttctctagccaggaaaaatgctttctggtgtaatatatcttgctccagaaccctcattctaattgtaacactaggatcaaag

SEQ ID NO: 434240 - DNA, 120 bp, Artificial Sequence
  ENSG00000152700_25 (sequence is synthesized)
aaacaaagtcactttgtggaccacagctaaactgtggatattttcccaaagacataagatttttatggcccgagcctctagaaaggaagccatgtttaggagcaaccagctttcctccca

SEQ ID NO: 434241 - DNA, 120 bp, Artificial Sequence
  ENSG00000152700_26 (sequence is synthesized)
gctttagggggcagagttcctgagccagaggacttactgtccagctttgagaacctctccagagtatatgcactgggtactgctctttttcaagagaaccaaattaagaggatggcaaga

SEQ ID NO: 434242 - DNA, 120 bp, Artificial Sequence
  ENSG00000152700_27 (sequence is synthesized)
gcctgtgtgaatgtgtgcatccatggagtatttcccaggtaaatactagtactggggacataggctaattgtgtgtcccacactgcaagatgctagggcgtagttaacactgtggtatac

SEQ ID NO: 434243 - DNA, 120 bp, Artificial Sequence
  ENSG00000152700_28 (sequence is synthesized)
atacaaatcaggcactgtccaaaagattttttaaaatctaaagtctgaaatgtaaaaatataaggtctcaacccacttttacacttttaaagagatcccatacctgtttcactgactgcc

SEQ ID NO: 434244 - DNA, 120 bp, Artificial Sequence
  ENSG00000152700_29 (sequence is synthesized)
gttaattacacttttggatcacagctggttaaattgatagatttcagtttatctcagtgaatttttagaatggagattatagcattttttaattggagaacagacatttcctaaagtata

SEQ ID NO: 434245 - DNA, 120 bp, Artificial Sequence
  ENSG00000152700_30 (sequence is synthesized)
tgaaaaaaaattattcactgttggtttaaaccagtatctttgtatgagtgccaaagatatatgaacacagatactgcctgtgcagacctaaattttagttttgtgtacctggatccatat

SEQ ID NO: 434246 - DNA, 120 bp, Artificial Sequence
  ENSG00000152700_31 (sequence is synthesized)
agttttgtgtacctggatccatatacaaattttttgtggtttatagcataaaagcagaacgttgtttctttcttagttttcaaccggctcatcttttgtttttgttttttgtttttttgt

SEQ ID NO: 434247 - DNA, 120 bp, Artificial Sequence
  ENSG00000152700_32 (sequence is synthesized)
acaggcgtgagccgccatgcccggccaattttcaactggcccatactttatagtgatggaaagcgcataaactacttgtaaatcattaaaatagggtgataactgtgataatagtgtttc

SEQ ID NO: 434248 - DNA, 120 bp, Artificial Sequence
  ENSG00000152700_33 (sequence is synthesized)
tttcttgcattctagaaaattattttattaactacattcaaaacccagcatttcacaggttccatcattagaaacagtatagttctagttaacatgattggagagtttcaggggaaaggt

SEQ ID NO: 434249 - DNA, 120 bp, Artificial Sequence
  ENSG00000152700_34 (sequence is synthesized)
ttacattttctgaaactgtatttggtatgtgactcaatgtggtatttcagtcttgttagtcacttacatgactgacgtttgcaaggatttattgccaagtaaaatttgaccagagtgcac

SEQ ID NO: 434250 - DNA, 120 bp, Artificial Sequence
  ENSG00000152700_35 (sequence is synthesized)
tgagaatagctacataaggggaaatctctcaaaattccttctgttcatttaatttggagcatattgtttaaatcattttaaacatatgtaaaaagttgaagcattaaaaaatcttcaaga

SEQ ID NO: 434251 - DNA, 120 bp, Artificial Sequence
  ENSG00000152700_36 (sequence is synthesized)
aacaatgaaaaaatagaaattagcaaacataagtttcttaatgcaaaattaatagtgaataaaatatagcctacattaaaagccagaggctttgctataaatataagagtttagaaaaac

SEQ ID NO: 434252 - DNA, 86 bp, Artificial Sequence
  ENSG00000152700_37 (sequence is synthesized)
agccagaggctttgctataaatataagagtttagaaaaacagtgtgcttcaattaaggactaaattatcaaaactgcaagatgaag

SEQ ID NO: 434253 - DNA, 68 bp, Artificial Sequence
  ENSG00000152700_38 (sequence is synthesized)
ccaggttcaagcgattctcgtgcctcaccatcccgagtagctgggattacaggtgcaccttggccagg

SEQ ID NO: 434254 - DNA, 75 bp, Artificial Sequence
  ENSG00000152700_39 (sequence is synthesized)
gatctacatgagccactgtgcccagcctaaaactacatgttgaagcttccggtcatttccattattatccttctt

SEQ ID NO: 434255 - DNA, 120 bp, Artificial Sequence
  ENSG00000152700_40 (sequence is synthesized)
catgttgaagcttccggtcatttccattattatccttcttttgaaattcaagttagtgctttttaaccaaataaaagaagaaccagctcttgggatatgtgactctgcctctgtataaag

SEQ ID NO: 434256 - DNA, 120 bp, Artificial Sequence
  ENSG00000152700_41 (sequence is synthesized)
tgactggaattttgttaaaaccgtgtttccacttctgaaccctgttaccattccccctcacaaatccccacccaacacctggattttaaagatcctccagtgtcaagggaagccacagag

SEQ ID NO: 434257 - DNA, 120 bp, Artificial Sequence
  ENSG00000152700_42 (sequence is synthesized)
tctattaaagaggcagttctgaaccaattaatttttgtccttataatttagagcattaaatagctaatatatttaatggcactaattgttgttcacggctttcatcatacttttaaacag

SEQ ID NO: 434258 - DNA, 120 bp, Artificial Sequence
  ENSG00000152700_43 (sequence is synthesized)
aatccaaagtattcaaaggaaagtaagcgaagttatccaaagccaactttgtttcaggtgtgtcccctgccccaaatagattttagggcagaaatagaaaactgagtttacacagaacta

SEQ ID NO: 434259 - DNA, 89 bp, Artificial Sequence
  ENSG00000152700_44 (sequence is synthesized)
ttttagggcagaaatagaaaactgagtttacacagaactatttttggaaaagctgcactggagtagatggattcttcttcagcatactt

SEQ ID NO: 434260 - DNA, 80 bp, Artificial Sequence
  ENSG00000152700_45 (sequence is synthesized)
tcccagcttcaagtgattctcctgcctcaaccttccaagtagcttggattacaggcgtgcgccaccacagctggctaata

SEQ ID NO: 434261 - DNA, 85 bp, Artificial Sequence
  ENSG00000152700_46 (sequence is synthesized)
attataggcgtgaaccactgcgcccggccagcatgcattttaaaagtggcttagatttagttttaaatattttggggtgaaaggc

SEQ ID NO: 434262 - DNA, 120 bp, Artificial Sequence
  ENSG00000152700_47 (sequence is synthesized)
gtggcttagatttagttttaaatattttggggtgaaaggcaggaacagttctgtttttgacatacaggttttctttgggattgttttcattttcaagtatagattcatgtcagaatggcc

SEQ ID NO: 434263 - DNA, 120 bp, Artificial Sequence
  ENSG00000152700_48 (sequence is synthesized)
aacttaacgtgggtttctgtattccctggtgttgctcttaacctgaactcataatcagttgccatactgaggcaagagcactcagggtgaacatagtcaagttactttaaaagtgataaa

SEQ ID NO: 434264 - DNA, 120 bp, Artificial Sequence
  ENSG00000152700_49 (sequence is synthesized)
agtgtttttccatggtgaaaccttcagtatttggctgaatgtaaagtatgttgaagtggtatattgatggtaagttgttaatcactaaccttgtttgcacttttgtacaccactgcttgc

SEQ ID NO: 434265 - DNA, 120 bp, Artificial Sequence
  ENSG00000152700_50 (sequence is synthesized)
actaggatcttggtgtgaattttcaattgttttacagtgtatacagattattaaggataatttatataaagatgtttctgtttaactttgtgtgttttacaacaaagagctataatagat

SEQ ID NO: 434266 - DNA, 120 bp, Artificial Sequence
  ENSG00000152700_51 (sequence is synthesized)
ggttaaacgtttttgaattgtgtttatatgttagtttgattatgttctattatcttttcacctgccatgaatttgagtgttaggaagggaaaaataaaatactaatctggtcttgaagaa

SEQ ID NO: 434267 - DNA, 66 bp, Artificial Sequence
  ENSG00000152700_52 (sequence is synthesized)
gtgtacggccaacgccaagtaggggattgcgttccctccagtcgcagagtttccctcttgtcgccc

SEQ ID NO: 434268 - DNA, 120 bp, Artificial Sequence
  ENSG00000152700_53 (sequence is synthesized)
aactgttttcagacattgggcaacagctaccacaggactgtgattcctgagagaaaggaaacaactctattttggttttatgccaagaggtaattttcagaccatggtgcaaagagagga

SEQ ID NO: 434269 - DNA, 120 bp, Artificial Sequence
  ENSG00000152700_54 (sequence is synthesized)
cacccaaacatagtccaatagtcttgctgagttgaggagatgtagaccagaatttggaaaggccaacaggactagaatttttttgctaggacagagaggagggagtaccggagaggaggg

SEQ ID NO: 434270 - DNA, 120 bp, Artificial Sequence
  ENSG00000152700_55 (sequence is synthesized)
acctctggagagaaaggactctagaaatttacatagctgaataccaatctgtgcatgcaatgggtaaagctccaaaaggctagtcaaagaacaattgtaagaatgctgttagccaaataa

SEQ ID NO: 434271 - DNA, 120 bp, Artificial Sequence
  ENSG00000152700_56 (sequence is synthesized)
ttactagagctctcatggggccaggaattgttgtttaatcccatttagccttctaacaaatgttaaaaactgatctgtaagcaagtgaactgtcagaacaaaattcaaccttcttcaaaa

SEQ ID NO: 434272 - DNA, 120 bp, Artificial Sequence
  ENSG00000152700_57 (sequence is synthesized)
gactacaacaaaatccagcactcaatatgaaattactagacatgcaaagaaacaggaaagtgattcagtcagtagaaacagacacaagtgtgacaaagatgatggaattagcagattaag

SEQ ID NO: 434273 - DNA, 120 bp, Artificial Sequence
  ENSG00000152700_58 (sequence is synthesized)
acataagacaatcgttatgaatgtgctcagggatttaaaggaaaacacaaacatgaggaaagaaatggaagatataacacagaatcaaatgaaacttctagaaatgaaaaatacagtatt

SEQ ID NO: 434274 - DNA, 89 bp, Artificial Sequence
  ENSG00000152700_59 (sequence is synthesized)
agaatcaaatgaaacttctagaaatgaaaaatacagtatttgaaatgaaaatagagacagggtctccctgggttgcccaggctggtctc

SEQ ID NO: 434275 - DNA, 120 bp, Artificial Sequence
  ENSG00000152700_60 (sequence is synthesized)
aaagtctgggcttacaggtgtgagctaccatgcccagcctgaaatggaaatttcactggataggattaatagtaaattagatagtgccagtactgcagaaagaaagaccactaaacttaa

SEQ ID NO: 434276 - DNA, 120 bp, Artificial Sequence
  ENSG00000152700_61 (sequence is synthesized)
ctcaatgcaacagaaactccagaatgaagcacagagagaaaagtgactgaaagcaaaataaacagagcctcaatgactggtgagacaacatcaggcagtctaacaaacctgcaactgaag

SEQ ID NO: 434277 - DNA, 120 bp, Artificial Sequence
  ENSG00000152700_62 (sequence is synthesized)
tcccagaagtggaagggaggagaaagaaagatagttatggaaataatggccacaattttttatggtaattgtttttgtaattaaagactgtcttatgtcagccataagagaaaattattt

SEQ ID NO: 434278 - DNA, 120 bp, Artificial Sequence
  ENSG00000152700_63 (sequence is synthesized)
cacctgtatcatttaagatgaattatatgaacaattattagattggagcagttatttgaattcatagcaaataattgtctgaagagattaacattttcagcaggaagaatagagaaggaa

SEQ ID NO: 434279 - DNA, 120 bp, Artificial Sequence
  ENSG00000152700_64 (sequence is synthesized)
aaataaatgttggatttgtggtgagtagaatactagaactgaatattacaattatttgttatattgtcagtatgaattggtgtatatctaattacaaaaaagtattattgtaccagtttg

SEQ ID NO: 434280 - DNA, 64 bp, Artificial Sequence
  ENSG00000152700_65 (sequence is synthesized)
gcagatatttaagaatgttagcacgggtctttgaatcaattttgcttctaagagaagttactat

SEQ ID NO: 434281 - DNA, 120 bp, Artificial Sequence
  ENSG00000152700_66 (sequence is synthesized)
agaagttactatttattcttaattagatggggaggaaagtctttgaaaaggaacctctactttactttttacacgattaatgggtttctaattttcatgtaaaaatattttaaaatctta

SEQ ID NO: 434282 - DNA, 120 bp, Artificial Sequence
  ENSG00000152700_67 (sequence is synthesized)
cggccaacgccaagtaggggattgcgttccctccagtcgcaggcttttcaccattctttagctctcacctaccaacaatcatcttcagtgaggactttgccacttgattcacagtctgta

SEQ ID NO: 434283 - DNA, 120 bp, Artificial Sequence
  ENSG00000152700_68 (sequence is synthesized)
attttgtaaaggggcccaacagcagcaggcaaggtcagcaccagatctggggccacagagtaagcaggtccatgatttgattgaaggttgatcataccatggctctgcccagagcaggca

SEQ ID NO: 434284 - DNA, 120 bp, Artificial Sequence
  ENSG00000152700_69 (sequence is synthesized)
gaggtcactctctctatctatgtcgcctcaagcagcagtggcacgcaaaggtcagtcagccctggccaggctgcgccctccccccggacagcactcaccgttggtgtagggagaccccga

SEQ ID NO: 434285 - DNA, 120 bp, Artificial Sequence
  ENSG00000152700_70 (sequence is synthesized)
ggccaaggcggctccgttctgggcctggaggctggctggggcgccgccggaggccggtattcccggctgggacatgatgactgggttggaaggggctggtcggggtcgacaacagcgcac

SEQ ID NO: 434286 - DNA, 120 bp, Artificial Sequence
  ENSG00000152700_71 (sequence is synthesized)
aagaagagagctgaaagaccactgctgaaagcggagggaggaggctaacgacttaagactgaagactgggagaagaggggggggcgcattaagcccgaggcatggcgccgcactctcccc

SEQ ID NO: 434287 - DNA, 120 bp, Artificial Sequence
  ENSG00000152700_72 (sequence is synthesized)
aggccaccggcggccacagcctagcctgggagctgaggcttgagagtcgggccggcggggccgcgaacgcccggctagaaggcggcagccaaacctagagagaaggagggaggccctggc

SEQ ID NO: 434288 - DNA, 120 bp, Artificial Sequence
  ENSG00000152700_73 (sequence is synthesized)
cggaagtgcctgtcagccgccggccgcgcagccgcaatcaggacacgtggcacttccggctccgggctcgcagcagccgccgccgcgccggcgaactcttctctgccagccgggctgccc

SEQ ID NO: 434289 - DNA, 120 bp, Artificial Sequence
  ENSG00000152700_74 (sequence is synthesized)
cgaggccacctgacagctcctggtgccccgaccccgacgaccgtgcccggcctcgccgccacgtcaccgactctcacggccggccggaagtgccgtgtgtcaccgctacggaaattcccg

SEQ ID NO: 434290 - DNA, 120 bp, Artificial Sequence
  ENSG00000152700_75 (sequence is synthesized)
ccgttgtgaacgtgacctcgctcgcagagccaggatcgtggggcaatctgagattcagtagccgctttcgtggggtgggactgacagttcctctcctcgggttttgtgaagattacctga

SEQ ID NO: 434291 - DNA, 120 bp, Artificial Sequence
  ENSG00000152700_76 (sequence is synthesized)
gaccatagaagtcatcgtcctctgttgagaccgtaccaccactgggagctggggcggttaatgttcatcgcagtatttcattcacatttcgtcttcgtgtttcagatgtaaattataagg

SEQ ID NO: 434292 - DNA, 120 bp, Artificial Sequence
  ENSG00000152700_77 (sequence is synthesized)
ggttttaaaaagaggtggttaaatatgtgtacatgttaatagtgtgatcaagccaagaaggaggcctttgtctttgactggaggactcagaggaattttaattttgaaactcgctgattc

SEQ ID NO: 434293 - DNA, 120 bp, Artificial Sequence
  ENSG00000152700_78 (sequence is synthesized)
agtcacgctcaagttcattagcacatttaaatggcagttttgtttcctcttctaagagtttacagtaaggaaaaacaacattgctacacatgctaaaagatgacagacttggacaacatg

SEQ ID NO: 434294 - DNA, 120 bp, Artificial Sequence
  ENSG00000152700_79 (sequence is synthesized)
gatgcgaactggggccacggcagccatcgcgctttgcagttcggtctcctggtgtacggccaacgccaagtaggggattgcgttccctccagtcgcagacagagtttccctcttgtcgcc

SEQ ID NO: 434295 - DNA, 86 bp, Artificial Sequence
  ENSG00000152700_80 (sequence is synthesized)
taacttccgaagaactgaccattgctggcatgacgtttacaacttttgatctgggtggacatgttcaagctcgaagagtgtggaaa

SEQ ID NO: 434296 - DNA, 68 bp, Artificial Sequence
  ENSG00000152700_81 (sequence is synthesized)
ggtctaacttttctatttttagtagagatgggatttctctatgttggccagtctggtctccaactcct

SEQ ID NO: 434297 - DNA, 120 bp, Artificial Sequence
  ENSG00000152700_82 (sequence is synthesized)
tgctgggattaaaggcatgagccacctcagtgggccactgtactgatttttaaggtgttgaagcttttccaagaagatttgttttaaaacagctaaaactttgacattgttagctgaaag

SEQ ID NO: 434298 - DNA, 120 bp, Artificial Sequence
  ENSG00000152700_83 (sequence is synthesized)
aactttgacattgttagctgaaagaaccaaattcgtcagcaatttaaggtgtttggtacagtggacaaaatgaggtgaagaagtccttttaacttgaaaaattaaacatagtattattta

SEQ ID NO: 434299 - DNA, 120 bp, Artificial Sequence
  ENSG00000152705_0 (sequence is synthesized)
agaatccagacgctaaggaaaatccctaagcagagattttctgttggatgctaaaagcaaggaataaaagttgaaaatttggaaaatgtctcaacaccgtcaccagcgccactcgagagt

SEQ ID NO: 434300 - DNA, 120 bp, Artificial Sequence
  ENSG00000152705_1 (sequence is synthesized)
catttctagttcaccagttgacactacatcggtgggattttgcccaacattcaagaaatttaagaggaacgatgatgaatgtcgggcatttgtgaagagagtcataatgagccgtttctt

SEQ ID NO: 434301 - DNA, 120 bp, Artificial Sequence
  ENSG00000152705_2 (sequence is synthesized)
taagataattatgattagcactgtcacatcgaatgcgttttttatggccttgtggaccagttatgacataaggtaccgcttgttcagacttcttgagttctcggagatcttctttgtgtc

SEQ ID NO: 434302 - DNA, 120 bp, Artificial Sequence
  ENSG00000152705_3 (sequence is synthesized)
catctgcacatctgagttgtccatgaaggtctatgtggaccccatcaactactggaagaacggctacaacctgctggatgtgatcattatcatcgttatgtttttaccctatgccctccg

SEQ ID NO: 434303 - DNA, 120 bp, Artificial Sequence
  ENSG00000152705_4 (sequence is synthesized)
ccagctcatgggcaaacagttcacttacctgtatatcgctgatggcatgcagtccctgcgcatcctcaagcttatcggctatagccagggcatccggacgctgatcaccgccgtggggca

SEQ ID NO: 434304 - DNA, 120 bp, Artificial Sequence
  ENSG00000152705_5 (sequence is synthesized)
tcttcctcctcatgtacatcttcgctatcttgggcttctgcctgtttggatctccagacaatggtgaccatgataactgggggaacctggctgcagcttttttcaccctcttcagcttgg

SEQ ID NO: 434305 - DNA, 120 bp, Artificial Sequence
  ENSG00000152705_6 (sequence is synthesized)
ccacggttgatggctggacagacctgcagaagcagttggacaatcgggaatttgctttgagccgggcattcaccatcatcttcatcttgctcgcctctttcatcttcctcaacatgttcg

SEQ ID NO: 434306 - DNA, 120 bp, Artificial Sequence
  ENSG00000152705_7 (sequence is synthesized)
tgggtgtgatgatcatgcacacagaggactccatcagaaagtttgagcgagagctgatgttggagcagcaggagatgctcatgggagagaagcaggtgattctgcagcggcagcaggagg

SEQ ID NO: 434307 - DNA, 120 bp, Artificial Sequence
  ENSG00000152705_8 (sequence is synthesized)
agatcagcaggctgatgcacatacagaaaaatgctgactgcacaagtttcagtgagctggtggagaactttaagaagaccttgagccacactgacccaatggtcttggatgattttggca

SEQ ID NO: 434308 - DNA, 120 bp, Artificial Sequence
  ENSG00000152705_9 (sequence is synthesized)
ctagcttacccttcatcgatatctacttttccactctggactaccaggacacaactgtccacaagcttcaagagctgtactatgagatcgtgcatgtgctgagcctaatgctggaagact

SEQ ID NO: 434309 - DNA, 120 bp, Artificial Sequence
  ENSG00000152705_10 (sequence is synthesized)
tgccccaggagaagccccagtccttggaaaaggtggatgagaagtagctgggcatggggcacccatgtgccgagagccttgcagaccatgacaggtccctattaaacacaggctttctga

SEQ ID NO: 434310 - DNA, 120 bp, Artificial Sequence
  ENSG00000152705_11 (sequence is synthesized)
cacaaagagtacttcttggtaaaaacaaagccattagagttgtagatgcatgaaaagaatttgaagaagattcgttcataaagtgtaaaagaatattcttcagaaacagattgaatatgt

SEQ ID NO: 434311 - DNA, 120 bp, Artificial Sequence
  ENSG00000152749_0 (sequence is synthesized)
agctgccgacgtggggcgggcagccgccggcggctgggagccgaggcgtcggtgcagacctggagacgggcatgggggggctgcggctgctggctgtggccctcacgtgctgctggtggc

SEQ ID NO: 434312 - DNA, 120 bp, Artificial Sequence
  ENSG00000152749_1 (sequence is synthesized)
cgcagggcagccagggtaagaccctgcggggcagcttcagcagcaccgcggcccaggacgcccagggccagcgcatcggccacttcgagttccatggtgaccatgctcttctgtgtgtca

SEQ ID NO: 434313 - DNA, 120 bp, Artificial Sequence
  ENSG00000152749_2 (sequence is synthesized)
gaatcaacaacatagcagtagctgttggaaaagaagctaaactctacctgttccaagcccaggaatggctaaagctacagcaaagcagtcatggttatagctgtagtgaaaaattatcca

SEQ ID NO: 434314 - DNA, 120 bp, Artificial Sequence
  ENSG00000152749_3 (sequence is synthesized)
aagctcagttgacaatgaccatgaaccagaccgaacataatctgacagtgtcccagattccgtctccacaaacgtggcatgtgttttatgcagacaagtatacatgccaagatgacaagg

SEQ ID NO: 434315 - DNA, 120 bp, Artificial Sequence
  ENSG00000152749_4 (sequence is synthesized)
agaattctcaggtggaagatatcccatttgaaatggtgttactaaacccagatgccgaagggaatccatttgatcattttagtgctggagaatctgggttacatgagttctttttcctcc

SEQ ID NO: 434316 - DNA, 120 bp, Artificial Sequence
  ENSG00000152749_5 (sequence is synthesized)
tagtcctagtgtactttgtgattgcttgcatttatgctcaatcattgtggcaggctattaagaaaggcggacccatgcacatgattttaaaggttctgacaactgcattgctgttacaag

SEQ ID NO: 434317 - DNA, 120 bp, Artificial Sequence
  ENSG00000152749_6 (sequence is synthesized)
ctggttcagctttagctaattacattcatttctccagttactccaaagatggaataggggtaccatttatgggaagtttggcagaattttttgacatcgcttcccaaattcagatgttat

SEQ ID NO: 434318 - DNA, 120 bp, Artificial Sequence
  ENSG00000152749_7 (sequence is synthesized)
acttacttttgagtctatgcatgggttggacaatagtcagaatgaagaagtctcaaagcagacctctccagtgggattctacgcctgcatccactggcattgcagtattcattgtcatga

SEQ ID NO: 434319 - DNA, 120 bp, Artificial Sequence
  ENSG00000152749_8 (sequence is synthesized)
cacagagtgttttgctactttgggaacagtttgaagatatcagtcatcatagctaccattcacaccacaacttagcagggatcctcctaattgttctaagaatttgcctagcattgtcat

SEQ ID NO: 434320 - DNA, 120 bp, Artificial Sequence
  ENSG00000152749_9 (sequence is synthesized)
taggctgtggactctatcagatcatcacagtggagagaagtacactcaaaagggagttctacatcacatttgccaaaggctgtatcttgtggtttttatgccatccagttcttgcatgca

SEQ ID NO: 434321 - DNA, 120 bp, Artificial Sequence
  ENSG00000152749_10 (sequence is synthesized)
tttctgtcatttttagcgactaccaaagagacaaggttattacaataggtgttatcctttgccagtctgtttccatggttattctctacagactctttctgtctcacagtctatactggg

SEQ ID NO: 434322 - DNA, 120 bp, Artificial Sequence
  ENSG00000152749_11 (sequence is synthesized)
aagtttcttcactttcttcagtaacactaccactgaccatatcatctggacacaaaagtcgccctcatttctgatacttgatttttgttgagaggaaaagtgaattggttaaaagagtgc

SEQ ID NO: 434323 - DNA, 120 bp, Artificial Sequence
  ENSG00000152749_12 (sequence is synthesized)
aataaggatccaaatacagtgacttttttttcatacatttagtatgaaaacttgaacagcgaaagcagagcatgttatttatataactgcatttaagcagtaccaagactgaaaaaaaag

SEQ ID NO: 434324 - DNA, 120 bp, Artificial Sequence
  ENSG00000152749_13 (sequence is synthesized)
gtaataaatgaaatgttttgaaatatacttaaacaacaaactttgaagaaagtgttgttataaaattattgaagcgatttctatgtggaaataaatgtgaaaaataactatgatattttg

SEQ ID NO: 434325 - DNA, 120 bp, Artificial Sequence
  ENSG00000152749_14 (sequence is synthesized)
gtaaaatattcaccacttataatgcctcatcttaatagctaactcaggtttaatagtcttataaaaagtaatcagttaaatgattacttgcttataaatatctaaactagtccagttatg

SEQ ID NO: 434326 - DNA, 120 bp, Artificial Sequence
  ENSG00000152749_15 (sequence is synthesized)
aaatcagtgtaatacattgatttttaaaactgctgctttttatgctttaaggaaaatgtatttcatatttgagtttaaaggaattgaaattacttcaggaaatgaatataaaataggttc

SEQ ID NO: 434327 - DNA, 120 bp, Artificial Sequence
  ENSG00000152749_16 (sequence is synthesized)
acagttaaatgaataagcttttgtttatttgtgggtggagttattctccaattttttctgccatttttggctctagttcaggttttagcttgattagcaaaggtttttgacaaacagttt

SEQ ID NO: 434328 - DNA, 120 bp, Artificial Sequence
  ENSG00000152749_17 (sequence is synthesized)
atgaaaaaataaaacttaaatacattacacgggttgtaaggacaaaggattttaaaatctgagcacttaggtgaagggacaagcaggtttatgtgtttaaacagaaagaagggaaaaggt

SEQ ID NO: 434329 - DNA, 120 bp, Artificial Sequence
  ENSG00000152749_18 (sequence is synthesized)
actatgtgatatggtactgaaattttgatcccaatagaattcatttctcttacgttgaatccccaatcataattaagccgtatacacagattaaattaacagaagcatttcacataaatg

SEQ ID NO: 434330 - DNA, 120 bp, Artificial Sequence
  ENSG00000152749_19 (sequence is synthesized)
ttggtttcagtcatcaactacccatgaattcctgcccaaggatacttaatcaggattaaattttctatgaataattgaaaaacaaaacactcactggatttgttataatccgtgttggca

SEQ ID NO: 434331 - DNA, 120 bp, Artificial Sequence
  ENSG00000152749_20 (sequence is synthesized)
ctggattctaagtagttgccatcttgaatcctttgtaataaagccatacttttgtgtgtgtgtgtgatgccccagtattgagtatgctagctaaaaaatatcaagtgcctgattaaagaa

SEQ ID NO: 434332 - DNA, 120 bp, Artificial Sequence
  ENSG00000152749_21 (sequence is synthesized)
ttgctaaatggttgtcaatactcgctgtataaaatgagtattcccattaatagtcactgattggaaattattctgttgctgtttgtcaagctgttcaggccttttcctttttacttctgg

SEQ ID NO: 434333 - DNA, 120 bp, Artificial Sequence
  ENSG00000152749_22 (sequence is synthesized)
cttattttaaaaatattttttatctatttactgtgtgtttaagcaagcaacagtgcactgatctggtagttaaattttttaattaaatagttaaaataatgtagtgcaacttaaaaatat

SEQ ID NO: 434334 - DNA, 120 bp, Artificial Sequence
  ENSG00000152749_23 (sequence is synthesized)
ctatggctttgtttttgtttttcttttgtacctagtctcattggaaatgactagtattctgcctcattttcagggcagaatatgtgtttgtgacccaaaatgacaaagttaccaagttca

SEQ ID NO: 434335 - DNA, 120 bp, Artificial Sequence
  ENSG00000152749_24 (sequence is synthesized)
acctgctcattaaatcatctctctattagttctttgtaaatcacttagtacattagagctacaggttaagactagaaagtctgagttatgttttaggtatacatgatcgtctgagtggtc

SEQ ID NO: 434336 - DNA, 120 bp, Artificial Sequence
  ENSG00000152749_25 (sequence is synthesized)
ataaccttttcttttatcatgtctcgctaataaccccagctattgtctgttgtgttcagctgagatgcaaaaaagaaattaagcaaaaaagaaaaagatgaagacttttcatgaattttg

SEQ ID NO: 434337 - DNA, 120 bp, Artificial Sequence
  ENSG00000152749_26 (sequence is synthesized)
tgaacttgccaaaaggggaagggaaaaatctttgtgttacttcactcaaagaacataagtaactgcaattaacatatatgaaatttattactctgcttgcatttatgaaactaaccagtt

SEQ ID NO: 434338 - DNA, 120 bp, Artificial Sequence
  ENSG00000152749_27 (sequence is synthesized)
ttttaaactttaattcttaaatttatggttggaaatgctgataatttattttgttatttaagagctgttgttaagtggaggaaagtagttgttaataaatgtataaaactgttcttgact

SEQ ID NO: 434339 - DNA, 120 bp, Artificial Sequence
  ENSG00000152749_28 (sequence is synthesized)
agtaatcagggacaaaatttatagttcataagtcatgacacagtattcgctctttttctgaatgtttacatagagattcatcactgcagattacagaaagttaagtgtatactacaaact

SEQ ID NO: 434340 - DNA, 120 bp, Artificial Sequence
  ENSG00000152749_29 (sequence is synthesized)
ctaattaaagataaaaatcttttctacttttctttgtcagataatgcttttttatgtgtttttacattttttgaaagaagataaatggttcatccagagctttattaagaagcatttctt

SEQ ID NO: 434341 - DNA, 120 bp, Artificial Sequence
  ENSG00000152749_30 (sequence is synthesized)
ttcttcccttaaaaaatagatgcttatttttattgacatgtgtataataagatgggtgcctactgtgatgcattttaccaggcattttaccttcattattactcatctctattgtgataa

SEQ ID NO: 434342 - DNA, 120 bp, Artificial Sequence
  ENSG00000152749_31 (sequence is synthesized)
ccaggctcccatttaactgagtataagagagaataaatgatttctctaaggtcatcaaactatttagtttttccactttaccttcatgatttaaggaacatgtattagctgtgttttagt

SEQ ID NO: 434343 - DNA, 120 bp, Artificial Sequence
  ENSG00000152749_32 (sequence is synthesized)
gagaatgaattgctatccatcataatttttgctgttgatttgaacattaaaactggaattgtgctaaaatcagaacatgcgcttgaatatctgtaagacctcagcacacttcagtatttg

SEQ ID NO: 434344 - DNA, 120 bp, Artificial Sequence
  ENSG00000152749_33 (sequence is synthesized)
aacctggcttttaaccagacagtattactagcaggagagttaatctaggcagaagagcttgctttagggtaattatttattatctccagtaaagtcacatctgatgaacataggagatac

SEQ ID NO: 434345 - DNA, 120 bp, Artificial Sequence
  ENSG00000152749_34 (sequence is synthesized)
acaaatctgagatcatctctaaaataatgagactagaacctatctatcaacatgaacatgggctccttcagcatgtttcttctaggagactgcacgttctttggaatttggaaatttgga

SEQ ID NO: 434346 - DNA, 120 bp, Artificial Sequence
  ENSG00000152749_35 (sequence is synthesized)
attatctgtgaaacattttcttaaatagcttctgtggtatcaaatcattgaggttgttttttgtttgttttgagaattgatatgattgttagaagtagccagatacgaagaggtaatact

SEQ ID NO: 434347 - DNA, 120 bp, Artificial Sequence
  ENSG00000152749_36 (sequence is synthesized)
gttttttattccaacatgtatttgtgaattgagactaaaataatgagattggttttcctctgtgatctgaaagtagtgtggtagaagcaccgtagcttgatttcttgcaatagctctcta

SEQ ID NO: 434348 - DNA, 120 bp, Artificial Sequence
  ENSG00000152749_37 (sequence is synthesized)
atattaccatgtccacacttgggcagccttctgcacagctccaggggcatcatatgtgttgtgctgtaggagtgccatgaagcctggaggtgaggaaagaagtgatcctgcccactaggg

SEQ ID NO: 434349 - DNA, 120 bp, Artificial Sequence
  ENSG00000152749_38 (sequence is synthesized)
ccattctccacagtgtagccaaaacaatctcttaaaaatggaaatcatctggatgatgagcatacagaaattctttgtgctaatcttgtaatttttttgtaagtttgaaattatttcaaa

SEQ ID NO: 434350 - DNA, 120 bp, Artificial Sequence
  ENSG00000152749_39 (sequence is synthesized)
aagtttaaaaatcatataaatcagatcaaactactacttccctgacaaaaaccctccatgtgcctctcattgcacttaggaaaagaagtcctcactcattactatgttctgcaaggccca

SEQ ID NO: 434351 - DNA, 120 bp, Artificial Sequence
  ENSG00000152749_40 (sequence is synthesized)
tatgatctggttatctcttaatttgtaccactctctcacacacatatcccagcctcattgtccttcatcaaaaaaagatctagcttatatcacaccctcagatacttggcactagccatc

SEQ ID NO: 434352 - DNA, 120 bp, Artificial Sequence
  ENSG00000152749_41 (sequence is synthesized)
ttctctgcctgggacattctcttccaaatcttagcatggttggaaggctgaatcctcatccttcaggttctcagctgagatgtcttttagagaactcaccatctgtggtggatttatatg

SEQ ID NO: 434353 - DNA, 120 bp, Artificial Sequence
  ENSG00000152749_42 (sequence is synthesized)
gtgcagtttagtcaacctggagataggttctgcagaattctcttccatgcataatttcaggacaatgtaggccataagaaatgtttgatacaagatatagaaggcagaagtaaagtagca

SEQ ID NO: 434354 - DNA, 120 bp, Artificial Sequence
  ENSG00000152749_43 (sequence is synthesized)
gccagatctgcattctttttgtaagaggaagggccagacaaggcacaaggcacaaggcactgttgcagcttatccacattattgcttatctgttggcttctcttggcctgtgggacaaca

SEQ ID NO: 434355 - DNA, 120 bp, Artificial Sequence
  ENSG00000152749_44 (sequence is synthesized)
gccaggcccacaggaacaccagttcctgccggaatggctccttcagcttctctggctcctgggccaggtgtgcgttttactctgacaaagggtgccagcttctgctggacaactccatca

SEQ ID NO: 434356 - DNA, 120 bp, Artificial Sequence
  ENSG00000152749_45 (sequence is synthesized)
ttcacactggaggattagaggcagggagagacctgtatggcttccagtccatcctcacaagttccactcagttcccacaggttctactcatcctagcaagttccttgcttcccccatttc

SEQ ID NO: 434357 - DNA, 120 bp, Artificial Sequence
  ENSG00000152749_46 (sequence is synthesized)
ccatgtcttccctttccaactgccagacacaaaagaaaccgcctcctataatccctataataagccccttattttgaatattaagatatgtgtatgtgtattagatcctagtggttcttt

SEQ ID NO: 434358 - DNA, 120 bp, Artificial Sequence
  ENSG00000152749_47 (sequence is synthesized)
tctgatcagaccctgattaaccataccatcctacctaatgctattcccccatcctagttctatcatattatccctttttttgtttgttgtacttagctggtttatctttgtcatctctca

SEQ ID NO: 434359 - DNA, 120 bp, Artificial Sequence
  ENSG00000152749_48 (sequence is synthesized)
aattagaatataaattttaagtgagtttgtctctattgttcattgctgtatgcctaatactaggacactccctggtgcatactagatgctcaaaaatatttttgagtgaatgaaggcaat

SEQ ID NO: 434360 - DNA, 120 bp, Artificial Sequence
  ENSG00000152749_49 (sequence is synthesized)
gctgaaaaagttccaaatctgtacttaacagtgtagtattaattatgtaatagaagtacccgtagtgacttcaataataccttgcctattctttgttcaattgcatggaacttggtagtg

SEQ ID NO: 434361 - DNA, 120 bp, Artificial Sequence
  ENSG00000152749_50 (sequence is synthesized)
tgtaaaaatcttgactagtcaagtagttgtcataaaacatcagttacgagaggatttctcaaattctcacagaggcagtttctctttattttatgtagtcctgtaataggaccatgtgtc

SEQ ID NO: 434362 - DNA, 120 bp, Artificial Sequence
  ENSG00000152749_51 (sequence is synthesized)
tggtttctggcctgccacaaccagaagcaccaatttaaaagagaagtttctagtcagctagaggagggaatgttgacagtagtcagaagcagctgggaaaagatgggaaaactagaaatg

SEQ ID NO: 434363 - DNA, 120 bp, Artificial Sequence
  ENSG00000152749_52 (sequence is synthesized)
acaataacactcaaattgcagcagcctggggtcatttagtgtaggtgaaagcagccctgtgttgtgtatctcagtagactcttaagagatttgttgttcaatgtattcatgacagtgact

SEQ ID NO: 434364 - DNA, 120 bp, Artificial Sequence
  ENSG00000152749_53 (sequence is synthesized)
gatggtaatcaagaaaatattaagttataagttatgttcagtagcctcaaagaagtatgcgaaaaccttctaatgttttcttcttgttaaacaggtaatatatgcacattgtacaaaaat

SEQ ID NO: 434365 - DNA, 120 bp, Artificial Sequence
  ENSG00000152749_54 (sequence is synthesized)
cagaaagttgaaaaaggtggggaaaagaagtccttctctcactcatttcccttccctgaatccaaactctgttaccagttatctttctagaaatggccccatgcacatataaacatatat

SEQ ID NO: 434366 - DNA, 120 bp, Artificial Sequence
  ENSG00000152749_55 (sequence is synthesized)
gaaacacaaattatagcataacatacagacttttgcacattcagcaatttattctgtagccttacctagaattgtcccatttttttcaccaattgcatagaactccattatatggatgta

SEQ ID NO: 434367 - DNA, 120 bp, Artificial Sequence
  ENSG00000152749_56 (sequence is synthesized)
ttttgattttttcaaagaatcagttctgttactgcacgttgttggttttcagtcttgctaatacagacaaggctgaaattaagacagtaatcaagaatttgccaagacttccttccctcc

SEQ ID NO: 434368 - DNA, 120 bp, Artificial Sequence
  ENSG00000152749_57 (sequence is synthesized)
tcccaaaatgcctccactccaggttccaggtctagatccttgggattttctaggtgatggaagtatctttgttattcatagtgagctctgatagttacgctaaccagatgactcaaatag

SEQ ID NO: 434369 - DNA, 120 bp, Artificial Sequence
  ENSG00000152749_58 (sequence is synthesized)
gggctagccacaccagaagaccaaccattggattagagggttggagttttgagtcatatgatattagcccaacctctgaggtggagagaggggttagagatggagttcagctttatatag

SEQ ID NO: 434370 - DNA, 120 bp, Artificial Sequence
  ENSG00000152749_59 (sequence is synthesized)
agattgagtcaattaatcatgcctgtcatgaaaccccgagagaaactctggtcagtgatgctcaagtgaacttccctggttggcaatactctggtgtgttctaggagggtgacatgtccc

SEQ ID NO: 434371 - DNA, 120 bp, Artificial Sequence
  ENSG00000152749_60 (sequence is synthesized)
tgagggcacagaaactttgtgtttgggatcctcttacaccttgctctatgtatgtcttcttttggctgttctgatttgtatccttttgctataataaactgtaatagtacgcatagcact

SEQ ID NO: 434372 - DNA, 120 bp, Artificial Sequence
  ENSG00000152749_61 (sequence is synthesized)
ttgctgagttctgtgagttgttctatttaattatagaacctgaaggtattgtggggacccctgaacttgcagccagttggtcagaagtaaggatggtcctgggaatgcccaaagttgcta

SEQ ID NO: 434373 - DNA, 120 bp, Artificial Sequence
  ENSG00000152749_62 (sequence is synthesized)
gtttctgaagtgagggcagtcatatggaggactgggcccttaatctgtgaagtttggcttaacttcaggcagttggtgtcagaagccattgcaaatatcctgatgatccgtgcaaaacaa

SEQ ID NO: 434374 - DNA, 120 bp, Artificial Sequence
  ENSG00000152749_63 (sequence is synthesized)
aaacacttaacagaaaattacgttgtactctctgtacggataattttcggttaagtgtttttgttttccatggattgtactagatatcaatctgataaataacttttattcattatagtt

SEQ ID NO: 434375 - DNA, 120 bp, Artificial Sequence
  ENSG00000152749_64 (sequence is synthesized)
ttaatttgcatttctcttattaatttttgttttaaaaccattttctttccagttctacgatctgttaacatatttttcccacttttctattgggttggttgtctttttcttattgatttg

SEQ ID NO: 434376 - DNA, 120 bp, Artificial Sequence
  ENSG00000152749_65 (sequence is synthesized)
ttaaaactctttataacagaaattggtcatttgtgatatgagtctgaactgtgtttctcaatttgtgatttttctctttacttttttaatggtgtctttttcttgtagtttttttaatgc

SEQ ID NO: 434377 - DNA, 120 bp, Artificial Sequence
  ENSG00000152749_66 (sequence is synthesized)
aggtggaattatcagtctttcatttttttcttctgtgttctacctgtttcacaggtagaaaagccttagctctttgagattatgtttaaatgccctgtattttcatctagtggttttatg

SEQ ID NO: 434378 - DNA, 120 bp, Artificial Sequence
  ENSG00000152749_67 (sequence is synthesized)
gttttattttgtatgtttttttcatccacctggaatttattttgctgttaaaatatgaattagagatccaacttaatttttttcagatggttgttgacttattgcaatatcatgtgttat

SEQ ID NO: 434379 - DNA, 120 bp, Artificial Sequence
  ENSG00000152749_68 (sequence is synthesized)
ataatccatctttactgattcgttgctaattggtttctggacttttaaggctatctgatgaactgttgatctggtaccacactgtttcaattattgtagtcttaaaattgctgtacgctt

SEQ ID NO: 434380 - DNA, 120 bp, Artificial Sequence
  ENSG00000152749_69 (sequence is synthesized)
tggtagggataattttctgttaagtgtttttgttttttataattttccaattagtcttgctcattttttatataaactttgaaatcaatttttctgattttcaaaagaaaaaaaatcctg

SEQ ID NO: 434381 - DNA, 120 bp, Artificial Sequence
  ENSG00000152749_70 (sequence is synthesized)
tttagtattcttagtggaatgaattaaatttccatagcaatttagggaaatttgactttcttaacgtgttgagtgttaaacccacaggtggtagcatgacattgactcctcagccaagca

SEQ ID NO: 434382 - DNA, 120 bp, Artificial Sequence
  ENSG00000152749_71 (sequence is synthesized)
tattatcaactgtcggaaactaggttttcccatagtgatccaagaaactagtacgaaatgcctttctgattttttaaaacttgtatacatatatagtacatattatatatacttatatat

SEQ ID NO: 434383 - DNA, 120 bp, Artificial Sequence
  ENSG00000152749_72 (sequence is synthesized)
taagtaatcagaagtatgtgtttctcaatcaccttttaaagacttctttatatagctcttgtacatttcttgatatgaatatgttaatgttttctttcattatgttgcatatggcttttg

SEQ ID NO: 434384 - DNA, 120 bp, Artificial Sequence
  ENSG00000152749_73 (sequence is synthesized)
ttttctgcatgaaaactattgatttctgcattctaattttgttcccagtcacctaactgaattcttctaacagttgtaataaatttctggttggctctcttgtgttttctaggtaaacaa

SEQ ID NO: 434385 - DNA, 120 bp, Artificial Sequence
  ENSG00000152760_0 (sequence is synthesized)
agagtccagggagagtgcgcgggcggccgccggctgaatgaagcctgggacgcgggagccgcgccgcgcgcagtgtctgcagtgccggaggtctgggaggctccgggcgaagcctccctg

SEQ ID NO: 434386 - DNA, 120 bp, Artificial Sequence
  ENSG00000152760_1 (sequence is synthesized)
ctgcaggttatgatgatgtcagacaatgctaaaggcagagcagctcattcatggaagaaaagagggagtatttcttctctaagtaatcatgaattttggcgaaaggaaattcatgggcgc

SEQ ID NO: 434387 - DNA, 120 bp, Artificial Sequence
  ENSG00000152760_2 (sequence is synthesized)
atcaaagattctatgagtactgtgtcttatatggaagaacccagtcagcgtgatgatatctctcgccttacagttcagatggaaaacacctatcagttgggtcctcccaaacattttcct

SEQ ID NO: 434388 - DNA, 120 bp, Artificial Sequence
  ENSG00000152760_3 (sequence is synthesized)
gtggtcaccgtcaatcatattttgaaagatgtagtaaccagctatctacaagtagaagaatatgaaccagagctctgtagacagatgactaaaaccatttctgaggttattaaagcccag

SEQ ID NO: 434389 - DNA, 120 bp, Artificial Sequence
  ENSG00000152760_4 (sequence is synthesized)
gtcaaggacttgatgattccacggtataaactaattgtgattgttcacattggacaactgaacaggcagagcatacttattggaagcagatgcctctgggatcctaaaagtgataccttt

SEQ ID NO: 434390 - DNA, 120 bp, Artificial Sequence
  ENSG00000152760_5 (sequence is synthesized)
tcatcttatgttttcagaaattcttctctcttcgctcttgcaaatgtctatgcagtttaccttgagtgattgaaaataagaaatctagctcttacttttgaaaattctgaggcaggctgt

SEQ ID NO: 434391 - DNA, 120 bp, Artificial Sequence
  ENSG00000152760_6 (sequence is synthesized)
atgtctgtacacaaaagttttactgccaaaaactttgagaaagaaacaacactgatatttcaagcaactggaagcttttgaattttttcatattctagtaaagatttggggaggggaggg

SEQ ID NO: 434392 - DNA, 120 bp, Artificial Sequence
  ENSG00000152760_7 (sequence is synthesized)
tagccacagaaagaatcttgtttatctaaagcaggaacttgatcttggttttgctggattgctttccatagacatagattcttattaaatatttgttttggtactaattattttaattat

SEQ ID NO: 434393 - DNA, 120 bp, Artificial Sequence
  ENSG00000152760_8 (sequence is synthesized)
tctttaattagagtgttacaatttcctgcattgttttttaataaaaagaagctttagaaaaactatggctatataccctgaccaataaatgatagtagaatattcaacatggtatacaca

SEQ ID NO: 434394 - DNA, 120 bp, Artificial Sequence
  ENSG00000152760_9 (sequence is synthesized)
tgtacctgacagttgaaactgctgaggtagaattaatggcttcataacaattatcgtggtcccacgggctgcaagctaaaactagaagctcttgtggcttgcctgcactttacacaattg

SEQ ID NO: 434395 - DNA, 120 bp, Artificial Sequence
  ENSG00000152760_10 (sequence is synthesized)
tgggagaaccgaaagttggctcttcagtaatggaaactataaagtgaataaaggctttttgggacactgaagtagacattgtgatattaaatatacatgatgcttaatactaaatgtgtc

SEQ ID NO: 434396 - DNA, 120 bp, Artificial Sequence
  ENSG00000152760_11 (sequence is synthesized)
tgtaacacataaaatcatttattggaaagagacattgcttttaaatatcctaggctaacaaactttttcacaaaatatatggctggcaccttaacaaataaagcatgtgtagttaccatt

SEQ ID NO: 434397 - DNA, 120 bp, Artificial Sequence
  ENSG00000152760_12 (sequence is synthesized)
ttactcctatgaatttaatactaaagtgacccagtgaggtttttgaatagacgggtgctaaaatttacagggctgaaatagcttattattctgctggttaatgtatcttacgccacggat

SEQ ID NO: 434398 - DNA, 120 bp, Artificial Sequence
  ENSG00000152760_13 (sequence is synthesized)
catttatttttatgaagctttcaagtctttgtgtgcaagtaaaatgatgttgtggcgttgttcttggatggtaagtggactgcctagaggacatttgttaaaggtcaaagacaaattgta

SEQ ID NO: 434399 - DNA, 120 bp, Artificial Sequence
  ENSG00000152760_14 (sequence is synthesized)
cacatatggagaaaattagcaatgctgtagtcttaaggaaaaaatgatttatcattcatatcaaaaagagtttagcaaatggaaaaccagttaatgctttaattttaaaatgttttggtg

SEQ ID NO: 434400 - DNA, 120 bp, Artificial Sequence
  ENSG00000152760_15 (sequence is synthesized)
tcttacttttccctaaaaatgacatgtagtaaaaaatggatacttttaaaatcccttcccttctgctattttctggcttttaaagtgattattcaaaatgaatttgtcaattttcacttt

SEQ ID NO: 434401 - DNA, 120 bp, Artificial Sequence
  ENSG00000152760_16 (sequence is synthesized)
tttttttctgttagtgcattagtgggaatatgtctatgtaataatttatcacaaccaatatttgtcaatctccatagaacagttttcaatctggattagattacacgtataacaagtaaa

SEQ ID NO: 434402 - DNA, 120 bp, Artificial Sequence
  ENSG00000152760_17 (sequence is synthesized)
tgagcttcatattttcattacacattggtgaacatctcccttcgtggaacaacagcgggggtaatcatatcactaattttgtatgaataaatgaaaatgaagaaacttctttaacatata

SEQ ID NO: 434403 - DNA, 120 bp, Artificial Sequence
  ENSG00000152760_18 (sequence is synthesized)
ggcacatgttcatgtcatgcaatgacattagtatatgaccaaagtgatgatatggctaatattcctgggatgcaggaggaagaagattcatttgaagcttctcctctgaacgtggatgaa

SEQ ID NO: 434404 - DNA, 120 bp, Artificial Sequence
  ENSG00000152760_19 (sequence is synthesized)
atgtggtcgagaatataagctctagcatcagataaacctgggtgtgcaccccagctctgcctctctgtgtgattctgggcaggttactcaatgtatataaatctctgtttccccacctgc

SEQ ID NO: 434405 - DNA, 120 bp, Artificial Sequence
  ENSG00000152760_20 (sequence is synthesized)
caaatggagataacagtgagattcacctcagagatctattggaagactatataagcattgtattagactctgaggaggataaaatccgagcttgcttaccatttcactggaaacgcaggt

SEQ ID NO: 434406 - DNA, 120 bp, Artificial Sequence
  ENSG00000152760_21 (sequence is synthesized)
taaaaatgatatttgataacctggcattgtcttcaattctagcacaatataagggactttaatgaattgagtgatttgatgttgctttagtttcttcctcagcaaaaaggtaacaacact

SEQ ID NO: 434407 - DNA, 120 bp, Artificial Sequence
  ENSG00000152760_22 (sequence is synthesized)
tgctgtcttacttttctttactaatgtttcccaaatgccaaacaattcactgggtggcactgatgcatacagtatactactgacttaacaaattcactgagtatttctgggtacatagat

SEQ ID NO: 434408 - DNA, 120 bp, Artificial Sequence
  ENSG00000152760_23 (sequence is synthesized)
atgacttaaatgaaagagataagtattgatattttatccaacaaaaccaatcagtgttgttaggtgaaggaaaaaaaaaaactcaaagcaaaggcaaatgactcatagtcccctgttgac

SEQ ID NO: 434409 - DNA, 120 bp, Artificial Sequence
  ENSG00000152760_24 (sequence is synthesized)
acatgtcagaagtaaagctaatttgagttttgtaccacctcttcttctccatgaatttttaatatggtgttcagtagaaaagaaattgagtttttatgaataccttctgtattatgcaat

SEQ ID NO: 434410 - DNA, 120 bp, Artificial Sequence
  ENSG00000152760_25 (sequence is synthesized)
ttcaatagagtccacccagaagattaaatccctccatgtttccatactcttttgattagcctatggggtgggtgggtgtgatttgaaattactttttagaaataaattttatgtgtattt

SEQ ID NO: 434411 - DNA, 120 bp, Artificial Sequence
  ENSG00000152763_0 (sequence is synthesized)
gttgagccagggctccaccgtcgccatgacgcccggcaaacattccggagcctcggcccgagccgctaacggaggagcttgggggtacagggacttcagaggcggccaaaaaaaggggtg

SEQ ID NO: 434412 - DNA, 120 bp, Artificial Sequence
  ENSG00000152763_1 (sequence is synthesized)
gtgcaccactccccagctggtcgccaccatgccagtctctccggcaggcagtcacaagcagcagaacttcgggttgaacaatgccacacaaccaaagaagtctattagcttttttgctac

SEQ ID NO: 434413 - DNA, 120 bp, Artificial Sequence
  ENSG00000152763_2 (sequence is synthesized)
aatgaaagcaacttcagtgaaaggatatactggtgcaaatcaaagcagaatggctgtgtccaaaaccgtgcttattccacctgaactgaaaactgtagaaaaaccaaatcccaatataaa

SEQ ID NO: 434414 - DNA, 120 bp, Artificial Sequence
  ENSG00000152763_3 (sequence is synthesized)
gacaacacaggtatttgacataaatggaactgatgttactccccgacctctttaccatccagatccacttactggtacagcaaaaccaagtaaactcttgacatcacaagaaggatcact

SEQ ID NO: 434415 - DNA, 120 bp, Artificial Sequence
  ENSG00000152763_4 (sequence is synthesized)
tggatcagaatttatatcttcctatagcctttatcagaatacaataaatcctagtacgttagggcagtttacaaggtcagttttaggaagcagtacagtttctaagtcaagtgtatcagc

SEQ ID NO: 434416 - DNA, 120 bp, Artificial Sequence
  ENSG00000152763_5 (sequence is synthesized)
aagtgaatcaatagcagaagacctggaagaaccatcctataaacgggaaagattgactagtttcacagatttgcaagttataagggcagcacctgaaaaaattgtaacaaaagaagacct

SEQ ID NO: 434417 - DNA, 120 bp, Artificial Sequence
  ENSG00000152763_6 (sequence is synthesized)
ggagaagaatatagagataatactcacagagacagaaacactgagattttttgacttgcccacagtcatggtctctgtagaatctgaagaagctgagaaagtaactcagagaaacaagaa

SEQ ID NO: 434418 - DNA, 120 bp, Artificial Sequence
  ENSG00000152763_7 (sequence is synthesized)
ttatgaagtcctttgtagaaacagattaggcaatgacctatatgttgaaaggatgatgcagactttcaatggagcaccaaagaataaagatgttcaatgtgataaaatcataatggaaga

SEQ ID NO: 434419 - DNA, 120 bp, Artificial Sequence
  ENSG00000152763_8 (sequence is synthesized)
taaaggcataatgtccactgcctgggatttgtatgattcttacaatgctatggaacttgtatctttatcagtaaaacaatctgtggttgagtcaagtagtaaagcaaatgtacttcctaa

SEQ ID NO: 434420 - DNA, 120 bp, Artificial Sequence
  ENSG00000152763_9 (sequence is synthesized)
agatcaggaccaaagattgccagggagcactacagaaaaaaatagtgaaactagttctctaatggacatagaaaatgtaattctggcaaaaatccatgaagatgaggaagaccactcaga

SEQ ID NO: 434421 - DNA, 120 bp, Artificial Sequence
  ENSG00000152763_10 (sequence is synthesized)
tgcaatattaaaatctgacaaatttcatcaggacttattttttatggaacgggttctgatggaaaatatatttcagcccaaacttgcagcttatcgtcagcttcctgttttaaaagaacc

SEQ ID NO: 434422 - DNA, 120 bp, Artificial Sequence
  ENSG00000152763_11 (sequence is synthesized)
tgaacctgaagagcctgaagatgttttagaaagtgcaaaacatgaagaggtagaggaagaatctaagaaggaggaggaagaagaaatacatgcagaagaatcaacaatacccgccaactt

SEQ ID NO: 434423 - DNA, 120 bp, Artificial Sequence
  ENSG00000152763_12 (sequence is synthesized)
ggaacgactttggtctttttcctgtgacttaaccaaaggcctcaatgtgagcagccttgcctggaataaaacaaatccagatcttttggctgttggctatgggcactttggatttaaaga

SEQ ID NO: 434424 - DNA, 120 bp, Artificial Sequence
  ENSG00000152763_13 (sequence is synthesized)
gcaaaaaagaggactggcttgctgctggtcaataaagaatcccatgtggccagaacgtatttatcagagtccatatggagttactgctgtggatttttcaattggagcacctaacctttt

SEQ ID NO: 434425 - DNA, 120 bp, Artificial Sequence
  ENSG00000152763_14 (sequence is synthesized)
agccgttggctatcacaatggcacaattgcaatttacaatgtacggagcaacagtaatgttccagttctggatagtagtgaatcacctcaaaaacatttgggacctgtatggcaactaca

SEQ ID NO: 434426 - DNA, 120 bp, Artificial Sequence
  ENSG00000152763_15 (sequence is synthesized)
aaaggactagactgttatgatttgatgcgattaaagagaactacagctgccagtaacaaaaaaggaggggaaaaggaaaagaaagatgaagctttgatatctcgacaggctcctggaatg

SEQ ID NO: 434427 - DNA, 120 bp, Artificial Sequence
  ENSG00000152763_16 (sequence is synthesized)
tgttttgcttttcatcccaaggacacaaatatctatttggctggcactgaagaaggtcatattcacaaatgttcttgttcatataatgaacaatacttagatacctacagaggacataag

SEQ ID NO: 434428 - DNA, 120 bp, Artificial Sequence
  ENSG00000152763_17 (sequence is synthesized)
ggtccagtgtataaagtgacatggaatccattttgtcatgatgtatttttaagctgttctgcagattggggtgttattatatggcaacaggagaatgtcaagccatctttgagtttttat

SEQ ID NO: 434429 - DNA, 120 bp, Artificial Sequence
  ENSG00000152763_18 (sequence is synthesized)
ccagctacttctgttgtttacgacgttgcctggtctccaaaatcatcctatatatttgcagctgcaaatgagaacagggtggagatttgggaccttcatatcagcactttggaccctctg

SEQ ID NO: 434430 - DNA, 120 bp, Artificial Sequence
  ENSG00000152763_19 (sequence is synthesized)
attgtgaatactgctaaccctggaatcaagttcacaaccattctctttgccaaacaaacagattgccttctggtaggagacagtgatggacaggtttctgtgtatgaactgagaaatatg

SEQ ID NO: 434431 - DNA, 120 bp, Artificial Sequence
  ENSG00000152763_20 (sequence is synthesized)
cctactgttttggaaactggccggggagatataatggatactttgcttggatccaagtcaaaccaatcagcataattcatcattcctaatatttttcttgtagttgttttaaaaaaggaa

SEQ ID NO: 434432 - DNA, 120 bp, Artificial Sequence
  ENSG00000152763_21 (sequence is synthesized)
ttaacatccaatattctgtattacatactgtacaccagattttgatttcagaaaacaatatttgatgtataacttccacttaatttaaatttaataaacttttatttcagagatatttga

SEQ ID NO: 434433 - DNA, 120 bp, Artificial Sequence
  ENSG00000152763_22 (sequence is synthesized)
ttagtttacaatctaagagttattcttaagagtttcagtggaattttcttaatttttctaaagatattcctactctcttgatcatattctaagtacatatgagtacatgtacattcttat

SEQ ID NO: 434434 - DNA, 120 bp, Artificial Sequence
  ENSG00000152763_23 (sequence is synthesized)
acaatgtctaaatgggttagaaaattattatacctatagaagcgaaacttggaaattaatagaatcacttaaaccaaaatctttataagacacaattctattgattttaaagcttctgct

SEQ ID NO: 434435 - DNA, 120 bp, Artificial Sequence
  ENSG00000152763_24 (sequence is synthesized)
ttccaggctctgttttccagagtttataattacgtagtttttagtagatgaaaataatggattcttgtacctaacattttatcctcttagatctaagagccgaagctatagaactttgtt

SEQ ID NO: 434436 - DNA, 120 bp, Artificial Sequence
  ENSG00000152763_25 (sequence is synthesized)
agactatttggcaagcaaaatatatgacagtaaatatcagaattttatggtttgaccagcgcttatcacattcccaattcagtgagaaaaattcatctgggacacaacagggtactcttc

SEQ ID NO: 434437 - DNA, 120 bp, Artificial Sequence
  ENSG00000152763_26 (sequence is synthesized)
tctgtttgcccagaatcagctctggattttaagcccagacttcagtggacccagatagaaaatataaagtctctgatctataggccacatcaggatgttattttatgaagagttctagag

SEQ ID NO: 434438 - DNA, 120 bp, Artificial Sequence
  ENSG00000152763_27 (sequence is synthesized)
caaggttgcggaaatcggggtggagatggggagcagtgactcctccaaatattcattgctaacaggccattctatgcagtttgttttaacaaatcctgggttaaactgaggccacaggac

SEQ ID NO: 434439 - DNA, 120 bp, Artificial Sequence
  ENSG00000152763_28 (sequence is synthesized)
atgatgggctgttctataaagcattctaagtggagaggagacgatagggcatatgaaattcactaaactctctggaaaaaaaatatgtatatattaaaaaccaagactggaatcagtgca

SEQ ID NO: 434440 - DNA, 120 bp, Artificial Sequence
  ENSG00000152763_29 (sequence is synthesized)
acagtgggaactaccttttacaagtatccattgcttcataaactccatttgtttggaccaatcccttaaacaaaagcaaggcaaattttacatggatttagagcctaggtcaggttatta

SEQ ID NO: 434441 - DNA, 120 bp, Artificial Sequence
  ENSG00000152763_30 (sequence is synthesized)
ggattataaattttccactggtatgtcattgtgattatctttgtttttgtctttctgaaagattggattttctataacaccttgtgtaagaaaataaaaaacttgatctaactgaaaaaa

SEQ ID NO: 434442 - DNA, 82 bp, Artificial Sequence
  ENSG00000152763_31 (sequence is synthesized)
gtggtgcaccactccccagctggtcgccaccatgccagtctctccggcaggcagtcacaagcagcagaacttcgggttggag

SEQ ID NO: 434443 - DNA, 120 bp, Artificial Sequence
  ENSG00000152763_32 (sequence is synthesized)
agaagaaggtcagcgggaatgcaatcaatgttgctgtctttgaagatgaaggaaaggttgtggtggcccccagaaactgaaaaaatcaaggaaacaaattctcctttaaaaccttcagaa

SEQ ID NO: 434444 - DNA, 120 bp, Artificial Sequence
  ENSG00000152763_33 (sequence is synthesized)
aggaacaaagccctatcaacttcttggttttagctcagtgacatctgttaggcctctaatctactgaactgtaagataaatttgcattgttttaagccactgtgatttgttacagcagca

SEQ ID NO: 434445 - DNA, 120 bp, Artificial Sequence
  ENSG00000152763_34 (sequence is synthesized)
agagaaaacttaatacaatagtatagtatttctgtatagcaataatcaaatcagacctttttctgaaggctgatcatcttatttcaacttgaattttaaaagaataaagacaaaaattac

SEQ ID NO: 434446 - DNA, 120 bp, Artificial Sequence
  ENSG00000152763_35 (sequence is synthesized)
agggaaaagagaaaaaaataagataggagacctggaattatggatggagaagagtccctgagacaccagtgacaagtttcagagttcacataaaaggaacaatgccacacaaccaaagaa

SEQ ID NO: 434447 - DNA, 120 bp, Artificial Sequence
  ENSG00000152763_36 (sequence is synthesized)
aattttgaaatactgattttgttaatttttaccacatattattccatacaacataatattgacacttggctcctataactagttattgataagaagaatattagagtggaatgagaaaag

SEQ ID NO: 434448 - DNA, 120 bp, Artificial Sequence
  ENSG00000152763_37 (sequence is synthesized)
tctattcatgaccttaagaactatttgcttatggtattaattatatacattacaactatctttcactgttgtcagcaatatagtcttgaaaatacaataaaattatttgtcataaagtca

SEQ ID NO: 434449 - DNA, 120 bp, Artificial Sequence
  ENSG00000152763_38 (sequence is synthesized)
tatttgtcagttttccactttctcttttcctgtgttagattcttgcctttagctttacaatactggacaagtctcccattgcaataaaaataactgctgattgttcacctcttcatccta

SEQ ID NO: 434450 - DNA, 120 bp, Artificial Sequence
  ENSG00000152763_39 (sequence is synthesized)
caataaagaatcccatggtaacccaaacaagaataagaagcatttttatctggctgttgacaaaattctcataaaatatataattacatgtaataattaaataaagtctagaaaatttta

SEQ ID NO: 434451 - DNA, 120 bp, Artificial Sequence
  ENSG00000152763_40 (sequence is synthesized)
gtataaagcaaaaataaaaataatttggccaaaccacaacagtagttggacactgtgttctatagctttcagaatttgacatgttaagtaataaatatatagatttgaataacataatta

SEQ ID NO: 434452 - DNA, 120 bp, Artificial Sequence
  ENSG00000152763_41 (sequence is synthesized)
ttcatcttggtttttatgcatactatatcatagaactttatactctttaaacgtttatataaactgattatttactatgtcacaaagaatatcagccataactattaacattttaaatgt

SEQ ID NO: 434453 - DNA, 120 bp, Artificial Sequence
  ENSG00000152763_42 (sequence is synthesized)
gtcagacactatgtccttcacatgtattaactggtttaatttttacagcaaccctatgaggtagatactattatgcttccccattttatagatgaggaaacaggcaaagagaagtttgct

SEQ ID NO: 434454 - DNA, 120 bp, Artificial Sequence
  ENSG00000152763_43 (sequence is synthesized)
aactgttctggttctagagcttgtgcacttaactactatacttaccacctctcactgtgtacaaattaacaaccctgagcacattgcatagccaaaatctgtagggtgtagccaaagaag

SEQ ID NO: 434455 - DNA, 120 bp, Artificial Sequence
  ENSG00000152763_44 (sequence is synthesized)
tgtagaagctatcaaaaactgctcagaacaatccaatcttagactggaaattacactgggactttatattagatcgatcttttccacaccattaaggccattgacctacaaaaatgtgcg

SEQ ID NO: 434456 - DNA, 120 bp, Artificial Sequence
  ENSG00000152763_45 (sequence is synthesized)
agaaccatcctataaacgggaaagattgactagtttcacaggtaatgaaaatatacttgtttatttcagtaacagtccgttatttagtcaatatgcttattattggttggatacttgaga

SEQ ID NO: 434457 - DNA, 120 bp, Artificial Sequence
  ENSG00000152763_46 (sequence is synthesized)
taaaagaaatatggtaatgatttccaaatgctggcttgtgaagtcgcttcaagagaattaccaggggaatatctatttttttaagttccctgggtgactgttttgaatcatcagcctgag

SEQ ID NO: 434458 - DNA, 120 bp, Artificial Sequence
  ENSG00000152763_47 (sequence is synthesized)
actgttttgaatcatcagcctgaggaaccaatggcgctttgtgttagagctcagctgctgcttctgctgctgctgttgctgctgctgcttctgcttcttcttcttcttcttcctcttcct

SEQ ID NO: 434459 - DNA, 120 bp, Artificial Sequence
  ENSG00000152763_48 (sequence is synthesized)
cctcttcctcttttcctcttcttttcctcttcttcctcacttcttcttcctcctcttcctcttcttcctcttcctcctcctcctcttccttctccccctcttcctctccctcctcctcct

SEQ ID NO: 434460 - DNA, 120 bp, Artificial Sequence
  ENSG00000152763_49 (sequence is synthesized)
ccccctcctctccttcttcttcttcctcttcctcctcttcctcctctgcttccttctcctcttcctcttcttcttcttcctcttcttctttcttctttcctctttttttttattttgaga

SEQ ID NO: 434461 - DNA, 120 bp, Artificial Sequence
  ENSG00000152766_0 (sequence is synthesized)
acacatgacaccagtgcctttgtttcattgggctgggctctctggaaggtgtgctgctgcctgagctgctggaaaagcactgacaggtgtttgctagaaaagcactcctggagcttgcca

SEQ ID NO: 434462 - DNA, 120 bp, Artificial Sequence
  ENSG00000152766_1 (sequence is synthesized)
ccagcttggacttctagggactttcctctcagccaggaaggattttgatattcatcagaaatacctccagaagattcaaggagctgtagaggtgaagtaagcctgtgaaggaccagcatg

SEQ ID NO: 434463 - DNA, 120 bp, Artificial Sequence
  ENSG00000152766_2 (sequence is synthesized)
ggaatcctatactctgagcccatctgccaagcagcctatcagaatgactttggacaagtgtggcggtgggtgaaagaagacagcagctatgccaacgttcaagatggctttaatggagac

SEQ ID NO: 434464 - DNA, 120 bp, Artificial Sequence
  ENSG00000152766_3 (sequence is synthesized)
acgcccctgatctgtgcttgcaggcgagggcatgtgagaatcgtttccttccttttaagaagaaatgctaatgtcaacctcaaaaaccagaaagagagaacctgcttgcattatgctgtg

SEQ ID NO: 434465 - DNA, 120 bp, Artificial Sequence
  ENSG00000152766_4 (sequence is synthesized)
aagaaaaaatttaccttcattgattatctactaattatcctcttaatgcctgttctgcttattgggtatttcctcatggtatcaaagacaaagcagaatgaggctcttgtacgaatgcta

SEQ ID NO: 434466 - DNA, 120 bp, Artificial Sequence
  ENSG00000152766_5 (sequence is synthesized)
cttgatgctggcgtcgaagttaatgctacagattgttatggctgtaccgcattacattatgcctgtgaaatgaaaaaccagtctcttatccctctgctcttggaagcccgtgcagacccc

SEQ ID NO: 434467 - DNA, 120 bp, Artificial Sequence
  ENSG00000152766_6 (sequence is synthesized)
acaataaagaataagcatggtgagagctcactggatattgcacggagattaaaattttcccagattgaattaatgctaaggaaagcattgtaatccttgtgaccacaccgatggagatac

SEQ ID NO: 434468 - DNA, 120 bp, Artificial Sequence
  ENSG00000152766_7 (sequence is synthesized)
agaaaaagttaacgactggattctatcttcattttagacttttggtctgtgggccatttaacctggatgccaccattttatggggataatgatgcttaccatggttaatgttttggaaga

SEQ ID NO: 434469 - DNA, 120 bp, Artificial Sequence
  ENSG00000152766_8 (sequence is synthesized)
gctttttatttatagcattgtttactcagtcaagttcaccatggccgtaatccttctaagggaaacactaaagttgttgtagtctccacttcagtcagaaactgatgtttcagctaggca

SEQ ID NO: 434470 - DNA, 76 bp, Artificial Sequence
  ENSG00000152766_9 (sequence is synthesized)
aggtgggaggatcacttgaactcaggagtttgagagcagccagggcaactggtgttccaaactcagtctttcctga

SEQ ID NO: 434471 - DNA, 120 bp, Artificial Sequence
  ENSG00000152766_10 (sequence is synthesized)
aaaaaaaaagccctggtgttccaaactcagtctttcctgaagaagaggatctgagttatcttctgaaacagcgttctcccttcccagttgtatcactcttataaaaagactgtccagtct

SEQ ID NO: 434472 - DNA, 120 bp, Artificial Sequence
  ENSG00000152766_11 (sequence is synthesized)
atgtcatgccctaggagacaaactgttcctcccagccccctttgagtattgagcagaagaatcaaattattaaatacgtatgtttgtacagaatggtatttgtgtatgtgtgtgggctta

SEQ ID NO: 434473 - DNA, 120 bp, Artificial Sequence
  ENSG00000152766_12 (sequence is synthesized)
gagattcacaagtaaatattcctttggtgaaggaatttcaataaaaacatctatcaagtgtcagcggtgagtgtgtttacaccacagaaattggcaaattgacaaatcagagtttgtttt

SEQ ID NO: 434474 - DNA, 120 bp, Artificial Sequence
  ENSG00000152766_13 (sequence is synthesized)
tgtttttttgttttttactttccataaagttcgtttaccagcataccactagagatttcggtttacaaataaaagccatcttggtttgagcaagactatgcaactatgaaaatgttcgtt

SEQ ID NO: 434475 - DNA, 120 bp, Artificial Sequence
  ENSG00000152766_14 (sequence is synthesized)
taaaaaaatcttcatgatccttttgtaaatacaaggtggttgccaagcttgttagttttgtttattttattgatagatgtaaaatattattgtaacttatttggataaagttcttcaaaa

SEQ ID NO: 434476 - DNA, 120 bp, Artificial Sequence
  ENSG00000152766_15 (sequence is synthesized)
gaaacagagctatacaatgaggtaggatctggattatttgtctaagtgagagattgcgaatatcaaaatatctgtctcacttcttctgtgaatgacacagagtagaaataaattcacttt

SEQ ID NO: 434477 - DNA, 120 bp, Artificial Sequence
  ENSG00000152766_16 (sequence is synthesized)
tgaaaatcaagactgaatctcacatagctgcagacaggaactaagccagcctctttgtatgtggtaacaagtacagtataagaatgaaagatttaccatccttgaaagctctaatgaaaa

SEQ ID NO: 434478 - DNA, 120 bp, Artificial Sequence
  ENSG00000152766_17 (sequence is synthesized)
tcaaatccagcaatatatattcaactgtgtacaggatttaagaaacttattttatgaaggaagtaatagtgtgtagatatagattctgaagtctttaaacgtgtcttaataaattaagat

SEQ ID NO: 434479 - DNA, 120 bp, Artificial Sequence
  ENSG00000152766_18 (sequence is synthesized)
tcactggcattgagctgagctaccaggtgacccttggggacaaaaaacccacacaagtgaatttcacacaccagtataccttcaacaatatacttttgacacacacaaacctttgatttg

SEQ ID NO: 434480 - DNA, 120 bp, Artificial Sequence
  ENSG00000152766_19 (sequence is synthesized)
gtttcagagattttgcaaaatagtaccaatgtaatttacaactgtcatctttgaaattgtgtaaaagtggaataattttctgaagaaataaatcatggtttgtcaatgagttgcagagac

SEQ ID NO: 434481 - DNA, 120 bp, Artificial Sequence
  ENSG00000152766_20 (sequence is synthesized)
tgtctgacattaactttgtcaagattaaaggataaagtatatgacaatttgtttcatcatgctcatgacattatgcaattttctccctagcttttaatttttggaggcagaaaattgagc

SEQ ID NO: 434482 - DNA, 120 bp, Artificial Sequence
  ENSG00000152766_21 (sequence is synthesized)
cagaaatttttagtcattaggtctcctagcaacaagctgtaaaccttccaacaagcttggactagaatctagacactgaaatgcacatacatgctttatgtaatgcagaatgcatttatt

SEQ ID NO: 434483 - DNA, 120 bp, Artificial Sequence
  ENSG00000152766_22 (sequence is synthesized)
ggagaactcataaacatcctataaaattttcttccctgagatgcaactataaaacttggccttattctgagaatgcttaacatagatttcatccatactgtaacactgattttgttgttg

SEQ ID NO: 434484 - DNA, 120 bp, Artificial Sequence
  ENSG00000152766_23 (sequence is synthesized)
ttgtccttaaagcagctcagcttcctgaggtagtgttatgtctctgtggcaacaaggtgaaaatgtctagcttattttgtcaaagtcaacaataatccacagactccagacctcaatatc

SEQ ID NO: 434485 - DNA, 120 bp, Artificial Sequence
  ENSG00000152766_24 (sequence is synthesized)
tgtcccaatttgccattttactttagtgctccaaaaatatggcttatagaaaaaacaataggtgttttaaagagatttacctgaatgatatagagaatgtctagatattttctggctatc

SEQ ID NO: 434486 - DNA, 120 bp, Artificial Sequence
  ENSG00000152766_25 (sequence is synthesized)
aggtaaaacctacccttcaagatggtagaatatataatagcatacaaaacctctatttacctaataagtactttaatttacagaaaaaaaatgtaaatgtaagtgtcggatttagtgcca

SEQ ID NO: 434487 - DNA, 120 bp, Artificial Sequence
  ENSG00000152766_26 (sequence is synthesized)
agtgcagggaatctgaaaaatgtatactaggtctctgctctccgtaattctgccttcatgggtcctagccccatccctcaggaggttgtcctaagatcgtcagtgtcagatgcttcacaa

SEQ ID NO: 434488 - DNA, 120 bp, Artificial Sequence
  ENSG00000152766_27 (sequence is synthesized)
tacggcctcacaccgtccctgggaaaggttggtctcctcctgctgcatcagatggatgatttcattgtacatacggtgaggagcatccaaaccccagatgaaatccacgtgagcccattc

SEQ ID NO: 434489 - DNA, 120 bp, Artificial Sequence
  ENSG00000152766_28 (sequence is synthesized)
aggaatattcttatggtagatgaggttggtcacctcagagagcagcattttcacgtcttctggatttgaaagccagtcctgacctcctgtccacattgctgtagggaccgtcatatctct

SEQ ID NO: 434490 - DNA, 120 bp, Artificial Sequence
  ENSG00000152766_29 (sequence is synthesized)
gactctgtaccttacaggagttggctagagaaaaggaatagttcttaactctaggtaacatttggactttcaggctcataatttatgtttcaaatagacataataaacatgccatctgtt

SEQ ID NO: 434491 - DNA, 120 bp, Artificial Sequence
  ENSG00000152766_30 (sequence is synthesized)
gtggtgaagggtacatgggtgttagagccacacaactctgttaagaatttctgttcccgcccttactttaaggtaaaattacttaacattattgaacctcagtttcttcttctgtgactg

SEQ ID NO: 434492 - DNA, 120 bp, Artificial Sequence
  ENSG00000152766_31 (sequence is synthesized)
gggataatatctgtaataacttgctagatcaaatgacaaaacacataaaaacatgtaatgccttgtatttcttttttcttcctattaaatattttgtaaataaattgtttttaaaaataa

SEQ ID NO: 434493 - DNA, 120 bp, Artificial Sequence
  ENSG00000152766_32 (sequence is synthesized)
ctatcaatggtttgcagactatttttctgcttagttgtatactacaaagtgtgaaaaggatttgccaatgaagccacatgctatggtctgtggagggcccgacttatgagctgaagtttt

SEQ ID NO: 434494 - DNA, 80 bp, Artificial Sequence
  ENSG00000152767_0 (sequence is synthesized)
gggcggggacgcggccgctgcccgctttgcgccgctcctccctgcgcgagtagcgctggccccggcgtcgaggcggccat

SEQ ID NO: 434495 - DNA, 120 bp, Artificial Sequence
  ENSG00000152767_1 (sequence is synthesized)
cgcgagtagcgctggccccggcgtcgaggcggccatggcgacccggagcccgctccccacccaccccgcctgctccgccctcccctccgccccgcgccacctttgatggctcggacctca

SEQ ID NO: 434496 - DNA, 80 bp, Artificial Sequence
  ENSG00000152767_2 (sequence is synthesized)
ccgcccgcgggtattaatagccggcgccgccgcgccctcggccgccgggggcttgggagccgccgatcccggagcccgag

SEQ ID NO: 434497 - DNA, 120 bp, Artificial Sequence
  ENSG00000152767_3 (sequence is synthesized)
ccgggagagggagccgccgcagccgccggcgctgtggagatattctctaagccgctttcatcatgggagaaatagagcagaggccgaccccaggatcacgactgggggccccggaaaatt

SEQ ID NO: 434498 - DNA, 120 bp, Artificial Sequence
  ENSG00000152767_4 (sequence is synthesized)
cggggatcagtaccttggaacgtggacagaagccgcccccaacaccttcaggaaaactcgtgtccatcaaaatccagatgctggatgacacccaggaggcatttgaagttccacaaagag

SEQ ID NO: 434499 - DNA, 120 bp, Artificial Sequence
  ENSG00000152767_5 (sequence is synthesized)
ctcctgggaaggtgctgctggatgcagtttgcaaccacctcaacctcgtggaaggtgactattttggcctcgagtttcctgatcacaaaaagatcacggtgtggctggatctcctaaaac

SEQ ID NO: 434500 - DNA, 120 bp, Artificial Sequence
  ENSG00000152767_6 (sequence is synthesized)
ccattgtgaaacagattagaaggccaaagcacgttgttgttaagtttgtggtgaaattctttccgcctgaccacacacaactccaagaagaactcacaaggtacctgttcgcgctgcagg

SEQ ID NO: 434501 - DNA, 120 bp, Artificial Sequence
  ENSG00000152767_7 (sequence is synthesized)
tgaagcaggacttggctcaaggcaggttgacgtgtaatgacaccagcgcagctctcttgatttcacacattgtgcaatctgagattggggattttgatgaagccttggacagagagcact

SEQ ID NO: 434502 - DNA, 120 bp, Artificial Sequence
  ENSG00000152767_8 (sequence is synthesized)
tagcaaaaaataaatacatacctcagcaagacgcactagaggacaaaatcgtggaatttcaccataaccacattggacaaacaccagcagaatcagatttccagctcctagagattgccc

SEQ ID NO: 434503 - DNA, 120 bp, Artificial Sequence
  ENSG00000152767_9 (sequence is synthesized)
gtcggctagagatgtatggaatccggttgcacccggccaaggacagggaaggcacgaagatcaatctggccgttgccaacacgggaattctagtgtttcagggtttcactaagatcaatg

SEQ ID NO: 434504 - DNA, 120 bp, Artificial Sequence
  ENSG00000152767_10 (sequence is synthesized)
ccttcaactgggccaaggtgcggaagctgagcttcaagaggaagcgctttctcatcaagctccggccagatgccaatagtgcgtaccaggataccttggaattcctgatggccagtcggg

SEQ ID NO: 434505 - DNA, 120 bp, Artificial Sequence
  ENSG00000152767_11 (sequence is synthesized)
atttctgcaagtccttctggaaaatctgtgttgaacatcatgccttctttagactttttgaagagcccaaaccaaagcccaagcccgtcctctttagccgggggtcatcatttcggttca

SEQ ID NO: 434506 - DNA, 120 bp, Artificial Sequence
  ENSG00000152767_12 (sequence is synthesized)
gtggtcggactcagaagcaggttctcgactatgttaaagaaggaggacataagaaggtgcagtttgaaaggaagcacagcaagattcattctatccggagccttgcttcacagcctacag

SEQ ID NO: 434507 - DNA, 120 bp, Artificial Sequence
  ENSG00000152767_13 (sequence is synthesized)
aactgaattcggaagtgctggagcagtctcagcagagcaccagccttacatttggagaaggtgccgaatctccagggggccagagctgccggcgaggaaaggaaccgaaggtttccgccg

SEQ ID NO: 434508 - DNA, 120 bp, Artificial Sequence
  ENSG00000152767_14 (sequence is synthesized)
gggagccggggtcgcacccgagccctgcgccgaggagaagccccgcgggtaacaagcaggcggacggagccgcctcggcgcccacggaggaagaggaggaggtcgttaaggataggaccc

SEQ ID NO: 434509 - DNA, 120 bp, Artificial Sequence
  ENSG00000152767_15 (sequence is synthesized)
agcagagtaaacctcagcccccgcagccaagcacaggctccctgactggcagtcctcacctttccgagctgtctgtgaactcgcaggggggagtggcccctgccaacgtgaccttgtctc

SEQ ID NO: 434510 - DNA, 120 bp, Artificial Sequence
  ENSG00000152767_16 (sequence is synthesized)
ccaacctgagccccgacaccaagcaggcctctcccttgatcagcccgctgctgaatgaccaggcctgcccccggacggacgatgaggatgagggccggaggaagagattcccaactgata

SEQ ID NO: 434511 - DNA, 120 bp, Artificial Sequence
  ENSG00000152767_17 (sequence is synthesized)
aagcgtacttcatagctaaggaagtgtctaccaccgagcgaacatatctgaaggatctcgaagttatcacttcgtggtttcagagcacagtgagcaaagaggacgccatgccggaagcac

SEQ ID NO: 434512 - DNA, 120 bp, Artificial Sequence
  ENSG00000152767_18 (sequence is synthesized)
tgaaaagtctcatattcccgaattttgaacctttgcacaaatttcatactaattttctcaaggaaattgagcaacgacttgccctgtgggaaggccgctcaaatgcccaaatcagagatt

SEQ ID NO: 434513 - DNA, 120 bp, Artificial Sequence
  ENSG00000152767_19 (sequence is synthesized)
accaaagaatcggcgatgtcatgctgaagaacattcagggcatgaagcacctggcggctcacctgtggaagcacagcgaggccttggaggccctggagaatggaatcaagagctcccggc

SEQ ID NO: 434514 - DNA, 120 bp, Artificial Sequence
  ENSG00000152767_20 (sequence is synthesized)
ggctggagaacttctgcagagactttgagctgcagaaggtgtgttacctaccgctcaacaccttcctcctgcggccactgcaccggctcatgcactacaagcaggtcctggagcggctgt

SEQ ID NO: 434515 - DNA, 120 bp, Artificial Sequence
  ENSG00000152767_21 (sequence is synthesized)
gcaaacaccacccgccgagccacgccgacttcagggactgccgagccgctttggcagagatcacggagatggtggcacagctccacggtacgatgatcaagatggagaatttccagaagc

SEQ ID NO: 434516 - DNA, 120 bp, Artificial Sequence
  ENSG00000152767_22 (sequence is synthesized)
tgcacgaactcaagaaagatttgattggcattgacaatcttgtggttccgggaagggagttcatccgtctgggcagcctcagcaagctctcggggaaggggctccagcagcgcatgttct

SEQ ID NO: 434517 - DNA, 120 bp, Artificial Sequence
  ENSG00000152767_23 (sequence is synthesized)
tcctgttcaacgacgtcctgctatacacgagccgggggctgacggcctccaatcagtttaaagtccacgggcagctcccgctctatggcatgacgattgaggagagcgaagacgagtggg

SEQ ID NO: 434518 - DNA, 120 bp, Artificial Sequence
  ENSG00000152767_24 (sequence is synthesized)
gggtgccccactgcctgaccctccggggccagcggcagtccatcatcgtggccgccagttctcggtccgagatggagaagtgggttgaggacatccagatggccattgacctggcggaga

SEQ ID NO: 434519 - DNA, 120 bp, Artificial Sequence
  ENSG00000152767_25 (sequence is synthesized)
agagcagcagccccgcccctgagttcctggccagcagcccccctgacaacaagtcccctgatgaagccaccgcggctgaccaggagtcagaggatgacctgagcgcctcgcgcacatcgc

SEQ ID NO: 434520 - DNA, 120 bp, Artificial Sequence
  ENSG00000152767_26 (sequence is synthesized)
tggagcgccaggccccgcaccgcggcaacacaatggtgcacgtgtgctggcaccgcaacaccagcgtctccatggtggacttcagcatcgcagtggagaatcagttgtctggaaacctgc

SEQ ID NO: 434521 - DNA, 120 bp, Artificial Sequence
  ENSG00000152767_27 (sequence is synthesized)
tgaggaaattcaaaaacagcaacgggtggcagaagctgtgggtggtgttcacaaacttctgcctgttcttctacaaatcacaccaggacaatcatccccttgccagcctgcctctgctcg

SEQ ID NO: 434522 - DNA, 120 bp, Artificial Sequence
  ENSG00000152767_28 (sequence is synthesized)
gctactcgctcaccatcccctctgagtccgagaacatccagaaagactacgtgttcaagctgcacttcaagtcccacgtctactacttcagggcggaaagcgagtacacgttcgaaaggt

SEQ ID NO: 434523 - DNA, 120 bp, Artificial Sequence
  ENSG00000152767_29 (sequence is synthesized)
ggatggaagtgatccgcagtgccaccagctctgcctcgcgaccccacgtgttgagtcacaaagagtctcttgtgtattgatggccggacacactcgtttccgcagtggctgctttcctgg

SEQ ID NO: 434524 - DNA, 120 bp, Artificial Sequence
  ENSG00000152767_30 (sequence is synthesized)
aagacgtttcctttcttctgtattaatgaagcctggtaaaattaacacctgtctgaaaatcaaaaacatggcttcccagcagctctcctgtctccacagccgcgttttttaaccccgacc

SEQ ID NO: 434525 - DNA, 120 bp, Artificial Sequence
  ENSG00000152767_31 (sequence is synthesized)
tctcagcgtctgaatgaacagcgctcccacctccagtcctggcatccgctgggggcgctgttctttagctagtgccagtattaaaacattgtcattacgagagtgccaaatgacatcttc

SEQ ID NO: 434526 - DNA, 120 bp, Artificial Sequence
  ENSG00000152767_32 (sequence is synthesized)
cctccaccctgcccctgaaaaacagtacacacacatccgttcaacacaagacagggcaagtgtttttcttcctaaaaaaagttctttcttttattattttcacctattggctgctgcatt

SEQ ID NO: 434527 - DNA, 120 bp, Artificial Sequence
  ENSG00000152767_33 (sequence is synthesized)
ttacgaagtggacttcccggtgtttgtttgtttgtttgcaatacactcagtgcagccttaagcaaatgagatcattttcagatttcattttttttttcagtctttctacttttgtaataa

SEQ ID NO: 434528 - DNA, 120 bp, Artificial Sequence
  ENSG00000152767_34 (sequence is synthesized)
taggaagttagtaggactcacttctctgattaataagcaatttgcagcacacagcgttccactgcggggtttcacgctcacctgaaaacacctgttcccaacctacttcttggtgcaagt

SEQ ID NO: 434529 - DNA, 120 bp, Artificial Sequence
  ENSG00000152767_35 (sequence is synthesized)
tgaccaaatcgttttaagtggtaactctttccaaccgtagcagggttgttttctgttaagcaaagccgagatccagtgcaatacctggactgtcaccgtcctgtgagtggtgtacacaat

SEQ ID NO: 434530 - DNA, 120 bp, Artificial Sequence
  ENSG00000152767_36 (sequence is synthesized)
gggaagataataagccgtggtgttttgctgtctgtctgtgtcacaagcatgaaaacccgtgtgtcattgatcagcaccatttgtggtatgttccgtgatgagcgtttagtgagcctgctg

SEQ ID NO: 434531 - DNA, 120 bp, Artificial Sequence
  ENSG00000152767_37 (sequence is synthesized)
gctgcagagcactatgaaatcatggtacgtagtccccggcacctgtcgttattcctatatcctcctgcaactgtggtttgaaactgcgcattctctagtagtatatatcgtgcctgtctt

SEQ ID NO: 434532 - DNA, 120 bp, Artificial Sequence
  ENSG00000152767_38 (sequence is synthesized)
caaaaacatttccctttttatactcattccccccaggcatggggtagtgtcagtcggactgcacagggaacacggtttccagtggctttggcccctactcgggaaacgtctgcctgttct

SEQ ID NO: 434533 - DNA, 120 bp, Artificial Sequence
  ENSG00000152767_39 (sequence is synthesized)
cgatggtgatggggtggctgccattcccttggttttcctaagccctttctaacgagagtctcaaacaagcggaggcgagggccaattcaaccccattctttccagcgccccgcaccatag

SEQ ID NO: 434534 - DNA, 120 bp, Artificial Sequence
  ENSG00000152767_40 (sequence is synthesized)
cacctgcccacctgagaaccaggaacgcaccctctctgtggagctctgactggtgtagctggaaacaaacagcaacttgcaaacggacgaagagcctgccgtgtgttaatcatttgcctt

SEQ ID NO: 434535 - DNA, 120 bp, Artificial Sequence
  ENSG00000152767_41 (sequence is synthesized)
acaagatgtaccagacggtttccagtactaacaaagggaataaaaatacctcacgccacaatccagcatattgatgttttaaggcaaaacaaccaactttgtctgtagtcttcattttct

SEQ ID NO: 434536 - DNA, 120 bp, Artificial Sequence
  ENSG00000152767_42 (sequence is synthesized)
gtgtggggggggaggggggaaggggacactccagcaagggtttctaaagccccagtgttcagagtgacacagggagggcctgccccccactgttccctatgctccccccacctccaggca

SEQ ID NO: 434537 - DNA, 120 bp, Artificial Sequence
  ENSG00000152767_43 (sequence is synthesized)
ctcctcagctatttatttctgaatgattgattgattccaaactacttgctggacactggtggttctgacctgtgaccagcacctctgcttcctgtgtgccctcaagaaaatactagtgtg

SEQ ID NO: 434538 - DNA, 120 bp, Artificial Sequence
  ENSG00000152767_44 (sequence is synthesized)
ggtaacagtccatctgagtggagtttgagacacactacacatgagacacacaatgatgcagatactcgttttcttgagctttattggcccctgcatgatacagtccctgtgcttaagaac

SEQ ID NO: 434539 - DNA, 120 bp, Artificial Sequence
  ENSG00000152767_45 (sequence is synthesized)
atgccctattaggtcactctgcctttgctgacacattttatagcagaaatacacaagctgtttttaaaggagggaaatataaaaaatgtttataaactgacagtgttttgccagaggaaa

SEQ ID NO: 434540 - DNA, 120 bp, Artificial Sequence
  ENSG00000152767_46 (sequence is synthesized)
ggtacaaaatgctacatacagaaccaaaccagccacttcacaagagcaatgcagggataaaactattggataaggaaggcagatgcacttccaagaaaatcagaacccagcaagaagtgg

SEQ ID NO: 434541 - DNA, 120 bp, Artificial Sequence
  ENSG00000152767_47 (sequence is synthesized)
ccagtgcaccccaaaccacactggtgtccacctcattggcagcagccagccaggacacagctcaaaaacgcaggagctaccagccacccagtccacggccctcgtctcccagaggctgag

SEQ ID NO: 434542 - DNA, 120 bp, Artificial Sequence
  ENSG00000152767_48 (sequence is synthesized)
tacctccccaggctgcaggctctgggcagctgagccaggagcagctcagggctggcactgagaggctactggtgacagtaaacccgtctcaaaggctgggcctggctacagaccagcagc

SEQ ID NO: 434543 - DNA, 120 bp, Artificial Sequence
  ENSG00000152767_49 (sequence is synthesized)
agttgacgctgaggcaggttccagtggtagccctggtgcctgggctctctcttaatgcaggcctggaagtggcgacacaaaagccagcttccttggctaagatgcccttaaaaacattgg

SEQ ID NO: 434544 - DNA, 120 bp, Artificial Sequence
  ENSG00000152767_50 (sequence is synthesized)
ggctgattttgtgcgtctacagaaagtaacagcccaggagagaatgtacacagaggcgagctttctaactccatcaaaccccacctcccccgacaggaaatgctgccagtcaactctaaa

SEQ ID NO: 434545 - DNA, 120 bp, Artificial Sequence
  ENSG00000152767_51 (sequence is synthesized)
agaaccacttgttgctctacgggggaaggggctgagtatgatttgtctggcgactgcagagactccccgttcataccagtattcattagaacccagtccctcgagcggctcacccactgt

SEQ ID NO: 434546 - DNA, 120 bp, Artificial Sequence
  ENSG00000152767_52 (sequence is synthesized)
tactagcatgagactggcttcagtgctaaaaactgtgatgtcattgtccatttgtaaatctgaagaactctgtaaatcagaaaagctgctgtccgccctggctcacttaaaaatcaggta

SEQ ID NO: 434547 - DNA, 120 bp, Artificial Sequence
  ENSG00000152767_53 (sequence is synthesized)
acggcacaccctggggaacacagactcaatctgtgtgattcgcaaggacaaaactcatctttgacttatgccgccggcctcacgtaaggaaacagttccccacacagaatactccctgga

SEQ ID NO: 434548 - DNA, 120 bp, Artificial Sequence
  ENSG00000152767_54 (sequence is synthesized)
aacacaaaatgaaatcttctccaattttattattcaacataacattcttgtatggagtaatgagtacaataagaattagcaactcagttctatttccccaaccaaaatatatcccttata

SEQ ID NO: 434549 - DNA, 120 bp, Artificial Sequence
  ENSG00000152767_55 (sequence is synthesized)
caaattaagagttcaacccaaatccacttctaataaaatacctcaattttagagcttaaaaaccagactgcactagcaaaccgacacaataacccactcaagcatctgtagctcagggct

SEQ ID NO: 434550 - DNA, 120 bp, Artificial Sequence
  ENSG00000152767_56 (sequence is synthesized)
ctgtcccctccctatagcttagaggccactagaccagcagatagctgagctacatccccaagctcacccactaacttccttgcttccaaaaatcctgtcttaactccacaagaactggca

SEQ ID NO: 434551 - DNA, 120 bp, Artificial Sequence
  ENSG00000152767_57 (sequence is synthesized)
cacccacgggagatgtcaatcatcagcttcaacaaacataaaagaatgcttcatgtaccagtcaacagctgctgcacgaaccctcccactccagaaacccagagattttccccctcgcca

SEQ ID NO: 434552 - DNA, 120 bp, Artificial Sequence
  ENSG00000152767_58 (sequence is synthesized)
agcaaggtcccacagcaaaccaagaaaaacagacacactggctgcctgcctagcaagcataggccccttccagagaagcaaaataactcttaaggtccccggcaaccgctacagcaatcg

SEQ ID NO: 434553 - DNA, 120 bp, Artificial Sequence
  ENSG00000152767_59 (sequence is synthesized)
cacagatcagcaacctccaactgcatcatctcggtgagcaagtgcgcaagcagtccagggcgctgacctgggcactcggcagctccaggcctggggacttctccctggagtcttccaaag

SEQ ID NO: 434554 - DNA, 120 bp, Artificial Sequence
  ENSG00000152767_60 (sequence is synthesized)
tgtctcatcacacacacacagccacgagtacacacgcacggccacacatacacagcaggtgccctgtcctctgaagagtcacatttcaaggagtatgcaaaataagcgtgttataaaatt

SEQ ID NO: 434555 - DNA, 120 bp, Artificial Sequence
  ENSG00000152767_61 (sequence is synthesized)
tatttgtgtaagcattcagacatttttaggtgggaaagatgatatgcagaatccactacaaggtgcaacagaaaatcgtattggaaaggacggtacatctggcgcagaccagcagtggca

SEQ ID NO: 434556 - DNA, 120 bp, Artificial Sequence
  ENSG00000152767_62 (sequence is synthesized)
cgattccaaacaaatgtcagacgagagcgcttcatggggagaaactgaaaattataatttaaagcttcatgaggcaagatatgttccaatttaaaacactaagaaatagtaccatcgatg

SEQ ID NO: 434557 - DNA, 120 bp, Artificial Sequence
  ENSG00000152767_63 (sequence is synthesized)
aaaaaggaaatcaacctctaggtgtaccaaaaggggcgtagggcaaacggggaaaatttgcatttgttgaggtacaaataggagtgttctgtaagagaggggcattaattattaatgaca

SEQ ID NO: 434558 - DNA, 120 bp, Artificial Sequence
  ENSG00000152767_64 (sequence is synthesized)
aaccctgcaaatacaaaataaaacccaaatcactggtcacagaattcaaaatgtacatgtaataaaggcaaggcaatagactcaagttatggcctgtcgaatatttactccactgacgtt

SEQ ID NO: 434559 - DNA, 120 bp, Artificial Sequence
  ENSG00000152767_65 (sequence is synthesized)
atctacagaagcacttggccagtttgtacacagtgattccttatgcacgccgaaagggtttccgtaaaaatgacattatatacaaatctgtacacccatccaccagagcgattctccagc

SEQ ID NO: 434560 - DNA, 120 bp, Artificial Sequence
  ENSG00000152767_66 (sequence is synthesized)
tcccagagggagttatcaacttaaagcaggatacctgaggtttcatgtctttagttgccttatcataatcccaaatatacatttcagggtttgtttttgtttttaaagacactttcctgg

SEQ ID NO: 434561 - DNA, 120 bp, Artificial Sequence
  ENSG00000152767_67 (sequence is synthesized)
aatatgtgcactatggttaaaattaaaaacaaaagtaataaaataaaataaaatgatcgctggaaggagctgaccctccccacccatctgagagacttcatctggctgcagcacagtgaa

SEQ ID NO: 434562 - DNA, 120 bp, Artificial Sequence
  ENSG00000152767_68 (sequence is synthesized)
gactgtgtgtgtccctggacgggcgcctggcgctggggtggctcccagtggcgcacctcttcggtggagtcagcgaaggctctcgttgacttttaaaaaaggaggaggatgaagaaggaa

SEQ ID NO: 434563 - DNA, 120 bp, Artificial Sequence
  ENSG00000152767_69 (sequence is synthesized)
aaaaggaaaaacaaaaccccaaatgccaaaggaatttcagtgggatgaagttcctccaccacttagagagtatctagggaaaaagagagagagagaagtcaacacatgtcatttctcatc

SEQ ID NO: 434564 - DNA, 120 bp, Artificial Sequence
  ENSG00000152767_70 (sequence is synthesized)
cctgtgcaaaaattcatatagtaaccaaaatcttagttttcataagaaattccaagtcatacaaaaataagtggagcaaatatcaatgtgtaagtctaattttaaaagaatgcatataaa

SEQ ID NO: 434565 - DNA, 120 bp, Artificial Sequence
  ENSG00000152767_71 (sequence is synthesized)
gactgagaagatcatgattcttacacaaaaactccagagcatgtcaccaaaaaccaagaatgggttcagcctccctggagagatgtgaataaaacgggaaatcatatcccttttacttac

SEQ ID NO: 434566 - DNA, 120 bp, Artificial Sequence
  ENSG00000152767_72 (sequence is synthesized)
gatcaattgtcaaaaagtgaacattgatccatacatgatgacacagtaagattccagggatgcatatgcattcccgatgtgagggcaggaaacccattttggccataaaaatagtgatgc

SEQ ID NO: 434567 - DNA, 120 bp, Artificial Sequence
  ENSG00000152767_73 (sequence is synthesized)
agtccaagaatctatttcctagaactgcttccgaaatatggtccaaagcaggaacaacgtgtctgcacaaagatgtctctcgggattttcgtaattacactaatttggaaacaactctga

SEQ ID NO: 434568 - DNA, 120 bp, Artificial Sequence
  ENSG00000152767_74 (sequence is synthesized)
tgcccaacagtacagaatcagttaagtaaattatacaaactgaaataacagactaaaaatggtaattatctgtatttacatatatatattaaagcaatattaaaaatatgtacaagttta

SEQ ID NO: 434569 - DNA, 120 bp, Artificial Sequence
  ENSG00000152767_75 (sequence is synthesized)
aaagtacatacaaaattacagattgggcatcccttatctgaaatgcttctggctttggatctgggaatatccgcattatacttaccagtgtgcagccccaaatccgaaatctgacatgcc

SEQ ID NO: 434570 - DNA, 120 bp, Artificial Sequence
  ENSG00000152767_76 (sequence is synthesized)
ccagagagcagttcctttgagccccatgctggcgctcaaaagtttcagattggggatttgggatattcagcctgtatatgtgcactatataagtatatttacatgaacaacttctgtatc

SEQ ID NO: 434571 - DNA, 120 bp, Artificial Sequence
  ENSG00000152767_77 (sequence is synthesized)
ctaaattaagtactatagaaattctaaaaaatcttctttgcactataaggtagataagagaattcagtaagtttatgacctggtatgacaacagaaggcaatgcacccaaagatgctgat

SEQ ID NO: 434572 - DNA, 120 bp, Artificial Sequence
  ENSG00000152767_78 (sequence is synthesized)
gagatttgggctacagtggtgggatcatgggtaatttctgtgtcttccaaaaattctacaagattgtcttcagaagacaacaaagggtgagaacggggtcccctcatgaccacaattccc

SEQ ID NO: 434573 - DNA, 120 bp, Artificial Sequence
  ENSG00000152767_79 (sequence is synthesized)
tcaaccattttacaacagactccaaatcacaggtccaggagagatggctgaggatgtctttgaccaggcttatctcaaacgttccaatctagagctcctcttttcaggcatttgaaatac

SEQ ID NO: 434574 - DNA, 120 bp, Artificial Sequence
  ENSG00000152767_80 (sequence is synthesized)
ttggcatctctcccagagaacaaatggttacataaggtcctcccaaaagcacacattagccacggagcctaagactcaactatcaagaaatacaaatgactaaatcacgggatgagttga

SEQ ID NO: 434575 - DNA, 120 bp, Artificial Sequence
  ENSG00000152767_81 (sequence is synthesized)
tgtcacacaaaagaatccaaacattaattccagctgagacagaaaggctctgaaaatgcttcagaggagaggcggctctcatttttcctacagccatccactgaaacaacatgtttggag

SEQ ID NO: 434576 - DNA, 120 bp, Artificial Sequence
  ENSG00000152767_82 (sequence is synthesized)
caaaactggcaggaagtctaagccatggccaccgtggttttggcagccatcggggtgaacgctcagtgggagcttcaggagcagggaaggaagaagtgggtaccacagccaagcctgcag

SEQ ID NO: 434577 - DNA, 120 bp, Artificial Sequence
  ENSG00000152767_83 (sequence is synthesized)
agagatgataagcacctcaagaggcagctcatctgaggacagaggaggaaagagggcactcctcatcacagacaaaggaaagagagcaccaacttggcttcccccatgcatcactgcaaa

SEQ ID NO: 434578 - DNA, 120 bp, Artificial Sequence
  ENSG00000152767_84 (sequence is synthesized)
gtaaagttttaaacacaacacagacatcaggtagctacagacccgcccgagggtaaatagggtcaaccccagccacgatgcccagtgagcacgtaaaatgtgctgcgtctgaatggagat

SEQ ID NO: 434579 - DNA, 120 bp, Artificial Sequence
  ENSG00000152767_85 (sequence is synthesized)
gtgctaagtgtaaaacacacaccaactccaaagacggtccctccaaaaatgtaaaataccttattgatgattgttgttattaatgttgaaataatactttggatctggcaggttaaaaaa

SEQ ID NO: 434580 - DNA, 120 bp, Artificial Sequence
  ENSG00000152767_86 (sequence is synthesized)
aagtcccgcgcagcccggggtggtgccggaagcccgtgcctgtggctccgggggaggggagggctcggtgggtccctgaagactgtcctccccgcgcgacgtcgcaggcgaagcagcccc

SEQ ID NO: 434581 - DNA, 120 bp, Artificial Sequence
  ENSG00000152767_87 (sequence is synthesized)
aggcaggacctcaaaaagcgacctgcagagtccgagcccctgaccgcccgcctgccgctcccggcttcgccgtgcacacgtctcccgctctccccgatattctctaagccgctttcatca

SEQ ID NO: 434582 - DNA, 120 bp, Artificial Sequence
  ENSG00000152767_88 (sequence is synthesized)
cccttattaggactccacacttaggacaagccaggcgcatcccatgtgctccagagaggaggccattgttattagtaaaggagttcatccgtctgggcagcctcagcaagctctcgggga

SEQ ID NO: 434583 - DNA, 120 bp, Artificial Sequence
  ENSG00000152767_89 (sequence is synthesized)
ccttgagcacggacagcctggatctgctgggtaaagggagaagttatgtccagggtgggacagagaggacggcgagagatttcctcactactcagaacagcgggaaattcaaaacttagg

SEQ ID NO: 434584 - DNA, 120 bp, Artificial Sequence
  ENSG00000152767_90 (sequence is synthesized)
gattatttctgaaattttccatttaaaattttctatttaaaattgacgaagggtaactgaaaccagagaaagcaagactgacgataagggaggggcctcctgtactccaagagcactgaa

SEQ ID NO: 434585 - DNA, 120 bp, Artificial Sequence
  ENSG00000152767_91 (sequence is synthesized)
aattttttcttaaaagccgcctgcggggtattgtagaaacgctgcgctgcctatcacagcttgtgatgtgacacgttcattctgcaagtttaaacttcgcctagtggctgcaccattttg

SEQ ID NO: 434586 - DNA, 120 bp, Artificial Sequence
  ENSG00000152767_92 (sequence is synthesized)
cattctgggatgtgacgtggagcagaattaccttcagagtgaagttcaaaaactcactgggaataagtacagagaaatgatgctgcaagctgatgaaataaatttactataggaacaaaa

SEQ ID NO: 434587 - DNA, 120 bp, Artificial Sequence
  ENSG00000152767_93 (sequence is synthesized)
cagggagacttgaacacaagcactgcttatctcgaaagctgatctgctcaccgaggtggcccttgagcacggacagcctggatctgctggatcggttcttggggaaaagctgtgcttcag

SEQ ID NO: 434588 - DNA, 120 bp, Artificial Sequence
  ENSG00000152767_94 (sequence is synthesized)
agacaaggttgaagaacttcgcctgcatatgatggaagatgacaatgggaaccacaggtgtcattggtggctttgttttacaaagtcttcacctttctgctgagtcacgggactaagttc

SEQ ID NO: 434589 - DNA, 120 bp, Artificial Sequence
  ENSG00000152767_95 (sequence is synthesized)
tttctaaagattcaggttcagtgggctgaatgcactttcatgacttcattagaccactgagcccaaggagaaaagtgccaatcttactagacatgaggaaaaagacacatcttttgctct

SEQ ID NO: 434590 - DNA, 120 bp, Artificial Sequence
  ENSG00000152767_96 (sequence is synthesized)
tgctggaagtggtgtcctactttctacaagcagtcgtcatctggtttatacttgccttgttcagtttttgtgtgatattttattctctgcctaatagatattaaagtatcaagctgtcaa

SEQ ID NO: 434591 - DNA, 120 bp, Artificial Sequence
  ENSG00000152767_97 (sequence is synthesized)
agggaagaaagcctgtggcctttagcaagcaaggatgggggtgtaaccaggctcatcagacctcccatcccctcacagccacagacccagctttaaggttactctggggtccccttggcc

SEQ ID NO: 434592 - DNA, 120 bp, Artificial Sequence
  ENSG00000152767_98 (sequence is synthesized)
aagaggagggtctgttctgtgggttgagagccttaggattttatttttctttcttcttgttcatgccttcaacaagtataaagccctttccatcttaactaagcacttatcacacactgt

SEQ ID NO: 434593 - DNA, 120 bp, Artificial Sequence
  ENSG00000152767_99 (sequence is synthesized)
tgccttccagcagagaaagacggcagtgtgtaaggagcgttagaagaagatgttgtcttttgtgtgtagaaagtggtatgtaaaagtgaaaaataaaaagaaatagagcagaatcaggga

SEQ ID NO: 434594 - DNA, 120 bp, Artificial Sequence
  ENSG00000152767_100 (sequence is synthesized)
ctgtgcctgaccttgaagcttctttctgactgatagagatgaggaggggagaaaactgtcttctcacatcaccacaattgataaatgtatcctggcatcccgtctctgagatctggccct

SEQ ID NO: 434595 - DNA, 120 bp, Artificial Sequence
  ENSG00000152767_101 (sequence is synthesized)
atgttccccaccaactgggctcaccttatgttgtctgctagcttctgtttggctcactggggaatattgacaaactgggaagtgtcattcctacgtgacctgtttttctttctgtttctt

SEQ ID NO: 434596 - DNA, 120 bp, Artificial Sequence
  ENSG00000152767_102 (sequence is synthesized)
ccagtgtgtggaatcgtcctcctcatactgtttatccattcattcagcagtggacacctgggttgcttctagcttttggctattgtgaataattcttctgtgaacgtggatttacaaaac

SEQ ID NO: 434597 - DNA, 120 bp, Artificial Sequence
  ENSG00000152767_103 (sequence is synthesized)
tctgctttcagttattttcgttgtatactcagaagtgagatcgctgtatcctaggataagactatttttgtaattttgagaaactgctgtactgtttttccatagtggctgcaccatttt

SEQ ID NO: 434598 - DNA, 88 bp, Artificial Sequence
  ENSG00000152767_104 (sequence is synthesized)
tatatatattttccctagttggctttagactcttgaccccagcttatagttgtttttgttaaagactgtattattatggtctctccat

SEQ ID NO: 434599 - DNA, 120 bp, Artificial Sequence
  ENSG00000152767_105 (sequence is synthesized)
tttctcatcaagctccggccagatgccaatttcctggggtggcctggagcccggagccgtgggcgacttcacagagaaacgacgtaagagccaacattgacacgaagtatgaggaagagg

SEQ ID NO: 434600 - DNA, 120 bp, Artificial Sequence
  ENSG00000152767_106 (sequence is synthesized)
atgaacgttgcgtttcagtgattttaaggaggcaggaagggactttcagtatctgggttttgtttttcaaggaaatgtaagccaaataaacataatttgtatatgaaatctgtcaaaaaa

SEQ ID NO: 434601 - DNA, 120 bp, Artificial Sequence
  ENSG00000152767_107 (sequence is synthesized)
tagttaattgaacattttttctgtatattcaaggaaaatatcaagagactgagtggacccaaaaatacagagtctgtcaggattgcttttagtcctggctagccaagcaaccctgcatct

SEQ ID NO: 434602 - DNA, 120 bp, Artificial Sequence
  ENSG00000152767_108 (sequence is synthesized)
gagcagaaaggaggcatcggagggacttacatttgaaccttttgaagagagacccttgcaaagcaaaatgtcctctttccatccacctgggagacaactggaaaaacacaacagtgtcgt

SEQ ID NO: 434603 - DNA, 120 bp, Artificial Sequence
  ENSG00000152767_109 (sequence is synthesized)
tagttcagaatcattgtgttcggaggagataaagcaatcctctgacctcatattctgctttttctccttacggggtgattcgcttctttaccttttcccctaccatatcccacagaagat

SEQ ID NO: 434604 - DNA, 120 bp, Artificial Sequence
  ENSG00000152767_110 (sequence is synthesized)
ttgagattgcttattttattttttttaaatgtacataaatgaaaatggaaaattaaaaaaaaaattaggtaaatagtaataaagccagaaaggtagtgcattaaattatgctagaaattc

SEQ ID NO: 434605 - DNA, 120 bp, Artificial Sequence
  ENSG00000152767_111 (sequence is synthesized)
atcaaaacagctgggctctggtcattagactattttttatgaagcttgttatacagtatatgtgatacaaagaaaaaggtgtgctgtctcagaggtgtaacaattggtgtacattgacct

SEQ ID NO: 434606 - DNA, 120 bp, Artificial Sequence
  ENSG00000152767_112 (sequence is synthesized)
tgaactagtgttgttaaggcgcaagtctgattttaaagctctatcctttaactttccacattccagcagtattgaggactgtcttgaggttatgtgagaatcatatttctcacagataaa

SEQ ID NO: 434607 - DNA, 120 bp, Artificial Sequence
  ENSG00000152767_113 (sequence is synthesized)
aacgtgtaagactttgcaatctgatctgttatttctgacaagactacgaaaagtttaataaactcataatttttttaagcattagattatctacctttgcacccactgacgttcctcttt

SEQ ID NO: 434608 - DNA, 120 bp, Artificial Sequence
  ENSG00000152767_114 (sequence is synthesized)
atatataagagtttcactttgatgtttataaagtcctgaagttttagggctttttaggaggtcatacggttgtcacccacatgtgtagaatttactgccaagaacctccccaggcggatg

SEQ ID NO: 434609 - DNA, 120 bp, Artificial Sequence
  ENSG00000152767_115 (sequence is synthesized)
ggaatctttggaaagaactggcttttgttcagcccttagggaagaaagcctgtggcctttagcaagcaaggatgggggtgtaaccaggctcatcagacctcccatcccctcacagccaca

SEQ ID NO: 434610 - DNA, 120 bp, Artificial Sequence
  ENSG00000152767_116 (sequence is synthesized)
cctttggccttttcacttaaaagaagcactctaaggcttcgctttgacataccccagttgccagcatcactactgtttgggaccattaggaagtaaattcagggagacttgaacacaagc

SEQ ID NO: 434611 - DNA, 120 bp, Artificial Sequence
  ENSG00000152767_117 (sequence is synthesized)
actgcttatctcgaaagctgatctgctcaccgaggtggcccttgagcacggacagcctggatctgctggcaaagagctcctgggaaggtgctgctggatgcagtttgcaaccacctcaac

SEQ ID NO: 434612 - DNA, 120 bp, Artificial Sequence
  ENSG00000152767_118 (sequence is synthesized)
cattgactgcagtgacgtagatagcgaatacgaccttcttagagaacaagcgtcccgatcccggtcccgatcccggtcccggtcccaaacaaatgacaattatgagggtgatctgaccag

SEQ ID NO: 434613 - DNA, 120 bp, Artificial Sequence
  ENSG00000152767_119 (sequence is synthesized)
cggtgtctatctgctgtccagggaggaggggcgaagagaggctgggcgtagggcttccccgcactctgcgaagtcctcccggcctccttccggagaattccttgatgacgattcagcaga

SEQ ID NO: 434614 - DNA, 120 bp, Artificial Sequence
  ENSG00000152767_120 (sequence is synthesized)
catcacctttgatatgagcgggagccctcgactcccaaggcatagctctctcatagatgaaatgttcaagggctcggctggtcacagccccctggccaccccattgtctcccagcagcag

SEQ ID NO: 434615 - DNA, 120 bp, Artificial Sequence
  ENSG00000152767_121 (sequence is synthesized)
cagttcaagtccaaatatgagttgggacagaactgggtctcaaggctatgtttcggaaaatggacatgaccatagagaggggagtatgggagaagacactctcccggaccagggtcctcc

SEQ ID NO: 434616 - DNA, 120 bp, Artificial Sequence
  ENSG00000152767_122 (sequence is synthesized)
ttatgaacgctggtcccccacctcgccaaggccatacatgcggaatcttcctggtagatgtaataagtcagagacagatccactcatccttagccaggtagcatttaccccggaggccat

SEQ ID NO: 434617 - DNA, 120 bp, Artificial Sequence
  ENSG00000152767_123 (sequence is synthesized)
ggatgggcttggtggccgtgggaagtgggggcaagccagcgcagctgctcccgagggtagaagcctggctaatggcacaccccccatgggtgcagcctctaaggtccctgctgtgcagtc

SEQ ID NO: 434618 - DNA, 120 bp, Artificial Sequence
  ENSG00000152767_124 (sequence is synthesized)
ggtgtgtgccagaggcatggcggggcagctggcacccctgcaagtgaccgagggctccaccagcagtgggactgagtccagtgagtcagactctgagatgctgatccccgggagtcagcc

SEQ ID NO: 434619 - DNA, 120 bp, Artificial Sequence
  ENSG00000152767_125 (sequence is synthesized)
cctcatatttggtaaccccgcagtgctgcgttccccgtccctgctgagaagccgggggtccttgggtggcctgcgtttgagtgaggaacaggaggaggatgagtgaggaacaggaggagg

SEQ ID NO: 434620 - DNA, 120 bp, Artificial Sequence
  ENSG00000152767_126 (sequence is synthesized)
atgagtgaggaggccaggagccaagtcttcagcccgagcaacctggggtcacgagaccagggtttccctaaagatcatctgttctagtgactcattcatttgtagtctacatttgttaga

SEQ ID NO: 434621 - DNA, 120 bp, Artificial Sequence
  ENSG00000152767_127 (sequence is synthesized)
ggagattttggacaggcacatgtttgaaagagtctgcctgacttctaaaatcgttaagaaaaacaaaacttcacataagtggcttgctttccagaaaaggtgggcaagataaacagcaag

SEQ ID NO: 434622 - DNA, 120 bp, Artificial Sequence
  ENSG00000152767_128 (sequence is synthesized)
tcctaatgacaagttctcaggagcttgtttattttgctggttgaaggctaggaagaaacactttattatgaatccgatcatgtgtatagtgtgttatatttatatggcaattttctgtgt

SEQ ID NO: 434623 - DNA, 120 bp, Artificial Sequence
  ENSG00000152767_129 (sequence is synthesized)
atgttcaattatgcagctcaccctcctgttggttgagagtttgaactgaagcatccttgagattacagaaaagggtttcccattctccccttctttaaaaggagggctgctttgtccatg

SEQ ID NO: 434624 - DNA, 120 bp, Artificial Sequence
  ENSG00000152767_130 (sequence is synthesized)
cctcatgaagtgaggaattggcactattcaaggccaaatgtaaattgatagctagttgagattatgttggtgaaatctttcgtcaagaataatgaatattttaatgggaagaatttgggg

SEQ ID NO: 434625 - DNA, 120 bp, Artificial Sequence
  ENSG00000152767_131 (sequence is synthesized)
ttatttctgcttcccaggcttcctgtgaaatactagaaaagttgtcaaatcttcatgaattgtgatctactagggattgctggtttggtttaggtttgcattggtggatcatattgttat

SEQ ID NO: 434626 - DNA, 120 bp, Artificial Sequence
  ENSG00000152767_132 (sequence is synthesized)
gttttaagaagtacaattctgcctctcagaatctcttggtgaaactgaaatcctattgagtgtggatgcagggaagagcaacaccttgaaataggcactgttgtcaccagtaggtcaaca

SEQ ID NO: 434627 - DNA, 120 bp, Artificial Sequence
  ENSG00000152767_133 (sequence is synthesized)
aactaaatgcctgcctttgaattgtgtacagcgcagagaaggactgttttccagcatggttgctcttggttggtgtacagacacagtcttaccattcacactctggtgaacagtgtcctc

SEQ ID NO: 434628 - DNA, 120 bp, Artificial Sequence
  ENSG00000152767_134 (sequence is synthesized)
tgttgggaatagtgatacttggatgtttctctgagccagaaaaaagaaaatgtaaggagagagagattgacttctttttaaatcttgcccaccagtgtcactgcctttcacccagcattc

SEQ ID NO: 434629 - DNA, 120 bp, Artificial Sequence
  ENSG00000152767_135 (sequence is synthesized)
ctgcattttagattaaagagcctggttttcacttgaagtttctctgccttagctgcacgttgcaattttctgagatattttaaaaattagtgatgccgggaccctgaccctagggatttt

SEQ ID NO: 434630 - DNA, 120 bp, Artificial Sequence
  ENSG00000152767_136 (sequence is synthesized)
gatctcattggtcttgagtgctccttgggcttcccagctgtttgtactgggcagccagggtcacttcttacccaggctgtctcgaatctagtggaatacagtaaaagtgttagctaaatt

SEQ ID NO: 434631 - DNA, 120 bp, Artificial Sequence
  ENSG00000152767_137 (sequence is synthesized)
tttggcttgcttgcagagtaagaaaaacatcacaaacaaactgctttttcttgatgcctgtgatttgtacttttcagccttaggtacttttttttttgaaaaaaaaaaaaaaaaaaagat

SEQ ID NO: 434632 - DNA, 120 bp, Artificial Sequence
  ENSG00000152767_138 (sequence is synthesized)
aaattgtagaataaaatttttagatcctaagtaactacaaaattattgaaaagagtcctaacaaggatagctccctgatgtgccaccataccagggcctcactgggctcatcacgcgacc

SEQ ID NO: 434633 - DNA, 120 bp, Artificial Sequence
  ENSG00000152767_139 (sequence is synthesized)
cgatcacaagggaagcaccaggcgtgcttaggacactgagtagaatttggcagcagcatagaaaatggaggaggatcggctcgtctcattgacaaatgatatctgtccacatgaatgtcc

SEQ ID NO: 434634 - DNA, 120 bp, Artificial Sequence
  ENSG00000152767_140 (sequence is synthesized)
agaagtcggttttaaagagtctgaacacttaatccatttttatacagactttttttgttttgttttcctaatcatttgattcagtgcctgattgaatcaagctgattgttggatcgtttg

SEQ ID NO: 434635 - DNA, 120 bp, Artificial Sequence
  ENSG00000152767_141 (sequence is synthesized)
agagttgttcattgaagtagtctatttacgccttgctttgaatttatatatttaaccagaatcacagaatttttaaactggaagggacctcagaggttcttctgggcaaaccttcatttc

SEQ ID NO: 434636 - DNA, 120 bp, Artificial Sequence
  ENSG00000152767_142 (sequence is synthesized)
ttctgaaaaagttaagtgactttgcataactaatacagctattgcatgacaaagctgaaactgtaacctcgtctctaggcttcacttttttaatctctgtgatatcttggtgcaatagga

SEQ ID NO: 434637 - DNA, 120 bp, Artificial Sequence
  ENSG00000152767_143 (sequence is synthesized)
gctttttgattcaatattttaattttggagagtcatatgaattaataattcaaatcggatgtggagactagtgatcaagtagacttaggcaattacaggccataataggtgggaagaact

SEQ ID NO: 434638 - DNA, 120 bp, Artificial Sequence
  ENSG00000152767_144 (sequence is synthesized)
acttctttttatatggtgagggttttgcagttataacacatttttgcataatctgttcagacataggaaaaatgtcaatttgctatgagtgttcagtgaagtgtgagttaaacagagcca

SEQ ID NO: 434639 - DNA, 120 bp, Artificial Sequence
  ENSG00000152767_145 (sequence is synthesized)
agtgtggaatcctgtggtttatctgtgaaagtggtttgttcaaatgaattttctttttccctctaattatacagcagtctggtaatgaaatacgattgagcactaggtatgaacttacac

SEQ ID NO: 434640 - DNA, 120 bp, Artificial Sequence
  ENSG00000152767_146 (sequence is synthesized)
agcgtatgacaggaatcgtcaaatgtaagcatccccgagcaaaacacgcttcaatcattattttgttttgctttttcctacagcagtgatttttatctaagtattttaagagcagttgat

SEQ ID NO: 434641 - DNA, 120 bp, Artificial Sequence
  ENSG00000152767_147 (sequence is synthesized)
caatggcagtatactcagttgtgtattgatgagatttttcactttaagagttgctcatagagtttttccctcactggctttgtaccaggcaagcaacttaatttctgcttcttggccagt

SEQ ID NO: 434642 - DNA, 120 bp, Artificial Sequence
  ENSG00000152767_148 (sequence is synthesized)
attcacaaaagcagcaatcctggtgtaattaatggtgcttacagtttgtttaaaggctgtttatcatacatcctgatgtgctgcgaatagtcactacttgcctcaagaggagcttgtcct

SEQ ID NO: 434643 - DNA, 120 bp, Artificial Sequence
  ENSG00000152767_149 (sequence is synthesized)
atgctaataaagattctataacattggccaaagggtccgtttatacattctttgagcctggtggagcacgtttgctgaggtgatgtggtctcctcagtgtcactgtgaagagctcagtca

SEQ ID NO: 434644 - DNA, 120 bp, Artificial Sequence
  ENSG00000152767_150 (sequence is synthesized)
ggaaaagccagcagcatctaccctgccaccctccaaaccttctgactttggggagactccagtcccccaggtctttacccagcctgcagatctcattctagcttaacaagggcatgcgtg

SEQ ID NO: 434645 - DNA, 120 bp, Artificial Sequence
  ENSG00000152767_151 (sequence is synthesized)
tgcatgaagttgaactaagagtggaggaaggccagaggtagggttgggtgtgatactaggtagcagatattacagacttctgaatgcattcagatttccaaagggtttcctgagacctct

SEQ ID NO: 434646 - DNA, 120 bp, Artificial Sequence
  ENSG00000152767_152 (sequence is synthesized)
caaccaatctttctaggacaatagctagtgtaggggtctcctgactcaataggggacccaggccttcagataccagccactcactggctgctctgtgacgtgctatcttaagaccgtgaa

SEQ ID NO: 434647 - DNA, 120 bp, Artificial Sequence
  ENSG00000152767_153 (sequence is synthesized)
tggaagacaagccctatgtaaacacaaatcttaaagccactgttggctactcgagggcctccttgtgctaatatcttttgttggatattatttcaaaatatgtgaattttagaccctttt

SEQ ID NO: 434648 - DNA, 120 bp, Artificial Sequence
  ENSG00000152767_154 (sequence is synthesized)
gtggttgcctttgctgccgcttgttaagggcaaaataaaaacgcaagaaattcttttagcatgaagaaatacatttaatgagctccagaactcaaaataaatggcttcagctccttgaac

SEQ ID NO: 434649 - DNA, 120 bp, Artificial Sequence
  ENSG00000152767_155 (sequence is synthesized)
agtcatctgtatgccattgacaatattttattagataggcgtttaattagaggaagtctgtgggccagattcttccctgcatgtgtgattcatatttggaaatttctgatttatctcccc

SEQ ID NO: 434650 - DNA, 120 bp, Artificial Sequence
  ENSG00000152767_156 (sequence is synthesized)
ccaattgtgccatgtggcctgcacttaaaatgtaagtaattctgattttattctcaagaacttatttgaagattcaagccaagcaatgctgaaaaaagctaggcctgcaaaactaaaaca

SEQ ID NO: 434651 - DNA, 120 bp, Artificial Sequence
  ENSG00000152767_157 (sequence is synthesized)
tagcacgagcctctcaaaatttccaccaaatatacaaaatccagtctgctctgaatgtgcatcagaaactcaactttggttattagccctggaatttggtgccaaaaacaaaaatttggt

SEQ ID NO: 434652 - DNA, 120 bp, Artificial Sequence
  ENSG00000152767_158 (sequence is synthesized)
tttgttgtcaagcaatttctaaaggaagaaacaatgtaaatattaatctgtcattttaaatgttgttgaaactgccatgagtgtgcacacagctctctgtttcatacctgtaatcagtat

SEQ ID NO: 434653 - DNA, 120 bp, Artificial Sequence
  ENSG00000152767_159 (sequence is synthesized)
tcgcatgctttcagtccactgtttctacttaaagcattattccgtatttcagcacagaatgactttggtgaaactgtagctgttagtgagtaattgcgttacaggcagacccagtcttaa

SEQ ID NO: 434654 - DNA, 120 bp, Artificial Sequence
  ENSG00000152767_160 (sequence is synthesized)
attaacaaatctgggttcccttaactatcaggtttatgttggttttatttgcttctatctggatcccttctctttgcctgggaccttattctgattagctagatttttaagagcttttaa

SEQ ID NO: 434655 - DNA, 120 bp, Artificial Sequence
  ENSG00000152767_161 (sequence is synthesized)
agactggccttcctctagtgtgatggtatgagtctattctattgctgctaaattttacaaattgaactgcagaagagtctttctaggtaatccctgtaacagagcaagtttctttgaacc

SEQ ID NO: 434656 - DNA, 120 bp, Artificial Sequence
  ENSG00000152767_162 (sequence is synthesized)
ctaagcatgtgggagttatttatatcttactgctcacggtcatcatcaaggtctgattacaaaaattcaaaaaattacaacctcaggcataaatttaaagaggtggccatttaaaaataa

SEQ ID NO: 434657 - DNA, 120 bp, Artificial Sequence
  ENSG00000152767_163 (sequence is synthesized)
aggcataaatttaaagaggtggccatttaaaaataatccgttgctaccatttccacttaaaatggtagctctctgatgagttttatattggctctctgttagccaagcccgtaagagcat

SEQ ID NO: 434658 - DNA, 120 bp, Artificial Sequence
  ENSG00000152767_164 (sequence is synthesized)
atggagagaaaggtacgattgaatgaacttctgtgagcggcataaagacatttactctgacaacattaaagaatttactggtactgttttttttccttgttagtttaattccatctgttt

SEQ ID NO: 434659 - DNA, 120 bp, Artificial Sequence
  ENSG00000152767_165 (sequence is synthesized)
ctgtttaattgagtgaaacttaataaaaatggtgtctctagtgagcacatgtacacacctctcccagttgttgggatttaaaatgaagctgtgacttttaggccaaaattagcgtgacac

SEQ ID NO: 434660 - DNA, 120 bp, Artificial Sequence
  ENSG00000152767_166 (sequence is synthesized)
ttaatataacagttttctttctattaaaaaataatgacaaaacacacacacacacacacacacaatctgtatgatgatttggcctggagttgtagacatcacagatcaaaagtggcctgg

SEQ ID NO: 434661 - DNA, 120 bp, Artificial Sequence
  ENSG00000152767_167 (sequence is synthesized)
tgctagctgtttgggtatatccttgaaaagggcaactttgtcatttcctagagtaacctagagagagatttccaagcatttccccatgaacagaagtggtaaatgctgatttattgtgcc

SEQ ID NO: 434662 - DNA, 120 bp, Artificial Sequence
  ENSG00000152767_168 (sequence is synthesized)
atatgtgtgtttgggaggaggggagatagcgtcttgttttgaaaaaagttctcacttcataaaataaactgcacaccactccaaaaaaaaaaaaaaagatgaaacctcaagcaggaggaa

SEQ ID NO: 434663 - DNA, 120 bp, Artificial Sequence
  ENSG00000152767_169 (sequence is synthesized)
cttttttatttaacccctagtgaaagcaattaaacgtcttggtagatgctagggaagaattagaaaatcttcttttcctgaaagctttaaacattgaatagactctgatttattcaggat

SEQ ID NO: 434664 - DNA, 120 bp, Artificial Sequence
  ENSG00000152767_170 (sequence is synthesized)
catttcggtgtagattggccactcgacacagacatcacagcatggtagcctcgaaaccaagccttcagcatcttctcggcgcccggtgttggagtgttacttggagtggaggcagtgcat

SEQ ID NO: 434665 - DNA, 120 bp, Artificial Sequence
  ENSG00000152767_171 (sequence is synthesized)
ttgcatcttcatgtagtctccagatcaggttactctgatttgtcttggagtggctttctgtttgaaagtagggaagattaaaaatcaacttgccacgggatatctgatctccatgagtag

SEQ ID NO: 434666 - DNA, 120 bp, Artificial Sequence
  ENSG00000152767_172 (sequence is synthesized)
ttgaaagccagtctaaaaggttaactctacagggccggcgccgccagtgcggtcatggaaaatcgtgctgtgagatactggagtgtgctgctggggccaggtgcagcaattgcagaatgt

SEQ ID NO: 434667 - DNA, 120 bp, Artificial Sequence
  ENSG00000152767_173 (sequence is synthesized)
tgaggagtgaggagtagttagaaatcactgcaacatggaaaagcacacagaccaaggacgctaaggagggagcgaggactaccgggcaggtgtgcgtgtgtggagtaaaatgcatcggac

SEQ ID NO: 434668 - DNA, 120 bp, Artificial Sequence
  ENSG00000152767_174 (sequence is synthesized)
agtgattgactccacttttgagtgagatgtggaggcggtagtggtgtgggggttgtgagggagtgagtctgctttattatgaatcaggattgatagctggccttaaagtgggaaatgata

SEQ ID NO: 434669 - DNA, 120 bp, Artificial Sequence
  ENSG00000152767_175 (sequence is synthesized)
gaagggtcacttaggagcctgcagtggcatggtgaccagtctgttattactcatagatgaccttttctggctcttgaaaccaagctaacgactcctttttcttctgggcctcaaagtttc

SEQ ID NO: 434670 - DNA, 120 bp, Artificial Sequence
  ENSG00000152767_176 (sequence is synthesized)
tttgtaggaagtaaagcatttgtcactttccctgcagtgatttattgaaagactgaagataggtcttccttagttaaggacgcacactggctgctcgctccagaagcaccaagaatggct

SEQ ID NO: 434671 - DNA, 120 bp, Artificial Sequence
  ENSG00000152767_177 (sequence is synthesized)
gatggataaatcccttacccatactcctgtttctgcctcctaaggttgctgtgaaaacctaactaaccaaacctcaccagcttggcctatattattaatcaaattcccttctgttctctc

SEQ ID NO: 434672 - DNA, 120 bp, Artificial Sequence
  ENSG00000152767_178 (sequence is synthesized)
tgtgtgtatatttaatactgtagataatatgttttatttaaaatttctaatacaccaaattaatttgaaatagaaaaggctggggacttcattctcatttttgtcatttgtttaatcagt

SEQ ID NO: 434673 - DNA, 120 bp, Artificial Sequence
  ENSG00000152767_179 (sequence is synthesized)
ttgggaaaacattttccgttgttccattgtatgcagtgtcttgtcagcatgtacctatctaggagaaaacgctttgttttcagcgttctgtctttaccctcaaagcatggtgtagcttct

SEQ ID NO: 434674 - DNA, 120 bp, Artificial Sequence
  ENSG00000152767_180 (sequence is synthesized)
gttcttacactgttggagcactgtctgatgtctttttttttttttttaacactgctgaataccaatttgtacttggaatacctctttcctctagaatacagtgatcctattccccaaagt

SEQ ID NO: 434675 - DNA, 120 bp, Artificial Sequence
  ENSG00000152767_181 (sequence is synthesized)
gcaagctttcatgtggaagcatcctaagtgatcgtcctgggtgatgccatatttcactaaagtgggaaaagaagaggtgaactttgctcttccaacaaggcttgcactttatactttggg

SEQ ID NO: 434676 - DNA, 120 bp, Artificial Sequence
  ENSG00000152767_182 (sequence is synthesized)
cagtgcatgggagaaggggggcccttagaggtgagcaggatcactgtagctagaggagaggtctcactgaaacagaacgcatctgtgactgtagcttgcatggagagcctagacagccaa

SEQ ID NO: 434677 - DNA, 120 bp, Artificial Sequence
  ENSG00000152767_183 (sequence is synthesized)
ccatggatttgcctttatgttttgaatggaaacatctatttcaattgggatagaaacctttacctatgtcatatctgtaagagaatttagcttatagatatgtagatacgtgtgtgtgtt

SEQ ID NO: 434678 - DNA, 120 bp, Artificial Sequence
  ENSG00000152767_184 (sequence is synthesized)
gctgggtggggaagtgggtgggaatgtagaaaaggcctcacctgacttggtcccagttggcttctgatggccaaggagctgtttttcattttggtgggcacccaacatgtaggttctcac

SEQ ID NO: 434679 - DNA, 120 bp, Artificial Sequence
  ENSG00000152767_185 (sequence is synthesized)
agatgctgtctggtttcttcttctctccatggcggaacaatgaagtacgtcaataaagcatggactcataccactgggaagaatgctggcttctccagtaacaatgagcttggtggttct

SEQ ID NO: 434680 - DNA, 120 bp, Artificial Sequence
  ENSG00000152767_186 (sequence is synthesized)
ttgagcatggaaggccaagctcatgtcacagtgtatgcacggtattaatatatctcttgttgatctaaactgaaggggcttttacttgtcctaacaggtatcatgctgtaaaaactgtcc

SEQ ID NO: 434681 - DNA, 120 bp, Artificial Sequence
  ENSG00000152767_187 (sequence is synthesized)
attgtaactgttctttcccactgatggctgaagctttgtcctgagtacaagatggtatttttcattggtacgaagcaccatgttcccaacccaaacactgcctccaccaccaccaccacc

SEQ ID NO: 434682 - DNA, 120 bp, Artificial Sequence
  ENSG00000152767_188 (sequence is synthesized)
accatcaccaccaccactgctactaccaacatcaccaccaccatcaccaccaccgtgttcaaacaaagcagcattctcctgtgtcttttcctcataagtaagaacaaggtagcacattca

SEQ ID NO: 434683 - DNA, 120 bp, Artificial Sequence
  ENSG00000152767_189 (sequence is synthesized)
tttttccattagtgcatttcaattcttttcctgcaagttgcattgctattgcttttctgaattgcttgatgatgaactgtgaagctgatgcttagctgcttgtgaaacttttcttaaagg

SEQ ID NO: 434684 - DNA, 120 bp, Artificial Sequence
  ENSG00000152767_190 (sequence is synthesized)
aactgggtctaagaagcacacatacattaccctcaacaacctcaggtatcaagaagaggaccacactgctaacatgggtaatcctataacctggcttttcttgtggaactttgtaatttc

SEQ ID NO: 434685 - DNA, 120 bp, Artificial Sequence
  ENSG00000152767_191 (sequence is synthesized)
tataaaataccgccagctttgcgtattccactgagccccaacttagatatcagacgctagtgagtcctgcctattcaggaagctacgtattattcagcataatactgcccttttttttga

SEQ ID NO: 434686 - DNA, 120 bp, Artificial Sequence
  ENSG00000152767_192 (sequence is synthesized)
taactggctttcaaatgggataatctcaagagaggtttcattgtatcctcttagagcgtatggatttaaatagagcctttcaaaaaaatagatgaaaacctacatctctaatatatttcc

SEQ ID NO: 434687 - DNA, 120 bp, Artificial Sequence
  ENSG00000152767_193 (sequence is synthesized)
tacttgggccttttgagcatattctgggcacatagagagaaaatctcctatgttttagaacagaataaaagaagacaaattatggtagataagtggcacccagaagattgcaaaataaat

SEQ ID NO: 434688 - DNA, 120 bp, Artificial Sequence
  ENSG00000152767_194 (sequence is synthesized)
aattttatgtgggggaatattgaagaaaaagcatagaaacttttttataattgcactttaaaattttggaaaagaaaaattgagaatgcaatcagtagtctcatttttgtcagtattctg

SEQ ID NO: 434689 - DNA, 120 bp, Artificial Sequence
  ENSG00000152767_195 (sequence is synthesized)
tcagatattagctattcaataagcatatcttggattactatttttttagttgtcagtttttctagtttccccctttataggaaaaaataatacctatgtggttaaaaactgagacccatt

SEQ ID NO: 434690 - DNA, 120 bp, Artificial Sequence
  ENSG00000152767_196 (sequence is synthesized)
taaaaaacaggacaggtacagttaagtactagaaatgccgtttttatcacttgaaaaatagattagaaatgtttttcttttcccagaattgtgtgagtttgttttgaagccttgaatacc

SEQ ID NO: 434691 - DNA, 120 bp, Artificial Sequence
  ENSG00000152767_197 (sequence is synthesized)
ggtacatggttaacaggcagcttgtgcccaatcccaaagcgggaagaaaggcctggctttggctcactgatgataaagtctcctcccactgcctttcagcagctctgccgaagagctgat

SEQ ID NO: 434692 - DNA, 120 bp, Artificial Sequence
  ENSG00000152767_198 (sequence is synthesized)
caagatgctgcaaacccagcttccccagaccggccaagagggaagaatgatgagcgtgttttaaattacaaagagagagcagcgcaggcagtttctggtctgggtgataaattgaaatcc

SEQ ID NO: 434693 - DNA, 120 bp, Artificial Sequence
  ENSG00000152767_199 (sequence is synthesized)
ataaatatagcagtgctaatttgaagttccgtaattgtttgtgccatgagaatgtgtacatttgaaaggattttataaagcaattactagaaatgcctcccttgagagctgtatgactgg

SEQ ID NO: 434694 - DNA, 120 bp, Artificial Sequence
  ENSG00000152767_200 (sequence is synthesized)
aggtgttttcagtctgaggggggcagcataaacccaaacctcttctagatgaatggcagggtggcgggaggggtcatgaaatcatggggaagaggtgaaggatttgagagctactaacct

SEQ ID NO: 434695 - DNA, 120 bp, Artificial Sequence
  ENSG00000152767_201 (sequence is synthesized)
gacatctaactgaatgcctaagaaattgcagggcaatttcaggaaataggaaaaataattttgaaaacattcaaagcctccagactttcggtgtgtgactgatcttttttctaatctctt

SEQ ID NO: 434696 - DNA, 120 bp, Artificial Sequence
  ENSG00000152767_202 (sequence is synthesized)
taaacttctttccacctattgccttaatagcaggtgcttcctcttagggtccccccaaattatttacctcgagttccctaatgaaattactttgcattaatttgtcataaagggagaagt

SEQ ID NO: 434697 - DNA, 120 bp, Artificial Sequence
  ENSG00000152767_203 (sequence is synthesized)
gctagaaataccgaggcattgataatttcatggagtagcaatgaatgtcagtcacagtttcctctccccgttgcccggggctgtgccttcaaagcaggtgacagactgcaaggtgtaaac

SEQ ID NO: 434698 - DNA, 120 bp, Artificial Sequence
  ENSG00000152767_204 (sequence is synthesized)
aagctttataatgccatataaatcaaaccgggctcattttacctaacaacagaaccatgtttgtttgcttttttgtaaaatggactacttcagtgaaaaattgattccacgtagttctaa

SEQ ID NO: 434699 - DNA, 120 bp, Artificial Sequence
  ENSG00000152767_205 (sequence is synthesized)
taactctgtgaccttggacattggctttttatagacacagctcttcccacctgctggtatggacaccagtttgtacagactgttgtcacacaccctggctcaaagtcaaaagagaatttt

SEQ ID NO: 434700 - DNA, 120 bp, Artificial Sequence
  ENSG00000152767_206 (sequence is synthesized)
aattactcatcaagctgccaaattctactaattgcccccttgtcagcatatttcattaattgctgaaaggtaaatgagttacatattttgtttggaccacgtcacctgtacattttcaaa

SEQ ID NO: 434701 - DNA, 120 bp, Artificial Sequence
  ENSG00000152767_207 (sequence is synthesized)
gcctcggattgtttatcttgcaaagagagaaggggcctcttctccacagatgcagctcaaattagcaaaactgaactgtagagtttcaggcctttcccttccttaaaatgctgatagatt

SEQ ID NO: 434702 - DNA, 120 bp, Artificial Sequence
  ENSG00000152767_208 (sequence is synthesized)
tctagaccagactttgatatttattggcttcttggtcttgctgtttaaacacacccattgccctttctttcttaggccctataagcaaagctggagtagcgtcttgggaaaaggccaact

SEQ ID NO: 434703 - DNA, 120 bp, Artificial Sequence
  ENSG00000152767_209 (sequence is synthesized)
gaccaccctaattttgtcgttccaagtctgcagagcgcacatattaagtagttgttactgacatctttaggctccgtgagtgaaatgcagcaagcctgcccccagcagcctgtgggctaa

SEQ ID NO: 434704 - DNA, 120 bp, Artificial Sequence
  ENSG00000152767_210 (sequence is synthesized)
tcctgagctgttccttcgtttaggtacacaggtgaccctgaagttcccactcggccctctgttttctgagtcctgtctcctctgtagcacagtggggattgttctgaaccgtggcacgcc

SEQ ID NO: 434705 - DNA, 120 bp, Artificial Sequence
  ENSG00000152767_211 (sequence is synthesized)
ttcttggcgaggcaggctctcttatggaaccatagtctgttacctcatttcttccaactgctctgtcccctaaatgtgtgttcccaggtgcagtgcagcaagggtgctcgctgttggcct

SEQ ID NO: 434706 - DNA, 120 bp, Artificial Sequence
  ENSG00000152767_212 (sequence is synthesized)
ttgagagtggaggtggctgtatcggagtgtgctccccctactttttcccttgccccgagtggcagttcttttcctctctgttgccggatgctgtctagggcctgttagttgctatttcct

SEQ ID NO: 434707 - DNA, 120 bp, Artificial Sequence
  ENSG00000152767_213 (sequence is synthesized)
tgcctccgctccccttcccactagccttctaactaccttttattctcggctccaactctttcaatgatgaggtgaatgctttttctgttccacgtcactgcaaagtcaaggtgtccagca

SEQ ID NO: 434708 - DNA, 120 bp, Artificial Sequence
  ENSG00000152767_214 (sequence is synthesized)
tgctctcacttataactgcctcacccgatctcacgcacagtgcgagagctgaaggtaagccccggatgttgccagattacggtggacaaataaaaaacaactctccaacagcaactcaca

SEQ ID NO: 434709 - DNA, 120 bp, Artificial Sequence
  ENSG00000152767_215 (sequence is synthesized)
aatgcatgaaatgttttaacctctagacagactgccagaatttctctcttctaattcctacttgtagtgataacatttttctttttgtgatttttttttttttaaataatagtgtagtac

SEQ ID NO: 434710 - DNA, 120 bp, Artificial Sequence
  ENSG00000152767_216 (sequence is synthesized)
cttgaaacaactgcagttctaactcattgtcaccatttctgtttgacacgttccacttcctttgcaattattgtatttagttgtgcactagtgtcaataaaattgacatttgtgaagcaa

SEQ ID NO: 434711 - DNA, 120 bp, Artificial Sequence
  ENSG00000152767_217 (sequence is synthesized)
acctctttgcagaacacaaagctggagctgaagctcacccccacccccactcactcccgtggttaacagaatattaaacctgaaaagtacattttaaaaaaagaatgaaaagtaaaaatg

SEQ ID NO: 434712 - DNA, 120 bp, Artificial Sequence
  ENSG00000152767_218 (sequence is synthesized)
tttgggaagttttctggaaactaaagagctaagaattcttaaaggatccggaaagctgtgttttcatacttcagtttgatgcatggattttcagtttaaaagccttttgcataaaaacat

SEQ ID NO: 434713 - DNA, 120 bp, Artificial Sequence
  ENSG00000152767_219 (sequence is synthesized)
taaagtctccttctaagggatcggttcttggggaaaagctgtgcttcagagacaaggttgaagaacttcgcctgcatatgatggaagatgacaatgggaaccacaggtgtcattggtggc

SEQ ID NO: 434714 - DNA, 120 bp, Artificial Sequence
  ENSG00000152767_220 (sequence is synthesized)
ggctcctcctggacgggttgggtactgagatgctccatgaagcccaagcaccattcacatctaattgagaagtttggagaggacagaattctcactcatcttacaggctctatttcttac

SEQ ID NO: 434715 - DNA, 120 bp, Artificial Sequence
  ENSG00000152767_221 (sequence is synthesized)
acaaactgggctggaagtagaagcttagcggtcacagtcactgaagagcttcttaatcttttttgagtcaggacttgaagtcctgtttcattatttcattcaaagaaattgattggcaat

SEQ ID NO: 434716 - DNA, 120 bp, Artificial Sequence
  ENSG00000152767_222 (sequence is synthesized)
gctgggtaggagtagatacagatgtgatctcagatacgtgaagctgcatacagaggggcccatccactcctaaacgggtctccaggaggcttggtttgatctactagatttggtgcctct

SEQ ID NO: 434717 - DNA, 120 bp, Artificial Sequence
  ENSG00000152767_223 (sequence is synthesized)
taaagggaagcaatacagcttttctgctgtgggttgtttgccactaggggaagattcatttctattccagccataaattagaccaaagagagggatttggtttattgctagtgcagaagt

SEQ ID NO: 434718 - DNA, 120 bp, Artificial Sequence
  ENSG00000152767_224 (sequence is synthesized)
taaaaaccatcttcctttcctgagtggtctcttaattagattctttagtttttaaatgttaactggaattgctgaagtttaattcctgaaagggtttagtttttaaaaggagtacctcat

SEQ ID NO: 434719 - DNA, 120 bp, Artificial Sequence
  ENSG00000152767_225 (sequence is synthesized)
ttaccatattactgtgttctgagaaatctacagtaatttttgtgtaacttttttattcaaagaatggattgttaattgtaaagccatttagaaaggcgaataaagtcagatctactttaa

SEQ ID NO: 434720 - DNA, 120 bp, Artificial Sequence
  ENSG00000152767_226 (sequence is synthesized)
agttggccctgatgtaaagagcacacgtgggcagcatggaggcgaggcagggctgcgtttgtgcaggtcgtgtggtccttgctctgagggttccgcgtgaaatttaaggagcagcctatt

SEQ ID NO: 434721 - DNA, 120 bp, Artificial Sequence
  ENSG00000152767_227 (sequence is synthesized)
tccacatttcaaagaggagaaatgtggggagcgaatgagtttcatagtcatgtcactatggcgtgacaggagggcaagaaaagacaagcgacccagaagaaaagagaattagacgtctcc

SEQ ID NO: 434722 - DNA, 120 bp, Artificial Sequence
  ENSG00000152767_228 (sequence is synthesized)
accctgatgccaaaggaaaaactggaccattcggctctctttatatggaatgatgggaaagagtgtgttctaagattcataggaattaagaagcccaaacataaagctcacaagacattt

SEQ ID NO: 434723 - DNA, 120 bp, Artificial Sequence
  ENSG00000152767_229 (sequence is synthesized)
ggtggaccccgaataagttgctgtgcataagttaaccatgcagctcttggcagctggtgtggggactcaaacccaggattagggactggaatggagcagctcattgctccctacattaac

SEQ ID NO: 434724 - DNA, 120 bp, Artificial Sequence
  ENSG00000152767_230 (sequence is synthesized)
cgacctgggaaatgcttgtctgaccctgtgtgtcggaaacagggcacattgctgtagcaaagtggtgaagataagattggtgatcagtgttccactctgctctcctgacccatttcctct

SEQ ID NO: 434725 - DNA, 120 bp, Artificial Sequence
  ENSG00000152767_231 (sequence is synthesized)
cacaatttctactttccgccttcctttggaataatagttttggaagccaagtattagtatatgataccagcctggagtcggggactctgaaacctaatctgaagtgtgtttaacgagggt

SEQ ID NO: 434726 - DNA, 120 bp, Artificial Sequence
  ENSG00000152767_232 (sequence is synthesized)
tctgaacgctgggacttattgctgaggggaacaaggagacagtgtgtcctcaggggcagtgtggccgcccctagagccacagcaagcaggaagaatcgcagcatttgtggtcagaaccga

SEQ ID NO: 434727 - DNA, 120 bp, Artificial Sequence
  ENSG00000152767_233 (sequence is synthesized)
cgaggtgagtgctgggagcctgcgccacctggtgcccatgccacagttcaggccgggtgctcccagactgagcccagccagggaggggctccccggggagagaggtcagctgatgctggg

SEQ ID NO: 434728 - DNA, 120 bp, Artificial Sequence
  ENSG00000152767_234 (sequence is synthesized)
ccggggagagaggtcagctgatgctgggtcccaggttttcatcagggtgggcgccggtttttattcctgctctggtgtttggttacatcttgattttttttttttttttttgagactgag

SEQ ID NO: 434729 - DNA, 120 bp, Artificial Sequence
  ENSG00000152767_235 (sequence is synthesized)
gccacatcttgatctttccgtaaagaaggtgctgatgatcgtcaggacccctttcttcctttgcctcttgcatgcattttctcctttggttcctgggtggttttgtgcaaagatccctag

SEQ ID NO: 434730 - DNA, 120 bp, Artificial Sequence
  ENSG00000152767_236 (sequence is synthesized)
agaagctccgcttacagttagcccccacccaggaagcttgcttctacccacgtgacggaaactcatccctctaccatggccacagaacatagcttgtaagaaatcctgttgctcattgct

SEQ ID NO: 434731 - DNA, 120 bp, Artificial Sequence
  ENSG00000152767_237 (sequence is synthesized)
accggtcatttgtaatgtgcccatcagcataatgagcatctctcctgtattaactcttcccaagcctcaggcacaggtgagttcatcttacatatggggactacggagactagagaggtt

SEQ ID NO: 434732 - DNA, 120 bp, Artificial Sequence
  ENSG00000152767_238 (sequence is synthesized)
aaggaacctgcccagagtcacacagcttggagggaaatgatttggaacctaaatctagaacccatggtcacaaccgtcctgcccttctatctcatggacagtcctacccgctcgtacttg

SEQ ID NO: 434733 - DNA, 120 bp, Artificial Sequence
  ENSG00000152767_239 (sequence is synthesized)
ctcagccccaggccaggtgctgtgtacctgatactgtaccaacgttcacaccattactcctttaaggacccctttagatcaattgcattatcccattttacagagcgtgacgctgagact

SEQ ID NO: 434734 - DNA, 120 bp, Artificial Sequence
  ENSG00000152767_240 (sequence is synthesized)
caggggaagggacttgctgggtcactcagaggtcagagccgcattccagacctgcttttcccacggggccacgcgtgctcttctgaacggaagtcgttgtgtctggtgtcacagttggtc

SEQ ID NO: 434735 - DNA, 120 bp, Artificial Sequence
  ENSG00000152767_241 (sequence is synthesized)
tgtgggtgtctgccctccctggcctagcatgcggagttggccctgcgtaggtggctcccgcacaggtggcccgaatccacacacccactaggagggcaaggcccttattccttgcctgaa

SEQ ID NO: 434736 - DNA, 120 bp, Artificial Sequence
  ENSG00000152767_242 (sequence is synthesized)
atgtcagaaacacctcccaactctttagccaaaactgtcatcttttttaaaaatccatcttcttacaccttggcttaaaacctgggtgacggctgactgcctcaggctaaaatcggaagt

SEQ ID NO: 434737 - DNA, 120 bp, Artificial Sequence
  ENSG00000152767_243 (sequence is synthesized)
cttcatgacctggcctggccagctctcacaccccagctgcgcagcgagcacctgtactgggcgtgtgagggagaaggaacagtgcggcccctgacctcacaggacccactggagggtctg

SEQ ID NO: 434738 - DNA, 120 bp, Artificial Sequence
  ENSG00000152767_244 (sequence is synthesized)
caggcaggtacctgggtgctggagggtctgcaggcaggtacctgggcagtggcaaccctgcactagggccgtgagagagaagtggacggtgcagttggagccggggcgttagggggtgtt

SEQ ID NO: 434739 - DNA, 120 bp, Artificial Sequence
  ENSG00000152767_245 (sequence is synthesized)
ggggggatctcgaagggaaatggtgtctaagttcagaactaacatgtaaataggagttttcctgggtgaaaggagggtgtggagaatagagttagaaacagcacaagctcaggttcagag

SEQ ID NO: 434740 - DNA, 120 bp, Artificial Sequence
  ENSG00000152767_246 (sequence is synthesized)
ggacagagaccggaacattgccaaaagcgtgcagggcacagggagagccacaaagtgaggctgcgacagaaagcagcggctacatcccactgcgccccatggaccccgcaaagccgtaac

SEQ ID NO: 434741 - DNA, 120 bp, Artificial Sequence
  ENSG00000152767_247 (sequence is synthesized)
ctaagagcagaggccgaacaggaagtgttttaaggagggaaacagtgataccaggcttgttctagaaaaaccgttgttaatatctagaatatatggcggactcctacaaattagttgtta

SEQ ID NO: 434742 - DNA, 120 bp, Artificial Sequence
  ENSG00000152767_248 (sequence is synthesized)
aaaaaaggcaacccaataggtagaagacttggcaaagtaattgagacagtgacagttcacagaaggggaacacaggtgcctcctgacatggtttgtcattgaccatctgtctttaaaaca

SEQ ID NO: 434743 - DNA, 120 bp, Artificial Sequence
  ENSG00000152767_249 (sequence is synthesized)
cacagcccaggcgacagacctagacccagtctctaaaaacaaaaccatgctgcctcttgcctccacaccttggtgcattccgttccttctgcttagagtcctggccaccacctccttggc

SEQ ID NO: 434744 - DNA, 120 bp, Artificial Sequence
  ENSG00000152767_250 (sequence is synthesized)
ctttcctggccagctctctctcgtcctttaagcctcagcttgtgcctggcacctgatgttgagctgacctcctgtccgccttgtcctgtcacactggcattgcctgtgtgttggccgagc

SEQ ID NO: 434745 - DNA, 120 bp, Artificial Sequence
  ENSG00000152767_251 (sequence is synthesized)
ccggaggaaaggacccagggcccctcctggctctgaggactcctcagatctgtcgcccatgggggtgagagcggtgtgtggttttgaaggcgctgttcttggcggactcatccagttcca

SEQ ID NO: 434746 - DNA, 120 bp, Artificial Sequence
  ENSG00000152767_252 (sequence is synthesized)
ctctgctatttctctaaacagtacccaatggagataggctatccttgatgattgaggaagagagtgctagctagcttaaagcatgaagtggcagcactgtaggagcctaggtttccagag

SEQ ID NO: 434747 - DNA, 120 bp, Artificial Sequence
  ENSG00000152767_253 (sequence is synthesized)
ctagagggacactgaatgccaagggctgttcccagcacgcccctgcccctgagcaccgggggccggggtgccatcattccatcattttcctctcagagctccccactaccccccagccct

SEQ ID NO: 434748 - DNA, 120 bp, Artificial Sequence
  ENSG00000152767_254 (sequence is synthesized)
gccactgagcactggatgccaagtaaatgtttattggaccaaactgggtggtcatgtctgaaaatcgagcaaggcctgggatttgtcactatggctgagaccgcattctctgataagcct

SEQ ID NO: 434749 - DNA, 120 bp, Artificial Sequence
  ENSG00000152767_255 (sequence is synthesized)
gggagaatttaactcgcatccttgggggaaaaaacaagaaaactaaatgcttcccttccaacactgaaatgctgggggaaagcagtgaaagaggtatttagagttctgaagactgaagtt

SEQ ID NO: 434750 - DNA, 120 bp, Artificial Sequence
  ENSG00000152767_256 (sequence is synthesized)
cagtcaacaagtatttcttgcttttcttgaccaaactacccaagtgctcagccgctggggacttgagtgccacccaaacttgtcagccactggggacttgcgtgccacccaagcttgtat

SEQ ID NO: 434751 - DNA, 120 bp, Artificial Sequence
  ENSG00000152767_257 (sequence is synthesized)
ccacccaagcttgtattaatcaggcactagcttcttttaaatattggatgcccaccagtataggggagccgtgcctctatcgaaaaataaaggcctgatgtggtggctcatgcctgtaat

SEQ ID NO: 434752 - DNA, 120 bp, Artificial Sequence
  ENSG00000152767_258 (sequence is synthesized)
aagccttgttccagctccccagggtttggatttaaagttttagttcctgtcggtggtcgcagtttcctgacgagggtgccatccagtctgctgttcagcttttgagtcatttaatttttc

SEQ ID NO: 434753 - DNA, 120 bp, Artificial Sequence
  ENSG00000152767_259 (sequence is synthesized)
cccattagagctcgcctagtctggatgccgttctaagggcatggtgtatactaagtcgcttaatccttacggtgacccagtgaagtggttcaatctttacgtccattttatgtaagagga

SEQ ID NO: 434754 - DNA, 120 bp, Artificial Sequence
  ENSG00000152767_260 (sequence is synthesized)
aactgaggcacaagaagtagcttgcctccagtgagtgtgactttgggcactccgttgtcctccagcctggaaagtcccagtagatacagcacagctgaggtgcaggtgtgcaggtatatc

SEQ ID NO: 434755 - DNA, 120 bp, Artificial Sequence
  ENSG00000152767_261 (sequence is synthesized)
aatcccttctgcccacagggtaaagccctagagcattgcatctggtctcaagtgtccagggctcaagtgtccagctttacacagatgttactgctgatgtctggaaagtgaaaaaggtag

SEQ ID NO: 434756 - DNA, 120 bp, Artificial Sequence
  ENSG00000152767_262 (sequence is synthesized)
attccaggccatagcgaaccggtggtgctcatcctaaaacacaggcgcttgaaatgcgtatttaaaagcaacacacgcgcagtgcagaaaacaaaaacagatacaagcaaaaaatattct

SEQ ID NO: 434757 - DNA, 120 bp, Artificial Sequence
  ENSG00000152767_263 (sequence is synthesized)
gcagggctgacttctttcaagttgttaccaggcttgacttttatgatttcactccattcttacactattgtttaggaatgtattcaactgcaaaataaaacccaccgttgatgacttaaa

SEQ ID NO: 434758 - DNA, 120 bp, Artificial Sequence
  ENSG00000152767_264 (sequence is synthesized)
caactctgattcatattcagtgggctaagacctctgatggttatttttcggcgaacaaagaaaaattaacctcatctcaggctttctgtttcccaggccctcagctcccagattctattt

SEQ ID NO: 434759 - DNA, 120 bp, Artificial Sequence
  ENSG00000152767_265 (sequence is synthesized)
aggggcacccagagagatggaatgaggcagactcggaggtctgtattttttattgtggtaaaatagctataccacaatattggccaacttaacgatttttacgggaacaattcagtggca

SEQ ID NO: 434760 - DNA, 120 bp, Artificial Sequence
  ENSG00000152767_266 (sequence is synthesized)
ttaagtgcctttacaaggtggtgcaactgctttgagtctctgctggtgatgtcactttggcaaagggacgaaatgagccaccagtgcgtcaggcctgctcagagttgtttggaggtagca

SEQ ID NO: 434761 - DNA, 120 bp, Artificial Sequence
  ENSG00000152767_267 (sequence is synthesized)
tggacacaggtgcctgtccctgccccctagctgggctgcagcgcatcctaacaatgctccaggggctgggccggccctgagcctggaggtgggcagggctgcaactgcctcctgggccac

SEQ ID NO: 434762 - DNA, 120 bp, Artificial Sequence
  ENSG00000152767_268 (sequence is synthesized)
tagagggcatgtgggagccactcacatgcaccccaggccccacttcctgggtagggtgcctggcccctcaaaacgagtgctgctctgagcttgttgggatggatctttccctccttcagc

SEQ ID NO: 434763 - DNA, 120 bp, Artificial Sequence
  ENSG00000152767_269 (sequence is synthesized)
ttccgcctgctggcaatgcatggggtcctgcgcccccatttctgcctcggtgtcacagggcacacccctctcccctcaaggtggctcttctcctcaggacaccactcccgttggatttag

SEQ ID NO: 434764 - DNA, 120 bp, Artificial Sequence
  ENSG00000152767_270 (sequence is synthesized)
ggcccaccctaccccagtgtgatctcgtcttcactagttaccctgcaacgagcctatttccaaataagcctgtgttctaaggtactggtagtcaggacctcaacgtgtcttttgggggga

SEQ ID NO: 434765 - DNA, 120 bp, Artificial Sequence
  ENSG00000152767_271 (sequence is synthesized)
cacagggaccccaagatgccccacagcaagtgacaaggggaagtgatgagatcagggtcccaggacctgccaagtctccccacacacgggggagcgggggtggggcccacatccttcagt

SEQ ID NO: 434766 - DNA, 120 bp, Artificial Sequence
  ENSG00000152767_272 (sequence is synthesized)
cacggacatgccccagcccagggccctggtgcagggagagctgctctctgtgccctcctggggcaggtgcccgctgtgcttctcacaggcctccttgcctttcagaatcagttgtctgga

SEQ ID NO: 434767 - DNA, 120 bp, Artificial Sequence
  ENSG00000152767_273 (sequence is synthesized)
aacctgctgaggaaattcaaaaacagcaacgggtggcagaagctgtgggtggtgttcacaaacttctgcctgttcttctacaaatcacaccaggtaagtgtctcgcacagggcaggtggc

SEQ ID NO: 434768 - DNA, 120 bp, Artificial Sequence
  ENSG00000152767_274 (sequence is synthesized)
cctgggaccttgggggtggcagcatgaggtgagggggccgccctcctctggaatgactcaggcctcttgggctccaggtgtcacggggatgacagggatgctggcggggggccctgtcca

SEQ ID NO: 434769 - DNA, 120 bp, Artificial Sequence
  ENSG00000152767_275 (sequence is synthesized)
cccgaggccctcaactctagggaagactgacattatcatccactgaaggacaacttctgccctaggaagggccacctgtcttctgcctggacaagggacgggggttggctttatctacag

SEQ ID NO: 434770 - DNA, 120 bp, Artificial Sequence
  ENSG00000152767_276 (sequence is synthesized)
gctgccatggtcccttccaggcccacgcccgaggagggagctgcctgggctcccaagtccctgtctgatgcggggcagcagccaggcccagcagcagaagctgaccccgaaaagccactt

SEQ ID NO: 434771 - DNA, 120 bp, Artificial Sequence
  ENSG00000152767_277 (sequence is synthesized)
ctcccaagtcagcgagtgagatggccccacccttccctgccaactaagcgtttagacctggggtcccactgcccgacaccagcaggcgattctgttctcatggcagaaagtggggtccca

SEQ ID NO: 434772 - DNA, 120 bp, Artificial Sequence
  ENSG00000152767_278 (sequence is synthesized)
acttccctgcgcccttaccctgcacggtgttggctgaggccctagacatcttgcttggagatctctgacataacgtgtccgggatgatgaagctaagccccagtgagactgcctacatgg

SEQ ID NO: 434773 - DNA, 120 bp, Artificial Sequence
  ENSG00000152767_279 (sequence is synthesized)
tgtaatggcagggactgcagacttcatttagccaagaaagaaatgcaacagtcaggcctaagactgttcctgcaattcatattttgaatagagatcctgggcctctgcaaattgcatccc

SEQ ID NO: 434774 - DNA, 120 bp, Artificial Sequence
  ENSG00000152767_280 (sequence is synthesized)
caagccgactacttgtgcagtttgccctgctgagccctcctcgccccgggaggcagaaggggaggggtcctcagcaatatgctgagcacctcctaaacaacatcacctgaaaaaggaacc

SEQ ID NO: 434775 - DNA, 120 bp, Artificial Sequence
  ENSG00000152767_281 (sequence is synthesized)
tagaggagagccattctcaaatctgatcctggactgagctcgagagctgggttgagagctgggttgatcaaagttgggattttgctattattgtgacaaagggtccagccttgcagtcca

SEQ ID NO: 434776 - DNA, 120 bp, Artificial Sequence
  ENSG00000152767_282 (sequence is synthesized)
gatcctgaaaggcctgggacaaggccaggtaatttggggagtccgtcctgcattgtgcaggatgttcagcggcatccctggccacccactagatgcccgcagcaacccctcagttgggac

SEQ ID NO: 434777 - DNA, 120 bp, Artificial Sequence
  ENSG00000152767_283 (sequence is synthesized)
atctaaaaatgtctccagactttaccaaatgggacagcattgcacccatttgagaagcaccggtagagagcaaatacacaaatatataaaaagggagatttgggcgtggtggtgcaagcc

SEQ ID NO: 434778 - DNA, 120 bp, Artificial Sequence
  ENSG00000152767_284 (sequence is synthesized)
tgtagtcccatctcctgggaggccaaggctggaggatcgattgagcccaggaggtagctacagtgggcgataactgcaccactgaactccagtatgagtgacagagccagaccctgtctc

SEQ ID NO: 434779 - DNA, 120 bp, Artificial Sequence
  ENSG00000152767_285 (sequence is synthesized)
gtagaaagtgatcggttcttggggaaaagctgtgcttcagagacaaggttgaagaacttcgcctgcatatgatggaagatgacaatgggaaccacaggtgtcattggtggctttgtttta

SEQ ID NO: 434780 - DNA, 120 bp, Artificial Sequence
  ENSG00000152778_0 (sequence is synthesized)
agtttctgagcgctcggcatctgattcaatctccagtttcctgttcttgctggggctggggtctctcctttaacaaagacacgccgcgcggccgagtccaggggctgcagaggcctggcg

SEQ ID NO: 434781 - DNA, 120 bp, Artificial Sequence
  ENSG00000152778_1 (sequence is synthesized)
cgcgcacgcgcacgcgcacgcccaccgcgcggcttcccgcggtccccggtgctgaggagagagcgatccgagggactgcgccgcccggacggcctgcagagcgctgccatcatgagtgaa

SEQ ID NO: 434782 - DNA, 120 bp, Artificial Sequence
  ENSG00000152778_2 (sequence is synthesized)
attcgtaaggacaccttgaaggccattctgttggagttagaatgtcattttacatggaatttacttaaggaagacattgatctgtttgaggtagaagatacaattgggcaacagcttgaa

SEQ ID NO: 434783 - DNA, 120 bp, Artificial Sequence
  ENSG00000152778_3 (sequence is synthesized)
tttcttaccacaaaatctagacttgctctttataacctattggcctatgtgaaacacctaaaaggccaaaataaagacgcccttgagtgcttggaacaagcagaagaaataatccagcaa

SEQ ID NO: 434784 - DNA, 120 bp, Artificial Sequence
  ENSG00000152778_4 (sequence is synthesized)
gaacactcagacaaagaagaagtacgaagcctggtcacttggggaaactatgcctgggtgtattatcacatggaccagcttgaagaagctcagaagtatacaggtaagatagggaatgtc

SEQ ID NO: 434785 - DNA, 120 bp, Artificial Sequence
  ENSG00000152778_5 (sequence is synthesized)
tgtaagaaattgtccagtccttctaactacaagttggagtgtcctgagactgactgtgagaaaggctgggcactcttgaaatttggaggaaagtattatcaaaaggctaaagcggctttt

SEQ ID NO: 434786 - DNA, 120 bp, Artificial Sequence
  ENSG00000152778_6 (sequence is synthesized)
gagaaggctctggaagtggagcctgacaatccagaatttaacatcggctatgctatcacagtgtatcggctggatgattctgatagagaagggtctgtaaagagcttttctctggggcct

SEQ ID NO: 434787 - DNA, 120 bp, Artificial Sequence
  ENSG00000152778_7 (sequence is synthesized)
ttgagaaaggctgttaccctgaacccagataacagctatattaaggtttttctggcactgaagcttcaagatgtacatgcagaagctgaaggggaaaagtatattgaagaaatcctggac

SEQ ID NO: 434788 - DNA, 120 bp, Artificial Sequence
  ENSG00000152778_8 (sequence is synthesized)
caaatatcatcccagccttacgtccttcgttatgcagccaagttctataggagaaaaaattcctggaacaaagctctcgaacttttaaaaaaggccttggaggtgacaccaacttcttct

SEQ ID NO: 434789 - DNA, 120 bp, Artificial Sequence
  ENSG00000152778_9 (sequence is synthesized)
ttcctgcatcaccagatgggactttgctacagggcacaaatgatccaaatcaagaaggccacacacaacagacctaaaggaaaggataaactaaaggttgatgagctgatttcatctgct

SEQ ID NO: 434790 - DNA, 120 bp, Artificial Sequence
  ENSG00000152778_10 (sequence is synthesized)
atatttcatttcaaagcagccatggaacgagactctatgtttgcatttgcctacacagacctggccaacatgtacgctgaaggaggccagtatagcaatgctgaggacattttccggaaa

SEQ ID NO: 434791 - DNA, 120 bp, Artificial Sequence
  ENSG00000152778_11 (sequence is synthesized)
gctcttcgtctggagaacataaccgatgatcacaaacatcagatccattaccactatggccgctttcaggaatttcaccgtaaatcagaaaatactgccatccatcattatttagaagcc

SEQ ID NO: 434792 - DNA, 120 bp, Artificial Sequence
  ENSG00000152778_12 (sequence is synthesized)
ttaaaggtcaaagacagatcaccccttcgcaccaaactgacaagtgctctgaagaaattgtctaccaagagactttgtcacaatgctttagatgtgcagagtttaagtgccctagggttt

SEQ ID NO: 434793 - DNA, 120 bp, Artificial Sequence
  ENSG00000152778_13 (sequence is synthesized)
gtttacaagctggaaggagaaaagaggcaagctgctgagtactatgagaaggcacaaaagatagatccagaaaatgcagaattcctgactgctctctgtgagctccgactttccatttaa

SEQ ID NO: 434794 - DNA, 120 bp, Artificial Sequence
  ENSG00000152778_14 (sequence is synthesized)
atacatactctaggaaattagctctaagtttttcccttcattttgggttctcctgtttgttttttttttattattttaatcccttgtttattatagagctaatatttattgaatagttat

SEQ ID NO: 434795 - DNA, 120 bp, Artificial Sequence
  ENSG00000152778_15 (sequence is synthesized)
tgtgtaccaagcattgtgctaaatactttatatgcattatgatgaatcttgtgcggttttctttctttttttctttttaattaaaatactataatccattgagaaatagcaatattctag

SEQ ID NO: 434796 - DNA, 120 bp, Artificial Sequence
  ENSG00000152778_16 (sequence is synthesized)
atattatatagtaaatatattcctacgtaaacctttgatacctagatcaggaatactcttccaggagtacaaaattacattattgatagttaagctcttaattgtgtagcttgcaaaaga

SEQ ID NO: 434797 - DNA, 120 bp, Artificial Sequence
  ENSG00000152778_17 (sequence is synthesized)
cagcactttttagttacagatgttttgactttgatgaggatatttagctatcaatctaatagtcacctaaaatatcttttttgttggaaaaaagtttataataaaaaagtttgtcatctc

SEQ ID NO: 434798 - DNA, 120 bp, Artificial Sequence
  ENSG00000152778_18 (sequence is synthesized)
tagtgacttcaataaagaaaaaactagaagaggagaaaaaggatttcctcaaattttaaatatgtaacttcagggattcaatccccaaatgtttattaagtagctagaaataattatgtg

SEQ ID NO: 434799 - DNA, 120 bp, Artificial Sequence
  ENSG00000152778_19 (sequence is synthesized)
gaaaaaaatgaataatggaaaatagtgagtctcaaattgttctctttttttttttaactaaaacaaatctgcaatgaatctagatgcaattaattttattccttccaactaaaattacaa

SEQ ID NO: 434800 - DNA, 120 bp, Artificial Sequence
  ENSG00000152778_20 (sequence is synthesized)
tatttttaggttaaaattattgagatataaagcagccattgggaaattgggagaaatgataaacaaatggaaaaagaagatgtccctaacctacacccatagattaccaaggtttcagtg

SEQ ID NO: 434801 - DNA, 120 bp, Artificial Sequence
  ENSG00000152778_21 (sequence is synthesized)
tactagttttgaatctgttctgaatggagtttttataccctcaatttctggcctttggctattttagcatttcaaagtgacttctatgaagctttttttttaatgtgaaattttcagaat

SEQ ID NO: 434802 - DNA, 120 bp, Artificial Sequence
  ENSG00000152778_22 (sequence is synthesized)
gttgtttttttcatgtagatactccaggaagagttaagcactgctttcagttttaatatccaccttgaggggtcgctgcttgagggctcttatcccaggggactttttaattcggatgtt

SEQ ID NO: 434803 - DNA, 120 bp, Artificial Sequence
  ENSG00000152778_23 (sequence is synthesized)
acttaatgtggcttctctaatgtagtttctttgattaccgactacacaattatgtaccatcacagtattagtggaaaagtaccatgtgatttaattctccattcctccaatgtaactctt

SEQ ID NO: 434804 - DNA, 120 bp, Artificial Sequence
  ENSG00000152778_24 (sequence is synthesized)
attcctccaatgtaactcttaaaattattatgtatgtgtgtgtgttttactttttgttttttatcatctttaaaatttctattatggtttgattattataaaaataatgaattctcactg

SEQ ID NO: 434805 - DNA, 120 bp, Artificial Sequence
  ENSG00000152778_25 (sequence is synthesized)
caaaagtatgtgaatttaaaaatgagagcagtcctctcaccctaccacagttccacaccctcaaggtaaacttataacttataatttgatatgtaaacttccagatcttttttctatgcg

SEQ ID NO: 434806 - DNA, 120 bp, Artificial Sequence
  ENSG00000152778_26 (sequence is synthesized)
tgcgtaatcagacatacatatatactgcagtgtatctcacgtattaatttttaaaaatcttttgttttacttaattctgtttttattattattattattttgtttgatctattaaggaag

SEQ ID NO: 434807 - DNA, 120 bp, Artificial Sequence
  ENSG00000152778_27 (sequence is synthesized)
aggaagggaatgatctttactcaagaatttcagaaagtcagcactgaagtcctgacctatcagtagacacatttgtccctttcagatattttaggatattctagcaaagcaggccatttc

SEQ ID NO: 434808 - DNA, 120 bp, Artificial Sequence
  ENSG00000152778_28 (sequence is synthesized)
tcccacctgaaagtacataacttctatcacttgccacataattaaaagaactcacattaagcggttactcagacagttaatcatagaaaagattatttgcttcatcagttcatagaaaag

SEQ ID NO: 434809 - DNA, 120 bp, Artificial Sequence
  ENSG00000152778_29 (sequence is synthesized)
attatttgcttcatcagttaacttgtttttataaatcagggctgtgttcatacacagaaggggcctgagatttctgcactttaaacaagctcctcctaggtgaggatgctgtggctgttc

SEQ ID NO: 434810 - DNA, 120 bp, Artificial Sequence
  ENSG00000152778_30 (sequence is synthesized)
taattacattttgagtagtaaggtctacagcattgttcctcaaacttggctacgtattggaatcacctaaaaagttaaaacaaaacatggatgtctgggtcccgccccatagagaatgac

SEQ ID NO: 434811 - DNA, 120 bp, Artificial Sequence
  ENSG00000152778_31 (sequence is synthesized)
ttaattggcatggggtgcagtccaggcatcatgatttttagatttcccagttggaacttgtgcagcaaagtttgggagctactgatggacatgtgaaaagtaagtataaatggaataaaa

SEQ ID NO: 434812 - DNA, 120 bp, Artificial Sequence
  ENSG00000152778_32 (sequence is synthesized)
ttaattaggctaataggcttaacccaggaaatcctaagttccttgaatatccagtttgcatttggactcctcatcatatacttggtatataatactctaataaaagctgcctgagttgaa

SEQ ID NO: 434813 - DNA, 120 bp, Artificial Sequence
  ENSG00000152779_0 (sequence is synthesized)
agagcgctggagcgctggagctctgggctgtcccgggctcagtctcgccggcggcccccgctcccggatccccagcgccctggccaagaagcttcctcggctccccctcttccctctccc

SEQ ID NO: 434814 - DNA, 120 bp, Artificial Sequence
  ENSG00000152779_1 (sequence is synthesized)
tgacacggttgtgcagagggcgcggtggctcagatacaggatttcgacatattggccggtttgctctcgagctcctgggctcaagcgatctgcccgctttagcctcccaaagtgatggga

SEQ ID NO: 434815 - DNA, 120 bp, Artificial Sequence
  ENSG00000152779_2 (sequence is synthesized)
aggcgtgagccaccgtgcctggccataatttttaaaaatgtctagtcagatggcgagtaacccatgggccaggtagcgttctatgccaaccttgaatgccatcaggaagtcactggacag

SEQ ID NO: 434816 - DNA, 120 bp, Artificial Sequence
  ENSG00000152779_3 (sequence is synthesized)
acagcaaactcttccaagatcataacttggctgttggagcaacctggaaaagaagaaaaaagaaaaaccatggcaaaagtaaatagagctcggtctacctcccctccagatggaggctgg

SEQ ID NO: 434817 - DNA, 120 bp, Artificial Sequence
  ENSG00000152779_4 (sequence is synthesized)
ggctggatgattgtggctggctgtttccttgttaccatctgcacacgggcagtcacaagatgtatctcaattttttttgtggagttccagacatacttcactcaggattacgcacaaacg

SEQ ID NO: 434818 - DNA, 120 bp, Artificial Sequence
  ENSG00000152779_5 (sequence is synthesized)
gcatggatccattccattgtagattgtgtgaccatgctctgtgctccacttgggagtgttgtcagtaaccatttatcctgtcaagtgggaatcatgctgggtggcttgcttgcatctact

SEQ ID NO: 434819 - DNA, 120 bp, Artificial Sequence
  ENSG00000152779_6 (sequence is synthesized)
ggactcatcctgagctcatttgccacgagtctgaagcatctctacctcactctgggagttcttacaggtcttggatttgcactttgttactctccagctattgccatggttggcaagtac

SEQ ID NO: 434820 - DNA, 120 bp, Artificial Sequence
  ENSG00000152779_7 (sequence is synthesized)
ttcagcagacggaaagcccttgcttatggtatcgccatgtcaggaagtggcattggcaccttcatcctggctcctgtggttcagctccttattgaacagttttcctggcggggagcctta

SEQ ID NO: 434821 - DNA, 120 bp, Artificial Sequence
  ENSG00000152779_8 (sequence is synthesized)
ctcattcttgggggctttgtcttgaatctctgtgtatgtggtgccttgatgaggccaattactcttaaagaggaccacacaactccagagcagaaccatgtgtgtagaactcagaaagaa

SEQ ID NO: 434822 - DNA, 120 bp, Artificial Sequence
  ENSG00000152779_9 (sequence is synthesized)
gacattaagcgggtgtctccctattcatctttgaccaaagaatgggcacagacttgcctctgttgctgtttgcagcaagagtacagttttttactcatgtcagactttgttgtgttagcc

SEQ ID NO: 434823 - DNA, 120 bp, Artificial Sequence
  ENSG00000152779_10 (sequence is synthesized)
gtctccgttctgtttatggcttatggctgcagccctctctttgtgtacttggtgccttatgctttgagtgttggagtgagtcatcagcaagctgcttttcttatgtccatacttggagtg

SEQ ID NO: 434824 - DNA, 120 bp, Artificial Sequence
  ENSG00000152779_11 (sequence is synthesized)
attgacattattggcaatatcacatttggatggctgaccgacagaaggtgtctgaagaattaccagtatgtttgctacctctttgccgtgggaatggatgggctctgctatctctgcctc

SEQ ID NO: 434825 - DNA, 120 bp, Artificial Sequence
  ENSG00000152779_12 (sequence is synthesized)
ccaatgcttcaaagtctccctctgctcgtgcctttctcttgtacctttggctactttgatggtgcctatgtgactttgatcccagtagtgaccacagagatagtggggaccacctctttg

SEQ ID NO: 434826 - DNA, 120 bp, Artificial Sequence
  ENSG00000152779_13 (sequence is synthesized)
tcatcagcgcttggtgtggtatacttccttcacgcagtgccatacttggtgagcccacccatcgcaggacggctggtagataccaccggcagctacactgcagcattcctcctctgtgga

SEQ ID NO: 434827 - DNA, 120 bp, Artificial Sequence
  ENSG00000152779_14 (sequence is synthesized)
ttttcaatgatatttagttctgtgttgcttggctttgctagacttataaagagaatgagaaaaacccagttgcagttcattgccaaagaatctgatcctaagctgcagctatggaccaat

SEQ ID NO: 434828 - DNA, 120 bp, Artificial Sequence
  ENSG00000152779_15 (sequence is synthesized)
ggatcagtggcttattctgtggcaagagaattagatcagaaacatggggagcctgtggctacagcagtgcctggctacagcctcacatgaccaaaggccttgagccccagaatcttcagg

SEQ ID NO: 434829 - DNA, 120 bp, Artificial Sequence
  ENSG00000152779_16 (sequence is synthesized)
tttgagagaggtggggccaccagattcttcatgtttctgaaactttttattttggcagaaggattgccttccaaggaaattattattattgttttgttaacatattaatatttataaggg

SEQ ID NO: 434830 - DNA, 120 bp, Artificial Sequence
  ENSG00000152779_17 (sequence is synthesized)
aaaacagcacataataaggaaagctggactagcccagagccttctcatttgggatttgtgctcataactgaactcgtatcttttggtcaatgggcatagctctgtaagaaatgtaaggac

SEQ ID NO: 434831 - DNA, 120 bp, Artificial Sequence
  ENSG00000152779_18 (sequence is synthesized)
acagctgatataattagctgtaattagggataatttcaaagcataaccaaagcagatgacactgggcagcagctttgttccagtctcaggcccttcatgttccctcctcagaaagaaaat

SEQ ID NO: 434832 - DNA, 120 bp, Artificial Sequence
  ENSG00000152779_19 (sequence is synthesized)
tcatggtggagtttctcattagggttttacttgggattgttaaagaatacttgagattcttcaaaaagtggtgattaatatagaaagaaactcttattttttttttctcttagtcttcca

SEQ ID NO: 434833 - DNA, 120 bp, Artificial Sequence
  ENSG00000152779_20 (sequence is synthesized)
gccagcccttgcctctgcccaagggtagacaccactatgagaatccaaataatcatggaatgccatggttggaatagatcttaaagggcatctggtaagatccatttgaaattgtccact

SEQ ID NO: 434834 - DNA, 120 bp, Artificial Sequence
  ENSG00000152779_21 (sequence is synthesized)
ggaaaccgaaagctcttttcctaagactgggttccaggctctcacatttgttaccatcacatataatacttactctaaatttagcagaacacacttagtcacaaggacaacctctcaatc

SEQ ID NO: 434835 - DNA, 120 bp, Artificial Sequence
  ENSG00000152779_22 (sequence is synthesized)
ttacctgaaatgtcaacaacaccaaaacttcccgtcttttaccttcagagaagaagctcttacttagactgcagacgcattcctgttaggttggaaaaatgttggcagtattccaattgg

SEQ ID NO: 434836 - DNA, 120 bp, Artificial Sequence
  ENSG00000152779_23 (sequence is synthesized)
gcaggaactgaattcttgaatcagcaggtctctggtgagagttttctttgcagatcagacatttagttttatcattacccaaaagaggattggagggagtcagttgtctgaaaaatatta

SEQ ID NO: 434837 - DNA, 120 bp, Artificial Sequence
  ENSG00000152779_24 (sequence is synthesized)
tcctagagatattctaaaggtgagattcctttctccctgtgttaattcttgttccactatccactgctcttcatctctttatagataataattagaaatctactcattggattataagtt

SEQ ID NO: 434838 - DNA, 120 bp, Artificial Sequence
  ENSG00000152779_25 (sequence is synthesized)
tattcattctcaaatactccacttttctatggtttgggataatttctgagtcttcagattgaagagggaaggcatggagggaagaaaaagtccagatcccccagcttgtttccaaccatt

SEQ ID NO: 434839 - DNA, 120 bp, Artificial Sequence
  ENSG00000152779_26 (sequence is synthesized)
ttaagtccaaagaattataatcctgaatctcacagtgtgtcacacctgtaataggagtaaattatgcaatcaattttaattaccaggagtttaaaatccaaatgtcaaggaactgttttg

SEQ ID NO: 434840 - DNA, 120 bp, Artificial Sequence
  ENSG00000152779_27 (sequence is synthesized)
accctgaaggctatttaatccactgtcccctacaaggcctcacaagtgctgggggaaaaaaaacagcaatgaggatgatcctgagttaatgtgtatgctccgcaagagagcttgcctata

SEQ ID NO: 434841 - DNA, 120 bp, Artificial Sequence
  ENSG00000152779_28 (sequence is synthesized)
ccttgattatttcataaaatcacatgttaatacattgctttcagaatgaaatactgacttgatctgataggagaaaatggtaatatttcatagttgttttccaaagacaaatttaaatgt

SEQ ID NO: 434842 - DNA, 120 bp, Artificial Sequence
  ENSG00000152779_29 (sequence is synthesized)
ttaaatgttgtctgttatctccttacttagtttaagaatttagttttgaaccccattgactttgtcatttgcaattttaaaaatatttgggactgggcatggtcgctcacgcctgtaatc

SEQ ID NO: 434843 - DNA, 120 bp, Artificial Sequence
  ENSG00000152779_30 (sequence is synthesized)
ctcaaaaaaaaaaaattggaaggtatctgtaaaatgtcaaagttaagatgaagttatatctgtttggaatagcactttgccctaaatatcatttcttgaattttcaagcctaaagatgtt

SEQ ID NO: 434844 - DNA, 120 bp, Artificial Sequence
  ENSG00000152779_31 (sequence is synthesized)
aagatgtttaaaaatatgaatagttacaaatattcttatacatattttttatcatgatcacaacaaaattttgtttatgtggttctgcaatataatttctgtgaagtattacaagtattt

SEQ ID NO: 434845 - DNA, 120 bp, Artificial Sequence
  ENSG00000152779_32 (sequence is synthesized)
taagcatagtgatcagaaattttaaagattttgtataaaaacatttgggagatttgactttatacatgcatagatttgcattttactttcccttttgaggcagcatttttagaaaatcag

SEQ ID NO: 434846 - DNA, 120 bp, Artificial Sequence
  ENSG00000152779_33 (sequence is synthesized)
taagaaaaatgtacatcttaaggtctactattttacatttctacacagaattttagtgttaatgttccatgtgtctatactgtttatttcaaaactgagaaattcatgggaatgatgtat

SEQ ID NO: 434847 - DNA, 120 bp, Artificial Sequence
  ENSG00000152779_34 (sequence is synthesized)
tttgtggaatcaagaacaaaattatagtgggataattttacatcttaaatatttctttctactactgtaagctctactttggaattatctgagtagaaaatcagaagacattatctaact

SEQ ID NO: 434848 - DNA, 120 bp, Artificial Sequence
  ENSG00000152779_35 (sequence is synthesized)
ttgtagatacactgtatgattgggctttttgttcagattgtaatttcattaatagatgaaatatttatgctaatattttcttatttcaaaagcaaaataaaatgaatttattgtcctgtg

SEQ ID NO: 434849 - DNA, 120 bp, Artificial Sequence
  ENSG00000152779_36 (sequence is synthesized)
gaaatggaggtgttctgacctatgatcagacaaggtaggtcagaaaccagctccagaaaccaggaaaaagttcctgccttggggagagaaagaaataggtgaaaggagggcagaaaagga

SEQ ID NO: 434850 - DNA, 120 bp, Artificial Sequence
  ENSG00000152782_0 (sequence is synthesized)
aagtgcattatttcacaatctaaagcttgtatatataatggtagtttgtaaagtgtaccttccccacaggacgctgtgggatgtaaatttgtaggtcgagtttacagctggtttttcttg

SEQ ID NO: 434851 - DNA, 120 bp, Artificial Sequence
  ENSG00000152782_1 (sequence is synthesized)
actgaagctcattcaactggttacttctttgtgggtgtctttaatgaagcttataaatggcaaaaagcaaacattcccatggtttggcatggacatcggtggaacgctggttaaattggt

SEQ ID NO: 434852 - DNA, 120 bp, Artificial Sequence
  ENSG00000152782_2 (sequence is synthesized)
gtatttcgagccgaaggatattacagccgaagaggagcaagaggaagtggagaacctgaagagcatccggaagtatttgacttctaatactgcttatgggaaaactgggatccgagacgt

SEQ ID NO: 434853 - DNA, 120 bp, Artificial Sequence
  ENSG00000152782_3 (sequence is synthesized)
ccacctggaactgaaaaacctgaccatgtgtggacgcaaagggaacctgcacttcatccgctttcccagctgtgctatgcacaggttcattcagatgggcagcgagaagaacttctctag

SEQ ID NO: 434854 - DNA, 120 bp, Artificial Sequence
  ENSG00000152782_4 (sequence is synthesized)
ccttcacaccaccctctgtgccacaggaggcggggctttcaaattcgaagaggacttcagaatgattgctgacctgcagctgcataaactggatgaactggactgtctgattcagggcct

SEQ ID NO: 434855 - DNA, 120 bp, Artificial Sequence
  ENSG00000152782_5 (sequence is synthesized)
gctttatgtcgactctgttggcttcaacggcaagccagaatgttactattttgaaaatcccacaaatcctgaattgtgtcaaaaaaagccgtactgccttgataacccataccctatgtt

SEQ ID NO: 434856 - DNA, 120 bp, Artificial Sequence
  ENSG00000152782_6 (sequence is synthesized)
gctggttaacatgggctcaggtgtcagcattctagccgtgtactccaaggacaactataaaagagttacagggaccagtcttggaggtggaacattcctaggcctatgttgcttgctgac

SEQ ID NO: 434857 - DNA, 120 bp, Artificial Sequence
  ENSG00000152782_7 (sequence is synthesized)
tggttgtgagacctttgaagaagctctggaaatggcagctaaaggcgacagcaccaatgttgataaactggtgaaggacatttacggaggagactatgaacgatttggccttcaaggatc

SEQ ID NO: 434858 - DNA, 120 bp, Artificial Sequence
  ENSG00000152782_8 (sequence is synthesized)
tgctgtagcatcaagctttggcaacatgatgagtaaagaaaagcgagattccatcagcaaggaagacctcgcccgggccacattggtcaccatcaccaacaacattggctccattgctcg

SEQ ID NO: 434859 - DNA, 120 bp, Artificial Sequence
  ENSG00000152782_9 (sequence is synthesized)
gatgtgcgcgttgaatgagaacatagacagagttgtgtttgttggaaattttctcagaatcaatatggtctccatgaagctgctggcatatgccatggatttttggtccaaaggacaact

SEQ ID NO: 434860 - DNA, 120 bp, Artificial Sequence
  ENSG00000152782_10 (sequence is synthesized)
gaaagctctgtttttggaacatgagggttattttggagccgttggggcactgttggaactgttcaaaatgactgatgacaagtagagacgagcagtggaggaaacagcctcccaaaagga

SEQ ID NO: 434861 - DNA, 120 bp, Artificial Sequence
  ENSG00000152782_11 (sequence is synthesized)
tatggcagatgaacctgctggatttgtaaataatttaaaatccttccagatgatcttttactcttaggttttgagctaatgattcaaaacgggggaatataaaaggttttttttctgtat

SEQ ID NO: 434862 - DNA, 120 bp, Artificial Sequence
  ENSG00000152782_12 (sequence is synthesized)
actgtatttttttaaaaaaatggtgcagcgtggccaaacctaccaattgtatgcattaactttgaaaagttgtttgatgtttaagaaggacctgatatgtaagcgctggtcatttttctt

SEQ ID NO: 434863 - DNA, 120 bp, Artificial Sequence
  ENSG00000152782_13 (sequence is synthesized)
ctggggtttactgatcagtgtggtgattttaacttcatttagtaattactctaggagattttaccttgacttatatttttcatgacgtttcatgatttgctgttggtttcaaatgaaact

SEQ ID NO: 434864 - DNA, 120 bp, Artificial Sequence
  ENSG00000152782_14 (sequence is synthesized)
acaaatctggcatgttttactgtgaacacttttgttatttgttttgtacccttttttgtcttgtttttctgttttagttgtcttctgaaaaaagagtcgttccctctgtttctgtcctca

SEQ ID NO: 434865 - DNA, 120 bp, Artificial Sequence
  ENSG00000152782_15 (sequence is synthesized)
gatgatgtccctccccctacctgtaacctttctttgacataattgttcatatcaatgaaggtgctgaccagctcaatacaaagttaagcacaagatctaaagctcttgaaaatgcccgtg

SEQ ID NO: 434866 - DNA, 120 bp, Artificial Sequence
  ENSG00000152782_16 (sequence is synthesized)
aagagaagactgaatgtgttaatgaatttaatgagtctggcaaaagttgcaaattatatgcaagtttgtcctatcgcttataaatgtagtgtttcattggatttattttatgctaggtta

SEQ ID NO: 434867 - DNA, 120 bp, Artificial Sequence
  ENSG00000152782_17 (sequence is synthesized)
tattaagttgaaatagtctgtgattaaatgtcctcatccatgcacagaatatgaatggcagcaaatctttgtgcaagaaatttgaaacttattgggaaaagcctcccagtagattaattg

SEQ ID NO: 434868 - DNA, 120 bp, Artificial Sequence
  ENSG00000152782_18 (sequence is synthesized)
ttcatatcaggagatttagggtaagtcatgggttgaggtgtcagatagtaatatctatttgttttgtacatgtatatatctaggaactttgtaacaacacatctttaataatgttaaagg

SEQ ID NO: 434869 - DNA, 120 bp, Artificial Sequence
  ENSG00000152782_19 (sequence is synthesized)
taaactaaaaactgtacttcaatctcagtttctaaaattaaaaataatttatactgatctatatattttttctttttgaaagatttcattaagactgatgggtaactttcaaatgagggt

SEQ ID NO: 434870 - DNA, 120 bp, Artificial Sequence
  ENSG00000152782_20 (sequence is synthesized)
ggtaactttcaaatgagggtcatgtacaaatattgggatgcatgagatcccatgatcttgtgtattgagcttattgttgaaagggatttttgaaggacagaacaattactccatgatgaa

SEQ ID NO: 434871 - DNA, 120 bp, Artificial Sequence
  ENSG00000152782_21 (sequence is synthesized)
tcttcctttctctgccttctgagcaccgtctttaatttccatatcttcaagtcttgaagaagttgatgttaattgaagaattcacttgtctggttgaaataaagcctgtttctgttgtga

SEQ ID NO: 434872 - DNA, 120 bp, Artificial Sequence
  ENSG00000152782_22 (sequence is synthesized)
ggacaactataaaagagttacagggaccaggtaaacatgtttctgcttgtgcttgaacccagacctctttcttgatgaccagtttatagtaaaaggttatttatattgaatacattttta

SEQ ID NO: 434873 - DNA, 120 bp, Artificial Sequence
  ENSG00000152782_23 (sequence is synthesized)
aggctgaggcgggtggatcacgagattgggcagaactgacagcttcttggtgagaaataggagtgatgaccatagctgtctcttcatcttattcctgcttcctcctggcccagatccaag

SEQ ID NO: 434874 - DNA, 120 bp, Artificial Sequence
  ENSG00000152782_24 (sequence is synthesized)
ctaagaatacacttcatggtgctaccagaatgacatggcttcctttgcccctgcaagagctttttttttttctttttttttatcttaacctacaaaataaaataaaagcaacagagcttt

SEQ ID NO: 434875 - DNA, 120 bp, Artificial Sequence
  ENSG00000152782_25 (sequence is synthesized)
accaaacgcacaggcacacacgcgcgcgcgcgtaagcacacactcacaaagcggggagggtaacgtgaatgaccttgcaaaggtatcttgctcactggggacaggattagcaaacctgac

SEQ ID NO: 434876 - DNA, 120 bp, Artificial Sequence
  ENSG00000152782_26 (sequence is synthesized)
acctctgcaaataattgtcttcctcccgtattcctcctgaaacggttcgctcctttcgctgtctctcccagacccatctggttttcacatcgccatacaaagcccaacccgcccatctcc

SEQ ID NO: 434877 - DNA, 120 bp, Artificial Sequence
  ENSG00000152782_27 (sequence is synthesized)
tctctgcaagcccagagaacttgattccccatgttgaaactcgtcggtggcggtggcgggcaggactgggcatgctcagtggcggggaccagtctgggaggcgaggaagccgcgtttgaa

SEQ ID NO: 434878 - DNA, 120 bp, Artificial Sequence
  ENSG00000152782_28 (sequence is synthesized)
gcgaggaagccgcgtttgaagtcgcgcggcctggggatcaggggaaggcgggcggcgggagccccggctgggggtgcgcggggatccccgattccgcgcccggggctggcgtgctccagg

SEQ ID NO: 434879 - DNA, 120 bp, Artificial Sequence
  ENSG00000152782_29 (sequence is synthesized)
cgcggggggcagggcgcagaggaggtgggggagtcggcaggaggaggggaggagcgccgggttcgccatccccaggcgccggctctgcggctgctgaatcggaagccgcagggaggatcc

SEQ ID NO: 434880 - DNA, 120 bp, Artificial Sequence
  ENSG00000152782_30 (sequence is synthesized)
ggggaaataaagacgccggagaatgacctccagcgaggccgcctgagccggggcccgcgcacagccccgccagcccccggcatgggcgaccgcagcgggcagcaggagcgctcggtcccg

SEQ ID NO: 434881 - DNA, 120 bp, Artificial Sequence
  ENSG00000152782_31 (sequence is synthesized)
cactctccaggggcccccgtgggcaccagcgccgccgctgtgaacgggctgctgcacaacggcttccatccgccgccagtccagccgccgcacgtctgcagccggggtccagtgggcggc

SEQ ID NO: 434882 - DNA, 120 bp, Artificial Sequence
  ENSG00000152782_32 (sequence is synthesized)
agcgacgcggcgccccagcgcctcccgctcctgccggagctgcagccgcagccactgctccctcagcatgactccccggccaagaaatgccggctgcggaggaggatggactcggggaga

SEQ ID NO: 434883 - DNA, 120 bp, Artificial Sequence
  ENSG00000152782_33 (sequence is synthesized)
tatatgttattttcatttcttaattctcatgtttatagtatctgctttgtaccatgaaatgactgtctgttgtgtttttgctactctacatttcaaaattggaggctttcccatgagtgt

SEQ ID NO: 434884 - DNA, 120 bp, Artificial Sequence
  ENSG00000152782_34 (sequence is synthesized)
ggtatggtccaaaacactgtcttcaggtgaagctgtagccctatgcatagatttttaaaatagagctttattgtttctatacaagtgactccttaatgccaactacctctgctatatttg

SEQ ID NO: 434885 - DNA, 120 bp, Artificial Sequence
  ENSG00000152782_35 (sequence is synthesized)
gtaattccaaaggagtttcaaaatttggtcatcacagatacattttaccaacttctatctggctttaaaaaaattcagacagctaaagtgttcttgaaaaggataagttaaaaatctaca

SEQ ID NO: 434886 - DNA, 120 bp, Artificial Sequence
  ENSG00000152782_36 (sequence is synthesized)
tattatttataattagtgccttttgatggcctcttctattcctattctcatctatcaggtaacagcagaccttgattccgcagatcatggttctacaaaggaaatcagggcaagttagtg

SEQ ID NO: 434887 - DNA, 120 bp, Artificial Sequence
  ENSG00000152782_37 (sequence is synthesized)
tgactgtattttttttaattatctgaaatcacttgatctctcattacaaacatttaaaatattggtgtagctgagaaaatacattattccattatacaaatatcagttaaatgttgacta

SEQ ID NO: 434888 - DNA, 120 bp, Artificial Sequence
  ENSG00000152782_38 (sequence is synthesized)
catatagccagcctgttttttacaaaagagatcttgtagcctgaggattttcacattcacttgaattacagaaacttttcttagaatcaacatcacaaagaaactgggaagactaaagaa

SEQ ID NO: 434889 - DNA, 120 bp, Artificial Sequence
  ENSG00000152782_39 (sequence is synthesized)
ttttgaccttgtgcaatatgaagtaagagcatggctttttatcgtgaggcagcttcagtctgggtccagcttagtcagttaccagttcaaagatatgctaagcctctttctaaaccatag

SEQ ID NO: 434890 - DNA, 120 bp, Artificial Sequence
  ENSG00000152782_40 (sequence is synthesized)
tttcctcacctataaaatgggacaaataattgttttacatacatatttaaagagctcagcacaggggttgacacaaagtaaatgcttcattaatgatagctacaatgaaaaaataaatta

SEQ ID NO: 434891 - DNA, 120 bp, Artificial Sequence
  ENSG00000152782_41 (sequence is synthesized)
tttaaactaatttattaaatcagtaattcttaactttctggattgtgggaaacccatgttagtatggagatgtttcaccaatctccgtatgctaatacatatccacagctccttgtccac

SEQ ID NO: 434892 - DNA, 120 bp, Artificial Sequence
  ENSG00000152782_42 (sequence is synthesized)
acttccaaaatcccatacttaagaaatctatcttgacagctcacttggcagcaaaagctgacttgagcattatttctcacatgtagtagggctcttcacatgttttgttgcaaagctcgt

SEQ ID NO: 434893 - DNA, 120 bp, Artificial Sequence
  ENSG00000152782_43 (sequence is synthesized)
agtagggctcttcacatgttttgttgcaaagctcgtcatgagttagataacaggatactgactctgacaggggtgttaagtaataaacgattttgaattggctgggtgtggtggctcacg

SEQ ID NO: 434894 - DNA, 120 bp, Artificial Sequence
  ENSG00000152782_44 (sequence is synthesized)
aataaatgattctgaattttgaaacacatctgatcccgagttttagacaaagggattgtggaaatatagttgtgttcttcaccttatgcagtatacatggattcagagtctctttgttgg

SEQ ID NO: 434895 - DNA, 120 bp, Artificial Sequence
  ENSG00000152782_45 (sequence is synthesized)
gaacaattgttataggtaatgtatacttgatgtcgttcagtcatagaaggaatattaagaagttactctgtgccaggaaggaactggagactaagatgcataggatacagcccctgcaga

SEQ ID NO: 434896 - DNA, 120 bp, Artificial Sequence
  ENSG00000152782_46 (sequence is synthesized)
gaaagacagcaaaatctcaagccaacatcagtcatcaagtgccacaagtgccattcaatcatttattcattcacattcacagcagtaaacagaacaaagatccaccatcacagagcttat

SEQ ID NO: 434897 - DNA, 120 bp, Artificial Sequence
  ENSG00000152782_47 (sequence is synthesized)
attctagaagggaagacaggtacattactaaatatataatgttagatcagtactacaaagaaaaagtaagctggtgtaaaggctaaataaggggtagttctattcagaaaaatgagaagg

SEQ ID NO: 434898 - DNA, 120 bp, Artificial Sequence
  ENSG00000152782_48 (sequence is synthesized)
ggaggaatatctcagggtggtctaagacagcctttcctaggaagtgacctttgagcagagagttgaatggaggtgagaacacattgtgtaaatgtctgagaaaatatttttcactcctgg

SEQ ID NO: 434899 - DNA, 120 bp, Artificial Sequence
  ENSG00000152782_49 (sequence is synthesized)
caaatgaaaatagggatttgaggaactgcaaagaggccagtgtctggagttaaaaatagaaagtggtgggagatgcagtgttgggagtaaacttgagccaggtcctataagaaatctgtg

SEQ ID NO: 434900 - DNA, 120 bp, Artificial Sequence
  ENSG00000152782_50 (sequence is synthesized)
agggtagtggcctctacccagaagagaggttggtcatttgtcttccagaaggtgctagagaaggttttgtgaagtcttaaccaaagaataggaatcactaagtggagaggaagggagggc

SEQ ID NO: 434901 - DNA, 120 bp, Artificial Sequence
  ENSG00000152782_51 (sequence is synthesized)
tttccaagcagagggagctgggtgagcagaagcgctgagggaagaaaccacttggcttattcagggactggaagctctttgctatagctggagcctggttcatgagacagaaaccaggta

SEQ ID NO: 434902 - DNA, 120 bp, Artificial Sequence
  ENSG00000152782_52 (sequence is synthesized)
gtgagaaagaggaagctggcccaactgtggaaggacttgtcttccatgctaacattgcggacttttccgtagtcactgtggagccatcaaagagtttcaaggaaagtgaaactagaaata

SEQ ID NO: 434903 - DNA, 120 bp, Artificial Sequence
  ENSG00000152782_53 (sequence is synthesized)
atcaggtttcaaagtggtaaagcaaaatgctctgttgaagtaaatgagtaaacaagttacgtacttttgaatacctaacattattccatttttttccctattgtgccagacctcatgcag

SEQ ID NO: 434904 - DNA, 120 bp, Artificial Sequence
  ENSG00000152782_54 (sequence is synthesized)
tagctacagagtgaaccatgctttcgctgtaagtaggatggctataaaaattattgagaactttctcagaggacacaggctactaatagctacagccccactatgagtctattcattgag

SEQ ID NO: 434905 - DNA, 120 bp, Artificial Sequence
  ENSG00000152782_55 (sequence is synthesized)
caagaaggtttcaatactgggagcatcgtaaactatcactcacaagaattgttagaaagcagttttcctcccagtgatcagaagatgacgccacatttgtgaaaaagatttcattagtgt

SEQ ID NO: 434906 - DNA, 120 bp, Artificial Sequence
  ENSG00000152782_56 (sequence is synthesized)
acatcgtttattaggtctaccagctgcccattcttttgctcatctgtttaatttttaataaatatcaatgatctgagaggcattgggtagcactgaggatgcaatccgatgtgaacaaga

SEQ ID NO: 434907 - DNA, 120 bp, Artificial Sequence
  ENSG00000152782_57 (sequence is synthesized)
cttcaggagctctgctttcattaggcttacatttggttaatggagataaacttgaagcatataaaccaataaataaacaagaaaatatcagggagtgacaattgctattaaggaaagaaa

SEQ ID NO: 434908 - DNA, 120 bp, Artificial Sequence
  ENSG00000152782_58 (sequence is synthesized)
cagggtgataggatagagagggaggagagagacttcttcagtcagatgatcataaaatgcaagtatgattaagtcatggcctcaacttttaaggaatgatgggctcaccttgctttcatt

SEQ ID NO: 434909 - DNA, 120 bp, Artificial Sequence
  ENSG00000152782_59 (sequence is synthesized)
cttgccacctcctcaatgaaaatgaaagatgtttttgggaaactgatagctaattttctttttcttagaatatttgatttagataatatgtatttaaaataaagttatcacgtaaaataa

SEQ ID NO: 434910 - DNA, 120 bp, Artificial Sequence
  ENSG00000152784_0 (sequence is synthesized)
aaaagcagcatcagacaagagctttattaatcccttacacgagcaaatgcgatctctgacctactagacttgttttcctacaatttcacaaaaagcctcgctagaggaatgtgcaaggac

SEQ ID NO: 434911 - DNA, 120 bp, Artificial Sequence
  ENSG00000152784_1 (sequence is synthesized)
agaagggaaactgaggagacccgcaactcattagcgaaataatagggtgcacttcaataaaaatgcggtcctgaagtggagcagactcaccggcaaggagcccggaaaatcgtcaggggc

SEQ ID NO: 434912 - DNA, 120 bp, Artificial Sequence
  ENSG00000152784_2 (sequence is synthesized)
ggcggcaaaatactatcaaatcagcctgggaagcatcttttcgctcagcaagttcaagagaacaaatatgttacaatccttgcctattcttgcctccacttcataatgtcataaaagcca

SEQ ID NO: 434913 - DNA, 120 bp, Artificial Sequence
  ENSG00000152784_3 (sequence is synthesized)
cctggggtgtcatttatcaacctctctccagcccactcttccaaaataacactacagtttcctacatgtgtatttttgccaggactccaaagagccttgctaaagtggaacaagcaaaat

SEQ ID NO: 434914 - DNA, 120 bp, Artificial Sequence
  ENSG00000152784_4 (sequence is synthesized)
cctcccctggcctcctgggactgcagtcaccaggctgtcaaagcctcaataccccactgagttccagagaagggtctcaaagctgggagaggatcaaactaacatggagtagagaattga

SEQ ID NO: 434915 - DNA, 120 bp, Artificial Sequence
  ENSG00000152784_5 (sequence is synthesized)
actgtgaaaaagaagcccgagattccccagcgacgtggtgttgcagccccgttgaaggagtcaacttgcaggctgttaaagacctcaagtcattagcatcagctgctgcactaaaggggc

SEQ ID NO: 434916 - DNA, 120 bp, Artificial Sequence
  ENSG00000152784_6 (sequence is synthesized)
aagtcagcgcctctaagtggcttagcgcacaaacgaggctcccgagacggcctcggcaactccatcccctcctccaccacccgctggatgtgaaaagctttccggagcccatcttggggg

SEQ ID NO: 434917 - DNA, 120 bp, Artificial Sequence
  ENSG00000152784_7 (sequence is synthesized)
aagcttggtagtgttggcgctcctgaagagagacgacgcccgtttatcacccccaggcaactagctgcgcaaatcagcggtggctccagggctagagaatccctggagctaaccgcaccc

SEQ ID NO: 434918 - DNA, 120 bp, Artificial Sequence
  ENSG00000152784_8 (sequence is synthesized)
ctctccctttcacggaacgcggactccggggaaatacgcacggggtccgcacgcgctgggtgtccagctctctgtcacagcttctccaagtgcctagtgaaacggggaaaggccctctcc

SEQ ID NO: 434919 - DNA, 120 bp, Artificial Sequence
  ENSG00000152784_9 (sequence is synthesized)
aatcattttggaagagcctaaaaggcggcaacaccaacacctcttgacatggaaatacactgatacaataggcaaaaggaaacactcgattgcatcttcccggttccaggtggccttatt

SEQ ID NO: 434920 - DNA, 120 bp, Artificial Sequence
  ENSG00000152784_10 (sequence is synthesized)
tgggagattctatactgaccttattcctgtgatggaggatactggcatccagcgaggcatctgggatggagatgccaaggctgtccaacaatgtctgacagatatttttaccagcgttta

SEQ ID NO: 434921 - DNA, 120 bp, Artificial Sequence
  ENSG00000152784_11 (sequence is synthesized)
caccacctgcgacatccctgagaatgctatatttggtccctgtgtcctgagccatacttccctatatgacagcatagctttcatagctctcaagtctactgacaagagaacagtaccgta

SEQ ID NO: 434922 - DNA, 120 bp, Artificial Sequence
  ENSG00000152784_12 (sequence is synthesized)
tatctttcgggtagacacctcagcagcaaatggttcctcagaaggtctcatgtggctgcggttggtccaatcggccagagataaggaagagcagaaccttgaagcctacataaaaaacgg

SEQ ID NO: 434923 - DNA, 120 bp, Artificial Sequence
  ENSG00000152784_13 (sequence is synthesized)
acagctgttctaccgctctctccgcaggattgccaaagacgaggagttactagtttggtacgggaaagaactgactgagttactcttgctctgcccctctagatcccacaacaaaatgaa

SEQ ID NO: 434924 - DNA, 120 bp, Artificial Sequence
  ENSG00000152784_14 (sequence is synthesized)
tgggtcgtccccttacacatgcctggaatgcagccaacgtttccagtttgagttcccctatgtggcgcatctgcgtttccgctgccccaagagacttcacagcgctgatataagtcccca

SEQ ID NO: 434925 - DNA, 120 bp, Artificial Sequence
  ENSG00000152784_15 (sequence is synthesized)
agacgaacaaggcggcggcgtgggcaccaaggaccacgggggcggcggcggcggtggcaaagaccagcagcagcagcagcaggaggcacctttaggcccgggtcccaagttttgcaaagc

SEQ ID NO: 434926 - DNA, 120 bp, Artificial Sequence
  ENSG00000152784_16 (sequence is synthesized)
cggccccctccaccactacccatccccctccccggaaagcagcaacccatccgctgccgccggcggcagcagcgcgaagccatccacagacttccacaacctggccagggagctggaaaa

SEQ ID NO: 434927 - DNA, 120 bp, Artificial Sequence
  ENSG00000152784_17 (sequence is synthesized)
cagctgctccccagcccagagcctcagcagcggtagcggcagcggcggcggcggcggccaccaggaggcggagctgagtcccgacggcatcgccacgggcggcggcaaaggaaagaggaa

SEQ ID NO: 434928 - DNA, 120 bp, Artificial Sequence
  ENSG00000152784_18 (sequence is synthesized)
attcccggaggaggcggcggagggcggcggtggcgctggtctggtagggggccggggccgcttcgtagagcggcccctcccggcctccaaggaggatctggtgtgcacaccgcagcagta

SEQ ID NO: 434929 - DNA, 120 bp, Artificial Sequence
  ENSG00000152784_19 (sequence is synthesized)
ccgagcctcgggcagctacttcggcctggaagagaacggccgcctcttcgcgccgccaagtcccgagacgggcgaggcgaagcgcagcgccttcgtggaggtgaagaaggctgcccgcgc

SEQ ID NO: 434930 - DNA, 120 bp, Artificial Sequence
  ENSG00000152784_20 (sequence is synthesized)
agcctgcaggaggaggggacagccgacggcgcgggagtcgcctccgaggaccaggacgctggcggcggcggcggctcctccacgcccgcggccgcgtcaccggtgggcgccgagaagctg

SEQ ID NO: 434931 - DNA, 80 bp, Artificial Sequence
  ENSG00000152784_21 (sequence is synthesized)
gctgctggccccgcggcctgggggcccgctgcccagccggctcgagggcggcagtcctgcgaggggcagcgccttcactt

SEQ ID NO: 434932 - DNA, 120 bp, Artificial Sequence
  ENSG00000152784_22 (sequence is synthesized)
ggaacgggcgccggggccgcaggcggcgcgggcgggggccagggcgccgcgtcggacgagcgcaaaagcgccttctcgcagccagcacgctctttctcgcagctgtccccgctggtgctg

SEQ ID NO: 434933 - DNA, 120 bp, Artificial Sequence
  ENSG00000152784_23 (sequence is synthesized)
gctgggccagaagctgggcgcgctcgagccatgccaccccgccgacggcgtgggccccaccagactctatcccgccgccgcggaccctctagcggtgaagctccagggggccgcggacct

SEQ ID NO: 434934 - DNA, 120 bp, Artificial Sequence
  ENSG00000152784_24 (sequence is synthesized)
gaacggaggttgcgggtccctgccgagcggcggcggcggcctgcctaagcagagccccttcctgtacgccaccgccttctggcccaagagctccgctgccgctgcagccgcggctgcggc

SEQ ID NO: 434935 - DNA, 120 bp, Artificial Sequence
  ENSG00000152784_25 (sequence is synthesized)
ggcggccgcggggcccttgcagctgcagctgccctcggcgctcacgctgctgccgccctccttcacctcgctgtgtctgcccgcgcagaactggtgcgccaagtgcaatgcctccttccg

SEQ ID NO: 434936 - DNA, 120 bp, Artificial Sequence
  ENSG00000152784_26 (sequence is synthesized)
catgacctccgacctggtgtaccatatgaggtcgcaccacaaaaaggagtatgcgatggagcccttggtgaagcggcggcgagaggagaaactcaagtgccccatctgcaatgagtcctt

SEQ ID NO: 434937 - DNA, 120 bp, Artificial Sequence
  ENSG00000152784_27 (sequence is synthesized)
cagggagcgccaccacctctccaggcacatgacctcgcataattgactcggaaaggaccccagctttccacgcgcgcgcaagcacagttaagccacctgcaggaataaacacgcgagaac

SEQ ID NO: 434938 - DNA, 120 bp, Artificial Sequence
  ENSG00000152784_28 (sequence is synthesized)
atccaccgcttccttgcaccccgaaaccctgcacaaagacacatacattcaccgcccccccgcccccccaacgcgcacacacacgtcctctcctcccaggaacctcattcaaatatttac

SEQ ID NO: 434939 - DNA, 120 bp, Artificial Sequence
  ENSG00000152784_29 (sequence is synthesized)
ccgggacacacacccccccccacacacacacacagacacactcacacacaagagccaggatggtggagttttgattgggtgggttgtttgagggggttttcttttgaatgcacgcatttt

SEQ ID NO: 434940 - DNA, 120 bp, Artificial Sequence
  ENSG00000152784_30 (sequence is synthesized)
cactttccccaaaacaaaggtacattttttaaaatgtcatatattgcaacatattgatgcatttgtcatacgtttctacttaaattattaagcacttacgatttagatgtaataattata

SEQ ID NO: 434941 - DNA, 120 bp, Artificial Sequence
  ENSG00000152784_31 (sequence is synthesized)
tgtaagggcaaaatttattttagatataaagtaaaggaggagggtgagatgctttctgcatttcttgatgacagtttgtgttcctacaaaaataaacaaaatgaataaaaagggatcacc

SEQ ID NO: 434942 - DNA, 120 bp, Artificial Sequence
  ENSG00000152784_32 (sequence is synthesized)
attcaatttgagtttccagggggaagtgcatgtataatgaaatgataatggacttcaatgaagaatgtcatcaattatgtacatatgtattttcttttaatacaaagtgtaattttgtgc

SEQ ID NO: 434943 - DNA, 120 bp, Artificial Sequence
  ENSG00000152784_33 (sequence is synthesized)
cagtgaaatggagtctgaatagttatgtgtttcttttatccctggaaatatttattaaactttatagtttatccgagtatgttggatgctttgacaataaatgactattttcttcaaagc

SEQ ID NO: 434944 - DNA, 120 bp, Artificial Sequence
  ENSG00000152784_34 (sequence is synthesized)
gtcactgcatcgggtccatctgtacaactctctccgtttctccgtctctctccctccctccctccctccacccccccaatctttttctccccatctctccatctctctcttatctcttca

SEQ ID NO: 434945 - DNA, 120 bp, Artificial Sequence
  ENSG00000152784_35 (sequence is synthesized)
agacgccgcccggcagcagccggcggtcgctccctccctcccagctgctgcagcagagaccggggccatttcgcgaggcggacgggctcctcggcaggctccgattggggtgggagagcg

SEQ ID NO: 434946 - DNA, 120 bp, Artificial Sequence
  ENSG00000152784_36 (sequence is synthesized)
ccggggaacgctgcctctgccgcaaagatgcccccttccgctggaaagcggtgcctccctgggtgctcgcgaaagcagccctgagaatggcagctctcagaggttgaagtcattcttttc

SEQ ID NO: 434947 - DNA, 120 bp, Artificial Sequence
  ENSG00000152785_0 (sequence is synthesized)
cgcgcgcgcgcgcgcacacacacacacacgtacactaaaaaactcggaccagccgcgccgcagctgctccaatccctggaaaaggcaatcgagcgccctccggaccgctgcgcacagccc

SEQ ID NO: 434948 - DNA, 120 bp, Artificial Sequence
  ENSG00000152785_1 (sequence is synthesized)
gcaatcgagcgccctccggaccgctgcgcacagccccggctccgacctggcgcccaaaacagagctagtcctagtccctcgcgcggccagtttggccgggtgttcccaaaaataaagcga

SEQ ID NO: 434949 - DNA, 120 bp, Artificial Sequence
  ENSG00000152785_2 (sequence is synthesized)
ggagggaaggtacagacagatcttgaaaacacccgggccacacacgccgcgacctacagctctttctcagcgttggagtggagacggcgcccgcagcgccctgcgcgggtgaggtccgcg

SEQ ID NO: 434950 - DNA, 120 bp, Artificial Sequence
  ENSG00000152785_3 (sequence is synthesized)
cagctgctggggaagagcccacctgtcaggctgcgctgggtcagcgcagcaagtggggctggccgctatctcgctgcacccggccgcgtcccgggctccgtgcgccctcgccccagctgg

SEQ ID NO: 434951 - DNA, 120 bp, Artificial Sequence
  ENSG00000152785_4 (sequence is synthesized)
tttggagttcaaccctcggctccgccgccggctccttgcgccttcggagtgtcccgcagcgacgccgggagccgacgcgccgcgcgggtacctagccatggctggggcgagcaggctgct

SEQ ID NO: 434952 - DNA, 120 bp, Artificial Sequence
  ENSG00000152785_5 (sequence is synthesized)
ctttctgtggctgggctgcttctgcgtgagcctggcgcagggagagagaccgaagccacctttcccggagctccgcaaagctgtgccaggtgaccgcacggcaggtggtggcccggactc

SEQ ID NO: 434953 - DNA, 120 bp, Artificial Sequence
  ENSG00000152785_6 (sequence is synthesized)
cgagctgcagccgcaagacaaggtctctgaacacatgctgcggctctatgacaggtacagcacggtccaggcggcccggacaccgggctccctggagggaggctcgcagccctggcgccc

SEQ ID NO: 434954 - DNA, 120 bp, Artificial Sequence
  ENSG00000152785_7 (sequence is synthesized)
tcggctcctgcgcgaaggcaacacggttcgcagctttcgggcggcagcagcagaaactcttgaaagaaaaggactgtatatcttcaatctgacatcgctaaccaagtctgaaaacatttt

SEQ ID NO: 434955 - DNA, 120 bp, Artificial Sequence
  ENSG00000152785_8 (sequence is synthesized)
gtctgccacactgtatttctgtattggagagctaggaaacatcagcctgagttgtccagtgtctggaggatgctcccatcatgctcagaggaaacacattcagattgatctttctgcatg

SEQ ID NO: 434956 - DNA, 120 bp, Artificial Sequence
  ENSG00000152785_9 (sequence is synthesized)
gaccctcaaattcagcagaaaccaaagtcaactccttggccatctgtcagtggatatggccaaatctcatcgagatattatgtcctggctgtctaaagatatcactcaactcttgaggaa

SEQ ID NO: 434957 - DNA, 120 bp, Artificial Sequence
  ENSG00000152785_10 (sequence is synthesized)
ggccaaagaaaatgaagagttcctcataggatttaacattacgtccaagggacgccagctgccaaagaggaggttaccttttccagagccttatatcttggtatatgccaatgatgccgc

SEQ ID NO: 434958 - DNA, 120 bp, Artificial Sequence
  ENSG00000152785_11 (sequence is synthesized)
catttctgagccagaaagtgtggtatcaagcttacagggacaccggaattttcccactggaactgttcccaaatgggatagccacatcagagctgccctttccattgagcggaggaagaa

SEQ ID NO: 434959 - DNA, 120 bp, Artificial Sequence
  ENSG00000152785_12 (sequence is synthesized)
gcgctctactggggtcttgctgcctctgcagaacaacgagcttcctggggcagaataccagtataaaaaggatgaggtgtgggaggagagaaagccttacaagacccttcaggctcaggc

SEQ ID NO: 434960 - DNA, 120 bp, Artificial Sequence
  ENSG00000152785_13 (sequence is synthesized)
ccctgaaaagagtaagaataaaaagaaacagagaaaggggcctcatcggaagagccagacgctccaatttgatgagcagaccctgaaaaaggcaaggagaaagcagtggattgaacctcg

SEQ ID NO: 434961 - DNA, 120 bp, Artificial Sequence
  ENSG00000152785_14 (sequence is synthesized)
gaattgcgccaggagatacctcaaggtagactttgcagatattggctggagtgaatggattatctcccccaagtcctttgatgcctattattgctctggagcatgccagttccccatgcc

SEQ ID NO: 434962 - DNA, 120 bp, Artificial Sequence
  ENSG00000152785_15 (sequence is synthesized)
aaagtctttgaagccatcaaatcatgctaccatccagagtatagtgagagctgtgggggtcgttcctgggattcctgagccttgctgtgtaccagaaaagatgtcctcactcagtatttt

SEQ ID NO: 434963 - DNA, 120 bp, Artificial Sequence
  ENSG00000152785_16 (sequence is synthesized)
attctttgatgaaaataagaatgtagtgcttaaagtataccctaacatgacagtagagtcttgcgcttgcagataacctggcaaagaactcatttgaatgcttaattcaatcattagttt

SEQ ID NO: 434964 - DNA, 120 bp, Artificial Sequence
  ENSG00000152785_17 (sequence is synthesized)
tcctgttttttttttttttttttttgcactgccaatgcattttgtttcaaaagattatttctatagtcagaggggaatgagcaaatagactgaagattgccaccaaggaaaagaactgta

SEQ ID NO: 434965 - DNA, 120 bp, Artificial Sequence
  ENSG00000152785_18 (sequence is synthesized)
aaggaaaagaactgtatttgtttctgaatgtaacttaaagcaagatttttagtaaatatggacatctatttctctttttgtaatcaaacacaacaacttatcaaactgtttttagaactg

SEQ ID NO: 434966 - DNA, 120 bp, Artificial Sequence
  ENSG00000152785_19 (sequence is synthesized)
ttagagaacacactggtttatttttgtaatgttctttgaaaacagaatggagaagcagcaatagcttgtcatttatctcatttaatgactaatgggaaatagagaacaatttcgcgtttt

SEQ ID NO: 434967 - DNA, 120 bp, Artificial Sequence
  ENSG00000152785_20 (sequence is synthesized)
gaattaggcttattgccttagaatcctgagaaagtgctaaataatcaactctgatgtttttcttaagttcttgagactcttgtttatccttgtttttcctccacaagtcattgtctaagt

SEQ ID NO: 434968 - DNA, 120 bp, Artificial Sequence
  ENSG00000152785_21 (sequence is synthesized)
gtaatggaaagtttatgctgagcgttagtgtgtatgtatgtgcgtacatgcgccaggtgcctgtgccctctgtaggatggtttgcttaatatggttttataattcagtttacacaggatt

SEQ ID NO: 434969 - DNA, 120 bp, Artificial Sequence
  ENSG00000152785_22 (sequence is synthesized)
ctttattttttttaattttgtattttggcaaacaccattcagttataagaactttgccaaatatgatagaataattcaagagcatatacagagagttaccacttgacccagctatttaat

SEQ ID NO: 434970 - DNA, 120 bp, Artificial Sequence
  ENSG00000152785_23 (sequence is synthesized)
tgcaaatacagttgttttcatttcatttcctaccagaaaaaggaatcagaaacctagtttttgaaaacacaagtgtaattcctcttttgtacttctttttcacaaatgcttttatttatt

SEQ ID NO: 434971 - DNA, 120 bp, Artificial Sequence
  ENSG00000152785_24 (sequence is synthesized)
ctaaattgaatttaaaaatccttcctaaagccattaactctttaattctcctgatatgcctttacttcctatgaagttattggtagatgttgaggcccaaaaactggtagaatattgaag

SEQ ID NO: 434972 - DNA, 120 bp, Artificial Sequence
  ENSG00000152785_25 (sequence is synthesized)
cttttggctcagtcacgaaatctacaagttagcaaagcttacaaaacattattcgtcaggtatgggaatcaaatatagacacttgtttgtctttgctttccatttctatgtgtcacatac

SEQ ID NO: 434973 - DNA, 120 bp, Artificial Sequence
  ENSG00000152785_26 (sequence is synthesized)
atatatgtgtcctcttataactttagtcttcaaaattatttcaatatccttcttctcactatatttatttgtgtgatggaaatgctttcaggccgtagatcattgttggtgttaatctgt

SEQ ID NO: 434974 - DNA, 120 bp, Artificial Sequence
  ENSG00000152785_27 (sequence is synthesized)
ggttaatcctcattttagttccgtcttatctgatacttagaaatatctcagccattttggaggctgtgcagtatcagaagacgtggagtttgttctgtctctgcctgtagctaattatgg

SEQ ID NO: 434975 - DNA, 120 bp, Artificial Sequence
  ENSG00000152785_28 (sequence is synthesized)
tggttcagtcatttaataaatatgttttgagcatctattttgtgaaaggcactgtgttacctgtgtgtctttagtgtcctcactggtaaaatgaagaggctggccatgagctggaagggt

SEQ ID NO: 434976 - DNA, 120 bp, Artificial Sequence
  ENSG00000152785_29 (sequence is synthesized)
taagtttataattccagctatttcacacccgtcttccttgaaggaatgatagtgatagatataaaaacactgtaagtccctcttttaataaactaaatgaaagaacatcctatacttcgc

SEQ ID NO: 434977 - DNA, 120 bp, Artificial Sequence
  ENSG00000152785_30 (sequence is synthesized)
tgtttgtaaattagtatggcattcgctttggtttaagtggtattttattgcaaacccattaaaagaataactcatgaaaagaagctctttgacaccttggggtacacaaatgttggtgtg

SEQ ID NO: 434978 - DNA, 120 bp, Artificial Sequence
  ENSG00000152785_31 (sequence is synthesized)
ggtgtgtgttaattctgtgagtgagacacaccagttctaaaaaaaatgagtgaagttctggtgcctgagttaccatgctttcttctagttcttacagtagcataaaattaaagattcaaa

SEQ ID NO: 434979 - DNA, 120 bp, Artificial Sequence
  ENSG00000152785_32 (sequence is synthesized)
gtgagatggaggataaaattactttttaatacatgttctcaaacatttgaaaataaaagtatatgatagaagggggccagagtgtggccaccatcctgatcgtactgtttttcaataaag

SEQ ID NO: 434980 - DNA, 120 bp, Artificial Sequence
  ENSG00000152785_33 (sequence is synthesized)
aaaactttttcattggtagatttggtgaaattctaaatttaggtttttttctagagctgtatcaaccaaaacttctggcaattcccagtatcacttcttagccttcttatatccaaatgc

SEQ ID NO: 434981 - DNA, 120 bp, Artificial Sequence
  ENSG00000152785_34 (sequence is synthesized)
ctgtttattacctttcttaatttgaatcaatgcctagttattacagattgcaccccacaatggccaaaaacccactacataataaaatttacaggtactaactagttaagattatatttt

SEQ ID NO: 434982 - DNA, 120 bp, Artificial Sequence
  ENSG00000152785_35 (sequence is synthesized)
aagtagcaattgatataaaattacaacacaatgaaagaacttgggtaatctcttagcaatggaaataggttttaaccagcagtttttctgggtgctttgtaactatcattttactaatga

SEQ ID NO: 434983 - DNA, 120 bp, Artificial Sequence
  ENSG00000152785_36 (sequence is synthesized)
attgaggatgtattatggtttaaattggaagagttttattcccaaagaataaagcaagattatctttcagtagtagagattgaagtaaatgtattaatattttaattaatacagatttac

SEQ ID NO: 434984 - DNA, 120 bp, Artificial Sequence
  ENSG00000152785_37 (sequence is synthesized)
taagagtagttagaaaatttagtaagtgcctgttttacaaattgttaggtactagtttctgtataattcctacacagaagctttagaaatctcctgatattaaattattaaattggcatt

SEQ ID NO: 434985 - DNA, 120 bp, Artificial Sequence
  ENSG00000152785_38 (sequence is synthesized)
catgaaaagagaagctacaattataaactccatttgctaaatcatgcataatactctctctctctcttcccccacaagtaatctctctaccccatgcagtgtgcacacacacacacacac

SEQ ID NO: 434986 - DNA, 83 bp, Artificial Sequence
  ENSG00000152785_39 (sequence is synthesized)
atctctctaccccatgcagtgtgcacacacacacacacacagtcagttactgaaaaaaataattctttttcttttttttttta

SEQ ID NO: 434987 - DNA, 84 bp, Artificial Sequence
  ENSG00000152785_40 (sequence is synthesized)
ttatttgataaaaagaattctttttctcaataactgttctcttgaattcaaattaagggactgccaaagtcaattagaatattt

SEQ ID NO: 434988 - DNA, 120 bp, Artificial Sequence
  ENSG00000152785_41 (sequence is synthesized)
aattcaaattaagggactgccaaagtcaattagaatattttaaaaatactttgttgtaacctgtgtaaataatatacaatttacaggatttgggattgtagaacttaaactggaagactg

SEQ ID NO: 434989 - DNA, 120 bp, Artificial Sequence
  ENSG00000152785_42 (sequence is synthesized)
gattcctcagatctcaggactataacattccagataaatttttacattccctttgctgtatattaactgatgatcatttatatgttaagattttttaccttaatatttctgaataaaact

SEQ ID NO: 434990 - DNA, 120 bp, Artificial Sequence
  ENSG00000152785_43 (sequence is synthesized)
cttattgcccatttaatattttcataggcaatcaaatgtgagtaatactgctaagagtctgatttattaaaaatatttgtataattcattcagtttagtttttcagtttagtctttctgc

SEQ ID NO: 434991 - DNA, 120 bp, Artificial Sequence
  ENSG00000152785_44 (sequence is synthesized)
tttcacttttctctgtgctaacaagtaactaatgtctgggcattgacttcttattgaatcaaagttgggttaggcatagctatgcacacctgatgtgtaagattaaagaagagattaaat

SEQ ID NO: 434992 - DNA, 120 bp, Artificial Sequence
  ENSG00000152785_45 (sequence is synthesized)
aagaaatcttgggtaagttggacttttctgtatagctcttttttcctctgagttgtattttaatgtagtttataagtgataaaatgatccttgttttctaaaagccagtccttcccttca

SEQ ID NO: 434993 - DNA, 120 bp, Artificial Sequence
  ENSG00000152785_46 (sequence is synthesized)
ttcagctttccacagtttctgtaaatgtttaatacttgtacagtcaatggcaattttaaatatatatatatatataatatatgtatatggaaaaggttcaaagatgcttttaatttattt

SEQ ID NO: 434994 - DNA, 120 bp, Artificial Sequence
  ENSG00000152785_47 (sequence is synthesized)
actattgccttcctataataataattttcatccttaattatgataatacttttagcaagaaaaattcctttttactacagtttttagatgcaaaatgcagtttggttctttagtcaaatc

SEQ ID NO: 434995 - DNA, 120 bp, Artificial Sequence
  ENSG00000152785_48 (sequence is synthesized)
cacttagagggtatattgcagtgaaactgtgaaggatacttcactaccaatgtataagctttgttgaatttgtatcattttctttcagtaatgaaaagctattcattatacagtatggaa

SEQ ID NO: 434996 - DNA, 120 bp, Artificial Sequence
  ENSG00000152785_49 (sequence is synthesized)
ataaaaattgcttcattgaccattcatttttacttattgggaaatactatatttccagacattttcaagtgtgctgcatttaaaagaggtaataaagcttaagcatagagttgaacattt

SEQ ID NO: 434997 - DNA, 120 bp, Artificial Sequence
  ENSG00000152795_0 (sequence is synthesized)
ccggacgccagagacaaaggctcccaaggcaagagggactgtggccctgcgtcggctctgctcgggactgctgaccccaggaatttacgccccttcgtttttctcttctgattcttctct

SEQ ID NO: 434998 - DNA, 120 bp, Artificial Sequence
  ENSG00000152795_1 (sequence is synthesized)
tctcccaagcccgcgtcccctcacgcgtggcctctctccttgccgggagggccgcgatggaggtcccgcccaggctttcccatgtgccgccgccattgttcccctccgctcccgctactt

SEQ ID NO: 434999 - DNA, 120 bp, Artificial Sequence
  ENSG00000152795_2 (sequence is synthesized)
tccgctcccgctactttagcctcccgcagcctctcccattggcggccgcggccgccgcggcagctagccccgctcctcccttcgctcgctcccagctccgcccggcagggggcgcgccgg

SEQ ID NO: 435000 - DNA, 120 bp, Artificial Sequence
  ENSG00000152795_3 (sequence is synthesized)
ccgcccagcagccctcccgattggcgggcggggcggctataaagggagggcgcaggcggcgcccggatctcttccgccgccattttaaatccagctccatacaacgctccgccgccgctg

SEQ ID NO: 435001 - DNA, 120 bp, Artificial Sequence
  ENSG00000152795_4 (sequence is synthesized)
ctgccgcgacccggactgcgcgccagcacccccctgccgacagctccgtcactatggaggatatgaacgagtacagcaatatagaggaattcgcagagggatccaagatcaacgcgagca

SEQ ID NO: 435002 - DNA, 120 bp, Artificial Sequence
  ENSG00000152795_5 (sequence is synthesized)
agaatcagcaggatgacggtaaaatgtttattggaggcttgagctgggatacaagcaaaaaagatctgacagagtacttgtctcgatttggggaagttgtagactgcacaattaaaacag

SEQ ID NO: 435003 - DNA, 120 bp, Artificial Sequence
  ENSG00000152795_6 (sequence is synthesized)
atccagtcactgggagatcaagaggatttggatttgtgcttttcaaagatgctgctagtgttgataaggttttggaactgaaagaacacaaactggatggcaaattgatagatcccaaaa

SEQ ID NO: 435004 - DNA, 120 bp, Artificial Sequence
  ENSG00000152795_7 (sequence is synthesized)
gggccaaagctttaaaagggaaagaacctcccaaaaaggtttttgtgggtggattgagcccggatacttctgaagaacaaattaaagaatattttggagcctttggagagattgaaaata

SEQ ID NO: 435005 - DNA, 120 bp, Artificial Sequence
  ENSG00000152795_8 (sequence is synthesized)
ttgaacttcccatggatacaaaaacaaatgaaagaagaggattttgttttatcacatatactgatgaagagccagtaaaaaaattgttagaaagcagataccatcaaattggttctggga

SEQ ID NO: 435006 - DNA, 120 bp, Artificial Sequence
  ENSG00000152795_9 (sequence is synthesized)
agtgtgaaatcaaagttgcacaacccaaagaggtatataggcagcaacagcaacaacaaaaaggtggaagaggtgctgcagctggtggacgaggtggtacgaggggtcgtggccgaggtc

SEQ ID NO: 435007 - DNA, 120 bp, Artificial Sequence
  ENSG00000152795_10 (sequence is synthesized)
agggccaaaactggaaccaaggatttaataactattatgatcaaggatatggaaattacaatagtgcctatggtggtgatcaaaactatagtggctatggcggatatgattatactgggt

SEQ ID NO: 435008 - DNA, 120 bp, Artificial Sequence
  ENSG00000152795_11 (sequence is synthesized)
ataactatgggaactatggatatggacagggatatgcagactacagtggccaacagagcacttatggcaaggcatctcgagggggtggcaatcaccaaaacaattaccagccatactaaa

SEQ ID NO: 435009 - DNA, 120 bp, Artificial Sequence
  ENSG00000152795_12 (sequence is synthesized)
ggagaacattggagaaaacaggaggagatgttaaagtaacccatcttgcaggacgacattgaagattggtcttctgttgatctaagatgattattttgtaaaagactttctagtgtacaa

SEQ ID NO: 435010 - DNA, 120 bp, Artificial Sequence
  ENSG00000152795_13 (sequence is synthesized)
gacaccattgtgtccaactgtatatagctgccaattagttttctttgtttttactttgtcctttgctatctgtgttatgactcaatgtggatttgtttatacacattttatttgtatcat

SEQ ID NO: 435011 - DNA, 120 bp, Artificial Sequence
  ENSG00000152795_14 (sequence is synthesized)
ttcatgttaaacctcaaataaatgcttccttatgtgattgcttttctgcgtcaggtactacatagctctgtaaaaaatgtaatttaaaataagcaataattaaggcacagttgattttgt

SEQ ID NO: 435012 - DNA, 120 bp, Artificial Sequence
  ENSG00000152795_15 (sequence is synthesized)
cttctccaatttgtaggtgtattttatgctcttaaggcttcatcttctccctgtaactgagatttctaccacacctttgaacaatgttctttcccttctggttatctgaagactgtcctg

SEQ ID NO: 435013 - DNA, 120 bp, Artificial Sequence
  ENSG00000152795_16 (sequence is synthesized)
aaaggaagacataagtgttgtgattagtagaagctttctagtagaccatatttcttctggattgtaataaaattgttagtagctccttttactttgttcctgtctctggaaagccatttt

SEQ ID NO: 435014 - DNA, 120 bp, Artificial Sequence
  ENSG00000152795_17 (sequence is synthesized)
tgaattgctgattactttggctttaatcagtggtcacctagaaaaagctttgtaatcataacacaatgagtaattcttgataaaagttcagatacaaaaggagcactgtaaaactggtag

SEQ ID NO: 435015 - DNA, 120 bp, Artificial Sequence
  ENSG00000152795_18 (sequence is synthesized)
gagctatggtttaagagcattggaagtagttacaactcaaggattttggtagaaaggtatgagtttggtcgaaaaattaaaatagtggcaaaataagatttagttgtgttttctcagagc

SEQ ID NO: 435016 - DNA, 120 bp, Artificial Sequence
  ENSG00000152795_19 (sequence is synthesized)
cgccacaagattgaacaaaatgttttctgtttgggcatcctgaggaagttgtattagctgttaatgctctgtgagtttagaaaaagtcttgatagtaaatctagtttttgacacagtgca

SEQ ID NO: 435017 - DNA, 120 bp, Artificial Sequence
  ENSG00000152795_20 (sequence is synthesized)
tgaactaagtagttaaatatttacatattcagaaaggaatagtggaaaaggtatcttggttatgacaaagtcattacaaatgtgactaagtcattacaaatgtgactgagtcattacagt

SEQ ID NO: 435018 - DNA, 120 bp, Artificial Sequence
  ENSG00000152795_21 (sequence is synthesized)
ggaccctctgggtgcattgaaaagaatccgttttatatccaggtttcagaggacctggaataataaaaagctttggattttgcattcagtgtagttggattttgggaccttggcctcagt

SEQ ID NO: 435019 - DNA, 120 bp, Artificial Sequence
  ENSG00000152795_22 (sequence is synthesized)
gttatttactgggattggcatacgtgttcacaggcagagtagttgatctcacacaacgggtgatctcacaaaactggtaagtttcttatgctcatgagccctccctttttttttttaatt

SEQ ID NO: 435020 - DNA, 120 bp, Artificial Sequence
  ENSG00000152795_23 (sequence is synthesized)
tggtgcctgcaactttcttaacaatgattctacttcctgggctatcacattataatgctcttggcctcttttttgctgctgttttgctattcttaaacttaggccaagtaccaatgttgg

SEQ ID NO: 435021 - DNA, 120 bp, Artificial Sequence
  ENSG00000152795_24 (sequence is synthesized)
ctgttagaagggattctgttcattcaacatgcaactttagggaatggaagtaagttcatttttaagttgtgttgtcagtaggtgcggtgtctagggtagtgaatcctgtaagttcaaatt

SEQ ID NO: 435022 - DNA, 120 bp, Artificial Sequence
  ENSG00000152795_25 (sequence is synthesized)
tatgattaggtgacgagttgacattgagattgtccttttccctgatcaaaaaatgaataaagcctttttaaacaaaatccaaacttttaatcaagtcttgatatgtatgactgagaaaaa

SEQ ID NO: 435023 - DNA, 120 bp, Artificial Sequence
  ENSG00000152795_26 (sequence is synthesized)
atacactacatctagagatgattgagatgttttgcaaagaattgaagggggagtgagaattggtttttcttgcaggggctttgaactctagatttgggctttgaactctagatttaattc

SEQ ID NO: 435024 - DNA, 120 bp, Artificial Sequence
  ENSG00000152795_27 (sequence is synthesized)
agatttcagggtctatcagttcaccaactgatgcaaatttgaacagatactctaaggctaagtgtcctaggttggatgaactgaagctactatcaagatctcgttcccaaggattaattt

SEQ ID NO: 435025 - DNA, 120 bp, Artificial Sequence
  ENSG00000152795_28 (sequence is synthesized)
agaacaaagtaattggacaagtttattggggaggggatagaaatgaattctaaagtacctataacaaatactctgtgtatgttttttacatcgtatttgccttttacattgtttagacca

SEQ ID NO: 435026 - DNA, 120 bp, Artificial Sequence
  ENSG00000152795_29 (sequence is synthesized)
aattctgtgtgatgttatcctcgggaagaggatagaaattaattctaaagtacctataacaaatgctcggtttgtatatgtttttatacatcgtatttgccttttgcattgttcagacca

SEQ ID NO: 435027 - DNA, 120 bp, Artificial Sequence
  ENSG00000152795_30 (sequence is synthesized)
aattctgtgtgatgttatcctaacaaaacaccttagtaatttctttggttaacatgttaatctgtaatctcacttttataagatgaggactattaaaatgagatgtctgttgggatgcta

SEQ ID NO: 435028 - DNA, 80 bp, Artificial Sequence
  ENSG00000152795_31 (sequence is synthesized)
cccgccgcgcccccttggcccgcgcgcccgtggtcacagtggaagaggcgcccgcgctgcgctgcccggaggagccgtcg

SEQ ID NO: 435029 - DNA, 120 bp, Artificial Sequence
  ENSG00000152795_32 (sequence is synthesized)
gtcgcgcgcccgcttcctgttcggctggttcctgccagctcgaggacaaaacacgcgtgcgcgcggcgggcgagcgcgctcgccgcctcagtcgccagcgccgggcgcagtccgcctttt

SEQ ID NO: 435030 - DNA, 120 bp, Artificial Sequence
  ENSG00000152795_33 (sequence is synthesized)
cgagcgggagaggcccggggcacgtgcagaaaggagccccgcgagtggcgcgccggggatgtgagtgccccttgccctctactgaatccagccccctccccgcccaccgcctccgccttt

SEQ ID NO: 435031 - DNA, 120 bp, Artificial Sequence
  ENSG00000152795_34 (sequence is synthesized)
cgggaacttcattgcaggccgtgtgtcaccctgaccacgtctatctctgggggtcgcacgttgcgggcagagcgcaaggcatacaccagaaaacgctgtcctgtggaggagatgttaaag

SEQ ID NO: 435032 - DNA, 120 bp, Artificial Sequence
  ENSG00000152795_35 (sequence is synthesized)
tgtttttactaaattgttgattttttaattgctttatgagcctgttttgcctaaagtgtctatagatctttaactttaaagtcttatctcactttctttagtattgcagaaaaacttaag

SEQ ID NO: 435033 - DNA, 120 bp, Artificial Sequence
  ENSG00000152795_36 (sequence is synthesized)
agtttttctgtttgcttttgtgtaccaggtggtctagaggaataattaaacattttagaactattaacaggtaaagtactgaaatgggtacaacttaaggaaaacaagaatgttgtcttc

SEQ ID NO: 435034 - DNA, 120 bp, Artificial Sequence
  ENSG00000152795_37 (sequence is synthesized)
taactctgacattataccttgtttgtacccgccagcgggaacttcattgcaggccgtgtgtcaccctgaccacgtctatctctgggggtcgcacgttgcgggcagagcgcaaggcataca

SEQ ID NO: 435035 - DNA, 120 bp, Artificial Sequence
  ENSG00000152795_38 (sequence is synthesized)
aacttaacttaaatggttttttacaggagttaaagtacataaatgcctttttacagcttaatcattttggtcttctgtttagtgttgtatttcaattgtggagcctcattttaagtgttc

SEQ ID NO: 435036 - DNA, 120 bp, Artificial Sequence
  ENSG00000152795_39 (sequence is synthesized)
attcttttaagatttaatgcttgctttttctttttatagctaatagtgaaatctacaaaccaaaacaagaacttttaaatctgggatataaattaaagatcatatgcacagatcaattta

SEQ ID NO: 435037 - DNA, 120 bp, Artificial Sequence
  ENSG00000152795_40 (sequence is synthesized)
tgttcttgtaataaacttattagaaattggtgtttgtgatagcattttacttgggttactagagatgcttctagtagaccttaatctagcatagttgaacctctgaatatgggaaggttg

SEQ ID NO: 435038 - DNA, 120 bp, Artificial Sequence
  ENSG00000152795_41 (sequence is synthesized)
tattcccagattctttcctgaatagatttgaatttaatgtcatttgggaactccagggtgagtttattgactacccaaactgtattttaccaataaatatgcatatgatctttaattatt

SEQ ID NO: 435039 - DNA, 120 bp, Artificial Sequence
  ENSG00000152804_0 (sequence is synthesized)
ggagcgcggcggagccatgcagtacccgcaccccgggccggcggcgggcgccgtgggggtgccgctgtacgcgcccacgccgctgctgcaacccgcacacccgacgcccttttacatcga

SEQ ID NO: 435040 - DNA, 120 bp, Artificial Sequence
  ENSG00000152804_1 (sequence is synthesized)
cgcccttttacatcgaggacatcctgggccgcgggcccgccgcgcccacgcccgcccccacgctgccgtcccccaactcctccttcaccagcctcgtgtccccctaccggaccccggtgt

SEQ ID NO: 435041 - DNA, 120 bp, Artificial Sequence
  ENSG00000152804_2 (sequence is synthesized)
acgagcccacgccgatccatccagccttctcgcaccactccgccgccgcgctggccgctgcctacggacccggcggcttcgggggccctctgtaccccttcccgcggacggtgaacgact

SEQ ID NO: 435042 - DNA, 120 bp, Artificial Sequence
  ENSG00000152804_3 (sequence is synthesized)
acacgcacgccctgctccgccacgaccccctgggcaaacctctactctggagccccttcttgcagaggcctctgcataaaaggaaaggcggccaggtgagattctccaacgaccagacca

SEQ ID NO: 435043 - DNA, 120 bp, Artificial Sequence
  ENSG00000152804_4 (sequence is synthesized)
tcgagctggagaagaaattcgagacgcagaaatatctctctccgcccgagaggaagcgtctggccaagatgctgcagctcagcgagagacaggtcaaaacctggtttcagaatcgacgcg

SEQ ID NO: 435044 - DNA, 120 bp, Artificial Sequence
  ENSG00000152804_5 (sequence is synthesized)
ctaaatggaggagactaaaacaggagaaccctcaaagcaataaaaaagaagaactggaaagtttggacagttcctgtgatcagaggcaagatttgcccagtgaacagaataaaggtgctt

SEQ ID NO: 435045 - DNA, 120 bp, Artificial Sequence
  ENSG00000152804_6 (sequence is synthesized)
ctttggatagctctcaatgttcgccctcccctgcctcccaggaagaccttgaatcagagatttcagaggattctgatcaggaagtggacattgagggcgataaaagctattttaatgctg

SEQ ID NO: 435046 - DNA, 120 bp, Artificial Sequence
  ENSG00000152804_7 (sequence is synthesized)
gaataatgttttgctacagaaaatcttcatagaagaactggaaggctatataagaaagggaatcaattctctggtattctggaaacctaaaaatatttggtgcactgctcaattaacaaa

SEQ ID NO: 435047 - DNA, 120 bp, Artificial Sequence
  ENSG00000152804_8 (sequence is synthesized)
cctacatggagaccttaattttgacttaacaaatagtttatgtactgctcttaggttgttttgataaagtgacattatagtgattaaattcttccccctttaaaaaaacagttagtggtt

SEQ ID NO: 435048 - DNA, 120 bp, Artificial Sequence
  ENSG00000152804_9 (sequence is synthesized)
ttcactatttataaaaaattaattttgaactttttgttaaatttttaagttatagctttaaaggttttaataggaccttcttgaacgacttttctgtaatctgtttatctcccacttaat

SEQ ID NO: 435049 - DNA, 120 bp, Artificial Sequence
  ENSG00000152804_10 (sequence is synthesized)
ggaaaggcaaaggggtaccccaaatccagaggtgcctacatttcaggcagccttggagtattttaaaaggaaaacattctttacttttatatgacattcttatactgctgtctcaaatcc

SEQ ID NO: 435050 - DNA, 120 bp, Artificial Sequence
  ENSG00000152804_11 (sequence is synthesized)
aaaaacatttcagagctcttgtctcagagatgtgtgttctttttgtcagagatatggttgatgagaatcttaaatgcttgttttgcactatcacttagtacctgtttgaccaaggtgtta

SEQ ID NO: 435051 - DNA, 120 bp, Artificial Sequence
  ENSG00000152804_12 (sequence is synthesized)
aggggatagtacctcccaattcaagcagagaaactgacctgactaaagttaatcgcagatgaactagaagtcacaggttaattaaatgtaagtagattgtagatactgttttatatcaaa

SEQ ID NO: 435052 - DNA, 120 bp, Artificial Sequence
  ENSG00000152804_13 (sequence is synthesized)
caatgtttataatgtgtatatagaattgttcactgtaaaaaaaatggccaaaatgtgttttttttttaataagtaacttgactataaaataaagccgtccgtgggacgactgacctcgtt

SEQ ID NO: 435053 - DNA, 120 bp, Artificial Sequence
  ENSG00000152804_14 (sequence is synthesized)
tgaaatcagaggaggccgcggctcccccggccaggattggaggctcctcgcgcaacctaatgcgggtgtccgggcccgagcgcttcccgcgcagccaggccttgtcggtgcagcagcccc

SEQ ID NO: 435054 - DNA, 120 bp, Artificial Sequence
  ENSG00000152804_15 (sequence is synthesized)
gctcctccccaacacgcacacacccggtgttcgcaagtgcggctcaccaagggagatccaagggggcaaaaagttatgtataaatccgagagccactggggaaagagggtcgtggtattg

SEQ ID NO: 435055 - DNA, 120 bp, Artificial Sequence
  ENSG00000152804_16 (sequence is synthesized)
tacaaggctgtgtgcatctgcggtgtcagtgtgtgactttgggtatgtttgtgtgtcggtgggaacgtgttaggtccacgtgccggtgggtgtatgtgaatgtgtctggttgggtggcct

SEQ ID NO: 435056 - DNA, 120 bp, Artificial Sequence
  ENSG00000152804_17 (sequence is synthesized)
cctggcctacctttgtcatccctggggcccgacagctctggggtctggccaggccgctccagggcagtgggtgagcgccgctcttcccgctcgcaggcaaacctctactctggagcccct

SEQ ID NO: 435057 - DNA, 120 bp, Artificial Sequence
  ENSG00000152804_18 (sequence is synthesized)
acacgcacgccctgctccgccacgaccccctggcctcgagggtttgatgatgcggcccgagcctggctgtggtcgcctgtcggggctggagcgggaccctcagccgggccgggcctgggg

SEQ ID NO: 435058 - DNA, 120 bp, Artificial Sequence
  ENSG00000152804_19 (sequence is synthesized)
gctaacgttttcacagtgcgccctgagtttccttgggttactgctgggaccgcgcaggaggaagcaaagagtttttcgagctagaccaacaggaaacacattgacggaaatgttgccata

SEQ ID NO: 435059 - DNA, 120 bp, Artificial Sequence
  ENSG00000152818_0 (sequence is synthesized)
atggccaagtatggagaacatgaagccagtcctgacaatgggcagaacgaattcagtgatatcattaagtccagatctgatgaacacaatgacgtacagaagaaaacctttaccaaatgg

SEQ ID NO: 435060 - DNA, 120 bp, Artificial Sequence
  ENSG00000152818_1 (sequence is synthesized)
ataaatgctcgattttcaaagagtgggaaaccacccatcaatgatatgttcacagacctcaaagatggaaggaagctattggatcttctagaaggcctcacaggaacatcactgccaaag

SEQ ID NO: 435061 - DNA, 120 bp, Artificial Sequence
  ENSG00000152818_2 (sequence is synthesized)
gaacgtggttccacaagggtacatgccttaaataacgtcaacagagtgctgcaggttttacatcagaacaatgtggaattagtgaatatagggggaactgacattgtggatggaaatcac

SEQ ID NO: 435062 - DNA, 120 bp, Artificial Sequence
  ENSG00000152818_3 (sequence is synthesized)
aaactgactttggggttactttggagcatcattttgcactggcaggtgaaagatgtcatgaaggatgtcatgtcggacctgcagcagacgaacagtgagaagatcctgctcagctgggtg

SEQ ID NO: 435063 - DNA, 120 bp, Artificial Sequence
  ENSG00000152818_4 (sequence is synthesized)
cgtcagaccaccaggccctacagccaagtcaacgtcctcaacttcaccaccagctggacagatggactcgcctttaatgctgtcctccaccgacataaacctgatctcttcagctgggat

SEQ ID NO: 435064 - DNA, 120 bp, Artificial Sequence
  ENSG00000152818_5 (sequence is synthesized)
aaagttgtcaaaatgtcaccaattgagagacttgaacatgccttcagcaaggctcaaacttatttgggaattgaaaagctgttagatcctgaagatgttgccgttcagcttcctgacaag

SEQ ID NO: 435065 - DNA, 120 bp, Artificial Sequence
  ENSG00000152818_6 (sequence is synthesized)
aaatccataattatgtatttaacatctttgtttgaggtgctacctcagcaagtcaccatagacgccatccgtgaggtagagacactcccaaggaaatataaaaaagaatgtgaagaagag

SEQ ID NO: 435066 - DNA, 120 bp, Artificial Sequence
  ENSG00000152818_7 (sequence is synthesized)
gcaattaatatacagagtacagcgcctgaggaggagcatgagagtccccgagctgaaactcccagcactgtcactgaggttgacatggatctggacagctatcagattgcgttggaggaa

SEQ ID NO: 435067 - DNA, 120 bp, Artificial Sequence
  ENSG00000152818_8 (sequence is synthesized)
gtgctgacctggttgctttctgctgaggacactttccaggagcaggatgatatttctgatgatgttgaagaagtcaaagaccagtttgcaacccatgaagcttttatgatggaactgact

SEQ ID NO: 435068 - DNA, 120 bp, Artificial Sequence
  ENSG00000152818_9 (sequence is synthesized)
gcacaccagagcagtgtgggcagcgtcctgcaggcaggcaaccaactgataacacaaggaactctgtcagacgaagaagaatttgagattcaggaacagatgaccctgctgaatgctaga

SEQ ID NO: 435069 - DNA, 120 bp, Artificial Sequence
  ENSG00000152818_10 (sequence is synthesized)
tgggaggctcttagggtggagagtatggacagacagtcccggctgcacgatgtgctgatggaactgcagaagaagcaactgcagcagctctccgcctggttaacactcacagaggagcgc

SEQ ID NO: 435070 - DNA, 120 bp, Artificial Sequence
  ENSG00000152818_11 (sequence is synthesized)
attcagaagatggaaacttgccccctggatgatgatgtaaaatctctacaaaagctgctagaagaacataaaagtttgcaaagtgatcttgaggctgaacaggtgaaagtaaattcacta

SEQ ID NO: 435071 - DNA, 120 bp, Artificial Sequence
  ENSG00000152818_12 (sequence is synthesized)
actcacatggtggtcattgttgatgaaaacagtggtgagagtgctacagctatcctagaagaccagttacagaaacttggtgagcgctggacagcagtatgccgttggactgaagaacgc

SEQ ID NO: 435072 - DNA, 120 bp, Artificial Sequence
  ENSG00000152818_13 (sequence is synthesized)
tggaataggttacaagaaatcaatatattgtggcaggaattattggaagaacagtgcttgttgaaagcttggttaaccgaaaaagaagaggctttaaataaagtccagacaagcaacttc

SEQ ID NO: 435073 - DNA, 120 bp, Artificial Sequence
  ENSG00000152818_14 (sequence is synthesized)
aaagaccaaaaggaactaagtgtcagtgttcgacgtctggctattttgaaggaagacatggaaatgaagcgtcaaacattggatcagctgagtgagattggccaggatgtgggacaatta

SEQ ID NO: 435074 - DNA, 120 bp, Artificial Sequence
  ENSG00000152818_15 (sequence is synthesized)
cttgataattccaaggcatctaagaagatcaacagtgactcagaggaactgactcaaagatgggattctttggttcagagactagaagattcctccaaccaggtgactcaggctgtagca

SEQ ID NO: 435075 - DNA, 120 bp, Artificial Sequence
  ENSG00000152818_16 (sequence is synthesized)
aagctggggatgtctcagattcctcagaaggaccttttggagactgttcgtgtaagagaacaagcaattacaaaaaaatctaagcaggaactgcctcctcctcctcccccaaagaagaga

SEQ ID NO: 435076 - DNA, 120 bp, Artificial Sequence
  ENSG00000152818_17 (sequence is synthesized)
cagatccatgtggatattgaagctaagaaaaagtttgatgctataagtgcagagctgttgaactggattttgaaatggaaaactgccattcagaccacagagataaaagagtatatgaag

SEQ ID NO: 435077 - DNA, 120 bp, Artificial Sequence
  ENSG00000152818_18 (sequence is synthesized)
atgcaagacacttccgaaatgaaaaagaagttgaaggcattagaaaaagaacagagagaaagaatccccagagcagatgaattaaaccaaactggacaaatccttgtggagcaaatggga

SEQ ID NO: 435078 - DNA, 120 bp, Artificial Sequence
  ENSG00000152818_19 (sequence is synthesized)
aaagaaggccttcctactgaagaaataaaaaatgttctggagaaggtttcatcagaatggaagaatgtatctcaacatttggaagatctagaaagaaagattcagctacaggaagatata

SEQ ID NO: 435079 - DNA, 120 bp, Artificial Sequence
  ENSG00000152818_20 (sequence is synthesized)
aatgcttatttcaagcagcttgatgagcttgaaaaggtcatcaagacaaaggaggagtgggtaaaacacacttccatttctgaatcttcccggcagtccttgccaagcttgaaggattcc

SEQ ID NO: 435080 - DNA, 120 bp, Artificial Sequence
  ENSG00000152818_21 (sequence is synthesized)
tgtcagcgggaattgacaaatcttcttggccttcaccccaaaattgaaatggctcgtgcaagctgctcggccctgatgtctcagccttctgccccagattttgtccagcggggcttcgat

SEQ ID NO: 435081 - DNA, 120 bp, Artificial Sequence
  ENSG00000152818_22 (sequence is synthesized)
agctttctgggccgctaccaagctgtacaagaggctgtagaggatcgtcaacaacatctagagaatgaactgaagggccaacctggacatgcatatctggaaacattgaaaacactgaaa

SEQ ID NO: 435082 - DNA, 120 bp, Artificial Sequence
  ENSG00000152818_23 (sequence is synthesized)
gatgtgctaaatgattcagaaaataaggcccaggtgtctctgaatgtccttaatgatcttgccaaggtggagaaggccctgcaagaaaaaaagacccttgatgaaatccttgagaatcag

SEQ ID NO: 435083 - DNA, 120 bp, Artificial Sequence
  ENSG00000152818_24 (sequence is synthesized)
aaacctgcattacataaacttgcagaagaaacaaaggctctggagaaaaatgttcatcctgatgtagaaaaattatataagcaagaatttgatgatgtgcaaggaaagtggaacaagcta

SEQ ID NO: 435084 - DNA, 120 bp, Artificial Sequence
  ENSG00000152818_25 (sequence is synthesized)
aaggtcttggtttccaaagatctacatttgcttgaggaaattgctctcacactcagagcttttgaggccgattcaacagtcattgagaagtggatggatggcgtgaaagacttcttaatg

SEQ ID NO: 435085 - DNA, 120 bp, Artificial Sequence
  ENSG00000152818_26 (sequence is synthesized)
aaacagcaggctgcccaaggagacgacgcaggtctacagaggcagttagaccagtgctctgcatttgttaatgaaatagaaacaattgaatcatctctgaaaaacatgaaggaaatagag

SEQ ID NO: 435086 - DNA, 120 bp, Artificial Sequence
  ENSG00000152818_27 (sequence is synthesized)
actaatcttcgaagtggtccagttgctggaataaaaacttgggtgcagacaagactaggtgactaccaaactcaactggagaaacttagcaaggagatcgctactcaaaaaagtaggttg

SEQ ID NO: 435087 - DNA, 120 bp, Artificial Sequence
  ENSG00000152818_28 (sequence is synthesized)
tctgaaagtcaagaaaaagctgcgaacctgaagaaagacttggcagagatgcaggaatggatgacccaggccgaggaagaatatttggagcgggattttgagtacaagtcaccagaagag

SEQ ID NO: 435088 - DNA, 120 bp, Artificial Sequence
  ENSG00000152818_29 (sequence is synthesized)
cttgagagtgctgtggaagagatgaagagggcaaaagaggatgtgttgcagaaggaggtgagagtgaagattctcaaggacaacatcaagttattagctgccaaggtgccctctggtggc

SEQ ID NO: 435089 - DNA, 120 bp, Artificial Sequence
  ENSG00000152818_30 (sequence is synthesized)
caggagttgacgtctgagctgaatgttgtgctggagaattaccaacttctttgtaatagaattcgaggaaagtgccacacgctagaggaggtctggtcttgttggattgaactgcttcac

SEQ ID NO: 435090 - DNA, 120 bp, Artificial Sequence
  ENSG00000152818_31 (sequence is synthesized)
tatttggatcttgaaactacctggttaaacactttggaagagcggatgaagagcacagaggtcctgcctgagaagacggatgctgtcaacgaagccctggagtctctggaatctgttctg

SEQ ID NO: 435091 - DNA, 120 bp, Artificial Sequence
  ENSG00000152818_32 (sequence is synthesized)
cgccacccggcagataatcgcacccagattcgagagcttggccagactctgattgatggggggatcctggatgatataatcagtgagaaactggaggctttcaacagccgatatgaagat

SEQ ID NO: 435092 - DNA, 120 bp, Artificial Sequence
  ENSG00000152818_33 (sequence is synthesized)
ctaagtcacctggcagagagcaagcagatttctttggaaaagcaactccaggtgctgcgggaaactgaccagatgcttcaagtcttgcaagagagcttgggggagctggacaaacagctc

SEQ ID NO: 435093 - DNA, 120 bp, Artificial Sequence
  ENSG00000152818_34 (sequence is synthesized)
accacatacctgactgacaggatagatgctttccaagttccacaggaagctcagaaaatccaagcagagatctcagcccatgagctaaccctagaggagttgagaagaaatatgcgttct

SEQ ID NO: 435094 - DNA, 120 bp, Artificial Sequence
  ENSG00000152818_35 (sequence is synthesized)
cagcccctgacctccccagagagtaggactgccagaggaggaagtcagatggatgtgctacagaggaaactccgagaggtgtccacaaagttccagcttttccagaagccagctaacttc

SEQ ID NO: 435095 - DNA, 120 bp, Artificial Sequence
  ENSG00000152818_36 (sequence is synthesized)
gagcagcgcatgctggactgcaagcgtgtgctggatggcgtgaaagcagaacttcacgttctggatgtgaaggacgtagaccctgacgtcatacagacgcacctggacaagtgtatgaaa

SEQ ID NO: 435096 - DNA, 120 bp, Artificial Sequence
  ENSG00000152818_37 (sequence is synthesized)
ctgtataaaactttgagtgaagtcaaacttgaagtggaaactgtgattaaaacaggaagacatattgtccagaaacagcaaacggacaacccaaaagggatggatgagcagctgacttcc

SEQ ID NO: 435097 - DNA, 120 bp, Artificial Sequence
  ENSG00000152818_38 (sequence is synthesized)
ctgaaggttctttacaatgacctgggcgcacaggtgacagaaggaaaacaggatctggaaagagcatcacagttggcccggaaaatgaagaaagaggctgcttctctctctgaatggctt

SEQ ID NO: 435098 - DNA, 120 bp, Artificial Sequence
  ENSG00000152818_39 (sequence is synthesized)
tctgctactgaaactgaattggtacagaagtccacttcagaaggtctgcttggtgacttggatacagaaatttcctgggctaaaaatgttctgaaggatctggaaaagagaaaagctgat

SEQ ID NO: 435099 - DNA, 120 bp, Artificial Sequence
  ENSG00000152818_40 (sequence is synthesized)
ttaaataccatcacagagagtagtgctgccctgcaaaacttgattgagggcagtgagcctattttagaagagaggctctgcgtccttaacgctgggtggagccgagttcgtacctggact

SEQ ID NO: 435100 - DNA, 120 bp, Artificial Sequence
  ENSG00000152818_41 (sequence is synthesized)
gaagattggtgcaataccttgatgaaccatcagaaccagctagaaatatttgatgggaacgtggctcacataagtacctggctttatcaagctgaagctctattggatgaaattgaaaag

SEQ ID NO: 435101 - DNA, 120 bp, Artificial Sequence
  ENSG00000152818_42 (sequence is synthesized)
aaaccaacaagtaaacaggaagaaattgtgaagcgtttagtatctgagctggatgatgccaacctccaggttgaaaatgtccgcgatcaagcccttattttgatgaatgcccgtggaagc

SEQ ID NO: 435102 - DNA, 120 bp, Artificial Sequence
  ENSG00000152818_43 (sequence is synthesized)
tcaagcagggagcttgtagaaccaaagttagctgagctgaataggaactttgaaaaggtgtctcaacatatcaaaagtgccaaattgctaattgctcaggaaccattataccaatgtttg

SEQ ID NO: 435103 - DNA, 120 bp, Artificial Sequence
  ENSG00000152818_44 (sequence is synthesized)
gtcaccactgaaacatttgaaactggtgtgcctttctctgacttggaaaaattagaaaatgacatagaaaatatgttaaaatttgtggaaaaacacttggaatccagtgatgaagatgaa

SEQ ID NO: 435104 - DNA, 120 bp, Artificial Sequence
  ENSG00000152818_45 (sequence is synthesized)
aagatggatgaggagagtgcccagattgaggaagttctacaaagaggagaagaaatgttacatcaacctatggaagataataaaaaagaaaagatccgtttgcaattattacttttgcat

SEQ ID NO: 435105 - DNA, 120 bp, Artificial Sequence
  ENSG00000152818_46 (sequence is synthesized)
actagatacaacaaaattaaggcaatccctattcaacagaggaaaatgggtcaacttgcttctggaattagatcatcacttcttcctacagattatctggttgaaattaacaaaatttta

SEQ ID NO: 435106 - DNA, 120 bp, Artificial Sequence
  ENSG00000152818_47 (sequence is synthesized)
ctttgcatggatgatgttgaattatcgcttaatgttccagagctcaacactgctatttacgaagacttctcttttcaggaagactctctgaagaatatcaaagaccaactggacaaactt

SEQ ID NO: 435107 - DNA, 120 bp, Artificial Sequence
  ENSG00000152818_48 (sequence is synthesized)
ggagagcagattgcagtcattcatgaaaaacagccagatgtcatccttgaagcctctggacctgaagccattcagatcagagatacacttactcagctgaatgcaaaatgggacagaatt

SEQ ID NO: 435108 - DNA, 120 bp, Artificial Sequence
  ENSG00000152818_49 (sequence is synthesized)
aatagaatgtacagtgatcggaaaggttgttttgacagggcaatggaagaatggagacagttccattgtgaccttaatgacctcacacagtggataacagaggctgaagaattactggtt

SEQ ID NO: 435109 - DNA, 120 bp, Artificial Sequence
  ENSG00000152818_50 (sequence is synthesized)
gatacctgtgctccaggtggcagcctggacttagagaaagccaggatacatcagcaggaacttgaggtgggcatcagcagccaccagcccagttttgcagcactaaaccgaactggggat

SEQ ID NO: 435110 - DNA, 120 bp, Artificial Sequence
  ENSG00000152818_51 (sequence is synthesized)
gataggcagccaaggctaaaaggagaaagtaagcaggtgatgaagtacaggcatcagctagatgagattatctgttggttaacaaaggctgagcatgctatgcaaaagagatcaaccacc

SEQ ID NO: 435111 - DNA, 120 bp, Artificial Sequence
  ENSG00000152818_52 (sequence is synthesized)
gaattgggagaaaacctgcaagaattaagagacttaactcaagaaatggaagtacatgctgaaaaactcaaatggctgaatagaactgaattggagatgctttcagataaaagtctgagt

SEQ ID NO: 435112 - DNA, 120 bp, Artificial Sequence
  ENSG00000152818_53 (sequence is synthesized)
ttacctgaaagggataaaatttcagaaagcttaaggactgtaaatatgacatggaataagatttgcagagaggtgcctaccaccctgaaggaatgcatccaggagcccagttctgtttca

SEQ ID NO: 435113 - DNA, 120 bp, Artificial Sequence
  ENSG00000152818_54 (sequence is synthesized)
cagacaaggattgctgctcatcctaatgtccaaaaggtggtgctagtatcatctgcgtcagatattcctgttcagtctcatcgtacttcggaaatttcaattcctgctgatcttgataaa

SEQ ID NO: 435114 - DNA, 120 bp, Artificial Sequence
  ENSG00000152818_55 (sequence is synthesized)
actataacagaactagccgactggctggtattaatcgaccagatgctgaagtccaacattgtcactgttggggatgtagaagagatcaataagaccgtttcccgaatgaaaattacaaag

SEQ ID NO: 435115 - DNA, 120 bp, Artificial Sequence
  ENSG00000152818_56 (sequence is synthesized)
gctgacttagaacagcgccatcctcagctggattatgtttttacattggcacagaatttgaaaaataaagcttccagttcagatatgagaacagcaattacagaaaaattggaaagggtc

SEQ ID NO: 435116 - DNA, 120 bp, Artificial Sequence
  ENSG00000152818_57 (sequence is synthesized)
aagaaccagtgggatggcacccagcatggcgttgagctaagacagcagcagcttgaggacatgattattgacagtcttcagtgggatgaccatagggaggagactgaagaactgatgaga

SEQ ID NO: 435117 - DNA, 120 bp, Artificial Sequence
  ENSG00000152818_58 (sequence is synthesized)
aaatatgaggctcgactctatattcttcagcaagcccgacgggatccactcaccaaacaaatttctgataaccaaatactgcttcaagaactgggtcctggagatggtatcgtcatggcg

SEQ ID NO: 435118 - DNA, 120 bp, Artificial Sequence
  ENSG00000152818_59 (sequence is synthesized)
ttcgataacgtcctgcagaaactcctggaggaatatgggagtgatgacacaaggaatgtgaaagaaaccacagagtacttaaaaacatcatggatcaatctcaaacaaagtattgctgac

SEQ ID NO: 435119 - DNA, 120 bp, Artificial Sequence
  ENSG00000152818_60 (sequence is synthesized)
agacagaacgccttggaggctgagtggaggacggtgcaggcctctcgcagagatctggaaaacttcctgaagtggatccaagaagcagagaccacagtgaatgtgcttgtggatgcctct

SEQ ID NO: 435120 - DNA, 120 bp, Artificial Sequence
  ENSG00000152818_61 (sequence is synthesized)
catcgggagaatgctcttcaggatagtatcttggccagggaactcaaacagcagatgcaggacatccaggcagaaattgatgcccacaatgacatatttaaaagcattgacggaaacagg

SEQ ID NO: 435121 - DNA, 120 bp, Artificial Sequence
  ENSG00000152818_62 (sequence is synthesized)
cagaagatggtaaaagctttgggaaattctgaagaggctactatgcttcaacatcgactggatgatatgaaccaaagatggaatgacttaaaagcaaaatctgctagcatcagggcccat

SEQ ID NO: 435122 - DNA, 120 bp, Artificial Sequence
  ENSG00000152818_63 (sequence is synthesized)
ttggaggccagcgctgagaagtggaacaggttgctgatgtccttagaagaactgatcaaatggctgaatatgaaagatgaagagcttaagaaacaaatgcctattggaggagatgttcca

SEQ ID NO: 435123 - DNA, 120 bp, Artificial Sequence
  ENSG00000152818_64 (sequence is synthesized)
gccttacagctccagtatgaccattgtaaggccctgagacgggagttaaaggagaaagaatattctgtcctgaatgctgtcgaccaggcccgagttttcttggctgatcagccaattgag

SEQ ID NO: 435124 - DNA, 120 bp, Artificial Sequence
  ENSG00000152818_65 (sequence is synthesized)
gcccctgaagagccaagaagaaacctacaatcaaaaacagaattaactcctgaggagagagcccaaaagattgccaaagccatgcgcaaacagtcttctgaagtcaaagaaaaatgggaa

SEQ ID NO: 435125 - DNA, 120 bp, Artificial Sequence
  ENSG00000152818_66 (sequence is synthesized)
agtctaaatgctgtaactagcaattggcaaaagcaagtggacaaggcattggagaaactcagagacctgcagggagctatggatgacctggacgctgacatgaaggaggcagagtccgtg

SEQ ID NO: 435126 - DNA, 120 bp, Artificial Sequence
  ENSG00000152818_67 (sequence is synthesized)
cggaatggctggaagcccgtgggagacttactcattgactcgctgcaggatcacattgaaaaaatcatggcatttagagaagaaattgcaccaatcaactttaaagttaaaacggtgaat

SEQ ID NO: 435127 - DNA, 120 bp, Artificial Sequence
  ENSG00000152818_68 (sequence is synthesized)
gatttatccagtcagctgtctccacttgacctgcatccctctctaaagatgtctcgccagctagatgaccttaatatgcgatggaaacttttacaggtttctgtggatgatcgccttaaa

SEQ ID NO: 435128 - DNA, 120 bp, Artificial Sequence
  ENSG00000152818_69 (sequence is synthesized)
cagcttcaggaagcccacagagattttggaccatcctctcagcattttctctctacgtcagtccagctgccgtggcaaagatccatttcacataataaagtgccctattacatcaaccat

SEQ ID NO: 435129 - DNA, 120 bp, Artificial Sequence
  ENSG00000152818_70 (sequence is synthesized)
caaacacagaccacctgttgggaccatcctaaaatgaccgaactctttcaatcccttgctgacctgaataatgtacgtttttctgcctaccgtacagcaatcaaaatccgaagactacaa

SEQ ID NO: 435130 - DNA, 120 bp, Artificial Sequence
  ENSG00000152818_71 (sequence is synthesized)
aaagcactatgtttggatctcttagagttgagtacaacaaatgaaattttcaaacagcacaagttgaaccaaaatgaccagctcctcagtgttccagatgtcatcaactgtctgacaaca

SEQ ID NO: 435131 - DNA, 120 bp, Artificial Sequence
  ENSG00000152818_72 (sequence is synthesized)
acttatgatggacttgagcaaatgcataaggacctggtcaacgttccactctgtgttgatatgtgtctcaattggttgctcaatgtctatgacacgggtcgaactggaaaaattagagtg

SEQ ID NO: 435132 - DNA, 120 bp, Artificial Sequence
  ENSG00000152818_73 (sequence is synthesized)
cagagtctgaagattggattaatgtctctctccaaaggtctcttggaagaaaaatacagatatctctttaaggaagttgcagggccaacagaaatgtgtgaccagaggcagctgggcctg

SEQ ID NO: 435133 - DNA, 120 bp, Artificial Sequence
  ENSG00000152818_74 (sequence is synthesized)
ttacttcatgatgccatccagatcccccggcagctaggtgaagtagcagcttttggaggcagtaatattgagcctagtgttcgcagctgcttccaacagaataacaataaaccagaaata

SEQ ID NO: 435134 - DNA, 120 bp, Artificial Sequence
  ENSG00000152818_75 (sequence is synthesized)
agtgtgaaagagtttatagattggatgcatttggaaccacagtccatggtttggctcccagttttacatcgagtggcagcagcggagactgcaaaacatcaggccaaatgcaacatctgt

SEQ ID NO: 435135 - DNA, 120 bp, Artificial Sequence
  ENSG00000152818_76 (sequence is synthesized)
aaagaatgtccaattgtcgggttcaggtatagaagccttaagcattttaactatgatgtctgccagagttgtttcttttcgggtcgaacagcaaaaggtcacaaattacattacccaatg

SEQ ID NO: 435136 - DNA, 120 bp, Artificial Sequence
  ENSG00000152818_77 (sequence is synthesized)
gtggaatattgtatacctacaacatctggggaagatgtacgagacttcacaaaggtacttaagaacaagttcaggtcgaagaagtactttgccaaacaccctcgacttggttacctgcct

SEQ ID NO: 435137 - DNA, 120 bp, Artificial Sequence
  ENSG00000152818_78 (sequence is synthesized)
gtccagacagttcttgaaggtgacaacttagagactcctatcacactcatcagtatgtggccagagcactatgacccctcacaatctcctcaactgtttcatgatgacacccattcaaga

SEQ ID NO: 435138 - DNA, 120 bp, Artificial Sequence
  ENSG00000152818_79 (sequence is synthesized)
atagaacaatatgccacacgactggcccagatggaaaggactaatgggtcttttctcactgatagcagctccaccacaggaagtgtggaagacgagcacgccctcatccagcagtattgc

SEQ ID NO: 435139 - DNA, 120 bp, Artificial Sequence
  ENSG00000152818_80 (sequence is synthesized)
caaacactcggaggagagtccccagtgagccagccgcagagcccagctcagatcctgaagtcagtagagagggaagaacgtggagaactggagaggatcattgctgacctggaggaagaa

SEQ ID NO: 435140 - DNA, 120 bp, Artificial Sequence
  ENSG00000152818_81 (sequence is synthesized)
caaagaaatctacaggtggagtatgagcagctgaaggaccagcacctccgaagggggctccctgtcggttcaccgccagagtcgattatatctccccatcacacgtctgaggattcagaa

SEQ ID NO: 435141 - DNA, 120 bp, Artificial Sequence
  ENSG00000152818_82 (sequence is synthesized)
cttatagcagaagcaaaactcctcaggcagcacaaaggtcggctggaggctaggatgcagattttagaagatcacaataaacagctggagtctcagctccaccgcctccgacagctgctg

SEQ ID NO: 435142 - DNA, 120 bp, Artificial Sequence
  ENSG00000152818_83 (sequence is synthesized)
gagcagcctgaatctgattcccgaatcaatggtgtttccccatgggcttctcctcagcattctgcactgagctactcgcttgatccagatgcctccggcccacagttccaccaggcagcg

SEQ ID NO: 435143 - DNA, 120 bp, Artificial Sequence
  ENSG00000152818_84 (sequence is synthesized)
ggagaggacctgctggccccaccgcacgacaccagcacggatctcacggaggtcatggagcagattcacagcacgtttccatcttgctgcccaaatgttcccagcaggccacaggcaatg

SEQ ID NO: 435144 - DNA, 120 bp, Artificial Sequence
  ENSG00000152818_85 (sequence is synthesized)
tgaagtattcatccggccaaccaatgtttcctgacgtacagtgttgcccttttcagcaaatgccaattccaagttccattaaatcagaagctccatggctccttggcccacgatgttgag

SEQ ID NO: 435145 - DNA, 120 bp, Artificial Sequence
  ENSG00000152818_86 (sequence is synthesized)
tgctgactgtgtgttctactgaaagagtaaaacactgactatccaaagagaaatggatattttgtttttataataaccatatattattgttttcttcttccctttctatgcaagtgtaaa

SEQ ID NO: 435146 - DNA, 120 bp, Artificial Sequence
  ENSG00000152818_87 (sequence is synthesized)
ttaatgaacagagaggtatttggaaatggtaatacatttgtcacggatttgtataatgtatacagcattgggaaagtgggtgggggctttctaatatgataccgtctttttaataactat

SEQ ID NO: 435147 - DNA, 120 bp, Artificial Sequence
  ENSG00000152818_88 (sequence is synthesized)
gacaaagcttacataagaattagaagaccactttacatttttacattccttctgctgttcatattaaccttgcacaattacttcattttttctttgactcttttaccacaatgttttggt

SEQ ID NO: 435148 - DNA, 120 bp, Artificial Sequence
  ENSG00000152818_89 (sequence is synthesized)
tatttataatttatcagccatatgtttatcagccatataaccaactagatcccaaatagatccatgtatttgtttccgtgatttggccacattaataaattcataaatttcaatcaaata

SEQ ID NO: 435149 - DNA, 120 bp, Artificial Sequence
  ENSG00000152818_90 (sequence is synthesized)
tcttatatatacacacatatggtttaagctacagccctgtgtatgccgtttaactttatttgacgttgcccacttacttctttgctgaccacttggataaccgtaataaaaatcctataa

SEQ ID NO: 435150 - DNA, 120 bp, Artificial Sequence
  ENSG00000152818_91 (sequence is synthesized)
gcctaaatggcatttcttttgggatatttttcctgcattttattccctttttatataagtaggaattaattatttattttatgtcttaatctatttgataaagaagactacattataata

SEQ ID NO: 435151 - DNA, 120 bp, Artificial Sequence
  ENSG00000152818_92 (sequence is synthesized)
atctcaaagatcatattaccaaaggttgcccacttgagcatattttcattttgacacagaaacaaaatttagtacaacctttcctagttcccatgtcttgattttcatcattacatgcac

SEQ ID NO: 435152 - DNA, 120 bp, Artificial Sequence
  ENSG00000152818_93 (sequence is synthesized)
agcagacctttacctattgtgataccagaacacatcattgtctttggttcccttcaaagagaattttattgttgttttgtattttcaagtccttaatagttcttgaaactcctagttgtt

SEQ ID NO: 435153 - DNA, 120 bp, Artificial Sequence
  ENSG00000152818_94 (sequence is synthesized)
ttcttgttgaaagcagacacacatttagtgcacggcttattttacctttcgggtgaaagatcagatgtttttatacccttcacttgatcaatatatttggaaagaatgtttatcaaaagt

SEQ ID NO: 435154 - DNA, 120 bp, Artificial Sequence
  ENSG00000152818_95 (sequence is synthesized)
ctatgtcactgcttctacagaagaatgaaattaatgcttaggtgatggtacctccacctacatctttttgagtgcattcaattatgtattttggtttagcttctgatttaacatttaatt

SEQ ID NO: 435155 - DNA, 120 bp, Artificial Sequence
  ENSG00000152818_96 (sequence is synthesized)
gattcagtttaaacatgttacttaattagcaaatgtagaggaaccaaaaaaaggtgaaaataatatgttttgattcaaacctaaagacataaaaacataaagacattttaactttgggtt

SEQ ID NO: 435156 - DNA, 120 bp, Artificial Sequence
  ENSG00000152818_97 (sequence is synthesized)
ctctttagctgggatctggccagaaggaggcttaaagttagaaattgctattattttagaataggttgggtgggttggggggcaagggtgtctatttgcagcagagatattttgaaaaga

SEQ ID NO: 435157 - DNA, 120 bp, Artificial Sequence
  ENSG00000152818_98 (sequence is synthesized)
agaaaattgttttatataaaaaggaaagccatgaccacctttctacctcagatccatcttcatccattgcattggaaactgctttatgctgctgcagtctgcaaagtctagagcttttat

SEQ ID NO: 435158 - DNA, 120 bp, Artificial Sequence
  ENSG00000152818_99 (sequence is synthesized)
caggccatgtcatacccaagaaagcacctatttaaagaaaaaacaattccctgagctctcaactccaagttgtagatttggtgtcttccttgttcttactttaaaaagtcatgtgttaat

SEQ ID NO: 435159 - DNA, 120 bp, Artificial Sequence
  ENSG00000152818_100 (sequence is synthesized)
tttttttctgcctgtatttgtatgcaaaatgtcctctatctgctattaaagaaaagctacgtaaaacactacattgtaaccttctaagtaataataaataaaaagaaatatattgcagta

SEQ ID NO: 435160 - DNA, 120 bp, Artificial Sequence
  ENSG00000152818_101 (sequence is synthesized)
acaatgggaagtaagtatgtagttcttttgaaatatgtggtaaagaactaatcacagactatcatctaatctggttacatattgtatttttcatcctgaataaaagtaattttaacacaa

SEQ ID NO: 435161 - DNA, 120 bp, Artificial Sequence
  ENSG00000152818_102 (sequence is synthesized)
aatgccagctcttattttctattttccctttcttcctccctccctttcttccttctgtttttctttcttaatgctggtcaggacctactaaattgattctataactcatcggtgggttat

SEQ ID NO: 435162 - DNA, 120 bp, Artificial Sequence
  ENSG00000152818_103 (sequence is synthesized)
caacttccttcatttctggccatgccgggctgagcaagtgctgcctgtgagcatctgctggggggctttctctgtggcgtttgtctgtgttttttaaattgagaagttgaaggaatacca

SEQ ID NO: 435163 - DNA, 120 bp, Artificial Sequence
  ENSG00000152818_104 (sequence is synthesized)
gcctcctttttcctagaacctaaccccctgtatctttcaaatgctttcctggaaacgagcatgctcagagaactgacaaatcattgtccagtgaccgggaggaaatgatcgttgctcttc

SEQ ID NO: 435164 - DNA, 120 bp, Artificial Sequence
  ENSG00000152818_105 (sequence is synthesized)
atttataatgcaaattctgaggtgtctccagaagtgtggtaaacttaaaatgatggctgtggtgagaacgtctctgcagaaagttgtggttttgttgcatcgcttacaaaggatggcagt

SEQ ID NO: 435165 - DNA, 120 bp, Artificial Sequence
  ENSG00000152818_106 (sequence is synthesized)
caccaaactaacactcgcacacacccccgcggttactccgtgtcaaactcctagaggagcccttggccagctcggggtgcggcggtggcgaccggcaggcgaggaggcccgcgggcagca

SEQ ID NO: 435166 - DNA, 120 bp, Artificial Sequence
  ENSG00000152818_107 (sequence is synthesized)
aactctaagcttggggccctggagagaacagttgtggcctgcaggtcattagtgaggtgagcagaagggaatcctggacttcccagagaaagaggagaccatgccagcctcgtggaacac

SEQ ID NO: 435167 - DNA, 120 bp, Artificial Sequence
  ENSG00000152818_108 (sequence is synthesized)
agctaccaggaaatacagaagcaggtctattccttgcgaactccgaagtccatgaaaaaacggacccacagtggggtggctaaaatgtcccagcgcaagctgccgctgctgctgatggac

SEQ ID NO: 435168 - DNA, 120 bp, Artificial Sequence
  ENSG00000152818_109 (sequence is synthesized)
gaagtttgccggaaagatgtaggcttcaagggctactggacaatgattggtctgaacttcaacttacgggaactgctgacaaaatttgaaaaggacatccaggcagaaattgatgcccac

SEQ ID NO: 435169 - DNA, 120 bp, Artificial Sequence
  ENSG00000152818_110 (sequence is synthesized)
aaaaaaaaaacccaaaataacacaggacatcccagtgtgcagttcgaaggctgcttttgttgtccacttcctccacatctttttcctcatcatctaagcagatgtaggtgatgagcggcc

SEQ ID NO: 435170 - DNA, 120 bp, Artificial Sequence
  ENSG00000152818_111 (sequence is synthesized)
tggcagccaccacgtttcattggaaaaagtgcagattggatttgccagggcatgtagctctccaggcttgcaagcgattaccagatgaacacaatgacgtacagaagaaaacctttacca

SEQ ID NO: 435171 - DNA, 120 bp, Artificial Sequence
  ENSG00000152818_112 (sequence is synthesized)
atactgtttggccctgtttttcaatttgactccatcaaagcacattctccagccgaggggtacacatccctttgtgacttcagaaatcatgcactgttggtttgggagtcttaactacat

SEQ ID NO: 435172 - DNA, 120 bp, Artificial Sequence
  ENSG00000152818_113 (sequence is synthesized)
ttggaggacacgctgagccgacgagaaatggaagtgagatctgaatccacaaacggagacggcagacagtcacaggcagatgaacacaatgacgtacagaagaaaacctttaccaaatgg

SEQ ID NO: 435173 - DNA, 120 bp, Artificial Sequence
  ENSG00000152818_114 (sequence is synthesized)
tgaaggcaaagacttctatatgatttaattatccatggtgagggcggggaagttaaaaaggaaatgtttttccttatgattatttgaatcctttctctgctttaacctctgaatgtggtt

SEQ ID NO: 435174 - DNA, 120 bp, Artificial Sequence
  ENSG00000152818_115 (sequence is synthesized)
ttttaaaaatagaattcagtcctattatctgaaagaaactgtgatatagttaatattaaaaagaaactacttttaacatgagaattatatttttcatgtatcagattagggatataggtg

SEQ ID NO: 435175 - DNA, 120 bp, Artificial Sequence
  ENSG00000152818_116 (sequence is synthesized)
tgtttagctgatatattttaaagtagagatttaaatatttggagacagacaataagctatgatggccatactgtattccagcctggacaacaaagcaagatccagtctctaaaaagtaaa

SEQ ID NO: 435176 - DNA, 120 bp, Artificial Sequence
  ENSG00000152822_0 (sequence is synthesized)
caggtactcaggtatgtctcaagtccatgtcctccaaacagactcagcatctagctcaccgctgccaacacgacttccactgtactcttgatcaatttaccttgatgcactaccggtgaa

SEQ ID NO: 435177 - DNA, 120 bp, Artificial Sequence
  ENSG00000152822_1 (sequence is synthesized)
gaacggggactcgaattcccttacaaacgcctccagcttgtagaggcggtcgtggaggacccagaggaggagacgaaggggaaggaggcggtggtggaggaggcaaaggccttggacgac

SEQ ID NO: 435178 - DNA, 120 bp, Artificial Sequence
  ENSG00000152822_2 (sequence is synthesized)
cattgttggcgaggggcaccactccgggagaggcggcgctgggcgtcttgggggtgcgcgccgggagcctgcagcgggaccagcgtgggaacgcggctggcaggctgtggacctcgtcct

SEQ ID NO: 435179 - DNA, 120 bp, Artificial Sequence
  ENSG00000152822_3 (sequence is synthesized)
caccaccatggtcgggctccttttgttttttttcccagcgatctttttggaggtgtcccttctccccagaagccccggcaggaaagtgttgctggcaggagcgtcgtctcagcgctcggt

SEQ ID NO: 435180 - DNA, 120 bp, Artificial Sequence
  ENSG00000152822_4 (sequence is synthesized)
ggccagaatggacggagatgtcatcattggagccctcttctcagtccatcaccagcctccggccgagaaagtgcccgagaggaagtgtggggagatcagggagcagtatggcatccagag

SEQ ID NO: 435181 - DNA, 120 bp, Artificial Sequence
  ENSG00000152822_5 (sequence is synthesized)
ggtggaggccatgttccacacgttggataagatcaacgcggacccggtcctcctgcccaacatcaccctgggcagtgagatccgggactcctgctggcactcttccgtggctctggaaca

SEQ ID NO: 435182 - DNA, 120 bp, Artificial Sequence
  ENSG00000152822_6 (sequence is synthesized)
gagcattgagttcattagggactctctgatttccattcgagatgagaaggatgggatcaaccggtgtctgcctgacggccagtccctccccccaggcaggactaagaagcccattgcggg

SEQ ID NO: 435183 - DNA, 120 bp, Artificial Sequence
  ENSG00000152822_7 (sequence is synthesized)
agtgatcggtcccggctccagctctgtagccattcaagtgcagaacctgctccagctcttcgacatcccccagatcgcttattcagccacaagcatcgacctgagtgacaaaactttgta

SEQ ID NO: 435184 - DNA, 120 bp, Artificial Sequence
  ENSG00000152822_8 (sequence is synthesized)
caaatacttcctgagggttgtcccttctgacactttgcaggcaagggccatgcttgacatagtcaaacgttacaattggacctatgtctctgcagtccacacggaagggaattatgggga

SEQ ID NO: 435185 - DNA, 120 bp, Artificial Sequence
  ENSG00000152822_9 (sequence is synthesized)
gagcggaatggacgctttcaaagagctggctgcccaggaaggcctctgtatcgcccattctgacaaaatctacagcaacgctggggagaagagctttgaccgactcttgcgcaaactccg

SEQ ID NO: 435186 - DNA, 120 bp, Artificial Sequence
  ENSG00000152822_10 (sequence is synthesized)
agagaggcttcccaaggctagagtggtggtctgcttctgtgaaggcatgacagtgcgaggactcctgagcgccatgcggcgccttggcgtcgtgggcgagttctcactcattggaagtga

SEQ ID NO: 435187 - DNA, 120 bp, Artificial Sequence
  ENSG00000152822_11 (sequence is synthesized)
tggatgggcagacagagatgaagtcattgaaggttatgaggtggaagccaacgggggaatcacgataaagctgcagtctccagaggtcaggtcatttgatgattatttcctgaaactgag

SEQ ID NO: 435188 - DNA, 120 bp, Artificial Sequence
  ENSG00000152822_12 (sequence is synthesized)
gctggacactaacacgaggaatccctggttccctgagttctggcaacatcggttccagtgccgccttccaggacaccttctggaaaatcccaactttaaacgaatctgcacaggcaatga

SEQ ID NO: 435189 - DNA, 120 bp, Artificial Sequence
  ENSG00000152822_13 (sequence is synthesized)
aagcttagaagaaaactatgtccaggacagtaagatggggtttgtcatcaatgccatctatgccatggcacatgggctgcagaacatgcaccatgccctctgccctggccacgtgggcct

SEQ ID NO: 435190 - DNA, 120 bp, Artificial Sequence
  ENSG00000152822_14 (sequence is synthesized)
ctgcgatgccatgaagcccatcgacggcagcaagctgctggacttcctcatcaagtcctcattcattggagtatctggagaggaggtgtggtttgatgagaaaggagacgctcctggaag

SEQ ID NO: 435191 - DNA, 120 bp, Artificial Sequence
  ENSG00000152822_15 (sequence is synthesized)
gtatgatatcatgaatctgcagtacactgaagctaatcgctatgactatgtgcacgttggaacctggcatgaaggagtgctgaacattgatgattacaaaatccagatgaacaagagtgg

SEQ ID NO: 435192 - DNA, 120 bp, Artificial Sequence
  ENSG00000152822_16 (sequence is synthesized)
agtggtgcggtctgtgtgcagtgagccttgcttaaagggccagattaaggttatacggaaaggagaagtgagctgctgctggatttgcacggcctgcaaagagaatgaatatgtgcaaga

SEQ ID NO: 435193 - DNA, 120 bp, Artificial Sequence
  ENSG00000152822_17 (sequence is synthesized)
tgagttcacctgcaaagcttgtgacttgggatggtggcccaatgcagatctaacaggctgtgagcccattcctgtgcgctatcttgagtggagcaacatcgaatccattatagccatcgc

SEQ ID NO: 435194 - DNA, 120 bp, Artificial Sequence
  ENSG00000152822_18 (sequence is synthesized)
cttttcatgcctgggaatccttgttaccttgtttgtcaccctaatctttgtactgtaccgggacacaccagtggtcaaatcctccagtcgggagctctgctacatcatcctagctggcat

SEQ ID NO: 435195 - DNA, 120 bp, Artificial Sequence
  ENSG00000152822_19 (sequence is synthesized)
cttccttggttatgtgtgcccattcactctcattgccaaacctactaccacctcctgctacctccagcgcctcttggttggcctctcctctgcgatgtgctactctgctttagtgactaa

SEQ ID NO: 435196 - DNA, 120 bp, Artificial Sequence
  ENSG00000152822_20 (sequence is synthesized)
aaccaatcgtattgcacgcatcctggctggcagcaagaagaagatctgcacccggaagcccaggttcatgagtgcctgggctcaggtgatcattgcctcaattctgattagtgtgcaact

SEQ ID NO: 435197 - DNA, 120 bp, Artificial Sequence
  ENSG00000152822_21 (sequence is synthesized)
aaccctggtggtaaccctgatcatcatggaaccccctatgcccattctgtcctacccaagtatcaaggaagtctaccttatctgcaataccagcaacctgggtgtggtggcccctttggg

SEQ ID NO: 435198 - DNA, 120 bp, Artificial Sequence
  ENSG00000152822_22 (sequence is synthesized)
ctacaatggactcctcatcatgagctgtacctactatgccttcaagacccgcaacgtgcccgccaacttcaacgaggccaaatatatcgcgttcaccatgtacaccacctgtatcatctg

SEQ ID NO: 435199 - DNA, 120 bp, Artificial Sequence
  ENSG00000152822_23 (sequence is synthesized)
gctagcttttgtgcccatttactttgggagcaactacaagatcatcacaacttgctttgcagtgagtctcagtgtaacagtggctctggggtgcatgttcactcccaagatgtacatcat

SEQ ID NO: 435200 - DNA, 120 bp, Artificial Sequence
  ENSG00000152822_24 (sequence is synthesized)
tattgccaagcctgagaggaatgtccgcagtgccttcaccacctctgatgttgtccgcatgcatgttggcgatggcaagctgccctgccgctccaacactttcctcaacatcttccgaag

SEQ ID NO: 435201 - DNA, 120 bp, Artificial Sequence
  ENSG00000152822_25 (sequence is synthesized)
aaagaaggcaggggcagggaatgccaagaagaggcagccagaattctcgcccaccagccaatgtccgtcggcacatgtgcagctttgaaaacccccacactgcagtgaatgtttctaatg

SEQ ID NO: 435202 - DNA, 120 bp, Artificial Sequence
  ENSG00000152822_26 (sequence is synthesized)
gcaagtctgtgtcatggtctgaaccaggtggaggacaggtgcccaagggacagcatatgtggcaccgcctctctgtgcacgtgaagaccaatgagacggcctgcaaccaaacagccgtca

SEQ ID NO: 435203 - DNA, 120 bp, Artificial Sequence
  ENSG00000152822_27 (sequence is synthesized)
tcaagcccctcactaaaagttaccaaggctctggcaagagcctgaccttttcagataccagcaccaagaccctttacaacgtagaggaggaggaggatgcccagccgattcgctttagcc

SEQ ID NO: 435204 - DNA, 120 bp, Artificial Sequence
  ENSG00000152822_28 (sequence is synthesized)
ctccccaagggcttgccccctcctctccagcagcagcagcaaccccctccacagcagaaatcgctgatggaccagctccagggagtggtcagcaacttcagtaccgcgatcccggatttt

SEQ ID NO: 435205 - DNA, 120 bp, Artificial Sequence
  ENSG00000152822_29 (sequence is synthesized)
cacgcggtgctggcaggccccggtggtcccgggaacgggctgcggtccctgtacccgcccccgccacctccgcagcacctgcagatgctgccgctgcagctgagcacctttggggaggag

SEQ ID NO: 435206 - DNA, 120 bp, Artificial Sequence
  ENSG00000152822_30 (sequence is synthesized)
ctggtctccccgcccgcggacgacgacgacgacagcgagaggtttaagctcctccaggagtacgtgtatgagcacgagcgggaagggaacacggaagaagacgaactggaagaggaggag

SEQ ID NO: 435207 - DNA, 120 bp, Artificial Sequence
  ENSG00000152822_31 (sequence is synthesized)
gaggacctgcaggcggccagcaaactgaccccggatgattcgcctgcgctgacgcctccgtcgcctttccgcgactcggtggcctcgggcagctcggtgcccagctcccccgtgtccgag

SEQ ID NO: 435208 - DNA, 120 bp, Artificial Sequence
  ENSG00000152822_32 (sequence is synthesized)
tcggtgctctgcacccctcccaacgtatcctacgcctctgtcattctgcgggactacaagcaaagctcttccaccctgtaagggggaagggtccacatagaaaagcaagacaagccagag

SEQ ID NO: 435209 - DNA, 120 bp, Artificial Sequence
  ENSG00000152822_33 (sequence is synthesized)
atctcccacacctccagagatgtgcaaacagctgggaggaaaagcctgggagtggggggcctcgtcgggaggacaggagaccgctgctgctgctgccgctactgctgctgctgccttaag

SEQ ID NO: 435210 - DNA, 120 bp, Artificial Sequence
  ENSG00000152822_34 (sequence is synthesized)
taggaagagagggaaggacaccaagcaaaaaatgttccaggccaggattcggattcttgaattactcgaagccttctctgggaagaaagggaattctgacaaagcacaattccatatggt

SEQ ID NO: 435211 - DNA, 120 bp, Artificial Sequence
  ENSG00000152822_35 (sequence is synthesized)
atgtaacttttatcacaaatcaaatagtgacatcacaaacataatgtcctcttttgcacaattgtgcatagatatatatatgcccacacacactgggccatgcttgccaaggaacagccc

SEQ ID NO: 435212 - DNA, 120 bp, Artificial Sequence
  ENSG00000152822_36 (sequence is synthesized)
acgtggacatgccagtcggatcatgagttcacctgatggcattcggagtgagctggtggagccagacagagcaggtgcggggaagggaagggcccaggccagacccatcccaaacggatg

SEQ ID NO: 435213 - DNA, 120 bp, Artificial Sequence
  ENSG00000152822_37 (sequence is synthesized)
atgggatgatgggacagcagctccttgctcagaagcccttctccccgctgggctgacagactcctcatcttcaggagactcaggaatggagcggcacaggggtctctcttcatccactgc

SEQ ID NO: 435214 - DNA, 120 bp, Artificial Sequence
  ENSG00000152822_38 (sequence is synthesized)
aacccatccagtgccagctttgagattgcacttgaagaaaggtgcatggaccccctgctgctctgcagattccctttatttaggaaaacaggaataagagcaaaattatcaccaaaaagt

SEQ ID NO: 435215 - DNA, 120 bp, Artificial Sequence
  ENSG00000152822_39 (sequence is synthesized)
gcttcatcaggcgtgctacaggaggaaggagctagaaatagaacaatccatcagcatgagactttgaaaaaaaaacacatgatcagcttctcatgttccatattcacttattggcgattt

SEQ ID NO: 435216 - DNA, 120 bp, Artificial Sequence
  ENSG00000152822_40 (sequence is synthesized)
ggggaaaaggccggaacaagagattgttacgagagtggcagaaacccttttgtagattgacttgtgtttgtgccaagcgggctttccattgaccttcagttaaagaacaaaccatgtgac

SEQ ID NO: 435217 - DNA, 120 bp, Artificial Sequence
  ENSG00000152822_41 (sequence is synthesized)
aaaattgttaccttccacttactgtagcaaataatacctacaagttgaacttctaagatgcgtatatgtacaatttggtgccattatttctcctacgtattagagaaacaaatccatctt

SEQ ID NO: 435218 - DNA, 120 bp, Artificial Sequence
  ENSG00000152822_42 (sequence is synthesized)
tgaatctaatggtgtactcatagcaactattactggtttaaatgacaaataattctatcctattgtcactgaagtccttgtaactagcgagtgaatgtgttcctgtgtccttgtatatgt

SEQ ID NO: 435219 - DNA, 120 bp, Artificial Sequence
  ENSG00000152822_43 (sequence is synthesized)
gcgatcgtaaaatttgtgcaatgtaatgtcaaattgactggtcaatgtcaacctagtagtcaatctaactgcaattagaaattgtcttttgaatatactatatatattttttatgttcca

SEQ ID NO: 435220 - DNA, 120 bp, Artificial Sequence
  ENSG00000152822_44 (sequence is synthesized)
ataatgttttgtacatcattgtcatcaatatctacagaagctctttgacggtttgaatactatggctcaaggttttcatatgcagctcggatggacatttttcttctaagatggaactta

SEQ ID NO: 435221 - DNA, 120 bp, Artificial Sequence
  ENSG00000152822_45 (sequence is synthesized)
tttttcagatattttctgatgtggagatatgttattaatgaagtggtttgaaaatttgttatattaaaagtgcacaaaaactgagagtgaaaataaaaggtacattttataagcttgcac

SEQ ID NO: 435222 - DNA, 120 bp, Artificial Sequence
  ENSG00000152822_46 (sequence is synthesized)
acattattaacacataagattgaacaaagcatttagattattccaggttatatcatttttttaaagattttccacagctacttgagtgtctaacatacagtaacatctaactcagctaat

SEQ ID NO: 435223 - DNA, 120 bp, Artificial Sequence
  ENSG00000152822_47 (sequence is synthesized)
aatttgtaaaatctttatcaatcacattttgccttcttttaatttttatgttcatggacttttattcctgtgtcttggctgtcataactttttatttctgctatttgctgttgtgtaata

SEQ ID NO: 435224 - DNA, 120 bp, Artificial Sequence
  ENSG00000152822_48 (sequence is synthesized)
tccatggacatgtaatccacttactccatctttacaatccctttttaccaccaataaaaggatttttcttgctgttttgatttcttctattatttgtggaatgaattataccccccttaa

SEQ ID NO: 435225 - DNA, 120 bp, Artificial Sequence
  ENSG00000152822_49 (sequence is synthesized)
atatctttgtttatgccttatgttcagtcatattttaatatgcttccttcatattgaagctgctgatttctcagccaaaaatcatcttagaatctttaaatatccattgcatcatttgtt

SEQ ID NO: 435226 - DNA, 120 bp, Artificial Sequence
  ENSG00000152822_50 (sequence is synthesized)
cagaatttaacatccattccaatgttggaggcttgtattacttatatttcatcatattctattgccaagtttagtcagttccacaccaagaatgaactgcatttcctttaaaaattattt

SEQ ID NO: 435227 - DNA, 120 bp, Artificial Sequence
  ENSG00000152822_51 (sequence is synthesized)
taaaacacctttattgaaaagatctcatgactgagatgtggactttggttccatgttttcattgtaagaaagcagagagcggaaaatcaatggctccagtgattaatagatgggttttta

SEQ ID NO: 435228 - DNA, 120 bp, Artificial Sequence
  ENSG00000152822_52 (sequence is synthesized)
gtaattgacaaattcatgagggaaagcatatgatctctttattagtgaatcatgcttattttttactcttaatgccactaatatacatccctaatatcacagggcttgtgcattcagatt

SEQ ID NO: 435229 - DNA, 120 bp, Artificial Sequence
  ENSG00000152822_53 (sequence is synthesized)
tttaaaaaattaggatagataaggaaacaacttatattcaagtgtaagatgatatcaggttggtctaagacttttggtgaacacgttcattcaactgtgatcactttattactctgaatg

SEQ ID NO: 435230 - DNA, 120 bp, Artificial Sequence
  ENSG00000152822_54 (sequence is synthesized)
cctactattatcctgattatggggtctcctgaataaatagagtattagtccttatgtcatcattgttcaaaattggagatgtacacatacataccctataccaagagggccgaaactctt

SEQ ID NO: 435231 - DNA, 120 bp, Artificial Sequence
  ENSG00000152822_55 (sequence is synthesized)
caccttgatgtatgttctgatacaagttgttcagcttcttgtaaatgtgttttccttcggcttgttactgccttttgtcaaataatcttgacaatgctgtataataaatattttctattt

SEQ ID NO: 435232 - DNA, 120 bp, Artificial Sequence
  ENSG00000152822_56 (sequence is synthesized)
agtgctgaagaaagagggcactagtgtacagcccagatcgcatccttgcaccgtctggattagagctgaggcgtctgcaagccgagcgtggccacggtcctctggccccgggaccatagc

SEQ ID NO: 435233 - DNA, 120 bp, Artificial Sequence
  ENSG00000152822_57 (sequence is synthesized)
gattagagctgaggcgtctgcaagccgagcgtggccacggtcctctggccccgggaccatagcgctgtctaccccgactcaggtactcagcatctagctcaccgctgccaacacgacttc

SEQ ID NO: 435234 - DNA, 120 bp, Artificial Sequence
  ENSG00000152822_58 (sequence is synthesized)
catgcacacacacactttgaaacacatatgcttgctttcacaaaactagacttgctaactccaaagtgggagagatgtgcagtgctgagctgaacattagttctggatctcactgttaat

SEQ ID NO: 435235 - DNA, 120 bp, Artificial Sequence
  ENSG00000152822_59 (sequence is synthesized)
aacattagttctggatctcactgttaatgtgaatattggcatcttcctgctaaacaacagcagaacaaggctcaggagggaggattggttaagcccaggagtttgaggttacagtgagct

SEQ ID NO: 435236 - DNA, 120 bp, Artificial Sequence
  ENSG00000152822_60 (sequence is synthesized)
aagctgttcctgcagccgatatcaggatgtgccgaaatgaaacggacaaggcaactgttaacattatagaccccagagttttaacacaggtcctctgatgacaaggttgtgatttttctc

SEQ ID NO: 435237 - DNA, 120 bp, Artificial Sequence
  ENSG00000152894_0 (sequence is synthesized)
agaagcgcccggagcccgcggggcgacgtcacccccggctccgcccccgtccctccccgagcaaagtaactcttgactaacaggagcagcctccgccgagcatggagagctgccgccgcg

SEQ ID NO: 435238 - DNA, 120 bp, Artificial Sequence
  ENSG00000152894_1 (sequence is synthesized)
gccggccggcgacgctggcgacgctttcgcccctgaggtagtttggcgaccgcgaagaaggaaaaagggcgggcgggcggctgtcctctcaccgtcctcaccccgcgaggcccggcccgc

SEQ ID NO: 435239 - DNA, 120 bp, Artificial Sequence
  ENSG00000152894_2 (sequence is synthesized)
tcctccgtcgtggatttcgcggcgatccccccggcagctctttgcaaagctgcttgaaacttctcccaaactcggcatggatacgactgcggcggcggcgctgcctgcttttgtggcgct

SEQ ID NO: 435240 - DNA, 120 bp, Artificial Sequence
  ENSG00000152894_3 (sequence is synthesized)
cttgctcctctctccttggcctctcctgggatcggcccaaggccagttctccgcaggtggctgtacttttgatgatggtccaggggcctgtgattaccaccaggatctgtatgatgactt

SEQ ID NO: 435241 - DNA, 120 bp, Artificial Sequence
  ENSG00000152894_4 (sequence is synthesized)
tgaatgggtgcatgttagtgctcaagagcctcattatctaccacccgagatgccccaaggttcctatatgatagtggactcttcagatcacgaccctggagaaaaagccagacttcagct

SEQ ID NO: 435242 - DNA, 120 bp, Artificial Sequence
  ENSG00000152894_5 (sequence is synthesized)
gcctacaatgaaggagaacgacactcactgcattgatttcagttacctattatatagccagaaaggactgaatcctggcactttgaacatattagttagggtgaataaaggacctcttgc

SEQ ID NO: 435243 - DNA, 120 bp, Artificial Sequence
  ENSG00000152894_6 (sequence is synthesized)
caatccaatttggaatgtgactggattcacgggtagagattggcttcgggctgagctagcagtgagcaccttttggcccaatgaatatcaggtaatatttgaagctgaagtctcaggagg

SEQ ID NO: 435244 - DNA, 120 bp, Artificial Sequence
  ENSG00000152894_7 (sequence is synthesized)
gagaagtggttatattgccattgatgacatccaagtactgagttatccttgtgataaatctcctcatttcctccgtctaggggatgtagaggtgaatgcagggcaaaacgctacatttca

SEQ ID NO: 435245 - DNA, 120 bp, Artificial Sequence
  ENSG00000152894_8 (sequence is synthesized)
gtgcattgccacagggagagatgctgtgcataacaagttatggctccagagacgaaatggagaagatataccagtagcccagactaagaacatcaatcatagaaggtttgccgcttcctt

SEQ ID NO: 435246 - DNA, 120 bp, Artificial Sequence
  ENSG00000152894_9 (sequence is synthesized)
cagattgcaagaagtgacaaaaactgaccaggatttgtatcgctgtgtaactcagtcagaacgaggttccggtgtgtccaattttgctcaacttattgtgagagaaccgccaagacccat

SEQ ID NO: 435247 - DNA, 120 bp, Artificial Sequence
  ENSG00000152894_10 (sequence is synthesized)
tgctcctcctcagcttcttggtgttgggcctacatatttgctgatccaactaaatgccaactcgatcattggcgatggtcctatcatcctgaaagaagtagagtaccgaatgacatcagg

SEQ ID NO: 435248 - DNA, 120 bp, Artificial Sequence
  ENSG00000152894_11 (sequence is synthesized)
atcctggacagaaacccatgcagtcaatgctccaacttacaaattatggcatttagatccagataccgaatatgagatccgagttctacttacaagacctggtgaaggtggaacggggct

SEQ ID NO: 435249 - DNA, 120 bp, Artificial Sequence
  ENSG00000152894_12 (sequence is synthesized)
cccaggacctccactaatcaccagaacaaaatgtgcagaacctatgagaaccccaaagacattaaagattgctgaaatacaggcaagacggattgctgtggactgggaatccttgggtta

SEQ ID NO: 435250 - DNA, 120 bp, Artificial Sequence
  ENSG00000152894_13 (sequence is synthesized)
caacattacgcgttgccacacttttaatgtcactatctgctaccattacttccgtggtcacaacgagagcaaggcagactgtttggacatggaccccaaagcccctcagcatgttgtgaa

SEQ ID NO: 435251 - DNA, 120 bp, Artificial Sequence
  ENSG00000152894_14 (sequence is synthesized)
ccatctgccaccttatacaaatgtcagcctcaagatgatcctaaccaatccagagggaaggaaggagagtgaagagacaattattcaaactgatgaagatgtgcctggtcccgtaccagt

SEQ ID NO: 435252 - DNA, 120 bp, Artificial Sequence
  ENSG00000152894_15 (sequence is synthesized)
aaaatctcttcaaggaacatcctttgaaaataagatcttcttgaactggaaagaacctttggatccaaatggaatcatcactcaatatgagatcagctatagcagtataagatcatttga

SEQ ID NO: 435253 - DNA, 120 bp, Artificial Sequence
  ENSG00000152894_16 (sequence is synthesized)
tcctgcagttccagtggctggacctccccagactgtatcaaatttatggaacagtacacaccatgtctttatgcatctccaccctggaaccacgtaccagtttttcataagagccagcac

SEQ ID NO: 435254 - DNA, 120 bp, Artificial Sequence
  ENSG00000152894_17 (sequence is synthesized)
ggtcaaaggctttggtccagccacagccatcaatgtcaccaccaatatctcagctccaactttacctgactatgaaggagttgatgcctctctcaatgaaactgccaccacaataactgt

SEQ ID NO: 435255 - DNA, 120 bp, Artificial Sequence
  ENSG00000152894_18 (sequence is synthesized)
attgttgagaccagcacaagccaaaggtgctcctatcagtgcttatcagattgttgtggaagaactgcacccacaccgaaccaagagagaagccggagccatggaatgctaccaggttcc

SEQ ID NO: 435256 - DNA, 120 bp, Artificial Sequence
  ENSG00000152894_19 (sequence is synthesized)
tgtcacataccaaaatgccatgagtgggggtgcaccgtattactttgctgcagaactccccccgggaaacctacctgagcctgccccgttcactgtgggtgacaatcggacctaccaagg

SEQ ID NO: 435257 - DNA, 120 bp, Artificial Sequence
  ENSG00000152894_20 (sequence is synthesized)
cttttggaaccctcctttggctccgcgcaaaggatacaacatctatttccaggcgatgagcagtgtggagaaggaaactaaaacccagtgcgtacgcattgctacaaaagcagcagcaac

SEQ ID NO: 435258 - DNA, 120 bp, Artificial Sequence
  ENSG00000152894_21 (sequence is synthesized)
agaagaaccagaagtgatcccagatcccgccaagcagacagacagagtggtgaaaatagcaggaattagtgctggaattttggtgttcatcctccttctcctagttgtcatattaattgt

SEQ ID NO: 435259 - DNA, 120 bp, Artificial Sequence
  ENSG00000152894_22 (sequence is synthesized)
aaaaaagagcaaacttgctaaaaaacgcaaagatgccatggggaatacccggcaggagatgactcacatggtgaatgcaatggatcgaagttatgctgatcagagcactctgcatgcaga

SEQ ID NO: 435260 - DNA, 120 bp, Artificial Sequence
  ENSG00000152894_23 (sequence is synthesized)
agatcctctttccatcaccttcatggaccaacataactttagtccaagatatgagaaccacagtgctacagcagagtccagtcgccttctagacgtacctcgctacctctgtgaggggac

SEQ ID NO: 435261 - DNA, 120 bp, Artificial Sequence
  ENSG00000152894_24 (sequence is synthesized)
ggaatccccttaccagacaggacagctgcatccagccatcagggtagctgatttactgcagcacattaatctcatgaagacatcagacagctatgggttcaaagaggaatatgagagctt

SEQ ID NO: 435262 - DNA, 120 bp, Artificial Sequence
  ENSG00000152894_25 (sequence is synthesized)
tcactccagagtgattttgcaacccgtagaggatgatccttcctcagattatattaatgccaactatattgatggctaccagagaccaagtcattacattgcaacccaaggtcccgttca

SEQ ID NO: 435263 - DNA, 120 bp, Artificial Sequence
  ENSG00000152894_26 (sequence is synthesized)
tgaaacagtgtatgatttctggaggatgatttggcaagaacaatctgcttgcattgtgatggttacaaatttagttgaggttggccgggttaaatgctataaatattggcctgatgatac

SEQ ID NO: 435264 - DNA, 120 bp, Artificial Sequence
  ENSG00000152894_27 (sequence is synthesized)
tgaagtttatggtgacttcaaagtaacgtgtgtagaaatggaaccacttgctgaatatgtagttaggacattcaccctggaaaggagggggtacaatgaaatccgtgaagttaaacagtt

SEQ ID NO: 435265 - DNA, 120 bp, Artificial Sequence
  ENSG00000152894_28 (sequence is synthesized)
ccatttcacgggctggcctgaccatggagtgccctaccatgctacagggctgctttcctttatccggcgagtcaagttatcaaaccctcccagtgctggccccatcgttgtacattgcag

SEQ ID NO: 435266 - DNA, 120 bp, Artificial Sequence
  ENSG00000152894_29 (sequence is synthesized)
tgctggtgctggacgaactggctgctacattgtgattgacatcatgctagacatggctgaaagagagggtgttgttgatatttacaattgtgtcaaagccttaagatctcggcgtattaa

SEQ ID NO: 435267 - DNA, 120 bp, Artificial Sequence
  ENSG00000152894_30 (sequence is synthesized)
tatggtccagacagaggaacagtacatttttattcatgatgccattttagaagcctgcttatgtggagaaactgccatacctgtctgtgaatttaaagctgcatattttgatatgattag

SEQ ID NO: 435268 - DNA, 120 bp, Artificial Sequence
  ENSG00000152894_31 (sequence is synthesized)
aatagactcccagactaactcttcacatctcaaggatgaatttcagactctgaattcagtcacccctcgactacaagctgaagactgcagtatagcgtgcctgccaaggaaccatgacaa

SEQ ID NO: 435269 - DNA, 120 bp, Artificial Sequence
  ENSG00000152894_32 (sequence is synthesized)
gaaccgtttcatggacatgctgccacctgacagatgtctgccttttttaattacaattgatggggagagcagtaactacatcaatgctgctcttatggacagctacaggcaaccagctgc

SEQ ID NO: 435270 - DNA, 120 bp, Artificial Sequence
  ENSG00000152894_33 (sequence is synthesized)
tttcatcgtcacacaataccctctgccaaacactgtaaaagacttctggagattagtgtatgattatggctgtacctccattgtgatgttaaacgaagtcgacttgtcccagggctgccc

SEQ ID NO: 435271 - DNA, 120 bp, Artificial Sequence
  ENSG00000152894_34 (sequence is synthesized)
tcagtactggccagaggaagggatgctacgatatggccccatccaagtggaatgtatgtcttgttcaatggactgtgatgtgatcaaccggatttttaggatatgcaatctaacaagacc

SEQ ID NO: 435272 - DNA, 120 bp, Artificial Sequence
  ENSG00000152894_35 (sequence is synthesized)
acaggaaggttatctgatggtgcaacagtttcagtacctaggatgggcttctcatcgagaagtgcctggatccaaaaggtcattcttgaaactgatacttcaggtggaaaagtggcagga

SEQ ID NO: 435273 - DNA, 120 bp, Artificial Sequence
  ENSG00000152894_36 (sequence is synthesized)
ggaatgcgaggaaggggaaggccggacgattatccactgcctaaatggtggcgggcgaagtggcatgttctgtgctataggcatcgttgttgaaatggtgaaacggcaaaatgttgtcga

SEQ ID NO: 435274 - DNA, 120 bp, Artificial Sequence
  ENSG00000152894_37 (sequence is synthesized)
tgttttccatgcagtaaagacactgaggaacagcaagccaaacatggtggaagccccggagcaataccgtttctgctatgatgtagctttggagtacctggaatcatcttagttgggtga

SEQ ID NO: 435275 - DNA, 120 bp, Artificial Sequence
  ENSG00000152894_38 (sequence is synthesized)
gactctttaaagtgcatccatgaagaaacctgtccatctattgagccagcagctgttgtacctgttacacttgtgcagaaagattttaatgtggggggtgggagacttttacatttgaga

SEQ ID NO: 435276 - DNA, 120 bp, Artificial Sequence
  ENSG00000152894_39 (sequence is synthesized)
ggtaaaagtattttttttatgaagttgtgtatcttaataaaaaggactgaattagtttttattactatattaaagcatcaacatttcatgccacataaattatatttaataagaaccaga

SEQ ID NO: 435277 - DNA, 120 bp, Artificial Sequence
  ENSG00000152894_40 (sequence is synthesized)
ttgaaatgagaacgtattggtgtttgtacagtgaacatgccaccttttttctcatggtttcagtagagcagctaccacatgttgcatgagttcatactttctacgtggcatttttctccc

SEQ ID NO: 435278 - DNA, 120 bp, Artificial Sequence
  ENSG00000152894_41 (sequence is synthesized)
tttctaaaatgaaagctgatgaatcttaaaaggaagaagaaaagaaaagctgtgcaaattcatagtaaagttcgttttttatatgtttccagtgtagcagatctctatataaatatataa

SEQ ID NO: 435279 - DNA, 120 bp, Artificial Sequence
  ENSG00000152894_42 (sequence is synthesized)
atatatataactggcttattttcttttaatgtgcaatgatggctggatcatttaaagttctttttagaaaataacataagccaaagactcaagtgtaaatatgtctatatggagaaagca

SEQ ID NO: 435280 - DNA, 120 bp, Artificial Sequence
  ENSG00000152894_43 (sequence is synthesized)
cattatatttattggttacttacattccttttttgatggctaaaatactaccaccacacaatcatcttttttttcctgaagaaagctttttctttagctaaaatcaattgtaaacgattt

SEQ ID NO: 435281 - DNA, 120 bp, Artificial Sequence
  ENSG00000152894_44 (sequence is synthesized)
ttgtagattattttttgtatgttttagtgtaagtagaagataaactttttattcataaaccaggaagcaatgttctttatagtgattctcttgtgtacatgcttgtgaattaaatttgtg

SEQ ID NO: 435282 - DNA, 120 bp, Artificial Sequence
  ENSG00000152894_45 (sequence is synthesized)
taaaatcccttggcaattgggtcttttaatataggaccaaattaaaacattttgctgaatatgtatagtttttcacaatttcattaggtaaataatggtttggtgatcatacatgagaaa

SEQ ID NO: 435283 - DNA, 120 bp, Artificial Sequence
  ENSG00000152894_46 (sequence is synthesized)
tgtacacattaaaaggccttgctgacaacttgcacaatgttgaacatagcctttaagcatcatttaaattttaaaggaatggagtttttcagcctgtggcccagcactggtcaagaaaac

SEQ ID NO: 435284 - DNA, 120 bp, Artificial Sequence
  ENSG00000152894_47 (sequence is synthesized)
aagatggcaacatatatgctttcagggtcaaatttgagcaaactgtaaactgtcagggtgataaaatgtttctcttgatgtttacatgcacaagctttgcgttctgactataaaaagtgt

SEQ ID NO: 435285 - DNA, 120 bp, Artificial Sequence
  ENSG00000152894_48 (sequence is synthesized)
gaacaaatcaatgccagattcctgttttgcgcattgtcatgggattcttaagtgaacctttctaaatgtggtcttgttcacatgctccacgtagctgtaacttcacatcatcagcttgca

SEQ ID NO: 435286 - DNA, 120 bp, Artificial Sequence
  ENSG00000152894_49 (sequence is synthesized)
gtttgtaattgactaaagcattccagtgtcctctttctagattgccagctcatgacatggtgcttataaagatttaattaaagtaagaatgaaataaagtttttataattataacagtta

SEQ ID NO: 435287 - DNA, 120 bp, Artificial Sequence
  ENSG00000152894_50 (sequence is synthesized)
ttcatggaccaacataactttagtccaagattgcccaatgatccacttgtaccgactgctgtgttagttcctataacagatgagaaccacagtgctacagcagagtccagtcgccttcta

SEQ ID NO: 435288 - DNA, 120 bp, Artificial Sequence
  ENSG00000152894_51 (sequence is synthesized)
tgggataggaaccgaaggagaaggatcttactgaagtggaaggttcaccatgaggagtggaggactatacaagcctggcagtcatggaagttcaaggattgctttttatcgatatctaga

SEQ ID NO: 435289 - DNA, 120 bp, Artificial Sequence
  ENSG00000152894_52 (sequence is synthesized)
aataatttacttctctttctgtgcaagaacaatatgctctcctgtttgcagagctgccccttcagtgtgtttctagagacgaaatggagaagatataccagtagcccagactaagaacat

SEQ ID NO: 435290 - DNA, 120 bp, Artificial Sequence
  ENSG00000152894_53 (sequence is synthesized)
aagttatggctccagattttcagactgtgattgacagaaggtaactgcaactgcccaaagtgcgaccttggataaggaaggatgtctgtattcctgaggaacgttcaatgatacggaatt

SEQ ID NO: 435291 - DNA, 120 bp, Artificial Sequence
  ENSG00000152894_54 (sequence is synthesized)
tgtgattcataacttgaagctatgataaagctctacttatgggaaataagatcaaaagtgaaattataacatataatttatactgaaatgaaataataaaaagcatttggttatattctt

SEQ ID NO: 435292 - DNA, 120 bp, Artificial Sequence
  ENSG00000152894_55 (sequence is synthesized)
ttagttcctataacaggaagaaaaaatgtttatcatggggacaacaattcattttttgctatatcctatttgtagagttggtgatagaacaggcaaatgtactagcacttgaaatatgtt

SEQ ID NO: 435293 - DNA, 120 bp, Artificial Sequence
  ENSG00000152894_56 (sequence is synthesized)
tatctgttaattaaatatcattctctacagtatgcattatcattaaaaaaaaagttcccctaagagtgtattttctcttctgttaatgagtatgacggtataatgcttttcaaagtaaca

SEQ ID NO: 435294 - DNA, 120 bp, Artificial Sequence
  ENSG00000152894_57 (sequence is synthesized)
ccccttaaaacatttgtttttttttttaagtggtaagtttaaatgtgataaatatgagcatgcttctcgttgtaatgtttagtacttcggtcattaaagtactgtttattcttcataggc

SEQ ID NO: 435295 - DNA, 120 bp, Artificial Sequence
  ENSG00000152894_58 (sequence is synthesized)
tcatcagttctcactatatgtgtaatacatagatgtaaatatgcatctcatggtaatgagagattgccctcttgcctcccccacccccattattggggaagtgtcatacatagatataca

SEQ ID NO: 435296 - DNA, 120 bp, Artificial Sequence
  ENSG00000152894_59 (sequence is synthesized)
tatgcatcccatggtaatgagagattgcccctctttcttccccaccctgttgatgaggaagtgtttggagacattggcacaaaaccttcaaactagagaaagtatttctatgtgttaaaa

SEQ ID NO: 435297 - DNA, 120 bp, Artificial Sequence
  ENSG00000152894_60 (sequence is synthesized)
taagtttaggtccaaaatttgttggtggtttgacaaagagctacttattgacagattctttcctacagctttgttcaggaagaaatagcctttttgagtttattgtaatcttcagactgg

SEQ ID NO: 435298 - DNA, 120 bp, Artificial Sequence
  ENSG00000152894_61 (sequence is synthesized)
actgatttactgactttttgaaagtaacatttgggaaataaatgtgatgtagagtttcatgaactatgttaagggggaggcattttcattaattattttaattttgattaattaattgaa

SEQ ID NO: 435299 - DNA, 120 bp, Artificial Sequence
  ENSG00000152894_62 (sequence is synthesized)
taaattaaatgacatataaaaataagccaaaaaggataagttattcacaaagctttggatgtttgtttcagaaatgattcattgaattatgattaaatcagacaatcaatagtgtcagta

SEQ ID NO: 435300 - DNA, 120 bp, Artificial Sequence
  ENSG00000152894_63 (sequence is synthesized)
tttagtccaagatgtaagtttttcattaaaattttaataaatgatgttacaactcatttcactttgaattctacacgataccttttgagtaatgagagagagtaggaaagtgaggggaga

SEQ ID NO: 435301 - DNA, 120 bp, Artificial Sequence
  ENSG00000152894_64 (sequence is synthesized)
agttcgtaaattgagaactgctgctttagttcatgttctaactcaagaattccttattttaaatctcttcctgagagataaatctcctcatttcctccgtctaggggatgtagaggtgaa

SEQ ID NO: 435302 - DNA, 120 bp, Artificial Sequence
  ENSG00000152894_65 (sequence is synthesized)
atcggcccaaggccagttctccgcagcttcgcttggctggcgagcgcatctgctgctggggttcgcggtgcagatggagacgcagtggtggccagagggtgatggagaagacgggaaaag

SEQ ID NO: 435303 - DNA, 120 bp, Artificial Sequence
  ENSG00000152894_66 (sequence is synthesized)
cgacagccacgctcctggctgaagccgcaggacgcaaataacttactttgtacctgacagtttctcacgttgttgtggaggccctgtttcctggaaataaactcaaattgttgttttctg

SEQ ID NO: 435304 - DNA, 120 bp, Artificial Sequence
  ENSG00000152894_67 (sequence is synthesized)
gttttcagtgtctgtgcttgtggtcggtaacttttgctgctgttgttctgctgctgtctgccattccattcgccatctatcacgcacacagaaccctggccaggatcatgaagggcgatt

SEQ ID NO: 435305 - DNA, 120 bp, Artificial Sequence
  ENSG00000152894_68 (sequence is synthesized)
taccacatttgttaaagtaacatcaacttattgcctgactacattttaaactaacatgcaagtatggtcagctttggtgtgaaatttttcaatatgaaaataaaaagttttctgacaggg

SEQ ID NO: 435306 - DNA, 120 bp, Artificial Sequence
  ENSG00000152894_69 (sequence is synthesized)
cactttatgattctgtgactgagtttatatgctcttaacaaaaaaaaggttcatttactagtttggagagtttgttcagtaaccctcactatgaggttccgtccctggatgctgttattt

SEQ ID NO: 435307 - DNA, 120 bp, Artificial Sequence
  ENSG00000152894_70 (sequence is synthesized)
ctttaaaaggtcaattttgtgttagaccttgagatttaaacttttaaaggacttgtttatttgtagcttattataaagcctaaagagaatacatttatgtaaaagtatattttatgatgg

SEQ ID NO: 435308 - DNA, 120 bp, Artificial Sequence
  ENSG00000152894_71 (sequence is synthesized)
tcagcaagcaatatataaactaatagttttatttctgccttttaaaaatgaattatgtctttaagttaggtttgtctttattcttgaaggggaaaaaagaaatgctttgctttaattgct

SEQ ID NO: 435309 - DNA, 120 bp, Artificial Sequence
  ENSG00000152904_0 (sequence is synthesized)
agtgtgaccgggatggcgcattttcttgcaccaactaatgcggtgtcgctggcggctgaggagggcggagagttctgtggtgaaatagtgggaaggattcatgtaggcatcgggaagagc

SEQ ID NO: 435310 - DNA, 120 bp, Artificial Sequence
  ENSG00000152904_1 (sequence is synthesized)
ctaagtccacattataaaataggaagttgatgcggggtacagttactcccggaccggcggcgtgaaagtcgtgatatcatcgttgaactattagctttgaagtttaaatccaatggagaa

SEQ ID NO: 435311 - DNA, 120 bp, Artificial Sequence
  ENSG00000152904_2 (sequence is synthesized)
gactcaagaaacagtccaaagaattcttctagaaccctataaatacttacttcagttaccaggtaaacaagtgagaaccaaactttcacaggcatttaatcattggctgaaagttccaga

SEQ ID NO: 435312 - DNA, 120 bp, Artificial Sequence
  ENSG00000152904_3 (sequence is synthesized)
ggacaagctacagattattattgaagtgacagaaatgttgcataatgccagtttactcatcgatgatattgaagacaactcaaaactccgacgtggctttccagtggcccacagcatcta

SEQ ID NO: 435313 - DNA, 120 bp, Artificial Sequence
  ENSG00000152904_4 (sequence is synthesized)
tggaatcccatctgtcatcaattctgccaattacgtgtatttccttggcttggagaaagtcttaacccttgatcacccagatgcagtgaagctttttacccgccagcttttggaactcca

SEQ ID NO: 435314 - DNA, 120 bp, Artificial Sequence
  ENSG00000152904_5 (sequence is synthesized)
tcagggacaaggcctagatatttactggagggataattacacttgtcccactgaagaagaatataaagctatggtgctgcagaaaacaggtggactgtttggattagcagtaggtctcat

SEQ ID NO: 435315 - DNA, 120 bp, Artificial Sequence
  ENSG00000152904_6 (sequence is synthesized)
gcagttgttctctgattacaaagaagatttaaaaccgctacttaatacacttgggctctttttccaaattagggatgattatgctaatctacactccaaagaatatagtgaaaacaaaag

SEQ ID NO: 435316 - DNA, 120 bp, Artificial Sequence
  ENSG00000152904_7 (sequence is synthesized)
tttttgtgaagatctgacagagggaaagttctcatttcctactattcatgctatttggtcaaggcctgaaagcacccaggtgcagaatatcttgcgccagagaacagaaaacatagatat

SEQ ID NO: 435317 - DNA, 120 bp, Artificial Sequence
  ENSG00000152904_8 (sequence is synthesized)
aaaaaaatactgtgtacattatcttgaggatgtaggttcttttgaatacactcgtaatacccttaaagagcttgaagctaaagcctataaacagattgatgcacgtggtgggaaccctga

SEQ ID NO: 435318 - DNA, 120 bp, Artificial Sequence
  ENSG00000152904_9 (sequence is synthesized)
gctagtagccttagtaaaacacttaagtaagatgttcaaagaagaaaatgaataatgttaagccattcttgattggacctcatagcttattttagttaatcttttttttgtcttttagcc

SEQ ID NO: 435319 - DNA, 120 bp, Artificial Sequence
  ENSG00000152904_10 (sequence is synthesized)
ttaccaccttttaaaaaatttgttattctccagaaacagtaaataggtgagtaggggtggtgcaagtgaattcgttttcatttagaagcccctctgtacagataatcaaaattcaaagtt

SEQ ID NO: 435320 - DNA, 120 bp, Artificial Sequence
  ENSG00000152904_11 (sequence is synthesized)
gaaagaatcaaaagcagccacagttatgtaggtctgatttgaatgtcataattgcagtgacaggacattgccaccaactctatcctactaccatcaatgttgtgtttattccgtcaataa

SEQ ID NO: 435321 - DNA, 120 bp, Artificial Sequence
  ENSG00000152904_12 (sequence is synthesized)
aggaatttttatccatacactttctaactgtactatctgggcagttccaagccagtttctattagctagctggaccaaagaccacaaatctctttttttcctaaacgctgctgtaaggaa

SEQ ID NO: 435322 - DNA, 120 bp, Artificial Sequence
  ENSG00000152904_13 (sequence is synthesized)
caaatctctttttttcctaaacgctgctgtaaggaatatctcacttttccccccggaaacaccctcactgaagtcttctatgaaaaggctgataatgggctgggcgcggtggctcacgcc

SEQ ID NO: 435323 - DNA, 65 bp, Artificial Sequence
  ENSG00000152904_14 (sequence is synthesized)
gtgagccgagatggctgataatgataaacagtgagcactccggtcctttttcttaggttttcctt

SEQ ID NO: 435324 - DNA, 120 bp, Artificial Sequence
  ENSG00000152904_15 (sequence is synthesized)
aaacagtgagcactccggtcctttttcttaggttttccttttttccttcctctccaccccacaagttttgctttttaaccaaggtgtctctgcttgatgaaattcacatgctagtctaaa

SEQ ID NO: 435325 - DNA, 120 bp, Artificial Sequence
  ENSG00000152904_16 (sequence is synthesized)
tctttttttctcccttgtaacatttatgtgccccaaactggttagtatatgggtacagcattccctttccaattgggaagcggaaaaagagagtatgggatattttagaagggagccttt

SEQ ID NO: 435326 - DNA, 120 bp, Artificial Sequence
  ENSG00000152904_17 (sequence is synthesized)
gaaccttattatatttccccatcattgatagtgacaatcttaaaagggttgttttcttaccttaagtacaaaagcatggaaaaatgcgcttttccttcccgcccacatcaccaccccgac

SEQ ID NO: 435327 - DNA, 120 bp, Artificial Sequence
  ENSG00000152904_18 (sequence is synthesized)
ttgaagacagtaggtgcttgaatggaaagtgagtaggcatctttaatcgccctgattaaaggaaagtgttagcctgagagggcctgactgaaaagtaaccaaaggcttaatatcaaacac

SEQ ID NO: 435328 - DNA, 120 bp, Artificial Sequence
  ENSG00000152904_19 (sequence is synthesized)
taattagctttttagtgccttaaccctgacctggttaccagttttctgtagtttctacacccaagccactgaagtcatctgtggcccaagaggtaggacaaaaaaaaaaaaaaaaaaagc

SEQ ID NO: 435329 - DNA, 120 bp, Artificial Sequence
  ENSG00000152904_20 (sequence is synthesized)
tgatttcaatatttgatttgttgacatcccaaaatgaaagttttatgtttcccttagaaacatgttttgcttggttctatagtatgttacttaggatctatttaccatatatttgtatga

SEQ ID NO: 435330 - DNA, 120 bp, Artificial Sequence
  ENSG00000152904_21 (sequence is synthesized)
gaaatcctcacccaagcattcaacctaaatctttgaaaagttgggtgctgtctttagtaacttttaaaatagtttaaatctcccattttaatagtgataaggaaacctgttaaaatcatg

SEQ ID NO: 435331 - DNA, 120 bp, Artificial Sequence
  ENSG00000152904_22 (sequence is synthesized)
gctattgatgttatagtatggaaagttgaactttatgaacccatacttttaaaaagcatttttaaaaatctaacactgactatagaaacaaattaaaatgtctacctttaagtataaaaa

SEQ ID NO: 435332 - DNA, 120 bp, Artificial Sequence
  ENSG00000152904_23 (sequence is synthesized)
cggccgggggccaccgaggggccaggagggcctgtgggccgcgggcaggaccggcccgccacagagcccctgcccacgtcccgttccgggctcagacccgacaagtgggagcgagatcaa

SEQ ID NO: 435333 - DNA, 120 bp, Artificial Sequence
  ENSG00000152904_24 (sequence is synthesized)
aaggctttctgggaaataaagtccatactctggggccaacgcgcaaatcctcgtccgcgagaactgcaaggcccgcaatgccctgcgcctgcgtggaccgattagctttgaagtttaaat

SEQ ID NO: 435334 - DNA, 120 bp, Artificial Sequence
  ENSG00000152904_25 (sequence is synthesized)
tagcactgtatacgtttgcagttctctgcccagccgctgtggaaaatcggcctcgaagtgattgaaattccctgtttatatcaggcggcttctttcagatccatcgtctttctcccggag

SEQ ID NO: 435335 - DNA, 120 bp, Artificial Sequence
  ENSG00000152904_26 (sequence is synthesized)
tcaatcaaaagggagagatggctccgattggaatgtcatccctggctgaagagtagaggaagcgaaaaaaagaagagttaaagaggcaaatgcagggaacccgacgaggaggctattgcc

SEQ ID NO: 435336 - DNA, 120 bp, Artificial Sequence
  ENSG00000152904_27 (sequence is synthesized)
gtagtagttcacatggtgaaaagaatggagcgtttgtattaatgattatggattcactctttgaacaaatttctggcagctttttagttttgaaagtgagaagtttcagactctcactga

SEQ ID NO: 435337 - DNA, 120 bp, Artificial Sequence
  ENSG00000152904_28 (sequence is synthesized)
ctctggccattctcaaaccaggcccttccctttgaaaagtcttttgcatgggatgttcacttcttagacgcaaggttgtgtgccctggtttcatcgtctaacgcgttagaaggcgctttc

SEQ ID NO: 435338 - DNA, 120 bp, Artificial Sequence
  ENSG00000152904_29 (sequence is synthesized)
atttcttcatgggtgttgagcgccgaccactggggtggcctctgccttcgtagacctgcgcctggtgagacggacagatgctgaacaaaacgatgtgaaattaccgcagtggcagtgccc

SEQ ID NO: 435339 - DNA, 120 bp, Artificial Sequence
  ENSG00000152910_0 (sequence is synthesized)
gcttttcagtgaggagtcagggaggtgtgtgtgagagagagagagaaaagagagagacagagacggggagagagagagggagagagaagagagggaggagggaagaagaaaagacggagg

SEQ ID NO: 435340 - DNA, 120 bp, Artificial Sequence
  ENSG00000152910_1 (sequence is synthesized)
gaggtgaggaggaagggagggggagagacagagacctagaggggctgaagacccagacagagctggcagagctactgagaagaggactggagcgctctgagagcctctcaagatcttttg

SEQ ID NO: 435341 - DNA, 120 bp, Artificial Sequence
  ENSG00000152910_2 (sequence is synthesized)
ggggagcccaataaatgtgaacatgggatctgtcacgggagctgtcctcaagacgctacttctgttatctactcaaaattggaacagagtcgaagctgggaattcctatgactgtgatga

SEQ ID NO: 435342 - DNA, 120 bp, Artificial Sequence
  ENSG00000152910_3 (sequence is synthesized)
tcctcttgtgtctgccttgcctcaggcatccttcagcagttcttccgagctctccagcagtcatggtcctggatttgcaaggctgaatagaagagatggagctggtggctggtctccact

SEQ ID NO: 435343 - DNA, 120 bp, Artificial Sequence
  ENSG00000152910_4 (sequence is synthesized)
tgtgtctaacaaataccagtggttgcagattgaccttggagagagaatggaggtcaccgctgtggccactcaagggggatatggtagctccaactgggtgaccagctacctcctgatgtt

SEQ ID NO: 435344 - DNA, 120 bp, Artificial Sequence
  ENSG00000152910_5 (sequence is synthesized)
cagtgatagtggctggaactggaaacaatatcgccaagaggacagcatctggggtttttcaggaaatgcaaatgcagacagtgttgtgtactatagactccagccttctatcaaagccag

SEQ ID NO: 435345 - DNA, 120 bp, Artificial Sequence
  ENSG00000152910_6 (sequence is synthesized)
atttctgcgcttcatccctttggaatggaaccccaagggcagaattggaatgcgaatcgaagtgttcggatgtgcatacagatcagaagtggttgatcttgatggaaaaagttcccttct

SEQ ID NO: 435346 - DNA, 120 bp, Artificial Sequence
  ENSG00000152910_7 (sequence is synthesized)
ctacagatttgatcaaaaatccctgagcccaataaaagacattatttctttgaaattcaaaaccatgcagagtgatgggattctactccacagggaagggccaaatggagatcacatcac

SEQ ID NO: 435347 - DNA, 120 bp, Artificial Sequence
  ENSG00000152910_8 (sequence is synthesized)
actgcaattaagaagagcaagactctttttacttattaattcaggtgaagctaaactgccttccacttccaccctggtcaatctcaccctgggcagcctgctagatgatcagcattggca

SEQ ID NO: 435348 - DNA, 120 bp, Artificial Sequence
  ENSG00000152910_9 (sequence is synthesized)
ttcagtgctcatccagcgtttgggcaaacaagtcaacttcacagtggacgaacacaggcatcatttccatgcacggggagaattcaatctcatgaatcttgattatgagatcagctttgg

SEQ ID NO: 435349 - DNA, 120 bp, Artificial Sequence
  ENSG00000152910_10 (sequence is synthesized)
agggattccagcacctggaaaatcagtgtcattcccacatagaaattttcatggatgtttagaaaatctctattataatggagtggatatcattgatttggccaagcagcaaaaaccaca

SEQ ID NO: 435350 - DNA, 120 bp, Artificial Sequence
  ENSG00000152910_11 (sequence is synthesized)
gatcattgctatgggaaatgtgtcattttcttgttcacaaccacaatctatgcccgtgacttttctgagctccaggagttatttagcactgccagacttctctggagaggaggaggtttc

SEQ ID NO: 435351 - DNA, 120 bp, Artificial Sequence
  ENSG00000152910_12 (sequence is synthesized)
tgccacttttcaatttcgaacttggaataaggcagggcttctgctgttcagtgaacttcagctgatttcagggggtatcctcctctttctgagtgatggaaaacttaagtcgaatctcta

SEQ ID NO: 435352 - DNA, 120 bp, Artificial Sequence
  ENSG00000152910_13 (sequence is synthesized)
ccagccaggaaaattacccagtgacatcacagcaggtgtcgaattaaatgatgggcagtggcattctgtctctttatctgctaaaaagaatcacttgagtgtggcggtggacggccagat

SEQ ID NO: 435353 - DNA, 120 bp, Artificial Sequence
  ENSG00000152910_14 (sequence is synthesized)
ggcttctgctgctcctctgctggggcctgagcagatttattcgggtggcacctattattttggaggttgtcctgacaaaagctttggatccaaatgtaaaagtccacttggtggatttca

SEQ ID NO: 435354 - DNA, 120 bp, Artificial Sequence
  ENSG00000152910_15 (sequence is synthesized)
gggatgtatgaggctcatttctatcagcggcaaagtggtagatctgatttcagttcagcaggggtcccttgggaacttcagtgaccttcagatagactcatgtggcatctcagacaggtg

SEQ ID NO: 435355 - DNA, 120 bp, Artificial Sequence
  ENSG00000152910_16 (sequence is synthesized)
tttgcccaactattgtgaacacggtggggagtgttcccagtcctggagcacctttcattgtaactgtaccaacactggttacagaggagctacttgccataactctatctatgagcagtc

SEQ ID NO: 435356 - DNA, 120 bp, Artificial Sequence
  ENSG00000152910_17 (sequence is synthesized)
atgtgaagcctataagcacagaggaaatacttcagggttttactatatagattcagatggaagtggtcccctggaaccatttcttctatattgcaatatgaccgaaactgcatggaccat

SEQ ID NO: 435357 - DNA, 120 bp, Artificial Sequence
  ENSG00000152910_18 (sequence is synthesized)
catacagcacaacggctctgacttaacaagagtcagaaatactaatccagagaacccatatgctgggtttttcgagtatgtggccagcatggagcaacttcaggccactattaaccgtgc

SEQ ID NO: 435358 - DNA, 120 bp, Artificial Sequence
  ENSG00000152910_19 (sequence is synthesized)
agagcactgtgaacaggagtttacttattactgcaagaagtcacggctggtcaataagcaagatggaacccctctgagttggtgggtaggaagaaccaatgaaacgcaaacctactgggg

SEQ ID NO: 435359 - DNA, 120 bp, Artificial Sequence
  ENSG00000152910_20 (sequence is synthesized)
aggttcttcgcctgatcttcaaaaatgtacttgtggattagagggaaactgcattgattctcagtattactgcaattgtgatgctgaccggaatgaatggaccaatgacactggattgct

SEQ ID NO: 435360 - DNA, 120 bp, Artificial Sequence
  ENSG00000152910_21 (sequence is synthesized)
tgcttataaagaacatcttccagtaactaagatcgtgattacagacacaggccgactgcattcagaagcagcttataaactggggcctctgctctgccagggagacagatcattttggaa

SEQ ID NO: 435361 - DNA, 120 bp, Artificial Sequence
  ENSG00000152910_22 (sequence is synthesized)
ttcagcttcctttgataccgaggcttcatatcttcattttcctaccttccacggagaacttagcgcggatgtatctttcttttttaagacaacagcttcatctggggtatttttagagaa

SEQ ID NO: 435362 - DNA, 120 bp, Artificial Sequence
  ENSG00000152910_23 (sequence is synthesized)
cttggggattgctgattttatacggatagagcttcgctctccgacagtagtgactttttcatttgatgtggggaatgggccttttgaaatctcagtgcagtcacccacccacttcaacga

SEQ ID NO: 435363 - DNA, 120 bp, Artificial Sequence
  ENSG00000152910_24 (sequence is synthesized)
caaccagtggcaccatgtgagggttgaaaggaacatgaaggaggcctcccttcaagtggatcagctgacaccaaagacacagcccgcccccgctgatgggcatgtcctgttacagctcaa

SEQ ID NO: 435364 - DNA, 120 bp, Artificial Sequence
  ENSG00000152910_25 (sequence is synthesized)
cagtcagctcttcgtgggtggaacggccaccagacagagaggctttctgggctgcattcggtctctgcagttgaatgggatgaccctggatttggaagaaagagcccaggtgactccaga

SEQ ID NO: 435365 - DNA, 120 bp, Artificial Sequence
  ENSG00000152910_26 (sequence is synthesized)
attgcagcagctatgggaagttatgccgcaatggagggaaatgcagagaaagacccattgggttcttttgtgactgcactttctctgcatacacagggccattctgctcaaatgagattt

SEQ ID NO: 435366 - DNA, 120 bp, Artificial Sequence
  ENSG00000152910_27 (sequence is synthesized)
ctgcatattttggatctggctcatccgtgatatacaattttcaagaaaattatcttttaagtaaaaactccagctcccacgctgcttcatttcatggtgatatgaagctgagcagagaaa

SEQ ID NO: 435367 - DNA, 120 bp, Artificial Sequence
  ENSG00000152910_28 (sequence is synthesized)
tgatcaaatttagtttccgaacaacacgaacaccaagcttgctgctttttgtgagctccttttacaaagaatacctttctgtgatcattgccaaaaatggaagtttgcagatcaggtaca

SEQ ID NO: 435368 - DNA, 120 bp, Artificial Sequence
  ENSG00000152910_29 (sequence is synthesized)
agttaaataaatatcaagagcctgatgttgttaactttgattttaaaaacatggctgatggacaacttcaccacataatgattaacagagaagaaggagtggtctttatagagattgacg

SEQ ID NO: 435369 - DNA, 120 bp, Artificial Sequence
  ENSG00000152910_30 (sequence is synthesized)
ataatagaaggagacaagttcacctgtcatcaggcacagaattcagtgcagtcaaatctctggtattgggcaggattttagaacacagtgatgtggaccaggatactgcactggcaggtg

SEQ ID NO: 435370 - DNA, 120 bp, Artificial Sequence
  ENSG00000152910_31 (sequence is synthesized)
cgcagggcttcacaggctgcctctctgcagtgcagctcagccacgtggcccctctgaaggcagctctgcaccccagccacccagaccctgtcactgttacaggacacgtgactgagtcca

SEQ ID NO: 435371 - DNA, 120 bp, Artificial Sequence
  ENSG00000152910_32 (sequence is synthesized)
gctgtatggcccagcctggcactgatgccacatcaagggaaaggacacactcgtttgcagatcattctggaacaatagatgacagagagccccttgctaatgcaatcaaaagtgactctg

SEQ ID NO: 435372 - DNA, 120 bp, Artificial Sequence
  ENSG00000152910_33 (sequence is synthesized)
cagtaattggaggtctgatagctgttgtgatttttatcttgctttgcatcactgccatagctgttcgcatttatcagcagaaaaggttatataaaagaagtgaggcaaaaaggtcagaga

SEQ ID NO: 435373 - DNA, 120 bp, Artificial Sequence
  ENSG00000152910_34 (sequence is synthesized)
atgtagacagtgctgaggctgttctgaaaagtgagcttaatatacaaaatgcagtcaatgaaaatcagaaagagtacttcttctgattggcagctatgatttaacataaaattatgatag

SEQ ID NO: 435374 - DNA, 120 bp, Artificial Sequence
  ENSG00000152910_35 (sequence is synthesized)
tttgttttaatagccaggggttctcaatggaaaaacgaatgctcttacactgaatgtacaggcagtgggcttgcagcactgccatcttgccatgtacaggcttggggtggctccaggaag

SEQ ID NO: 435375 - DNA, 120 bp, Artificial Sequence
  ENSG00000152910_36 (sequence is synthesized)
cctcgtccagtgatatatttctcatagcattcattctatggaacaagaaattagatattgctgttaattttcaactgttctggtatgatctaaaacaagtttaacctgcttaatggctac

SEQ ID NO: 435376 - DNA, 120 bp, Artificial Sequence
  ENSG00000152910_37 (sequence is synthesized)
agtttttacatgtgaaaactgtagccttggtctcttaaccatgtaatacataagttttgttagaggtaaaaattaaatttggactataatgtccttgctttatttgagaacatttgctgt

SEQ ID NO: 435377 - DNA, 120 bp, Artificial Sequence
  ENSG00000152910_38 (sequence is synthesized)
gtttgcttttgtctcctcgtggtgttattcatagacctggaaatgcttctcagatcctgtgtggccggtgtttgcatcttcagtggccacaagcataataaagcccctttgcctttctct

SEQ ID NO: 435378 - DNA, 120 bp, Artificial Sequence
  ENSG00000152910_39 (sequence is synthesized)
gtattatattcaatacaatacatcaatagtcttgaaaaatgttttgctgtctttgctttgtttgtattgctcattattctatttgtctcttcttaataatgttgaatacatttggttttg

SEQ ID NO: 435379 - DNA, 120 bp, Artificial Sequence
  ENSG00000152910_40 (sequence is synthesized)
agtctcagacttcaactctgaacatacaagttgtatttaacaagactcagaaagtgcagtggttgttagtatgtaatgtctttccttttaaaaaaagttttccaattaatttgctaccat

SEQ ID NO: 435380 - DNA, 120 bp, Artificial Sequence
  ENSG00000152910_41 (sequence is synthesized)
tgtttgatggtgacagtacttaagaccctgagtaatgccagtttcccaaagaatgtaaaatgttttcaactaaactgttgatatattaaaaaaaattcttaacacagcaaaaaattatta

SEQ ID NO: 435381 - DNA, 120 bp, Artificial Sequence
  ENSG00000152910_42 (sequence is synthesized)
tttaatttacaactgtaatacctcaaatgaaatatacttatgagactattttgcccaaacctagatcagtcctttattggtttacatttctgtttttctgaagtttatcacaaacttcgc

SEQ ID NO: 435382 - DNA, 120 bp, Artificial Sequence
  ENSG00000152910_43 (sequence is synthesized)
cttgatcttcaatgattatacttcacgaatcatcttatatattaccaaaaaagagacaaattgaagtatagagccccatttcccattctgaaacatatacccctttaggtgtacattttg

SEQ ID NO: 435383 - DNA, 120 bp, Artificial Sequence
  ENSG00000152910_44 (sequence is synthesized)
ctgtgcatagacttccagtacatactttttgaaatatgagctgcaaccatcagtgatctacacaatcaataattaaacaatgcacactctaaggggagatagcatattaaatgatctact

SEQ ID NO: 435384 - DNA, 120 bp, Artificial Sequence
  ENSG00000152910_45 (sequence is synthesized)
gtgaatttgtcattccagacacttctcgtctgaaacgatggggtgaatttctcaaaaattaccaagaatcaatccaacttgctgaatggtacattctgattagggtgtattatacactag

SEQ ID NO: 435385 - DNA, 120 bp, Artificial Sequence
  ENSG00000152910_46 (sequence is synthesized)
gagatcaaagaatgatcaataaccttatggaactgttacaataattaatcttgagaccatgcatacaaggaactatctttgaattctgcaagccaatcatacaataaaggcactctatta

SEQ ID NO: 435386 - DNA, 120 bp, Artificial Sequence
  ENSG00000152910_47 (sequence is synthesized)
tacatactcacaccttcaagtgcctcccaagtaactattggatttcttagtttgtctacaccagaagaatcgggaaatatgtaaatttagcattactatcatcttattttctatattttc

SEQ ID NO: 435387 - DNA, 120 bp, Artificial Sequence
  ENSG00000152910_48 (sequence is synthesized)
cttgttaactcttcttataaaacctgcctctcttttctcatagcactatatccatattgatgtttctgcaaatgcctgactaaatcttaagaacctgaattaacatagtagtttacgaag

SEQ ID NO: 435388 - DNA, 120 bp, Artificial Sequence
  ENSG00000152910_49 (sequence is synthesized)
gactaaggacctatgttggtagatggtatactctttgtttgattggaagatctatggtgacaagggaaggatttaacatagaaatggcattatttattcgatgcaaagctgagtgcaaac

SEQ ID NO: 435389 - DNA, 120 bp, Artificial Sequence
  ENSG00000152910_50 (sequence is synthesized)
atcattatatctctgaatcttttgcagatgttcatgttatttagtagcggtattaacctcattggtagctgaactctagggaggtttattggtgaagcctcacagtcctctgtggtctgc

SEQ ID NO: 435390 - DNA, 120 bp, Artificial Sequence
  ENSG00000152910_51 (sequence is synthesized)
actgctagagactcaacattatggcatggaaatgcattgacacatcctatgccatgactttaatttcctgatttgtaatctcttattttatcattaataaaatgcatttttgaactaaaa

SEQ ID NO: 435391 - DNA, 120 bp, Artificial Sequence
  ENSG00000152910_52 (sequence is synthesized)
gcggagctcgagcgctgttgtgtgtttggaaggaaggatgctgctgccaatttgtgggaccgctgctgcgaggagtgggcgtggcctcggcggtgtggatgcttgttaggaaagatgctg

SEQ ID NO: 435392 - DNA, 120 bp, Artificial Sequence
  ENSG00000152910_53 (sequence is synthesized)
caactaattcagttcacaactcaaaggttcacgtaagtgcttttcctggagacaatgatcagacttcagagtgcaccagaagtactttatttctgtttcccattttaacacacaaaatgt

SEQ ID NO: 435393 - DNA, 120 bp, Artificial Sequence
  ENSG00000152910_54 (sequence is synthesized)
tagaaagtcttgcagtcaagggtcaagatttaattaaatgaagagtttttacagcttcattaaggagattcttaaataaatttggctttttattccttttcctacaattgtctggcagtg

SEQ ID NO: 435394 - DNA, 120 bp, Artificial Sequence
  ENSG00000152910_55 (sequence is synthesized)
taatgttttctacttcatgaattcaatgattattattattgttttgtgtccttgcgttaatttgtgctaagtaccaggaattttacctaactttgttttataccaaatttggttccgtat

SEQ ID NO: 435395 - DNA, 120 bp, Artificial Sequence
  ENSG00000152910_56 (sequence is synthesized)
taaaatggaaatggaaatgtcaacagagtgaaaaagacatcttagaattatcatgaaatagttttgagcccctgtgccctctcaaagtgtcccagggaccactacacgtctacagatcac

SEQ ID NO: 435396 - DNA, 120 bp, Artificial Sequence
  ENSG00000152910_57 (sequence is synthesized)
actttgaggactactgacctaatataatgccagcgttggtaaccattgacatagttaagaatcgcagtacttagaatttgtatttacaactagaagtgttaaaacaacattcctcatata

SEQ ID NO: 435397 - DNA, 120 bp, Artificial Sequence
  ENSG00000152910_58 (sequence is synthesized)
gaaataatttaggcatatttgtatatgtgttattggtcagaatgatttatttacataacccatttctgctgttcagcagtataacaattgaataacaatttcattaaaatgtttacatat

SEQ ID NO: 435398 - DNA, 120 bp, Artificial Sequence
  ENSG00000152910_59 (sequence is synthesized)
ttaatcacaaaacagtttaatcattttatgatgttgctactactccataatttcaaaataattaaaactaatatgaagtggccacatggccacatggtcctagagacatatagttaatac

SEQ ID NO: 435399 - DNA, 120 bp, Artificial Sequence
  ENSG00000152910_60 (sequence is synthesized)
atgtaggtgaacccacaaggctgatagaactcagaaataaactcaacatacaataatactgcttgagccagaaatacctgaagtttttatatttccaatttatatgtagtagatgcttaa

SEQ ID NO: 435400 - DNA, 120 bp, Artificial Sequence
  ENSG00000152910_61 (sequence is synthesized)
tatataattttatgatttttaaagtattttcatattctcctgtctttaagttttttcttttctcattgaacttactagacttctagtaagccctggaagtagtaggcatatttttagaga

SEQ ID NO: 435401 - DNA, 120 bp, Artificial Sequence
  ENSG00000152910_62 (sequence is synthesized)
tcttagatcctagtttttgatgttgttgttttacttgttggttgttttgtctattgattccacgaaagcctcagcactaactaaccctaacgtggcattgttcctcctggcagatgactg

SEQ ID NO: 435402 - DNA, 120 bp, Artificial Sequence
  ENSG00000152910_63 (sequence is synthesized)
tgatttctttatgcaagaaaaagttcatttaaaaaaattaatcactcaaagtatgtatagctagccagatactgaacaagttagtgcaatgaagtaattaaataaaggtttgttttaatg

SEQ ID NO: 435403 - DNA, 120 bp, Artificial Sequence
  ENSG00000152926_0 (sequence is synthesized)
gactaatggccctaactaagtattaacccctgccaagaaaagagctacttcctcttgaagtaaatgaagatagtgatgctttctcttaaactttacttataaaaagcatcaaagggggga

SEQ ID NO: 435404 - DNA, 120 bp, Artificial Sequence
  ENSG00000152926_1 (sequence is synthesized)
atgaagcaggaaatataaaaggaaaaacaagtaaagggaaaacaagtcctttcctgaccagtctgactcactccaaagtcctgctggagctatgataattatctgcaaggccaggcaggg

SEQ ID NO: 435405 - DNA, 120 bp, Artificial Sequence
  ENSG00000152926_2 (sequence is synthesized)
gctccgaaggagtgggctccaggagcagggatgagaaaaacaagttctccttatcagtttccctgtttgaaattctctccccataacattattctttgttctgctctcacaactattttt

SEQ ID NO: 435406 - DNA, 120 bp, Artificial Sequence
  ENSG00000152926_3 (sequence is synthesized)
gtaactatttctgcaagtctgtaaagattttgtaagttcttgtttttctttctgtagcatggcaaggtcacaagacatgtttaagtaaggtaggctcatgttgcaaatcctgttgtaaaa

SEQ ID NO: 435407 - DNA, 120 bp, Artificial Sequence
  ENSG00000152926_4 (sequence is synthesized)
cctgtcacggtatgattaactgcctttgttctgcttctgtaagactgctttctcacctcgcaggttttgcgccaaaaacccgacttgcccctgcctgatgcatgtataaaagtcaagccc

SEQ ID NO: 435408 - DNA, 120 bp, Artificial Sequence
  ENSG00000152926_5 (sequence is synthesized)
tgtctttgttcagggctcagcctttggatgttaatccgctgggccagtggccacctaaataaaaccttcctgttgcacccagtgatctctccggcctcctgattcccacaacatataagc

SEQ ID NO: 435409 - DNA, 120 bp, Artificial Sequence
  ENSG00000152926_6 (sequence is synthesized)
attcctttttctctgcaacctagcccgcatctgtcattgactttttaacaataggcattctgactggatgagatggtatctcactgtggtttttctctgcatttttctaataattaacaa

SEQ ID NO: 435410 - DNA, 120 bp, Artificial Sequence
  ENSG00000152926_7 (sequence is synthesized)
tcttcttttgaaaagtatctgttcatgtttttgcttactttttaattaggtttttggttttctttttgttgttgttgttgttttctgagatggagtcttgctgtgtcaccaggatggagt

SEQ ID NO: 435411 - DNA, 73 bp, Artificial Sequence
  ENSG00000152926_8 (sequence is synthesized)
tttaattaggtttttggttttctttttgttgttgttgttgttttctgagatggagtcttgctgtgtcaccagg

SEQ ID NO: 435412 - DNA, 120 bp, Artificial Sequence
  ENSG00000152926_9 (sequence is synthesized)
gggatcacagggaccattgacatttatggatgtggccatagaattctctttggaggagtggcaatgcctggacactgcacagcagaatttatataggcatgtgatgtgagagaactacag

SEQ ID NO: 435413 - DNA, 120 bp, Artificial Sequence
  ENSG00000152926_10 (sequence is synthesized)
aaacctggttttcttgggtgaaggtattgctgtctctaagccagacctgattacctgtctggagcaaggaaaagagccctggaatatgaagagacatgagatggtagctaaacatttagt

SEQ ID NO: 435414 - DNA, 120 bp, Artificial Sequence
  ENSG00000152926_11 (sequence is synthesized)
tatgttttattattttgcccaacacctttggccagagcagaacataagagattctttccagaaagtgaccctaagaagatatagaaaatgtggatatgagaatttacagttaagaaaagg

SEQ ID NO: 435415 - DNA, 120 bp, Artificial Sequence
  ENSG00000152926_12 (sequence is synthesized)
ctgtaaaagtgtggttgagtgtaaacagcacaaaggagattatagtggacttaaccaatgtttgaaaactaccttgagcaaaatatttcaatgtaataaatatgtagaagttttccataa

SEQ ID NO: 435416 - DNA, 120 bp, Artificial Sequence
  ENSG00000152926_13 (sequence is synthesized)
aatttcaaattcaaatagacacaagatgagacatactgaaaataaacattttaaatgtaaagaatgtcgcaaaacattttgcatgctttcacacctaactcaacataaaagaatccaaac

SEQ ID NO: 435417 - DNA, 120 bp, Artificial Sequence
  ENSG00000152926_14 (sequence is synthesized)
tagagtgaatttctacaaatgtgaagcatatggaagagcctttaactggtcctcaacccttaataaacataagagaattcatactggagaaaaaccttacaaatgtaaagaatgtggcaa

SEQ ID NO: 435418 - DNA, 78 bp, Artificial Sequence
  ENSG00000152926_15 (sequence is synthesized)
atactggagaaaaaccttacaaatgtaaagaatgtggcaaagcctttaaccagacctcacaccttattagacataaga

SEQ ID NO: 435419 - DNA, 120 bp, Artificial Sequence
  ENSG00000152926_16 (sequence is synthesized)
tataattcatactggggaaattccctacaaatgtgagaaatgtgttagagcttttaaccaagcctcaaagcttactgaacataagttaattcataccggagagaaacgttatgaatgtga

SEQ ID NO: 435420 - DNA, 120 bp, Artificial Sequence
  ENSG00000152926_17 (sequence is synthesized)
agaatgcggcaaagcttttaaccgatcctcaaaacttactgaacataagtacattcatactggagagaagctgtacaaatgtgaagaatgtggtaaagcctttaaccagtcctcaaccct

SEQ ID NO: 435421 - DNA, 72 bp, Artificial Sequence
  ENSG00000152926_18 (sequence is synthesized)
gtgaagaatgtggtaaagcctttaaccagtcctcaacccttactacacataagagaattcataaattttcaa

SEQ ID NO: 435422 - DNA, 83 bp, Artificial Sequence
  ENSG00000152926_19 (sequence is synthesized)
atcttactgaccataagaatgtggcaaagcttttaaccaactctcaaaccttactagacataaggtaattcatactggagaga

SEQ ID NO: 435423 - DNA, 120 bp, Artificial Sequence
  ENSG00000152926_20 (sequence is synthesized)
gtcctcagcccttaatacacataagataatccatactggagagaatccccacaaatgtagagaatctggcaaagttttccacctatcctcaaaacttagtacatgtaagaaaattcatac

SEQ ID NO: 435424 - DNA, 72 bp, Artificial Sequence
  ENSG00000152926_21 (sequence is synthesized)
aacttagtacatgtaagaaaattcatagatcttcaacccttattggacataagagaattcatactggagaga

SEQ ID NO: 435425 - DNA, 120 bp, Artificial Sequence
  ENSG00000152926_22 (sequence is synthesized)
agcttttaaccaatcttcaacacttactacacataagataattcatactgaagagaaacagtacaaatgtgatgaatgtggcaaagcttctacctgatcctcaaaactcattgaacacaa

SEQ ID NO: 435426 - DNA, 120 bp, Artificial Sequence
  ENSG00000152926_23 (sequence is synthesized)
gagaaaccttacaagtgtgaagaatgtggcaaaacttctaaccatttctcaacccttactaaacataagatgattcatactggagagaagttacacaaatgtgatgaatgtgacaaagct

SEQ ID NO: 435427 - DNA, 82 bp, Artificial Sequence
  ENSG00000152926_24 (sequence is synthesized)
ataagatgattcatactggagagaagttacacaaatgtgatgaatgtgacaaagcttttaaccaatcttcaaccctttctac

SEQ ID NO: 435428 - DNA, 120 bp, Artificial Sequence
  ENSG00000152926_25 (sequence is synthesized)
aaccctacaaatgtgaagaatgtggaaaagcttttaaccagttctcaactcttactacacataaaataattcatactggagagaaaccatataaatgtgaagaatgtggcaaagctttca

SEQ ID NO: 435429 - DNA, 89 bp, Artificial Sequence
  ENSG00000152926_26 (sequence is synthesized)
ctcttactacacataaaataattcatactggagagaaaccatataaatgtgaagaatgtggcaaagctttcaacctatacgtaaacctt

SEQ ID NO: 435430 - DNA, 65 bp, Artificial Sequence
  ENSG00000152926_27 (sequence is synthesized)
aaccctacaagtgtgaagaatgtggcaaagcttttagccaagtgtcaactcttactatgctttta

SEQ ID NO: 435431 - DNA, 120 bp, Artificial Sequence
  ENSG00000152926_28 (sequence is synthesized)
tggagagaaaccttacaaatgtgaggaatgtggcaaaactttcagtcgatgctcaaaacttactacacataagaaaattcatacaggagagaaaccttacaaatgtgaaaaatgtgctaa

SEQ ID NO: 435432 - DNA, 120 bp, Artificial Sequence
  ENSG00000152926_29 (sequence is synthesized)
agcttttagccagtcttcaaccctttctacatataagataattcacactggagagaaatgctacaaatgtgaagaatgtggcaaagtttttaaccgatcttcaaaccttacagaccataa

SEQ ID NO: 435433 - DNA, 120 bp, Artificial Sequence
  ENSG00000152926_30 (sequence is synthesized)
tcaaaccttacagaccataaaaaaattcatacaggagagaaatcctacaaatgtgaagaatgtgacaaggcctttaacctgtcctcaacgcttactaaacataaggtaattcatactgga

SEQ ID NO: 435434 - DNA, 120 bp, Artificial Sequence
  ENSG00000152926_31 (sequence is synthesized)
attcatactggagagaaactgtacaaatgtaaagaatgtggtaaagcttttaaacagttctcacaccttgctatacataatataattcatactggagagaaactctacaaatgtgaagaa

SEQ ID NO: 435435 - DNA, 86 bp, Artificial Sequence
  ENSG00000152926_32 (sequence is synthesized)
ctacaaatgtgaagaatgtggcaaagctaacctatcatcaacccttactccacataagacaattcatattttgcttgtaactaaat

SEQ ID NO: 435436 - DNA, 120 bp, Artificial Sequence
  ENSG00000152926_33 (sequence is synthesized)
caaatgtgaagaatgtggcaatgcttgtaactaaatctcaaactttactaaacataagaaaattaatactggaaactttacaaacctgaaagatgtgacaatgattttgacaacaccttc

SEQ ID NO: 435437 - DNA, 120 bp, Artificial Sequence
  ENSG00000152926_34 (sequence is synthesized)
aaacttttctaaacataaaataaatcatactggtgagaaatcttaaaaatatgaagaatggtacaaagcctttaaatggttgtcacacttgattgtaggtaagataatttatactggagg

SEQ ID NO: 435438 - DNA, 120 bp, Artificial Sequence
  ENSG00000152926_35 (sequence is synthesized)
aaactcccagaagtgtgaagaatgtggcaaaacttttaatttttcacaccttatagcacaggaaagcacttcagaaaaattgtacaaatataaatgtggaaaagccattaatatctgctt

SEQ ID NO: 435439 - DNA, 120 bp, Artificial Sequence
  ENSG00000152926_36 (sequence is synthesized)
ccattaatatctgcttacatcttactcaacattagagagttagtgcttaataaaagcattataaaagcaattagtgtaaaatcagaaaatgaaagttttttttttttttttagatggagt

SEQ ID NO: 435440 - DNA, 70 bp, Artificial Sequence
  ENSG00000152926_37 (sequence is synthesized)
tgagactacaggcacacaccaccacatttggctaatttttttatttttagtagagactggctaatgcctc

SEQ ID NO: 435441 - DNA, 120 bp, Artificial Sequence
  ENSG00000152926_38 (sequence is synthesized)
gggattataggtgtgagtcactgtgcctgacaaatataagcctttaaagagaagaaggttttcattttgaagacaaacattaggtacataaagagggttgtagtgtctttatttgtatca

SEQ ID NO: 435442 - DNA, 120 bp, Artificial Sequence
  ENSG00000152926_39 (sequence is synthesized)
tagtgtctttatttgtatcacagattttattgtacacattatgtactaaaggaaaatcctgaagcagtgctcaaactttgatcaacatcagggagtttatattggagaaaaactgcaaat

SEQ ID NO: 435443 - DNA, 120 bp, Artificial Sequence
  ENSG00000152926_40 (sequence is synthesized)
gtaatatatttggaaaaacatttttcaaaaactactgcttagaaaacaccaggggatttatactaaaatatatttttgcagatgcagtaagtataaaagaaatttaatccaaaattaagt

SEQ ID NO: 435444 - DNA, 120 bp, Artificial Sequence
  ENSG00000152926_41 (sequence is synthesized)
gtgtgtaaatatcagagaattcacagtagaaatatctaaggcactgacattttagacattgaactaatcagtgtgctgagtacagaaaataatccaaaattaaagttggtagataaatta

SEQ ID NO: 435445 - DNA, 120 bp, Artificial Sequence
  ENSG00000152926_42 (sequence is synthesized)
agttataattacatttaaagtatacttttttctttgaaaaaattacaaaatttttaaaaagtgaatgatgtaattcaactcaaattacttcatgcttttcattctattgtattcacatgt

SEQ ID NO: 435446 - DNA, 120 bp, Artificial Sequence
  ENSG00000152926_43 (sequence is synthesized)
ttacttcatgcttttcattctattgtattcacatgtgaaagcatgtgatcaattgctgcttcatcaaagatatgagacattcttttttgttaggtgggcaatattttttaccttttctat

SEQ ID NO: 435447 - DNA, 120 bp, Artificial Sequence
  ENSG00000152926_44 (sequence is synthesized)
ggaagagtaaagacattacaatgtaggatgcatgataaaaatctaagtggagaggctctttgtgtttaatttataatattgaatgatgtatgagggaagtgttcagaggaatattctgca

SEQ ID NO: 435448 - DNA, 120 bp, Artificial Sequence
  ENSG00000152926_45 (sequence is synthesized)
aagtgttcagaggaatattctgcattctagtgaaaatatcttttattttagttaaaattaaattaaaattagtagtatatcattttactaactgtacttttatgtaataaaatgcagcac

SEQ ID NO: 435449 - DNA, 120 bp, Artificial Sequence
  ENSG00000152926_46 (sequence is synthesized)
gaacttaattttttaattaaactttttttttaacatgttaagaccaattgtgcattcagtgaagtattatcatgccactaacttcaacctatcccaccttactcaagggtgttggtaaaa

SEQ ID NO: 435450 - DNA, 120 bp, Artificial Sequence
  ENSG00000152926_47 (sequence is synthesized)
gatagtaacaatgtactatttaataacagagtggactaacatctctaataatttctcttgccagtgactttaaactaaagaacttaattaaagaacattgttcccataggttaaattttt

SEQ ID NO: 435451 - DNA, 120 bp, Artificial Sequence
  ENSG00000152926_48 (sequence is synthesized)
attctttttcttatttaaacatatttttcttaacttttgtgggtacatagtgtgtgtatatatttatgccatatatggcatattttgatacaggcatatgaataggtattaatcacatca

SEQ ID NO: 435452 - DNA, 120 bp, Artificial Sequence
  ENSG00000152926_49 (sequence is synthesized)
gggcaaatgaaatatccatcaactccagcatttatcatttgtattacaaaccgattctacacttttagttactttaaaatgtacaagtaaattgctattgactatagggtcattttcatg

SEQ ID NO: 435453 - DNA, 120 bp, Artificial Sequence
  ENSG00000152926_50 (sequence is synthesized)
ggtataataaaaattatatacaagtataaataaaatcctgagtcttaaaattctgagtcctgcttaaacattttaaaaattttgttatgtatttttctttgaacatgtctctctgcctgc

SEQ ID NO: 435454 - DNA, 120 bp, Artificial Sequence
  ENSG00000152926_51 (sequence is synthesized)
aaacataacagaattttagtattggtttacatagagttaactatacccatatattactctaaaaataaatgttaagtgcaagaaagttatggactgtttttgtgtgagtgtgagtttgta

SEQ ID NO: 435455 - DNA, 120 bp, Artificial Sequence
  ENSG00000152926_52 (sequence is synthesized)
cctattttcaaaagaaaagagcaatattggagcaaaacaaatattttaataaagtaatgtactagacaactgaaaacttcaaaaatgctgaaagtaaatgtatactctgctttgtattga

SEQ ID NO: 435456 - DNA, 120 bp, Artificial Sequence
  ENSG00000152926_53 (sequence is synthesized)
attcattactgccaaatcttctgacttatgattcagaatctctccatgcaaattatgtttttacttgcctgttagtcatgctagacctataattttcttgtttcttaccatttttttctt

SEQ ID NO: 435457 - DNA, 120 bp, Artificial Sequence
  ENSG00000152926_54 (sequence is synthesized)
ttatactttatgaggtattatgtgagctgttcatggattataagaatgatttttataaaattcagtactgcacacaagataagttttagatgtatttccaaaattgtgtattaattatat

SEQ ID NO: 435458 - DNA, 120 bp, Artificial Sequence
  ENSG00000152926_55 (sequence is synthesized)
ttagttagaacattccatttgttcttttaattggagaatcctatataagcctatatttcttattcttttctcttgttataattgacataagtaaatttatttatttattgagccaatttg

SEQ ID NO: 435459 - DNA, 120 bp, Artificial Sequence
  ENSG00000152926_56 (sequence is synthesized)
ttcaggtaagaactaggaatgcttcataagtcatgaggatgtttttatatatatatgtggcaaacaaatatgacagtgcttgctgtgtaacagatgttccataataacctgtaaacattc

SEQ ID NO: 435460 - DNA, 120 bp, Artificial Sequence
  ENSG00000152926_57 (sequence is synthesized)
ctgctggagttagtttgtaacttcaagtcagagatggaaaataccaatagtgaagaaataacattgattcttcatgtgcagataacattttttttccatgctgcaaagctaaattttgct

SEQ ID NO: 435461 - DNA, 120 bp, Artificial Sequence
  ENSG00000152926_58 (sequence is synthesized)
gaatttaaaaagaaattttggttcttttatttcctaattacctttagttttgtttgtcttattatgtgacttctgtgtattcatcacagcccttctccttctttttctatgtgatggcta

SEQ ID NO: 435462 - DNA, 120 bp, Artificial Sequence
  ENSG00000152926_59 (sequence is synthesized)
cactttgctcactgttgtcttcatgccatgtcattttatacagtactttgtaggttttgatgagaaagttggtatttttaatgcactcaaaaattgctttttattggagagtacttatca

SEQ ID NO: 435463 - DNA, 120 bp, Artificial Sequence
  ENSG00000152926_60 (sequence is synthesized)
atataactttctgatcagttaattaagataaaaggcatacattgtccacaggtgagaggattaaatcagttagcattatttttttctgtttgtaaaaggaaaaacttattaaatttttaa

SEQ ID NO: 435464 - DNA, 120 bp, Artificial Sequence
  ENSG00000152926_61 (sequence is synthesized)
ctcttattgcccaggctggagtgcaaatatattgtggcaaatataaaatttgctagaaaatacatcttagaaattaagttataagagagcaaatggtaagtgaagaattttaaatttaat

SEQ ID NO: 435465 - DNA, 120 bp, Artificial Sequence
  ENSG00000152926_62 (sequence is synthesized)
taagtgaagaattttaaatttaattttctatgatatagcataacatacatttccatgcagaatcttttatttttaaatgtgaaatttaaaggttgcaaaataataaaatgacttctgtgg

SEQ ID NO: 435466 - DNA, 120 bp, Artificial Sequence
  ENSG00000152926_63 (sequence is synthesized)
atttgatatttggaatgatatttcttttttatattgatattacaattccgaggaatttttcactcattatttttttagtgggtgaaggtgagtgtacagttattgctttttgtcacctaa

SEQ ID NO: 435467 - DNA, 120 bp, Artificial Sequence
  ENSG00000152926_64 (sequence is synthesized)
ctatagtcagcttcttggtcattttctctagaaaacttttgaagattatggcagctttttgattaaacattttctgttatttttatgcaaattcatttattgtgttcacagggtggccag

SEQ ID NO: 435468 - DNA, 120 bp, Artificial Sequence
  ENSG00000152926_65 (sequence is synthesized)
tcatgagaccataagcaacagctgcccttttagtgtctttcatgccattaccatctgtaataaataaatgtgtactttattctgcaaaacatgatgtttggaagtatatgttgtcaaatg

SEQ ID NO: 435469 - DNA, 120 bp, Artificial Sequence
  ENSG00000152926_66 (sequence is synthesized)
cttaattctaggtaattaaggctttacctcacatcgttaacatttttgtggtcagagtatgtgacattgtcaatgtttttcaaaaacacaactacattattatgatctgtagtcactatg

SEQ ID NO: 435470 - DNA, 120 bp, Artificial Sequence
  ENSG00000152926_67 (sequence is synthesized)
ctgtacaaaaagatctcttaaacttattcctcctattaaactataattatgtattctttgaccaacatcttccaaaaccccccttttttctaaataccttggtgtctggtggtcaccact

SEQ ID NO: 435471 - DNA, 120 bp, Artificial Sequence
  ENSG00000152926_68 (sequence is synthesized)
ttactctctactttaatgggattaagtttcttagaatccctgtgtaagtaaaatcatgaaaaataatctttgtgtctggctcatgtagacaaatatgatgtcctccaggttaattcatgt

SEQ ID NO: 435472 - DNA, 120 bp, Artificial Sequence
  ENSG00000152926_69 (sequence is synthesized)
gattgaaaataatagaaatttcttttttaaagacgaagagtattccattgtgtatatgtaccacattgtctttatttactcataaatgttgaactgttgattgtgtattttggtaattgt

SEQ ID NO: 435473 - DNA, 120 bp, Artificial Sequence
  ENSG00000152926_70 (sequence is synthesized)
gaagagtgttgcaaacaacatagaagcataaatgtttcttcattctgatttcacttgttttggatatatacagtaaaattgctgtattgtggtttaattttaaattttttgacaaatttt

SEQ ID NO: 435474 - DNA, 120 bp, Artificial Sequence
  ENSG00000152926_71 (sequence is synthesized)
tgtttttcatagtgactctcctcattcacattcaaaccaacagtgtgcaagcattccttttcttcatactttgactaacactttcttttctttttagtaagagtaattctaacaggagtg

SEQ ID NO: 435475 - DNA, 120 bp, Artificial Sequence
  ENSG00000152926_72 (sequence is synthesized)
agttgataatctcctggtttttctttttgctttcctgattatagttgatattgagcattttttatatatcttgaccatttgtcttttcttgaaaaatatttaagccttttgctcattttt

SEQ ID NO: 435476 - DNA, 120 bp, Artificial Sequence
  ENSG00000152926_73 (sequence is synthesized)
aatagttatttgtcttctgttgtatagtcatttaagttgtttatatgtttctgttattaaccctttgtcccacgtatgatttgcaaatattttctcccatttttttcagttgtctcattt

SEQ ID NO: 435477 - DNA, 120 bp, Artificial Sequence
  ENSG00000152926_74 (sequence is synthesized)
tgttgattgtatcagattccatgaagcagctttttaatttcaagtaatctaacgtatctatttttcttttgatttccttggattttgaggttaaataataaaagtcacagcctagatcaa

SEQ ID NO: 435478 - DNA, 120 bp, Artificial Sequence
  ENSG00000152926_75 (sequence is synthesized)
tctggcggcagccggagcttctggtgtagtcttcactgctctgtgtcttctgctcctagaggcccagcttctgtggcctcgttacctgcaggtattgggagatccacagctaagacgcca

SEQ ID NO: 435479 - DNA, 120 bp, Artificial Sequence
  ENSG00000152926_76 (sequence is synthesized)
tctggaaagcccgagtttttttttatttttctctcacatagaacatattttgtattgtttttcaattctctaaggattcctctttccctttagtgatctgtcttcaatttcacagtgaaa

SEQ ID NO: 435480 - DNA, 120 bp, Artificial Sequence
  ENSG00000152926_77 (sequence is synthesized)
gccaacatcctcttcatgggatataaaagactgcacaatctgactggtttttttttgttgttgttttgggggacacacaaatatgcataattttgagaaactctatgttaaacagttttt

SEQ ID NO: 435481 - DNA, 120 bp, Artificial Sequence
  ENSG00000152926_78 (sequence is synthesized)
taaattctctttttgcatcaagtctgaaatgtgtgagtagtgatttctgttccattggtttttttgttgttgtttatttttctgtatattccattctgtttttactactatagctttgaa

SEQ ID NO: 435482 - DNA, 120 bp, Artificial Sequence
  ENSG00000152926_79 (sequence is synthesized)
taccttttcaggatttggctattttggattggctttttctttttatttggcaggacagatttgctgctggtattattctcacttgacagctattttcttcaggacttggacaatgtcaca

SEQ ID NO: 435483 - DNA, 120 bp, Artificial Sequence
  ENSG00000152926_80 (sequence is synthesized)
cagttagttcccttctggcctgcaaattttcttgagaaattcactcattacctcataagactatgcttataaataacatatcacttttatcttgcaactcacaatattctcttgtctgtg

SEQ ID NO: 435484 - DNA, 120 bp, Artificial Sequence
  ENSG00000152926_81 (sequence is synthesized)
acttttaaaattgtgcttatatatgttcttgttgtaaatatctttgtgtgtattctagtttctttgttaacctttttaatttttacatcagtttttcttataatttttcagttccttttt

SEQ ID NO: 435485 - DNA, 120 bp, Artificial Sequence
  ENSG00000152926_82 (sequence is synthesized)
tatattttttacctccacaatatctgttttttgatatttttaatatttttgttatcccaatttttatgatttttaatagttgtctgtgtttctatttcattcatggagtattattcaatt

SEQ ID NO: 435486 - DNA, 120 bp, Artificial Sequence
  ENSG00000152926_83 (sequence is synthesized)
tatgttaactttttaaaattaattttttaatggttgctttctgaaaattttataatatctgatagagctatgttgccctaaaattttgtatgcattgtaatctttaattgaaatttgaac

SEQ ID NO: 435487 - DNA, 120 bp, Artificial Sequence
  ENSG00000152926_84 (sequence is synthesized)
attaaaaacaagctacctgtcacagtgtctataatgtagctttgtcctggcaaagtctgaaaccatttgtcttagctagagatcctgagagtctttcaaacatgttcttaggatgtgtct

SEQ ID NO: 435488 - DNA, 120 bp, Artificial Sequence
  ENSG00000152926_85 (sequence is synthesized)
tgtctgaaatgttctagttgttttttagttaaaagactttattcatgtttcttcttaatagtcatcacttgccacaactgttccctgtctgtagtacagtctctttcctgctgtaacatt

SEQ ID NO: 435489 - DNA, 120 bp, Artificial Sequence
  ENSG00000152926_86 (sequence is synthesized)
tacctttgatctcagcagactcaaaatgtcattccaaagtataccactgttaatttcagcactttatgtcattggagacagaaaccagtgtccgccaaagcacctaataaagccagaaat

SEQ ID NO: 435490 - DNA, 120 bp, Artificial Sequence
  ENSG00000152932_0 (sequence is synthesized)
agtgctgatgttggagccggttagcgaaccccaagagtgcagagtgtggagcgtggagcgccgggactgtgcacgcttgaccggaagcccagaccagtgcggtcctagccagagagaaag

SEQ ID NO: 435491 - DNA, 120 bp, Artificial Sequence
  ENSG00000152932_1 (sequence is synthesized)
gacatttgccaacaatgagacacgaagcgcccatgcagatggcctctgcccaagatgccaggtacggccagaaagactcctctgatcagaactttgactacatgttcaaattactcatca

SEQ ID NO: 435492 - DNA, 120 bp, Artificial Sequence
  ENSG00000152932_2 (sequence is synthesized)
tcggcaatagcagtgtggggaaaacatcttttctattccgttatgcagatgactcctttacatctgcattcgtcagcacagttgggatcgatttcaaagtaaaaactgtattcaaaaatg

SEQ ID NO: 435493 - DNA, 120 bp, Artificial Sequence
  ENSG00000152932_3 (sequence is synthesized)
aaaagagaatcaagcttcagatttgggacacagcaggccaggaaagatacaggactatcaccacagcctattatcgtggagccatgggctttattttaatgtatgacattacaaatgaag

SEQ ID NO: 435494 - DNA, 120 bp, Artificial Sequence
  ENSG00000152932_4 (sequence is synthesized)
aatccttcaatgcagtacaagattggtcaactcaaatcaaaacatactcttgggacaatgcccaagttattctggttgggaacaagtgtgacatggaagacgagcgggtcatctcaactg

SEQ ID NO: 435495 - DNA, 120 bp, Artificial Sequence
  ENSG00000152932_5 (sequence is synthesized)
agcgaggtcaacatttaggagaacagcttgggtttgagttttttgaaacaagtgccaaggacaacattaatgtcaagcagacatttgagcgccttgtggatatcatctgcgacaaaatgt

SEQ ID NO: 435496 - DNA, 120 bp, Artificial Sequence
  ENSG00000152932_6 (sequence is synthesized)
cagagagtttggagactgatcctgccatcactgctgcaaagcagaacacgagactcaaggaaactcctcctccaccgcagcccaactgtgcctgctagtgtccccgtgcacacaggcagc

SEQ ID NO: 435497 - DNA, 120 bp, Artificial Sequence
  ENSG00000152932_7 (sequence is synthesized)
tccagggggctctggttgccaacaaacagcatttgtaaatggtctattagccttcatttatactgcctaacaattatttgaaggaataaattgatgtcaatggctcgtacgcattcaatt

SEQ ID NO: 435498 - DNA, 120 bp, Artificial Sequence
  ENSG00000152932_8 (sequence is synthesized)
cttgggagctttcctgtttaatatgtggcaaatatgtgatcttaaatttataaggactatccatctataaacatctggtacctgcatgtgacttgttatttatttgtctgctaggctctt

SEQ ID NO: 435499 - DNA, 120 bp, Artificial Sequence
  ENSG00000152932_9 (sequence is synthesized)
tttgtttcaaatttgttctcagactacttctgggacatcagactataatctcactacaactggcttttgtcccattgattcaaattatgctattcacttgtaggaatgatgaccaaggaa

SEQ ID NO: 435500 - DNA, 120 bp, Artificial Sequence
  ENSG00000152932_10 (sequence is synthesized)
gtgtgtgtgtgtgtgtgcacgcatgcccgcatgcgtgcagaggaagaagtcacaagacttcatttgctttactcttagttgaaaatcaaatggaagtttttctcatgattagggacgctg

SEQ ID NO: 435501 - DNA, 120 bp, Artificial Sequence
  ENSG00000152932_11 (sequence is synthesized)
atgattagggacgctgtcacgagtctggtcagtttactgttgggaactgtgtctttatttcactgttattaataactgagatcattggcctataaagaaattgaaatgttgtttttaagg

SEQ ID NO: 435502 - DNA, 120 bp, Artificial Sequence
  ENSG00000152932_12 (sequence is synthesized)
tccttgcaattttcctaagtcattaatattacctgactggggctatttaacaataatcttcgtttacacatttaaataagcaagtatctacccaggactgctttttccactgatccttcc

SEQ ID NO: 435503 - DNA, 120 bp, Artificial Sequence
  ENSG00000152932_13 (sequence is synthesized)
caattctgtgaatattcaacatcattgaacagattgagacatatctactgaatgccagttatgcaacaagcattttaaccaagaagggtatgagtagctatggaattccaaggtccaagc

SEQ ID NO: 435504 - DNA, 120 bp, Artificial Sequence
  ENSG00000152932_14 (sequence is synthesized)
ccccttatttttcaatgacttgccttccccaacccccataatgcacaccaccaccaccatcactttctggaaccatcaccaactcttggactagagcttatgttgaagcttgttagggct

SEQ ID NO: 435505 - DNA, 120 bp, Artificial Sequence
  ENSG00000152932_15 (sequence is synthesized)
cctctttccgtaggatgtagacttgcctccccaaacacggccatcttctcaaacctcagctaagttcttttacctgtttagatgctatttaaatcagatttcaaagggtccccagttgag

SEQ ID NO: 435506 - DNA, 120 bp, Artificial Sequence
  ENSG00000152932_16 (sequence is synthesized)
aaaaaggaaaattttaatctttaatcatctttttaagtccagatgttcataaattctaaagcatattcctattacgtgaatgcttaagttacacaggaaacattctataactgtagtatt

SEQ ID NO: 435507 - DNA, 120 bp, Artificial Sequence
  ENSG00000152932_17 (sequence is synthesized)
tcaatttcagaaatatttaggatccatagcaatttaaaagagggaggaaaccactggagcattctaattttgtatcacaaacttcctaaaggacctatatgaataaagagaaaacaacaa

SEQ ID NO: 435508 - DNA, 120 bp, Artificial Sequence
  ENSG00000152932_18 (sequence is synthesized)
atcctaccagctgtacagagagcaacagggaaatttggcctctgtatcactgtccagcattatttaaagctaggatttaggaaggaagcaggaattatttggcagatttggaaggatagt

SEQ ID NO: 435509 - DNA, 120 bp, Artificial Sequence
  ENSG00000152932_19 (sequence is synthesized)
ttcgttaagtgaactttctacttttttggtggttatgtcaaagaatttttttcctcttctcaaaaatagagaggcttcccatgaaagtattggatgcaaatgaaacaggcatacatctaa

SEQ ID NO: 435510 - DNA, 120 bp, Artificial Sequence
  ENSG00000152932_20 (sequence is synthesized)
agatatctttggagaataaatccttacaagtcacagaactaggtcacacacattagtaagtcaaaagttggaaattaggggagagagcatttggaatgctttaagcatttccatgttatt

SEQ ID NO: 435511 - DNA, 120 bp, Artificial Sequence
  ENSG00000152932_21 (sequence is synthesized)
tctcaccttcctagttgaagatccactaatcagtagtacatttctactttggtgccctacaaagcaaaccttagcatagtaaagacaagaaaacattaatgttttattagtttttaatgg

SEQ ID NO: 435512 - DNA, 120 bp, Artificial Sequence
  ENSG00000152932_22 (sequence is synthesized)
ggcaaccaacttcaaaatcacaggaattacagtgacgggagagaaagaagcaggaggcataaaaacagatttgtttgtagcagtagtctgtttgtacaatgttataatatttctgtaact

SEQ ID NO: 435513 - DNA, 120 bp, Artificial Sequence
  ENSG00000152932_23 (sequence is synthesized)
tgggccagaatgtggccatgttaaatgatatagctattaagctcacttttacaatctaaaaggaactaataaagccaggaaacccttctcatcctccttcacagccctcatcccacacat

SEQ ID NO: 435514 - DNA, 120 bp, Artificial Sequence
  ENSG00000152932_24 (sequence is synthesized)
agatgtaaaaagcttagaaagaatattctgatggctttttcagaaggaaggaccttgatgtgtgtattgtggtaaaatgaaaagcaaaatgagacagtatttaaaagtgaaagagcagag

SEQ ID NO: 435515 - DNA, 120 bp, Artificial Sequence
  ENSG00000152932_25 (sequence is synthesized)
ttttgctctgctgaaaaccccttccctgaagaactgattgctgttgaagttaattggcccttagatgggaagccctaagccaagctcccacttacacagtgtcaaacatcccgaagtgga

SEQ ID NO: 435516 - DNA, 120 bp, Artificial Sequence
  ENSG00000152932_26 (sequence is synthesized)
aacattttatgccagtcaggggagagacaggcaacaatagcccaaatgtcattgccaagaaacatctgatactttctaatttctaaaccccaatggaagtgaggcctttttcattgattc

SEQ ID NO: 435517 - DNA, 120 bp, Artificial Sequence
  ENSG00000152932_27 (sequence is synthesized)
tcagttctgaaactcccaccctgttaggatttccattccaaataattcaatgagaggtttccagagaaacagtcacagagctcaagagaaagaacacttaaatgctcctgctgtaattgc

SEQ ID NO: 435518 - DNA, 120 bp, Artificial Sequence
  ENSG00000152932_28 (sequence is synthesized)
atcaaaaaatccgggttttaacatcaaatttggcaaatggtgggaccaacccaaggttaactaagtgggctttcattggcattgagctatgttacttataaattataacactatagttcc

SEQ ID NO: 435519 - DNA, 120 bp, Artificial Sequence
  ENSG00000152932_29 (sequence is synthesized)
cacacacacacacacacacactataccatcatctatcaatagtctaaatacataaataaatgcaggtcatttttatcaatggcctaactaaatttatatttaaaagaacaagacttttaa

SEQ ID NO: 435520 - DNA, 120 bp, Artificial Sequence
  ENSG00000152932_30 (sequence is synthesized)
ggcctaactaaatttatatttaaaagaacaagacttttaaaaagtacatactcctgttggtttgtaagttatacacatttatctcttgtctttgatttaattaaattagtgttttaagta

SEQ ID NO: 435521 - DNA, 120 bp, Artificial Sequence
  ENSG00000152932_31 (sequence is synthesized)
tgaatttattttcctttgctactcattacctgaccactttcactcctctagatacccttaggaataaacctgaactgttccaaatcgattcttccaagagctttggtgttggtaccttcc

SEQ ID NO: 435522 - DNA, 120 bp, Artificial Sequence
  ENSG00000152932_32 (sequence is synthesized)
tttcttttcctaatgcaactgaaaaattagactgaaaattatttgacttaaatagccatcctcagagtgaatcagcatttcagtttttggagatggggatggaagtagaaggtgcacaaa

SEQ ID NO: 435523 - DNA, 120 bp, Artificial Sequence
  ENSG00000152932_33 (sequence is synthesized)
gcgtcctaagatggcagtttgaatgttagcatcgcatctacatgctcataagaggaattgcttcaggacaatgaatcagttcattgttgctgcccccagtgaacagctccaactgccttg

SEQ ID NO: 435524 - DNA, 120 bp, Artificial Sequence
  ENSG00000152932_34 (sequence is synthesized)
atgaacttctaatgactgtgaaagctaggaggttcttctagttcctccttagggtcacttgaagttcagtatttttttgctgcctggtaactaagtgctaagatttttacttggaaagaa

SEQ ID NO: 435525 - DNA, 120 bp, Artificial Sequence
  ENSG00000152932_35 (sequence is synthesized)
aactatgacaatgccttcagttgtagcagaaagttgtggcattgtgataataaacaaaatctacaaagttacaacccaaattatacaagacatcaaaacactcagtaaacaaatatatat

SEQ ID NO: 435526 - DNA, 120 bp, Artificial Sequence
  ENSG00000152932_36 (sequence is synthesized)
tctatgctgacgatagactttcgggtatatacaaccttcttcttctcttttaaaagttaaatacattccactattaactgaacttccatgaagcaacattaattttagagcatggtagtc

SEQ ID NO: 435527 - DNA, 120 bp, Artificial Sequence
  ENSG00000152932_37 (sequence is synthesized)
cataatcagtggttcattgtgatgtgctttatccaacatgtatcttagtgcatggttgaggatgtactatgtgatattttagttaacagtgtggcatttgtgggactatattaaaagcat

SEQ ID NO: 435528 - DNA, 120 bp, Artificial Sequence
  ENSG00000152932_38 (sequence is synthesized)
atccaaactaccaagctataccaagctgaggtaggtaacacctgcatgtgaaaaactgtgatatgaatcttatttataaaaaagtcataactaaaacccttctagaccaaaaagttactg

SEQ ID NO: 435529 - DNA, 120 bp, Artificial Sequence
  ENSG00000152932_39 (sequence is synthesized)
tgtgtttgttaataatcttcatagtactactggaatgctcaatcagttatttttggtgtggcatacttcagagctggcctgtccgtctgaagaaccctttctctcacaattacagtttgc

SEQ ID NO: 435530 - DNA, 120 bp, Artificial Sequence
  ENSG00000152932_40 (sequence is synthesized)
atgactagaacccggaactctgttcctttgcgtgtatagtcacttagtgtgctgtccgggtgccacatgagcaactacacccatgtggcctttctgtcactccctggaaaatgcaacctc

SEQ ID NO: 435531 - DNA, 120 bp, Artificial Sequence
  ENSG00000152932_41 (sequence is synthesized)
tacagctctgctcagctctgcctgtgtgcattgattaccttcgctttagtagtttgcctgtaaaatggtgaagtctttctgatatgctgaacctttgagccagcttttgggagttcttca

SEQ ID NO: 435532 - DNA, 120 bp, Artificial Sequence
  ENSG00000152932_42 (sequence is synthesized)
tattttaggtgaatttttgaccaaagtcaattaaagacataaacctgttttatatcatggaatttactgggccaaattaagtaaaagatgaagtttatgaccagaataaaaaagccttta

SEQ ID NO: 435533 - DNA, 120 bp, Artificial Sequence
  ENSG00000152932_43 (sequence is synthesized)
cccctgcacagcactgtatctaaagggctctaggttgtagaaatatagtaccccctaacagggaaaaaccaagttgggggatttatctaaaatgtatctacctattgttactggtatttc

SEQ ID NO: 435534 - DNA, 120 bp, Artificial Sequence
  ENSG00000152932_44 (sequence is synthesized)
acaaataatttttttcttaaaaatatttacagaaatgcttgacactccggtcaaataatatttccctttgatagattgaaatatttgcttttagattacacatacagtgctgcccttctc

SEQ ID NO: 435535 - DNA, 120 bp, Artificial Sequence
  ENSG00000152932_45 (sequence is synthesized)
aacagtcactcacacgctcactcgcctgtacaaaggtatcaggcaaacactgatacttttttttaagaaggcaaaattccatctatggtgctttctcagtgctagggaaaagggagcttt

SEQ ID NO: 435536 - DNA, 120 bp, Artificial Sequence
  ENSG00000152932_46 (sequence is synthesized)
tactatgttccagctataactcacatcttacttataaggtccataaaatcggttcttcacactgatttcgtttgattagtctgtgcatgtaattaatttcctccaaacagagagagtgga

SEQ ID NO: 435537 - DNA, 120 bp, Artificial Sequence
  ENSG00000152932_47 (sequence is synthesized)
ggggaaataaattttgcaagcattctagataacagaaatgagtcattttaaaacctcactcagagctcgagtgttaagatcagaccatctagctagtggacaaattgaactttctatttg

SEQ ID NO: 435538 - DNA, 120 bp, Artificial Sequence
  ENSG00000152932_48 (sequence is synthesized)
cagttctcttttactttctgactttcttttaaattactgcagtttttcaaaacactatcctcatggaatgacaggaccaagaatagaaaatgagactcaaatttcaccatttacttccca

SEQ ID NO: 435539 - DNA, 120 bp, Artificial Sequence
  ENSG00000152932_49 (sequence is synthesized)
tcagcaaccattactggtggagtttcaaacagtcattacttgctgaaatgaggtttgaggttacctgtgtatttcattcacctgtgttaatatttccttcatcgtggacaagtgagagtt

SEQ ID NO: 435540 - DNA, 120 bp, Artificial Sequence
  ENSG00000152932_50 (sequence is synthesized)
ggctgtggctttatttcttgaggcaaattattttgcattcatgttatttggggctaggtattgcttaggttcgtgaatgctgttcttacagacacagatggtacctgagcccctcagaca

SEQ ID NO: 435541 - DNA, 120 bp, Artificial Sequence
  ENSG00000152932_51 (sequence is synthesized)
cctgccctttcagggacgtgagcatgacttacatctgtcaagtggttccatacttcttgtaaaagtaaagtttgggtattgtttgctgtatcaatatgatggctttccatgcattgtctc

SEQ ID NO: 435542 - DNA, 120 bp, Artificial Sequence
  ENSG00000152932_52 (sequence is synthesized)
attatccctaggatacgtgctaaaggaaaactgtcctgtaattcctgttaatatattgttaatgtcagacgtgatgtgataccgttagactgtccaaatgtacaacaatttaatggtgtt

SEQ ID NO: 435543 - DNA, 120 bp, Artificial Sequence
  ENSG00000152932_53 (sequence is synthesized)
tgtagaactgatatgtcttaaatgttgcatgaaatatgttataaaaatagatttgttttctattttcaacacctcagaattgagggttcatgggccaataagtgcaatatttaatgactc

SEQ ID NO: 435544 - DNA, 120 bp, Artificial Sequence
  ENSG00000152932_54 (sequence is synthesized)
actcagtgtatataaactagtatgaaagagtgaattataatgaatgtgtgagatgctttgatagctgtgtgacttattcaaatgattttcttgtagctgtatttgtctagtggtgcaatt

SEQ ID NO: 435545 - DNA, 120 bp, Artificial Sequence
  ENSG00000152932_55 (sequence is synthesized)
tatacagtaaatatcttattggtgtcatgtaaaacccctctgtgcctacttcaaaatacttttttcttataaaaccaaacatttagtatctggaaatatgtgtcaattttatctcttaga

SEQ ID NO: 435546 - DNA, 120 bp, Artificial Sequence
  ENSG00000152932_56 (sequence is synthesized)
attgtggattttattgtcaagacagaatggctgttcatttattttataaaagcatctccttctataactcaaaattttctttaagtgtcatataaaagtgtacattttacttttaagcaa

SEQ ID NO: 435547 - DNA, 120 bp, Artificial Sequence
  ENSG00000152932_57 (sequence is synthesized)
ctaatttagatacctaagaaaaactatgtgcattaggaaaagtcatgtttttcttctcagaaaggttgatcacatgacatgtctactaagaattttcacctctgtacttgtatgtatatt

SEQ ID NO: 435548 - DNA, 120 bp, Artificial Sequence
  ENSG00000152932_58 (sequence is synthesized)
ttattgttactcaatcttgtattttatttacaaattcaacactgtcaaccctgggaattctaaaataccaatgtatttttaggttgtagctaatgttgtattcactttcaattctcagtt

SEQ ID NO: 435549 - DNA, 120 bp, Artificial Sequence
  ENSG00000152932_59 (sequence is synthesized)
gtccacactggtgatataagaggaacaaatcagaatcattaaatactttgtaatgccatcataaactcatatattcatcctcaaactcccttgtttaatgctaattggtggcctggaact

SEQ ID NO: 435550 - DNA, 120 bp, Artificial Sequence
  ENSG00000152932_60 (sequence is synthesized)
tcactgagatgcaaaatcaagaactgaagcctagttgctagataacgaaaagctataaatgtttatgtatgtgaattttaaattagaataaccgtcttaaactcctacttgccatttcta

SEQ ID NO: 435551 - DNA, 120 bp, Artificial Sequence
  ENSG00000152932_61 (sequence is synthesized)
aggcaaagcattcattttaatattgtactttgccttttcattcagttagtggagtaagtcatgaaacccttaggaagaaaaacaagttatgacttattcactaaaattgatgcaagacag

SEQ ID NO: 435552 - DNA, 120 bp, Artificial Sequence
  ENSG00000152932_62 (sequence is synthesized)
ttggttctagatgaccatggccatgtgttcatcatataaaaccttcagttctctctatggtgcttggctggagattgacatgtgaggatgtgccaatcatattaaatggatttggtctat

SEQ ID NO: 435553 - DNA, 120 bp, Artificial Sequence
  ENSG00000152932_63 (sequence is synthesized)
gtgggtgatatgtggcctgaatgtaactgtgatagactgaaatttgttcttagctctcaaaatccactgaagaagtcaagtgaaggtgggtaaaatagggagattagtgacaactttgtg

SEQ ID NO: 435554 - DNA, 120 bp, Artificial Sequence
  ENSG00000152932_64 (sequence is synthesized)
ccaaattttttaaaaaatggaagcaggtagccaatattagaatgataatttaagggtgtggttgaattttagttagttgtcacatagttattgaacctcatatgctcagtgctgtgggaa

SEQ ID NO: 435555 - DNA, 120 bp, Artificial Sequence
  ENSG00000152932_65 (sequence is synthesized)
tcaaacatggaagaggtatggctcctgcccctaatgagaacaagggggaaaaatccagatataatctaaatgctaggttatgtcagggtataggaacacagagaatgggggacctgtaag

SEQ ID NO: 435556 - DNA, 120 bp, Artificial Sequence
  ENSG00000152932_66 (sequence is synthesized)
aactggaagagtcagagagggctccattgaagaggtcaaacataattccggaaagaattaggtagtgaggagattgtgccaggaaaataagtgggaaaggccacagttatgtttcctttg

SEQ ID NO: 435557 - DNA, 120 bp, Artificial Sequence
  ENSG00000152932_67 (sequence is synthesized)
aatggaagagagacaaagctatcagctatagatcattgttttcttaagacagccaaactggccctttgaaaccattcaaattaccccagtttagctccctaccttttagtctccgtgagg

SEQ ID NO: 435558 - DNA, 120 bp, Artificial Sequence
  ENSG00000152932_68 (sequence is synthesized)
aagacaagctgttgcattatcatattcctctgtgctgagcagctcaagactcagccacaatatgcaaattgctttaatgccatattacggcagttgatttagacatttgccagtgcacca

SEQ ID NO: 435559 - DNA, 120 bp, Artificial Sequence
  ENSG00000152932_69 (sequence is synthesized)
aaccatgagagattgtccgacctaatgccacctggcagatgtgtacccagagatttttctgtagctccatgtttcccataaagggcattggaaatgcacagatgaagatcttcctttgga

SEQ ID NO: 435560 - DNA, 120 bp, Artificial Sequence
  ENSG00000152932_70 (sequence is synthesized)
accaggcacatttggccccttctcagtgactgcactgtggaactcttcttaagaaaatattgaaaacagcttaatgctttcatatagtgaccgacatttagttgaaaactactgctgcat

SEQ ID NO: 435561 - DNA, 120 bp, Artificial Sequence
  ENSG00000152932_71 (sequence is synthesized)
agcaaatattgtgactcttcatgtgtccacaggagctcttgtgtgggtttaaagctatgaagtgtattcacattgtgaagttttaattatctttattgaaattaattgtgtaaaaatggt

SEQ ID NO: 435562 - DNA, 120 bp, Artificial Sequence
  ENSG00000152932_72 (sequence is synthesized)
atgtgctctattaggtattcagtttgtatgtgaattctataaagaaagtggtttttgttctttgagtttgttttatttcttgaagattacaataaatatctaagagactatattcctgaa

SEQ ID NO: 435563 - DNA, 120 bp, Artificial Sequence
  ENSG00000152932_73 (sequence is synthesized)
gataccaacttttcagagtgctgagaggatttgatggcataatttgtgtaagatgcctagccccgtgcctgcatgatctatactttggctgacagtccgtgccttcaggcagcctcacaa

SEQ ID NO: 435564 - DNA, 120 bp, Artificial Sequence
  ENSG00000152932_74 (sequence is synthesized)
gaatatctgagaacagacagtattgcgttgcatccaggatttggtatggacaacttatcctgctccctggtgccaacacaatatttcacaacagacaataaaactaaaggacacagcagg

SEQ ID NO: 435565 - DNA, 120 bp, Artificial Sequence
  ENSG00000152932_75 (sequence is synthesized)
agaatttacaatttaaaagaaaacagaggaagaaaagtagaaaaaaagctggcatgacacaaaacaaaacacagaagcttgtgggaaccatgataacttactgatttttctggctgcaag

SEQ ID NO: 435566 - DNA, 120 bp, Artificial Sequence
  ENSG00000152932_76 (sequence is synthesized)
attgtatgaaacaaaaaatagcaatatataacacttccagtttccccccgaagcaggcatgaccaagctcgttgtggtccagattgtctaaccagttatgctttaaaaaaaaaaaacatt

SEQ ID NO: 435567 - DNA, 120 bp, Artificial Sequence
  ENSG00000152932_77 (sequence is synthesized)
gaagccctccatctaaatcagctgtcttctccacatccctcctttttctctccgccagacgccacccctaccccttctattgtgttgtgccttttcattttagccccgcttcctacgtag

SEQ ID NO: 435568 - DNA, 120 bp, Artificial Sequence
  ENSG00000152936_0 (sequence is synthesized)
aagctgcttccagtgaatgctacacacctgcaccatggtttgtccgacatccttagccaagatcaggattggctatgttggtacttacatatcctcatgagaattgtggttctggtacta

SEQ ID NO: 435569 - DNA, 120 bp, Artificial Sequence
  ENSG00000152936_1 (sequence is synthesized)
gtttggtaaagaaattattaaacctagctgatgcttgaaggtagttggattaacagaagagaagacaaacttggagtatattctttagtacatttttccccaaagatgttgggttcagtt

SEQ ID NO: 435570 - DNA, 120 bp, Artificial Sequence
  ENSG00000152936_2 (sequence is synthesized)
gccacaacactgccattgtcatcttcaaattccagtggaatgcctcttggttactatctgtctagtcctcagattagtagagtaactatatcaacaactggacaattgacttctaaagct

SEQ ID NO: 435571 - DNA, 120 bp, Artificial Sequence
  ENSG00000152936_3 (sequence is synthesized)
actgtaggtagctgttccagagtggaaaacagcttggatgccagccccttctcagttccgaagaaacaggatgaatcacccatgattggggatggagaagattatttcctttctttgttt

SEQ ID NO: 435572 - DNA, 120 bp, Artificial Sequence
  ENSG00000152936_4 (sequence is synthesized)
ggtgattcaaagaaacttacagcacactcaaactacactcagaaaactttaaaatacttttctatgattcttgaagaagttggccaatttacctccagttctcttggagatgttgaaata

SEQ ID NO: 435573 - DNA, 120 bp, Artificial Sequence
  ENSG00000152936_5 (sequence is synthesized)
gctgaagtgaatgtcaagggtttgttcgtgaagctcattaactcttcccttgacaaagaaatggcaattggagatcatattctccagcaaaatgtgaatggacaaaccatttctttgtac

SEQ ID NO: 435574 - DNA, 120 bp, Artificial Sequence
  ENSG00000152936_6 (sequence is synthesized)
cgattccttccaaacatcgtaatgcaggcaaattccacagtaacagtgtgggcagcagcatctgaagcaaagcatcaacctccatcagattttctttggaaggaacaagacaagtttaga

SEQ ID NO: 435575 - DNA, 120 bp, Artificial Sequence
  ENSG00000152936_7 (sequence is synthesized)
cggtcaagccattgcgtggtacacccctatccactggaagcaagcgtgggaaaaattagatgctgacgttgaatttaacagatgttcagtagtatctccaacattccgaaagcgtgtgtt

SEQ ID NO: 435576 - DNA, 120 bp, Artificial Sequence
  ENSG00000152936_8 (sequence is synthesized)
tcagtggacagcatctacagctacaataactaaagaaaaacaagatcaacctaagaaagatatctcaaattatcaggtggaacaagctcaagttcttcttaagagagagaaggaaatccc

SEQ ID NO: 435577 - DNA, 120 bp, Artificial Sequence
  ENSG00000152936_9 (sequence is synthesized)
accaaccgttttccctaatcgcagcccttggtgccagaatccctatgtctctgcacatccttactgtcctctgattgaaccacacaatacatccaccgctggaggcagattggatagaca

SEQ ID NO: 435578 - DNA, 120 bp, Artificial Sequence
  ENSG00000152936_10 (sequence is synthesized)
gcccaggactcggtcaaccagacctaatcgagcctcagggtctaagaaaaagaagacatctgagtcacaaaagcaataagcagtcaactcaacctttaaagtaatctagtccaccctcaa

SEQ ID NO: 435579 - DNA, 120 bp, Artificial Sequence
  ENSG00000152936_11 (sequence is synthesized)
ccagctactagaaaagcaaaagagaactcaaatccctgaggcctgctctgcaacctccctgctattccatgagagggtgaagacatcacatttctatatggaaaaaggatccaaaatttg

SEQ ID NO: 435580 - DNA, 120 bp, Artificial Sequence
  ENSG00000152936_12 (sequence is synthesized)
tattgctgtagaattggtgaattatagatgcttgatgaaatcacaagtcctaccactcctgccttccaaatccctgcagaaaacaagcagatggttagtattattcaatggataaaattg

SEQ ID NO: 435581 - DNA, 120 bp, Artificial Sequence
  ENSG00000152936_13 (sequence is synthesized)
ctatttgccttagatttctctttttgtaaacaaagttattttgggtacagaactcacaaaagaagagcacgtgcaattgtttaaccattttacattgactgataaatctcttttttccat

SEQ ID NO: 435582 - DNA, 70 bp, Artificial Sequence
  ENSG00000152936_14 (sequence is synthesized)
gttcaagtgactgcatggctaatttttgtatttttagtagcaacgaggtttcaccatgttggccaggctg

SEQ ID NO: 435583 - DNA, 120 bp, Artificial Sequence
  ENSG00000152936_15 (sequence is synthesized)
ccaagatgaaagatacacaagacattcaggaagcttcgaaggcaatgcagaataaagtccatgagcaggaagataagaatgagaaacaaaaacaaagagaagacaaacttggagtatatt

SEQ ID NO: 435584 - DNA, 120 bp, Artificial Sequence
  ENSG00000152936_16 (sequence is synthesized)
gccctctcaagctgcttccagtgaatgctacacacctgcaccatggtttgtccgacatccttagccaagatcaggattggctatgttgaagagaagacaaacttggagtatattctttag

SEQ ID NO: 435585 - DNA, 120 bp, Artificial Sequence
  ENSG00000152936_17 (sequence is synthesized)
agttgtatggaagagtaaaaagacctgcaatctaggctccctgccatgctggccaaagacattccacaacttaaagaaaatcaaatgcctgagcaaacgtagcgggttccgctttcatag

SEQ ID NO: 435586 - DNA, 120 bp, Artificial Sequence
  ENSG00000152936_18 (sequence is synthesized)
ttaaaggcttcctattctttacttgacttaagatgaaaactacagccacgtgaaccctaacttgttggtattctggactctcctggtagaaatgacttaattttactactccatacagcc

SEQ ID NO: 435587 - DNA, 120 bp, Artificial Sequence
  ENSG00000152936_19 (sequence is synthesized)
tcaggattaagcatttcctggccaagaaacaaaagcaaaatcgtcccattccccagtggattcggatgaaaactggtaatacaatcaggtacaactccaaaaggagacaatggagaagaa

SEQ ID NO: 435588 - DNA, 120 bp, Artificial Sequence
  ENSG00000152936_20 (sequence is synthesized)
cataacagaagaagcttaaggacactacatgcaacagccagtgagagcaggagacatcggtgtttccagagtccagacccaccacagcttctgagcaagatcaccatttggagacagact

SEQ ID NO: 435589 - DNA, 120 bp, Artificial Sequence
  ENSG00000152936_21 (sequence is synthesized)
tatctaaagattttgtgattgggaagctccatgaagattactttgaacaaactgtctgaaacttgaaacttccaatacatgtcctctagcctctcttgaaatacccctcgtaggagctta

SEQ ID NO: 435590 - DNA, 120 bp, Artificial Sequence
  ENSG00000152939_0 (sequence is synthesized)
gataccggtttcagagtcctgggcagcgtgcgcgctcttcctggcggctgcgcaggtgtgaaaatcacaaatgtcaaatgatggaagatccaggaatcgggacaggcgctacgatgaggt

SEQ ID NO: 435591 - DNA, 120 bp, Artificial Sequence
  ENSG00000152939_1 (sequence is synthesized)
cccaagcgacctgccctatcaagataccaccataagaacccacccaactcttcatgacagtgagcgggcagtgagcgctgatcccttgccaccaccccctctcccattacagccaccatt

SEQ ID NO: 435592 - DNA, 120 bp, Artificial Sequence
  ENSG00000152939_2 (sequence is synthesized)
cggcccagacttctactcaagtgacacagaagaaccagctatagcgccagatctcaaaccagtaaggcgctttgtccctgactcctggaagaactttttcagagggaagaaaaaggaccc

SEQ ID NO: 435593 - DNA, 120 bp, Artificial Sequence
  ENSG00000152939_3 (sequence is synthesized)
cgaatgggataagccggtgtctgatatcaggtacatctccgatggagtggagtgttcaccaccagcctctccagcaagaccaaaccaccgttcgcccctcaactcctgcaaagatcccta

SEQ ID NO: 435594 - DNA, 120 bp, Artificial Sequence
  ENSG00000152939_4 (sequence is synthesized)
cggagggtcagaaggaacctttagttcccggaaagaggctgacgcagtgtttccccgggatccctatggatctctagaccgacacacacaaacagttcgaacatacagtgagaaggtgga

SEQ ID NO: 435595 - DNA, 120 bp, Artificial Sequence
  ENSG00000152939_5 (sequence is synthesized)
ggagtataacctgagatactcctacatgaagtcgtgggcaggcctgctgagaatactgggtgtggtggagctgcttttgggggccggtgtctttgcttgtgtcacagcttacattcacaa

SEQ ID NO: 435596 - DNA, 120 bp, Artificial Sequence
  ENSG00000152939_6 (sequence is synthesized)
ggacagtgagtggtacaacttgtttggatattcacaaccgtatggcatgggaggcgttggtggattgggcagtatgtatgggggctattactacactggccctaagaccccttttgtact

SEQ ID NO: 435597 - DNA, 120 bp, Artificial Sequence
  ENSG00000152939_7 (sequence is synthesized)
cgtggttgctggattagcttggatcaccaccattattattctggttcttggcatgtccatgtattaccggaccattcttctggactctaattggtggcccctaactgaatttggaattaa

SEQ ID NO: 435598 - DNA, 120 bp, Artificial Sequence
  ENSG00000152939_8 (sequence is synthesized)
cgttgccttgtttattttgtatatggccgcagccatagtctatgtgaatgataccaaccgaggtggcctctgctactatccgttatttaatacaccagtgaatgcagtgttctgccgggt

SEQ ID NO: 435599 - DNA, 120 bp, Artificial Sequence
  ENSG00000152939_9 (sequence is synthesized)
agaaggaggacagatagctgcaatgatcttcctgtttgtcaccatgatagtttatctcattagtgctttggtttgcctaaagttatggaggcatgaggcagctcggagacatagagaata

SEQ ID NO: 435600 - DNA, 120 bp, Artificial Sequence
  ENSG00000152939_10 (sequence is synthesized)
tatggaacaacaggagataaatgagccatcattgtcatcgaaaaggaaaatgtgtgaaatggccaccagtggtgacagacaaagagactcagaagttaatttcaaggaactgagaacagc

SEQ ID NO: 435601 - DNA, 120 bp, Artificial Sequence
  ENSG00000152939_11 (sequence is synthesized)
aaaaatgaaacctgaactactgagtggacacatccccccaggccacattcctaaacctatcgtgatgcccgactatgtggcaaaataccctgtgattcagacagatgatgagcgagaacg

SEQ ID NO: 435602 - DNA, 120 bp, Artificial Sequence
  ENSG00000152939_12 (sequence is synthesized)
ctataaagctgtgttccaagaccagttttcagagtacaaagagctgtctgcagaagttcaggctgtcctgaggaagtttgatgagctggatgcagtgatgagcagattgccacatcattc

SEQ ID NO: 435603 - DNA, 120 bp, Artificial Sequence
  ENSG00000152939_13 (sequence is synthesized)
ggaaagccgacaggaacatgagagaatttcaagaatccatgaagagtttaagaaaaaaaagaatgatcctacatttctggaaaaaaaagaacgctgtgattacctaaagaataaactttc

SEQ ID NO: 435604 - DNA, 120 bp, Artificial Sequence
  ENSG00000152939_14 (sequence is synthesized)
aaactttctcacataaagcaaagaattcaagaatatgataaagtaatgaattgggatgtacaaggttattcttaacgcttatttgaaaccactttatttttttattttattttatttttt

SEQ ID NO: 435605 - DNA, 82 bp, Artificial Sequence
  ENSG00000152939_15 (sequence is synthesized)
gaaactactttttttaaaaaatagcaagtttactatttatttactgcctttttaatgctagcctctgtggtagagaagcaag

SEQ ID NO: 435606 - DNA, 120 bp, Artificial Sequence
  ENSG00000152939_16 (sequence is synthesized)
actgcctttttaatgctagcctctgtggtagagaagcaagcgcttcccaaatcagcttccaattggtttaaccagtatgcaacattaaagattttactcagacatttttaaacgaattca

SEQ ID NO: 435607 - DNA, 120 bp, Artificial Sequence
  ENSG00000152939_17 (sequence is synthesized)
tagagatcgtatcctggcagtgtgatgggcaagtggaccatcaattctggtgctactttttccttttttactcaggcaggttcctaggatttttctgggacaaatttctcttcctagaga

SEQ ID NO: 435608 - DNA, 120 bp, Artificial Sequence
  ENSG00000152939_18 (sequence is synthesized)
aattcctaggggatttctaaaggatttttctaagggaaaaagggtgacatctttcaaaggtgtcatttattcccttgaaaggtgtttgaatcccagatcaacattttcagacatcctgat

SEQ ID NO: 435609 - DNA, 120 bp, Artificial Sequence
  ENSG00000152939_19 (sequence is synthesized)
cttgggcaaattgcttaatctctctgtgcctgtttcctcttctgtaaaatggggctaataatagttccttcctcatagagttgttaggattaaaggagttactaatatggtaggaactat

SEQ ID NO: 435610 - DNA, 120 bp, Artificial Sequence
  ENSG00000152939_20 (sequence is synthesized)
attagtgtttgtgaagtctactgaagtgtttgtgaaatgaataaattataaagaatgagtctcaagaaaaggtccttaatgagcaagcccaacctacttaaccaaaagcccaagtgtctg

SEQ ID NO: 435611 - DNA, 120 bp, Artificial Sequence
  ENSG00000152939_21 (sequence is synthesized)
gtgcctttctggtttgtggtgttaactcatggccttagcctggtgcttcactgtggctctgtggcccctggggttccacatggcctccctgtctttcatcagtgtgactgtacatctctc

SEQ ID NO: 435612 - DNA, 120 bp, Artificial Sequence
  ENSG00000152939_22 (sequence is synthesized)
ctccctgtctttcatcagtgtgactgtacatctctccatctccccatagtccagcctgccctggacacattgaattgtatgaatggtattgcttttttttttttttttttgtgagacaga

SEQ ID NO: 435613 - DNA, 120 bp, Artificial Sequence
  ENSG00000152939_23 (sequence is synthesized)
gcgtgagtcaccgcgcccagctggtattgcttttctattccctttggacatacatgctacagtcccacaatgtagcatttccttggaaactccctttttttttttttttgagatggagtt

SEQ ID NO: 435614 - DNA, 120 bp, Artificial Sequence
  ENSG00000152939_24 (sequence is synthesized)
agagacaggatttcactatgttggccaggttggtctcaagctcctgacctcagatgatctaccagcctcggccttctgaagtgctgggattcaggtgtgagccactgtgcccagcaggga

SEQ ID NO: 435615 - DNA, 120 bp, Artificial Sequence
  ENSG00000152939_25 (sequence is synthesized)
gcccagcagggatgcttcatctttctaagaattatcttggctttggactttattcataaatgttttatttctgttagtatgaacaatagactgccttaacaaagtttttttttaaacaaa

SEQ ID NO: 435616 - DNA, 120 bp, Artificial Sequence
  ENSG00000152939_26 (sequence is synthesized)
atcgttcttgttggattttattcagcagcatctatcatgtagataaattcccaggtgtagcattacagcttctgactaatatagctgccattcagacaattaatgttcaaagagttttct

SEQ ID NO: 435617 - DNA, 120 bp, Artificial Sequence
  ENSG00000152939_27 (sequence is synthesized)
aaagtgataaaaccaaagaaaagcatgtggaaaagcagaagcttagaaagttgtggtcactgaatgcactccctggtttttatttgtcagtgaaatctttatgcattcattgttaatatt

SEQ ID NO: 435618 - DNA, 120 bp, Artificial Sequence
  ENSG00000152939_28 (sequence is synthesized)
ttaattccatggctttgtaggctgtgctgtgtctgaaggggtaacacctagggaaacatgaggccccttatgggaccccccaaatggaacaacttcactttctcttttatgtattgagcc

SEQ ID NO: 435619 - DNA, 120 bp, Artificial Sequence
  ENSG00000152939_29 (sequence is synthesized)
ctgtgttaacatttcacttaagaagagcaccagtgctttaaaaaaaaaaaaaggtaaaatattaccattttgatagactgtaaagagttagattcctgttgaagtgttaaggaaatttaa

SEQ ID NO: 435620 - DNA, 120 bp, Artificial Sequence
  ENSG00000152939_30 (sequence is synthesized)
ctttgtgaaacttttaaaataaagtttataaatgtagctaatctttgaaaaaccaatgcagtaacactgatttgtaaatgttgtggtcaatccctaggtgcattaaagtttcagtcacct

SEQ ID NO: 435621 - DNA, 120 bp, Artificial Sequence
  ENSG00000152939_31 (sequence is synthesized)
gccgtgtgtgtgtgtgcccttttatgtttgccttcctagcattcctgtgttcactgtgcatgttcttgaaaatattttcacttgtcagaaaataaactggaaagtcattgaaaacccgta

SEQ ID NO: 435622 - DNA, 76 bp, Artificial Sequence
  ENSG00000152939_32 (sequence is synthesized)
gataccggtttcagagtcctgggcagcgtgcgcgctcttcctggcggctgcgcagagacagagactcactgtgtca

SEQ ID NO: 435623 - DNA, 74 bp, Artificial Sequence
  ENSG00000152939_33 (sequence is synthesized)
ctatacctcagccacctgagtagctgggatcacaggcgcatgccacaacgcctggctagtttttgtatttttag

SEQ ID NO: 435624 - DNA, 66 bp, Artificial Sequence
  ENSG00000152939_34 (sequence is synthesized)
gtcaggctggtctcaaactcctgacctgaaatgatccgtatcatatttatcatttttgtatatcat

SEQ ID NO: 435625 - DNA, 120 bp, Artificial Sequence
  ENSG00000152939_35 (sequence is synthesized)
aataattagacatgatcctgttggtctcctaaatactttttgctactacatgaataaaatcagcatcattgagaggataagtaactaatcataagtgataactttaaatttggccacagg

SEQ ID NO: 435626 - DNA, 120 bp, Artificial Sequence
  ENSG00000152939_36 (sequence is synthesized)
cccaggtgtgctgcgacggacggctgcccgcgctcggcgctcagcctgccatagcccgcgggggaggccggagccagggatccggggaggcccgcgtcccgccaggtttcgctctgcgga

SEQ ID NO: 435627 - DNA, 71 bp, Artificial Sequence
  ENSG00000152939_37 (sequence is synthesized)
cacctcccgggttcaagcaattctcctgttcaagcaattagcctctggtattgcttttctattccctttgg

SEQ ID NO: 435628 - DNA, 120 bp, Artificial Sequence
  ENSG00000152939_38 (sequence is synthesized)
gcggggcggggcgcgcacctcggggcgatctcggtgctccttacctgggaggtctcccggcttagtttcggcctcgttgggtcggaatctccaaagacagtgggtttcagccagaaacgc

SEQ ID NO: 435629 - DNA, 120 bp, Artificial Sequence
  ENSG00000152939_39 (sequence is synthesized)
gaagacgaacgcctagccggcgcgggcagaaccgaggacacaatgagatttgtgggaccgggcgcccagaggctggcgcgggggagaccccacagctaaaatgctcggtacccccgggca

SEQ ID NO: 435630 - DNA, 120 bp, Artificial Sequence
  ENSG00000152939_40 (sequence is synthesized)
gtcgtgggttagttagaaccgcagagcctttcccgacccctcggaagcgcagaagtatccgaaatctacccgtttcttgggtccagcaaaacttttaagccaggtgtgaaaatcacaaat

SEQ ID NO: 435631 - DNA, 120 bp, Artificial Sequence
  ENSG00000152942_0 (sequence is synthesized)
gtgaattatagtttaatgtactgcaagtcctaaactacggatgggaactattacagtttataatgtcaaaaacttttcttagaccaaaggtatcttccacaaaggtaacagactgggttg

SEQ ID NO: 435632 - DNA, 120 bp, Artificial Sequence
  ENSG00000152942_1 (sequence is synthesized)
acccatcatttgatgattttctagagtgtagtggcgtctctactattactgccacatcattaggtgtgaataactcaagtcatagaagaaaaaatgggccttctacattagaaagcagca

SEQ ID NO: 435633 - DNA, 120 bp, Artificial Sequence
  ENSG00000152942_2 (sequence is synthesized)
gatttccagcgagaaaaagaggaaatctatcttccttagaacagatttatggtttagaaaattcaaaagaatatctgtctgaaaatgaaccatgggtggataaatataaaccagaaactc

SEQ ID NO: 435634 - DNA, 120 bp, Artificial Sequence
  ENSG00000152942_3 (sequence is synthesized)
agcatgaacttgctgtgcataaaaagaaaattgaagaagtcgaaacctggttaaaagctcaagttttagaaaggcaaccaaaacagggtggatctattttattaataacaggtcctcctg

SEQ ID NO: 435635 - DNA, 120 bp, Artificial Sequence
  ENSG00000152942_4 (sequence is synthesized)
gatgtggaaagacaacgaccttaaaaatactatcaaaggagcatggtattcaagtacaagagtggattaatccagttttaccagacttccaaaaagatgatttcaaggggatgtttaata

SEQ ID NO: 435636 - DNA, 120 bp, Artificial Sequence
  ENSG00000152942_5 (sequence is synthesized)
ctgaatcaagcttccatatgtttccctatcagtctcagatagcagttttcaaagagtttctactaagagcgacaaagtataacaagttacaaatgcttggagatgatctgagaactgata

SEQ ID NO: 435637 - DNA, 120 bp, Artificial Sequence
  ENSG00000152942_6 (sequence is synthesized)
agaagataattctggttgaagatttacctaaccagttttatcgggattctcatactttacatgaagttctaaggaagtatgtgaggattggtcgatgtcctcttatatttataatctcgg

SEQ ID NO: 435638 - DNA, 120 bp, Artificial Sequence
  ENSG00000152942_7 (sequence is synthesized)
acagtctcagtggagataataatcaaaggttattgtttcccaaagaaattcaggaagagtgttctatctcaaatattagtttcaaccctgtggcaccaacaattatgatgaaatttctta

SEQ ID NO: 435639 - DNA, 120 bp, Artificial Sequence
  ENSG00000152942_8 (sequence is synthesized)
tgtcagggatgttctggtgatatcagaagtgcaataaacagcctccagttttcttcttcaaaaggagaaaacaacttacggccaaggaaaaaaggaatgtctttaaaatcagatgctgtg

SEQ ID NO: 435640 - DNA, 120 bp, Artificial Sequence
  ENSG00000152942_9 (sequence is synthesized)
ctgtcaaaatcaaaacgaagaaaaaaacctgatagggtttttgaaaatcaagaggtccaagctattggtggcaaagatgtttctctgtttctcttcagagctttggggaaaattctatat

SEQ ID NO: 435641 - DNA, 120 bp, Artificial Sequence
  ENSG00000152942_10 (sequence is synthesized)
tgtaaaagagcatctttaacagaattagactcacctcggttgccctctcatttatcagaatatgaacgggatacattacttgttgaacctgaggaggtagtagaaatgtcacacatgcct

SEQ ID NO: 435642 - DNA, 120 bp, Artificial Sequence
  ENSG00000152942_11 (sequence is synthesized)
ggagacttatttaatttatatcttcaccaaaactacatagatttcttcatggaaattgatgatattgtgagagccagtgaatttctgagttttgcagatatcctcagtggtgactggaat

SEQ ID NO: 435643 - DNA, 120 bp, Artificial Sequence
  ENSG00000152942_12 (sequence is synthesized)
acacgctctttactcagggaatatagcacatctatagctacgagaggtgtgatgcattccaacaaagcccgaggatatgctcattgccaaggaggaggatcaagttttcgacccttgcac

SEQ ID NO: 435644 - DNA, 120 bp, Artificial Sequence
  ENSG00000152942_13 (sequence is synthesized)
aaacctcagtggtttctaataaataaaaagtatcgggaaaattgcctggcagcaaaagcactttttcctgacttctgcctaccagctttatgcctccaaactcagctattgccatacctt

SEQ ID NO: 435645 - DNA, 120 bp, Artificial Sequence
  ENSG00000152942_14 (sequence is synthesized)
gctctactaaccattccaatgagaaatcaagctcagatttcttttatccaagatattggaaggctccctctgaagcgacactttggaagattgaaaatggaagccctgactgacagggaa

SEQ ID NO: 435646 - DNA, 120 bp, Artificial Sequence
  ENSG00000152942_15 (sequence is synthesized)
catggaatgatagaccctgacagcggagatgaagcccagcttaatggaggacattctgcagaggaatctctgggtgaacccactcaagccactgtgccggaaacctggtctcttcctttg

SEQ ID NO: 435647 - DNA, 120 bp, Artificial Sequence
  ENSG00000152942_16 (sequence is synthesized)
agtcagaatagtgccagtgaactgcctgctagccagccccagcccttttcagcccaaggagacatggaagaaaacataataatagaagactacgagagtgatgggacatagaagccagcc

SEQ ID NO: 435648 - DNA, 120 bp, Artificial Sequence
  ENSG00000152942_17 (sequence is synthesized)
ccccgggaggccgtacctccgagaggctcggcgttgagcccgggtagggccaggtggctgccctttcacctagggtagtccctggtcgcctccgctcttcgcctaaaaggggatgcagct

SEQ ID NO: 435649 - DNA, 120 bp, Artificial Sequence
  ENSG00000152942_18 (sequence is synthesized)
ccgggaaagtaaggccgccgcggttgcggctatattatgtatatgtcttagagacgtgagtctatctctgccttcaagctttcctgggctctcgtcgctcctcctcccgacccgcccatc

SEQ ID NO: 435650 - DNA, 120 bp, Artificial Sequence
  ENSG00000152942_19 (sequence is synthesized)
ccatctggggatgagaagattgagggtgcagagccctgtcctgcagcggggatttgcgagctcaacccggcaccccactgattacaggattacgttggacgaatatttgagcttagtatt

SEQ ID NO: 435651 - DNA, 120 bp, Artificial Sequence
  ENSG00000152942_20 (sequence is synthesized)
ccctgttcactgtgtggggtggtggtgggtcggctaggaatagtcttgaaggtctacctctgacatctcatttcagtaacctcgcatcttcagggacagttatctgctttttaaaggagc

SEQ ID NO: 435652 - DNA, 120 bp, Artificial Sequence
  ENSG00000152942_21 (sequence is synthesized)
aagtgaattcatggtattttacttttttgggaaatactggaaatgaagacctgcaactgtaatttgaaataaggaaaactttaattttcagtataaaaattgctcaaatagaattgcctg

SEQ ID NO: 435653 - DNA, 120 bp, Artificial Sequence
  ENSG00000152942_22 (sequence is synthesized)
cacagcttcatttttgtttcattcagtggtacttcagcagagttaatatgcttttctgatgaattacacaacagtttgttaattcttcattcttgtagtatttcatcacaagaaacctac

SEQ ID NO: 435654 - DNA, 120 bp, Artificial Sequence
  ENSG00000152942_23 (sequence is synthesized)
tcttctgtcatcttgaagtaaatagaagatcaagccttcaaatctcttaattttttcggtatttattaaatctgtgagtggtttaaggagcggtcagtgtgtataaagtgtgtttgaaca

SEQ ID NO: 435655 - DNA, 120 bp, Artificial Sequence
  ENSG00000152942_24 (sequence is synthesized)
ttatgccaaatatcaagatgtgaaggactaattcaggatgcaaaaacgttattggggggttgtaaatatcaactattcaacagtttaggatgcaattacgagtgtaaactgtgtgcctta

SEQ ID NO: 435656 - DNA, 120 bp, Artificial Sequence
  ENSG00000152942_25 (sequence is synthesized)
tttacactttattgtctcccgcttctcagatagttttgatgtgttgtacagtggaatatcttagatactttttggaaagtatttacataagttatatcacaattaaaatgttgaatttaa

SEQ ID NO: 435657 - DNA, 120 bp, Artificial Sequence
  ENSG00000152942_26 (sequence is synthesized)
acctgtataccttttgaaacgtcacagtctctaatcgtgaacgatttggggcggagggctgaacaatgtgttttctagtgtgtcgaggtgtttataggctatgtgtgcctccaaactgta

SEQ ID NO: 435658 - DNA, 120 bp, Artificial Sequence
  ENSG00000152942_27 (sequence is synthesized)
aagtagtccagtatactttccaatgtataagtttgtagaccttaaacttttcttctggctaacttaaaatcgttgaattcactagtttgcataaacatttaagaatttgaaaacacggtt

SEQ ID NO: 435659 - DNA, 120 bp, Artificial Sequence
  ENSG00000152942_28 (sequence is synthesized)
acatttatgtaagaaatgaaactataaaatgtataaataatttgcaaatcagaattgctgtcgaaagttttactataatgaaagatattttcatactctcaaaaatatagaggaaagggg

SEQ ID NO: 435660 - DNA, 120 bp, Artificial Sequence
  ENSG00000152942_29 (sequence is synthesized)
gcaacgcccgcgagggtcggctcccggggcgctgacaaccgcctcgtggccctcggccggcctctgaagagggcagtgaggggcccccacctgggcgcccgatgcccagagcactctgcg

SEQ ID NO: 435661 - DNA, 120 bp, Artificial Sequence
  ENSG00000152942_30 (sequence is synthesized)
taaaatgaatggaattcgtattctttcatgtagagagcaacatcttcctacatagtaaataaaagagtaaagaccactgtattgagatgagaaatcaagggaagaaagcaacccaaagct

SEQ ID NO: 435662 - DNA, 120 bp, Artificial Sequence
  ENSG00000152944_0 (sequence is synthesized)
gtctgtttgctgcggtaggaacatggcggatcggctcacgcagcttcaggacgctgtgaattcgcttgcagatcagttttgtaatgccattggagtattgcagcaatgtggtcctcctgc

SEQ ID NO: 435663 - DNA, 120 bp, Artificial Sequence
  ENSG00000152944_1 (sequence is synthesized)
ctctttcaataatattcagacagcaattaacaaagaccagccagctaaccctacagaagagtatgcccagctttttgcagcactgattgcacgaacagcaaaagacattgatgttttgat

SEQ ID NO: 435664 - DNA, 120 bp, Artificial Sequence
  ENSG00000152944_2 (sequence is synthesized)
agattccttacccagtgaagaatctacagctgctttacaggctgctagcttgtataagctagaagaagaaaaccatgaagctgctacatgtctggaggatgttgtttatcgaggagacat

SEQ ID NO: 435665 - DNA, 120 bp, Artificial Sequence
  ENSG00000152944_3 (sequence is synthesized)
gcttctggagaagatacaaagcgcacttgctgatattgcacagtcacagctgaagacaagaagtggtacccatagccagtctcttccagactcatagcatcagtggataccatgtggctg

SEQ ID NO: 435666 - DNA, 120 bp, Artificial Sequence
  ENSG00000152944_4 (sequence is synthesized)
agaaaagaactgtttgagtgccattaagaattctgcatcagacttagatacaagccttaccaacaattacagaaacattaaacactatgacacattacctttttagctatttttaatagt

SEQ ID NO: 435667 - DNA, 120 bp, Artificial Sequence
  ENSG00000152944_5 (sequence is synthesized)
cttctattttcactcttgataagcttataaaatcatgattgaatcagctttaaagcatcataccatcattttttaactgagtgaaattattaaggcatgtaatacattaatgaacataat

SEQ ID NO: 435668 - DNA, 120 bp, Artificial Sequence
  ENSG00000152944_6 (sequence is synthesized)
ataaggaaacatatgtaaaattctgttatgacataatttatgtctccattttgttgtattggccagtacttttacaaatcaaaacatctctcaagccaaaggagaagacagtaagaacag

SEQ ID NO: 435669 - DNA, 120 bp, Artificial Sequence
  ENSG00000152944_7 (sequence is synthesized)
acataagggacattttagtttgggctagtgtcctgcctcttagaggtggcattgtgtaaatctgagctttgagcaagaaagttttggaaattgtgttgcttttaagaaatagagttagtg

SEQ ID NO: 435670 - DNA, 120 bp, Artificial Sequence
  ENSG00000152944_8 (sequence is synthesized)
tggctggataagaaagtcacatttatgcaaatgtttcttctgctagaacctcatacctgttctagttcatctccacgtttattttaccaagagatcctctgtcaagagaatttcctggct

SEQ ID NO: 435671 - DNA, 120 bp, Artificial Sequence
  ENSG00000152944_9 (sequence is synthesized)
gttgtgaaagaatttttctacatcctgaactatttttcctatttcttttcaccttgctttttttcatccttaatttgcttgtcatcacaatgaagtatgttttttgaatcatcaattctt

SEQ ID NO: 435672 - DNA, 120 bp, Artificial Sequence
  ENSG00000152944_10 (sequence is synthesized)
tctcattctccatttatctgaaggttcttttgcccttattaacctctcaacttttattgctgtattctagtcagaccagaacatacttccactacatcagttacttggcatcatttcacc

SEQ ID NO: 435673 - DNA, 120 bp, Artificial Sequence
  ENSG00000152944_11 (sequence is synthesized)
tgtcagcattttcaactatggttattcatccaacccttggatctctttgagtctactgataatctccactggaaaggtggaattgaaatgtggtccacattttaactagctatttcctgg

SEQ ID NO: 435674 - DNA, 120 bp, Artificial Sequence
  ENSG00000152944_12 (sequence is synthesized)
ggctgtatttttcagaatatgctgagctacatttgctgcaatctgttgctattcagagtttaagtttcaggagaaaacaggaacaatagaacactctgcctgttatttttgttgtaatca

SEQ ID NO: 435675 - DNA, 120 bp, Artificial Sequence
  ENSG00000152944_13 (sequence is synthesized)
agcttttccacagttcttgaaaagtactatgtttcaaatttcaggaacaccagcgttagctgtaaaagttgcagcaatttattggctagtcatagaaaatttttgaacttttaactgtat

SEQ ID NO: 435676 - DNA, 120 bp, Artificial Sequence
  ENSG00000152944_14 (sequence is synthesized)
tttaattgatgtttattaaaaacactttgctatcagatatttggcataaatctgtactcttcattatagttttggggggagagaagattcagtcagaaaacttattcaaagtacctaagt

SEQ ID NO: 435677 - DNA, 120 bp, Artificial Sequence
  ENSG00000152944_15 (sequence is synthesized)
attataaaggagtcaaaaaggtacaaagagaaaaggtcaagacatttttcaaatgagggaaaactaacaggatttatcactagtaaacctgctctaaaagaattcaagggaagcttttta

SEQ ID NO: 435678 - DNA, 120 bp, Artificial Sequence
  ENSG00000152944_16 (sequence is synthesized)
aaaagaagggaagttatagcagaaggaaacttagaatggcaggaataaagaaggcataatgtatagggtaaatataatagacttctcttgaggttttaaaaattacatttgttatttgaa

SEQ ID NO: 435679 - DNA, 120 bp, Artificial Sequence
  ENSG00000152944_17 (sequence is synthesized)
agaaaaaaattaacgttgttgtatgtgattctctgtagaggatatacagtttttttttgttgttcttgtttctgtttttttaaggtgaagtctctgtcacccaagctgaagtgcagttct

SEQ ID NO: 435680 - DNA, 120 bp, Artificial Sequence
  ENSG00000152944_18 (sequence is synthesized)
gtgatcatggctcactgcagcttcaccctgggttcaggtgatcctcccacttcagcctcttcagtaactgggactacaggcatgtactaccacgtccagctaattttttttttctttttt

SEQ ID NO: 435681 - DNA, 120 bp, Artificial Sequence
  ENSG00000152944_19 (sequence is synthesized)
atggggtctcactctgttgcccaggctaatgccaaactgctaacctcaagatattaatactatacagtagactataagaaattaagtatttgtatcatccctagagcgacacagattttt

SEQ ID NO: 435682 - DNA, 120 bp, Artificial Sequence
  ENSG00000152944_20 (sequence is synthesized)
agatttttccctaaaaaactacagattattttcaaaagcattaataaattaaggtggaatactaaaaaagattcaggtaacccaggaacgagaaacagaataaaacaatagtaaacctaa

SEQ ID NO: 435683 - DNA, 120 bp, Artificial Sequence
  ENSG00000152944_21 (sequence is synthesized)
attttattttatttcattaatacagcaataattaaatgtcaatgatctaagctgatttaaatctaaaaactggataagaagctgtggcttgtaattaaaaatagacctttattcactaga

SEQ ID NO: 435684 - DNA, 120 bp, Artificial Sequence
  ENSG00000152944_22 (sequence is synthesized)
agacagggtctcgctttgccacacaggctggagtgcaatggcacagtcatagctcactgcaacctcagccttccacatttgagacattgtaagttcagaggcctgagagttagcatccag

SEQ ID NO: 435685 - DNA, 120 bp, Artificial Sequence
  ENSG00000152944_23 (sequence is synthesized)
aggcagcagacaccagcagcacagctgtttctcccgcaggatcattgccagcagaacatcctacaccaatggctctttgggcaggatcttggctgtgctttgtctgtctagcttcatgcc

SEQ ID NO: 435686 - DNA, 120 bp, Artificial Sequence
  ENSG00000152944_24 (sequence is synthesized)
tcgggatagggcctgggaagtgtctgacttacagaaacccaccatgtcttgttctctgctggagacctctgcttctccatcttgtgaacatccacaggccccctgcaccgtaatcttgcc

SEQ ID NO: 435687 - DNA, 120 bp, Artificial Sequence
  ENSG00000152944_25 (sequence is synthesized)
ctcttactgttgactcagtcctcatggaagttataaaagaacttgtgtggattagcttgctaaatacatccaagatttgaagaactgaaaacaaaatcagtattaaacctgctttttaaa

SEQ ID NO: 435688 - DNA, 120 bp, Artificial Sequence
  ENSG00000152944_26 (sequence is synthesized)
aatgtaagtgaagtaacttctggccatggttcatttcagacctctctaaagcctgcaattacctctcagtgtatgtgaatttttttccaggagtaaagttacttgactctagtgagtcta

SEQ ID NO: 435689 - DNA, 120 bp, Artificial Sequence
  ENSG00000152944_27 (sequence is synthesized)
gtttgctgcggtaggaacatggcggatcggctcacgcagcttcaggacgctgtgaattcggtgaggaatttcattcgattagcctctgtctttctctttcttgaggtaaagcaagggagg

SEQ ID NO: 435690 - DNA, 120 bp, Artificial Sequence
  ENSG00000152944_28 (sequence is synthesized)
aaaggggcccaagaggcaaaacttgaaagtggggagcggactgagagacagggcttcggcataaagcgctctctcgggaggcgccaccgcgaactcggaggtttgaggccggctgccggg

SEQ ID NO: 435691 - DNA, 120 bp, Artificial Sequence
  ENSG00000152944_29 (sequence is synthesized)
gtgaagaatctacagctgctttacagacagggtctcgctttgccacacaggctggagtgcaatggcacagtcatagctcactgcaacctcagccttccacatttgccaagagccctgatc

SEQ ID NO: 435692 - DNA, 120 bp, Artificial Sequence
  ENSG00000152944_30 (sequence is synthesized)
gttttggcgtctgtttgctgcggtaggaacatggcggatcggctcacgcagcttcaggacgctgtgaattcgagtatgcccagctttttgcagcactgattgcacgaacagcaaaagaca

SEQ ID NO: 435693 - DNA, 120 bp, Artificial Sequence
  ENSG00000152944_31 (sequence is synthesized)
aagctgaagtgcagttctgtgatcatggctcactgcagcttcaccctgggttcaggtgatcctcccacttcagcctcttcagtaactgggactacagttctaggggcaccactatcagtt

SEQ ID NO: 435694 - DNA, 120 bp, Artificial Sequence
  ENSG00000152952_0 (sequence is synthesized)
gctgctccgtgcctccaccgacgacctcactcagctgcgttacgcgccgctccggctgccggccgcgcgccttgcccgccggctcccgcccgcaatcggcggctcagggcggacccgggt

SEQ ID NO: 435695 - DNA, 120 bp, Artificial Sequence
  ENSG00000152952_1 (sequence is synthesized)
ctctgcgttctcgcgagaagcgcggcgctgcggggccgtgggcgcctgagcccgcgcggccctcgagggccgaatatggggggatgcacggtgaagcctcagctgctgctcctggcgctc

SEQ ID NO: 435696 - DNA, 120 bp, Artificial Sequence
  ENSG00000152952_2 (sequence is synthesized)
gtcctccacccctggaatccctgtctgggtgcggactcggagaagccctcgagcatccccacagataaattattagtcataactgtagcaacaaaagaaagtgatggattccatcgattt

SEQ ID NO: 435697 - DNA, 120 bp, Artificial Sequence
  ENSG00000152952_3 (sequence is synthesized)
atgcagtcagccaaatatttcaattatactgtgaaggtccttggtcaaggagaagaatggagaggtggtgatggaattaatagtattggagggggccagaaagtgagattaatgaaagaa

SEQ ID NO: 435698 - DNA, 120 bp, Artificial Sequence
  ENSG00000152952_4 (sequence is synthesized)
gtcatggaacactatgctgatcaagatgatctggttgtcatgtttactgaatgctttgatgtcatatttgctggtggtccagaagaagttctaaaaaaattccaaaaggcaaaccacaaa

SEQ ID NO: 435699 - DNA, 120 bp, Artificial Sequence
  ENSG00000152952_5 (sequence is synthesized)
gtggtctttgcagcagatggaattttgtggccagataaaagactagcagacaagtatcctgttgtgcacattgggaaacgctatctgaattcaggaggatttattggctatgctccatat

SEQ ID NO: 435700 - DNA, 120 bp, Artificial Sequence
  ENSG00000152952_6 (sequence is synthesized)
gtcaaccgtatagttcaacaatggaatctccaggataatgatgatgatcagctcttttacactaaagtttacattgatccactgaaaagggaagctattaacatcacattggatcacaaa

SEQ ID NO: 435701 - DNA, 120 bp, Artificial Sequence
  ENSG00000152952_7 (sequence is synthesized)
tgcaaaattttccagaccttaaatggagctgtagatgaagttgttttaaaatttgaaaatggcaaagccagagctaagaatacattttatgaaacattaccagtggcaattaatggaaat

SEQ ID NO: 435702 - DNA, 120 bp, Artificial Sequence
  ENSG00000152952_8 (sequence is synthesized)
ggacccaccaagattctcctgaattattttggaaactatgtacccaattcatggacacaggataatggctgcactctttgtgaattcgatacagtcgacttgtctgcagtagatgtccat

SEQ ID NO: 435703 - DNA, 120 bp, Artificial Sequence
  ENSG00000152952_9 (sequence is synthesized)
ccaaacgtatcaataggtgtttttattgagcaaccaaccccttttctacctcggtttctggacatattgttgacactggattacccaaaagaagcacttaaactttttattcataacaaa

SEQ ID NO: 435704 - DNA, 120 bp, Artificial Sequence
  ENSG00000152952_10 (sequence is synthesized)
gaagtttatcatgaaaaggacatcaaggtattttttgataaagctaagcatgaaatcaaaactataaaaatagtaggaccagaagaaaatctaagtcaagcggaagccagaaacatggga

SEQ ID NO: 435705 - DNA, 120 bp, Artificial Sequence
  ENSG00000152952_11 (sequence is synthesized)
atggacttttgccgtcaggatgaaaagtgtgattattactttagtgtggatgcagatgttgttttgacaaatccaaggactttaaaaattttgattgaacaaaacagaaagatcattgct

SEQ ID NO: 435706 - DNA, 120 bp, Artificial Sequence
  ENSG00000152952_12 (sequence is synthesized)
cctcttgtaactcgtcatggaaagctgtggtccaatttctggggagcattgagtcctgatggatactatgcacgatctgaagattatgtggatattgttcaagggaatagagtaggagta

SEQ ID NO: 435707 - DNA, 120 bp, Artificial Sequence
  ENSG00000152952_13 (sequence is synthesized)
tggaatgtcccatatatggctaatgtgtacttaattaaaggaaagacactccgatcagagatgaatgaaaggaactattttgttcgtgataaactggatcctgatatggctctttgccga

SEQ ID NO: 435708 - DNA, 120 bp, Artificial Sequence
  ENSG00000152952_14 (sequence is synthesized)
aatgctagagaaatgactttacaaagggaaaaagactcccctactccggaaacattccaaatgctcagccccccaaagggtgtatttatgtacatttctaatagacatgaatttggaagg

SEQ ID NO: 435709 - DNA, 120 bp, Artificial Sequence
  ENSG00000152952_15 (sequence is synthesized)
ccattataacaatgacctctggcagatttttgaaaatcctgtggactggaaggaaaagtatataaaccgtgattattcaaagattttcactgaaaatatagttgaacagccctgtccaga

SEQ ID NO: 435710 - DNA, 120 bp, Artificial Sequence
  ENSG00000152952_16 (sequence is synthesized)
tgtcttttggttccccatattttctgaaaaagcctgtgatgaattggtagaagaaatggaacattacggcaaatggtctgggggaaaacatcatgatagccgtatatctggtggttatga

SEQ ID NO: 435711 - DNA, 120 bp, Artificial Sequence
  ENSG00000152952_17 (sequence is synthesized)
aaatgtcccaactgatgatatccacatgaagcaagttgatctggagaatgtatggcttcattttatccgggagttcattgcaccagttacactgaaggtctttgcaggctattatacgaa

SEQ ID NO: 435712 - DNA, 120 bp, Artificial Sequence
  ENSG00000152952_18 (sequence is synthesized)
gggatttgcactactgaattttgtagtaaaatactcccctgaacgacagcgttctcttcgtcctcatcatgatgcttctacatttaccataaacattgcacttaataacgtgggagaaga

SEQ ID NO: 435713 - DNA, 120 bp, Artificial Sequence
  ENSG00000152952_19 (sequence is synthesized)
ctttcagggaggtggttgcaaatttctaaggtacaattgctctattgagtcaccacgaaaaggctggagcttcatgcatcctgggagactcacacatttgcatgaaggacttcctgttaa

SEQ ID NO: 435714 - DNA, 120 bp, Artificial Sequence
  ENSG00000152952_20 (sequence is synthesized)
aaatggaacaagatacattgcagtgtcatttatagatccctaagttatttacttttcattgaattgaaatttattttggatgaatgactggcatgaacacgtctttgaagttgtggctga

SEQ ID NO: 435715 - DNA, 120 bp, Artificial Sequence
  ENSG00000152952_21 (sequence is synthesized)
gaagatgagaggaatatttaaataacatcaacagaacaacttcactttgggccaaacatttgaaaaactttttataaaaaattgtttgatatttcttaatgtctgctctgagccttaaaa

SEQ ID NO: 435716 - DNA, 120 bp, Artificial Sequence
  ENSG00000152952_22 (sequence is synthesized)
cacagattgaagaagaaaagaaagaaaaaacttaaatatttatttctatgctttgttgcctctgagaataatgacaatttatgaatttgtgtttcaaattgataaaatatttaggtacaa

SEQ ID NO: 435717 - DNA, 120 bp, Artificial Sequence
  ENSG00000152952_23 (sequence is synthesized)
ataacaagactaataatattttcttatttaaaaaaagcatgggaagatttttatttatcaaaatatagaggaaatgtagacaaaatggatataaatgaaaattaccatgttgtaaaacct

SEQ ID NO: 435718 - DNA, 120 bp, Artificial Sequence
  ENSG00000152952_24 (sequence is synthesized)
tgaaaatcagattctaactggatttgtatgcaactaagtatttttctgaacacctatgcaggtcttatttacagtagttactaagggaacacacaaagaattacacaacgttttcctcaa

SEQ ID NO: 435719 - DNA, 120 bp, Artificial Sequence
  ENSG00000152952_25 (sequence is synthesized)
gaaaatggtacaaaacacaaccgaggagcgtatacagttgaaaacatttttgttttgattggaaggcagattattttatattagtattaaaaatcaaaccctatgtttctttcagatgaa

SEQ ID NO: 435720 - DNA, 120 bp, Artificial Sequence
  ENSG00000152952_26 (sequence is synthesized)
tcttccaaagtggattatattaagcaggtattagatttaggaaaacctttccatttcttaaagtattatcaagtgtcaagatcagcaagtgtccttaagtcaaacaggttttttttgttg

SEQ ID NO: 435721 - DNA, 120 bp, Artificial Sequence
  ENSG00000152952_27 (sequence is synthesized)
ttgtttttgctttgtttccttttttagaaagttctagaaaataggaaaacgaaaaatttcattgagatgagtagtgcatttaattattttttaaaaaactttttaagtacttgaatttta

SEQ ID NO: 435722 - DNA, 120 bp, Artificial Sequence
  ENSG00000152952_28 (sequence is synthesized)
tatcaggaaaacaaagttgttgagccttgcttcttccgttttgccctttgtctcgctccttattctttttttggggggagggttatttgcttttttatcttcctggcataatttccattt

SEQ ID NO: 435723 - DNA, 120 bp, Artificial Sequence
  ENSG00000152952_29 (sequence is synthesized)
tattcttctgagtgtctatgttaacttccctctatcccgcttataaaaaaattctccaacaaaaatacttgttgacttgatgttttatcacttctctaagtaaggttgaaatatccttat

SEQ ID NO: 435724 - DNA, 120 bp, Artificial Sequence
  ENSG00000152952_30 (sequence is synthesized)
tgtagctactgtttttaatgtaaaggttaaacttgaaaagaaattcttaatcacggtgccaaaattcattttctaacaccatgtgttagaaaattataaaaaataaaataattttagaaa

SEQ ID NO: 435725 - DNA, 120 bp, Artificial Sequence
  ENSG00000152952_31 (sequence is synthesized)
aatatggggggatgcacggtgaagcctcagctgctgctcctggcgctcgtcctccacccctggaatccctgtctgggtgcggactcggagaagccctcgagcatccccacaggtgagcac

SEQ ID NO: 435726 - DNA, 120 bp, Artificial Sequence
  ENSG00000152952_32 (sequence is synthesized)
cccgcggtccgccgctgtcccgcgaggctcggccggcgggggggcagttcattcatccaccagcccttccgcggggctggccagataaattattagtcataactgtagcaacaaaagaaa

SEQ ID NO: 435727 - DNA, 120 bp, Artificial Sequence
  ENSG00000152952_33 (sequence is synthesized)
aagtgctgactgggaccgacagtgagggaggggagcccagagggaagttgataacccaaatgtcatctggtatctccagttgttcattccttgatattgctgatgataatgttacaaact

SEQ ID NO: 435728 - DNA, 120 bp, Artificial Sequence
  ENSG00000152952_34 (sequence is synthesized)
gtaccagggaaagcaaacatagtcactgcccctggtaagaaggcaggggaataactatcttagaaaatttgatgaaaatcaagtttgtaaaatattaatacctgaaaagtcatatactta

SEQ ID NO: 435729 - DNA, 120 bp, Artificial Sequence
  ENSG00000152952_35 (sequence is synthesized)
catctccaacattcatttaaaactgagttgtgggatatgtaagttgcatttgtgtgcatgtgtatgtatgtatgtatgtatgcagaaacattttgatttgtggatgttttatgccttaaa

SEQ ID NO: 435730 - DNA, 120 bp, Artificial Sequence
  ENSG00000152952_36 (sequence is synthesized)
atatttactggcttgaaaatatattttaactggcttaaaattttagaggtgagctccctgtgaatatccgtgttaaattgaccattttgaaatttaagacaatatatatatcgtttcaga

SEQ ID NO: 435731 - DNA, 120 bp, Artificial Sequence
  ENSG00000152952_37 (sequence is synthesized)
tattgttccactattttgatcagaaaagtatgctagagaaccatattttacataaaagaatatatatattaacatttttcagtcagcagatatttattttatgtcatgcccatttcattt

SEQ ID NO: 435732 - DNA, 120 bp, Artificial Sequence
  ENSG00000152952_38 (sequence is synthesized)
taaccccatcgtgagtcaaggagcatctgtaaaatgtgtaaatctattcactgtaagattacttaagttttaaaatcctgaggtacaatatttcataaataaaaattttgtatttcatag

SEQ ID NO: 435733 - DNA, 120 bp, Artificial Sequence
  ENSG00000152952_39 (sequence is synthesized)
aatgacataagcatattcagaaccaggcaaagattaggctatatactgtgatttctgaaaattactattttgtccactatacataatcatttataagttgaataatttctaaaatgcata

SEQ ID NO: 435734 - DNA, 120 bp, Artificial Sequence
  ENSG00000152952_40 (sequence is synthesized)
taagaaaaaataaacttttaaattaaaattgttatgccaaatttgggtgtctcaaactatttgtttgcgtatgcagtagccaacttagactgtgtctatgtttgtacgtatttatacata

SEQ ID NO: 435735 - DNA, 120 bp, Artificial Sequence
  ENSG00000152952_41 (sequence is synthesized)
aagggctgtagaagttacttatgtttttcttttaatggctacgagtccacatatttaatcaaatgatgaatcaaggtaagatcaattttttttaaatgcagataaatgaatagtatgact

SEQ ID NO: 435736 - DNA, 120 bp, Artificial Sequence
  ENSG00000152952_42 (sequence is synthesized)
ttcatagcagtgacttaaatttaaatgtacactctgaaggttgtgtgtggtaaaagtgtgtttatttagactgtgggggaaacaggtgctcttactctccagttagtcactgagctagat

SEQ ID NO: 435737 - DNA, 120 bp, Artificial Sequence
  ENSG00000152952_43 (sequence is synthesized)
aatactgtaatcccaagaaacgggcattgtaggccttttgtttagccctgttaatgcttcattctactaataaaactctagtaatagtaaaaaaaatcgtgtattcaatgaatattaatt

SEQ ID NO: 435738 - DNA, 120 bp, Artificial Sequence
  ENSG00000152952_44 (sequence is synthesized)
gaatatgccaggaactgtgttaagagtaggtgataaaaaggtgaagacatgatccattctcatcaggaaataatcttatctactacgaaccctcatgcctgtgctgcagaagctgaggtc

SEQ ID NO: 435739 - DNA, 120 bp, Artificial Sequence
  ENSG00000152952_45 (sequence is synthesized)
ccagagggatggattctgactagattaggggtctagggatagacagaaaagaggcctctgaaaaaccaaactgatgttattactaatgattccataatttattcattggagaatcctctg

SEQ ID NO: 435740 - DNA, 120 bp, Artificial Sequence
  ENSG00000152952_46 (sequence is synthesized)
ggtccacattcagaacatattttctttaatatttttcatgattgtacctagtgcttctgtctggtattttgtttgatagttgcttcgaacaaatatggtgtggagacacacactgacaac

SEQ ID NO: 435741 - DNA, 120 bp, Artificial Sequence
  ENSG00000152952_47 (sequence is synthesized)
tttatttatttttgtttatttaatatttgatatagtatattgcctagtagtaaagtttctttaagggccttatttgcatttagcttggtaaaatgttgattttcatcagtcatctgtgtg

SEQ ID NO: 435742 - DNA, 120 bp, Artificial Sequence
  ENSG00000152952_48 (sequence is synthesized)
tttgcgtgttttgtgtgacttgggcatgggtcttgtgtgatagtcaactcttggttctttgagctgatttatattttatggctgacaggtgacaaagttaaacctaagtccctttcattc

SEQ ID NO: 435743 - DNA, 120 bp, Artificial Sequence
  ENSG00000152952_49 (sequence is synthesized)
tttttttaggtttttatttctttttaaagggagagaagagggtagaagtaggtataaaatagaatttgattacagtaaggtttaggtgcaccttattgagttattaatcactaactcttt

SEQ ID NO: 435744 - DNA, 120 bp, Artificial Sequence
  ENSG00000152952_50 (sequence is synthesized)
tactattaaaacaggtccaaaaagaaacacattacctagtggtgtttgccacatttgtctggtttggggcaagaatatgagactggttttctttatctgcctttataatgtatgactcat

SEQ ID NO: 435745 - DNA, 120 bp, Artificial Sequence
  ENSG00000152952_51 (sequence is synthesized)
ttgcgtgttagcctttaaacattagaaaaagaaaggaatgaaacagactggtgaaatataactggcagtgaattcttgattaaaaatgtgatgctttctttgaaagagaaagaagccaaa

SEQ ID NO: 435746 - DNA, 120 bp, Artificial Sequence
  ENSG00000152952_52 (sequence is synthesized)
agaggtataattcattgcactgtgtctcaaaaatatttctgctttcaaacaggaattttttccccgatgtctacatctaggatcaatgagaaagggacaaaaacagtccattcttctttt

SEQ ID NO: 435747 - DNA, 120 bp, Artificial Sequence
  ENSG00000152952_53 (sequence is synthesized)
tttcagttgagtgtcagtgctatctactagttttgtgtggtgtctgaattcataatcaaaatttgagttttttattttaaactatgcacattttatatgaatactaaaaatgcatgttca

SEQ ID NO: 435748 - DNA, 120 bp, Artificial Sequence
  ENSG00000152952_54 (sequence is synthesized)
aaagatagaaattaatatcttctatatatttttcctatgattaaatttacttttgtacctacctctaagattaatactgttattttctggcatatagggtgtatttatgtacatttctaa

SEQ ID NO: 435749 - DNA, 120 bp, Artificial Sequence
  ENSG00000152952_55 (sequence is synthesized)
gtacatttctaatagacatgaatttggaaggctattatccactgctaattacaatacttcccattataacaatgacctctggcagatttttgaaaatcctgtggtatgtatttcatactc

SEQ ID NO: 435750 - DNA, 120 bp, Artificial Sequence
  ENSG00000152952_56 (sequence is synthesized)
aactttattatttttctataactgtaagtggttataaatcagttggttaataatatgaaatgtggttagaggctttttaaaatgacataaggtgaaatgcacatcaaaaccacaatgaga

SEQ ID NO: 435751 - DNA, 120 bp, Artificial Sequence
  ENSG00000152952_57 (sequence is synthesized)
aatggctattattaaaaagtcaaaaacaacagatatgggtgaggctacggagaaaagggaatgcttgtacgttgttggtcggaatgaatttggaaagcagtttgaagatttctcaaagat

SEQ ID NO: 435752 - DNA, 83 bp, Artificial Sequence
  ENSG00000152952_58 (sequence is synthesized)
cgccaaaagaaagtaagtcatttgaccaaaaacacacatgaacctgtatctgttcgttgcagcactattcacagtagcaaaga

SEQ ID NO: 435753 - DNA, 120 bp, Artificial Sequence
  ENSG00000152952_59 (sequence is synthesized)
actattcacagtagcaaagacatggacttaaactaggtgttcattaatggtggattggataaagaaaatgtgttacatacacaccatagaatactatacagccataaaaaagaacaatat

SEQ ID NO: 435754 - DNA, 120 bp, Artificial Sequence
  ENSG00000152952_60 (sequence is synthesized)
gaatactatacagccataaaaaagaacaatattatgtcattttcagcaacatggagagaactggaggccattaccctaagtgaattaatggcacagaaaaccaaatactgcatgttctca

SEQ ID NO: 435755 - DNA, 120 bp, Artificial Sequence
  ENSG00000152952_61 (sequence is synthesized)
attgggtacttgtgaacataaatataggaacagtagaccctggggatcactagaggagtgagggagtagggagggggacaagggttgaaaaaccaactaatgggtactgtgctcactacc

SEQ ID NO: 435756 - DNA, 120 bp, Artificial Sequence
  ENSG00000152952_62 (sequence is synthesized)
ttggtgatgggatcagtcataccctaaaccttagcatcatgcattatacacttgtaacaaacctgcacatatactccctgaatccaaaagctgaaattgtttttaaaaagtaaataaaaa

SEQ ID NO: 435757 - DNA, 120 bp, Artificial Sequence
  ENSG00000152953_0 (sequence is synthesized)
cttcccctccttcccctgctcccgcgccgcctcgcgtctcccgcccgctgtagccggcgaggagcgccgcacgttggccccggcgcgaggagctcccgggttcccgggcgggcactggag

SEQ ID NO: 435758 - DNA, 120 bp, Artificial Sequence
  ENSG00000152953_1 (sequence is synthesized)
taaggagctgcgagcgcagcccgaggcggggcacggcggaaggcgcggcgagagcggggtccctgcgagcgcagtcggaagggcgtccaggagaagggggacgccgtccccgcccctgca

SEQ ID NO: 435759 - DNA, 120 bp, Artificial Sequence
  ENSG00000152953_2 (sequence is synthesized)
cggtgctcggccccctcgggctccgcgcgcggctacaacccggactgggcgcgcccccggcatcccgcatctctgcgcgcgtcccacatcccgcatccggcatcccagcggccgggcatg

SEQ ID NO: 435760 - DNA, 120 bp, Artificial Sequence
  ENSG00000152953_3 (sequence is synthesized)
tagcagcggcagcaacggcggaatatgggcgggaaccactcccacaagccccccgtgtttgacgagaatgaggaagtcaactttgaccattttcagattctgcgggccattggtaaaggg

SEQ ID NO: 435761 - DNA, 120 bp, Artificial Sequence
  ENSG00000152953_4 (sequence is synthesized)
agttttggaaaggtatgcatcgtgcagaagcgagacactaagaaaatgtatgcaatgaagtacatgaacaagcagaagtgcatcgagagggatgaggttcggaatgttttccgggagctg

SEQ ID NO: 435762 - DNA, 120 bp, Artificial Sequence
  ENSG00000152953_5 (sequence is synthesized)
cagatcatgcaagggctggagcaccccttcctggtcaatctgtggtactccttccaggatgaggaggacatgttcatggtggtggacctgctcctgggaggcgacctgcgctaccatctg

SEQ ID NO: 435763 - DNA, 120 bp, Artificial Sequence
  ENSG00000152953_6 (sequence is synthesized)
cagcagaatgtgcatttcacagaggggactgtgaaactctacatctgtgagctggcactggccctggagtatcttcagaggtaccacatcatccacagagacatcaagccagacaatatc

SEQ ID NO: 435764 - DNA, 120 bp, Artificial Sequence
  ENSG00000152953_7 (sequence is synthesized)
ctgctggatgaacacggacatgttcacattacagacttcaacatagcgacggtagtgaaaggagcagaaagggcttcctccatggctggcaccaagccctacatggctccagaagtattc

SEQ ID NO: 435765 - DNA, 120 bp, Artificial Sequence
  ENSG00000152953_8 (sequence is synthesized)
caggtgtacatggacagaggccccggatactcgtaccctgtcgactggtggtccctgggcatcacagcctatgagctgctgcggggctggaggccgtacgaaatccactcggtcacgccc

SEQ ID NO: 435766 - DNA, 120 bp, Artificial Sequence
  ENSG00000152953_9 (sequence is synthesized)
atcgatgaaatcctcaacatgttcaaggtggagcgtgtccactactcctccacgtggtgcaaggggatggtggccctgctgaggaagctcctgaccaaggatcctgagagccgcgtgtcc

SEQ ID NO: 435767 - DNA, 120 bp, Artificial Sequence
  ENSG00000152953_10 (sequence is synthesized)
agccttcatgacatacagagcgtgccctacttggccgacatgaactgggacgcggtgttcaagaaggcactgatgcccggctttgtgcccaataaagggaggttgaactgcgatcccaca

SEQ ID NO: 435768 - DNA, 120 bp, Artificial Sequence
  ENSG00000152953_11 (sequence is synthesized)
tttgagcttgaagagatgattctagaatccaagccacttcacaaaaagaagaagcgattggcaaagaacagatccagggatggcacaaaggacagctgcccgctgaatggacacctgcag

SEQ ID NO: 435769 - DNA, 120 bp, Artificial Sequence
  ENSG00000152953_12 (sequence is synthesized)
cactgtttggagactgtccgggaggaattcatcatattcaacagagagaagctcaggaggcagcagggacagggcagccagctcttggacaccgacagccgagggggaggccaggcccaa

SEQ ID NO: 435770 - DNA, 120 bp, Artificial Sequence
  ENSG00000152953_13 (sequence is synthesized)
agcaagctccaggacgggtgcaacaacaacctcctcacccacacctgcacccgtggctgcagcagctgagcccacacttgttgctgctcaacaggactgcactcgtctctgccctgccca

SEQ ID NO: 435771 - DNA, 120 bp, Artificial Sequence
  ENSG00000152953_14 (sequence is synthesized)
atgcagaaaaagccctggacttggagctgggaagcctgggttctggtcccatctccatgactgattcacgtgtgacctcagacaagtcacgccctctctgtgcctccgttttctgcatct

SEQ ID NO: 435772 - DNA, 120 bp, Artificial Sequence
  ENSG00000152953_15 (sequence is synthesized)
gccaaaggggttaaacacttctgccccacttcaaattacaagattatggggagaacccaattaggtaggaaacatgaaaaacctttgatatttataaaatcatttttacgtgcaaaatat

SEQ ID NO: 435773 - DNA, 120 bp, Artificial Sequence
  ENSG00000152953_16 (sequence is synthesized)
aaccttaatatttgaagtgacccccattccccaaagcaatcaaaccgtcatgactttgcaatttggcacatcctagcttgttagagggcacttccgaaaaacacagccctgacagcaaaa

SEQ ID NO: 435774 - DNA, 120 bp, Artificial Sequence
  ENSG00000152953_17 (sequence is synthesized)
taaaggtctgatatgttggccccttctatggaaacaacgctgccaaatcctggagcaaaacctgaagtgtcttcatgtgcattctctggcaggccacagtcctgagcttgtaagatggtg

SEQ ID NO: 435775 - DNA, 120 bp, Artificial Sequence
  ENSG00000152953_18 (sequence is synthesized)
cagcatgcagaccagacttgtccccaaggtctcagcgctgcggtctcactcctcccctcatttaagaagactatccttaccttttagtttcagcagtcctcaccaccaccatatccccag

SEQ ID NO: 435776 - DNA, 120 bp, Artificial Sequence
  ENSG00000152953_19 (sequence is synthesized)
tgctgggatggcacacaggtgtccattcagatgagagttgggtcgctgagcattggttactcctgcagagtgtaatcagcaccccatccaactggcccgaaagcccagacctgcagcaga

SEQ ID NO: 435777 - DNA, 120 bp, Artificial Sequence
  ENSG00000152953_20 (sequence is synthesized)
actctccaactctctatcagctttcagggttttctctcctgggaagggtgtaaaatcagcttgtcagattcttcttacagagagtatccaatcggtattggtggagcggctccctattta

SEQ ID NO: 435778 - DNA, 120 bp, Artificial Sequence
  ENSG00000152953_21 (sequence is synthesized)
tacaataggaagcatgggtgcttagaaagtttatttcaggaggaaaatgggttcacacaaaaagcaaactacattctggtctgctcagggagaagcttgcctttgaactggaagatgttg

SEQ ID NO: 435779 - DNA, 120 bp, Artificial Sequence
  ENSG00000152953_22 (sequence is synthesized)
ggatgagcagggaaagcttagactttggagtcaggtttgtgttcagaatccagccctgctggctactaactaactgggagaccttaggcaaagcatgcaatcgctctgaatggcagtttc

SEQ ID NO: 435780 - DNA, 120 bp, Artificial Sequence
  ENSG00000152953_23 (sequence is synthesized)
ctcatttttaaacagggataataaaactaatattgcaggggagttacagggttaaataagatcctgtgtgtaaccccaagcattggatgactcatagaatggccttttttgtcagcataa

SEQ ID NO: 435781 - DNA, 120 bp, Artificial Sequence
  ENSG00000152953_24 (sequence is synthesized)
tcgtcatcattatttagatactttcttccttcactcacccagcaggtcagttttctgtgcaaacaaacctgtttaggattcttccaaatgttcttcctggggtctttgatatttgtttgt

SEQ ID NO: 435782 - DNA, 120 bp, Artificial Sequence
  ENSG00000152953_25 (sequence is synthesized)
tacatcctgctgaagttcgactgtgtttttattttttcatccaacttccatttttcactttttacatgattactcaatccttggggctgtccatgtcatctcttagatttcttaaaagac

SEQ ID NO: 435783 - DNA, 120 bp, Artificial Sequence
  ENSG00000152953_26 (sequence is synthesized)
attttaatgtatggttaggttttatatttttattttttaaaaaagaaatagtcagtgttttcctcctttcaaccgagactatttctggattgtgtgctcctcgtcagttgacttgttttg

SEQ ID NO: 435784 - DNA, 120 bp, Artificial Sequence
  ENSG00000152953_27 (sequence is synthesized)
cacacttttctttacttcatgtccccatcaacaaccgtcctgctccccacctcccccaggaaataaggggcctgctcctctccctactgtgaccctggaggctcttaagatgatgatggt

SEQ ID NO: 435785 - DNA, 120 bp, Artificial Sequence
  ENSG00000152953_28 (sequence is synthesized)
tttttttattgggctgagttcacgaattaggggcaggagctggaagtcgccctaggaacaccagatttcctggttctgttcaagttggcatttcttgtttggaataaactatttcttgga

SEQ ID NO: 435786 - DNA, 120 bp, Artificial Sequence
  ENSG00000152953_29 (sequence is synthesized)
aactacatgctaatccctttgaatctggagctgacttagtcatgtttctgccttcagagagctacccagtgggggagatggacatgcaggggatgaggcaccagagagaacacaacactc

SEQ ID NO: 435787 - DNA, 120 bp, Artificial Sequence
  ENSG00000152953_30 (sequence is synthesized)
tctgccctcaaggagcttggagtcaagagaaaagggagacaactaagcaaaaatgcatgaggagatgaagagcatgggggaaatgaggaagcccctgtctagcctgggcaggagggagat

SEQ ID NO: 435788 - DNA, 120 bp, Artificial Sequence
  ENSG00000152953_31 (sequence is synthesized)
ggtaaggaagtgataatagcagaggcctattctgaggagtccactgtacctgtgaagagccttgtctggcacatgctccagaagtattccaggtgtacatggacagaggccccggatact

SEQ ID NO: 435789 - DNA, 120 bp, Artificial Sequence
  ENSG00000152953_32 (sequence is synthesized)
cgtaccctgtcgactggtggtccctgggcatcacagcctatgagctgctgcggggctgggtaagacaggcacctgtgcggtacacacgaggggctgtgcagtgggggctcacgttgtacc

SEQ ID NO: 435790 - DNA, 120 bp, Artificial Sequence
  ENSG00000152953_33 (sequence is synthesized)
tcggcagggcccgcggtgcaggaaggagcactgggggagtcactgccccccaggtttcagtcctgatgcctgtgtgccgcctatgaacgccctgaacttctggtccaacccactcattgt

SEQ ID NO: 435791 - DNA, 120 bp, Artificial Sequence
  ENSG00000152953_34 (sequence is synthesized)
acagatgggaaagaggcattcagtgggggagggtcttacacaaaggcccacagcggatcagtgacaagtcaaacatcaaagcgccttggcctcgtggtttcaaacactgtcctctttgaa

SEQ ID NO: 435792 - DNA, 120 bp, Artificial Sequence
  ENSG00000152953_35 (sequence is synthesized)
cccacaacacaaggtcttcatgtctgattttctagctgattggaaaatctttaaaggtgaagaccatgcttcttttttctctttgtttcacatcttccctgaatatctaactcagtgtcc

SEQ ID NO: 435793 - DNA, 120 bp, Artificial Sequence
  ENSG00000152953_36 (sequence is synthesized)
tataaaaatgggacattcaatcaatacgtatttgtattttattgcatttaaatttacaagctgaagatgattaatggggctatttggtggctgtaataacacatttttttgtttgagcag

SEQ ID NO: 435794 - DNA, 120 bp, Artificial Sequence
  ENSG00000152953_37 (sequence is synthesized)
gggatttactggcaaggccgtacattgttgacctgtcttggtgtagggaaacatgtagaagccaggcagaagtggggtagagagtgaagcagcaagactgcagagcctcatcaagaagtg

SEQ ID NO: 435795 - DNA, 120 bp, Artificial Sequence
  ENSG00000152953_38 (sequence is synthesized)
tggagtgaagggaaggcttcagatggacaatttgtgtgctggggaaaaaatggaatgtgctgcaaattcccctgtggataagggtggacggctgctctggcaagtatagtgcacctgacc

SEQ ID NO: 435796 - DNA, 120 bp, Artificial Sequence
  ENSG00000152953_39 (sequence is synthesized)
tcttcaggaagcactccttaataaattgcttgcagatgaagcctcatctcaaagtctgcatctggaagaactcaactaagaaagctgcactttcgaaagagcagaatcgtgggtagaatt

SEQ ID NO: 435797 - DNA, 120 bp, Artificial Sequence
  ENSG00000152953_40 (sequence is synthesized)
tgaatttaaagcagatgcttcaaactctgtctttaaattcctcgttcctgttcccatggaccacttaattttaaaatgttaactcactaaaaggcaaataaacgatacactaaaagcaca

SEQ ID NO: 435798 - DNA, 120 bp, Artificial Sequence
  ENSG00000152953_41 (sequence is synthesized)
gttctaccatcagctccaagtgtgtgggggaggagggaatgtcaccttctctaggactgcagacatttgtcgcttgtctgatcatgacagccaggacaggatcactctgctgctgcttct

SEQ ID NO: 435799 - DNA, 120 bp, Artificial Sequence
  ENSG00000152954_0 (sequence is synthesized)
gggtgcgcgggcacgcgggactcccagctgtcaatcaggcgcgggctgagctctacgaggcggagcggcggcggtggcgacggcgatgggaccccagcgagagatctgcagctaggctgg

SEQ ID NO: 435800 - DNA, 120 bp, Artificial Sequence
  ENSG00000152954_1 (sequence is synthesized)
ctgcacttgctccacgggtcaggggatcggagggggattgaagaatgcgccattaaaaggaaagatcaaggagtaaaccagaagaagaagaaaaagaggacttcaaagctgggaaggatg

SEQ ID NO: 435801 - DNA, 120 bp, Artificial Sequence
  ENSG00000152954_2 (sequence is synthesized)
agttcttgcagcaacgtctgtgggtccaggcaggcacaggctgcagctgagggtggttaccagcgctatggagtccggtcctacctgcaccagttttatgaggactgtacagcctcaatt

SEQ ID NO: 435802 - DNA, 120 bp, Artificial Sequence
  ENSG00000152954_3 (sequence is synthesized)
tgggagtatgaggatgatttccagatccaaagatcacctaacaggtggagctcagtattctggaaggttggactcatctcaggtacagtttttgtgatcctcggattgactgttctggca

SEQ ID NO: 435803 - DNA, 120 bp, Artificial Sequence
  ENSG00000152954_4 (sequence is synthesized)
gtgggctttcttgtgccccccaaaatcgaagcatttggcgaagccgattttgtggtggtcgacacacatgctgtccagtttaacagtgctctggacatgtacaagctggcaggagctgtt

SEQ ID NO: 435804 - DNA, 120 bp, Artificial Sequence
  ENSG00000152954_5 (sequence is synthesized)
ctcttctgcattggaggcacgtccatggcagggtgcctgctgatgtcggtgtttgtaaagagctactccaaagaagaaaaattcctccagcagaagtttaaagaacgaatcgcagacatc

SEQ ID NO: 435805 - DNA, 120 bp, Artificial Sequence
  ENSG00000152954_6 (sequence is synthesized)
aaagcccacacccagccggttacaaaagctccagggccaggggaaacaaagattccagtcactttgtccagggttcaaaatgtccagcctctactggcaacctgaaacctttcccacccc

SEQ ID NO: 435806 - DNA, 120 bp, Artificial Sequence
  ENSG00000152954_7 (sequence is synthesized)
agttcttcttgtctgatttatgcccgtggttaaaaagagcaggccagttttcgagataaagaagatttggcgttgactgccctagggctgtgttcagctgtgggcaatataatgggtgga

SEQ ID NO: 435807 - DNA, 120 bp, Artificial Sequence
  ENSG00000152954_8 (sequence is synthesized)
ctcacacttgctcagttcaggcagctctgctggagggcggtgccatgcctaagcctgtgcacatgcatccagctgcttaagatgggtgcttccttgtacccggccaccagaaaacccctg

SEQ ID NO: 435808 - DNA, 120 bp, Artificial Sequence
  ENSG00000152954_9 (sequence is synthesized)
gaactcctctttcatagatcgtgactttgtgttattttccgtgttgtttgaaagtgccgaacagtttagaccagctcaccaatggctaatgtggtccattttattttctaatattggttt

SEQ ID NO: 435809 - DNA, 120 bp, Artificial Sequence
  ENSG00000152954_10 (sequence is synthesized)
ttttctgcgtggtgctgtcttccattcctgtctcactatgtgtaagattttgtcatatgtgttcatagaaacatggaattctctgattttgagccgaacatgagtttttagactgtatct

SEQ ID NO: 435810 - DNA, 120 bp, Artificial Sequence
  ENSG00000152954_11 (sequence is synthesized)
tgacatgaggttcctgacattggatacaaagttatcagcattcacaaatctttttgttttctccattttttttccctttgagatgaagtgctgttcttttgcctaggttggagtacagcg

SEQ ID NO: 435811 - DNA, 62 bp, Artificial Sequence
  ENSG00000152954_12 (sequence is synthesized)
ccccagttaatattttttttaattttttttagaggcaggatcttgctgtccaatttttttta

SEQ ID NO: 435812 - DNA, 120 bp, Artificial Sequence
  ENSG00000152954_13 (sequence is synthesized)
ttttttttagaggcaggatcttgctgtccaattttttttaaaaagctaaaattgccaactttagaatcttgaccaaaaaaaattaattttaggagcatctatttatgcagtgttcaaaag

SEQ ID NO: 435813 - DNA, 120 bp, Artificial Sequence
  ENSG00000152954_14 (sequence is synthesized)
tactgaattagaaaccaggaagttttagttccttctactacctgtgtgatcttggggaaattatttaacctctcagtcctaattttccccttctgtataatgggagttctggatcacaat

SEQ ID NO: 435814 - DNA, 120 bp, Artificial Sequence
  ENSG00000152954_15 (sequence is synthesized)
atgtctgggctctcattacccaaacatctgagattccatttttgccatgtgtcatcgagtcgctccccaacagatgtttgtgatgtttttgtggctgtcaccatggtgggattctttcag

SEQ ID NO: 435815 - DNA, 120 bp, Artificial Sequence
  ENSG00000152954_16 (sequence is synthesized)
aatgagactcctggaaattcactgagtcagcagccttcacaccatctacccttaaatatccaaccccagcaatttatacaacgctgtcatatttttaaaaaaacaaaagtaagccatcct

SEQ ID NO: 435816 - DNA, 120 bp, Artificial Sequence
  ENSG00000152954_17 (sequence is synthesized)
caaataaggaaccccttggtagatattaaccttaaaaagggttttcattctcaaacaagatgctttgttctccaacaagatgttcatctcatcacttgcacttttgttttaatgtatgga

SEQ ID NO: 435817 - DNA, 120 bp, Artificial Sequence
  ENSG00000152954_18 (sequence is synthesized)
ttcagattagactgagaaaaatggatggtattttcttaaaattgtgccaccttagagcccccccccttttttttttcttccttcactggataaataaaatatgtgaacaagtggaacctg

SEQ ID NO: 435818 - DNA, 120 bp, Artificial Sequence
  ENSG00000152954_19 (sequence is synthesized)
aattgcattgtcattccttcagtgtggttattttctctccaacatgtaattttccattctgagactgaataagctctgatgtttccccggctaaatggaagaataaatgaagcaattagt

SEQ ID NO: 435819 - DNA, 120 bp, Artificial Sequence
  ENSG00000152954_20 (sequence is synthesized)
cctgcccacatgtagcttacactctatcatgtatatggtctatcagaccataagtaaataaaccacacatagaatatcagatagtaacaagtgctaggaagagaaacaaacctagacaag

SEQ ID NO: 435820 - DNA, 120 bp, Artificial Sequence
  ENSG00000152954_21 (sequence is synthesized)
gggatagaaagtaatggaacgctgatatttagatatattgattatagaaagcctctcagaagaatttgatagggagtggcagcataatttttttccctcctcatgtctctgggttatgat

SEQ ID NO: 435821 - DNA, 120 bp, Artificial Sequence
  ENSG00000152954_22 (sequence is synthesized)
ggaatcggaagttacagcacaaaaactgtcctcgctgctgtttcgggagtttgtcaccacctggagaggcccttctctgtcgccattgggattggccttaccaccctaaggccccaggtt

SEQ ID NO: 435822 - DNA, 120 bp, Artificial Sequence
  ENSG00000152954_23 (sequence is synthesized)
tcagaactttaaacaacctctgcattgcaattttttgactctttccatttgggagtcctctttctgttagacctgggaccaattcgactttgaactgtgtccagagataatttttatgat

SEQ ID NO: 435823 - DNA, 120 bp, Artificial Sequence
  ENSG00000152954_24 (sequence is synthesized)
actgtatggaattgctccctcaatttttatcctttccagtactcagcatggtaccaagactaagctgatgagtcccaactgctctcctcacctcccatatgctactcatgagactccttc

SEQ ID NO: 435824 - DNA, 120 bp, Artificial Sequence
  ENSG00000152954_25 (sequence is synthesized)
gtacctatcatcccacgctctccctcccatgttttaacatgtctggaattccccaatgggtgcatctctcagagattctcattaaagactggcattaacagccccttcagaagccttgaa

SEQ ID NO: 435825 - DNA, 120 bp, Artificial Sequence
  ENSG00000152954_26 (sequence is synthesized)
aattcacaggagaagctcaatgaatgtttgctgaattgaggtgtttgagttgaagaaactgcaataattgttcttagtaaacagacctccttgtgacctgcaccaattcatatgatactg

SEQ ID NO: 435826 - DNA, 120 bp, Artificial Sequence
  ENSG00000152954_27 (sequence is synthesized)
cattttatgggagagaaaagcagcatgaaaaattgaatgatatttcaaagaaaataaatagaacagggcctgtgcctggcctcacaactgactcacacatagtgtcacaggaaaacactc

SEQ ID NO: 435827 - DNA, 120 bp, Artificial Sequence
  ENSG00000152954_28 (sequence is synthesized)
atgttcttagagtttcatgaggcataaagatttatttctgcttcaaggctatgaacatttataaaggaaaataaaaagtaactgcatatattacacagaaatttaaatttccaacacatt

SEQ ID NO: 435828 - DNA, 120 bp, Artificial Sequence
  ENSG00000152954_29 (sequence is synthesized)
gatactacagtctattggcacacatagtgatatcacaatagcacattcatgagcttgtttccctaatacaggaattattcaaggaattctcagcatttgtactccctttacctcttgatg

SEQ ID NO: 435829 - DNA, 120 bp, Artificial Sequence
  ENSG00000152954_30 (sequence is synthesized)
atgcccattttgttatgtttattgcttcatgagtgtgtctccttgtaacccaagagtccattgagggcagacctggctccactcatcttcacaactattatttatctcacaggtgcctgg

SEQ ID NO: 435830 - DNA, 80 bp, Artificial Sequence
  ENSG00000152969_0 (sequence is synthesized)
accgagggagctgcagccacccgcgtgcggcacgcgccggccgcctgcccggatcgcggccaccagtgccgcggcctctc

SEQ ID NO: 435831 - DNA, 120 bp, Artificial Sequence
  ENSG00000152969_1 (sequence is synthesized)
gccgagccgcgcgcgcgactgccatcctcctcaattgctttttacgattttttttgtgcatgcattcattttctgttccgttttgtcctttttaaggcggtggcggcggcgacagcggcg

SEQ ID NO: 435832 - DNA, 120 bp, Artificial Sequence
  ENSG00000152969_2 (sequence is synthesized)
taagctcgcagcggggagggggcggccggaggatgcggcgcggggctgcgctcgctacgtccgctgctgctgcccggctcgggcctgagcgccgagcaggatcccaagtgatggtggttt

SEQ ID NO: 435833 - DNA, 120 bp, Artificial Sequence
  ENSG00000152969_3 (sequence is synthesized)
cctcggagggcgagctgagtcctgcgcgactggttagcacggtggagctggtagccacgcctgctggctggcgtgcgtgaacaggtgtggaccgcaggatctcagcactctgacccaagg

SEQ ID NO: 435834 - DNA, 120 bp, Artificial Sequence
  ENSG00000152969_4 (sequence is synthesized)
ggaagcatgtcgaagaaaggccggagcaagggcgagaagcccgagatggagacggacgcggtgcagatggccaacgaggagctgcgggccaagctgaccagcattcagatcgagttccag

SEQ ID NO: 435835 - DNA, 120 bp, Artificial Sequence
  ENSG00000152969_5 (sequence is synthesized)
caggaaaaaagcaaggtgggcaaactgcgcgagcggctgcaggaggcgaagctggagcgcgagcaggagcagcgacggcacacggcctacatttcggagctcaaggccaagctgcatgag

SEQ ID NO: 435836 - DNA, 120 bp, Artificial Sequence
  ENSG00000152969_6 (sequence is synthesized)
gagaagaccaaggagctgcaggcgctgcgcgaggggctcatccggcagcacgagcaggaggcggcgcgcaccgccaagatcaaggagggcgagctgcagcggctgcaggccacgctgaac

SEQ ID NO: 435837 - DNA, 120 bp, Artificial Sequence
  ENSG00000152969_7 (sequence is synthesized)
gtgctgcgcgacggcgcggccgacaaggtcaagacggcgctgctgaccgaggcgcgcgaggaggcgcgcagggccttcgatggagagcgcctgcggctgcagcaggagatcctggagctc

SEQ ID NO: 435838 - DNA, 120 bp, Artificial Sequence
  ENSG00000152969_8 (sequence is synthesized)
aaggcagcgcgcaagcaggcagaggaggcgctcagtaactgcatgcaggctgacaagaccaaggcagccgacctgcgtgccgcctaccaggcgcaccaagacgaggtgcaccgcatcaag

SEQ ID NO: 435839 - DNA, 120 bp, Artificial Sequence
  ENSG00000152969_9 (sequence is synthesized)
cgcgagtgcgagcgcgacatccgcaggctgatggatgagatcaaagggaaagaccgtgtgattctggccttggagaaggaacttggcgtgcaggctgggcagacccagaagctgcttctg

SEQ ID NO: 435840 - DNA, 120 bp, Artificial Sequence
  ENSG00000152969_10 (sequence is synthesized)
aaagagagagctcccgcccgggatcggggacatggtggagctcatgggcgtccaggatcaacatatggacgagcgagatgtgaggcgatttcaactaaaaattgctgaactgaattcagt

SEQ ID NO: 435841 - DNA, 120 bp, Artificial Sequence
  ENSG00000152969_11 (sequence is synthesized)
gatacggaagctggaagacagaaatacgctgttggcagatgagaggaatgaactgctgaaacgctcacgagagaccgaggttcagctgaagcccctggtggagaagaacaagcggatgaa

SEQ ID NO: 435842 - DNA, 120 bp, Artificial Sequence
  ENSG00000152969_12 (sequence is synthesized)
caagaagaatgaggatctgttgcagagtatccagaggatggaggagaaaatcaagaacctcacgcgggaaaacgtggaaatgaaagaaaagctgtcagcgcaggcgtctctgaagcggca

SEQ ID NO: 435843 - DNA, 120 bp, Artificial Sequence
  ENSG00000152969_13 (sequence is synthesized)
tacctccttgaatgacctcagcctgacgagggatgagcaggagatcgagttcctgaggctgcaggtgctggagcagcagcacgtcattgacgacctctcactggagagagaacggctgtt

SEQ ID NO: 435844 - DNA, 120 bp, Artificial Sequence
  ENSG00000152969_14 (sequence is synthesized)
gcgctccaaaaggcatcgagggaaaagtctgaaaccgcccaagaagcatgttgtggagacattttttggatttgatgaggagtctgtggactcagaaacgttgtccgaaacatcctacaa

SEQ ID NO: 435845 - DNA, 120 bp, Artificial Sequence
  ENSG00000152969_15 (sequence is synthesized)
cacagacaggacagacaggaccccagccacgcccgaagaagacttggacgatgccacagcccgagaggaggctgacctgcgcttctgccagctgacccgggagtaccaggccctgcaacg

SEQ ID NO: 435846 - DNA, 120 bp, Artificial Sequence
  ENSG00000152969_16 (sequence is synthesized)
cgcctacgccctgctccaggagcaggtgggaggcacgctggacgctgagagggaggcccggactcgggagcagctacaagctgatctgctgaggtgtcaggccaaaatcgaagatttgga

SEQ ID NO: 435847 - DNA, 120 bp, Artificial Sequence
  ENSG00000152969_17 (sequence is synthesized)
gaagttactggttgagaagggacaggattccaagtgggttgaagagaagcagctgctcatcagaacaaaccaagacttgctggaaaagatttacagactggaaatggaagagaaccagct

SEQ ID NO: 435848 - DNA, 120 bp, Artificial Sequence
  ENSG00000152969_18 (sequence is synthesized)
gaagaatgaaatgcaagacgccaaggatcagaacgagctgttagaattcagagtgctagaactcgaagtaagagactctatctgttgtaaactctcaaacggagcagacattctctttga

SEQ ID NO: 435849 - DNA, 120 bp, Artificial Sequence
  ENSG00000152969_19 (sequence is synthesized)
tctcaaacggagcagacattctctttgaacccaaactgaaattcatgtaaagctctcagatgttttcaagcatgtgtaaaggggacatgttatagtttctttctttctttctttcttttt

SEQ ID NO: 435850 - DNA, 120 bp, Artificial Sequence
  ENSG00000152969_20 (sequence is synthesized)
ttcactgccttaatgtgttctggagagcgtgctcacccaagtctatggacatgtaccagagctaatatatttattgcctatggcttgttttgcacttaataaaataatttgtttttgcaa

SEQ ID NO: 435851 - DNA, 120 bp, Artificial Sequence
  ENSG00000152969_21 (sequence is synthesized)
attttgagtcaggagcctggactgacccgggtccctccacagcactggagggggtgggacacatcactacagggtttccttccatgaggactctgaggagttgacagtggaggcaaggag

SEQ ID NO: 435852 - DNA, 120 bp, Artificial Sequence
  ENSG00000152969_22 (sequence is synthesized)
agagagagagaggaggtcgccagcatttaacctccaaatcaccaccttccccgagaaccacagcagcgctctccagctgttctgtcaccaggaaggagttaaggatgtgaatgtttctga

SEQ ID NO: 435853 - DNA, 120 bp, Artificial Sequence
  ENSG00000152969_23 (sequence is synthesized)
acttatgaagaaattagatatccttggcgataacgggaatttgagaaatgaagaacaggttgcaataatccaagctggaactgtgcttgccctgtgtgaaaagtggctgaagcaaataga

SEQ ID NO: 435854 - DNA, 120 bp, Artificial Sequence
  ENSG00000152969_24 (sequence is synthesized)
ggggaccgaggccgccctgacccagaagatgctggacctggagaaggagaaggacctgttcagcaggcagaagggctacctggaagaggagctcgactaccggaagcaagcccttgacca

SEQ ID NO: 435855 - DNA, 120 bp, Artificial Sequence
  ENSG00000152969_25 (sequence is synthesized)
ggcttacctgaaaatccaagacctggaggccacactgtacacagcgctgcagcaggagccggggcggagggccggtgaggcgctgagcgagggccagcgggaggacctgcaggctgctgt

SEQ ID NO: 435856 - DNA, 120 bp, Artificial Sequence
  ENSG00000152969_26 (sequence is synthesized)
ggaaaaggtgcgcaggcagatcctcaggcagagccgcgagttcgacagccagatcctgcgggagcgcatggagctgctgcagcaggcccagcagagaatccgagaactggaggacaaact

SEQ ID NO: 435857 - DNA, 120 bp, Artificial Sequence
  ENSG00000152969_27 (sequence is synthesized)
ggagtttcagaagcggcacctgaaagaactggaggaaaagtttttgttcctttttttgtttttctcactagcattcattctgtggccttgatgacttcagtgagccaagaactcgggttg

SEQ ID NO: 435858 - DNA, 120 bp, Artificial Sequence
  ENSG00000152969_28 (sequence is synthesized)
tcatcagaacaaaccaagacttgctggaaaagtgacttctcgctgctgccaggcgatgggtgctgctgtttcccttcttggacagaagatttacagactggaaatggaagagaaccagct

SEQ ID NO: 435859 - DNA, 120 bp, Artificial Sequence
  ENSG00000152969_29 (sequence is synthesized)
ttcagcaaacagggctgtgtacctgctgtgtcaggccccggacagggccctggggacgtagaggtggatgaaccgtggacactgtccttgagaagcccgctgcacagtaaggcttttagt

SEQ ID NO: 435860 - DNA, 120 bp, Artificial Sequence
  ENSG00000152969_30 (sequence is synthesized)
caggggctggtgtgtctgcagcttcacgccaccatggaatatgtcctctttgtgctgtacttctctttcttcctgtgtctctgtgccctggtgtgcctgtacttctctggctgccaggag

SEQ ID NO: 435861 - DNA, 120 bp, Artificial Sequence
  ENSG00000152977_0 (sequence is synthesized)
aattcatttatctgcaggaatgattgctgctatcagtctcgcgctcaccgcccggctgaggaggtgaaagtttctccccaggaagataaaccgcaaaagacaatattgtgcatgatttgc

SEQ ID NO: 435862 - DNA, 120 bp, Artificial Sequence
  ENSG00000152977_1 (sequence is synthesized)
gccttttctttggctttttctttctttcttcacccccccacccacttttttttttttttttttcaaaaagcagagagggaaaaacggagagtgaaggagcgaggaggcgagcgtgagaga

SEQ ID NO: 435863 - DNA, 120 bp, Artificial Sequence
  ENSG00000152977_2 (sequence is synthesized)
aaggagagagagagaaaagaaagggcgaggggctagtggagaagtaaggaggggcgcgctgcgcgaggcggagagagggcgaagcagtcgcggcactggcgctcacattcctctatgcta

SEQ ID NO: 435864 - DNA, 120 bp, Artificial Sequence
  ENSG00000152977_3 (sequence is synthesized)
caaatccaggaggaagtttttttttagggggctgagatgctccatgcctttccccgggcagccttgacgcgcggccctctcggcagagactgagcggcgagaaagtgcgagccgggccgg

SEQ ID NO: 435865 - DNA, 120 bp, Artificial Sequence
  ENSG00000152977_4 (sequence is synthesized)
cagaatctgcctggcgggcgctggagcctgcgttactcgcggcccgcagccgtccggctactttgcgtttggcccggccagcgcccgggcgcgccgcgccattgcctgcaggctaggact

SEQ ID NO: 435866 - DNA, 120 bp, Artificial Sequence
  ENSG00000152977_5 (sequence is synthesized)
tcgcgaggtgggtcgactccccctccctcctcctcttcttcctcctcttcctcctcctcttgttcctcctcctcctcccgattttccctcctcggctggcgagggtggggggggcggggg

SEQ ID NO: 435867 - DNA, 120 bp, Artificial Sequence
  ENSG00000152977_6 (sequence is synthesized)
aggccggggctcgccccgagcagccacgatgctcctggacgccggcccccagtacccagcgatcggcgtgaccacctttggcgcgtcccgccaccactccgcgggcgacgtggccgaacg

SEQ ID NO: 435868 - DNA, 120 bp, Artificial Sequence
  ENSG00000152977_7 (sequence is synthesized)
agacgtgggcctgggcatcaacccgttcgccgacggcatgggcgccttcaagctcaaccccagttcgcacgagctggcttcggccggccagacggccttcacgtcgcaggcgccaggcta

SEQ ID NO: 435869 - DNA, 120 bp, Artificial Sequence
  ENSG00000152977_8 (sequence is synthesized)
cgcggctgctgcggccctgggccatcaccatcacccgggccacgtcggctcctattccagcgcagccttcaactccacgcgggactttctgttccgcaaccggggttttggcgacgcggc

SEQ ID NO: 435870 - DNA, 120 bp, Artificial Sequence
  ENSG00000152977_9 (sequence is synthesized)
ggcggcagccagcgcacagcacagcctctttgctgcatcggccgggggcttcgggggcccacacggccacacggacgccgcgggccacctcctcttccccgggcttcacgagcaggctgc

SEQ ID NO: 435871 - DNA, 120 bp, Artificial Sequence
  ENSG00000152977_10 (sequence is synthesized)
cggccacgcgtcgcctaacgtggtcaacgggcagatgaggctcggcttctcgggggacatgtacccgcgaccggagcagtacggccaggtgaccagcccgcgttcggagcactatgctgc

SEQ ID NO: 435872 - DNA, 120 bp, Artificial Sequence
  ENSG00000152977_11 (sequence is synthesized)
gccgcagctgcacggctacgggcccatgaacgtgaacatggccgcgcatcacggcgccggcgccttcttccgctacatgcgccaacccatcaagcaagagctcatctgcaagtggatcga

SEQ ID NO: 435873 - DNA, 120 bp, Artificial Sequence
  ENSG00000152977_12 (sequence is synthesized)
gcccgagcagctggccaaccccaaaaagtcgtgcaacaaaactttcagcaccatgcacgagctagttacgcacgtcaccgtggagcacgtaggtggcccggagcagagtaatcacatctg

SEQ ID NO: 435874 - DNA, 120 bp, Artificial Sequence
  ENSG00000152977_13 (sequence is synthesized)
cttctgggaggagtgtccgcgcgagggcaagcccttcaaagccaaatacaaactggttaaccacatccgcgtgcacacgggcgagaagccctttccctgccccttccctggctgtggcaa

SEQ ID NO: 435875 - DNA, 120 bp, Artificial Sequence
  ENSG00000152977_14 (sequence is synthesized)
ggtcttcgcgcgctccgagaatttaaagatccacaaaaggacgcacacaggggagaagcccttcaagtgcgagtttgagggctgtgaccggcgcttcgctaacagcagcgaccgcaagaa

SEQ ID NO: 435876 - DNA, 120 bp, Artificial Sequence
  ENSG00000152977_15 (sequence is synthesized)
gcacatgcacgtgcacacgagcgacaagccctatctttgcaagatgtgcgacaagtcctacacgcatcccagttcgctgcgcaaacacatgaaggtccacgaatcctcctcgcagggctc

SEQ ID NO: 435877 - DNA, 120 bp, Artificial Sequence
  ENSG00000152977_16 (sequence is synthesized)
gcagccttcgccggccgccagctctggctacgaatcctccacgcctcccaccatcgtgtctccctccacagacaacccgaccacaagctccttatcgccctcctcctccgcagtccacca

SEQ ID NO: 435878 - DNA, 120 bp, Artificial Sequence
  ENSG00000152977_17 (sequence is synthesized)
cacagccggccacagtgcgctctcttccaattttaacgaatggtacgtttaaaatcagaaacaaaacatcgaacaaaaccctatttaagagactgatcacacacgtatacacaacattac

SEQ ID NO: 435879 - DNA, 120 bp, Artificial Sequence
  ENSG00000152977_18 (sequence is synthesized)
tgaaagaaccctgcgaatcaaaacaacccccacacagaccccgcaatccttttttaaaaaatctgccaatagacccaggacgagtaagagaggaagcatcaaccttttaaaaatttcctt

SEQ ID NO: 435880 - DNA, 120 bp, Artificial Sequence
  ENSG00000152977_19 (sequence is synthesized)
tcgctttcattatttttctttttttggcaaaggcttggtacccaaggtgcggtagggggtcgagggggaggaggccacctgaccaaatgccgccaaccccgagggccagtttcttgtcga

SEQ ID NO: 435881 - DNA, 120 bp, Artificial Sequence
  ENSG00000152977_20 (sequence is synthesized)
attggtacgggctctctggggcttcggcttctttttttctttgttttcttgtaaatacagaattattagcttaaaactgtactgttgaattctgtaaatagttatatctcggttggagcg

SEQ ID NO: 435882 - DNA, 120 bp, Artificial Sequence
  ENSG00000152977_21 (sequence is synthesized)
caactgtttgtactgaatggcaagaatgttctagtaaatgtgtaccaaaatgtgaattactttgtacgattacagtctccacgtcgacctaacccaatattattggtattaatgtgcttt

SEQ ID NO: 435883 - DNA, 120 bp, Artificial Sequence
  ENSG00000152977_22 (sequence is synthesized)
ttttgtataaagtgcaaacatttcgtcccaaagtctaagtactttagtgcagtaaaatgttgtttcatgtcctgtcaagaattcgtatagtacgagcctggatctgcgtgtcaaactgtt

SEQ ID NO: 435884 - DNA, 120 bp, Artificial Sequence
  ENSG00000152977_23 (sequence is synthesized)
ccatttgtttatgtaaagtgatattaaaaaagatataaactataactgtccgttacttttggcaaaagatacaaccacataatgtatataattcctagtttccatatttatccgcatgta

SEQ ID NO: 435885 - DNA, 120 bp, Artificial Sequence
  ENSG00000152977_24 (sequence is synthesized)
aagggccggtttatccatgttacagctcttcaatatttatggctagaagaactcgtatgtacactttagtttccagaactgtttggtaacctttcgtaccttattaaagattcttaaatc

SEQ ID NO: 435886 - DNA, 120 bp, Artificial Sequence
  ENSG00000152977_25 (sequence is synthesized)
tccgtgattgtggtaggaatttcttcttcacccaccagcaacctgctgcctcttctgccagtcttaaagggtctccagaaaagctctccagtctcccttgccttccctttctgtcactgc

SEQ ID NO: 435887 - DNA, 120 bp, Artificial Sequence
  ENSG00000152977_26 (sequence is synthesized)
aggtcgtataaacgtgataaatgaatgctaccctgctggctctccgagagagtgtaattagtatttatatcaaaatttatgaaacaaattttcggccgcagtataatttaaatgaccttt

SEQ ID NO: 435888 - DNA, 120 bp, Artificial Sequence
  ENSG00000152977_27 (sequence is synthesized)
gcagatgtagaataacaaccataaaaataacaggaatagattgcacaggcgacatcaatattaatgtagacgaattgtcagaagctcaggggctcgctctgcaacattgcaaatgaactt

SEQ ID NO: 435889 - DNA, 120 bp, Artificial Sequence
  ENSG00000152977_28 (sequence is synthesized)
gcagccgagggttccgctgccccctagattaaattccccgggctgaaactgagttgcagatttacaatatcatattttaaattgctgtcttcaattaaaccatttatgaccataactaat

SEQ ID NO: 435890 - DNA, 120 bp, Artificial Sequence
  ENSG00000152977_29 (sequence is synthesized)
tttcaggatgtcgatgcatgcttttccaggccttccttctttgtacaaaagtaaatgtccataaagcgtttcacttatattcttcaaacatgatgctaatttaaattaattacttcctat

SEQ ID NO: 435891 - DNA, 120 bp, Artificial Sequence
  ENSG00000152977_30 (sequence is synthesized)
gatatgttattattcctatgattttgccactgttattagttctctcaaaaatacatctagggaagaggattattttaagtaatttgattatctttctatctcttttatttatttctcatt

SEQ ID NO: 435892 - DNA, 120 bp, Artificial Sequence
  ENSG00000152977_31 (sequence is synthesized)
tacttaagaaattcgttccattggttggcattgatacagtaaatttgtaaatgaggagacaatataaaaaatctaaattacttgtgcttaatgactgtagcagaatgccttttctctaaa

SEQ ID NO: 435893 - DNA, 120 bp, Artificial Sequence
  ENSG00000152977_32 (sequence is synthesized)
tcagattgtctttcttgcagtttagtttgatagatttgcaagctatgctgcttccatgaagttagctgcgctggtaggaacgcaggcttctttgtctctggttgtagcttgcatgatcgc

SEQ ID NO: 435894 - DNA, 120 bp, Artificial Sequence
  ENSG00000152977_33 (sequence is synthesized)
cccattaggcagacaacgtagccggagatcacaaatcaggcccttggctgtagttgctagtgtgtggaggtgcagagcaggtggcagaaactgacctcactgggcaagggtggccatgga

SEQ ID NO: 435895 - DNA, 120 bp, Artificial Sequence
  ENSG00000152977_34 (sequence is synthesized)
cctgattctttaatgcactctatgtgttcaggaagccacaggccatatttgactctgagaaagaaaacaagaggaaaaaccccacaaagtataacaaccccttaagatacatctatttta

SEQ ID NO: 435896 - DNA, 120 bp, Artificial Sequence
  ENSG00000152977_35 (sequence is synthesized)
aagtgaaattaatttttcagtttataccattggccaattacaagataaaaatgttcaatttctttaagaatcctttgttgacttgtcttttcatctcttgctatttatatttgtcactgt

SEQ ID NO: 435897 - DNA, 120 bp, Artificial Sequence
  ENSG00000152977_36 (sequence is synthesized)
ttcaacaaagtcttatttgctgaggaaggactttgctgcacttactgtaccacatcaaacactggggagggtggtgtttaactttttaaaaaatgttattctgattataacaataatatt

SEQ ID NO: 435898 - DNA, 120 bp, Artificial Sequence
  ENSG00000152977_37 (sequence is synthesized)
ggcttttttcatgaaaagagcgccaccttgcaaggtttagtgagatttatggaagttgaatacctaagcaggaattgctgctagctccaaaaatttgcgaagcaaaagctagccccaatt

SEQ ID NO: 435899 - DNA, 120 bp, Artificial Sequence
  ENSG00000152977_38 (sequence is synthesized)
ggtttggaagtttgaaactgattaacagatttgcatttgaagtgactccagacattaggtccagacattagttaaaaatagaaagaggaataaagacatctcttctctctagaaaagata

SEQ ID NO: 435900 - DNA, 120 bp, Artificial Sequence
  ENSG00000152977_39 (sequence is synthesized)
acaccacaattaataatccttcccactttcattgagatcagcttgtctgataacctgatatgagtgtgataatgataaacatgataatagtggtacttttgtaattttgctggtgcattt

SEQ ID NO: 435901 - DNA, 120 bp, Artificial Sequence
  ENSG00000152977_40 (sequence is synthesized)
aagaagatagtaaatgatgagttcatcttttcttcgaacattcctattcctagatgtagtttacctcaaattgggaattataactgtctaatttttgttgtgtacctgatgccccttttg

SEQ ID NO: 435902 - DNA, 120 bp, Artificial Sequence
  ENSG00000152977_41 (sequence is synthesized)
ctttaataccacagtgtaacaattaaatatcacactatgacatatgatttaagtaggatattttaaagataaattttaggggtaaatgtttacttcaaaatgactccatatttcaaatat

SEQ ID NO: 435903 - DNA, 120 bp, Artificial Sequence
  ENSG00000152977_42 (sequence is synthesized)
ctgtttagactgtgaaggccaaataatttttaagaaaacatttgaagagtagtgtgtttgcatttgtgaataatcttactcacagcaagtaaacgtaataaaagccaacatttaagccaa

SEQ ID NO: 435904 - DNA, 120 bp, Artificial Sequence
  ENSG00000152977_43 (sequence is synthesized)
ctcctgggaagctctaggatgtgactttaagctggaaagactctcaggagctaggtttgatatggcacaatctcaaggcatcgctaagtctgaagttcttccagcagtaaaccacaaagg

SEQ ID NO: 435905 - DNA, 120 bp, Artificial Sequence
  ENSG00000152977_44 (sequence is synthesized)
aagtctgaagagtttcccagaagccctgaaaggacgcaatagcatcatttagcagaaagaaacagccctggattaatgttcttttgggattcatcttctggctttgtgattttgggcaag

SEQ ID NO: 435906 - DNA, 120 bp, Artificial Sequence
  ENSG00000152977_45 (sequence is synthesized)
gctttgtgattttgggcaagttacttatcttcctccatttattcacatatataatgagaggagtagtacctaccttacaaacttttctgtgagaagcaaaaaaaataaaaataaaaaata

SEQ ID NO: 435907 - DNA, 120 bp, Artificial Sequence
  ENSG00000152977_46 (sequence is synthesized)
agctccctgcactgcgccctgggtgggtgggtgaatgtgaagaggcggcgttgggctaggcccctgcagcccgctcggagcgtcctaggcccggggctgcgctgtgaaagacccagattc

SEQ ID NO: 435908 - DNA, 120 bp, Artificial Sequence
  ENSG00000152977_47 (sequence is synthesized)
tcatcccagaggcccagcagtcctgaaaggcctcctctccgaccctgagccgggtccgccgaacaaagttcggaagctcgggctagctgggccagcgccattttctcgcacttgtggctg

SEQ ID NO: 435909 - DNA, 120 bp, Artificial Sequence
  ENSG00000152977_48 (sequence is synthesized)
ggaaggtgtggtgagctcccggccccggccgaggggtccctggagaggagctgggtggcggtggccaggccgagcgcggttgctggcccgcgcctccctccccgaggcaccattgttccg

SEQ ID NO: 435910 - DNA, 120 bp, Artificial Sequence
  ENSG00000152977_49 (sequence is synthesized)
ggatcgctgtgaccgccacaaagtgaatcctttcggtgcggacagtcgccttcaaagccaggccccggattcagctcctgggaagctctaggatgtgactttaagctggaaagactctca

SEQ ID NO: 435911 - DNA, 120 bp, Artificial Sequence
  ENSG00000152977_50 (sequence is synthesized)
gcggcgaggagggctctgagtcctctcccggccaggccgagcttagtatgtggaggcggcggcgggagtgcgggcatggaccaagggaagggggacacccaaaccgcattggtgccttcc

SEQ ID NO: 435912 - DNA, 120 bp, Artificial Sequence
  ENSG00000152977_51 (sequence is synthesized)
tttccctccactcgcgccgtagacctccccaaattgcccgtctccggtatgactgaatctgtctgctggcctctcagctaccaactctgcccgaaatctagatcccagacctgctcctgg

SEQ ID NO: 435913 - DNA, 120 bp, Artificial Sequence
  ENSG00000152977_52 (sequence is synthesized)
gaagctctaggatgtgactttaagctggaaagactctcaggagctaggtttgatatggcacaatctcaaggcatcgctaagtctgaagttcttccagcaggtctgtaaaccacaaaggac

SEQ ID NO: 435914 - DNA, 120 bp, Artificial Sequence
  ENSG00000152977_53 (sequence is synthesized)
taaagttttcatgtcagttaaaacatgttattggcttgaatcctgactcaagaacggaaatagtaattgtgtctgccattcagggtgacacagttatttccactggttcagggtggtggg

SEQ ID NO: 435915 - DNA, 120 bp, Artificial Sequence
  ENSG00000152977_54 (sequence is synthesized)
gtgggagctactagatagaacaggtggggcaattcttgatacattttcgtgttttttgttactactaatccaccaactcttgttttcactcagaagcagataaaatggacatatttatta

SEQ ID NO: 435916 - DNA, 120 bp, Artificial Sequence
  ENSG00000152990_0 (sequence is synthesized)
ggcggcggcagaggaggaggaggaggcggtgctcgcgccgggcggtagagcggcgctgggacccatgcggccgtgacccccggctccctagaggcccagcgcagccgcagcggacaaagg

SEQ ID NO: 435917 - DNA, 120 bp, Artificial Sequence
  ENSG00000152990_1 (sequence is synthesized)
tccctagaggcccagcgcagccgcagcggacaaaggagcatgtccgcgccggggaaggcccgtcctccggccgccataaggctccggtcgccgctgggcccgcgccgcgctcctgcccgc

SEQ ID NO: 435918 - DNA, 80 bp, Artificial Sequence
  ENSG00000152990_2 (sequence is synthesized)
gcatggagccacccggacgccggcggggccgcgcgcagccgccgctgttgctgccgctctcgctgttagcgctgctcgcg

SEQ ID NO: 435919 - DNA, 120 bp, Artificial Sequence
  ENSG00000152990_3 (sequence is synthesized)
ctgcccgccggctgcaagcacgatgggcggccccgaggggctggcagggcggcgggcgccgccgagggcaaggtggtgtgcagcagcctggaactcgcgcaggtcctgcccccagatact

SEQ ID NO: 435920 - DNA, 120 bp, Artificial Sequence
  ENSG00000152990_4 (sequence is synthesized)
agcctggaactcgcgcaggtcctgcccccagatactctgcccaaccgcacggtcaccctgattctgagtaacaataagatatccgagctgaagaatggctcattttctgggttaagtctc

SEQ ID NO: 435921 - DNA, 120 bp, Artificial Sequence
  ENSG00000152990_5 (sequence is synthesized)
cttgaaagattggacctccgaaacaatcttattagtagtatagatccaggtgccttctggggactgtcatctctaaaaagattggatctgacaaacaatcgaataggatgtctgaatgca

SEQ ID NO: 435922 - DNA, 120 bp, Artificial Sequence
  ENSG00000152990_6 (sequence is synthesized)
gacatatttcgaggactcaccaatctggttcggctaaacctttcggggaatttgttttcttcattatctcaaggaacttttgattatcttgcgtcattacggtctttggaattccagact

SEQ ID NO: 435923 - DNA, 120 bp, Artificial Sequence
  ENSG00000152990_7 (sequence is synthesized)
gagtatcttttgtgtgactgtaacatactgtggatgcatcgctgggtaaaggagaagaacatcacggtacgggataccaggtgtgtttatcctaagtcactgcaggcccaaccagtcaca

SEQ ID NO: 435924 - DNA, 120 bp, Artificial Sequence
  ENSG00000152990_8 (sequence is synthesized)
ggcgtgaagcaggagctgttgacatgcgaccctccgcttgaattgccgtctttctacatgactccatctcatcgccaagttgtgtttgaaggagacagccttcctttccagtgcatggct

SEQ ID NO: 435925 - DNA, 120 bp, Artificial Sequence
  ENSG00000152990_9 (sequence is synthesized)
tcatatattgatcaggacatgcaagtgttgtggtatcaggatgggagaatagttgaaaccgatgaatcgcaaggtatttttgttgaaaagaacatgattcacaactgctccttgattgca

SEQ ID NO: 435926 - DNA, 120 bp, Artificial Sequence
  ENSG00000152990_10 (sequence is synthesized)
agtgccctaaccatttctaatattcaggctggatctactggaaattggggctgtcatgtccagaccaaacgtgggaataatacgaggactgtggatattgtggtattagagagttctgca

SEQ ID NO: 435927 - DNA, 120 bp, Artificial Sequence
  ENSG00000152990_11 (sequence is synthesized)
cagtactgtcctccagagagggtggtaaacaacaaaggtgacttcagatggcccagaacattggcaggcattactgcatatctgcagtgtacgcggaacacccatggcagtgggatatat

SEQ ID NO: 435928 - DNA, 120 bp, Artificial Sequence
  ENSG00000152990_12 (sequence is synthesized)
cccggaaacccacaggatgagagaaaagcttggcgcagatgtgatagaggtggcttttgggcagatgatgattattctcgctgtcagtatgcaaatgatgtcactagagttctttatatg

SEQ ID NO: 435929 - DNA, 120 bp, Artificial Sequence
  ENSG00000152990_13 (sequence is synthesized)
tttaatcagatgcccctcaatcttaccaatgccgtggcaacagctcgacagttactggcttacactgtggaagcagccaacttttctgacaaaatggatgttatatttgtggcagaaatg

SEQ ID NO: 435930 - DNA, 120 bp, Artificial Sequence
  ENSG00000152990_14 (sequence is synthesized)
attgaaaaatttggaagatttaccaaggaggaaaaatcaaaagagctaggtgacgtgatggttgacattgcaagtaacatcatgttggctgatgaacgtgtcctgtggctggcgcagagg

SEQ ID NO: 435931 - DNA, 120 bp, Artificial Sequence
  ENSG00000152990_15 (sequence is synthesized)
gaagctaaagcctgcagtaggattgtgcagtgtcttcagcgcattgctacctaccggctagccggtggagctcacgtttattcaacatattcacccaatattgctctggaagcttatgtc

SEQ ID NO: 435932 - DNA, 120 bp, Artificial Sequence
  ENSG00000152990_16 (sequence is synthesized)
atcaagtctactggcttcacggggatgacctgtaccgtgttccagaaagtggcagcctctgatcgtacaggactttcggattatgggaggcgggatccagagggaaacctggataagcag

SEQ ID NO: 435933 - DNA, 120 bp, Artificial Sequence
  ENSG00000152990_17 (sequence is synthesized)
ctgagctttaagtgcaatgtttcaaatacattttcgagtctggcactaaagaatactattgtggaggcttctattcagcttcctccttcccttttctcaccaaagcaaaaaagagaactc

SEQ ID NO: 435934 - DNA, 120 bp, Artificial Sequence
  ENSG00000152990_18 (sequence is synthesized)
agaccaactgatgactctctttacaagcttcaactcattgcattccgcaatggaaagctttttccagccactggaaattcaacaaatttggctgatgatggaaaacgacgtactgtggtt

SEQ ID NO: 435935 - DNA, 120 bp, Artificial Sequence
  ENSG00000152990_19 (sequence is synthesized)
caaaatagatggtgtgaatgtagatacccaccacatccctgttaatgtgacactgcgtcgaattgcacatggagcagatgctgttgcagcccggtgggatttcgatttgctgaacggaca

SEQ ID NO: 435936 - DNA, 120 bp, Artificial Sequence
  ENSG00000152990_20 (sequence is synthesized)
aggaggctggaagtcagatgggtgccatatactctattcagatgaaaatatcactacgattcagtgctactcccttagtaactatgcagttttaatggatttgacgggatctgaactata

SEQ ID NO: 435937 - DNA, 120 bp, Artificial Sequence
  ENSG00000152990_21 (sequence is synthesized)
cacccaggcggccagcctcctgcatcctgtggtttatactaccgctatcattctcctcttatgtctcttagccgtcattgtcagttacatataccatcacagtttgattagaatcagcct

SEQ ID NO: 435938 - DNA, 120 bp, Artificial Sequence
  ENSG00000152990_22 (sequence is synthesized)
caagagctggcacatgcttgtgaacttgtgctttcatattttcctaacctgtgtggtctttgtgggaggaataacccagactaggaatgccagcatctgccaagcagttgggataattct

SEQ ID NO: 435939 - DNA, 120 bp, Artificial Sequence
  ENSG00000152990_23 (sequence is synthesized)
tcactattccacccttgccacagtactatgggtaggagtgacagctcgaaatatctacaaacaagtcactaaaaaagctaaaagatgccaggatcctgatgaaccaccacctccaccaag

SEQ ID NO: 435940 - DNA, 120 bp, Artificial Sequence
  ENSG00000152990_24 (sequence is synthesized)
accaatgctcagattttacctgattggtggtggtatccccatcattgtttgcggcataactgcagcagcgaacattaagaattacggcagtcggccaaacgcaccctattgctggatggc

SEQ ID NO: 435941 - DNA, 120 bp, Artificial Sequence
  ENSG00000152990_25 (sequence is synthesized)
atgggaaccctccttgggagccttctatgggccagccagcttcatcacttttgtaaactgcatgtactttctgagcatatttattcagttgaaaagacaccctgagcgcaaatatgagct

SEQ ID NO: 435942 - DNA, 120 bp, Artificial Sequence
  ENSG00000152990_26 (sequence is synthesized)
taaggagcccacggaggagcaacagagattggcagccaatgaaaatggcgaaataaatcatcaggattcaatgtctttgtctctgatttctacatcagccttggaaaatgagcacacttt

SEQ ID NO: 435943 - DNA, 120 bp, Artificial Sequence
  ENSG00000152990_27 (sequence is synthesized)
tcattctcagctcttgggggccagccttactttgctcttatatgttgcactgtggatgtttggggctttggctgtttctttgtattaccctttggacttggtttttagcttcgtttttgg

SEQ ID NO: 435944 - DNA, 120 bp, Artificial Sequence
  ENSG00000152990_28 (sequence is synthesized)
agccacaagtttaagcttcagtgcgttcttcgtggtccaccattgtgttaatagggaggatgttagacttgcgtggatcatgacttgctgcccaggacggagctcgtattcagtgcaagt

SEQ ID NO: 435945 - DNA, 120 bp, Artificial Sequence
  ENSG00000152990_29 (sequence is synthesized)
caacgtccagccccccaactctaatgggacgaatggagaggcacccaaatgccccaatagcagtgcggagtcttcatgcacaaacaaaagtgcttcaagcttcaaaaattcctcccaggg

SEQ ID NO: 435946 - DNA, 120 bp, Artificial Sequence
  ENSG00000152990_30 (sequence is synthesized)
ctgcaaattaacaaacttgcaggcggctgcagctcagtgccatgccaattctttacctttgaactccacccctcagcttgataatagtctgacagaacattcaatggacaatgatattaa

SEQ ID NO: 435947 - DNA, 120 bp, Artificial Sequence
  ENSG00000152990_31 (sequence is synthesized)
aatgcacgtggcgcctttagaagttcagtttcgaacaaatgtgcactcaagccgccaccataaaaacagaagtaaaggacaccgggcaagccgactcacagtcctgagagaatatgccta

SEQ ID NO: 435948 - DNA, 120 bp, Artificial Sequence
  ENSG00000152990_32 (sequence is synthesized)
cgatgtcccaacgagcgtggaaggaagcgtgcagaacggcttacctaaaagccggctgggcaataacgaaggacactcgaggagccgaagagcttatttagcctacagagagagacagta

SEQ ID NO: 435949 - DNA, 120 bp, Artificial Sequence
  ENSG00000152990_33 (sequence is synthesized)
caacccaccccagcaagacagcagcgatgcttgtagcacacttcccaaaagtagcagaaattttgaaaagccagtttcaaccactagtaaaaaagatgcgttaaggaagccagctgtggt

SEQ ID NO: 435950 - DNA, 120 bp, Artificial Sequence
  ENSG00000152990_34 (sequence is synthesized)
tgaacttgaaaatcagcaaaaatcttatggcctcaacttggccattcagaatggaccaattaaaagcaatgggcaggagggacccttgctcggtaccgatagcactggcaatgttaggac

SEQ ID NO: 435951 - DNA, 120 bp, Artificial Sequence
  ENSG00000152990_35 (sequence is synthesized)
tggattatggaaacacgaaactactgtgtaacattgctgggcttcctaggcagaaattcatataaactgtgatactcacattccttgaagctatgagcatttaaaaactgtttacagcca

SEQ ID NO: 435952 - DNA, 120 bp, Artificial Sequence
  ENSG00000152990_36 (sequence is synthesized)
ccatagggattcaaaagaatttggaataaactttgaagttttggattttacttatttttatccccaaattgttgctattttttaggatctgaaacaaaatctttctaaaacattgtttta

SEQ ID NO: 435953 - DNA, 120 bp, Artificial Sequence
  ENSG00000152990_37 (sequence is synthesized)
gttgtcaaagcaccaacaggacattttgggatgtgaaatgtaatttcttggaatctgtaatttgtacttaatatttcaggcttgtatttaatataataaataggtgtttgttattgtgtc

SEQ ID NO: 435954 - DNA, 120 bp, Artificial Sequence
  ENSG00000152990_38 (sequence is synthesized)
cattctgcaatcatttaagactatttacagttaaattagaatgctccaaatgttctgcttcgcaaaataaccttattaaaagattttttttttgcaggaagataggtattattgcttttg

SEQ ID NO: 435955 - DNA, 120 bp, Artificial Sequence
  ENSG00000152990_39 (sequence is synthesized)
ctactgttttaaagaaaactaaccaggaagaactgcattacgactttcaagggccctaggcatttttgcctttgattccctttcttcacataaaaatatcagaaattacattttataact

SEQ ID NO: 435956 - DNA, 120 bp, Artificial Sequence
  ENSG00000152990_40 (sequence is synthesized)
gcagtggtataaatgcaaatatactattgttacatgtgaaaaaatcttatttgacttaaaagtttatttatttgtttttttgctcctgattttaagacaataagatgttttcatgggccc

SEQ ID NO: 435957 - DNA, 120 bp, Artificial Sequence
  ENSG00000152990_41 (sequence is synthesized)
ctaaaagtatcatgagcctttggcactgcgcctgccaagcctagtggagaagtcaaccctgagaccaggtgtttaatcaagcaagctgtatatcaaaatttttggcagaaaacacaaata

SEQ ID NO: 435958 - DNA, 120 bp, Artificial Sequence
  ENSG00000152990_42 (sequence is synthesized)
tgtcatatatctttttttaaaaaaagtatttcattgaagcaagcaaaatgaaagcatttttactgatttttaaaattggtgctttagatatatttgactacactgtattgaagcaaatag

SEQ ID NO: 435959 - DNA, 120 bp, Artificial Sequence
  ENSG00000152990_43 (sequence is synthesized)
aggaggcacaactccagcaccctaatggaaccacatttttttcacttagctttctgtgggcatgtgtaattgtattctctgcggtttttaatctcacagtactttatttctgtcttgtcc

SEQ ID NO: 435960 - DNA, 120 bp, Artificial Sequence
  ENSG00000152990_44 (sequence is synthesized)
ctcaataatatcacaaacaatattccagtcattttaatggctgcataataactgatccaacaggtgttaggtgttctggtttagtgtgagcactcaataaatattgaatgaatgaacgaa

SEQ ID NO: 435961 - DNA, 120 bp, Artificial Sequence
  ENSG00000152990_45 (sequence is synthesized)
tgtcatcatacccctaaaattccactattggtaataatcaggcttcagtatctttaagagtaaacctcctctggaaatttagaaatgccatagaaaacacttcagtgcctaaagatgtgt

SEQ ID NO: 435962 - DNA, 120 bp, Artificial Sequence
  ENSG00000152990_46 (sequence is synthesized)
tttgtcccctgtagaaaattctttgtttgacacctcctatgtgggagttgcctttaacctgtatttttacttttgtattttagagccctacctcattcttttgacctttgtgtcagagac

SEQ ID NO: 435963 - DNA, 120 bp, Artificial Sequence
  ENSG00000152990_47 (sequence is synthesized)
acctccagcaatagtagagttgaccattttgagtcagcatctgatttgttttgaatttattggtttctatgcatcaaattcatttatactatttttacttacagtatttggtgtgacttg

SEQ ID NO: 435964 - DNA, 120 bp, Artificial Sequence
  ENSG00000152990_48 (sequence is synthesized)
atagctcaaaagggttattttatgctttctgttccacttctgtctataaattttgctttcacagcgcagtcagcaaaactaatgggaaccatgaagccacttttctttttaagacgatca

SEQ ID NO: 435965 - DNA, 120 bp, Artificial Sequence
  ENSG00000152990_49 (sequence is synthesized)
tttctgacgtttgtagttgggccaaacttgatcccacctcccagcacctcagagccactgcaaggtttatctggagaggggccaccctggctttctcctgcaaaagaagatttgggcttt

SEQ ID NO: 435966 - DNA, 120 bp, Artificial Sequence
  ENSG00000152990_50 (sequence is synthesized)
caggtcaccaagtgtttgctgcagattggttctcattaaaataaactctggacagtggtccataattttattatcgacctttgattttcttgaggttggagaggcatccctttagaatga

SEQ ID NO: 435967 - DNA, 120 bp, Artificial Sequence
  ENSG00000152990_51 (sequence is synthesized)
cagattttttcttggaatttcataattatataaaaaagcagtgattaaaaaaaagcaagttactggttaagaaagctggattatgtccttgatactccagtgacatatgacatttacttt

SEQ ID NO: 435968 - DNA, 120 bp, Artificial Sequence
  ENSG00000152990_52 (sequence is synthesized)
tcttaaactaaaatttaagcttctctcatttcctcacatcttcatctagaatttcatcctcaactagagttgcttcatgtataggtcatgtgataaatagaaactgtaagtgtatcattt

SEQ ID NO: 435969 - DNA, 120 bp, Artificial Sequence
  ENSG00000152990_53 (sequence is synthesized)
gcatatattgcagttatcctatacttactgagcacctattatatcccatgaattgtgtccattcaattcctacgaaacccctagaggtggcgattgataattttctactattaaattgag

SEQ ID NO: 435970 - DNA, 120 bp, Artificial Sequence
  ENSG00000152990_54 (sequence is synthesized)
gaaagttaatttcagagaggtcgcattatttcctcaaaatcacattcttaataagtaataatatagtgatttctactaattgcttgtcacacactaggcgatttgctaaatgcttaatgt

SEQ ID NO: 435971 - DNA, 120 bp, Artificial Sequence
  ENSG00000152990_55 (sequence is synthesized)
ggaccatcttacttaacctcacagtacttttatattactcttggttcccaagtgaggaagccagcactttaggtcttacgtgactttgctcagatcacccagcaggtaagaggtgaatac

SEQ ID NO: 435972 - DNA, 120 bp, Artificial Sequence
  ENSG00000152990_56 (sequence is synthesized)
cagtttaaaaatcaaggaaaatttcatttctgagttcaccctcttaaccatcaatatattattatattgctttgtgattgttacagtgtataaaagctctgaatcatatctcaggtctct

SEQ ID NO: 435973 - DNA, 120 bp, Artificial Sequence
  ENSG00000152990_57 (sequence is synthesized)
tactctggaacttattctgtgtgtgctgtggccttcaccctgtagttaacctgtgccctctgtatattcctccttaaaaagaatgttagaaaatggactctaggccgggcatggtggctc

SEQ ID NO: 435974 - DNA, 120 bp, Artificial Sequence
  ENSG00000152990_58 (sequence is synthesized)
ggtgacagagcgaggctctgtcccaaaaaaaaaaaaaaaagaaaatgaactctaatgtataatgtcacatctatgaaaaacacacttttggtttaatgtctgggagccagttctgtcctg

SEQ ID NO: 435975 - DNA, 120 bp, Artificial Sequence
  ENSG00000152990_59 (sequence is synthesized)
gtcgtctttggtataaatggtagtttgtgggcttcctagagccaattgttggtttgtgtatttgaggattgtgattccctgtcacatgtctattagaacacagtgttgccttagcaggca

SEQ ID NO: 435976 - DNA, 120 bp, Artificial Sequence
  ENSG00000152990_60 (sequence is synthesized)
acagagttgattattaggataggccttcctgctgctttcaaatcagacttctgagttacttaccaattttgaggtaagccttagtaggaacattttttttcttttatttattctttgatc

SEQ ID NO: 435977 - DNA, 88 bp, Artificial Sequence
  ENSG00000152990_61 (sequence is synthesized)
ttaagaattacggcagtcggccaaacgcaccctagctgtacagcagtcatgacgctggcatctgcttggcttctggggagccctcaga

SEQ ID NO: 435978 - DNA, 120 bp, Artificial Sequence
  ENSG00000152990_62 (sequence is synthesized)
cttcctacctactgcggaccacctgtcaactctgggctgtaacatgagagaattgtgaacttctgtcttgtttgagccatggtttcattctctttttcagccatgtagcctgtgctgtaa

SEQ ID NO: 435979 - DNA, 120 bp, Artificial Sequence
  ENSG00000152990_63 (sequence is synthesized)
ctcagtgccacattagcaactagtgaaagtcaatgtgggtaaatttgtcattcttcaggttagaacatttcttccttttattcttgtgtttttggctaaataaactgggaaattatagta

SEQ ID NO: 435980 - DNA, 120 bp, Artificial Sequence
  ENSG00000152990_64 (sequence is synthesized)
acatggcgaaaacagaagcgaggatgtgatgtcaaggggaaaaacactagtataaactttgatattttattcagatgtctttaaatgtgatatatttgtaaatatatatttttcttagca

SEQ ID NO: 435981 - DNA, 120 bp, Artificial Sequence
  ENSG00000152990_65 (sequence is synthesized)
aagattgtacaataaattcttcaactatggaatgtttttagatggttaattgttcacttctttggtatatatatattttttactgaatgctgaataatttgttatttaaaaatcctcaat

SEQ ID NO: 435982 - DNA, 120 bp, Artificial Sequence
  ENSG00000152990_66 (sequence is synthesized)
aaagaaatctgaaaaaattcagtgatcagtcagcattttcagttgttcctatgtgttattattttttttttctaaatgtgtttcctagtctcaaggaaatttctgctaagtgtactgaat

SEQ ID NO: 435983 - DNA, 120 bp, Artificial Sequence
  ENSG00000152990_67 (sequence is synthesized)
ctaaacctctattatgtttgtataatttcattcttttgttgtgtggaggtttgaattcatcataaatcaccttaaagttccataagcccaaattaattatactcatatttatgatatgct

SEQ ID NO: 435984 - DNA, 120 bp, Artificial Sequence
  ENSG00000152990_68 (sequence is synthesized)
ggctcattttctgggttaagtctccttgaaagattggacctccgaaacaatcttattagtagtatagatccaggtgccttctggggactgtcatctctaaaaagattaaacctttcgggg

SEQ ID NO: 435985 - DNA, 120 bp, Artificial Sequence
  ENSG00000152990_69 (sequence is synthesized)
gaaaattaactttgttaatttgaaacacttttcttgtttacttatttaactctttaaagtttgcatttctgttttatacttcttttaatctatgttatgtggtgttgacatttcgcttga

SEQ ID NO: 435986 - DNA, 120 bp, Artificial Sequence
  ENSG00000152990_70 (sequence is synthesized)
ctgatgatttttttaactgttaaattttgtatatccaatttaaaaaatgaagtcaacctaattataccacttttgtaactatctgacatatttttttctggtttctatgtactaatgtag

SEQ ID NO: 435987 - DNA, 120 bp, Artificial Sequence
  ENSG00000152990_71 (sequence is synthesized)
cagcataagcgatgtaccaaactaaaacttggtactgtgttaaatggtagcagtagacatcaaggacttccttaatggcgttgaaattcaagaggcgagagctccaagtagcgttcctaa

SEQ ID NO: 435988 - DNA, 120 bp, Artificial Sequence
  ENSG00000152990_72 (sequence is synthesized)
gcatcgtccatagatcatgtggcgcttttatgactgaggaaatgacagtcctttggccgaagcattctggaattgcagattctgagtaacaataagatatccgagctgaagaatggctca

SEQ ID NO: 435989 - DNA, 120 bp, Artificial Sequence
  ENSG00000152990_73 (sequence is synthesized)
aaaaagaatcaaggcagccactatacaaacatgaatgcaaggaccgcagcatgatctatgaaaacacttaaagtatggttttaaatgtaacccaaattcagcaggagtatacacaggatt

SEQ ID NO: 435990 - DNA, 120 bp, Artificial Sequence
  ENSG00000153002_0 (sequence is synthesized)
ctggtcagacacaatgttggcactcttggttctggtgactgtggccctggcatctgctcatcatggtggtgagcactttgaaggcgagaaggtgttccgtgttaacgttgaagatgaaaa

SEQ ID NO: 435991 - DNA, 120 bp, Artificial Sequence
  ENSG00000153002_1 (sequence is synthesized)
tcacattaacataatccgcgagttggccagcacgacccagattgacttctggaagccagattctgtcacacaaatcaaacctcacagtacagttgacttccgtgttaaagcagaagatac

SEQ ID NO: 435992 - DNA, 120 bp, Artificial Sequence
  ENSG00000153002_2 (sequence is synthesized)
tgtcactgtggagaatgttctaaagcagaatgaactacaatacaaggtactgataagcaacctgagaaatgtggtggaggctcagtttgatagccgggttcgtgcaacaggacacagtta

SEQ ID NO: 435993 - DNA, 120 bp, Artificial Sequence
  ENSG00000153002_3 (sequence is synthesized)
tgagaagtacaacaagtgggaaacgatagaggcttggactcaacaagtcgccactgagaatccagccctcatctctcgcagtgttatcggaaccacatttgagggacgcgctatttacct

SEQ ID NO: 435994 - DNA, 120 bp, Artificial Sequence
  ENSG00000153002_4 (sequence is synthesized)
cctgaaggttggcaaagctggacaaaataagcctgccattttcatggactgtggtttccatgccagagagtggatttctcctgcattctgccagtggtttgtaagagaggctgttcgtac

SEQ ID NO: 435995 - DNA, 120 bp, Artificial Sequence
  ENSG00000153002_5 (sequence is synthesized)
ctatggacgtgagatccaagtgacagagcttctcgacaagttagacttttatgtcctgcctgtgctcaatattgatggctacatctacacctggaccaagagccgattttggagaaagac

SEQ ID NO: 435996 - DNA, 120 bp, Artificial Sequence
  ENSG00000153002_6 (sequence is synthesized)
tactggatctagctgcattggcacagaccccaacagaaattttgatgctggttggtgtgaaattggagcctctcgaaacccctgtgatgaaacttactgtggacctgccgcagagtctga

SEQ ID NO: 435997 - DNA, 120 bp, Artificial Sequence
  ENSG00000153002_7 (sequence is synthesized)
aaaggagaccaaggccctggctgatttcatccgcaacaaactctcttccatcaaggcatatctgacaatccactcgtactcccaaatgatgatctacccttactcatatgcttacaaact

SEQ ID NO: 435998 - DNA, 120 bp, Artificial Sequence
  ENSG00000153002_8 (sequence is synthesized)
cggtgagaacaatgctgagttgaatgccctggctaaagctactgtgaaagaacttgcctcactgcacggcaccaagtacacatatggcccgggagctacaacaatctatcctgctgctgg

SEQ ID NO: 435999 - DNA, 120 bp, Artificial Sequence
  ENSG00000153002_9 (sequence is synthesized)
gggctctgacgactgggcttatgaccaaggaatcagatattccttcacctttgaacttcgagatacaggcagatatggctttctccttccagaatcccagatccgggctacctgcgagga

SEQ ID NO: 436000 - DNA, 120 bp, Artificial Sequence
  ENSG00000153002_10 (sequence is synthesized)
gaccttcctggcaatcaagtatgttgccagctacgtcctggaacacctgtactagttgagaaagctgatggccttgtttcaaaattctcatttttcatttcttttctttcttgaattctt

SEQ ID NO: 436001 - DNA, 120 bp, Artificial Sequence
  ENSG00000153002_11 (sequence is synthesized)
attttggtttgcctggatgttttgcagatcccaatctttcttttaagcttctgggtctattaaactaggtagatcttttcgtattgatcataataaaagtgaatcattactattggaaaa

SEQ ID NO: 436002 - DNA, 120 bp, Artificial Sequence
  ENSG00000153002_12 (sequence is synthesized)
aaagtctccagaatgaggaaatgttggaagcaaataatatattcagctgagcattcttcctggcagtgggagcaggagcctgatttggaccttaaaagcttagtggcaacaacaaataag

SEQ ID NO: 436003 - DNA, 120 bp, Artificial Sequence
  ENSG00000153002_13 (sequence is synthesized)
cattggcctggaaaatccacatcccaacaggctaaacaaggcaggtgttgagagagataccctctcagactttacacagctaccaaggcaacaatgccaggaaaactattaatcaagata

SEQ ID NO: 436004 - DNA, 78 bp, Artificial Sequence
  ENSG00000153002_14 (sequence is synthesized)
caaattaacaaaaataataatgataatttcaactcaagggttgggtgcaggtaagaggatagcaatatgttctggaag

SEQ ID NO: 436005 - DNA, 120 bp, Artificial Sequence
  ENSG00000153002_15 (sequence is synthesized)
ggttgggtgcaggtaagaggatagcaatatgttctggaagctttgaaatgaaagaggatgtcattttctggtcctcttgggtttttttttttcgttccgagaagctcatccttattaggg

SEQ ID NO: 436006 - DNA, 120 bp, Artificial Sequence
  ENSG00000153002_16 (sequence is synthesized)
ggtagatagaggcttggactcaacaagtcgccactgagaatccagccctcatctctcgcagtgttatcggaaccacatttgagggacgcgctatttacctcctgaaggttggcaaagctg

SEQ ID NO: 436007 - DNA, 120 bp, Artificial Sequence
  ENSG00000153002_17 (sequence is synthesized)
aaaaatcatattattctgatttcatcaccaacctcacagttttccaggcatatgtagaagaagtaattataatgccaaagtatgaaatatagccggtttcataaccggaatgaattatgg

SEQ ID NO: 436008 - DNA, 120 bp, Artificial Sequence
  ENSG00000153002_18 (sequence is synthesized)
ctaattctcctgcagtaaataatttgtttttcaaatctgtattccccagacagctgagccaggccttgcttctcaagtgttttatttaaataggcagtatgtcagtggagttttaccaca

SEQ ID NO: 436009 - DNA, 120 bp, Artificial Sequence
  ENSG00000153002_19 (sequence is synthesized)
gagtttctgagcgcagagagcctttccctaggagtggggtgcagggaactggagggcaatggttcttatgagaaggtgatgatgcttctaagaaaaaagattacacaatgccctggctaa

SEQ ID NO: 436010 - DNA, 120 bp, Artificial Sequence
  ENSG00000153002_20 (sequence is synthesized)
gatatcacaatgatatggtttggctgtgtcccctctgagaagagggctaccatcttccagttaaattggactttaactagaagtccaattaaacctctttttgttcctagtttcaggtgt

SEQ ID NO: 436011 - DNA, 120 bp, Artificial Sequence
  ENSG00000153002_21 (sequence is synthesized)
tccagcctgggcgacagagcgagactcctactcaaaaaaaaaaagacttcaaagcaaatacagaaagttacatagttgcaggaaacaacaacaacaacaacaactttgctcttttaatac

SEQ ID NO: 436012 - DNA, 120 bp, Artificial Sequence
  ENSG00000153002_22 (sequence is synthesized)
atacaaaggactcagttgtcttaagtaatcaaagacctaataatagaaaacataaagcacagaaaattattttgataagacacaaaatctttgttttctagtcagagccctctaaaggtg

SEQ ID NO: 436013 - DNA, 120 bp, Artificial Sequence
  ENSG00000153002_23 (sequence is synthesized)
ctgattccagggatttttgttaagataattggaatttaaaatatgatattttacttgattaatgtctgttctgactttttttgtcttttggccttggaggggctaagagaaaggattcat

SEQ ID NO: 436014 - DNA, 120 bp, Artificial Sequence
  ENSG00000153002_24 (sequence is synthesized)
agacttttttttttaattaatagaaataagtaaaatgcacagaagatgtcaatgtctaaatgtggcatcctatcaaccatcaataaatggtaccactgccctcccccagaagcatcccca

SEQ ID NO: 436015 - DNA, 120 bp, Artificial Sequence
  ENSG00000153002_25 (sequence is synthesized)
atctccactcaggtgggttcagcctctgcaaagctcagcactctgtacctccacccaaatcttgattattcataatgcccctaagccagagtgttagactcagtcaactaatcatgtgct

SEQ ID NO: 436016 - DNA, 120 bp, Artificial Sequence
  ENSG00000153002_26 (sequence is synthesized)
aggtgctgtgcaatctgctgaggatacaaaatgaatagccaacaattccttccttcaaggagctcacctggtgaggaaatagatgcaaaaacaactgattatagcatacagtgaaccctg

SEQ ID NO: 436017 - DNA, 120 bp, Artificial Sequence
  ENSG00000153002_27 (sequence is synthesized)
ataaaagtgtgggcccccaaaaaggagaggggctcaatgcttcctaagagagtagaggcagcttcacaaagaagataacactaaaactgaatctggaaaaacaatagcaattatccatat

SEQ ID NO: 436018 - DNA, 120 bp, Artificial Sequence
  ENSG00000153002_28 (sequence is synthesized)
tagtaaagagagaaagaggattccagtgaagagaaaagggtacccacagtcatggaggtcaggagaagcaggaaagggtgtacagggaagtaattcaggaaaatctacctcagaaggaac

SEQ ID NO: 436019 - DNA, 120 bp, Artificial Sequence
  ENSG00000153002_29 (sequence is synthesized)
acgggaatgcacaacaaataatgtagcctgagagacaaggccggacctggtttgcaacaactgtttttgccaaaagaggtttgacatgatagagccatcgaagacgtggtgatgaggtga

SEQ ID NO: 436020 - DNA, 120 bp, Artificial Sequence
  ENSG00000153002_30 (sequence is synthesized)
tcttcagaagatgagagatgaggtggatatcaaaatgagagagcaactgaggacaagagctgagaacttaggcataaactaaatgttcctccagtgtgcacctgtgacaggaataaaata

SEQ ID NO: 436021 - DNA, 120 bp, Artificial Sequence
  ENSG00000153002_31 (sequence is synthesized)
acaacctttttaagctcacatcaacctcagatattgcttcagcatcaaaaaaaaaatagagcaactgttgccaaaagatgccgatgacggtgtagagagaacttggatgtcacttcacat

SEQ ID NO: 436022 - DNA, 120 bp, Artificial Sequence
  ENSG00000153002_32 (sequence is synthesized)
gcccagagtgtggtttgaggaaaggacaactaaacatttttctgtggccttaatggaaatcatgtctaaattgatataataagtcaaaagagataacagatcacaagtagccccctttgg

SEQ ID NO: 436023 - DNA, 120 bp, Artificial Sequence
  ENSG00000153002_33 (sequence is synthesized)
ttttgtctgaaaactgtattactacattgcaccagtaaatatattgagagacttgaaagacaatcaatcaacacacgagtccaatagataatgacaatgactattaaatcttctctagtc

SEQ ID NO: 436024 - DNA, 120 bp, Artificial Sequence
  ENSG00000153002_34 (sequence is synthesized)
ttcgtaactttatatgtttggaactaatattgaagaatcatatttctactaactaaaaataataattcaaggcttaaggaaaaattgaagtaaagcctgaagaaggcaaccagggaagga

SEQ ID NO: 436025 - DNA, 120 bp, Artificial Sequence
  ENSG00000153002_35 (sequence is synthesized)
ataagaattctttaagatcagaggttctgcctttcagataaataactaactggagatttcctttgataaatggcaagataaagaaattgtagaatggtagaaaatatcatgtttacctac

SEQ ID NO: 436026 - DNA, 120 bp, Artificial Sequence
  ENSG00000153002_36 (sequence is synthesized)
aaaaagaactattgcctcaccatgtttcacatctctagaagatggttttaaatctattatgagcattatgtaatgtttaactggttctggtttcaattggcagtggaacctaagggttta

SEQ ID NO: 436027 - DNA, 120 bp, Artificial Sequence
  ENSG00000153002_37 (sequence is synthesized)
atgcagttagagaaagcatgtcttagtttatcagtttagaaataggaaaatggaaccctaaaatttgcaagtaccgacccaaaactctgagaataatgttagttccaggaagctgattgc

SEQ ID NO: 436028 - DNA, 120 bp, Artificial Sequence
  ENSG00000153002_38 (sequence is synthesized)
atcatttcagtggaccagaacagaaaataatgagttacatttaataactctttttaagttttctaatttaccacctggctgataaagtattaatgctataggaattggaatccttgaagt

SEQ ID NO: 436029 - DNA, 120 bp, Artificial Sequence
  ENSG00000153002_39 (sequence is synthesized)
tctgcattttgaaatagaatgaatattctctaactttttagtctaaaaaatttccaagctggagctaccactcatccttggaactgccaattcctaagcattttcatgctggcactgaat

SEQ ID NO: 436030 - DNA, 120 bp, Artificial Sequence
  ENSG00000153002_40 (sequence is synthesized)
gttgcattgactagccattcctatgtgcagtttctaatgctcctgccctaactcacacaaccctattgtaacttaatctggctttataaactgccacattgccaagtgtttttttttttt

SEQ ID NO: 436031 - DNA, 120 bp, Artificial Sequence
  ENSG00000153002_41 (sequence is synthesized)
ttttttttttgctttgttttctttgcgtttttgcatgcgtgtgttttggtttgtttgcctgcaaacaggtaaacaacttctttgcacaaccataaagacttccttgtctcctgcttttct

SEQ ID NO: 436032 - DNA, 120 bp, Artificial Sequence
  ENSG00000153002_42 (sequence is synthesized)
gttacaaactcttacaagacaagataaatagaggctcagagtgaatgcttggggagggtattagggaagacattcttgcacaagaattacttggatcatatcactaggttaagtagaaaa

SEQ ID NO: 436033 - DNA, 120 bp, Artificial Sequence
  ENSG00000153002_43 (sequence is synthesized)
atgaaaatgggtcctgaataagcatataatacgatccaaattgttacttacatgctttgaatgccttaaaaataatgtacagggcatttgtttggcagtgtgcttttatttatttcctta

SEQ ID NO: 436034 - DNA, 120 bp, Artificial Sequence
  ENSG00000153006_0 (sequence is synthesized)
atctactggttctgccgtcgctagaggcgtacaggcccttcccgaccgtagcgagggtgctgctgcgctgggggaaggaaaacgccgctttgactgtgccttgttctcacagctggcggg

SEQ ID NO: 436035 - DNA, 120 bp, Artificial Sequence
  ENSG00000153006_1 (sequence is synthesized)
aagcaagcgccttttcgaaagccagaggctcgagttacccctcttaccaccgtcatggcagtcccaggttgcaacaaggacagtgtcagagcaggctgtaaaaaatgtggctaccctggt

SEQ ID NO: 436036 - DNA, 120 bp, Artificial Sequence
  ENSG00000153006_2 (sequence is synthesized)
cacctgacttttgaatgccgcaattttctccgagtagaccctaaaagggacatagttttggatgtcagcagtacaagtagtgaagatagcgatgaagagaatgaagaactgaataaattg

SEQ ID NO: 436037 - DNA, 120 bp, Artificial Sequence
  ENSG00000153006_3 (sequence is synthesized)
caggcattacaggaaaaaagaataaatgaagaagaggaaaagaagaaagaaaaaagcaaagaaaaaatcaaattgaaaaaaaaaaggaaaaggtcttactcatccagttccactgaagag

SEQ ID NO: 436038 - DNA, 120 bp, Artificial Sequence
  ENSG00000153006_4 (sequence is synthesized)
gacacttcaaaacaaaagaaacaaaaatatcagaagaaagaaaagaaaaaagaaaaaaagagtaaatcaaaaaaagggaaacatcacaaaaaggaaaaaaagaagagaaaaaaggaaaag

SEQ ID NO: 436039 - DNA, 120 bp, Artificial Sequence
  ENSG00000153006_5 (sequence is synthesized)
cattcttctacacctaatagttctgaattctccagaaagtaactgagactttggcttaagccgttaaatttaaaaatttgtttttaaaacgtgtttgcccttccttggaatttgctatat

SEQ ID NO: 436040 - DNA, 120 bp, Artificial Sequence
  ENSG00000153006_6 (sequence is synthesized)
attatgctttgcaataaatcacagccttttccatatagacatttttcgtatttgggaccattatccctctggcaatatatttttaatgtgctgtaactgtaaagtattaaatcagtcttg

SEQ ID NO: 436041 - DNA, 120 bp, Artificial Sequence
  ENSG00000153006_7 (sequence is synthesized)
ttacttgatagccatgccccaagtatagctatttgtgtatactaaacacatcatttttggtatttgtgtctctgtgtgtttggctagtgttactacttcataagttcattgtaaaatggc

SEQ ID NO: 436042 - DNA, 120 bp, Artificial Sequence
  ENSG00000153006_8 (sequence is synthesized)
tttactgccatcaacatgggtcatctacctagcagttaatgagtattgctggatcaggtgtccaccttccaatgatgaagcaaggtaaggggtaatgttttgctcttgacacagagaaat

SEQ ID NO: 436043 - DNA, 120 bp, Artificial Sequence
  ENSG00000153006_9 (sequence is synthesized)
ttaatagctttatgtactaaaatataatatcttttaaagatagtgaaattcttcagttttttaaatctctagggattttttttcaatgttgtagaagatgcagctgcttaatggtcttga

SEQ ID NO: 436044 - DNA, 120 bp, Artificial Sequence
  ENSG00000153006_10 (sequence is synthesized)
ctaggactttttaaatgaatggtgtctgcaggtagatgatcatgaaaatatctctaacaaagttttactcttctatgaaatgcagaatttctagtacctgcctcctttgtttttgtaata

SEQ ID NO: 436045 - DNA, 120 bp, Artificial Sequence
  ENSG00000153006_11 (sequence is synthesized)
attaaaatacttcttgtataaagagattagttcagcctgttagtaagtctgcagagatgatgctgagttggttgtgatttttagaatagactcctgggttgttttacaaatgtgccatat

SEQ ID NO: 436046 - DNA, 120 bp, Artificial Sequence
  ENSG00000153006_12 (sequence is synthesized)
tggcatgtcttacagtgatacctcaaacacagaaatttttatttaggaagatagctaaatctttattagaactgatttttattgtattcagtataaattttatgaagcttgtttctatga

SEQ ID NO: 436047 - DNA, 120 bp, Artificial Sequence
  ENSG00000153006_13 (sequence is synthesized)
gtactgtggaaaattttataaatgtgagcatatatatttattttgtctgacataatttgtagttttaaagcaagtttcacactgaacttaacgttttcataaatgaccagtttgggatgt

SEQ ID NO: 436048 - DNA, 120 bp, Artificial Sequence
  ENSG00000153006_14 (sequence is synthesized)
ttctctcttttactttagtggcaaactcaagagtaaaaagtgtcaaaaaaagaattgagaattttattctgtactttttaaaatttaagagccagggagttgcatcatgaaagcctttgt

SEQ ID NO: 436049 - DNA, 120 bp, Artificial Sequence
  ENSG00000153006_15 (sequence is synthesized)
ataataatggaaattttatatgggtaagcattttcaaacacatattagtagatacgttttttaaatttctattttcacattgatcagtgttactttgcttaatacttaggtagcccttat

SEQ ID NO: 436050 - DNA, 120 bp, Artificial Sequence
  ENSG00000153006_16 (sequence is synthesized)
gtccactaaagtaaatgcttatgttgtagaagcatcgaacatcaaccaatgtcatggcacagcaccaaagattgcaaatacctcactatggtgcgcttagaaattttcaaattgataacc

SEQ ID NO: 436051 - DNA, 120 bp, Artificial Sequence
  ENSG00000153006_17 (sequence is synthesized)
tatagatacggctgcaggtgaattcatgatagtgaaatcagctaagtatacttaacctcacaggctagaaaggtttactgattcttgtttcacctggcacccaatgtggataccctcagt

SEQ ID NO: 436052 - DNA, 120 bp, Artificial Sequence
  ENSG00000153006_18 (sequence is synthesized)
aagactcagggagccttataactcctcttaacatatgcttacccatgcttaaattctagggaagctgtatccacagccctctgcattgcagccatgagagctctcacgctttcaaccctt

SEQ ID NO: 436053 - DNA, 120 bp, Artificial Sequence
  ENSG00000153006_19 (sequence is synthesized)
ccataacctaatttagtcatttgggcctctcaaaaggaaatgcttttgtttaaataggtcagtcagttactgggagaaaaaatacagagccagtaggtttttagggatttgttttgcctt

SEQ ID NO: 436054 - DNA, 120 bp, Artificial Sequence
  ENSG00000153006_20 (sequence is synthesized)
tgctgctagttttttgaaaatattcttcgattatcaagattttaaaaatcggtttttaatataaagcttttttaaaaacgaggctggcacaagtgcagtggtgtttctttactcccactg

SEQ ID NO: 436055 - DNA, 120 bp, Artificial Sequence
  ENSG00000153006_21 (sequence is synthesized)
cttgacttgactagccttgaaaaaataacagtaaaataaaatattaaaaaataattagaaaatgctacaaaggcaatgaccttattccattgagtaagatagttaaaaatgatagtaatt

SEQ ID NO: 436056 - DNA, 120 bp, Artificial Sequence
  ENSG00000153006_22 (sequence is synthesized)
gtagtgaaatagttaattacttgtaagttttattactgttaattgtagagattataaattggctcattaggtttctgaatggtgacacaataatgactgagaagagcaaaagtcagtcct

SEQ ID NO: 436057 - DNA, 120 bp, Artificial Sequence
  ENSG00000153006_23 (sequence is synthesized)
cgttaactaatgtagtatgcaaattaaaatattttaatgatcagtaattttccccccagaaatgatgttggcatttctaagtaaatttcccataattttagcatagtttatgaaattgaa

SEQ ID NO: 436058 - DNA, 120 bp, Artificial Sequence
  ENSG00000153006_24 (sequence is synthesized)
taaaaatttattttcactgaagtaattttcttctaatatgatattattattgagattggatgcaaatctcatgaatatgttttagaagaaaattaatgaaattccctcccaggcagtatg

SEQ ID NO: 436059 - DNA, 120 bp, Artificial Sequence
  ENSG00000153006_25 (sequence is synthesized)
taccagaaggaaaactgaatttagcagtaaaacagtcctggtcattctaactacctgtatgatcttgaacaaagtcacttagtttccctgggccttggtgtctttcgtctataaaatatt

SEQ ID NO: 436060 - DNA, 120 bp, Artificial Sequence
  ENSG00000153006_26 (sequence is synthesized)
ccttggtgtctttcgtctataaaatattgtaccagattatctctgaaatcacttcaaggtttaatatatataattatcaatattttaaaattcaagcaatattcactttagaaattatta

SEQ ID NO: 436061 - DNA, 120 bp, Artificial Sequence
  ENSG00000153006_27 (sequence is synthesized)
ttattaatataataaacacgttcaacttcttcaagcagataattgatatttggttcatattcttacaacctaatgcatgtcattttcaccaaatgcaggcagaatttatatttaggtttg

SEQ ID NO: 436062 - DNA, 120 bp, Artificial Sequence
  ENSG00000153006_28 (sequence is synthesized)
tttttgggttgatggaccttctcaccacacaatttcccccttttttttttttgcatatcatatgttggttgatatttctcagaggtatccctatttcttcatacttaatatacatctcca

SEQ ID NO: 436063 - DNA, 120 bp, Artificial Sequence
  ENSG00000153006_29 (sequence is synthesized)
tttacatctttgactctctgaggtcaaaacaacaataaatgagaagtaaaacaactatatgtgtttgtatttacaactgtatctaaaattatataaccctagtttaccttcagagtaaac

SEQ ID NO: 436064 - DNA, 120 bp, Artificial Sequence
  ENSG00000153006_30 (sequence is synthesized)
taggctgaagagttgttaataatgttgataaaaatgccattgaatcctttcttcaacaaatatttattgagtacctaacgtggcaaacgctgtgctaagtactggggatacagagataag

SEQ ID NO: 436065 - DNA, 120 bp, Artificial Sequence
  ENSG00000153006_31 (sequence is synthesized)
taagacacatttgcctccctgaaggacttcacagtgtagttggtaggagaaacaccagagcatacaccgttatataattagtgcagtaattgacatgaacatgagtttatagaaactcgg

SEQ ID NO: 436066 - DNA, 120 bp, Artificial Sequence
  ENSG00000153006_32 (sequence is synthesized)
ggttacctaaagtagtctggataaattagaagaggctacctagagaaagtagtgactgaattgcaatttgattaaggataagaatgagggttatggcagttcctgacagagtgggtactg

SEQ ID NO: 436067 - DNA, 120 bp, Artificial Sequence
  ENSG00000153006_33 (sequence is synthesized)
tgaacaaacaccagaggtagaacaagctgtgttatgtgtttgtcaagaattacaagcaatctggtgttgctggtgtatcataggcgaggcaggaagtggtaagaattgagactaccattt

SEQ ID NO: 436068 - DNA, 120 bp, Artificial Sequence
  ENSG00000153006_34 (sequence is synthesized)
taagttcttaggaacaggaggaaggagtcgtgtgttccgtgtttgggagcttgaactgtaatgtgtaagcaatgagacaccattaaagagtttcaaggggggccgggcacagtggctcac

SEQ ID NO: 436069 - DNA, 120 bp, Artificial Sequence
  ENSG00000153006_35 (sequence is synthesized)
atagaaaaattagccggacgtggtgacaggcacctgtattcccagctactctggagtctggggcaggagaatcgctcaaacccaggaggtggaagttgcagtaagctgagatcacaccac

SEQ ID NO: 436070 - DNA, 120 bp, Artificial Sequence
  ENSG00000153006_36 (sequence is synthesized)
cgagactctatctcaaaaaaaaaaaaagattttaaggaaggaaatgacttttattagggtttggttttatcaatttcataatccgattaatcccaccatttttaaaagatgaaattgctt

SEQ ID NO: 436071 - DNA, 120 bp, Artificial Sequence
  ENSG00000153006_37 (sequence is synthesized)
aattgctttcattagaaggctacataaaatataatttgattattttaggctctattattagactcacatttctttctacagtctcattattatttccaaaaattacacagtaacctaaat

SEQ ID NO: 436072 - DNA, 120 bp, Artificial Sequence
  ENSG00000153006_38 (sequence is synthesized)
catctaaaaacacataaagctactgtattctttattagatccatccccagagttatatgtacatgtacatactttgagatgtgttttgttcttaattgtattttaggttatttttgactg

SEQ ID NO: 436073 - DNA, 120 bp, Artificial Sequence
  ENSG00000153006_39 (sequence is synthesized)
acttaaattctatcactattttaatatttgttaggtccgaataaaccatttagaatatttttcagtgtacaaaatgtgctgtaatttaataaggccccttgcttttaaaatttggcttaa

SEQ ID NO: 436074 - DNA, 120 bp, Artificial Sequence
  ENSG00000153006_40 (sequence is synthesized)
cctgtgaagcacaactgcttcagagttacagagaaacataccagttggtccactggatgagccctgtggttctacctcaggtaacctagtgataagctagctcagcagggagtgcttcaa

SEQ ID NO: 436075 - DNA, 120 bp, Artificial Sequence
  ENSG00000153006_41 (sequence is synthesized)
ggactccagctgatcctagtgctgagaccaaaacttcctggacattgggtgcccaagaacagtaggtttcttataccagtgtgacaataatcccagttgcgaaggccagtcttctgatct

SEQ ID NO: 436076 - DNA, 120 bp, Artificial Sequence
  ENSG00000153006_42 (sequence is synthesized)
cagtatctcctcccaactcctctaaaaataggtagagtggcagagaattggggtgcctcttctatagcacaacccatgatgcatccagtcatgcctgaccccactatgcctttcccacaa

SEQ ID NO: 436077 - DNA, 120 bp, Artificial Sequence
  ENSG00000153006_43 (sequence is synthesized)
attgggaggagttggggcagtgagcattttgctagctctgtctgtttcttgcttcttgtgccatttatagtccttggccatgagcaacaaaagtagaatggtgccagtgccttaactaaa

SEQ ID NO: 436078 - DNA, 120 bp, Artificial Sequence
  ENSG00000153006_44 (sequence is synthesized)
tttttctcaacctagattttcacctgagacaatatggtaatattattaaattactgtaaagatagcaaattttctgggatactttaaaatcaaagttgtatcaaagatcaagaagcaccc

SEQ ID NO: 436079 - DNA, 120 bp, Artificial Sequence
  ENSG00000153006_45 (sequence is synthesized)
ataaaagctttataaactttcacaaaaaataagtgaaaattctttgtttttatggccgtgtaaaatgtcatttttataatggaaatgtcttaattttcaaacttaacatatactttaagc

SEQ ID NO: 436080 - DNA, 120 bp, Artificial Sequence
  ENSG00000153006_46 (sequence is synthesized)
aattttagtatttaaacctttgcaaaattgtatttttgaatgtgaagttcaactttggcagtaggttgttgcaatagtgatctggcactatggtgccagtatagccacatagggttattt

SEQ ID NO: 436081 - DNA, 120 bp, Artificial Sequence
  ENSG00000153006_47 (sequence is synthesized)
aaattaattaaataaatgaaaaattttattttttcagttgcattagccacatcttaagtgttcagtagccacatgtgactggtggctaccatattagtgcagatatagaaagaacatttc

SEQ ID NO: 436082 - DNA, 120 bp, Artificial Sequence
  ENSG00000153006_48 (sequence is synthesized)
catcatcacagaaacttctcttaattctggtctagaagataaccttagtacttggtagaaattttgacaggctaatgacgaaaagtttgtaaccctgagctttgcatgcccaagaaaaat

SEQ ID NO: 436083 - DNA, 120 bp, Artificial Sequence
  ENSG00000153006_49 (sequence is synthesized)
aaggtattcttttttatatatcagaccagagaagctgtattcagcacattttgaaatgctagtttttggctatggccataccaccctaaatgtgccagatcttgtctgaaatgctagttt

SEQ ID NO: 436084 - DNA, 120 bp, Artificial Sequence
  ENSG00000153006_50 (sequence is synthesized)
ctgactacaaaaactacaggacatagtagatatgctcagtagagctgcttaaaataattccctttttttttctgttgaattctgttacaaaaccaggtctgtgttataatagaaaacaca

SEQ ID NO: 436085 - DNA, 120 bp, Artificial Sequence
  ENSG00000153006_51 (sequence is synthesized)
cttatgaataaaaatctttaaaaattataatttgcagaaattagttttatttctagatttctaggtggtattaatgtgatagcattaggtgggaccagagaactcatttgttttgtagct

SEQ ID NO: 436086 - DNA, 120 bp, Artificial Sequence
  ENSG00000153006_52 (sequence is synthesized)
ttcattatacagattatttaggaaatatatcagcaaaggattttttgttatgcttatctcttgaaacaaaatatttattgtacagattatacattgtgatttttttgttactgagtatat

SEQ ID NO: 436087 - DNA, 120 bp, Artificial Sequence
  ENSG00000153006_53 (sequence is synthesized)
tgtttgtgcccagaaaaatctaaaaagatgtgggttgacttctaagagatttaagaacaagtcacctctagtttttaagacagttcccttgatatttacctatccagtaccatctcataa

SEQ ID NO: 436088 - DNA, 120 bp, Artificial Sequence
  ENSG00000153006_54 (sequence is synthesized)
gaataactgcctgtaagtatcagaaagttgagaaatgctggtaatgtgacataaacttctcactgttcttcactgagataggactgcttatcttgttattgataaattatttaatttctc

SEQ ID NO: 436089 - DNA, 120 bp, Artificial Sequence
  ENSG00000153006_55 (sequence is synthesized)
ctgaataattagcataatctcatgtgatacagaaacatcttaattagcaaataaatttatacaaaggaaaaccaataaaaccttaatgtgcgtttaataaagtaactgaatgatcaaaaa

SEQ ID NO: 436090 - DNA, 120 bp, Artificial Sequence
  ENSG00000153006_56 (sequence is synthesized)
tgggtggcaggaaaaaattgcaggtataggtataattgagtttatttttttaagaatacatatcacaatatgttgtttgggaatgatagagaccaacttcagtgcagttgcttcagagga

SEQ ID NO: 436091 - DNA, 120 bp, Artificial Sequence
  ENSG00000153006_57 (sequence is synthesized)
caaaaaaaaaaaaatggaatgagattgagaaagtgttccaaaagttgatacaagctctccagctgtgtgtgtgtgtgcgcacaggcatgcgagtgagctttttccttaaatgaattgaaa

SEQ ID NO: 436092 - DNA, 120 bp, Artificial Sequence
  ENSG00000153006_58 (sequence is synthesized)
gtgagcatgacaaaatgttaacatttggatgataggtatttaggtattggttatattattttctttacttttatagtgtttgtaatatttgactttctaaaacatatacataagtagata

SEQ ID NO: 436093 - DNA, 120 bp, Artificial Sequence
  ENSG00000153006_59 (sequence is synthesized)
actgttgtagttttcttatagggtagagtctttagggaaatgatgcaagaattaaatgtttaggtattctttagtaaagcacattcagttatattaatgcttgtatattattatgccaac

SEQ ID NO: 436094 - DNA, 120 bp, Artificial Sequence
  ENSG00000153006_60 (sequence is synthesized)
tttaattagatgaaaggtatataattgcatgagtacatttgtcaaactgggaaagaaaaggtatgggaaaggaatataatataaaatcccaagtatgatggtattttttatttacttagt

SEQ ID NO: 436095 - DNA, 120 bp, Artificial Sequence
  ENSG00000153006_61 (sequence is synthesized)
aaaatgcttattgaataaggagttctgaggaagaaaggaaaaagttctttctgagtattgcattcatggaaaagtatagggaaaataaccaaactactaccaactgaataaaagttaaag

SEQ ID NO: 436096 - DNA, 120 bp, Artificial Sequence
  ENSG00000153006_62 (sequence is synthesized)
ctttctacattatattattgaaattgtaacttactggttaccgtgaggcagcaaaacatacaaaaatacataatgtatctatagttttatcactcacattttttttgtttgtttcactta

SEQ ID NO: 436097 - DNA, 120 bp, Artificial Sequence
  ENSG00000153006_63 (sequence is synthesized)
cttaccaccgtcatggcagtcccagttgttgaaattacctccaacattcatgtcagtgattcaccactctccatgaagagctgaactggcacaagtggcaacaaataaattctactgggt

SEQ ID NO: 436098 - DNA, 120 bp, Artificial Sequence
  ENSG00000153006_64 (sequence is synthesized)
gtggctcttacctacaatcccagcaccttgagaggccagaggaggatcgcttgaggccagaagtttgagatcgcctgggcaacaaagcacaacctcatctctgcaaaaaaatttaaaagt

SEQ ID NO: 436099 - DNA, 120 bp, Artificial Sequence
  ENSG00000153006_65 (sequence is synthesized)
tagccaggttgcaacaaggacagtgtcagagcaggctgtaaaaaatgtggctaccctggtcacctgacttttgaatgccgcaattttctccgagtagaccctaaaagggacatagttttg

SEQ ID NO: 436100 - DNA, 120 bp, Artificial Sequence
  ENSG00000153006_66 (sequence is synthesized)
ttttttcttcaacaactaagcttttcattgagcttaagtttaaactcttaatatatattttgtcttcatatacatgaaattgactaaaatatttgtattcttgtaatattaccatggcta

SEQ ID NO: 436101 - DNA, 120 bp, Artificial Sequence
  ENSG00000153006_67 (sequence is synthesized)
aaattgactaaaatatttgtattcttgtaatattaccatggctaataaattaacttattaatagaatttaatagaacttgtcatgctgtccaggtgcgatggctcatgcctataatccca

SEQ ID NO: 436102 - DNA, 120 bp, Artificial Sequence
  ENSG00000153006_68 (sequence is synthesized)
gaatggcttgagcccagaagtttgagacaggcttgggcaacatagggagacctcatctctgcaaaaagtaaaagaaaaattatccaagtgtggtggcatgtacctgtgttcccagctatg

SEQ ID NO: 436103 - DNA, 80 bp, Artificial Sequence
  ENSG00000153012_0 (sequence is synthesized)
cagcccgggctcgggtgggggggcgccgagtgggggtggcggccagcatgctgctcggctgcggctcggcctcccacacc

SEQ ID NO: 436104 - DNA, 80 bp, Artificial Sequence
  ENSG00000153012_1 (sequence is synthesized)
cgcggctccctagtcctcgccagcagcggcggcggcagagcagcgagcggcgcccgcgtctgcagcggcgccgggtccga

SEQ ID NO: 436105 - DNA, 120 bp, Artificial Sequence
  ENSG00000153012_2 (sequence is synthesized)
catggcgctgcggagaggcggctgcggagcgctcgggctgctgctgctgctgctgggcgccgcgtgcctgataccgcggagcgcgcaggtgaggcggctggcgcgctgccccgccacttg

SEQ ID NO: 436106 - DNA, 120 bp, Artificial Sequence
  ENSG00000153012_3 (sequence is synthesized)
ccccgccacttgcagctgtaccaaggagtctatcatctgcgtgggctcttcctgggtgcccaggatcgtgccgggcgacatcagctccctgagcctggtaaatgggacgttttcagaaat

SEQ ID NO: 436107 - DNA, 120 bp, Artificial Sequence
  ENSG00000153012_4 (sequence is synthesized)
caaggaccgaatgttttcccatctgccttctctgcagctgctattgctgaattctaactcattcacgatcatccgggatgatgcttttgctggactttttcatcttgaatacctgttcat

SEQ ID NO: 436108 - DNA, 120 bp, Artificial Sequence
  ENSG00000153012_5 (sequence is synthesized)
tgaagggaacaaaatagaaaccatttcaagaaatgcctttcgtggcctccgtgacctgactcacctttctttggccaataaccacataaaagcactaccaagggatgtcttcagtgattt

SEQ ID NO: 436109 - DNA, 120 bp, Artificial Sequence
  ENSG00000153012_6 (sequence is synthesized)
agactctctgattgaactagatttgaggggtaataaatttgaatgtgactgcaaagccaagtggctatacctgtggttgaagatgacaaattccaccgtttctgatgtgctgtgtattgg

SEQ ID NO: 436110 - DNA, 120 bp, Artificial Sequence
  ENSG00000153012_7 (sequence is synthesized)
tccaccagagtatcaggaaaagaagctaaatgacgtgaccagctttgactatgaatgcacaactacagattttgttgttcatcagactttaccctaccagtcggtttcagtggatacgtt

SEQ ID NO: 436111 - DNA, 120 bp, Artificial Sequence
  ENSG00000153012_8 (sequence is synthesized)
caactccaagaacgatgtgtacgtggccatcgcgcagcccagcatggagaactgcatggtgctggagtgggaccacattgaaatgaatttccggagctatgacaacattacaggtcagtc

SEQ ID NO: 436112 - DNA, 120 bp, Artificial Sequence
  ENSG00000153012_9 (sequence is synthesized)
catcgtgggctgtaaggccattctcatcgatgatcaggtctttgtggtggtagcccagctcttcggtggctctcacatttacaaatacgacgagagttggaccaaatttgtcaaattcca

SEQ ID NO: 436113 - DNA, 120 bp, Artificial Sequence
  ENSG00000153012_10 (sequence is synthesized)
agacatagaggtctctcgcatttccaagcccaatgacatcgagctgtttcagatcgacgacgagacgttctttgtcatcgcagacagctcaaaggctggtctgtccacagtttataaatg

SEQ ID NO: 436114 - DNA, 120 bp, Artificial Sequence
  ENSG00000153012_11 (sequence is synthesized)
gaacagcaaaggattctattcttaccagtcactgcacgagtggttcagggacacggatgcggagtttgttgatatcgatggaaaatcgcatctcatcctgtccagccgctcccaggtccc

SEQ ID NO: 436115 - DNA, 120 bp, Artificial Sequence
  ENSG00000153012_12 (sequence is synthesized)
catcatcctccagtggaataaaagctctaagaagtttgtcccccatggtgacatccccaacatggaggacgtactggctgtgaagagcttccgaatgcaaaataccctctacctttccct

SEQ ID NO: 436116 - DNA, 120 bp, Artificial Sequence
  ENSG00000153012_13 (sequence is synthesized)
tacccgcttcatcggggactcccgggtcatgaggtggaacagtaagcagtttgtggagatccaagctcttccatcccggggggccatgaccctgcagcccttttcttttaaagataatca

SEQ ID NO: 436117 - DNA, 120 bp, Artificial Sequence
  ENSG00000153012_14 (sequence is synthesized)
ctacctggccctggggagtgactatacattctctcagatataccagtgggataaagagaagcagctattcaaaaagtttaaggagatttacgtgcaggcgcctcgttcattcacagctgt

SEQ ID NO: 436118 - DNA, 120 bp, Artificial Sequence
  ENSG00000153012_15 (sequence is synthesized)
ctccaccgacaggagagatttcttttttgcatccagtttcaaagggaaaacaaagatttttgaacatataattgttgacttaagtttgtgaaggtgtggtgggtgaaactaagagaaatg

SEQ ID NO: 436119 - DNA, 120 bp, Artificial Sequence
  ENSG00000153012_16 (sequence is synthesized)
tagcattagctctcacaaaagaggaccaagaaaaatcaacaaacaaatcaaagccaggctcagagctctgaaattaaaaagcactgaaatagttagatgttttcaaacttttagaactca

SEQ ID NO: 436120 - DNA, 120 bp, Artificial Sequence
  ENSG00000153012_17 (sequence is synthesized)
cattttaatcagggattgcatttattggctaactgcatgacatgcccattctaccatttaaaaaaaaatcttaaagcctgtaatttctgagaaaagagtacagcatttactcttatcatc

SEQ ID NO: 436121 - DNA, 120 bp, Artificial Sequence
  ENSG00000153012_18 (sequence is synthesized)
tagaaatgtaatatgcttcccccccgctttttgatgaggaagaagacaattggataagatgggacagcacttataatgaaataaaaaaaaactttgagcccctctcattccactttagca

SEQ ID NO: 436122 - DNA, 120 bp, Artificial Sequence
  ENSG00000153012_19 (sequence is synthesized)
atctttttggtaagaactcttaaagccaaaagtctgctgaaaagatttgctgattattagtttaaaaatcttgtaacactcagcagtgctattttgagtcatcccagtttcctgaaagta

SEQ ID NO: 436123 - DNA, 120 bp, Artificial Sequence
  ENSG00000153012_20 (sequence is synthesized)
atgcccagtcttcctgaatcctccttaatagcagaaccttggtgattttgttggctcatatgaatgcttgtcatggatatgttaacaatttagtgtttgacattgcttcctctgccacaa

SEQ ID NO: 436124 - DNA, 120 bp, Artificial Sequence
  ENSG00000153012_21 (sequence is synthesized)
agacaatactctggtgacacatgtctagacccagcacaggctgtaggcccaggagtgactcaaaggagtttttccctctttcttacggttcaaaggtgaccctggtggtggccagagcag

SEQ ID NO: 436125 - DNA, 120 bp, Artificial Sequence
  ENSG00000153012_22 (sequence is synthesized)
taatgcttgtttgatgctcttcatggctcatctgcttctcagaacccacccgttgagtttgtgggtaaccagcaggcaggccaaagactggtgcttttcatttcatcctttagagggatg

SEQ ID NO: 436126 - DNA, 120 bp, Artificial Sequence
  ENSG00000153012_23 (sequence is synthesized)
aaacagttatttccgtctgatgagcattcggtagaatttttgaagtgagattttatgaagtcaaaggggactttacacagatctcgacctgctttgaaacctagaggtggccctttgatt

SEQ ID NO: 436127 - DNA, 120 bp, Artificial Sequence
  ENSG00000153012_24 (sequence is synthesized)
tgtgcgtgtccttgccctctggacaacttaatatttcaagtaatcgaataccaacttccctgccagcccacctgccttccgccccgcttgtgtaacagtcctgttttgttgagttgctgc

SEQ ID NO: 436128 - DNA, 120 bp, Artificial Sequence
  ENSG00000153012_25 (sequence is synthesized)
tattgcactgccagtgcagcccacaccaaatcacaacccaagatactcagataggaagactccttcctctcccagtactttaccaaaggaacccccgccaggacccacatggggccacgt

SEQ ID NO: 436129 - DNA, 120 bp, Artificial Sequence
  ENSG00000153012_26 (sequence is synthesized)
gttggcagtggaatcagcctgtgcaggctggggatctcaggctgatcagtaggggccagctttggagccagccaagctgaatcccacactccaggtctgtgctcaagagaccagatggtg

SEQ ID NO: 436130 - DNA, 120 bp, Artificial Sequence
  ENSG00000153012_27 (sequence is synthesized)
ctctctggtatgggcaataggcaagctcctggggtctggttatgtggaagattcttagtggatgttccgcctggttagctggttctcttcagagaatataaagtgaatgcctttaggggt

SEQ ID NO: 436131 - DNA, 120 bp, Artificial Sequence
  ENSG00000153012_28 (sequence is synthesized)
agctctgaaagagaaacccaacaacttcattcctagccatgaaagtagcacgatcatattgtactgtattgttattgtaaaatgactatttgccatgtcatgagtaggtagatgttttgc

SEQ ID NO: 436132 - DNA, 120 bp, Artificial Sequence
  ENSG00000153012_29 (sequence is synthesized)
cacaaatatgaatgtgtttgttgtttcctgactttaagcaatgaagattgagacaataaatagcactcagagaatgaagcattgatgttacatcagcactcttgggtacattctgggact

SEQ ID NO: 436133 - DNA, 120 bp, Artificial Sequence
  ENSG00000153012_30 (sequence is synthesized)
gtaggctgaggcttctagcctcagaaaccacggattttaatgaacgaactcacccacgcatagtagtgttgttacttgaaacttctgcaaaataccaagcaaacaggagaaaagtggttt

SEQ ID NO: 436134 - DNA, 120 bp, Artificial Sequence
  ENSG00000153012_31 (sequence is synthesized)
gttttcatttttaagtgcaaattacttttcttctgcacttttttttccctcttggtttctttgaacaggctacaaatgcccaggtccccccattggaggctgaaagggaaagagctttgc

SEQ ID NO: 436135 - DNA, 120 bp, Artificial Sequence
  ENSG00000153012_32 (sequence is synthesized)
cattcctccagtcctaaagatggcaagctattctttctgttgcatggaaccactcagataaacctgggcagaaaaatgggtacttggcaaactgtaggagatatttagacagtcccagca

SEQ ID NO: 436136 - DNA, 120 bp, Artificial Sequence
  ENSG00000153012_33 (sequence is synthesized)
actatgccagatcaaagtgatgttcccaattccagccacctgtagagatggcaaggtggcatcttttcacagtgttgctactgcagagaggtatcacattcccagctgcccctctgaggg

SEQ ID NO: 436137 - DNA, 120 bp, Artificial Sequence
  ENSG00000153012_34 (sequence is synthesized)
taaatgagcgactgaccccctgcactcactattctgctcacattgccagattctgggaaaccaggaaacacaggatgctgggcttaggatggggagagctgttgagtccagatggggaat

SEQ ID NO: 436138 - DNA, 120 bp, Artificial Sequence
  ENSG00000153012_35 (sequence is synthesized)
taggaggtgaaagaacgatctaaacaggtgatgggtggggtgtgagaagggggtgacccactcaactgcaatcaggttttccttttttataatgttattttatacaagactaaagcctgt

SEQ ID NO: 436139 - DNA, 120 bp, Artificial Sequence
  ENSG00000153012_36 (sequence is synthesized)
agtctacagagcgcctgtgctgtggaaggagatatttgttctggccaacttactaaaggagcatagatgttcttggcacggggtggtgatatctttgcttcattaatcttactgctccat

SEQ ID NO: 436140 - DNA, 120 bp, Artificial Sequence
  ENSG00000153012_37 (sequence is synthesized)
cccaagaatccctgaagttttaaacaacttctgcaagaagcattcttccagtaataatgtaaaacaaaaaaccaaccaagcaacagcaaaaatgcaaagcagagaaatatgtggaccgtc

SEQ ID NO: 436141 - DNA, 120 bp, Artificial Sequence
  ENSG00000153012_38 (sequence is synthesized)
cccagtggagatcagcttgaaggagggggtggatctttcttctactttccctcccatcacccactgggtggtcgtctgctcagcttatttcttctttatgaactttgtggcgaggctcct

SEQ ID NO: 436142 - DNA, 120 bp, Artificial Sequence
  ENSG00000153012_39 (sequence is synthesized)
ggactgatccctctgtgcggccatgtggctttaaggcctttccttaaagggggcttgtccccatactccatggggtcgggaatgggtctattatcaagactctaaaaataactcttagac

SEQ ID NO: 436143 - DNA, 120 bp, Artificial Sequence
  ENSG00000153012_40 (sequence is synthesized)
atgaagagcactgtgttattggacagtggatgataaggccaccttacatttagcaaagctttatatttttccaatgcacattagtactcacctcatttgttcataaatagctctgaagtt

SEQ ID NO: 436144 - DNA, 120 bp, Artificial Sequence
  ENSG00000153012_41 (sequence is synthesized)
tattgcagggcaggtattattctaatttcagagagaaggaaatagacatgaaaactatatgaattgcctgccatggttatccaatagggactggcaaagcaataactttccctctgatca

SEQ ID NO: 436145 - DNA, 120 bp, Artificial Sequence
  ENSG00000153012_42 (sequence is synthesized)
gcagacattgtattttctttctaagacaccctgctatactctcccagagaaagactttcatttctagcatgattttgaatttggcagcaccttgagataaagtaaaaagtgcaataaaat

SEQ ID NO: 436146 - DNA, 120 bp, Artificial Sequence
  ENSG00000153012_43 (sequence is synthesized)
atgcatagccagaagaaaaatcatactgaatagacaccattcaatcaactggtccatttaacaattaacaaacatgcaattgcatgccccactctttttacattcaaggccccactcttg

SEQ ID NO: 436147 - DNA, 120 bp, Artificial Sequence
  ENSG00000153012_44 (sequence is synthesized)
aaagtggtccagaaattttggatagttttctgttgtactaaggaggatatctagctggtctggttgtttctccccctgcatagctatggggaggatgttgaggttgagacacatctggtt

SEQ ID NO: 436148 - DNA, 120 bp, Artificial Sequence
  ENSG00000153012_45 (sequence is synthesized)
cttgtcacattgtccaccagataaacaagaagagatctgtgaaggaaaaattcaaaacctgaatgcacgagtggtgatgaattgctctcggccgtcatcagccttcaggaagcacactgg

SEQ ID NO: 436149 - DNA, 120 bp, Artificial Sequence
  ENSG00000153012_46 (sequence is synthesized)
aaatggcagagttgcattttttcttccccatggagtgagagtctgtgtatttttaggaaagaaatcagcatgggatgccagaggtttggcggtcaggagtgctcatgatggaaatttctc

SEQ ID NO: 436150 - DNA, 120 bp, Artificial Sequence
  ENSG00000153012_47 (sequence is synthesized)
tggcctggggtataatgaaggtgagatgaagatctgcaggaggggagtctatttgcatgccacctaaagaaaacctcttaagctggcttcctgattcttctgcagaggtatcagcctctc

SEQ ID NO: 436151 - DNA, 120 bp, Artificial Sequence
  ENSG00000153012_48 (sequence is synthesized)
cttcgcagctgcggaaggaagttctttaattaggcagcggccaaagattctgttcaacagcttcctggagtggaatacaataatctagttgtatgcaatgatgcaattagaaagtggtcc

SEQ ID NO: 436152 - DNA, 120 bp, Artificial Sequence
  ENSG00000153012_49 (sequence is synthesized)
ggatttgggtggcaatggaaggggaatggcaaagtggggcagatggctctggaggaaacttgggaaagtaaaaacaaactgaaagaaaaggaaaaaaggatgatgatttcttttgcctca

SEQ ID NO: 436153 - DNA, 120 bp, Artificial Sequence
  ENSG00000153012_50 (sequence is synthesized)
gccaggcaagcagagggtagaatgaccaggaagattaacaacatctcaattattaatgaagagagccaactgtaatgctcattcaaataagaagcatattgtaaagctactgagatcgaa

SEQ ID NO: 436154 - DNA, 120 bp, Artificial Sequence
  ENSG00000153012_51 (sequence is synthesized)
accaagttattattatccttactgtattccattgcttgtatcaaaatctactttttttctagtaggaaactatgcattccctatcagtccctttgattatcaggaatgtataagaattgt

SEQ ID NO: 436155 - DNA, 120 bp, Artificial Sequence
  ENSG00000153012_52 (sequence is synthesized)
gataaaataggccaatatgctatttggtaccatttgtatgtattttaagtgcataacctaggtaaaataagaatagtttctatgtgtaaagaagcaagttttacagtatgcagactacag

SEQ ID NO: 436156 - DNA, 120 bp, Artificial Sequence
  ENSG00000153012_53 (sequence is synthesized)
tggatgtattttaggctgtatacatatttagctctttttggtaaatagggtatacaaactatatgcctcttaattcaatatattcggtaagcctatgaataaaaagtggttcatgcctaa

SEQ ID NO: 436157 - DNA, 120 bp, Artificial Sequence
  ENSG00000153015_0 (sequence is synthesized)
agcggtgctcgggtccggtaacaacatggcggcgtccgtgaggggctcctttgggcaggggtagtgtttggtgtccctgtcttgcgtgatattgacaaactgaagctttcctgcaccact

SEQ ID NO: 436158 - DNA, 120 bp, Artificial Sequence
  ENSG00000153015_1 (sequence is synthesized)
ggacttaaggaagagtgtactcgtaggcggacagctttagtggccggccggccgctctcatcccccgtaaggagcagagtcctttgtactgaccaagatgagcaacatctacatccagga

SEQ ID NO: 436159 - DNA, 120 bp, Artificial Sequence
  ENSG00000153015_2 (sequence is synthesized)
gcctcccacgaatgggaaggttttattgaaaactacagctggagatattgacatagagttgtggtccaaagaagctcctaaagcttgcagaaattttatccaactttgtttggaagctta

SEQ ID NO: 436160 - DNA, 120 bp, Artificial Sequence
  ENSG00000153015_3 (sequence is synthesized)
ttatgacaataccatttttcatagagttgtgcctggtttcatagtccaaggcggagatcctactggcacagggagtggtggagagtctatctatggagcgccattcaaagatgaatttca

SEQ ID NO: 436161 - DNA, 120 bp, Artificial Sequence
  ENSG00000153015_4 (sequence is synthesized)
ttcacggttgcgttttaatcggagaggactggttgccatggcaaatgctggttctcatgataatggcagccagtttttcttcacactgggtcgagcagatgaacttaacaataagcatac

SEQ ID NO: 436162 - DNA, 120 bp, Artificial Sequence
  ENSG00000153015_5 (sequence is synthesized)
catctttggaaaggttacaggggatacagtatataacatgttgcgactgtcagaagtagacattgatgatgacgaaagaccacataatccacacaaaataaaaagctgtgaggttttgtt

SEQ ID NO: 436163 - DNA, 120 bp, Artificial Sequence
  ENSG00000153015_6 (sequence is synthesized)
taatccttttgatgacatcattccaagggaaattaaaaggctgaaaaaagagaaaccagaggaggaagtaaagaaattgaaacccaaaggcacaaaaaattttagtttactttcatttgg

SEQ ID NO: 436164 - DNA, 120 bp, Artificial Sequence
  ENSG00000153015_7 (sequence is synthesized)
agaggaagctgaggaagaagaggaggaagtaaatcgagttagtcagagcatgaagggcaaaagcaaaagtagtcatgacttgcttaaggatgatccacatctcagttctgttccagttgt

SEQ ID NO: 436165 - DNA, 120 bp, Artificial Sequence
  ENSG00000153015_8 (sequence is synthesized)
gatttagttgatgatggagaagatgaaagtgcagagcatgatgaatatattgatggtgatgaaaagaacctgatgagagaaagaattgccaaaaaattaaaaaaggacacaagtgcgaat

SEQ ID NO: 436166 - DNA, 120 bp, Artificial Sequence
  ENSG00000153015_9 (sequence is synthesized)
gttaaatcagctggagaaggagaagtggagaagaaatcagtcagccgcagtgaagagctcagaaaagaagcaagacaattaaaacgggaactcttagcagcaaaacaaaaaaaagtagaa

SEQ ID NO: 436167 - DNA, 120 bp, Artificial Sequence
  ENSG00000153015_10 (sequence is synthesized)
aatgcagcaaaacaagcagaaaaaagaagtgaagaggaagaagcccctccagatggtgctgttgccgaatacagaagagaaaagcaaaagtatgaagctttgaggaagcaacagtcaaag

SEQ ID NO: 436168 - DNA, 120 bp, Artificial Sequence
  ENSG00000153015_11 (sequence is synthesized)
aagggaacttcccgggaagatcagacccttgcactgctgaaccagtttaaatctaaactcactcaagcaattgctgaaacgcctgaaaatgacattcctgaaacagaagtagaagatgat

SEQ ID NO: 436169 - DNA, 120 bp, Artificial Sequence
  ENSG00000153015_12 (sequence is synthesized)
gaaggatggatgtcacatgtacttcagtttgaggataaaagcagaaaagtgaaagatgcaagcatgcaagactcagatacatttgaaatctatgatcctcggaatccagtgaataaaaga

SEQ ID NO: 436170 - DNA, 120 bp, Artificial Sequence
  ENSG00000153015_13 (sequence is synthesized)
aggagggaagaaagcaaaaagctgatgagagagaaaaaagaaagaagataaaatgagaataatgataaccagaacttgctggaaatgtgcctacaatggccttgtaacagccattgttcc

SEQ ID NO: 436171 - DNA, 120 bp, Artificial Sequence
  ENSG00000153015_14 (sequence is synthesized)
caacagcatcacttaggggtgtgaaaagaagtatttttgaacctgttgtctggttttgaaaaacaattatcttgttttgcaaattgtggaatgatgtaagcaaatgcttttggttactgg

SEQ ID NO: 436172 - DNA, 120 bp, Artificial Sequence
  ENSG00000153015_15 (sequence is synthesized)
tacatgtgttttttcctagctgaccttttatattgctaaatctgaaataaaataactttccttccacattacatgttaaccattgcagactgcaagcctgtttgtgtccttttaccctaa

SEQ ID NO: 436173 - DNA, 120 bp, Artificial Sequence
  ENSG00000153015_16 (sequence is synthesized)
aatatatgaaggcttccttttcaagatttttttataagaagttcctacagaaagaatatttgtgggaaacctccctttcactaacttcagaatataataaaatattataaataaaatata

SEQ ID NO: 436174 - DNA, 120 bp, Artificial Sequence
  ENSG00000153015_17 (sequence is synthesized)
ggagaagtggagaagaaatcagtcagccgcaggtgagtcagttactgtgctagatatcagagtttttgtctttttatatttcactttaattcagattgaatcctctcttcagctaatttt

SEQ ID NO: 436175 - DNA, 120 bp, Artificial Sequence
  ENSG00000153015_18 (sequence is synthesized)
aatacaccaagcttaaagtaaacataacaatgatcctatgagttcaattccattttatttctctctgatccttttttagaaaggctctatactttcatatatatagggtaataatgtatt

SEQ ID NO: 436176 - DNA, 120 bp, Artificial Sequence
  ENSG00000153015_19 (sequence is synthesized)
agctagatgtggaagaatgcatttgttaaataccaatgagagcagtagagtaattgtatagaaagaaaagagacatcctcaaataatttcggtaagcaaaatttgtcaaaactgatgaag

SEQ ID NO: 436177 - DNA, 120 bp, Artificial Sequence
  ENSG00000153015_20 (sequence is synthesized)
aaaatgagtgagcctgaaaacattcttaaatatcttttcaagtctgatttaccaaataccatatacctatcctaagctcagtagtatcataaaataaatttcagcaaatggtgaaaagtt

SEQ ID NO: 436178 - DNA, 120 bp, Artificial Sequence
  ENSG00000153015_21 (sequence is synthesized)
ccttctctatgcctgtatcttgactactggatacagctcagcagaatcacacaggcatatacaagctggtattattatggatttctagattccagcctcagctgtgtctccagtgcttcc

SEQ ID NO: 436179 - DNA, 120 bp, Artificial Sequence
  ENSG00000153015_22 (sequence is synthesized)
ttattactcactcgccacaatgtttacttcacacttcaaactcactcaacggatcacctggctgcttgtttttttatgaaatgagagtaaatttcttcaacccgtatttctttctcttcc

SEQ ID NO: 436180 - DNA, 120 bp, Artificial Sequence
  ENSG00000153015_23 (sequence is synthesized)
ccgcttcgagagtaaaaactaacaaaaccattccattttatttcctgtccctacctccttcctatttatttctaaatacatatcatctagcttctcacctaccactccactgaaactact

SEQ ID NO: 436181 - DNA, 120 bp, Artificial Sequence
  ENSG00000153015_24 (sequence is synthesized)
tccactaaggccatctagttgataatcgactggctactttccatttttttttcttggtcttcctgctctggagatttttgtctcttttctcttgagactaatctctctcaagaaccttac

SEQ ID NO: 436182 - DNA, 120 bp, Artificial Sequence
  ENSG00000153015_25 (sequence is synthesized)
tatttaaagtgtgatctgtgaagcagtagcattagtatcacttgggaacttgttagaaataccgagtctcaggccctgtcctacacatttttaattagaatctgcattctaacaagatcc

SEQ ID NO: 436183 - DNA, 120 bp, Artificial Sequence
  ENSG00000153015_26 (sequence is synthesized)
ccaggtgatttttgtgtgcattagtttgagaagcagtcctgtagaatattaatttttatccctactgctcctggatgagttcaagtttgtatcatgttagttccaaggtcagcaagttgt

SEQ ID NO: 436184 - DNA, 120 bp, Artificial Sequence
  ENSG00000153015_27 (sequence is synthesized)
cagcaagttggtactatattccctgactccttagtgcaaacctatgtgcacccttttcacactcctgtaatattaggttacatatacattttttcttctttgtgtatccttatactgtaa

SEQ ID NO: 436185 - DNA, 120 bp, Artificial Sequence
  ENSG00000153015_28 (sequence is synthesized)
ctttcttgaaggtagtgatcatatccatttacatttgtatctccatgttcaaacagcgtaggtacccaaatatttttgtaaatacatgaacaaaaaatgaataaattcttctttggcaaa

SEQ ID NO: 436186 - DNA, 120 bp, Artificial Sequence
  ENSG00000153015_29 (sequence is synthesized)
tttgaatagatagccaattagggctagaatggggctgatggaccatgaactacagttaaggaattggctttcattattatgggaatatgtgcaagcttagtagaaatgaaaggctgaaaa

SEQ ID NO: 436187 - DNA, 120 bp, Artificial Sequence
  ENSG00000153029_0 (sequence is synthesized)
ggactatgggggaactgatggcgttcctgttacctctcatcattgtgttaatggtgaagcacagcgattcccggacgcactctctgagatattttcgcctgggcgtttcggatcccatcc

SEQ ID NO: 436188 - DNA, 120 bp, Artificial Sequence
  ENSG00000153029_1 (sequence is synthesized)
atggggtccctgaatttatttcggttgggtacgtggactcgcaccctatcaccacatatgacagtgtcactcggcagaaggagccacgggccccatggatggcagagaacctcgcgcctg

SEQ ID NO: 436189 - DNA, 120 bp, Artificial Sequence
  ENSG00000153029_2 (sequence is synthesized)
atcactgggagaggtacactcagctgctgaggggctggcagcagatgttcaaggtggaactgaagcgcctacagaggcactacaatcactcagggtctcacacttaccagagaatgattg

SEQ ID NO: 436190 - DNA, 120 bp, Artificial Sequence
  ENSG00000153029_3 (sequence is synthesized)
gctgtgagctgctggaggatggaagcaccacaggatttctgcagtatgcatatgacgggcaggatttcctgatcttcaataaagacaccctctcctggctggctgtagataatgtggctc

SEQ ID NO: 436191 - DNA, 120 bp, Artificial Sequence
  ENSG00000153029_4 (sequence is synthesized)
acaccatcaagcaggcatgggaggccaatcagcatgagttgctgtatcaaaagaattggctggaagaagaatgtattgcctggctaaagagattcctggagtatgggaaagacaccctac

SEQ ID NO: 436192 - DNA, 120 bp, Artificial Sequence
  ENSG00000153029_5 (sequence is synthesized)
aaagaacagagcccccactggtcagagtaaatcgcaaagaaacttttccaggggttacagctctcttctgcaaagctcatggcttttaccccccagaaatttacatgacatggatgaaaa

SEQ ID NO: 436193 - DNA, 120 bp, Artificial Sequence
  ENSG00000153029_6 (sequence is synthesized)
acggggaagaaattgtccaagaaattgattatggagacattcttcccagtggggatggaacctatcaggcgtgggcatcaattgagcttgatcctcagagcagcaacctttactcctgtc

SEQ ID NO: 436194 - DNA, 120 bp, Artificial Sequence
  ENSG00000153029_7 (sequence is synthesized)
atgtggagcactgcggtgtccacatggttcttcaggtcccccaggaatcagaaactatccctcttgtgatgaaagctgtctctgggtccattgtccttgtcattgtgctggctggagttg

SEQ ID NO: 436195 - DNA, 120 bp, Artificial Sequence
  ENSG00000153029_8 (sequence is synthesized)
gtgttctagtctggagaagaaggccccgagagcaaaatggagccatctaccttccaacaccagatcgatgattgcagatccctcttttccagttctccttcctctaggagccatgttatc

SEQ ID NO: 436196 - DNA, 120 bp, Artificial Sequence
  ENSG00000153029_9 (sequence is synthesized)
ctctgtcccccatagagtcaagcctagtgcttgaaggtcctgacgacacccacaacatacatgagagtaatgggattgagcatttatggcagcaacagaggagccacaaaatgttctttg

SEQ ID NO: 436197 - DNA, 120 bp, Artificial Sequence
  ENSG00000153029_10 (sequence is synthesized)
ttctttggctccaaaaagactgtcagctttcagtctcttttgatggactgttttatcagagttgactttaaatacagcttgtctcatgacacaacgcttccctacattctatttgtcaat

SEQ ID NO: 436198 - DNA, 120 bp, Artificial Sequence
  ENSG00000153029_11 (sequence is synthesized)
gatgatttgcaactagttggagattctcagagcaggaaggaatcttttcaaccagagcaggaactgtcttctgcaatgccttggacttgagcctccagcctccacttgaacaccatgtga

SEQ ID NO: 436199 - DNA, 120 bp, Artificial Sequence
  ENSG00000153029_12 (sequence is synthesized)
agggaacctcagtacttcataaaatggcctttctcattcatctttcatgggaacatttattgtacaagcgctttgaatatcatgggcaccatgactgtgaccctacaggtaggattggat

SEQ ID NO: 436200 - DNA, 120 bp, Artificial Sequence
  ENSG00000153029_13 (sequence is synthesized)
cactccatgagagtagccggcaggtttctacaatggcctgggaatggactgattatttttatacattttctggcctgagagaaagccaaagtcccctgctgttcacagcaaccctgcctg

SEQ ID NO: 436201 - DNA, 120 bp, Artificial Sequence
  ENSG00000153029_14 (sequence is synthesized)
ggagcttggaatcttggtaatctgcccggttggatctatggaggtagtctcaccctttttgtcttttgtgggaaattaagagaaataattatcagacatatcatcacctccagtggaact

SEQ ID NO: 436202 - DNA, 87 bp, Artificial Sequence
  ENSG00000153029_15 (sequence is synthesized)
agaaataattatcagacatatcatcacctccagtggaactacagagacctggacccagctgcactattttaatgtaaaaataacagt

SEQ ID NO: 436203 - DNA, 120 bp, Artificial Sequence
  ENSG00000153029_16 (sequence is synthesized)
aataataataacagtatatttggtgtcaggagagggctcaattctcatttctgcctttcctgtgctggctcatggtagctgggcatgacttgccttcctacataggttgtcttcatacat

SEQ ID NO: 436204 - DNA, 120 bp, Artificial Sequence
  ENSG00000153029_17 (sequence is synthesized)
atgcactgggaatcaataaaagcccatggtgagaatgaacatccccttaatgttccttactatccccaacccctgaggcctcacctactgccctgccatgtggagctacttgccctgggg

SEQ ID NO: 436205 - DNA, 120 bp, Artificial Sequence
  ENSG00000153029_18 (sequence is synthesized)
ctgccagtcacacattcctcggtcctacttctctgaccccgtttgactctgcacctgagccctaatgcttacttcagtgacctgaactttgacaagtggcttttgtcctgcacctcaggt

SEQ ID NO: 436206 - DNA, 120 bp, Artificial Sequence
  ENSG00000153029_19 (sequence is synthesized)
cctcaggtttgacctctgctctcccttgaccttgactgtgacatttgacctttggctttaatcattacagcctcagataaaggtaccttcagcccgggcacagtggctcacgcctgtaat

SEQ ID NO: 436207 - DNA, 120 bp, Artificial Sequence
  ENSG00000153029_20 (sequence is synthesized)
gtctccaaaaaaaaaaagaaagataccctcagtgtgccaggcctctaagagctcacctgccaggcttcctccttgctccactgtcccatgtaattccatatatgaagctaccactgtaca

SEQ ID NO: 436208 - DNA, 120 bp, Artificial Sequence
  ENSG00000153029_21 (sequence is synthesized)
tctctcttttccggtgcctgttgagttgcatagaagcacagttgtgtttattttgtttttagggttgccatgggcaatttccgtgccacttttaagcagtgttgcactgtgaagagaatg

SEQ ID NO: 436209 - DNA, 120 bp, Artificial Sequence
  ENSG00000153029_22 (sequence is synthesized)
taggcaagtttatttctggaatggtttcttcttacaatcagaatagttaggatgtaatatatttttgggtgggcatttaaagtgaaaaggtacatatttacatagacacaggtgataatg

SEQ ID NO: 436210 - DNA, 120 bp, Artificial Sequence
  ENSG00000153029_23 (sequence is synthesized)
tatctatgtaaatgccttttgattctgcaactgcaggatactctcatcaaagacacagataaaaagcctctgtgtttccaaggccttgccctacacctaacacataatatgtccaaatgg

SEQ ID NO: 436211 - DNA, 120 bp, Artificial Sequence
  ENSG00000153029_24 (sequence is synthesized)
atgaagaggaggcaaggacaaggatgtgatgacaaaacattctgttatgcacttgtagcatttatgtttcttcctgggggattttataatactaaaagaatcataatataaagagatgat

SEQ ID NO: 436212 - DNA, 73 bp, Artificial Sequence
  ENSG00000153029_25 (sequence is synthesized)
caacatggagaaaccctgtctctaccaaacatacaaaattagccggggaagaaccgcttgaacccgggaggca

SEQ ID NO: 436213 - DNA, 85 bp, Artificial Sequence
  ENSG00000153029_26 (sequence is synthesized)
aagtaagtaatacctaaaattctgcaaccttcattttactatagatggttgaagattatattacttcttaattgttttagccttg

SEQ ID NO: 436214 - DNA, 120 bp, Artificial Sequence
  ENSG00000153029_27 (sequence is synthesized)
aattgttttagccttgttattgcttcattacttcatggttgttgagtacagatgctcagtaatcataacctatgaaatatttgacaccatgatctaaacattaaaaacaaataactgtgc

SEQ ID NO: 436215 - DNA, 120 bp, Artificial Sequence
  ENSG00000153029_28 (sequence is synthesized)
tattgccacagctatgttttggctttgaattttctttactgaatattttggatcaagaacactagatgagaaacctgttcaactctgttcttttttttttttttaactccactgtattta

SEQ ID NO: 436216 - DNA, 120 bp, Artificial Sequence
  ENSG00000153029_29 (sequence is synthesized)
ttttgttttttttgtttgtttgtttttgatgtgcatatagaccaagatgtggtaaatttaaatggcagatgtttttgatgtggtacatttaagggagagaaagcagtttaaagagcaggg

SEQ ID NO: 436217 - DNA, 120 bp, Artificial Sequence
  ENSG00000153029_30 (sequence is synthesized)
gagcagggtgaaaaatccaacaagactccatcgagagtttctgagctctcccatcaggggccagtcctcctttcctctctcctcttactcccatgatttccaagttgtgatcctttcctt

SEQ ID NO: 436218 - DNA, 120 bp, Artificial Sequence
  ENSG00000153029_31 (sequence is synthesized)
atttctgaggaatgacttggtttctcctcttctttttttggcctgagagaagatgtttttgcacttgtagctatgaggaacagattgtccactagggaggccagctgatcattttctgcc

SEQ ID NO: 436219 - DNA, 120 bp, Artificial Sequence
  ENSG00000153029_32 (sequence is synthesized)
agagtcacacagagcagtcacaccttattttgaaaaccactgtctggggtctttgtcctcacatatgcaggtctagtgtccccacaaagtgatcagatggatatataaagtggagtgcca

SEQ ID NO: 436220 - DNA, 120 bp, Artificial Sequence
  ENSG00000153029_33 (sequence is synthesized)
atgtattaatttactgtgagaaacacaattgctaagtgggtcagatatctgtctcagctggtcagtacaccttccagcaggaaaatctacataagaacaactaaatcacaatctgtagag

SEQ ID NO: 436221 - DNA, 120 bp, Artificial Sequence
  ENSG00000153029_34 (sequence is synthesized)
tgcttgatgaccccagaattggtgcaaggggacacattcttgcttgttagcacctgctctctggagtttgctattttctcacacacagtgtattagttcacagaatgttctccaaggagg

SEQ ID NO: 436222 - DNA, 120 bp, Artificial Sequence
  ENSG00000153029_35 (sequence is synthesized)
acagggggctttgcccatagccatgtgctgtgggcagcagagctaggaagaagcacaggcatctcccagcccaggtgtttcccacttaactgcattgcccttttcatcttttttttttcc

SEQ ID NO: 436223 - DNA, 120 bp, Artificial Sequence
  ENSG00000153029_36 (sequence is synthesized)
ccaatagcttcaggacattcagtacattgtgctttttagaggttgatgattccactgcctgagctgccttcacctctctttctttggaaattgccatctttgagcattgtatgtctctgt

SEQ ID NO: 436224 - DNA, 120 bp, Artificial Sequence
  ENSG00000153029_37 (sequence is synthesized)
aacatctctgcatctccttttcactctggcctccctttctccattgtccttctagcttctggttgccccaaaccccacagactgtgtaacaaaacccaaaacctattggtttaaaacaat

SEQ ID NO: 436225 - DNA, 120 bp, Artificial Sequence
  ENSG00000153029_38 (sequence is synthesized)
acccattttattttctttcatagtttctatgggtcaggaatttggatatggcttgggtaagcagttctggcttctcatggagttggaggcaagtggtggctggaacagaaatggggcagc

SEQ ID NO: 436226 - DNA, 120 bp, Artificial Sequence
  ENSG00000153029_39 (sequence is synthesized)
caggggtggtggccaggcatcagctacatctcctccatgtagtctcaggaactctccatgtaatctctctgtgtgggttgggcttcctcacaacatggtggcctcagggcagtcactgct

SEQ ID NO: 436227 - DNA, 120 bp, Artificial Sequence
  ENSG00000153029_40 (sequence is synthesized)
tacatggcagctagcttccctcagagtgagtatcccaagagatcacagtcaaagtgcatagcatttatataatctaatcttggaagtcacaaaatgtcattcttgtgatactctcattgg

SEQ ID NO: 436228 - DNA, 120 bp, Artificial Sequence
  ENSG00000153029_41 (sequence is synthesized)
tgaagaagtcataaaatcctgctcaggttcaaaaagagggtgtatagaacccaacactcaataggaagattgtcagagttacattgtaagaagagcatgtagttgggagatatcattgtg

SEQ ID NO: 436229 - DNA, 120 bp, Artificial Sequence
  ENSG00000153029_42 (sequence is synthesized)
gccattttgggaaagatgcaacatgtcacaatgtcatgttctccatcgtctccccgttccaccttgtactggtttccaagggtagtcgtttaaaagtaccacaaaaactgggtggcttgg

SEQ ID NO: 436230 - DNA, 120 bp, Artificial Sequence
  ENSG00000153029_43 (sequence is synthesized)
aacaacagaaatttattgtttcacagttctggaggccagaagttcaaaatgaagtgttggcagaaacatgctgcctctaaagggactgggaaaggatctgttccaggcttccctcctatc

SEQ ID NO: 436231 - DNA, 120 bp, Artificial Sequence
  ENSG00000153029_44 (sequence is synthesized)
ttctggttgttccttgccttctggctgcgtaactctagtcttcatttggtgttctccctgcatgcatggctttgtgtccaaatttccttttttcatgaggccatcagtcatactggatta

SEQ ID NO: 436232 - DNA, 120 bp, Artificial Sequence
  ENSG00000153029_45 (sequence is synthesized)
gggacccactctactactgcaggatgacctcaccttcccaaattacatctgcaacaaccctatttccaaagaaggccacattctgaggtactgggggttataacttcaacatgaattttt

SEQ ID NO: 436233 - DNA, 120 bp, Artificial Sequence
  ENSG00000153029_46 (sequence is synthesized)
tggaggaaacaattcaactcctaacacatctctacccaacctctgtaggttccctcaatccaccaaaattttttggctccactggattatctagcagttaggaaaccaagatcattaaat

SEQ ID NO: 436234 - DNA, 120 bp, Artificial Sequence
  ENSG00000153029_47 (sequence is synthesized)
gaattcaccgcaactacagtgagactgactaccttagcttacctctgtgaaaggagttaagccaaaggaatctgtggaattttggagagtttgggagcatttgggggcaggaggcaaatg

SEQ ID NO: 436235 - DNA, 120 bp, Artificial Sequence
  ENSG00000153029_48 (sequence is synthesized)
ttcttcctttaaatcacaacacttagttctcttccatttataagactcacccctccatcccaacccctgcaccacaggacaaggaagtgttcttggtcttcaactttcatccctgatggt

SEQ ID NO: 436236 - DNA, 120 bp, Artificial Sequence
  ENSG00000153029_49 (sequence is synthesized)
gaaagcagttgctcctgacctatttgcccaccagcttctcctctggagcctgaggcttctgatgcctgcctggctggttctcagtaagaaggtcaagttcaaccagaggggagatgctga

SEQ ID NO: 436237 - DNA, 120 bp, Artificial Sequence
  ENSG00000153029_50 (sequence is synthesized)
tgcctttcagtacttaaatatgagttcagaccctggggcctggacataagatttggggtcccctggatataagatttctgaaaacactcagactgtggagacccctgctgagggagaagc

SEQ ID NO: 436238 - DNA, 120 bp, Artificial Sequence
  ENSG00000153029_51 (sequence is synthesized)
cccaaactgtggcttcaggggaatgcaccaaggctctcattgaggccaccttctccaacaagctcccctcctgcttccccatggctggcatggctgaggaaaaaggacactgagcacagc

SEQ ID NO: 436239 - DNA, 120 bp, Artificial Sequence
  ENSG00000153029_52 (sequence is synthesized)
ccgtgcatgagcggcttgccatgcaacaggataaaacccataatgccactcagcaagccttggttgtaaatctagtttgattacatttgtaatcaaatgatggccatttgttctgtttct

SEQ ID NO: 436240 - DNA, 120 bp, Artificial Sequence
  ENSG00000153029_53 (sequence is synthesized)
ggtttgtgaaccaactgaagacataagcagggcctcagctaacccacaaatagcacatgtgtgcaaactggaaaaatgaacccttcttctgggaggacgccagcccaggccaggtcaccc

SEQ ID NO: 436241 - DNA, 120 bp, Artificial Sequence
  ENSG00000153029_54 (sequence is synthesized)
ggcttggccagcagaacacagagtagattttggtcccgtttgttccccagtggggtatctatccttgtgcagggcacaagcctacatggtggctctggtcatatcattagaaaatagaca

SEQ ID NO: 436242 - DNA, 120 bp, Artificial Sequence
  ENSG00000153029_55 (sequence is synthesized)
gaaatgggctgcacaccagaatgaatgaattgaattgaaagggaggagtgatggtggaaaaaaaaacaagtcaattcatttagactggtagaaccagaaccactgtgtagtacatccaaa

SEQ ID NO: 436243 - DNA, 120 bp, Artificial Sequence
  ENSG00000153029_56 (sequence is synthesized)
cggttaaaattccctggaagatgttacataatcctatcatggtgtttatttatggaaatctattttaaaaattttatgtaatactgcacagtctgtttgcatgatgccttgtacgtagta

SEQ ID NO: 436244 - DNA, 120 bp, Artificial Sequence
  ENSG00000153029_57 (sequence is synthesized)
gcaactcagtaaatactttttgaatgaactagtatagtattttaattagctagtcttcatgtactggtacaaaagaacagtgtcatcttacagctgaagtcatagaggggaaatatccca

SEQ ID NO: 436245 - DNA, 120 bp, Artificial Sequence
  ENSG00000153029_58 (sequence is synthesized)
ctcaagatcatataacattccaggtactcaggatgaatggtttgaggactggtctgaattcttcaaaggtttcagctgtattaacattctccatctaataaactttatcttgtcattgca

SEQ ID NO: 436246 - DNA, 120 bp, Artificial Sequence
  ENSG00000153029_59 (sequence is synthesized)
agaatcttctgtaggcctttctcttgccttcttttattcacaactgatgacactgcatatcttcccctgttcttattgggagaaggccttgtgtgtcaccaagaggttctcagaagggac

SEQ ID NO: 436247 - DNA, 120 bp, Artificial Sequence
  ENSG00000153029_60 (sequence is synthesized)
ttcccccatcccaccccaacccgcagagacccctgggctggcctccaataagcggatgctgaattgcacctgctgtagctttggcaaagcctgaggaatcaggttggtggagttcagggc

SEQ ID NO: 436248 - DNA, 120 bp, Artificial Sequence
  ENSG00000153029_61 (sequence is synthesized)
ctcccatctgcctgtgcatcttctggactgtccctctctcccccaggagcactctgtcatttgccccacccactcttccccatctctgtatccgtatctgcatcccatttccactcaggc

SEQ ID NO: 436249 - DNA, 120 bp, Artificial Sequence
  ENSG00000153029_62 (sequence is synthesized)
ttctgatatgcatctccttttccattctaaatttgcccattctgcgtctcacttcctggtagtcaggcctagtgacttgcttatgagtatcgacagtaactttcccaggggtatttctgg

SEQ ID NO: 436250 - DNA, 120 bp, Artificial Sequence
  ENSG00000153029_63 (sequence is synthesized)
gggggaactgatggcgttcctgttacctctcatcattgtgttaatggtgaagcacagcgattccccctgtgtgaaactgtgaattggcgatatgggtgggtgtaatcagactgggggctg

SEQ ID NO: 436251 - DNA, 120 bp, Artificial Sequence
  ENSG00000153029_64 (sequence is synthesized)
agagaaggcctcattcccacattgcctgaacaactgtttttatacgtaactcttttaatctaggttatatccactgtatcctgaaagccatctctttagttggcctattgtgatctcatg

SEQ ID NO: 436252 - DNA, 120 bp, Artificial Sequence
  ENSG00000153029_65 (sequence is synthesized)
aactttccctggttacttttgagcagcatcttgacaagatttgacagttccccttgtcttgacagagtggagtacctccaagggcaccttgtttttagggatctattgaggcaaattctt

SEQ ID NO: 436253 - DNA, 120 bp, Artificial Sequence
  ENSG00000153029_66 (sequence is synthesized)
ccattccgtcaatgataagctgggaaattctttgggagatagagcaattcttacaaactgtttagttaacaaagggctcacacaccaccagtaggagtaaaaatctggatttaccaagac

SEQ ID NO: 436254 - DNA, 80 bp, Artificial Sequence
  ENSG00000153029_67 (sequence is synthesized)
cacaccaccagtaggagtaaaaatctggatttaccaagacaaacagaaggtctctgctttactaaaggattaatgaggtt

SEQ ID NO: 436255 - DNA, 120 bp, Artificial Sequence
  ENSG00000153029_68 (sequence is synthesized)
ttgcttaaggccaggagtttaagactggcctgggtaacattgtgagaccctgtctctattaaaaaaaaaattagctgagcatggtggcacatgactgtagtcccagatactcaggaggct

SEQ ID NO: 436256 - DNA, 120 bp, Artificial Sequence
  ENSG00000153029_69 (sequence is synthesized)
ggtcaaggctgcagtgagccatgatcatgatcagcctgggtcacagagcaagaccctatttaaaaaaaaaaaaaagtattaatgataagattcctttcagcaaagagctcctcttatacc

SEQ ID NO: 436257 - DNA, 120 bp, Artificial Sequence
  ENSG00000153029_70 (sequence is synthesized)
taccttaaagatatgattcagttggtcaacttttagttcatatagaacttttcatgtatggtcttgttattcaaaattaatcacacctgtatgatgctacaggaaactcctagatacaat

SEQ ID NO: 436258 - DNA, 120 bp, Artificial Sequence
  ENSG00000153029_71 (sequence is synthesized)
gtgtgtgggaagagtatgggaagctcccctctccaggcctctgtctacattcagtgtcctaatggattttcaaccttttggtcaaaacacactcctaaaaaaacaaacaaaaaaaaaaaa

SEQ ID NO: 436259 - DNA, 120 bp, Artificial Sequence
  ENSG00000153037_0 (sequence is synthesized)
gggctgtctcggaaactcagagccgggttcctcccgggtttctgccgggtttctccctgcggctcctgggttgttgagactcttgtgaagatggcttgcgctgccgcgcggtccccggcc

SEQ ID NO: 436260 - DNA, 120 bp, Artificial Sequence
  ENSG00000153037_1 (sequence is synthesized)
gaccaggacaggtttatttgtatctatcctgcttatttaaataataagaagaccatcgcagagggaaggcgaatccccataagtaaggctgttgaaaatcctacagctacagagattcaa

SEQ ID NO: 436261 - DNA, 120 bp, Artificial Sequence
  ENSG00000153037_2 (sequence is synthesized)
gatgtatgttcagcagttggacttaacgtatttcttgagaaaaataaaatgtactctagagaatggaatcgtgatgtccaatacagaggcagagtccgggtccagctcaaacaggaagat

SEQ ID NO: 436262 - DNA, 120 bp, Artificial Sequence
  ENSG00000153037_3 (sequence is synthesized)
gggagcctctgccttgtacagttcccatcacgtaagtcagtaatgttgtatgcagcagaaatgatacctaaactaaaaacaaggacacaaaaaacaggaggtgctgaccaaagtcttcaa

SEQ ID NO: 436263 - DNA, 120 bp, Artificial Sequence
  ENSG00000153037_4 (sequence is synthesized)
caaggagagggaagtaaaaaagggaaaggaaagaaaaagaagtaacctagtatcagcatcaagtatgtggtactactgtaagagacatgaatggagacttctaatttgtatcggagggaa

SEQ ID NO: 436264 - DNA, 120 bp, Artificial Sequence
  ENSG00000153037_5 (sequence is synthesized)
acagaagctttttgtttgcatcatttaactgaactgtgaacccttgtgcctctcatctttatcatcggagttgacagtgaaacaaatttacatcagaagtttgcatctcgcgtatatgcc

SEQ ID NO: 436265 - DNA, 120 bp, Artificial Sequence
  ENSG00000153037_6 (sequence is synthesized)
gtataaaagaatttttttgtctttcaatgcagttttttggaagaaaatatttttaaatggacaatggactgtacaataagttacttgaaataagttgtttcagataaatttcaattagat

SEQ ID NO: 436266 - DNA, 120 bp, Artificial Sequence
  ENSG00000153037_7 (sequence is synthesized)
ttaaaataaacattttgtccaccttttaagttaatgaaataaaatttgaaactgacttttgcagcttttgcttatatactaatgctaggagaggagggataattaagaataaaatatgta

SEQ ID NO: 436267 - DNA, 120 bp, Artificial Sequence
  ENSG00000153037_8 (sequence is synthesized)
gtgaaagtttccatagtgtgaggctaaaactagaagaaactgtggtaggtccttttgtgggtgggggacaggggagtctgtaaaaagccagtctgtagatgatattttaatatattattg

SEQ ID NO: 436268 - DNA, 120 bp, Artificial Sequence
  ENSG00000153037_9 (sequence is synthesized)
taatcgaatcgttcagttgttttttgacatggaaagtcctggattttaagctttaaatttgcttattttgtaggtttaagaacatgattttcatgggagttgtaaaattaactgtgcttt

SEQ ID NO: 436269 - DNA, 120 bp, Artificial Sequence
  ENSG00000153037_10 (sequence is synthesized)
agcaccttgaggtacactttccttcaacaaatgaaattggattggtgctccagaatttcagagcggtttctgaaagtagtgattttgagctatcccaattcctgttcttcctgaggcctg

SEQ ID NO: 436270 - DNA, 86 bp, Artificial Sequence
  ENSG00000153037_11 (sequence is synthesized)
aattcctgttcttcctgaggcctggtttagctcttccttgaattctgcaagctatctcatattttcagtaaattccatttttttta

SEQ ID NO: 436271 - DNA, 120 bp, Artificial Sequence
  ENSG00000153037_12 (sequence is synthesized)
tttttattgctcacagtcaaacattcctattgattgtaaaataagcaaacctagagttgtggagatttatatgtatttatttatttgaattgagacagggtcttaaactcccaggctcaa

SEQ ID NO: 436272 - DNA, 120 bp, Artificial Sequence
  ENSG00000153037_13 (sequence is synthesized)
aaagtgctgggattacaggcatgagctagctggcctgttgactttttttttttaactctaacaatttctgttttatagtgaacataatagtataagacttagtttatatatttgacttac

SEQ ID NO: 436273 - DNA, 120 bp, Artificial Sequence
  ENSG00000153037_14 (sequence is synthesized)
acttagtttatatatttgacttacaaataaatcctggggagaggggagtatgtgtaaaacataattcagagcagccttctttgagaaagtgggtgtgtttggctgtgtaacaaaacaata

SEQ ID NO: 436274 - DNA, 120 bp, Artificial Sequence
  ENSG00000153037_15 (sequence is synthesized)
aggggatgtgtttgctgtgtaacaaaacaatgaaggatttaagcaggatatttttgcctcatatgttaaatccaagtgaggttgctgtggtggttggtttagctctcagtgatgcctttt

SEQ ID NO: 436275 - DNA, 120 bp, Artificial Sequence
  ENSG00000153037_16 (sequence is synthesized)
ttgtatttttccgctctgctgtccatgacatatttctaacacctttatgattattgttcctgcttgtaaaagggctgatatttacatgagtgcaaggcaggaagaaaaggtagctgtgcc

SEQ ID NO: 436276 - DNA, 120 bp, Artificial Sequence
  ENSG00000153037_17 (sequence is synthesized)
agccacttctggcaagcagttctcccaccttagcctcccaagtagctgagaccataggcatgagatttctcaaaattcctcccagcaggctttcacttagtttcattgttgagaactgtg

SEQ ID NO: 436277 - DNA, 120 bp, Artificial Sequence
  ENSG00000153037_18 (sequence is synthesized)
acaggtccatctctagctgcaaaggaggctgagaaagtgaacacagcagtcctccttatccttggggaatacattccaagagtggatccctgaaacagcagatagtactgaaccctatat

SEQ ID NO: 436278 - DNA, 120 bp, Artificial Sequence
  ENSG00000153037_19 (sequence is synthesized)
atactatgtttttgcctatgtatatatacttgatatggtttggctgctacccaacccaaaatctcatcttgaattataatccccaaatccctatgtgttaagggtgggaccaggtggaga

SEQ ID NO: 436279 - DNA, 120 bp, Artificial Sequence
  ENSG00000153037_20 (sequence is synthesized)
taattggatcatgggggcaatttcccctgtgctgttcttgagataatgagtgactctcaggagatctgttggttttataagtgcctggcgtttcccctgcttgcagtcactccatcttgc

SEQ ID NO: 436280 - DNA, 120 bp, Artificial Sequence
  ENSG00000153037_21 (sequence is synthesized)
tttcaccatgttactcaggctggtctcaaacacctgagctcaagcaatccacccaccttgacctctggaagtgctgtgattacaggttaagaatgtctgaggggtcaggcggtgctggca

SEQ ID NO: 436281 - DNA, 120 bp, Artificial Sequence
  ENSG00000153037_22 (sequence is synthesized)
ctaaaactgaaaggtaaaagtcagaatttgcattctgaagattaatttaaagacaggactactgctcatggagagaagcagtagttctaatttctttgaggtgaatgacctctttgaaaa

SEQ ID NO: 436282 - DNA, 120 bp, Artificial Sequence
  ENSG00000153037_23 (sequence is synthesized)
cagttcccatcacgttaagaatgtctgaggggtcaggcggtgctggcaagatggctgcacttgagaagatgacgtttcccaagaagatgacatttccagagaaaccaagccacaaaaagt

SEQ ID NO: 436283 - DNA, 120 bp, Artificial Sequence
  ENSG00000153037_24 (sequence is synthesized)
acagggccgccctgaagaaggagaaacgaaagaaacgtcggcaggaacttgctcgactgagagactcaggactctcacaggaggaggaagaggacacttttattgaagaacaacaactag

SEQ ID NO: 436284 - DNA, 120 bp, Artificial Sequence
  ENSG00000153037_25 (sequence is synthesized)
aagaagagaagctattggaaagagagagggaaagattacatgaggagtggttgctgagggagcagaaggcacaagaagaattcagaataaagaaggaaaaggaagaggcggctaaaaaat

SEQ ID NO: 436285 - DNA, 120 bp, Artificial Sequence
  ENSG00000153037_26 (sequence is synthesized)
ggctagaagaacaagagagaaagttaaaggaacaatggaaagaacagcagaggaaagagagagaagaggaggagcagaaacaacaggagaagaaagaaaaagaggaagctgtgcagaaga

SEQ ID NO: 436286 - DNA, 120 bp, Artificial Sequence
  ENSG00000153037_27 (sequence is synthesized)
ccagaaccacccgtggatttcagagtaatggagaaggatcgagctaattgtcccttctacagtaaaacaggagcttgcagatttggagacagatgttcacgtaaacataatttcccaaca

SEQ ID NO: 436287 - DNA, 120 bp, Artificial Sequence
  ENSG00000153037_28 (sequence is synthesized)
tctagtcctacccttcttattaagagcatgtttacaacgtttggaatggagcagtgcaggagggatgactatgaccctgacgcaagcctggagtacagcgaggaagaaacctaccaacag

SEQ ID NO: 436288 - DNA, 120 bp, Artificial Sequence
  ENSG00000153037_29 (sequence is synthesized)
ttcctagatttctatgaggatgtgttgcccgagttcaagaacgtggggaaagtgattcagttcaaggtcagctgcaatttggaacctcacctgaggggcaatgtatatgttcagtaccag

SEQ ID NO: 436289 - DNA, 120 bp, Artificial Sequence
  ENSG00000153037_30 (sequence is synthesized)
tcggaagaagaatgccaagcagccctttctctgtttaacggacgatggtatgcaggacgacagctgcaatgtgaattctgcccagtgacccggtggaaaatggcgatttgtggtttattt

SEQ ID NO: 436290 - DNA, 120 bp, Artificial Sequence
  ENSG00000153037_31 (sequence is synthesized)
gaaatacaacaatgtccaagaggaaaacactgcaactttcttcatgtgttcagaaatcccaacaatgaattctgggaagctaatagagacatctacttgtcttcagatcagactggctcc

SEQ ID NO: 436291 - DNA, 120 bp, Artificial Sequence
  ENSG00000153037_32 (sequence is synthesized)
tcctttggcaagaactccgagaggagggagaagatgggccaccacgaccactactacagcaggcagcggggaaggagaaaccctagtccagaccacacctacaaaagaaatggggaatcc

SEQ ID NO: 436292 - DNA, 120 bp, Artificial Sequence
  ENSG00000153037_33 (sequence is synthesized)
gagagaaaaaagagtagtcatagggggaagaaatctcacaaacgcacatcaaagagtcgggagaggcacaattcaccaagcagaggaagaaataggcaccgcagctgggaccagggccgc

SEQ ID NO: 436293 - DNA, 120 bp, Artificial Sequence
  ENSG00000153037_34 (sequence is synthesized)
cggagccagagccgcaggagccaccgcagccggagccaaagttcctctaggtgccgaagtcgtgggaggaggaagtcgggtaatagagacagaactgttcagagtccccaatccaaataa

SEQ ID NO: 436294 - DNA, 120 bp, Artificial Sequence
  ENSG00000153037_35 (sequence is synthesized)
gccacgcagaaaaaggaggggttgaaaagggagtacccatctgatatctaggcagcatgaattggcctttggttccctgccacccgacccttttctcctgcctcttactgctctagtgat

SEQ ID NO: 436295 - DNA, 71 bp, Artificial Sequence
  ENSG00000153037_36 (sequence is synthesized)
gtgtggtggcaggcgtctgtaatccgaggttgcagtgagtcgacatcatgccacttcactccagcctgggt

SEQ ID NO: 436296 - DNA, 120 bp, Artificial Sequence
  ENSG00000153037_37 (sequence is synthesized)
gacagagcgagactgtgtctcaaaaaatagaatttttggactagtggaactacacagcctgctttccatatcagaccattcaatccaatgggattcactgccataatctccatgttatga

SEQ ID NO: 436297 - DNA, 120 bp, Artificial Sequence
  ENSG00000153037_38 (sequence is synthesized)
caatccaatgggattcactgccataatctccatgttatgattttaagccaggcctctcttcacctttcctattccttacatttaaagactccaaagcttgtttactgagcacagatcttg

SEQ ID NO: 436298 - DNA, 120 bp, Artificial Sequence
  ENSG00000153037_39 (sequence is synthesized)
gaaaacaggatcttcagacttgggaaagcatgacagtagatgatggaaaggtaaagactcagactagcatctagtagtctcgctacacatggatagtaatgctacgtgcatgaatgtgca

SEQ ID NO: 436299 - DNA, 120 bp, Artificial Sequence
  ENSG00000153037_40 (sequence is synthesized)
atcatgcaaaaactcaaatcagccttctgcacacacacaatggtagactaagaccttctgttaaaggtccaagcactccaaggaagccagcgccttgaggtaccctcagtatgtgcaagt

SEQ ID NO: 436300 - DNA, 120 bp, Artificial Sequence
  ENSG00000153037_41 (sequence is synthesized)
agttcgatgttactcttagttttcccagcaactctgctctagcatgccctaagtttagccagcagcagatcttactgaattataagatgttgccagaggttcagaaccttggtttttttg

SEQ ID NO: 436301 - DNA, 120 bp, Artificial Sequence
  ENSG00000153037_42 (sequence is synthesized)
agatacgcatttgcattgacccaaaatggagaattaaatgactgtatttttcactggcattagctttgtttccttggcatagtgccagttaattacagcagaccctgcaagaccacctct

SEQ ID NO: 436302 - DNA, 72 bp, Artificial Sequence
  ENSG00000153037_43 (sequence is synthesized)
agtgccagttaattacagcagaccctgcaagaccacctctctagttatttccctgtggaagccttttggttg

SEQ ID NO: 436303 - DNA, 78 bp, Artificial Sequence
  ENSG00000153037_44 (sequence is synthesized)
agtggcgtgccctgcctcaacctctcgagtagctggtactacaggcgcatgccaccgtgcccagctaattttttgtat

SEQ ID NO: 436304 - DNA, 120 bp, Artificial Sequence
  ENSG00000153037_45 (sequence is synthesized)
gacctcgtgatctgcccaccttggcctcctaatgtgcttaggattataggcgtgagccactgcaccctgctgccttttggtttttaatatccaaaattcatacaatgttttactgtagtt

SEQ ID NO: 436305 - DNA, 120 bp, Artificial Sequence
  ENSG00000153037_46 (sequence is synthesized)
taatatccaaaattcatacaatgttttactgtagttgcttatataggaaaagctatacatccccaaaatgcaatacaacattatgatatgcaggaaatgtcttgagtaacatttttgaca

SEQ ID NO: 436306 - DNA, 120 bp, Artificial Sequence
  ENSG00000153037_47 (sequence is synthesized)
gaatatcagaatccttggtggacattttgaagaatatgcagagcatcacaggggatgtgctatgtattcctgcacacagagcaattgttacttactatattaactatttggagagcagca

SEQ ID NO: 436307 - DNA, 120 bp, Artificial Sequence
  ENSG00000153037_48 (sequence is synthesized)
agtgtttttagcatctaacatcctaacatgatatttgttatatataggtattttgctgtattttattaatacttagtgaattcgttgagttttacattgacatgtaatacattaaaattt

SEQ ID NO: 436308 - DNA, 120 bp, Artificial Sequence
  ENSG00000153037_49 (sequence is synthesized)
ggattatcaagagagagacagatgtccatattaaaaccagagcattaaggtgaagtgaaaatgactcattggattaagaatcaggagaggtggggctgggcgcagtggcttacgcctgta

SEQ ID NO: 436309 - DNA, 62 bp, Artificial Sequence
  ENSG00000153037_50 (sequence is synthesized)
gaaaaaaaatagccgggcattgtggtgggcacccgtagtcccagccactcaggaggctgagg

SEQ ID NO: 436310 - DNA, 120 bp, Artificial Sequence
  ENSG00000153037_51 (sequence is synthesized)
aaaaaaatcaggagaggtggggtgtgttttatgactttaggcaaatcaacctaagagacagttttctcttctgcagagttttaggaaagtcacaaattaatgtacttgaagaaagtgtac

SEQ ID NO: 436311 - DNA, 120 bp, Artificial Sequence
  ENSG00000153037_52 (sequence is synthesized)
aatagaatagtagtattaccaaatcctaaagttcttattgtggaaaatctctgaaatattacctgcctatgtagatgccaacccttcagcaatccagacaagcttattatcttttctgga

SEQ ID NO: 436312 - DNA, 120 bp, Artificial Sequence
  ENSG00000153037_53 (sequence is synthesized)
tgaattaagtgtccacagttttgtacctcttcaatgtgattactttgtaggctagactgcagactgttaattgactactttctggtaccctctagctattgtcttgagacagtaaaataa

SEQ ID NO: 436313 - DNA, 120 bp, Artificial Sequence
  ENSG00000153037_54 (sequence is synthesized)
ttactgctctctagctacatccttagcattttcctgttctgaaatgaaatcattttcttatgttaaaaataaagttaattactgttcaactcccaaggtgatattcagctgccacctctt

SEQ ID NO: 436314 - DNA, 120 bp, Artificial Sequence
  ENSG00000153037_55 (sequence is synthesized)
acaaccctctcttcttaatctgtgtaactattctacagcccaggaatagcctgagtttattaaagtcacccacacagatctggctcttttcaatcaagctgccctcaaagtgccagctga

SEQ ID NO: 436315 - DNA, 120 bp, Artificial Sequence
  ENSG00000153037_56 (sequence is synthesized)
tgatactcccaaggagactcacaagcccactgctgcctgcagttcagacagagtccatgctattttaactggactcttggcactattagcactgacacaatgactccttaaattacgaat

SEQ ID NO: 436316 - DNA, 120 bp, Artificial Sequence
  ENSG00000153037_57 (sequence is synthesized)
tacaacaggccattctattccgtctgtgcttctaatgctgtcaccatgtgattttcccccagaagagatatttcccaggtaggggtatgcttaacatgcagttacggaactgagagttaa

SEQ ID NO: 436317 - DNA, 120 bp, Artificial Sequence
  ENSG00000153037_58 (sequence is synthesized)
tgtcagaagaaagcttttgcagtgtagccacagaatagttacaggctacattgctcagcatgcacaaataaaagcttaaaagaacgtgttaaaggaaagatttccctgtctttttagcct

SEQ ID NO: 436318 - DNA, 84 bp, Artificial Sequence
  ENSG00000153037_59 (sequence is synthesized)
agaacgtgttaaaggaaagatttccctgtctttttagcctcctacgaacattaagaagaaaaatgttgcgaggcacagtggctt

SEQ ID NO: 436319 - DNA, 120 bp, Artificial Sequence
  ENSG00000153037_60 (sequence is synthesized)
agtacaggttgcagtgagcagagatcacgccacttcactccactccagcctgagtgaaatagcgaaactccatctcaaaaaaaagaaaaaagaaaagaaaaatgttatattctctgtcaa

SEQ ID NO: 436320 - DNA, 120 bp, Artificial Sequence
  ENSG00000153037_61 (sequence is synthesized)
tgggtgaaatagcacaggtgacaattcaggtcaggacctaatcttgccagagtttactcaaccttgttctaaaaataaatctagccaggcctggtggctcacgcctgtaattgcagcact

SEQ ID NO: 436321 - DNA, 60 bp, Artificial Sequence
  ENSG00000153037_62 (sequence is synthesized)
gagacaggagaatcacttgaacctgggaaagaggttacagtgagctaaagtaaatctaga

SEQ ID NO: 436322 - DNA, 120 bp, Artificial Sequence
  ENSG00000153037_63 (sequence is synthesized)
aaaagtaaagtaaatctagaaaatgatttaaatgaaggtaaacagaggatacaaagatattaattgcagcattatgtataatcgcatgacaaatgtcctcaatgtctttcaattgggaag

SEQ ID NO: 436323 - DNA, 120 bp, Artificial Sequence
  ENSG00000153037_64 (sequence is synthesized)
taggtaaattatcaataacattagatagctatgtcaaaaaatactgaataacatgagaaaatactcagaatactgtgttaattgaaaaaagcaagacacagaattatatatcatatgtga

SEQ ID NO: 436324 - DNA, 120 bp, Artificial Sequence
  ENSG00000153037_65 (sequence is synthesized)
tctaagccacacatatgttaagacagcaatacatacatatatatatacacatacacacagagttctgtttttatttatatacacagaccaatatatttgcacattttaaaaaataggaag

SEQ ID NO: 436325 - DNA, 120 bp, Artificial Sequence
  ENSG00000153037_66 (sequence is synthesized)
acacagaccaatatatttgcacattttaaaaaataggaagactactctaagatgtaggattacaaatgttattttcctccctacataaaacacatcccatcacacacacacacacacaca

SEQ ID NO: 436326 - DNA, 120 bp, Artificial Sequence
  ENSG00000153037_67 (sequence is synthesized)
caacaaggactttgttttattcgccaaagtatctcccagatgtagaacagaatctggcacatggaggttctaaataaatctgctgaataaaggaatgagcatatgtaaatttcataatca

SEQ ID NO: 436327 - DNA, 120 bp, Artificial Sequence
  ENSG00000153037_68 (sequence is synthesized)
agaaaaaaagcttttaaatttatttttaaaccctcttgctcaaggccagatgtcagagcaaagctcagaatatgcatgatccaatttctacctaaatacatcatatattatcttctcaac

SEQ ID NO: 436328 - DNA, 120 bp, Artificial Sequence
  ENSG00000153037_69 (sequence is synthesized)
taagctttgatgccaagccattggctccttttattttcctccaatcttatcagctgctttagaaaaatgaaaataaagccaacaatattaactctgcaaaaaataaaatattaaacatgt

SEQ ID NO: 436329 - DNA, 120 bp, Artificial Sequence
  ENSG00000153037_70 (sequence is synthesized)
cagcctgggtgacagagcaacactctgtcccaaaaaacaaaaaacaaaacaaacccatgtccttacttgtaagtctctttcccacacttccagtcagcatgcgattgcaacagcataggt

SEQ ID NO: 436330 - DNA, 120 bp, Artificial Sequence
  ENSG00000153037_71 (sequence is synthesized)
ttgcaacagcataggtaagatggattctagtccctaaaattcaatactctcctgaaccttctcctacagacgagactctgcaattcagaggcctcttctcagtctgttcactaggtcatt

SEQ ID NO: 436331 - DNA, 120 bp, Artificial Sequence
  ENSG00000153037_72 (sequence is synthesized)
cagagtatgccactaatgtaggaagaaagtattttgattgacagcatcatgaatgtttaatcctttcaagtatgttatctatttggaatgtatgcaataaattcactttcatgaacacta

SEQ ID NO: 436332 - DNA, 120 bp, Artificial Sequence
  ENSG00000153037_73 (sequence is synthesized)
ctggaagtctgtcattgctcccaggttaagaatataaaattattaaatcgttggatgttaattgccatttcagatcctagaggtccttgaggtctgttaatatctataatatctaatgat

SEQ ID NO: 436333 - DNA, 120 bp, Artificial Sequence
  ENSG00000153037_74 (sequence is synthesized)
tctatcattaataaatctgaaaagcaatattgactgaaaaaagcaagagatatacatagtgtggtaccacttaggtaaatttaaatacaaaatattactatttattgatagatgcatatg

SEQ ID NO: 436334 - DNA, 120 bp, Artificial Sequence
  ENSG00000153037_75 (sequence is synthesized)
cgggttcctcccgggtttctgccgggtttctccctgcggctcctgggttgttgagactcttgtgaagatggcttgcgctgccgcgcggtccccggccgaccaggacaggctgttgaaaat

SEQ ID NO: 436335 - DNA, 120 bp, Artificial Sequence
  ENSG00000153044_0 (sequence is synthesized)
cttttctgagcgcgtttgcctgttgagtggtagcctttcccctcaaccagcaatggaggagcagccccagatgcaagacgccgacgagcccgcggactccggaggggaaggccgggcagg

SEQ ID NO: 436336 - DNA, 120 bp, Artificial Sequence
  ENSG00000153044_1 (sequence is synthesized)
cgggccaccgcaggtcgccggcgcccaggcggcgtgcagcgaggaccgcatgaccctgctcctcaggctgagagcacagacaaaacaacaactcttagaatataaatcaatggttgatgc

SEQ ID NO: 436337 - DNA, 120 bp, Artificial Sequence
  ENSG00000153044_2 (sequence is synthesized)
aagtgaagaaaaaactccagaacaaattatgcaagaaaagcaaatcgaagctaaaattgaagacctggaaaatgaaattgaagaggtaaaagttgcttttgagataaaaaagcttgcatt

SEQ ID NO: 436338 - DNA, 120 bp, Artificial Sequence
  ENSG00000153044_3 (sequence is synthesized)
agacaggatgagactttcaactgcacttaaaaaaaacctggagaaaattagcagacagtctagtgtgctcatggataacatgaaacacctattagagctaaataaattaataatgaaatc

SEQ ID NO: 436339 - DNA, 120 bp, Artificial Sequence
  ENSG00000153044_4 (sequence is synthesized)
acagcaggaatcttgggatttagaggaaaaactgcttgatattagaaagaagagattgcaattaaaacaagcttcagaaagtaagcttttagaaatacagactgaaaagaacaaacagaa

SEQ ID NO: 436340 - DNA, 120 bp, Artificial Sequence
  ENSG00000153044_5 (sequence is synthesized)
ataaagatcatacgacaaaacctacagatggagataaaaattactactgttattcaacatgtgttccagaaccttattttggggagtaaagtcaattgggcagaggatcctgcccttaag

SEQ ID NO: 436341 - DNA, 120 bp, Artificial Sequence
  ENSG00000153044_6 (sequence is synthesized)
gaaattgttctgcagcttgagaagaatgttgacatgatgtaataagaattcatttctgacatattttacatttctggcaatctcaactcttatttggaatacttctgtgcatttgtctgt

SEQ ID NO: 436342 - DNA, 120 bp, Artificial Sequence
  ENSG00000153044_7 (sequence is synthesized)
ccaccgtaattttagaaaagcatatccataacgtttacagttgtagtacagttgtggttagttatttgtagtgggattgaaagtaatttttttctttttatatttctatatttagtttgt

SEQ ID NO: 436343 - DNA, 64 bp, Artificial Sequence
  ENSG00000153044_8 (sequence is synthesized)
ctctcagaactcctgagctcaggcagtccaccgcctcggcctaccgaagtgctaggattacaga

SEQ ID NO: 436344 - DNA, 120 bp, Artificial Sequence
  ENSG00000153044_9 (sequence is synthesized)
agtccaccgcctcggcctaccgaagtgctaggattacagacgtaagccaccgagcctggtctagtttgcattttttttctatcagttttataagttaagaaataaaaggaattaatgtta

SEQ ID NO: 436345 - DNA, 89 bp, Artificial Sequence
  ENSG00000153044_10 (sequence is synthesized)
actgcactccagcctaggcaacaataaatgtttatatgtttcatttttgtaatttaagagggaaaaatatatgtatttcctacctattt

SEQ ID NO: 436346 - DNA, 120 bp, Artificial Sequence
  ENSG00000153044_11 (sequence is synthesized)
taatttaagagggaaaaatatatgtatttcctacctattttggcaacccaaaataagccctcattacatgatgccacttgaaacatctgtagacagctgttattgtcatacagaaatacc

SEQ ID NO: 436347 - DNA, 120 bp, Artificial Sequence
  ENSG00000153044_12 (sequence is synthesized)
tggaacatttcactaagggcattgctaagtacgaaattaaaatattgttattttgcaccagggaagtcattttcagatcgtaataaagttgcaacctaaaatgctgcttattaaaatttt

SEQ ID NO: 436348 - DNA, 120 bp, Artificial Sequence
  ENSG00000153044_13 (sequence is synthesized)
ttgactaaaataaccaagaagtgatctgcttcataatttttcaagatccttgtttatagaggtattatatatggtatattattttatttttaacctaacagaattaaaacaagcttcaga

SEQ ID NO: 436349 - DNA, 120 bp, Artificial Sequence
  ENSG00000153044_14 (sequence is synthesized)
aggatgggatctgcatagtgactttagttttgtgaattttaaaaaattattactgccaactacctttgtctggggaataaggaaagtgatgaaatttttgtaggtcctccccagaattac

SEQ ID NO: 436350 - DNA, 120 bp, Artificial Sequence
  ENSG00000153044_15 (sequence is synthesized)
agcaacttttatagttctaattatattttgttccgtatggattgtaactgtaagaagcagaagagtttatccagaagattggaaaattttaagggaaagctttaaaagttcattttcttc

SEQ ID NO: 436351 - DNA, 120 bp, Artificial Sequence
  ENSG00000153044_16 (sequence is synthesized)
agtatttactataaatcaggaacagggctatctcatttaatccatccaaaacacagtgagataggaaatatactcctcattttttattggtagaaatgagcttattcggatccaacaatt

SEQ ID NO: 436352 - DNA, 80 bp, Artificial Sequence
  ENSG00000153046_0 (sequence is synthesized)
ggtcgcaagtaggaagctttctgcactacaccggagaggggagccgcgatccggccgcgccgcccgcacgccgccgcgcc

SEQ ID NO: 436353 - DNA, 80 bp, Artificial Sequence
  ENSG00000153046_1 (sequence is synthesized)
ccgagcgcgagccggcccgccggggagtgagcgcggggcgcccagggcgcgttgcgtagctgctcctgcgcacaaccccg

SEQ ID NO: 436354 - DNA, 120 bp, Artificial Sequence
  ENSG00000153046_2 (sequence is synthesized)
caagaggctcgtccgtgcccagcgcccggccggccgcgggagcaggaagcgcaggccacgcaggacccaactgaaacaaagtgtcggccgcccggcgccggcgcccgccccgaccctgcc

SEQ ID NO: 436355 - DNA, 120 bp, Artificial Sequence
  ENSG00000153046_3 (sequence is synthesized)
ccgcaactccgccgcccaccatggcttccgaggagctgtacgaggttgaaaggattgttgacaaaaggaaaaataaaaaagggaagacagagtatttggttcggtggaaaggctatgaca

SEQ ID NO: 436356 - DNA, 120 bp, Artificial Sequence
  ENSG00000153046_4 (sequence is synthesized)
gcgaggacgacacttgggagccggaacagcacctcgtgaactgtgaggaatacatccacgacttcaacagacgccacacggagaagcagaaggagagcacattgaccagaacaaacagga

SEQ ID NO: 436357 - DNA, 120 bp, Artificial Sequence
  ENSG00000153046_5 (sequence is synthesized)
cctctcccaacaatgctaggaaacaaatctccagatccaccaacagcaacttttctaagacctctcctaaggcactcgtgattgggaaagaccacgaatccaaaaacagccagctgtttg

SEQ ID NO: 436358 - DNA, 120 bp, Artificial Sequence
  ENSG00000153046_6 (sequence is synthesized)
ctgccagccagaagttcaggaagaacacagctccatctctctccagccggaagaacatggacctagcgaagtcaggtatcaagatcctcgtgcctaaaagccccgttaagagcaggaccg

SEQ ID NO: 436359 - DNA, 120 bp, Artificial Sequence
  ENSG00000153046_7 (sequence is synthesized)
cagtggacggctttcagagcgagagccctgagaaactggaccccgtcgagcagggtcaggaggacacagtggcacccgaagtggcagcggaaaagccggtcggagctttattgggccccg

SEQ ID NO: 436360 - DNA, 120 bp, Artificial Sequence
  ENSG00000153046_8 (sequence is synthesized)
gtgccgagagggccaggatggggagcaggcccaggatacacccactagtgcctcaggtgcccggccctgtgactgcagccatggccacaggcttagctgttaacgggaaaggtacatctc

SEQ ID NO: 436361 - DNA, 120 bp, Artificial Sequence
  ENSG00000153046_9 (sequence is synthesized)
cgttcatggatgcattaacagccaatgggacaaccaacatacagacatctgttacaggagtgactgccagcaaaaggaaatttattgacgacagaagagaccagccttttgacaagcgat

SEQ ID NO: 436362 - DNA, 120 bp, Artificial Sequence
  ENSG00000153046_10 (sequence is synthesized)
tgcgtttcagcgtgaggcaaacagaaagtgcctacagatacagagatattgtggtcaggaagcaggatggcttcacccacatcttgttatccacaaagtcctcagagaataactcactaa

SEQ ID NO: 436363 - DNA, 120 bp, Artificial Sequence
  ENSG00000153046_11 (sequence is synthesized)
atccagaggtaatgagagaagtccagagtgctctgagcacggccgctgccgatgacagcaagctggtactgctcagcgccgttggcagcgtcttctgttgtggacttgactttatttatt

SEQ ID NO: 436364 - DNA, 120 bp, Artificial Sequence
  ENSG00000153046_12 (sequence is synthesized)
ttatacgacgtctgacagatgacaggaaaagagaaagcactaaaatggcagaagctatcagaaacttcgtgaatactttcattcaatttaagaagcccattattgtagcagtcaatggcc

SEQ ID NO: 436365 - DNA, 120 bp, Artificial Sequence
  ENSG00000153046_13 (sequence is synthesized)
cagccattggtctaggagcatctatattgcctctttgcgatgtggtttgggctaatgaaaaggcttggtttcaaacaccctataccaccttcggacagagtccagatggctgttctaccg

SEQ ID NO: 436366 - DNA, 120 bp, Artificial Sequence
  ENSG00000153046_14 (sequence is synthesized)
ggagcatctgcaaacgagatgctgctcagtggacggaagctgacagcgcaggaggcgtgtggcaagggcctggtctcccaggtgttttggcccgggacgttcactcaggaagtgatggtt

SEQ ID NO: 436367 - DNA, 120 bp, Artificial Sequence
  ENSG00000153046_15 (sequence is synthesized)
cgcattaaggagcttgcctcgtgcaatccagttgtgcttgaggaatccaaagccctcgtgcgctgcaacatgaagatggagctggagcaggccaacgagagggagtgtgaggtgctgaag

SEQ ID NO: 436368 - DNA, 120 bp, Artificial Sequence
  ENSG00000153046_16 (sequence is synthesized)
aaaatctggggctcggcccaggggatggactccatgttaaagtacttgcagaggaagatcgatgagttctgagtgtcgggctgcccactggtgacaccgggatcgggctgagcaggagaa

SEQ ID NO: 436369 - DNA, 120 bp, Artificial Sequence
  ENSG00000153046_17 (sequence is synthesized)
catcaccggctccagttcccctgatccattctcacagcctgaaacaagctcacccgtagcttacgcttggaagcaggactgggaacatccacgctatttattatcgaggagttttaaagt

SEQ ID NO: 436370 - DNA, 120 bp, Artificial Sequence
  ENSG00000153046_18 (sequence is synthesized)
actgtaactttaaaataaataactacaaagcttctttgtccaaacgtcattattttatacttatatacacgcaggtgtaaaagtataaaggtgagcactagactgctcttagaagctcta

SEQ ID NO: 436371 - DNA, 120 bp, Artificial Sequence
  ENSG00000153046_19 (sequence is synthesized)
atttttgttttctttggctagtactgtataaaaaacagaattgtgttttattggttttggatgacagaaaagtctggaataatgtttgttttcctcatttcttccttctagaacacagaa

SEQ ID NO: 436372 - DNA, 120 bp, Artificial Sequence
  ENSG00000153046_20 (sequence is synthesized)
tctaaaggggtattagccagcctcgcctccctgccccacgtagagacacagagtgatgtgaggcgttggctttttctccaagaaggtacagatacctcagattcgggaaactcaaaatca

SEQ ID NO: 436373 - DNA, 120 bp, Artificial Sequence
  ENSG00000153046_21 (sequence is synthesized)
aaagacttagcttctaggataaatacttctgatgaaaaatccgctgaggagcataccccaaaccagacatatgcttaggattcatgctgagatatcaattggtttccccttctttttaaa

SEQ ID NO: 436374 - DNA, 120 bp, Artificial Sequence
  ENSG00000153046_22 (sequence is synthesized)
atacgtccagttcttacccagttaacatgaagaaaccactgtctctagaagaaagcttgttttgcagtattagtgaatcactgaatagcttaagtatgactatctaagttataagttagt

SEQ ID NO: 436375 - DNA, 120 bp, Artificial Sequence
  ENSG00000153046_23 (sequence is synthesized)
ctttagtgggttttaaatagtttttctgacccttctgaaaaataactacataagtgcttcttgttgctgggtgagaaatactactttatagacagttttggttttctgtttgcagatatg

SEQ ID NO: 436376 - DNA, 120 bp, Artificial Sequence
  ENSG00000153046_24 (sequence is synthesized)
ttttatgtttataaagtgtaatttttaggttcacttagaatatattttatttaataagttaaaattcttttggcacactattaaatgcaaaaactcctttcaaaacaaaaaagaactacc

SEQ ID NO: 436377 - DNA, 120 bp, Artificial Sequence
  ENSG00000153046_25 (sequence is synthesized)
actcctttcaaaacaaaaaagaactaccttatattcaacatttaatgttcttggcctctgcttttatgtctatacaatatactgagttcagtatggtgtccaagagtgccctgtgtggat

SEQ ID NO: 436378 - DNA, 120 bp, Artificial Sequence
  ENSG00000153046_26 (sequence is synthesized)
agacatgtgcactccttccaggagtgggtactgattccagactccagatgcctattattagttaggcttctgagcttgcaatcatattgaatgtatgaagagcgaaatcaaattcttatt

SEQ ID NO: 436379 - DNA, 120 bp, Artificial Sequence
  ENSG00000153046_27 (sequence is synthesized)
tttgtacagttttgaagtttatacttagaactgaccacctccccggccacgcggagagctgtacagtgtgtaaatctgcctttatcttggattgattggtacagtatttttgcatctgtg

SEQ ID NO: 436380 - DNA, 120 bp, Artificial Sequence
  ENSG00000153046_28 (sequence is synthesized)
ggacctaccttttcgttcagtagtttgaactatatataaactgtacaatctgtaaagtttttatagaataaatattcagctgtgaaaactggttaaataaaactaatatttcttaacaca

SEQ ID NO: 436381 - DNA, 120 bp, Artificial Sequence
  ENSG00000153046_29 (sequence is synthesized)
tcccgagatgggaagaggctgtgattcttgatctgaagagtcttatcgtcggtagaacttgccatcgatgatcaattgtttggatttgaggaggagagaattgaattatgttggcctaca

SEQ ID NO: 436382 - DNA, 120 bp, Artificial Sequence
  ENSG00000153046_30 (sequence is synthesized)
cgagggcccaacccaaaagttattcctgaagagaaacaacgggcctgagcagtagcctgcctgatgatgatcaagcagagccctgcaagtttcaagaggaatgtcagtgactcttcactg

SEQ ID NO: 436383 - DNA, 120 bp, Artificial Sequence
  ENSG00000153046_31 (sequence is synthesized)
aaaccccccagtgtcagcaccagatgggccttcagaccccagcatctccgtgagcagtgagcaaagcggggcacagcagcctcccgctttacaggttgaaaggattgttgacaaaaggaa

SEQ ID NO: 436384 - DNA, 120 bp, Artificial Sequence
  ENSG00000153046_32 (sequence is synthesized)
ggagagaggacctatttctacctaaggacattcccggaaggcaatgggtttcaaacaatatcctgaagagactcatctcggggaactaagcaggtggtcatcagagaacacagagccccc

SEQ ID NO: 436385 - DNA, 120 bp, Artificial Sequence
  ENSG00000153046_33 (sequence is synthesized)
ggaagaattttatgacatttcaggcaagccacaggtcagcctggggaaaaagcaggaagaaaaactggcaatacgagggcccaacccaaaagttattcctgaagagaaacaacgtgtcag

SEQ ID NO: 436386 - DNA, 120 bp, Artificial Sequence
  ENSG00000153046_34 (sequence is synthesized)
ttggctcctccccaaggcttaggtttctaagtcagccacaaatgctacccaaaactacataaagaagaaaaaagttgcatagaaccaaaaagttgaaaggattgttgacaaaaggaaaaa

SEQ ID NO: 436387 - DNA, 120 bp, Artificial Sequence
  ENSG00000153046_35 (sequence is synthesized)
ggttaaggagggaggggaaacaaaagcagtgtgctccaccaggctcctgcctcggctctaaggaaacagaggaaagcaaacgggaatactctggtttagtatactgcccgcttctggagt

SEQ ID NO: 436388 - DNA, 120 bp, Artificial Sequence
  ENSG00000153048_0 (sequence is synthesized)
agtcggagcgaagcggctggcggagcagaacggattgcagggtcagccatgtcatctgagcctcccccaccaccacagccccccacccatcaagcttcagtcgggctgctggacacccct

SEQ ID NO: 436389 - DNA, 120 bp, Artificial Sequence
  ENSG00000153048_1 (sequence is synthesized)
cggagccgtgagcgctcaccatcccctctgcggggcaacgtggtcccaagcccactgcccactcgccggacgaggaccttctcggcgacggtgcgggcttcacagggccccgtctacaaa

SEQ ID NO: 436390 - DNA, 120 bp, Artificial Sequence
  ENSG00000153048_2 (sequence is synthesized)
ggagtctgcaaatgcttctgccggtccaagggccatggcttcattactccagctgatggcggccccgacatcttcctgcacatctctgatgtggaaggggagtatgtcccagtggaaggc

SEQ ID NO: 436391 - DNA, 120 bp, Artificial Sequence
  ENSG00000153048_3 (sequence is synthesized)
gacgaggtcacctataaaatgtgctccatcccacccaagaatgagaagctgcaggccgtggaggtcgtcatcactcacctggcaccaggcaccaagcatgagacctggtctggacatgtc

SEQ ID NO: 436392 - DNA, 120 bp, Artificial Sequence
  ENSG00000153048_4 (sequence is synthesized)
atcagctcctaggagatggtggaagcaccccttgtcctgtgcttgtgggagactttgcagggaggaggcagcagacactggagatgacattcttccacacgagacggggcttcagccggg

SEQ ID NO: 436393 - DNA, 120 bp, Artificial Sequence
  ENSG00000153048_5 (sequence is synthesized)
catggtccctctcaagtatctcctggaggaaggggtatggggggcaggtgtggggtgtggggtgttcccggccatcagcacagcctatgaccattgcaacaacctctcaccatctgaaga

SEQ ID NO: 436394 - DNA, 120 bp, Artificial Sequence
  ENSG00000153048_6 (sequence is synthesized)
gcattaaaagcatttaaaaaggagaggtgcccactggtggctgagtggaggttccaaccccatcccagggagtggatcaagggtggtatttctccagctgctcagacacatgggctcaac

SEQ ID NO: 436395 - DNA, 120 bp, Artificial Sequence
  ENSG00000153048_7 (sequence is synthesized)
ccacagaatccctcttcctcctggagctggaggccccagattcccagatctggccccctggcagcctgacagggaccttgcgtgacttctccaaggcaaatttccacctaagtgcccctt

SEQ ID NO: 436396 - DNA, 120 bp, Artificial Sequence
  ENSG00000153048_8 (sequence is synthesized)
gcgcctctcctggggcctgggcaaagcagttttctaattcttggcttggttggttctaggggagctggcttgaagtgggtggggaaaggcgggggtggcggtctttggattggacggatg

SEQ ID NO: 436397 - DNA, 120 bp, Artificial Sequence
  ENSG00000153048_9 (sequence is synthesized)
ttgccttttggtgcctttgcagtgggaggcggcatagctgcctgtctggggaagacagttctcccagcactcccacccctgggcacagcaggctggtactgggaggctgaacccctctta

SEQ ID NO: 436398 - DNA, 120 bp, Artificial Sequence
  ENSG00000153048_10 (sequence is synthesized)
gagcctgaccttttcatctgccttctggttgtgtgaccatcactcaacagccatttcacagcccctgtaattatggcggcggggggctggggtggtggtggtgggaagggcttgtggaga

SEQ ID NO: 436399 - DNA, 120 bp, Artificial Sequence
  ENSG00000153048_11 (sequence is synthesized)
agcctggcaaagtcaagaaagttgaaggagaaacatacctttggagagggggttttctttaaaactagtgttaagaaatgcttagggattttttttttcttatttttcataactaaagct

SEQ ID NO: 436400 - DNA, 120 bp, Artificial Sequence
  ENSG00000153048_12 (sequence is synthesized)
ttttttcttatttttcataactaaagctttcacccagagccggctctgtttgcactttgctgccgacattgcaaactttttggcagggtgggagactgagtctcattctgtcacccaggc

SEQ ID NO: 436401 - DNA, 67 bp, Artificial Sequence
  ENSG00000153048_13 (sequence is synthesized)
tggagtgcagtggcccgatctcagcttactgcaacctctgccctccagggttctggcaattttaatt

SEQ ID NO: 436402 - DNA, 79 bp, Artificial Sequence
  ENSG00000153048_14 (sequence is synthesized)
tttagtagagaccaggtttcatcatgttgggcaggatggtcttgaacccctgacctcagatgatctgcccacgcgcccg

SEQ ID NO: 436403 - DNA, 120 bp, Artificial Sequence
  ENSG00000153048_15 (sequence is synthesized)
gtatttctggtaaacaaatccttaggttatctttgctgtggttgtggtttggctttagtcatgatttcaaagtagaaatagctaggcattattttttgaaatatatgacctatatgtagt

SEQ ID NO: 436404 - DNA, 120 bp, Artificial Sequence
  ENSG00000153048_16 (sequence is synthesized)
caagaatccactgaacagaggcaagcaaaccttttggaaactggcttttgggcagacagtaaacgtccagtttgatgctggaagcatgaacagcttcatcaggtaggtactcctcaactc

SEQ ID NO: 436405 - DNA, 120 bp, Artificial Sequence
  ENSG00000153048_17 (sequence is synthesized)
tgatgagtttgtcctttcagcctaagggggtggaagggagttgtttgagaatagcaaatacgcatgttgattgcgagtgtgtggagacaaaggcagttcccaccacagttaggtcctggc

SEQ ID NO: 436406 - DNA, 120 bp, Artificial Sequence
  ENSG00000153048_18 (sequence is synthesized)
cattgtttcctcgcctgcgatgctccttgtacatcctcaccctcctctcccgcctctgccttctgctgggtcaaaggtggccttttctctccagccttgaattgttccctgttggcttcc

SEQ ID NO: 436407 - DNA, 120 bp, Artificial Sequence
  ENSG00000153048_19 (sequence is synthesized)
caagggcccatctgctggtacagtccacacttccacagccaagacccgagagggctttcactgccccaagcctctctcctgtgaccctgggattctgtcttggcagaatcctttgtcagc

SEQ ID NO: 436408 - DNA, 120 bp, Artificial Sequence
  ENSG00000153048_20 (sequence is synthesized)
ggctcttactctgtccttcctgtttggccacagctctttcaatcaatgggtattctagaaccgcaggatgtcagagctggaagggacgcgataccggtttacacaaggggaaactcctcg

SEQ ID NO: 436409 - DNA, 120 bp, Artificial Sequence
  ENSG00000153048_21 (sequence is synthesized)
aggctctgggagggacggagggttttggtgacagagcgagagctaaaattgaggattcctgaatccagatcttgcctcccatcagccatctttctcccaataaatttttgttttgtgcaa

SEQ ID NO: 436410 - DNA, 120 bp, Artificial Sequence
  ENSG00000153048_22 (sequence is synthesized)
ggtgccttaggcgctggagaaaaacttcacccgcgcccacaggccccctttccgcaggctgcgctggcggttcaggtttgcaggccggaagtgaaatgttcttttttgatttttaaaaag

SEQ ID NO: 436411 - DNA, 120 bp, Artificial Sequence
  ENSG00000153048_23 (sequence is synthesized)
gaagcctccggccctatggttttctggggttggagtggatgtgtgtgctgggggaggcggagacgtcccgctccaggcagggccttgggtcttaataggtggggaaatctctgccaaata

SEQ ID NO: 436412 - DNA, 120 bp, Artificial Sequence
  ENSG00000153048_24 (sequence is synthesized)
ggaggcctctcggagcctcagtttccccatctgcagactgggctctgacttcttctggcatgagagggtgtgtgagagtaaaaggaggcagctagccccgtgccgggagacacgtcagcc

SEQ ID NO: 436413 - DNA, 120 bp, Artificial Sequence
  ENSG00000153048_25 (sequence is synthesized)
attctaggactctatgacctgtgctggtaggtcatgcgggggccctggcccccaggccagcagctggggcctttttgaggtgggggctccccggactcaggagttcctccttggccgcgg

SEQ ID NO: 436414 - DNA, 120 bp, Artificial Sequence
  ENSG00000153048_26 (sequence is synthesized)
gctctcagtcggagcgaagcggctggcggagcagaacggattgcaggcaggccccccagtcctgggtgcaggcttgtgacagctgctcagggatccaaacgtggcgcttgagctctctgc

SEQ ID NO: 436415 - DNA, 120 bp, Artificial Sequence
  ENSG00000153048_27 (sequence is synthesized)
acttcccgcctggccacctgttctctgcgtgcaggggaagctcttcccgccctccccgctgcttttgcctttgggcgggagccctggacgggggactcgccgggcggtggggcgaggcgc

SEQ ID NO: 436416 - DNA, 120 bp, Artificial Sequence
  ENSG00000153048_28 (sequence is synthesized)
gtggactgagcccgccgtgcgcttggcattttcgcggcaccatctgcacagcgtccgagccctgcgacgcagcaccgctcctgtcccctttgacagatgaggaaactcgggtggggcggt

SEQ ID NO: 436417 - DNA, 120 bp, Artificial Sequence
  ENSG00000153048_29 (sequence is synthesized)
ggtggcctggctggggtgggcgcttccttggccctgtggaggtggggatggtgtgtgactctgatgggcgctgggtgtgaggacgaatggctgggcctgtgtgactctgcctgtggctgg

SEQ ID NO: 436418 - DNA, 120 bp, Artificial Sequence
  ENSG00000153048_30 (sequence is synthesized)
tgctccagctgtgctcctgtgtgtgtgttgggttggggttgtgagactctacggagctgtgttgggggatgtgaggctgggggcgacacggtacttgtgattgtccctgggtgtgtcttt

SEQ ID NO: 436419 - DNA, 120 bp, Artificial Sequence
  ENSG00000153048_31 (sequence is synthesized)
attgtcgtctaagtccccaacttctcagcagggcttcctgttatcttccgccactaccttctccagcctctctctgcctctgttctccctcccttcgggcctttggccctcctctgggct

SEQ ID NO: 436420 - DNA, 120 bp, Artificial Sequence
  ENSG00000153048_32 (sequence is synthesized)
ggaccttctcggcgtgagtctggagcaggctggggacgcgttctcagatggatctcttgcctgaggccagagattcactgtgtctctggccatttttgggcctatgtcccggactgccaa

SEQ ID NO: 436421 - DNA, 120 bp, Artificial Sequence
  ENSG00000153048_33 (sequence is synthesized)
aaggcgccttgtaaattcagggtactgcccagcccagaagaacctgttaccagctgggagtggcaatgggtgggcagttgctggggtcagaatcgctgggctttaaccacacatgagagt

SEQ ID NO: 436422 - DNA, 120 bp, Artificial Sequence
  ENSG00000153048_34 (sequence is synthesized)
ctggttccctgtgagactgtgaattctgcagctgcaaaatgggcacagcaccagggctgcaaaggacccacataatgcctggcagatgcaggtctcaggccttgcgagtggaggatgctt

SEQ ID NO: 436423 - DNA, 120 bp, Artificial Sequence
  ENSG00000153048_35 (sequence is synthesized)
gtgttattaatagtaaatcattagtttctggagggatgttcagtgatgttttagttcaactccctctttccaggagggaaaacaggcccgagaaaattggccagggtcatccaaagagtc

SEQ ID NO: 436424 - DNA, 120 bp, Artificial Sequence
  ENSG00000153048_36 (sequence is synthesized)
ctttcccccagcgtctttgtgagcggctcccagggttgagggttgtgcagtcctcagcctgtgtgactgtacatggcggtcctggccagggcttgatggggcacagctgtgggcaggggc

SEQ ID NO: 436425 - DNA, 65 bp, Artificial Sequence
  ENSG00000153048_37 (sequence is synthesized)
tctggctaatggtgaaatcccgtctctactaaaaaaacacaaaaaaaattagccgggcatggtgg

SEQ ID NO: 436426 - DNA, 66 bp, Artificial Sequence
  ENSG00000153048_38 (sequence is synthesized)
atgagcagggcgtggtgacaggtgcatgtaatcccggctcctcggaaggctgaggcaggagaatca

SEQ ID NO: 436427 - DNA, 120 bp, Artificial Sequence
  ENSG00000153048_39 (sequence is synthesized)
aatccaggaggtagaggttgcagtgagccgacatctcgccattgcactccagcctgagtgacaagggtgaaagtccatttcaaaaaaaaaaaaaaggatcgggcatggtggctcacacct

SEQ ID NO: 436428 - DNA, 120 bp, Artificial Sequence
  ENSG00000153060_0 (sequence is synthesized)
ggtgatgcctttggctccttgagctgagttttgcccgagtggggctcatgagggaggatggagtttcttgggactactcagaccgccagttactgtggtcccaagaaatgctgtggcttg

SEQ ID NO: 436429 - DNA, 120 bp, Artificial Sequence
  ENSG00000153060_1 (sequence is synthesized)
acctcactgccagctgtacaggcgccagtgatccaggaatgctatcagccctactacctgcccgggtaccgctacctcaattcatggaggcctagcctcttctacaagatagccaacgtc

SEQ ID NO: 436430 - DNA, 120 bp, Artificial Sequence
  ENSG00000153060_2 (sequence is synthesized)
cagacctgcccggacgagagcaccagtaccctgcggccgcccaccatcctgcccacactgcgctccgcactcttctctcgctatagcccccacgactgggaccagtccaaccagctgcag

SEQ ID NO: 436431 - DNA, 120 bp, Artificial Sequence
  ENSG00000153060_3 (sequence is synthesized)
gtgcgtggggccgaggcctcccggctgtgggccagccggctgacggatgactccatgaggctcttgcaggacaaggaccagctgacgcaccagatgcaggagggcacctgccggaacctg

SEQ ID NO: 436432 - DNA, 120 bp, Artificial Sequence
  ENSG00000153060_4 (sequence is synthesized)
ggccagaggctgtcggacattggcttctggaagtcagagctgagctatgagctggacaggcttctgactgagaaccagaacttggagacggtcaagaggcggctggagtgcgcggccaat

SEQ ID NO: 436433 - DNA, 120 bp, Artificial Sequence
  ENSG00000153060_5 (sequence is synthesized)
gaggtgaactgcccattgcaggtggccttggagtgtctgtaccatcgagagaagaggattgggattgatttggtccatgacaacgtggagaaaaaccttatccgggaagtggatttgcta

SEQ ID NO: 436434 - DNA, 120 bp, Artificial Sequence
  ENSG00000153060_6 (sequence is synthesized)
gaattgatatccagatgcgggataaccgggatgctcagcacgtgctggagagggacctcgaagacaaaagctcggcccagtgtatcgatgagaagtgctttaacctgagaaatacgtcag

SEQ ID NO: 436435 - DNA, 120 bp, Artificial Sequence
  ENSG00000153060_7 (sequence is synthesized)
actgcatcagcttcttccacggcatggagaaaattgacggcacgatctccgtacctgagacctgggccaagttcagtaacgacaacatcaaacactctcagaacatgcgggccaactcca

SEQ ID NO: 436436 - DNA, 120 bp, Artificial Sequence
  ENSG00000153060_8 (sequence is synthesized)
tccagctgcgggaggaggcggagcacctctttgagaccttgtcggatcagatgtggaggcagttcacagacaccaacctggccttcaacgcccgcatctctgaggtgacggatgtgaaga

SEQ ID NO: 436437 - DNA, 120 bp, Artificial Sequence
  ENSG00000153060_9 (sequence is synthesized)
ataagctgcagacgcagctggcgaagacgctgcaggagatcttccaggccgagaacaccatcatgctgctggaaaggtccatcatggccaaggagggcccgctgaaggtggcccagacaa

SEQ ID NO: 436438 - DNA, 120 bp, Artificial Sequence
  ENSG00000153060_10 (sequence is synthesized)
ggctggagtgccggacccggcgccccaacatggagctgtgcagggacatcccgcagttgaagctggtgaacgaggtgttcaccatcgacgacaccctgcagaccctcaagctgcggctgc

SEQ ID NO: 436439 - DNA, 120 bp, Artificial Sequence
  ENSG00000153060_11 (sequence is synthesized)
gggagacacaggacacgctgcagctgctggtcatgaccaagtgccggctggagcacgagctcgccatcaaggccaacaccctctgcatcgacaaggagaagtgcatgggcatgcgtaaga

SEQ ID NO: 436440 - DNA, 120 bp, Artificial Sequence
  ENSG00000153060_12 (sequence is synthesized)
ccttcccctgcaccccgcgcctggtgggccacacctgagcaccgccctggcgcctcattccgcgctggcgtaaaattggaaaaggctgagaaacaaagtaaaacagtattttgtttgaaa

SEQ ID NO: 436441 - DNA, 120 bp, Artificial Sequence
  ENSG00000153064_0 (sequence is synthesized)
gagacctggccgcagcctccgcgggtggcaagcgggctggggagagccgagggccaaaggaagagaaaatcgcggggagtctctggccgggagagtccaggtagcgctcggcgggcagca

SEQ ID NO: 436442 - DNA, 120 bp, Artificial Sequence
  ENSG00000153064_1 (sequence is synthesized)
gtgcgcaggcccctcggcttcaaccgccacaatgctgccagcagcgccaggcaaggggcttgggagcccggaccccgccccctgcggcccagcgcccccaggaaatacaaaagatataat

SEQ ID NO: 436443 - DNA, 120 bp, Artificial Sequence
  ENSG00000153064_2 (sequence is synthesized)
aatgatatatgaagaagatgctgaggaatgggctctgtacttgacagaagtatttttacatgttgtgaaaagggaagccatcctgttatatcgcttggagaatttctcttttcggcattt

SEQ ID NO: 436444 - DNA, 120 bp, Artificial Sequence
  ENSG00000153064_3 (sequence is synthesized)
ggagttgctgaacttaacgtcttacaaatgtaaacttttgatattatcaaatagcctgcttagagacctaactccaaagaaatgtcagtttctggaaaagatacttcattcaccaaaaag

SEQ ID NO: 436445 - DNA, 120 bp, Artificial Sequence
  ENSG00000153064_4 (sequence is synthesized)
tgtagttactttgctttgtggagtgaagagttcagatcagctctatgaattactaaatatctctcaaagcagatgggagatctcaactgaacaggaacctgaagactacatctctgtaat

SEQ ID NO: 436446 - DNA, 120 bp, Artificial Sequence
  ENSG00000153064_5 (sequence is synthesized)
ccagagtatcatattcaaagattctgaagactactttgaggtcaacattccaacagacctacgagcaaaacattctggggaaataagtgagagaaaggaaattgaagaactatcagaagc

SEQ ID NO: 436447 - DNA, 120 bp, Artificial Sequence
  ENSG00000153064_6 (sequence is synthesized)
ttcaagaaacaccataccactagcagtggtgcttcccactgaaattccatgtgagaatcctggtgaaatattcataattttgagagatgaagtaattggtgatactgtagaggttgaatt

SEQ ID NO: 436448 - DNA, 120 bp, Artificial Sequence
  ENSG00000153064_7 (sequence is synthesized)
tacatcaagtaataagcgcattagaacacggccagccctttggaataagaaagtctggtgcatgaaagctttagagtttcctgctggttcagtccatgtcaatgtctactgtgatggaat

SEQ ID NO: 436449 - DNA, 120 bp, Artificial Sequence
  ENSG00000153064_8 (sequence is synthesized)
cgttaaagctacaaccaaaattaagtactacccaacagcaaaggcaaaggaatgcctattcagaatggcagattcaggagagagtttgtgccagaatagcattgaagaacttgatggtgt

SEQ ID NO: 436450 - DNA, 120 bp, Artificial Sequence
  ENSG00000153064_9 (sequence is synthesized)
ccttacatccatattcaaacatgagataccatattatgagttccagtctcttcaaactgaaatttgttctcaaaacaaatatactcatttcaaagaacttccaactcttctccactgtgc

SEQ ID NO: 436451 - DNA, 120 bp, Artificial Sequence
  ENSG00000153064_10 (sequence is synthesized)
agcaaaatttggcttaaagaacctggctattcatttgcttcaatgttcaggagcaacctgggcatctaagatgaaaaatatggagggttcagaccccgcacatattgctgaaaggcatgg

SEQ ID NO: 436452 - DNA, 120 bp, Artificial Sequence
  ENSG00000153064_11 (sequence is synthesized)
tcacaaagaactcaagaaaatcttcgaagacttttcaatccaagaaattgacataaataatgagcaagaaaatgattatgaagaggatattgcctcattttccacatatattccttccac

SEQ ID NO: 436453 - DNA, 120 bp, Artificial Sequence
  ENSG00000153064_12 (sequence is synthesized)
acagaacccagcatttcatcatgaaagcaggaagacatacgggcagagtgcagatggagctgaggcaaatgaaatggaaggggaaggaaaacagaatggatcaggcatggagaccaaaca

SEQ ID NO: 436454 - DNA, 120 bp, Artificial Sequence
  ENSG00000153064_13 (sequence is synthesized)
aataattcacaagagccactcatgagcagcagacctcctctccccccgccgcgacctgtagctaatgccttccaactggaaagacctcacttcaccttaccagggacaatggtggaaggc

SEQ ID NO: 436455 - DNA, 120 bp, Artificial Sequence
  ENSG00000153064_14 (sequence is synthesized)
caaatggaaagaagtcaaaactggggtcatcctggtgttagacaagaaacaggagatgaacccaaaggagaaaaagagaagaaagaagaggaaaaagagcaggaggaggaagaagaccca

SEQ ID NO: 436456 - DNA, 120 bp, Artificial Sequence
  ENSG00000153064_15 (sequence is synthesized)
tatacttttgctgagattgatgacagtgaatatgacatgatattggccaatctgagtataaagaaaaaaactgggagtcggtctttcattataaatagacctcctgcccccacaccccga

SEQ ID NO: 436457 - DNA, 120 bp, Artificial Sequence
  ENSG00000153064_16 (sequence is synthesized)
cccacaagtatacctccaaaagaggaaactacaccttacatagctcaagtgtttcaacaaaagacagccagaagacaatctgatgatgacaagttctgtggtcttcctaagaaacaagac

SEQ ID NO: 436458 - DNA, 120 bp, Artificial Sequence
  ENSG00000153064_17 (sequence is synthesized)
agagctcggatagagagtccagccttttctactctcaggggctgtctaactgatggtcaggaagaactcatcctcctgcaggagaaagtaaagaatgggaaaatgtctatggatgaagct

SEQ ID NO: 436459 - DNA, 120 bp, Artificial Sequence
  ENSG00000153064_18 (sequence is synthesized)
ctggagaaatttaaacactggcagatgggaaaaagtggcctggaaatgattcagcaggagaaattacgacaactacgagactgcattattgggaaaaggccagaagaagaaaatgtctat

SEQ ID NO: 436460 - DNA, 120 bp, Artificial Sequence
  ENSG00000153064_19 (sequence is synthesized)
aataaactcaccattgtgcaccatccaggtggtaaggaaactgcccacaatgaaaataagttttataatgtacacttcagcaataagcttcctgctcgaccccaagttgaaaaggaattt

SEQ ID NO: 436461 - DNA, 120 bp, Artificial Sequence
  ENSG00000153064_20 (sequence is synthesized)
ggtttctgttgcaagaaagatcattaaagaaggttattataatgaaactcacgaatctacggacattttgctttcagggtgaagcaagcttgaatttggattgcctgctctctttaaagc

SEQ ID NO: 436462 - DNA, 120 bp, Artificial Sequence
  ENSG00000153064_21 (sequence is synthesized)
gaattcatactatgacagcagaaacaaaacttcagatttcagaatttgttattggcaaaatttattctcattatacctgcttcatatgggtatattactattaaaacagaataccataga

SEQ ID NO: 436463 - DNA, 120 bp, Artificial Sequence
  ENSG00000153064_22 (sequence is synthesized)
gtaattgcattatttgaaaattctctcattttacaatgcacttcaccaatgaaacagctaatttccattttgaaaattaaaagaaaacagcacagagaagttaaatgcggtgtagcaaag

SEQ ID NO: 436464 - DNA, 120 bp, Artificial Sequence
  ENSG00000153064_23 (sequence is synthesized)
ttatggggtctgcttgagggcactaacctcaacagattattcctcctctccttagaataaccatgaaaatacaaatttacttagcacatttttgctttttaagtagctggttcattttct

SEQ ID NO: 436465 - DNA, 120 bp, Artificial Sequence
  ENSG00000153064_24 (sequence is synthesized)
gaatttctcacattcagagttccagtcattattgttacatcatgtttgcagaaaccttgtcttatttagtgtctatttgcatataaccctgaaaacattattatttgaaaacttttctat

SEQ ID NO: 436466 - DNA, 120 bp, Artificial Sequence
  ENSG00000153064_25 (sequence is synthesized)
atctcaaattaatatacattttcataacctacctttgtattaagacttgcaattttatcaatctattatttcttagaaacaatttactagcttagaatagaaagcaatgttatcgtcata

SEQ ID NO: 436467 - DNA, 120 bp, Artificial Sequence
  ENSG00000153064_26 (sequence is synthesized)
taattttcatgtacaaatgccacaaataaattgaatgtttaaagctatgtctgagtttttaaagtaaatttataagaattagccaataaaattgcttctcggccttttggctaagatcaa

SEQ ID NO: 436468 - DNA, 120 bp, Artificial Sequence
  ENSG00000153064_27 (sequence is synthesized)
ctggccaacaagggctgcagaggatgcacacatcaggaagagggtgggggactacttgcttgctggttttgcttgcatctgatgagtagaaattcagcctattctttgttttggaaatac

SEQ ID NO: 436469 - DNA, 120 bp, Artificial Sequence
  ENSG00000153064_28 (sequence is synthesized)
tttggtttctcttcaagaattaacaaaccacttactcttgaattctcttctagttaacacaggcatcactacttccaattgatctcaggatgtgggatcctcatacacattttgaacaaa

SEQ ID NO: 436470 - DNA, 120 bp, Artificial Sequence
  ENSG00000153064_29 (sequence is synthesized)
atcctctgtttcagcaaggaattcatatttgcatatggtgaagatggtttctgaagtgagatcagaagtagagcttctaatgacccccagaagcactgagtgaccaagtgacatacctgc

SEQ ID NO: 436471 - DNA, 120 bp, Artificial Sequence
  ENSG00000153064_30 (sequence is synthesized)
caggcccattgtgtccatcgctctcagagcagctggggattgtgcttggctcccagagctatggtgcaaaaggcggggtcgctagggccactcagggaaagagaacccagaaacatggca

SEQ ID NO: 436472 - DNA, 120 bp, Artificial Sequence
  ENSG00000153064_31 (sequence is synthesized)
gttatgttgccaaataaatgctaaagaatactgattgtagagttctgcaactcttcattgttcatgatcagaattacaatattgcttctcaatcatgtcaatgtcatcaccaatacacat

SEQ ID NO: 436473 - DNA, 120 bp, Artificial Sequence
  ENSG00000153064_32 (sequence is synthesized)
gtgtttaggtgcagacctacaaatcactttcctagcaatgttagattttatagattttgttgaagtaagtcaattgtatttcatcctcctaagacccttaaataataacgttttccattt

SEQ ID NO: 436474 - DNA, 120 bp, Artificial Sequence
  ENSG00000153064_33 (sequence is synthesized)
agagttatccaacctaaatatcattttggaaattatttcactagttgtttcatcaaaccctggttgtttctattttgtttgtatatttaaatttaatcttgtttttaggaagaatttaag

SEQ ID NO: 436475 - DNA, 120 bp, Artificial Sequence
  ENSG00000153064_34 (sequence is synthesized)
gtgcttcatactcactacttagagactgatctgactcacctaataataaggttataatgggataatgaatattgttcatgcttattttaaaaaattatttttttaaataaaggccaacag

SEQ ID NO: 436476 - DNA, 120 bp, Artificial Sequence
  ENSG00000153064_35 (sequence is synthesized)
atactaagattactttccataagcaacaaagtttaatgacttggtctgaattctgtcagaggaatcagtcagtccttaacataagggactgggccaaaatccaaacaacaaaaagatgaa

SEQ ID NO: 436477 - DNA, 120 bp, Artificial Sequence
  ENSG00000153064_36 (sequence is synthesized)
tattcctcctgtttcctcaacacacacacgtgcaaacaaagatgcattcctatgtacttttcaatatttttcttgcagcttggaaaagtatttgtttgtatcctatgaatataaatgaag

SEQ ID NO: 436478 - DNA, 120 bp, Artificial Sequence
  ENSG00000153064_37 (sequence is synthesized)
ttatcagaggtaactgaagtcatattattattgatgaaggaattaatctaggaaactaagaaaaaaatggcacaaacatggagttaataggggaagctggtttccagaataactaagaat

SEQ ID NO: 436479 - DNA, 120 bp, Artificial Sequence
  ENSG00000153064_38 (sequence is synthesized)
catgtagaatccctggcgttgaagatgaaatggtggagaagggaaaaccttgcccttcactgtcctcacccctactcacagtcacagagtaagaagaagagtttggcaccactggtagga

SEQ ID NO: 436480 - DNA, 120 bp, Artificial Sequence
  ENSG00000153064_39 (sequence is synthesized)
tttccaggaaaatcctgaggaaagagtgctattcttaagttctgttctaaaacaagattattaaatgttagcttgttttacattttgcttaaaaagataatgttcaatatttggaaatca

SEQ ID NO: 436481 - DNA, 120 bp, Artificial Sequence
  ENSG00000153064_40 (sequence is synthesized)
aagaaagatcacagatgtgctaagaagaggaatcctgttatgttcatctgcttttaagtctctgatttttagaattagaacactgggaaggaatgtgccatacagaggctgagatgggct

SEQ ID NO: 436482 - DNA, 120 bp, Artificial Sequence
  ENSG00000153064_41 (sequence is synthesized)
caggcagcagcaaaccatcactatgtagcccttctgcttttggacaccaaatagccaatacagaccccacaagaattgggttggcaaaacaacttcccaaagaattgcactctaggatcc

SEQ ID NO: 436483 - DNA, 120 bp, Artificial Sequence
  ENSG00000153064_42 (sequence is synthesized)
aatcttgactctaccacttataactatgaattgggaaagttactgtacctctctgtacctcagtttccatatctacaacatggaatgacgacattttacatccacttcattaagctgtga

SEQ ID NO: 436484 - DNA, 120 bp, Artificial Sequence
  ENSG00000153064_43 (sequence is synthesized)
gaattaagtaagataacgtggaaagtatcaaggatggcaattgagacatcataagtagcaaattaatatcaagtagcagcattggtattgctaatagtagttgatgttttcatcttgatc

SEQ ID NO: 436485 - DNA, 74 bp, Artificial Sequence
  ENSG00000153064_44 (sequence is synthesized)
cgagactccgtgggcgtaggaccctccgatccaggtgcgggatataatctcgcggtgtgccgttttttaagcca

SEQ ID NO: 436486 - DNA, 120 bp, Artificial Sequence
  ENSG00000153064_45 (sequence is synthesized)
tcgggtgggagtgacccgattttccagggaagacacacccagcttcaagttattacaaaaggaggaaatactgaaaatctgaagattctcctcagcccgaaaatggaggagaaacaagga

SEQ ID NO: 436487 - DNA, 120 bp, Artificial Sequence
  ENSG00000153064_46 (sequence is synthesized)
tggtgaggagcaaaatgctttcatgaatggcatttgagagtttgtattagttaacacaggcatcactacttccaattgatctcaggatgtgggatcctcatacacattttgaacaaaatc

SEQ ID NO: 436488 - DNA, 120 bp, Artificial Sequence
  ENSG00000153064_47 (sequence is synthesized)
ctctgtttcagcaaggaattcatatttgcatatggtgaaggttgggctgactgctccatctctcaaatctctagatgtagggggagtcccaaccacatcagcactaggcttggtactgaa

SEQ ID NO: 436489 - DNA, 120 bp, Artificial Sequence
  ENSG00000153064_48 (sequence is synthesized)
aaaccaaagcggccttttgagaagggatgtaagagcaggcccctgagcagtttcacttcctctgggcgcccagcagagcggagccctggccttgcgggcatgagccccggggctgcgttt

SEQ ID NO: 436490 - DNA, 120 bp, Artificial Sequence
  ENSG00000153066_0 (sequence is synthesized)
gcggcgcggctgacgtggagcgtccgggttagcgggtgcggcgagctgcgggattggggagcaacgggccgggccgggccttcgggcccgaggcggcggcggcggtataaagccggcgac

SEQ ID NO: 436491 - DNA, 120 bp, Artificial Sequence
  ENSG00000153066_1 (sequence is synthesized)
gtataaagccggcgactgggagcatgtaatgtcggaatgcggaggccgcggcggcggcagcagcagcagcgaggacgccgaggacgagggagggggcggcggcggccccgcgggctcaga

SEQ ID NO: 436492 - DNA, 120 bp, Artificial Sequence
  ENSG00000153066_2 (sequence is synthesized)
cagactgcctcagctcgagcccgaccctggccacagcgtcctcggcgggccggctccgtcgcgggctgcgtggcgccttcctcatggcgcgccagcggccggagctgctctgcggggccg

SEQ ID NO: 436493 - DNA, 120 bp, Artificial Sequence
  ENSG00000153066_3 (sequence is synthesized)
gctcggctgcgcgctgctcctcgccctcaagttcacctgcagtcgagcaaaagatgtgataataccagcaaagccacctgtcagctttttctccttgaggtctccagtccttgacctctt

SEQ ID NO: 436494 - DNA, 120 bp, Artificial Sequence
  ENSG00000153066_4 (sequence is synthesized)
ccaggggcagctggattatgcagagtacgttcgacgggattcagaggtggtactgctcttcttctatgccccttggtgtggacagtccatcgctgccagggcagaaattgagcaagcagc

SEQ ID NO: 436495 - DNA, 120 bp, Artificial Sequence
  ENSG00000153066_5 (sequence is synthesized)
aagtcggctttcagatcaggtgttgtttgtggcaattaactgttggtggaaccaggggaaatgcagaaaacagaaacacttcttttattttcctgtaatatatctgtatcatcggagttt

SEQ ID NO: 436496 - DNA, 120 bp, Artificial Sequence
  ENSG00000153066_6 (sequence is synthesized)
tggaccaatcgaatacaaaggccccatgagtgctgtttacattgagaagtttgtccgccgggtgatgaaaccacttctctacatcccatctcaatcagaattactagattttctctcaaa

SEQ ID NO: 436497 - DNA, 120 bp, Artificial Sequence
  ENSG00000153066_7 (sequence is synthesized)
ctacgagcctggagtactcgggtactttgagttcagtggctcaccccagcctcctggttatttgaccttcttcacctcagcattacattcattaaagaaagattacctaggaacagtacg

SEQ ID NO: 436498 - DNA, 120 bp, Artificial Sequence
  ENSG00000153066_8 (sequence is synthesized)
atttggggttatcacaaataaacatcttgcgaaactggtatccttagtacactctggaagtgtgtatttacatagacatttcaacacatcacttgtcttccccagggaggtcctgaacta

SEQ ID NO: 436499 - DNA, 120 bp, Artificial Sequence
  ENSG00000153066_9 (sequence is synthesized)
cacagctgagaacatctgtaagtgggccttagaaaaccaggagacgctctttcggtggctgcggccacacggaggcaagagtctcctgctgaataacgagctgaagaaaggaccagcgct

SEQ ID NO: 436500 - DNA, 120 bp, Artificial Sequence
  ENSG00000153066_10 (sequence is synthesized)
gtttctgttcataccttttaatcccctggccgaaagtcatcctttaatagacgagatcaccgaagtggccttggagtacaacaactgtcatggggaccaggtggtggagcgtctccttca

SEQ ID NO: 436501 - DNA, 120 bp, Artificial Sequence
  ENSG00000153066_11 (sequence is synthesized)
gcacctgcggcgggtggatgctccagtgctggagtccctggccctggaagtgccggcacagctgccagacccgccaacgatcacagcgtccccctgctgcaacactgtggtgctgcccca

SEQ ID NO: 436502 - DNA, 120 bp, Artificial Sequence
  ENSG00000153066_12 (sequence is synthesized)
gtggcactccttctccaggacccacaacgtctgtgaactctgtgtcaaccagacctccgggggcatgaagccgagctcggtcagcgtgccacagtgcagcttttttgaaatggcagcagc

SEQ ID NO: 436503 - DNA, 120 bp, Artificial Sequence
  ENSG00000153066_13 (sequence is synthesized)
aggagcagaccttttatcatgtggcatcagacagcatagaatgcagcaattttttaacttcctatagccccttcagctactacactgcatgttgcaggaccataagcaggggtgtgtcag

SEQ ID NO: 436504 - DNA, 120 bp, Artificial Sequence
  ENSG00000153066_14 (sequence is synthesized)
gcttcatcgactctgaacaaggtgtctttgaagcccctactgttgcattttcttcccttgagaagaaatgtgaggttgatgccccaagctccgttcctcacattgaggagaacaggtatc

SEQ ID NO: 436505 - DNA, 120 bp, Artificial Sequence
  ENSG00000153066_15 (sequence is synthesized)
tctttccagaagtggacatgactagcacaaacttcacaggcctgagctgcagaaccaacaagactctcaacatctaccttttggattcaaatttgttttggttatatgcagagagactgg

SEQ ID NO: 436506 - DNA, 120 bp, Artificial Sequence
  ENSG00000153066_16 (sequence is synthesized)
gtgctccgagctccactcaggtgaaagaatttgcggcaattgttgacgtgaaagaagaatctcattacatcttggatccaaagcaagcactgatgaagctcaccctagagtcttttattc

SEQ ID NO: 436507 - DNA, 120 bp, Artificial Sequence
  ENSG00000153066_17 (sequence is synthesized)
aaaacttcagcgttctctatagtcccttgaaaaggcatctcattggaagtggctctgcccagttcccgtctcagcatttaatcactgaagtgacaactgataccttttgggaagtagtcc

SEQ ID NO: 436508 - DNA, 120 bp, Artificial Sequence
  ENSG00000153066_18 (sequence is synthesized)
ttcaaaaacaggacgttctcctgctctattacgctccgtggtgcggcttctgtccatccctcaatcacatcttcatccagctagctcggaacctgcccatggacacattcactgtggcaa

SEQ ID NO: 436509 - DNA, 120 bp, Artificial Sequence
  ENSG00000153066_19 (sequence is synthesized)
ggattgacgtgtctcagaatgaccttccttgggaatttatggtcgatcgtcttcctactgtcttgttttttccctgcaacagaaaggacctaagtgtgaaataccccgaagacgtcccca

SEQ ID NO: 436510 - DNA, 120 bp, Artificial Sequence
  ENSG00000153066_20 (sequence is synthesized)
tcacccttccaaacctgttgaggttcattttgcatcactcagaccctgcttccagcccccagaatgtggctaactctcctaccaaggagtgtcttcagagcgaggcagtcttacagcggg

SEQ ID NO: 436511 - DNA, 120 bp, Artificial Sequence
  ENSG00000153066_21 (sequence is synthesized)
ggcacatctcccacttggagagagagatccagaaactgagagcagaaataagcagcctccagcgagcacaagtgcaggtggagtcccagctctccagtgcccgcagagatgagcaccggc

SEQ ID NO: 436512 - DNA, 120 bp, Artificial Sequence
  ENSG00000153066_22 (sequence is synthesized)
tgcggcagcagcagcgggccctggaagagcagcacagcctgctccacgcacacagtgagcagctgcaggccctctatgagcagaagacacgtgagctgcaggagctggcccgcaagctgc

SEQ ID NO: 436513 - DNA, 120 bp, Artificial Sequence
  ENSG00000153066_23 (sequence is synthesized)
aggagctggccgatgcctcagaaaacctccttaccgagaacacgtggctcaagatcctggtggcgaccatggagaggaaactggagggcagggatggagctgaaagcctggcggcccaga

SEQ ID NO: 436514 - DNA, 120 bp, Artificial Sequence
  ENSG00000153066_24 (sequence is synthesized)
gagaggtccaccccaagcagcctgagccctcagccaccccccagctccctggcagctcccctccacctgccaatgtcagcgccacactggtgtctgaaaggaataaggagaacaggacag

SEQ ID NO: 436515 - DNA, 120 bp, Artificial Sequence
  ENSG00000153066_25 (sequence is synthesized)
actaactttttaaatgatatgaagaaatcagaggtgaaaattgtacattgggaatatatttatgcaaattttattgaaatttattgtaaataaagattttctcagtggtctagaaaatca

SEQ ID NO: 436516 - DNA, 120 bp, Artificial Sequence
  ENSG00000153066_26 (sequence is synthesized)
aactcaacagtagactcagagcttctacatatgagtctttttagccatcctctttcaaatctaggtgaagcttgtttcttacattagacacatttgtgaaaaggctttatagtcttttat

SEQ ID NO: 436517 - DNA, 120 bp, Artificial Sequence
  ENSG00000153066_27 (sequence is synthesized)
atatctgtatcatcggagcctggagtactcgggtactttgagttcagtggctcaccccagcctcctggttatttgaccttcttcacctcagcattacattcattaaagaaagatggagtc

SEQ ID NO: 436518 - DNA, 77 bp, Artificial Sequence
  ENSG00000153066_28 (sequence is synthesized)
cttcacctcagcattacattcattaaagaaagatggagtctcgccctgctctgcctcccgggttcaagcgattctcc

SEQ ID NO: 436519 - DNA, 120 bp, Artificial Sequence
  ENSG00000153066_29 (sequence is synthesized)
taaaacttacgacttgtttatttctggaattttccatttagtatttttgaaccggagttgaccatggataactgaaattacagaaagtgaaacgtggctaacggggtgctagtccctcag

SEQ ID NO: 436520 - DNA, 120 bp, Artificial Sequence
  ENSG00000153066_30 (sequence is synthesized)
tcattacatttagttgtggggtgatgtcaccttcgtagctcattttaagtctttagaccaccatcagtcataattttcaaagaagctaattttgtctattaaatggaacagaaacttcct

SEQ ID NO: 436521 - DNA, 120 bp, Artificial Sequence
  ENSG00000153066_31 (sequence is synthesized)
cactctgaattttggataagtttgtcatttagcccatggtgggggtaagagtcccactttctaaattggcgatttctgtcacatgtctaaggtagaaccagctgcaggcagtggggactt

SEQ ID NO: 436522 - DNA, 120 bp, Artificial Sequence
  ENSG00000153066_32 (sequence is synthesized)
ggggactagaacaggcagggaggtggagagctattctggtgggatgtcctaggggctgatgaaagtgagccttgacagcagctttgttctaaaggagcttaaagagaaagcagtggccgg

SEQ ID NO: 436523 - DNA, 120 bp, Artificial Sequence
  ENSG00000153066_33 (sequence is synthesized)
tgaaatgttaaaaatgtgagcctatgaagtcatttgagtttttaaaatgtggagtttaaaagtaggccagctattctctttgtatctagaggagagttgatctcattttctctttatttt

SEQ ID NO: 436524 - DNA, 120 bp, Artificial Sequence
  ENSG00000153071_0 (sequence is synthesized)
agtcctcagctgccagcatctgattagaaccatatctctcgccgggagtggccgcgcggctccgaagctcccggccggcggctatttaagcgaggcccgccgcatccgctgcgctgtagc

SEQ ID NO: 436525 - DNA, 120 bp, Artificial Sequence
  ENSG00000153071_1 (sequence is synthesized)
ctggaggctccgggcgcggggaagtcatgctcgcttcacggaggcaatagctagccggtgtctgtgggaggttatgtttatttgagacttctccatcgggatcgcctggtgtcaccaagt

SEQ ID NO: 436526 - DNA, 120 bp, Artificial Sequence
  ENSG00000153071_2 (sequence is synthesized)
gtccactggtactgaggtttgctgcctgccttcttgccatgtctaacgaagtagaaacaagtgcaaccaatggtcagcccgaccaacaggccgcaccaaaagcaccctcaaagaaggaaa

SEQ ID NO: 436527 - DNA, 120 bp, Artificial Sequence
  ENSG00000153071_3 (sequence is synthesized)
aaaagaaaggccctgaaaagacagatgaatatctcttagcaaggttcaaaggcgatggtgtaaaatataaggccaagctgattggcattgatgatgtgccagatgcaagaggggataaaa

SEQ ID NO: 436528 - DNA, 120 bp, Artificial Sequence
  ENSG00000153071_4 (sequence is synthesized)
tgagccaagactctatgatgaaactaaagggaatggcggcagctggtcggtctcagggacaacacaaacaaaggatctgggtcaacatttccctttctgggataaaaataattgatgaga

SEQ ID NO: 436529 - DNA, 120 bp, Artificial Sequence
  ENSG00000153071_5 (sequence is synthesized)
aaactggggtaatagagcatgaacatccagtaaataagatttctttcattgcccgtgatgtgacagacaaccgggcatttggttacgtgtgtggaggagaaggccagcatcagttttttg

SEQ ID NO: 436530 - DNA, 120 bp, Artificial Sequence
  ENSG00000153071_6 (sequence is synthesized)
ccataaaaaccgggcaacaggctgaaccattagttgttgatcttaaagacctttttcaagttatctataatgtaaagaaaaaggaagaagaaaagaaaaagatagaggaagccagcaaag

SEQ ID NO: 436531 - DNA, 120 bp, Artificial Sequence
  ENSG00000153071_7 (sequence is synthesized)
cagttgagaatgggagtgaggccctaatgattctagatgaccaaactaacaaactgaaatcgggtgttgaccagatggatttgtttggggacatgtctacacctcctgacctaaatagtc

SEQ ID NO: 436532 - DNA, 120 bp, Artificial Sequence
  ENSG00000153071_8 (sequence is synthesized)
caacagaaagcaaagatatcctgttagtggatctaaactctgaaatcgacaccaatcagaattctttaagagaaaatccattcttaacaaacggcatcacctcctgttctcttcctcgac

SEQ ID NO: 436533 - DNA, 120 bp, Artificial Sequence
  ENSG00000153071_9 (sequence is synthesized)
caacgcctcaggcatccttcttgcctgaaaatgccttttctgccaatctcaacttctttcccacccctaatcctgatcctttccgtgacgatcctttcacacagccagaccaatcgacac

SEQ ID NO: 436534 - DNA, 120 bp, Artificial Sequence
  ENSG00000153071_10 (sequence is synthesized)
cttcttcgtttgattctctcaaatctccagatcagaagaaagagaattcgagtagctcgtctactccgctgagtaatgggcccctgaatggtgatgttgactactttggtcagcaatttg

SEQ ID NO: 436535 - DNA, 120 bp, Artificial Sequence
  ENSG00000153071_11 (sequence is synthesized)
accagatctctaaccggactggcaaacaggaagctcaggcaggcccatggcccttttcaagttcgcaaacccagccagcagtgagaactcaaaatggggtatctgaaagagaacagaacg

SEQ ID NO: 436536 - DNA, 120 bp, Artificial Sequence
  ENSG00000153071_12 (sequence is synthesized)
gcttctctgtcaaatcctccccgaacccttttgtgggaagccctcccaaaggactgtccatacagaatggcgtaaagcaggacttggaaagctctgtccagtcctcaccacatgactcca

SEQ ID NO: 436537 - DNA, 120 bp, Artificial Sequence
  ENSG00000153071_13 (sequence is synthesized)
tagccattatcccacctccacaaagtaccaaaccaggaagaggcagaaggactgctaagtcttcagccaatgacttgcttgcatcagacatctttgctcctcccgtctcagaaccttcag

SEQ ID NO: 436538 - DNA, 120 bp, Artificial Sequence
  ENSG00000153071_14 (sequence is synthesized)
gccaggcgtcacccacaggacaacctacagccctgcagcccaaccctctggatctcttcaaaacaagtgctcctgccccagtggggcccctggtgggtctaggtggtgtaactgtcacac

SEQ ID NO: 436539 - DNA, 120 bp, Artificial Sequence
  ENSG00000153071_15 (sequence is synthesized)
tccctcaggcaggaccatggaacacagcatctttggtcttcaatcagtccccttcaatggctccgggagccatgatgggtggtcaaccttcaggttttagtcagcccgtcatttttggta

SEQ ID NO: 436540 - DNA, 120 bp, Artificial Sequence
  ENSG00000153071_16 (sequence is synthesized)
caagtccagctgtttcaggttggaaccagccttcaccctttgcagcctcaactccccctccagtgcctgttgtctggggcccttctgcatctgtggcacccaatgcttggtcaacaacaa

SEQ ID NO: 436541 - DNA, 120 bp, Artificial Sequence
  ENSG00000153071_17 (sequence is synthesized)
gccctttggggaatccttttcagagcaatatttttccagctcctgctgtgtccactcagcccccatccatgcactcctctctcctggtcactcctcctcagccacctcccagagctggcc

SEQ ID NO: 436542 - DNA, 120 bp, Artificial Sequence
  ENSG00000153071_18 (sequence is synthesized)
cttcactgccttagacccacttggggataaagagatcaaggatgtgaaagaaatgtttaaggatttccaactgcggcagccacctgctgtgcccgcgcggaagggagagcagacttcttc

SEQ ID NO: 436543 - DNA, 120 bp, Artificial Sequence
  ENSG00000153071_19 (sequence is synthesized)
tgggactttgagtgcctttgccagttatttcaacagcaaggttggcattcctcaggagaatgcagaccatgatgactttgatgctaatcaactattgaacaagatcaatgaaccaccaaa

SEQ ID NO: 436544 - DNA, 120 bp, Artificial Sequence
  ENSG00000153071_20 (sequence is synthesized)
gccagctcccagacaagtttccctgccagttaccaaatctactgacaatgcatttgagaaccctttctttaaagattcttttggttcatcacaagcctctgtggcttcttctcaacctgt

SEQ ID NO: 436545 - DNA, 120 bp, Artificial Sequence
  ENSG00000153071_21 (sequence is synthesized)
atcttctgagatgtatagggatccatttggaaatccttttgcctaaattctgaacttggtctgcagaccatccagaggaataaaaaggttggccttagtagtcaaaaacaaagctgatag

SEQ ID NO: 436546 - DNA, 120 bp, Artificial Sequence
  ENSG00000153071_22 (sequence is synthesized)
ccagacacgttctgatttctgcccttgttccagctttgacgtattatctgttgccttatttctcattgcctcttctacttgtaaaatgcttttcactttctgtctaggttaaagctaaac

SEQ ID NO: 436547 - DNA, 120 bp, Artificial Sequence
  ENSG00000153071_23 (sequence is synthesized)
tgaatctatggctttaaataaattaagatcctaaactctctagcttaagtgtaaatgaagtacagtagtttccctactgaaccctgcctcttgtgtccctggaaccttctagaacacctg

SEQ ID NO: 436548 - DNA, 120 bp, Artificial Sequence
  ENSG00000153071_24 (sequence is synthesized)
ccttctaccctctggttgggagatgcagccaccacatcccttcatatcatactgttttgaataaattttcaaatccttattgttcagagttgtttgggggttctgtttcagagcataaaa

SEQ ID NO: 436549 - DNA, 120 bp, Artificial Sequence
  ENSG00000153071_25 (sequence is synthesized)
cctaaaggttatagtagaacaaggcaccttcttaaaagaaatcttgcttcagaccatcagttacagagaatttctaaagtaaaattgaagcaactacaacttctccttagacactttgga

SEQ ID NO: 436550 - DNA, 120 bp, Artificial Sequence
  ENSG00000153071_26 (sequence is synthesized)
atctaaccacttaaggacctttttaaagagatagcttctcttctttctgaagatcaatttctcccaaggccaagattgtccttttctcccatttcttgctagctattgcaaatgagggaa

SEQ ID NO: 436551 - DNA, 120 bp, Artificial Sequence
  ENSG00000153071_27 (sequence is synthesized)
gaacattattcatctctcctccccttttttttctgattcttttttcagtcagttttgctcctgggttcaagtagtattaccaccctttcacaagcaacagactctcacagggcaaaaaaa

SEQ ID NO: 436552 - DNA, 120 bp, Artificial Sequence
  ENSG00000153071_28 (sequence is synthesized)
aaaaaaaatctaatgattcacagacagatctggagcctctcttcattctcagtaattgctagtcccaagaactagaattgcaaatgggcacaacctatatccttcctgtggaagaggagg

SEQ ID NO: 436553 - DNA, 120 bp, Artificial Sequence
  ENSG00000153071_29 (sequence is synthesized)
ccactctcttgagctgaagttccagaagagcagttaatgttcaagagaaattgaactcaactcagcaacaaaggactctattttgaagagcaacatatcacaaagctaaatgtgattgtg

SEQ ID NO: 436554 - DNA, 120 bp, Artificial Sequence
  ENSG00000153071_30 (sequence is synthesized)
ccaaacacattaggtgcttatttggggtcatgctaggcctttatcaagtaactggaaaacttttcttgcagccacaatctcaatgtcgttagtaggaagataagaggggagaaaaagctg

SEQ ID NO: 436555 - DNA, 120 bp, Artificial Sequence
  ENSG00000153071_31 (sequence is synthesized)
tagaacaaatgtttggggttaccattgaaaatctaatgtctgcaatatttttctcctcacaacttggaaacgttcccagttcattttcagtcctgttgtgagcacagttctgaagggttt

SEQ ID NO: 436556 - DNA, 120 bp, Artificial Sequence
  ENSG00000153071_32 (sequence is synthesized)
attattgtcaaaataagttttgttttgttttgtttatgttgggtttttaatgttgtctcttgacccttaatgctcaggttcttgtgggagttaatcagccacatccaatgttaccttgag

SEQ ID NO: 436557 - DNA, 120 bp, Artificial Sequence
  ENSG00000153071_33 (sequence is synthesized)
ggggaagaagagggtgatgctcagaagctaaacaagacaggggccacatgaccctctattgattagccccaagtagaaagtcctgtggttttatgtttaatggtaatagttgatcatata

SEQ ID NO: 436558 - DNA, 120 bp, Artificial Sequence
  ENSG00000153071_34 (sequence is synthesized)
tggcataattttctatcagcttcctactcagtcactataaacacagacttgaaatagtactttaaatgtccaaatacctaaatgtgctaaactggaggtaactatttctaggtagttgaa

SEQ ID NO: 436559 - DNA, 120 bp, Artificial Sequence
  ENSG00000153071_35 (sequence is synthesized)
tttttgaaagtcatgatcagccacacaactgttttgtacatacttattttctcatgcacttttctgtatgcaaataaagctataaatttactcatttcaataaactggagtggcagaata

SEQ ID NO: 436560 - DNA, 120 bp, Artificial Sequence
  ENSG00000153071_36 (sequence is synthesized)
gtccttatttgcacccgccccccgcccgcgtcggtctggggcttttgacttctccccgaacacatttcccctcccgtcgctgggtccctgcgatcgcccccagctggtggggctcgcgga

SEQ ID NO: 436561 - DNA, 120 bp, Artificial Sequence
  ENSG00000153071_37 (sequence is synthesized)
gctcaggggagcggggtcctctgcgccgctgcagcgcgagttaataaacagttaagtttggaagactctgcagacacgttgagggggagttaccaagcccaggcagcaaaaacatcctgg

SEQ ID NO: 436562 - DNA, 120 bp, Artificial Sequence
  ENSG00000153071_38 (sequence is synthesized)
gcacacatgaaacatggcaatgttcagggcagcatgtgattgactgccaaagtgtctcgagcaggaagtaccaagggaggatggagatggtaataatcagggttgggtggagaatatctg

SEQ ID NO: 436563 - DNA, 120 bp, Artificial Sequence
  ENSG00000153071_39 (sequence is synthesized)
aggaaactgcacttgatttgggccttgaagagtaattgactggatttagatttatctagaaaggtcgttcccagcagaagcaacaagaacaacaagcttggaggtgtctgtgggaggtta

SEQ ID NO: 436564 - DNA, 120 bp, Artificial Sequence
  ENSG00000153071_40 (sequence is synthesized)
aggctccgggcgcggggaagtcatgctcgcttcacggaggcaatagctagccgtgcaacagaaataaaccaaatgtgtttgaacatatgtcagagggctgacataatcatatgaagaatg

SEQ ID NO: 436565 - DNA, 120 bp, Artificial Sequence
  ENSG00000153071_41 (sequence is synthesized)
gaaatgtgaatctactagggcaacatacaactgccctctgagtcagaagatcagaagttgctgtggctacacataattctggggtacatgtggagaacatgcagttttgttacataggta

SEQ ID NO: 436566 - DNA, 120 bp, Artificial Sequence
  ENSG00000153071_42 (sequence is synthesized)
tgagaaccctttctttaaagattcttttggttcatcacaagcctctgtggcttcttctcaacctgtatcttctgagatgtatagggatccatttggaaatccttttgcctaaattctgta

SEQ ID NO: 436567 - DNA, 120 bp, Artificial Sequence
  ENSG00000153071_43 (sequence is synthesized)
caggggtttttgtgagaaagggtgacatggaataaagagtgaaattttaattttagaattgggaagagggtaaatatctataatttaggagtaatcgacaggaaaatctctactgagatc

SEQ ID NO: 436568 - DNA, 120 bp, Artificial Sequence
  ENSG00000153071_44 (sequence is synthesized)
attcaataatgactaggctgggcacttaagaatagaattcctaaacacatcaaaaaatagtaatatacccttggggatgtggatttttatcttattccatgttcttggtttttcagttct

SEQ ID NO: 436569 - DNA, 120 bp, Artificial Sequence
  ENSG00000153071_45 (sequence is synthesized)
catacaactgccctctgagtcagaagatcagaagttgctgtggctacacatagtgtctgtgggaggttatgtttatttgagacttctccatcgggatcgcctggtgtcaccaagtgtcca

SEQ ID NO: 436570 - DNA, 120 bp, Artificial Sequence
  ENSG00000153071_46 (sequence is synthesized)
ggaaacaaactgccaagattctgaccttcagcctgcttgaacactggtatcaagaggagagatggctggttgtcaggctgctggttctctgcaaacctgaaatttgacaaataaatatca

SEQ ID NO: 436571 - DNA, 120 bp, Artificial Sequence
  ENSG00000153071_47 (sequence is synthesized)
agtcactttttgtttttaaatgactcctttttccttcatctaatttgaaagcaaccatgtcttgtctaaaggaaattaactaaatcatgaagaaccattttttaaatgataatattttga

SEQ ID NO: 436572 - DNA, 120 bp, Artificial Sequence
  ENSG00000153071_48 (sequence is synthesized)
ctaactgccatgttggttgtggatgtcttccccaactcgaatagatcatatcagatgtggaaatgtgacccagcggcaagtctctcatggaaggttaatgccaactctatgggtgtctgt

SEQ ID NO: 436573 - DNA, 120 bp, Artificial Sequence
  ENSG00000153071_49 (sequence is synthesized)
actagggcaacatacaactgccctctgagtcagaagatcagaagttgctgtggctacacatattaagtggtacagagtgttgtgtggatccagagggagaaaaaggccattggtgttaat

SEQ ID NO: 436574 - DNA, 120 bp, Artificial Sequence
  ENSG00000153071_50 (sequence is synthesized)
gctgtagcctggaggctccgggcgcggggaagtcatgctcgcttcacggaggcaatagctagccgtttttgtttggaaggaagagagccgctctgtaaaccgagaagagcagaaacaagc

SEQ ID NO: 436575 - DNA, 120 bp, Artificial Sequence
  ENSG00000153071_51 (sequence is synthesized)
ttccagacacatggaaagacttaaaaattatggaggggcgacttcacgaatagtaaatgttgctattgctctataaagtgacttcatgaaaaaatttctggccttagtcaggcaaagcag

SEQ ID NO: 436576 - DNA, 120 bp, Artificial Sequence
  ENSG00000153071_52 (sequence is synthesized)
cattgtggctcctgtttggtgtcctaagaacttcttctgaagtatttgaaaacgagaactctaccagctgtgaacactcaactgttctaacccagaggtggctcaaaacaaataaataaa

SEQ ID NO: 436577 - DNA, 120 bp, Artificial Sequence
  ENSG00000153071_53 (sequence is synthesized)
tattgaaatcacaagcttttgtaatacattttatcctaccttttgattgtataaagatccctagattaatagctcttccaatccatttctctgattaaatttttttttaattataagctc

SEQ ID NO: 436578 - DNA, 120 bp, Artificial Sequence
  ENSG00000153071_54 (sequence is synthesized)
gaagagtaattgactggatttagatttatctagaaaggtcgttcccagcagaagcaacaagaacaacaagcttggagtgcaacagaaataaaccaaatgtgtttgaacatatgtcagagg

SEQ ID NO: 436579 - DNA, 120 bp, Artificial Sequence
  ENSG00000153071_55 (sequence is synthesized)
cagtaagtgtttgtttttaaatttgcaatgtaataaaatgacatctataactcaaattggcaataaccagaaatcttaagcatctcattgaaacttggaaggtgactgttgatttttgca

SEQ ID NO: 436580 - DNA, 120 bp, Artificial Sequence
  ENSG00000153071_56 (sequence is synthesized)
aatgaagtgtcaatggtttttagaataaatgtgaatcttaagtcaccatgggaacctatccacactaattcagttatattaatattgcttacagattaaacctgaacaataagtcagcaa

SEQ ID NO: 436581 - DNA, 120 bp, Artificial Sequence
  ENSG00000153071_57 (sequence is synthesized)
cttggtatcacttaggattagaaggaggaggtgaataatagtccttgaataagcctacttgaagaaagtatgactgttagatggttaatcataaagcctcctggcctcttcatttctttt

SEQ ID NO: 436582 - DNA, 120 bp, Artificial Sequence
  ENSG00000153071_58 (sequence is synthesized)
gcattctgtctgttgcaatttagcagcataaatttggtgtgaagtaagatttaaaacaaacaagtggctcagttatattccaccaaagcttgtccttgttagaaagctgcccattctcat

SEQ ID NO: 436583 - DNA, 120 bp, Artificial Sequence
  ENSG00000153071_59 (sequence is synthesized)
aggattttataccatatccagtctgctcaatattgaatgatctgtaacaaccctgtaagaacagaacagtattttcctttataaattaaaaaaaaatggtggttcagggaaaaaaaagaa

SEQ ID NO: 436584 - DNA, 120 bp, Artificial Sequence
  ENSG00000153071_60 (sequence is synthesized)
gaccacctgagtctgaccaacaatttgctacttgaatttcggctccccttcttcgttctcaaagttctgtggggaacaaatatatcatatattacatctccagaagtaacaggcagaaaa

SEQ ID NO: 436585 - DNA, 120 bp, Artificial Sequence
  ENSG00000153071_61 (sequence is synthesized)
acatagtaggtgctcaaatatccatcctttaaagggaagggtcagctgtgctttagttatatcagcattaggttttgttgttgttgttacttgattttgttttgtgttgctccctgcccc

SEQ ID NO: 436586 - DNA, 120 bp, Artificial Sequence
  ENSG00000153071_62 (sequence is synthesized)
ctttacctctaaaattaagcgacttaaatgcaattcatttttgaagtagaaaaaacaagtatgtagctgatagaacaggcttttccatcaattgttggttgctagtaaggagggtcaata

SEQ ID NO: 436587 - DNA, 120 bp, Artificial Sequence
  ENSG00000153071_63 (sequence is synthesized)
gtcttctgtctgctgtggcaagcaagtcacttcttcttgtagtgagaactgaaaccagaaccatcatgtgccacttcctggacacctcctattaaatattaaagtcctctcaccacagaa

SEQ ID NO: 436588 - DNA, 120 bp, Artificial Sequence
  ENSG00000153071_64 (sequence is synthesized)
gccggagtttagtggttaggggcacaggttcttagatatgaacatcagttgcaacctaccaactgcatgctcttggacaatttacatttctgtgtatcagctttcctttttctttagaat

SEQ ID NO: 436589 - DNA, 120 bp, Artificial Sequence
  ENSG00000153071_65 (sequence is synthesized)
gagatattaatagtagcaacccagaattgtcatgaagcctaactaagtttttatatataaagagagttagaagagggcttggaatgtaacaataactcaataaatattggcctattatga

SEQ ID NO: 436590 - DNA, 120 bp, Artificial Sequence
  ENSG00000153086_0 (sequence is synthesized)
acagttttcacaaaggtctcttgatatcaaaacttctttccttgcatgcttctctgatcctgtggagatgaaaattgacatccatagtcatattctaccaaaagaatggccagatctaaa

SEQ ID NO: 436591 - DNA, 120 bp, Artificial Sequence
  ENSG00000153086_1 (sequence is synthesized)
aaagaggtttggctacggaggctgggtgcagctccaacaccacagcaagggagaagcaaagttgttgaaagatgggaaagtcttcagagtggtgcgagagaattgctgggatccagaagt

SEQ ID NO: 436592 - DNA, 120 bp, Artificial Sequence
  ENSG00000153086_2 (sequence is synthesized)
tcgtattagagaaatggaccaaaaaggagtaacagtgcaagccctttccacagttcctgtcatgtttagctactgggccaaacctgaggacactttaaacctgtgccagcttttaaacaa

SEQ ID NO: 436593 - DNA, 120 bp, Artificial Sequence
  ENSG00000153086_3 (sequence is synthesized)
cgaccttgccagcaccgttgtgagctaccccaggaggttcgtgggtctggggacgttgcccatgcaggcccctgagctggcggtcaaggagatggagcgctgtgtgaaagagctgggctt

SEQ ID NO: 436594 - DNA, 120 bp, Artificial Sequence
  ENSG00000153086_4 (sequence is synthesized)
tcccggggtccaaattggcacccacgtcaacgagtgggacctgaacgcgcaggagctctttcctgtctatgcggcagccgaaaggctgaagtgttccctgttcgtgcatccctgggacat

SEQ ID NO: 436595 - DNA, 120 bp, Artificial Sequence
  ENSG00000153086_5 (sequence is synthesized)
ccagcagagaccaccatagccatttgctccatgatcatgggtggagtatttgagaagtttcccaaactgaaagtgtgtttcgcacatggtggtggtgccttccccttcacagtgggaaga

SEQ ID NO: 436596 - DNA, 120 bp, Artificial Sequence
  ENSG00000153086_6 (sequence is synthesized)
atctcccatggattcagcatgcgcccagatctgtgtgcccaggacaaccccatgaacccgaagaaataccttggttccttttacacagatgctttggttcatgatcctctgtccctcaag

SEQ ID NO: 436597 - DNA, 120 bp, Artificial Sequence
  ENSG00000153086_7 (sequence is synthesized)
ctgttaacagatgtcataggaaaggataaagtcattttgggaaccgattacccctttccactaggtgagctggaacctgggaaactaatagagtccatggaagaatttgatgaagaaaca

SEQ ID NO: 436598 - DNA, 120 bp, Artificial Sequence
  ENSG00000153086_8 (sequence is synthesized)
aagaataaactcaaagccggcaatgccctggcatttttgggtcttgagagaaaacaatttgaatgactgaatttactacaaaggcaaactttcaaaaggatatctcatttttgtttctaa

SEQ ID NO: 436599 - DNA, 120 bp, Artificial Sequence
  ENSG00000153086_9 (sequence is synthesized)
atatgtatcaacaggtatcaacaaaatcctattttgaactattttactcagaaatgaatgtcccaaatatcctaaattattcataataaaaatgatttgtaagtgttttcattctgaaaa

SEQ ID NO: 436600 - DNA, 120 bp, Artificial Sequence
  ENSG00000153086_10 (sequence is synthesized)
ttctctctcctttggcctctctccaaaaaagggatggaagaaaggtattagatgaaaggagagagacagtgaggtttgggattaggtttgctcacacaggggattctctccagggtctcc

SEQ ID NO: 436601 - DNA, 120 bp, Artificial Sequence
  ENSG00000153086_11 (sequence is synthesized)
ctccacacagagtacataacactaagaaactattatatatgccagagaaatcccagatcatctacatggctgggtattcccccagatcagctcctcttccttagcgacatccctatatgc

SEQ ID NO: 436602 - DNA, 120 bp, Artificial Sequence
  ENSG00000153086_12 (sequence is synthesized)
acccaaaatgacacatggcaatgtagtaagcaggaaaggggcacaagtttcaaagtcaaattgacctgggttaaaatcctggctctacctttcactagttgggtaaattgtgaatacaac

SEQ ID NO: 436603 - DNA, 120 bp, Artificial Sequence
  ENSG00000153086_13 (sequence is synthesized)
tgtcctcatccactacatggagaaaactggaacattgaaagtgtggaaaatgcatagttgggaaattgcgctggacagggagtcaggggaagatgatgaagggtcttgtgtatcatgccc

SEQ ID NO: 436604 - DNA, 120 bp, Artificial Sequence
  ENSG00000153086_14 (sequence is synthesized)
tgagatttcttcctggaataatatggcttttgattctctcatttaattaaaacaccagcatagtggtactttaaagcgcacaagaaaaagtctttcctctgatgtagtctcctcgccaat

SEQ ID NO: 436605 - DNA, 120 bp, Artificial Sequence
  ENSG00000153086_15 (sequence is synthesized)
ctctctgttggtggcacacccaccctttaagtattctttaaaaatgctaactcagcaagttcaagaatttctagggaaaaggccatagtgaaaagtctaaaatattttgtatttcaattc

SEQ ID NO: 436606 - DNA, 120 bp, Artificial Sequence
  ENSG00000153086_16 (sequence is synthesized)
catcttattaacagatatctatagaagatttccacattttcccaagggaaaaatctttggggttaaaagtatatagacatatttaaaaatttgcaatatggtacttgagtttagactcta

SEQ ID NO: 436607 - DNA, 120 bp, Artificial Sequence
  ENSG00000153086_17 (sequence is synthesized)
aggtttaaaaaaatcatgtcgagcaaaaagaggcccatcatttgaaagttgcaagtagtggtttatctccagaatggacactttatctcatattaatgctgactgtttctctggcttgag

SEQ ID NO: 436608 - DNA, 120 bp, Artificial Sequence
  ENSG00000153086_18 (sequence is synthesized)
cccttttctctgccaggacaggctgttccagcttcactgtgggagggacagggccttccactacaatgcttttagagtgtggattcaaaatgtttcatatgagttataccctgttttaaa

SEQ ID NO: 436609 - DNA, 80 bp, Artificial Sequence
  ENSG00000153086_19 (sequence is synthesized)
ggattcaaaatgtttcatatgagttataccctgttttaaaatagaatgctatatcatgaaaaagataaaaatggcatttt

SEQ ID NO: 436610 - DNA, 120 bp, Artificial Sequence
  ENSG00000153093_0 (sequence is synthesized)
acctgctgggagctggaggaggcgcggagcgaagccggccctgccagccacgcggagaagcagaggcaggtgagcgcgatgcagccggcgccgggtctggggctcggggactcctccctg

SEQ ID NO: 436611 - DNA, 120 bp, Artificial Sequence
  ENSG00000153093_1 (sequence is synthesized)
caccgctacctggacggcgacttctggagcctcaagaacgagctgcgcggactcctcggcggcgcccgctcttccggcaaaggtatgatttaagcttggatgaaatgagagctttgacag

SEQ ID NO: 436612 - DNA, 120 bp, Artificial Sequence
  ENSG00000153093_2 (sequence is synthesized)
ttcagagagtgaagtttgccatggacctgcctctgttaaaacgtgcaggtcaggatctggcagagaaaacaaagaattttgtcagccgaagccttgtcataggagaagtcctctccatgg

SEQ ID NO: 436613 - DNA, 120 bp, Artificial Sequence
  ENSG00000153093_3 (sequence is synthesized)
cggacatggccacaggagtgaagtgcggaataatttattggctatttggtggtgctatcaggaatctcggaagccctgaacatgttactaagtggtttcagccactccaggagcagaaat

SEQ ID NO: 436614 - DNA, 120 bp, Artificial Sequence
  ENSG00000153093_4 (sequence is synthesized)
acactgggatgtttgcaatgaccgagaggggccatgggagcaacgcgagagggatccagaccgaagccacctttgacctctctgcccaggagtttgtaattgacacgccgtgtgaaaatg

SEQ ID NO: 436615 - DNA, 120 bp, Artificial Sequence
  ENSG00000153093_5 (sequence is synthesized)
cggagaagatgtatattggaaatgccatgtacgggaattatgcagctgtctttgcccagctcatcatagatggaagatctcaagggccccactgtttcatcgttcctgtccgggatgaaa

SEQ ID NO: 436616 - DNA, 120 bp, Artificial Sequence
  ENSG00000153093_6 (sequence is synthesized)
acggaagcttgtacccaggagtcacagctattgatatgatgtacaaggagggtctgcatggtgtggacaatgggatattaatatttgacaaggttcggatacccagggagaacctgctgg

SEQ ID NO: 436617 - DNA, 120 bp, Artificial Sequence
  ENSG00000153093_7 (sequence is synthesized)
ataagtttggttccgtggctccagatggacagtaccattcgcctattaggaacaagagtgcaagattcaatgccatgctggcagcactgaccccttcgagattagctgtggctttccaag

SEQ ID NO: 436618 - DNA, 120 bp, Artificial Sequence
  ENSG00000153093_8 (sequence is synthesized)
ctatgggtgccatgaagcttgggttgacgatagccattcgctatagccacagccggaggcagtttgggcccaaaaccaaggaagaggtgaagatcattgagcaccaaacacagaccctgc

SEQ ID NO: 436619 - DNA, 120 bp, Artificial Sequence
  ENSG00000153093_9 (sequence is synthesized)
ggctgatgccccacctggccacagccttggccctgaccttcgtcagcaggtatgctggggccctcctggatgaggatgtcttccagggaaaggagctggtcaacagtcgctcgctgcagg

SEQ ID NO: 436620 - DNA, 120 bp, Artificial Sequence
  ENSG00000153093_10 (sequence is synthesized)
ctctggtggcggggctgaaggcctacagcacctgggagaacatccgctgcctgcaggactgccgcgagtgcactggaggcatgggttacatgatggaaaatcgaatctcaggcttaaagt

SEQ ID NO: 436621 - DNA, 120 bp, Artificial Sequence
  ENSG00000153093_11 (sequence is synthesized)
gcccaatacaccaaacagtatgaagaaaaaccactctttggcctgctccaaaactgggctgaatctgtgggggacaagctgagaaccagtttcctggcatttaacatggacacagttgat

SEQ ID NO: 436622 - DNA, 120 bp, Artificial Sequence
  ENSG00000153093_12 (sequence is synthesized)
gatctcgcctttctgttgaaagcagtgaaatttcgtgaaagggttcttcagcggggtttggtggccagaatttattataaggtaaagaccaagaaggaggattttttccatgcctggaac

SEQ ID NO: 436623 - DNA, 120 bp, Artificial Sequence
  ENSG00000153093_13 (sequence is synthesized)
tcgtgtctgcaccacgtggcttctctgtccctggcacacactcaccgagttaccttagagcagttctccctagcagtgaagagctgtcctgaccaagaggaccagactttgttaatgaag

SEQ ID NO: 436624 - DNA, 120 bp, Artificial Sequence
  ENSG00000153093_14 (sequence is synthesized)
ttttgtctgttgtatggaaccaagctggtgtttcaggagcgggcctggtatttagaacataaatacttgactcccatggccagcacgaggatcaggaatcaggagagatgctgaaacaca

SEQ ID NO: 436625 - DNA, 120 bp, Artificial Sequence
  ENSG00000153093_15 (sequence is synthesized)
aggagagatgctgaaacacaaacaggtataagactcagtctccacatgaagggagctcatatccaaggacacaaaaccactttaaaaacataaatactggccaggtgcagtggctcatgc

SEQ ID NO: 436626 - DNA, 81 bp, Artificial Sequence
  ENSG00000153093_16 (sequence is synthesized)
cactatgggaggctgaggcgggcagatctcctgagctcaggagttcgacaccatcttgggcaacatggtgaaaccctgtgt

SEQ ID NO: 436627 - DNA, 120 bp, Artificial Sequence
  ENSG00000153093_17 (sequence is synthesized)
aaacaaaacaaaacaacaacagcaaaaaacaacaaaacaaaacacaaatactctcacagggcatggaggttttcgaatgaacttggccataagaataaattcagagttgacagaacagac

SEQ ID NO: 436628 - DNA, 120 bp, Artificial Sequence
  ENSG00000153093_18 (sequence is synthesized)
gtcttaggaataaatgccattcttatgctagaccttgaagagtagaaaattaagagatggtggcccaattgagaggggaaaatgcagttgaaacttcagacagggttgataaagtgagga

SEQ ID NO: 436629 - DNA, 120 bp, Artificial Sequence
  ENSG00000153093_19 (sequence is synthesized)
cgatcatagacatggagtacttagacatattaataaacaataaagactttacctgtctaatggaaaacctggagaagtcgtcaggaaccagactacagtggaccctggagaaccttgaag

SEQ ID NO: 436630 - DNA, 120 bp, Artificial Sequence
  ENSG00000153093_20 (sequence is synthesized)
aacatttttccttttcaggaaaacggaggttacagagaaaagtatatgtaatgatgctacagtaatgtatttctgtataacaaatgactccaaacttacgacttaaaacaaccaccactt

SEQ ID NO: 436631 - DNA, 120 bp, Artificial Sequence
  ENSG00000153093_21 (sequence is synthesized)
actccaggagcagaaatacactgggatgtttgcaatgaccgagaggggccatgggagcaacgcgagagggatccagaccgaagccacctttgacctctctgcccagatggggaaacagag

SEQ ID NO: 436632 - DNA, 120 bp, Artificial Sequence
  ENSG00000153093_22 (sequence is synthesized)
tgtctgataggggacctgcaaagttgcaatcataatgacgaggggcctctggtgaacactgtctcccgtggggctgggagagagaacaatcccatcataaactcataccaccgagaactg

SEQ ID NO: 436633 - DNA, 120 bp, Artificial Sequence
  ENSG00000153093_23 (sequence is synthesized)
acatagcaggaatgtatttctcccttcactgggttctgtgttttccccttcatttccctttcaaaatgctagagcttattaaataagtgttctctccccaaggaccatttaaatctctta

SEQ ID NO: 436634 - DNA, 120 bp, Artificial Sequence
  ENSG00000153093_24 (sequence is synthesized)
ccctggcgagggcgaggtggggtgtgcgccgcgcctgagaggcgggtccctgcctcgccgcaggtgacgggctcccctccccaggtgtgtgggcgcagccggccgccgccgacctcttcg

SEQ ID NO: 436635 - DNA, 120 bp, Artificial Sequence
  ENSG00000153093_25 (sequence is synthesized)
cctcttcggccccctgagaggtgccctctcctcccgagctccctcccccacgaagagtcgggtgcagggctgggccccgcggtgacaggcgcggtgtctacgaagaccgtgtggctggaa

SEQ ID NO: 436636 - DNA, 120 bp, Artificial Sequence
  ENSG00000153093_26 (sequence is synthesized)
catctcccagaactgctgttcagctccagctggtctttattgagcccctcttgtggaccaggctaatttcctgaaaactggtttttgctaacgtttcttacgcttgctcgtgaaatcagc

SEQ ID NO: 436637 - DNA, 120 bp, Artificial Sequence
  ENSG00000153093_27 (sequence is synthesized)
cagatccctataggcttctcactgcactatcccaaactttttatctgagaatgttgtgtggcaagatgtctgcagagtgccgcttaggagatgctggcctggcgtccacgggtctgctgt

SEQ ID NO: 436638 - DNA, 120 bp, Artificial Sequence
  ENSG00000153093_28 (sequence is synthesized)
gtatgtctctccaggcagatggcctgtctctgcctggcaaggacgatctggggtggaaaaactctgatctgaaagtgaaatcattgactccgttaccatgttctgaattcccagatctcc

SEQ ID NO: 436639 - DNA, 120 bp, Artificial Sequence
  ENSG00000153093_29 (sequence is synthesized)
ctgatatggaaagtgaaaattggcttctattacacaatgcatcaaaattcttttgtataggaccagaccactgatatcaagggcagtgcactgactttcagttcctctgcatcccttggt

SEQ ID NO: 436640 - DNA, 120 bp, Artificial Sequence
  ENSG00000153093_30 (sequence is synthesized)
catgttcccacctttcaatgggaacagagaataaaaattccagctctagggcccagcctagtggccacctctcacggacaggcacccggctgctcagtgttatccaattactagaggcca

SEQ ID NO: 436641 - DNA, 120 bp, Artificial Sequence
  ENSG00000153093_31 (sequence is synthesized)
ggcacccggctgctcagtgttatccaattactagaggccattcctagcatttcaacttggggaattaatttactattactttatttttatctttagagacagagtcttgctctgtcaccc

SEQ ID NO: 436642 - DNA, 120 bp, Artificial Sequence
  ENSG00000153093_32 (sequence is synthesized)
ttgaactcctgagctcaggcaatcctcctgccacagccacctgagtagctggaactataggcatgtgccatcatgcccaactaattttatttttatttcagttgtagagatggagcctta

SEQ ID NO: 436643 - DNA, 76 bp, Artificial Sequence
  ENSG00000153093_33 (sequence is synthesized)
ctaattttatttttatttcagttgtagagatggagccttaccctgttgcccaggctggtctctgactcctggtctc

SEQ ID NO: 436644 - DNA, 120 bp, Artificial Sequence
  ENSG00000153093_34 (sequence is synthesized)
taaagtgtgtgttgcctttctagtttgagtagaaagtccagcattatctttttggataatatccaggttttgctgtttctttctttatttttcataatgagaacatttgctctcttgctg

SEQ ID NO: 436645 - DNA, 120 bp, Artificial Sequence
  ENSG00000153093_35 (sequence is synthesized)
acattggagggcgtctgtttacctctcctgtaggcacacaaaattcccaacgtttatttgaagaaaaagacaattatttgagtaatttgaataaataaacattttaagtgattcccaaaa

SEQ ID NO: 436646 - DNA, 120 bp, Artificial Sequence
  ENSG00000153093_36 (sequence is synthesized)
gctgcttggctcctttgaacgtagaagatggattacactcgtttactattttaatctaagcataaagtataaatgcagtcactgcttagtgtcacaaaggcttgtgattaaagaacacac

SEQ ID NO: 436647 - DNA, 120 bp, Artificial Sequence
  ENSG00000153093_37 (sequence is synthesized)
cgtgaaagggttcttcagcggggtttggtggccagaatttattataaggtactgtcttttcatgtgaaaatggaagtttagaaatctagaacaggcttcagctgctgaatcttgatacac

SEQ ID NO: 436648 - DNA, 120 bp, Artificial Sequence
  ENSG00000153093_38 (sequence is synthesized)
tacatcgaaaaatggcagtgggtgcccaggccagccagcagcatggaatccaggtatctgaaacctctctccctgccgcttgcaaagacattcataagttttcttgaagttctgaaaagt

SEQ ID NO: 436649 - DNA, 120 bp, Artificial Sequence
  ENSG00000153093_39 (sequence is synthesized)
gagtgggttttagtattcttaaaggcttagccaaaaatgtaagtcccttagttacggtaaaatacataaaaatgcttagttgaaacttcaaatatatagctaaataaaaaattaaggaac

SEQ ID NO: 436650 - DNA, 120 bp, Artificial Sequence
  ENSG00000153093_40 (sequence is synthesized)
atttgtgcgactcggtgaaggatgatgcccggagggtgatctcgacctttaacattccacacacctacctccacgcaccaatcgccggaatctccaacccgcgggccgcgtgggctttct

SEQ ID NO: 436651 - DNA, 120 bp, Artificial Sequence
  ENSG00000153093_41 (sequence is synthesized)
accctgcaccgctgcagccgcggccacgggaagaggcgcgctcccggcggcccaagctgggagccaagctctaacgggtgtggcgggaagtgtggtggcccgccagcagctgccacgacg

SEQ ID NO: 436652 - DNA, 120 bp, Artificial Sequence
  ENSG00000153093_42 (sequence is synthesized)
ctcgctccaccgacgcccagagctgtggccgaggccgggggctggcacccgctgggccgccactctcggggattttggtggcaaagcggaggtcccgccgaggctggcgaggtgcgcggc

SEQ ID NO: 436653 - DNA, 120 bp, Artificial Sequence
  ENSG00000153093_43 (sequence is synthesized)
tggctgctaggaaagagatccagacggtcgcctggtgcgctggatccctgtgccctttccctgaaacccagcctggcctgactgcaacctctcccaacttcagtgccggatcccctagac

SEQ ID NO: 436654 - DNA, 120 bp, Artificial Sequence
  ENSG00000153093_44 (sequence is synthesized)
aatcagggtgggctccccgctgcgagcgcgccccacagccgggtgccgccaaaggtctcctgctgttagcggtgactcacattcccagtgatttagaaaaactgtggtgccgagtgaaag

SEQ ID NO: 436655 - DNA, 120 bp, Artificial Sequence
  ENSG00000153093_45 (sequence is synthesized)
caagattcaatgccatgctggcagcactgaccccttcgagattagctgtggctttccaagctatgggtgccatgaagcttgggttgacgatagccattcgctatagccacaggtatgctg

SEQ ID NO: 436656 - DNA, 80 bp, Artificial Sequence
  ENSG00000153094_0 (sequence is synthesized)
acttcgctccgcgcagccgcctggtctgcagtttgttggagctctgcgtccagcgccgctgccgctgccgccgccgccgc

SEQ ID NO: 436657 - DNA, 120 bp, Artificial Sequence
  ENSG00000153094_1 (sequence is synthesized)
tgattcttgcagccaccctgcgaaccctgccacactgcgatcgcatcatcgcggtattcggttcgctgcgttcccgccgccaccgcctcggcgccctttcttggcccttgttcccccaaa

SEQ ID NO: 436658 - DNA, 120 bp, Artificial Sequence
  ENSG00000153094_2 (sequence is synthesized)
tgtctgactctgactctcggactgagaaacgcaagaaaaaaagaccaaatggcaaagcaaccttctgatgtaagttctgagtgtgaccgagaaggtagacaattgcagcctgcggagagg

SEQ ID NO: 436659 - DNA, 120 bp, Artificial Sequence
  ENSG00000153094_3 (sequence is synthesized)
cctccccagctcagacctggggcccctacctccctacagacagagccacaagacaggagcccagcacccatgagttgtgacaaatcaacacaaaccccaagtcctccttgccaggccttc

SEQ ID NO: 436660 - DNA, 120 bp, Artificial Sequence
  ENSG00000153094_4 (sequence is synthesized)
aaccactatctcagtgcaatggcttccatgaggcaggctgaacctgcagatatgcgcccagagatatggatcgcccaagagttgcggcgtattggagacgagtttaacgcttactatgca

SEQ ID NO: 436661 - DNA, 120 bp, Artificial Sequence
  ENSG00000153094_5 (sequence is synthesized)
aggagggtatttttgaataattaccaagcagccgaagaccacccacgaatggttatcttacgactgttacgttacattgtccgcctggtgtggagaatgcattgacaggttctttgcgga

SEQ ID NO: 436662 - DNA, 120 bp, Artificial Sequence
  ENSG00000153094_6 (sequence is synthesized)
cagcggttctcttgtggagggggcaggtgacgtttcagaagacaccgagctggatgggactacctttctgttcatcaccacacagcagaatttctaatggaagtttgttgtgaatgtaaa

SEQ ID NO: 436663 - DNA, 120 bp, Artificial Sequence
  ENSG00000153094_7 (sequence is synthesized)
ggagggagcattctttgctttttaatatacaaaccatggttttttggagcaggattttgtgtaagaatggtgtttacatgcagtgtgttttccccctcaccttcaataaggtttttcaaa

SEQ ID NO: 436664 - DNA, 120 bp, Artificial Sequence
  ENSG00000153094_8 (sequence is synthesized)
aaggaaatggaaactttttaaccaatttgtgaataacttttgtattaaaattttaagaacctacggcctattctcagaggattatgtaacccctgcagtggaaactgagccagctaactt

SEQ ID NO: 436665 - DNA, 120 bp, Artificial Sequence
  ENSG00000153094_9 (sequence is synthesized)
aaaaagctgccttagtttatttttagagattacagaatttttaaacagggagacgtgtgatatactccctcccttccctactattgcctctctgacctttttaaattatttttaatacca

SEQ ID NO: 436666 - DNA, 120 bp, Artificial Sequence
  ENSG00000153094_10 (sequence is synthesized)
aaagagttcttttgaaatggaactgattaaaagggcagagggtctgttgccagcctgcattgatataccagtcccatttgtaaatatttacgtacctttataaattcagttgcatctgtg

SEQ ID NO: 436667 - DNA, 120 bp, Artificial Sequence
  ENSG00000153094_11 (sequence is synthesized)
gcaaaatttcagactatttttgcgtctttcctcatcactttttgtgatgcaactccagtctggactcagatgcatagatttggtccagtgtattttcatgataaagtgaaattgagtcag

SEQ ID NO: 436668 - DNA, 120 bp, Artificial Sequence
  ENSG00000153094_12 (sequence is synthesized)
cctccccagctcagacctggggcccctacctccctacagacagagccacaaggtaatcctgaaggcaatcacggaggtgaaggggacagctgcccccacggcagccctcagggcccgctg

SEQ ID NO: 436669 - DNA, 120 bp, Artificial Sequence
  ENSG00000153094_13 (sequence is synthesized)
gccccacctgccagccctggcccttttgctaccagatccccgcttttcatctttatgagaagatcctccctgctgtctcgatcctccagtgggtatttctcttttgacacagacaggagc

SEQ ID NO: 436670 - DNA, 120 bp, Artificial Sequence
  ENSG00000153094_14 (sequence is synthesized)
tccatttcgacgagcatgttattgggaagtattctgaagaggcaatagcagtaataacaacagacttaagtgctacgcccctttgtgctgctggcttttctggttgcaggctttcccatg

SEQ ID NO: 436671 - DNA, 120 bp, Artificial Sequence
  ENSG00000153094_15 (sequence is synthesized)
gtcacaggatgcactgtcagcatcaggtcccagagggccaccgtgtccattacagcagagtccagctgcagcatccagctcacgccctcatgggaattggcacaggcctggggcagggct

SEQ ID NO: 436672 - DNA, 120 bp, Artificial Sequence
  ENSG00000153094_16 (sequence is synthesized)
tctgatggccatttgcttggcctcctgcattttagtccaactcacagtccactagcttcactcctttaaattcactttgaaacaggcctcatcccacttccaccagcaccatagaagaat

SEQ ID NO: 436673 - DNA, 120 bp, Artificial Sequence
  ENSG00000153094_17 (sequence is synthesized)
aattctgggcagaagtctgttttttttcatttttccaggacagttggatattgtcaggccacttgtgaccccagccatgtagtgagggtgctctttctctgtgcctgctccttatgagtg

SEQ ID NO: 436674 - DNA, 120 bp, Artificial Sequence
  ENSG00000153094_18 (sequence is synthesized)
cagtggaaggaagccacacactggtcagtcatttcagaggcagcagatgcccagggagacccaagaaagagtcaggttagggagcagtgaaagtgaggagggaagacaattctgtgaact

SEQ ID NO: 436675 - DNA, 120 bp, Artificial Sequence
  ENSG00000153094_19 (sequence is synthesized)
ctgtaactcttaaaatttttgaaaactccatcgttaaacaacttttaaaagaaataactaaattttcaaatgagtaagcagtgccaccaactagtgttttgcccgatagaagagccagca

SEQ ID NO: 436676 - DNA, 120 bp, Artificial Sequence
  ENSG00000153094_20 (sequence is synthesized)
attgcatattcactttttcctttaggtagagatgatttcaatccaaatactcttactttaaaaaatttcctttccccaagaatctccttgggactttgacttatttttaaagctgtgttg

SEQ ID NO: 436677 - DNA, 120 bp, Artificial Sequence
  ENSG00000153094_21 (sequence is synthesized)
gagctcatcttgttccctgatgtgtctcgagcccattggtagggtcatacaaagcccacggttacaagcagtggtaggattgcagccgtgggcctgctggacacacacatacaccaaaga

SEQ ID NO: 436678 - DNA, 120 bp, Artificial Sequence
  ENSG00000153094_22 (sequence is synthesized)
tgtatttggatctgggcaccccctcccaggatccctgtactcacgtgccagtctcctgactagagcactttactctgtttcctcagccctgcagcccctgggagcacacactgggtgcag

SEQ ID NO: 436679 - DNA, 120 bp, Artificial Sequence
  ENSG00000153094_23 (sequence is synthesized)
ccctgggccaggcacgggaggccctgccctgtgctgcccaggggctgtgtgcaccacatgagcacatttccctctggcctggcggcctccaggctggctgtggaaacagttcctgaggaa

SEQ ID NO: 436680 - DNA, 120 bp, Artificial Sequence
  ENSG00000153094_24 (sequence is synthesized)
attagagattctatgaattgtaggagtattaaagaccaggctgttggcaccagaacttaaagcgatgactggatgtctctgtactgtatgtatctggttatcaagatgcctctgtgcaga

SEQ ID NO: 436681 - DNA, 120 bp, Artificial Sequence
  ENSG00000153094_25 (sequence is synthesized)
aagtatgcctcccgtgggtatacgtttttaccttttttaaaaaacatttttgtagaaaaaataattaaatcccctttttggaaacttactgcaggttttgtgccttgacaacctctccct

SEQ ID NO: 436682 - DNA, 120 bp, Artificial Sequence
  ENSG00000153094_26 (sequence is synthesized)
atgtgaggtttgtaaaaagtgtcctgtgacttaacacagaaacgcaataaacacacacaaaatagtttcatgagtgattcttcagatgcccttcccaactggttagttgatcaagaattt

SEQ ID NO: 436683 - DNA, 120 bp, Artificial Sequence
  ENSG00000153094_27 (sequence is synthesized)
tgggggtgggggttgcggagaaatcaagtttaaaattccttctgattaaaaaaatatagtggaatacaattgtctgccgtttccccttcttaatgtatatattgtgagtatttattagat

SEQ ID NO: 436684 - DNA, 120 bp, Artificial Sequence
  ENSG00000153094_28 (sequence is synthesized)
tcgtaggtcatattacttatcaactgagccaaatgtctgtgtgcaattgtgtttcctttaccttgtaaaattttgtacagcataaataagtaaaaaaatcactgtttttctcaacttttt

SEQ ID NO: 436685 - DNA, 120 bp, Artificial Sequence
  ENSG00000153094_29 (sequence is synthesized)
caaaatcaaggattgtaaatattgtagattctttttctgtgtgatgtgtcctactgtttcataatgctgtaacttgtagaaatattgtatatttattttctgcttatttaatgtcttaat

SEQ ID NO: 436686 - DNA, 120 bp, Artificial Sequence
  ENSG00000153094_30 (sequence is synthesized)
ttctgaaaagtattaacatccctgtctcccactcccctgccgtcccatgaagttaactcctgagagttgtcgggggtgactggagagctcattgcagaccacgtggtcctccagggtggc

SEQ ID NO: 436687 - DNA, 120 bp, Artificial Sequence
  ENSG00000153094_31 (sequence is synthesized)
tctccaccttcgggtcctggtatttccagtcaagtgggtttcaattcttgggctttgccgcccttatgatgaagtgtgtgtttgatgccagtgagaaactcagtctggcaggctacaaaa

SEQ ID NO: 436688 - DNA, 120 bp, Artificial Sequence
  ENSG00000153094_32 (sequence is synthesized)
ttctactccaagaaatacccagcaaccttctgtttgttccaaagcaactagcttatcatgcaagcaaattttgctgactccaggctttatctttaggaaaacaaaaaaaccaaagtatta

SEQ ID NO: 436689 - DNA, 120 bp, Artificial Sequence
  ENSG00000153094_33 (sequence is synthesized)
tcagcaggtgggaaagatttttctattgaaaatttatccctgacaactcagcgtttagaaaagaaataaaatgtgccacttccagaggtgctgcattgcagttgttcagggctagggcca

SEQ ID NO: 436690 - DNA, 120 bp, Artificial Sequence
  ENSG00000153094_34 (sequence is synthesized)
ggcaggacaagtgaatgggtgggacaggtggctcctgcctaaggaccacctcaggccactaaccccttgtggacaactgtgagtagctgggttttcccccacctgctgtgcaacttcctg

SEQ ID NO: 436691 - DNA, 120 bp, Artificial Sequence
  ENSG00000153094_35 (sequence is synthesized)
tgctttgaggttggactaacttgtcttcaggagctaattaactgtacagccctccccacgccccacccatacggtcactgcatttggtcagcctgcttcttcaggtcgatgccctccttc

SEQ ID NO: 436692 - DNA, 120 bp, Artificial Sequence
  ENSG00000153094_36 (sequence is synthesized)
tgatactccatctccttcaggggaggttggggccccactggactgggtgtcaagatgtgaaagcttatgggagctttaaggagacttcatggtggttccatgcaggtggttctgccatcc

SEQ ID NO: 436693 - DNA, 120 bp, Artificial Sequence
  ENSG00000153094_37 (sequence is synthesized)
ctgctgatttagcctggtgcctgtgtgtgtccactcacgtacacgtggggtgggggaaacgtgtctacagatgacgctaaatcagttggggtctactctaaacagcattgtgtgtaagaa

SEQ ID NO: 436694 - DNA, 120 bp, Artificial Sequence
  ENSG00000153094_38 (sequence is synthesized)
gcatcctcaagctcccagttaagtaacttgactacttttatttgggaatttcagactatagaagctctcttatgttttatgtccagattctgtgaccactagttactgtatcagaactca

SEQ ID NO: 436695 - DNA, 120 bp, Artificial Sequence
  ENSG00000153094_39 (sequence is synthesized)
tcaggtacccacttataaatagcactgatctggctgtatactgatccatcactaacctgttttctaggacccagcgtatgtagcatttgtattgcagtttccctggcttacttgtgtttt

SEQ ID NO: 436696 - DNA, 120 bp, Artificial Sequence
  ENSG00000153094_40 (sequence is synthesized)
gcactgatgaattttgacagggtaattgccactttacttgtgcaatactgctgtaaataactgcagatttttaaacaatcttttatgttaattttataaaaataaaactttcaactagtt

SEQ ID NO: 436697 - DNA, 120 bp, Artificial Sequence
  ENSG00000153094_41 (sequence is synthesized)
attggagacgagtttaacgcttactatgcaaggaggctggcaaaactcctggcatcctccacctgacataaaccagttcacagaacattccagcctagatctgaaatgttagagaaatag

SEQ ID NO: 436698 - DNA, 120 bp, Artificial Sequence
  ENSG00000153094_42 (sequence is synthesized)
tatctcagtgcaatggttagagaaatagaggaagttgtcgtgtagttgtcatgtattcagtccacttaagggcagtggggaagcgtttgagacggagctgtggaggctgaatccttgaag

SEQ ID NO: 436699 - DNA, 120 bp, Artificial Sequence
  ENSG00000153094_43 (sequence is synthesized)
gacgcgcgtcctccagcgactccgggaacccaaggcctccttcacctcgctcaaaattcacccgaaaatgcgctgagactttggcatggggctgcgctgtgtcccactgacgttacagaa

SEQ ID NO: 436700 - DNA, 120 bp, Artificial Sequence
  ENSG00000153094_44 (sequence is synthesized)
gggactagaaacagctccatcacccagtaaagagaaagaaaacatggatctgcctaggaagtcacctctgcctgagtctgctacttgcaggattggagcttttgctgcagattacagctt

SEQ ID NO: 436701 - DNA, 120 bp, Artificial Sequence
  ENSG00000153094_45 (sequence is synthesized)
tgaagtcactttacctcaagagcagtttatattttattgtgctttaaaaaaaaaatttagtgccaggtttatggagtgaagtgctttcataaatgctgaaactacattttctgtgggtaa

SEQ ID NO: 436702 - DNA, 120 bp, Artificial Sequence
  ENSG00000153094_46 (sequence is synthesized)
aaatgcagctcatcagaatttcccctttgaagaattttttatgttcacataaaattgccaagttaaaaatttgatctccctacagagtaagagctttcatttcaaataaaaccattttat

SEQ ID NO: 436703 - DNA, 120 bp, Artificial Sequence
  ENSG00000153094_47 (sequence is synthesized)
tacagaacaactcaaccacaaggatttctcatgatacctttttatagccacagccacctctctccctcttccttgagcattttgtcatatggtcattggtgattaaataaaatgtatttt

SEQ ID NO: 436704 - DNA, 120 bp, Artificial Sequence
  ENSG00000153094_48 (sequence is synthesized)
gtgcggagccctcggctgcccggcggagcgcggcggcgggctggcgggaaggcgcgggctttgcgctgcgccggggactctgaacccgagtcccgggctttgtctcctgcgctgctttcg

SEQ ID NO: 436705 - DNA, 120 bp, Artificial Sequence
  ENSG00000153094_49 (sequence is synthesized)
agtcccgggctttgtctcctgcgctgctttcgtggtgacggtcagggggcgcccggtcggcgaagggcgcgggccggacgccgcggggcttggtccctggcccggacgctgcgctctgaa

SEQ ID NO: 436706 - DNA, 120 bp, Artificial Sequence
  ENSG00000153107_0 (sequence is synthesized)
gcgaggcaagacgggaaagtcaagatggacgcgtccatttgaacgtctcgcacgccttcctgccattagcactcgagcccgctgctgttgcccgttcttcctccagaataggggagggag

SEQ ID NO: 436707 - DNA, 120 bp, Artificial Sequence
  ENSG00000153107_1 (sequence is synthesized)
agggaatgagaagctgctgcggcccaagagtcactgtgaaggaccccgccgctgccctcgggcctcctcggcccctgcgcctccggggagcagccggggctcgccgcgcctgacgcgtcc

SEQ ID NO: 436708 - DNA, 120 bp, Artificial Sequence
  ENSG00000153107_2 (sequence is synthesized)
cgagttatacagaaataatgttgatatttggaacccatgtcgaacttctatgaagaaaggacaacgatgattgcagcaagggatttgcaggaatttgttccttttggtcgagaccactgc

SEQ ID NO: 436709 - DNA, 120 bp, Artificial Sequence
  ENSG00000153107_3 (sequence is synthesized)
aagcaccaccctaatgctttgaaccttcaacttcgccagctgcagccagcttctgaattatggtcttctgatggtgctgctggcttggtgggatcccttcaggaggttacaatccacgag

SEQ ID NO: 436710 - DNA, 120 bp, Artificial Sequence
  ENSG00000153107_4 (sequence is synthesized)
aaacagaaggaaagctggcagttaaggaaaggagtaagtgaaattggagaagatgtggactatgatgaggaactctatgttgctggaaatatggtgatatggagcaaaggaagtaaaagc

SEQ ID NO: 436711 - DNA, 120 bp, Artificial Sequence
  ENSG00000153107_5 (sequence is synthesized)
caggcattggcagtttataaagcatttacagttgacagtcctgttcagcaggcattgtggtgtgacttcattatatcacaggataagtctgaaaaggcctacagtagcaatgaagtagaa

SEQ ID NO: 436712 - DNA, 120 bp, Artificial Sequence
  ENSG00000153107_6 (sequence is synthesized)
aaatgcatatgtatattgcaaagctcatgtattaacatgcatagcatagaaggaaaggattacatagcttcattaccatttcaggttgcaaatgtttggcccactaaatatggattgctg

SEQ ID NO: 436713 - DNA, 120 bp, Artificial Sequence
  ENSG00000153107_7 (sequence is synthesized)
tttgaacgaagcgcttcttcacatgaagtacctccaggttcacccagagaacctttacctactatgttcagcatgctgcacccactagatgaaataactccacttgtttgtaaatctgga

SEQ ID NO: 436714 - DNA, 120 bp, Artificial Sequence
  ENSG00000153107_8 (sequence is synthesized)
agtctttttggttcatcacgggtgcaatatgttgtagatcatgcaatgaaaattgttttcctcaatactgacccctctattgtaatgacttatgatgctgttcaaaatgtgcattctgtg

SEQ ID NO: 436715 - DNA, 120 bp, Artificial Sequence
  ENSG00000153107_9 (sequence is synthesized)
tggactctccggagagtcaaatcagaggaagagaatgttgttttaaagttctctgaacaggggggaaccccacagaatgtggccactagcagctccctcacagcacatctcagaagcctc

SEQ ID NO: 436716 - DNA, 120 bp, Artificial Sequence
  ENSG00000153107_10 (sequence is synthesized)
tccaaaggagattcccctgtgacttcacctttccagaattactcctccattcacagccagagtcgctcaacctcatcacccagtctacattctcgctcaccttctatttccaacatggca

SEQ ID NO: 436717 - DNA, 120 bp, Artificial Sequence
  ENSG00000153107_11 (sequence is synthesized)
gctctaagtcgtgctcattctcctgcgttaggagtgcactctttttcaggggtgcaaaggttcaacatttcaagccataatcagtctccaaagagacatagtatttctcattctccaaat

SEQ ID NO: 436718 - DNA, 120 bp, Artificial Sequence
  ENSG00000153107_12 (sequence is synthesized)
agtaattctaatggctcctttcttgcaccagaaacggagccaattgttcctgaactgtgtattgaccatttgtggacagaaacgattactaatataagagagaaaaattcacaagcctca

SEQ ID NO: 436719 - DNA, 120 bp, Artificial Sequence
  ENSG00000153107_13 (sequence is synthesized)
aaagtgtttattacatctgacctatgtgggcaaaagttcctgtgctttttagtagagtcccagctccagttacgctgtgtaaagtttcaagagagtaatgataaaacccagctcatcttt

SEQ ID NO: 436720 - DNA, 120 bp, Artificial Sequence
  ENSG00000153107_14 (sequence is synthesized)
ggttcagtgaccaacataccagcaaaggatgcagcaccagtggagaaaatagacaccatgctggtcttggaaggcagtggaaacctggtgctatacacaggagtggttcgggtgggaaag

SEQ ID NO: 436721 - DNA, 120 bp, Artificial Sequence
  ENSG00000153107_15 (sequence is synthesized)
gtttttattcctggactgccagctccctctctgacgatgtccaacacaatgcctcggcccagtactccactagatggcgttagtactccaaagcctcttagtaaactccttggatcattg

SEQ ID NO: 436722 - DNA, 120 bp, Artificial Sequence
  ENSG00000153107_16 (sequence is synthesized)
gacgaggttgttctgttgtccccagttccagaactgagggattcttcaaaacttcatgattctctctataatgaggattgtactttccaacagcttggaacttacattcattctatcaga

SEQ ID NO: 436723 - DNA, 120 bp, Artificial Sequence
  ENSG00000153107_17 (sequence is synthesized)
gatcctgtccataacagagtcaccctggaactgagtaatggctccatggttaggatcactattcctgaaattgccacctctgagttagtacaaacgtgtttgcaagcaattaagtttatc

SEQ ID NO: 436724 - DNA, 120 bp, Artificial Sequence
  ENSG00000153107_18 (sequence is synthesized)
ctgccaaaagaaatagcagttcagatgcttgtcaagtggtacaatgtccacagtgctccaggaggacccagttatcactcagagtggaatttatttgtgacttgtctcatgaacatgatg

SEQ ID NO: 436725 - DNA, 120 bp, Artificial Sequence
  ENSG00000153107_19 (sequence is synthesized)
ggttataacacagaccgcttagcatggactagaaattttgactttgaaggatcactttctcctgtcattgcgcccaaaaaagcaaggccttccgagactggatctgatgatgactgggaa

SEQ ID NO: 436726 - DNA, 120 bp, Artificial Sequence
  ENSG00000153107_20 (sequence is synthesized)
tatttactaaattcagactaccaccagaatgttgagtctcatcttttgaacagatctttatgtctgagtccttcagaagcttcacagatgaaggatgaggatttttcacagaatctcagt

SEQ ID NO: 436727 - DNA, 120 bp, Artificial Sequence
  ENSG00000153107_21 (sequence is synthesized)
ctggattcttctacacttctctttactcacatacctgcaatttttttcgttcttcaccttgtgtatgaggagcttaagttgaatactctaatgggagaaggaatttgttcacttgttgaa

SEQ ID NO: 436728 - DNA, 120 bp, Artificial Sequence
  ENSG00000153107_22 (sequence is synthesized)
cttctcgttcagttggcaagggacttaaaattggggccttatgtagatcattactatagagactacccaacgcttgtcagaactactggacaagtgtgcacaattgatccaggtcaaaca

SEQ ID NO: 436729 - DNA, 120 bp, Artificial Sequence
  ENSG00000153107_23 (sequence is synthesized)
ggatttatgcatcatccatcattttttacgtctgagccaccaagtatttatcagtgggtgagttcttgtctgaagggtgaaggaatgccaccttatccttacctccctggaatctgtgaa

SEQ ID NO: 436730 - DNA, 120 bp, Artificial Sequence
  ENSG00000153107_24 (sequence is synthesized)
agaagcagacttgtagtcttgagtattgcactgtacatacttggtgatgagagcttggtttctgatgaatcctcacagtatttaaccagaataactatagccccccagaagttgcaagta

SEQ ID NO: 436731 - DNA, 120 bp, Artificial Sequence
  ENSG00000153107_25 (sequence is synthesized)
gaacaagaggaaaacaggtttagtttcaggcattctacatctgtttctagtctagctgaaagattggttgtctggatgactaatgtaggattcactttaagagatttggaaactcttccc

SEQ ID NO: 436732 - DNA, 120 bp, Artificial Sequence
  ENSG00000153107_26 (sequence is synthesized)
tttggaattgctcttcccatcagagatgcaatttatcactgtcgtgagcagcctgcctcagactggccagaagctgtctgtctcttgattggacgtcaggatctttccaagcaggcctgc

SEQ ID NO: 436733 - DNA, 120 bp, Artificial Sequence
  ENSG00000153107_27 (sequence is synthesized)
gaaggaaacttacccaaagggaagtctgtgctctcatcagatgttccttcaggaacagaaactgaggaggaagatgacggcatgaatgacatgaatcacgaggtcatgtcattaatatgg

SEQ ID NO: 436734 - DNA, 120 bp, Artificial Sequence
  ENSG00000153107_28 (sequence is synthesized)
agtgaagatttaagggtgcaggatgtgcgaaggcttcttcagagtgcgcatcctgtccgtgtcaacgtagtgcagtacccagagctcagtgaccacgagttcatcgaggaaaaggaaaac

SEQ ID NO: 436735 - DNA, 120 bp, Artificial Sequence
  ENSG00000153107_29 (sequence is synthesized)
agattgctccaattgtgtcagcgaactatggctcttcctgtaggacgaggaatgtttaccttgttttcgtaccatcctgttccaacagagccattgcctattcctaaattgaatctgact

SEQ ID NO: 436736 - DNA, 120 bp, Artificial Sequence
  ENSG00000153107_30 (sequence is synthesized)
gggcgtgcccctcctcggaacacaacagtagaccttaatagtggaaacatcgatgtgcctcccaacatgacaagctgggccagctttcataatggtgtggctgctggcctgaagatagct

SEQ ID NO: 436737 - DNA, 120 bp, Artificial Sequence
  ENSG00000153107_31 (sequence is synthesized)
cctgcctcccagatcgactcagcttggattgtttacaataagcccaagcatgctgagttggccaatgagtatgctggctttctcatggctctgggtttgaatgggcaccttaccaagctg

SEQ ID NO: 436738 - DNA, 120 bp, Artificial Sequence
  ENSG00000153107_32 (sequence is synthesized)
aactaggcaccatggatatgtctattactcggcttcttagcattcacattcctgctctcttacccccaacgtccacagagctggatgttcctcacaatgtccaagtggctgcagtggttg

SEQ ID NO: 436739 - DNA, 120 bp, Artificial Sequence
  ENSG00000153107_33 (sequence is synthesized)
gcattggccttgtatatcaagggacagctcacagacatactgcagaagtcctgttggctgagataggacggcctcctggtcctgaaatggaatactgcactgacagagagtcatactcct

SEQ ID NO: 436740 - DNA, 120 bp, Artificial Sequence
  ENSG00000153107_34 (sequence is synthesized)
tagctgctggcttggccctgggcatggtctgcttggggcatggcagcaatttgataggtatgtctgatctcaatgtgcctgagcagctctatcagtacatggttggaggacataggcgct

SEQ ID NO: 436741 - DNA, 120 bp, Artificial Sequence
  ENSG00000153107_35 (sequence is synthesized)
ttcaaacaggaatgcatagggagaaacataaatcaccaagttatcaaatcaaagaaggagataccataaatgtggatgtgacttgtccaggtgctactctagctttggctatgatctact

SEQ ID NO: 436742 - DNA, 120 bp, Artificial Sequence
  ENSG00000153107_36 (sequence is synthesized)
taaaaaccaataacagatctattgcagattggctccgagcccctgacaccatgtatttgttggactttgtgaagccagaatttctcttgcttaggacacttgctcgatgcctgattttgt

SEQ ID NO: 436743 - DNA, 120 bp, Artificial Sequence
  ENSG00000153107_37 (sequence is synthesized)
gggatgatattttaccaaattccaagtgggttgacagcaatgttcctcaaattataagagaaaatagtatctctctcagtgaaatcgaattgccgtgctcagaggatttgaatttggaaa

SEQ ID NO: 436744 - DNA, 120 bp, Artificial Sequence
  ENSG00000153107_38 (sequence is synthesized)
ctttgtcccaagcacatgtctacataattgcaggagcctgcttgtctctgggttttcgatttgctggctcagaaaacttatcagcatttaactgtttgcataaatttgccaaagatttta

SEQ ID NO: 436745 - DNA, 120 bp, Artificial Sequence
  ENSG00000153107_39 (sequence is synthesized)
tgacttatttgtccgcacctaatgcttctgttacaggtcctcataacctagaaacttgtctgagcgtggtgctgctgtctctcgccatggtcatggctggctcaggaaacctaaaggttt

SEQ ID NO: 436746 - DNA, 120 bp, Artificial Sequence
  ENSG00000153107_40 (sequence is synthesized)
tgcagctttgtcgcttcttacacatgaaaacgggtggtgaaatgaactatggttttcacttagcccaccacatggcccttggacttctatttttgggaggaggaaggtactctttgagca

SEQ ID NO: 436747 - DNA, 120 bp, Artificial Sequence
  ENSG00000153107_41 (sequence is synthesized)
catcaaattcttccattgccgctcttctctgtgccctttatccgcacttcccagctcacagcactgacaaccggtatcatctccaggctctccggcacctctatgtgctggccgcggagc

SEQ ID NO: 436748 - DNA, 120 bp, Artificial Sequence
  ENSG00000153107_42 (sequence is synthesized)
ccaggcttctagtgcctgtggatgtggacacaaacacgccctgctatgccctcttagaagttacctacaagggcactcagtggtatgaacaaaccaaagaagaattgatggctcctaccc

SEQ ID NO: 436749 - DNA, 120 bp, Artificial Sequence
  ENSG00000153107_43 (sequence is synthesized)
ttcttccagaactccatcttttaaagcagattaaagtaaaaggcccaagatactgggaactgctcatagatttaagcaaaggaacacaacacttgaagtccatcctttccaaggatgggg

SEQ ID NO: 436750 - DNA, 120 bp, Artificial Sequence
  ENSG00000153107_44 (sequence is synthesized)
ttttatatgttaaactccgggcgggtcagctctcctacaaagaagatccaatgggatggcaaagtttgttggctcagactgttgctaacaggaactctgaagcccgggctttcaagccag

SEQ ID NO: 436751 - DNA, 120 bp, Artificial Sequence
  ENSG00000153107_45 (sequence is synthesized)
aaacaatctcagcattcacttctgatccagcacttctgtcatttgctgaatatttctgcaagccaactgtgaacatgggtcagaaacaggaaattctggatctcttttcttcagtactct

SEQ ID NO: 436752 - DNA, 120 bp, Artificial Sequence
  ENSG00000153107_46 (sequence is synthesized)
atgaatgtgttacccaggagaccccagagatgttgcctgcatacatcgcaatggatcaggctataagaagacttgggagaagagaaatgtctgagacttctgaactttggcagataaagt

SEQ ID NO: 436753 - DNA, 120 bp, Artificial Sequence
  ENSG00000153107_47 (sequence is synthesized)
tggtgttagagtttttcagctcccgaagccatcaggagcggctgcagaaccaccctaagcgggggctctttatgaactcggaattcctccctgttgtgaagtgcaccattgataataccc

SEQ ID NO: 436754 - DNA, 120 bp, Artificial Sequence
  ENSG00000153107_48 (sequence is synthesized)
tggaccagtggctacaagtcgggggtgatatgtgtgtgcacgcctacctcagcgggcagcccttggaggaatcacagctgagcatgctggcctgcttcctcgtctaccactctgtgccag

SEQ ID NO: 436755 - DNA, 120 bp, Artificial Sequence
  ENSG00000153107_49 (sequence is synthesized)
ctccacagcacctgccacctataggactagaagggagcacaagctttgctgaactgctcttcaaatttaagcagctaaaaatgccagtgcgagctttgctgagattggctcctttgcttc

SEQ ID NO: 436756 - DNA, 120 bp, Artificial Sequence
  ENSG00000153107_50 (sequence is synthesized)
ttggaaatccacagccaatggtgatgtgaccgtgtctggcggtgaacctaccctgaaacgtgacttctgcacaacaaacgtgaccaaacatcaaagctaaagcaatgtttataaagtttt

SEQ ID NO: 436757 - DNA, 120 bp, Artificial Sequence
  ENSG00000153107_51 (sequence is synthesized)
atggtataactagggggaaatgagctgcacaaacctcaatgtattttaaatctgttgctgtcatcattaacggtatatgacatataaaagcaagttaaaatttacttttgtaaataaagt

SEQ ID NO: 436758 - DNA, 120 bp, Artificial Sequence
  ENSG00000153107_52 (sequence is synthesized)
ttttggtttgtttccaaaactcttgatgattgctttagttttggacttagagaatagagcaggggttgctggagtgaatattgatttttaaagtctttgaactgtggtggtataggtgaa

SEQ ID NO: 436759 - DNA, 120 bp, Artificial Sequence
  ENSG00000153107_53 (sequence is synthesized)
gtgactatgcccaaaaatgccaagttttaaaagaagctatgtcataaagttttactttctgtggcaaaagagcgctttagcatttcctcagatgtcacagttgtcctgtctaaaataagt

SEQ ID NO: 436760 - DNA, 120 bp, Artificial Sequence
  ENSG00000153107_54 (sequence is synthesized)
ttgtacttctggtgacaatgccagacactcttatgatgtgatcaccttaaacaggagaaggagatttttgccctcagttgctcaacatgaagtactgtggactgaattgtgtcctcccag

SEQ ID NO: 436761 - DNA, 120 bp, Artificial Sequence
  ENSG00000153107_55 (sequence is synthesized)
aattatatattgaggccctaatccctgtgtgactgtattaggcaatagggcatataggagattactaaggttaagtgaggtcatcataagggtggggccttaattcagtagaattggtgg

SEQ ID NO: 436762 - DNA, 120 bp, Artificial Sequence
  ENSG00000153107_56 (sequence is synthesized)
cctcctaagcagaggaagagagatttttctttctctctctgccatgtgaagacagtgaggagtcggccgtctgcaagccaagaagagcccttatcaggaacagacttggctagcaccttc

SEQ ID NO: 436763 - DNA, 120 bp, Artificial Sequence
  ENSG00000153107_57 (sequence is synthesized)
atcgtggacctccagcctccagaattgcaagaaaatacatttccgtcgttgaaaccacccagtctgtggtattttgttatggcagcccaggcagactaatacgtgaagcctgctctaaat

SEQ ID NO: 436764 - DNA, 120 bp, Artificial Sequence
  ENSG00000153107_58 (sequence is synthesized)
agataaaataagaaattactacagagggctctttagaaattgtatttaaaaacaagacaatccatatttacctaagatttacagaatgtatgtctataaaaggagggatttctggactag

SEQ ID NO: 436765 - DNA, 120 bp, Artificial Sequence
  ENSG00000153107_59 (sequence is synthesized)
atgatgatgaaaaatgttcatataaaggcacctccagcttcgagttgccaacacaggaggaagaatgctccctgctgttcagatgctgatatgtgtcctgtgcttcctggatggccagtg

SEQ ID NO: 436766 - DNA, 120 bp, Artificial Sequence
  ENSG00000153107_60 (sequence is synthesized)
ggatcataagctggtagaagcaagaccttcatccactgacttcatatttcttccacatcctgaactgtggtgtttgactttaaaaataaattaaagcaaatagaaatgtttccattgaga

SEQ ID NO: 436767 - DNA, 120 bp, Artificial Sequence
  ENSG00000153107_61 (sequence is synthesized)
ttttggcaaaaacccacatgacatttgcgtctgcagagtagacttggaaggcatgcacctggaggccaagtggtattctctggactctctgtccttgcatttgcgtggctgccccgagga

SEQ ID NO: 436768 - DNA, 120 bp, Artificial Sequence
  ENSG00000153107_62 (sequence is synthesized)
ctcgcttcttcctggatgtgaagcagaggcacgatggggctgactgagaggctgaaatgtgcttctcttcacagttacatagttttcttctaattaaaaataaattttaagtggtagatt

SEQ ID NO: 436769 - DNA, 120 bp, Artificial Sequence
  ENSG00000153107_63 (sequence is synthesized)
atgaaaattccatttgaatcaagattttaaaaattcaatatcaaaccagttgttactgtcttcactctccgttgtttacgattgtgtgcttttcctgaataaagaatgactggagagaca

SEQ ID NO: 436770 - DNA, 75 bp, Artificial Sequence
  ENSG00000153107_64 (sequence is synthesized)
tgtgagccaccacacccggccagcaatatagtactttttagaaagatttgtagattagagtcccagtatacattg

SEQ ID NO: 436771 - DNA, 120 bp, Artificial Sequence
  ENSG00000153107_65 (sequence is synthesized)
ttttagaaagatttgtagattagagtcccagtatacattgcggctccaacccatgcctgctttggaaaacatattttctctgtgctagtatagtcaagacacatcagcctatatatcctc

SEQ ID NO: 436772 - DNA, 120 bp, Artificial Sequence
  ENSG00000153107_66 (sequence is synthesized)
tatctcatgtgtttctttcccctgtgctggattaagctgattttttgttctttcaagtactgtaagtttttgaaagaaaacttgcagtatttgaagttataaagattttacctggaaata

SEQ ID NO: 436773 - DNA, 120 bp, Artificial Sequence
  ENSG00000153107_67 (sequence is synthesized)
atgtatttggctattttaatggtatttgacaatatagttttcaatttctgttcatttctgttttgtagttgatgtcagtaacacccaagcaatgcccatgtttgttttcattaatttagc

SEQ ID NO: 436774 - DNA, 120 bp, Artificial Sequence
  ENSG00000153107_68 (sequence is synthesized)
atattgctgtgaggactggttaagccagaaatacttatcatttagtgtgatcttggttaccatgtaaaacaatggtttttgcctacttcaggagcttttgtaattaccaaaccgtctgcc

SEQ ID NO: 436775 - DNA, 120 bp, Artificial Sequence
  ENSG00000153107_69 (sequence is synthesized)
ttcctaacttgctatattaatgctgatgcttgaaagtaagatctttggcatttatgcttacactttgcatgaggaataagttgagtacaagacgttatgccatgtctttagtctattaat

SEQ ID NO: 436776 - DNA, 120 bp, Artificial Sequence
  ENSG00000153107_70 (sequence is synthesized)
taaaaacaaattctaagattcaaggagttttcagtgttccacatttctccctttagaaaaagtaaatgtgtgcagaattaacaaagtgtttaaaaatagatatttattactttactattt

SEQ ID NO: 436777 - DNA, 120 bp, Artificial Sequence
  ENSG00000153107_71 (sequence is synthesized)
ggatgaatgtgtagggcagtgcttccttggcactggggatatttcattgagcaaaactaaaaatatcttccctcatggagtttatgttatagtaagacatacatgtacatctataataac

SEQ ID NO: 436778 - DNA, 120 bp, Artificial Sequence
  ENSG00000153107_72 (sequence is synthesized)
tattacattagaaggtgtgaagtattgtgaaaaatatgtagagctgtagtggagcgggaagaaatgttttgaaatagagcttgagattcttgattgtcttgccctctacttgaacagtgt

SEQ ID NO: 436779 - DNA, 120 bp, Artificial Sequence
  ENSG00000153107_73 (sequence is synthesized)
cactgatcctggtaaccactaattctccatcttgataatttggcatttgtgaatgttatataaatgggctcatacagtatgtaaacttctgagattgtctttttctgttcagtataatac

SEQ ID NO: 436780 - DNA, 120 bp, Artificial Sequence
  ENSG00000153107_74 (sequence is synthesized)
tcgggtaagcaataagtagcacttcatgcctttagtaggacttcaggctgcctgcatgaatatttgtaatgttactttagattgatattttaaatttgttatgttcctgtctgcacaatt

SEQ ID NO: 436781 - DNA, 120 bp, Artificial Sequence
  ENSG00000153107_75 (sequence is synthesized)
tggcagaagaattttgttaataattctcagtgaagcttcctatttaggtgggtcctaatttggagggctatggctcactgctgttaaatgcattggtactctaaacctgtcacagatggg

SEQ ID NO: 436782 - DNA, 120 bp, Artificial Sequence
  ENSG00000153107_76 (sequence is synthesized)
aaagtgctgggattacaggcgcgagtggccgctggggttcttaacttgggtctttgaatcgccttaagaagtgtctctgaatctgggaattgcaagcaacgtttctgtgaggaccttcac

SEQ ID NO: 436783 - DNA, 120 bp, Artificial Sequence
  ENSG00000153107_77 (sequence is synthesized)
tcacacagttcatccactcttcgaagagtatggaccgaaaaaggcatagagcattcactgcacgtagagaaaatcagcaacccctgctccccaccctcagcctgaggtgcctacctccac

SEQ ID NO: 436784 - DNA, 120 bp, Artificial Sequence
  ENSG00000153107_78 (sequence is synthesized)
gtggggtcaggaggcggaagcgaaaccagaagaaaaaaccctgagatctataaggcagttcaggtccctagtgacatgagctaaagagaacttggacgccaggactgtagcagacagagt

SEQ ID NO: 436785 - DNA, 120 bp, Artificial Sequence
  ENSG00000153107_79 (sequence is synthesized)
ccggcttcggggttcgcatcagtcgcacggaaggtggaaatagcccccaagttgtaacccgccgcggtcttccctcaacagcgcaggcgccaggactgctaggacgccgcgcacctcccg

SEQ ID NO: 436786 - DNA, 120 bp, Artificial Sequence
  ENSG00000153107_80 (sequence is synthesized)
gttttgttggagaacatttttgaattaattggttttagaggcatgtcttatgtctcatgtttcgtagtagtcaaaaatgttatttttactcaaaataactaaattttggcagctttagtg

SEQ ID NO: 436787 - DNA, 120 bp, Artificial Sequence
  ENSG00000153107_81 (sequence is synthesized)
gcttaccatttttctgtacttcacaagaaaataagttatttagtgaagtaaattaggaagtcttctgtggtatgtgtttgttggtttaaatgatacctaagaacttttggttatattaaa

SEQ ID NO: 436788 - DNA, 120 bp, Artificial Sequence
  ENSG00000153107_82 (sequence is synthesized)
taaggcatatgaataacaccagtctttttttgttactcatcgtctttttaatgcctagggctattgttaacacattgtcattttgttactgatcctggccagtggcaggaatttcacatt

SEQ ID NO: 436789 - DNA, 120 bp, Artificial Sequence
  ENSG00000153107_83 (sequence is synthesized)
gaacaactcctctttattagatttgattttatcttagagttgcttatttgtattactttttaagaaaataccgtatttaatgattatgttactttgtaaagctattactaaattggaaaa

SEQ ID NO: 436790 - DNA, 120 bp, Artificial Sequence
  ENSG00000153107_84 (sequence is synthesized)
ctgaaggacctagcaggagactcaggttgaaaccctacagaacctcgccgtgtgccgcccagtcttccttgaataaggccattttctcaccctttgtctagtaactagctgactccacag

SEQ ID NO: 436791 - DNA, 120 bp, Artificial Sequence
  ENSG00000153107_85 (sequence is synthesized)
ctcatggtaaggggcatgtctcagctcagggggtctcctgacatcccagaggaagcaataaggtgggggtctttcatctctcagcctgatgatctgtgcacacccacttgatgggaggcc

SEQ ID NO: 436792 - DNA, 120 bp, Artificial Sequence
  ENSG00000153107_86 (sequence is synthesized)
agggtgcctgtgggcagatgggtcagagtgtgggccaggatttggagtagaagccagagcatgtgaaaatccaaaccaggaagacttcgttgcctcccgcatgtggggttgaaggcctct

SEQ ID NO: 436793 - DNA, 120 bp, Artificial Sequence
  ENSG00000153107_87 (sequence is synthesized)
cttctgtggtctcccatcctcatgctgatcaaattgggggggaatgtctcactgtgtgaggatcaccccaattaagctgtgggggaggacacagaatctgatcccctctgtatccttagc

SEQ ID NO: 436794 - DNA, 120 bp, Artificial Sequence
  ENSG00000153107_88 (sequence is synthesized)
gcatgctacctccagccaccaggggaaagaagcagaggtgaggtgggagaggtggccactctggacggtgtaactgggctggctgcctctcagcgcccacgagcaccccacagatatcca

SEQ ID NO: 436795 - DNA, 120 bp, Artificial Sequence
  ENSG00000153107_89 (sequence is synthesized)
cgctagtgtacaaaggttcccaagtggtggccttttcctgcttccaagggctgcccgggttcccccctctctgaaatagattggttgcttctcattacgtcacaagctgcagaaaaaaaa

SEQ ID NO: 436796 - DNA, 120 bp, Artificial Sequence
  ENSG00000153107_90 (sequence is synthesized)
aaaatataggcttttgagtgaaatggtttggtaaagcttactttatataaatatagccatgataagcagtatgttattcttcagattattaaatatttgtaatgagaacattgatatcta

SEQ ID NO: 436797 - DNA, 120 bp, Artificial Sequence
  ENSG00000153107_91 (sequence is synthesized)
taaaagcattctgctgatttctgctgccctgtatccagacggaaggaatgggtgcctcagctatgaccctcgtaatgggtgaggaaaaaacatattttcttccctgcagctgcttggcca

SEQ ID NO: 436798 - DNA, 120 bp, Artificial Sequence
  ENSG00000153107_92 (sequence is synthesized)
cctgccttttgcttggattggcagaaatctggcttaatctggcttctccagtcctccatcacctggccaggagatccatgttgcagctgggagcatggggaaatctggacacgcacttca

SEQ ID NO: 436799 - DNA, 120 bp, Artificial Sequence
  ENSG00000153107_93 (sequence is synthesized)
ccaaaatgagacaactgtggcaggagacaggctaaggcgagtggggacaaatcaatgtgctggatgccctggtgtacctgtgacgaagaagcaggagctgggaagagagaggaaaaggaa

SEQ ID NO: 436800 - DNA, 120 bp, Artificial Sequence
  ENSG00000153107_94 (sequence is synthesized)
gaggaaaaggaaatagacaagtgaataaataaataagagttcagaaaccccgtctccaccaaaaatacaagaaattaggtgggcatggtgctggtgcctgtagtcccagctattcgggag

SEQ ID NO: 436801 - DNA, 120 bp, Artificial Sequence
  ENSG00000153107_95 (sequence is synthesized)
tttttgtggctggcttgagtgatattcttttttccttaccttttcagtaacaattctagtttctggtaggctttttaattagtcagtgaaggagggaaaagccttttttggatgagttgt

SEQ ID NO: 436802 - DNA, 120 bp, Artificial Sequence
  ENSG00000153107_96 (sequence is synthesized)
gtaaacaggaagacctgtttgttattggccttttgataaattagtagctcatgttaacttgtgcaaaagcttcttgtaacttcttagcagaacaggttgatgaggcaagtttgcatcatc

SEQ ID NO: 436803 - DNA, 120 bp, Artificial Sequence
  ENSG00000153107_97 (sequence is synthesized)
tgggattttttgggaatgttgggtgacaaaggggaggtagagttgttagaactgtgtgtattacagtttaagcgtaaggaaaataatcttttgttgtcttatactgttgtggttgtttgt

SEQ ID NO: 436804 - DNA, 120 bp, Artificial Sequence
  ENSG00000153107_98 (sequence is synthesized)
ttttttagccagaaacaatctcagcattcacttctgatccagcacttctgtcatttgctgaatatttctgcaagccaactgtgaacatgggtcaggtatatattctatggtttgccgagc

SEQ ID NO: 436805 - DNA, 120 bp, Artificial Sequence
  ENSG00000153107_99 (sequence is synthesized)
cccaggactagaatttgttattatttctatgcatgggtcacccaaaacatctctactatctatatctatctttgagattgatgacatgcgtcagtcacattggatgacttttgcttggca

SEQ ID NO: 436806 - DNA, 120 bp, Artificial Sequence
  ENSG00000153107_100 (sequence is synthesized)
cgtatagatttgcatagcctaaaactattaaattcagcaactttctaccttgatagaagaaacaacttaaaatttataagacatcagttttgacagatgatagtttctgtcatctacaag

SEQ ID NO: 436807 - DNA, 120 bp, Artificial Sequence
  ENSG00000153107_101 (sequence is synthesized)
aatgatacccatccatattctgctttatgttttcagtgtttaccacctttctcttatttttatgtaatttcattaactgtttcctctgtatattataaccctgctttttattgttcatac

SEQ ID NO: 436808 - DNA, 87 bp, Artificial Sequence
  ENSG00000153107_102 (sequence is synthesized)
ttcctctgtatattataaccctgctttttattgttcatacacctgttaccttcaagattccaagggtgcttagcagagacagggtcg

SEQ ID NO: 436809 - DNA, 69 bp, Artificial Sequence
  ENSG00000153107_103 (sequence is synthesized)
gccaccatgcctggctacttttttaaaaaaattttttgtagcgatggagtctcactatattgcccaggc

SEQ ID NO: 436810 - DNA, 73 bp, Artificial Sequence
  ENSG00000153107_104 (sequence is synthesized)
aacttctgggctcaaatgatccttgcctggcccagatctttgacttaatccaccatagagacaaggaaagatt

SEQ ID NO: 436811 - DNA, 120 bp, Artificial Sequence
  ENSG00000153107_105 (sequence is synthesized)
agatctttgacttaatccaccatagagacaaggaaagattggatgcatatatggccttcagaaaatttctcaacctctccaaaatgtagtttcctcatttctaaaagtgattataataga

SEQ ID NO: 436812 - DNA, 120 bp, Artificial Sequence
  ENSG00000153107_106 (sequence is synthesized)
gaccctgagaataggtattttatcattctgggcttacagatgaggaaactgccactgagagatgtcacatgcccaagatctcacagctagtaagagctgggctgtgcactccaggtcacg

SEQ ID NO: 436813 - DNA, 120 bp, Artificial Sequence
  ENSG00000153107_107 (sequence is synthesized)
ggtctctaataaagcccatgcccacccttaaccccagctggacttgactctgccgcctcccctaaacttgttctggacagtgttttttttcttgcagctttgttactctgtttcctttct

SEQ ID NO: 436814 - DNA, 120 bp, Artificial Sequence
  ENSG00000153107_108 (sequence is synthesized)
ggatcctactcttcccagcccaacccaaggcatagctctgtgatgtcctatctactcattttgtcctagtttggtccattcctctcttctgtagcacttactatccttaactgtctcttg

SEQ ID NO: 436815 - DNA, 120 bp, Artificial Sequence
  ENSG00000153107_109 (sequence is synthesized)
ggacttaattttttttttttaattaatgtttaatgttacatgtgctgtggcttttttaaaagattgtagtgttacttttatgtcattcattataaaacttaagaatgggccatagtagtg

SEQ ID NO: 436816 - DNA, 120 bp, Artificial Sequence
  ENSG00000153113_0 (sequence is synthesized)
cactcagagagctgggctggagctccaagcggaaaccgcgggagccgagcccagctaggaatgcagacctcctgaaaaccaagccgaggactgcggggtccggtgtccacgcagagtgtc

SEQ ID NO: 436817 - DNA, 120 bp, Artificial Sequence
  ENSG00000153113_1 (sequence is synthesized)
agcttcctctggtgcaaccagcaagtcttccagtatgaatcccacagaaaccaaggctgtaaaaacagaacctgagaagaagtcacagtcaaccaagctgtctgtggttcatgagaaaaa

SEQ ID NO: 436818 - DNA, 120 bp, Artificial Sequence
  ENSG00000153113_2 (sequence is synthesized)
atcccaagaaggaaagccaaaagaacacacagagccaaaaagcctacccaagcaggcatcagatacaggaagtaacgatgctcacaataaaaaagcagtttccagatcagctgaacagca

SEQ ID NO: 436819 - DNA, 120 bp, Artificial Sequence
  ENSG00000153113_3 (sequence is synthesized)
gccatcagagaaatcaacagaaccaaagactaaaccacaagacatgatttctgctggtggagagagtgttgctggtatcactgcaatatctggcaagccgggtgacaagaaaaaagaaaa

SEQ ID NO: 436820 - DNA, 120 bp, Artificial Sequence
  ENSG00000153113_4 (sequence is synthesized)
gaaatcattaaccccagctgtgccagttgaatctaaaccggataaaccatcgggaaagtcaggcatggatgctgctttggatgacttaatagatactttaggaggacctgaagaaactga

SEQ ID NO: 436821 - DNA, 120 bp, Artificial Sequence
  ENSG00000153113_5 (sequence is synthesized)
agaagaaaatacaacgtatactggaccagaagtttcagatccaatgagttccacctacatagaggaattgggtaaaagagaagtcacaattcctccaaaatatagggaactattggctaa

SEQ ID NO: 436822 - DNA, 120 bp, Artificial Sequence
  ENSG00000153113_6 (sequence is synthesized)
aaaggaagggatcacagggcctcctgcagactcttcgaaacccatagggccagatgatgctatagacgccttgtcatctgacttcacctgtgggtcgcctacagctgctggaaagaaaac

SEQ ID NO: 436823 - DNA, 120 bp, Artificial Sequence
  ENSG00000153113_7 (sequence is synthesized)
tgaaaaagaggaatctacagaagttttaaaagctcagtcagcagggacagtcagaagtgctgctccaccccaagagaagaaaagaaaggtggagaaggatacaatgagtgatcaagcact

SEQ ID NO: 436824 - DNA, 120 bp, Artificial Sequence
  ENSG00000153113_8 (sequence is synthesized)
cgaggctctgtcggcttcactgggcacccggcaagcagaacctgagctcgacctccgctcaattaaggaagtcgatgaggcaaaagctaaagaagaaaaactagagaagtgtggtgagga

SEQ ID NO: 436825 - DNA, 120 bp, Artificial Sequence
  ENSG00000153113_9 (sequence is synthesized)
tgatgaaacaatcccatctgagtacagattaaaaccagccacggataaagatggaaaaccactattgccagagcctgaagaaaaacccaagcctcggagtgaatcagaactcattgatga

SEQ ID NO: 436826 - DNA, 120 bp, Artificial Sequence
  ENSG00000153113_10 (sequence is synthesized)
actttcagaagattttgaccggtctgaatgtaaagagaaaccatctaagccaactgaaaagacagaagaatctaaggccgctgctccagctcctgtgtcggaggctgtgtgtcggacctc

SEQ ID NO: 436827 - DNA, 120 bp, Artificial Sequence
  ENSG00000153113_11 (sequence is synthesized)
catgtgtagtatacagtcagcaccccctgagccggctaccttgaagggcacagtgccagatgatgctgtagaagccttggctgatagcctggggaaaaaggaagcagatccagaagatgg

SEQ ID NO: 436828 - DNA, 120 bp, Artificial Sequence
  ENSG00000153113_12 (sequence is synthesized)
aaaacctgtgatggataaagtcaaggagaaggccaaagaagaagaccgtgaaaagcttggtgaaaaagaagaaacaattcctcctgattatagattagaagaggtcaaggataaagatgg

SEQ ID NO: 436829 - DNA, 120 bp, Artificial Sequence
  ENSG00000153113_13 (sequence is synthesized)
aaagccactcctgccaaaagagtctaaggaacagcttccacccatgagtgaagacttccttctggatgctttgtctgaggacttctctggtccacaaaatgcttcatctcttaaatttga

SEQ ID NO: 436830 - DNA, 120 bp, Artificial Sequence
  ENSG00000153113_14 (sequence is synthesized)
agatgctaaacttgctgctgccatctctgaagtggtttcccaaaccccagcttcaacgacccaagctggagccccaccccgtgatacctcgcagagtgacaaagacctcgatgatgcctt

SEQ ID NO: 436831 - DNA, 120 bp, Artificial Sequence
  ENSG00000153113_15 (sequence is synthesized)
ggataaactctctgacagtctaggacaaaggcagcctgacccagatgagaacaaaccaatggaagataaagtaaaggaaaaagctaaagctgaacatagagacaagcttggagaaagaga

SEQ ID NO: 436832 - DNA, 120 bp, Artificial Sequence
  ENSG00000153113_16 (sequence is synthesized)
tgacactatcccacctgaatacagacatctcctggatgataatggacaggacaaaccagtgaagccacctacaaagaaatcagaggattcaaagaaacctgcagatgaccaagaccccat

SEQ ID NO: 436833 - DNA, 120 bp, Artificial Sequence
  ENSG00000153113_17 (sequence is synthesized)
gctgcttccagctccaaagcacctaagaatggaggtaaagcgaaggattcagcaaagacaacagaggaaacttccaagccaaaagatgactaaagaaatacaagttaaggtatctggtat

SEQ ID NO: 436834 - DNA, 120 bp, Artificial Sequence
  ENSG00000153113_18 (sequence is synthesized)
ctgcatgtaaaatcttcagctggtggatggtgacttttgaagaacaaaaggctttggcaacagaaaacaattgttctgggtgatttctagaatggtttttgttgagtctctgaacatcct

SEQ ID NO: 436835 - DNA, 120 bp, Artificial Sequence
  ENSG00000153113_19 (sequence is synthesized)
aaatattggtttgttattcttttccagaaagaaaatgaatttgactggttcacctgtgtactgagtattgataaactttgaatttttttaattgccttcaattgggagagaaagctttat

SEQ ID NO: 436836 - DNA, 120 bp, Artificial Sequence
  ENSG00000153113_20 (sequence is synthesized)
atttgtaagaaatatatttgataaagtttcttaaagcaacaccaaaaaaacaaaagaaaagctaagtgaatttttgcacattctacacacagtgcctgtaaatctcatttgtattttcag

SEQ ID NO: 436837 - DNA, 120 bp, Artificial Sequence
  ENSG00000153113_21 (sequence is synthesized)
tttgcccttaattttttttgttagtgtttagaaaacaatgttttaaacattcttcagtgttctgatttcttattaccccctttcctcttgggcttttgaactgtatttgatgttgctttg

SEQ ID NO: 436838 - DNA, 120 bp, Artificial Sequence
  ENSG00000153113_22 (sequence is synthesized)
ggataatgtttataagtcaaacataagatattgtacattgggcacatatctcctcttgggctgctaataataaattaataacaggtaacctggacaaaccaggaagcaccaaaccccttt

SEQ ID NO: 436839 - DNA, 120 bp, Artificial Sequence
  ENSG00000153113_23 (sequence is synthesized)
tcagtttgaactcttctttgccaggtgtgaggacttctgcatcttacagtcagcacagaacacactgagacttgaatcaagtcagcaacagagcaaaataaaggttagataagtccttgt

SEQ ID NO: 436840 - DNA, 120 bp, Artificial Sequence
  ENSG00000153113_24 (sequence is synthesized)
gtagcaaatttcgagcataagaaataaaatctaattaattcttagggtactcatctgacttgaactctgttggtttactgtgttagtaaactgtgctttctattatctatacataaaacc

SEQ ID NO: 436841 - DNA, 120 bp, Artificial Sequence
  ENSG00000153113_25 (sequence is synthesized)
tgagcagcaactgtgtctttagagctattgccacattagcctttgcactgtatagcgtctggctttatggaacttaagtttaccaaatataaaaagaaacttctgcttttaaaaaaatta

SEQ ID NO: 436842 - DNA, 120 bp, Artificial Sequence
  ENSG00000153113_26 (sequence is synthesized)
tatatatatattaaatttgaaacctgcatttctcccacagcaatgtaagaagtaggctctgatgtcctaccactttgaatggttttctaatatcttaatgaatagttcctgaacattgca

SEQ ID NO: 436843 - DNA, 120 bp, Artificial Sequence
  ENSG00000153113_27 (sequence is synthesized)
ctgatatcatcgattagaattttgatatttaatttcatctttatttcctggtagagaatgcaggaaaagatgtcaggtacataacataaaacagattgggaatttattgtttccaaaggg

SEQ ID NO: 436844 - DNA, 120 bp, Artificial Sequence
  ENSG00000153113_28 (sequence is synthesized)
catggccttccttagcatcagtttgaagcttttgttatgacttagctgacttgtggcagcggggcaagcaaaaacaataacactgcttataaatggcaccacatcttgttaacctccccc

SEQ ID NO: 436845 - DNA, 120 bp, Artificial Sequence
  ENSG00000153113_29 (sequence is synthesized)
ccaaatactctctgaaagtcatgcacatacctatgggattttacacaccaccagcttaaaatgctatgtctctatccatcagaaatagtcattattctatttttaaggcagcaacaagaa

SEQ ID NO: 436846 - DNA, 120 bp, Artificial Sequence
  ENSG00000153113_30 (sequence is synthesized)
aagaaaaaacacttttcctgagggatttctaaccatgtatctaatcctcccatttgggcagtataggtgtttgcttttttgttttctttttttaagaaaaaccttgaaacctttgacact

SEQ ID NO: 436847 - DNA, 120 bp, Artificial Sequence
  ENSG00000153113_31 (sequence is synthesized)
gacagatgtgtttgcaaggatacggcttcagtattactaatttccatgtgtatctggaagtatttttaaatggcataccaaaatccagaagtttaaagatgcctataaaagtaaacaaca

SEQ ID NO: 436848 - DNA, 120 bp, Artificial Sequence
  ENSG00000153113_32 (sequence is synthesized)
tttatttaaaaagaactctgaatatgccttcttttttaattagaaatatcttcgagacttgggtgtttgttaataactaataactggagtaagctacaggatctaaagcagcccttttta

SEQ ID NO: 436849 - DNA, 120 bp, Artificial Sequence
  ENSG00000153113_33 (sequence is synthesized)
cagtctagttaggagagagaaaataattgcaaatatccacttagaggcaaagaacaattttttattatcaaaaaggtttctgcacattgttgtggcaatattgtatctgtttagaaaatg

SEQ ID NO: 436850 - DNA, 120 bp, Artificial Sequence
  ENSG00000153113_34 (sequence is synthesized)
ggcttttccaaaagcaaacaaagataggttcctcaggtgaccaaaactgaaaatcaatatttccatgtttcattaatcaaggcataaaatacaattaaagcaaaatattttacattaaaa

SEQ ID NO: 436851 - DNA, 120 bp, Artificial Sequence
  ENSG00000153113_35 (sequence is synthesized)
tctgggcatcgaaggaggaacgctgcaacctccaaccccttctttctgaccaaccgggaccagagcagtgctggggccggggcgggtcaccggcatgtcagtgaaaaaaccagtgaatcg

SEQ ID NO: 436852 - DNA, 120 bp, Artificial Sequence
  ENSG00000153113_36 (sequence is synthesized)
tctggtgcaaccagcaagtcttccagtatgaatcccacagaaaccaaggccattccagtcagccaacagatggaaggaccacatcttcctaacaagaaaaaacacaaaaaacaggctgta

SEQ ID NO: 436853 - DNA, 120 bp, Artificial Sequence
  ENSG00000153113_37 (sequence is synthesized)
acattggtaaggtgttttcccccattgaaactaatattttctattttcaagaaaaaagcagcaagcctcggcagcagtcaatcctccagaacctatgctggtggaacagcctcggccacc

SEQ ID NO: 436854 - DNA, 120 bp, Artificial Sequence
  ENSG00000153113_38 (sequence is synthesized)
ggcccatcggggctaggggaaccccggcgcagacctggggtggggtcggaaaagctgtttcatcgcccgctcccgggccctccgctccctccctccctccctctctccctggcaggactc

SEQ ID NO: 436855 - DNA, 120 bp, Artificial Sequence
  ENSG00000153113_39 (sequence is synthesized)
ctctctccctggcaggactccccgccaggcctccccgccactctccgcggcgcattccgggaggcagcggccgcagcggcctcgccatgtcccagcccggccagaagcccgccgcctccc

SEQ ID NO: 436856 - DNA, 120 bp, Artificial Sequence
  ENSG00000153113_40 (sequence is synthesized)
gtgtgagcccggcgcctccaacgcaacaccccgcgccctcgccggctcccccgccgtgcggatcggagccagccggttgttgccatggcattcgccagctggtggtacaagacgcatgtc

SEQ ID NO: 436857 - DNA, 120 bp, Artificial Sequence
  ENSG00000153113_41 (sequence is synthesized)
agaacatagggtactccgagtgaagaattcagcagctaagtggaagttgtcttctattccactttaaatacttttatctactgaatcgcaagaaaattgggtttctggtgctgtctgtgg

SEQ ID NO: 436858 - DNA, 120 bp, Artificial Sequence
  ENSG00000153113_42 (sequence is synthesized)
aactgaaaagacagaagtatgtttctaaacatataaatctctagttttgaggtttgtgatcttaaaaaaaaattgtgagacagactgttttagcatcaagcagtctgttagaaagcccaa

SEQ ID NO: 436859 - DNA, 120 bp, Artificial Sequence
  ENSG00000153113_43 (sequence is synthesized)
agagagctgggctggagctccaagcggaaaccgcgggagccgagcccagctaggaatgcagacctcctgaaaaccaagccgaggactgcggggtccggtgtccacgcagagcagccagag

SEQ ID NO: 436860 - DNA, 120 bp, Artificial Sequence
  ENSG00000153113_44 (sequence is synthesized)
attagacatatttggaattatttcatgcatcaagagaagcaactggaatccctagagacatgaatacaacttcaggaaagaaatctgcttttctattctttgatgactgacctaggctgt

SEQ ID NO: 436861 - DNA, 120 bp, Artificial Sequence
  ENSG00000153113_45 (sequence is synthesized)
tagaactggaagctcaacttcatgccttaaatgtggatttttttttctaagttcttggggtggtccggtatcagagctcataatcagaccctcagagaatatggccagtatccttctagc

SEQ ID NO: 436862 - DNA, 120 bp, Artificial Sequence
  ENSG00000153113_46 (sequence is synthesized)
ttggatttagatcacagatcagctgtgactattgtcacagttgctaggcaacgtttgtatgtttatttcgaggcctacccacatgttgcatcagaggccaaagctcatgtgctctgcact

SEQ ID NO: 436863 - DNA, 120 bp, Artificial Sequence
  ENSG00000153113_47 (sequence is synthesized)
atgggccagtttctatcttcgactttcttggagggctcaccggccacagtgtggcacgataagctttgtgacggtgaacgcagaggagcaagagaagcagttcgtatcttccaggaccaa

SEQ ID NO: 436864 - DNA, 120 bp, Artificial Sequence
  ENSG00000153113_48 (sequence is synthesized)
cccctactgtattctacagggatatgattagtgggtggggcctgtaggaatggcaaacagtgtccagatatcactgaaggttttttaacaaagtatcatttctgtgctagaagagagaat

SEQ ID NO: 436865 - DNA, 120 bp, Artificial Sequence
  ENSG00000153113_49 (sequence is synthesized)
tctgtgctagaagagagaatataatttcttaataatgatgtgaatgatttaaaacctagtaaaaccatttattgtataaatcttcttggcatataataagcgttaaataaatattaatta

SEQ ID NO: 436866 - DNA, 120 bp, Artificial Sequence
  ENSG00000153113_50 (sequence is synthesized)
taatattaaacttttgaacatactgtgagtaaaaacgtagtgctcccactttagaaaataattcatatcctcctcatgggcattaaccacaccaggcgtgctgctagtgctttatgtaat

SEQ ID NO: 436867 - DNA, 120 bp, Artificial Sequence
  ENSG00000153113_51 (sequence is synthesized)
aggtggagaaggtatagtcacagtctacctgacagcagttgctttccagagcctgatctagctcattcaggaaactgccagtagcacataacccatgatgagaagccatgattttttccc

SEQ ID NO: 436868 - DNA, 120 bp, Artificial Sequence
  ENSG00000153113_52 (sequence is synthesized)
tctcaggtctatgtggaatagtgaagccaatgagggttatgttgatcatctccaggcaagccttgtgtgtttctgtaactgcttgtgaatgattttagcacagttgtctcagtcatcatc

SEQ ID NO: 436869 - DNA, 120 bp, Artificial Sequence
  ENSG00000153113_53 (sequence is synthesized)
agccgagcccagctaggaatgcagacctcctgaaaaccaagccgaggactgcggggtccggtgtccacgcagatcaggcatggatgctgctttggatgacttaatagatactttaggagg

SEQ ID NO: 436870 - DNA, 120 bp, Artificial Sequence
  ENSG00000153113_54 (sequence is synthesized)
tcttgtttcttcatatttcaaacaccaaatagtattagtctactactaatagtgttagaacaccagatacaaagctaaaatattcctaagtagacttgatcctcaagtgaaagaaatcta

SEQ ID NO: 436871 - DNA, 120 bp, Artificial Sequence
  ENSG00000153113_55 (sequence is synthesized)
atgtctaagctacctaatgttttcctttctaacccacagcttgttacaataccagaaatattaaaaaaccttgtgtagataggagaactaaaatgaggaataggccgggcatggtggctc

SEQ ID NO: 436872 - DNA, 120 bp, Artificial Sequence
  ENSG00000153113_56 (sequence is synthesized)
gtaagtttcctgaggccttcccagccattcagaactcatgtcagtgaaaaaaccagtgaatcgccttccaaaccaggagaaaagaaaggatcagatgagaaaaaagcagcaagcctcggc

SEQ ID NO: 436873 - DNA, 120 bp, Artificial Sequence
  ENSG00000153113_57 (sequence is synthesized)
aaaaatgaaaacacttaacatcagcaactttaaatgcagtagaacaaataagtctttccaaacctgcaatcaaatctatttaaaggatgaaactgacacatccggccacactgagagagt

SEQ ID NO: 436874 - DNA, 120 bp, Artificial Sequence
  ENSG00000153113_58 (sequence is synthesized)
gtgaatcttttagcaacatatttcagtaaagtcctggggaatggaatttaaagtataaaacgggcatgatctcagagagccaattttaaaagcttcaaatttaacaatggatttattttt

SEQ ID NO: 436875 - DNA, 120 bp, Artificial Sequence
  ENSG00000153113_59 (sequence is synthesized)
aaggcagcaggggccacttcaagcttccctgcttcctaagcttaggttgtcagaagcctttttagagatacatttttagaaaaagaaaaatagtgtggtaacagtttactacttgcttct

SEQ ID NO: 436876 - DNA, 120 bp, Artificial Sequence
  ENSG00000153113_60 (sequence is synthesized)
tttttttttgtttgtttagagtattttatagtaatattactatagctttatgtctagcttaccaaataaggggtgaagtgtgccccagagaacgctgttactgtagaaacgtgtcttagc

SEQ ID NO: 436877 - DNA, 120 bp, Artificial Sequence
  ENSG00000153113_61 (sequence is synthesized)
ataaaaccttcaagtttgattgtataaaggactttgagccctgaggatcactagagggacaccaagtagctggtactgcccagcattctcaactatatttcactatgacataattctcac

SEQ ID NO: 436878 - DNA, 120 bp, Artificial Sequence
  ENSG00000153113_62 (sequence is synthesized)
aaatcgcaaaaggcaatcctgcagctctgtgctggctgggaacacatgtctcctctgcaaacagtcaagataatgctcaggaacggtttctatcagagcagcttgtgcctctcccctcct

SEQ ID NO: 436879 - DNA, 120 bp, Artificial Sequence
  ENSG00000153113_63 (sequence is synthesized)
aaattttgatttaaccaagatttggttcaagaatataaaaggaaatcactaaaaataaataaaaaaaattgttcctgggaatagagcctgtatgaatactttccctttagtaatagaact

SEQ ID NO: 436880 - DNA, 120 bp, Artificial Sequence
  ENSG00000153113_64 (sequence is synthesized)
ttgttgcttagggtgttttccctataggaactggtgaatccaaattgttttgttggcgaatatgtcaagtgtagaagggaaaacagttgctgtagtaaaaaggaaaatctttttttatga

SEQ ID NO: 436881 - DNA, 120 bp, Artificial Sequence
  ENSG00000153113_65 (sequence is synthesized)
ctctttggcaaagttggggtgcagatggagggattgctctccattggctctcatgatggttctttccctgtatctgaggcttcttacagatttatatgccagagccaagtctccaaggga

SEQ ID NO: 436882 - DNA, 120 bp, Artificial Sequence
  ENSG00000153113_66 (sequence is synthesized)
aacccaaggtgttacagccagtgatattgatgatttagtaggaggataaatccaatcagtgttactctatcttggttggaagcaagaatctcataagtattcagcaaaccaagcaaactt

SEQ ID NO: 436883 - DNA, 120 bp, Artificial Sequence
  ENSG00000153113_67 (sequence is synthesized)
tgatgcaaccctaacccaggttaaaaggttctgagtcacctgctcagtttacttattggctctgcccaagcctggtcttttatattttatttccacttgattatatattgcttcttgccc

SEQ ID NO: 436884 - DNA, 120 bp, Artificial Sequence
  ENSG00000153113_68 (sequence is synthesized)
agtcaaccttatagctaggtgtgtcagaaacacccagttcataatggaaagctcagaacacatagttacctgacgtcccatggtagagattctatctctcttctaagcttagtataaaga

SEQ ID NO: 436885 - DNA, 120 bp, Artificial Sequence
  ENSG00000153113_69 (sequence is synthesized)
tgcaaacttcgttttttaaaaacatgatatctaaaaagcagaatgtgcagagtcttttctttgccaagcaaaacagtttccaccacatcttgtctatagatgactacctttctggtcaag

SEQ ID NO: 436886 - DNA, 120 bp, Artificial Sequence
  ENSG00000153113_70 (sequence is synthesized)
gctttggacatctcttcagtcatcagacagagtatctctgctctagacctcgctggagttcaagcttgaattattatatgcaagttaattttacaagcctggatgaggctactgaaaact

SEQ ID NO: 436887 - DNA, 120 bp, Artificial Sequence
  ENSG00000153113_71 (sequence is synthesized)
ggaaaaaagctacgagactgtaacaacccttcattctttttcatttccaaagctctctccccatctcaagctagaaaatagtgtaaccagactacacaatggaaccactcctaaaaaaat

SEQ ID NO: 436888 - DNA, 120 bp, Artificial Sequence
  ENSG00000153113_72 (sequence is synthesized)
ttttacctctgtgctcctcattagcaaaatgcctggtacttagcaggtgctcaaaacgtgattaaaagtgaatgagaaacaactgtgtaattcaacaagtgtgaggcattttccctcaag

SEQ ID NO: 436889 - DNA, 120 bp, Artificial Sequence
  ENSG00000153113_73 (sequence is synthesized)
ctacaccctcttgtaaatcaaatagaaggaaacgtgaaatgagtacctccttgttattttcaggagagttaattctgcagatctcagtttgctattgttttggctgttctaaggcactgc

SEQ ID NO: 436890 - DNA, 120 bp, Artificial Sequence
  ENSG00000153113_74 (sequence is synthesized)
tctcgatcactgaattgtcagcccttccatactgggtagcttaatttctagaccacttcagcatcctatctctcacccctggtaactcgtaagtaatgccttttttggtgaatggacttt

SEQ ID NO: 436891 - DNA, 120 bp, Artificial Sequence
  ENSG00000153113_75 (sequence is synthesized)
ttggtgaatggactttatttttatacgtaacctgctccagctttcctcggttgtttcccattgttcatttctctcccataacactgaaaacagggtttttttttgtttttttttttttgc

SEQ ID NO: 436892 - DNA, 120 bp, Artificial Sequence
  ENSG00000153113_76 (sequence is synthesized)
gccagtcctgatcgagacaagctctattttgttttttaaatacattttattgtgtatatttgaggtttacaacatggtagtttgggatgcatagaaataataaaatggttactgtaggga

SEQ ID NO: 436893 - DNA, 120 bp, Artificial Sequence
  ENSG00000153113_77 (sequence is synthesized)
agcagatttacatatctatcattctcacacaactactttttgtgacaaaagcagctaaaatctacttagttaacaaaatccctaatacaattttattaaccttagtcctcatgttataca

SEQ ID NO: 436894 - DNA, 120 bp, Artificial Sequence
  ENSG00000153113_78 (sequence is synthesized)
ttaactctctacacttgttcattctgcatatctgctattttgtatcctttgacctatatctctgtttcctcctcctgttccctaccatggtcgccatgttttattctctgtgtttttgag

SEQ ID NO: 436895 - DNA, 120 bp, Artificial Sequence
  ENSG00000153113_79 (sequence is synthesized)
ctttttcttttatatatattctacatataagtgaaatcacttttctttctgtgtctggcttatatcatctagtataaggtcttccaggtccatccatgttgtgacaaatagtaggatatc

SEQ ID NO: 436896 - DNA, 120 bp, Artificial Sequence
  ENSG00000153113_80 (sequence is synthesized)
gttttttaaggctgaataatattccattatgtatatatacatgacattttctttatccattcatcaacaactaggttgttccatatcttggctattgtgagtaatgttgcagtgaatatg

SEQ ID NO: 436897 - DNA, 120 bp, Artificial Sequence
  ENSG00000153113_81 (sequence is synthesized)
ggagtgcagatatctttataaggtgataatttcatctcctttgggtatatacccagaagagggattactgggtcatacagtagttctacttttaatttctttaggaacctatatactgtt

SEQ ID NO: 436898 - DNA, 120 bp, Artificial Sequence
  ENSG00000153113_82 (sequence is synthesized)
ttccatcatagcccataccaatctacatccccactgacagtgtactagggttcccttttctccacacccttgccgacatttattatctattgacaagctctgttttgattagcaaaataa

SEQ ID NO: 436899 - DNA, 120 bp, Artificial Sequence
  ENSG00000153113_83 (sequence is synthesized)
ggtctgggtgagtcaggcaccacgggaattagagcatcaatgtcacccacatttccctccttatttctatcctttttccctcctgctttaaacaattctctgacaccgttgttcaaaaaa

SEQ ID NO: 436900 - DNA, 120 bp, Artificial Sequence
  ENSG00000153113_84 (sequence is synthesized)
actgtatcttctgccaatttatgtgttatagatgagagaagtgaagtccacctcttgagtaattcatgctcactttacagtattggcatgaaatgcatactgcaagatctacagagtaat

SEQ ID NO: 436901 - DNA, 120 bp, Artificial Sequence
  ENSG00000153113_85 (sequence is synthesized)
tggtcattctctgaaagcactaaatgggatgagtttgctattgaaatgtttaaaaaccttaatcttataattaaaagcttttaaaaatattaggccaggcacttagaatgaccatctgag

SEQ ID NO: 436902 - DNA, 120 bp, Artificial Sequence
  ENSG00000153113_86 (sequence is synthesized)
gctagttgaatctttgaaatccaaatgctcattactgcaggttattgtggcaaagcaaaattagcatgttacaacttagcgaaatgtcctgaagacattggcattccccagaataccaat

SEQ ID NO: 436903 - DNA, 120 bp, Artificial Sequence
  ENSG00000153113_87 (sequence is synthesized)
acatggtggggtggggagaagtaccctttagagtctggtggaaattacagggttttgggaacaagggcaaaggaaaagattggccatttttatttgtcattattttggaaagtaaagtac

SEQ ID NO: 436904 - DNA, 120 bp, Artificial Sequence
  ENSG00000153113_88 (sequence is synthesized)
tgtgtttgattctaatttataattgctgaagaaactggacagattgaagggatttctgagatcttcagaactgggcccttatcttaatcttcagaaaggagagggcttaatgtaagcctt

SEQ ID NO: 436905 - DNA, 120 bp, Artificial Sequence
  ENSG00000153113_89 (sequence is synthesized)
aaaagcatacaagcacttactgaccaaagcctaaaagaaatcaaagtataggttaaatcgggttcagctctctcaccatgatccatgtttatttcctaggaaaaaaggagctatattagg

SEQ ID NO: 436906 - DNA, 120 bp, Artificial Sequence
  ENSG00000153113_90 (sequence is synthesized)
tagaactgctctaacatttttcccaaaattaaaaaaaattctattaatccactttcatgtttacttataggaaattccttctgtctgttatacaatgcttttgctaagtggtatatttac

SEQ ID NO: 436907 - DNA, 85 bp, Artificial Sequence
  ENSG00000153113_91 (sequence is synthesized)
atattttctagagtgggattagctgtcaacaaactcagtagtcacatggctcatgtgttatctgtgtacatttgtgaaaaacaac

SEQ ID NO: 436908 - DNA, 120 bp, Artificial Sequence
  ENSG00000153113_92 (sequence is synthesized)
tcaccattctcagagactgctgacagggttactattgacctgataccacatgtctacttctgtgatcctaaagagtgggcctgagtgggcctaagcgggcttttcctgaaaaaggcagaa

SEQ ID NO: 436909 - DNA, 120 bp, Artificial Sequence
  ENSG00000153130_0 (sequence is synthesized)
acttccggttaagaatgcaacactcaggtctgaaaattgaacaagatggacgggtccaggaaagaggaggaggaagacagcacattcaccaacatttctcttgcagatgacatagaccat

SEQ ID NO: 436910 - DNA, 120 bp, Artificial Sequence
  ENSG00000153130_1 (sequence is synthesized)
tcctcaagaattttgtatccaaggcccaaaagtttgttacccaagatgatgaatgctgacatggatgcagttgatgctgaaaatcaagtggaactggaggaaaaaacaagacttattaat

SEQ ID NO: 436911 - DNA, 120 bp, Artificial Sequence
  ENSG00000153130_2 (sequence is synthesized)
caagtgttggaactccaacacacacttgaagatctctctgcaagagtagatgcagttaaggaagaaaatctgaagctaaaatcagaaaaccaagttcttggacaatatatagaaaatctc

SEQ ID NO: 436912 - DNA, 120 bp, Artificial Sequence
  ENSG00000153130_3 (sequence is synthesized)
atgtcagcttctagtgtttttcaaacaactgacacaaaaagcaaaagaaagtaagggattgacacccttctgttttatggaattgctgctgatcattttttctttaaaacttggatagat

SEQ ID NO: 436913 - DNA, 120 bp, Artificial Sequence
  ENSG00000153130_4 (sequence is synthesized)
tccaaaagttacagtacctttgtggcttcattgaatatttatgaagataatgtcagatgtagacaaaaataacacaataacaggagacttccataagtttgtgtattatgttagtctatg

SEQ ID NO: 436914 - DNA, 120 bp, Artificial Sequence
  ENSG00000153130_5 (sequence is synthesized)
aaaacgtgcaaatgtattgtagagactttatgattagaattgcatatatttatgaaacttaaagatgaatgttttattgaatttgtaggtttagcactgtcttttattataggattagta

SEQ ID NO: 436915 - DNA, 120 bp, Artificial Sequence
  ENSG00000153130_6 (sequence is synthesized)
agatatacaagaaaataaccaccgtgttgtgaaaaagtgaccaaaatcatgtactaaatgcacagctttatgtaccctgtccaccatcttgtgcctcttctccatttgcctcttccttcc

SEQ ID NO: 436916 - DNA, 120 bp, Artificial Sequence
  ENSG00000153130_7 (sequence is synthesized)
catctctgagagtaacctgtattttaattgttgaaacttaaccaaaataagatactgtctcagctagggcttgtcatttgtgtatttagtgttaagataggaatgctagtgtctctttaa

SEQ ID NO: 436917 - DNA, 120 bp, Artificial Sequence
  ENSG00000153130_8 (sequence is synthesized)
ttaattggaaatagatggaggctaaaaatgaaggtttttctttgaaactgaattaacttgggaatatttgttgttaaaaacttctttttgcccaaaataactcattttgtattatctgaa

SEQ ID NO: 436918 - DNA, 120 bp, Artificial Sequence
  ENSG00000153130_9 (sequence is synthesized)
aatatataatttctggtcatgtgtatgttaaaatagaaaattttgaggaaaaatggaaatagggtggaaaagtactcggtaaacagtagtaaccaaatattttcactccagatttgtgtt

SEQ ID NO: 436919 - DNA, 120 bp, Artificial Sequence
  ENSG00000153130_10 (sequence is synthesized)
ttctctggcacagagtagatcttttgggaaatatatatgaaagtggattaagtttgactacccttatgttagccacatctggatgagaacagttacaaagagtttggtctctaagttgat

SEQ ID NO: 436920 - DNA, 120 bp, Artificial Sequence
  ENSG00000153130_11 (sequence is synthesized)
ttgtacccagtgggtcaacttctgcaaaattccgtaatggtgtattagtattagaatagtgaataaaatgggaaagttatacatgtatacttattatcttgctcagtattttatctcact

SEQ ID NO: 436921 - DNA, 120 bp, Artificial Sequence
  ENSG00000153130_12 (sequence is synthesized)
tgttctagaattttctgtaaaccctgctactgggtttgaagagttttagtcatcctttaacaatttttaaaaatttagcttctagattccatttggtaaggaaatcaatattggaagtat

SEQ ID NO: 436922 - DNA, 120 bp, Artificial Sequence
  ENSG00000153130_13 (sequence is synthesized)
tgctaaaatcttataatatgaaaagagatccactaatgtagcttaaggttattagatttgggcttttaatcatggaataatcttatgtattggtgtaagagttgatgaatgactttagct

SEQ ID NO: 436923 - DNA, 120 bp, Artificial Sequence
  ENSG00000153130_14 (sequence is synthesized)
gtgtgaatatataatagtcaaactgcaaacattttgcatcccttttgtgacctaatttacagacatttaaattgtgttgcagttctgctttgccgtttaataaaaagctatttcagaggt

SEQ ID NO: 436924 - DNA, 120 bp, Artificial Sequence
  ENSG00000153130_15 (sequence is synthesized)
aacactcaggtgagaacttctcaggtggaaagcaggaagagggtggctagtgcaaggatcagatagcacctgcttggaagttcactgattaatgatttaacaagggcggtcacatgggac

SEQ ID NO: 436925 - DNA, 120 bp, Artificial Sequence
  ENSG00000153130_16 (sequence is synthesized)
atttaaaattatagagcttttcatcactacggagatgctcttgcctatgataggaacgatggctacatctgaagctgagcaaatttatcttttctcttcgtctgcatcagggtgacctct

SEQ ID NO: 436926 - DNA, 120 bp, Artificial Sequence
  ENSG00000153130_17 (sequence is synthesized)
gagtaatgcccttatgcgtagggctgccagatacagtgggcggttttttcactgtgcaacacttgggatgcaatcttacgtagactgtggtgtgaattgtgctctctcgcgttgtatacc

SEQ ID NO: 436927 - DNA, 120 bp, Artificial Sequence
  ENSG00000153130_18 (sequence is synthesized)
cttatagcactgttcttgtggcactacttttgtgctcctgcctctaccctaatcttgagtgtaagagtaatttttcctttaataagccctctccaccctgtttttctgctttttattttc

SEQ ID NO: 436928 - DNA, 120 bp, Artificial Sequence
  ENSG00000153130_19 (sequence is synthesized)
ctcatttttcttactaacaggtctgaaaattgaacaagatggacgggtccaggaaagaggaggaggaagacagcacattcaccaacatttctcttgcagatgacatagatgaagtcacac

SEQ ID NO: 436929 - DNA, 120 bp, Artificial Sequence
  ENSG00000153130_20 (sequence is synthesized)
agttggtccaagtgtcccggcctgaggtgtcggccggatccctccttctcccggcgcctcaagcggaaggcccaggcgttctttgggagagggacctctcgcggtccctgacgcagacat

SEQ ID NO: 436930 - DNA, 120 bp, Artificial Sequence
  ENSG00000153130_21 (sequence is synthesized)
cgtgtagctttctccccgcagctcctgggtcgggagccgctttgcagctctcggctctggaattggactgcgggaggggcgtttgggtggaatgggacctggcacgcctggaccttcccg

SEQ ID NO: 436931 - DNA, 120 bp, Artificial Sequence
  ENSG00000153130_22 (sequence is synthesized)
tggctgctctgcgagagcctgagagatgggaggggaggctgaggtggggagggagcctagagagccgtaaaataaggattggaccatttttccaggcggcgaaagcggcacctgggtttg

SEQ ID NO: 436932 - DNA, 120 bp, Artificial Sequence
  ENSG00000153130_23 (sequence is synthesized)
ggacgactggggtgaggcgggcagctaatgcgcaggcgtgtattctcgagtcaggattggcgggcgagcggctgggacgggatgggattcttctcacggcgcacgttctgtgggcggagt

SEQ ID NO: 436933 - DNA, 120 bp, Artificial Sequence
  ENSG00000153130_24 (sequence is synthesized)
ttatttaagtacccagttactgattatttaggggaataatatttttattaatacaactataactggttatcaatataaatatcataggctattatacattaatttggaaaacaaaagcaa

SEQ ID NO: 436934 - DNA, 120 bp, Artificial Sequence
  ENSG00000153130_25 (sequence is synthesized)
aaaagcaaagcactcaaaggatccagtatctccagggaaaaaggaagttgtattttttagggtaggctaagctactttagcaagagacccagtgataaagaatataaatatagaagtttc

SEQ ID NO: 436935 - DNA, 120 bp, Artificial Sequence
  ENSG00000153130_26 (sequence is synthesized)
tctcccaaccagtggttccaaggtcagcattgcaggctagcagcccttgttcaaacagttattcagggactttggctgaggatggtgctgccattttaaatcatggctttcaagtcactc

SEQ ID NO: 436936 - DNA, 120 bp, Artificial Sequence
  ENSG00000153130_27 (sequence is synthesized)
tagttattcttctaatttgcagaaaaagaacatggaagtgtacatatgcaaggtgttatgggctgtgcctggaaatggctcatatatcttctcatattccagtggtgtggagacttagtt

SEQ ID NO: 436937 - DNA, 120 bp, Artificial Sequence
  ENSG00000153130_28 (sequence is synthesized)
cagcctcagccacagctcttcttgtgctaccaagtatcttcccttacacagaaagtaatccctcttcatccagctagtgattcagctcacaatctaggatctctattaaaggtccatccc

SEQ ID NO: 436938 - DNA, 120 bp, Artificial Sequence
  ENSG00000153130_29 (sequence is synthesized)
tttacatgtggcttctaatagtctgacaatctctaaactgataggcaaattatttgctctcacccttgctgctgcccatttataatgtagttgggacaggatggccaaataaaaagtctc

SEQ ID NO: 436939 - DNA, 120 bp, Artificial Sequence
  ENSG00000153130_30 (sequence is synthesized)
aatttggaaaatggaataaagggaaacgtaaaaattgtggaatgctcctgggagatgtatgaagattttgtccctagcagtggagaagttccttgattcaactatgattctgatctctgg

SEQ ID NO: 436940 - DNA, 120 bp, Artificial Sequence
  ENSG00000153130_31 (sequence is synthesized)
caggggactcccttgttcattgaactccatggtttcccctctggaaagttactccttatccattttcttccatggctacctcagaagtagagattgggtgttcactccatgggaattgtg

SEQ ID NO: 436941 - DNA, 120 bp, Artificial Sequence
  ENSG00000153130_32 (sequence is synthesized)
aagacagtccacttcctgctggtgtgaatttggtgcccatcattttaaggccaagctcatgtttctgtggaatacgattctctcaaaaactcaagcctttttatcagtgtgcttctgatt

SEQ ID NO: 436942 - DNA, 120 bp, Artificial Sequence
  ENSG00000153130_33 (sequence is synthesized)
gcatatgccgaggaaccacaaccaagcttttgaccaaattctcaaagtatgtattatttttgcctttctttaatggaggctatcttgagatcaactaaaaataagattacactgggaatg

SEQ ID NO: 436943 - DNA, 120 bp, Artificial Sequence
  ENSG00000153130_34 (sequence is synthesized)
ttacatgcagatcatcactgcaaagctgggttcctttggcttaacgattggtagagaagtcttcatgggcttccccccaatctcccccacctcaaaaataattttgaacctttgctgcta

SEQ ID NO: 436944 - DNA, 120 bp, Artificial Sequence
  ENSG00000153130_35 (sequence is synthesized)
ttcagacttcagaaacaattggcttaatttcatgaggttccttgtatcaaaactttgtctattcccttctatctttgcttgaaaatgtcaatttttttgataccttgctgaaagcaagga

SEQ ID NO: 436945 - DNA, 120 bp, Artificial Sequence
  ENSG00000153130_36 (sequence is synthesized)
atagccaattcacttaacattctggctttttccagctagagctatcagattagtaggtgtcaaaatatatccccactgcttgtcatgttaatggtaagctaatgctatatacttagtttt

SEQ ID NO: 436946 - DNA, 120 bp, Artificial Sequence
  ENSG00000153130_37 (sequence is synthesized)
tgctatgcaatacttcaggataatttcttcattagaaatataggtggtacacagtgtgcacagggactgtgtccagcttctggaaaagactcgaccaaattttagacaggcacctctgag

SEQ ID NO: 436947 - DNA, 120 bp, Artificial Sequence
  ENSG00000153130_38 (sequence is synthesized)
ccctgtttttgactagtccagttttagcaaaaatcctgctaaatgagtttagagataatcccatcctcaataactgatgatcgtcaacctggcctgtctttggcaagaatcaccctactc

SEQ ID NO: 436948 - DNA, 120 bp, Artificial Sequence
  ENSG00000153130_39 (sequence is synthesized)
ttgatgtctccagttagtagttttccatccactgacctcatcactgctcattgactataaatcctcagttgtatttgctgtgttagttgagcccagtttctttcccttattgggtgatgg

SEQ ID NO: 436949 - DNA, 120 bp, Artificial Sequence
  ENSG00000153130_40 (sequence is synthesized)
tcttaacatatacagtcctgagtaaagtcttctttactgctttaacaagtgtcagaatggtttttcctttaatacttcctagtttacatgctggtagaataatgtttggtagggaaaaat

SEQ ID NO: 436950 - DNA, 120 bp, Artificial Sequence
  ENSG00000153130_41 (sequence is synthesized)
cagcatactccttgttatggactgaatgtgtcctcccaaaattcttaggttgaaatcctaaccccaatgtgatgcttttaggaggtggggcttttgggagataattaggtaatgagggtg

SEQ ID NO: 436951 - DNA, 120 bp, Artificial Sequence
  ENSG00000153130_42 (sequence is synthesized)
aaaccctcatgaatgggattgtgtcattaaaagaaaccccagagagctctctttctgccacatagaagacagcagtctgcatcttggaagagggccctcaacactgatctctcagacttc

SEQ ID NO: 436952 - DNA, 120 bp, Artificial Sequence
  ENSG00000153130_43 (sequence is synthesized)
cagcttccaaaactgagaaataaatttgtttataagccacccagtctatattttgttatagcatcccaaatagtttaaggcacccattttccccactgtttcccaatacaaatttcccca

SEQ ID NO: 436953 - DNA, 120 bp, Artificial Sequence
  ENSG00000153130_44 (sequence is synthesized)
gtattgacactgccattctatgcaaaatgtgtcctctttatagtccctttggactcacagcaggttactacacatcacagatcctcgtctgaaacttgtagggccagatgtcttagaatt

SEQ ID NO: 436954 - DNA, 120 bp, Artificial Sequence
  ENSG00000153130_45 (sequence is synthesized)
tggagttttccagattttataaaatattatgactcagacaccaatatggtttggggcaacacctataatcaagtatattaacatttctgtagcaaaatgagtattaaagtaggataaaga

SEQ ID NO: 436955 - DNA, 120 bp, Artificial Sequence
  ENSG00000153130_46 (sequence is synthesized)
aagactacatatgtacataaaaccttgccggggaagtcaggctcagctaccaggtgagttttgttgccaaaatgctaggaaaatctttaacttttcagagatttttggtcatggaattgt

SEQ ID NO: 436956 - DNA, 120 bp, Artificial Sequence
  ENSG00000153130_47 (sequence is synthesized)
agcaacaaaaccttttgtagaagagtaaccaaaatcatgtatgcatttagttccaactagttaatgtcacatctctattcctgtcacccttccctgtgatctagtcccttttgtaagaga

SEQ ID NO: 436957 - DNA, 120 bp, Artificial Sequence
  ENSG00000153130_48 (sequence is synthesized)
aatatggtagttgaattataaaatctaaaattaattttgtggtccaaagaaaagcaaaatagatctttagaatgtaaagccattctttactttgcccaataaaaattttgttattccctg

SEQ ID NO: 436958 - DNA, 120 bp, Artificial Sequence
  ENSG00000153132_0 (sequence is synthesized)
agtagtcgctgctgcgcggccgccggcgggactggtctgaagagacgcggggaccaagtggcaacgacttggacatctgagctgtcactgccgaaaacaggccgcaagagagataatcaa

SEQ ID NO: 436959 - DNA, 120 bp, Artificial Sequence
  ENSG00000153132_1 (sequence is synthesized)
tatgcatttccaagccttttggctatgtttgggtcttctgttcatctcaattaatgcagaatttatggatgatgatgttgagacggaagactttgaagaaaattcagaagaaattgatgt

SEQ ID NO: 436960 - DNA, 120 bp, Artificial Sequence
  ENSG00000153132_2 (sequence is synthesized)
taatgaaagtgaactttcctcagagattaaatataagacacctcaacctataggagaagtatattttgcagaaacttttgatagtggaaggttggctggatgggtcttatcaaaagcaaa

SEQ ID NO: 436961 - DNA, 120 bp, Artificial Sequence
  ENSG00000153132_3 (sequence is synthesized)
gaaagatgacatggatgaggaaatttcaatatacgatggaagatgggaaattgaagagttgaaagaaaaccaggtacctggtgacagaggactggtattaaaatctagagcaaagcatca

SEQ ID NO: 436962 - DNA, 120 bp, Artificial Sequence
  ENSG00000153132_4 (sequence is synthesized)
tgcaatatctgctgtattagcaaaaccattcatttttgctgataaacccttgatagttcaatatgaagtaaattttcaagatggtattgattgtggaggtgcatacattaaactcctagc

SEQ ID NO: 436963 - DNA, 120 bp, Artificial Sequence
  ENSG00000153132_5 (sequence is synthesized)
agacactgatgatttgattctggaaaacttttatgataaaacatcctatatcattatgtttggaccagataaatgtggagaagattataaacttcattttatcttcagacataaacatcc

SEQ ID NO: 436964 - DNA, 120 bp, Artificial Sequence
  ENSG00000153132_6 (sequence is synthesized)
caaaactggagttttcgaagagaaacatgccaaacctccagatgtagaccttaaaaagttctttacagacaggaagactcatctttatacccttgtgatgaatccagatgacacatttga

SEQ ID NO: 436965 - DNA, 120 bp, Artificial Sequence
  ENSG00000153132_7 (sequence is synthesized)
ggtgttagttgatcaaacagttgtaaacaaaggaagcctcctagaggatgtggttcctcctatcaaacctcccaaagaaattgaagatcccaatgataaaaaacctgaggaatgggatga

SEQ ID NO: 436966 - DNA, 120 bp, Artificial Sequence
  ENSG00000153132_8 (sequence is synthesized)
aagagcaaaaattcctgatccttctgccgtcaaaccagaagactgggatgaaagtgaacctgcccaaatagaagattcaagtgttgttaaacctgctggctggcttgatgatgaaccaaa

SEQ ID NO: 436967 - DNA, 120 bp, Artificial Sequence
  ENSG00000153132_9 (sequence is synthesized)
atttatccctgatcctaatgctgaaaaacctgatgactggaatgaagacacggatggagaatgggaggcacctcagattcttaatccagcatgtcggattgggtgtggtgagtggaaacc

SEQ ID NO: 436968 - DNA, 120 bp, Artificial Sequence
  ENSG00000153132_10 (sequence is synthesized)
tcccatgatagataacccaaaatacaaaggagtatggagacctccactggtcgataatcctaactatcagggaatctggagtcctcgaaaaattcctaatccagattatttcgaagatga

SEQ ID NO: 436969 - DNA, 120 bp, Artificial Sequence
  ENSG00000153132_11 (sequence is synthesized)
atctgttcggaaaaggaagtagcagatcactgggctgcagatggttggagatggaaaataatgatagcaaatgctaataagcctggtgtattaaaacagttaatggcagctgctgaaggg

SEQ ID NO: 436970 - DNA, 120 bp, Artificial Sequence
  ENSG00000153132_12 (sequence is synthesized)
cacccatggctttggttgatttatcttgtgacagcaggagtgccaatagcattaattacttcattttgttggccaagaaaagtaaagaaaaaacataaagatacagagtataaaaaaacc

SEQ ID NO: 436971 - DNA, 120 bp, Artificial Sequence
  ENSG00000153132_13 (sequence is synthesized)
gacatatgtataccacaaacaaaaggagtactagagcaagaagaaaaggaagagaaagcagccctggaaaaaccaatggacctggaagaggaaaaaaagcaaaatgatggtgaaatgctt

SEQ ID NO: 436972 - DNA, 120 bp, Artificial Sequence
  ENSG00000153132_14 (sequence is synthesized)
gaaaaagaagaggaaagtgaacctgaggaaaagagtgaagaagaaattgaaatcatagaagggcaagaagaaagtaatcaatcaaataagtctgggtcagaggatgagatgaaagaagca

SEQ ID NO: 436973 - DNA, 120 bp, Artificial Sequence
  ENSG00000153132_15 (sequence is synthesized)
gatgagagcacaggatctggagatgggccgataaagtcagtacgcaaaagaagagtacgaaaggactaaactagattgaaatatttttaattcccgagagggatgtttggcattgtaaaa

SEQ ID NO: 436974 - DNA, 120 bp, Artificial Sequence
  ENSG00000153132_16 (sequence is synthesized)
atcagcatgccagacctgaactttaatcagtctgcacatcctgtttctaatatctagcaacattatattctttcagacatttattttagtccttcatttcagaggaaaaagaagcaactt

SEQ ID NO: 436975 - DNA, 120 bp, Artificial Sequence
  ENSG00000153132_17 (sequence is synthesized)
tgaagttacctcatctttgaatttagaataaaagtggcacattacatatcggatctaagagattaataccattagaagttacacagttttagttgtttggagatagttttggtttgtaca

SEQ ID NO: 436976 - DNA, 120 bp, Artificial Sequence
  ENSG00000153132_18 (sequence is synthesized)
gaacaaaataatatgtagcagcttcattgctattggaaaaatcagttattggaatttccacttaaatggctatacaacaatataactggtagttctataataaaaatgagcatatgttct

SEQ ID NO: 436977 - DNA, 120 bp, Artificial Sequence
  ENSG00000153132_19 (sequence is synthesized)
gttgtgaagagctaaatgcaataaagtttctgtatggttgtttgattctatcaacaattgaaagtgttgtatatgacccacatttacctagtttgtgtcaaattatagttacagtgagtt

SEQ ID NO: 436978 - DNA, 120 bp, Artificial Sequence
  ENSG00000153132_20 (sequence is synthesized)
gtttgcttaaattatagattcctttaaggacatgccttgttcataaaatcactggattatattgcagcatattttacatttgaatacaaggataatgggttttatcaaaacaaaatgatg

SEQ ID NO: 436979 - DNA, 120 bp, Artificial Sequence
  ENSG00000153132_21 (sequence is synthesized)
tacagattttttttcaagtttttatagttgctttatgccagagtggtttaccccattcacaaaatttcttatgcatacattgctattgaaaataaaatttaaatattttttcatcctgaa

SEQ ID NO: 436980 - DNA, 120 bp, Artificial Sequence
  ENSG00000153132_22 (sequence is synthesized)
cgcacgcgcggttagtagtcgctgctgcgcggccgccggcgggactggtctgaagagacgcggggaccaagtggcaacgacttggacatctgagctgtcactgccgaaaacaggccgcaa

SEQ ID NO: 436981 - DNA, 120 bp, Artificial Sequence
  ENSG00000153140_0 (sequence is synthesized)
atgttgtgggaggtccctgaggccgctgaggtcgttcgtgtctgttgaacggctgtgggcgtcttgctgccttgggtagggggttaaaatcgttcttgagaggaacgtctctgtgcgaag

SEQ ID NO: 436982 - DNA, 120 bp, Artificial Sequence
  ENSG00000153140_1 (sequence is synthesized)
agataatgagtttagctctgagaagtgagcttgtagtggacaaaacaaagaggaaaaaaagaagagaactgtctgaggaacagaaacaagaaattaaagatgcttttgaactatttgata

SEQ ID NO: 436983 - DNA, 120 bp, Artificial Sequence
  ENSG00000153140_2 (sequence is synthesized)
cagacaaagatgaagcaatagattatcatgaattaaaggtggcaatgagagccttggggtttgatgtaaaaaaagctgatgtactgaagattcttaaagattatgacagagaagccacag

SEQ ID NO: 436984 - DNA, 120 bp, Artificial Sequence
  ENSG00000153140_3 (sequence is synthesized)
ggaaaatcacctttgaagattttaatgaagttgtgacagactggatattggaaagagatccccatgaagaaatactcaaggcatttaaactatttgatgatgatgattcaggtaaaataa

SEQ ID NO: 436985 - DNA, 120 bp, Artificial Sequence
  ENSG00000153140_4 (sequence is synthesized)
gcttgaggaatttgcgacgtgttgctagagaattgggtgaaaacatgagtgatgaagaacttcgagctatgatagaagaatttgacaaagatggtgatggagaaataaaccaagaggagt

SEQ ID NO: 436986 - DNA, 120 bp, Artificial Sequence
  ENSG00000153140_5 (sequence is synthesized)
tcattgctattatgactggtgacatttaaagaattacaaggataaacactaagaatgttgcagttaccatcttatattctatttttgtgcctggagccatgtgaaaaaaaccaacttagt

SEQ ID NO: 436987 - DNA, 120 bp, Artificial Sequence
  ENSG00000153140_6 (sequence is synthesized)
tcttttatcctaaaggaccaaaaataagcatcttatatatctgtattttactactgttaagtttctttgtatgaactgtgttgttagtactcagatagtttagctttgtatttataatag

SEQ ID NO: 436988 - DNA, 120 bp, Artificial Sequence
  ENSG00000153140_7 (sequence is synthesized)
agcttttatataaagttttaaaaattgaatgtgtgatatgtgttctttgaaggttttttaatttaacatttatagtcactttttagtgcacacattttccagactttcgttaataaaata

SEQ ID NO: 436989 - DNA, 120 bp, Artificial Sequence
  ENSG00000153140_8 (sequence is synthesized)
tttattttattagaattttaaagtttggtaaatttgtttttattcctagtatctgttaaccctcaagagtggatttcttaaatcttccctttataattttactagtttctgaaacaaaaa

SEQ ID NO: 436990 - DNA, 120 bp, Artificial Sequence
  ENSG00000153140_9 (sequence is synthesized)
ttgaaatacaattagcaatagagtggcacatttttccattacctaacatttcatcaattttgacattctatattttaatacaagctgactcaatataagcctaattccttttttaagagt

SEQ ID NO: 436991 - DNA, 120 bp, Artificial Sequence
  ENSG00000153140_10 (sequence is synthesized)
tgcagatagacccatttatccttgtgtattatgtttcttaacttggtatcattgtaagtatgaaagttaattttcttctgaatatttccttaaacaaattgaatgaatacaatttgaatt

SEQ ID NO: 436992 - DNA, 120 bp, Artificial Sequence
  ENSG00000153140_11 (sequence is synthesized)
ttctaacttcttgactgagagatttaaattttggaattttgatttgttaaggtaattatcactcaattacatgtcacagtgatgaaaatagaaaactgtaagccacagaaataatttaag

SEQ ID NO: 436993 - DNA, 120 bp, Artificial Sequence
  ENSG00000153140_12 (sequence is synthesized)
tctatgttttacctatatgaaggaacagtctgtgattcaccaggaaatagtagagacacagtttccaagtactggtgggctcttctgccttgtagaagtgtatgttagggggaaacaagt

SEQ ID NO: 436994 - DNA, 120 bp, Artificial Sequence
  ENSG00000153140_13 (sequence is synthesized)
ggttatggagatcgatcatagaaaaaaatagtacctatatggatccttcactcatatctagtactcggtgttatgggctctcccaggaacggaattgagttgtctatttcagcaatcttt

SEQ ID NO: 436995 - DNA, 120 bp, Artificial Sequence
  ENSG00000153140_14 (sequence is synthesized)
ctttagaattcttgttttaaatttttaagtttaaagtgtagtatcatttgaggcgctttaaatgttgtgagccttttaagagtattacattaagggttgtccactagaaatttaacacaa

SEQ ID NO: 436996 - DNA, 120 bp, Artificial Sequence
  ENSG00000153140_15 (sequence is synthesized)
aatcagtagggaatactatagcagtagtgacatttcaaacagttatctaggaagcaagtgtatattaagtcattcttgtattgctacgaagaaatacccaagactgcatattttataaag

SEQ ID NO: 436997 - DNA, 120 bp, Artificial Sequence
  ENSG00000153140_16 (sequence is synthesized)
aaaagaagcttaattggcttacggttctgcaggctttacaggaagcatggtgcttctgcttttggggaggcctcaggaagcttacagtcatggtagaaggcaaagggggagcaggcacat

SEQ ID NO: 436998 - DNA, 120 bp, Artificial Sequence
  ENSG00000153140_17 (sequence is synthesized)
cacatggtgaaaaccagagtgaacaagtgagagaagtgccaagtactttgaaaccaccagatctcatgagaactcactattgtgaggacatctaatcacctcccaccagacctcacctcc

SEQ ID NO: 436999 - DNA, 120 bp, Artificial Sequence
  ENSG00000153140_18 (sequence is synthesized)
agtactggggattacaattcaacatgatatttgagtggggacagatatacaaactatatcagcaggttaactagagtaaaacttaattttgaatacaaattcaatggtcacagtcattat

SEQ ID NO: 437000 - DNA, 120 bp, Artificial Sequence
  ENSG00000153140_19 (sequence is synthesized)
attcagggcaacagaccttgaaattaaaaaatttttgtcgcacactgatgagttccctctgtcttgatcatgaaatatattgatttccaggaaagtgaaaaataaaacagtaaaagtaaa

SEQ ID NO: 437001 - DNA, 120 bp, Artificial Sequence
  ENSG00000153140_20 (sequence is synthesized)
aatgacttgcaagacttttttgtaaacttaactgcttcttgtaatggaccttctgtctaaataattcacatattcaatttagaatgaagcagatctctaaaaccaattatacttcaagaa

SEQ ID NO: 437002 - DNA, 120 bp, Artificial Sequence
  ENSG00000153140_21 (sequence is synthesized)
ggtccttcacttttctctgaaggtgaaaccaccaaaatttcagcctttcaatataatttcagtctttaatggcttctccctcaacctacatgctaagttctaagttctattgattttccc

SEQ ID NO: 437003 - DNA, 120 bp, Artificial Sequence
  ENSG00000153140_22 (sequence is synthesized)
ttaatatcactttttaaattttaaattctctaggttatggaattttcttatagaacactggtgtataatgtgactcttactcagttttgttttgttggtttttttttcaaagaaaaaata

SEQ ID NO: 437004 - DNA, 120 bp, Artificial Sequence
  ENSG00000153140_23 (sequence is synthesized)
tggctttgctctgagatttatagttttgtcttttgttttgttgtgaagattctaaccaaggaactattgtgtagctttttatagaaagatgcttttccaagttgtttgtatttatattat

SEQ ID NO: 437005 - DNA, 120 bp, Artificial Sequence
  ENSG00000153147_0 (sequence is synthesized)
gccggtggaacctagagccccgcggaagagcagaacgtttgggagtgtgcagctcctgggcccggctcaggcccgtcgcggaggcgcggcgcaggggagcgctcgggtgggagtctcgct

SEQ ID NO: 437006 - DNA, 120 bp, Artificial Sequence
  ENSG00000153147_1 (sequence is synthesized)
cctccaccagtttattgcgacgtagcatccaggcctaggcctccccgtccatccccgccggactcgggcctctggcagcagcgggtgacgcagacggaacatcatgtcgtccgcggccga

SEQ ID NO: 437007 - DNA, 120 bp, Artificial Sequence
  ENSG00000153147_2 (sequence is synthesized)
gcctccgccacccccgcctcccgagagcgcgccttccaagcccgcagcctcgatcgccagcggcgggagcaacagcagcaacaaaggcggccccgaaggcgtcgcggcgcaggcggttgc

SEQ ID NO: 437008 - DNA, 120 bp, Artificial Sequence
  ENSG00000153147_3 (sequence is synthesized)
gtctgcggccagcgctggtcccgcagacgccgagatggaggaaatatttgatgatgcgtcacctggaaagcaaaaggaaatccaagaaccagatcctacctatgaagaaaaaatgcaaac

SEQ ID NO: 437009 - DNA, 120 bp, Artificial Sequence
  ENSG00000153147_4 (sequence is synthesized)
tgaccgggcaaatagattcgagtatttattaaagcagacagaactttttgcacatttcattcaacctgctgctcagaagactccaacttcacctttgaagatgaaaccagggcgcccacg

SEQ ID NO: 437010 - DNA, 120 bp, Artificial Sequence
  ENSG00000153147_5 (sequence is synthesized)
aataaaaaaagatgagaagcagaacttactatccgttggcgattaccgacaccgtagaacagagcaagaggaggatgaagagctattaacagaaagctccaaagcaaccaatgtttgcac

SEQ ID NO: 437011 - DNA, 120 bp, Artificial Sequence
  ENSG00000153147_6 (sequence is synthesized)
tcgatttgaagactctccatcgtatgtaaaatggggtaaactgagagattatcaggtccgaggattaaactggctcatttctttgtatgagaatggcatcaatggtatccttgcagatga

SEQ ID NO: 437012 - DNA, 120 bp, Artificial Sequence
  ENSG00000153147_7 (sequence is synthesized)
aatgggcctaggaaagactcttcaaacaatttctcttcttgggtacatgaaacattatagaaacattcctgggcctcatatggttttggttcctaagtctacattacacaactggatgag

SEQ ID NO: 437013 - DNA, 120 bp, Artificial Sequence
  ENSG00000153147_8 (sequence is synthesized)
tgaattcaagagatgggtaccaacacttagatctgtttgtttgataggagataaagaacaaagagctgcttttgtcagagacgttttattaccgggagaatgggatgtatgtgtaacatc

SEQ ID NO: 437014 - DNA, 120 bp, Artificial Sequence
  ENSG00000153147_9 (sequence is synthesized)
ttatgaaatgcttattaaagagaagtctgtgttcaaaaaatttaattggagatacttagtaatagatgaagctcacaggatcaaaaatgaaaaatctaagttgtcagaaatagtgaggga

SEQ ID NO: 437015 - DNA, 120 bp, Artificial Sequence
  ENSG00000153147_10 (sequence is synthesized)
attcaagactacaaatagactattattaactggaacacctcttcagaacaacttgcatgagctgtggtcacttcttaactttctgttgccagatgtgtttaattcagcagatgactttga

SEQ ID NO: 437016 - DNA, 120 bp, Artificial Sequence
  ENSG00000153147_11 (sequence is synthesized)
ttcctggtttgatacaaacaactgccttggggatcaaaaactagttgagaggcttcatatggttttgcgtccattcctccttcgtcgaattaaggctgatgttgaaaagagtttgcctcc

SEQ ID NO: 437017 - DNA, 120 bp, Artificial Sequence
  ENSG00000153147_12 (sequence is synthesized)
aaagaaggaagtaaaaatctatgtgggcctcagcaaaatgcaaagggaatggtatactcggatattaatgaaggatatagatatactcaactcagcaggcaagatggacaaaatgaggtt

SEQ ID NO: 437018 - DNA, 120 bp, Artificial Sequence
  ENSG00000153147_13 (sequence is synthesized)
attgaacatcctaatgcagttgagaaaatgttgtaatcatccatatctctttgatggagcagaacctggtccaccttatacaacagatatgcatctagtaaccaacagtggcaaaatggt

SEQ ID NO: 437019 - DNA, 120 bp, Artificial Sequence
  ENSG00000153147_14 (sequence is synthesized)
ggttttagacaagctgctccctaagttaaaagaacaaggttcacgagtactaatcttcagtcaaatgacaagggtattggacattttggaagattattgcatgtggagaaattatgagta

SEQ ID NO: 437020 - DNA, 120 bp, Artificial Sequence
  ENSG00000153147_15 (sequence is synthesized)
ctgcaggttggatggtcagacaccccatgatgagagacaagactccatcaatgcatacaatgaaccaaacagcacaaagtttgttttcatgttaagcacgcgtgctggtggtcttggcat

SEQ ID NO: 437021 - DNA, 120 bp, Artificial Sequence
  ENSG00000153147_16 (sequence is synthesized)
caatcttgcgactgctgatgtagtaattttgtatgattctgattggaatccccaagtagatcttcaggctatggaccgagcacatagaattgggcagactaagacagtcagagtgttccg

SEQ ID NO: 437022 - DNA, 120 bp, Artificial Sequence
  ENSG00000153147_17 (sequence is synthesized)
ctttataactgataacactgtagaagaaagaatagtagaacgtgctgagatgaaactcagactggattcaatagtcattcaacaagggaggcttgtggatcagaatctgaacaaaattgg

SEQ ID NO: 437023 - DNA, 120 bp, Artificial Sequence
  ENSG00000153147_18 (sequence is synthesized)
gaaagatgaaatgcttcaaatgattagacatggagcaacacatgtgtttgcttcaaaggaaagtgagatcactgatgaagatatcgatggtattttggaaagaggtgcaaagaagactgc

SEQ ID NO: 437024 - DNA, 120 bp, Artificial Sequence
  ENSG00000153147_19 (sequence is synthesized)
agagatgaatgaaaagctctccaagatgggcgaaagttcacttagaaactttacaatggatacagagtcaagtgtttataacttcgaaggagaagactatagagaaaaacaaaagattgc

SEQ ID NO: 437025 - DNA, 120 bp, Artificial Sequence
  ENSG00000153147_20 (sequence is synthesized)
attcacagagtggattgaaccacctaaacgagaaagaaaagccaactatgccgttgatgcatatttcagggaagctcttcgtgttagtgaacctaaagcacccaaggctcctcgacctcc

SEQ ID NO: 437026 - DNA, 120 bp, Artificial Sequence
  ENSG00000153147_21 (sequence is synthesized)
aaaacaacccaatgttcaggatttccagttctttcctccacgtttatttgaattactggaaaaagaaattctgttttacagaaaaactattgggtacaaggtacctcgaaatcctgagct

SEQ ID NO: 437027 - DNA, 120 bp, Artificial Sequence
  ENSG00000153147_22 (sequence is synthesized)
gcctaatgcagcacaggcacaaaaagaagaacagcttaaaattgatgaagctgaatcccttaatgatgaagagttagaggaaaaagagaagcttctaacacagggatttaccaattggaa

SEQ ID NO: 437028 - DNA, 120 bp, Artificial Sequence
  ENSG00000153147_23 (sequence is synthesized)
taagagagattttaaccagtttatcaaagctaatgagaagtggggtcgtgatgatattgaaaatatagcaagagaagtagaaggcaaaactccagaagaagtcattgaatattcagctgt

SEQ ID NO: 437029 - DNA, 120 bp, Artificial Sequence
  ENSG00000153147_24 (sequence is synthesized)
gttttgggaaaggtgcaacgagctccaggacatagagaagattatggctcagattgaaaggggagaggcgagaattcaaagaagaataagcatcaagaaagcacttgacacaaagattgg

SEQ ID NO: 437030 - DNA, 120 bp, Artificial Sequence
  ENSG00000153147_25 (sequence is synthesized)
acggtacaaagcaccttttcatcagctgagaatatcatatggtactaacaaaggaaaaaactatactgaagaagaagatcgttttctgatttgtatgcttcacaaacttggatttgacaa

SEQ ID NO: 437031 - DNA, 120 bp, Artificial Sequence
  ENSG00000153147_26 (sequence is synthesized)
agaaaatgtttatgatgaattgcgacagtgtattcgcaactctcctcagttcagatttgactggtttcttaagtccagaactgcaatggagctccagaggagatgtaataccttaattac

SEQ ID NO: 437032 - DNA, 120 bp, Artificial Sequence
  ENSG00000153147_27 (sequence is synthesized)
tttgattgaaagagaaaacatggaactagaagaaaaggagaaggcagagaaaaagaaacgaggaccaaagccttcaacacagaaacgtaaaatggatggcgcacctgatggtcgaggaag

SEQ ID NO: 437033 - DNA, 120 bp, Artificial Sequence
  ENSG00000153147_28 (sequence is synthesized)
aaaaaagaagctgaaactatgaatatgtttttgtttcataatcactaactttaaaccagtagttctttaatttacgggtcttcataagatgtactgtacaatgctcaattgttatgtcat

SEQ ID NO: 437034 - DNA, 120 bp, Artificial Sequence
  ENSG00000153147_29 (sequence is synthesized)
ttaaagacatcaggttcatctgtttactgagctagaaacatagtatgtagtttcacttttttaaatgcaacagctgtgctgaaatttttttatcattaacacttgaagtaataaaatagg

SEQ ID NO: 437035 - DNA, 120 bp, Artificial Sequence
  ENSG00000153147_30 (sequence is synthesized)
cttcatttattactaagtgtttcatttgatttatttttctattgtagttccatttgtgaagattgtgactttttgtttattagctataatttctacacttgtaaggcttaaaaacaagtt

SEQ ID NO: 437036 - DNA, 120 bp, Artificial Sequence
  ENSG00000153147_31 (sequence is synthesized)
aaaaagaaaattgcaaataacatttgtccctttcagtcttcacctagttgtgtaattattttaattcactttgcctttgcagaaatttgggtattttctttgtagtgctattgagtctca

SEQ ID NO: 437037 - DNA, 120 bp, Artificial Sequence
  ENSG00000153147_32 (sequence is synthesized)
gaaagattatataaattgcattctccttgcttatgtgggtagaatgggaaaagaaggcaagacaaagtatacttaaattctatgcatatttctgttatgctttctgttttttttagttga

SEQ ID NO: 437038 - DNA, 120 bp, Artificial Sequence
  ENSG00000153147_33 (sequence is synthesized)
ttctgaaatgaatatgccctattcttttgaaagaatggccttttagttgtatagccaaagacatttagtattttccggttccttaaggtattactgtaccattttgtaaaaggaatatta

SEQ ID NO: 437039 - DNA, 120 bp, Artificial Sequence
  ENSG00000153147_34 (sequence is synthesized)
ttattattatttttaattatttggtaaatattttgtcatatgaccttctgaagcagccacaacttagataatgtcagaactaaggtgattttttttttttaattttgaaagcccagccaa

SEQ ID NO: 437040 - DNA, 120 bp, Artificial Sequence
  ENSG00000153147_35 (sequence is synthesized)
aatgaggtgtgaatttgtcatactgttacattgaaattggtaacaaaatatatcccctcccatttggacttttagggtaaatgaaaattttattgtattttaaagtagtttctaagtgtt

SEQ ID NO: 437041 - DNA, 120 bp, Artificial Sequence
  ENSG00000153147_36 (sequence is synthesized)
agcaagactgactataattccagtttctgttttctatggacagacctgataaactggagaccctaaagcaggaatacccaaattatagtgtcaggattttagctgtaccagaggccttta

SEQ ID NO: 437042 - DNA, 120 bp, Artificial Sequence
  ENSG00000153147_37 (sequence is synthesized)
tgtgctacacataatttgtataaaattttatatgtgcagattgggtacataaacagttctccatttttctaagggaatgcaataaatgtagcatcgtgaataaatataacttttataatc

SEQ ID NO: 437043 - DNA, 120 bp, Artificial Sequence
  ENSG00000153147_38 (sequence is synthesized)
cgtaaagtggtcttttctttccatttctttaattgttttctcaatttttattcactttttcctttaggacacatttcccttaattggatatctttcccttaaatttctattagtagttgt

SEQ ID NO: 437044 - DNA, 120 bp, Artificial Sequence
  ENSG00000153147_39 (sequence is synthesized)
tttcatctgcccacatgtaattgaagatttaaaaaaaaaattttgatacctgcagtattactaatactgcttaatttcttgaaatgtggaattgctgctgttaatgtcaagcaaaacgca

SEQ ID NO: 437045 - DNA, 120 bp, Artificial Sequence
  ENSG00000153147_40 (sequence is synthesized)
gtatttatggcaaattgtaaagtaatttgaatttagtgctacctcaaaattaactttttaaatactatgttagattcttaacagttaaaggtctaatacatgcatgaggaatggttactt

SEQ ID NO: 437046 - DNA, 120 bp, Artificial Sequence
  ENSG00000153147_41 (sequence is synthesized)
atgaaaggaaaaagaatttgtaagagttatcacctcagtttggaagaaattgaaaaaatgtaaggctgaagaaaacttacggaggtcacaaaagtgatgttttcaagaggaggagaaact

SEQ ID NO: 437047 - DNA, 120 bp, Artificial Sequence
  ENSG00000153147_42 (sequence is synthesized)
gggagggagatacacagtggaaatgcaaaatgaatcaagtatagtggtagccctgagagcttagggactcaaatggaaactgtgtgaagggaaactcacttgaaaaaaaagcatgaacca

SEQ ID NO: 437048 - DNA, 120 bp, Artificial Sequence
  ENSG00000153147_43 (sequence is synthesized)
gctaggccctgccaccactgtgtttggccaagttcacaaatctgttttaacctgtcacttccctgtcacttctctggctttcctctcccgctaagcttttgtttcctggcagtaattaaa

SEQ ID NO: 437049 - DNA, 120 bp, Artificial Sequence
  ENSG00000153147_44 (sequence is synthesized)
atcttctgtcagtgccacagctactactgctactggaactgccttaaccactactgctactggaactgccttagccaccttggtatcgtggtttggcaaagtattggcctctaccaccat

SEQ ID NO: 437050 - DNA, 90 bp, Artificial Sequence
  ENSG00000153147_45 (sequence is synthesized)
attgccaaaatcattgtagcttttaccacctccaaaattgcttcaatcattaccaaatctattatagcaatccccactgccaccatatcc

SEQ ID NO: 437051 - DNA, 120 bp, Artificial Sequence
  ENSG00000153147_46 (sequence is synthesized)
taccaaatctattatagcaatccccactgccaccatatccatcaccaccaccatggctgccaccaaagccaccacgatcacagaacttgatgactgtatttgtgactaattgtataatag

SEQ ID NO: 437052 - DNA, 120 bp, Artificial Sequence
  ENSG00000153147_47 (sequence is synthesized)
tttctgttctgtggaaagtaaagcattccaacacagggtttcagtgtagattgttttgttttgtacccatgctgttgattgctaaatgttttaataatctgatcatgatactgaataaat

SEQ ID NO: 437053 - DNA, 120 bp, Artificial Sequence
  ENSG00000153147_48 (sequence is synthesized)
gtctttttttttttttaacaacaaagcatgaaagattgcttaattgtacatctgacaaagtgctggaggctattataaagtgtaattattactacttttaagagacagggtcttgctctg

SEQ ID NO: 437054 - DNA, 69 bp, Artificial Sequence
  ENSG00000153147_49 (sequence is synthesized)
gcaacctcaaacttcataccacgcccagctaagtttttttagtttttgtagagatagggccttgctatg

SEQ ID NO: 437055 - DNA, 120 bp, Artificial Sequence
  ENSG00000153147_50 (sequence is synthesized)
taagtttttttagtttttgtagagatagggccttgctatgttgcccagtccggtctcaaacgccgacttcaggcaatcctcttgcgtcaacctctcaaagtgctgggattacatgtgtaa

SEQ ID NO: 437056 - DNA, 120 bp, Artificial Sequence
  ENSG00000153147_51 (sequence is synthesized)
gcctacattccaaagtgctgggatcatagttgtgagcctacaccacacctggcctacattttgtttttcataaagttgagagaagcaaatcctaagcatagagtacaagttgagcatccc

SEQ ID NO: 437057 - DNA, 120 bp, Artificial Sequence
  ENSG00000153147_52 (sequence is synthesized)
taatcaaaaaatctaaaatcagaaatgctccataatttgaatgctcattagggcatttctgatttttggattagggatgctgaactgataagtataatgcaagtattctaaagtctggaa

SEQ ID NO: 437058 - DNA, 120 bp, Artificial Sequence
  ENSG00000153147_53 (sequence is synthesized)
aatgctaaaaacacttctggttccaggcatttcagataaggattgctccatctgccctttgagtatttaatatatgccgattgtttgaactaatctggatttaattatataaatgattat

SEQ ID NO: 437059 - DNA, 120 bp, Artificial Sequence
  ENSG00000153147_54 (sequence is synthesized)
ataaatgatctttggcttagtacctttcttaatctcgatcttaaaaagcattgtaaaacacccctgtggtttttcagaaaaattctgagtaaaaaataaatttcatcttgttctatccct

SEQ ID NO: 437060 - DNA, 120 bp, Artificial Sequence
  ENSG00000153147_55 (sequence is synthesized)
ttgaatctaaaaaacaaatctttttgaaaggatgtgctactatatttcaaaccagtagttttggagtagaacattgctaaaaaaatgggtactaaggagggtaatttaaacaaagtagat

SEQ ID NO: 437061 - DNA, 120 bp, Artificial Sequence
  ENSG00000153147_56 (sequence is synthesized)
taatgacacaaggtggattgatgaactcataaatccaaatgaatggaatgctagaagacatgtattaacggagtagctgttaccaaaatatatacatattttgtatatgtacatagctgt

SEQ ID NO: 437062 - DNA, 120 bp, Artificial Sequence
  ENSG00000153147_57 (sequence is synthesized)
taccaaaatgtatctttgcctgttggaatctgatgtcaagatcaaaggtgagggcatccctcagatgacagataatgggcaaaatacattcttggtgtggagcagtgctgcagaattaac

SEQ ID NO: 437063 - DNA, 120 bp, Artificial Sequence
  ENSG00000153147_58 (sequence is synthesized)
ttcgctgtgtacatcccagaatcgttttggatctgttaaggtttttattagaatgattaaataggcttttgcagcattaactttacagtagttaccagaaaagactatgctacaagaacc

SEQ ID NO: 437064 - DNA, 120 bp, Artificial Sequence
  ENSG00000153147_59 (sequence is synthesized)
aaaattgaagtaagaagaaaaagactgaaatgatatgattctaaatgaaaaaaatgaagaagtggaatagtttctccacaggcataagaggcaaagcattgtttcagaagtggactggca

SEQ ID NO: 437065 - DNA, 120 bp, Artificial Sequence
  ENSG00000153147_60 (sequence is synthesized)
cctcacctgagatactcaagactggcaacatgggtctacattctttgttaccacagattcccttgtgtccggagagattccctagctctaatgacagcttttttggggggtaatgaggct

SEQ ID NO: 437066 - DNA, 120 bp, Artificial Sequence
  ENSG00000153147_61 (sequence is synthesized)
atgagaagattgaggatctaggtacttgcctttaactctacagcatacaaggtgtgtggctcttatctctaggacaccaatatttaatgttgcatatcatgtatctccagtacaagaaga

SEQ ID NO: 437067 - DNA, 120 bp, Artificial Sequence
  ENSG00000153147_62 (sequence is synthesized)
aagtttatcagaatttagttaatgttggaaactttgtaatataaacaatgtaaacactacattgacaaaaatattttattaatacaaagaatatgcatatagtttgcttactacagaaat

SEQ ID NO: 437068 - DNA, 120 bp, Artificial Sequence
  ENSG00000153147_63 (sequence is synthesized)
tcttgtttttgatgtagacaacccaaaggagtttttatgtatatagattgtgaataaattgggaaaagaaatagagataagtagagattatttcacttcattaaacttttgaagtcctaa

SEQ ID NO: 437069 - DNA, 120 bp, Artificial Sequence
  ENSG00000153147_64 (sequence is synthesized)
taaaatttaatgccagtttttcagttggtaagctctgaaatatttttaaagtttttgtaatgaagtttgtggtatatgtttacagtgaaatatattcttgtatgggatgaatagtaattt

SEQ ID NO: 437070 - DNA, 120 bp, Artificial Sequence
  ENSG00000153147_65 (sequence is synthesized)
gggatggtaacctgattcattttattttaaacagcagaattggctggtaataaagggaaaaatttcttaacttcataagtaatacttggtaatatagagataaattgaaaaatacccaga

SEQ ID NO: 437071 - DNA, 120 bp, Artificial Sequence
  ENSG00000153157_0 (sequence is synthesized)
ggggaagcaggagagggccgaccgagcgcaacaaagctgagcggcgcgtcgcttcaggaacgaagaagcctcgttatgcaagcgaaaaacaaagatgctttgcagcctattaaggaagac

SEQ ID NO: 437072 - DNA, 120 bp, Artificial Sequence
  ENSG00000153157_1 (sequence is synthesized)
aggactgggaaggcccaggatgatgctttctggcttcaatcacttattacggatgcattccatgataaaggatttcagaaaataaaagaatactttcaacagaaagagagccactttcct

SEQ ID NO: 437073 - DNA, 120 bp, Artificial Sequence
  ENSG00000153157_2 (sequence is synthesized)
caaaaatataatcgtcttctattataccgtcttgacagatcaataaataaggaactagataaaaatgaatttcagtctgtgtcactgttgctgaaatgtattcagcgattcctcgtagat

SEQ ID NO: 437074 - DNA, 120 bp, Artificial Sequence
  ENSG00000153157_3 (sequence is synthesized)
ggcctgaaagaagatgaacctctgctaattcggcagggactgatcccaaagctagtttcctggtttgaaagaacaacaggaattctgacctcggaaggcctagcctcagacacgtcgctg

SEQ ID NO: 437075 - DNA, 120 bp, Artificial Sequence
  ENSG00000153157_4 (sequence is synthesized)
atttgtgttatagaagatttctttgacactgcattgattatttccaggagtagtagtgaagggaaaattcagatgttggattccttcctacttagcttaggattcctggtgacagaaaag

SEQ ID NO: 437076 - DNA, 120 bp, Artificial Sequence
  ENSG00000153157_5 (sequence is synthesized)
actgtaaatcatttgcttcaacaggagggcttgaagacttttaactgcattttgcacgctgtccctcgagaagagagaaaaaaattccctttgtcagaaggcatgtgtcatcttatgaaa

SEQ ID NO: 437077 - DNA, 120 bp, Artificial Sequence
  ENSG00000153157_6 (sequence is synthesized)
gaccttgcaaggacactcttgactgtgggtgattatgaccagcaggttgctatttctgaagcgctgtgtagactgacgattaaaaaatcaagggatgaacttgtccataaatggtttgat

SEQ ID NO: 437078 - DNA, 120 bp, Artificial Sequence
  ENSG00000153157_7 (sequence is synthesized)
gatgaagtcattgctgaagctttcaaagaaattaaggatcgagaatttgagacggacagtagacgttttctcaatcacctaaacaacagacttggtgaccaaagaagggtgtattcattt

SEQ ID NO: 437079 - DNA, 120 bp, Artificial Sequence
  ENSG00000153157_8 (sequence is synthesized)
ccgtgtattgctgcttttgctgatgagcatgagatgagaaaaccagcggatgaaaaattagagaaattttggatcgacttcaacctaggaagtcagagtgtcactttttatatagacaat

SEQ ID NO: 437080 - DNA, 120 bp, Artificial Sequence
  ENSG00000153157_9 (sequence is synthesized)
gctgagaatactctatgggactcagtgacacttccgaaggaagcggtgatgaatttcagcataacagaaacggagaagataaagatatttatcatttacctgaagaagcccatgattatc

SEQ ID NO: 437081 - DNA, 120 bp, Artificial Sequence
  ENSG00000153157_10 (sequence is synthesized)
agctacaaagaagtcatgaaaatagaaatccattttgatttgcagttcaacatatcacaagtttccattcaagctttaggagaagacaaacagatgttgcctgaccagacgaaaatctcc

SEQ ID NO: 437082 - DNA, 120 bp, Artificial Sequence
  ENSG00000153157_11 (sequence is synthesized)
tcagaactttttagtaagtctgataaagaagacagggagagtcccagtggccttgaaagagaaacagagcaggcagaagaatccactaacatggtggagtttatgagtgctgaagatgac

SEQ ID NO: 437083 - DNA, 85 bp, Artificial Sequence
  ENSG00000153157_12 (sequence is synthesized)
ctgaagatgaccgctgcctaataactctccacttaaatgaccaatctgagccacctgttattggggaacctgcctctgatagtca

SEQ ID NO: 437084 - DNA, 120 bp, Artificial Sequence
  ENSG00000153157_13 (sequence is synthesized)
ctctgagagtaatcaagattcaagtaccagtgaactatcttggaccagtaaccagaaaaagaaatccctaaaatcatattccagtagaaagaagacaagaaccagaagtaatttgagaat

SEQ ID NO: 437085 - DNA, 120 bp, Artificial Sequence
  ENSG00000153157_14 (sequence is synthesized)
cttgccagttttccctcccagtagtggcagtggccatgagaaagaccaagctaagcttctatcaccatcagagaaagaaatacccgagcaaaataacaccacatctccaaagacttctga

SEQ ID NO: 437086 - DNA, 120 bp, Artificial Sequence
  ENSG00000153157_15 (sequence is synthesized)
acaaaaattccaagatagttttgcttttttgactgctgaagattctgcccagaaaacagagcttcaagatcctcactcactgagtgagctctcttccttgaagcactcagaagatgaaga

SEQ ID NO: 437087 - DNA, 120 bp, Artificial Sequence
  ENSG00000153157_16 (sequence is synthesized)
aaaacctaagattgtgaaccaagaatcactaacagaaagtactagcttgaaacataagctgagaaacttggaagacaaagacataccagaaggtagttttgctaagtcacaacaatcaag

SEQ ID NO: 437088 - DNA, 120 bp, Artificial Sequence
  ENSG00000153157_17 (sequence is synthesized)
attggaagaagaggttgctccgggatcccctttctcaataacagaagaaagagagttgccagaaggaatttccacttcatccctagaagttgtgccagagaacttgaacggttctgccat

SEQ ID NO: 437089 - DNA, 120 bp, Artificial Sequence
  ENSG00000153157_18 (sequence is synthesized)
tctcccaacctttgaaaacttcactaaaaaacggaaaagaaaatatgagcttaggtacagaaagcgtccgtttaattcagaaaatgcaaagaaagcaccggattgcctaataaaactttt

SEQ ID NO: 437090 - DNA, 120 bp, Artificial Sequence
  ENSG00000153157_19 (sequence is synthesized)
aaaccagatgcaactgttcagactcaataaactagagcgctttcaaaatttggttcttcaagagttgagcagtcttaagcaggatattcaggccctggaacaccttgagaaggaggttct

SEQ ID NO: 437091 - DNA, 120 bp, Artificial Sequence
  ENSG00000153157_20 (sequence is synthesized)
ggaattctgggggaaacagtctgctgatctgcaatctttctgtgatctgcaagtgctgaggttcaattcaactcagacttcataagaaagccaaagcctggttttatgattgcagccctc

SEQ ID NO: 437092 - DNA, 120 bp, Artificial Sequence
  ENSG00000153157_21 (sequence is synthesized)
agcctgggctgcctgaagacgaagagaaagagcaaggttattgttggctcaggccttgttagccagacttcgtgctctgtacgcattcaatttcctcccctccaaacatcatccctggga

SEQ ID NO: 437093 - DNA, 120 bp, Artificial Sequence
  ENSG00000153157_22 (sequence is synthesized)
actgctgagttcagatagaatatatgttggtagtttgcagttgggttattatccatttgttcataaaaattaaccttttgtattaaaatttggtcagatagtattaatagaaagttcagg

SEQ ID NO: 437094 - DNA, 120 bp, Artificial Sequence
  ENSG00000153157_23 (sequence is synthesized)
atgttaaacaacttggagtggtgttgctttttttttataaaagtaaaatggacttttttttgtttgagaaatgtcttcaagttttgtgtgaataaaacactttagcagcatctgtataaa

SEQ ID NO: 437095 - DNA, 120 bp, Artificial Sequence
  ENSG00000153157_24 (sequence is synthesized)
agaaaaagaaataactctcctctttggttttggttcttctaaaatgtagagaggcttgtctttgcaaaaaatattcccatacttttcttttgccatctgacttagtattttcaagtagta

SEQ ID NO: 437096 - DNA, 120 bp, Artificial Sequence
  ENSG00000153157_25 (sequence is synthesized)
ttaggcacaatattgagattggtctgcttttgaacagtcatccaccatctcttctgttgcaaacgttttattagaaaggattttgtcatcctatacaacagcaacttggttgagaattga

SEQ ID NO: 437097 - DNA, 120 bp, Artificial Sequence
  ENSG00000153157_26 (sequence is synthesized)
ctgatggaataatccttttcttccactccatacttctttgcttttatattatataagagagcccagtcttctagaagggtacttctcttatctctagctttgtagaatatgtttagttat

SEQ ID NO: 437098 - DNA, 120 bp, Artificial Sequence
  ENSG00000153157_27 (sequence is synthesized)
gagtgctggctttctcttaaagggtgagtgcgtgcgcccaggtggtttggcctgtgtgcgctagttacttgcacgcgcttcttgagtctcaaaacacagagctctagtaaacttcagggg

SEQ ID NO: 437099 - DNA, 120 bp, Artificial Sequence
  ENSG00000153157_28 (sequence is synthesized)
agactttccctggagtgatgagtaaaatgtccggcaagattagtattttggggagatcatggaggcttactctagaccagcactgtcctatagaaatatgagaaacggagaagataaaga

SEQ ID NO: 437100 - DNA, 120 bp, Artificial Sequence
  ENSG00000153157_29 (sequence is synthesized)
cataagaaagccaaagcctggttttatgattgcagccctcagcacttcaacaaaagtgtcacctttagcagggcagaaatattcatcatgttgttattaattactagatgctctagtgaa

SEQ ID NO: 437101 - DNA, 120 bp, Artificial Sequence
  ENSG00000153157_30 (sequence is synthesized)
gagctggttctacatgagctgtcttacgtacagtgcttcagtctcagagaaatctgcaacatctatcatttgtttctagggccactgccgcctgggcaacaaagtgagactcttgtctca

SEQ ID NO: 437102 - DNA, 120 bp, Artificial Sequence
  ENSG00000153162_0 (sequence is synthesized)
agaaagcccacgttggccgctgcggggagcgcggcgtggagaggcgggagaccgaattccggcgccgccgccgcggccgctgctcggtgcactagcccccttccttcccatcctttctgc

SEQ ID NO: 437103 - DNA, 120 bp, Artificial Sequence
  ENSG00000153162_1 (sequence is synthesized)
gagcgggtttgctgggcagccgggcgaccgccgaacggaaagcaagatcctcgccgcctccgcttgaggaggcgtgcggcgcgcggagattttgagtgggagcgacggtgcccgagagct

SEQ ID NO: 437104 - DNA, 120 bp, Artificial Sequence
  ENSG00000153162_2 (sequence is synthesized)
caggggcgcggagttcgtgagcgagaaggaagttaaacctcgcggaatagactggcatttcgggacgccttgtcgccgcagcctgggccctgcaacggggtaaacttcatggtggccctg

SEQ ID NO: 437105 - DNA, 120 bp, Artificial Sequence
  ENSG00000153162_3 (sequence is synthesized)
cgatctggggaggggcgtgcgccacggtgatgccgggcatctcccgcagctcgtgagcggccccgctccccgctgccccgggtcccactcagtcgccagggagagcgcggggcagcgcac

SEQ ID NO: 437106 - DNA, 120 bp, Artificial Sequence
  ENSG00000153162_4 (sequence is synthesized)
gtgtgcggccagcgaggcccagagtgaccgcgccgcgactcgcaggagccagggcgcaggctgcagtgcagcccggactcagacgcacctggcctggaccgcgcgcctctagagacctgc

SEQ ID NO: 437107 - DNA, 120 bp, Artificial Sequence
  ENSG00000153162_5 (sequence is synthesized)
gcgaggctgtgaggctccccttcctcccctccaagcggttctcctggtgatcgccccttcgccacctctctagcctgggcaactgggggcgccccggacgaccatgagagataaggactg

SEQ ID NO: 437108 - DNA, 120 bp, Artificial Sequence
  ENSG00000153162_6 (sequence is synthesized)
actgagggccaggaaggggaagcgagcccgccgagaggtggcggggactgctcacgccaagggccacagcggccgcgctccggcctcgctccgccgctccacgcctcgcgggatccgcgg

SEQ ID NO: 437109 - DNA, 80 bp, Artificial Sequence
  ENSG00000153162_7 (sequence is synthesized)
agcccggccgggcggggatgccggggctggggcggagggcgcagtggctgtgctggtggtgggggctgctgtgcagctgc

SEQ ID NO: 437110 - DNA, 120 bp, Artificial Sequence
  ENSG00000153162_8 (sequence is synthesized)
gccgccggggggcagctgctgggggacggcgggagccccggccgcacggagcagccgccgccgtcgccgcagtcctcctcgggcttcctgtaccggcggctcaagacgcaggagaagcgg

SEQ ID NO: 437111 - DNA, 120 bp, Artificial Sequence
  ENSG00000153162_9 (sequence is synthesized)
agaagcgggagatgcagaaggagatcttgtcggtgctggggctcccgcaccggccccggcccctgcacggcctccaacagccgcagcccccggcgctccggcagcaggaggagcagcagc

SEQ ID NO: 437112 - DNA, 120 bp, Artificial Sequence
  ENSG00000153162_10 (sequence is synthesized)
agcagcagcagctgcctcgcggagagccccctcccgggcgactgaagtccgcgcccctcttcatgctggatctgtacaacgccctgtccgccgacaacgacgaggacggggcgtcggagg

SEQ ID NO: 437113 - DNA, 120 bp, Artificial Sequence
  ENSG00000153162_11 (sequence is synthesized)
gggagaggcagcagtcctggccccacgaagcagccagctcgtcccagcgtcggcagccgcccccgggcgccgcgcacccgctcaaccgcaagagccttctggcccccggatctggcagcg

SEQ ID NO: 437114 - DNA, 120 bp, Artificial Sequence
  ENSG00000153162_12 (sequence is synthesized)
gcggcgcgtccccactgaccagcgcgcaggacagcgccttcctcaacgacgcggacatggtcatgagctttgtgaacctggtggagtacgacaaggagttctcccctcgtcagcgacacc

SEQ ID NO: 437115 - DNA, 120 bp, Artificial Sequence
  ENSG00000153162_13 (sequence is synthesized)
acaaagagttcaagttcaacttatcccagattcctgagggtgaggtggtgacggctgcagaattccgcatctacaaggactgtgttatggggagttttaaaaaccaaacttttcttatca

SEQ ID NO: 437116 - DNA, 120 bp, Artificial Sequence
  ENSG00000153162_14 (sequence is synthesized)
gcatttatcaagtcttacaggagcatcagcacagagactctgacctgtttttgttggacacccgtgtagtatgggcctcagaagaaggctggctggaatttgacatcacggccactagca

SEQ ID NO: 437117 - DNA, 120 bp, Artificial Sequence
  ENSG00000153162_15 (sequence is synthesized)
agtccacgtccacccccgagccgcaggcctggtgggcagagacggcccttacgacaagcagcccttcatggtggctttcttcaaagtgagtgaggtgcacgtgcgcaccaccaggtcagc

SEQ ID NO: 437118 - DNA, 120 bp, Artificial Sequence
  ENSG00000153162_16 (sequence is synthesized)
ctccagccggcgccgacaacagagtcgtaatcgctctacccagtcccaggacgtggcgcgggtctccagtgcttcagattacaacagcagtgaattgaaaacagcctgcaggaagcatga

SEQ ID NO: 437119 - DNA, 120 bp, Artificial Sequence
  ENSG00000153162_17 (sequence is synthesized)
gctgtatgtgagtttccaagacctgggatggcaggactggatcattgcacccaagggctatgctgccaattactgtgatggagaatgctccttcccactcaacgcacacatgaatgcaac

SEQ ID NO: 437120 - DNA, 120 bp, Artificial Sequence
  ENSG00000153162_18 (sequence is synthesized)
caaccacgcgattgtgcagaccttggttcaccttatgaaccccgagtatgtccccaaaccgtgctgtgcgccaactaagctaaatgccatctcggttctttactttgatgacaactccaa

SEQ ID NO: 437121 - DNA, 120 bp, Artificial Sequence
  ENSG00000153162_19 (sequence is synthesized)
tgtcattctgaaaaaatacaggaatatggttgtaagagcttgtggatgccactaactcgaaaccagatgctggggacacacattctgccttggattcctagattacatctgccttaaaaa

SEQ ID NO: 437122 - DNA, 120 bp, Artificial Sequence
  ENSG00000153162_20 (sequence is synthesized)
aacacggaagcacagttggaggtgggacgatgagactttgaaactatctcatgccagtgccttattacccaggaagattttaaaggacctcattaataatttgctcacttggtaaatgac

SEQ ID NO: 437123 - DNA, 120 bp, Artificial Sequence
  ENSG00000153162_21 (sequence is synthesized)
gtgagtagttgttggtctgtagcaagctgagtttggatgtctgtagcataaggtctggtaactgcagaaacataaccgtgaagctcttcctaccctcctcccccaaaaacccaccaaaat

SEQ ID NO: 437124 - DNA, 120 bp, Artificial Sequence
  ENSG00000153162_22 (sequence is synthesized)
tagttttagctgtagatcaagctatttggggtgtttgttagtaaatagggaaaataatctcaaaggagttaaatgtattcttggctaaaggatcagctggttcagtactgtctatcaaag

SEQ ID NO: 437125 - DNA, 120 bp, Artificial Sequence
  ENSG00000153162_23 (sequence is synthesized)
gtagattttacagagaacagaaatcggggaagtggggggaacgcctctgttcagttcattcccagaagtccacaggacgcacagcccaggccacagccagggctccacggggcgcccttg

SEQ ID NO: 437126 - DNA, 120 bp, Artificial Sequence
  ENSG00000153162_24 (sequence is synthesized)
tctcagtcattgctgttgtatgttcgtgctggagttttgttggtgtgaaaatacacttatttcagccaaaacataccatttctacacctcaatcctccatttgctgtactctttgctagt

SEQ ID NO: 437127 - DNA, 120 bp, Artificial Sequence
  ENSG00000153162_25 (sequence is synthesized)
accaaaagtagactgattacactgaggtgaggctacaaggggtgtgtaaccgtgtaacacgtgaaggcaatgctcacctcttctttaccagaacggttctttgaccagcacattaacttc

SEQ ID NO: 437128 - DNA, 120 bp, Artificial Sequence
  ENSG00000153162_26 (sequence is synthesized)
tggactgccggctctagtaccttttcagtaaagtggttctctgcctttttactatacagcataccacgccacagggttagaaccaacgaagaaaataaaatgagggtgcccagcttataa

SEQ ID NO: 437129 - DNA, 120 bp, Artificial Sequence
  ENSG00000153162_27 (sequence is synthesized)
gaatggtgttagggggatgagcatgctgtttatgaacggaaatcatgatttcccttgtagaaagtgaggctcagattaaattttagaatattttctaaatgtctttttcacaatcatgta

SEQ ID NO: 437130 - DNA, 120 bp, Artificial Sequence
  ENSG00000153162_28 (sequence is synthesized)
ctgggaaggcaatttcatactaaactgattaaataatacatttataatctacaactgtttgcacttacagctttttttgtaaatataaactataatttattgtctattttatatctgttt

SEQ ID NO: 437131 - DNA, 120 bp, Artificial Sequence
  ENSG00000153162_29 (sequence is synthesized)
tgctgtaacattgaaggaaagaccagacttttaaaaaaaaagagtttatttagaaagtatcatagtgtaaacaaacaaattgtaccactttgattttcttggaatacaagactcgtgatg

SEQ ID NO: 437132 - DNA, 120 bp, Artificial Sequence
  ENSG00000153162_30 (sequence is synthesized)
caaagctgaagttgtgtgtacaagactcttgacagttgtgcttctctaggaggttgggtttttttaaaaaaagaattatctgtgaaccatacgtgattaataaagatttcctttaaggca

SEQ ID NO: 437133 - DNA, 120 bp, Artificial Sequence
  ENSG00000153165_0 (sequence is synthesized)
gctttcaggcgctttcctcttggaattggcgactgctgcggggctgagcgctggtctcacgcatctcgggagccaggttggtggcgcgatgagttgcagcaaggcctacggggagcggta

SEQ ID NO: 437134 - DNA, 120 bp, Artificial Sequence
  ENSG00000153165_1 (sequence is synthesized)
cgtcgcctcggtgcagggctccgccccgtcgcctcgaaagaagtcaacgagaggattctattttgcaaagctgtattatgaagctaaagaatatgatcttgctaaaaaatacatatgtac

SEQ ID NO: 437135 - DNA, 120 bp, Artificial Sequence
  ENSG00000153165_2 (sequence is synthesized)
ttacattaatgtgcgagagatggatcccagagctcacagatttctgggtcttctttatgaattggaagaaaacacagagaaagccgttgaatgttacaggcgttcagtggaattaaaccc

SEQ ID NO: 437136 - DNA, 120 bp, Artificial Sequence
  ENSG00000153165_3 (sequence is synthesized)
aacacaaaaagatcttgtgttgaagattgcagaattgctttgtaaaaatgatgttactgatggaagagcagaatactgggtggaaagagcagcaaaacttttcccaggaagtcctgcaat

SEQ ID NO: 437137 - DNA, 120 bp, Artificial Sequence
  ENSG00000153165_4 (sequence is synthesized)
agattgtgaaggtgaagatggatggaataaactttttgacttgattcagtcagaactttatgtaagacctgatgacgtccatgtgaacatccggctagtggagttgtatcgctcaactaa

SEQ ID NO: 437138 - DNA, 120 bp, Artificial Sequence
  ENSG00000153165_5 (sequence is synthesized)
agtggagttgtatcgctcaactaaaagattgaaggatgctgtggcccgctgccatgaggcagagaggaacatagctttgcgttcaagtttagagtggaattcgtgtgttgtacagaccct

SEQ ID NO: 437139 - DNA, 120 bp, Artificial Sequence
  ENSG00000153165_6 (sequence is synthesized)
taaggaatatctggagtctttacagtgtttggagtctgataaaagtgactggcgagcaaccaatacagacttactgctggcctatgctaatcttatgcttcttacgctttccactagaga

SEQ ID NO: 437140 - DNA, 120 bp, Artificial Sequence
  ENSG00000153165_7 (sequence is synthesized)
gctcttcagtctgcgaaatcttctttgggtggaaatgatgaactgtcagctactttcttagaaatgaaaggacatttctacatgcatgctggttctctgctcttgaagatgggtcagcat

SEQ ID NO: 437141 - DNA, 120 bp, Artificial Sequence
  ENSG00000153165_8 (sequence is synthesized)
cttagaaatgaaaggacatttctacatgcatgctggttctctgctcttgaagatgggtcagcatggtaataatgttcaatggcgagctctttctgagctggctgcattgtgctatctcat

SEQ ID NO: 437142 - DNA, 120 bp, Artificial Sequence
  ENSG00000153165_9 (sequence is synthesized)
gattaaattaataaaaggtgaagctggacaaaatctgctggaaatgatggcctgtgaccgactgagccaatcagggcacatgttgctaaacttaagtcgtggcaagcaagattttttaaa

SEQ ID NO: 437143 - DNA, 120 bp, Artificial Sequence
  ENSG00000153165_10 (sequence is synthesized)
agtggttgttgaaacttttgccaacaaaagcgggcagtctgcattatatgatgctctgttttctagtcagtcacctaaggatacatcttttcttggtagcgatgatattggaaacattga

SEQ ID NO: 437144 - DNA, 120 bp, Artificial Sequence
  ENSG00000153165_11 (sequence is synthesized)
aagatttggctagatacgatgttggtgctattcgagcacataatggtagtcttcagcaccttacttggcttggcttacagtggaattcattgcctgctttacctggaatccgaaaatggc

SEQ ID NO: 437145 - DNA, 120 bp, Artificial Sequence
  ENSG00000153165_12 (sequence is synthesized)
acctggaatccgaaaatggctaaaacagcttttccatcatttgccccaggaaacctcaaggcttgaaacaaatgcacctgaatcaatatgtattttagatcttgaagtatttctccttgg

SEQ ID NO: 437146 - DNA, 120 bp, Artificial Sequence
  ENSG00000153165_13 (sequence is synthesized)
agtagtatataccagccacttacaattaaaggagaaatgtaattctcaccacagctcctatcagccgttatgcctgccccttcctgtgtgtaaacagctttgtacagaaagacaaaaatc

SEQ ID NO: 437147 - DNA, 120 bp, Artificial Sequence
  ENSG00000153165_14 (sequence is synthesized)
ttggtgggatgcggtttgtactctgattcacagaaaagcagtacctggaaactcagcaaaattgagacttctagttcagcatgaaataaacactctaagagcccaggaaaaacatggcct

SEQ ID NO: 437148 - DNA, 120 bp, Artificial Sequence
  ENSG00000153165_15 (sequence is synthesized)
tcaacctgctctgcttgtacattgggcaaaatgccttcagaaaatgggcagcggtcttaattctttttatgatcaacgagaatacatagggagaagtgttcattattggaagaaagtttt

SEQ ID NO: 437149 - DNA, 120 bp, Artificial Sequence
  ENSG00000153165_16 (sequence is synthesized)
gccattgttgaagataataaaaaagaagaacagtattcctgaacctattgatcctctgtttaaacattttcatagtgtagacattcaggcatcagaaattgttgaatatgaagaagacgc

SEQ ID NO: 437150 - DNA, 120 bp, Artificial Sequence
  ENSG00000153165_17 (sequence is synthesized)
acacgtaacttttgctatattggatgcagtaaatggaaatatagaagatgctatgactgcttttgaatctataaaaagtgttgtttcttattggaatcttgcactgatttttcacaggaa

SEQ ID NO: 437151 - DNA, 120 bp, Artificial Sequence
  ENSG00000153165_18 (sequence is synthesized)
ggcagaagacattgcaaatgatgccctttctcctgaagaacaagaagaatgcaaaaattatctgagaaagaccaggggctacctaataaagattttagatgacagtgattcaaatctttc

SEQ ID NO: 437152 - DNA, 120 bp, Artificial Sequence
  ENSG00000153165_19 (sequence is synthesized)
agtggtcaagaaattgcctgtgcccctggagtctgtaaaagagatgcttaagtcagtcatgcaggaactcgaaaactatagtgaaggaggtcctctctataaaaatggttctttgcgaaa

SEQ ID NO: 437153 - DNA, 120 bp, Artificial Sequence
  ENSG00000153165_20 (sequence is synthesized)
tgcggattcagaaataaaacattctacaccatctcctaccaaatattcactatcaccaagtaaaagttacaagtattctcccaaaacaccacctcgatgggcagaagatcagaattcttt

SEQ ID NO: 437154 - DNA, 120 bp, Artificial Sequence
  ENSG00000153165_21 (sequence is synthesized)
actgaaaatgattcgccaagaagtaaaggccattaaggaagaaatgcaggagttgaaactaaatagcagtaagtcagcatcccatcatcgttggcccacagagaattatggaccagactc

SEQ ID NO: 437155 - DNA, 89 bp, Artificial Sequence
  ENSG00000153165_22 (sequence is synthesized)
cccatcatcgttggcccacagagaattatggaccagactcggtgcctgatggatatcaggggtcacagacatttcatggggctccacta

SEQ ID NO: 437156 - DNA, 120 bp, Artificial Sequence
  ENSG00000153165_23 (sequence is synthesized)
tccctgtgtctgctgatggatttaaatttggcatttcggaaccaggaaatcaagaaaagaaaagtgaaaagcctcttgaaaatgatactggcttacaggctcaggatattagtggccgga

SEQ ID NO: 437157 - DNA, 120 bp, Artificial Sequence
  ENSG00000153165_24 (sequence is synthesized)
agaagggccgtggtgtgatttttggccaaacaagtagcacttttacatttgcagatgttgcaaaatcaacttcaggagaaggatttcagtttggcaaaaaagacctcaatttcaagggat

SEQ ID NO: 437158 - DNA, 120 bp, Artificial Sequence
  ENSG00000153165_25 (sequence is synthesized)
tttcaggtgctggagaaaaattattctcatcacaatacggtaaaatggccaataaagcaaacacttccggtgactttgagaaagatgatgatgcctataagactgaggacagcgatgaca

SEQ ID NO: 437159 - DNA, 120 bp, Artificial Sequence
  ENSG00000153165_26 (sequence is synthesized)
tccattttgaaccagtagttcaaatgcctgaaaaagtagaacttgtaacaggagaagaaggtgaaaaagttctgtattcacagggggtaaaactatttagatttgatgctgaggtaagtc

SEQ ID NO: 437160 - DNA, 120 bp, Artificial Sequence
  ENSG00000153165_27 (sequence is synthesized)
agtggaaagaaaggggcttggggaacttaaaaattctcaaaaacgaggtcaatggcaaagtaagaatgctgatgcaaagagaacaagtactaaaagtgtgtgctaatcattggataacga

SEQ ID NO: 437161 - DNA, 120 bp, Artificial Sequence
  ENSG00000153165_28 (sequence is synthesized)
ctacaatgaacctgaagcccctctctggatcagatagagcatggatgtggtcagccagtgatttctctgatggtgatgccaaactagagcgattggcagcaaaatttaaaacaccagagc

SEQ ID NO: 437162 - DNA, 120 bp, Artificial Sequence
  ENSG00000153165_29 (sequence is synthesized)
tggctgaagaattcaagcagaaatttgaggaatgccagcggcttctgttagacataccacttcaaactccccataaacttgtagatactggcagagctgccaagttaatacagagagctg

SEQ ID NO: 437163 - DNA, 120 bp, Artificial Sequence
  ENSG00000153165_30 (sequence is synthesized)
aagaaatgaagagtggactgaaagatttcaaaacatttttgacaaatgatcaaacaaaagtcgctgaggaagaaaataagggttcaggtacaggtgcggccggtgcctcagacacaacaa

SEQ ID NO: 437164 - DNA, 120 bp, Artificial Sequence
  ENSG00000153165_31 (sequence is synthesized)
taaaacccaatgctgaaaacactgggcccacattagaatgggataactatgatttaagggaagatgctttggatgatagtgtcagtagtagctcagtacatgcttctccattggcaagta

SEQ ID NO: 437165 - DNA, 120 bp, Artificial Sequence
  ENSG00000153165_32 (sequence is synthesized)
gccctgtgagaaaaaatcttttccactttgatgagtcaacaacaggatctaacttcagttttaaatctgctttgagtctatctaagtctcctgccaagttgaatcagagtgggacttcag

SEQ ID NO: 437166 - DNA, 120 bp, Artificial Sequence
  ENSG00000153165_33 (sequence is synthesized)
ttggcactgatgaagaatctgatgttactcaagaagaagagagagatggacagtactttgaacctgttgttcctttacctgatctagttgaagtatccagtggtgaggaaaatgaacaag

SEQ ID NO: 437167 - DNA, 120 bp, Artificial Sequence
  ENSG00000153165_34 (sequence is synthesized)
ttgtttttagtcacagggcagaattctacagatatgataaagatgttggtcaatggaaagaaaggggcattggtgatataaagattttacagaattatgataataagcacgttcgtatac

SEQ ID NO: 437168 - DNA, 120 bp, Artificial Sequence
  ENSG00000153165_35 (sequence is synthesized)
tgatgagaagggaccaagtattaaaactttgtgccaatcacagaataactccagacatgagtttgcaaaatatgaaagggacagaaagagtatgggtgtggactgcatgtgattttgcag

SEQ ID NO: 437169 - DNA, 120 bp, Artificial Sequence
  ENSG00000153165_36 (sequence is synthesized)
atggagaaagaaaagtagagcatttagctgttcgttttaaactacaggatgttgcagactcgtttaagaaaatttttgatgaagcaaaaacagcccaggaaaaagattctttgataacac

SEQ ID NO: 437170 - DNA, 120 bp, Artificial Sequence
  ENSG00000153165_37 (sequence is synthesized)
ctcatgtttctcggtcaagcactcccagagagtcaccatgtggcaaaattgctgtagctgtattagaagaaaccacaagagagaggacagatgttattcagggtgatgatgtagcagatg

SEQ ID NO: 437171 - DNA, 120 bp, Artificial Sequence
  ENSG00000153165_38 (sequence is synthesized)
cagcttcagaagttgaagtgtctagcacatctgaaacaacaacaaaagcagtggtttctcctccaaagtttgtatttggttcagagtctgttaaaagaatttttagtagtgaaaaatcaa

SEQ ID NO: 437172 - DNA, 120 bp, Artificial Sequence
  ENSG00000153165_39 (sequence is synthesized)
aaccatttgcatttggcaacagttctgccactgggtctttgtttggatttagttttaatgcacctttgaaaagtaacaatagtgaaactagttcagtagcccagagtggatctgaaagca

SEQ ID NO: 437173 - DNA, 120 bp, Artificial Sequence
  ENSG00000153165_40 (sequence is synthesized)
aagtggaacctaaaaaatgtgaactgtcaaagaactctgatatcgaacagtcttcagatagcaaagtcaaaaatctctctgcttcctttccaacggaagaatcttcaatcaactacacat

SEQ ID NO: 437174 - DNA, 120 bp, Artificial Sequence
  ENSG00000153165_41 (sequence is synthesized)
ttaaaacaccagaaaaggagcctccattatggtatgctgaatttactaaagaagaattggttcagaagctcagttccaccacaaaaagtgcagatcacttaaacggcctgcttcgggaaa

SEQ ID NO: 437175 - DNA, 85 bp, Artificial Sequence
  ENSG00000153165_42 (sequence is synthesized)
aagagcaagaggtgtctgcagctaacgtggaacacttgaagaacgtcttgctgcagttcattttcttgaagccaggtagtgaaag

SEQ ID NO: 437176 - DNA, 120 bp, Artificial Sequence
  ENSG00000153165_43 (sequence is synthesized)
tcttgctgcagttcattttcttgaagccaggtagtgaaagagagagacttcttcctgttataaatacgatgttgcagctcagccttgaagaaaagggaaaacttgctgcggttgctcaag

SEQ ID NO: 437177 - DNA, 120 bp, Artificial Sequence
  ENSG00000153165_44 (sequence is synthesized)
gtgaggaataaaatgcttcccgttcttctggatgggcatcctatcttcgtagttggtttggacttcgataggttgatggaaggaatgtttttattaaccaaataaaatctatttacaaaa

SEQ ID NO: 437178 - DNA, 120 bp, Artificial Sequence
  ENSG00000153165_45 (sequence is synthesized)
atggttcatgtgtattaccatcattcttttgtcaaaaagtgtgtatatgtttgcatttacatatatttgtacatctatatgacagatgtattttaaaagtttcaacttgaagtaaaagta

SEQ ID NO: 437179 - DNA, 120 bp, Artificial Sequence
  ENSG00000153165_46 (sequence is synthesized)
gcttattcacatattctggtttgaattaaaagtgatgaaattatcctaaatacagttggccctctgtatccatgggttccacatccacaaattcaaccaactgtggatggaaaagacttg

SEQ ID NO: 437180 - DNA, 120 bp, Artificial Sequence
  ENSG00000153179_0 (sequence is synthesized)
ttaatacagtttctagttatgagggccaaggtctaaaggacaagccaaaagaatgacagaggaaggggatttagggctaacaggtggtccccagacatattggctgaaaggcagttcaca

SEQ ID NO: 437181 - DNA, 120 bp, Artificial Sequence
  ENSG00000153179_1 (sequence is synthesized)
gctaaagtgtcatatgtgggtgttactgtgctcctcatccatgctctctgtagcgagtcattctggaacactcctggttctcgctatggccataagaagtgactttcatgagaccttcag

SEQ ID NO: 437182 - DNA, 120 bp, Artificial Sequence
  ENSG00000153179_2 (sequence is synthesized)
aagaatagcccggctcttttactggttccccaaatcactgacctgctcaaagaatcggaaatccaagctgctctggagccaaggtggggagggtaaatatatatgtcatgctcactgccg

SEQ ID NO: 437183 - DNA, 120 bp, Artificial Sequence
  ENSG00000153179_3 (sequence is synthesized)
agacctggtacatctggattatccacaaaatgggaacgtatcaagctgcatgccgacttctgaagtaagatattcaatcaaaaagaacagtcaggatgttgagaaagagaaggaaaccca

SEQ ID NO: 437184 - DNA, 120 bp, Artificial Sequence
  ENSG00000153179_4 (sequence is synthesized)
actggcttcattaaagtacagatggaactctgcaaacctccacagacttctccaaattctggaaaactctctcccagtagcaatggctgtatgaatacacttcatatcagcagcacaaac

SEQ ID NO: 437185 - DNA, 120 bp, Artificial Sequence
  ENSG00000153179_5 (sequence is synthesized)
actgtcggggaagtgatcgaggccctgctcaaaaagtttctcgtgactgagagccctgccaagtttgcactttataagcgttgtcacagggaagaccaagtctacgcctgcaagctctca

SEQ ID NO: 437186 - DNA, 120 bp, Artificial Sequence
  ENSG00000153179_6 (sequence is synthesized)
gaccgggaacatccactctacctgcgtttggtagcagggcccagaacagacacacttagttttgttcttcgtgaacatgaaattggagagtgggaagccttcagccttccagaactacag

SEQ ID NO: 437187 - DNA, 120 bp, Artificial Sequence
  ENSG00000153179_7 (sequence is synthesized)
aatttcttgcgcatcttggacaaggaagaagatgaacagctgcagaacctgaagaggcgctacacagcctacaggcagaagctggaagaagccctccgtgaggtgtggaagcctgattaa

SEQ ID NO: 437188 - DNA, 80 bp, Artificial Sequence
  ENSG00000153179_8 (sequence is synthesized)
gctgcataaggactgcccggggctgcgcgccgggaacctcgcggggctggcgggcgccgcaccccctccctggccgcctg

SEQ ID NO: 437189 - DNA, 120 bp, Artificial Sequence
  ENSG00000153179_9 (sequence is synthesized)
atgagcagcggctacagcagcctggaggaggacgccgaggacttcttcttcaccgccaggacctccttcttcaggagagcgccccagggcaagccccgctccggccaacaagatgttgag

SEQ ID NO: 437190 - DNA, 120 bp, Artificial Sequence
  ENSG00000153179_10 (sequence is synthesized)
aggcccggtgcaggaccgatgtacaaaacagcagcaagtgcctctcttctcagagggctgctgtcttgccccactatgctagggtcttcgcctttctatctgtagattttgttccccaaa

SEQ ID NO: 437191 - DNA, 120 bp, Artificial Sequence
  ENSG00000153179_11 (sequence is synthesized)
cctggtcacacagcatcctgcaccttagcgtcccatgtaagggactctgcaagcttgttgttcagcaccgcagtgttacctcttggcaagctgtgaacctgtcgcctcatcaggagcatt

SEQ ID NO: 437192 - DNA, 120 bp, Artificial Sequence
  ENSG00000153179_12 (sequence is synthesized)
cgagggtgcttggaagcatgaactctgggggtgtttttttttttggttattttaattatgtgatgatgctgttaagcttacagatatgcagttgattttttaaaaagcttaactaggaat

SEQ ID NO: 437193 - DNA, 120 bp, Artificial Sequence
  ENSG00000153179_13 (sequence is synthesized)
ctttctgaatacttgtcctattttgaaactacctgtctggttttttgtttggttttgttttctttttttaatgtcagaggaatctatccatgtgaatcgaaaggcacaggaatctaggaa

SEQ ID NO: 437194 - DNA, 120 bp, Artificial Sequence
  ENSG00000153179_14 (sequence is synthesized)
aacggggcacgtcggctggactgaggagcccggtgctagagcccgcggcctcctggcactaggagccgcaccaggggagccgggccaacccggccacgctcacatcagattacagaagat

SEQ ID NO: 437195 - DNA, 120 bp, Artificial Sequence
  ENSG00000153179_15 (sequence is synthesized)
tggcgagtgctgcgggctatggaaggtgacttggcttttcagttaggggtagtggagaaaggggtagttgcttgtaaacgagttaaaagcattcagtgtggaggtgttaaacccatttta

SEQ ID NO: 437196 - DNA, 120 bp, Artificial Sequence
  ENSG00000153179_16 (sequence is synthesized)
ggatcgcttggtttcctggtgggtagaatatgggaacagagccagaggcaggagctaaaccaaaaggagggacccatgaactctgcagctgaccaatcagagaatcaggcaggtgtagcc

SEQ ID NO: 437197 - DNA, 120 bp, Artificial Sequence
  ENSG00000153179_17 (sequence is synthesized)
cgcagctggatccgaccctttaattctgcccttttggagtggaaggtctgattggtgtagctgctctgcataggcaggacagtgacagttcactaactcttgttaagttacatagtgtat

SEQ ID NO: 437198 - DNA, 120 bp, Artificial Sequence
  ENSG00000153179_18 (sequence is synthesized)
agctttccccccacaggtggttttcaaagttgagacggaatttgggtaggggcagctgtttttcccttgattgttagctaggatatttgtcaagtaaactttggtgacaatcactctctt

SEQ ID NO: 437199 - DNA, 120 bp, Artificial Sequence
  ENSG00000153179_19 (sequence is synthesized)
tgacaatcactctcttcccttttattcctcctttccttttcctttcttcccttttttctttccttccctgctgtctcccaccctaccttgttcttttcctccctccctccctccctccct

SEQ ID NO: 437200 - DNA, 120 bp, Artificial Sequence
  ENSG00000153179_20 (sequence is synthesized)
ccctccctctctctccctctccctttcttttctacattgaaatctgttcttacataatagagaacagggctattgaataaagacccaatcctaccagatctttagttctaaagggcaact

SEQ ID NO: 437201 - DNA, 120 bp, Artificial Sequence
  ENSG00000153179_21 (sequence is synthesized)
tgactgtgagtaggagggcccccaagaaagggaggaaagtccacacccagctaaccacacaacagggcttcattatggaaatattttaacaaaagtacatgttattaccaaccaaagaga

SEQ ID NO: 437202 - DNA, 120 bp, Artificial Sequence
  ENSG00000153179_22 (sequence is synthesized)
tgcatgtgcaatagaagccttccttaaaaacaggctaaataacctcattttatgcagcagtttaatctgagaacagagggaaaggtgtgcagtggttccagaggggccttatattctatt

SEQ ID NO: 437203 - DNA, 120 bp, Artificial Sequence
  ENSG00000153179_23 (sequence is synthesized)
tttagtctagatattttttgtttataaattcccaaggaattgttaacactttggtgacacctaatggattctttttgaaattccaaggtgcttcagttctttgcccaagtgaactgtgcc

SEQ ID NO: 437204 - DNA, 120 bp, Artificial Sequence
  ENSG00000153179_24 (sequence is synthesized)
ttttattgcatttctgttcgtctcttggtggctcttctgactttttggagaatacccatcttgttggaggcagacttaagttgttatgctgtgccacacaatttactgagacaatcatat

SEQ ID NO: 437205 - DNA, 120 bp, Artificial Sequence
  ENSG00000153179_25 (sequence is synthesized)
cttcctaagcatttaaggaaagttgaaaaaaatagaattagctataaaatatgtatggcacatcttgtttaattttgcatgtaacttctcttttgtacattgatgaggttttagtgacat

SEQ ID NO: 437206 - DNA, 120 bp, Artificial Sequence
  ENSG00000153179_26 (sequence is synthesized)
tgtcatccaacactttacctttattgttcagggaatgccttcgtgattttttgtactggttttattattcagactatggcctggatttgagtatattgttattaccacctggttttttaa

SEQ ID NO: 437207 - DNA, 120 bp, Artificial Sequence
  ENSG00000153179_27 (sequence is synthesized)
ttaattattcatcccagtaaacttatattttgtgaagcatttgtttctcagattaagacactgttagaacctaaagtagtagctgatgggtatctgtgaatttttttttttttttttttt

SEQ ID NO: 437208 - DNA, 120 bp, Artificial Sequence
  ENSG00000153179_28 (sequence is synthesized)
ttgaagtagattgtctgaataggcatcctcatctatatttacccaaaacctcgcttactgtcatgtgcactacaaattgcaatttggaaacctactgtattgaaattctgtcagtttatg

SEQ ID NO: 437209 - DNA, 120 bp, Artificial Sequence
  ENSG00000153179_29 (sequence is synthesized)
gttcttgaagactgatgtcctttcccaaacactggttactgcagcagcatttttaatgtgtaagtgaagaaaaaaggccactaaggccaaagattttttaagaatcattgtacaaatcat

SEQ ID NO: 437210 - DNA, 120 bp, Artificial Sequence
  ENSG00000153179_30 (sequence is synthesized)
tatgttaaactatctaagctttgctgtaatactgttttctcttcaatatgtgatggtacaggaaggatgttaaatgaaggggtggtattgcaggagagcattttaaatggcagaagtaaa

SEQ ID NO: 437211 - DNA, 120 bp, Artificial Sequence
  ENSG00000153179_31 (sequence is synthesized)
aagttataatatttataattttgatgggtttaagtttatttttgtagggaagatttttctcccctaaaatagtttctagaatggcaaaattgtttccattattaaaaattgaagttatta

SEQ ID NO: 437212 - DNA, 120 bp, Artificial Sequence
  ENSG00000153187_0 (sequence is synthesized)
cggcgccgctcctgcgagaggacgttgcgtgctcgctcgcgccaggcgagtctccgcgtctccctcgcgaactcggtgaaaggaattggcgccgttcgacaccaggcggatccgctctgc

SEQ ID NO: 437213 - DNA, 120 bp, Artificial Sequence
  ENSG00000153187_1 (sequence is synthesized)
agcacgaacccatctccagccgcagccgcagccgccgcccgggccgaggagcagccgcagcagccgccaccagtggccgagtgagcggagccgagtttgaggcagcgcctagcggtgaat

SEQ ID NO: 437214 - DNA, 120 bp, Artificial Sequence
  ENSG00000153187_2 (sequence is synthesized)
cggggccctcaccatgagttcctcgcctgttaatgtaaaaaagctgaaggtgtcggagctgaaagaggagctcaagaagcgacgcctttctgacaagggtctcaaggccgagctcatgga

SEQ ID NO: 437215 - DNA, 120 bp, Artificial Sequence
  ENSG00000153187_3 (sequence is synthesized)
gcgactccaggctgcgctggacgacgaggaggccgggggccgccccgccatggagcccgggaacggcagcctagacctgggcggggattccgctgggcgctcgggagcaggcctcgagca

SEQ ID NO: 437216 - DNA, 120 bp, Artificial Sequence
  ENSG00000153187_4 (sequence is synthesized)
ggaggccgcggccggcggcgatgaagaggaggaggaagaggaagaggaggaggaaggaatctccgctctggacggcgaccagatggagctaggagaggagaacggggccgcgggggcggc

SEQ ID NO: 437217 - DNA, 120 bp, Artificial Sequence
  ENSG00000153187_5 (sequence is synthesized)
cgactcgggcccgatggaggaggaggaggccgcctcggaagacgagaacggcgacgatcagggtttccaggaaggggaagatgagctcggggacgaagaggaaggcgcgggcgacgagaa

SEQ ID NO: 437218 - DNA, 120 bp, Artificial Sequence
  ENSG00000153187_6 (sequence is synthesized)
cgggcacggggagcagcagcctcaaccgccggcgacgcagcagcaacagccccaacagcagcgcggggccgccaaggaggccgcggggaagagcagcggccccacctcgctgttcgcggt

SEQ ID NO: 437219 - DNA, 120 bp, Artificial Sequence
  ENSG00000153187_7 (sequence is synthesized)
gacggtggcgccgcccggggcgaggcagggccagcagcaggcgggaggggacggcaaaacagaacagaaaggcggagataaaaagaggggtgttaaaagaccacgagaagatcatggccg

SEQ ID NO: 437220 - DNA, 120 bp, Artificial Sequence
  ENSG00000153187_8 (sequence is synthesized)
tggatattttgagtacattgaagagaacaagtatagcagagccaaatctcctcagccacctgttgaagaagaagatgaacacttcgatgacacagtggtttgtcttgatacttataattg

SEQ ID NO: 437221 - DNA, 120 bp, Artificial Sequence
  ENSG00000153187_9 (sequence is synthesized)
tgatctacattttaaaatatcaagagatcgtctcagtgcttcttcccttacaatggagagttttgcttttctttgggctggaggaagagcatcctatggtgtgtcaaaaggcaaagtgtg

SEQ ID NO: 437222 - DNA, 120 bp, Artificial Sequence
  ENSG00000153187_10 (sequence is synthesized)
ttttgagatgaaggttacagagaagatcccagtaaggcatttatatacaaaagatattgacatacatgaagttcgtattggctggtcactaactacaagtggaatgttacttggtgaaga

SEQ ID NO: 437223 - DNA, 120 bp, Artificial Sequence
  ENSG00000153187_11 (sequence is synthesized)
agaattttcttatgggtattctctaaaaggaataaaaacatgcaactgtgagactgaagattatggagaaaagtttgatgaaaatgatgtgattacatgttttgctaactttgaaagtga

SEQ ID NO: 437224 - DNA, 120 bp, Artificial Sequence
  ENSG00000153187_12 (sequence is synthesized)
tgaagtagaactctcgtatgctaagaatggacaagatcttggcgttgccttcaaaatcagtaaggaagttcttgctggacggccactgttcccgcatgttctctgccacaactgtgcagt

SEQ ID NO: 437225 - DNA, 120 bp, Artificial Sequence
  ENSG00000153187_13 (sequence is synthesized)
tgaatttaattttggtcagaaggaaaagccatattttccaatacctgaagagtatactttcatccagaacgtccccttagaggatcgagttagaggaccaaaggggcctgaagagaagaa

SEQ ID NO: 437226 - DNA, 120 bp, Artificial Sequence
  ENSG00000153187_14 (sequence is synthesized)
agattgtgaagttgtgatgatgattggcttgccaggagctggaaaaactacctgggttactaaacatgcagcagaaaatccagggaaatataacattcttggcacaaatactattatgga

SEQ ID NO: 437227 - DNA, 120 bp, Artificial Sequence
  ENSG00000153187_15 (sequence is synthesized)
taagatgatggtggcaggttttaagaagcaaatggcagatactggaaaactgaacacactgttgcagagagccccccagtgtcttgggaaatttattgagattgctgcccgaaagaagcg

SEQ ID NO: 437228 - DNA, 120 bp, Artificial Sequence
  ENSG00000153187_16 (sequence is synthesized)
aaattttattctggatcagacaaatgtgtctgctgctgcccagaggagaaaaatgtgcctgtttgcaggcttccagcgaaaagctgttgtagtttgcccaaaagatgaagactataagca

SEQ ID NO: 437229 - DNA, 120 bp, Artificial Sequence
  ENSG00000153187_17 (sequence is synthesized)
aagaacacagaagaaagcagaagtagaggggaaagacctaccagaacatgcggtcctcaaaatgaaaggaaactttaccctcccagaggtagctgagtgctttgatgaaataacctatgt

SEQ ID NO: 437230 - DNA, 120 bp, Artificial Sequence
  ENSG00000153187_18 (sequence is synthesized)
tgaacttcagaaggaagaagcccaaaaactcttggagcaatataaggaagaaagcaaaaaggctcttccaccagaaaagaaacagaacactggctcaaagaaaagcaataaaaataagag

SEQ ID NO: 437231 - DNA, 120 bp, Artificial Sequence
  ENSG00000153187_19 (sequence is synthesized)
tggcaagaaccagtttaacagaggtggtggccatagaggacgtggaggattcaatatgcgtggtggaaatttcagaggaggagcccctgggaatcgtggcggatataataggaggggcaa

SEQ ID NO: 437232 - DNA, 120 bp, Artificial Sequence
  ENSG00000153187_20 (sequence is synthesized)
catgccacagagaggtggtggcggtggaggaagtggtggaatcggctatccataccctcgtgcccctgtttttcctggccgtggtagttactcaaacagagggaactacaacagaggtgg

SEQ ID NO: 437233 - DNA, 120 bp, Artificial Sequence
  ENSG00000153187_21 (sequence is synthesized)
aatgcccaacagagggaactacaaccagaacttcagaggacgaggaaacaatcgtggctacaaaaatcaatctcagggctacaaccagtggcagcagggtcaattctggggtcagaagcc

SEQ ID NO: 437234 - DNA, 120 bp, Artificial Sequence
  ENSG00000153187_22 (sequence is synthesized)
atggagtcagcattatcaccaaggatattattgaatacccaaataaaacgaactgatacatatttctccaaaaccttcacaagaagtcgactgttttctttagtaggctaactttttaaa

SEQ ID NO: 437235 - DNA, 120 bp, Artificial Sequence
  ENSG00000153187_23 (sequence is synthesized)
cattccacaagaggaagtgcctgcgggttccttttttagaagctttgtgggttgattttttttcttttcttttttgtacatttttaattgcagtttaaaagtgaatcgtaagagaacctc

SEQ ID NO: 437236 - DNA, 120 bp, Artificial Sequence
  ENSG00000153187_24 (sequence is synthesized)
agcattgtgcacgataagagaatgtgtcagtatttcagggttctacattttatctgtaaaatgtgacttttttttttttttatcacaacagaagtaaaatgttgctttgtacctggtgtc

SEQ ID NO: 437237 - DNA, 120 bp, Artificial Sequence
  ENSG00000153187_25 (sequence is synthesized)
ttttattaagaatttactccccccatttctcacagagaataacagtcgggagtcattgtcacaatataatagaaatgttagcaaccagattcatgtaaggactaagtggtcctcatgaat

SEQ ID NO: 437238 - DNA, 120 bp, Artificial Sequence
  ENSG00000153187_26 (sequence is synthesized)
tgcattaagactctgtactgctcatattacactccatcctctctgtagtttgctgggtagtggagggggtaagctaaatcatagtttctgacaataactgggaaggttttttcttaaaat

SEQ ID NO: 437239 - DNA, 120 bp, Artificial Sequence
  ENSG00000153187_27 (sequence is synthesized)
aacaatggaattggtataattgggattgaaaactaaaacttggaactaagatagagaagatggagtgtatgtagaagggctgttaaaaatgtaaaacttggttgcattatttgtggaggc

SEQ ID NO: 437240 - DNA, 120 bp, Artificial Sequence
  ENSG00000153187_28 (sequence is synthesized)
ccagttgtctaatgggatctatatgaagttagccatgtctgtatgcccttctcccacaaaatactgtataactagtgtgcttgtagtagttaactccaccatctttgtaagctaatgaaa

SEQ ID NO: 437241 - DNA, 120 bp, Artificial Sequence
  ENSG00000153187_29 (sequence is synthesized)
ttgtgagtcacccatttatatcttaatttttaatcatgtcagttcttgaatgggtatctccttagcctgctgatttctttttctttctaaagaaagtgggtggagaaattaatttagacg

SEQ ID NO: 437242 - DNA, 120 bp, Artificial Sequence
  ENSG00000153187_30 (sequence is synthesized)
tttgtttgcaataaaaagaattcattttactcttgttttgggattctcgccatcaaggttcaaaatccctttatataactcccaagaggagaaatttattaagtgtgtgctttctggaca

SEQ ID NO: 437243 - DNA, 120 bp, Artificial Sequence
  ENSG00000153187_31 (sequence is synthesized)
gcttattctttactctgcatagaacatttaggttttaaaaacttaaatgtatactgacaattgatacataattatgaagtaaagttgaattcttcccttcccctcccccccagacaactt

SEQ ID NO: 437244 - DNA, 120 bp, Artificial Sequence
  ENSG00000153187_32 (sequence is synthesized)
ttaacatatttaatgaggggaaaaggtactggctgggagaagttaacactgagtttatcatctttacagaatgctaatgctgtcctcaactgattattttatatacatatatatgataca

SEQ ID NO: 437245 - DNA, 120 bp, Artificial Sequence
  ENSG00000153187_33 (sequence is synthesized)
tgaaactctgggatcagatgcttttagaagccatcatgcaagccagtcattgatgtcactgctacacaacactgctaacttgactgtagctatgtaataacattagatcccctaattgta

SEQ ID NO: 437246 - DNA, 120 bp, Artificial Sequence
  ENSG00000153187_34 (sequence is synthesized)
attatattgggtttgcacagaacactttaatcttcccctcaccaatgtgaagtgaggaatcaggagtcaaactgtagaactaaaatttgacttcagtctagcgtttccttggtgttttta

SEQ ID NO: 437247 - DNA, 120 bp, Artificial Sequence
  ENSG00000153187_35 (sequence is synthesized)
ggttgctttggtaagtttaggtttgctatatttctgattgcttagaattttgttttagccctttaaaatcagatcataaatatgaattcatacttctaaggaattttcttgctataagct

SEQ ID NO: 437248 - DNA, 120 bp, Artificial Sequence
  ENSG00000153187_36 (sequence is synthesized)
ggagtttaggtgatgtataggttcagttgagacatttttggaacaggcaaatccttagttaacataagatatttaacagttgaagatagtgtcatggatttttatcttttttagcaagta

SEQ ID NO: 437249 - DNA, 120 bp, Artificial Sequence
  ENSG00000153187_37 (sequence is synthesized)
atgctaagaaccactggcctgagctactactcttcagtatacattattaggattgcatagacttactagaggaacagtttcaggttttgatgctaatcagtgttgtgtcctaaagttgtc

SEQ ID NO: 437250 - DNA, 120 bp, Artificial Sequence
  ENSG00000153187_38 (sequence is synthesized)
ctttgtgcctttaaaaagttttggatatatcttctagtttaaaattgcttattaaggaattcattttataattgcagtgggaaagtaatggtcaagtaacactaggtagactatcatgcc

SEQ ID NO: 437251 - DNA, 120 bp, Artificial Sequence
  ENSG00000153187_39 (sequence is synthesized)
tgtttagcccagagaatttggggggagagagaatagataaaaatggcacccagaaaaatgttaaaatctttagtcaagactagaattaatacaattgtctacacttgtatggcagaaata

SEQ ID NO: 437252 - DNA, 120 bp, Artificial Sequence
  ENSG00000153187_40 (sequence is synthesized)
accttataaagtgtttaaggaattcagagaagggaatgtaccaaataagcaacagggagaaaattaggtaagaagtaagatacgaacgagaaacctgatttattgctcatccttcccttg

SEQ ID NO: 437253 - DNA, 120 bp, Artificial Sequence
  ENSG00000153187_41 (sequence is synthesized)
cctccctaatggcaagcaaaactctgaacatctgaaaaggatgtagttctggacaaatcctgactacccagaggaaactcactgtgagattgctgttgatttgaagggtgctttcactaa

SEQ ID NO: 437254 - DNA, 120 bp, Artificial Sequence
  ENSG00000153187_42 (sequence is synthesized)
ggttatattttaaagtagaataacacatgctgagtgtaaactggctttggattggtcagctgcagtagtacaaaaacagcatagaatttgagaaaactaaaactgctatgagatagctat

SEQ ID NO: 437255 - DNA, 120 bp, Artificial Sequence
  ENSG00000153187_43 (sequence is synthesized)
gagaaaactaaaactgctatgagatagaaatgatgtaaaattatgtggaaagttttccctcatatactcacatacagcctttgaagggctctggctctgaccggttgatggccttgagcg

SEQ ID NO: 437256 - DNA, 120 bp, Artificial Sequence
  ENSG00000153187_44 (sequence is synthesized)
agatgaaatcatgaaattgagtcaaatcaatttgacattgaaatgacaagaggaaactcttaaatacataaaaacaagctctcatttgcctaggatagatactgtcttaaaaataaagac

SEQ ID NO: 437257 - DNA, 120 bp, Artificial Sequence
  ENSG00000153187_45 (sequence is synthesized)
tgaacctagatgttctgagcactagcaacaaggtattttaacaagtttaaaggaattctctgaaaaagttataaaattattctaggaaacataaccataatagtgttttaagggactttc

SEQ ID NO: 437258 - DNA, 120 bp, Artificial Sequence
  ENSG00000153187_46 (sequence is synthesized)
acctggggattttatattcatgaacagagtgtattctgtatttaaaatgtctcatttgtgggaattggatgacatgttttttgataaatttattcacaatataaattgactttttattct

SEQ ID NO: 437259 - DNA, 120 bp, Artificial Sequence
  ENSG00000153187_47 (sequence is synthesized)
aggaccatgtgaataatgggttccattgcacaaatacaaatattttaatagcttcttaggcagtggtgtagacatcttggatataaataattgtagatcttgtatatttgatttttaaaa

SEQ ID NO: 437260 - DNA, 120 bp, Artificial Sequence
  ENSG00000153187_48 (sequence is synthesized)
aactagaataaacagagaggcataaacatatcttagagtccaagtggtagtgtttagcattggatataataaatggatgttttacaaagtgtttccataattctcttcctatacataaat

SEQ ID NO: 437261 - DNA, 65 bp, Artificial Sequence
  ENSG00000153187_49 (sequence is synthesized)
tttacaaagtgtttccataattctcttcctatacataaatgtcttgttttcaaaagtggatggaa

SEQ ID NO: 437262 - DNA, 120 bp, Artificial Sequence
  ENSG00000153187_50 (sequence is synthesized)
ggcaacatagtgagacctggtctcttgaaaaaaaaaaagtggatggaacttgtagcagagaattttatctacttctcaacctgcttcagaatacccatttgagatgttcccctggaaaga

SEQ ID NO: 437263 - DNA, 120 bp, Artificial Sequence
  ENSG00000153187_51 (sequence is synthesized)
tgaacacaatactgcatctgaagccatttcttcccacctaacattcttaaaatgattagagtctaaactttgtcattcattcctaattctggagctctgaggttgaggtgttcagagttt

SEQ ID NO: 437264 - DNA, 120 bp, Artificial Sequence
  ENSG00000153187_52 (sequence is synthesized)
ggtgaataattgggtttaagttttaacattttagtaataataaaagcaaacacatacatgttaaggcctgacaataggttgcaatacccatgcattgggactcatacccagcataaatgg

SEQ ID NO: 437265 - DNA, 120 bp, Artificial Sequence
  ENSG00000153187_53 (sequence is synthesized)
tgagggactgaacattagtgctttgagcaagaattggttaactacctgagatctctaaaacagtaatttgaattactaatacataaaccacaagtctcttcgaattgttaattgcctaaa

SEQ ID NO: 437266 - DNA, 120 bp, Artificial Sequence
  ENSG00000153187_54 (sequence is synthesized)
tttaccctaaaacttagttaacgctgcagtgcctttattaaagcttttttttgggggggggtgtgggcacagctactccataactttaaattttaaagcatgaaggtgatctagctagtg

SEQ ID NO: 437267 - DNA, 120 bp, Artificial Sequence
  ENSG00000153187_55 (sequence is synthesized)
ttagtgcttgagttggtagttacataggctgctcttgaatcgtcctgttttctttgcctagtattagcaccacaggtacatatttgtaaaataagcattaaaagtactttgtccagctaa

SEQ ID NO: 437268 - DNA, 120 bp, Artificial Sequence
  ENSG00000153187_56 (sequence is synthesized)
gggcgaggcagggccagcagcaggcgggaggtaagaagaaggcggaaggcggcggaggcggcggtcgccccggggctccggcggcgggggacggcaaaacagaacagaaaggcggagata

SEQ ID NO: 437269 - DNA, 120 bp, Artificial Sequence
  ENSG00000153187_57 (sequence is synthesized)
gtgaatgtgctgtgtggaagagttaaagggcccaactaaatgttccagtgattccaatagacctcctcgcattatataatcgaagcaaagggaaaccagcgatggagtagagctatttag

SEQ ID NO: 437270 - DNA, 120 bp, Artificial Sequence
  ENSG00000153187_58 (sequence is synthesized)
ctggtacctactgctatatcacctagtgtgacatttcggaattaatggaacaatgaaggaagctgtacactggaggttccaggtggtcatggaaggtttccagtttatgcaaacttctgt

SEQ ID NO: 437271 - DNA, 120 bp, Artificial Sequence
  ENSG00000153187_59 (sequence is synthesized)
gaaaatgagctttgttattggtgaagacattggaaattttaccagccaaaacagagtttctctcttattcagggtaagatgtaattgcagtgtgctagcgctggaagggacctgttttat

SEQ ID NO: 437272 - DNA, 120 bp, Artificial Sequence
  ENSG00000153187_60 (sequence is synthesized)
ttaagtgcagcaaaacttgggttagtttttttaaaagcaggaagataatggtttacattcagaacctagtagtttaatatttagcacgtcatcagttgtattaagtggattattttacag

SEQ ID NO: 437273 - DNA, 120 bp, Artificial Sequence
  ENSG00000153187_61 (sequence is synthesized)
gctctaggagtttcgtatttttatgacttgaaagttctcattcttaggaaatgtaaaattaatgccagtttttgactagctaacggaaacttgtaacactacctataatttagccttaca

SEQ ID NO: 437274 - DNA, 120 bp, Artificial Sequence
  ENSG00000153187_62 (sequence is synthesized)
ggcttctacaataaagtaattcatttttttgtggaattatattaagtgagctatttgggctagttaaatatttactaatgacttctcccattagcacacaagtatattccctattttaaa

SEQ ID NO: 437275 - DNA, 120 bp, Artificial Sequence
  ENSG00000153187_63 (sequence is synthesized)
agattgtaatattactttttcaataactgctcttttgttctcaattccagttcagtagctgctgctttaaacataagttgatttcttccaaagacctgaggcagcagcagtgggctatca

SEQ ID NO: 437276 - DNA, 120 bp, Artificial Sequence
  ENSG00000153187_64 (sequence is synthesized)
ctgggccactagctttcttcagcagcgaatggtatcaatggcagtgcagcactgtaaatactgctactttacccagttgggttgcaattgagtgagaaagtattgcaaacctctaagtgg

SEQ ID NO: 437277 - DNA, 120 bp, Artificial Sequence
  ENSG00000153187_65 (sequence is synthesized)
gctttgactgtcagacttgttttttttttttttttttttgttacaaaaaaacgtagttggtttagtgatgagaatgtacaactctgggtgtgataaatagaccaaaggataaaaataact

SEQ ID NO: 437278 - DNA, 120 bp, Artificial Sequence
  ENSG00000153187_66 (sequence is synthesized)
gtttcaaaagtatcagctatggtgtcagcctgctgtgttagatggaaggcattggagcttagcttctcatgttttcttgtacaaattggctttattcagatttgtaagagtgtcaatgta

SEQ ID NO: 437279 - DNA, 120 bp, Artificial Sequence
  ENSG00000153187_67 (sequence is synthesized)
aaactctttcttactggaatatcctttacagaaggttgagatagtcatctgagcctttttaaaagaaaaaactgcaggtgaaaaaggagttagttgatgtgaaagttttagtgaaattct

SEQ ID NO: 437280 - DNA, 120 bp, Artificial Sequence
  ENSG00000153187_68 (sequence is synthesized)
gggttgtataaataagttgctaggaattggcaaggtagtgaagtggtgactcacacaggtaatgtaattgttagattttttagcaaatcaggaatatgtcaatataagtacaatgttgaa

SEQ ID NO: 437281 - DNA, 120 bp, Artificial Sequence
  ENSG00000153187_69 (sequence is synthesized)
ttcaaacaatctgttgaattaaattctgttgattagaataactctaatttaagaaaaattccaaactgtagatttatttttctctgatcagtaaaaagaaaatgagttccagcttgactt

SEQ ID NO: 437282 - DNA, 120 bp, Artificial Sequence
  ENSG00000153187_70 (sequence is synthesized)
tagctgttcaagtgagaagtctgaggaagtgcatgttaatgagccagtgacccataggtagctgggttaaagacactttggatttggataatccgggaagcaattaatccctaattgttg

SEQ ID NO: 437283 - DNA, 120 bp, Artificial Sequence
  ENSG00000153187_71 (sequence is synthesized)
aacaggcagtcctgggtaaagaggacctaaaatgctgcactattaacagcattagacggccaggtttgtacttcatagttttaggctgtcttcttcacaagttttagaaaaagaatttag

SEQ ID NO: 437284 - DNA, 120 bp, Artificial Sequence
  ENSG00000153187_72 (sequence is synthesized)
gagctagagccctggtgcaggatcaacagcagctcatactcctattttaaaataatttggtcgtggcctcccttcagttttaatgtggcactggtaaatctacctggttctggcatgctt

SEQ ID NO: 437285 - DNA, 120 bp, Artificial Sequence
  ENSG00000153187_73 (sequence is synthesized)
cactttgatttcctgctatcctctactgcttgcctctaaatcaaggtaaagagcagagcaggtatgtattaatgtcacattgtcttgattattttaaatacttaaaatatacatgttaaa

SEQ ID NO: 437286 - DNA, 120 bp, Artificial Sequence
  ENSG00000153187_74 (sequence is synthesized)
ccttggtattagtttcacaggcagtttacttttcagtacataatttaacaggagtgacttggtgggagtggggctttaaactgaaaattggaacaacagcatgatgtggagaaaagttgt

SEQ ID NO: 437287 - DNA, 120 bp, Artificial Sequence
  ENSG00000153187_75 (sequence is synthesized)
gaatcatcgaggagactggcaaaattagtaatgtctttagactgcgtcactagcgccaatcgaattcgtagttgattgttctttgaattcacatttgagtcctcggttaaaacctcagtt

SEQ ID NO: 437288 - DNA, 120 bp, Artificial Sequence
  ENSG00000153187_76 (sequence is synthesized)
aaaaagcaggataaagtcgagctgctttggttctcggaacggaaaagcgtttttttgttgtttagaggcttggcctttatggggctcgtgtgtgttttaggggacggcaaaacagaacag

SEQ ID NO: 437289 - DNA, 120 bp, Artificial Sequence
  ENSG00000153187_77 (sequence is synthesized)
tatacagttcttttactgctagctttaattgtgtaaactaacaaagtcatgatgtttcgttttgtaatgtgtattgataattatgggatattaaaactaaatctggtttggtagaaatca

SEQ ID NO: 437290 - DNA, 120 bp, Artificial Sequence
  ENSG00000153187_78 (sequence is synthesized)
gaggtatgacaggtataaatttgtttccagcaaattactctgaattagattcattgtcatttcctaaaaacagtttgagtggcttattgatgttttttctttaaaaacaaaattttctct

SEQ ID NO: 437291 - DNA, 120 bp, Artificial Sequence
  ENSG00000153187_79 (sequence is synthesized)
ctcttgagtgtgttggagtagatgaaaaaccaggggtccccaagggtatatttttgaaattgaacagaaacaattcatcttaatatttagttttcattatgtttagcttaatatgtgtgc

SEQ ID NO: 437292 - DNA, 120 bp, Artificial Sequence
  ENSG00000153187_80 (sequence is synthesized)
tagtttatttggcgtcacacttatgtcaatctcaagtcatgcagaaatagcacagtctcagaaaagaggttaggtgggaaatagatgatatgcttacattattgagcaggactatgcttt

SEQ ID NO: 437293 - DNA, 120 bp, Artificial Sequence
  ENSG00000153187_81 (sequence is synthesized)
cacatcctaaccaattgactaaaaatataaatgattgaagtaattttcattagttgccccaggagtctttaataatagttttaagggatagtagattggacatagatagatgggttattc

SEQ ID NO: 437294 - DNA, 120 bp, Artificial Sequence
  ENSG00000153187_82 (sequence is synthesized)
ataatggatattcataatggatattcataatgttaacctagaattattcagaaaatataacacctatgtagtagaatctattgattgtaagcctagtgttggtaggcaaacatgttgatg

SEQ ID NO: 437295 - DNA, 120 bp, Artificial Sequence
  ENSG00000153187_83 (sequence is synthesized)
atgggccaggacatcagtaatcactacttggttaggcaagtaattaggacagggattgtaatcatgtcaatttgtagctacctaatttttattgattaggatactttatttttcatgcca

SEQ ID NO: 437296 - DNA, 120 bp, Artificial Sequence
  ENSG00000153187_84 (sequence is synthesized)
ggattcagcatatacttaggtcttgagcaggggctttgcttttaaagctgaatcctgggcataagaagctatgtactgtagttgaaagtgaagtaaatgtcaatgtaggctagtctctag

SEQ ID NO: 437297 - DNA, 120 bp, Artificial Sequence
  ENSG00000153187_85 (sequence is synthesized)
agaaatgtcttctataaagattcagggtttttttgcaccattatgatcaccatactgtgccaatgacatagttactcatgagcatgtccagtctgtctacattaatgaaggataatgcag

SEQ ID NO: 437298 - DNA, 120 bp, Artificial Sequence
  ENSG00000153187_86 (sequence is synthesized)
agatcacaggctggagagttacatctgacagagaagtgctgcactattggggcatattctttcctgctattcctttaacagttccattctgaaccttacaggaagtaaaataagttatgt

SEQ ID NO: 437299 - DNA, 120 bp, Artificial Sequence
  ENSG00000153187_87 (sequence is synthesized)
ctggtaaaatatacgttgcaaacacttaaagcattgccacaaattggtgacagccaagacatttttaaaaattttaaaacaccaagaatagacgtggctagtacagacaccagtttataa
